United States Patent Application Publication US 2026/0103690 A1 - sequence listing, part 40

SEQ ID NO: 188202 - protein, 404 aa, unidentified
MWYTGIDWADEHHDALTIDEKGQQMGSIRVDHSPQGFAKLDNFLMQIIGSAPKEHMACIIETTHGLLILHLLEAGWPVYPVNPRTVDRRRSASGAKTDLIDAYLLAKTGRADFADLHRLTPDSEKVAELKQLTRDQDTLIRTQTRLVNQLTACLKAYYPVALELFSKLQQKSTLVFLQAYPTVETARAASLKDIQQQLKHTRHPHPADAAASIVELLHQPQLQADVVLTRTKSRLMLALVSQLLPLIEQLADYDKEISTLFLTHEDHAIFASLPRAGQHLAPRLLAEIGDDRERYQDAHSLQALGGTSPVLYQSGMYSKAHRRLGCIKPLRNALHQFAWQSTQSEAWAKDYYQRKRTEGKSHTVAIRALSNVWVRIIFAMWTHREGYQTATFELAQQQHARRAA

SEQ ID NO: 188203 - protein, 361 aa, unidentified
MKSTTIIAFDQHAATTVAAVLLPGHRTPALHTLASDSATILRFVERLRRERPVSCCYEAGPCGFELQRACNTRGIPCDVIAPALIPRRPGDRIKTDRRDAGQLAILSRAGALTAIHIPTDQEEAARDLLRCREDIRADLLRARHRLSKFLLRHGRRFTGTKKAWSKRHDVWLRAQTWPLAALDQTHRAYLRAVEETLARLRAVEEDLRALLDLEPLRPRVERLRCFRGIDDLTALTIAAELGDARRFATAPSTMAFVGLVPSEHSSGTKQARGAITKTGNAHLRRVLVEAAWHYRHHPFVSAALRRRQQGAPAAVITQAWTAQHRLHRRYQRFAARGKPKQHIVTAVARELTGFVWAALTQ

SEQ ID NO: 188204 - protein, 337 aa, unidentified
MDENGKKTKPVRIPHDLDTYRRFLAQLPERSHIAIEATGHWYWMVDEMERARHIPHLTDALEAKKRVGKTHKSDPIDAGGLSLLLRCGTLPEVWIPPAPLRDQRELLRTRMALRDLRTALKHRIGAAIDRYNLHSQGFSDLFGLRGREYLNTCLAKLPPITASMIVVQLDAFDQLEVKIEALEKRIRAEIAPTPAVQRLMTLPGVGETLGPVIAFEIGDVARFSRAECLASYAGLVPRLISSGDRVRHGHTPEKKINPFLKWAFVEAAVCSLHPAGPRYAHVKSLFARLAPTKGFGRAVVAVARHLAEASFWVLSKHQDYRPPQPPRLALAASRGSR

SEQ ID NO: 188205 - protein, 437 aa, unidentified
MKKRKDRVCGADVHKDLIVATITGDDVPPIRENFGTTKFELKRFRSWLVANKCEQVAFEATGVYWIPIYDALSPTIDTIVANPLQIKTIPNDKSDSKDSKRIATLCLNGQIKRSRVFSDEDRDLRTLTRARSGYVKTRTQFRNRIHKYLSSSGIKLSSCMDDIFCKSGTHIIKGLAEDKSVEEILKGIPSGKIRKKQDLIRAALDNVLGQTNRMLVTDALEILDDIESKIEKTSHEILKKIQQRSKDLAIVMSIPGIAFVSGSVILSEIGNYRDFQTPEQLAKWCGLNPGENESAGKKKKCGITKRGSKHIRVVLVQAAQTISNMKNTRLSRFFQRLSKKKEHNVAVVAVARKLICLIHHLLINQELYQEADCRKRRSRREKSCKEPSFPAEHLTDKVAAIVDAFYGLSDSKRKKALMRALGDISAIDQKRSLDGGG

SEQ ID NO: 188206 - protein, 345 aa, unidentified
MPIVGGLDIHRKQLTFDYLDTETGEVKRGQVAPADRAHLRAWLARFAGRDGVAFALEGCTGWRYVTEELAAAGVAAHVAEPADTAFARGRKRHAKTDKTDSRHLRQLLAEGRLPECWIPPGHILECRALLELYHDLRAEHTAWVQRIHAVFFHQGAPALGDGALRTGKDLAALRAAAAAHLSPVGQLQVAVSLEVLEALEARMHQVRHQMLAAARHLTGAKVLAARLYGVGPVTALAMTCWLAGKDRFSSSRKAVRFAGLDVTVWSSDRKGPPGRLSRQGPPVLRWAVYEAGKTHARSSAPDHRYYAQVKDRQDGKRAALSEARKILRQACHILAELGDDALTAA

SEQ ID NO: 188207 - protein, 417 aa, unidentified
MWNKATKVRRACGYSITYLSLEVFVMVISVGIDVSKDKHDCFIVSSEGEVLADVFTIPNTIEGFHCLLQRIRDCTAPQDKIKVGLEATGHYSYNLLGFLLDNGLATYVLNPLRTNLYRKSLSLRKTKTDRVDARTIASMLLSDAGLKPYTDTAYHNEELKSLTRYRFDKVKERAKLKSSIARLVCILFPELEKLVPSLHIASVYALLEEFPGAKQIAAAHLTRLKALLVTASKGRYNRDMAFEIRDAARNSIGSRMPAKSLELQHTIRLIRELDDEIEEIEEQIHSIMDELHSPITTIPGLGFRMAAMILAEVGDFTRFDSPDKLLAYAGMSPSTYQSGQLKNCYPHMEKRGSRYLRYALYNAAKYVCQWDPTFSAYLAKKRAEGKHYNVAISHAVKKLVRLIFAMEKSGVPYLLAA

SEQ ID NO: 188208 - protein, 326 aa, unidentified
MEHELHYIGIDTAKEKLDVDVLRPDGRHRTKKFANTTKGHDELVSWLKGHKIDHAHICIEATGTYMEPVAECLYDAGYIVSVINPALGKAFAQSEGLRNKTDTVDARMLAEFCRQKRPAAWEAPHPLERALRALVVRHQALTDMHTQELNRTETAREVQRPSIDAHLLWLEAELKRLEKQIKDLTDDDPDMKHRRKLLESIPGIGEKISAVLLAYIGLKDRFAHARQFAAFAGLTPRRYESGSSVRGASRMSKAGHVSLRRALYMPAMVATSKTEWGRAFRDRLAANGKKGKVILGAMMRKLAQVAYGVLKSGVPFDASRHNPVAA

SEQ ID NO: 188209 - protein, 339 aa, unidentified
MMKVTTVGLDLAKNVFSLHGVDERSNPVFRKTVHRAKLVECFAQLPPCVIGMEACSGAQHWARELRKLGHDPRLMAAEFVAPYRQGGKNDANDAEAICEAVARPKTRFVAIKSAEQQAVIAVHRLRQGLVEERTALANRLRGLLAEYGIVVGVGLDRLRHALPEILEDAENEVPGIAREVFADAGEQLRELDARIAAYDRRIAALARASEPAKRLMKLEGVGPVTATAVIASIGDGKVFRNGRQLAAWLGLTPRQHSTGGKQRLGVMTKHGDVYLRTLLIHGARAVLRVTPHRDDAKSRWAESLRRRRPTNVAAVALAAKHARIMWALLARDKEYQVIA

SEQ ID NO: 188210 - protein, 412 aa, unidentified
MEIIHACCCGLDVHARTVVACLIKHGRKQTRTFSTMTDELLRLSDWLVAEGCAHAAIESTGVYWKPVFNILEGVVEVVLVNAYHVKAVPGRKTDVRDCEWLADLLRHGLLRASFIPPPEIRELRELVRYRQTLIKEQVAVSNRVQKLVESGNIKLAQVASDALGLSGRAMLRALAGGETEAAKLAEMARGRLRAKKAELRRALEGRLTPAQRFVLGELLQRYEELEAAITRASAQIAQEVARSSDPFVPEAMQLLQTIPGVGERIAETIISEIGVEMCRFATDAHLASWAGMCPGNNESAGKRKSGKTTKGSVYLRAALVQAAWAASHTKQTYLAAQYRRLVKRMSKKKALAAVGHSLLVIIYHVLKSRASYRELGGDYFDRQHVEVQRARLIRKLETLGLKVTVEELPQAA

SEQ ID NO: 188211 - protein, 346 aa, unidentified
MNHIGMDSHISTLEFAVVNEGGRLVKADRVATSVKGFMEFVRTVPRPRAIYMEEGTLAAWALETCVRFGEKLVITDPKKNHWISSSGQKDDPIDALKLAQLGRGGYIKEIHHPVGQRRRFRELMIAYHDAVRSTTRIKNKIKAKFRQNGIQCTGITVYSETYREDWKGKLPQEPTLLLILDGLWRQLEQSEQIEKGLLVAARAQAKNYPEIKHFQALPGIGFISAATISATLETPYRFADKKKVWMYAGLGIMRRSSAGKVYSEKLSSDYNRLLKYTMKQAAEAAIRDKDSPFRQKYLDMTLIHGIAPHRAKLTIARDMLATMWAMWRKGEKYNPEIREQAAYKQG

SEQ ID NO: 188212 - protein, 343 aa, unidentified
MLNKNIIAIDLAKTTLQVCHISKDGELLSNKAMSRQRTSEFLIKSEPSIVAMEGCCGCHYWGRMAEEYGHEVRIINPKKVKRYLEGHKTDNNDALAIANAALQIGLKYSKPKSIERQSLQSLENSRRFLTRSKANLGLHIRGVLLGCGIVHPKGEKGLSRAVLETIENNILPVPLLKMIGLLWEQYRELKQEISKIDVELDGLIINIEECKRLTKLEGVGTSSAVSLYIALGSGEQFQNGRQASAFVGLTPKQHSSGGKAKMVGIDKNGGVKDLRSLLYLGAMSYISRLSRSKPKTRKDEWILATLQRVGYKKTCIALANKTVRTAWAILKHNTKYQPEFLTA

SEQ ID NO: 188213 - protein, 343 aa, unidentified
MKEISIIGVDLAKNVFQLHGAAADGTVPFRKKLSRPQFQRFMTEHPQCLVVMEACGGAHHWARELVRVGHEVKLIAPRYVKPFIKRQKNDAADAEAIVEAALRPTMRYVEPKTGDQQARAILFRTREQFVKQRTEAVNALRSHLYEFGFTAPEGIGYLPRIGAALEDPNWHLPPLAREICRELLEQIANLSGRINAMKKRLDAIAREGETSRRLQTMPGVGPISALAVETFAPPMEQFKRGRDFAAWLGLVPRQASTGGKQRLGKTSKMGQRDIRRLLVTGAMAVIRWALRRGAPSNPWLARLLERKPPMVAAFALANKMARGIWAMMTRGENYRGAEIGSAA

SEQ ID NO: 188214 - protein, 410 aa, unidentified
MGRVVIGMDPHRRSATIEVLDEAEQPLMAGRFGTDSDGYRLLLAAGRQFPQRLWAVEGCQGVGRHLAQRLVADGEFVVDVPAKLSARARVFSTGQGRKTDATDAHSVAVVALRTRSLRQVGRDDRTVALRLLADRRDELGAARTLTINRLHRLLVELVPGGAKKALTARQARGLLTEVPAGDVVRETRRQLAAELVDELEVIDDRIKAAKKQLAALVAETGSGLMQLNGIGPSGAARLLGDIGDVSRFPTKGHFASWNGTAPLDASSGDQNRHRLSRAGNRRINRALHIMAVVQLRHANTDGRRYYDRRVAEGKTPMEAMRALKRRLSDVVYRQLVNDQKQQTAHDGDQDTEARRTGPEGHLGATTKSSAAGLNPNADASDKSLSEPASIDATPTSEASPDRTSAGSSSL

SEQ ID NO: 188215 - protein, 407 aa, unidentified
MQITCGIDWSERHHDVALMDEAGTVVCRLKIGTGLAGFTELMTAIAEHSPEPIGVPVAIETDKNLLVAALQAAGMTVYAVNPRAVARYRDRHGQSGKKSDPGDAAILANILRTDRPVHRAMPSVTESALAVKSLARQHQEAIWALHQLNSRLRSVLLEFYPQALQAFPNLKHKAALTVLAAVPTPAAGLKLTSKKVVALLHRCGRRNDPKLAQQILTDLKTPTLRQPVAVENALGVTVTTLLRISVQMQAAVQELEAAMAKAFDAHPLAPVLSSAPGLGPVLAARILAEVGDDPARFTTAGGLRAFAGTAPVTRASGRSSYVKARKVRNRRLGDACHWWAFSMLTKSPGARALYDHRRAVGDHHNAALRNLANKLVGRLWWCLTQNQPWDEAAAWPEHVAAPPAVAA

SEQ ID NO: 188216 - protein, 356 aa, unidentified
MEQAITSDAAVTIGLDLGDRMTEGCVMDATGAVVERFRTRTTRARLVPTVTRFPGVRVILEVGSQSPWLSRALTAAGCEVIVANARRVRLIAEHDAKSDRLDAELLARLGRVDPTLLAPIQHRGEQAQRDLSLLRTRASLVGMRTQLITRVRGVAKALGQPLPRCSAEVFPARVRADAAGATLPGIAPLLAVLEHLTATIRQFDRQLATLATTRYPVTQVLRQVSGVGPLTALTYVLTLEDPTRFRKSRMVGAYLGLRPKRRESGAQRPELSITKAGDVFLRRHLVTAAQYILGPFGPDTDLRRWGLALAARGGRAAKKRAVVAVARKLAVLLHRLWMTGEVYEPLGYQARAARAA

SEQ ID NO: 188217 - protein, 388 aa, unidentified
MIYVGIDIAKLNHFASAISSEGEVLIEPFKITNDGDGFQLLVSKLESFDSDSIIIGLESTAHYGDNLVRYLVASSFNVCVLNPIKTSTMRKNNIRKTKTDKVDTYIIAKTLMMQDSFRFMTYYDLDLMDLKTLGRFRQKTVKQRTRLKIQLTTYVDETFPELQYFFKSGLHQKSVYALLREAPTAKAVASMHMTHLSHLLEVSSHGHFSKEDAKALRVLAQKSVGASDSALSIQVTQTVSQIELLDSQLESIEREMTDIMMFHDPIIMTIPGIGYINGGMILGEIGDIHRFSNPSKLLAFAGLDPVVYQSGNFKATRTRMSKRGSRVLRYALINAAHNVVKNNAVFKAYYDAKMAEGRSHYNALGHCAGKLVRIIWKMMTDDVEFNLN

SEQ ID NO: 188218 - protein, 424 aa, unidentified
MAIVMGLDQHRAQITAEWIDTATGEVSRARVAPADRAGVRRFAARFGGRELEVALEATTGWRFVVEEFDAAGARVHLAEPAETAARRGTKKRAKSDRADARHLRELLMVSRLPESWIPPAHLLDLRARVRLRHTLVDQRREWQQRMQAVLYHHGAPARGGLLTAESRAWLAGLSLPAAAREQITVALAMIDAHDAQLAPLDRELRTYARRPAGCRALMRHYGIGPLTAVTILAELGDTGRFSSSREAVRYAGLDITVHQSDARRAPGRLTARAVGAALGTVRGRPVRPPARLARSRLLHRDGRPPRRQPRLPGHRPKAAQAQLPHAARARRGGPSARMTVGPRALPSLTPMHRGRLPACSCRHHPVDGLHRQSGRTASPQRNTPSPIMSPTRSHPGSRTEIRLGVRAHPTRTSYHAHAPPPTTG

SEQ ID NO: 188219 - protein, 420 aa, unidentified
MSFKIFRKNCCGLDVHKTWIYACIGITDTNGRTTYKQTRFSSFSKGLKELSTWLAKYQCTEVCMESTGKYWIPVFNVLEKEDVSVILSHPKYTKPQKGNKTDRKDAKWICDLFMCDMVKPSFIPPADIRHLRDLVRYRFKLICMITGEKNRAQNCLTVSNLKLDDVFSDVFGKSSRSITEYILKHPGDLFDVTPFVDRRCKTPIEEIQAAVDGAISPEQAVKLRQCLNHIDELEKHLEEIEQEILRLSDKYQAALDLIRTVPGFDKNPMTAIQVLSEIGGDMSVFPSAKHLVSWAGCCPRNDQSNKKIKSTRISRAGSYFKPVLVQVANGLLRSKKHPEITDRYKRIKARRGHKKAIIAICRMLLTAIWHILSDLKPYTAEGFRESRPVNESKVLTTSQALNLLKQRGYIIKDDLAPAMN

SEQ ID NO: 188220 - protein, 422 aa, unidentified
MDVHKDIIVATVGITDRSTMLTEYFQKTFSSFNSDLYRLCDWLSSYQCSEVCMESTGKYWIPVFNILEERGFTVCLAHPKYTKAIKGQKTDKKDSKWICDLYKHDLVRGSFIPPKAIRELRDISRYYHKLIGMNSSESNRYQNCLTVSNLGIGSIFTDVNGKSAKRVMEVVLAADDPNSISDEDLLKLIHKSCKKKDKLLDAVRGCRIESDQRFKMTEIQKHKEELDQHITNCYVEMFKRATPFFHQFLHITELVGLSVLSAILIISEIGVDMTVWENARQLCAWAGLTPGNNESANKKKSTRITKAGQFLKPLLVQCALAAIKNPDGYFGIKYRRIKKRRGHKKAIIAIARMMLISIYHMILTGESFNPSDYEELMNPKPRKPREFTIESAVDFLKSSGADINTIIASLKEAPPDQAVVFS

SEQ ID NO: 188221 - protein, 317 aa, unidentified
MAEVTFPQLIQRACGIDVHLKVVVATIDGVGIQRDTRSFKTFTSSLNELKEWLLSNGVTHVAMESTGVYWKPVYKVLEDSIPNVWIVNARHIKNVPGHKTDKMDSEWICKLLLAGLLKPSYIPPKEQRQLRDLTRYRNKLIQQIASEKNRMMRILEDCNIKLSGVVSNTSGTTATSLIDMLCEGKVLTLDDIKSVYHGKLSASPEELLEACTGFVEDHHIYLLQMIRKDIDQTQALVDDLSERIKRLLSKYDNVLELLREIPGFSTKVVEDLVSEIGLDMSHFPSEKHLSSWAGLSPGNNESAGKKKAHESLTETNR

SEQ ID NO: 188222 - protein, 345 aa, unidentified
MVMIGVDPHKATHTAVAIDSNEVVLAERLLRANKMQVLELLSWAKHLDGSERTWAIESAGGLGYLLAQQLLAAGEHVVDIPATLASRVRVLGSGRSQKNDPNDARSVAIAALRAPRLVPVRVEDHASVLRLLSRRHTQLGWTYNKTACRLHAIIAELVPGGIGKELVVSQARSLLETIEAASAVGRERHLLAVEMLDELDRLAAQRKQLRRRITTAVAASATTLTDIFGVGDVGAAIIMGQVGDVARFATADRFAAYNGTAPVEWSSGNPKRPVHRLSRRGNRTLNHVIHIAAVTQLRHAHSPGRAYYDRKRNEGHTAREALRSLKRRISDVVYRCLVADAARTG

SEQ ID NO: 188223 - protein, 358 aa, unidentified
MAGKVTETAVVGGVDTHKDLHVAAVVDQNNKVLGTQFFSTIRQGYRQMLAWMTSFGALKRISVECTGTYGSGLLRYLLNAGLDVLEVTAPDRMERRKRGKSDTIDAECAAHAAFSRIRTVTPKTRNGMIESLRVLKTCRKTAISARRVALQIIHSNIISAPDELREQLRNMTRMQLIRTLGSWRPDASEYRNVTNVYRISLKSLARRYLELHDEIADLDVMIAAIVDELAPELIKRNAIGYESASQLLITAGDNPQRLRSESGFAALCGVSPVPVSSGKTNRYRLNRGGDRAANSALHIIAIGRLRTDDKTKEYVARRVAEGHTKMEAIRCLKRYISREVYTLLRNQNRQLNSIPITA

SEQ ID NO: 188224 - protein, 348 aa, unidentified
MVTLGADLHKRWHTVVAVDATGRKLDERTVSATPEGHLELRRWAERWSERRWALEDCRHLSRRLESELVRAGESVVRVPPKLMAGVRRSVREPGKSDPIDAFAVAQAALREPDLPVARLDGPERELRLLVDHREDLVAERTRVIQRLRWHLLDLDIEEPPARSLDRARILDIVERRLAGREGVTASIARELVDTLRRLSASIDALERTIGRMVMSLAPTLLALPGCGPLTAAKLLGETADITRFRSKEAFARFTGTAPVPVWSGNVARFRLSRTGNRQLNVALHRIAITQMRIDQRGRAYLEHRRASGDTKTEAIRALRRRISDEVYRRMRHDHALRSAAQAPLAPAA

SEQ ID NO: 188225 - protein, 392 aa, unidentified
MERYELAHKPEVLAEWVSGLQQRFPGQRVAVALEQARGAVVQALMGYDFLVLYPVNPKTLAKYREAFSPSGAKDDPTDADLLLELVTLHRDKLRAWLPDDELTRTITLLVEYRRQLVATQTRLSNRLTNLLKLYFPQALAWVGELATVQACDFLERWPTLAKVQQIVPAKLRQFYTAHGCRKADVIEQRLQEIKLAQPLTRDLAVISASVAMVQATTSQLRPVLAAIARMDKQIAELFSQHADHDLFSSFPGAGPVFAPRLLAALGADRGRFAAASEIQQLSGIAPVMERSGKSWWVHRRWACPKFVRQSFHEFAGQSIRWSTWARAFYDQQRQRGNGHHALVRSLAYRWIRIIYRCWQMRVPYCEQTYCRALQRRQSPLARILSAPMQSAS

SEQ ID NO: 188226 - protein, 420 aa, unidentified
MKSTSDLEFTAFVGLDWADKKHDICLQAAGCEAREFDRFAHRVMAIEQWALSLHQRFGGRIAVALELSKGPIVYALQKYPFLVLFPINPSMLAKYREAFKPSRAKDDPTDAELALDLLVRHRERFKPLQLQSEPMRTLAYLVEQRRRLVDDQVRYTNRLGSALKQYYPQALDWFADRDTVLFCDFIKRWPTLMQVKRARKTSLVAFFKAHNMRFPKLIEKRICAIKTAAPLTHDGAVITAYKLQALVLVEQLQVTLQAIRCFDQEIAAITPKLPDYALFRALPGAGSALAPRLLVAFGEQRDRFASATECQKYFAVAPVTERSGDKTWVHWRWQCSTFLRQTLVEWAGQTINKSFWAGAYYRQQREKGSSHQAAVRALAFKWVRILYRCWQTRTPYDESKYLEALRRRGSPLLKQLGETM

SEQ ID NO: 188227 - protein, 377 aa, unidentified
MHSENIAAYVGLDVHKETLAVAIAAPERLGEVRYYGTINNEAQAVRRLFQKLQGLYGNILSCYEAGPFGFGLYHQLTAMNIKCQVIAPSRIPKSPTDRIKNDHRDAISLARLLRAGELTPVWIPDLTHEAMRDLIRARAAAKRDSRVARQRILSMLLRTDKHYAGKHWTGKHRTWLANQSFSQPSQQIAFQHYCQSLEQIEDRILQLDQEISRLLPEWSLCNLVCQLQALKGVGQLIAITLVAELGDFSRFSNPKQLMAFLGLVPGEYSSGNSIRPRGITKVGNSELRRLLYEAAWSYRTPAKVGAWLIYYRPDSVTQYSKDIAWKAQQRLCSRYRSLTAKGKKSQVAITAVARELTGFMWDIALAAQSSFSQQKQN

SEQ ID NO: 188228 - protein, 413 aa, unidentified
MDIIYQRVAGLDLHKETIVAAVRCVGAAGKLETDLRTFGTMTRDLRELSDWLAAHGVTHVAMEATGVLWKPVWNILDGRFELLLVNPRELKQVPGRKSDVKDAQWIAQLLQCGLLRSSFVPGRPQRELRDLTRHRAQLQGEHTRAANRIHKLLEDANVKLGVVASDILGVSGREILDALAAGEEDAAKLAQSARGRMKSKIPQLELALQGKFGDHHRFMLKQLLSHLDHLDQQIAQFTARIEELMVPFVDQELQEKLDAVPGVDLNTIQNVVAEIGVDMDQFPSEAHLASWTGICPGNEESAGKRKRSKTTKGNRWLRRALTQAAWAATHTKDSYLGAQYHRLAGRRGKKRALVAVAHTLLVIIYHIIKYRVDYQDLGADYFLRLEPERQKRYLVKRLEQLGYEVQLAEKHTA

SEQ ID NO: 188229 - protein, 350 aa, unidentified
MIIIGVDFHPEFQQIASVDTDSGEFQEKRLTHREEAEKIYRALACAGQKVRVGMEASGHARWFERLLAELQIELLIGDAAEIRTKRVRKQKTDRQDAQLILSLLLEDRFPRIWVPSWENRDLRQLLWHRHRMVQARTRIMNQLQAVALNEGLRCKKKLWRERGREQLESFRLAPWASRRRRDLLELLDRLNPTIAELSQAIQQEVEKCPEARRLMTHPGVGPLTALAFVLIIGEADRFQCGKQVASYLGLVPLEDSSGNRRRLGHITKQGSSMLRFLLVEAAQVTARSLPQWRSKYLHLMMRRGRKTAKVAMARRLAVHLYWMMRQGWDYQQSIKFGSHAGQLGNRHGVQ

SEQ ID NO: 188230 - protein, 386 aa, unidentified
MNTIQYIGIDVDKDKCNITTIDENGEEIEQYHIENNTKELNKFIKKTPQDAEIAMESSTCSKPIYWMLKKKGLKVYMAAPGKIKLISQSKKKTDPHDSRLLADLLRLNYLPKSYVPTEDIEDLRKLLRHRKNLGEKRTMTKNQIHAILQRNGIKHGFTDLFGRDGIQFLKQQNLPQLEEIILQGCIRELGFFSYEINITDMRLAAIAETDKQTRLLMSIPGVDYYSALVILSEIGDIYRFPNAKKLVGYAGLAPRVYQSGKTKHHGHISKDGPSILRWVLTLSSHGVIKKPGKLRRFYLRLSKRIGKSKAIVATARKLLIIMYHMLTKQVEYEERDDDLTSRKIKRMKAKSQRMHRLKETGKLRNEHYETLAEKGITMLINSKSVI

SEQ ID NO: 188231 - protein, 406 aa, unidentified
MNDSGKRYIGLDVHKHYLIALGVDDDLNVVLPARRVELSRLEAWMKKTLTRQDAVVLEMTTNTWQLYDELAEYAGSVTVVHPPHVALITRSQVINDKIAASILARLLAKGLLVGIWIPPQEIREARGLVAQRQKMVRLATQAKNRLHAVIQRHHLVPPAGNLFKAGNKEWWMSLSIGKLEKLNLQSDLETLQFAEKQVKDMTEIMAGMAAEQEEIGRLLHLAGFGVVTAVTVWAAIGDIGRFVEPRYLVGYAGLGARVHDSGMTTRTGKITKAGRRDLRTVLIEAANVAANSHPHWKAELARLEPHLGRNKAIVAIARKLLVAAWYVLQGKTDKYAEPEAVAQKMLRFAYEVGKNNRAGQTAAQFARVRMDALGLGSELTSIAWGSKKPIPLPPSELKEGSDVPNM

SEQ ID NO: 188232 - protein, 399 aa, unidentified
MFYYGLDVHRRFIQVCRIDAAGEARKDFRIDATHEAIRAFAKTLGQGDQVVLEATFHTRAIWALLVPHAGRVVVANPLQVKAIAHARIKTDKVDAHILAQLLRTNFIPEVVMPDNETWELRQLVTHRQLLAGKRTAVRNAIHGILHRKLLQCPYVEPFCGVGRRWLLAQKYTELERFTLENDLSVLDELVRGVKAVEKKMVEIASKELDIKLLMTIPGVNVTVAIGLLATIGDVTRFPTPDELASYFGLVPSVYQTAEKCYHGRITKRGRSSARWLAVEAAQTLSQMSSPLAASYHRIKRKSGHNVAVVALARKLVVLAWHMLRNQEPYRYAPVPRTREKLRRVTPGIRPAKPGQVPRTLDAVYAEVGLPELSAATAGEKRAAARNKRGVTLAKKRAHA

SEQ ID NO: 188233 - protein, 420 aa, unidentified
MKEESIEFAAYIGLDWADRTHVIRLRCAGSQAVEQREVTHTPEALAAWVSELQQRFGGRPVAVALEQSRGAVVHALMSYDFVVLYPVNPKSLAKYREAFRVGGAKDDPDDAQLLLELLTLHRDKLRAWVPDDELTRTLGLLVQYRRQLIDERTSLTNRLTSLLKLYYPQALRWAGGLATQQAGEFLRHWPTLADIQRAPATTLRKFYLAHGCRKAELIEQRLQEIKLGQPLTRDLAVITASVSMVQAIVNQLRALITAVAQMEKQITELFGQHPDHDLFDSFPGAGPVLAPRLLTAMGADRQRFSAAREVQQFSGIAPVTERSGQSCWVHWRRACPKFVRQSFHEYAARSIRWSPWAKAFYEQQRQKGNGHHAAVRSLAYRWIRIVYRCWQQRGLYSEVTYQQALIRRHSPLAKLLPAPH

SEQ ID NO: 188234 - protein, 427 aa, unidentified
MKYKQNEKILQVTGDTLIAGVDIAKESHYARAFDYRGVEYGKYLRFENNREGMTKFLNWAKDLMERHKKNKLIVGIEPTGQYWLCFAQYLKDNNIKVVLVNPFHVKMSKELDDNSPTKSDKKDPKTIAMLVKDGRYVEPIIPEGVYAELRVAMGIKDRLNKQIGMTKNQITRWLDIYFPEFNTVFSDWEGKAALITLREFPTPEKIAKKSAEEIISIWKKEVQRGVGEKRAIKLIETAKESIGKKQGIKMAEYEIKTLIEQYEFLKKQIEEIEKKMEELIVEIPGVKELLEIKGIGVNTVAGFIAEVGDIEKYEHPKQIQKLGGLNLIENSSGKHKGETTISKRGRKRLRSVLFNAVMALVAKNEEFRELHKYYTTRAQNPLKKKQSLIVLCNKLIRIFYVILKKGVKYDPIKMMKDIKRPGLQEAA

SEQ ID NO: 188235 - protein, 410 aa, unidentified
MSVHAAPVVSSTVLLAIDVGKSSLAWSLTDASRARLLGPVECAMTGPALREVIARVEGKLAVGARVKVGVEAAGHYHRPLLAPAAWPAGWEVLELNPAHVTEQRRVMGRRRVKTDAIDLEAITELLLSGRGVAVTSREAVLGELAAWSAHRTRRVTTRTATKNQLLGQLDRSFPGLTLVLPDVLGTKIGRLVAAEFADPARLAALGAGRLVRFAAGRGLQLRRPLADRLVQAARDALPTADAAVARQVLAADLALLTDLEGQVAAAEIELARLLPASPFRTLTSVPGWGVVRAGNYGAALGDPARWPGPRQVYRAAGLSPMQYESAGKRRDGAISREGSVELRRALIDLGVGLWLNDGPSRSYAAALKQRGKRGGIIACALAHRGNRIAFALVRDQTAYDPSCWEVTTLT

SEQ ID NO: 188236 - protein, 393 aa, unidentified
MICVGIDVAKDKYDCFILSSEGEVLADVFTIPNNAEGFDTLLQTIRRCARPEDKIKVGLEATGHYSYNILGFLLNEGLDTYVINPLHTNLYRKSLSLRKTKTDRVDARTIAAMLMSDVDLKSYTDTAYHNEELKSLTRYRFDKVRERAKLKQSVSRLVTILFPELEKLVSTLHMASVYALLSEFPGAKQVSEAHLTHLKAVLYDASKGRYGSDMATTLRDAARCSVGSVMPAKSLELRHTIRLIHELDAQIEDIEAAIQSMMGEIQSPITTIPGMGVRTGAMILAEIGDFSRFDSPDKILAYAGMSPSTYQSGQLSLSGTYSHMEKRGSRYLRYALYNATKYVCLWNPTFAAYLAKKRAEGKHYNVALSHATKKLVRLIYALEKSKRPYSTAA

SEQ ID NO: 188237 - protein, 349 aa, unidentified
MNKKLFVGIDFSKETFDAAILKVSDDSSIDPKIIGNEQFKNDVPGCKRFVKWLNKTCALAGDYSSVLVGGEDTGNYSTTLPKQLYVLGIDCSLQNAYSIKCGSGKIVRDKTDKMDAEKIAYYFYRFRDQIRLYKPLSKDMESLERLYSYRYGQVRERARLKCQIKEYKHILKSEPNDETLKFMIQRLEKQERFLKREIKAIEAKMVEIIKANEELNEIHKCLLSVPGIGKITSLLLIVVTRGFTRFDNPKQLACFLGVSPHPNQSGTSVQNGNHRSWFADPYFASLLHMAALSASRFNSKFIDYKKKLKSKGKPHLLIMNNIKNKLLTVAFTIATRRTKFYSDYDAKRA

SEQ ID NO: 188238 - protein, 421 aa, unidentified
MEDSYRFFVGIDWATEKHDVCVVDVGGQKVLERQVEHRGDPLRVFFEELLTLAEGHPEQVAIAIETPRGALVESLVERGFHVYAVNPKQLDRFRDRHTVAGAKDDSLDSFVLGDSLRTDRALYRRVKVDDPVIIQLRELSRASEGLVSEQGRLHNQLRDQVHRILPQLLTLSPAADEAWLWDLLDLVASGSEPARIRPTQVARILKVNRIRRLEADEILAQLQQPAPWTTPGTRQAVRAHIALLLPRLRVTLQQARDCDKQIQVLLNELAGPEPGKDEIREHRDVTIIQSLPGAGTKVTATMLAEASQPLAERNYHVTRTQSGVAPVTKSSGKRSKSRGLVHMRYACNGRLRNALFYWAQAAVSRDEACKAYYAGLRQRGHEHARALRSVADRLLRILFAMLESRTLYDPAHANRLSPVTP

SEQ ID NO: 188239 - protein, 388 aa, unidentified
MYYVGIDIAKYKHDCYICTSEGVTVLESFSFDNSNTGFKELQSALDHLDHSQQIKIGLEATGIYGKNLKLFLSSIGYDFHEFNPLLVKRFHDSLSNRKTKTDKIDARIIALYLSTGASRTYLYSSYHIEALKQLSRARNKLIRSRSDQYVIITNILDVEFPEFKAFFHNKLSDTALFLLNKYKTVDRMKRLTYQDCVLLHNKSRRIPTSSFEELRDLAKHTIGHHFNYNDLILSSALQIVNTLERQIESIEKEILAIMEELHSPIDTIPGISTLSAATILGEFGDFSKFSNPKQLCAFCGVEPAIYQSGTSFHNGRMVKHGSSELRYVLFNAVPYLVIHNITFRKFFYKKLHEGKNYRVAQSHVVKKLLRVIYHLELTGESFDPTFLY

SEQ ID NO: 188240 - protein, 355 aa, unidentified
MNDAKYIGMDVHTATISAAVRDSSGNLVMEATLETKAETILEFVHGLRGSLRVSFEEGTCASWLHDLLKPHVTEVLVCDSRKNALLRVGNKNDREDARKLSELLFLNKLHAVYHGETGIRTLKELARSYLTITRDLTRVMNRLKAIYRGWGIACTGQQVYAPRYRAEWLAKIAEAGVRRRAEVYYQQFDVLAALRQEVRRELLAESRKHPAMRLLRQIPSIGPIRAALLIALMQTPHRFRTKRQLWAYCGLALRTYDSGEYRFVGGQLKRSKKAVTIRGLNKNHNHDLKNIFKGAATRAAATAGPFQKFYEARLASGMKPPMARLTLARKIAAITLLVWKKGVRFDAEQLKQQAA

SEQ ID NO: 188241 - protein, 391 aa, unidentified
MIYVGVDAAKDKHDCCILGGNGQIVQEVFTFQNNRQGFEQLRDKIQRCSEAEGSGQIKAGLESTGHYSGNLETFLRESGVDLVVFNPLQVNLYRKSQTLRKTKTDKVDAKCIAQLLMTAESNPVSVSYQIQELKALTRHRSRLVSQQTKLKISISRLVVILFPDLPTVCNSVTQAAIKTMLLELPGARQIAACRIDRLTNLLTKASKGRYGRAKAEEIKDLAQQSIGANSPAAALELQLTLQHLDFLLQQINELDKTIRTAVVQTQSPIMSIPGIGPTLAAIILAEIGDIHRFSSPDKLQAFAGLDPSTYQSGNFKADRTPMVKHGSTYLRWALMQAARLAAVHCETFGQYLATKQAQGKHYFVALGHTTKKLIRVIFHILTANEVFVPQT

SEQ ID NO: 188242 - protein, 347 aa, unidentified
MVTFGCDSHKRTHTLVVVDQNGRQLGERRVAATTSGHLEALDWARQWSQRQWALENCRHLSRLLERQLLSAGEVAVQVSPKLMGSVRRSSRELGKSDPIDALAVARAALREPHLPVAQLEGREREVKLLVDHREDLVGERTRIQNRLLWHLHELEPGYQVVASGLLRSVVLAEVSRRLERHTGVVAEIACELVVRLAELTQSVKRLQQRLESLTRELAPSLLTLPGCAALSAAKLLSETADVSRFRSSAAFAMHNGTAPIPVWSGNHNRHRLNRGGNRQLNVALHRIAITQIRLGGPASAYVARRLTMGNTKTEAIRALRRQISDEVYRRLRQDKLKRSTVQVAVAA

SEQ ID NO: 188243 - protein, 360 aa, unidentified
MGIGFLGLRDIGAILHGEPMRPKTFVGLDVHRKLVVATAVNPLGKRIRQSSFGPTPKELTRFLSRLPKPTKVVLEACSVWERYYEAAVSTGAEVVVSHPLRTRLIAESSIKTDKVDSAALANLLRLDSIPLTFVPPPEIRALRRLYLERDFYARAKSSIMRHAYARLAERGVDYGKGVLQHRPQREKLRNHGIPEFDRAMDTMDYLELKCKELDTEIHAAFLESEDAQLLKSIPGIGELMAVGIAGFLCPIDRFPNVDKLTSYAGLCPTTHQSADTLYHGKLKKDVNRSLRALLVAASWTHRVHAPKGEVAKLVHRVVRRKGKMRGTVVGAHKLLRIIYAILKQRRPYLPRAPEGFASGQ

SEQ ID NO: 188244 - protein, 415 aa, unidentified
MEAIIECAAGLDVHQATVVACVVATGVGRKLRKEIRTFGTMTRDLDCLRAWLSEHAVTHVGMESTGVYWMPVYAALEGSFTLIVGNAHHIRNVPGRKTDAKDAEWLAELVRHGLIRPSFVPSPELRELRDLLRHRRSLAGAIAAGRNRTLKLLESAGIKLSTVATDAFGVSGMAMLHALADGVDTPEAMAALARGRLRRKLEALARALEGRMTDHHRFMLRLHLVHLQHLESTVAELDARITEKINPYHAQVRLLAGIPGVDQLIAAHIIAEIGVDMSVFGTAGRLSAWAGVCPGNYESAGKRQGGATRKGNVSLKTALITAAIGASRTRGTYLKDKFYRLRARCGAMKAAMAIAHKILVAVFHILAARVPFRELGDGYLDSRSKHRVTKALVRRLDVLGYRVTLEQKSIVVAAS

SEQ ID NO: 188245 - protein, 427 aa, unidentified
MSGIERGGQEPQFAAFVGIDWADQKHVWCLQSRDSTKREIGELKHTPEAVEAWVAQLCRRFGNRPIAVALEQSRGSLVFMLAKYEPLHLFPVPSTMSASMRKALYPSGSKDDPRDADVLLDLLLQHRNKLRRLSPDTEATRRIQNLVEERRKLVDEKTEHTNRLTSHLKIYFPQMLNWFEHLDTELVCALLERWPTLEELQKVPPAKLRTFFGKHHCRDQELIEWRILAIRQSIPAIQDRAVIEAKSAAVKVIVQLIRILLEGIADLDERIEEAAAAHPDFFIFKSLPGAGPALAPRLLAAFGSQRERYRNAGEVQTYSGVAPVMEKSGKKQWIHFRWACPKFLRQSFHEWAGHSIGYSVWARAYYRQQRGKGMDHHGAVRALAFKWIRIVFRCWKERVAYDESKYLAALTRHGSTLVTVVVTAKAL

SEQ ID NO: 188246 - protein, 337 aa, unidentified
MDKYIGIDVAKATLQIYIPKNDLDIEIKNSPDGLKKLYSKLKKQYRNELKDIIVVYESTGAYSTILEQFCQEKEILCFKVGAYQSASFSKVIKNRSKTDKIDARMLSQMYILAKKKDIKVPKRDEKAHQIRSYIKYYQSLAKEHIRQSNYLEAATYNLEDKFILKQVKKKIASIEKEKAMIIDKVLEIIQTNPTVHQAYKNITSIKGIAEKSGIILLYLFLKYPNASRQQITALCGLDPMQRSSGTSVQHKERISKQGLSLVRAILYMPTLNTILYNPEMKLIYDRLVERGKPKMLAQMAVMRKVILLAHSLYKNNQEYDSKRYLKFTQVKEVNMIE

SEQ ID NO: 188247 - protein, 395 aa, unidentified
MTAVRYVGLDIHKRHVTVAAVDEQQQVVLAPVKVAVERFGAWAAQHLQATDSVALEATTNSWEFHDELSPLVHQVAVANSFQLKLISSSGRKTDKHDALVLAKLLAAKLLPTVWVPPQHVRDLRALTSHRAELIGERTALRNRLHRLLHAHNLNLPSGQPFSAANEQWWTTLPLSPVECLQVRHFWLSLHHLDALIEDTEACIAQQSATQPWNELMTFVLQLPGIGLYTGMTILAAIGDIARFPSAQQLVGYAGLGARIRASGDVKHTGKISKQGRRELRTTLVTVAWSAVRWSPYWRDLFHAFSKRLGKPKAITAIARKILVVIWHVLSKRELDRHASPAAIARSLMTWSSQHHLARSQSTRRLDFVRQRLDLLGVLQDISTFRANGRAHAIAT

SEQ ID NO: 188248 - protein, 350 aa, unidentified
MMLIGVDYHPSFQTIAFFVEETGECGEQELNHSDGQAERFYRDLKQRGICVRVGMEATGYARWFERLLAELGFALWIGDPAEIKARRVKKQKFDREDARLLVRLLRENNFPQIWVPGPENRDLRQLLWHRHRLVQMRTRIMNQLQALAMNEGYRWKKKLFSERRAQFEKLALGPWASRRRQELLELLDRMNPTIEELTAAVEWEARQRPEAMRLMTHPGVGPVTALAYVLIIGTPTRFQCGKQIGTYVGMIPCEDSSARKQRLGHISKQGSSLLRFLLVEAAQSAARSNPEWKRRYVYLAMRRHRSIAKVAIGRRLAVRLYWMWRNGCDYSPSLEFGSYAGQLGSGYGVK

SEQ ID NO: 188249 - protein, 427 aa, unidentified
MGRLKIVYPVCCGMDVHRDFVIACIATTNSQGVTDYLSKRFSTYSGGLRDLAAWLLANNCKDVCMESTGKYWFPVQNILEKSCNVVVSHPKFVKAIKGKKTDKKDAMWIADLFKHDLVRGSFIPPEEIRQLRDLCRYWVKLTAYNTGEKNRAQNCLTVSNLKLDSVFSNVFCKSASAIISHMLEHPGEQFPVAPFVHPRCKSPIEDIQAAVDGAFSPWQAEKLMVIRTHMDDLASLKQSLEALIFKLAQPFTRQIELLLTVPGISEPMTAIRIIAEIGADMSQFESSKHLCSWAGLTPQNNESAGKKKTTRIGKAGQYIKPLLLQCAIAACNPRSKRYPQILAKYQQLYKRRGKKKARIAISRRLLTAIFHMLLNDEPYAPFEASARHTIPDSRVLTPDQALALLRANGYIIQEPPVVAPAGIASSG

SEQ ID NO: 188250 - protein, 421 aa, unidentified
MAHLAPEEFAAFVGLDWADAKHDVCLQATGTTRREFLSFEHRPEAIDAWAQTLHTRFHGHPVAVCLELNKGPIVSALRKYDFLVLFPVNPLTLARYREAFIPSRAKDDPSDAELQVELLLKHRDKLKPLQPQSSAMRALTQLVEHRRRLVGDKVRCTNRLTSALKNYFPQVLQWFPDKDTAIFCDCLSRWPTLKAAQLARRSTLEGCFRAHHVPSVDVIAPRLQAVKRAMALTTDDGVIAPNVLLVQALVAQLRVTLQAIADVDTAMAQRAQDHPDFPLFDALPGAGAVFAPRLLVAFGEQRERFSSAEELQKYAGIAPVTERSGKKAWVHWRLQCPTFLRQTFVEWAAESTRPSFWAQVSYQHQRDKGKAHQAAVRALAFKWIRILYRCWQDRTPYDESVYLQALKRRSAPLLHTLAQEA

SEQ ID NO: 188251 - protein, 351 aa, unidentified
MEEYIAFDSHKRYTWVEHQEANTGKTRAYRLQHGTGAIRQALAGCAPGTAVAIEATANWYWIIDEIEQASCVPKLVHPRKAKLMMGLINKTDKLDAHGFNTLQRNGTLPTVWIPPGGLRELRELTRTRLVLVAQRTRWKNRITATLAKWGLPPSEYSDPYGKKARAELEQQLERLPEQTRWATRQMLAQLDSLSEQAQQFEKRLEELVEVTPMMQWLMTLPGVGVILGATIALEIGEIERFANAERLASYSGTTPRVHSSGDRTRHGRTRPDVNRYLKWAFAEAANSVAVNHRRNPERHVSRLYARLRASKGHARAVGAVARHLAEAAFHVLQRKEVYRDPSLNPRPEKGV

SEQ ID NO: 188252 - protein, 356 aa, unidentified
MDSTKYIGMDVHKEATTIAVMNSAGKLVMESIVETKAATMVQFFEGLRGELYVTLEEGTWAAWLYDLLKPHVTKVVVCNPRKNALLKVGNKSDRIDARKLAELLRAGLLSAVYHGETGLRTLKELGRSYLAISKDLTRTMNRVKALYRSWSIPCGGPSVYAPRHRKEWLSKITEPGVRRRAELFYQQLDGLQKLRQEARRDLLAESRKHGATELLRRIPYIGPIRAALLIALMQTPHRFRTKRQLWAYSGLALETHSSAEYHYVQGQLQRSKRPVALRGLNQNHNHDLKSIFKGAAAKAGTAKGPFHDFYTALVGKGMKPTMARLTLARKIAAITLIVWKKGVCFDAQQLKQQVSV

SEQ ID NO: 188253 - protein, 350 aa, unidentified
MQKQTEDMQAAKCFPLWFGLDVSKDSFTAAGRSILRGQATMFPPEGKYTLDRKGVGAFLKWAGSKAGVLGYGIAMEATGVYSGRLADLVRKADPERHVAVCNAASVSLYARSFTEEKSDRADAAMIAMYACDRNPREPRKVTPEEARLREIVRARNALEEQLLQARNRMEGLGDRAVLKIQKRLVAAVERAIAGLERELEAAVKASPEIRAEVELMATAPGVGFLSAACIYAELGSLRQYSRKQVSALSGVCPVNRTSGTSVRRHTMSHHGSRLLRRILFLDSTQAIRRMPSMGRFHARLLARPDSSKMTAKCACMRKLLLILHAMVVTNTRFDPDHKSEKNFKKVKETT

SEQ ID NO: 188254 - protein, 421 aa, unidentified
MNQLTDTGYTAYVGIDWAAAKHDICVQEADSGAREFACISSQPEGIEAWAQALYQRFGGPIAVALELSKGPIVSALQKYDFFVLYPINPSTLANYRETFTPSGAKDDPTDAELAVDLMTRHAERFSPLKPQSVGMRKLIGLVEQRDKFVSDQGRVVNRLGHALRQYYPQVLEWFSEHNTLVFCDFLNQWPTLNQVKRARKASLERFFRSHHVHSAELIERRITAIKTAMPLTLDAAVIEPHCLQVEILVEQLRITIKALKRFDDQIAVTAQKLPDYDLLFSPLPGAAKVLAPRLLAAFGEDRQRYPQADALQKYSGIAPVTKRSGKTTWVHWRWQCPTFVRQTFVDWAAQTINKSAWAGAYYRQQRAKGCSYQVAVRALAFKWIRILHRCWQNRTPYDESKYLEALRRKRSPLLKYLAETA

SEQ ID NO: 188255 - protein, 294 aa, unidentified
MNPERVGNDAAGLAALVAAITAAGTGLVVLEATGGYETAAVRALQGAGMPVAVINPRQARDFARAQGRLAKTDAIDARVLACFGAAVRPSPLPPIEPGRDALAGLVARRRQLVDMLVAEQNHLEHAAAAVRSWIEHHCGALRNQLAQVDAAIAVAVEADLALARRRAILVSVKGIGQATAAVLLAELPELGRIDHRQLAALIGVAPINHDSGQFRGQRHIAGGRASVRCALYMATLSAVRHNHNLQAFYQRLRANGKPAKVALVAAMRKLATILNAVVRDDRPWQPSSPLQHGC

SEQ ID NO: 188256 - protein, 390 aa, unidentified
MVAALRPFGEIVAKPFEVPHTSSGFHQLVDQLNSLDGSTRIIMEHTGRYYEPMARWLSDSGFFVSTVNPKLIKDYGNNTLRKVKTDKADSVKIARYALDNWQDLRQYTSMDIIRNQLKTMNHQFSFYMKQKTSYKNNLISLLDQTYPGINDFFDSPARSDGSQKWVDFVSSFWHVDCVRSLGLATFTERYQKWCKRHGYNFQPEKPAQIYSFSKELISVFTKDSVTKFLVKQAVEQLNTVSFTVEQLRLEMNRLAAQLPEYQVVMAMKGVGPSLGPQLMAEIGDLSRFSHREALTAFAGVDPGVNQSGTYEARSVRTSKRGSPQLRKTLFQIMDVLIKSAPSDDAVYRFLDKKRSEGKPYYVYMTAGANKFLRIYYGRVKEYLAALPKPE

SEQ ID NO: 188257 - protein, 354 aa, unidentified
MAQSSTLYIGLDVHKEAIAVAYAAKDYGADVVYLGSIGTRQCDIDKLVRQLQSKAKRLVFVYEAGPCGYWLYRYLTKKGYDCWVVAPSLIPKNAGDRVKTDRRDALQLARLMRSGDLTPVYVPKVEDEAIRDLCRAREDVLRDLKAAKLRLKAFLLRHDIRYTGQATWNPAHLRWLSEVVCPTPAQQIVFQEYVRAVNEQTERLQRLEQELQEQVKSWRLNPVVEALQALRGVQFTVAVTTVAELGDLTRVENPRQLMGYLGLTPSESSSGERRRHGSIPKAGNTHARRALVEGAWASRYPAKVSRHLQLRLENQPKAIQDISWKAQVRLCTRYRRLLARGKHANQVVVAIARE

SEQ ID NO: 188258 - protein, 417 aa, unidentified
MTEPAAYTVYVGIDWATTSHEVCVLSPERAVVATRRVAHTAAGLDELVALLTTFGSATAVAIGIEMPRGALIEALLAHGYPVYAINPKQSDRFRDRHTVAGAKDDRLDAFVIADALRTDRPCFRRVQPDEATVLQIREYSRIDAELRDEQSRLTNRLREQLYRYFPQALTLCPAVDEPWVWALLAMASTPAAAARLRRPRLAACLKTYRIRRLTADDVHAALATRAMVESAGTIAAASAHVALLLPRLTLVHAQQRTCAAALTHLLETLSAAHDTDPSAPTPSDVQILRSLPGVGLKTVAALFAEAADAIATRDLAALRAHAGIAPVTKRSGTRCVVVMRRACSGRLRTALYHASRVSAQCDAGAKQMYAALRARGHSHGRACRSVADRMLRILMAMLRTGTTYVTPTPAVPVMQPA

SEQ ID NO: 188259 - protein, 331 aa, unidentified
MSVQSKELTFKTFTQPPSVSVLVQHLHKNFPGATYYSAYESGFSGFWAHRELVNQGVNNIVVHAADVPTKQKERAFKTDKRDCRKIARSLSNEELDAIHVPSLKTQQDRTLVRLRLTFRKDLTRQKNRVKSLLNLYGKVIPEQFLCSSHWSKSFIQWLTELRFETESAEQALKLLITQVEHLRLCLLEVTRKVRKLSNSQEYGSDMKLLLQIPGVGMITGIAFLTQLEDVERFPNTNSLAGYLGLVPSCNSSGDKENTGEMTFRGNKWLRVLLIESAWTAARTDPALHLAYINLCKRMKSNNAIIRIARKLLNRIYYVLKNKYEYEKGIVR

SEQ ID NO: 188260 - protein, 353 aa, unidentified
MRIVCALDVHRSQITYLTVEVGTGEVSRGRISPATRQSVRAWLARFDGVDEVHFALEGTTGWRFVVEEIERAGHRPHLADPAETAARRGRKRRAKTDRTDCDLQLRLLLAGELPESWIPPAQILELRTRVRLRKALVDERTAWQQRLQAQLFHQGAPAGLKPRTRGGREALARAELSPAGRELVALALRVIDRIDLELAPLDRTLSLFARRQPGCRALIARLYGVGPVTATAIVAELGDARRFGCSDDAVRHCGLDVTVHQSDTKRAPGHLSHEGPGLLRWALFEAAQQACRPASPDHVYYRQVARRIDHNRACLSVARKLCRRAYHILRELGDEALAPIEAPTAEEVIAAAA

SEQ ID NO: 188261 - protein, 407 aa, unidentified
MSITCGIDWAEAHHDVALLDDSGHVLERLRIDTGVPGFTELMGLLAEHAEDPTTVPVAIETDKNLLALALQAAGLAVYPINPRAVARYRERHSQSGKKSDPGDAAVLADVLRTDRHRHRPLPVISDQGLAVKALARQHQEAIWALHETTSKLRSVLLEFYPQALRAFPNLKHRAALTILAAASTPELGQRLTARKIVALLHRCGRRNDPALVERILGELKTPALRQCVRVEDALGHTVVGLLEILTAMHAAVERLEQALAVEFDAHPLAPVLRSAPGLGPVLAARVLAEVGDDASRFTSAAGLRAFAGTAPVTRSSGRSHRVNARRIRNKRLADACHWWAFAMLTKSAGARAHYDRRRAAGDHHNAALRNLANKVLGRMWWCIQNGEHWDERAAWSEPSEDIQTTAA

SEQ ID NO: 188262 - protein, 370 aa, unidentified
MDSSSPYGIYVPDWSSYFQSQEKKESTMNISRIGIDLAKNVFQLHGVDRHGKAVWKRRLKRAQWLKAVLDKTAPDCEIGMEACAGAHHWARELESRGYTVKLMAPQFVKPYVKSNKNDANDAEAICEAMSRPNMRFVTVKSIEQQDIQATHRVRSELMSQRTAKANQIRGLVAEYGLVAPQTMCALRAAVPCWLEDAENGLTGHFRSLLHGMWTDLVALDDRVRELDRGIQKLADSNEVTQRLQQLRGVGPLVATALVATVGDARQYHRSRQMAAAIGLTPRQHSSGGKDRLLGISKRGDVYLRSMLIHGARAVVSQAKHRDDRLSRWVIGIATRRHPNVAAVALANKTARMAWAMLRNETDYDPDFAIS

SEQ ID NO: 188263 - protein, 356 aa, unidentified
MSRDVKYIGMDVHKEATVIAVRNSRGELVMESMVETESSTIVQFIHGLRGELHVTWEEGTWAAWLYDLLKPHAHEVLVCNPRRNALMKEGSKTDRIDARKLSELFHAGMLGAVDHGENGVRTLRELACMYQTVSQDLTRVMHRVKALYRGWGIACAGTQVYAPRYREEWLQKIEPAGVRRRAELLYEELDGLQALRRKVRPELLTESQKHKAAKLLRQIPCIGPIRAARLIALMQTPHRFRSKRQLWTYSGLGIETRDSGQYRFVDGQLQRSKKPQQVRGLNRNHNHEMKEIFKGAAIRASCGVGPLREFYGSLLDKGRKPEMARLTLARKIAAITLTLWKKEERFDAEQLKTQAA

SEQ ID NO: 188264 - protein, 319 aa, unidentified
MAQVDNVVAGIDVAKDKVDACLRSIAERPVLPSTAEGRRQLIAWLRKHKVAKAVMEASGGYEKEWAKALRKAGIEVWVVDPKRVRNFALSAGRMAKNDKIDADTIAWFAETFKERPSEIHDADQEELKGLVKARLGLVNMRARLFQSDHGATGLAQKANARILKQLDGEIAKLEAAICAKVKSTPELAERAEIIASVPGLGEVSAANLVAGMPELGRVSGKAAAALVGVAPYDEDSGKRRGDRHVKAGRRWVRNAIYMPCVGAATLNNSVLKAYYRRLIARGKEPKVAIVACMRKLIVILNTMLTRRQKWDPCCAIAVS

SEQ ID NO: 188265 - protein, 351 aa, unidentified
MKEYIAFDSHKHYTLMEREDRQTARTVQLRVAHQPGAIRACLRNCESGTDVAVEATGNWYWIVSEIEQAGLKAQLVHPRKAKLMMGLINKTDKLDVHGLNRLQRNGTLPTVWIPPAELRDQRELTRTRLVLVAQRTRLKNRLQSTLAKYGLAVRDCSDAFGTVARSQWPELLAQLPEQTQWVSQELLKQLDLLEEQIGQCEKRLNSLLKITPQIERLKSLPGVGLILGASIAFEIGEVSRFASAEHLASYAGTTPRVHSSGDKLRFGRLRPDINRYLRWAFVEAANVVALHHQQRPERHVSYLYWRLKQRKGHAKAIGAVARHLAEATFHILSRQEDYVDPALRKGRSKPV

SEQ ID NO: 188266 - protein, 351 aa, unidentified
MLYIGLDVHKEFCQACVVNELGRALSNEKFSSTRDELDRFLAGFKDAKFVLESTGIWEFIYEGIEKRGFEVVLAHPLRVRAIAEAKVKTDKVDAETLAQLLRADLIPRSWIPSKDMRDLRQLVRQRAYLVQQSTSFKNRIHAELLRRGVRRPLNFVMPFSKKSIDWMRSLEIPTVISCLNCLESVQAQIEEMNIKLLDEFKRRPDAQLIATVPGIGFYGALLIHAEIDDIKRFSHPEKLCAYAGLVPTVSQSASSVHYGAISKDGSSYLRWMLTEAVHTHTHCEPGSRLSRFHAKVARRRGKQKATIATARKLLLIIYWMLVRHEPYHSQGLDPGFPPARNECDIGIGAGP

SEQ ID NO: 188267 - protein, 341 aa, unidentified
MSEHVAVIGVDLAKNVFQVCAASGSGKRLINKKITRAKLLDFFVNLPPCLVGMEACSSAHHWARQIQKLGHHVKLIPPQFVKPYVKSNKNDAADADAICEAVTRPTMRFVAIKSEEQQALLLLHRDRKGLVGERSAIANRLRASLAEFGLIVPVGIHKLRAWLQQDYGAYEETLPVMMRLHAQRLAGRLRQIDQHIDEIEHEIKRYNPDIELTKRLQEVPGIGPLTASALVATIKDGSSFKSGREFSAWLGLVPRQHSSGGKDRLLGISKRGDTYLRTLFIHGARAVIKHMNPRRSMTPWIAELMRRRHRNVVIVALANKLARIAWALMSKGKSYDEAFGF

SEQ ID NO: 188268 - protein, 366 aa, unidentified
MKKPSTKTVSWRGKLPDGQLTIGLDLGDRSSFYCVLNGAGEVILEERVATNPEAMKKTFSTMPLSRIALETGTHSPWVSRLLSDFGHEAIVAHARNVRLIGESRQKDDRLDAQALARLARIDPQLLSPIQHRSAQAQADLSVIRARYALVRARTALVCSARGLTKSFGERIRGRNPKGFSPATGEMLSPQLRVALAPMLSALETITVRIREYDAQIERLAEESYPDVALLKQVKGVGTLIALTYILTLEDPRRFRKSRDAGCYVGLQPGRRNSGQSQPQLHITREGDSYLRMVLVQGAQHILGPFGEDSDLRRWGLKLAERGGKSGKKRAIIAVARKLAVLLHHLWISCEEYEPLHNTRKRRLAAA

SEQ ID NO: 188269 - protein, 350 aa, unidentified
MIIIGCDYHPGFQQIAFVDTETGDYGEQRLEHSEGAEKFYRDLAGQSKKVRVGMEASGHARWFERLLAELSIELWIGDASEIRAKRVRKQKTDRQDAQHILQLLMENRFPKIWVPSGENRDLRQLLWHRHRLVQMRTRIMNQLQAVALNEGLRCKKRLWRQHGREQLESFRLAPWASRRREDLLQLLDRLNPTITDLTQVIEQEVEKCPEARRLRTHPGVGALTALAFVLIIGRGERFQCGKQIASYLGLVPLEDSSGNRRRLGHITKQGSSMLRFLLVEAAQATARSLPEWRSKYFHLVMRRGRKIAKVAMARRLAIALYWMWRKGWNYEQSRKFGSHAGQLGTGDGVQ

SEQ ID NO: 188270 - protein, 327 aa, unidentified
MGNYTYVGIDIGKLEICCSLPERKPFILSNDSIGIKALLKRARTIDSPGNLCFVMESTSVYSSRTAEAILELADTWVVIVPPACVNGFKQAGLVRTKNDFVDAVAIREFAEVKHPRPWLPPAQAQRRLRNLQVVMGNLVNAGARLKNIREKLLNEHHHDDIALDSTNRMISQIDTELTNLQAETDKVIASDEVMATDSANIMSIPGIGPKVRNVMMSVIYEQLRNLPQRKLLSYCGMSPREHISGKHKGRTIMSKAGDARVRSVLYMAALVTIKKSGLMHDYYQGQVASGKPGKVAIVNVMRRLLYIIQGVVKANSPFDMEVFLQRG

SEQ ID NO: 188271 - protein, 381 aa, unidentified
MKKNLRFVGLDVHKDTIVIAVADQGREGEVRGYGTISSDLHAVERAVTKLRADGAELRAAYEAGPTGFGLYRSLRRMHIECLVVAPSKMPVPGGRRQKNDRRDAELLARLLRAGELTPIHVPDEVDESIRDLTRARSDAVDDLRRAKQRLKSFLLRAGFHYTGKADWGQKHQRYLRELRLPLVAHKAVLEEYLLALDQGIERVSRFDDLLAAQVPQWCHYPAVQALMAMRGFQLVAATVLVAEIDDIRRFAHPRHLMAFLGLVPHEHTTGSTRRVGAITKAGNGHARWMLVETVQSALFPPKVTAALTLRQEGQPTAVKALAWKAQTRLHKRGWHLMARGVMKPKVIVALAREMAGFVWAMLHLVPVPGAPPPAGPLLRRA

SEQ ID NO: 188272 - protein, 430 aa, unidentified
MRSTMQPHYQCVCGVDVHKEFLQVCILRRGEDPEVFRVFNNFSGVQNLKQRVEEEGCECIACESTGVYWYRLYLAFEEQTRVIIGNAYQIKSIPGRKTDVRDAQWIAELAMNGLINPSRVFPKKDRELRELTRTRESMVNSRTQMKNRIHHTLDSAGIALGKGVNDIFGKSGIHLIWGLLNRERSEDIISNIPSARVKKKADSLREILSGSLSDLQIMLIKNNLDMMAHINEHIRALDEQIIARMGEQERIRDVDIACSIPGVSVTTAVTALAEIGDYHDFETPEKLASWAGLVPSVYQSAGKNWSGKITKHGSAHLRWILVQAAKSAGRTVNTTFRKFFNRIMYRKGANTATVALARKILCILWHLLMKKELYIDPIKKAKVTKLPLVQKFSKNSPADIQKAIDFILDSGFKVIYPDATLDQNLRGVSR

SEQ ID NO: 188273 - protein, 352 aa, unidentified
MRILALDLGKYQSVACDYEAETGQHSFATIVTNPKALHDLIVDREPDRVVIEICSIAGWVGDLVRSLGIELQVANTADERWRWRIVKQKNDRRDALKAAQLSAVNQLSLVHVPQIDVRQWRALIAYRHHLVRRRTKIKNHIRDLLLREGQLLPRGRSAWTQVGMAALEGMVKPLAEMQINELWRGELGVELAQLKELQTQIISVEAKLDELAAADGRVQLLRTIPGVGPRLAEAIVTMFDDPTRFRTAGQVSSYIGMVPKSFDSGETARAGRITRHGHRLVRSLLVEIAWAALRHNRWARECFQRISGGKKSRRKIAIVAVGRKLLVRCWAMLRHQTPWRGSVAEVVATGSR

SEQ ID NO: 188274 - protein, 352 aa, unidentified
MIVLGADTHKRSHTIAAVAAGTGELLGEQTVAVGRRGFAALLQWARTLDGERVWALEDCRHVSGSLERFLIERGERVLRVPTHLTAKARKSARQRGKSDPIDALNVARAALQEGLDAFPAAHLDGPELDLRLLVDHRERLVRHRVELNSTLLWHLHDLWPEVELPGGALFSKKWSTRIGRRLVRAEQTMRVRIAREELRRLRELTLAINRLEREITELVAQIAPQLLAEPGFGPLIAAKLVGEIAGAQRFATSAKLARAAGVAPIPASSGNTQRQRLDQGGNRQINAALHRIIVTRARCHPPTRDYIERRRSEGKSTREAIRCLKRYLVRHVWRLLQPPLTTRTPPSPHSFS

SEQ ID NO: 188275 - protein, 413 aa, unidentified
MRLFIGDDWAEDHHDVELMDASGRRLAKARLPEGVAGMARLHAMAGEALGDDAEDGDPGQVVVGTETDQGPWVAALIAAGYTVYAINPLQASQYRRRHGVSGAKSDAADAHVLADMVRTDSHQLRAVAGDTAQAAAVKVVARAHKTLIWERARHMQRLRHSLRDYFPAALEAFTDLAAPDALELLAKAPDPASAAKLTTAQITAALKRARRRGIPAKAAAIATALRSEHLGQPSVVAAAYAATVRAATAVLTVLNEQLKALEEQVEAHFGQHPDAEIIRSQPGLGPILGARVLAEFGDDPHRYADARSRKNYAGTSPITRASGKKKAVLARYIRNDRLIDALTRQAFTALTTSPGARAYYDQLRGRGASHYAALRQLANRLVGILHGCLKTRTLYHEATAWPQHTTKAEKAAA

SEQ ID NO: 188276 - protein, 437 aa, unidentified
MSQNKNHAKKSVCLQSLPLIHPHAAGIDVGAKEHVVAVPADRDPRPVRSFKAFTPDLYELAEWLQQCGVKTVALESTGIYWITLYEILEERGFEVRVVNARHVKNVPGRTKTDVLDCQWIQKLHSFGLLSGSFRPDQQIRTLRSLMRLRDNLVVQSTQSVHHMQKALFEMNVQLSNVISDIVGESGMRILEAILAGEHDPARLATLCTPRIKAARETVAKSLHGNWREELLFSLRVALDSFRFAQGKIAECDARITEHLAQFADRAVLETPPSSLKSELHRVCGVDLTKIPGIKEQAAQIIISEVGLDMTRWNTEKQFSSFLGLCPNNSISGGKVLRRSTRKVYNRAADALRLCSQSLTHSKTALGAKYRRLKGRLGAPKAIVAMAHHLARLVYRMLRYGRQYVEKGIAEYEIKFRLQRLKWLKHEAKSLDMQLLPA

SEQ ID NO: 188277 - protein, 350 aa, unidentified
MTTVAASQSLVTGGVDTHLDTHVAAALDRLGGVLGTAQFPTTAADYRRLLRWLRGFGEVGRVGVEGTGSYGAALARHMTGHGITVIEVSRPDRQVRRRHGKTDVVDAIAAARAAMSGEAAATPKTHDGSVEGLRMLKVLQCSANKSRTQALNQLRSLLVTAPPELRAKLQHLPRRDLLATSAAFRVTPDGDSLPGLTRFALRDLAERIQSLDERLKEVNTRLRRITTAAAPDLVELHGVGPDTASTLLITAGDNPERLTSERSFAALTGCCPIPARAARPTATASTAEATGKPTPPSGASPSSAWPATNAARPTSPSETAKAKARPKRSAASSATSPAKSSTRYRSPAAA

SEQ ID NO: 188278 - protein, 341 aa, unidentified
MLKVDSAGIDVSARSLMVLLRRDGQARPARSFLNTPEGHRLICRYLAKGGHRVRVCLESTGLYGLDLALVLSVCDGIEVMVANPRAVRRFAQALGHRSKNDQIDAALLEEFAARMPFEPWQRPGQAALELRAIARRIKALTVACTAEKNRLHAATSTHTTPRIVRKDLQQSIRHHQQSILRLRNEAQRIVALDARLKQQFDLLVTVPGVASTSAILILGEIVVLSEDLDARQWVAHCGLDPRHEISGTSVKHPGHISKAGNKYLRSALYMPALVARRRQPNLKAFALHLVSKGKKPIQALVAVMRKLLVAIHHMLKRSQPFDGSKLYSIPTQHTPPTTEAA

SEQ ID NO: 188279 - protein, 369 aa, unidentified
MADRITYVGLDVHKESIVVAVASGGLRDEVREYGRIANTAAALDRLIRKLGADGMALRFCYEAGPCGYGIQRRLSARGQECVVVAPSLIPKRAGDRVKTDRRDAASLAKLHRAGELTAVWVPDARHEAIRDLVRARLDAVHSLRRARQQLSGFLLRQGCHYGRPAWTKLHRRWLSGLKFGQAVHHIVLEDYIAAAEAAEARRDRLTAQIEAVLPDWTLAPVVAALQTMRGMALVNAATLIAELGDLSRFTNPRQLMAYLGLVPSEHSSGANVKRGGITKAGNGAARRLLIEAAWSYRFPARLSRELRLRQENQPRSIRDIAWKGQVRLCARYRRLTGAAKPANVVTTAIARELSGFVWAIARHVTMPAG

SEQ ID NO: 188280 - protein, 312 aa, unidentified
MKCYNNFIGIDIGKSSFVSAIHQQKTTKEYANNAAGIAEFIKDKKEILSTGLCVLEVTGGYEMLLLLRLCEEEFAVHRASGRQVKSFIRSYGNEAKTDNIDAKSLARYAQERHESLAIFTPPSQNASQLYELAQRRKDLKQMLTAEKNRYQGPRVSGVKKSIETIIEILKTEIKAVTSEMDQLIGEDKKLKEKQQVLMTVPGIGPIIANNLLILLPELGALNRREIASLTGLAPIARDSGQLKGYRRTGHGREGIKPTLFMAAMAARNSNSSLRTYYESLVGRGKKKMVALTALMRKIIVIANARLKEIEAI

SEQ ID NO: 188281 - protein, 344 aa, unidentified
MDITTIGLDLAKSIFQVHGVDVNGRVVIRKSLRRAQMLPFFARLRSCLVGMEACGTSHYWARELIKLGHEVRLMPPAYVKPYVKRSKTDAADAEAVCEAVTRPTMRFVPVKSPEQQAALSMHRARDLLVKQRTQLVNMIRGLLAEFGINIPKGLERALLMARRIVDDEAPDVPIEAAKIVGTLSQQALDIHVRLRQIDRDLLVWQRGNDVARRLMTIPGIGPVGATALAASVTDPHQFRSGRQFAAWLGLTPLQKSSGGKERLGRITKMGDKYLRKLLIVGMTSLVRRAKDNPPTIDPRLANLLVRKPVRVATVAMANKTARIIWAIMTRGETYRASHQPALAA

SEQ ID NO: 188282 - protein, 365 aa, unidentified
MAEVTWGLVARVGVDLSKRVYQVHAVDRSGRVLMAKPLSRERFFAWCAELPAGCLVAMETCGGAHHVARRLCLLGLDARLIAGHFVTPYRMAGKSGKNDANDAAAICEAAGRPHMRFVPVKSAEQQGQLSVHRLREGYKAERTALINRIRGVLAEFGLVFPQSPEALRRVLAEVLEDAGNELTGIARLVLQRAHLHWIDLDLQMKWCEERIEAHVRSDARAGQAAELLGIGPIGASAMVASVADFKQFRSAKQFGAWLGTVPSQNSTGGKASLGRITKRGDDYLRTLLIQGAKSAVMTAHRRDDRISQWLVQLKDRVGWQKAVVALANKNARILWAVMTRDGAFDPNHVPEAPGPHCALSQRPAF

SEQ ID NO: 188283 - protein, 337 aa, unidentified
MELYSGLDLHSRNTYIGILDTDFKRVFKKRIPNNLDLILQTLEPFRDKLKGLVVESTFNWYWLVDGLMDAGYGCVHLANPSAIKQYEGLKHSDDKHDAYFLAQLLILGILPQGYIYPKEERPVRDLARKRMFLVKHKTAHILSLQSLIARCSGQRISSNQIRNFTNADLKQLLKEEYLLLSAQANLNIIAFLIQQIKALEKAIKKKVKLDKAFEQLMTVPGIGFILAMTIMLEVGDIKRFAKVGNFASYCRCVSSQRLSDGKSKGSGNRKNGNRYLSWAFVEAAQLGRRYSQRFGRYFDRKAAQTNTIVATKALSNKLARICYYIMRDQVPFRQELF

SEQ ID NO: 188284 - protein, 340 aa, unidentified
MSKITLCVGLDYHDKAIRVCVMDEDGNTLVNRSVPNSEGEVIDLVSQFGCYAVCAIEACCGAADFAHRLRQHTDWDVRLAHPGYARRLKQSPDKSDHDDAELLADLVRVNYLPEVWLAPTETRELRRLVRYRQQLKRNRAEIKLQIRALLREERIKPPANAWTKAWRSWLENTRQLSDVIRWILGEQLGRLAEVEARMKQVELQLEKHTANDRNTQRLQQHSGIGFVTAVTLSAEIGDFRRFANGKQLSRFCGVTPCNASSGKREADAGLVRAGNRELRAVLIEAAHRLAQHDPKWRALRDRLRKRKPYNVALAAVANRWLRWLYHQMMRVETKHQMEAA

SEQ ID NO: 188285 - protein, 342 aa, unidentified
MKKYFIGIDVSKETIDVSFVESDFQQQPEYLAQYPNGKKGYRSMIRDLKLALRGASSGQWLFCCETTGAYDRQMCHWLVEHGMHVWRESALQIRQSLGIRRGKNDKADSMAIADYARRHPDKVNLFEIPGKALSALKDLYLYRQTLVDKLKGVKNRQKALKSQGEAASPAARFIRRDSNNEIKRLERSIAECESAMMEVIRSDEQLMSNYEHVRSIKGFGLVVTVALMVYSGNFQTVPTANKMATYCGVASFRNKSGTTLDARQDVRHLSNLRLKGVLTMAARTAIRHDEAIRQYYQRKIAQGKQHGVAINNVKNKLLHIAYALVRDGQLYQSGHVANGDAA

SEQ ID NO: 188286 - protein, 400 aa, unidentified
MDRVEQGWIGIDAGKGHHHAVLIDRDGQRLLSRRVINDQPDLVALIDTVRDRVVDPVWAIDLAGGSASLVIALLLQHGQRVVYLPGIAVNRASAGYRGEGKTDAKDAAIIADQARMRRDLRELHVLDEDIAQLQLLSSYRADLAADRTRSINRLRGLLAGIFPALERVLDFTNRGPLILISGFQSPTAIRQLGAARLTGWLKRRGVHGAGRLAHAAVEAASRQTAHVPGQAAAASLIARLAQTVLDLDRQLTDLDREVAGIFRAHHDAAIITSLTGIGNVLGAEFLAVVGGSLAGFASADHLAGYAGLAPAPHDSGYRTGNLHRPQRYNRQLQRVFYTSAMISIQHSPASRAYYDRKRAQGKRHTQAVLALARRRVNVLWAMLRDHRPYQEQPPSHVLAA

SEQ ID NO: 188287 - protein, 332 aa, unidentified
MENCIGIDVSKASINIHISKNGQDLQLENSIKGFKTLYSKLKKIYKKEVKDIIFIFEPTGSYSESLRKYCSHQQIKCFIINPKQFSNYAKALGEDVKNDVIDARVLSQALHIAKDGQVIIPVYDEDVERIKELMSYYKFTTKQTTQQKNHLESLESKEGDTFAIKDLKRSIKSSKEKESRIIEQIQTIIDTNAKYKNDYENIISIMGIGQIGAIALLHLFLKYPEANQRQITSLTGLNPVYRQSGSSIQSLSRISKSGAKVYRGSLFMAAMSAIRYDANFKAFYERLKANGKHTTQAQIAVMRKLIITAHSLYKNNRRYDVKFNTQKVENAT

SEQ ID NO: 188288 - protein, 345 aa, unidentified
MQPMYYIGLDVHKRTISYCVKDGSGAIHSEGTLPATRLDLDVWMKTLPQPWTAAMEATAFTGWIYDHLQPHAAALKVAHPLMLRAIAAAKKKNDRIDASKICDCLRCDFLPECYMASTAIRERRRTLRYRNLLVRQMVQTKNKISMLLMEAGVSYNKQRLHKAGYFRQLLATNPDIPEGLHSLLGLCREMVVRLSKTESALVRSLERDPQLLERVERLMTIPAVGPITALTWALEVGDVKRFSSIKKAISYCGLCGAEKSSGNMTQRMPLSKQRNKHLQTTLIEAAKMAPRYSPSLAMLYDAEKRKGNANRATLAVARKLVAYLVALDRSQKEFLIVEGENRTAA

SEQ ID NO: 188289 - protein, 322 aa, unidentified
MRYIGIDVSKATFVVAYSSDKGGEIRTFNNTTAGIRQFIGTLPKDGSIHCVMEATGNYSALLLYMLNVAGITVSMENPLKVKNFAKAMLSTIKTDKSDARLITLYGEKMNPRPFKVQGEAILRLRQKRTVIRQLTKQITAMSNLRGSLACLPVPDKGATHTVDETIKFLEKKRDRLQAELTDLVEVEFSRQLALLTTIKGIGITLATALIITTGGFTYFQNAKQVSRYLGICPTYEQSGTSVNIKGHINRNGDAYTRGLLYIAAWPASRFNAQCKETYTRLRQNGKSGKLAMIAVANKLIRQAFAVVAHDKEYVDGFVSNRP

SEQ ID NO: 188290 - protein, 425 aa, unidentified
MATTRSANPGSRNYGAVGGGNGTIVGSNTMVGSNTMMEQFMAQSEDMSKPPTALAQNDTLICVVEMGLKSWLVAGLVPGIERQPLKKLEADESALHRLVLRWKAEAEKAGRPISRITLAFEAGRDGFWLARWLGSRGIEAWVIHPTSIAVSRDHRRPKTDRLDTQMLMRAFLGWLRGEPGHCRMAAIPTLEQEDAKRPTREHETLVGERTRIINRSKSALIRLGIRGFKPGLRKASERLASLRTPEGVPIPPNTLAEMHRDMARLAVIQSQIAEIAVARLERLEHATDAPHAMIRLLARVIGVGVETAEMLVTEVLSRNLRDRRAVARYAGLTGAPYESGSKRHEKGLAKTGNARVRHGMIQFAWRFLLFQKESALARWYRARTENAKGSRKRMIVALARKLLIVLWRFVTTGEPPEGVALRVAA

SEQ ID NO: 188291 - protein, 384 aa, unidentified
MLPLLFSLICDKDSIFLCILHSDGELFEQVFGVLTFQLHEMCKLLKKHHVSEVSMESTSIYWIPIWRVLSPHFTLRLVNPYFIKQLPGHKSDVKDAQWIAECTMKELVNGSFVPPEIIQQLRQYDRRIFDLNEEIVRKESKVDAVLQRCNIRLSNYVSNIECKSYRTVVRRLSEGVTDPQELIKEIHGRIINKHGRETILASMEGVVSQAEIDVLRQLREEIDIAESHKKECQDKMSEICQKYFPEELRRLQTIPGIKERAATSLIAEIGTDMSKFETANHLAAWSGLRPRNDESNKKVKSRKTTYGNSYLRRTIIQCAWAASRQKDCFFSWFSYHQTVVRRKNKMKVIVAVARKMLVAVWHVLHDNVEYIDFKHDCEESANNG

SEQ ID NO: 188292 - protein, 358 aa, unidentified
MIVIGADTHKATHALAAVDAGTGRARGTREIDADGSGHLQAVRWARGVDEERVWAIEDCRAVSRRLEQALLAAGERVVRVSPHRMGASRKGERERGKSDEIDALAIARAVVKEGVARFPCAYLNEQATEIRLLFDHRADLVAERTRIVNRLRWHLLELCPDLERSLNRGSLGNRRTLDRVGRSLRMLPADARVRVAREQVLGLRGLNRQIDALQDELVALVAAHRPRLLAELGCGALTAAILIGRTAGNEHFRSDASFALQSGTAPIPCSSGRRIQHRLNRGGDRQLNHALHVIAITRAQRDPATKEYLARKQAEGKTSKGALRCLKRHLARRFYQLLSEPSNDGSTPVEREHPEAPK

SEQ ID NO: 188293 - protein, 438 aa, unidentified
MSNKVFFNLDDLFISVGIDVGADFSWMSIALPNQQFVGKPYKILHNSIDSLTTAVSKIKEAEELYSLESRIFLESTGIYHYPLFCYLRDKGFNCSVINPIITKNSTNINIRKVHNDRFDSKKAALVGLKPDLKVSLMPSDLALNCRNLCREYYDLMDNRSAYVNKLQGELRMVFPQYLGIFSKVTINTSLTLLETYTSPSAFLKADKQEIIDIIKSTARFGLTYAQNKYNAIIQAATDANQFGYIIDSNIKRIRLYISFIRKYDEEINNILESLHELVDANEDADFVKQIHLIETFKGAGFLSAVSIMGEIGDFSAFSKPKQLFAYFGLDPAVKQSGKFEGTKVQMSKRGSAIARRVIHTLTLQSISISRNGEAKNPVLREYYLKKCDSKPKLVAMGAVSHKVCNMIFTILRDNKPFKIIAPQEHIKQYNAAKCDIAA

SEQ ID NO: 188294 - protein, 427 aa, unidentified
MSYRIAGIDVHKRMIVVVVADVDVAGDYEFERRQYGSSPAQLRLLAAWLVEQGVEEVVMESTAQYWKPVWASLERYWKPICEKWEGTSPMSGSLHLAQAQSNRGARGRKNDFADAERLVRRLVAEELTLSFVPDAEQRLWRTVMRTRYQLRCNQVQLQNRLEALLEEAHLKLSSLVSDLLGLSGRRMLQAMAEGETDPAVVAARADCRLRATQEQLCDALGACRELHPVYRRLLKAALEEWERIEAQIAQLGQEMASLIGPQQEQVQRLAEVPGLGVDSGQQILAEVGASAATFPSDRALASWVGACPGEEQTAGVNRNRRSPKGNRHLRRILNQAAHAAVKLKGSIFALLYRRYVVRFGHNQTIAVIAHRLCRLIWKILHEGVRYDERGPAVSQRAQQRRTARMIRQLRSLGYSVELLHAAAGVPA

SEQ ID NO: 188295 - protein, 414 aa, unidentified
MDTIYAKVAGLDVHQKFITVGVRCRLDTGKTFAEVRTFGTMTRDLRALADYLEALGVTHVALESTGVLWKPVWNILEGRFPLTLVNPRHVKQVPGRKSDVNDAEWLAQLLQCGLLRGSFVPPRELRQLRDLTRFRAQLASEQTRLANRIHKVLEDANIKLGAVATDILGKSGRAMLYALIRGEHDPGKMAELAQGRLRAKIPELTLALEGHFTEHHRLLIDHLLGHLDELERHVEELSGRIAERLRALLDDARRQRLDTIPGVNRTTIENVVAEIGVDMTVFPDETHLSSWAGICPGNEESAGKRLRSHTLRKNRWLRRALVEAAWAASHTKTSYLGAQYRRLAARRGKKRALLAVGHSLLVILYHMLKYDVDYQDLGVDYFDKRDPERLRRHLVKRLERLGYHVTLAPQDEAA

SEQ ID NO: 188296 - protein, 315 aa, unidentified
MRSTVAQSVGVDISKDTLDVAIHPGGESFRITNNPEGHRALIKRLKGFDIARIVFEATGAYHRLFQQAMVEVGLPWVKVNPCQARRFAQATGKLAKTDRCDALMLARMGAVLELETRAPASKTVEALRELVNARDALIKDRVAALNRQAIAVSPLIKRQLAQRLRQINGQIEAIDRRLKTLRNADSDLCQRFDILTSIPGIGEVTANVLVVETPELGRLEHAQAASLVGLAPVPRDSGQTHGKRSIRGGRPRARQALYMPALNAIRLNPEFKAKYEAMVKAGKPAKVAIVAIMRKLLILANALIRDRRKWAPANP

SEQ ID NO: 188297 - protein, 369 aa, unidentified
MLDSMFIGLDVHKATISVAVAEGERGGDVRHWGTIPHRPDHVRKLVEKLDADGVRLHFCYEAGRCGYGLHRQLVEMGHDCIVVAPSLIPVKAGDRVKTDRRDAVMLAKLHRAGELTSVWVPDAAHEAMRDLVRARATAMRVLGKARQHLQGFLLRHGRIYPGKKGWTVAYRRWLTTVRFQNPAQQIVFQDYVDAVADAEARVARLTGQIADLLPSWSLAPVVEAVQAMRGVAFIVAVTVVAEVGDFHRFDSPRQLMAYLGLTPSEHSSGTSVRRGGITKAGSGLARRALIEGAWSYRMQARVSRKLHDRIEGLPRTVRDIAWKGQLRMCQRYRHLVAAGKAKVVVTTAIAREMVGFIWAIARAVTAAPA

SEQ ID NO: 188298 - protein, 343 aa, unidentified
MEHFAGLDVSVKDTSVCIVDGAGKIVREVKVASEPAALLAVLTNCSYRFKRIGLEAGPLSQWLFSALAEAGLPVICVETRHMRAVLKAQINKTDRNDARGIAQMMRVGLYRPVHVKTLRSQKLRMLLTHRKLLQAKAIAIENDLRATLRNFGLKVGMVGTAKFEARIKELIENLPDLAVLVEPLLVVRRVLREQLDLLHRRLLAVVQDDAICRRLMTVPGVGPVVALTYRATIDVPARFRKSKSVGAVFGLTCSRDQSGERDRPGAISRCGDEMMRAMLYEAAQAMLLRSAKWSWLKAWAMQIARRRGMKRAIVALARRLAVILHRIWVDGTEFRWTREAAAA

SEQ ID NO: 188299 - protein, 360 aa, unidentified
MRHLSAKLLSDRISSEWEPSMGEVTTIGLDLAKQVFQVHGVDAKGATVLRKQLRRAQVLGFFSRLPPCLVGLEACATAHYWARELAALGHELRVMPAQYVKAYIKRNKHDAADAEAICEAVVRPTMRFVPVKTADQQAAVLLHRGRERLVRQRTGLVNALRGHLAEFGVIAPQGLRNVGKLIAIVRDQTDARVPDLARQVLQVLAAQIEQLEAAVAAIEKQLMAWHKSNPVSQRLASVPGIGPIIATAIAATVVEPSGFRSGREFAAWLGLVPRQNSTGGKHRLGGISKRGNQYLRRLLINGASANLLRSKATNADPWVIGLRRRRPPLVVAVALANKTARIAWAVMHRHENYQRVAAAA

SEQ ID NO: 188300 - protein, 468 aa, unidentified
MKVRALSGIFVCQRVWIGLDTAIRTSSICCINENGQVLDRFVAKTSAADIHADIEARFKKCEITIGIEACSTSVAVARGLRRLGYDVALFDCGQIKRFASIRRSKTDANDARSIADVARLGREVISEVYLKSQRCVNIRAKISTRHRVIQQRKGTEHLIRSHLHLYGTTIGVRVQKSHRLRYHVLARIDEVRNETGDDLAPHILPLLEMAERQREEEARLESEIREFIENEPVCRLFLGVPGVGPITAASFYTAIEDPTRFSRSSDVGAYFGLTPRIHISGATELRGKITKAGNTLTRYHLVQAANAMLHTSKSDSALKAWGLDRSASIGRHKGRIALARKLATVLFCMWRDNAAFEPYPPGAVLEVKTNPLGTLEGRRCFETPSNDVGGESHSVASVVGFEASSHLSAALTEKQRNRDARIQKELELVRRFSDAGIGVAEIVREASLSRSTVYRRLNELKELGLAPA

SEQ ID NO: 188301 - protein, 368 aa, unidentified
MKEVTTRYVGLDVHKATISIAVADDGVAPVLFGTIANEATAVHKAVSQLKRGGKLVSAYEAGPTGYGLHRQLTQLGVDCVVVAPALIPRRAGDRVKTDKRDAIALARLLRSGDLTPVWVPGQQDEALRDLVRSRFDAKDDLRRAMHRLAKFLLRQSIQAPPGIKPWSARHLQWLETLRLDHPTSQLVFQDYRVAVHAARERVRRLEADLERCAEQSPRLGTILALQVLRGVAFLSAVTIVAEVGDFRRFPNAPRFMSFTGLTVSEHSSGQSRRQGRITRAGNRYLRHILVQAAHNARFAPSLEGELKRRLKDVPADLVALSVTAQNRLHRRYRHLDRRIGRHKAVTAVGRELAGFVWAIGQRMEASAA

SEQ ID NO: 188302 - protein, 322 aa, unidentified
MHSENIAAYIGLDVHKETLAVAIAAPERLGEVRYYGTINNEAQAVRRLFQKLQGLYGNILSCYEAGPCGFGLYHQLTAMNIKCQVIAPSRIPKSPTDRIKNDHRDAISLARLLRAGELTPVWIPDLTHEAMRDLIRARAAAKRDSRVARQRILSMLLRTDKRYAGKHWTGKHRTWLANQSFSQPSQQIAFQHYCQSLEQIEDRILQLDQEISRLLPEWSLCNLVCQLQALKGVGQLIAITLVAELGDFSRFSNPKQLMAFLGLVPGEYSSGNSIRPRGITKVGNSELRRLLYEAAWSYRTPAKVGAWLIYYRPVNRPGNPGD

SEQ ID NO: 188303 - protein, 341 aa, unidentified
MNTTLIAVDLAKEVFELACANRAWRIIDRKRLNRKQFHRFCTQQPPVEFVLEACGTAHHWARELQAMGHRVRLLPAQYIRAYVRRSKTDRHDAAAIVEAARNREIRPVPVKSVDQQCIQTLHRMRSQWMATRTARINALRGLLRELGHPLPLGAANAIKGARDCLEKLPQTIQPAVAALLDEIHDLEDRASGIEAHLKQHANQSETVQRLLTVPGIGLLTATALNAAAGDAGHFHNGRHLAAWLGLTPREYSSGHHRFLGRISKRGDSYVRMLLVHGARAVLNRAKQLSQAGQSLSRLQQWVVTLERRVGHNKAAVALANKLARIAWAVWKNNTVFVAATA

SEQ ID NO: 188304 - protein, 360 aa, unidentified
MHATTVAVDLAKSVFQIVVADDQWRIIDTQRLTRSQFERWFVNRSVGLVVMEACGSAHHWARWLGDLGIEVSLLPAQYVRAYVRRNKTDATDAAALLEAARASDIRPVRVKSVEQQALQGLHRIRSLWMGTRTSRINALRGFCREFGITIAQGARTGVETISRVLADPRSAVPELIRHTASMLLEEIRLLETRIAQVERELASVARDSPACTLLLSVPGIGLLTATALVAATSGDVTHFQDARHFSSWFGLTPREYSSGSSRYLGRISKKGDRYLRMLLTHGARSVLRAAKVAQGAGKELQGVRRWALDVQARSNHNKATCALANKLARICYATLRDHKPFDEAARLNRKERRQSFAMPD

SEQ ID NO: 188305 - protein, 415 aa, unidentified
MNGKEFVALMSLDWADRKHVGCLQQAGREEVEFFELEQKALAIAEWVNKLRARFNGGRIAIAVEQRRGPLVYALMKYEIFVIFPLNTTAVKNYRKALRSSGAKDDFSDARLQLLFLEKHIHQLRRLDPDSLRTRQLRLLVEGRRNLVDRCSGLGNQLTALLKEYYPTALEVVGDLKTSLACDFLTKYPSLKKAQALKPEQLRAFYQKRNCRSRKAIENRLRILQQAAPLIEEKSILETYELMSHSLVAQMRLLLNAISSFDQKIEILFQGHPDFEIYKSFPSAGSALAPRLAVVFGEDRTRYDNASAISTFSGVAPVRIQSGQKKIVCFRWCAPKFIRQSLVEFSRLTIKKSHWAKAFYWHLRSRGKRHHAAVRALAFKWIRILYRCWKNRICYDESIYLDALRRRNSPLIKLLT

SEQ ID NO: 188306 - protein, 343 aa, unidentified
MAYFAGLDVSVKETSVCIVDDAGKIVREARVASEPEALLQVLTNTIYRFKRVGLEAGPLSQWLYSVLAEAGLPVICVETRHMRAMLKVQINKTDRNDARGVAQMMRVGLYRPVHVKTLRSQKLRMLLTHRKLLQSKAIAIENDLRATLRNFGLKVGMVGTVKFEARIKELVENLPDLAVLVEPLLIVRRVVREQIGILHRRLLAIVRDDDVCRRLMTIPGVGPVVALTYRVTVDVPARFRNSKAVGAVFGLTPSKYQSGQNDRTGGISRCGDEMMRMMLYEAAQSMLVRSAKWSWLKAWAMKIARHRGMKKAIVALARRLAVIMHRVWVDGTEFRWTREVAAA

SEQ ID NO: 188307 - protein, 401 aa, unidentified
MKMLTGGIDIGSESHHVIIMDGTGKVLYDRKVAHKFSKFLEAIGEFRGIEEKQRGKITFAIEGKNGYGAPFDRMLIENGFKLYNVDNLKLRRFRDVFGAEWRNDRRDAKMLAKMLKLKDHMDAEEEKAFIAVEKTPAVHEKLRILSRHQQSLIDEKVRIQNRLKKRLLEVCPDILVYGDTDGKKLLQILKKYPDFSRYKKITLGALLKIETIGKKTAVSIVEGLRNIQYVEELAGIYKTIISSYCRRILELKEEIEMLDRELEETGEKSAEVMKLKSMMGVGTKLSSRLTGEIGDIRRFNRESQLAVYCGVACIDDDSGKSKKTKAVYKANRICKATMIEIAGCTIRYVQESKAYYDKKRAEGKDHNHALRCLARQLIKVIFKMLTENREYIYKEALKKAA

SEQ ID NO: 188308 - protein, 393 aa, unidentified
MVVGQPDTAEREFSRCRSGSTSQELAVLAEWLHDLGVTTVVMESTAQYWKPVWAALEGEFTLLLAQARSNPAPHGRKSDYADAIRLMKRLWADDLRLSYVPEAEQRSWRLLTRTRVQHTREITRLRNRIEGLLEECRIKISGLLSDLLGASGRRMLRALIAGKTTDPQQLARLADKRLRAAPEELEQALNGQVGPVHRLLLGQLLDEIELLEEHLAQLDQCLLDRLEGQRDAIRRLCGVPGIGIEAAQLIVAELGPRAATFPTASHAASWVGVCPGRNESAGHSTSDASPKGNRQMRRILNQCAWAAVRSKDTYWQQLFRRLTPKLGVNKALWAVAHRLLRVIWLVLHEGTEYRERGPCAPDPERLRRRIERMLYELRKRGVHFQLTALAPST

SEQ ID NO: 188309 - protein, 318 aa, unidentified
MTAFVGIDIASQKFDVAVLYGKNSYKCSSFSNSTQGFIAFTNWLQVYGEIHICMEATGAYSTPLATFLDEISVPVSVENPARIHAFAQRELTRNKTDKSDAKMIARYCRLYHPPLWKPAPLYIRQLLSLMSRLDNLKEMLRMEQNRLLTADVIITVSLQENINSLSRQIVVIQQAVKEHINANKELKKNKALLTSIPGVGDILSCMFLAYVGDISKFSNNKKLVAWVGLNSMQQESGLWKGRSKISKKGNIELRKALYMPAVAALTHNPILIDLKNRLKVKNKSGKSIVCAGMKKLLQLMYGVLKSGVPFDAKKSFAN

SEQ ID NO: 188310 - protein, 328 aa, unidentified
MNLAGIDIANESFEICLRCADKVAHRCFNNTPAGHRQAIRWLRSRSQTARVCLEATGIYHLQLALALTQADGIELMVVNPRASRRFAEAQMRRAKTDKVDAAVLLSYLERMPFRPWQAPDAEVLELQSLAHRLSQLQKEITREQARLHAAERAGPHTRLVQKDIRAHIKQLKARLERFEAQAIDWIRQHEQLSENLELIDTVPGFAEHSAFKVLAEVSPLADDMTAPQWVAQAGLDPRPTESGTSVYTPRRISKQGNAKLRAALFFPAMVAIQHDANVRAFYQARLDRGARPRQAQVAVMRKLLHAIWGILKRQQPWDGERFYRLNTA

SEQ ID NO: 188311 - protein, 312 aa, unidentified
MAQMVKTAGIDVSKLWLDVEIWPTREDIRIGRDAAGLAVLIGWLSEHRVMRVGLEASGGYEREVIDRLQAAGFEVAVLNALRVRRFAEAKGRLAKNDRVDARTVAQFTAVMVEEVPPQRRRDLDALTELLTYRRQLKGWCTDCTNQLEHLRDAMLRKAIVQRQASFERDVAKLDKQVADLLAEHDDWNALARRLRTVPGVGPVVSASLIALLPELGTLSRRGIASLVGLAPFDDDSGGRRGERHIRGGRKTVRDALYMAALSAKQHNPRIAAFAKRLAGKEAKVIITACMRKLLVMLNAMVRDGTDWRAEAA

SEQ ID NO: 188312 - protein, 373 aa, unidentified
MQNASFPLHDAVDVFIGVDVGKGHHHAVALDRNGRRLYHKARPNDEAQLRALINELKTHGQLLFVVDQLATIGALPLAVAQDAGALVAYLPGLAMRRIADLHAGEAKTDARDAAVIAEAARSMPHTLRSLRLADEPLAELTMLCGFDDDLAEQVNQTSNRIRALLTQIHPALERVLGPRLDHPAVLDLIERYPSPAALASAGQKTLANRLIELAPRIGKNLAADIAQALTEQTVVVPGTHAATLVMPRLGQQLAALRKQRDEIATEVERLVQSHPLWPVLSSMPGVGLRTAARRLTEVAHKPFASAAHLAAYAGLAPVTRRSGSSIRGEPPLDAATRYSNAPCFSRPLPLCEIPSRGTTTVEKSSRASATTRH

SEQ ID NO: 188313 - protein, 371 aa, unidentified
MGDNSEAFVAFDTSKLRNSVAIAEAGRSGDVRFFGEIDNTPAATEKLVRKLAAKYSRLTFCYEAGPTGYGLYRQIKTLEHDCVVAAPSLIPKKPGDRVKTNRRDALNLAKLLRAGELTAVWVPDERHEAVRDLVRARGAAVDDLKSKRQQVLSQLLRLGRHYPGKKTWTRAHMVWLMSQKLAHREQRIAFEEMLLAMRQAQERVVRLDQAIAAAVPDWSLAKVVTALMALRGLDLVAATIFLAEIGDLSRFASARELMGYLGLVPSEASTGEQISRGRITKAGNHRARRILVECSWSYRHPPRVGKKKLDKIAAAPREVQEIAWKAQARLTTRYRALTRRGKRPTVVVTAIARELAGFIWAVGRAADLPAM

SEQ ID NO: 188314 - protein, 431 aa, unidentified
METRLNQRLLEITNATLIVGVDIAKQVQWARFTDYRGVEIGKAIRFENDRAGFESIVARIENIRNNKAMRTSFDKVLIGMEPTGHYWKPLAHYFIKAGYRVVGVNPYHTKKAKELDDNSPTKSDKKDALTIARLVKDGRYFDPYLPEDIYAELRVLTNGRVSIMKRNNAVKNTITAILDEYFPEIFKVFKNPLTGKASRQILKSCPFPSLILSLSEEDILAEIKKAIKKTVGIKKVRELIEASKDSIGVDYGLVSANQRLSQLLDELEMVEKHLSHTEASMEQLLSATDYGESMLSIKGIGVVTAASFLGEVGDPLRFSDARQIANYAGLNLTEDSSGKSKSGTVISKRGRSQLRSLLYQMAFTMVGQNVEMKELHKYLTSRAKNPLKKKQSLVVIAKKIITVIYSLLKKQAMYNPALALGTVRREMLKVA

SEQ ID NO: 188315 - protein, 405 aa, unidentified
MKELLVGVDWSQSHYDIAIVAPNGALLTQFRIAKTAPEFSFLAEKIEQFGVPAAHCHIGLETAHNILIDFLWSRQYAAFVIAPSIVKSSRGRFGNSGAYTDAKDAHLIADLLRTDRERFAPWRPDSELLMRLKTKLGHVDYLTKLITGQTNHLRSILLRVYPQVLQAFNDLHVSIGLHLLVVCPTADALATLSYPEFAAFCRSQHCHRLDWISTWYSRLQQPQPPVQSTLAAAYQDEIVFMAQQLISLIGEKKHALQQVQALYQQHPDRPIFASLPGTGDLLQPKLLVMFGEDRARFPSPQDLRALAGTCPVTKQSGKRRGIQFRRACNHSFRETAQQLAVASVQQVDWAAAYFTAALARGLRKNHAYRCLANRWLGIVWKLWQTHQLYDEAYHLQQIHQQRRPT

SEQ ID NO: 188316 - protein, 412 aa, unidentified
MKVVHRICCGIDVHAKMLVACLILTNGQKEIRTFSTMTDDLLRLRDWLQTANCTHVAIESTGVYWKPVFNILEDALQVILINPEHARALRGRKTDVKDAEWLADLLRHGLLKPSFIPPPEIRELRELTRYRESLVRQQSAVANRIQKVIESGNIKLGQVASDALGVSGRAILWALAKGETDPVKLAALARGQLKEKELLLRRALHGRLTPNQRFVLREALQLWEQLEAADRRVTEEIDGYLQARPKLAQARDHLDTIPGLGPRAAEIIVAEIGVEMKANFESDAHLASWAGICPGNKRSGGKRLSGRTRKGNTYLRAALVQAAWGASMKKNCYLSSQFHRLVKRLGRKKALVAVGHSLLVIIYHVLERDQTYTELGGDYFDRQHVELQREYFIRRLQMLGLKVSVEELPIAA

SEQ ID NO: 188317 - protein, 396 aa, unidentified
MKAYVGIDLAQETFTATFLASDDQGQERQVTSTFAMTGEGWQAFCQELESFAPSREQTLIGLESSGPYTVLLLAHLLSLPYSVYVLNPTLIRRFRQAQSMRPLKTDPVDANTIARFLQQAPLPKAVSEVDEIGLLAREYEAISQEIAALKNSIRQHVHVLFPELARQVHLFSQAMLNLLEAYPNAQAIAQAPQESLTGLLQAKGRGRAPALTPDQLRHLAQSSFGIPNPPRQRVLQSQIRRLRFLQTEQKNLEHQLLDLVQGWQEQAFKTLHSIKGMGNITTATFLAEAGPLCRFPSAKSLVAYAGLDPSVHESGRYRGKSRLSKRGNRHLRRILYLIAQKLTCTTERFRQAYAHCRQQGRSHREALVIVARKILITFYVMLSRGQPFQDLPIGDS

SEQ ID NO: 188318 - protein, 322 aa, unidentified
MEMLSFGGIDVSKDRLDITVLPDEQCSSVSNDAAGWAELIEQLRGSSITAIGVEASGGYERGVVRALLAAGMSVRQINPFKLRQFAKASGILAKNDRLDARMIASFVAIMPTRPAQRQTPMIEQLAAMLTVRRQLSDHKVATENASRLLEGAMLQRLSRRRVAVLTADIDLLDQRLVEIVTADPALAHRFWLLTSMPGVGAVLACTLIALLPELGQMSRKQVAALVGLAPYDFDSGKLKGRRCIWGGRARVRHVLYMAALSASNWNPALKAFHDRLAATGKKPKVVIVAVMRKMITTLNAMLRDGTTWVDRYSGRRSAATAR

SEQ ID NO: 188319 - protein, 468 aa, unidentified
MNEVRLGIDVACRADHWASLADERGEFIWSSWKFRTTTVDLERLWAKIPDGASVTVILEPTRNAWVPLSAWLQARGATVILVPPEQSADLRDYYNKHTKTDRLDSRVLARLPMLHPEGLRGIDNLGPAQSLRRAVRHRFSLVKRRSAASLRLEALVELLGPGWADSLGSATASKTALVILEKYADPRALKRLGRGRLSVLLIRSSSGLWREDKADELLAMANETLELWSGGGIDFAELAHDIASEVRVFRSLDDEITAADKRIAVLYDEADPKGIVVSAPGIGPVLSAAILANAGDFNRFANLAGVRSFTGFVPKIDQSGLVAGHKGMTKAGDAGLRQALYLAADHARHIDPTLAQRYYRLVMVEGKHHNSALCSVASVLITRIAASWRKGELYQLRDEDGDVITEAEGKAACTDRFKIDPKVRAARRRITSAKSFKNRVAGRGRKESARKVAPATDPPRKEASENVA

SEQ ID NO: 188320 - protein, 325 aa, unidentified
MDVLGIDLAKATLVVVLLVAERQQRAEFANTPAGHAKLLNWLAKRCAARVHACLEATGTYGDDLAQALYDAGHTVSVVNPARIAAYATVQAARHKTDQADAALIARYCQREQPSAWQPPAPEFRELRALVRHLDTLQQQRQAEQNRLEAGGHPAAVTQAIQAHLTFLTEQIRSVEQQIEAHFDQHPDLKRQRELLDSIKGIAVRTATRLLAELGDWQRFANARAVVAYVGLNPRQYRSGSSVQRRTRLSKAGNAAVRAALYFPAIVAKQHNPLVQGLCARLTARGLCPKAVIGAAMRKLLQIAYGVLKSGRPFDPMYTSSAAAQG

SEQ ID NO: 188321 - protein, 339 aa, unidentified
MPLYSGIDLHSNNLTAAIMDEAGKRILKKRLVNDREVVLATLEPYRTELVGIVVESTYNWYWLVDALMDHGYPVHLANASAIQQYSGLKYLDDNHDAFWLANLLRLGTLKEGYIYPKQDRPLRDLLRKRFHLVKLRTSLIISLKNILSRNFGLQMRSSRIKNESLDTFISGLPEGDNVILVVRTSKASIDFLTVQIDEIESAVLKQAKNKPFYAKLLALPGVGKILALTIQLETGPVDRFPKVGNYASYCRKVESRWLSNEKTKGRGNAKNGNKYLAWAFSEAAEYARRFDPASRKFYNRKLNQGNTAMAHHALGHKLARAAYYIMRDNVPFEETRMFA

SEQ ID NO: 188322 - protein, 366 aa, unidentified
MKKTSTVRVNKNTIFKGHKLTIGLDLGDRWSCYCVLDEAGEIILEQKVAMTPEAMKQTFSKIPQGLIALETGTHSPWVSRLLTELGYKVIVAHAQKVQLITKSNRKDARHDARTLARLARIDPELLGPVRHRSAQAQIHLTVIRARAELVRARTALVNAARGLVKSYGQRLPKCGTRQVSRELGAGLHAELREVLEPLLKEIESLNERIQEYEVRMEEIAKDSYPQVELRKQVKGVGTQMALTYVLTLEDPHRFPKSREVGCFLGLRPGRRDSGESQPQMRISKEGDRYLRTMLVQGAHYILGPFGEDSDLRRWGLKLAARGGKNAKKRAVVAVGRKLAVLLHRLWVSAEVYEPLRNSQKAMRAAA

SEQ ID NO: 188323 - protein, 405 aa, unidentified
MDIAKKKHYACFVDERGRVLKKPFPVLQSREGLEWLYQCIVEAMKEFGKTEVIVGIEPTGHYWLNLAYFLDEKGIPLVMTNPMHVKRSKELDDNLPTKHDAKDALVIARLVKDGRFSYPRILKGMEAELRVGATFRSKLVEEQGAIRNQMIRWLDRYFPEFSQVFPSFEKMALAVLEYTPFPSDLAGKELEEVLALYRQSEGLQSPQKPKAKKLMELAQHSIGVTEGQQMARIEIATLVRRYCQLEEEIEALTEQLIELVQTSVEYEWLKTVPGLGDATIVELLSEIGSFSHYQDPRQLIKLAGLTLREHSSGQHKGQKRISKRGRRRLRALLFRVMMPMIRHNEAFRQLHEYYTTRPDNPLRKKQSIVVLCGKLLKVLHAVCTKRQAFDVKRMMWDIFGLETAA

SEQ ID NO: 188324 - protein, 408 aa, unidentified
MTQYYLGVDWADEFHQVWVSDPDGKKVIEKKVVENVEGLAEFGRWLDERRAQQIELWASIEKPHGRIVDFLLDHGVVVYPVNPKALDRARDRFRMSQSKSDGFDAYVLAQFLRTDHGHLRALKPNSDPAQELKLLTRDQQRLVRQKTRLLNQLTTTLKEYYPQPLEVFSDLESNIALDFLKQYPTPHDLSKLTRRQWNRFAKREHHLGEERCKELWEKLNQPQLEVPEHVVRAKARLLEVVVVQLKTLRDAVESYNERVRSFFACMPAAELVKALPGAKTGTIVATLWAELGDAKDRWESFRHLQAEAGVVPVTKASGKSRVVQFRFSCNKVMRHAAYWLAFVSLNRTEWANHYYRYQRAKGHSHHQALRALGAKWLKIIFVMWRDHKPYDENYHLANIARQQMRQAA

SEQ ID NO: 188325 - protein, 415 aa, unidentified
MFKIIRSKCCGLDVHKTWIYACIGIADSNSRVEYKQARFSSFSKGLKELSEWLAKYECTEVCMESSGKYWIPVFNVLETTCDVTLAHPKYTKPQKGNKTDRKDAMWICDLFMCGMIKRSFIPPADIRELRELIRYRTKLTNMITGEKNRALNCLTVSNLKLDDVFSDVFGKSSSSIIQFMLDNPGVYFDVKPFIDPRCKTPIEEIQAAVDGALSPAHAVKLRECMSHIDQLESHKHMVEQDIIRLSAPYEQELELIRTVPGFDKNPMTAITILSEIGADMSVFPTAKHLVSWAGCCPRNDQSAKKIKSTRISKAGSCLKPLLVQVANALIKSKNHPEFKERYRRLKARRGHKKAIIAICRMLLTAIWNVLSKAEPYSPAGYLSDHQVSEVRRLTQKQALNLLKSRGYVITDEVPA

SEQ ID NO: 188326 - protein, 326 aa, unidentified
MEHELHYIGIDTAKEKLDVDVLRPDGRHRTKKFANTTKGHDELVSWLKGHKIDHAHICIEATGTYMEPVAECLYDAGYIVSVINPALGKAFAQSEGLRNKTDTVDARMLAEFCRQKRPAAWEAPHPLERALRALVVRHQALTDMHTQELNRTETAREVQRPSIDAHLLWLEAELKRLEKQIKDLTDDDPDMKHRRKLLESIPGIGEKTSAVLLAYIGLKDRFAHARQFAAFAGLTPRRYESGSSVRGASRLSKAGHVSLRRALYMPAMIATSKTEWGRAFRDRLAANGKKGKVILGAMMRKLAQVAYGVLKSGVPFDASRHNPVAA

SEQ ID NO: 188327 - protein, 312 aa, unidentified
MAKIICGVDVSSKTLDARIGQDGPSQSFDRTPEGIRALTAFCKSHDVEFVAMEATGGYEKLPFSLLWLAGVPCAILNPRSVRRFAEAMGTFEKTDDIDTGVIAHFAEVKRIVPQTPASATQQELEALVTRLRQVTDLRTSQTNQRRLVTDAGVLEGIDELVALLNRQIRALEAKIAQSIDADPLWKALDAAFRSIKGVADRTVARLMADLPEIGTISGKKAAKLVGLAPLANDSGKVKGKRSIFGGRANVRSILFVVAELVRRHEPDFSKFHQTLTAAGKPKKAIRVALARKLLVRLNAKARDARKELGLAV

SEQ ID NO: 188328 - protein, 428 aa, unidentified
MRHIGLDVHQGFCEVAIREHGKTRSAGRVASDRDALELFAGSLGPTDEVAMEATGPAMEIARIITPHVARVVVANAQEVRAISHARVKSDRFDARTLADLLAAGMLAPVWVPDGETQVLRRRVARRAALVRQRTRAKNEIHATLARCLLGRSPFSDLFGKKGRAWLGEQQLGVEEAETVSGCLRQIDFLDVEVAQIDRKLSEWAVSSEDARRLMSIPGVSAGVAAALMAAIGDISRFGSPRQLVAYLGLDPKVRQSGDEPARHGRISKRGNAQARSVLVEAAWVTIRQPGPLHAFGERIRARKGAQVAAVAVARKLACLSWQLLTKGEDYAFARPSLVRSKLRRLELDAGAASLPTRHGAQRISANAAEKAAERQLIEHAEAAYRRLIADWKATGPAKTGGGATRGRAPSRPSKRQAARQATAQTPAL

SEQ ID NO: 188329 - protein, 411 aa, unidentified
MEQIHDRVAGLDVHRDQVTVCVRTPGLRGGVHTEKARFATTTGELAALAGWLAGRGVPLVAMEATGVYWKPVYYALEGRFEVWLCNAHHVKTVPGRKTDMSDAEWLADVAAHGMVRPSFVPPPPIRELRELTRYRKTQAKVRAHEIARLEKVLQDAGIKLTSVASRVLTQSGRAMIEALIAGQRDPAALAALAKGKLRPKIPQLTAALDGHFGAHHAVAAARILAHLDFLDAAVAELDAQIGARVAAGYRSAARLLRDIPGIDHRNAEVIIAETGADMSRFPSPAHLASWAGLCPGNHESAGKRRRVATTPGNPWLRDALIESARAAAWTKGSYFGAQYRQIARRRGPNKAAVAVAHSLLDVIWHMLTTGEVFTDLGEDYYASCHDKEQQARRLVARLQKLDYTVEVTAAG

SEQ ID NO: 188330 - protein, 329 aa, unidentified
MGQEKMSQTLSPVVDQVTIGIDIGKQRLDVHSLPDGTSQCFPNDPVGIAALTCWASERQPTRILFEATGAYHRALETTLRQAGLPAVKLNPWRVRRFAEAIGTRAKTDPVDAAVLAQFGVSLRPSIPPPSDAATDQLRELLSARLALIKDRTAARQRGMTRTLRLLARQGQDRLRHVTAQIKAIDQACLALIASQPRLQARFDILTSIPGIGPVLAITLLALMPELGTLDAKAVASLAGLAPMDRQSGNWKGRSFIQGGRKPVRDALYMPALVAIRFNPPLKATYEAMITAGKPAKLAITAIMRRLLILANALLRDNRRWTLERNAPAA

SEQ ID NO: 188331 - protein, 431 aa, unidentified
MLGGNQEKLMSQNQPEIQYAAFVSIDWADQKHVWSLQEANSSTREHGEVGHMPEAIEAWIAQMSQRFAGRPMAVAVEQSRGALVFLLSKYEQLHIFPVPPAMTANLRKAFYSSGAKTDPADTDLLQDVLQMHREKLRRLSPDTEATRLIQNLVEERRKLVDEKTAQSNRLEAHLKIYFPQIPQWFGDVDSPLVCALLERWSALEALQKARPDTLRSFFRKHHCRKEELIESRIKAIGEAMPALKDRAVVEAQLAAVKVLVQVIQVLHQGIEDFNRQIQEAAEAHPDFFIFESLPGAGAVMAPRLLAAFGSQRERYRNAAEVQTLSGIAPVTESSGKSSWIHFRFACSKFVRQSFHEWAAQSIPRSQWARAYYELQCRRGKKHHAAVRALAFKWIRIIFRCWKERVAYDEKVYLAALAQHNSPLLAATKIAL

SEQ ID NO: 188332 - protein, 420 aa, unidentified
MGRRVSGVSYYCGIDWAEKHLDFAVINNKGDTLVEGRIGHDPAGVDELFRAFRTVARRRKAVLVGIETDRGAVVAALRAADQQVVVLCPSKVVRYRGRRTVHGGKSDRADARLLAQVLRWGGDELRPLPASSPAALAIREVGRAQIEAARRQWTTASQVRGLLREFHAPASGAWAGRQGGPSGLFRPEARAVLAVAPTPAHACRLSRRQLREALEASGRKRLLDDEVDRLYDRFRAPALRHPTAVEDAMGERLLTLLRVLNEQIECTDDLTVRLTDRFYAHPHAPIYASLPGLGPVLGGRLLGEFGDDLGRFATARDRTTWAGASPITIASGATHVVRRRRHANRVLMGAAFSWPFATLTRSPGARAHYDRRRAAGDRHATALRNLFRRLVSQLHYCLKSGELYDEARAYPAQSDREGDR

SEQ ID NO: 188333 - protein, 421 aa, unidentified
MQKIKPKSIKEVNQKILIAAIDGGKDKHYGYFRCSDGTEGKSLPFWNNGRGFQEFWERISSAANARGLEEIVVGFESTGPYLEPLVQFLRNKKIVRLVQVNPMHTKRLKELPGNSPLKTDRKDPKVIADIIELGHALTVVIPEGPAAELRRLVQGRERTIESRTRLFNQLQCLLAIIFPEFLQVMRDVTTASAQHLLRNHPTPQGIVSLGESALASLLRKVSRGKLREDRARALFEAANESVGVRDGRDSMLLEIGLMLDMIATSDRFLEGLEAEMIRYLEQIPYSHLILSLKGIGPVTAAGLIGEVGDFTKFRTIAEVLKLAGLDLYEVSSGKHRGKLRISKRGRPLIRKLLYLAALSAVRKGGVMYEWYQRALGRGMIKTKALVAVSRKLLGIIYALVRDHSVYVENYMKQKTILQEAA

SEQ ID NO: 188334 - protein, 401 aa, unidentified
MVSDFRKGRYNLMKIFVGIDVAKLNHFAAAISSDGEILLEPFKFTNDADGFQLLISKLESFDKDSIIIGLESTAHYGDNLVRYLVAEFYQVCVLNPIKTCQMRKNNVRKTKTDKVDTFVIAKTLMMQDDLRFITFFDLDMMDLKALGRFRQKTIKQRTRLKIQLTTYVDQVFPEIQYFFKSGLHQHAVYALLKEAPSPNEIASMHMTHLANLLKVNSHGHFTKEQAKELRVLAQKSVGANDSAISIQITQTIQQIELLDSQLEKIEAEMTDIMKFNDSVIMTIPGIGYINGGMILGEIGDIHRFSNPNKLLAFAGLDSSVYQSGNFQAKTTRMSKRGSRVLRYALVNAAWNVVRNNATFKAYYDAKRAEGRSHYNALGHCSGKLVRVIWKMLTDNVEFNLK

SEQ ID NO: 188335 - protein, 419 aa, unidentified
MNIASVGIDLGKTTFHLVALDDHSNVVVRKKFSRKQLLAYTANLPPSRIGIEACSGAHFIGTALRDQGHDVGLIPAQFVKPFVKSNKNDFLDAEAIAEAVSRQNMRFVPIKSDDQLDLQALHRVRDRLVHRRTAVINQIRGFLLERGITFAKGPAKLGNNLANVLEDADQNLTPCMRMLLDRVWQEWKQLEVDITALSQQIERISNEDAACQRLRQIPGVGPLVSTATVAAIGNGAAFRKGRDFAAWLGLVPKQHSTGGKAKLYGISKRGNIRSPRSRRNASCAEGSSHDFHNESFAGDVTQVGTIVRDFRVYATEGLAHRTQDRGSLLFAVGFFHRRIQSLVRWLERRPVGPVAHQHEVRAFAAVRQLVPAAASSLRIVGLLETLVDFFHRFHEVVDSIRFEHEMGNGDHGGRRKGFW

SEQ ID NO: 188336 - protein, 444 aa, unidentified
MAGTLHLGIDVSMAENTCCFLLQNGTEARRRLTVPNNLPGTNQLVEELLRLMERHHLDRLMVGLEATNLYWWHLACFLNSSPQLAPFEPRVYAFNPRLIKGFKKALSDTPKSDVNDAYAIAERLRFGHLPAPFIPNELYQPLQRLTRFRCHLTHQITREKSYFLSFLFLKFSEYQNLDPFSNTFGAASQAVLTDYLTVDEIVAAPLEELVGLLVQEGRNRFPSPDAVATVIKRAANDSYRPHPSLNEPLNLILSTTLENIRTLTRQVKKLDQAIERELQKFPNPLISVPGLGPVFVAGIMAEIQDIHRFPDHPAVAKFAGLFWRTSESGSFQAEETSLGKSGNAYLRYYLIEAANSVRMHNAEYARYYRTKYDESTKHKHKRALVLTARKLVRMVDAMLRHNQLYVPRPEDSAQEVNDRPMVKARPAKQHHYRQVESGSPALCA

SEQ ID NO: 188337 - protein, 458 aa, unidentified
MQRNRSKPKTQRTMPMVHANAAAIDIGATMHMAAVRADRTSEPVRSFGTFTTDLHRLVDWFTECGVETVVMESTSVYWIPIFELLDARGFTVFLVNARDAKHVPGRKTDVSDAQWLQRLHSYGLLRASFRPKGQIAELRAYMRQRERLLEYGASHIQHMQKALTEMNLQLHHVVADITGATGLRIIRAILAGERDPKVLARLRHYQCHASADTIEKALTGSYRSEHLFALEQALALYGVYQEKASACDIRIEAVLKELSIGRGPRSDPLPSPRRHRATQANGLAFDVRAALFALLGKDLTQINGLGPYLSLKKLIAECGDDLSAWPSAKHFTSWLLAPSNKISGGKVLSSRTRRCGNRASALLRLAAVTVGRTDTALGAFYRRLSARIGKTKAITATARKIAALFYNALRHGMEYVDPGASFYETRYRARVVDNLHRRAKAFGFVLQPIEPTPSSVVS

SEQ ID NO: 188338 - protein, 343 aa, unidentified
MQSISTIGLDIAKSVFQVHGVDAAGQVVVRRQLRRRYVLAFFQKLPPCLVGIEACASSHHWSRELQALGHTVRLMPPAYVKPYVKRQKNDSTDAEAICEAVTRPNMRFVPTKTVEQQSCLMLHRARHLFIRQQTAVINSIRAYLAEFGIVAPVGRRGVEQLLEVVADTADYRLTEVARACLAALGSQLRALKAQILEFDRRIIAWHRSSVTSKRLDAIPGVGPALATALVASIADPKAFRSGRDFSAWVGLVPKQNSSGGKDKLGSISKQGDRYLRSLFTAGALAVIRYAKIHGTDHRPWLTRLLARRPTKVAAIALANKLARMAWAMMARNERYNEPAALAA

SEQ ID NO: 188339 - protein, 371 aa, unidentified
MSEPSTFVGMDVHRRDIAVAMLIGDRRDPVEWRVANEQSAVRRLGQRLRREGGSQVHCVYEAGPCGYALQRQLQGLGLACDVVAPSMIPIRPGDRIKTDRRDARKLAELARGRLLTIVRPPSEDEEAVRDVCRGRDDVRVDLMRARHRLGKFLLRRGRVFERPAWSQAHRWWLGQQTFERRAEQIMFEDYLLAVEQAQARRHSLELHLEDLARGPRYTEAVGWLRCFRGIDTITAITLLAELHDFRRFRSPSQLMAYLGLVPSEYSSGPQKRRGGITRTGNRHVRRLLIEAAWHNRHKPSVSVALAERRHGQPASIIALADKAQLRLRRRYRRMEGRGKHPTKIVVAVARELVGDLWVALTPHARALTRNS

SEQ ID NO: 188340 - protein, 350 aa, unidentified
MSVNHPNKQLILGVDTHLDLHVAVLINTLGQVICTAEFATNSTGYVKLLRWCQSFGHLTKAGVEGTGTYGAGLSRFLSNHQITVYEVNRPNRARRRLRGKSDPTDAENAARAVLADEAKAIPKTQNGSVEAMRFLLIARRSAVKARTQAINQIRAILITAPDDIRLKYLKSSQSACIEGCVNMTAMDGSILLETLSISLNLLAKRWLNLTEELRKIDKNLKKITRTTAPTLMSQYGVGSYVAATLLVTAGDNPERLKKESSFAALCGVSPIEASSGKTVRHRLNRGGSRIANNAIWTITLIRMRSDPCTQQYIARRTKEGMSLKEIQRCLKRYIIRGLFPIILNDLSLSA

SEQ ID NO: 188341 - protein, 349 aa, unidentified
MTILAIDLGKGKSVFCLFDTVTGEVQFGSVATTTRSLGALVERLHPERVAVEICPLAARVYDLAQSLKVPVQVADTTQDAWKWKNVKRKTDEDDALKLARLSALDQLNLVHMAAPAMRQWRKLVEARAALRTERTRCKNRIRALLLQEEQEWPAGKRGWTAQSLKGLAELAQPLDQCPPTDLWRGVLHLELQRLAELAATVQVLEAKLDELAQQDQRVELLQSIPGVGPRTAEVIVTALDDPRRFQNSRQVASYAGLTPRRFQSGQMDRSGRISKRGNRLLRWALNQAAWMAVRYNPWARAVFQRIGAGRKERRKLAIVAVMRKLLVIAWAMLRDRRAYRPGPVATAAA

SEQ ID NO: 188342 - protein, 346 aa, unidentified
MKEIKVIGLDLAKNVFQVHGMDATGGKVVGKKLKRGEVLNWFAQQPPVLVGMEACGGAHYWAHEISRFGHTVKMMAPQHVKPYVQGNKTDARDAAAIAEAAQRESVPTVAVRDLAGQQMQALHRVRDLWMKQRVALSNQTRGLLAEFGQVMPLGLARLKTEVALWQARDEPAMVVLKELITQLMTAIGELDTKISQIEVQITQLHRSNAASRLIETIPGVGLLTATAVVASFGECAQFPRARQFASCLGITPREHSSGGKQTLLGISKRGNPYIRRLLVHGARSVLTARMNKPAYADDWAVKLAIRRGHNIAAVALAAKNARRIWAMLHTGEVFRADHAQAKPACA

SEQ ID NO: 188343 - protein, 343 aa, unidentified
MYTVAVDLGKRKSQVAVFEEDGELHSEFKMANQKEGFVRLVRKLREPVQVVCETGNKCFWPADLMTEAGAEMHVANAYKVKLIAEARIKTDKVDARLLGQLLRAKFLPEVYVVPKEIRDWRELLRGRSFLVRIRTQLYNRIHAVLDRYGEEYETSQIHRAGAGAWIESLSLPEPIRGALGRYLEVIGKVTEHLKGFEKDLWEKVKTDEKARQIVGRLETIPGIGRLTALALYLELVDIKRFAEVKKLCGYIGIVPGVHQSGEVHRGGRLTKQGNALLRWMITEAAWSAVLTTAYYKQLHQRHARRIGASRAILPVARTLLAVVYRVWSEKKTYEELYIKPAAR

SEQ ID NO: 188344 - protein, 404 aa, unidentified
MEITPAFAGLDWSWQHHAICIVKEDGQRVEEFTVPHSKVGLAKISAQLRRHRVTRVGIERGDGPVVEHLSRAGFEVVVIAARQVKSLRARYGSAGNKDDRFDAFVLADALRTDAGRWHPVQPDSPETTALRMLVRARQDLVTHRIAVHNQLLAVLQHNFPGAIGLFSGLDIAISLKFLRRFPTEAKAAWISELRMAHWLKANGYCGRQTPAELTMHLRAAVTGRTGGPAAAAAEHIVLALVTLLNGLHTQIDELEAAIREALLAHPDGPIMTSLPRAGTIRAATLLAEIGDCRARYPDDAALASAAGVAPSTRQSGKYHNVAYRRGCNKQLRAALIDWAQDTPRANIWAEATYRAARARGCRHPHAARILARGWTRILWRCWHDRVPYDPAQHGRLKHLQQKAA

SEQ ID NO: 188345 - protein, 390 aa, unidentified
MKKNTTAKKSAKVLSKGKQTHLRQVAANQRLTVALDLGDRTSRYCVLDEAGEVVSEDQVPTTRAGLDSLLGRMPPSRVSLEVGTHSPWVSRHIAGMGHEVIVANPHKVKLITQSVKKNDRMDAEQLARLARVDPKLLSPIRHRGEEAQADLAVIRARAELVDTRTGLINCARGLAKPMGERLKPCDADQVKESLADGLGEALQKVIRPLLRSVEEISKQIGVYDQEIEEIGQRYPEKKVLTQVWGVGTLIALTYILTIEDPERFEHSRDVGPYLGLTRKQRDSGESQPELGISKAGDQLMRRLLVQGAQCILRQGAPDSDLKAWGMARLPNGGKKDGKKGSKKGSKATKKKAVVAIARKLAVLLHRLWVTGEVYDPQYNRKAAQAGKVAA

SEQ ID NO: 188346 - protein, 311 aa, unidentified
MATYVGIDIAKHSFDMALDSEPNVQRFDNDARGIRKCVKQLQQLKPDLIVMEPTGGYEKPLRKQLQARDLPVAVVNARKIREFARASGQLAKTDKLDAQIIARFAAVLQPAAQEPLDEHTEQIKALVSRRHQLVQRHTAETNRFEHAHDKAVARSIRAILKTIEKQIQNVDQQIRDHIDSHPELKRKAEQLESVPGIGETTASLLVTELPELGRLNRRQIAALVGVAPINRDSGTYRGKRFTGGGRRHLRARLFMPTLVAARHNPVIRAFYQRLIQNGKTKMTALIAAMRKLLTTLNTMLKKNETWKPKIT

SEQ ID NO: 188347 - protein, 439 aa, unidentified
MQILYSRCCGIDVHKDSVTACVLVYADGKEPEARRKEFQTHFKALGNLRFWLFAQKVTHVAMESTGVYWKPIWQALEGHFELILANPYQVKTVPGKKTDVRDSQWLAELLAHGLIKPSFVPPRATRELRDLTRYRVKLTEERNRVHNRIHKVLEDACVKLDTIASNILGATGRAIIQAIIAGQEHPDWLADHAKGTLRGKRPQLRLALRGRITDHHRLMLRELMEDLAFVEGKIKRLDTEIASKVDVETLARLATIPGIDLITAWTLLAELGSDMSVFASPRHAAAWAGLCPGNHESGGKRLSNRTRKGNRWLRRALCQSAWAATRRKNCYLAAFFYRKAGKHGIRKAIVATAHRLLLIAFCVPRDGTEYLELGDNYFDQLHPERTRNRLVRRLQRLGLDVILQPRATAPTPPTLPPTIRKRGRPCKCFERAIPCKHTS

SEQ ID NO: 188348 - protein, 334 aa, unidentified
MEKITTVGIDLAKNVFSLHGVDGAGRVTLRRTVRRDQLVEVVAGLSPCLIGMEACSGAHEWGRRFQEHGHTVRLMAPKFVAPYRKSGKNDGNDAEAICEAVSRPSMRFVPVKSAEQQALLAMHRVRQGFVVERTATINRLRGLLSEFGVVLALRSVTVRRQAAASAEKLPELARRAIGDLLEQLRVLDERIRGYDHEIQAQARLSEPAQRLMKIRGIGPTTALAIVVTVGNAREFKNGRQFAAWIGLTPSQYSTGGKPRLGHISKRGDAYLRNLLVQGARSVLNSASAHQDRMSRWILELQPRRGYYRTLVAIANKNARIAWALLAKNESLRSA

SEQ ID NO: 188349 - protein, 334 aa, unidentified
MAQTVTPAWLALDIGARTHAFAFDNGGRQGAGEVRNEPATLRAFLAEQIERAGTLRVIVEATGIYYLDVALIAADLGAEVMVINPKAAHNFGKALQQRSKTDALDAATLLEFLRRMPFVAWMPPRQALLELRYYGRYLTQLTEDRTAALNRLHALEHATVSPKALRKDLRRAIAGLDRRIERIRKEALVGVKTDDELLAAYRALVTVKGIAQVSAVSILAEVMVMPRTLSSRACVCHAGLDVRHHQSGTSVARPPRISKHGNKYLRRALYMPALSAIQHDPHARAFRERLLARGKKKMQALVAVMRKMLTAVWALVRQPATYDGSKLYSVAIEG

SEQ ID NO: 188350 - protein, 348 aa, unidentified
MALTIVEDTRAVTGGAGTHAGMHVGAALDLVGGLLGVGEFPATAAGYARLLGWLGGFGTVCLAGIEGTGSYGAGLARHVTAAGIRVVEVDRSDRQDRRRQGKSDPLDAVSAARAAQSGRARGAPKGRDGAVEAIRALMVAKRSARSERTQTINQARALIVTGPDDLRARFARHTAAGLVSELAALRPRPGATVGYATRIALRELGRRAEFLDGQLGRLDELIVPLVTARAPALLALHGVGPDTAALLLIAAGDHPHRLRSEAAWAHLCAVAPIPASSGKRTRHRLNPGGNREASHALWRIVITRMSSHAPTRAYVERRTKEGLSKKEIIRCLKRYAARQVYRHLRPAG

SEQ ID NO: 188351 - protein, 440 aa, unidentified
MRITYERVAGIDVHKKTVVVTRLRVTEEQQVEWETHTFGTTTPELLQAYDWLQEWECRQVALESTGDYWKPVYNLLEEDFEVWVVNAQHVKRVPGRKTDASDAEWLAELLAYGLLQPSFIPPKPQRALRELTRYRTRLIQERSRLVNRVQKLLEGANIKLASVATDLQGVSARAILAELAAGNTDAEALAELARGRLRNKIPELERALTGKVEPHHRFLLSQQLEHIDFLDEQVAEIEAEIERQLEAMSPLSEASETAEEATATPPTPAGSPISWSTAVSLLDTIPGINRQAAQIILAEIGVDMSVFPTAGHLCRWAGVAPGNNESGGKHYSGRTTKGNRVLKSTLVECAQAAIRTKDSFFKARYQRLVARRGKQRAIMAIAHSILKAIWQMLRSGEVYHDLGAEYYNQRDKDAKVAYYTRQLEKLTGAKVQIALGEAMA

SEQ ID NO: 188352 - protein, 345 aa, unidentified
MTTMNYIGLDVHKKTISYCVKDVSGLIQQEGKVGATRRELDGWIKTLPQPWTVAMEATIFSGWIYDHLLPHAAQIKVAHPLMLRAIATAKKKNDQIDASKIADCLRCDFLPECHMMPRAIRDRRRTLRYRHLLVRQMVQMKNRVSGLLMETGVEYNKQRLHKVSYFRELLSANEEVHPSIRPLLKLSRETIERCQKTEYALVSSLQHDPVLADRIERLRTVPGVGPITALTWALEIGDVSRFRTIKQAISYCGLCGDERSSANKAMRMPLSKQRNKHIQRTLVEAAKLAPRQSHELALIYDKEKQKGNGNRATLAVARKMVAYLLAVDRQQRDFVPAEERRTAAA

SEQ ID NO: 188353 - protein, 430 aa, unidentified
MRILYQRCCGLDIHKNKIVACVMATDPLTGQVGVRKKEFGAWLKALRDLRFWLQSQKVTHVAMESTGVYWKPVWNVLEGRFTILLVNSKHFRGVPGRKTDMIDAEWLADLLRCGLLKSSFIPPKEIRELRDLTRWRVHLLEDANRAQNRLEQVLEDANIKLGAVVSDTLGVCARRMIRGVIEGKRDAAWMADWGIGRLRARRKELKLALESLTTDHHRWLLKERLAAVEEIEARVARVETEIRRRIEPHQELLERLDEIPGVDEVTVWTIISELGVDMEVFQTPERAASWAALCPGNRESAGKRKSGKTRKGNRYLRRALVQVAWAVSHCKDNYLRARYWRLAGKVGKKKAALAVAHQVLKVIFLMIRDQTRYKELGGNFYDKIDPIRAKNKLITRLNALGWEVTLTPVSPLPSNLPPTPTTRTENSSCH

SEQ ID NO: 188354 - protein, 409 aa, unidentified
MLFVGNDWAEDYHDVEVVDKSGRRLVRRRFSEGIAGMAELHAVIADYLPDDAEASDVVVGIETDRGPWVAALVAAGYQVYPINPMQVARYRERHGTSGAKSDRWDAHVLAEIVRLDRDHHQPLAADSELVGAVQTLARVHQNLIWSRQRQTNQLRSMLREFYPAALHAFDDLHGRDALAVLAAAPTPGAGQALTLEAITDILRQAGRRRYLTTTATRIHTALQTEHLTSSPQLAEAYGAATAALIAIIAEMGHQIEAMEAQVVTHFGRHPDSEIYLSQPGLGKILGARVLGEFGDAANRYTHAKARRNYAGTSPITRASGKKLVVLARYARNKRLADALFQQAFTALSASPGARAYYDSLRARRIGHNDALRRLSNRLVGILHGCLRRGTVYDEATAWPTPKQDQQGTA

SEQ ID NO: 188355 - protein, 389 aa, unidentified
MPSVSERPEAPTAIQTHLAASFVSLELSRSIWLITSLSPGSGEKMSKHSVRAGDVAALLARFSELKRKASERTGKSFPIVVIQEAGLDGFWLHRVLQSEGVESHVVDPSSIATSRRRRRAKTDRIDGEALLRALLAYKRGEPRVCAMVKAPTPEEEDRRRLCRERKVLIAERVKHVNRVKGLLFSQGISGYEPLRRDRRQRLDELTTGDGRPLPVHLKIQIRRELDRLELLLDQIKEAEAERDALLAAPQPAAPAPAGRMLLEFKGIGAELAAVLWLEALFRHFDNRRQLASYAGLAPTPWQSGSVDHEQGVSKAGNPRLRTSLIQLAWLWLRHQPQSALTLWFKERVSGNGGHFKKSTIVALARKLLVALWKYVTAGVVIDGAVMKDA

SEQ ID NO: 188356 - protein, 327 aa, unidentified
MTDAANTAAAAVDYLGIDMAKARFEWAVHGTPTTCSATRDASGYDALLADLAPRRVGLLVIEATGGLEHELATVLLQHGYAVAVVNPRAARDFARSMGHLAKTDKLDALALAHYAQTLAHRAEQGAVRLQPSAQQLQALQALVLRRKQLSDMRVAELNRRGGPMRVLRKSIDAVLQILDQQIALLDQEIGTHLNDHFDRLHERFDAVKGVGPNTCAVVIGFMPELGHISHARAAKLAGLAPLNNDSGRLRGQRHIWGGRSIVRCALYMATVSAVRFNPLIKPFYERLLAAGKPKKVALTACAHKLLRILNALARTGQDWNPDHRRPA

SEQ ID NO: 188357 - protein, 318 aa, unidentified
MRTFIGIDISKNTFDACMQQKVRQFANTAQGFRMFLKHLPAGAYCVMEATGNYGVALAEYLHQAGVAVAVINPIQVKRYAQMRLRRQKTDRADAALITMYAEHAQLGASDQWQPMSDDTNELRQQQTVLEQLKKQHTALQNQLEALSRLPRPSRDALRAIKKVLAGIAKTIKELEAAQQQRIRTTASDTYQIMLSVPGIGPRAAMALLLVTDCFSRCSDARQLASYLGLCPRPYESGTSLKSAAVGHSSAPQARTILYMCAVSAMRCNRACRALYLRLVAHGKAKKLALIAVAHKLLRQVFSVVQRRQRFIDLMPLDA

SEQ ID NO: 188358 - protein, 347 aa, unidentified
MLIHYIDIAKRNFVIAVSSLSKTKTETNNPKGIAHTIEYLKKHKVALVVTESTVGLEIPAAKAIRRAGIAVIIANPRQTHQFAQSQSLTKTDAKDAKMPAFFAQMKAQKEDSQTMPYQPPTEAEEVLEALVNRRNQSADMRTAEKNRLHQVHETQVGSVKQLIAHFDRLIDESDKQIDDHTHTHFDGKAQVAEQIKGIGSITTATLMAMLPELGRLSHKRIASLVGIAPHPRKSGEAKFKSRCFGGRSAVLKALYMATVAATRFEPLIRDFHQRPLSEGKPYKVAVTACMRKLLETFAKFLSLTTTEIPTQVFGCFRPKYRLILPKHPLNPARIPDNQASEPPFRRK

SEQ ID NO: 188359 - protein, 325 aa, unidentified
MNKTKMKTRPATAKLTYIGVDVAKAELVVDCQDVIHRFENNDKGIARLLKSVSKIPSTAHLVCEATAGYEQDLALTALSKGIRISIIPAQRPRSLAKSAGKFAKSDPADARLLSKYGSVHEPKPLMPKDRARLQLDALMRARGELMDSLQRELNRTEHHRCPVVMALFKELVATYRRQIKTLDTAIAKLVAEDEVLSGSEAILRKVSGVGPQTSRALLAFMPELGHIGRRSAAALAGLAPYDRDSGKMRGKRHIQGGRSQVRRSLHMAAVVASRRNPELKKFYDRLREAGKPFKVAIVAKKSPAREPIREPGMGFPEGELHPSGP

SEQ ID NO: 188360 - protein, 413 aa, unidentified
MSVTPTPVPARVCAGVDWASVDHAVCILEPDGSVLDRFFITYDAAGLKTLVRRLLKAGVDEVGIERGDGPVVDALLQAGLTVLVIAPGQVKNLRSRYGSAGNKDDRFDAYVLADVVRTDRARLRPLVRDTAATTAIRTTVRARRDLVEHRVAAANQLRAHLQLVFPGAASLFAAIDTAISLCFLERFTTQSQADWLSPKRLATWLSNVSYSGRTDPEVLHARLLAAPRGTTGADAEVHAATTSTYVALLRVLNTQIAALEDNLAAQLAVHPDTHVFASLPRAKTLRVARLIGEIGDARGKFPTAASLAALAGVAPSTRQSGKVKAVTFRWGCNKQLRDALCDFAGDSRHDNPWAADLYNRAIARGHDHPHAVRILSRAWAHVIWRCWHDNLSYDPSQHRALQNVLAQVAEQAA

SEQ ID NO: 188361 - protein, 392 aa, unidentified
MVVSVGIDVSKDKHDCFIVNSDGEVLADVFTISNTLDGFHCLLQQIQDCSAPLDKIKVGLEATGHYSYNLLGFLLDNGLTTYVLNPLRTNLYRKSLSLRKTKTDRVDARTIASMLLSDAGLKPYTSTAYHNEELKSLTRYRFDKVKERAKLKSSIARLVCILFPELEKLVPSLHIASVYALLEEFPGAKQVANAHLTRLKALLETASNGHYKRDMALGIRNAAKNSIGSQMPAKSLELQHAIRLIRELDREIDEIEEQIQSIMDELHSPITTIPGLGFRMAAMILAEVGDFTRFDSPDKLLAYAGMSPSTYQSGQLKNCYPHMEKRGSRYLRYAIYNATKYVCHWDPAFADYLAKKRAEGKHYNIAISHAAKKLVRLIFAMEKSRQPYCSAA

SEQ ID NO: 188362 - protein, 393 aa, unidentified
MYLVGIDIGKLKHSFCLLEKETGEILVEPVFFENSRDGFNVLLSSFKHLPQKDILIGMEDTGHYNLALLKFLLDRNYQVALINPVATNLTRKMQGGISKNDKLDTLTICDVLSSSQRVKSYRISKYSSFDLYEQKLLTREHHNLKEEENQLTNRLQKCIDVVFPEFNSLFKSKYGIVYMNILKEFGSADAIAHADIRTIRKCFDTGRGKHISLTAEELKEAARNSIGFPSSSEATQIKHLVARIELIKEQIAEIDKKIEEFSIQNNSPILSIPGISHFSGTSILAELGDIHNYSKPSQIIKFAGVAPLTYESSQFTAQHTAITKKGCKYLRKTLYQIITPVIQYNPVFRKFYLLKIAQGKGHRCAQGHCVRKLMRVIYHLLSTGTQFDPALLR

SEQ ID NO: 188363 - protein, 345 aa, unidentified
MKKGITIGMDLGDKKHQVCILDKTGKIIAEEEVAGNRKAMASFFKQYRGAVVAMEMGAHSRWVSQIATAAGLEVLVGNARKLRMIWQSRKKSDAKDAVMLARIARMDPALLCPIHHRGEQVQMDLEIIRARDLLVGERSRMVNHVRGVVKSMGERLPPSSAESFGRKAKLPEALNEALKPMLEMIRELTKNIHGYDLMIKDAATKKYPETEQLCQVGGVGPLTALAYVLTLEEPERFAKSRMVGSYLGLVPRLDQSGQIDKQLRITKHGDGYLRRLLVGSAHYILGPFGTDCDLRTFGLKLMQRGGKNAKKRAVVAVARKLAVLLHALWRSGAIYEPKRMQPLAA

SEQ ID NO: 188364 - protein, 389 aa, unidentified
MSQSFDASRSLAALEQDNTIIAVIEMSKAKWLVAALVPGLKRQPLKKLDADAPALLKLLQRWRDEAGRAGHPIKRIAVAYEAAGDGFWLARWLRAHDIEAYAIHPASVAVSREHRRAKTDRLDTELLMRAFLGWLRGEKRHCSMAAIPTIEEEDARRPSRERESLVGEQTRLVNRIKAVLARFGIRSFRLSLRSAADRLAAIRTAEGTPLPDNTCAELSRLLARLSLVREQIRTIEQERLRRLAAAPAAAASGPHAMVRLIARIIGIGVETADMLVHEALSRGLRDRRAVARYAGLTGSPDESGHRRREKGLARSGNARVRRGMIQLAWRFLLFQKDSALTQWFRARTADGRKTTRKTMIVALARKLLIALWRFVTTGEVPQGVNLRAA

SEQ ID NO: 188365 - protein, 311 aa, unidentified
MQITIGIDISKNTLDAYRLPDSQHIQVANDKAGHKTLLRWIGKHDLPLVVFEATGAYHRGLEAELAANDVSFAKVNPRQARRFAEATGRLAKTDRVDAAMLAKMGAVLELKGHKPKSETLHILRELISARRALMKDTVAAKTRLQTTTQTLLKSQINARIKQTEIQTRQVDDAIAREVAKDEALSHKLAILISIPGIAETTAFSMLIEMPELGTLEGKQAASLAGLAPVSRQSGKWQGKERIQGGRAFLRRAIYMPALVATRHNPDLKAKYDQLIRAGKPGKVALTAIMRKLIVTANALLRDGRKWSEIRP

SEQ ID NO: 188366 - protein, 361 aa, unidentified
MPTIADAGRPVTGGAGTHAEVHVAGMADQAGRVLGTREFAATTAGYAAALAWMRGHGELVKVGVEGTGSYGAGLARYLAACGIEVAEVIRPNRQARRRRGKSDPADAVAAALAALNGEASGQPKSGNGAVESIRALQVARRGAVKARTQAGNQLLGLIITAPQELREKLAALPATDRVKLAARFRPGDLTSPAEAAKAAMATVARRHQALTAEIAQLDTALETLLAHAAPVGFRAKNGVGTRSAATLLVTAGDNPGRLRTEASFAALCGASPVDASSGKQRRHRLNRGGDRQANSALWRIVFTRIATDPRTQAYVARRTSEGKTTREIIRCLKRYVAREVYKALTAHTRQLNQDPATQIHP

SEQ ID NO: 188367 - protein, 351 aa, unidentified
MEKYLGLDVHAKSCTAAIIDGRGKRLGSQVIETNGKSLVEFFKLQAGRVHLCLEEGTQSAWLTEVLRPYVAELAVTVPRQRRGQKNDELDAYTLAEQLRQGAFTIRVYQQVGPFGELKQLVKTHLSLVIDTRRVQSRLKALYRSRGIATAGQEVYAQSTRSDWLSQLPKSSLRSAEVLYRQYDALCEIRDQARRDMVRESHRFPITRTLETCPGMGEIRVARLVSVVVSPQRFRGRRQFWLYCGLGVVMRSSSDWDQDPSGSWHKVRKPVTRGLNLNFNRMLKDVFKGAATTVLQQGGEEPLYSEYQRQTLGGTKPDLAKVTLARKIAAISLTMWKNEEKYDPKKRKQVLA

SEQ ID NO: 188368 - protein, 354 aa, unidentified
MSQTPNTAIAVIGIDIGKNSFHVVGHDARGAIVLRQKWSRGQVEARLANIPPCLIGMEACVGAHHLSRKLASLGHDARLMPAKYVRPYSKGQKNDFNDAEAIAEAVQRPTMKFVATKTAEQLDLQALHRVRERLVSQRTGIINQIRAFMLERGIAVRQGIGFLRTELPTILATRTDVLSPRMLRVIEELAGDWRRLDQRIDGLSGEIEALARQDQACSRLMTVPGIGPIISSAMVAAIGTGDVFSKGRDFGAWLGLVPKQISTGDRTILGKISRRGNRYLRVLFVQAAWVVLVRIKNWERYGLKSWIEAAKRRLHHNVLAIALANKLARIAWAVLAKGRAFELTRTDDAGVRPA

SEQ ID NO: 188369 - protein, 338 aa, unidentified
MKVYIGIDLHANNCVVVVIDEKGRKLHERRLRNDLPLIVEDLAPYRKRCGGVVVESTFNWYWLVDGLIDAGYDVHLANTAAIQKYSELKYTDDKTDARWLAEMLRLRLLKEGYIYPKEGRAVRDLLRKRSQLVQQRTAQILSIQGLVSRNTGAPPSGNTVKTMTAWELDALLSDPLVVRAARSNLQVYRCLDREIADLERLVLERTKSSPDFEHLLSAPGIGQILGMTILLETGDINRFAQVGNYVSYCRCVGSQKLSNGKKKGKGNTKNGNRYLAWAYVEAANYAIRFSPRIKRFFERKRAKTNGVVAIKTVAHKLARGCYHALKDRVPFEVERAFA

SEQ ID NO: 188370 - protein, 423 aa, unidentified
MDILYERVAGLDVHKDTVVACVRMVADGKTTRECRTFATTTEQLVALRAWLEECRCTHVAMEATGVYWMPVFRLLDAGKFKLIVANAAHIKNVPGRKTDMNDAMWIADLLACGLIEASFVPNEEVQELRALTRTRKQLVREQTRHVQRIEKTLAEANVKLSSVISDIVGASGRRMIQAMIDGVRQPNKLAELAGKQIKATPKELYDALHGRLTDHHRFLLALHLKQWDSIDEMIRKLDVEIDQRIGRMTAEAEGNETPFRALIGLLTTIPGVSAVAAPAILSEIGPDMSRFRTAGHLVAWAGLCPGQNESAGKRKSSRLRKGAPWLKTMLVQCAWAAKRTKDSYYRAQFFRLQAKRGPQKAICAVAASILTAIYHILKHGTEHHDLGSDYFDRRPVELKASRLVARLKKLGFTVQLQPIAEAA

SEQ ID NO: 188371 - protein, 340 aa, unidentified
MNITTYGLDIAKRVFQLYWVDIKSGEIYNHKFGKQELLEFLAQREAGLIALEACGSAHWWRRKLIAMGHEVKLIHAKFVRPFVQTNKTDAADAKAIWTAIRQPGMRTVAGKTEEQQAMLALHRMRMSLIKFRTVQVNQLRGLLYEFGVTLKCGRLAGLSELQQRTAEIEETVPDMLFKAMKEQLQRLTGIEADIQDIERRIKAWLRQQDACRKIAEIPGVGMLTATALVATMGEANSFKSGREFAAFVGLVPRQSGTGGKVKLLGISKNGDTYLRTLLIHGARAAIFKSKDKGEWSEALLKRRPTNVAIVALANKMARTAWAILAHGREYQKNYVSVVPA

SEQ ID NO: 188372 - protein, 389 aa, unidentified
MSPTQGTDFTPGEGFMAASLELSKGSWKIALHDGKRDSPAIHTVSSEQAATRLKEAAAVIEATKKKWGISEHTRTVVSYEAGQDGFWIHRALTALGYEVLIVDPASIPVERQARRAKTDRLDAIKLVNCLLAWLRGERDRMHVIRVPGTEAEAQRHLARDRGELQKEIQQHRDRTRKLLRTVGCWDSVEGKFAKRLEQGEVCCQDGHPLPAHMKARLERECARMALAETQLAALETSMIEALPKAVSGRIDQLTQLKAIGRIGAFRLVLELYWRNFDNRRQVGSCVGLAPQPYDSGESRVDQGISKQGNRRVRALLIEMAWFWLRYQPDSALSKWFAQRTGGAGKNKRGKRIAIVAVARRLAIALWRYLKDGVIPEGAKLKAVTAPKAA

SEQ ID NO: 188373 - protein, 444 aa, unidentified
MAPATIEWVTVKAPNLKQEEPSQMENTAARKRKQVPERYLIIGIDPHKKRHAAVAITQDFTIRDKSKFDNTREGLETMLRRTRTEMVKADCRGVMFAIETGGHYWRNIAYFLDEQGIPFRFINQYTLKRRREGKDLNHKKNDYRDSEVAAQLLCTGEFTESTIPQGVYAELRTAHNAYRRLVKERTRITNLVKGLLDGLFPEFTQVFKDPCGLTALSVLSTCPIPKVIACMTEDEFVAAIEAKHQGRLMRKKLRELHYKTKTSIGIAAGARSVSAEILFLIEKHELIRRHICIIERTLVRLVDETEEGKYLLSIRGLNYVAAAGLLAELGCFKLYRSAKQMIKMAGSNPTESESAGKRGSHTPMSKQGRPALRYCAWTSVIPMLRLNPDFRAWAKQRRERPAHANPLNGREIVGAALNRLFRLIFAMVKNQTYYLSPQLVQVTG

SEQ ID NO: 188374 - protein, 404 aa, unidentified
MIFVGVDWAEAHHDVCVLDQAGAVLGRRRVPDGVAGVAQLHALVADHAEERSQVVVGVELDRGLLVGALTAAGYQVVAVNPLQASRYRERHAVSGAKSDPGDAKVLADLVRTDRHNHRLVAGDSELAEAIRVLARAHQSAIWSRQRQLNSLRSALRGFYPAALEAFGTDLACGDGLAVLQLAPTPELGRQLSRAKIAAALRRGGRQRNLQARAAQIQAALRGPQLAASQGISQAYGVVVHASVGLLASLNQQIATLEEALGEGFNKHPDAKTIRSLPGLGMVLGARVLGEFGDDQTRFPIAKSRKNYAGSAPITKASGRSLVVLARHARNRRLADALEQWAFCSLTRSPGARRYYNQLRARNKTHRQALRQLANRWVGILHTCLERGVSYDEHLAWSHLYPAAA

SEQ ID NO: 188375 - protein, 374 aa, unidentified
MQSQTKVLKNADFTNQNFYIGLDVHKRQWTVTFRLDGTYIKTFTMEPSPKVLIKHLQAIYPNGNYFSVYEAGFCGTSHHEELCALGIKNIIMNPADLPMTHKHKTNQTDHHDSRALAEYLEAGKLKPIHIFSREQQELRSLCRLRNRNRRDVTRCKNRIKGLLMYYGISVPLEYQEKKCWSKRFVNWLKQQQLTTVAGTSSLQFLIEDLEYHRTKLLAVLRKIKQLLKERFKEEWDLLLSIPGIGPLNVVTLLSEIGDIKRFITAARFANYLGLLPSEASSDETIIIKGINPRCNKYLRSMLVEAAWVAIRTSPSLLAYYKKHSYKDSNKAIIKVTRKLAMIIRGVWLNKEPYKEGYISTKSKDLLDNNKPNAA

SEQ ID NO: 188376 - protein, 430 aa, unidentified
MMEEVDDAELVVERIAALDLGKAGLEACVRVPSPHRPGRRMQELRGYGTTTAQLLEMVAWLRHWGVQRAVMESTSTYWKGVYYLLEAEGFECWLVNAREVKNVPGRAKTDRADAIWLAKVAERGMCRPSLLHPAEIRRLRDLTRYRRALVQDRTREQQRIEKLLEDAQIKISSVLSELHGVTARAMMDALIAGQRDPRALAQLAKGRARKKTAQLEEALRGFFTDHHAAILRMMLDNTDRISAQIAALDARIEKEIGPFSGQAARLAEIPGVDAVAAAELIAEIGVDMTRFPSDAHLVSWAKFCPQTHESAGKSKSKGRGRGNPWLAGTLGRIAFANSRADTFLGARYRRLARRRGKQKAIVATGNSVLTVVYYLLSDPMATFCDLGPGYYESRINVHRRARDLVTQLQALTGQHIVIRDGKAVITDAAA

SEQ ID NO: 188377 - protein, 346 aa, unidentified
MKKVLKQVVGVDVAQKELVTTLGRMYDDFSIDLYSHRVFKNTEKGMLTLLDWVKKQTTEEAKIHYVMESTGVYHQKFAYYLDESFLDLSVVLPNKIANYIRTLEVKTITDKTCSEAIAQFGLERKLNLWHAPNKVYMELQQLTRERDQIVAERSAIKNQLHAETIQAKPNTNSVRRLKERIAFLNRQEKEIKGEIDVIIDNNEDVKKEIKNIISIPGIGKLTAVIVLAETNGFELIRNKKQLTSYAGLDVKEKQSGTSVRGKPRISKKGNRSLRKAMYLPSLSAVKYDENFKGQYVRIVSKHGIKKKGLIAVQRKMLELIYTLFKNKTVYDKNYESKKSSAKILVA

SEQ ID NO: 188378 - protein, 342 aa, unidentified
MDHFGGLDVSVKETSICIVDDTGRIVKEVKVASEPAALLKVLGNPTYRFKRIGLEAGPLSQWLFSALAEAELPVICVETRHMQAVLKAQINKTDRNDARGIAQMIRVGLYRPVHVKTLRSQKLRMLLTHRKLLQSKAIAIENDLRGTLRNFGLKVGMVGKVRFEARIQELVENIPDLAIMAEPLLIVRRVLREQIVILHRRLLAIVREDEVCRRLMTVPGVGPVVALTYRATVDVPARFRKSKSVGAVFGLTCSRYQSGEIDWSGKISRCGDEMMRVMLYEAAQSMMHSKKWSWLKAWAMQIARRRGMKKAIVALARRLAVIMHRIWVDGTEFRWTRETVAA

SEQ ID NO: 188379 - protein, 368 aa, unidentified
MELSKNSWLLAIQFRDREQPSLYPIEGGNTDKLMAKLAAARDCWAKVNGALPAITLCYEVGYDAFWLARFLRARGIECLVIDPGSLQVNRRARRVKTDRVDVKMLLRTLIAWCRGERHVWSLVRIPSVDEEDLRRSHRERSRLVRERTAHINRIKGLLFAQGVRGINIKSQYKTLAVDQLVTGDGHRLPPRLVCEVAREIQRLAMVQEQIAKIERERDTAPTPCEATERKRRLLLRLKSIGPAISALLSREVYYRQFANRRQVGSFLGLTPSPYSSGEEERCQGISRAGSGHVRAIMIEAAWLWIRHQPKSALTRWFLERTAGQSTRMRKTMIVAVARKLAIALWRYVEHGLVPQGAILNPPTTGNAR

SEQ ID NO: 188380 - protein, 458 aa, unidentified
MYRELQPLRRTLSEELRSALLPGLPGIQPDKLLETYLDQLTLFVGADVADLTLSLLAIDASKEELGSLLNVANDPSGFRQIIAWLEKLRCQHQLRIMAVACEATGVYYWGFWDALAEQPNLARILYNPRTTEHMGEVLSKRVRTELVDAYLLAEQLRLGSTPEVVLSQDADLLSARFCSRCARDLAQQINRKKNQLRALLRAYSPAFSQAFPGDKFHHPAVYALYAQCLFPDEIVAAGPEAIAAILTSHCRTAFDATVAQQLVDLCRTVLLRTMTRTVIRQRALDLADDITTAQSRQRYFIRTGYDLIKQRSETKLLKQTSGAGLSNTLALVSEIGDVQRFPDGEHLASFLGLTTSKHISGATVYKATHITKQGAPNARYAAVNMADHLRHKVPYYHTMYQRITDRKPPHKGHFVALVAIARHFTTNVLYDMWRHQRPFFLETADYRQYLQEHPLTDH

SEQ ID NO: 188381 - protein, 416 aa, unidentified
MNKRVLSGPVGRCVGLHLDFIEIAICEEGKVYSAGRVPSTPEGIGTLADSLLPTDRVALEVTGSSWEIAKLLKPHVRKVVVVSPGDTGIAQARAKTDRLDARMLARLLWTGELEAVWVPPEWIARMRRRLSRRGQLVRARSRVKNELHAVLMRRLKGRPPVSDLFGVKGREWLRGLELPLEEAETVEAGLRHIEFLDTEIEQVERLICQEALKSSQVRRLMTVPGVNVICAAIFLAAVGDIKRFKASRPVVAYLGLDPRVYQSGSGPARGGRISKQGSPQARWALVEAARSVAQQPGPLHAFYQRIRARKGHNAAVVAVARKLAVLFWCMLTREEDYAHQQPSLTAQKLRRLEVRAGAPTLEGKPTGVWATRERMRQAEKQLAAQAEASYKRSIADWKAASPKNEKAGASVTAGRA

SEQ ID NO: 188382 - protein, 428 aa, unidentified
MNNTLIATLFVGIDVSSRTNYVFGMDFFGNKLMSFETSNNDPGANKIVENILQVLKETELSYITIAMESTSFYSWHIANFLSTNEALIWFKPKVYCLNPRTIKSYKKTFNDIDKTDPLDALAICDYARVGKIKEAPWRGGQYIALQRLTRCRLHIIENISREKSYILSNIFLKFSELAVLKKDDKPFSNTFGATALAVLTEFLSAEDIANTSIEELVNFVVEKGKNKFSDPEATAKLLQKAARDSYRIDKALADPLNATIAASFNCIKALEKEVKTLDKAIAKAVKAVSTHEFECSLSIKGIGPVFAAGIVSEIGDISKFNSQASLAKYAGLTWRKKESGNFKACETFMTKTGNKYLRYYLLEAASSIIRYNQEYHDYYLKKYNEALIHKHKRALALTARKLVRLIFALLRNNRLYTSNIEANKVKTS

SEQ ID NO: 188383 - protein, 317 aa, unidentified
MTTPNDAYVGIDVGKTWLDVALWGNNAVWRVSNDDEGVAEIMARVTALGLQLIAVEATGGYEQLVVQTMLLNSLPVAVVNPTRVRALSKATGKLAKTDVIDARLIAEYAFKIQPEALAPKEAQEIRLNALVTRREQLVEMRTAEQNRLGTVHNSMQVDIREHIEWMNARIQELEVEINGLVDSLPKWRKQAERLDSIPGVGKITAVTVLAEMPELGQLNRQKIAALAGLAPFNRDSGQKRGKRRIFGGRKGIRRVLYMACLSATKYNPVIRSLYLRLTKKGKLFKVAITACMRKMLTIMNAMTRDQVNWRPPEPIPN

SEQ ID NO: 188384 - protein, 422 aa, unidentified
MMHEERRWFVGIDWASREHVVSLCDGEGKKIGQREFIHGGTGISGMIAWLLKASGGEPGEIHVAIETPHGPIVEALLERGFNVYCINPKQLDRFRDRFTVSGAKDDSLDSYVLADSLRTDMPLYRKLSVAEPLIVELREWSRIDEELKVERIRLANRLRDQLWRYYPQMLELGELDEDWMLDLWEATPTPQKAARASKAAIARVLKKHRIRCFDAAQVLSELRKPALSVAQGTIGAAPVHIRMAIERLRVVNRQLADAELQLDRLCKKLAEPVAADDGENVPGQRQEHRDATILDSLPGVGRVVLATMLAESPDALQRRDYHALRSLYGTAPVTRRSGKSCIVTRRRACNRRLRNAVFNWGAVAVQHDPISKAKYQALRARGHGHARALRSVVDRLLYVACTMLENGTLFDHSFAEAKKAAA

SEQ ID NO: 188385 - protein, 342 aa, unidentified
MEHYAGIDVSLEYSSVCVVDANGKIVREAKVASEPQALIAWFGSLGFGLERIGLEAGPLSQWLFAAMREAGLAVELLETRHVRKAFEAMPVKSDRNDARGIAQLMRLGWFRPVHCKSMSAQETRSLLTARKLVQSKLHDVENSLRGILRGFGLKVGKTTGQKFAGRIEELVAGHPHLQMIAKALLAVRAVLRTEFAAFEKQTRRMVRSDMQARLLTSIPAVGPIVALTYASAIDDPARFKSSKQAGAHFGLTPKKHQSGETDYTGRISKIGDASVRTALYEAANVMLTKPVKGCSQLKSWAMRIKRRAGMSKAKVALARRLAVIMHRMLADGTPFNAAAATA

SEQ ID NO: 188386 - protein, 405 aa, unidentified
MDLIPICRSAVGMDVHLNLIEVCAIVEDASGEAQVHRRRFGGFRRDRLEMAQWIAGFAPETVVMESTGIFWKSPYAYLERLGVRALVVNAQHVKTVPGRKTDVGDAEWLAMLARAGLLRGSFIPPEPLRNLRQLSRHHQRVTAMLAAEKNRLVRVLGDAGIRLTAVVSDPHGVAARAMIDCLLDGGTPQQALAYAGRLRAPHEELAAALEGEPSEEHLFVARMIRRHIDTLEADLAEIERTLIARLQPYQAALDILLTLPGIDLLAAAKLLVEIGEDMSAFGSAEKLAKWAGICPGNRESAGKRKSGKTTKGNRYLRALLCEIAWSAARTASQFKSRYQALAIRRGAKRAIVAIAHKLLKIVYVLLARRVPYRDSTVDYEALAVKRKAPRWIRQLKKFGLLPQTA

SEQ ID NO: 188387 - protein, 348 aa, unidentified
MTIVGTNPDAVIGGVDTHADVHVAAVVNHVGGVVGVESFRTTRAGYRQLVSWLRSFGELTLVGVEGTGSYGVGVARYLARAGVPVVEVDRPNRQTRHRKGKSDPVDAVTAARAALSGTASGLPKTRDGNVEAIRVLMIARRSAIDTRIETLNQLRHVMFTATREIRAKFSGLTAIALANKASVLRPRQGDDPVRYTTMITIRTLGQRVQYLREETKRINRLLRPLIRHTAPGLLEVYGVGFTTAAQLLVAAGDNPERLRSEAAWAHLCGVAPIPASSGKTTRHRLNRGGNRQANSALYHLVLTRMKHDQATRHYVARRLAEGKTMGEIARILKRYAAREVFKHLPRPT

SEQ ID NO: 188388 - protein, 300 aa, unidentified
MTEITTVGVDLAKSVFQIHGVDAEGSVVLRRQLRRNQILEFFQRLAPCVVGIEACAGVHHWARELGKFGHDVRLMPPSYVKPYVRRGKTDQADAEAICEAVTRPSMRFVPVKSEETQALLMTHKAREFLVRQLTQVTNAIRAHLGEFGIVAPKGVHNVGRLLEAGERADLPAAARAPLRLLADQFFETRKRIDALTKDIRREAEANVAAKRLQTIPGIGPITATALAATLPDVTGFRTSRDLSAWLGLTPKPHSSGGKEKLGRISKMGNRYLRRLLYLGAMWVISARRRGPPGDDWPSAL

SEQ ID NO: 188389 - protein, 338 aa, unidentified
MRLYCGIDLHSNNSYVVVLEEQDRVVYRRRLGNDLQVILQALAPFAEQLVGIVVEATFNWYWLVDGLMEAGYRVHLANPAAMRQYEGLKFADDRSDARWLAHMLRIGLLPEGYIYPREQRALRDLLRKRGRMVQQRTANLLSLQNLVHRNTGQRLSGRVLRAVELAELDSQHPDANRTLAMESTKRVLECIDGEVRRLEKEILRQLKPDSLLRLLKTVAGVGDVLAPTIRLETGEISRFPSAGNYVSYCRAVGSQHLSNGKSKGKGNRKNGNPYLAWAYVEAAHFAIRYHKPVRRFYERKRARTQQVVALKAVAHKLARASYYVMRDQVPFRIDLAFG

SEQ ID NO: 188390 - protein, 345 aa, unidentified
MELHTIGIDLGKTVFHLVGLNLRGEVVVRKKFSRTQLLRFTANVHVGLIGMEACGGSHFLGRALREQRHEVRLIPAQYVKPYVKTNKSDYIDAEAIAEAVSRPTMRFVPIKTDDQLDLQSLHWVRERWVMRRTAVINQIRGLLLERGITLRKGRCHVGAALPGILEDADAKLSGALRMLLAQLKLELDHLDLRIDEADALIKKTACENEACQRLVAIPGIGPVTATAVIAAIGNGAAFRKGREFAAWMGVVPREHSTGGKQKLLGISKRGNSYLRRLFVQGARAVMQQRTKQSSGLSAWLAQLTSRTHRNVAGVALANKLARMAWAVLAKNEPYRPPVLADVAAA

SEQ ID NO: 188391 - protein, 369 aa, unidentified
MASMPNFTTEQNPPLTVSRVVVGGIDTHKDLHVAALIDLAETVLATHSFSTTRAGYRALVKWMRSFGDVSKIGVEGTGSYGAGVCRHLVDAGLEVLEVDRPDRSDRRGKGKDDDLDAISAARAALHGRRVSIPKSKDGAVESLRVLRVTRQTAVRARRNALQLLRMTIVAAPEELRDQVQNLTRMQLIRTCAAWRPETTNAADPVAATPIALKSLARRILELGDEIAALDELIEPLVRALAPQLLERVGGIGIEVAGQLLVTAGDNPDRLRSEASFAMLCGVAPLPASSGMTRRHRLNRGGDRQANSALHLAVISRIRIRIDDKTKAYVAKKTAEGHSKLEIIRCLKRYLAREVYYLLNTPATPLAKAA

SEQ ID NO: 188392 - protein, 364 aa, unidentified
MSSVSHRSLTHLGMDVHKDSISIGILRPDDSMDVERIFHDEESVRRFIARMGEARRLTACYEAGPTGYELQRLLLRLRVPCQVVAPSLIPKAPGDRVKTDRRDCRRLARLHRAGELVAIRVPSPEEEAVRDLCRARGDVVIDLDRARRRLGAFLLRHGLIWRGGSNWSLKHEQWLLGLRFEDAALTSTFAHYRSIVEERRLRLQALESDLLPYCEQDPYVEGVHRLCCYRGVDTIGALTLVSEVCDWRRFAKASSFMGFVGLVVSEYSSGDRTHRGHITKAGNVQLRTQLVESAWAYQRGPYVGERIRRAQERCPPATRERAWAAQVRLCGRFRRLAARKNVKSVVAAAVARELAGFLWGEMTA

SEQ ID NO: 188393 - protein, 340 aa, unidentified
MTVIIGIDPHKASHTAVAIGCDEQPLAEIRVRATCQQIAKLLTWAEPLGPRTWAVESAGGMGYLLSQQLVSAGEEVLDVPATLASRIRVLGTGRSNKNDPNDALSVAIAALRSPGLRSVEPANHREVLRLLAKRNHDIGRLRNIVVSRLHAALANLSPGGIAKELNASDAVRMLGDFDPTTPVEQTRYEMALELLDDVRRLDVQLKESHKRIKAAVKASGTTLTDLFGVGPILACELIGYTGDVRRFTTRDKFASYAGVAPVEFSSGGRTVHRLSRRGNRQLNHAIHMVAICQIRQKNSEGRSYFEKKVAGGKTKREAIRSLKRHVSNAVYRQLLVDAQK

SEQ ID NO: 188394 - protein, 369 aa, unidentified
MAKSITFIGLDVHKDTIAVALAEAGLRGEVREHGKIPNAAAALKALAMKLASAGRELRFCYEAGPCGYGIQRQLAGMRHDCTVVAPSLIPRKPGERIKTDRRDAINLAKLHRAGELTPVWVPDQAHEAIRDLVRARQAAVRTLRQARQQLSGFLLRHGYHYHRPAWTQLHRRWLASLRFEQAVHHIVLEDCIAAVEAATARRDRLEAHIEAALPEWALAPVVQALQALRGVGLVAAATLLAELGDITRFTNPRQLMAYLGLVPSEHSSGRTRRQGGITKAGNGAARRMLIEAAWSYRFPARISRAQLLLQERLAKPIRDIAWKAQERLCRRYRKLARAGKLPTVITAAIARELAGFIWAIARQPQSTTP

SEQ ID NO: 188395 - protein, 419 aa, unidentified
MDETEQNWFVGVDWASEAHHVRAADGRGGKLGERVFAHSGAGLADMAAWILALTGAPAQAISVAIEVPHGPVVESLMEHGFRVCAINPKQLDRFRDRFSPAGAKDDSRDAEVLADALRTDPRSFRVLTPLDPLVIELREWSRIAEDLREERVRLSNRLREQLWRYYPQFLELTDDVAAGWVLELWALLPTPAKAGRVRESTIAALFKRHRIRRLTAADVLARLRTPALVVAPGTSAAAIAHIEMVAKRLTLVNRQIAAANQQLDRLTEGLVGSEAAEPGHREEQRDVTILRSLPGVGRIVLATLLAEASDALRRRDYHALRCLCGVAPVTRRSGKSRLVQRRQAAHRRLANAVYHWARVAVQHDPRSRAKYAALRQRGHGHARALRSVADRLLAVACAMLESQTLYDPRLGRQTANQPA

SEQ ID NO: 188396 - protein, 477 aa, unidentified
MKQAKSSPGARAIPARGGQLSRKERRELARQIQSDKVTLEIVHANAAGIDVGKNTHYVAVPPDRDAEPVRYFDSCTEGLQQMVAWLKNCGITSVALQSTGVYWIALYDLLQEADFEVYLVNARYTKSLPGRKSDVQESQWLMKLHTYGLLPNSFRPPQEIRWLRSYWRQRQNHVRSAASCIHRMDKVLTEMNVRLSSAVTDLSGATGLAIIQAIVDGERDPHELAAYRDPRVKATQEEIARQLQGNWQEDLLFRLRQELTAYRFWQTLMAECDQELAKLLRAFPDRSAGVALPEETRKNRRKKKRGNSPQFDLRQLLYLMSGVDLSRIDGIGVSTAMTVIAEAGYDMSPWPTADHFVSWLRLAPDNRISGDKIIGKGRTPTQNRLSQALKMAASSLKESKTYLGAQFRRLRARRGPAIAVKAMAAKLARLVYNMLRHGMEYVDRGTEFYEQQQHERRLHALAKNAAQLGFQLVPVAA

SEQ ID NO: 188397 - protein, 424 aa, unidentified
MKSLTGCEFAAFIGIDWADAKHDICLQVANTEKREFAVLPHRPDAIDQWACSLRQRFQSRPVAVCLELAKGPLIYALQKHEFLVLFPVNPATLAKYRGAFTPSHAKDDPTDAEYQLELLVLHRDKLKALNPQSAPMRTLESLVEQRRRLVDDSKRITNRLTSALKQYYPQAVEWFEAKDTVLFCDFLSRWPTLKQVKHARRATLQAFFREHNARSAKLVEERLTAIKSATSLTEDIAVITPHRLLVQALVDQLRVTLQAIERFDAEISAISRTLPDYPLFRNLPGAGAALAPRLLTAFGEQRERYDSAVEIQQYTGIAPVTERSGKQHSIHWRLQCPTFLRQTFVEWAAETIPRSFWAGAYYRQQRAKGCSHPAAVRALAFKWIRILYRCWKTRTPYDESQYLNALKRRGSPLLNWNAEAAKNT

SEQ ID NO: 188398 - protein, 420 aa, unidentified
MSPPGASEPASERLLQYLLQHLLVHTQLSDQLLQPLILILQLPQTPLFRHARSGKFFLPVNGMDYLLPLRLTVRNVLTGRITMNIVFLGIDLAKNVFQLCGVNQAGKPVYTKRTGRKELLQTLANIPACLIGIEASTGAFYWQREFEKLGHKVKIISPQYVKPFVRGQKNDGNDAQAIAVALMQPTMQFVPPKSPEQQDIQALHRARQRIVNHRTATVCQIRGLLLDRGIPIGSAVSRARRAIPLILEDAENGLSSRMRRTIAELYDLFNDLGRRIHFFDKEIETVFRQSEACQRIAKVKGIGPKTATAVVAAIGKGTEFKNGRHFAAWLGLVPRQHSSGDRQVLMNMTKKGDKHLRTLFIHGARAVVRVATNNNDGHMNQWVNQLKERRGFNKTTVAVANKNARIIWSMLRNETEYQVV

SEQ ID NO: 188399 - protein, 340 aa, unidentified
MGEVSTVGIDLAKSVFQVHGADTSGAVVFRKKLRRDQVLTFFSTLPRCVVAMEACASAHYWAREIALAGHETRLIPPAYVKPFVKRQKNDMADAEAICEAAQRPTMRFVQGKSAQAQASAVVFRTRDLLVRQRTQLINALRGHLTEFGYVVRQGVGHVGKLVAIVRDPTSDVPAEARPVLAIIAGSLEALQAQIARLDREIAQRAKDDAVAKRLMTIPGVGPVIATALVALAPAASTFRRGRDFAAWLGLVPRQHSSGGKERLGRTTKMGERSLRRLLILGASSATKVAARDPDKAGAWLAGMLSRKPRMLITVALANKMARIVWALMAHGGSYRAPATA

SEQ ID NO: 188400 - protein, 338 aa, unidentified
MRYVGLDVHWRQSSICVLDTRGRKVSAQAIRGGWSKVLEELGKIKRPFAICFEASSGYGYLFEQLTPIARRVVVAHPGQLRLIFRSKRKSDRVDAEKLAKLLFLDEVPPVHVPSADVRSWRSMIEHRRKLVAEQTRAKNTIRGLLRSQGIESPRGLWTGKGLAWLSSVTLATELDELQRDILRERLESIASMIKRVERVLNRKGTAHPGVQLLRTIPGVGPRTGEAVMAYIDKPSRFHSNKAIGCYFGLIPKQDASGRSNRLGHITREGPSVVRSFLVEAAWQGIRLCPRIREVYERIMRGDKERKKIALVATAHYLIRAMLAMLRTGEVWRESVEAA

SEQ ID NO: 188401 - protein, 394 aa, unidentified
MEHYIGIDNSSLDHKVRVIDENGNPNLSFTVVNTLEGFEELNKKLNGFTNVKIGFELPHGPLVDYLHLKEYRLYSLNPLKIKRYKESIKVSGNKNDDIDALAIAEYLRNNATYTRELTYSSSEIERLKNLSIIHTRLTQNRARHVNKLHFTVRQYFPLQESLFANFGCTVQLRMIIKYPTLDCLHTSSDEKIEEFLKSEKYRRQVYIDKIINKIRNYKQLISQDVEYAYQIEAKAICNIILILNDELKRVEKKMNQITTSHKLGKYFKSLPGAGNILACKLLALFGDNKDRFTNHNGVQCLFGTAPKNYQSGNYHKVIMRKACNKSARAVLYNYAFSSLRYSKWAREYYDNQRSKRKTHSVAVRALSNKWVKILFRIWKDEVLYQEDKIISSAA

SEQ ID NO: 188402 - protein, 411 aa, unidentified
MNNTLFVGIDISKRSNVATFMNCEGKVVGRLTFSNNGSGADRLVAKILSYYEKEDFEAIRIGMENTSVYSKNLVWFLYEHEALNEHKLSIIPLNAIMVANYKKSFLDMDKDDITDSFAIADFIRIRPGLLPFKLDDRQEALKIMTRSRYNYVQALSRMKSQFLTRLFLSFSEMESGKPFYSIFSKTSLSLLEEEFTLDELAEKPIPELVEFLQEKGGGKFQNPEEIAKVLKKAASSSYRVPAMVRESLNRTMASDMEIMRILENEIHNCDKNIEKLMKSVPAILVSIPGIGPVLAAGIMSEIGDISRFQKQESLGKMAGFKWKRNQSGKKESEDKAAVLSGNKKLRYYLVEAANRVRIHDPVFEAYYRKKYAESKTHAHKRALILTARKLVRVIFYLLKENKLYKPDVGIS

SEQ ID NO: 188403 - protein, 340 aa, unidentified
MEKRYIGIDLHRNRFTCCIRLENERTYLTDWELEDLGKFVKKLRPADEVAVEITGNTRLFFDAVAAHVARVVVVNTNQFRVIRQSVKKTDPNDARTLALYLSKNMLPEVRMKDKEHGQLASLTQTRDTLVKLRTALKNKINNILSARGLNLAKEALSSEKKLAEVLELPFDEIVRIELRVIVGQIRSLNQSIAELEKTIGEEGSKLDGHKGLSSIKGIGKITGAILLSVIGDVNDFADEGHLASYFGIVPRVSNSNETERSGRIHKSGTKLGRTALVQSALIAANYSPYLKRFYEQVKGRRGAGKAIIALAKKFLGIIYRTLKNKWVFEDFPNFVLAEAS

SEQ ID NO: 188404 - protein, 329 aa, unidentified
MSDELTQPVTWVGVDVSKKKFDVFLERADGRGKSKVFSNNAAGFAQLLTWGQAQDLDWTQTGVCLEATGPYGTLLARTLHEAGVVIAIENPARIQAFARTLGVRVKTDKADAQLIARYAKQHPPRRWQPPSAEEERLQALVGRLDDLIVMRTMEMARAQQLTGEALASVTNILKALEEEIERLRAAICNHIDQDPTLRQPAELLGSIPGIGQETISRVLAHLGTLTRFENVRQLVAFVGLNPRVRQSGQWTGTSPISKQGSSAIRRALYMPALVAKRYNPILRDFGERLAANGKRPKQIVVAIMRKLVHMMWGILKSGRPFDPSMGLQG

SEQ ID NO: 188405 - protein, 387 aa, unidentified
MMVRTVNDLPAATHGETVRCLIAIELSKRSWVVAFNTPLSEKISRRTLTGCKWKKLLELIEDVRVRVSRQMGRSVEVMSCYEAGYDGFWLHRQLEAHGVRNYVIDPASLQVDRRARRVKTDRMDTERLLRSLMAYLRGEPKVWSVVRVPSVAEEDARRLHRERDRLVSERVQHVNRIKGLCALHGIYDYDPLRRRAMAQLEQLRMTEGEALPPRLKSEIKRELQRLELVVEMIATLEAERDAIVEDEASPHVNAKKIQNLHKLKAIGPEFAAVLVGEIFHRGFNNRRQLASYVGLAPSPFQSGNVAHDQGISKSGNRKGRTTGIELAWLWLRYQPDSDLSAWFRARVGITKGRIRRIAIVALARKLLVALWRYLETGLVPRGAVFKG

SEQ ID NO: 188406 - protein, 350 aa, unidentified
MNVLHYIGFDVHKKSISYCVKAPDGTIVEEGKLSAKRATLCEWASQRSQPWHGAMEATLFSGWIYDTLKPYAGELQMGHPAMMKAIAASKKKSDKLDARKIADLVRCNLLPACYVAPAELRELRRLLRYRNLVVAQAVRMKNRISGLLMETGAEYSKKKLHGEKYFTELVDSLEEVPESVKDLLRLSRGAVEMFQTTQEQLLARLEKEPRVVARVELLRSIRGAGVVTALTWALEVGEPQRFPSIGDAVSYCGLTSALLSSADKQQRGPISKQRNVHLQTVLIEAAKLAPRWNPQLAAIHEREIQRGHRNRATLAVARKLVAYLLAVDKSGKPFEIRTPAIVEQEVKPAA

SEQ ID NO: 188407 - protein, 422 aa, unidentified
MARKTRKTEELEEIVYERCCGIDVHKDDIKACLNIGGKKEVRTYSTMTDGLFELASWLKENNVQMVAMESTASYWKPVFNILECEGIPAMLVNPQHVKNLSSPKTDVRDAKWLSNLLRHDLLTASFVPNRDMRELRELVKYRGSLSDDSTRTFNRIDKILQGANIKLSSIISKTGTKTELSILEALANGEDDGKKLAELAKGTLRNKKAEITRALNGLMSDHQRFMLKSMLNHLNRIHTEMAEVEAEIDKRMEKNNEIIKRLQGIPGVGKTTAQAILSEIGTDMEQFPDEKHLSAWAGVSPNQNESAGKRKNSKAKKGNSNLKKTLVQCANSAANSKDTYLNAQYKRIAARRGNKRAKVALAHTILIICYFMILNGSTYQEFGADYFDKRNKETIALRSIKRLQNLGFIVTITRPEEAFEAS

SEQ ID NO: 188408 - protein, 400 aa, unidentified
MANTPGSKFFVGIDVSKEKFDVCCIEDTREKLFRLSTEMNRSGFEGLIKKIFSYGGSTDNVVIGMESTACYHIPLFSYLTSEGYSVVVINPLLISNYMKLQLRKTKTDKKDAQVIAKYLIEQKEAYSQSVMRSDITELRDLSRQRESLVDQMTAQKVDIKRILSVTFPELERITNIFTKSMLRLLSQYPSASAIKNTRRAKIAKALIPGSYGKQTDESVDVIRKAAKTSIGVVSQAKEVVLKQKVAILIQLQEHLSQLSEILIELCQSQMGEDVEILTSMKGIGNQSATNFLIELGGGVDPYKSPKQVIAMAGLDPSVYQSGKHEGKGRISKRGNRHLRRIIWLMSTKVIIFNDFFKEYYLKRRDDGLPYKMAVLATAHKLIRTIFAMLSNKTSFKVRAS

SEQ ID NO: 188409 - protein, 317 aa, unidentified
MSNPESFVGIDVAKSWLDVGWLAGPTLRIDYNDEAVAGLVERLRREPPTLVVMEATGGLETEVASALAAAGLPVAVVNPRQVRDYAKACGRLAKTDRIDALILAGFAAAIRPQVRELPDEDTRALGDLLARRRQLIEMRVQEKLRLQRASSVQRLSLREHITWLDERIARLDIELTHALRTSPAWRDKDDLLKAIPGVGSLTRATMLALLPELGALNRRQIAALVGVAPFNRDSGKHQGQRVIWGGRAQVRRTLYMAVVAAMRCNPVIRSFYLHLRAQGKPAKVALTACMRKLLTIMNAMLKHRSEWAPGLDSQHSC

SEQ ID NO: 188410 - protein, 341 aa, unidentified
MRIVGGLDIHRRQITFDYRDERSGQIHRGRIAPADRMLLRRWLATTLEGAPAAFAVEACTGWRFVVEELQRAGVEAHLAEPAETAAARGPKRRAKTDRTDARLLRELLAADRLPESWIPPEQVLEMRGRLQLFKDLREEHTAWVQRIHAILLHQGAPAIAGDLLGADNRRWLEAGDQLSAAGRQAVAAALRILDALDAELVPLRKQIAAFARRQPGCKALQAHYGVGEITAVALWAELGDTRRFSCSRKTVRHTGLDITVYSSDGKRPPGKLSRQGSPLLRWALFEAAKCAARPSSPDYAYYRQVADRLGGNRAALSVARKITRRAHHTLRALGDEALAPV

SEQ ID NO: 188411 - protein, 385 aa, unidentified
MFDHLAKTPVTVQSQANTLFVSLELSKSCWLVTVSAPGSTKFSRYSVTGGDAAALLQLLERLQGAVAQRLGAPVAIAVIAEAGLDGFWLHRLLCQHGLTSYIVDPASIAVPRRHRRAKTDKIDGAALLRTLIAHARGEQRVCAMVVPPSPEAEDQRRLSRERARLIKERIQHSNRIQGLLFGQGIRDYDPTHPERLARLGALVTGDGRALPAHLKSEIQRELARLELVLSQLTAVEAERDALVARTAAADPNAPAAALTRLRGIGPEFASLLWLEGLFRRFNNRRQIAAYAGLAPSPWQSGGIDREQGIAKSGNPRLRRTMVELAWFWLRHQPASELSRWFQRRVGQARGRVRRIAIVALARKLLIALWRYASHGVVPEGAVLKA

SEQ ID NO: 188412 - protein, 414 aa, unidentified
MLPPEIHTVVGIDVAKQAPVVCALEAPSGALRHKPSRIEATAAGYALLRSWWASWGNPEQTVMGLEATGPLWEPLYDTLTRAGYTVLVLNPRQTASWASSLGLRAKTDGIDAQLLARGLLAGLARASTLPSEAVQALRTLTRARRDLIQTRTATRQRLHDELVTLFPEFVRFLPTLPGRADLGEPAVLALLSTSSSAHALAQVSLDELTTTLERVSSARWGHEQAQALQALACRSTASTRAVSARSLVARTLAQQLQELAVHVAELEAAIADLLHDDADGQRLQAIPGIGPLNAATIRAELGDITRFQRVDEVVAYAGLDPRTRQSGAFIGQKQLSKRGPGALRHALYLAAFVAARCVPEWRTRNERLLARGHAKKEAYTILARALLRVIYHLLRTGDAYDPALLNPSSPATTG

SEQ ID NO: 188413 - protein, 427 aa, unidentified
MRDIALDVHIDFCEVAIAEGGEVRSAGRIAAKPEELALFAQSLGREDRVALEVTGNAWAIKRIIEPHVAEVIVVSPTDTGIRGARAKTDRLDARILAKLLAAGELDGVWMPDRNTQVMRRRLGRRTQLVRTRARAKNEIHATLMRCLVGRAPFSDLFGKRGGQWLAGLELPAEERESVDAALRQIEFLDSEIAAVERLIAAEALESAEIKRLMTVPGVNVIVAATFMGAIGDVRRFSSPRKLVGYLGLDPRVSQSGSSPATHGRISKQGSVSARHALVEASWSVVRQPGPLHAFYGRIRARRGHSVAIVACARKLACLFWFLLTREEDYAYAQPSLTAKKLRLLEVRAGAPTRKGILSGTWPTRQRMRAAEQELAARAESAYKRMVAEWQRTQAKQSKGAGATPGRASSGPSSGQAARQDEAPSPAL

SEQ ID NO: 188414 - protein, 315 aa, unidentified
MSETSISVGIDVSKDTLDVALSTGARFSSANDENGILSLVKQVKALQPERIVLEATGGYEQALVAELAVNQLPVAVVNPRQVRDFAKALGRLAKTDSMDAEVLMHFAQAVKPETRALPDEQTRELEALVVRRRQLLGIVVAERQRLAKAPAVVRQDIRSHITWLIKRLKDTDRQLATALRASPLWREREQLFKPVKGVGRVMLSTLSASLPELGRLNRRQIAALVGLAPFNCDSGKFKGKRHCWGGRADVRAVLYMATLSAKRFNPAIRVFYERLIALGKPKKVALTASMRKLLSILNAMVRDRTQWNPNLHLST

SEQ ID NO: 188415 - protein, 375 aa, unidentified
MEGAPMLDTTTFVGLDVHARSIKAVSLDVMTGEVRAATFGYDAGAVAEWVRSVDPRARCVYESGVTGFDLQKRLSGLGVDCVVGAVSKMIKPSADRRRKNDRNDAEFLARMLSVGNVVEVWVPDDECEAARDLTRALEDARDDLSRSKQRLSKFLLRHGLAFDERTPTGRRKGNWTRAHWSWIESIRFAEGADNDVLAYYVDAVRRAAEEKARLEGLVEAEARKPRWRRRVDSLRCLKGVDTATAADLVFEAGEFSRFRNARSFAAWVGLTPSEHSSGESDRRGAITKAGNKHLRKALVEAAWHYLTCSGRPKDLAKGQAPDRVARRHAAKGVRRLVERREALLARGVHNNKANVATARELACWVWAVGLMAEEA

SEQ ID NO: 188416 - protein, 319 aa, unidentified
MKATKAAPYVGIDISKTQLDVAVGQSGDSWRANNDEKGIESSVRRLKELAPALVVVESTGGLEVPLLVALYEAGLPLSRVHPGRVREFAKSIGLLAKTDKLDARLLARFAEAVKPPITTLPTSEEQQLSALMTRRRQVVEMLTAEKNRLNTLPPTMRQRVSKHIVWLEEELAELNRLIEELMKQTPAFQDKNALLQSTPGVGPVTSAILLADLPELGHLNRQQIAALVGLAPFNHDSGHRQGKRRVKGGRPFVRSILYMATLSAIKFNPLINSFYDRLLAQGKLKKVAIVACMRKLLVMLNAMIRDNKPWNPGQLVHAS

SEQ ID NO: 188417 - protein, 350 aa, unidentified
MDRYIGMDVHSASCTAGVLSAKGKRLSSTVLETNGKALVEFLRLVPGTRRLIIEEGTQAAWLYEILSPHVHEMVVMSVPKSKGQKNDKLDAFGLAEKLRTSSIERRVFKGLGEFSTLSSMAKAYRTVMLDSVRVMNRLKAVFRSRGISTADRQIFGQRTKEKWIKKLPSKIQPLASTYYTQLEVLLPVRKQALKDMLKEARKHHLFHILNTIPGLGPKRVAEMLPIVVTPYRFPNKAKFWTYCGLGVVMRSSSDWARAADGSWLRTNKDQTRGLNLNHNRSLKKIFKGAATTVVGQKRPQEPIFQHYLSLLDNGTNPNLAKLTIARQIASVTLALWRSGEEYDGKKLKKQ

SEQ ID NO: 188418 - protein, 385 aa, unidentified
MLSPMRIVCGLDVHKDSVFACILNENGEKFECKFGVLTPELEELHQLLLTQDVKEVTMESTSIYWHPIWRVLDDIEDLKLVNPYFIKQLPGRKSDVRDAAWIAECTMKDLIRGSFVPSTLVQRMRQYNRRIFDLNKEIVYKLTKLDSVLQRCNIRISNYVSSVDSKSYKEVVRLVSEGVTDPNRLASVIHGRTINRVGKETITASLTGVISEVDIDLIRQYLEEIELAQRHKQESHEKLTRMCEDEFPKEFENLQTIPGVKERSATSILAEIGADMKMFITASALVSWCGLKPRNEESAGKIKSRRITHGNKYIRKTMIECAWGASKTQNCFFSKYSYTQTVVRKKNAMKVKVAIARKMLTAIWHVLSEGKPYADYKKPDTKGNS

SEQ ID NO: 188419 - protein, 336 aa, unidentified
MTKYIGLDAHSSTCTFNVTDERGREIDNTTLETNGRLLVKYLRGIGGVKKLTFEECELSNWLYEILSKEVDELVVCNPVANKDYKKIKTDKMDARKLAKLLRGGFLIPVYHNGSSRERFRSVMSAYQDLVEESVRLKNRYKSLFRKEGKKAKGESLYHDESFLEGLERGDFQFIGRHIYELLEKMEQGRKEYIKEIIKYSKGFKEIKYLKSIPGIGPIQAARIASQVIDPKRFADKYKYYSYCGLVRHKRISDGKEYGSCRIWGNRILKSVYKTAGLSVLQGSSGLRKYYDCLRSKGISHDNAYNAVCRKIAAISLSVWRKSESYNDELITGNLTR

SEQ ID NO: 188420 - protein, 394 aa, unidentified
MKLIGIDIGKNKHFFCIMDQQTGEIISQPISFSNDKEGFDFLVQKIKSYPKDSILIGMEDTGHYHFALLKYLLNLQYTVALINPKTTDFNRKIQGGITKNDKLDTINICDVLDTPERKKQYRITKVNSFDLYEQKQLTRHHHNLKEEENVYKNRLQKCIDIVFPEFNKLFNSKYGIVYMNILKMFGSAENIANTDIRTIRKCFEIEGRGNRISLTPERLKECARSSIGISSSAEVIQIKHLTAQIELIEEQLTEIDKKIEEFSIQNNSPILSIPGISHFSGTSILAELGDISNYSKPSQIIKFAGVAPLHYESSQFNAQHTSITKKGSKYLRKTLYQIILPVIRHNPVFTKYYQLKISQGKGHRCAQGHCVRKLIRIIYHLLKTNQQFDPQLLR

SEQ ID NO: 188421 - protein, 419 aa, unidentified
MTSIKEKKVKYINKKTMITTLDIGKTVHYGYFRAPNGSDVKAFPFYNSKKSFNTLWGKICQFKREHQLDEVVIGFESTGPYAEPLFHFLRKKDVKLVQVNPVHTKRIKELTGNSPDKTDKKDPRVIADIISLGHALTLIVPKGAAAHLRRLTQARERALKQRTATINQLQDLIFVIFPEFLSIMKNITTKTASYLITHHPSAESICTMGVKALVATIKKISRGQLGHQRAQELVAAAKNSVGIYEGKESILLEIEHLNRKIEFENRFIDNLEHQMAEYLQQVDYSGCILSIKGIGTVTAAGLIGEVADFNKFDTISEVMKLAGLDLYEISSGRHKGQRRISKRGRPLMRKLLFFMAINTVKSKGIMHAKYQQMLAQGMIKMKALVAISRKLLGIIFAIVRDNTKYVENYSGNYHYKLAA

SEQ ID NO: 188422 - protein, 430 aa, unidentified
MSYKIAGIDVHKKVLAVVVSDVEIESEFQFERRMFGSNPEQLRSLAAWLLAQEVEEVVMESTAQYWKPVWEALERYWKPIREKREGAGRRSGTLHLAQAQSNRGRRGRKRDFPDAERLVKRLVARELTLSFVPDAEQRLWRTVTRRKYQLRRDHVRLQNQVESLLEEAHIKLSSLVSDLLGASARRMLKALAEGETNPAALAALADWKLRATPEQLCDGLGACTDLKPVYRRLLKMALEQLQFLEQQIDQLDQELASLLHPHQDAVQRLAEVPGLGVDSAQQIIAEVGPTAATFPSEKCLSSWVGACPGDDESAGVNYSHRSPKGNRHMRRVLNQTANAAARTKGSIFEIVYRRSVPRLGHNQAIGAIAHRQCRLIWLILHQGVRYEERGPAVTKQSKQRRTARMIRQLRSLGYRIEPPNPQHPSPAQGR

SEQ ID NO: 188423 - protein, 344 aa, unidentified
MARSLVHYRLFVGIDIAASTCAVSWMRPSGQPTRAITIKQTPAGFAELQRQLLAIEPDPHAVLIVMEATGTYWMRLATNLVGAGFAVSVINPAQAHDFAKALLKRSKTDAIDAQMLTELGARLQPERWTPPPQVHTELQQRLVHRDGLVAARTQFRNQLHALVQQPVVIASVQTRLESLIATLDQEIATIEQEIAAALQQDEAWAAAAARLATISGFGTLTVAWVLTTTINFTLTATPEAAANYAGLAPQLRQSGSSVRGRPRVGHGGNADLRRALYMATLSAVQHNPVIKAFYQRLCAAGKPRKVALCAAAHKLLRIAWAVVNTNQDFDPAYAGRRCAVPAAG

SEQ ID NO: 188424 - protein, 343 aa, unidentified
MEHYVALDVSLREISVCVIDGKGAVIFEGKTAADPASLAQLIRAKAPQVVRIGMETGATSPWLYHTLTAAGLPVVCMDARQAHAALSLRPKKSDRSDARGLAEMLRMGWYRAVHTKSVTSHERRTMLGVRHQLVTIRAELDAQIRGVLKTFGLILGTGNSNTLIRRAEELANGHPMLSSLVAKLADVRRLVVLQIAAIDREIRRLIQSETDLKRLMTVPGVGPITAVAFLSAIDDVGRFKHARDVGPYLGLTPTRYQSGETDRQGRISKCGDAFTRTCLYEAAHVLLTKVQRFSPLKAWGMRLVKRIGMKKTCIAVARKIAVILHRIWVDGTEFRWTREAQPV

SEQ ID NO: 188425 - protein, 429 aa, unidentified
MIMGFNKPIEHFNLQQKKVITTNTLYVGIDVSSKSNVIYLMLPNGDKHSNFSVANSREGSTQLVKRILSALTSHSLDTVLIGLEATSVYGDNLVYFLREDATLAPFNRKIHILNPKQVKKFHDAYNDLPKNDYVDSFVIADCLRFGRINKEVYMGDYRYKALQNLTRARFFAVQNLVKEKQRFMNVLFKKYSMMTQEKVFSDTFSTTALAVYDEFESAEALANMDLHELTDFIIEKGKNRFPDPDAVAKAIQKAARSSYRLPKTVYDSVNQVLSISITSMKALESQIKEFDKAIKAQMELLPNVLISIPGIGPVYSAGIMAEIGDINRFNSQAALAKYAGLAWKQHQSGGFEAEVTRLIPSGNRFLKYYLCEAAFSLVRCDKEYSDLYHLKYKEVNRCQHKRALALTARKFVRLVFRLLKDNRLYCPAK

SEQ ID NO: 188426 - protein, 414 aa, unidentified
MILVNPVVGLDISKGESQVQAFVDKGKPFRKSFKVAHTIQGLALLVEFLEVVQKETGLKPPVILEATGHYQTAVVQYLEERGYLLIIINPLISYKAKSSSLRKVKTDAVDAYHLCELFYKEELEPYKKRGVQLLNLRNLTRQHENITGVMIQTKLQFQAILDQVFPEYRGVFGDLYSVVSLLTLKEFPSSEDILEASDETLSNRIKELCKSRSIRWANEKALQLKEAATRNPFEKTVYQSHFLSLGMYINIILQYKEHLSTLESEIDALAKEVEEYNIIKSIPGIGEKIAATIISEIGEIDRFTDPKKLVAFAGVDPSVFESGKFTATKNRITKRGSSRLRHALYMAVRCAIRDCRKSKTSDEIIPRNKKLREFYDKKREEGKPFKVAVIACVNKLLHWIFALLRDRTTFQDIA

SEQ ID NO: 188427 - protein, 328 aa, unidentified
MNRWRAEAEKQGHRITRIAVAFEAGYDGFWLARWLAAQGVEAHVIHASSVAVTREHRRAKTDRLDTELLKRAFLGWLRGERGHCKMVAVPTLAQEDAKRPSRERETLVGEASRIITRVKAAFVRLGIRGFNPKLKAAATRLETLRTPEDEPIPPNTLAALKRDLERHQIVKKQIREIEQTRLDVLKQAPEKGPHAMVLLLARVIGVGVETADMLVQEVLSRTMRDRRAVGRYAGLTGSPDESGAKRRDKGLARSGNARVRHGMIQLAWRFLLFQKDSALAQWYRQRTADAPSTRKTLIVALARKLLIALWRLARDGVVPEGVRMRPAA

SEQ ID NO: 188428 - protein, 343 aa, unidentified
MEYFAGIDVSLEQSSVCVMDATGKIIREAKVASEPDALARFFADLGFPVVRIGLEAGPLSQWLHAGLIKAGLAAVLLETRHVKAALSAMVVKTDRKDARGIAQLLRMGWFRPVHCKSPPAQEARALLVGRKLLQAKLHDVELSIRGILRGFGLKVGQVSRGRFAARVQELIVGQEMLETVIGAMLTARAGLHSEFMRLHRRLLAIVREDTVCRRLMTVPGVGAVVALTFTSAIDDPARFSSSKAVGPHFGLTPKKYQSGETDVTGAISKTGDALVRGALYEAAQVMLTRTKSFSTLKRWAMEVAKRRGMMRAKVALARKLAIVLHRMWVNGTDFRFGKEAAVA

SEQ ID NO: 188429 - protein, 410 aa, unidentified
MSLVGALFFVGVDWAAKTHAVCVLDPAGRAVAAFPVAHTAAGFTGLIRRLAKLGTPGDVPVAIERPDGRLVDALLAAGHPVVPVKPNAIKTWREGEVISGAKSDPGDAHVIAEYLRLRAHRLRAATPLTEHTTALRIVSRTRSELVEARVAATNQLSALLDTHWPGAKEVFADVESPISLAFLTRYPAPAHAAALGEKRMAAFLTKHGYSGRRSTTELLTRLRTAPAGTTSTVIAEALRDAVLAMVAVLTTLNTAIKDLDRSAAAHLYEHPDGEIFTSLPRAGLVNAAQIRAELAEHSAYTGPEAIAALAGLVPVTRASGKHHAVSFRWACNKRLRVAITTFADNSRHASPWAAGIYQRARASGKDHPHAVRILARSWVRVIWRCWIDQQPYDPTRHGGAAQLLDHTTAA

SEQ ID NO: 188430 - protein, 387 aa, unidentified
MGHVVIGMDPHKRSATIEVIDDRERVLDKGRFGTDSEGYRAMLAAGRRHRDRVWAVEGCNGIGRHIAQRLVADGEPVVDVPAKLSARARVFCTGQGRKSDPVDAHSVALLGLRSTDLRVIAVDDATVALRLLVDRRDELGVARSQTINRIHRLLLELLPGGAKKDLSAMQAKTLLATVRPRDIVGGTRRRLTAELITELAGIDKRIKSADRELNELIDATGSSLRELHGIGPCGAARLLGDVADITRFADKGRFASWNGTAPLDASSGDQQRHRLSRAGNRRINRVLHIMAIVALRNDTEGRRYFDRRVAAGKTNMEAMRCLKRRLSDIVYKQMRDDAKRQAASPGGHPGATLQSSAADSHPDIDTSDQSLPGPATSQPRTTLAAVS

SEQ ID NO: 188431 - protein, 424 aa, unidentified
MKVTYQTCCGVDVHKSFLVATIVKTTGGIEPSYQKKRFSTFNNSILEFKQWLLDNDCHDVCMESTGKYWIPVFNLLEDEINVVIANPKWVKAVKGNKDDAKDSKWIGDLFRLGLVKGSYIPCKKVRILREYTRYRYKLVSCRSSEKNRYQNALTVCNVALDSVVSDIFGKSSTSIIDYLLEQSGTSINHEEIASKLLRSLKSKEDAVIESIEGYQMTDAQKYRMRLVRAHMDYITAEINDVDKMIENMISSNPDFENAVQFLCTIPGVKHDSAITIISEIGTDMSQFSSSKRLCCWAGLTPGSNESAGKKKSVRITRAGVYLKPALVQCAHAAVKSDKSPYYKKKYDSLVKRRGKKRAIIAIARMILTAIYQMLSTGEQWNPSDLYKIDMPAPLLEKQKAKAIKQAKKLLQREGLLPPDEPLAS

SEQ ID NO: 188432 - protein, 406 aa, unidentified
MNDELAEGNVPEIWAGVDIGKTHHHAVVINADGKRLLSRRIANDESELLTLIGDVLEISADALWAVDLNHGGAALLIGLLVNHGQPVAYITGLAVHRAAATYKGGEGKTDAKDAFVIADQARVRRDLGLLRPGDEIAVDLRTLTTRRLDTVFDRTRQINRLRAQLLQIFPALERALDLTNRGPVTLLTGYQTPAAIRRAGTSRIETWLKNRKVRGAAALAKTVVEAAQAQQTALPGEKLAATMVVRLAKGVMALDEEIAELDALIEAKFREHPLAEVIRSLPGMGAKLGAEFLAATGGDMDAFGSPDRLAGFAGLAPRPRDSGRVSGNLRRPRRYHRGLLRTMYLSAMVSLQCCPASKAFYDRKRSEGKGHKQALLALARRRLNVLWAMIRDGECFHASPPVTAAA

SEQ ID NO: 188433 - protein, 318 aa, unidentified
MNTNTLQNINVGVDTGKSQLDIYIRPLDIYFTAPNTEKGISHAIKTIKKHKPQRVVIEATGRLEMPFILACDKAKLPYVIANPLRIKRFAGAIGQRAKNDRLDAALIAHYAERVQPELTKIKSENIRLMSDLVTRRNQLLTMQTMEKNRLQILPKNISSTITPILTALKNQIEKVEAKIAKLIDSCPEYQAKNTLLQSMPGVGKVLAASLISNVPELGYITNKQASSLIGVAPITRESGRFKGKRMIQGGRAQVRTVMYMAMMSAIQCNPVFKAAYERLLAAGKPKKVAIVACMRKMVVILNSMLRDGVMWDKDSVKN

SEQ ID NO: 188434 - protein, 343 aa, unidentified
MGEVSTIGLDIAKSVFQVHGVDVDGVVVIRKRVSRAKVLEFFSTLPSCLVGIEACPSAHHWSRKLQALGHTVRLMPPSYVKAYLKRSKNDANDAAAICEAVTRPSMRFVPTKSEQQQSGLMLHRSRQLLVRQRTMLSNAIRGHMAELGIISAKGRNGTAELLKIIANAEDDRLPAVARFSLDVLARQYVIITAEIGALEKRIHVWHRSCEESRRLEEIPGIGPIVATALVAEVGDWKAFSSGRNLAAWIGLVPRQHSTGGKERLGGISKQGNRYLRWLLVTGAMAVIRYARQRGTKRLWLARIMERRPIRVAAVALANKIARMAWAMMVRGECFKEPRLLPAA

SEQ ID NO: 188435 - protein, 358 aa, unidentified
MVDKVTEAAVVGGVDTHKDLHVAAVVDQNNKVLGTQYFSTTRQGYRQMLAWMTSFGTLKRIGVECTGTYGSGLLRYFQNAGLEVLEVTAPDRMERRKRGKSDTIDAECAAHAAFSGLRTVTPKTRDGMIESLRVLKTCRKTAISARRVALQIIHSNIISAPDELREQLRNMTRMQLIRTLGSWRPDASEYRNVTNVYRISLKSLARRYLELHDEIADLDVMIAAIVDELAPELIKRNAIGYESASQLLITAGDNPQRLRSESGFAALCGVSPVPVSSGKTNRYRLNRGGDRAANSALHIIAIGRLRTDAKTKEYVARRVAEGHTKMEAIRCLKRYISREVYTLLRNQNRRINSIPITA

SEQ ID NO: 188436 - protein, 321 aa, unidentified
MSLPNPLCVGIDVSKATLDIAASTDITPFTVSNDSDGFDAIIAELREHSVALILMEATGGLEAAVACQLQAEGFDVAVINPRQARDFARAMGHLAKTDRINARVLAQMAEVINRHPDRVRFIRSLPDVERQVLVAMVIRRRQLIAMLVAERNRLHPVHPQSRKSINIIKALEDELARVDEEMNSYIRNHFKEQAARLSSIKGVGAMTVASLLAEVPELGSLSRRAISALVGVAPVNRDSGSMRGRRTIFGGRSGVRTALYMAALVATRFNPVIKAFYMRLLAAGKTQKVALVACMRKLLTILNAMIRKNEEWNESNHYIAP

SEQ ID NO: 188437 - protein, 385 aa, unidentified
MTQATPNLSIIPRDYDIFGGLDVDKKSMAVTFTDHGTMRKSHKLPYSARQLLNYTRKHFPGQRVAFVYEAGPTGFGLHDELTAANHPCLVVSPSMVPTAAGQRVKTNRLDSIKLSEGLRGGQLRSIHVPATSYRELRHLVQLRDSQVAQLTASKCRIKSLLLYEGIAFPSANGKWSGRVLQQLEAVPCSATVRFKLDQLIDALGFHYRSAAKVQKQIRLFCQNDPELRQCISFLTSLPGIGSITATHALARLGDWRQITNVRQIAGFLGLVSSEHSTGDKQNRGEITRIGDSRLRNKLIQCAWVAIRKDPELRAFYRRIYERQPKKVAARKAIVAVARKLTTRMYAVLKEQRPFVIRPDSSIAPLTAEETVGPRERLDAAQYEQL

SEQ ID NO: 188438 - protein, 339 aa, unidentified
MKVSTLGIDLAKNVFQLHGVGCNGQTVLKKKLTRDKFLPFLMQLEPCLIGMEACASSHHFARVLRQYGHEVKLIPPQYVKPYVKTNKTDAADAEAICEAVARPNMRFVQIKTAEQQAILVLHTERNILIRERTACANSMRAILAEFGIIMPRTLSQLYKKIPEILEEYDNELSPFVRCSVARQLEHLQGVEDQITLTEQELSRWAKTQPACQRVMKVPGVGLMTATYLVASVGNGQQFHSAKQFAAWLGLVPREFSSGGKQRLGRISKRGDRYFRYLLVHGARAVVAVIERHKDNMPWLYRLLNKKAYNVAVVAQANKTARILWSMLVHHTEYRTLSVV

SEQ ID NO: 188439 - protein, 355 aa, unidentified
MSVYVGVDVHRKRSQIAVIGQDGEVQVNRNVPNGVKTVLGVIGDLPIGAPVAFEAAYGWGWLVELLEDYGYDPHLVHPLQCKAIASARLKNDKVDAATIGQLLRADLLPEAWIAPLEVRQQRALLRHRFQLVRLRTLLRNRIHAVLADHGHDRAGGICTSPGRSWLADLPLPDASRHVVDDLLQVIDALQPIIDTLDRQLAAQSRGDPRSIALCALPGVGTLTALMIVAEVGDISRFPSARKLAAWAGLTPTVRNSDRTVRHGHISKQGSPWLRWIMCEAAQTAKRHPMFAPGYQEMAHRRGKKIATIAIARKLLTRAYHVLREVHEQQAPPHRTTATKAAAGTAPHPGRARISA

SEQ ID NO: 188440 - protein, 346 aa, unidentified
MRYKGMKYKSFIGIDISKNVIDASIFCEGPPIKDFPHDVFNNSRKGFSEMCTWLKKNHVVLSNCLFGMEFTGSYSMELEKFLNARNYQFCMLSTHMVKHYPMGPKDKSDKIDSAKIADFLYRYNGTECVKPYKMPDKTMQRLKALMNERKFLVEQRTCFMNRRQLCTTKEDTQLYDGYIKKLSHDIENIELEEQKLLATDDSLLATYKNLLTIPGIGFVNAINAIVITRNFTAFETARQYASYVGVAPHSHTSGTSVKWRPRPSARCDGQAKADLSMAATVAVQYDAELQSFYNRKLGGKQDSDTKRKALNAVKFKLVLRMFAIGKQNRKWEPLDSKSSNEKLAIS

SEQ ID NO: 188441 - protein, 400 aa, unidentified
MLSIGIDVSKGKSTVCGMKPGGEIVYTPFEVQHTREGMLELVSLLRSSGEEVRAVLESTGSYHCPVVAALLENGIFVSVVNSLRMKRFCSQSIRKVKTDRIDAMQIALYGLAYWQELQPTKLPEDTYRELQLLARQYYQMTSLLIKAKVDFNAICDQVLPGMQELMSDHAGRHKLSDFVLRYHHTTHILEMGETRFRKDYCKWAEKKGYRNCERMAALIFATAQNGIPVLPNAPSTQIVITEAIRVLHTVEASRDAILTQMQALAKTLPEYSLVREMPCIGDTLAPRLIAEIGDVRRFHSKRALIAYAGIDAPPYQSGKFCANNRHISKRGNRYLRKTGYEVMQSYVMHKPANDPIFTFIEKKRGEGKNGKLAMVAGLNKFLRVYYGKVTELYRSLPAIE

SEQ ID NO: 188442 - protein, 348 aa, unidentified
MGYYVGLDVSMKETVICIVNEKGESVHKGRAKTDPEKIFQHLTYSKFKIEKAGIESGSLSHWLVNELKKLGVPAVCIDARKMAAVLSIRVNKTDDNDARGIADAMRCGMYTEVSQKSQTAVETNTLMQCRKTLVHQRVQLTNSIRGYLKTYGVRLSSSGEKEFPLKVRNSLPAIFEIACAGIESLLCCYEKLCEQIREMERKITDLAQGDEEVKRLMTVPGVGLITAMTFKAEIDDPARFKKSRDVGAYLGMTPRQYSSGETHKQGHISKCGSSEMRTLLTEAGLVCLTRSKKWSRVKAWGLKIMRKHGAKKASVAMGRKLAVIMHRMLVEKKDFVYGEETLKEAKVA

SEQ ID NO: 188443 - protein, 322 aa, unidentified
MRYIGIDVSKATFVVAYSSDKGGEIRTFNNTTAGIRQFIGTLPKDGSIHCVMEATGNYSALLLYMLNVAGITVSMENPLKVKNFAKALLSTVKTDKSDARLITLYGEKMNPRPFKVQGEAILRLRQKRTVIRQLTKQITAMSNLRGSLACLPVPDKGATHTVDETIKFLEKKRDRLQAELTDLVEVEFSRQLALLTTIKGIGITLATALIITTGGFTYFQNAKQVSRYLGICPTYEQSGTSVNIKGHINRNGDAYTRGLLYIAAWPTSRFNAQCKETYTRLRQNGKSGKLAMIAVANKLIRQAFAVVAHDKEYIDGFVSNRP

SEQ ID NO: 188444 - protein, 370 aa, unidentified
MQTARSFIGMDVHKATISISIAEDGRDGPVRFLGVIPNAPDDIAKMAKRLSKHGELDFCYEAGGCGYNIYRQLTALGHRCTVAATSLIPRKPGERIKTDRRDSQKLAILHRSGDLTQVWVPDATHEALRDLVRARVDATMHLMRARQQLLAFLLRHGRSYPTGKHWTMRHRSWLAGQTFSLPVHQLVFQDYVETVWTAQERRDGLIERIGATMASWSLGPLVEALRGLRGIDMISAATLVATTGDLSRFESPRMLMGYLGLVPSEHSSGGSIRRGGITKTGNREARRMLVEAAWSYRYPARVAKEKAEILVRLPKNVRDIAWKAQSRLCARYRTMIARGKKPTVVVAALARELAGFVWAIGQEMRTVMAT

SEQ ID NO: 188445 - protein, 326 aa, unidentified
MHTHFLGIDIAKSKFDCALLRPDGKVRNKVLPNNALGFTQLLTWLHAHGVSSSELHQLHVCMEATGIYWEALAEFLCDQGIAVSVINPAQIKSYGASRLMRSKTDKIDANLIAHFAKERSPAPWTAPAAHERVLRSLVLRLEALQNMLTQESNRHQVANPAVQPQIQSHIDWLNAEIKALAKLIKDHIDKHPDLRQKRDLLDTIPGIGERTQAIMLAYFGSTEQFDNARKAVAFVGLDPRQHESGSSVKGKPRMSKVGHAFVRKALYMPAMAALYKTDWGKRFRQRLANAGKPPKLIIGAMMRKLIHVAFGVLKSNKPFNSALHCA

SEQ ID NO: 188446 - protein, 330 aa, unidentified
MNHIGIDVSGKALSVVFSVNGKHRKAQRYENTPEDHKRLIALIQKLQGESIVCMEATGMHHFDLAVALSRSEKITVTAINPKAVHNFAKALMQRCKTDSIDADVLASYAERMPLVAWQRPSEEALALRALARRISATNKIKAQVKNQLGALMVTQETPEVILTQTKSLIGTLEEQIASFRINALSIINRNQELREIFALITSMKGIAEASAIQLLGELLTMPDDLTIKQWVAYAGLDPRHFESGSSVVKKTRISKAGNRYIRQALYMPALVASRSEPHVAAYYKHLQEKRGLLKIQALCAVMRKILHAIYGMLRSKRPFDGRMFFRMETT

SEQ ID NO: 188447 - protein, 386 aa, unidentified
MELKVTNKAFAIDISQSKLTAAKGELVVEQEKSAVYVKEVKEFNYDNEGIEELIKFLGEYKEGIIEATGVYYFYLHEKLTEKGYKVTVINPLHLTEILGKKTDKLDAQRLLVAHMTGVIKGSYIPTGEIMELRELTRYRESLVEKTTQVKNEIRKILEFAGYKIQPFDKKGRKLLEKLVKGEGLSKEEKEELKEKLGRNLNDAEKLALKQLVELLKNLEKMIKEVEDMIISKIPKPVIELSKIPGIGLISAATIYAEFGDVSRFSSSKAARAYAGFAPKTKQSGDSESHSGMISGNKHLRRTLYLAARVARGLEPFKEYYERLIARGKSVTQATCALAGKLASICYHVIKDGVYKGVVKKSFRIPRGKEVNVKDFDVGDALDSLSP

SEQ ID NO: 188448 - protein, 351 aa, unidentified
MSHKTAATVAHTIGIDTGKNTLHLIGLDDQGAIVLREKIARGRIAARLANVPRCLIGIEAGMATHYVARELGALGHDVKQVPPAYSKPFRQGHKNDFRDAHAIAEAVQRPSTRCVPVKTDDQLDLQALHRVRSRLVGQRTAVINQIRGFLLEHGIAVRQGLRFLRQQLPDILAKRSDVLSPRMIRIMEDLSGDWRRLDERIEHITKEIEVLAATDVNCGQLMTVPGIGPIVASATVAAIGNGAAFARGRDFAAWLGLVPKQMSTGDRTILGRITKRGNRYLRMLFVQGARAILLRPKSWVKHSFGPWLTTAARRLHRNILTIALANKLARIALSVLIQGRSYETRIVPAAA

SEQ ID NO: 188449 - protein, 477 aa, unidentified
MKDNRRSPAPRQAAATKHRSWSPLLKRIQPDAAGVDCGATSHYVAVAEDREPQPVRAFSTFTADLHRLADWLVQCGITTVAMESTGVYWIPLYEVLEERGLEVVLVNARQLHNVRGRKSDVQDCQWLQELHSVGLLQASFRPAGEIVALRSYMRHRQSLVEAAATCIRRMQKALTQMNLKLHHLLSDLTGVTGMAIVRDILAGVRDPQALAAHRDGRCKASEQDIAAALTGHYRPEHLFALRQNFAAFEFHQRQIAQCDQAIEAQLASLAESRPPASRELPAARPRVKLSKNEPRGELRAPLHRITGGADLSQIDGIGPYGALQLIAEIGTDMSRWRSEKHFSAWLTLAPNNKISGGRLLSSKTQPSANRAAVVLRRCAMSLTRSATALGAYYRRLAYRLGQPKAITATARKLAILVYRVLGGEMVYRDPGATAYDQLHRTRLINGLRRRAQEFGLSLINLETGEVLDHALVPQSVS

SEQ ID NO: 188450 - protein, 455 aa, unidentified
MLRDAIGIDPDSKGCQCAHVKLGECQTQQRGYLATEEGMGRFIRWVKKQGAVIVAIEGSNGLSKPMEKALRSAGIVFYSFKASDIDKFRKAVLGQNKNNKKDAESTARYAMALEAQGILDNWKRVWSPDEELQSLTRSYAQRTKESTREVNRLWKLLRAASVDLYLALGGDHPDIDIPENILQNEGILALLAEKPDIYEWKTLSETDFLAVMGDRNYKGRDKLIKELQKVSRSFKLRSPTLSLMIKNSTEQIILLKRQLTEIKRMIEKLTKDNKAVKTLEQHRGIGIMTASTLIAEIVDIRRFAKDDNLASYAGLGKREYKTGNSKKEVPNCFFNRRLKNAFMTAARNYVRFNPDSHLAGYYRNLVKGEMKKTEARKRVARALVRVFFRDLYSLVEPDDPDKVEDEKRGNESDMANSLNCSDKYHSNIPLSFPIKDNTEESVKINGEKTKKAVLR

SEQ ID NO: 188451 - protein, 390 aa, unidentified
MLLEAHTDQPTAIRTQIAAIFVSLELSRKNWLITSLSPGGGEKMSKHGVEAGDLAGLLALFAELQRKALRRTGQSYPIITIQEAGLDGFWIHRALQKEGIESHVVDAASIAAPRRRRRAKTDRLDGEALLRALMAYKRGEPRVCSMVVAPSPEEEDRRRICRERQTLIEERIDRVNRIKGLLFAQGICGYAPLRRNRRAQLEALRTGDGGRALPEHVKAQISRELDRLELLLAQIKAVEAVRNAMLAAMVRRVDETQAPHPLTMLLGVKGIGVDFAATLWLECFYRTFANRRQLAAYAGLAATPWQSGAVAHEQGVSKAGNPRVRTKLVQLAWLWLRHQPQSALARWFHEQAKRGRKSAIVALARKLLVALWKYINAGVVIDGATLKSAA

SEQ ID NO: 188452 - protein, 307 aa, unidentified
MAPRFGIDIDKARLTIAQAGVPGTKTVENTAQAISDWLASLPESSAIAVESSGRCHDLLLALACTAACAVYLLNPLDVRRYAQGIGRRAKTDAVDAHVIARYLDREIADLRPYTALDPAFAALRRVVRHRATLVKHRQALRASLAGTPWLSQIDEALTTSLNAIDAHITALLNTHAAARDLRQRLLTVPGIGPVASASLVSLLHPIAFDTADALVAYVGLDPRPCDSGMHRGQRVLTKRGDPEIRRVLYLAAQAFARTIGKALYERYRARALSATATYVILARKLLRIAWAIQQRNTSFDPQRFAMG

SEQ ID NO: 188453 - protein, 339 aa, unidentified
MTLYAAIDLHSNNGVLSVLDEADRVQYERRLPNDLSQVLKALEPFRDELHAVAVESTYNWYWMVDGLIEHGYRTELVNTAAVPQYDGLKHGNDHTDARHLAHLMRLGILPTGYIYPRPGRALRDLLRRRFHLVRMSTTLMQSVQCAWARRTAQPLRSNAFRQLDEAAIAQAITDPIECQALRAQYMAWRALNAQVDQIERWVLQHQGSSATLAALRTVPGIGAVLGSTIALETGVIDRFASVADYASYCRMVDSQRLSNGKRKGSGNAKCGNRYLCWAFIEAANYAVRFCPEAKRWYARKLGKRKLRTIAIKAVAHKLARACFYLMRDGTTFDAERAFG

SEQ ID NO: 188454 - protein, 375 aa, unidentified
MAQGTRWVGLDAARVSALVAGQTQNDGLVKGEAAGRLPIVMGLDQHRAQITAEWIDLSSGEISRGRVVPADRASVRKFLKRFAGRDLEVALEATTGWRFVAEELERVGAGVHLAEPAETSGLRGPKKRPKTDWADARHLRELLLIGRLPESWIPPDHILDLRARVRCRHTLSHQRTECQQRIQSVLYHHGCPQRRALMTVEGREWLDAQPLPAAAREQITVAVAMINALDVQVAPLTARLYDYAKRQTGCKALIAAYYGIGGLTAVTILAELGDTRRFENSRDVVRYGGLDITVKQSDQHRAPGHLSRQGPPALRWALYEAAQQARHPRSPDREYYLQAAERIGGNRACLALARKLLKRCYHTLRDLGEDALTPA

SEQ ID NO: 188455 - protein, 315 aa, unidentified
MTHLVAAGIDAGQKHLDVGIAPAGKTFRVPNTSAGIAKIIDQLAALNVRRVVLEAIGPYAQHLVDTLSRAGFEVGIVNPRRIKAYRDAEGGRAKTDRLDAGLIARFALKMIDAIRPLPSPAQNRLKALSLRRRQLVEMIAMEKVRLKQALEPFLADSHRAAIADLGALLARVEIELATNLAADSQRARTLTILTSIPGIGTRIATLLVTDLPELGQTDRKAIASLAGLAPHVSQSGNAPPRAVIAGGRPCVRAALYMAALVAARHNPDLRPEYEAMRRAGKPAKVALIAIARKLVVLANALVKANATYQNRSVAP

SEQ ID NO: 188456 - protein, 342 aa, unidentified
MDHFGGLDVSVKETSICIVDDTGRIVKEVKVASEPAALLKVLGNPSYRFKRIGLEAGPLSQWLFSALAGAELPVICVETRHMQAVLKAQINKTDRNDARGIAQMMRVGLYRPVHVKTLRSQKLRMLLTHRKLLQSKAIAIENDLRGTLRNFGLKVGMVGKVKFEARIQELVENIPDLALLVEPLLIVRRALREQIVILHRRLLAIVREDEVCRRLMTTPGVGPVVALTYRATVDVPARFRKSKSVGAVFGLTCAKYQSGEIDWSGRISRCGDEMMRVMLYEAAQSMLRSKKWSWLKAWAMQIARRRGMKKAIVALARRLAVIMHRIWVDGTEFRWTRETAAA

SEQ ID NO: 188457 - protein, 388 aa, unidentified
MVVGVDIGSQIHYARAFDNRGRELTKRIFSFHNDLEGFNSFNLWAETLKTENKKTAVLIGCEPTGHYWFAFAKYVNDHQKRLVMVNPFSVKKIKELDDNSPKKTDSKDPKTIAKLVVDGRYSIPYMPEGIYAEIRDLVYSRDRIMKQHNISANRIQRWLAIYFPEYLGLYTRFDAISGLAVLEKAPLPKDVIALGVNGIRKIWHDKKMRGRGVTEDRAKTLVEAAHNSVGLDGGIGTKSELYMLLEEHRLWTSQLEAVNKVLEEMILKVPHVEKLLAIKGVGSITIAGFIAEVGDIRRFDSPKQIQKYAGLELVENSSGKHKGRTRISKRGRRKLRKILYQVMVPLLARNKEFRGIYDYYVTRVKNPLKRRQATVSYTHLTLPTKLEV

SEQ ID NO: 188458 - protein, 319 aa, unidentified
MTDVFVGIDVSKDQLDVAARPRGESWQVANTELGIATLVKRLEKLQPTLVVLEATGRLESAAVSALAVAGVPLAIVNPRQVRDFARSTGKLAKTDKLDAQMLARFADAVRPEPRLLPDETQQRIDALLVRRRQVLGMITAERNRRRRAPTMTRAEIDEHVAWLQVRVEAIEDELNKTIRSSLLWREKVALLRSVPGVGPMLAATIVAQLPELGVITHKEIASLVGVAPLNRDSGHWRGKRTIWGGRSQVRAALYMSALVATQFNPRIRPFYQRLLATGKPKKLALTACMRKLLTILNAIAHRGQPWRSPASVALIGAAI

SEQ ID NO: 188459 - protein, 350 aa, unidentified
MIIIGVDFHPEFQQIAWVDTDSGEFQEKGLAHREEAERFYRELAAAGQKVRVGMEASGHGRWFERLLSELQIELWIGDAAEIRARRVRKQKTDRQDAQLILKLMLKDDFPQIWVPSWENRDLRQLLWHRHRMVQARTRIMNQLQAVALNEGLRCKKRLWRKHGRQQLEAFRLAPWASRRRRDLLELMDRLNPTITELSQAIEQEVEKCPEARRLMTHPGVGALTALAFVLIIGKADRFRCGKQIASYLGLVPLEDSSGNRRRLGHITKQGSSMMRFLLVEAAQVTVRSVPEWRSKYLHLMMRRGRKTAKVAMARKLAVRLDWMMRKGWDYQQWSKFGSHVGQPGHRDGVQ

SEQ ID NO: 188460 - protein, 313 aa, unidentified
MITLGLDPHPGSHTVAALDKNGTRLAHITVPNNSQGLAHLHEFAAQFVWHRWAIEGAANRFIAIFVSQLVAQGQSIYPVSPGLTSQYRARRGRKKNDVVDAENVARALLANPQLPPLHVMDQQRELQDLTRAQRRLSEQLKANRGAYKELTTQSPVRKVLQPVVRMLVKQLRILKQQIETLVNKLMPPLLTVLGVGPILAGVLLAETGDPRRFATADHFASYCGAAPVERGSGQNRRMQVNPGGNRRLNWALHIVVMVRLRIDGGRSRAFFDKLQTRGKTKRSALRLLKTYIARELFHVMRQPQPITNSSVFA

SEQ ID NO: 188461 - protein, 359 aa, unidentified
MARENLTKLQLFVKAFCNHSFYVGVDVHKRSYHVAIRRADGKTFTFVAAACPEILLKQLQDLDVPIAAIAYEAGPTGFGLARAVRNAGITPFVAAPSRIPRAILAGAKTDRLDCIRLADYAAKGLIKSIAIPSEVEEAERSLLRRRHKLLDRVRSCKQRIKSFLLQHGIQEPQSLQGWSQRAVRDLEQLDLSPEGRMTLQSLIRELSFFEEEKQLIEGCLDELSSREAHIEAIKYMQSVPGVGRIVSSTFRFELFSPERFRSSREVTSYLGLAPVVHHSGEKSPSGRIRPVGQRRLRSLLIEAAWLWRSKDPYASNLYKHFLGRMGISQKAITAVARKLAVILWRLSVEQRMYYCSVKA

SEQ ID NO: 188462 - protein, 436 aa, unidentified
MDAHYANRLRWFRQFKEHINASKSTLVVGIDIGKDKHHAFFGTPAGRTIHRRLIFENSFEGFYELLFYIKRYVCAEKLQDVVIGVEPTSVYHKPLSEYLINMGYSVVYATNSAIKKNRAILDGRWDKNDTKDSANVADLVSRGRCHFYDLPDMNLRDIRSLLSLRKRLKKQEHRCITRIRNNLVAQYFPELDRAWYSCQQENLAIVRFCLSPQKIAQLSFDDFARMVTRKRRGLRQYRRLRHIHEVAQQSIGCRLGSSVAFEAQLLVESLEQVRQQVGEIEEQLYGICESYKEYELLQTIPGFGPFVSAAVLGAIGFAQRFENAKQLLRLAGLDLNALRSGKRSQSAVPVISKVGKADLRYALYQAAKVATSLTAEFKAYFKRLLKGREKEKGIKTKMRVKVSAKMLVIAWTLMKTRQPYKAGLLLIDEPVQPRGR

SEQ ID NO: 188463 - protein, 344 aa, unidentified
MEEGGVVSQLYVGVDVAAETFVAAWLAPGGQPGTPVTHEQTPAGFAALQRHLRATASPPAATLVVLEATGNYWVALAVALHETGYRVAVVNPRQAHHFAKAQLRRAKTDALDARDLARLAAALRPAPWSPPPAVYHEVRQRLVARDGLLAMRTQARNQRHALAQWPVVVAAVRQHLDELIADLDRRVAALEAEIAAVLKESAWAESLACLTSAPGIGLVTASWLLVGTLNFALCAGPEALTAYAGLAPVPRESGRSIRGRAAIGHDGNGRLRTALYMATLSAARYNPAITAFYQRLRAAGKPKKVARCAAARKLLHQAWALGSKLQRFDPGYQQQHEASPDLAA

SEQ ID NO: 188464 - protein, 394 aa, unidentified
MCQHYQTEASMIKHNILFIGLDTHKTFTEVAYIEDQRGAKSTHLGKILSNKAAFKKLARQLQSKYPDATLHFVYEAGPCGYWIYRFLTSLNHCCYVIAPSLIPKKPGEKIKTDKRDALKLAKLLKSEDLTPIYVPEPEDEAVRDLSRARETGMKDLKDAKYQLKALLLRNNINSKIKDNWSLQHLRWLAELVLPHPCQQIVLQEAVLTINERLKRLKRLDNELTHQVKNWRFYPVVKAIQALRGVRLLVATGVIAELGDLSRFDHPRKLMSYLGLVPSEHSSGDKRHLGAITKCGNSRARRLLVEGAHSYKHNANISKEMQLRQEGLSKEIIDMAWQAQLRLCRRYNRLMHKGKHRNVVVTAIAREMIAYIWAISREVVLPKIDVKLRISRVPA

SEQ ID NO: 188465 - protein, 458 aa, unidentified
MEEPQEVLADEEHEQVWERVAAVDIAKASGVVCTRLPDEDHPGKRKTHVWTVQATSGAIIELGDYLRARQVQVVTLESTSDYWRIWFVILEAAGLKVQLVNARAVKNVPGRAKTDKKDAVWLAKLTEKGLLQPSFVPPYEIRRLRELTRLRADLVHDKSRYWARLEKLLERAHIKISAVLSTLDTDTARAMIEALIAGQRDPRALADLAIGKARAKRAELAAALDGRWEDHHSVQARILLDNIATLNQQAEQLTGQISELIAQIPAAWGVDADGTTGPDAGTSPDSPVLSAVAQLDAITGCGIIAAQAIIAELGLDMTVFGTAGRLVSWAKRSPQTRQSGKKTSGGRTGKGNPWLNGILGEIAASASRTGTFLGERYRRIARRRGKRKALAAVARSILVIIFHLLSDRAVRFRDLGPDFYDTQISRDRKIRNHLRQLQALGLSPDDITALLGKDKAAA

SEQ ID NO: 188466 - protein, 406 aa, unidentified
MEGPIITVDVSKGSCHYQPFIENGHPMRKPKQLSATIDGFQKLGQTIKDLEAKTEREDIPVIFEATGVYHRPLQKYLDDHRIRYYIISPLLSATYRKTDLHSNKTDALDCAHIAKAYYCEKELRQYQAQPQEYKRLYQLSRIYESELVHLRKRKVSLRSMLDIIYPRIDKTFKGNQNLYDPIPMEILKRYPHPSLLLSHREDTIVKTVGHRTGHLKGYTERIVHKIYEKAKECYSGCDIDDIEVVKLPSLIENVQEQKKKCNSLLKEMIEIARTCPYFAPIVSIVGIGENLAARIIAELRDVNRFDNRAAIVAYAGLNPKIQQSGDIDGLHLKISKKGNKHLRCLLYLGAQCNYRLRKEDPLYEFTKKKRQQTQCPLSSKAAYTASAHKLLVIIYSLCKNGTLYHS

SEQ ID NO: 188467 - protein, 410 aa, unidentified
MDVYCGIDWAEDHHDIALVNRDGQLVARRRISDDAAGLAQLPALLAEHGDSPEDPVPVAIETPRGLLVACLRATGRQIYPVNPMAVARYRDRHSVAGRKSGHGDAVVLANVLRTDLHAHRPLPAGTELAQAIAVLARAQQDAVWDRTQAHNKLRSHLRGYFPGFLAAFPARAGLTRPEARIILAAAPTPAAAARLTSTQLRALLKKAGRSRGLDTEAARLRDAFRAEQMRQLPLAEDAMGRQALALLRQLDAACASADDLEQATTGSFNQHPDAGIITSFPGLGALTGARVLAEIGDDRSRFQDAKGLKAYAGAAPITRASGKSKSVTRRHVKNNRLAAVGYTWSFSALTASPGARAHYDHRRHAGDRHAAAQRNLSGRMLGCLHHRLITGQHYDEATAFPARTTLPKAA

SEQ ID NO: 188468 - protein, 385 aa, unidentified
MNSFGYRPSDYDIFSGLDVDKKSIAATFTSHEGLLKSVKMPYKAEDLINHIRNHYQGQRVLFAYEAGPTGFGLYDKLKEQGYECLVVSAANIPTAPGQRVKTNRLDSKKISENLRGGQLRSINIPSESYRELRHLVQMRDTFVSQQSATKCRIKSLLLYEGIPFPESGSSVEWTRAVIDRLKAIRCSEAVRFKLGRLLVSLEFFHSNILETTGAIRAFCKQDNELQRNIGYLKSISGIGQATAYQLLARIGDWRNLKHSRVNQLGSFLGLVPRENSTGDDVNRGTITLTGDSRLRNKLIQCAWAAIRKDPELKEFYDRIYKQHNKTCAARKAIVAVARKLTTRIHAVLTQQRNYVVRVSEFSLTRKETLLPQGETRRAPDPVTTL

SEQ ID NO: 188469 - protein, 255 aa, unidentified
MTNYIGVDVSKDSFDAHCASLGSRQFSNDDKGFKLFGKWIGITAHIVMEASGPYYLRLADNMYRSGYPVSVINPLVIRRFCQMNLQRAKTDRKDAMAIAQFAQLTNPSVWKPAPEHLQQLLQMQSVMEQLSKQLTSTKNALGALHQHPHIYSSALKSLQQVERAQQQQIVQLEKEIMELTRQHYQAELDSLISIPGIGKKTAVLLILSTHGFSRFENIKQFIAYTGIAPRIFQSGKTINKKPKISKLGMADLSPA

SEQ ID NO: 188470 - protein, 424 aa, unidentified
MKVTYQTCCGVDVHKSFFVATIVKTTGGIEPSYQKKCFSTFNNSILEFKQWLLDNHCHDVCMESTGKYWVPVFNLLEDKINVVIANPKWVKAVKGNKDDTKDSKWIGDLFRLGLVKGSYIPCKKVRILREYTRYRYKLVSCRSSEKNRYQNALTVCNVALDSVVSDIFGKSSTSIIDCLLEQSGTSINHEEIASKLLRSLKSKEDAVIESIEGYQMTDAQKYRMRLVRAHMDYITAEINDVDKIIENMISSNPDFENAVQFLCTIPGVKRDSAITVISEIGTDMSQFSSSKHLCCWAGLTPGSNESAGKKNSVRITRAGVYLKPALVQCAHAAVKSDKSPYYKKKYESLVKRRGKKRAIIAIARMILTAIYQMLSTGEQWNPSDLYKIDMPEALVEKQKAKAIKQAKKLLQREGLLPPDEPVAS

SEQ ID NO: 188471 - protein, 353 aa, unidentified
MVYVGIDLHRRTSHVAALDEEGLELLSRRVTNDPEALRALFAELGGEARVALEAAFGWEWLADLLEREGIELHLAHPRHTKAIAAARVKTDAVDARTLAHLLRADLLPEAYVAPPELRELRELLRHHIGLTRLRTTLKNRVHALLARQGVQRGRAELFGPSGRRFLGELSLPESTRRRLESLLALIADFDRELAAVKREIHARAKDEPRVSVLTRIPGVGVFIALLVLAEVGDVTRFPSARHLASWAGLTPRVSNSGERVRLGSITHQGSAHLHWGLVQAAQTAVRADGPLKATYERIKHRRGSKVAKVAVAREILTLCYYGLRDGEIRRLEAAAARANSALAVASTGSRLVD

SEQ ID NO: 188472 - protein, 401 aa, unidentified
MVSDFRKGRYNLMKIYVGIDIAKLNHFAAAISSDGEIIIEPFKFTNDADGFQLLVSKLESFDKNSLIIGLESTAHYGDNLVRYLVTELYQVCVLNPIKTCQMRKNNVRKTKTDKVDTYVIAKTLMMQDNLRFVSFFDLDMMDLKALGRFRQKTIKQRTRLKIQLTTYVDQVFPEIQYFFKSGLHQHAVYALLKEAPSPKEIASMHMTHLANLLKVNSHGHFTKEQAKELRVLAQKSVGANDSAISIQITQTIQQIELLDSQLEKIEAEMTDIMKFNDSVIMTIPGIGYINGGMILGEIGDIHRFSNPNKLLAFAGLDPSVYQSGNFQAKTTRMSKRGSRVLRYALVNAAWNVVRNNATFKAYYDAKRAEGRSHYNALGHCSGKLVRVIWKMLTDNVAFNLE

SEQ ID NO: 188473 - protein, 370 aa, unidentified
MLDTTTFIGLDVHARSIKAVSLDVMTGEVRAATFGYDAGAVAEWVRSVDPRARCVYESGVTGFDLQKRLSGLGVDCVVGAVSKMIKPSADRRRKNDRNDAEFLARMLSVGNVVEVWVPDDECEAARDLTRALEDARDDLSRSKQRLSKFLLRHGLAFDERTPTGRRKGNWTRAHWSWIESIRFAEGADNDVLAYYVDAVRRAAEEKARLEGLVEAEARKPRWRRRVDSLRCLKGVDTASAADLVFEAGEFSRFGNARSFAAWVGLTPSEHSSGESDRRGAITKAGNKHLRKALVEAAWHYLTCSGRPKEPARGQAPDPGARRHAAKGVRRLVERREALLARGVHGNKANVATARELACWVWAVGLMAEEA

SEQ ID NO: 188474 - protein, 463 aa, unidentified
MARNNKSKKRKKPVRSLKAIQPDAAGIDLGSREHWVAGPPLQDNTPNVQRFGTTTPELLRLADWLKEQAVKTVAMESTGVYWIPLFEILDSRGFEVILANARQVSHVPGRKTDMLDCQWLQLLHACGLLRGSFRPSDDICRLRALFRERNTMIDQRSDWVRRIQKSLDQMNICVHHAVSDITGVTGMAIIRAIVDGQRDPRTLAQMRDRRCQKSEDQIADELTGNWRPEHLFNLRQALKMYDQFCQIVSEYDAEIFAYIKTLQPGADDDQCAPPLASKSKARNIAKKGQEPMRQALYQLTGFDLTTIDGIGVDTAAVVISELGLDFSAFPDEGHFVSYLRLAPNLSISAGKKVPSKIKGTTTSRVATALRMAALAARNSKTALGAFYRRISSRKGASVAVFATARKLAQIIYRLVCHGQTYIDIGAKAYEAQFNNRRLKYYTKALKDMGYKVKPLAAEEAQAA

SEQ ID NO: 188475 - protein, 338 aa, unidentified
METYAGIDLHSSNNFIGVINDNDKILYGKRHSNRLDDVLRALDPFQDSLQGVVVESTFNWYWLVDGLQEHGYAVHLANPSAIQQYEGLKHTDDQWDSFWLAHMFRLGILPEGYIYPKEHRAVRDLLRRRLLFVKHSTSHILSLQSMISRNLGLRMSAREIKKMKPEDVDGLFDCPNLVFMANNSLTAINFLKKIILDIEKNVKSQVKMRKEFLMLLTIPGIGNILGLTINLEVGDIGRFPAAGDYSSYCRCVDSNRLSNGKKKGENNKKNGNRYLAWAYVEAAQFARRYCIKAQSFYQSKAAKTKPVVAVKALSNKLSKASYYIMRDQVAFDEDKLFS

SEQ ID NO: 188476 - protein, 455 aa, unidentified
MARKKTIPHPKLKPMNVGAAAIDVGSTMHMAAVNPEHSDEPIRAFGTFTHDLHDLADWFASCGVTSVAMESTGVYWIPAFEILEQHGFEVILVNARYAKNVPGRKTDVNDAAWLRQLHSYGLLRGSFRPDAEIATLRAYLRQRERLVEYAAAHIQHMQKAMMEMNLQLHHVVSDITGATGMRIIRAIVAGERDPDVLAAFRDVRCHSSTETIRAALVGNDRDEHIFALTQSLEFYDFYQTKMLECDRRLETVLAELAADKVYDATTLPRARTKTKQVNTPSFDVRAALYGVLGTDLTQIHGLGPSLALKLVGECGTDLKAWPSAKHFTSWLCLAPGNKISGGKVLSSRTRRSSSRAAALLRLAAVTIGRSDTALGAFYRRLAARAGKAKAVTATARKIAVLFYNTLRYGMTYKDPGASLYEERYRSRVLGNLQRRAKAFGFVLKEVPDQGELAVS

SEQ ID NO: 188477 - protein, 338 aa, unidentified
MELKRIAIDTSKHVFTIHGVDQQEHPILRRELRRSQVEAFFSKLVPAEVVLEACGGSHHWGRVLSRLGHRVQLIPPQYVKPFVKRSKNDRNDAEAISEAASRPSMRSVPVKTVGQQAETMIVKHREMLVAQQTQAINALRGHAAEFGVVAAKGSQNVAALLAVLAADAATPATAKAMFTHMGQHIADLDAKLEALDRQLMERHKANPVSRLLAEIPGVGSITAITMAVTVDPGNFASGRHFAAWLGLTPREHSTGGKQRLGKISKAGNERLRQLLVVGAVAVIRYAKPGSKSASAWLLQLLERKPRKVAAVALANKMARIIWAMMARGEAYRRQPIAA

SEQ ID NO: 188478 - protein, 343 aa, unidentified
MDHFAGLDVSVKDTSVCIVDDTGRIVREVKFASEPEALLAVLTNPAYRFKRIGLEAGPLSQWLYSALAEAGLPVICVETRHMRAVLKAQINKTDRNDARGMAQMMRVGLYRAVHVKTLRSQKLRMLLTHRKLLQSKAIAIENDLRGTLRNFGLKVGIAGKVKFEARIKELVENFPDLAVLVEPLLVVRRVLREQLGILHRRLLAIVRDDDVCRRLMTVPGVGPVVALTYRATVDVPARFRKSKSVGAVFGLTCAKYQSGEIDRSGAISRCGDEMMRTMLYEAAQSMLFHSAKWSWLKAWAMKIARHRGMKKAVVALARRLAVIMHRIWVDGTEFRWTREAVPA

SEQ ID NO: 188479 - protein, 400 aa, unidentified
MAVMIGIDPHKGSHTAVAVTAAEEPLGTVRVRACPGQAGQLVAWAAAWPERTWAVEGAAGLGRLLAQQLIAAGERVLDVQPKLAARVRLLHTENTGKSDPNDALSVAVAALRSTTRREVIADDHAMVLKVWAKRHRDLSRARNQAACRLHAVLCDLVPGGVADEITAGRAARILGQIRPAGPAAEAHRELAAELLADIRHLDAQRREVKKKLATAVKASGTSLTEVFGVGPVIAATVIGDVVTVARFPTRDRFAAYNGTAPTEVSSGEKKIYRLSLRGNRRLNHAIHMAAITQISHAHSDGRAYYQRKLAEGKTHKEALRCLKRRISDAIYARLRADARTKGPGGQPGNHSVSRAAGLTPRTPALRTSHSRAQGQPTIPGRTHAAHAAARASAKKARRAT

SEQ ID NO: 188480 - protein, 419 aa, unidentified
MSFKILKNNCCGLDVHKTWIYACIGITDPNNRTEYKQARFSSFSKGLQQLCNWLAKYNCTDVCMESTGKYWIPVFNILEKNNIWITLSHPKYTKPQKGNKTDRKDAKWICDLYMCGMVKPSFIPPADIRQLRDLVRYRFKLTCMITGEKNRAHNCLTVSNLKLDDVFSDIFGKSSRSITEQILQHPGETFDVAPFVDGRCKTPIEEIQAAVDGAISTEQAVKLRQCLNHIDELEKHQAEIEREIFRISEKYESVLNLIRTVPGFDKNPLTAIQVLSEIGGDMSVFPTAKNLVSWAGCCPRNDQSNRKIKSTRISRAGSYFKPVLVQVANALIKSKKHPEFTTRYRRIKARRGHKKAIIAICRMILTAIWHILTDLKPYTPEGFLESRPVSESKILTTSQALNLLKQRGYVIKDDAVSVT

SEQ ID NO: 188481 - protein, 367 aa, unidentified
MSQSTPIVVVGIDVGKSGLRAHILPGGLQRHFQNDKGGRRALRNWLLKHGVSRAVFEPTARYHRRLHQGLYEAGLATGLVNPLRSRRFAESLRQLAKNDRVDAVMLARFGQFDNLASTPPKDAHLQLLSDLLTLRRKLVTQLDALRKLCSELAPEASCGPAATLTAFAADIAACDQRMLECIAADAALARRAEIIQSVPGCGPVTAACLCAELPELGTISRRQAAALLGLAPFDRDSGPVQGHRSIRGSRAHPRRVLYMAALSGIRWEHSCQACYQRLSAAGKEHKRAMLAVMRKLACLLTALVQSYIIPAVDSQVPPPTRRGFFSHCSAPAGRNLEPQWPERACRGGLAPAGSPRSFSDCSDFLPF

SEQ ID NO: 188482 - protein, 378 aa, unidentified
MHKDSVYLCILRENGEKIERVYGVLTPQLDSMRDFMAENKVSEVAMESTSVYWIPIWRVLVDSFELKLVNPYFIRQLPGRKSDVKDAQWIAECVMKELIRGSFIPSPLVQRLRLYDRRIFEINAELVRKYSKIDAILQRCNIRLSNYVSNTDCKSYKAVVKQISEGVTSPQELLRHVHKRIINKHGEDTILAALTGVVSDAEIDMLAQYVAESAILEDNKNKCIEKMREICNSEFEEQMKNLQEIPGVSERSALTVLAEIGPDVNAFPSAKHLVSWCGFNPRNDESNKKIKSNKITHGNRFIRIASVQCAWAASRTKDCYFSKFYAFHTQVRKKFKLKVVVAVARKVLVCIWHILKFNVPYKDFEPQKPVAKDCTQLA

SEQ ID NO: 188483 - protein, 354 aa, unidentified
MKQQAIQYLAFDVHQATVVASLRDEHGKVVMRATVATEAKAILTLVRGAGARVHVAFEEGTQAQWLHDLLVDHAERVIVCNVRGRSETTNKSDRIDADGLSELLRLGALKPVFHGATEVLTLKELVRNYNDLVKDSTRVMQRIKAIFRARAILTPGVSVYRPSKRKEWLGKLEGGAKVRASSLLAQLDVLLELRPKAKAAMIATARRQSGWKILRTIPFLGPVRVAQILAIMRTPFRFRTKRNLWPYAGLAVVTRSSADEELREGKLRRRRRAPLTRGLNRNHNPILKAVFKGAATAATARPGPLRDYYDASLARGVKDDLAVVTLARKIAAITLRLWKKGELWDPKKVTMQAT

SEQ ID NO: 188484 - protein, 457 aa, unidentified
MSKAKRSSRKRAISPVHPHAAAIDVGATTHVAAVGPDRDPEPVRSFGTFTADLHRLADWFERCGVRTVAMESTGVYWIPVYEVLEQRGFTVVLVNARDAKHVPGRKTDVSDAEWLRRLHEYGLLRASFHPEARIAALRDYLRQRERLLDYAASHIQHMQKALTQMNLQLHHVVADITGASGLRIIRAIVGGERDPAVLAALRDHRCKASVETIRQALVGNYREEHVFALAQALELYDLYQAKVAACDARIAAVLDRLQAERPVPTAPLPAPRHQTRTPNAFAFPAREALHRILGVDLTRIHGLGPYLALKLVAECGTSLTAWPSAKHFTSWLCLAPGNKISGGKVLSSKTRRSNNRAAALLRLAAVAVGRTETALGAFYRRLSGRVGEAKAVTATARKIAVLFYNTVRHGMTYADPGASYYEERYRQRVLTNLRRRAKSLGYVLQVADPTAPVAEVS

SEQ ID NO: 188485 - protein, 416 aa, unidentified
MNAVGIDVSSRKSTVAVLRPLGEVVCLPFDVTHDIAGLASLAEKLKALDGETRVVMEHTGRYYEAVAKALHEAGLFVCAVNPLLIKEYGANSLRRVKTDKADAVKIARYALDNWADLRDFTPMDAIRYDLKTLNRQFQLASKQRTASANNLIALLEQSFPGIRKCFDSPVRSDGTQKWVDFAHSFWHVDCVRKQPFPAFCERYRKWCKRHAYLFKLSNAEEVYALAKRAVVLTPKSKVVKVLVQEAANQLISISRSVEVYRAEMDRLAAMLPEYPVVMAMYGVGKSYGPQLMAEIGDVRRFERKQALVAFAGIDPMPNQSGDKNVRSNKSSKRGSPYLRKTLFNVIRTYLQCAPQDEPVFQFLNRKQAEGKPFYVYMLAAANKFLRRYYAKLRDYFASLDTLQPVAPIPTILKATL

SEQ ID NO: 188486 - protein, 352 aa, unidentified
MQYLGIDWAYRRAAWCAKSEGGAIVDEGFVPADEDGLARLVLRLGPEVRACVEMMSGAVWVRDRLQAAGWEVEVADARKVKGLAPLACKTDKVDARVLAELCRRDLVPAVWLPSLDDRELRERLKRRMHLVRMRTMARNRIHGVLTQWGLKLPVPRLRQPDAMELLEASGVPEVWRRSVAEALAVIDWLDARLAPLERELRPLARADPRVALLETIPGVGPLLGLTIACEIGDIARFASARKLVGYAGLAPKVKQSGQSARTGPLSKAGSKALRWAAVEAAQQAWRETNPWHALYRDVSKRQGKSNAGKAAVARKVLIAAWHVLALEQPFKPSRPRGGADPVPASSHFHLAA

SEQ ID NO: 188487 - protein, 347 aa, unidentified
MKVLIGVDPHKTSLAVAAVDEATGELLERAGFPQDRAGLRSLERWAKRFSERSWAMENAGGLGRHLAGRLVAAGESVVDVPPKLSARVRVLSTGNTRKNDGLDALATALAASRNERLAQVDAEATSEVLRLLSERREDLVAERTRALNRLHALLRVLVPGGVAGKLSADRAARILRGLRPRGGASARLRRRLASEVLRDVRTLDRKIADLDGRIEAEVQASGTTLTEIFGVGAILAARIIGTVGNVARFPTKSHFASYAATAPVEASSGEVVRHRLSLVGNRKLNYALHMVATSQARSETRGGEYYRKKVAEGKSRKEALRCLKRRVSDAVFRSLMADSLAPSSSAA

SEQ ID NO: 188488 - protein, 340 aa, unidentified
MSEVSIIGLDIAKHVFQAHGADASGRAVFRKKISRAKLLPFFASQPRCRVVLEACGGAHHWARELARLGHDVQLIAPAYVRPFVKRQKNDAADAEAICEAAQRPSMRFVPIKSEAQQAAAMVFRGRDLLVRQRTQISNALRGHMAEHGWVAPKGLAHLDKLATLLADPTAVPEGVRSVCTVLLESLALLDRQIAALDKEIVRRSREDEIARRLMTIPGIGPITATAITALAPPPGTFAKGRDFAAWVGLTPRQHSTGGKQKLGAISKMGERTLRRLLIIGSSAVVLQASKRGAPKGSWLEQMLARKPRMLVTVALANKTARIVRALLMKNEDYRAPVVAG

SEQ ID NO: 188489 - protein, 340 aa, unidentified
MELYGGIDLHSNNSVLAIMNGEGERLYRRRLPNDLGVVKTALAPYREHLKGLVVESTFNWYWLVDGLMEAGYRVHLANTTAIQQYNGLKYSDDDSDALFLAQLLRLGILPEGHIYPRAERGVRDLARKRAHLVRQRTANVLSIQNILQRSAAKRLKGDKVKQLKVAEVEPLVGRADVAVAVESTLQVTHCLDQQIARLEQVVVERIKLRKEFGVRQSIPGVGTILALTIMLEAGPIGRFAQVGDFSSYCRCVSSARRSNGKLKGKGNVKNGNRYLAWAFVEAANFAVRYSAPIRGFHQRKSAQTNAIVATKAVAHKLARAAYHMLRQQKNFEVRMAFGAQ

SEQ ID NO: 188490 - protein, 344 aa, unidentified
MDATTVAVDLAKTVFELALANAQWRVVERQRLNRAGFARFLAETTPTHVVMEACGTAHYWGRIAQQHGHRVTLVPPGYVRPYVRRNKTDRADAEAILEAVRSGQVPTVAVKRVEQQALVALHRIREQWMTTRTARINTLRGILREQGILLPAGARAAMKSLATVLEEAATVLPSHLRQVLTSVHEEVRAIEDRIAALERELKTLAEQDPVVTRLRTIPGIGLLTATALVGTVGHIHAFGRARQFASWLGLTPREHSSAMRRHLGGISKRGDVYLRCLLTHGARAVLVAAHRRRSPAATGLHHWALAVRERRGHNKATIAVANKLGRIVWAVWTKDVPYAVADAA

SEQ ID NO: 188491 - protein, 414 aa, unidentified
MKTYILRHSQPVEPQKSIRSPRPKTVIPPTADRLPRPSATHQGPVLFIGLDVHNDSIAVSLAPSDATEVRRYGIIGGEHEDVLKLAKKLAEAHPGMTLKFCYEAGPRGFALCRCLRAHGWDCILVCPSKIPRKPGERVKTDRRDADDLARLYRAGELTGIYVPEPEDEAMRDLIRARFQVGRQQHRARQQLKMYLLRHNLRYGGQSSWTPAHLRYLAKIKMPFPTQQIVFQEMLDVISEATARLERYDQEIERAVPGWRWEPAVRALMSLRGMALLHAATLVAELGDFNRFEHPGQLMGYLGLVPSEHTTGKDRQQGGITKMGNAPARRALVEAAWQYRIPARLSPHLKKRQEGLPQAITDIAWEAQRRLHHRYTHLTRVGRKKSQVAVTAVARELTGFVWAIARQVKPKTAVG

SEQ ID NO: 188492 - protein, 330 aa, unidentified
MEHFAGIDVSLEHSSVCVVDGVGKIVREAKVASEPEALVRFFRGLETGVTRIGLEAGPLSQWLHAGLVAAGFEVVLLETRHVKAALSAMVIKTDRKDARGIAQLLRMGWFRPVHAKSPGSQEVRALLVARKLLQAKLLDVEFSIRGILRGFGLKMGEVSKGRFAARVRELAAGHAMLARITEPMLRAREALRTEYARLHGEMLAIVKPDPVCRRLMTVPGVGALVAITFKSAVDDPGRFARSRVVGAHFGLTPRKYQSGETDVTGAISRVGDGMVRMALYEAAHIMLGRVTRFSSLKRWALDVAKRRGLKRAKVALARKLATWGKQAAAV

SEQ ID NO: 188493 - protein, 311 aa, unidentified
MTLPQDVIGVDIAKGWIDTFTLSSRKHERIAMTKPALAQFARGAAGCLVVCEASGGYERALVEALATAGVDCARVNPRQAREFARATGRLAKTDRVDAEVLARMGRALSPAPTPPTDPARARLADLVARRDDLVAGIGREKNRARTVTDAWIAREIAGLLRVLQAHLKAVEGQIAALIQANAALAEDQRRLTTVPGIGPALSTVLIARLPELGQLDHRRIASLAGLAPHACDSGLQRGKRHIWGGRADVRRTLYLAAFIGSRYEPSLKAFRKRLKDAGKPTKVAVTACARKLLTILNAMIRDAKDHQTSTL

SEQ ID NO: 188494 - protein, 362 aa, unidentified
MNYVGVDVHKKYSVLCALDETGRKLREGRVEGNASNGFAQFFAGLDGPSKAVVEASWNWGLVHEELEELEQVEEVVLAHPHKTRLIADAQIKSDRLDAHALSTLLRGNLVARAHVPRRETRARKNLLRQRLYWARLRTMLRNRMHVLLDRQRGLELPQCSDIFGVRGLGFLRRLQLPEPDATLLGEQLALHDLIAQQMKAQEKRIAAEFGSEPMHRRLLSVPGIGATLAAVIACEVDSIERFNSAEKLCAYAGVVPTTHSSGGKVAHGQLLPFCNKWLRWALVEASWVAIGCSPYFGTLYKQHRMRGKKANTAVLIVARRMCRIIWQLLHEKRDFEKRALSPNFTFPGCSVVRLTAVKASGP

SEQ ID NO: 188495 - protein, 346 aa, unidentified
MDNIGLDLHKRESQLCILTDAGELIEQRIATTRARFTAVLGGRPPARILLEASTESEWVARHLESLGHQVIIADPGYAPMYATRSRRVKTDRRDARTLCDACRLGAYRAVHRASDAQRHVRAELAVRDALVRTRTRYVALIKALVRRDGLRLTQGEPERTVAKVAALALPPALAAELGPLLGLLAPLNQQIAAADQRLTILTVTDPVVQRLTSAPGIGPVTATAFVATLDQIERFATAHQVEAYLGLVPSEQSSGERQHRGRITKQGNTRMRWLLVEAAWRVLRSPRPDAAGLKVWAERIAVRRGKRVAVVALARRLAGVLYAMWRDGSAYEVARSRSAKGTPVAA

SEQ ID NO: 188496 - protein, 344 aa, unidentified
MDHFAGLDVSVKETSVCILDDAGKIVKEVKVASEPQALLKVLGNPIYSFKRIGLEAGPLSQWLFSALAEAELPVICVETRHMQAVLKAQINKTDRNDARGIAQMMRVGMYRPVHVKTLRSQKLRMLLTHRKLLQSKAIAIENDLRGTLRNFGLKVGMVGTARFEARIQELVEHFPDLGVLVEPLLIVRRALREQIVLLHRRLLAIVREDEVCRRLMTTPGVGPVVALTYRATVDLPARFRKSKSVGAVFGLTCSRYQSGEIDWSGRISRCGDEMMRVMLYEAAQSMLRSKKWSWLKAWAMQIARRRGMKKAIVALARRLAVIMHRIWVDGTEFRWPREQAAAAA

SEQ ID NO: 188497 - protein, 446 aa, unidentified
MKKSSRMSVIHPHAAGVDIGAEFHVVAVPPDADAAPVRTFQRFTGDLHRMSDWLKTCHITTIAMESTGVYWLPAFEIPEAAGFNVILVNARDAKNVPGRKTDVNDAQWLQKLHSFGLLRASFRPEHDISVLRSYLRQRERLTEYRAAHIQHMQKALMQMNVQLHHAVSDITGVTGLSIVRAIVSGERDPSVLIQYRDVRCKKTPEVLQQALTGNWQPEHLFAPEQSVAFFDFYQEKIRECDDQIETSLLQLSTGTEEPEGVLPSARHRTKQPNQLSFDVRPLLWKITGADLTQIHGFGPYLALKFVAECGTDMNRWPDASHFTSWLCLSPGNKISGGKVLSPKTRRSSSRIAAALRLAATTIGRSDTALGAFYRRLSSRIGKAKAVTTTARKLAILFYNALKYGQKYVDPGADYYEERYRNRVLDGLKRRAKSLGYSLQQDPELCV

SEQ ID NO: 188498 - protein, 341 aa, unidentified
METVYFTGIDQHKRTSFLTTLDQDGDIVRSSKLKNNPEAIRAYFRTLPGEHHATVETTTGWYWMNDLLEREGVDLSLAHAKFVKAISYAKVKTDKVDAHTLAQLLRVGLIPEAHKIAADMRDVRDTLRARLHLVEKRTSAQNSIHRVFEKFNTDSVDDLPELFRLQADMHSNRAALINEQIKMIDSTLNHLLLDSENIQRLLWIPGIGRLNAFTIYLEVDGIQRFADVKNFYSYCRLVPGAHNSGGKTRHRASKEGNKYLKIAFSHAATRAIQYYPLIKKYYQRMARKKGAPIARALVAKEIAKSVYYVLESGESYNQLFKGMRLERSKLASWPRRASPAI

SEQ ID NO: 188499 - protein, 350 aa, unidentified
MSLELRSLVPYPNSCLGTSPYQQERDTKMATVSFCGIDVAKDRLDVVVLPEQRCWSVCNDAAGWAELAKQLGSFSIAAIGLEASGGYERGVMRVLLAADMPVHQINPFKLRQFAKASGVLAKSDRLDARVIASFIAIMPPRRAQRPSPAIERLTEILSVRRQLTDQKIAAQNASAMLQDAMLLRLSRRRIGRLAADIEMLDRSLVEIVRTDAALAHRYRLLTSMPGVGPVLACTLIALLPELGSMSRKQVAALVGVAPYTFESGKLKGKRCIWGGRAPVRHVLYLAAMSASNWNPVLKAFHSRLKIAGKLHKVAIVAVMRKMITMLNAMVRDDVAWAGHLGGRQILPTAR

SEQ ID NO: 188500 - protein, 361 aa, unidentified
MKSTTIIAFDQHAATTMAAVLLPGHRTPALHSLTSDTPTILRFVQRVQRQGTVTCCYEAGPCGFELQRALTAHRIACDVIAPALIPRCPGDRIKTDRRDAGHLAVLYRAGALTAIHIPTDQEEAARDLLRCREDIRADLLRARHRLSKFLLRHGRRFTATKKAWSKRHDAWLRAQTWPIAALDQTHRAYLRAVDEVLARLRDVETDLRALLDLEPLHPRVQRLRCFRGIDDLTALTIAAELGDPRRFATAPSTMAFVGLVPSEHSSGSKRAQGGITKTGNAHLRRVLVESAWHYRHHPFVSATLRARQGGAPADVIARAWTAQQRLHRRYARLAARGKPKQHIVTAIARELTGFVWAALTQ

SEQ ID NO: 188501 - protein, 345 aa, unidentified
MTLYCGVDFHARQQTIAYCNLQDGEIRFTQIKHDDRDALQRFYTQFQTPVIVGLEAGGYSEWFERFLSELGIETWFGNPTEVRRRARSRQKNDWRDAELLLDLLIKNEFPRVFRQTAESRAVLAQLRYRHKLVQTRTQATNSLHALAIREGLSLRATILTRAGRARLNALSLTALQARQREEWLALIDQLSENIKRVEEELIQLAAQNEQVIRLRTHPGIGLLTGLALVHTLAPISRFSNSRKVTAYVGLEPREFSSDTRQRWGGISKAGSPLLRFLLVEAGQQAARADTELKNTYQHLSARRGRPKAKVAVARKLLVRAYILLRDEIDYSTYLRRTVAVRSARQ

SEQ ID NO: 188502 - protein, 476 aa, unidentified
MTARKTRPRHPPPAAPPRRAPAVAPADLAPTPGRHAAGTDVGDGTHWVCVGHTPDGSDPVREFPAHTPGLRRLAAWLKACGVTTVALEATGAYAHVLFLTLLEAGFEVVMTPPHFARQVKGRPKTDRLDCQWIQRLHALGMLPAVFQPDDATQTLRDYVRQRANLVRLGAQHVQRMQKALQLMNLKLTAVVGDTTGVTGLKIIRAIVAGERDPHALARLRDRRCKHSAADIATALDGRYRPEHLTELRLCLRMWDAYQAAIADLDPVIAAHLRSMRKASDLPPLPPQTRVRGRKPHDPRFDVREALYRATGVDLTAVEGIDAVHALTLVSELGCDFAKWPTVKHFTSWLGLCPNLKKTGGKVQSSRTRLGKNRAAGALRLAAWALVRSKSYVGAYLRRQRSRLGAPKAVTATAHKLARVIYHLVRYGAAYVKKSEDEYAAQVRGRVERAFHRRAKELGYEVRKVEPPAEPVGPPVG

SEQ ID NO: 188503 - protein, 417 aa, unidentified
MHGGSCLAENEMTAKRRTPLRVPLSDGMDSPVCLRDIRALVFMGVGIRSSSKRKESDMNATTVAVDLAKSVFQIAVADEHWRIVETQRLTRLQFERWFANRAVSLVVMEACGSAHHWARWLNGLGIEVRLLPAQYVRAYVRRNKTDATDAAALLEAARASDMRPVRVKSVEQQALQGLHRVRSLWMGTRTSRINALRGFLREFGIAVPVGARTGLEAISRVLADPGSAVPELIRGTARLLVEEVRLLEARIAQLERELAALARLSPACTTLLSIPGIGLLTATALVAATSGDVTHFKDARHFASWFGLTPREHSSGGNRFLGSISKRGDRYLRMLLTHGARSVLRAAKVAEAAEREVCGVRRWALDVQRRSNHNKAACALANKLARICYATLRDKVPFGETERLNRKIHRESFVMPA

SEQ ID NO: 188504 - protein, 464 aa, unidentified
MKKKPTGKKAASRRARKTGDNPQHSINTQTHPDAAGIDVGAEEFVVAVPAGRCEKPVRTYATFTSGVEALRDWLLECGIKTAAMESTGNYWITLHDVLTEAGIDVYLVNARHVKGVPGKKTDVCDAQWLQQLHAAGLLRKSFRPAPDIVPLRFLMRHRAEMVGDAAKQLQLMQKTLTEMNLKLHHVFSDIDGVSAQAIIDAILSGERDANKLAALRDKRCRSSAEDIIEALRGDYREEYLFVLKQSQQTYRQLRESIASCDEQLGELAARVECEVSAPLPEAPKGQHKVAKNSPQFAVFETAWRFYGVDLSGVPGVSTGLLCSLISEVGTRDQLLSTFAGPENFASWMGLCPDNRISGGKVLKAKTRKVDSRLAGAFRLGVFGLQRSQTEMGGYLRRMKGKLGKAEGITAAAHKLARVVYAMIKSQKPYDEKEAFKLTPQSEARRRNALEKQAAALGLTLRPAA

SEQ ID NO: 188505 - protein, 328 aa, unidentified
MVEEGSVATTKKELAQVLGAMGRCRIAMEVGTHSPWVSRLLKSLGHEVIVANARQVKLISASSRKDDRLDAQTLARLARVDPELLRPIRHRSEKAQQHLMKIRVRARLVDARTSLVNAARGMTKAVGERLPACDAGSMGTAQMVDLPTGLQETLKPLLEQVESLTQKIKECEKEIEQIAGTEYAETYVRRQVSGVGNLIALTFVLTVEDRERFQKSRDVGCYVGLRPRRSDSGQSQPQLRITKEGDNYLRKMLVQGAHYILGWRGPDTDLRRWGLKLAERGGKNAKKRAIVAVARKLAVLLHALWVSGEVYEPLRNSHARQRLKQRTA

SEQ ID NO: 188506 - protein, 349 aa, unidentified
MQHIAIDLGGVKSQVCVRAEDGQILLERIVDTMRLGAMLKHQPPSRVIVETCSEAFRVADQALASGHEVRVVPATLVKTLGVGARRIKTDRRDAQVLSEVSCRIDLPSVHVPQELARVRRNMCACREVLVSCRTAMINSVRGWARTQLLKIPSGTSETFPKRAKKAALASPDGLPEYVTRTLFSLDSLNEQIAAADDELDQLAKADPVCMLLMSVPGVGPITSIRFVAALDDRTRFATAHAVQAYLGLTPGEHSSSERKQRTGITKAGPAPVRRALVQAAWNFRRLRPLDPISKWAAALRDRSGWQKAVVALANKNARILWAVMTKGDAFDARHVSVKPGATAPAAASA

SEQ ID NO: 188507 - protein, 320 aa, unidentified
MNSHYKIEKIQTEINHVGIDVSKQHLDVSIAGSKTQRLANTQAGLRVLHQKLGRLAHPRVTCEATGGYEKLLVDSMLDAEIEVCVAAPGRVRYLAHAEGLLAKTDSIDAELIRRFAEKIPLPRQIKQDPAAQKLRQMSDYRRMLSEDIVKTSNRLELAQGYLREQLQSQLTHLQGLMKKVEADIKAHIRNCEELAHKAARLQELKGVGPVLAATLLAHVPELGKVGDKTLACLVGVAPHPKQSGNFKGKSSIRGGRANVRHVLYMAAVTAARSNPILAAFYQRLRTQSGKTAKVALVAVMRKMLSVLNKMIAQPNFSLAH

SEQ ID NO: 188508 - protein, 456 aa, unidentified
MKIPQSTIRLLTGRLVKILLYREVSTMKSNTQNAKIEAITEKTLVLGIDVGSEMHYARAFDYRGIEYSKKPFKFSNTEAGFVTFKEWILDLKERHEKDKVIPGMEPTGHYWFNLGKFLQDNEMKPVLVNPHHVKKSKELDDNNPTKNDRKDPKVIAGLVREGRYMIPYLPDGVYADLRTASNIRFQLQAELTRIQNRISRWFNIYFPEYKTVYGKPDAKSGMLILKAAPLPEDILTLGIDGVNQIWRDAKLRAVGKARAKTLIEAAEHSVGSKEGAVSARMEIRMLLEDYESRNTRLQEVMVLIEELVRKIPMAEKLLEIKGVGIRTVSGFLAEVGDISRFNNPKELQKLAGLALVENSSGKHKGETTISRRGRKRLRYLLFEVAMSLVSKNQEFRELHNYYTTRRLNPLKKMQSLMAIAAKLIRVFYAMLTKGVDYDPKKMVSDIKRPAVYLQAA

SEQ ID NO: 188509 - protein, 234 aa, unidentified
MQTVLDLGADVDSRTFVVAAAAVSTAPQRIANARRDILAWLRSVPPGSRLGLESTGTYHELLADLAHRAGLQVFVLNARDVRRYAQGLGRRGKTDRIDAQVIARYVAHEHSELHAYVPPSPQQRALARLIKRRAKLVTIKGMLNQSLPRPADSGQKHGRRRLCKRGPGELRRVLFNCGMAAAKSALWRPYYQAQRAKGLSSTAAIVVLTRKLVRVAFALYKYQQPFDPARVATA

SEQ ID NO: 188510 - protein, 311 aa, unidentified
MEHACFVGIDVSQTHLDVHVRPTGDSFRVNHDDTGVGTLLERVRPLAPTVLVLEATGGYEVPVAATLASAGLPVAVVNPRQIRDFARATGQLAKTDTLDARVIALFAEAVRPAARPVPDEQAQALGELIARRRQLVEMLGAEHNRRRLLRDRRLQRHLDAHIAWLEEALRRLDHDLTTLIRSTPVWRETDDLLRSVPGIGPVTACTLIADLPELGRLDRRRIAALAGLAPFARDSGAFRGRRMIVGGRGHIRRVLYMATLTAIKHNPAIRTFYLRLRAAGRPGKVALTAAMRKLLTVLNAMLRDRRPWRPA

SEQ ID NO: 188511 - protein, 324 aa, unidentified
MFLGIDVSKNTLDAALLIPSEPACKPRHTVFANTPAGHQQLLEWLRQNGAVPVHACLEATGTYAEAVARALHQAGHQVSLVNPAQIHAFGQSQLSRTKTDKADAQLIARFCQMHQPPLWTPAAPEIQELQALVRRLDSLEEMRQMEENRLAGGVSCAVVRASLEEHIAYLQAQMEKTRQQIRDHMDQNPTLKAQRDLLTSIPGIGETTAALLLAEVDAAQFESARQVAAFAGLVPRLRQSGTSVRGRSCLSKVGSWRLRKGLYFPALTALRFNPLIRALGERLQAKGKSKMLILGAAMRKLLHIAFGVLKSGKPFDPNFVVQMA

SEQ ID NO: 188512 - protein, 389 aa, unidentified
MKIYVGIDIAKLNHFAAAISSDGEIIIEPFKFTNDADGFQLLVSKLESFDKNSLIIGLESTAHYGDNLVRYLVTELYQVCVLNPIKTCQMRKNNVRKTKTDKVDTYVIAKTLMMQDNLRFVSFFDLDMMDLKALGRFRQKTIKQRTRLKIQLTTYVDQVFPEIQYFFKSGLHQHAVYALLKEAPSPKEIASMHMTHLANLLKVNSHGHFTKEQAKELRILAQKSVGANDSAISIQITQTIQQIELLDSQLEKIEAEMTDIMKFNDSVIMTIPGIGYINGGMILGEIGDIHRFSNPNKLLAFAGLDPSVYQSGNFQAKTTRMSKRGSRVLRYALVNAAWNVVRNNATFKAYYDAKRAEGRSHYNALGHCAGKLVRVIWKMLTDEVEFNLE

SEQ ID NO: 188513 - protein, 379 aa, unidentified
MKIITQNEKILYIGIDVHKDTYSLCCFDFFRNELSDEMTIKATTKAVIKYLEAIKKKHREEILFACGYEAGPTGYGLCRGLQKAGYGCVVMAPTTMSNPDGKRRVKTDRIDARAIARILAYKSYSQVHLPSEEMEALKEYTRARDAKKRMFKKAKQELLSFLLRNGKSYPESGNYWTEKFFKWIKTVQFSEKWMQEAFNEYLAEVYSLKHKIELMDAKIKEIAELEIIKDKVDKLVCFSGIDVTTAVETVVEIHDFTRFATAAQFVSYLGLCPGEDSSGKTKNMLPLTKAGNKRVRALFCESAKAIKRTNPYGQKSKRILERQKNASPEIVAYADKATKRIRTKMKHLEERGKNYNVSSAAGARELACFVWGMMNGKIA

SEQ ID NO: 188514 - protein, 337 aa, unidentified
MKVSSFIGVDISKNTLDVAICQEATPEKYSHQQFNNTLAGCKKMLNWLKNQSSDLSKSYFTIEHTGWYTLLLCSFLQEEQLAFGLYAPLHLKRSLGLTRGKTDKIDAQRLAYYAFSHRHALKLTLLPSATLLKAKNLFAFRDRLVKTQSSLKVTITDLKATAKLIDNKFIIRESEKQLRLIEQQVKHTEKQLEATIQEDEEMKKHFHLLRSVPGIGLVTAAALILATNNFTAFTDSRKFASYCGAAPFEHQSGTSYQGKTRISQYANKRIKALLTNGANSAIQHDEEIKAYYQRKIAEGKHKMVVINAIRVKLINRAFATINRGTEFVKIRHYPQAA

SEQ ID NO: 188515 - protein, 337 aa, unidentified
MDNYIGIDVAKATLQVFIPRNDLDVEIENSPLGLKKLYSKLKKQYKKSINDIVFVYESTGAYSTILEHYCQDKEIKCFKVGAYQSASFSKVVKNRNKTDVVDARMLSQMHILIKKGDVKVPHRNKEAHQIRSYIKYYQTLVKEERRKSNYLEAADFNLEDSYVLKQVKKHIKRLQKEQTEILDKLMEIIKGNAKYYQAYKNIISIKGIGDKSAIILLYLFLRYPNASRQHITALCGLDPVERSSGTSVQYKKRISKQGLSLVRDILYMPTLVAVRYNEEMKLIYDRLVQRGKPKMLAQMAVMRKIVLLAHSLYKNDETYDPQRYIQFTQLSKVENMD

SEQ ID NO: 188516 - protein, 302 aa, unidentified
MAGNVRAARVTSSFLTTGKGFQAILEAVPGDASFLMEATGTYYFNVALNLHRQGKHVAVVNPVRIKNHMRAEMSRTMSDKADAHSIARYGRERQPSAWEPPSREAAQIQQLLAVDLMLTGEITKCMNMMQAFRCSEFYSPDAIVELHETRLELKARRKKIQEQLERISQESMGRTIEVLASMPGVGRASAIRMAACVGDFKRFESSRKLVSFLGLSPMTKQSGTSVKSRGHISRMGGTKVRGVLYMCAMNALQKNESCKRLWERFKEHKKHGKVAMIAIMNKMIRQMYSMVINDRLYDPSMA

SEQ ID NO: 188517 - protein, 354 aa, unidentified
MRVPTNQREVTKMKITTIGIDLAKNVFQVHGVDQRGKVVVRKRLRRHQVLTYFTQLTPCLVGMEACGGAHYWARNLQAQGHTVKLMAPQFVKPYVKSNKTDAADAEAICEAVTRPNMRFVPIKNADQQAILSLHRARQGFVRARTAQANQIRGLLAEYGITLPQGISHVANRLPGIVEDAENELPGLFRALLQRLVVHLRELNHQVQELEEQINAWHRNNAASQKLARVPGIGPLTASALSASIGDARSFRNGRELAAWLGLVPRQHSSGGKPMLLGISKRGDAYLRTLMIHGARSVVRVAKSKSTPTDRWSTELLERRHTNVVAVARANKNARIVWALLAHDRDYRVDYELAA

SEQ ID NO: 188518 - protein, 391 aa, unidentified
MIYVGIDVAKDKHDCFITNSDGEVLFKAFTITNNLDGFNDLYQKIETVMKDITKVKVGLEATGHYSYNLLGYLIDKGLPTYVINPLHTNLYRKSLSLRQTKTDKVDARTIASILMSDVNLKSYSDISYHNEELKSLTRYRFDKVKERAKLKSSVSRLICILFPELEKLVPTLHMASVYALLSEFPGAKQVANAHLTRLTNLLSEASKGRYSKDTAITFRDAARTSIGSNMPAKSLELKHTIKLIKELDSEIDEIENEIKIIMDEINSPILSIPGINYRMGAMIIAEIGDFSRFDSPDKILAYAGFSPSTYQSGHLYGAYAHMEKRGSRYLRYALYNAAKYVCHWDPTFTAYLAKKRAEGNHYNVAISHAVKKLIRVIYHLEKTNQQYIKAS

SEQ ID NO: 188519 - protein, 400 aa, unidentified
MMRVAGIDVGSLTHVVSIVSEDKQLVLVKPTSFGEDAAGYLKLFELLGSATDLLVAMEATGIYGHNLFLALCETGYRVARLNPLRTRRFAQEDLRRAKNDSIDALGIARFAAQKRPDPTPPFDAPTTELREYVRLLDRLTQDYGDRLRQLHRLVHLCFPEFTRYVRSLSSQRATAILAAYPAAAAFSDSCLRKLSALRPDGHHPVGRELARALVDAAKASVSRHHGPAFTTEMLFLCQDLDRLRAKLRELHHELEQRITAHQVGSLLKTIDGLGTCAAARIVAAVGDPARFRDGAAFAAYVGAVPGTHESGLRRPGSASLCPLGNARLRHALYMTTLGAVRRNPWLKEYYERLRGRGKIPKVALLAAMRKLLTAVYSVAKHRQPFQPRLADHPLPAPSGI

SEQ ID NO: 188520 - protein, 341 aa, unidentified
MEQATTIGLDIAKHVFQLHGADAAGHVLFRKRITRVKLLGFLAAQTRCVVAMEACAGAHYWAREIAKLGHHVRLIAPAYVKPFIKRQKNDAADAEAICEAAQRPSMRFVPVKTEEQQANGIVFRARDLLVRQRTQCVNALRGHLMEYGYVFPKGITHVEALVALVEDLQSSLPDSVRVILKLLVDTFTALEAQIAVLDAEINQRSKSDPTARRLMTIPGVGPIASTAITALVPAAEGFPAGRDFAAWLGLTPLQKSTGGKQKLGAVSKRGERTIRRLLIIGASAVVQQASRRGAPKGSWLAQMLARKPKMLVTVALANKMARIIWALLVKGGTYRTPAAAA

SEQ ID NO: 188521 - protein, 339 aa, unidentified
MTWWTVAIGVDTHKQAHVAVALDRLGRLIDSLTVPATMVGYRQLLVWAHGLGQPTFGIEGCGSYGAGLARFLTDHDETVFECERPRRHERHGDKNDLIDATLAARHVISGDGLSLPRGSGQREQLRVLLLERRGAVRARTAALNQLDAAIMTAPAELRQRLDGVPKRRLVMTVARLRPRPDGVTQVLRRIARRIQLLSSEITEIDQTLDHLVAATAPDLLTECGVGPVCAAQLLVSSGDPARMTTEASFAALAGTNPLEASSGKQRRHRLNRGGDRQLNWALHVIALQRVHHHDQTKAYYQRLLADGKTTKEAKRCIKRALARHFYHRLRELHPPALTT

SEQ ID NO: 188522 - protein, 368 aa, unidentified
MKEVTTYVGIDAHQKDLFVAMLIGTQTVPVTWTVPNEPTAVRRLVRKLEQETPGAVRVFYEAGPCGYALQRQVTTARVRCDVIAPALIPRKPGDRVKTNRRDARKLAELGRAGLLTTVQPPTPEDEAVRDLARARDDAREDLQRCRHRLGKLLLRRGLHFSGRNWTRAHRQWIDGLTWTQAAERAVVEDYRLAIDHTEARLLALDAQLAEIAAHEPYREPVGWLRCFRGIDTLTAMVILAELHDFRRFASAPALMAYLGLVPGEDSSGEKHRRGRITRTGNALVRRVLVEAAWHYQHRPGIGVALRRRRHEQPARVIAIAEKAQQRLCRRFRKLTAEHKPAPKIVVAIARELAGFLWAALQPVPVSAK

SEQ ID NO: 188523 - protein, 342 aa, unidentified
MLKQTRSYRLFGGIDVSARTFTLASMRSGQTPSRSCTLDQTPSGFAELKRQLLALEPDPAAILVVMEATGTYWMHLALALIEAHIAVAVINPAQAHDFAKALLKRSKTDAIDAQTLAELAARLQPQPWTPPPSISNELQQRLVHRDALVDARTQFRNQLHALERHPIIVESVQTRLQELIATLSEQIAEVEQEISTALEQDAAWAEAAAFLASIKGLGMLTIAWLLTATSNFKQTATPEAAANYAGLVPQLRESGSSVRGRSRIGHSGHARLRRALYMATLSAIQHNSLIRAFYQRLIAKGKAKKVAVCAAARKLLRIAWAVATKKQSFDPAYVECRAARAA

SEQ ID NO: 188524 - protein, 406 aa, unidentified
MSDIFALDVSMGKSYCVWYRGKHCLKEFSLVHTRAGFNALRDMIKKAQKPIIYFEATGIYSRVIEHFCETNGLRFCRLNPLELHLKSESLRRVKTDQKDAHRIALTVQENAFRLTVPWKKEYLQLHELSRFYNQLNADWNYRLNHLHTALEQVFPELKQLFVNRTSKLALNIVELFPHPALVRPYSRVKLKNILMASTDKRISKMKAYKYADRLIDLAQKSYPAVSGDAIQVDEVRYYARQLIALTRKKEEVIKRMESIAQRLPEYILYCSFPGIGKQTAAQLMGELGDISRFDNANQLNAFVGIDIRRYQSGTYLGQDHINKRGNPIARKLLYFTVGNMIRQQHANSNHIVDYYYRLKEKRPHPKLNKVAMVACMNKTLKCLLSMIKHHEKYHYRYTDSMVPVKA

SEQ ID NO: 188525 - protein, 423 aa, unidentified
MKVVYPVCCGVDVHKSFLVATIIKTTNGVSPAYQKRRFSTFNKSIREFKQWLLDNQCLDVCMESTGKYYIPIYNLLEGDIRVTVANPKWVAAVKGNKDDVKDSKWIGDLFRLGLVPGSFIPDKPIRILREYLRYRFKLVCCKSSEKNRFQNAFTVCNVALDSVVSDMFGKSASAITDYLVSADSVDPAHCVSLLHRSMLKKADLIVDSIEGFQMTEEQKQRIRFIRTHLAFVDRLIEDLDQKIDSMVSPLENHIYLLRTIPGVDRTSAIIILSEIGTDMDQFSSSQRLCSWAGLAPGNNQSAGKKKSVRITRAGVYLKPALVQVAHAAVMSNASAYYRIKYERIAKRRGKKRAIIAIARMILTAVYHLLLTGEVWNPCDLYQVDMPPDLLAKQKQKAVQQAVKLLLSQGIVRPEDIALPLLSA

SEQ ID NO: 188526 - protein, 331 aa, unidentified
MQSQTFVGIDVSKDRLDIAIGSEGELWQVTNDSAGHSELVEKLSGVKPALIVLEASGGYEAVVAGVLWEAGHPVAVVNPRQVRDFARGQGKLAKTDQIDARMLAMFGEKVPIEVRAPLDPEARELQTLVLRRRQLIEMLTMEKNRRRLIPTGRARRNLDKHIAWLEEAIRRASDDIDQAVRQSPMWREKEDLFRSVKGIGPVNARTLVAELPELGRLNRKKIAALVGVAPFNRDSGKFKGKRAIAGGRSHVRTVLYMAAVTAARCNPLIRPLYQRLIAAGKPKKVAIVACIRKLLTILTAMVRDGVYFSAAPHPNPLPAAAAAGRGGKISP

SEQ ID NO: 188527 - protein, 414 aa, unidentified
MDTIVSRCAALDVHKDTVMGCVRVPDEFGGRVQEVREFRTFTAGLRALRAWLAGHGVTQVAMEATGVYWKPVWHVLEAEPGWQLLLANAQHVKNVPGRKTDVADAIWLAQLLECGLLRGSFVPPRVIQRLRDLTRYRKKLIEERTREIQRIQKLLEDAGIKLDSVVSDVMGTSAREMLEALIGGQRDPGVLAELARTRMRPKIPELRLALEGGFDPHHALMLRLHLDHVDQLSVAIEGLDAEVDRVILPFSEQHRRLTTIPGVGKRTAEVIIAEIGVDMSRFPTASHLASWAGICPGNHESAGKRRSGKARKGDAALRAALCESAWSAAKTRGYLGSLYRHLLRRFGKKGEAKAAFAVGHAILVIAWHLLHDERDYQDLGADYLDKRKDNEARKRYLIRQLETLGHRVTIEPAA

SEQ ID NO: 188528 - protein, 378 aa, unidentified
MKKIMRYVGMDVHADSIAIAVVEDNGTERDVGTIANRPEAIRKCLKKLGRADELHCCYEAGPTGYVLYWQLVRMGIECTVVAPTLIPTKAGDRVKTDRRDARKLARYLRSGDLTAVWVPDEAHEALRDLVRARQAAKIDEKRARHRLQKFLLRHGQRPAPGVKAWSVAYRAWLQALKFEQPTLGVVCSEYLQELLHHEQRVERLDTAIDQAIDEAPETIRAVIAALQALRGVRRVTAAGVVAEIGQFSRFAHPRQLMGYSGAVPREFSTGGPGNHRRGAITKAGNAHLRRLLGEAAWCYRFRPAVRYPLKKRQQGLPAAVTDISWKAQVRLCNRYRRMVTRGKTKQKVVIAVARELLAFMWAIGVEVETHQAPARTAA

SEQ ID NO: 188529 - protein, 346 aa, unidentified
MLHVGLDLSRKRIDVCLISDQGELIDRFTAIPDRDGLYGLARRVAVYGEAVRAVVESMNGARFVHDELTSHGWEVLVADAQKVKGLAPLACKTDKIDSGVLAELSFRDLVPAIWLPTFELRREREISRWRLHLVKHRSTLKNRVHSTLITFGHQRHMSDLFGVAGRRLLTELEMPEPWRSHVDASLVLIDDLEARIGQIAKELRRSGADHRYIPILMSAPGFGWITSFTVACEIADISRFSSPVKLTGYTGLCPRVKQSGQMDQRGPLSKHGPRYLRWGLMEAAIAASSHPLYRERYQRTRRRLGRQRGPKVAQIDLARQLTEAIWYMLTRNQPFAPAGAINRLAA

SEQ ID NO: 188530 - protein, 349 aa, unidentified
MGYFAGLDVSLEETAICIVDDTGRIVREARAASEPDALVAFFKASGTTMERVGLEACSLTAWLHQGLTAAGIPAICIEARQAKAAMGAMPNKTDRNDARGIAQIMRTGWYRAVHVKTPSCRSWRALLTARRMVLNKRRDVENGLRALLREAGLKVGTPSRRDFPARVRELAADDLVLANLVEPLLSIVDVMTDELARLTKRVLDEVRVEPTCRRLMTVPGVGPLTALAFRATIDRPDRFRRSRDVGAHLGLTPRRYQSGETDVQGRISRCGDELARTALYEAAHSLLIRSTKWSALRAWGMQVAKRRGMARARVAVARKLAVILHRMWSDGSEFRWGKQRPEPAAAAAE

SEQ ID NO: 188531 - protein, 337 aa, unidentified
MNNVPLLLGLDYSDGFVQVCAMDQEANVLVNRACRNDWRELVKAVAGKGTVRRVAIEACSGAADLAEELVSHAGWHVELAHPHYVAKLKGSPDKSDFSDSRLLADLTRVGYLPRTWLPPAYVRQLRQLVGYRQQLVDQRRANKLRVGALLREHRVKAPKELSRSRWSKPWVSFARNTTQLGEHARWIINQVLDQVIELDRRIAEAHERLGSATAGDTVIAKLMEQEGVGEVTAWVMRAFIGTFGRFNNGKQLSRYCGMSPKNASSGLRQADGGLIKSSNKILRGIIVQAAHRLIRTRPRWAALAESLRARGKPACVIAAAVGNRWMRKMFHEMRQTS

SEQ ID NO: 188532 - protein, 444 aa, unidentified
MAGSGMILIREVADAPVIMGISKPAGLKSPCGEVKIVNPLFVGIDVSSKNNVAYLMKPDGSKHSSFSVQNNLGGAKLLSEKIVSALGSMQLNDVVIGLEATSIYGNSLVYTLREDGSLGRFQRKIHVLNPKQVRKFKDAYPDLPKNDWVDAFVIADHLRFGRIAKEVYMDDYRYQALRTLTRARFDIIQNLTREKQRFANYLFLKCSGIAQAKDIQNTSATTLALMEHFETVDDLANADLNELTAFISEAGRGRFADPDATAKAVQAAARGSYRLPKTVNDTVNQAMAVSIASMRALKEQVKVLDKAIEQQFEIIPNTLTSIPGIGKVYSAGIIAEIGDIHRFNSQASVAKFAGLVWHRNQSGDFEAEHSQMIKSGNRYLRYYLLEAANSVRRCDSEFRRYYDLKFKEVNKYQHKRALALTARKLVRLVFRLLKDNRLYIPPVG

SEQ ID NO: 188533 - protein, 316 aa, unidentified
MEHGGKKVTVGIDTAKETLEVAVRPLGMSRTVPNTPEGHEALLALVEPLAPAFVVFESTGGFELGAVEYLLVHGVPVAVVNPRQVRDFARAMGRLAKTDKIDADMIAWFAETATLEAMPLKEEQARKLDALVGRRRQLIDMLTAEKNRLTTAREWIKADIQRHVHWLEQCLDDIDKEVGTLIKESPVWRAKEDLIRRIRGIGRVTSSLLIAQLPELGYLNRKKIAALVGLAPFSRDSGPFKGKRTIGGGRSGIRSGLYMAALSAIRFNPAIKAFYHSLIARGKPFKVAITACMRKLLVILNAVVKAHVNSLAEERA

SEQ ID NO: 188534 - protein, 330 aa, unidentified
MKNYDEVVGIDVSKKTIDAYCHQTQIHKEFVNDLLGYKSLIKWVLKVTKVSSVFYCFENTGYYSLKLALYLSSQDLVYVEESPLKIKRSSGVVKEKTDKLDAKLIARYAWLYREELTPSSVKSTSHLELGRLLALRDQIVRNNAGLKGTLKEMKVLLSSPTTDFGCISLKRSIDYLSKQVKGIETRIKEIISEDESMDKNYELLTSLKGFGLVVTCQLIYHTGNFTRFESWRAFSSYCGTAPFEHRSGTSIYRRKQCHYLGDRKMKSLLSMASVSAIQHDIELRLYYKRKLAEGKDKMLAINNVRNKLIARAFAVVKRGTPYVVLQQHAA

SEQ ID NO: 188535 - protein, 327 aa, unidentified
MKSIYVGIDVSKRTLDVCLKGSEKDKFFKIENKVKSIKKLFKELSKIDSYIVIARENTGHYNHQLYKVLPNFNFTVYVVDPKHIKRSIGLVRGKNDKVDAKRIATFIERNNEDLELWEPLSESVYSLKVLLTERKAEVNRIRVLKQRIEGLNQQKSVSSVPKLITRNKKEIQRIQKRVKEIEKMIREEIAKEIALKREIARIKTVPGIGDITAWMIAAKTHGFTRLLDPRKLACFAGVVPFEQQSGSSLKTKPRVSKMADRALKTVLQMAAMRSVRLDNELKEYYQRKVEEGKNKMSVLNAVRNKLIHIAMALIKNKSYYQNRLELS

SEQ ID NO: 188536 - protein, 346 aa, unidentified
MKKIYVGIDISKEKCNLCYRDGLEIVMEEESANDVKALKKSLSAVLKTFSVAIDEVLVCAEYTGRYIYPLTVACQELDIFLWMDDPTRIKNSMGLTRGKNDVIDAARIAEYAYRYSDKAVRYHIPDAALVSMKSLLVDREFLLIDKKRYQSQITDQKRYMASGDFKHKCARWKKVIRAIDEQIKAIDAEIESLIAANPVLTRQKELLTSIDGVGDRIAINMIAITGGFTRFQNARQFCSFAGLTPYKYDSGTSVRSKAKISKRANQTMKALLHLAAVGAATHMKESEYRDYFDRKIKDGKHVMCILNVVRAKIVHRMFSVIRRDTEYTKTYKPSVQVNVNQSITTA

SEQ ID NO: 188537 - protein, 369 aa, unidentified
MADRITYVGLDVHKESIVVAVAAGGLRGEVREYGRIANTPAALDRLLRKLGGDGMRLRFCYEAGPCGYGIQRRLSTRGHECVVVAPSLIPKRAGDRVKTDRRDAAGLAKLHRAGELTAVWVPDVGHEAMRDLVRARLDAVHSLRRARQQLSGFLLRHGCHYGRPAWTRLHRRWLAGLKFEQAVHHIVLEDYIAAVEAAEARRNRLTAQIEAMLPDWTLAPVVAALQTMRGMALVNAATLIAELGDLSRFANPRQLMAYLGLVPSEHSSGSSVKRGGITKAGNAAARRLLIEAAWSYRFPARLSRELLLRQESQPRLIRDIAWKGQVRLCARYRRLARTGKPANIVTTAIARELAGFVWAIARQVTVTTD

SEQ ID NO: 188538 - protein, 457 aa, unidentified
MAKKRNHHSKKIVHLDALKQINFHAAGIDIGDSEMYVAVPEDSDQQFVRVFGTFTRDLVSIAQWLLQCNITTVAMESTGVYWIPLFEILVEHGFEVLLVDSRKIKNVSGRKTDIEDCQWIQQLHTYGLLNGSFIPDQNIRALRDMIRHRANLLRYRASHIQHMQKILQLMNLKLTNVLSDITGTTGMKIIRAIVDGKTDPHYLSQFRDPHCRTAQAEIEKSLEGNYRSEYVFQLKQMLNLYDQYALLITELDHETEAMYQQLPSLREPKEHPLKPLKRNTNRKSKNSPVFDLRTQLYRITGVDLTQVDGLNASTVQDIITDIGTDMSKWPTSKHFCSWLRVSPENKKTGGVVFSSFTKKTKNRANKALRMAAFALAHAHCALGAFYRRVRAKHGGPAAITATAHKLARIIYKMLKDKVEYVDLGPDYYEERYKSRIIHSLKNRAESLGYQLVPISTQ

SEQ ID NO: 188539 - protein, 344 aa, unidentified
MEYFAGLDVSLEETSVCIVDGEGTIVAERKVASQPGAIAEALRDSGFVLTRVGLEAGPLSPWLHAGLRAEDFAVICIETRQAKAALRAMRNKTDRNDARGIAQIMRTGWFRIVHVKSGESHELRFLLTNRKTLQRKALDIENEIRGTLKAFGLKVGKVSRRRFEARVLELVADRAVLHRMVAPMLKARAALLEEFARLHRMVLDVVRDDAVCRRLMTIPGVGAITALTFKTGVDMPGRFAKSKTVGAHFGLTPRKFSSGEIDHQGRISKCGDAMVRSALYEAANVMLTRCTRWSALKAWAARIAKKAGAKRARVALARKLAVIMHRMWIDGTDFQWGEQTKAAR

SEQ ID NO: 188540 - protein, 430 aa, unidentified
MNHSDLKTIEFAAYIGLDWADQKHDICLQENPSHRVESLRLDHKPDAISNWAAELRQRFQGRPLAVALEQKRGALLYALMRFEFMVLYPINPKSLASYRDAFTTSGAKDDPNDALLLMEMVRLHRDKFQPWIPDDPLTRQISLLVEYRRRLVDDRTRLTNRLIALLKQYFPQAVNWAGKLGSLAAVDFLTQWAQLETIQQASPAEVQDFYRQHGFRLGEKIQTRLDEIKAARPLTTDQAVIAASASMMRALLGPLRGVIAGIEALDQQIAACYEQHPDRQIFDSLPGAGPALAPRLLAAFGADRERYRSAEEMQCFSGIAPVVKRSGKTTFVQRRLACPQFVRQSFHEFAKSSILQSRWARAYYDQQRRRGNKFHEAVRALAYKWIRIIYQCWRQRAPYNEAVYLARLELHGSLLAKLVSSKRLSSASAG

SEQ ID NO: 188541 - protein, 321 aa, unidentified
MDKQNIIGIDISKQSFDVFDHNAKHQVYTQDLDAFKKFLKAIPKYSICVMEATGIYHLQLANFLYANNIRVAVINPLRIKRFIQMHLKRNKTDKSDATMIRLYGIKQDMELYKPIDPDLQQSKDNYQTMEQFINIRASLKNKLEELSCKKSDLKLIQVVDSQISNLTDAIQGLEMEITTLINKSHAQLLSNLKSIAGIGARTATILIISSDAFNHFDSAKQLSSFYGLAPSERSSGTSLNAKSTISKKGNPLVRKKLYMCSLQASIHNPACRDLYQRLIAKNKSKKLALIAVANKLLHIVYAVAKSNIPYDPEYVSYRKVA

SEQ ID NO: 188542 - protein, 347 aa, unidentified
MNFYNNMHPYYCGIDLHARLLYVCIIDNTGLILVHKKIKDDPEALLKLLKPYIGDIVVGVECMHCWYWVADFCKEHTIDFILGHALYMKAIHGGKAKNDKIDSHKIAKLIRGGNFPLAYVYDKDMRATRDLLRRRTKIVRHGADLKAHVANTASQYNLPAHNVNLKNVCDREKMRYYFPDPVVQRSINLNMAILDCYHKELKPLEHYIEQMAKQHNPVHLNILQTINGIGRILALTIIYEIGDINRFSSVQKFASYSRLVKCKAESAGKTYGTQGNKIGNAHLKWAFSEAAVLLLRHNHNANKYLEKLQKRMSKAKALSALAHKLGRCVYYMLKKETVFDEAKFLKS

SEQ ID NO: 188543 - protein, 404 aa, unidentified
MLHSQPSSDYVQVFVGLDVHKETIRLAALHERHFVFERTVKTTNLDVLRKTLVKLRNKYGVLKACYEASGAGYGLQRQLGEWGFSCEVIAPSLMPTRPGDRRKTDEYDARKLAEFFANGQLTSIRIPTEEEEAVSDLVRCRFATKKTQIKAKHRLVKFLAKKGKSCAAAAWTNDYLAWLSALSLDAVADNLTLTYYREHLEHVSKQLECIDASILAVSKEEPYSERVSLLRGFYAVDTLTAMVLVSQLGDIQRFRTPRQVMSYVGLTPSMNMSGGSKNRAGSITKTGNSHSRHVLVQAAWNYLKPVRETKSKALLEKQRDLPSWAVEIADTARERVRRKMWKIAERRGNRIAIPAGARELAGFLAAALMRLADVKRDLEEASSKVSGIVDRTVGCPAIRLHSQE

SEQ ID NO: 188544 - protein, 338 aa, unidentified
MKHKRIAIDTSKHVFTLHGVDEQDSAVLRRNLKRSEMEAFFRKLAPTEVVMEACGGAHHWGRLLSRLGHRVRLIPAQYVKPFVKRAKNDRADAAAINDAASRPDMPVVAVKSAEQQASTMILKHREMLVGQRTAAINALRGHAAEFGVIAAKGTAQIQALLERLAADEAIPAAAKTMFAQMGAHIAALDQQAATLDEELLTLHKANPVSQLLAAVPGIGPISAITLALSVEPTHFASGRHFAAWLGLTPKEHSTGGRPRLGRISKAGNERLRQLLVVGATAVIRHAKPGKSSVSDWLLQLLARKPRKLAAVALANKTARIVWAMMARGEAYRRSPIIA

SEQ ID NO: 188545 - protein, 350 aa, unidentified
MKIKRVGLDLAKRSIQVHAVDEHERVVLKKSVKRAELLKLFANREPCLIGMEACGGAHYWARELAKLGHDAKLMAPKDVKPYVQGQKNDANDADAICEAVSRPKMRFVPLKSIEQQDVQALHRIRSQCLEQRNAKASLIRGLLMERGIVIAEGLSPLRAALVRLLEDAENGLSCSFRELLADLRGDLLRLEERLAELTRRVERDAQGRDETRRLMTIPGIGPITASALWASIGDGKAFANGRQLSAFLGLTPRQHSTGGKTRLLGIHKHGDSYVRGLLVHGARAVQRTAVKKTDEPSQWLNRLAQRRHVNIATVAQANKMARIVWAVLTRGEVYQANYRQEHARQMLKAA

SEQ ID NO: 188546 - protein, 359 aa, unidentified
MNTITIGVDLAKSVFSVCAVDGSGQILRRLELKRAAFAPWLAQLPAGSVVAMEVCSGAHHWARRCLEYGLQPRIIAAQFVTPFRKGRKTKNDRADAEAIATAARQGNMRFVPIKSLDQQARLSWHRVREGYKAESLAIGNRIRGLLAEFGVVVAKSDVALHRLLADLDAQVGLPAELKELLRDLAAHGKQLRTALDACDARIEAHARDDEQCVRLRAVIGVGAITADAMVATVGNAHEFKQGRQMAAWLGLVPTQHSSGGHAQLGAISCRGDAYLRTLLIQGARSSLQRAQAVSVQDATPEQLWIRTLDGRMRFGKVIAAIANKHARQLWAMLARDVDYDPSACLNHPMHQHTHAAHAA

SEQ ID NO: 188547 - protein, 458 aa, unidentified
MENTEKRPKRRGTAQQAVLPVELQRVNLNAAGIDVGADSYFVAVPEGRDEALVKKFGVFTRDMVELGDWLEQCGVTAVAMESTGVYWIPLYEYLERRGFEVKLVDARRVKNVPGRKSDVLDCQWIQYLHMMGLLDAAFRPSDEICTLRGYMRQREMLVECYTMHVQHMQKALTQMNLRLPNVVSDITGVTGMKIIKAILAGERDPHVLSGHREPQCRKSREAIALALEGNYRDEHLLALKQATELYEFYQQKILECEKALLAALQQRASHTDKEPPPSNKPLRAKDRVRAGVDVRRELYRQTGVDLFQISGLGADTLLTVTSEVGLDMTPWKSEKNFGSWLGLCPGTKISGGKVLSNRSKRSRNRAAKAFRMAASTLRNSQTALGAFYRRIKSRVGAAKAITATAHKIAKIYYRLLKYGEAYTELGAEAYEMQYQERRLKALQKQATKFGYTLTLTPV

SEQ ID NO: 188548 - protein, 405 aa, unidentified
MDLKPLYRCVVALDVHQGKLTVCVLQEDGEGELQVQLREFGGCKRERREMAEWVASFHPEEVVMESTGIYWKSPYAALERCGIRALVVNARHVKQVPGRKTDIGDAQWLAILARSGLLRGGFVPPANFRELRLTSRQMQKLTGILAAEKNRLHKVLTDAGIRLAVVVSDIHGQSARAMVKGLIAGESPEQVLAYASKRLKASEEELLDALEGELSDEHRFVLGELMDHIEDLERRIARFSEHLLDGLAPQQGLLQALQTIPGLDERGTAMLLVEIGDDMDAFGSGEKLASWAGVCPGNHESAGMRKSGKKRKGNPYVRRRILCEAANAAARTRSALAELFKSLLIRRGRKRAIFALAHKILKIVFVLISRGDYYRDATVDYEAMSVERNAPRWIRMLRKYGYIAA

SEQ ID NO: 188549 - protein, 425 aa, unidentified
MASNPRIVRRAVWKDWKPPIRGIGRLTRKILWAFGWRPALRESEVADAPTLEPMMLNDAPRPAQAAIRTDLGAIFVSMELSRRAWLITSLSPGAGEKMSKHSVPASDVPGLLHRFAELKRKAAARSGRDFPIIVIQEAGLDGFWIHRVLQSEGIESHVVDPASILTSRRARRAKTDRIDGETLVRTLMAFKRGEPRVCSMARAPTPQEEDRRRVCRERRILVGERVRHVNRIKGLLFAQGIFGYEPLRKCRRERLEDLRTGDGRPLPVHLKAQIIRELDRLELVLAQLKAVAAERDTLLKTASDEMPAPPAMLVQLKGIGPEIAAVLWSEGLFRRFDNRRQVAAYAGLAPTPWQSGSIDHEQGVSKAGNPRLRTTMVELAWLWLRNQPTSALSLWFHERVQSLSGRMRKTIIVALARKLLVALWR

SEQ ID NO: 188550 - protein, 338 aa, unidentified
MNSVTLLGIDIGKNSFHLHGQDAQGHMVLRKKLNRSQLLPWLAQIPPCKVAMESCGGSQFLAREITKLGHQVQLIAPQHVKAYVTGNKNDFIDAEAICEAASRPRTRSVQVKSVDQQVLSTVHKLRKSLVSRRTGVINQVHGFLLEFGVIFPAGYAALDRVPTLMEEHNLPLRLRQAINRMLDDIRQLTSEIKALDTEIKQQVNRSDAGKRLQSVPGIGPLIASALVADVGDASMYKSSRDFSASLGLVPRQYSTGGQTTLLGISKRGDRYLRTLLMQGAQTLLYRIDKRNDALGVWARNLLARKPINKVACALANKMARIVWALLTKGGTYNGHFTA

SEQ ID NO: 188551 - protein, 366 aa, unidentified
MLYLGIDQHARQITISLRDENGDVLQARQVSTQPEKINTFFQQLTDGRLYADPSFIAVLEVCGFNDWLIRMLRDYRCHKVILIQPDERKKCKTDRRDAASLSELLWVNRDRLLQGKPVRGLRQIDIASNTDQENRRLTTLRKEVGQARTRLVNKIRHLLRRHNLQWQMPTKRLPTLAAIAWLKQVALPEIDRLEMDQLLSDLEHVRQRLKELERVIAQRCGVSAEAVLLSSMPGVSYFTATSLACRVGRIERFPRSQSLANYWGLTPGCRNSGENTQRLGNITKAGSGMARWLLAQVTHKVLRKDARLREWFKRIKRRRGPTIARVAVMRKLATIIWHMLSKRKTYAECRALAEVGMKQSEQQPCG

SEQ ID NO: 188552 - protein, 317 aa, unidentified
MTPAKFYVGVDVAKDWLDVAQRPEGAPWRVSNDERGIAALVERLVQLRPALVVLEATGGMEMPVVGALVIVQLPTAVVNPRQVREFARATGRLAKTDAIDAQVLAQFGEAVRPELRPFPDAATQELSALLTRRRQLVGMLTAEKNRLRTAAKAVRADVQEHIRWLECRLSDLDGQLAQSIRSSPSWRELDNLLKSTPGVGPVLSVTLLAELPELGTLGRKEIAALVGVAPLNWDSGHLRGKRRVWGGRSRVRAALYMAALVAARRNPVLRAFYERLVEAGKPKKVALTACMHKLLTILNAMIRHRTPWSVEHHALQP

SEQ ID NO: 188553 - protein, 429 aa, unidentified
MIMGFTKPIEHFNLQRKKVITMNTLYVGIDVSSKSNVVYLMLPNGDKHSNFSVANSHEGSTQLVKRILSVLTSHSLDTVLIGLEATSVYGDNLVYFLREDATLAPFNRKIHVINPKQVKKFHDAYNDLPKNDYVDSFVIADCLRFGRINKEVYMGDYRYKALQNLTRARFFAVQNLVKEKQRFMNVLFKKYSTMTQEKVFSDTFSTTALAVYDEFESAEALANMDLHELTDFIMEKGKNRFPDPDAVAKAIQKAARSSYRLPKTMNDSVNQVLSISITSMKALESQIKEFDKAIKAQMELLPNVLISIPGIGPVYSAGIMAEIGEIDRFNSQAALAKYAGLAWKQHQSGGFEAEVTRLIPSGNRFLKYYLCEAAFSLVRCDKEYSDFYHLKYKEVNRCQHKRALALTARKFVRLVFRLLKDNRLYCPAK

SEQ ID NO: 188554 - protein, 403 aa, unidentified
MNAVGIDVSKGKSMVAILRPGGEVVARPHEVSHTGDGLAQLAARLKGLPGETRVVMEHTGHHFEPIARSLHEAGIFVSVVNALLIHQYGNNSIRNVKTDRKDAVKLAKYALDRWAELPAYTPEDENRRMLKIYNRQYNQYMKIKVMLKNNLIALLDQTFPGVNTLFSSPAREDGHEKWVDFAAKFWHCQEVTKLSERAFKERYAKWCTRNGYRYADDAAGRVYAAAQGQVGVLPANAATKCLVTQAIDQLKAVAGTLAAVNREMRRLASLLPEAAIVRQMYGVGQTLGPQLMAEIGDVRRFHSKKALVAFAGIDAPPYQSGNFEAKKRTISKRGSPALRKALFQTISGILRLSSPDSEVYQYLAKKRAEGKHFYVYIMAGANKFLRIYYARVTEYLRGLESAA

SEQ ID NO: 188555 - protein, 325 aa, unidentified
MSESIVHVGLDVSKSFLDLHLGGPPLRLAHDPGGCAELLKRLAALPSRPHVVLEATGGWERPVVEVLRAAGVIHSVVNPRQVREFARATGRLAKTDRIDAQVLAAFGAAVRPKPTPPPSSQQAELAAWVTRREQLLDFLRAERCRQVPGLPKALAAQILASIARIQKQIAAVEVRIAKLIATHAELLARAKRLESFQGIGATTAATLLGHLPELVQLSGKAIAALVGVAPLNNDSGPRRGLRRIAGGRASVRSALYMAAFNAIRYNPILRPFYERLRARGKAFKCALIATARKLLCALNTALQDPNFIPVGNHSNVPPEPSTNPT

SEQ ID NO: 188556 - protein, 350 aa, unidentified
MMIIGCDLHTRYQQVAMVDTETGEMLECRLEHENGEARAFYAALRGPVRVGIEATGYTHWFEALLAELGHELWMGDAARIRAAVVRKQKTDVRDATHLLDLLREGRFPKIWRPSPAERDLRQLVWHRQKLVWMRGAVKNQLHALAMGEGVCRKKQLFTVKGRKELEGLALGPWSSYRRQELLRMYDEMAAATTKLDLEVERTAKAQPLAVRLMTHPGVGPVTSLAFVLILGPVARFERSKQVVSYLGLNPQEHSSGGKQRMGSISKQGNPMMRSLLVEAGHTAARLDPELKRVYQRLKFRRGASVAKVAVARKLAVRMYWMLRSTADYAQLVRMQGSPWATLVETSPSLG

SEQ ID NO: 188557 - protein, 348 aa, unidentified
MRGAVHMQITTIGLDIAKNVFQVHGIDATEKVVVRKQLRRSQVLAFFKALPPCLVGMEACATAHYWARELTKLGHQVRLMPAKDVKAYVKRNKNDAADAEAICEAVRRPTMRFVQVKSAEQQGQLMLHRTRDLLMRQRTQVINALRAHMAELGIVSAQGREGIKELLKIIASEQDARLPVDAHTSLVVLAAGLQAVQTMIGSIEKRIMAQHRASEASQRLESIPGIGVIGATAIAATVPDPKVFRSGRDLAAWIGIVPRQDSTGGKQKLGPISKQGDRYLRRILVVGAHAVLKQARRQPEKYPRLTLLLARKPFKVVAVALANKMARIAWALLAKGGTYRAPALAAAV

SEQ ID NO: 188558 - protein, 318 aa, unidentified
MNTNTLQNINVGVDTGKANLDIYIRPVDIFFTVSNDDKGIKEAVKIIKKHQPERIVIEATGRLEMPFIIACSKANLPFVIANPIHIKRFAGTIGRRAKTDKLDAQLIAHYSEAIQPQLTQLKPEIMRLMSDLVARRHQILTMQTMEKNRLQQLPKTLHSTINPIITSFKNQIEKIETLIIALIEKTPSYQSKNIILQSVPGIGKVSAAAIISNVSELGYINNKQAASLIGVAPMNRESGRYKGKRIIQGGRAQVRTVLYMAMMSAMQSNPVFKTTYQRLLEAGKPKKVAIIACVRKMVVILNSMLRDGTMWNENMAKN

SEQ ID NO: 188559 - protein, 347 aa, unidentified
MNYYAGIDVSLECSSVCVVDGTGKIAREAKVASEPEALIAWFGSLGLSLERIGLEAGPLSQWLYAALREAGLAVELLETRHVKAALSAMPVKTDRNDARGIAQLMRLGWFRPVHCKSAEAQEIRALLTARKLVQSRLYDVEMSLRGILRGFGLKVGRTTPKRFAERIRELVVGHATLEAVGAALLSVHAVLLREFNGFEKRVRAIARSDGRVRLLMSTPGVGAIVGLTYVSAIDDPARFKSSKSVGPHFGLTPTKYQSGETDVTGRISKLGDSSVRTALYEAANVILTRPIKGGGLKSWAMKLAKRAGMKKAKVALARKLAVILHRMLADASKFIAEKASGCVRVAA

SEQ ID NO: 188560 - protein, 400 aa, unidentified
MGQPLWAGVDAGKLDHYCVVLDADGKRLLSRRVANGEAALLELINAVTALADGGELTWAIDLNAGGAALLIALLIGAEQRLLYISGRTVHHASGGYRGEGKTDAKDAAVIADQARMRRDLQPLRPGDDIAVELRILTSRRTDLVADRTRAINRLRAQLLEYFPALERAFDYSASKAALILLTGYQTPDGLRRAGAARLAAWLRKRKARNADAVAAAAIEAAKSQHTVVPGQQLAAAMVARLAEEVMTLDTEIGDTDAMIEERFRRHRHAEIILSMPGFGVILGAEFLAATGGDIAAFGNTDRLAAVAGLAPVPRDSGRISGNLKRPRRYNRRLLRACYLASHIAIRTDTASRIYYDRKRAQGKRHTQAVLALARRRLNVMWAMLRDHKPYQPTAPNAAAA

SEQ ID NO: 188561 - protein, 395 aa, unidentified
MNKIVHYIGLDVHKDSIAVAIAPQNSTEVRRYGIIGGTLDAVDKLLKRLSQPNIELRLVYEAGPCGFVLCRHLRHKGIHCDLVCPSLIPKKASDRVKTDRRDADQLARLYRAGELSPIQVPDQEDEAIRDLIRARTAAVHDQRRARNRLKGFLLRLGFRYTGKTSWNEAHKRYLSGLLMPRPAQQIVFQESIHAIDDAAERVARLTQAVEDALPGWKWEPVVRALMSLRGLQVLSGMTVIAEAGDLSRFENPRSLMHFFGLTPSEHTSGDKRVLGGITKCGNAHCRRVLTEAAWHYRLKPLVSEAMQKRQEHQSKEVRLIAWKAQQRLHKRFRQLAVRKKSVVAVTAIARELVGFVWAIACQVKPAPRPPAPEVIRTCQGKVYRLDPEKKMPKAK

SEQ ID NO: 188562 - protein, 316 aa, unidentified
MDQSGIVVGIDVSKARLDVALRPSGETWSVSNDEPGIASLVERLAPLEVSLVILEATGGQQDAAAAALAAAQLPLAVVNPRQVRDFAKAMGKLAKTDVIDASVLAHFGQAIRPEPRALPDEAASELAATLARRRQLVEMLVMEKNRLCVASKKQRPSLEAHIRYLNLELKDLDKDIHGTLRSSPVWRAKDDLLRAVPGIGPTTSATLLAELPELGTLNRKQIAALVGIAPFNRDSGTLRGKRVVWGGRASVRTVLYMATLSAIRCNAVVKEFYERLCKAGKPKKVALIACARKLLVILNAMLRDNQPWTNNVLHAT

SEQ ID NO: 188563 - protein, 476 aa, unidentified
MTSNKNAHTDLHVLPTLAHETLYVGIDIGKTMHVAGFLSTTLLVRHQRFEHCPALTFANTREGFRSLADRIGGYVPLTQVYVVLEFTGHYHRALVQYLQELDIPVSAIHVQKRQAGLLKTDKRDALGLANVLYNQLEKGIQMGDPLQAIRRLASPTETAAQLRGMVQHRYELINESTQRKNKLTAICDEIFPELTQIYKDPNLPSALALREHFPTPATVATTSLSALKETRLGHHPSDTKLLELQQLAAQSIGTKDAARVHGLTFEQKQLIKELQLIQDHLEELETEITQVVENSREGKILTSIPGIGAIPAASIIATIGTIANFSRASQLKSYFGWAPTVAQSGKTLDRAQLSPRGTRLMKRTMYLIVWKAVQTKGCEWAQIYERLVPIKCSYNERTHRYTGRGRVIGRIAGQIISVVYALLKKDQELLSKLPPGTPAPEPVLYDPQLHRQHQAGQYQTSSSRSKQNKLILLPPH

SEQ ID NO: 188564 - protein, 552 aa, unidentified
MKITLMDHDNTVETESAPAGAETDSVSTVSREYGIMRDVSAMAAADAPTFIGAMCPTCRLSSARPMFNGRAAVELHGGVLPRQDFTSIPPKPSPCSYKEGQDMAGKTNRFEEVRRFVAGVDLAGHADHYVCGPRKDDGTHDIEHFGTTTNELKRMVAWMKERKVESAAMESTSVYWIPVYDTLESAGIEVVLVDTRTVKMVPGRKSDVKDCQWLQRLHSCGLLRGAFRPPEAFNAVRSVIRERGNVLQMRTQAIQAAQKALDQMNIHLHHAVSDIDGVTGMRILGAITDGERDPHALAKLRDKRCRKSESEIAEELTGNWREEHLFNLKQAYRTLCFLDERVAEYDRQIREMYARIAETFPPSDPPPGGGGEKSKDKEDANAKADLARICGGFDMTRIDGIGYDSAAAILAELGPNLSAFPTERHFVSYIGTAPSLGKSAGKNVSTRNKHKNTSRVGLILKMSASALFRSESSLGARIRCVRSRTCSRTAIKDVAREMGKRIYRGIKHGQAYVDEGEQAYMNRTRERTIRSMKKKISKLGISAEELGIRIAS

SEQ ID NO: 188565 - protein, 363 aa, unidentified
MRSDSVVPTQSGKRFIGVDLHKNRFTVCYMQETGEYKLAVFSLNIKGLERFKETLTKEDEVAVESTGNAGYFGREIKGLVKEIKIINPTQFKIISQSVKKTDEHDAVTIARYLAKGLIPEVRMRSKEESQIASLIGTRDKLVKLRSALKNKIHGILNANGIVTDREIFGSEKGLEKVLTLNIDEAYLFELKIIVEQIRGLNKSIDEISRGITNRGEKLKGHKNLTSITGIGDLSATILLNTIGDIKDFSDDKKLAAYFGIVPRVYVSNETSHYGRITKMGNKIGRTALVQSTLIAIRYNDYLRSFYKRLKGKKGSGKAIIATARKLLTIVYRTLKNNWVFEDFNKFKLATPLQTCLGQAGGVD

SEQ ID NO: 188566 - protein, 367 aa, unidentified
MVLVKPKPIAEDAAGHGALLATLAPPGEALVVMEATGHYWKNLFAVLAAKGYEVALINPLRTHRFQGESLERTKTDAIDALGLARFGRKKNPPSTRLGSRAREDLRELVRHRDRLRQDFDDRVRQLHRLVDPGFPEFHRYVRTLDSMLATAILAEYPTAEAVAKATPRRLAKLRYDGRHAVGHELADQLIAAAERSVGQHHGPAYRAQVRDICQDLNLWRRRLAERDDDIARLLDEHEVGSLLTSIDGIGPGTAARLIAELGDPARFDSAAALAAYVGVVPALRQPGKRRPTWAGITPIGNARLRTALWMPTLTAVRRNPWLKAFYDRLRAKGKPPKLALIAAMRKLLVAVYAVAKARKPFEPMLPT

SEQ ID NO: 188567 - protein, 416 aa, unidentified
MDAIVERCAGLDVHLDTVVACVLYGKLDIKPKKEVKTFSTTTKGLLELLDFINQKECTHVAMESTGIYWKPVWNILESGAFDLIVANAKKIKNVPGRKTDVKDAEWIASLLRCGLIEKSFVPPERIRDLRDLTRLRKELLGEVNRNKNRIHKVLQDANIKISSVLSDVFGETGKSILNQIIGNQCITEEFIYSLYEGRGKSKLKSTPMEMYEALNGKIRGHHVILLGMHNSNIVFLEKQINELEKEIDILLQKERDSLELLETIPGISKISASSIIAEIGTSMDVFKTEKHISSWAGLCPKNNESAGKKKRSGTKSGNNWLRSMLCECAWSATKKKDSRFKNKYWSMVPRMGRKKALIAIANMMLRLIYHLLKTKSTYKELEIQYFIDKDKRREDRIIKELKSKGYLVEKDSLQMA

SEQ ID NO: 188568 - protein, 434 aa, unidentified
MQDVEDEPLFAERVAGIDIAKAGIEVTVRVPSDTRPGGRQQETRPFRTVRKDLLALADWLRAWGVTKVGMEATGDYWKPVYFLLESGGLDCELYHAAQVKALPGRPKTDKLDSAWLARITERGSLPSSFVPPEPIRRLRTRTRYRRHLTQARTAEKGRAEKLLEDAHLKLSSVISDIHGVSGRAMLEAIIAGERDPRVLAQLARGKMRGKIRQLEEALDCSFLTGEHAAVLAMMLATIDYYTTQIDELTAKIEVLCEPYRHQIAQLDAVPGTGVITAQDVIAEIGVDMTVFPTAAHLVSWCRWCPQVAQSGGKRKGANASGRGNPYASAAIGEASISAGRTQSFPGAKYRRLVKRMPKKKALVATGNSLLTIYHALLSDPGAAYQDLGADYYERRMNIRRQARNHLRGLERLGYKVTIEAPDPDPDTIPVTAAS

SEQ ID NO: 188569 - protein, 370 aa, unidentified
MACRGHNPRQAAGDRIEPTQSSLRLPRSVIVVSTFTGPGWLPEQLGSLHKAGSTKMTQTNMTTAGIDTSKAKLDVAVHGRTERWQVANGLPGWRALAANLVKAGAIRVGIEATGGYERGVVDYLRAAGFIVLVLQPSQVKAFGRIRLRRAKNDALDAELIAACTAALDQPKILPDPRLTELAGYLTFLEQTEEDIARLKTRLEHIDEPELRRIANSDITRLKTRRTAQIRNIAKRLRAHGDLDRRFDLVLSIPGIGERTALALLIRMPELGQVSREEAAALAGLAPFDNDSGQHKGQRRIAGGRGRLRRSLFAAALPAAYRWNKALIALYARLKARGKAHNAALIACARKLLIYANTVVQRGTPWTEKAA

SEQ ID NO: 188570 - protein, 360 aa, unidentified
MLYLAIDQHRKQLTVNLRNEQGDVLVKRQVSTEWPRVRSFLEEVREMSVSEEGFIVILEVCGFNDWLVKLLAEFGCRETILIQPEKRSKKKTDRRDAYALGELLWVNRQRLLASKKVQGIRRIQLPTDHEAEDRQLTVVRQRMGQQRTRTINRIKHLLRKHNLEQQQPAKGLDTQRTRKWLATLPLAPIDRLEMDLLLTQWKLWDEQLARLELEIEKRQAKNATAAVLATIPGCAAYGSLALASRIGSIERFPRPASLANYWGLTPGCRNSGEATDRLGSITKQGSAMARFVLGHMVLHVLRRDARMKAWHGRIKRRRGSKIARVAVMRRLATIIWHMVKHNEPYAVGGPPQRKLSARAA

SEQ ID NO: 188571 - protein, 344 aa, unidentified
MIEQKIGLIKYFIGIDVGKASFNYCLRYGGGTVVNGKAANNVESIKEFVLTLKQIPGFKLGHAIFGMEMTGVYGLVLMNTLVKLKAKVVVEPALRIKNSLGIIRGKNDKLDAARISRFLIKNLTELKLWIPRRTIINQLSSLSTLRERMVKVRTLMNTPLNEDDGFVDHEISKTNIELCSPSLILLEQLVLDIDNKIKQSWMEDERCRRFMEIMLSVRGIGDVTALQILIHTNEFKSIQTARTFASYCGVAPFDHDSGISVKKKSRVSAISNKRIKSLLHNGVRACIANDPEIKAYYKRRVEVDGKNKMSMMNAVKFKLICRVFACIRGNRLFDKNYGGKKPIQ

SEQ ID NO: 188572 - protein, 368 aa, unidentified
MKQQTSATIETFIKGRTVTDFSGKTIYVGIDVHQKDYQVAKILGEICLGNHRMGADNNQLIEHLRSRYPGAAFKCVYESCAWGFALQRKLEQAGMECIVVHAADVSSSDKEKRRKTDTVDALKLARNLESNQLKAIHVPPEDIQKQRNLIRLRKRLVGDINRSKNRLKSLLKYQGIDIPEKFGKKNNWSHNFMNWVEAEAKKDELLEDSLLLLLEEIKMLRQLLLRAERKLRELMKSKYKGNAELLVSTPGVGPTTAMLFLLEIGDIQRFGTFDSLNDFVGFCPDTASSGDTEQDRGITCRRHKQLRSALIESAWQAIRVDPALLEAYQLLTKRMKGNEAIVRIARKLLRRMRAVLLSGKPYQIGLVK

SEQ ID NO: 188573 - protein, 419 aa, unidentified
MSFKIFKFNCCGLDVHKTWIYACIGITDSNNRTEYKQARFSSFTKGLNELCDWLAKYNCKDVCMESTGKYWIPVFNILEQHSFWVTLSHPKYTKPMKGNKTDRKDAKWICDLYMCGMVKPSFIPPADIRELRDLVRYRFKLTCMITGEKNRAQNCLTVSNLKLDDVFSDVFGKSSRSITEHILQHPGEKFDIAPFVDSRCKTPITEIQAAVDGAISKEQVVKLRQCLDHIDELNKHISEVEQEILRLSDKYEIALNLIRTVPGFNKNPLTAIQVLSEIGGDMSVFPTAKHLVSWAGCCPRNDQSNQKIKSTRISRAGSYFKPVLVQVANALIKSKKHLEFTNRYKRIKARRGHKKAIIAICRMILTAIWHILSDLKPYTPEGFLESRPVKEGKVLSTSQALNLLKQRGYIIKGEPLAVS

SEQ ID NO: 188574 - protein, 408 aa, unidentified
MDVLIERGAGLDVHQATVVATVRVPGEGGRQMVTETFGTMTPDLWALREWLQAYGVTHVALESTGVYWKPVYYMLEDAFTLLLINMQQLKRVPGRKTDVKDSEWLAQLLECGLLRSSFVPPPPIRELRDLTRYRVQQVRDRAQEVNRLCKVLEDSGLKLTSVLTDVMGVSGRAMLAAMVEGTTDPAILADLARGRLRKKLPELRRALQGHFRRHHAFLIEQILAKVDFLDETLDRLMGELDARLVPFEPLLTALDTIPGVDRIGAISIVAETGGDMSRFPTAGHLCSWAAMCPGHNESAGKRRSGKTRKGNRYLRGTLIQAGLGAIHSKGTALQARYHRVKRHRGHKKAVVAVGHQILEIAYYVMRDGVTYQELGADYFAQRHAERAVRRHMRQLEALGYRVTIEKAA

SEQ ID NO: 188575 - protein, 353 aa, unidentified
MKKIVKQAVGIDVAQDELVVCMGRMYEDLTLELYSHKTFGNTAKGFELLTNWVSKLSNADVELIYVMEATGVYHESLAYYLSDRGDRLSIVLPNKISNYSRTLDVRTVTDKTASEAITRFGLERKLDNWEPPKGVYRSLRQLTRERDQIVATRTIAKNQLHAEEAEAYPNKRSIARTKKHIAFLDKQEQEIKEELAQMIKEDEEVKRIVVLLCSLPGIGLLTAATILGETNGFDLIRNKRQLSSYAGLDVKEKQSGTSVKGKPRISKKGNRYLRKAMHLPALTAIRHDERFKAIFARIVSKHGIKMKAAVAIQRKLLEMAYTLYKRQEKYDSQYLNKSEDKIAVEITELSIKN

SEQ ID NO: 188576 - protein, 337 aa, unidentified
MSNEIWIGVDLGKSEFEAAVVGPEVRAEAWPTFPWSQFEHSPKGVDRFVQWIGEQCGEQQPIGGICVEATGRLAWRWLTLLDGRIGAVSIVNPALPSAFACSVGLRDKTDRIAACVLGLYGRTMCPRQAQLPSPAQAELRELYMLHGVWQREFRAYSNRLEDGPTSAIVRRALSSHIRQLERKLAKLQRQMDELIDSNDQLRCDMRQALSITSIGPKTARALLAEYGDMRRYSRNEIVALAGLYPKQFQSGTSVYRRARLVKGGGSRIRAILYMCAMNAVHHNPHMRLFAQRLKAQGKTPMAIIGAVMRKMLLMVRAVIVSGKPYDPTFGMTSQKPT

SEQ ID NO: 188577 - protein, 430 aa, unidentified
MKSNTQNAKIEAITEKTLVLGIDVGSETHYARAFDYRGIEYSKKPFKFSNTEAGFATFKEWILELKERHEKDKVVPGMEPTGHYWFNLGKFLQDNEMKPVLVNPHHVKKTKELDDNNPTKNDRKDPKVIAGLVREGRYMIPYLPDGVYADLRTASNIRFQLQAELTRIQNRISRWFNIYFPEYKTVYGKPDAKSGMLILKAAPLPEDILTLGIDGVNQIWRDAKLRAVGKARAKTLIEAAKHSVGSKEGAVSARMEIRMLLEDYESRNTRLQEVMVLIEELVRKIPMAEKLLEIKGVGIRTVSGFLAEVGDISRFNNPKELQKLAGLALVENSSGKHKGETTISRRGRKRLRYLLFEVAMSLVSKNQEFRELHNYYTTRRLNPLKKMQSLMAIAAKLIRVFYAMLTKGVDYDPKKMVSDIKRPAVYLQAA

SEQ ID NO: 188578 - protein, 357 aa, unidentified
MSEITRVGVDLAKNVIQVHAVDAQGKLVTNRALMRDKFLAWCAQLPARCLIAMEASSGAHHWARKLVSLGLQARIIAAHLVEPYRSQGKSGKNDANDAAAICEAASRPSMRFVAIKTVDQQSMLSVHRLREGFKEERTAGTNRIRGLLAEFGVVIPQSTTVLRESLSEVIEDANNELSGLVRLVIERAQTQWKELDEHIDWCDQRIAAHLKNDAQARAAGQLIGVGPVSASAVVATVGDFKQFKNGAQFGAWLGLTPRQNSSGGKNNLGAITKRGDMYVRSLLIQGAKSAVLTAHRREDPISQWVLRLREKSGWQTAAVALANKNARILWAVMTKGAPFDARHVSLKPGASTALAAA

SEQ ID NO: 188579 - protein, 391 aa, unidentified
MVCVGIDVAKDKHDCCILDSDGTIRADCITIPNNMDGFKQLLQTIRDCTKKSDKIKVGLEATGHYSYNILGFLLDNDLAVYVMNPLHTNLYRKSLSLRKTKTDRVDARTIATMLLSDVDLKSYTDTAYHNEELKSLTRYRFDKVRERAKLKQSVSRLVTILFPELEKLVPSLHIASVYALLSEYPGAKQISEIHLTKLTNLLATASKGRYGKDKAIQIRDAARTSIGSVMPAKFLELKHTIKLIRELTSEIDEIEVSIQKIMDELNPPILSIPGVGIQSAAMILAEIGDFSNFESPDKILAYAGCSPSTYQSGKLTNCYAHMEKRGSRYLRYALYNATKYVCHWNPVFAEYLAKKRAEGKHYNVALSHATKKLVRLIYALQKSGKAHLVAA

SEQ ID NO: 188580 - protein, 315 aa, unidentified
MITVPENTAPVYAGLDIAKATLQLHFQNRQFSLANTAAGHAELVQQLRALPKTHVVCEATGGYERAVVAALQVAGLPVSVINPAQVRHFALAQGGRAKNDPLDAAVLTAYGQSFTPAATPIPDAVLAELRALVQWRLQLKDQLTRTRQFGEQAILPVVRRQQAKLILHLEKQIDTVETELAKALARAPRCQAQVRELATLDGVGTLTAVSVLCQMPELGQLNRQQAAALAGLAPWTRQSGPWEGQRHIGGGRAVIRHALYMSAVVLARQTETTLGKFYAHLREAGKPAKVALTAVMRKLLLQMNQTLKSHALKTA

SEQ ID NO: 188581 - protein, 289 aa, unidentified
MRKECSTVSFKNQVIYVGIDVHKSSWQVSIRHCRHHLANFSMNPDALKLAEHLSRNYPEAEYRSVYEAGFCGFEIHRSLCGLGILNIVINPADVPTSGKERANKNDCLDSRKLARELENGSLEGIYIPEPANLELRNLTRRETQLTGNITRVKNRIKSHLYFNGLKFRSWSGSSLKIMESDAVKRHDFALCSLLRELRFLRLEKLQVVRDEKECLKFLNREKTQKNLQSIPGIGFRTAVVLQSELWDLKRFPDKDHLKSYVGLAPRLVGSGEHGQIRPSRPHRAAPSQG

SEQ ID NO: 188582 - protein, 346 aa, unidentified
MLHYVGLDVSVKSVSICVVDEDGEVLARGETSSDPDEIASFIFEHSAKPERVVHESGILAIWLTRELEKRGLPIICIDARLAHKALSGRINKSDTGDAEGLAHLARTGWFSRVHIRSEASERVRVLIGARERLIRMRKDLEAHVRGVLKVFGVCMGSVGRANLRQGFRDQLAGAGQTDPALGVMADMFIPIHRTLCAAAEAMDEDLRLIARESGLARRLMTVPGVGPVVALSFIATLDNAERFRRSRDVGAFLGLTPRRHQSGDMDWSGRISKCGDRDLRRLLYSAATTLITQVRKPSQLRAWAKRLQDRKGFKKAAVAASRKLAVVMMCIWRDQTVFEPGKELIT

SEQ ID NO: 188583 - protein, 342 aa, unidentified
MDHFAGLDVSVKETSVCIVDDTGRIVREVKVASEPEALLQILKNPAYHFKRIGLEAGPLSQWLFSALAEAGLPVICVETRHMRALLKAQINKTDRNDARGMAQMMRAGIYRPVHVKTLRSQKLRMLLTHRKLLQSKAIAIDNDLRGTLRNFGLKVGVVRTVKFEARIRELVENLPDLAALVEPLLIVRRVLREQFVIQHRRLLAIVRDDEVCRRLMTVPGVGPVVSLTYRATVDVPARFHKSKAVGAVFGLTCAKYQSGEVDWDGRISRCGDDMMRTMLYEAAQAMMRSKKWSWLKAWAMQIARRRGMKKAIVALARRLAVIMHRIWVDGTEFRWTRETAVA

SEQ ID NO: 188584 - protein, 469 aa, unidentified
MRIIGLDLAITSTHKAVVADETGQFLTPVFTVATWPQELAAMLRRARQGAATNLPLTVVMEPTGLAWLPVAVYLLLHEVTVHLVNSQQVADLRRYYKKHAKSDRIDARVLAKLPVVSPEKLHPRVLPSADLFTLQRACKQVDWLISHITALHNQIVALDRMVWLGSWEALVFADPFSPAARWCREHYYDPNAVLDAGTKTIRQQWRASNLDPTDVGAWAKSLVTLAKQVVLIYGHPSPQVDFAALQAEVSSKQQWMAQFETDRDHWRLQVVRPLYRRLHPSRNLETLKGVGQDSAAVFLSFIGDPKRFANGRVFRGWSGLVPRSAQSAESEAKGLHISQAGPDLPKKYAFLGGDVSRRWDPQLAKIYYDQMVLYGKHHTQAVVAVATHLLDRILVVLQEDRPYELRDVDGTPVTVEQAQRIIAEKYTVPDDVRQRNNRRARRARAEAKAERQHARREKRKGKSASLVRG

SEQ ID NO: 188585 - protein, 438 aa, unidentified
MSNKVIFDLDELFISVGIDVGADFSWMSIALPNQQFVGKPYKILHNSLNSLAAAVSKIKEAEELYSLESRIFLESTGIYHYPLFCYLRDKGFNCSVINPIITKNSTNINIRKVHNDRFDSKKAALVGLKPDLKVSLMPSDLALNCRNLCREYYDLMDDRSAYVNKLLGELRMAFPQYLGIFSKVTINTSLTLLETYTSPSAFLEADKQEIIDVIKSTARFGLTYAENKYNAIIQAANDANEFGYIIDSNIKRIRLYIGFIRKYDEETAGIIEALHELVDSNQDTDFVKQIHLIETFKGAGFLSAVSLMGEIGDFSAFSKPKQLFAYFGLDPAVKQSGKFEGTKVQMSKRGSAIARRVIHTLTLQSISTSRNGEAKNPVLRDHYLKKCESKPKLVAMGAVSHKVCNMIFAILRDNKPFEIITPQEHIKQYNAAKCDIAA

SEQ ID NO: 188586 - protein, 405 aa, unidentified
MNAVGIDVSKGKSTVTIRKPGDVVLMSPCDIPHTQSAINDLIKQIKSLEGETKVCMEHTGRYYEPVATWLSDAGIFVSAVNPILIRDFGDDSLRTPKTDKADSKKIARYTLDRWAKLKQYGIMDKTRNQLKTMNRQFGFYMAQKTAMKNNLIALIDQVYPGANDFFDSPARNDGSQKWVDFIHTYWHVDCVRSKSLNAFTEHYQNWCKRKNYNFSAEKAAKIYQISSDLIAVFPKNDITKMLIWQAVALLNTASKTVESLRSKMNELASTLPEYPVVMDMNGVRATLGPQLIAEIGDVSRFTHREALTAFAGVDPGKNDSGKHIQNSVRTSKKGSPYLRKALFQIMDSLIKRSPVDDPVYAFMDKKRSEGKSYYVYMTAGANKFLRIYYGRVREYLSNLSNNETI

SEQ ID NO: 188587 - protein, 368 aa, unidentified
MDSLKTVFGIDVSSRKSNVCIMVNGQKVNDYAISNDMVGFNQLLDDLKQVTNPQIIFEATGVYSRRLQAFLDMHDLRYVMMNPLEAKRKTKDDLHQNKTDKLDAMYLAKMQSEHPQRLAYVQSEEYQELMANNRIYEQASHDLITNKNRLHKAIQLTFPEIEHLLANPRGKNYWSIVLKFPHPNIVLETKEADIIDFLKSLSGIGEKRANDLAQRLIRLAKLAPKRDLEILKSIPGIAENTALRIISELGDIRRFNKPNQLNAFVGVDPQVYESGNLTAHLSISKRGTAIGRKVLYLAINQIQSAKKAGNPCHIADYYEKRKRSSETASHKKAAIASIHKLLRTIFALITNDQLYSYDIAKHNQRLLS

SEQ ID NO: 188588 - protein, 376 aa, unidentified
MTASTSGEQTLYAALELSKNSWLLAIQVPGRDNPSLHPIKGGDVDGLMAKLDSARWRFAKASGQTPKLRLCYEAGYDGFWLARFLEQRGIDCLIIDPASVQVTRHARRVKTDRVDVEKLLHTVIAWCRGERHVCSMVVIPSVEEEDLRRSHRERTRLVRERTAHINRIKGLLFGQGIRGINVKSRYKTLTPADLVTGDGRPLPERLAREIAREIQRLALVQEQIREIERERDLGPTTCHATERKRHQLLRLNGLGAASAPVLAREVYYRKFANRRQVAGFIGLAPSAYDSGESRRSQGISKAGNSLVRAVMIQTAWMWLQHQPQSALTQWFRQRTEGQSRRVRCIMIVALARKLAVALWRYLEHGLIPHGAILSAR

SEQ ID NO: 188589 - protein, 361 aa, unidentified
MKKTAQHLIAEVPSRHSPTELTIGVDLGDVWSHYCTINQNGEVIDRGRFRTNPQGVEKWFKNLAPVRVAMEAGTHSIWISEQLQLLGHEVIVANVRELRAISHSDRKSDQVDAEKLARFARLDPKILRPIAHRTLQQQQALTLIRARDLLVRLRTAAVNAVRGLTKSCGHRMPASTTTCFAQRGLAMLPVGLAPALGPVLEQIAEMTTKIKQYDQQIRQLTETEYSETQALLKVYGVGPITALTYVLTLGDKQRFQRSRDVGCYLGLRPRRSQSGDRDPQLGITKAGNGYLRMLLIECANHILRPPGKDSSLRRWGLALAARGGKKAKNKAVVAVARKLAVLLHRIWVTQEPYIPFYAEAA

SEQ ID NO: 188590 - protein, 341 aa, unidentified
MQVATIGLDLAKHVFQIHGIDAAENVVVRKQLRRSQVMGFFEALPPCLIGIEACATAHYWARELTKLGHEVRLMPAKDVKAYVKRNKNDAADAEAICEAVRRPTMRFVGVKSAEQQGQLMQHRTRDLLMRQRTQVINALRAHMAELGIVAAQGREGTKALLAIIADDGDERLPVDARASLIVLAAQLQALQTLIGSIEKRIIAQHRASEASKRLATVPGIGILGASAITTMVTDPKAFRSGRDFAAWVGLVPRQDSTGGKQKLGPISKQGDRYLRRILVVGAHAVLRRARQHPEKYPWLTQLLARRPFKVVAVALANKMARIAWALLAKGGSYRVPRLAAA

SEQ ID NO: 188591 - protein, 485 aa, unidentified
MNPKHRRCCGIDVHKSSVTVCVLASAGQPQLGVKKRKCRTFTRDLRQLRGWLKNCQVTEIAMEATGQYWRAVWNVLEGEFEKLILVNPQHIKGLNGHKTDPKDAQWIAELLDSGKLRGSWVPPRPIRELRDLTRQRVNVMEDLNRAKNRIEQLCQTGNSKVSSVATDLFGVSGRKMLKAIVAGQHDAGWMADYARGTLRSKKDQLELALEGTFSSEQRWLLDKELRQVEWLESQVEVLEQEIERRVAPFQEPMRRLMTIPGIDRKTAWTIVAEIGVDMSVFGDARHLVSWAGVCPGNRESGGKRLSGRVRKANRYLKRVLCQAAWAASHTKQTYLSAFYRRLCLRKGAPKAVMALAHHILTVVFHILDRGDEYVELGGDYYDRQNKQRTVTRLVKRLMRLGYYVDLQSVQPNPVRTPPPMPVPKQAYEEAEPEPTELSSAPTAGAGKRKRGRPCKCAERGIICKHQTAPPAISLIQNASSPGEFS

SEQ ID NO: 188592 - protein, 334 aa, unidentified
MYYSGIDLHTDNSYITTQDDTGSVVKQERTTNDPENVLTYFHSLPGPHIAVVESTSGWYWLNDLLQENGIELVLAHAKYLKAIAYAKVKTDKVDSQTLATLLRQNLIPRAHKISRELRGFRDTMRLRLRLVQQRTACLRRIDSIKVKFNSVSIPDPYGFQLSVLEHTRDTFTCQISALEKSLHPVLIPNEDIQHLLSVPGIGKLTAFTIYLEIDGIARFASDKHFVSYCRLVPGADNSNRRVHHRSSKDGNKYLKIAFTEAAVHAIQFYPEFKAFAARLARRSNPAIARTVVAKELARIVYYLLKNNTPYRGFKGLPISRAKSLQWPRLPSPNA

SEQ ID NO: 188593 - protein, 348 aa, unidentified
MALTIVETPAITGGVDTHADVHVAAALDPVGGLLGVAEFPVTPAGYARLLSWLGGFGTVCLVGIEGTGSYGAGLARHLAAAGIRVVEVDRSDRQDRRRQGKSDPLDAVSAARAAQSGRARGAPKGRDGSVEAIRALMVAKRSARAERTQTINQARSLIVTGPDDLRTRFARHTVAALVAETASLRPRPGSTVGYATRIALRELGRRAQFLDGQLERLDELIVPLVTARAPGLLALYGVGPDTAALLLIAAGDHPARLRSEAAWAHLCAAAPIPASSGKRTRHRLNPGGDRQANHALWRIVITRMSSHPPTRAYVERRTAEGLSKTEIIRCLKRYVAREIYPRLRAAAD

SEQ ID NO: 188594 - protein, 350 aa, unidentified
MPQRNVPRPAAVYGIDIGKNIFHVVGLGSDGVPVQKVRFRRDTLLQFFERAAPAIVGMESCAGSQWIARKIQALGHKVRLIPAQFVKPYVKSNKTDIIDAEAIAEAATRPTMRFASLKSEEQADLQALHRVRDQMIGTRTRLINQMRAFCLEYGIALRQGAGLFKLDLPQVLEDQSNDLSSAMRKLLADLFADLRQLEQRIGDVTREIEAVASREDVARRLMTIPGIGALGATALLAAVGSGKQFHKARDLAAWLGLVPREYSTGGKQKLLAISKRGNRYVRKLLVHGARSCFRHLDRTKDRLGNWLHGLQARMHPNKAVVALAAKMARIVWVVLTKPGALYERRDPAFT

SEQ ID NO: 188595 - protein, 351 aa, unidentified
MVVVGADVHKQTHTFVAVDEAGRRLGEKVVKAISDGHAEAVMWARERFGADVIWGIEDCRNMSARLERDPLSAGQKVVRVPTKLMTQVRASARTRGKSDPIDALAVARAVLREPDLPVACHDEVSRELKLLVDRREVLLAQRTSAINRLRWWVHELDPTKGPKPRSLDRAKPREALRVWLDTVVSVVAELARDELADITRLSEQIDALAERIGARVRDVAPTLLAIRGCGELTAAKIVGETAGVTRFKSEAAFARHAGVAPIPVWSGNTEGRVRLSRSGNRQLNTALHRIAITQIRLNGSLGQAYYRTRIAAKDTTAGSRRCLKRHLSRVVFRALHIDDQIRNQSPQTAAA

SEQ ID NO: 188596 - protein, 344 aa, unidentified
MIIIGCDFHPSWQVIAFVDTETGETGELKLVHATGEARKFYQGLKGAVRVGLESTGNSHWFTDMLSEMGHEVWIGDAARIRAAQVRKQKTDRRDAAHILDVLLKNDFPRIWTPSRQERDHRQLLIHRHKLVRMRAQIKTELQHLAMNQGMQKGRSLWSKENQKQFLELPLQPWASVRRQNLLQLMQGMDQQIAVLDQAVKEAAEKDTRARLLMTQPGVGPITSLAFALTIGDVRRFEHSKQVASYLGLIPAEHSSAGKQRLGAISKQGNRFLRMLLVESAQVVVRYDPKFRKEYLHRCHQKPKAVAKVAAARKLAVRLYWMLRTNMPYPEVVRIESSPRVALAG

SEQ ID NO: 188597 - protein, 347 aa, unidentified
MVAVIIGVDPHKGSHTAVAIGMAEEPLGELRVRASAAQAQRLLAWAAAWPERTWAIEGAAGLGHLLAQQLLAAGERVLDVQPKLGARVRLLAAGAVNKNDPNDARSVAVAALRCASRRDVAADDHAAVLKVWSKRHRDLGRTRTQVACRLHAVLCELIPGGVSKRITAAHAAGLLQALTPSGAVQAARCELAAAFVEDLRRIDAQMRDAKKKLTVAVATSGTTLTEIFGVGPVVAAIVIGAVRDVSRFPSRDHFAAYNGTAPIEVSSGHRKIYRLSRRGNRRLNHAIHMAAVTQISHRHSDGRTYYERKLAEGKTPKEALRALKRQVSDTVFARLQADAHRVAAGTR

SEQ ID NO: 188598 - protein, 375 aa, unidentified
MSNHSEAFVAFDSSKLRNAVAIADSGRTGEIRFLGEIENSTTATAKLVRKLASKYERLTFCYEAGPTGYELYRQIRILGQECIVVAPSLIPKKPGDRVKTNRRDAVSLAKLLRAGELTAVWVPDRHHEAMRDLTRARDTAVNDLRSKRQQISAFLLRKGLHYCAGKKTWSQAHLNWLMSQRFEYPEHRLVFEEMMMAMRQAQERLERLEQAMRAAVPDWSLAHLVTALMAMRGIDLISAATFLAEIGDLSRFQSPCELMAYLGLVPSEDSTGDRIKRGPITKAGNRRARRTLVECSWSYQHPPRVGKDKQAKVAAAPQAVREIAWKAQSRLNRRYRALVRRGKLKTVAITAVAREFAGFIWAVAREATAARAAAK

SEQ ID NO: 188599 - protein, 351 aa, unidentified
MLHAGLDLSRKRLDYCLLDRQGDRVEVGAAPPDGDGLRGFARRVELRHGPVVVRAAVESMNGARFVHDTLERCGWEVEVADAQKVKGLAPLACKTDRIDAWVLAELSRRDLVAAIWLPGFEQRQERERARWRLFLVRKRSSLKHRVHAQLLAFGHTCPISDLFGRRGRELLERLDVPDPWRSGVLACVAMIDDLDREIAGIDRELKALGADHRYIPLLQTVPGIAWVLGYTIAAEIGDIERFSSPKKLTGYTGLCPRVYQSGGTDRRGPLTHAGPKYLRWALMEAALHACRHEVYRDRYQRNKQRLGKQRGAKVAQVDIARRLAEAIWHMLTATSPSLRQAPRALWPHRRP

SEQ ID NO: 188600 - protein, 387 aa, unidentified
MIYVGIDIAKTTHYAAILSSDGEVLTQPFPFRNDLIGFQKLLSNLSSYEQKQILIGLESTAHYGENLITYFFNLGFSIAVINPIQTANLRRANIRKIKTDKVDTFLIAKALILGSYSLVQKKSVSIMQLKGLCSSRQNLVLLRTRAKIQMNTYIDQLFPELNGFFKSNLHLNVAHALLKEHSTASDIAKLHLTYLTNLLRNNSHGRYSRDKAVELKALAAHSIGVENPALPLQIRQLIEQIELFDTQIENVNQMIESIMFDINSPIMSIPGIGYINGAMILASIVDINRFTKPCQICAYAGIDPIVIQSGNFTARSTRMSKRGSSMFRYALINVAHNVVRNNETFKAYYDSKIAQGKSHYNALGHCAYKLLRVIFKLMKDNVSFDLA

SEQ ID NO: 188601 - protein, 389 aa, unidentified
MPSVSERPEAPTAIQTHLAASFVSLELSRSIWLITSLSPGSGEKMSKHSVRAGDVAALLARFSELKRKASERTGKSFPIVVIQEAGLDGFWLHRVLQSEGVESHVVDPSSIATSRRRRRAKTDRIDGEALLRALLAYKRGEPRVCAMVKAPTPEEEDRRRLCRERKVLIAERVKHVNRVKGLLFSQGISGYEPLRRDRRQRLDELTTGDGRPLPVHLKTQIRRELDRLELLLDQIKEAETERDALLAAPQPAAPAPAGRMLLEFKGIGAELAAVLWLEALFRHFDNRRQLASYAGLAPTPWQSGSVDHEQGVSKAGNPRLRTSLIQLAWLWLRHQPQSALTLWFKERVSGNGGHFKKSTIVALARKLLVALWKYVTAGVVIAGAVMKDA

SEQ ID NO: 188602 - protein, 316 aa, unidentified
MKPSDSEIFIGLDVSKDHLDLAVLPGGETWRTPNRPEELSALAQRLSALSPALIVLEATGGLELAALTVLAAEGLPVVAVNPRQIRDFARALGHLAKTDRLDSLVLARFAQTVRPALRPIPDQDALLLKELLSRRRQIVDMIVAEKNRRASTLPALHPMIDAHIRYLEAELKKLDQEMNQSIRQSPAWAAKEKLLTTVPGVGPVVARTLIAALPELGDLNRKQIAALVGVAPLACDSGHLKGKRRTWGGRAAVREKLYMAALVGIRFNQTLRAFYLRLIQRGKPKKLALVACMRKLLTILNAMVRNHQPWQEQLAS

SEQ ID NO: 188603 - protein, 334 aa, unidentified
MWHVGIDLHRMTVVLAAVNDAGEAMNPLTIPCSDTATIVSTVKALGSFRAVIEACGTYRWLYDLLRPHGAVLLAHPLRLRAMIQRRTKTDKLDAQLLANLLRINQIPLAYIPPEPYQQLRDLTRCRARLGRQLAEVKIQLRALLARQNRESPYRTPFGPRGLGWFRGQDFGPVASMVRDELLERFRHYAKQMILFDKRLEDMRQAFPQVESLLDIHGIGLYSALLIVAEIGEVERFHTAKQVGAYAGLTSRVHQSGGHCYQGSITRQGSPWLRWVLVQAAMKAVHKDVALKNFYSRIRKRSSAKIARVAAARKLAEICWKRLRQWQREHASQAA

SEQ ID NO: 188604 - protein, 341 aa, unidentified
MEEYIGLDVSMKETAVSIRREGERIWRGKCASDPNIIAELVRKRAPAVKRVVFETGPLSVWFYHALRAKGLPAICIDARHAKAALDMAANKTDANDADGLAQLAEVGFFREVRVKGFDSMLTRTLVSARTRLVRITTELSNQIRGLMKTFGLLVPAGKGTTFEKNVRGLLIDHKELALIVLPMLEAWRGIRIRAAELGRQLVADARQSQACRILMSIPGIGAITATSFATAIEDPGNFKKSRSVGAWIGLTTRRYQSGEVDYDGHISRRGDRHLRGLLYEAASVILTRSTTESTLRTWGLKLRERIGFKRAAVAVARKLAVTMHAMLKTGELFDRNAGATT

SEQ ID NO: 188605 - protein, 423 aa, unidentified
MENTAARKRKQVPEGYLVIGIDPHKKRHAAVAITQDFTTRDKFKFNNTREGLEFLLRRARTEMVESGCRGVMFAIETGGHYWRNIAYFLDERGIPFRFINQFTLKRRREGKDLNRRKNDYRDSEVAAQLLCTGEFTESKVPQGVYAELRSAHNAYRRLVKERTRITNLIKGLLDGLFPEFTLVFKDPCGLTALSVLSTCAIPSVIAGMTEDEFVAAVEVRHHGRLMRRKLRALHQMARVSIGIVAGARPVSSEISFLVEKLELIRRHIRIIEGTLVRLVDETEEGKYLLSIRGLHYIAVGGLLAELGCFKSYHSAKQMIKMAGSNPTESESAGKRGAHTPMSKQGRPVLRYCAWTSVIPMLRLNPDFRAWAKRLRERPAHANPLGGREIVGAALNRLFRLAFAMVKNQTYYHVSKPELTLVAV

SEQ ID NO: 188606 - protein, 390 aa, unidentified
MVLKEWLEPDAGRPARPVLRGRRRSDASLLPDKATIAVSVADANGGEVRYVGEIANTPEAIEKLVRQLRKGDAHLSFCYEAGPCGYGIHRQLSDLGWDCQVVAPSLIPRKAGERVKTDRRDSLMLARLHRAGELTAVWVPDDAQEGLRDLTRAREDMKHLQRQAKQRLCAFLLRYGKCYSGKSNWTQAHYRWLEEQQFRQSVQQIVFQEYVDTVKALSKRVDGLDTQLESAASESVFWPVIEGLMALRGVNLLTATTVVAEIGDLKRFASAPQLMAYLGLVPSEHSSGATKSRGAITKTGNAHVRRVLVEASWTYRHPARKTAHLQRRAERTSEAVQDIAWKAQKRLCARYRLMEGKGKLKVQACTAVARELTGFIWAIGQELPQPVPNR

SEQ ID NO: 188607 - protein, 425 aa, unidentified
MNYKQNEKINQVKESTLVVGIDIGNTKQYARAFDWRGIELGKVFTFSNSREGFEAFKAWMQHLQDKYRKSDVIVGIEPTGHYWFDLGAYLEDEGILLVMVNPYAVKQTKELDDNSQSKNDRKDPKVIAKLVTEGRYSAPYTPDGVYADLRIMVANRKRLIREMTQIKNRFARWFAIYFPEYTDVFGDYEAQSSMLLLKKVCTPEAIVELGAEKINQIWRDAKLRAVGMKRATTLCETAKRSIGLKKGSSAARYEMKLLLEDYEYKKAQLDAVMEEIEKLCRKIPESEQMLAIKGIGVITVAGFLAEVGDVRRFESPRQIQKLAGLSLRENSSGKHKGQTTISKRGRSKLRAVLFNAAIPLIAKNPEFKSLHEYYTTRANNPLKKKQSVIAISCKLIRVFYAILAKGVTYDAQKLISDIHRQPQAA

SEQ ID NO: 188608 - protein, 339 aa, unidentified
MSKFTKKEWFIGIDISKNTIDVALVHDQLPEVLVDNQFSNDLKGFDLMLQWLTKQKVSLSDCLLCMEHTGNYGLLLFFWLTQKEADFCVEPGLQIKRSLGMIRGKNDKVDARRIAGYACNQKSKLKQFILPAKNLIQIKQLLTYREQLVKVSTGFKNSIKGHEQYQQVSELTFVVDDIKQQLEQLSERIVQVESQIMSIIDSDEDLKQNFKLAISVKGIGTIIATYMLVTTNNFTSFKNGRKYACMAGTAPFEESSGLHRGGSHVSHLADKKLKTLLSNGANSACNCDPELKAYYKRKKEQGKHHKSIINAISCKLINRVFAVVNRQAPYVAVYKNNFA

SEQ ID NO: 188609 - protein, 417 aa, unidentified
MTEGFDFYVGVDWGSEQHHVCIVDRADEIIAEFQVAHSGRGLGAFTDRLARLGAAAPDRIAIAIEVPSGAVVETLLERGHAVYAINPKQLDRFRDRYSPAGAKDDRRDAMVAARALRTDRQCFRQVTLTDPDFVELRELARMDDELVEDRTRLGNRLYAQLNRYYPQILELANSMHEPWIWDLVEAAPTPERARWLKRKTVARILRRNRIHRIGVDEVWSVIKAPPLQVAPGTSEAAALHATSLIPRLRVAHEQLLALRKRTAKKLDALSKRRVNKGEHRDVEIVLSMPGIGTKVGAAMLGEAWQAITDRDYHTLRVLAGTAPVTRASGKSRRVTMRYARNRRFANAVYHWARVASQHDPTSTAYYRRLRERGHTHPRATRQLADRLLRILVAMLRDGSLYDAERPKSVATDLRSAA

SEQ ID NO: 188610 - protein, 342 aa, unidentified
MYYIGLDVHKKTISYCVKDASGQVHQEGQIGATRWELDGWMKTLPQPWTVAMEATIFTGWIYDHLLPHAQQVKVAHPLMLRAIAAAKKKNDRIDAGKIADCLRCDFLPECHMASTAIRDRRRTLRYRHLLVRQMVQMKNRISGLLMETGVSHNKRRLHKVGYFRELLSSNAEVNESIRPLLRVSRDSIVRLQKTEYALVSSLQRDPLLAERIKRLRTVPGVGPITALTWALEMGEVSRFPSIREAISYCGLCGDEKSSADKVMRTPLSKQRNKHIQRVLVEAAKLAPRQDHDLALVYEREKQKGNANRATLAVARKMVAYMLAVDRGERDFVPFADPRSAAA

SEQ ID NO: 188611 - protein, 410 aa, unidentified
MELLHRRCCGLDVHKDTVVACLRLVSNGKVTTEVRTFRTITADLLKLSEGLAANDCTHVAMEATGVYWKPVWHILDDGEFVLVLANAAHVKNVPGRKTDVNDAMWLAELLAHGLIRASFVPDQTTQEMRNLMRTRKQLVREQSRHLQRVQKTLEDANIKLDSVLSSLMTKSGRAMIAALIAGETNPVKLARLADPRVKASPQDLREALRGRVTDHHRFLLRLHLKQIDTLTAALAEVDAQVATNLEPFRTAVDLIKSIPGFDDIGSHVVVSEIGIDMSRFLSAPHLVSWAGICPRNDESAGKRRSNRLRKGAPWLKTTVVQCSWAAIKKKGSYLQALYHRIKARRGPKKAIIAVAASILTAIYHMLKDGTMYQDLGPDHFNRRSTDRQKTRLVKRLADLGYAVELKPLAA

SEQ ID NO: 188612 - protein, 353 aa, unidentified
MMIIGCDFHPSFQQIAYVDQETGEYGERRLCHREEAVRFYSGLAGKQVIVGLEATGNDRWFRKLLGEADHQLLVGDASAIHAAAPREQRTDKRDARHILRLLVENRFPAVWQPSAGNEEQRQLLLHRCRLVRMRTRIKNQLDSIAKSEGLTGSRSWSQQRRGQIEALPLTGWYGQRRADLLQLLDGLELRIKPLNAAVESAARQDAQARLLMTHPGVGPVVSLAYVLVIGDWQRFGRGKQVGSYLGLIPSEASSGKRQQQMGHITKQGNTLLRWLLVEAAVTAQRFDPSWHRQYVRLSMTKHHGVAKVAIAHKLAVRLYWMLRSGQDYGQMMERGSHARQSECPVGRSKGPIE

SEQ ID NO: 188613 - protein, 360 aa, unidentified
MDKDKYVGMDVHKAMTVVAVLDGSGRLVAEAIIETAAATIKDFVRGLSGRIHLTFEEGTQSAWLYGLLKPLVAELVVCDPRRNKLMAVGNKSDKVDAKNLAELLRSGSLKGVYHGDAGTKKLKEVVRLYLTLMSDAIRVMNRIKAIYRGRGIATTGTAVYRAESRLDWIVQILDDGSRVRLEALYRQLDFLSEQRKHARKEVVTEVRRHAAYRILIQIPSLGPIRIAIIIAVVVSPHRFRTKRQFWPYCGFGVVTVTSSEYVTINGKVCRSKKPVGTRGLNRNYNRHLKAVFKDAAQYASRKPPFKQHYDRLIAKNMRKQMAMLTLARKISAITLAVWKAEDCFDSGRLSDPNMVKEVVA

SEQ ID NO: 188614 - protein, 344 aa, unidentified
MNTIRVVGIDIAKSVFQVCVWMVDGSVAWNRKISRQKLLDTLCQFEPGTLIAMEACSTSHFWGRTLSSMGYSVRLIPAQHVKAFVRSQKNDANDALAICETACRPGIHFVPVKTTEQQDIKALRNTRQLMVEQRTALANQLRSLLAENGLILPVGIQRLQQQLPELIEDASNDLTFTLRRLLSLLREDMQALNERVTYLDKEIAALSSQQTAYRHLLTVPGVGPLIAAAFISEVDAVQFSSGRELSAWCGLVPRQHSSGGKQRLSSVTKNGNRSLRTLVIHGARSVMRCVKKRDDNLGLWLKRLEARRGFLKTTVALANKLTRIIWRILTDGVDFNMNKAFSAS

SEQ ID NO: 188615 - protein, 380 aa, unidentified
MTVLSVHSFQRSMSIAAGKDDPMAKSKQTLPVVGGVDTHKDLHVAAVVDDNDQVLGTQSFATTRQGYKLMLTWMRSFGDVQRIGVECTGSYGAGLLRYMQVAGVDILEVTAPDKLDRRRRGKNDDFDAQSAAHAAFAQRRTVTPRSRDGMVESLRVLKVCRKTAVQARRVALQIIQTTIVCAPDRLRDLLRNMTRMQLIRTLAAWRPDLTGYRDVEEAYRIALKSLARRYLELHDEVADLDDMIKAIVTELAPDLIACNGVGLNSAAQLLLTAGDNPERLKSEASFAALCGVSPVPASSGKTTRHRLNRGGDRAANSALHIIAIGRLRLDPRTKEYVARRTAQGHSKLEAIRCLKRYIAREVFNIIARRHKQINQAQIAA

SEQ ID NO: 188616 - protein, 351 aa, unidentified
MALRYIGIDLHTSSCTLAVLGPTGRRLRCWQVDTNQRALLEAVRSVAGEICVCFEEGTLSDWLYEILEPVASEIQVIQPLKRRGNKNDTVDAWAAAEAMRVASKEVTQVFKAPKRYTGLRKAVRAHLLIQQDVVRVKNRIHACYRSRAIQSVNAEIYDSELRVEWLKKLAPAQRHLTEILSVELDGLLEARTQAEQWLLEEAEKVAAVRLLCTAPAISLIRASQIVAIVLSPHRFRTRSQFWAYCGLGIVMHSSSDWQRAPSGRWERTQVAQLRGLNHNKNPVLKNVFKGAAITLLHMPTHPLYASYHRALAAGQKPNLARLTLARRIAAAVLAMWKSNTEYDTNKQQAVA

SEQ ID NO: 188617 - protein, 334 aa, unidentified
MAKNVFQVHGVDRKEKGVWRRRLTRENWVKVLLETVEPGCEIGMESCGGAHHWARKLQEKGFTVKLIAPQFVKPYVKSNKNDANDAEAICEAMSRPGMRFVAVKGVEQQDIQAVHRIRSGLIEQRTAKANQIRGLVAEYGLIAPKQLSHLRVALPVWLDDTHNGLTDRFRRLLNGLWGDLLGLDARVKELDREIVLIAQNNPLAKRLEQLRGVGPISATALAAAVGDGTQFANGRQMSAALGLTPKQHSSGGKERLLGISKRGDAYLRTLLIHGARSVVRTAQGKTDRLSLWITRLAERRHPNVAAVALANKTARMAWAMLKNGTDYKPDRIAA

SEQ ID NO: 188618 - protein, 322 aa, unidentified
MENIALIGIDLGKNSFHIHCQDRRGKAVYRKKFTRPKLIEFLATCPATTIAMEACGGSHFMARKLEELGHSPKLISPQFVRPFVKSNKNDFVDAEAICEAASRPSMRFVQPRTESQQAMRALHRVRESLVQDKVKTTNQMHAFLLEFGISVPRGAAVISRLSTILEDNSLPLYLSQLLLKLQQHYHYLVEQIKDLESQLKRKLDEDEVGQRLLSIPCVGTLTASTISTEIGDGKQYASSRDFAAATGLVPRQYSTGGRTTLLGISKRGNKKIRTLLVQCARVFIQKLEHQSGKLADWVRDLLCRKSNFVVTCALANKLARIA

SEQ ID NO: 188619 - protein, 356 aa, unidentified
MSRDIKYIGMDVHKEAVVIAVLNSSGKLVMESIVETKASNLLQFIHGLQGELHVTWEEGTWAAWLYDLLKPHVHQVLVCDPRRNALLKEGNKSDKIDAHKLADLLRTGMLRSVYHGEHGLRTLRELARSYQTIGQDQIRVMNRIKALYRGWGIACGGTQVYAARYREEWLGKIEHVGVRRRAELLYQQLDGLQTLRRTVRPELLAESRKHKAAKLLRQIPCIGPIRAARLLALMQTPHRFRSKRQLWTYSGLGIETRDSAQYCFVRGKLQRVKKPQQIRGLNRNHNHEMKDIFKAAATRASCGVGPLRDFYVGLLDKGMKPEMARLTLARKIAAIALTLWKKEARFDAEQLKAQAA

SEQ ID NO: 188620 - protein, 307 aa, unidentified
MKEEVVYCGIDVGKSHLDIALLQQRWQVANTQAAINGLVQQLKSESLNLQVICEASGGYEQALVRALHRASVPVTLVQAKRVRQFARAAGILAKTDCIDALVLARFGQAIRPVPTPSQPLHMARLRELDRERCHLSRLLVAEQNRLEQLSSPELRRLARSLIKKVEKQILLIDQAIAELIGQDQILRTKVKTLTSFSGVGERTAALLLAQMPELGRLNRRQVAALAGVAPFNRDSGSIHGKRCVFGGRRVVRNALYMAALSAARRNHILAPFYQRLLAAGKPPKLALTAVMRKLLIALNSALTHSPA

SEQ ID NO: 188621 - protein, 752 aa, unidentified
MGTVRAERAGTLRHEEVRAFIAALYEGELHTKRVTALAGATLGVMASASLAVAVIGQALAQARSLVTKHAIKQVDRLLSNAGIDVWDSFARWVPRQIGARRNILVAMDWTDYDRDGQATLVLSLVTGHGRATPLLWLSVWKDELSQQRNAFEDACLVRLKELVPEGCRVTILADRGFGDQNLFGFLAELGFGYVIRFRGNIQVTDAHGETRPAAEWVGTSGRARKLREARVTAKGRQVGAVVCVRAKGMKDCWCLAASNAEAPAAELVNHYARRWTIEPHFRDTKDLRFGMGLSATRIGEPTRRDRLLLVSAFATALLTLLGTIRESLGMDRLLKSNTSKTRTHSLFRQGCMLYELIPTMPEHRLEPLAWWERPKSDRFAVNLRGGGHPPKVGRAGSCSPRIRPVDELDPLALRARPEQMTGSKSRMQGKVLLERSATPVYVGIDVCKARLDVYIHPTGQKLTVSNDRDGLKRLKRVLKTCKVALVVMEATGKLHRLAHRNLHAGGFAVAVVNPLRSRLFAEALGTLAKTDAVDARMLAILGESLKPTASEPQAEHLETLRELVGGRDAAVAARTALKNQLGVTQARVLANEIKRQLHAIETAIAHLEAEITRLIAEDPQLARRLAVLTSIPGVGITTTAALLAGLDELGSLSARQAAMITGLAPIACDTGDRSGARHIKGGRPQVRRALYMAAITAVRHNPPLKAFYDRLRAIGKKPKVALTAVMRKLVILANALVRENRPWQPTRPVKSP

SEQ ID NO: 188622 - protein, 366 aa, unidentified
MKKYTICHSATAAPATAKSKVKRDGSLLKVGLDIHQEKFVAVVQYDHATPRPPQRFAPAEFVPWVEGRLREGFEVHVVYEACGFGYGLYRALLQAGAYCYVIAPQKLDEGNTRVKTDGRDGHALCLRLDRYLAGNKNSLAMIRVPSEEEERARHWGRQREQLVHHRQKLEAQGRSLLIGHGWPAPARWWRPQSWSRLGKLLPGWILSHLELYRPVLLALDRQIRILTVELEKAAPPTLPKGMGALSTVVISREICNWQRFNNRRQVSSYTGLCPGEYSSGTKRVGRSITRHGNSRLRAALVELAWRLVRYQPQYHAVQKRLSVLGKGAQATRAHRKKAIVAVARQLAVDLWRLHTGRCTPTILGFK

SEQ ID NO: 188623 - protein, 393 aa, unidentified
MICVGIDVAKDKYDCFILSSEGEVLADVFTIPNNAEGFDTLLQTIRRCARPEDKIKVGLEATGHYSYNILGFLLNEGLDTYVINPLHTNLYRKSLSLRKTKTDRVDARTIAAMLMSDVDLKSYTDTAYHNEELKSLTRYRFDKVRERAKLKQSVSRLVTILFPELEKLVSTLHMASVYALLSEFPGAKQVAGAHLTHLKAVLYDASRGRYGRDMATTLREAARCSVGSVMPAKSLELQHTIRLIRELDAEIEDIETAIQSMMGEIQSPITTIPGMGVRMGAMILAEIGDFSRFDSPDKILAYAGMSPSTYQSGQLSLSGTYSHMEKRGSRYLRYALYNATKYVCLWNPTFAAYLAKKRAEGKHYNVALSHAAKKLVRLIYAIEKSQKPYCSAA

SEQ ID NO: 188624 - protein, 339 aa, unidentified
MKYIPVGVDIAKHLMQVHFVDEHTGEIIDKQVKREKFLEYFSNREPCLIGMEACGGSHHWARELQKLGHKVRLLKGRFVKAFVMGNKNDVMDARAIWLAVQQPVKSVAVKSEEQQATLGLHRMRQQLVKFRTAQINALHSLLLEFGETTHKGRAALAKEVPEALGRLKERLPLYLINMLDEQYQRITELDEHLDHIEKQLQAIARQNETCQRLLNIPGVGPLIATAAVATMGDASAFKSGREFAAFIGLVPRQTGSGGKIRLLGISKRGDKYLRTLFIHGARAAALLTKEPGPWITELKKRRPASVAIVAMANKLARTVWAIAAHGRKYDKNHVSIRPD

SEQ ID NO: 188625 - protein, 430 aa, unidentified
MKSNTQNAKIEAITEKTLVLGIDVGSEMHYARAFDYRVIEYSKKPFKFSNTEAGFATFKEWVLDLKERHEKDKVVPGMEPTGHYWFNLGKFLQDNEMKPVLVNPHHVKKSKELNDNNPTKNDRKDPKVIAGLVREGRYMIPYLPEGVYADLRTASNIRFQLQAELTRIQNRISRWFNIYFPEYKTVYGKPDAKSGMLILKAAPLPEDILTLGIDGVNQIWRDAKLRAVGKARAKTLIEAAEHSVGSKEGAVSARMEIRMLLEDYESRNTRLQEVMVLIEELVRKIPMAEKLLEIKGVGIRTVSGFLAEVGDISRFNNPKELQKLAGLALVENSSGKHKGETTISRRGRKRLRYLLFEVAMSLVSKNQEFRELHNYYTTRRLNPLKKMQSLMAIAAKLIRVFYAMLTKGVDYDPKKMVSDIKRPAVYLQAA

SEQ ID NO: 188626 - protein, 311 aa, unidentified
MTDHTIGVDISKASLDVFDSKRQEVRRFDNTDAGFGELSKWLVSHSPTRVVYEPTGPYHRNFEEHFSGKWPLVKVNPLQARRFAEACGTRAKTDALDARGLARMGQALALEPDAPVSQTSRILKDLQLARTALLKDRTRLRTRAHTQTHKVLQRQTKARLTLVEKQIVQLDEEIGKLINTCKTTARNRDILRSIPGVGQVASAAIVTFLPEIGTLDRRQVGSLAGVVPHTRQSGQWKGKAFISGGRKPLRDALYMPPLVAMRFNPDLRLKYQTLRDAGKPAKVAIVAIMRKLIETANALVKENRVWVQKGA

SEQ ID NO: 188627 - protein, 350 aa, unidentified
MPLVAEVVDAVVGGDTHRDTHALEMTAPTGARIATLTVDNDDQGYAEVLAWIAEHAPGPRVIIGLEGTRSYGIGLARAVQAAGLVVVEVERPKRSDRRRGKSDPIDAHLAALHTLRLEADRMPTPRADGDREALRILLSARREMATTRTRQVNRLRALLLTGDDKDRVLARGPLPDARLRQIARRRGSASDAVDSQVRRSETRRLAIAIEQAGQELKANRQLLVQLVTGFAPNLLDKFGVGPVSAAQAIVSWSHPGRCRHEAAFAALAGASPLPASSGRTVRHRYNRGGDRSLNRALHDITLTRWRACPRTHAYIAMKRSQGKNDNEIRRSIKRYIARELFRALEAPSAA

SEQ ID NO: 188628 - protein, 436 aa, unidentified
MGTYAGVDWAAEKHDVHVADAAGEKLLAATFAHDEPGLQALCRQLVRLKVKLVAIERPDGLLVERLLDAGLRVLALHPNQVAAARDRFRVSGGKSDRFDAFVLCELARTDHRRFRVLEPDSDQTKALRALTRGREQLVGTRTALANQLRAELERFWPGPLHLFSDLHSRISLAFLERYPSPADARGLGEARLQGFLERERYSGRQKPAQLLAKLRRAPAGCAGELELATRRQLVLGLVATLTALGAQIKELERQIATAIDQHPDGAIFLSLFKGSVITAAELLAEIGDCRARYPVRDALSGDAGQSAVALESGKRRAATFRWGCNKRLRSAFCTLADSSRHHNPWAQDLYATARARHHDHPRALRTVGRAWCRIVWRCWQDGVPYDPARHRALQRHLTVTVPTPSGPVVDHAATARMSATAFATAARPSKKVPVTS

SEQ ID NO: 188629 - protein, 319 aa, unidentified
MAATAQDQKMYVGIDVSKNRLDVHIHPSAEAFTVEQNAEGLEQLVRRLKDLDLAVVAIEATGGFESMAAAALAAAALPVVVVNPRQVHNFAKALGVNAKTDPLDAYVIARFAEASKPVIRALPDADTLALADLLARRRQIVQMITAEKNRAMRNVTNAALQKSIGRILKALELELARLDDDVDKMVRSSPLWREKEELLASVPGIGKVIARTLLAEMPELGRLNNKQVAALAGLAPWTRQSGQWRGKSMIGGGRSVCRTVLFIAALSATRYNPDLKAFSLRLLNAGKPKMVVLIAVARKLLTILNAIIRQSKPWQLKTV

SEQ ID NO: 188630 - protein, 340 aa, unidentified
MRVLKQVLGVDVAQKELVVTLGVLNEDLSIDFLLHRVFHNKETGFVALLKWLKKHTDESIKLQVVMEATGVYHQKFAYYLDDNNISLCIVLPNKISSYLRTLETKTITDKTCSEAIAHFGLSRKLDNWTRPNKTYKVLQQLTRERDQLVFERTTIKNQIHAEESESEPNSSSIKRFNARIKFINKQEQEIKKEIDKWLNSDEKIKGQVEKITTIPGIGQLTAVTILAETNGFELIRNKKQLTSYAGFDVKEKQSGTSVKGKPKISKRGNRYLRKCMHLPSLSAVKYNETYKDLYTRIITKNGIKMKALIAVQRKMLELTFVLFKNDSVFEQDYKKKECFY

SEQ ID NO: 188631 - protein, 359 aa, unidentified
MRETVTYVGLDVHARSTHAAAIDVASGELRRARFGGGHEQVIAWLRTLPGPLRGCYEAGPTGFALYRAAEAAGLGIEVIAPSKTPRAPGDRIKSDRKDAELLARLLLAGQLKAVAVPPPPFEAARHLARAREQVRCDLMRCRHRVSKLLLLHGRVYEGSAWTKTHRRWLAQQRFDEAATELAYLDCLAAVDGLVARKQALDERLSRLALEGAWSQTVARLRCFRGIDTLTAFVLALEIGDFTRFARPAKLSGWLGLVPSLDQSGDSRRQGAITKTGSGYARRLLVEAAWHYLPRPSEGPTIRDRRAGQPDHVIQIALRAERRLHRLYQRLRERGKPGNVTTVAVARELACFLWAAAVAD

SEQ ID NO: 188632 - protein, 342 aa, unidentified
MQITTIGLDIAKNVFQVHGIDANEKVVVRKQLRRSQVIGFFRALPPCLIGMEACATAHYWARELTKLGHEVRLMPAKDVKAYVKRNKNDAADAEAICEAVRRPTMRFVRIKSAEQQGQLMQHRTRDVLIRQRTQIINALRAHLAELGIVAAQGDAGVNELRAIVADDRDERLPIDARASVIVLAAQLEALQTLIGSIEKRIKMQHRSNEASQRVETIPGIGVLGATAIVATVADPTIFRSGRDFAAWIGLVPRQDSTGGKQKLGPISKQGDRYLRRILVVGAIAVLRRAQENPGKYPWLMQLLARRPFKVVAVALANKMARTAWALMAHGGTYRAPELVEAA

SEQ ID NO: 188633 - protein, 424 aa, unidentified
MKSKAYRAVDVNRIELANVLEGRDETVVHAGLDIGKETILATLRWSADDFERPWRVRNPFDVARLAELLKEVGRGRRLIVALEPTGTYGDALRQALERAGLAVHRVSPKSASDYAEVFDGGVPSQHDGKDAAVVADLSAQGRSWPWPMKTPSEAEQELAYQVEWLDGQRRQMMLWCGRVEALLSRHWPEATRILRLGSGTMLRCLAKYGGPRGVAASGVEEIQRWGGHYLKEEKAQALVASARETAGVVMGRWDEERLRRYAREIQKCKGEMRVACRRLDELTSDHGAIRGMGEAVGVATACVLWVELGDPSAYHCGSAYRKAMGLNLAERSSGKWQGKLKISKRGSSKVRRWLYLAALRWVKHEPVRSWYLHQKAQRRGEGKPALIGVMRKLASALYHVGGHGVVFDRNQLYRSLMAAPTASA

SEQ ID NO: 188634 - protein, 338 aa, unidentified
MTILMGCDQHRAQITTEWVDTSTGEICRARVRPADRAGVRRFLARFHGEELEVALEATTGWRFVVEELGRIGAGVHLADPAETAALRGNKKRAKNDRADARHLCQLLMAGRLPESWVPPDHILDLRARVRLRHTLSEQRGEWQQRIQSVLYHHGCPQRGDLMNGPGLEWLVAQRLSACAREQVTVSLQMIDALDLQLAPLDKELRGYARRQPGCKALTRHYGIGPLTAVTILAELGDVGRFSSSREAVRYAGIDITVHASDQRRAPGRLSRQGPPALRWALFEAAQCARRHSSPDHGYYLQAAERLGGNRACLSVARKLLKRSYHTLRELGEEALQPA

SEQ ID NO: 188635 - protein, 368 aa, unidentified
MGRKSSKLFVGMDVHKESIDITLAEQGGEVRHYGGIGGEQSALIRTVRKLESLGKSLVFVYEAGPCGFWIYRLLRERGHPCWVVAPSNTPRRVRDRIKTDRRDSLKLAGLARAGELTPIYVPDAADEAMRDLVRAREDAVTTQRQARHRLAALLLRNDIRYGGKTAWTEAHRRWIARLHLPGAAQRIAFEEYVLTVDEATASVQRLTRSMEQELGHWRWQPVVHALQACRGIQLIHAVRIVAEVGDLSRFTHPRQLMAYLGLIPSEDSSGERRRQGPITKAGNRSARRALVEAAWAYRHHAAVSPLIVRRQTGLAKPVLDIAWKAQLRLCARFRRLTARGINRNKIVVAVARELAGFVWAIGQRVKLN

SEQ ID NO: 188636 - protein, 351 aa, unidentified
MDRYIGIDAHSESCTVVVMGPSGKRLRQQVVDTQAAVLIDFLKGVAGDKYVCIEEGQLAEWLVEALMPHVKEMAVVQPPEHNGRKSDLDDAWALAERIRVRAGGTYVFKPTTQYRALREAVRAHVIAVKEQTRAKNRFRSLLRSRGIPELNATIYEPDLRSQWLAKLPLSYRRRAEWLGQQVDATSQALAITEAWLKEEGQKVPEVKKLKTVPGLGDVRAAQIVAIVVTPHRFRTKQQFWSYCGLGIVTRASGEWRRSGNGQWAHVQGKVQMRGLNLNRQPLLKAIFKGAATSVLHRSNHLHEHFNRLVVGGTAPHLARLTIARRIAAATLAIWKNKEEYEPSKHRSIEAA

SEQ ID NO: 188637 - protein, 358 aa, unidentified
MQRNKISFKGQKIFVGIDVHARTWEVAVLTESGFAKRYSQASSAKVLFDFLSRNFPDGEYHAVYESGFSGFSTYYALKEYNIDCVVTHAADVPTTQYEEVMKTDKVDALKLARSLRADEIRPVYIRERENIDDRSVLRIRKTIQKQLGGYKSRVKHMLHCNGVEMPERFAKPGTHWSRGFIKWLKEDVTLLSPTRKSLDLLIMQVETLRSTLLTATREVRKLALLDRYKDNYELLRGIPGIGTIVAMSILTEIYDVTRFKNEKQFASYLGLIPTSHSSGDKESHGEKTFRGNKQLGPMIIETCWIAISRDYGLGQAYVAYKRKMNPQEAIIKIARKMSNIIFSVLKNKRTYEPYHWEI

SEQ ID NO: 188638 - protein, 406 aa, unidentified
MKQIVSVGIDVSKGKSTVCAMIHPNTIIKESFEVLHTVEEMSMLADYIGSLDGEIRIVMESTGHYHLPVAQFLYQKGFFICVENAYIIRQFSRIMLHGAKTDPLDAKKLAKYGLAYWSELKPYKFHPSCYTELSLLSKQYQTYIKLLIAAKQNVIHLMDEMLPGFKEALDTASSVQFSKVKYVDFAKEFYHVDMIKSMGKEIFRENYKQWCKEKGYRFQSEKADELFHLAEDGIPTLPTEFPSTRLCMEVATEQVSQLGYALEQILSQMQNLAKTLPEYQTIRQMGGMGEKLCVRFIADIGDVRRFHNGKALVAYAGIDAPPYQSGQYTGTKRRISKRGNSALRKTGYEVMKSLKSHPPKTDTRVYDFIIKKENEGKSKKQAKIAGLNKFLQIYYARVIEIYKNIV

SEQ ID NO: 188639 - protein, 480 aa, unidentified
MTPRRQKNGRVVPSSEPLRVANPHAAGIDVHAAVHWVAVPPDHVPPKSTADDGAANPPHHVRRFGACTADLELLADWLRQCGITSVAMESTGVYWIPLFELLERRGFAVYLVDPRQTKHAPGRPKSDVLDCQWIQRLHSYGLLTASFRPADQVVVLRGYLRQRHMLIRYAGQHVQHMQKALEQMNVKLPEVVSDITGVTGLAIIQAILAGEREPRQLAKLRHERCHRTEAEIARALHGNWRAEHLFALKQALALHQEYQRLLRECDAQLEAHLATFADKRDGQELAPKPRRCGRKANEPAFGVRAALHRMSGHDLTVLEGIDDNTALVILSEIGTDMSKWPTEKHFTSWLGLCPQHQGSAGKIKSRRVRRGRNLAARAFRLAAQGCHHAKNALGAFYRRIQARCGGVKAVFATARKIAERVYRLLKYGAAYVRQGVEAYEAAYRERLMQGLANKARSLGYALVALPEAAAADGAATPATA

SEQ ID NO: 188640 - protein, 391 aa, unidentified
MIYVGIDVAKDKHDCFITKSDGEVLFKAFTIANNLDGFNELHQKITSVMDDVTKVKVGLEATGHYSYNLLGYLIDKGLPTYVINPLHTNLYRKSLSLRQTKTDKVDARTIASMLMSDVNLKSYSDISYHNEDLKSLTRYRFDKVKERAKLKTSVSRLVCILFHELEKLVPTLHITSVYALLSEFPGAKHIATAHLTRLTNLLSEASKGRYGKDTAITFRDAARASIGSNMPAKSLELKHTIKLIQELDSEIDEIENEIKIIMDEINSPILSIPGINYRMGAMIIAEIGDFNRFDSPDKILAYAGFSPSTYQSGQQDSAYAHMEKRGSRYLRYALYNATKYVCHWDPTFAAYLAKKRAEGKHYNVAISHAVKKLVRVIYHLEKTKQQYIKAA

SEQ ID NO: 188641 - protein, 341 aa, unidentified
MTLVMGMDQHRAQISAEWIDTITGEISRARVAPADRAGVRRFLTRFRGEGLEVALEATTGWRFLAEELQRIGAEVHLAEVVQTSGLKGRGKRPKTDWADARHLRELLLIGRLPESWIAPAHLLDLRARVRCRHTLLHQRTEWQQRMQAVLFHHGAPHARGLLKLEHRTRLAALKLPAAAHEQLTIALEMIDAIDVQLAPFDLSLREYARRQTGCRTLTAQIYGVGELTSVTILAELGDTRRFQNSRDAVRYGGLDITVRESDQRRAAGHLSRQGPPALRWALYEAAQAARRPSSPDRAYYEQLAERIGGNRACIAISRKLLKRSYHLLRALGDQALEPVAT

SEQ ID NO: 188642 - protein, 412 aa, unidentified
MPMTVYCGIDWAEEHHDVAIVNDSGGLVARLKTGDDAAGYRQLIDLLADADDNPQQPIPVAIETSRGLLVACLRATGRQIYAINPVAVARYRDRYTVSRTKSDHVDAVVLANILRTDMAVHRTLPNDSELVQAIAVLARAQQDAVWDRTQAHNKLRSLLREYYPTFLLAFRDARGGVTRPEARAVLAAAPTPTQAATLTPDDLADALRRAGRQRGVTAEADRLHQALATATLHQPPLVEQAMGRQALALLHTLDTACLNAEELATAAEQSFDQHPDAEIITSFAGLGRLIGARVLAEIGDDRSRFADTRALKSYAGSAPITRASGKSLIVMHRRVKNQRLAHASHLSALTASPGAHAHYQRRRTSGDGHTAALRHLSNRLLGCLHHCLQTRQLYQETTAFTPPQPQQLPTAA

SEQ ID NO: 188643 - protein, 375 aa, unidentified
MKEKLRFLGLDVHAETIAVAIAEADGEVRSLGTIPNRLESVRKLIKKLGPAEKLRVCYEAGPTGYVVYWQLAELGVKCDVVAPTLVPVKAGDRVKTDRRDAEKLARCYRSGDLTAVWVPDEGSEALRDLVRTREAAKQDQLRARHRLSKFLLRSGQRPPSGIRPWTRPYLIWVAQLRFTQMAQEATRLDYLHEVEHMRERVERLEQAIAEAVKLASPALQQVINDLQALRGIADISAVTIAAELGQVSRFDSARQLMGYCGAVPSEDSSGKRTRRGSITKTGNAHLRRIVVEAAWSYHRPPCIWYGLRKRQESISEEVKEIAWKAQHRLHKRYMRLAAAGKDKRKITTAVARELLGFIWAIGTRAETTVRQRIAA

SEQ ID NO: 188644 - protein, 416 aa, unidentified
MSYEKNAVGIDVSNGRSTVSVLRPFGEVVVLPFNVQHTTEELSALADKLLAIDGETRVVMEHTGRYYESIEKVLHNKGLFVSAVNPLLIKQYGNNSLRNVKTDKADSMKIARYALDNWAELRDYTPMDTIRYDLKTLHRQFNLSSKQKTAANNNLVSLTEQVFPGIRKIFESPVRKDGTQKWVDFITTFWHADCVRKQSLNAFTERYRKWCKRHGYLFKVSNAEEVYALAKTVIVLVPKDSITKTIVQEAARQLTAISRSVETYRAEMNRLASMLPEYEVVMNMYGAGESTGPQLMAEIGDVTRFERKQSLVAFAGVDPVPKDSGDKQSRSNKSSKRGSPYLRKTLFNIMSTILQNAPEDEPVYQFLDKKRSEGKPYYVYMTAGANKFLRRYYAKVTEYLKEKEKTETDSNQSNTD

SEQ ID NO: 188645 - protein, 379 aa, unidentified
MRPASRRNPIQSPTSTDPTDRADANKIQGCDLHARQQSIALLDTETGELIERSLEHGAEEPREFYSSLSGPVVVGIEASGAMQWFLQLMEELEIECRVGHPAKIRAAETRKQKHDRRDALLLLQLLLEKRFPGIWMPTTEQRDIRTLLRDRHQWVRMRTRVQSTLQAIAFNHGLRKGKGLWTHAGIAALQGLPLPRYTTQRRNELLRLYIQLRKRIEELNRQVDQVIERHPQAQRLLTHPGVGPVTALATEVFLGDPHRFADGKAVASYIGMIPSEYSSGTRQRFGQLSKQGNGLLRYLWCEAAMHAVNKDGELRRFYRRKLVKKGMGKARVAAARKLGIRLWIMLRDEIDYQEFCRRRRQEGEVLAGMPDRNNGPAVQ

SEQ ID NO: 188646 - protein, 343 aa, unidentified
MNEVITIGVDLAKNVFQIHGVDAEGGVVFRRQLRRGQMLPFFKKQPACLVGMEACATSHHWGREIESLGHRVRLMPPSYVKPYVKRNKNDMADAEAICEAVRRPTMRFVEIKTPQQQSVLMLHRTRHLFVRQRTTLINALRAHLAEFGIVAGVGRNGLERLLNVIEDSGDDRVPTAVRECLMALRAQLEMVKGQILDADRRILAWHRSSEVSQRLDDIPGIGPLIATALVASVPDPHAFKSGRDLAAWIGLVPRQNSTGGKDRLGHISKAGNRYLRMQLVVGALSVIRRAQQVGYTRRPWLTKLLQRRSTKVAAIALANKNARTAWAMMAHGTYYQEPVSQAA

SEQ ID NO: 188647 - protein, 358 aa, unidentified
MRIIGVDLHTRQQTVAMLDVETGELIEKTLKHDGDEVRKFYSALPGQVLVGIEATGSMHWFLELLEELGIERQVGHPAKIRAAEPRRQKHDRRDAALLLKLQVENRFPAIWMPSTERRDLRTLLLHRHQWVRMRTRVQNALQAIALSRGLRRGKTLWSQGGQHSIESLSLPPNAAHRRTELQRLYRNLNEQIDELDKRVNGRALQRPGAKLLMTHPGVGPVTALATDVFLGDPARFEDGKAVVSYVGMIPSEYSSGGQQRLGGLSKQGNPFLRFLWCEAAVHAVRRDPELQRFYRRKLAQKGLGKARVAAARKLGIRLWIMLRDQIDYQEFCRRGQMRQKNGGACAGMPEVGHSPAMQ

SEQ ID NO: 188648 - protein, 403 aa, unidentified
MNSVGIDISKGRSTVAVMRPFGEVVTSPFEVRHTDSELSELAKQLKSLDGETRVVMEATGNYHAPVAKLLHDAGLYVSVVNAKLVHGYGNNELRRVKTDRKDAVKLANYGLDRWLTLPKYIPEEDTRLLLKNCYRQYRQYSKVQTILKNNLISLLDTVFPNVNRLFSSPIRGDGSEKWVDFVAEFWHCRCVSEKSERAFTSKYLRWCRKHGYNFSEEKACAIYAEASGHIGVMPKSETTKLLVEQAVAQLRATSAALATLKQEMQSLASKLSEYPVVMDMFGVGPTLGPQLIAEIGDVRRFYSKKALVAYAGLDAPPNDSGDVTGRHKSMSKIGASSLRRTLFLVMSVYLQNAPLDEPVYQFMDRKRAEGKPYRVYMMASANKFLRIYYATVKAYLESLEHTA

SEQ ID NO: 188649 - protein, 334 aa, unidentified
MKKIKLGIDISKEKLNLCYLSNLEIVSEEEVTNDVKTIKKAFKDALKSLSVTEEDILVCAEYTGRYIYPLTVACQEMKVFLWLDDPTRIKNSMGLTRGKNDTIDAKRIAEYAHRYEDKAVRYAIPGTALVSMKNLLSDREFLLTDRKRYQAQLTDQEKYMSPNDFKHKDKRWKEVIKVIDKQIQVIDEEIDSLIAADPVLNRQKELLKSIDGIGERIAINMIAITGGFTRFQNARQFCSFAGLSPYKYDSGSSVRSKAKISKRSNQTMKTLLHMSAVNIATNMEGEYKDYYERKLKEGKHVMSIMNVLRAKLVHRMFSVIRRDTEYTKQYSPAS

SEQ ID NO: 188650 - protein, 350 aa, unidentified
MLIGVDYHPSFQTIAFFVQETGECGEQELNHSDGKAERFYRDLKERGICVRVGMEATGYARWFERLLAELGFELWIGDPAEIKAKRVRKPKTDKEDARLLLKLMLEDRFPKIWVPSLENRDLRQLLWHRHRLVQMRTRIMNQLQALAMNEGRRWKKKLWSEQGRAELEKLGLAAWASRRRKELLELLDRLNPSIQELTAAAEREARKRPEVLRLMTHPGVGPLTALAYVLMLGTPERFHRGKQIGTYVGMVPSEDSSARKQRLGHITKEGNCLLRFLLVEAAQAAVRTNPHWRRRYIHLAMRRHKSIAKVAMGRRMATRLYWMWRNRCDYSPSFEFGSYAGKLETSHGVK

SEQ ID NO: 188651 - protein, 424 aa, unidentified
MEEKDLETSIRAWIGIDWADEKHDVSLYDVASGKQESFIVRQTPEALQQWLGELRSKYEGGYVAVVLEQGRGGLLNALTGCEFLVLYVINPKSLSSFREAFYGSGATSDPVDAELLRDMVRQNPSRFRAWRPDDVLTRSLRLLTEGRRDLVNESTALTNRLTALLKGYYPQALAWVGGLDTAWACDFLEQWPTLQALQRSSHRQILRFYEKHPRASVDLKQQLKQFHEARALTQDEAVLESSALMVHALVSQLRLLLTSIAAFDRKIAAIFSQHPDRPIFESFPGAGAALAPRLTAAFGTDRDRFQAATEMQELAGIAPVTEKSGKKSFVHWRYACPKFVRQTFQEFADHSRRWCKWAKAYYELLRQRGKSHNAAVRALAYKWIRILFRCWKDRQPYQDEIYTKSLFEHGSPLCSLLAGSVENP

SEQ ID NO: 188652 - protein, 343 aa, unidentified
METKRYIGIDLHRNCFTACLRLEDGREYLKQWKLVDMTKFTAKLRPTDQVAVEVTGNTRLFHDAVAPHVGRVVAVNPSQFKVITHSVKKTDPNDARNLALYLAKDLLPEVRMKDKRQAQIASLTQTRDTMVKLRTALKNKVNNLCSAHGVNLNRESLASEKGLKAVLEMGFDLLVNLELKIIVDQIRSLNRSIAELEETIGKEGQKLEGHKNLTSIKGIGGLSGGILLSIIGDIGDFADEGKLAAYFGIVPRVSNSNETERSGRITKRGTKLGRTTLIQCALIAQRYSPYLKTYYEKMKRRRGTGKAIVALARKFLGIIYRTLKNKWVFKDFPNFVLAEEATA

SEQ ID NO: 188653 - protein, 424 aa, unidentified
MKKTDYLSTLFVGIDIGSKINVVSALNFSQEFLIRMVPVKNAKGGAELIEQLICDALGKDPELKRIIVALESTGYYGFHTANYLSTSEKLLPFGVKVYCLNPKSVKNYKESYVDLPKNDGIDSFVIADFARCGRITIKPWKGAQYLALQRLTRHRLHITECIAREKVYMLNNIFLKFSEFAFLQKDEHPFSNKYGATAEAVLTEFTTTEEIVNSSVEDLVDMITARSRGRIANPVNTAELLQKAARDSYRLDKCMYEPLTTSIACSFNCIRAFEKELKALDAAIGEAVKGLNPTEYQILLSVPGIGKVYGAGILAEIGSIKYYKNHNSLAKYSGIYWNQNQSGDFDGEDTSMSKAGNRYLRYYLIEAAGSVIQHCPEYAVYYEKKYAEVLRHQHKRALALTSRKLIRMLFGLLDKSQLYSPGKE

SEQ ID NO: 188654 - protein, 318 aa, unidentified
MQTILDVCCGLDVHKDSVVACIVKSKGVDLSKSKDDIDVEIRTFSTLLSDLENLKNWIVENDCRHVAMESTGVYWYPVYEILETAFDGEITLLVTNARHMRNVPGKKTDIKDAQWIASLLRAGLLSGSFIPDTEVRELRQLTRYRRNIVQDVTQQKNRIEKTLQQAGFKLSTFLSDIFGVSGRNLLNILITKGCIVPNDIDESTKQLSSAKKEDMKFALNGRLSAHQRNFLKLELDHLDTLLAHQVEVEEAICQKSESFNEAIKQLDTIPGIAVASATSIIAEIGTDMSKFPTAENFCSWAGLAPGNDKSAGKKNELA

SEQ ID NO: 188655 - protein, 353 aa, unidentified
MSNDKYVAMDVHKASVSIGVRDAAGKMISRAVVETKAQTLKDYVRGLSGTIHLTFEEGTQAAWLYDLLRPLVAECIVCDPRRNKLLESGNKSDEIDVDKLSELLYLGRLRAVYHGAQGTRALKELAHNYDALVKDNTRIKNRLKAIFRGRGISYEGGEIYDNEQREQWLVQLPERGVRERASQLYEQLAQLDEWVNKARLQMLRESRKQKARKILEQIPTLGEISVAQLIATIDTPFRFRSKRQFWTYCGLAVVRHTSADYRFEQGEIRRRTKPGPTRGLNRNYNRRLKRIFKTAALAGSLKGPFKPYYERLVARGLDSELAQVTLARKIAAITLTLWKRGASFDREKLITTE

SEQ ID NO: 188656 - protein, 339 aa, unidentified
MVYGAIDLHMRYSQIRVVDDSGAVVRDQRIVTTRERFVQAFEGHGPLRILLETGTESEWVAQALEQAGHEVIVADPNFAPMYGEIRRTVKTDRRDVAALAEANRRGWYRATHRVSGAQRATRQLLRTRRQLVQVRSGAVALIRSLVKQDGYRLPSCAAERVPTLLAQLPLPVELVTAVAPLARTIAAATTEVAELDRALRTRAAADPIVARLQTVPGVGLIVALTFRTQLDTIDRFTHAGQVSALIGLVPREDSSAGRRHRGHITKAGPRELRSLLVQAAWACWRSKQSASLRVWAAQLATRRGRRIAVVALARRLSRILYAIWRDGSTFEGSKLAAAA

SEQ ID NO: 188657 - protein, 402 aa, unidentified
MIDTSGVGVFLGLDVGKTAHHGHGLTPAGKKVFDKPLPNSEPKLRAVFDKLRDKFGTVLVVVDQPASIGALPLAVARDAGCHVAYLPGLAMRRIADLYPGEAKTDAKDAAVIADAARTMPHTLRSLELTDEITAELTVLVGFDQDLAAEATRTSNRIRGLLTQFHPSLERVLGPRLDHQAVTWLLERHGSPAALRKAGRRRLVELIRPKAPRMAQRLIDDVFDALDEQTVVVPGTATLDVVIPSLARSLAAVHEQRRALEAQINELLEAHPLSQVLTSLPGVGVRTAAVLLVTVGDGSSFPSAAHLASYAGLAPATKSSGTSIHGEHAPRSGNRQLKRAMFLSAFAALHDPASRTYYDRCRARGKTHTQALLRLARHRISVLFAMLRDGTFYEARQPEVAAA

SEQ ID NO: 188658 - protein, 411 aa, unidentified
METVFERVGALDVHKAQVTACVRVPGDGGRRVAHLGEFQTTVRGLMALRDWLAAHRVTQVAMEATGVYWQPVWHVLEDEFELTLCNARHVKNVPGRKTDVSDAQWLCQLMEAGLLRGSFVPPKPQRRLRTLTRYRKTQIAERQREANRLHKALEDTGIKLDCVASDLLGKSGRAMLDALVAGTSDPAVLAELAQGKLRAKIPALREALEGRFEAHHAVVISAILTHLDFLDEQIDRLSDAIETELGPTGASALALASTITGVARRSAEVLVAEIGTDMSVFPSAGHLASWAGRCPGNDQSAGKRRSGRTRKGSKWLGIALEEAALAATRTKGSYLQAQYQRLRPRLGHGRALGAVKHSMLVAYWHMFTTGETYHDLGGDYYTRRNPERATKRLVAKLQALGHAVELTPAAT

SEQ ID NO: 188659 - protein, 347 aa, unidentified
MKDLELVGIDLAKNVFQLHGCSSTGEVVFRKQLRRSKLLSFIAELPTCTIAMEACSGSHYWGREFETLGHSVRLIAPKYVKPFVKRSKSDAIDAEAICEAALRPTMRFVRFVRFVRVRSEDNQAAGLAFKARDLLVRQRTQIINALRGHLSEFGFVVAKGPTHVRKLVSAIEDGDIDLPEISRPLLSILVDTLEALNARIRLLEAQIAQRAREDEICQRLTTIPGIGPIIATAIAALAPPPSTFRRGRDFAAWVGLTPLQHSTGGKQRLGRTSKMGNRTLRRLLIIGASAVVRWAEHKGAAPGSWLARMLERKPPMLIRVALANKMARIAWALMAHGGEYRAQTVTR

SEQ ID NO: 188660 - protein, 418 aa, unidentified
MKSIKTEKIKMINQKSLIVALDIGKKIHYGYFRAPNGHDIKPFPFYNTAQSFKKFWEKLCRFKEDHMLNEVVIGFESTGPYAEPISNYLQKKSVKLVQVNPMHTKRIKELTGNCPNKTDQKDPRVIADVISLGHSLTVIVPEGAAAQLRRLTQARERAIERRTAMFNQLQHLVFVIFPELVSIIKPSTKTGMYLIKNFSDPESIVSTGIESLYDIIRKISRGKLGMDRAERLYDAAQQSVGIKEGKESILLEITYLVSSIDSENKHIEILEEQMVSCLGQIPYSHTILSVKGIGHITVAGLIGEVGDFRKFKTISEVLKLAGLNLYEISSGKHQGSRHISKRGRSLLRKLLFFAAINTTRKNGIFHISYQRHLAKGMPKVKALVAIARKLMRIIFAMVRDHCEFDIDYSTQMELRKAA

SEQ ID NO: 188661 - protein, 306 aa, unidentified
MGMDISVLGVDLGKNICSVVGLDASGAVVLRRRAKRETLISLAAKLPPCVVAMEACCGAHHLGRVFAGHGHDVRLMSPEYVRPYVKAQKNDDRDAEGIAEAATRPTMRFVELKSQEQLDMQTLHRSRDRLVGERTALINQLRAILLERGIVVPQGKRKLEQFLAVLMDEQGGAGLSPRMITLVADARAQWAELDRRIAAFDTEFIRWTKENEDARRLASIPGVGPTIASALIAAIGKGETFEHGRDLAAWLGLVPRQFTTGGRPKLLGISKRGNRSSQAADPRRTSGVAPCRRARHPARPMGQSAT

SEQ ID NO: 188662 - protein, 343 aa, unidentified
MQSITTIGLDIAKSVFQVHGVDAEGGVIIRRQLKRRYVLAFFQKLPPCLVGIEACASSHHWSRELQALGHTVRLMPPAYVKPYVKRHKNDATDAEAICEAVGRPNMRFVETKTPEQQGCLTLHRTRHLLIRQQTSVINAIRAHLAEFGIVAPVGRNGVDQLLGIVVDASDKRLPEVARACVAALGTQLRILKAQVLEFDRMIRAWHRSSELSRRLDEVPGVGPVLATALVASVADPKAFQSGRDFSAWIGLVPKQNSSGGKDRLGSISKRGDRYLRSLFTVGALAVIRYAKIHGTKHRPWLTALLARRPTKVAAIALANKIARMVWAMMAKGERYNEPVALAA

SEQ ID NO: 188663 - protein, 359 aa, unidentified
MHSECTKVQFNGQDVYVGIDVAKKSWKVCVYLGEAYHKRFAQPPEPEALVNYLHRNFPGATYHSVYEAGYFGFWIHRAFIRLGVDSIVINPADVPTTDKERHTKTDRVDATKLARALANGQLTPIYVPERAAQEDRTLIRMRMTFVRKQTRTKNQIKALLQFYGYRVPSDITERHWSRAYIGWLKSLTFDQDAGRAAFQALVRELLALRATIADLTKQIRHMAQQERYRAQVELLQSVSGIGLLAAMTFLCEVITLERFKNLDCLLSYVGLVPGEHSTGDTEHNTGLNPRRNSALRFVLIECAWIAQREDPALLNAFTSYGKRMPKSMAIIRIARKLVSRMRFVLKNRQPYVKGVLSAA

SEQ ID NO: 188664 - protein, 398 aa, unidentified
MEVMDAAGRRLSAAKLPEGIAGIARFHAMIAAQLDPDADLDAQAGQVLIGIETDRGPWVQALIAAGYRVYAVNPLQAARYRERLGVSGAKSDPADAHLLADMVRTDSHQLRVVAGDSDLAEAVKVVTRAHKTLIWERTRHTLRLRSTLREYFPAALAAFEDLTDADTLELLAKAPDPVSAARLTTTQIMAALKRARRHHRDRRAGEIQAALRTEQLGQPAVVARAYAVAVRAQVAILGVLNEQINLLQEQVEAHFGQHPDAEIYTSQPGLGQILGARVLAEFGDDPTRYGDTRARKNYAGTSPITRQSGKKKVVLARYVHNDRLLDALGGQAFAALTRSPGARAYYDKQRDRGLGHRAALRQLANRLVGILHGCLKTGTRYDEATAWSHTQQDQQVAA

SEQ ID NO: 188665 - protein, 318 aa, unidentified
MNTNTLQNINVGVDTGKSQLDIYVRPLDIYFTVPNTDKGISDAIKIIKKHKPQRVVIEATGRLEMPFILACDKAKLPYVVANPLRIKRFAEAIGQRAKNDRLDAELIAHYAERVQPELTKLKSENIRLMSDLVTRRNQLLTIQTMERNRLQILPKNISSTITPILTALKNQLEKVEAKIEKLIESCPEYQAKNTILQSMPGVGKILAASLISNVPELGFITNKQASSLIGVAPITRESGRFKGKRMIKGGRPQVRTVMYMAMMSAIQCNPVFKATYERLLAAGKPKKVAIVACMRKMVVTLNSMLRDGAIWDKDSVKN

SEQ ID NO: 188666 - protein, 349 aa, unidentified
MGIIGGLDVHRSQITYDWIDSVSGQRQRGQLAPATREHLRMWLGQFAGQQAGFAVEGCTGWRYVVEELGRAGIAAHLAEPADTSAARGPKRRAKTDQTDARHLRELLATGRLPESWIPPTHVLEVRPLVRCYKALADEHTAWLQRIHATLFHHGAPAQHNLLAPDRRARLERGTGLSPAARQLVTVALGTLDHLDAELDRLRAELIGFARRQPGCQALDGLYGIGPVTAVAIWAELGDVGRFTSSRHAVRHTGLDVTVYSSDGKRTPGHLARQGPPVLRWALFEAAKCAARVSSPDHAYDLQVKQRLGGNRAALSVARKLARRCYHTLRALGDHAYAPPSEPSIGGQVA

SEQ ID NO: 188667 - protein, 343 aa, unidentified
MQTVTTIGLDIAKSIFQVHGIDAAGQVVIRRQLKRRYVLAFFERLPPCLVGIEACASSHHWSRELHSLGHTVRLMPPAYVKPYVKRQKNDTTDAEAICEAVTRPNMRFVPTKTIEQQSCLMLHRARHLFIRQQTAVINSIRAYLAEFGIVAPVGRRGVEQLLEVVADAADRRLPEIARVCLAALGSQLRKLKAQILEFDRRIMAWHRSNSTSKRLDAIPGVGPALATALVASIADPRAFRSGRDFSAWVGLVPTQNSSGGKDKLGSISKQGDRYLRSLFTAGALAVIRYAKIHGTRHRPWLTALLARRPTKVAAIALANKLARMAWAMMARNDRYKEPAALTA

SEQ ID NO: 188668 - protein, 387 aa, unidentified
MQFFAADSQKGAFKDKEMVIMDFDAFVGLDVHKDSISIAIADPVRSGEVRRLGQIPNRAESVAKLVRQIKARHSRPEFVYEAGPCGYVLYRQITELGCTCRIVAPSRIPRVPGERIKNDTKDSEMLARLLRSGELNFVWVPDPVHEAMRDLVRARHVAACDVREARGHIQMFLLKNGLRYDAKSWSYRHRIWLADRSFEHAGQQVAFQSFLNRLEQAESRKEQLDAQIKELSESWALAPVVNALQALKGVGPIVASTVIAEIGDFGRFASPRQLMAYLGIVPGEHSSGGSVRGRGITKSGNALVRALLFEAAWSYRTPPKVGQWQIVHRPKVDQVYKDIAWKAQLRLNGRYKRLIARGKKSNVAITAVARELVGFIWDIARRVPVNG

SEQ ID NO: 188669 - protein, 407 aa, unidentified
MNAVGIDISKGKSTVAALRPMGEVAFLPQEFLHTEVGLEQMAGAIVALGEDTRVIMESTGRYHEPVAAALHEYGIYVCVLNPLLIKQSGGGSIRKGKTDKADALKIAKYGLDNWVDLREYTPMDTIRQQLKLCSRQYNLYMKTVVSLQNNLISLTDKTFPGVNELFSSPERADGHQKWVDFVMTFWHCDCICRASEKAFTERYQKWCKRKGYHFSAEKALDIYAGSCGHFTTLPKNENTKLLIVTAAQQLLAGKTTLATLRAEMTRLASQLPEYETVCAMYGVGKITAAQLMAEIGDVRRFPRRSSIVGFAGVDPGVDESGKHSAKSVPTTKRGSPHLRKTLYQIICTYLKKSPADEPVYQFLDKKRAEGKPYFVYMTAAQNKFLRIYYARVKECLEAFDTEPAKQS

SEQ ID NO: 188670 - protein, 385 aa, unidentified
MMGLSTTHLGGALIMKFKQTDAQNQRIEQITTSHLVIGIDMAKETHVAQATNFRGIVVSKRHLSFSNSIEGFEKLNRWMNELQQKYRLKKLIIGMEPTGHYWFNLANWLSDKEVHVVMVNPATTKRNKENRDNSPSKNDPKDALVIADAVSRGFYYEYTRQSLVFQRIKTIMSDREFWVTNSVRLQNRIVRWLDIRFPEYPSVFKDWTCKRSLATLKTFPCPRDLENYSIPEVIDAWRVHMQRAGGSTGLEKAAQLIARAKCSVGEQAAAEEAKTDLRRLIEEFERVTTMLEQIERDIEVLLSEIPIAQQLRTIKGLGKIFTAAILAGTGDLRQYAHGRQVMRKAGLNLAESSSGRRKGQIVLSKRGDSALRKYLYLATALRPPN

SEQ ID NO: 188671 - protein, 430 aa, unidentified
MKSNTQNAKIEAITEKTLVLGIDVGSETHYARAFDYRGIEYSKKPFKFSNTEAGFVTFKEWILDIKERHEKDKVVLGMEPTGHYWFNLGKFLQDNEMKPVLVNPHHVKKSKELDDNNPTKNDRKDPKVIAGLVKEGRYMIPYLPEGVYADLRTASNMRFQIQSELTRIQNRISRWVNIYFPEYKTVYGKPDAVSGMMILKQAPLPEDILTLGVEGVNQIWRDAKMRAVGKARAKTLIEAARHSVGAKEGTMAARMEIRMLLEDYESRNNHLQEVMTLIEELVKQIPMAEKLMDIKGVGIKTVSGFLAEVGDVSRFSNPKELQKLAGLALVENSSGKHKGQTTISRRGRKRLRYLLFEVAMSLVAKNPEFRELHNYYTTRRLNPLKKMQSLMAIAAKLIRVFYAMLTKGVDYDPKKMVSDIKRPAVYLQAA

SEQ ID NO: 188672 - protein, 350 aa, unidentified
MSQNLNSAVAVIGIDIGKNSFHVVGLDDRGAIVLRQKWSRGQIEARLANMPPCLIGMEACVGAHHLSRKLKALGHDARLMPAKYVRPYSKGQKNDFRDAEAIAEAVQRPTMKFVATKTADQLDLQALHRVRERLVSQRTGIINQIRAFLLERGIAVRQGQRFLRAELPRILATPPEVLSARMVRLISDLAEDWRRLDQRIDCLSSEIAVLARQDAGCERLMSVPGIGPIISSAMVAAIGTGDAFAKGRDFAAWLGLVPKQISTGDRTILGKISKRGNRYLRVLFVQAAWVVLVKPMSWERHGLKHWIEAARKRLHRNVLAIALANKLARIAWGVLAGSGRTFEASKLQAA

SEQ ID NO: 188673 - protein, 352 aa, unidentified
MTVYIGVDLHVRTQTVCWVDTADGEQHEITLDHQRNDVRAFYAQFAAPAVVGVEASGYSLWFHRLLEELGHHLLVGDALAIRQCARRRQKNDRRDARLLLDLLLHQEFPAIHIPAPASREVLALLRYRHRLVRIRTMLRNGLQAVALSHRLRLGPKLFTAGGLQQFAALPLTGAFAVQRQHSLALLASLAEQVLAVEAQLQDRAQQDPRVLRLRTHPGVGLLTSLAVVHTLEPVSRFDRARRVAAYCGLDPKERSSGDTQRWGHISKQGNRLLRFLLIEAAHTALRGDDDLCRFFFHLQARKNASIAIVAVARKLVLRLYRMLRDEIDYTQFRRRGRDARRAREDTSQAASG

SEQ ID NO: 188674 - protein, 343 aa, unidentified
MQTITTIGLDIAKSVFQVHGVDAEGNVILRRQLKRRYVLAFFQKLPPCLVGIEACASSHHWSRELQALGHTVRLMPPAYVKPYVKRHKNDATDAEAICEAATRPNMRFVATKTPEQQSCLTLHRTRHLFIRQQTSVINAIRAHLAEFGIVAPVGRNGVEQLLGIVAEASDKRLPEVARACVTALGAQLRTLKAQILQFDRMIMAWHRSSEASRRLDDIPGVGPVLATALVASVADPKVFRSGRDFSAWIGLVPKQNSSGGKDRLGSISKRGDRYLRSLFTTGALAVIRYAKIHGTKHRPWLTALLARRPTKVAAIALANKIARMAWAIMAKGERYKEPAALAA

SEQ ID NO: 188675 - protein, 392 aa, unidentified
MLYLGIDIAKNNHVASLIDENAKPLFKAFSFSNTLDGANSLLAKLSAYATNPDCVEIGMEATGHYWLSIYSFLIENGYTVHVVNPIQTDGWRKGTEIRKRKTDIIDSVLIADLIRYGDFVETSLSDEDTLSLRNLSRFRSYLVSSIGDLKRKVVCVLDQIFPEYQSVFADIFGKTSKEILLHFQSAEDFENITSEQLESVLENVSFKKFAKNKISGISELAATSFGLKFCRESFSLQLKLLIEQIKFIEAQVADVESEIAIILDKIDSPITTIPGIGVITAAVILGEIGDISRFSNASKLAAYAGIDASVSQSGEYQSSNNKMSKRGSPYLRKALFNAAMIAAFHDPVFSAFYQKKRNEGKHHLTAIGAVARKLCNTIFAVLKYNKPYEVQL

SEQ ID NO: 188676 - protein, 404 aa, unidentified
MAKYHIGVDISKHKHKACIRSLAQDSYSGVFSFDVKRQGFGKFLDTLGNFSSNKDDFLIGVEATGNYGVTLVYFLLSHGYKVVEINPYRANQFRKAQGKKAKTDRIDARSLAAVLSLGNHKALSIPDPVLDNLRELTHFRADMVEDRSALVNQLHDTLCTLFPEFAALFRQLDSATSLALLISYPGPEYISHAGEAKIAETLVNASRGRLGKVVAKALVEAAQSSIGVPQRQPALATKISILGERLVALTAAIERVEKEIADLFRELPYDPEDFPVGNIPSLATLISEIQDIHRFPTLKQFLSHFGWCPQSFQTGNYKRENPRMSHAGNRYVRRLIWMLSIVSIKSVPRYRAYFQRRVKEGKAKMHIIVAVGRKLLSVFYALLKKGIPFDPDWEDNRHLAPARH

SEQ ID NO: 188677 - protein, 355 aa, unidentified
MESTKYIGMDVHKDAISIAVLNSSGKLVMESIIETKANTILEFVHGLRGSLYLTFEEGTWAAWLYDLLKPHVTKLVVCDPRRNDYLKQGSKSDRIDARKLAELLRSNLLRPVYHGEHGVRPLKELARSYLTITQDQARVMTRLKAVYRSWAIPCAGKQVYGQRHRLEWLGKIQEAGVRRRAEFYYVQLDALRSLRLVVRRELLLESRKHDASKLLSQIPSIGPIRAALLIALLQTPDRFRTKRQLWAYSGLAIETHDSAENQYVNGQLQRSRKQASIRGLNQNHNHDLKNLFKSASAVAAAKAGPFQKFYAAQIGKGLKPEMARLTLARKIAAITLIVWKRGVSFDARYLNPQTA

SEQ ID NO: 188678 - protein, 485 aa, unidentified
MYKADDTWHPVSLNKGGIHMTSFYLGIDVSKGYADFLVLNHKKQPVVKNFQLDDTFEGHTRLYEILNQFLAGHEQATLYAAVESTGGYENNWYQALTSFQASLPIQTARLNPLGVLHNSKADLKRIKTDKISAQSVAEYLIAHPEKVSYQQEDRLAGLRKQWSFIQMLTKQCTQFLNQLHSLIYTANPELLGFCRGGMPAWVMKLLLQYPTACRLAKARAKTVAKIPYVTLERAQKLIADAKCSVASNADDVSAHLIVATVSQILHLKKTIAAQTDSMAAQCNLPEVKLLKTFIGISDVSAIGLMIQIQNITRFKTVKKLASFWGVHPVYKTSGDGSGGFKMSKQGHVQPRRILYLVALTAIEHNPVIKAVYEHHIRQGKEKMAAIGICMHKILRIIYGMLKNNTVFDPEIDNANRIRLMAAKTAAPKKNKNRRFQQYDISAPISRRQRKKRLEREQSQSVNNTECGISAPVPMATIIADILAKL

SEQ ID NO: 188679 - protein, 356 aa, unidentified
MSQNLDSKVAVIGIDIGKNSFHIVGQDRRGALVLRQKWSRGQVEARLANLPPCLIGMEACTGAHHLSRKLQALGHDARLMPAKYVRPYSKGEKNDYHDAEAIAEAVQRPTMKFVATKTADQLDLQALHRVRERLVSQRTGIINQIRAFLLERGIAVRQGLHLLRAELPGILGTRTDVLSPRMLRVIEDLAGDWRRLDERIEGLSGEIDALAHHDKGCERLMTVPGIGPIISSAIVAAIGTGDAFSKGRDFGAWLGLVPKQMSTGDRTILGSISRRGNRYLRKLFVQAAWVVLVKLGPEQWERYGLKSWIEAAKKRLHPNVLAIALANKLARIAWAVLHKGRAFEYVKTNATASRSA

SEQ ID NO: 188680 - protein, 343 aa, unidentified
MQTVTTIGLDIAKSVFQVHGADAAGNVIVRRQLKRRYVLPFFQKLPPCLIGIEACASSHHWSRELQAVGHTVRLMPPAYVRHYVKRQKNDAADAEAICEAVTRANMRFVATKTPEQQSCLMLHRARHLFIRQQTAVINAIRAHLAEFGIVAPVGRNGVEQLLDVVADASDKRLPEIARACLLALGAQLRTLKVQILNFDRQIIAWHRSNEASKRLDEIPGVGPALATALVASVPDPRAFRSGRNFSAWIGLVPKQHSSGGKDKLGSISKQGDRYLRSLFTAGALAVIRYAKIHGTKHRPWLTALLARRPTKVAAIALANKIARMAWAMMARGDRYKQPVALAA

SEQ ID NO: 188681 - protein, 369 aa, unidentified
MKSLLYVGMDVHKETIVVACAAEGEEVRVVGTIANTAAALDAMVRKLVSGGKHPSFVYEAGPGGYVICRRLRDQGFTCMVAAPSLIPRKSGDKIKTDRRDAAMLTRLYRAGELTGITVPDADDEAMRDLYRARNDAKKMCRIAKQQLLGFLLRLGIMYDIGKTHWTKMHYRWLDELSLAHPAQQLTLQEYLDAIRQNESRVIRLEGMLQSSALQWKRLEEVKGLQSLRGVSFITAVGLLAELGDLRRFKSARQLMSYAGLVPSENSSGNTVRRGRITKTGNSCVRWILIESAWSYRLKARKSRCLLKRQADVDAATAELSWKAQVRLCGRYQWLLQKGKPKGKVITCIARELAGFIWALGTMKPTKQAA

SEQ ID NO: 188682 - protein, 319 aa, unidentified
MMKLKYSICCGLDVHKNVIVATIVITNADGISEYKQKSFSTFNSDIRKFHSWLIENNCYHVCMESTGKYWIPIFNYLENDIEVCLTHPKYVKAIKGKKTDKKDSKWIADLYKFDLVRCSFIPPKDFRQLREIARYRFKLVCMKSSEKNRIQNCMTVSNVGIASVLSDPFGKTATEIMSYLLTHTSDSIDEKAVRRLIKKGAKAKSDEIIEAIRGYNIESDQAKKLELARSHLEYLDGMITQSEVELYVRMKPYYKFVELVSTMPGMTELSSTIVLAETGVDMSIFDDAKHLCSWCGLSPTNNESAGKKKSVRISKAGDY

SEQ ID NO: 188683 - protein, 407 aa, unidentified
MPRYYLGVDWGDQTHGGCARDEEGTIVWEGTVPHTVVGLSEWGRRLDEWRATGTELWAAIEKPEGRVVDFLLDHGVVVYPVNPKALARARDRFRMSASKSDRGDSRVLAAFLRTDHQELAPLHPSSEAAQELKLLTRDHARLVRQQTRVLNQLTGTLKEYYPRPVEVFGDWTTQIARDFLKAYPTPAALKKLRPAQWRRFAQKHRLGEARTATLWAQLTQPQLPVPDHVVRAKARLVLVLVEQLEVTHQAVAQYHTEVDRFFATLPAAAWMKTLPGGKSGMTLPTLWAELGDAPGRWTSWQHLQAQAGTVPVTVQSGKSCVVRFRFACNKHLRQAVRCLAFVSLKQSEWARAYYQQQRARGRHHNQALRALAAKWLKILFSMWTHQVPYNEQYHLANMAKQYLRATA

SEQ ID NO: 188684 - protein, 474 aa, unidentified
MTKRSAIGIDPDSKGFVCALVRSSNLKVITKAYMTTEASLGSFLKWVKEEGEPIVAIEGCNGLSKPIEKTLREAGIMFYSFAPADTERFRKAVLGQNKTNEKDAESTARYALALESQGKLQRYRRVWFANMELRLLTRSYDRKSEAATAEVNRLWKHLRHASSDLYLAFGGIHPEVNLRKEMLDTQGILELFTQKPRVWEWKDLSEEEFFCAMGGNCKGRQTLIQELRKIGACVKPFPASTVLLIQSSARLIAQLKRDQGEMVKMMDEMTTDSLPVQMLMENRGIATITASTLVAEIIDIRRFASDDNLASYSGLGMKEHSTGETTRMVHTQFFNHYLKDAFMTAARNFVIFNPDSHLSGYYRNLVKNGMEPREATKRVARALVRMVYRKLAFLAKADNERLAGNGEERKEGESDMASGSTRSGQSHTSNTPLSSPQETQACRTARVKREVRSTRKTKNLRRAEKILKKSSWQS

SEQ ID NO: 188685 - protein, 332 aa, unidentified
MNLPIVATTALGIDIAKLKFDVCLIKPSGRAKHKVFANTQHGFEQLVAWLNSHQVSELHACLEATGTYGEALALFLHDAALVVSLVNPAAVRAFANAGLSRTKTDKVDAELIARFCLAQQPKAWQPPAPERRELQALVRRLESLTEMRVAEENRLSSGTLTAAVRHSLQQHIAYLVEEIKQTEALIRQHIHNHPDLKEQSDLLDSIPGIGETTAALLLAEIVNLKQYTSARQVAAYAGLVPRERRSGSSVSGRTCLSKIGNARLRKALYFPAITALRCSDFFKAWADGLRTRGKSKMSVIGAAMRKLIHLAYGVIKTGKPFNPNWAKAIEVA

SEQ ID NO: 188686 - protein, 412 aa, unidentified
MEVVYPCCCGLDVHKKSITACVLWAEAKGKSRKEKRRFGTFTHDLLQLADWLGESGVTHVAMESTGVYWKPVWNILAEQFKVLLVNAQHIKAVPGRKTDQKDSEWIADLLQHGLLRGSFVPPQPTRELRDLTRYRVSLAQEINRIANRIQKVLEDANIKLASVATDALGASGRAILEAMLAGEQDAARLAELSKGLLRNKIPELQLALEGRMTEHHRFLLRQLFDHLRFTESKLSQIEQEIDRRMRPFQDEVIRLCTIPGVDQVTAWGILSEIGLDMNQFPSAEHLSSWACLCPGNFESAGKRLSGKMRKGNVSLRRCLSQAAWAISMTKNNYLSALYRRIAARRGAKRAIMAVAHALLVIAYHMLKRKEDYRELGADHFDRIDMNRTRRSLVRRLERLGHKVTLEPLAQTA

SEQ ID NO: 188687 - protein, 345 aa, unidentified
MQPMYYIGLDVHKRKISYCVKDSSGKIHTEGSIAATRLDLDHWMKKLPQPWSAAMEATMFTGWIYDHLKPHAVALKVAHPLMLRAIAAAKKKNDRIDAGKICDCLRCDFLPESYMASTAIRERRRTLRYRTLLVRQMVQMKIKTGALLMEAGVSYNKQRLHKAGYFRELLATNPDIDEGLCSLLRLCRETVVRLGKTESALVRSLERDSLLVERVQRLMTIPAVGPITALTWALEVGDVQRFSSIKKAISYCGLCGAEKSSGNTVQRTPLSKQRNKHLQTTLIEAAKMAPRNSPELAMLYDKEKQKGNANRATLAVARKLVAYLMAVDRGQRNFQMAETRSNIAA

SEQ ID NO: 188688 - protein, 356 aa, unidentified
MKRPKRAKDKLVAGLDLHGNNIMIGITNLEGKRITHRKLDCDLKEITQFLEPLKAQLQSMAVESTFNWYWLVDGLRSQGYPIDLANPAKIEQYNGLKRVDDKDDAFHLAELQRLNILPKAHVYDPLLRPVRDLLRRRTGLVHQRTSLLLSFKGLHVRTTGRRLDLSDAKKMEPKEATKLYEHPANQLIAQVQCEHIQALDKSICRIEKGVLACTRQIPIYEKLQTIPGIGRILGMTITLEVGDIKRFKTDGDFASYCRMVDAERLSNGKRKADNNPKCGNKYLSWAFVEAANFARRYSAECRRWYDRKAAKTNKVLATKALACKLARAAWHVMAKQCDYDEKRMFPELATKAMKPS

SEQ ID NO: 188689 - protein, 343 aa, unidentified
MQVSTIGLDLAKNVFQAHGVSAEGKVVLTKQLRRGQVLSAFAKLPPCLVGMEACAGAHYWARELRKLGHDVRLMPARDVKAYVKRDKTDAADAAAICEAVSRPSMRFVALKTPEQQGRLMQHRVRDLLLRQRTQTINALRAHMAELGLVAATGRQGLGLLLAILADAKDERLPQDARASLKLLASQIAALQAQIDTLDKRLHAQHRQCPASRRLETIPGIGVIGATALAATITDPKAFKSGRDLAAFIGLVPRNNASGGKQRLGPISKQGDRYLRRILVVGAHSILKQARTRPDKHPWLARLMARKPGKLAAVALANKTARIAWAVLARGETYRAPTAPAAAG

SEQ ID NO: 188690 - protein, 384 aa, unidentified
MNSRTRSTDKQKAVQRNVDWKSLQVVHSDAAGIDVGGSEHWVAISPDRDPEPVRCFGCFIADLREMGRWLMERGVRSVAMQSTGVYWMPVFEILEQHGLEVYLVNARHTKNVPGRKSDVQECQWLLKLHTFGLLNNSFQPSDEIRIARTLWRHRGNLVAEASSVIQRMQKVLTELNIQLSNVLSDISGLSGMKIIRAILGGVRDPWELAGLVEPEVKATQRDIARSLEGNWREELLFVLRQQMEFYRIFQEKIADCDLQLRKHLETFGSKADLKAQPLGPRPKGRKKSKNAPFFDLRSELYRITGIDWAQVDGIDVLTAQTVIAEACTDLNAFPSEKQFVSWLGLCPTNEQSGGKVLNRRTRKVINRATVAFRNAAMTLLRSQS

SEQ ID NO: 188691 - protein, 420 aa, unidentified
MPNIEIGVDSMVKENFIYVGIDLHKETHTAVMIDCYNQKLGEITFPNRPADFPKLVAKVKKCNTAGKEVVYGLENAYGYGRALAVWLIDKGYLVKDVNTAISHRQAKHRGAMYRKSDSDDAEAIALATLNMLDKLPDACPNDAYWSLGQLVHRRDNIMKQRTRLVNQLHEQLCIAYPSYKSFFNDISRPTALYFWEHYPSRKYLKGKSVEDLRAELVPVSHNKCSTKTCEKILDAVASDKVKNNAYQDARDMVTLSIVSDLQHYDSQLTEVDKMLEQMYKMLGCTLTTIPGVNVITAVKILAEIGDIKRFSNANKLAQFAGIAPLHLSSSGKGKDVATKQGNRRLQATIYFLAIQMVQISSKGTPRNPVVRAYYEKRKAEGKTSQQALICISRRLISVIYGMLKNGTEYRMPVVENAGEK

SEQ ID NO: 188692 - protein, 353 aa, unidentified
MNSLTDLREMVDVVIGVDTHVHTHSAAVVDTATGGVLDEITVDATPEGYAELVEFANNHATLRAWAIEGTGGHGAGLSRHLLETSEIVIELDRPKRAARRNGAKTDPLDAIRAAREAMARPRLGTPRTGGERQALSVLLAARRSAINASTEAQQQVFSLVVAAPEPVRARFRGQKLAAMLNTAASLRVHSSWDVETTSTVVALRTLARRAHAMLKEARELQKAMLAIIRAWRPDLLEEFGVGPIVAATVLCAWSHPGRIHSEAAFAMLAGVAPIPANSGQVTTRYRLNRYGDRNLNNALHTVVQSRIQYQQATRDYVARRTAEGKTSREIKRCLARYVARDLYRLLENRAAAA

SEQ ID NO: 188693 - protein, 420 aa, unidentified
MEEISEEPAELVERVAALDIGKATLVACVRVPHDAKPGRRRQEIRTFATTTRSLLGLADWLDCLGVTRVVMEATSTYWKPPFYLLEESCACWLVNAREVKHVPGRPKTDKQDAVWLAKLAERGMLRPSLVPPPWQRELRDLTRYRRTLIHERTREKQRVEKLLEDTQIKLSAVVSDMFGVSGRQMLEALIAGQRDPKVLAQLAHGRMRSKLGALAEALTGHFRAHHGYLLRMMLDRIDALGAQADQLTGRIEELLAPFADQVEQLDEIPGVGRIGAQELIAEIGVDMGRFPSAGHLVSWAKFAPTTQASAGKTKSSSTGKGNPWIGATIGEAAMGASKTKTFLGSRYRRIVKRRGKQRALVAVGNSILTVAYHLLLDPQARFVDLGVDFHDRLHPQRRTHQLIRELEHLSGKKVTLHTAA

SEQ ID NO: 188694 - protein, 370 aa, unidentified
MAKRSMFVGMDVHKESIDISVAEEGRDGEVRHYGVIPGDLEAVAKVLRALRAPNRRLRFVYEAGPCGFGIHRYRTSQGEECVVVNPSSMPKRSGDRIKTDRRDGDALARLHRAGELTAIYIPTPEDEALRDLVRAREDAVGLSTQAKHRLKAFLLRQGRRYPGRAGWTCPYRRWLADLSFPLAPQHIALQEYRDTIEETERRVERLTDQLRQLTPAWRWAPVVDALQALRGVSFVTAVGLVTEIGDIRRFSHPRELMAYLGLVPSEYSSGPSVRRGGITKAGNPHARRLLAEAAWAYQGVPRIGRQMLYRQEALPKTVCDIAWKAQLRLTSRFRKLVARGKAKPKVATAIARELTGFIWAIAREVPAPPA

SEQ ID NO: 188695 - protein, 410 aa, unidentified
MEVLYPHCAGLDVHKESVVACVRHMVDGKVATTVKRFKTMTQELMTLSDWLWAEGVTHIAMEATGVYWKPVWHILSDGEFELVLANAAHVKNVPGRKTDVNDAVWLADLMAHGLIKASFVPGEPTQQMRDLLRTRKQFVRERSSHLQRIQKTLEDANIKLDSVISDISGLSGRRMIEALIAGKTEPEALAALAHGRIRASAAELEAALRGRVTAHHRFMLRLHLNHLDAVDVAISSIDKEVDLNVEPFRVAIEMLTTIPGIGSLAAEVIVAEIGIDMSLFETEGNLISWAGLCPRNDESAGKRRSTRMKKGAPWLKTTLVQCAWAATRVKGSYLQAQYLRIRSRRGPKKAIGAVAASMLTAAYHMLKDGTFYQDLGSNHFDNRDKGKQALRLVNRLQSLGFAVQITSLAA

SEQ ID NO: 188696 - protein, 374 aa, unidentified
MVDDIALYVGLDVSKEKIAIGLAEAGRKGEVRYYGEIANRADAVRKFVDKLAGRHGRLCLCYEAGPTGYGLYRQLCDLGHECLVVAPSLVPSRSGLQIKTDRRDAVALAALLRAGELSSIWVPDETHEAMRDLCRAREAAVSDLRRARQYLLSFLLRHGRVFEGRSHWSKAHRNWLATQRFDHRAQQIAMEEYIRAIEQIEERRDRLTRQMLGLLQDWSLNPIVEAIQALRGVAQISAVTLVSEIGDFRRFSNPRQFMAWLGLVPKEHSTGASVSRGSITKAGNTRARRMLVEGAWTYRLPARVGQEILKRTEGLPEAIRATAWKAQVRLCQRYRRMQASGRPTNIVIVAIARELAAFVWAIATTVPITPTKAA

SEQ ID NO: 188697 - protein, 406 aa, unidentified
MIFVGVDWAEAHHDVHVCDEHGKRLARARLPEGVDGIARFHELVGHVDDPGDVVIGIETDRGLFVTALVAAGYQLYAVNPMSTSRYRDRHSASGAKSDAGDAQVLADMVRTDRHNHRLMAGDSDEVEAIKVLARAHQTMVWSRQRQTNLLRSTLREFYPAALMAFDDLASGDALAVLRIAPTPTLGSGLSLSKIASALRRGGRHRRVEQRAAEIQTALRSEQLQAAAVVATAMGASVAASVAVIAEMVTQIELLAQELASGFEQHPDAEVVRSLPGLGTILGARVLGEFGDEPNRYASPKSRKNYAGTSPITRASGTKKTVLARHVRNHRLADAIYLWAFASLTASPGARSYYDARRAVGDGHHQALRALGNRLVGILHGCLEHHNLYDETTAWAHRPENKLAPAA

SEQ ID NO: 188698 - protein, 415 aa, unidentified
MDVQMQHACGLDVHQATVVACLLSVLDSGKVKKQIRTFGTTTRELQALRQWLQLEGCQQVAMESTGVYWKPVYALLEGSLELTVANAQQIKNVPGRKTDVKDAEWIADLLLHGLLKASFVPPKPIRELRDLTRYRRKLAESQSAEGNRLLKVLETANIKLASVASDVFGVSGMNMLDALAEGTATPAEMAELARGRLRGKIPQLEPALEGRLEEYHRYMLKLQLRRLRDLDRDLAELDARIQEKLKPYQPQVELLRGIPGVDAILAAVIVAELGVDMKVFESAPRLAAWAGLCPGNHESAGKRRKVRVTKGNVHLKTALVEAAHASTRAKGTYLRDKYFRLKARRGAKRAVVAIAHKILVSIYHMLSGDVSYHDLGDLYLDKLNKHHLTRNLVRRLQRLGYYVTLQPQVVQQLTA

SEQ ID NO: 188699 - protein, 368 aa, unidentified
MEVVVEMSESSWLVAGMLPGVARRPLKKLDPDPVALEQLLERWRAEVAKTGRTIGRIVLAYEAGRDGFWLARWLRARGIEAHVIHSTSVAVSREHRRSKTDRLDTAMLMRVFLGWLRGERGHCGMVAIPSLEEEDAKRPSRERENLVGERTRIINSMKSALSRLGIRGFNPKLRKAAQRLDAVRTPEGMPIPPNTLDEIRRDLARFAVTKEQIDAIEQGRLERLERAPEAGPNAMVLLLARVIGVGVETADMLVQEVLSRALRDRRAVARYAGLTGSPDESGAKRREKGLAKSGNARVRRGLIQLAWRFLMFQKGSVLAQWYRTRTEGTAGARKKTMIVALARKLLIAFWRLVTTGVVPEGVILRPAA

SEQ ID NO: 188700 - protein, 370 aa, unidentified
MSQFSTLFIGMDVHKESIAVAYVAQDHGAEVTYLGTIGTRQCDIDQLIRKMQSKAKHLIFIYEAGPCGYWLYRYFTKKGYDCWVVAPSLIPKKAGDRVKTDRRDAVQLARLARSGDLTAVYVPKVEDEAIRDLTRAREDTLSDLKDAKFRLKAFLLRHDIRYTGRAHWHPAHLRWLSEVVCQTPAQQIVLQEYVRAVSEHTERLQRLEQELQEQVKSWRLHPVVEALQALRGVQFTVAVTMVAELGDLSRFDTPRELMKFLGLPPSEYSSGERRHQGSITKAGNTHARQALVEGAWAYRYPAKVSRHLQLRLENQPKRIQDISWKAQVRLCTRYRRLVAKGKHANVVTVAIARELAGFMWAIAKEVPVTT

SEQ ID NO: 188701 - protein, 398 aa, unidentified
MTRKNTLKSLPTDTEFRVVGLDLAKSDVSVAAIPVDDNTPSLVDRMTYADLLDWAGKISPTLFAMEPCNGYSLLCLQLENLGHEIKVISGSTVSMWINTHLSGQKTDLNDAIALARLAVSDAELTPIRHKSITEIRIQTVQAVRQQLMSQRSKSIVSFKALAQQWGIPCAAGHRNLKKLRESIEAKVDLITRPVANAMLFLLDAVKSLDRQIGQLNQTLQELVMSDERGRLLQSVLGVGTQISARVITVVGNVERFNSPRSLVAYVGVAPRNFITGHKNLTKKKHGNCPDLSHKGQGKISRRGDKLLRSLFIQGAACLYMQFCKDQLPECQLKRWILKQLASQKPYGKLIVSLAAKLIRIVWAVLTYGEKFNIQKAGMTRSMWSEMALETPLNKEVPA

SEQ ID NO: 188702 - protein, 412 aa, unidentified
MDVLHPCCAGLDVHKDSVYACVRRIAPGGGVREAVRVFGTMTPDLLRLADWLAAEGATRVAMESTGVYWKPVYYALDGPFELVLANAQQLKRVPGRKTDTQDCAWIAKLMPHGLIAAGFVPPEPQRDLRELCRQRVQLTRQKAAVANRIQKVLEDANLKLGSVASDVLGKSGRAVLRAIAAGETDPVAPAELALGRLRKQLPRLRPALTGRVTEHHRFVLKLFLDEVEMVEEWVRRLEERIAAVLGPFAEAVRRWATIPGVDRRTAQAVAAGIGTDMSRFPAEGHLAAWAGMCPGNDESAGRRRSGKTPKGSPWLKRALVQAAWAASHTEGTYLSAFYRRLAARRGRKRALVGLGHAIPGIMCHPQRNGTDYADLGGDYFERRDTDRLTRRLVRRLESLGLKVTPEPTPQAA

SEQ ID NO: 188703 - protein, 317 aa, unidentified
MNKNWFIGIDVSKKTLDASIFVAGEVVNKFPHVQMRNDRQGFKDLLRWAKEQGVKTKDTLFGLEFTGYYSDALEQFLTKKQICYTMLPTTVVKHYQRGPHDKNDKIDSAKIADYLFRFNGTECIKLRVLPSKAMQELKALKSERKFLVQQRVACENRQKVAKSKGEEKHLQKLIDLYKTEIEQVEQQIADVIVLDEEIYTTYRLLNSIPGIGFVNAVNTIANTQNFTAFETARQYAKYVGVAPSEHSSGTSVRWRRRPSPHADLQAKADLSMAALHAIELSAEIRQLYERKLGNRTKDKDMQKKALNAVKNRQRTLN

SEQ ID NO: 188704 - protein, 463 aa, unidentified
MGKGQKNTEKKQKIKDFVQLPLVNANAAGIDIGDTLHVVAVPEECCKGSNVRDFGTFTDDLLAIVEWLTECGVTTVAMESTGIYWKNLGVLLIEKGFEVYLVNARHTRNISGKKNDRSDAQWIQKLHSCGLLKNCFLPDDQTDVLRTLVRQRRKLIRDSSTSVLRMQKALELMNLKIHTVISDLMGKTGKAMVEAILSGERYAENFLTLVDCRIKADRNTIISSLKGNWREEQLFLLEQYYTQYKFFQEQLVQCDQKIEYQLQRMHAKTNEGIAEPEKEIRLTPTGRLSKQKKTKNQPFFDTRAYLKGIHGIDVLDIYGVSEVGALEILSETGTDLYKWPSAAHFASWLNLCPNNKVSGGKLISSKLQRKKPNAASQAFRMAAGGVQNSNHLMGHFFRKMKSKGGYKYAIVATARKLACIYYKMVTEKQSFNPLNNEEHLNKQKKARIAALEKTLNALKLQVA

SEQ ID NO: 188705 - protein, 409 aa, unidentified
MLFGGIDWSDRFLDYHLRTADGRVLAQGQVESSMEGLAELFTALENHGPAAEIGIAIETCHGAWIQPLLDRGYAIYPVNPKTVERFREALSAAGNKSDKIDRKVLAMFLVTFHQDSLPLRPDAPEIVSLRMACQDRVRLVEERTAKLNELQAVLKCYYPAFLGLFGNLDSTIALQFLEQFPMQNQMKALTKRRLQNWLKRHQYSWSRRTEDMMEVLQQPAFPVADHLQEAKAPLISYLAASIQILHSEIVTRDRWITEHLDELPEANWVRSLPGAGDVLAPALLACVGRDPQRFASVAEARALMGTAPVTKSSGTMRTVQFRRGCWKFARRTLHLFADHSRHHCAWAQAFYSKQRNSGHNHHAALRALAHKWLKIILAMRRDGTVYNERIFANSQRRYLLGTAALEKRI

SEQ ID NO: 188706 - protein, 459 aa, unidentified
MGFEPVLFVRPPLRLAWIERLELVSVCVVVPLLLPRKRRAVEVRELGMPRWVGRAIGLDVHREFCEVAICEDGRTRSAGRVSATPEGIAVLARSLLPSDRVALEVTGSCWEVARILEPRVNRVVVVSPDDTGITSARAKTDKLDARALASLLWKGELEAVWMPDERCRVLRRRLARRQQLVWSRSRAKNEIHAALQRRLQPKPPCSDLFGVKGRAWLSSLELPLEERESVDAGMRHIEFLDAEIAAVEKLIAKQALSWPEIRRLMTVPGVNLICAASFIAAVGNPNRFLTSRKLVAYLGLDPRVKQSGEGPARSGRISKRGSPSARWALVEAAWTAVLQPGPLHAFYVRTRNRRGHGKAIVATARKLAVLFWCMLTRGEDYAHQQPSLTRKKLRRLEITAGAPKYTRRAAGIWSTNDLMREAELELARQAETSYLRLVQDQLAGAPAKKAGASVTLERA

SEQ ID NO: 188707 - protein, 314 aa, unidentified
MAQMVINAGIDVSKEWLDVALSSKPAELRVGHNPAGYRELAAWLKQHRVTRVGLEASGGYEVAVMDALVDKGFEVVRLNAQRVRMLAKAKGRLAKNDRADARTIAQATKILAGDTVLKRRRELDPLIEHLHLRRRLRQWMTDCVNQLEHLKDKALRREVTAQRAALARKVALLDKKLASLIAEHEDWRRLEQRLRTVPGVGPVLAQTLIALLPELGTLSRRAIACLTGVAPFDDDSGKRSGERHIKGGRFAVREVLYMAALAAMRHNPKIATFAKRLASKKPKVVIVACMRKLLVMLNAMLRDGVDWQAKTAGA

SEQ ID NO: 188708 - protein, 411 aa, unidentified
MRRCIGLDVHREFAEVAIWEDGVVRSAGQIKTTPEALRLFAESLCAYDEVALEATCNTHAIARLLERHVGRVVVSNPTKTRAIAEAKVKTDKVDAQVLAQLLAAGFLPSVWLADEETHALRRQVARRAHIVRQRTRLKNRVQSILHRNLVPRCPAADLFAHKGRAWLAEQDLPGDERQAVEALLRQLDFHGEELKLIDAELARVALRREEVKRLMTIPGVDATVALSIVAAVGAFARFRSPDKLVSYLGLNPRVRQSGGQPASHGRITKQGRAHARGMLVEAAWAAAKTPGPLHAFYERVRARRGMQIAVVATARKLAVLCWHLITRGEDYAYGRPSLLTQKLRRLELRAGMPSRRGQRGSTHAYNLKQVRARERALSEQGEIAYKQLVTEWQAKARTAKTGAGAATGVRL

SEQ ID NO: 188709 - protein, 344 aa, unidentified
MPSIVGGFDIHRKQLTFDYLDTVAGEVRRGQITPADRGHLRSWLAQLENPQDAAFAAEACTGWRYVTEELARAGVQAHLAEPADTAAARGRKKRAKTDRADARLLRDLLAEGRLPECWIPPEHIVECRALLECYHDLRAEHTAWVQRIHATLFHQGAPPFQGLRQADGPGQLTALAREHLSPAGQAQIAVCLRVLAALEAELTAMRHRLLAAAAHLRGAKALTGAIYGVGPITGLALTCWLGGAGRFSSARKAVRFAGLDITVYSSDGKRSPGHLSRQGPPVLRWCAYEAGKVSAHATAPDHPYYAAVKDRAGGNRAALAAARKIIRRACHILTELGDDAFTTG

SEQ ID NO: 188710 - protein, 340 aa, unidentified
MQKLCIGVDVSEKTLDVAYWDDQKQEAVFLGKYANTHTGFHTIKEKIEERRKATSAELVHVTMEPSGGYEQPFAHFVDQQDGWDGSLPNPAHPKRWAEAIGKRAKTDSQDARTLAHYCFVRNPPVWKPLPAEVEQLEHLLDRLDNLKDMLSREKNRLGSAQYHVKSHEAVYDDLRESISSLEDRIEKIQEIINDHLEKHPHLKEQRKILLSVPGVGVKSVLYILITMNRWGAFTHGEGDANGIVALLGLDPKTHESGTSIHKRGRISRQGDRSQRSRLYMCALGGVRGNNPLRAFYERLVGRGKPKKLALVAAARKIVVWCWAVFRSNIPFDAARFDHNQ

SEQ ID NO: 188711 - protein, 351 aa, unidentified
MKDLMAGIDLHSNNIMVGIVDREGKRLAQQKLPCELKRIGEFLSPYKDRLEKLAVESTYNWYWLVDGLQAQGYPVVLANPARITQYSGIKHADDKNDAFFLAELLRLGILPTGYVYDAERRPVRDLLRRRMSLVHQRTALMLSFKSLFTRTTGEQMSLSRLKALEVKEAQKLYEHPANQLIAGLQIQHIEQLNASIDRLEKAVLSVARHLPCYPKLKTLPGVGIILGLTITMEIGDIKRFAGPGQFASYCRTVAAQCTSNGKLKGENNRKCGNKYLAWAFVEAANFARRYDEPCRKWYERKAAKTSKVIATKALACKLAKAAWYLAAEETDYEPGRVFPQMATTKNQTMKA

SEQ ID NO: 188712 - protein, 350 aa, unidentified
MTTVARRITGGVDTHLDEHVVAALDEQGALLGVEAFEATAAGYRDTLAWLRGFGELDLVGVEGTGSYGAGLTRHLHTHAVRVVEVDRPNRQRRRRRGKSDTQDAIAAARAAQSGEATGEAKQRAGNVEAMRVLRVARASARKARTQTLNQMRSLICTAPEPIRAELRHLNVYRLVERTAAYRPGPGHDVTTITKSTLKLLARRAQALEDEIKGIDATLAELVADTAPQLVSRPGIGTDTASALLVAAGDNPDRLCNEASFAHLCGAAPIDASSGKKQRHRLNRGGDRQANSALWHIVLTRMTCDPRTRHYIERRLKDGKTKKEAMRCLKRYIAREVYALLPRYELSLDSP

SEQ ID NO: 188713 - protein, 442 aa, unidentified
MPKSEVSQQAQEPEFAAFVGIDWADQKHAWCLQAVGSTQRESGELEHKVETVEAWVTQLCQRFGGDRPIAVALEQTKGALLYMLAKYECLHLFPVPSTMAASMRKALYPSGAKDDPTDSDLLLDLLLLHRDKLHRLTPDTEATRRVQNLVEERRKLVDEKTAQLNRLTSNLKIYFPQMLEWFEALDTELVCDLLEHWPTLEELQKVSSEDLRRFFHQHHCRNRELMERRLQGIGQARPAIQDRPVIEAQRVVVRVTVQLIRSLRAAIAELDGKIAEATATHPDFFLFASLPGAGEVMAPRLLAAFGSQRDRYSSADEMQIYSGIAPVLERSGKTKWVHFRRACPKFLRQSFHEWAGHSMVKSAWAQAYYRQRRKQGQGHHAAVRALAFKWIRILFRCWKDRVAYDEKKYLAALAKRGSPLRELLVASAVRTCEIPSEIVVNP

SEQ ID NO: 188714 - protein, 309 aa, unidentified
MKEELVYIGVDIAKSYLDAAVGNEKRRFANERIGHRELIKWVKQLKAAVQVICESSGGYERALVQALVRAQLKVSLVQANRVRQFARAAGILAKTDRIDAKLLCDFAQAMQPGTISASQLEQEHLRELESQRRHLTHLLVMEQNRAARISDGCVRRLNRSLLNQIKKQIQQLDLLIKEHIEASPELSAKAQKLTAISGVGARTAALLLARMPELGQLNRREVAALVGVAPFNRDSGKMRGKRAIYGGRKPVRHGLYMAALVASRYNPILHAFYLRLRAAGKPAKLALTATTRKLLIVLNSALKPDLNYA

SEQ ID NO: 188715 - protein, 304 aa, unidentified
MEYFAGLDVSLEETAICIVDDTGLIVREARIASEPEALVAFFRASGMAMKRVGLEACSLTAWLHQALTEAGIAAICIETRQAKAAMGAMPNKTDRNDARGIAQIMRTGWYRAVHVKNPCCRSWRALLAARRMVLNKRRDVENGIRALLREAGLKVGTPSRRNFAARVIELVADDPVLAALSRSLLSVISVMTEEIDRLTKRVLDEVRIEPTCRRLMTVQGVGPFTALAFRATIDRPDRFQRSRDVGAHLGLTPRRYQSGETDVQGGISRCGDELARTALYEAAHSLLIRSTKWSALRAWGMNVA

SEQ ID NO: 188716 - protein, 346 aa, unidentified
MLIIGCDFHPSFQQVAIFDNQTGEIYQRRVKHREEAEQFYRSLAEAARVGMEACGHYPWFERLLAECGHQLWLGDASRIRAAAVRKQKTDRRDAEHILQLLMENRFPRIWVPSLEERDARQLLMHRHKQVQARTRVKNQLQAMALSQGVQKKRKLWTQGGRAELKKLELLPYAAARREQLLQTLDGLEQEITRLNQQVDEEVQQRPAAMRLMTHPGVGPVTALAMVLTLGPAERFASGKQAASYFGLIPSEHSSGGGQRLGHISKQGSSFLRFLLVEAGQSAVRYDAELGRFYRRLSMRKHRGLAKVAVARKLAVRLYLMLRENWTYAQLVKAVVQVSPSHSVVES

SEQ ID NO: 188717 - protein, 406 aa, unidentified
MFYFGIDWSEAHHHLCILNEAGTRVSQLRLPHSPAGFQRLEAERQKLGVPPQACLVAIETAYNPIVDFLLDRGYSVYIIPPQATHSYRNRQRSSGAYNDTSDAALLASILRTDRDSHRRWYPNTPLTQQMHAQVRFIESLRRSIHRQQSQLRALLLRTFPVALDLFSGLTTQITLQFLQAYPTAAEAQALSWEAFESFCRAQGYTRPKLLRQHYAALRTPCPPVDPHVVQAHRDVICELAQILLLQVRTRARAIAQLQSLFQQHPDAFIFASLPGAGKLLAPALLVKFGDHRQRFPRPADVQALAGTCPVTQRSGKKKRVKFRRGCDKEFRRIAHQFARASIAESGWAAAYWQEIRPHCKSDAHATRILANRWLAIIWKLWQTRQPYDEAYHMQNRARRRQPKAAI

SEQ ID NO: 188718 - protein, 338 aa, unidentified
MNIVFLGIDLAKNVFQLCGLNQAGKPVYTKRPGRKELLQTLANIPACLIGIEASTGAFYWQRKFEKLGHKVKVISPQYVKPFVRGQKNDGNDAQAIAVALMQPTMQFVPPKSPEQQDIQALHRARQLIVNHRTATVCQIRGLLLDRGIPIGSAVSRARRAIPLILEDAKNGLSSRMRRTIAELYDLFNDLGRRIHFFDKEIETVFRQSEACQRIAKVKGIGPKTATAVVAAIGKGTEFKNGRHFAAWLGLVPRQHSSGDRQVLMNMTKKGDKHLRTLFIHGARAVVRVATNNNDGHMNQWVNQLKERRGFNKTTVAVANKNARIIWSMLRNDTEYQVV

SEQ ID NO: 188719 - protein, 424 aa, unidentified
MKSATNTPSSECPLVLPEFPPNDVTSGIDWARDDHAACIVDGRGRKIATTMVEHTAAGLRDLVAFLGRHGVGEVAIERPDGPVVDTLLAAGLVVVVISPNQVKNLRSRYGSAGNKDDRFDAYVLADTLRTDRARLRPLVPDTEATIALRRACRARKDLVKHRVAAANQLRAHLRNVLPGAIGLFKDLDSEISLAFLTRFDTQDRADWLTAKRLGDWLSKQGYSGRTDPEVLHQRLLQAPHGATGEHALAQVPITAALVALLRTLVEQIKALATQIDHQLDAHADAHIFTSLPRSGRVRAARLLAEIGDCRARFPTPESLTCLAGAAPSTRQSGKLRTVGFRWSCDKQLRDAVVDFAADTRHANPWAADLYDRARARGHDHAHAARILARAWLHIIWHCWQDGVPYAPDQHRALQRVMAAQTAAG

SEQ ID NO: 188720 - protein, 423 aa, unidentified
MMKLKYSICCGLDVHKNVIVATIVITNKDGISEYMQKSFSTINSDIQRFHNWLIENNCYHVCMESTGKYWIPIFNYLENDIDVCLTHPKYVKAIKGKKTDKKDSKWIADLYKFDLVRCSFIPPKDFRQLRELARYRFKLVCMKSSEKNRIQNCMTVSNVGIASVLSDPFGKTATEIMSYLLEHTADSIDEKAVRKLIKKGAKAKSDEIIEAIIGYNIETDQAKKLELARGHLEYLDNMITQTEVELYVRIKPYYEFVEFVSTMPGMTELSSTIVLAETGVDMNIFDDAKHLCSWCGLSPANNESAGKKKSVRIAKAGDYLKPMMVQCALAAVQSKKQPYFAIKYGRIKKRRGHKKAIIAIARMMMVCIYHMVSEKKPFTPTDYEDLMAPQNHVERVVLNENNVFAYLESLGYDSSKLVKRNDN

SEQ ID NO: 188721 - protein, 343 aa, unidentified
MKIIRVGVDLAKNVFQVHGVDRDERSVWKRKLKRDEWIKVLLEKIEPGCVIGMEACGGAHHWARLLQAQGYTVKLIAPQFVKPYVKSNKNDANDAEAICEAMSRPNMRFVPIKTVAQQDTQAVHRIRTGLMEQRTAKVNQIRGLVSEYGLVAPIRVSYLRSAIPEWLEDAENGLTSQFRRLLNGLWSDLQSLDQRVKELDREIVEIAAADPLANRLQQLRGVGPIGATAMLASVGDASQFKNGRQMAASLGLTPKQNSSGGKERLLGISKRGDAYVRSLLIHGARSMVNASKGKDDRLSQWVTRIATTRHPNVAAVAMANKTARIAWAMIRKGTDYQPELAAA

SEQ ID NO: 188722 - protein, 351 aa, unidentified
MPMLAETVDAVVGIDTHRDIHQAEIATPSGTPLATISVGNDSAGFAELLGWIVDHAPGPQVAVAIEGTRSYGIGLTRALAAAGLAVIESEQPSRGQRRGKGKSDPIDAHLAVLAALRLDAARLPTPRADGDREALRILLGARHELTVASTAQTNRLRALLLGGTDTDRDTARGSLTDTVLARLVRRRPPAQASRHLLVRHAEISRLAAALRQARAELKANRTQLQAIITDLAPALTDRLGIGPVSAAQVIVSYSHPDRWPNEAAFAALAGTNPLPASSGQTVRHRLNRGGDRALNNAIHTIAVTRMRACPRTRAYLTRRTTEGKTPREIRRCLKRYIARELYRTLTNTLTT

SEQ ID NO: 188723 - protein, 406 aa, unidentified
MSDIFALDVSMGKSYCVWYRGKHCLKEFSLVHTKAGFNALRDMIKKAQEPIIYFEATGIYSRVIEHFCETNGLRFCRLNPLELHLKSESLRRVKTDQKDAHRIALTVQENAFRLTVPWKKDYLQLHELSRFYNQLNADWNYRLNHLHTALEQVFPELKQLFVNRTSKLALNIVELFPHPALVRSYSRVKLKNILMASTDKRISKMKAYKYADRLINLAQKSYPAVSGDAIQVEEVRYYARQLIALTRKREEVIKRMESIAQRLPEYILYCSFPGIGKQTAAQLMGELGDISRFDNANQLNAFVGIDIRRYQSGTYLGQDHINKRGNPIARKLLYFTVGNMIRQQHANSNHIVDYYYRLKEKRPHPKLNKVAMVACMNKTLKCLLSMIKHHEKYHYRYTDSMVPVKA

SEQ ID NO: 188724 - protein, 353 aa, unidentified
MNESTTIGLDLAKSVFHYVSVDGTGREVRKQQLKRKQLISHFANLPPCRVGMEACAGAHDWGRRLQALGHAVRLLPPQHVKAYVRGNKNDYNDARAIAEATGRPGLRAVPVKTVAQQDVQALHRLRSGQVAARTALANQLRGLLAEYGIVVPQGLTALRRALPEILEDAANGLSDCFRPLLQRGQQQLRELDGHIAYYTGLIERQGREDEAVRRLQTIPGFGPIVASAFYSLVGDGQGYRRGRDVAAALGLVPAQHSTGGKAVLLGISKRGDRYLRCLLVHGARAVTRQAAAKDDPLSTWLNRLVATVGFNKATVALANKLARIGWAVLRHRTAYQPAKACAVAEPTAVAAAA

SEQ ID NO: 188725 - protein, 376 aa, unidentified
MITCFIGIDAHTTNYTLSTAIDAEDKPFNTCKYAPKLTYILKYANALCKKYNLKKEDILLGYEAGCLGFKLQRDLNENGFNCVVMAPSTIPGTAINRRKKTKNDIRDAEAIAKALRNDDYSSVATPDEEDEAIREFIRAREDVRMELKRCKQHIMAFCNRHGQHYEETGWTQKHMKWLNNLAFSQPVPKETLNNLLLEYEYLTEKLEEKDRRIEEFAQMDKYRESVHKLTCFKGIKTLTALAVIVEIGDFARFMKAKNFVAYLGLSVGEQSSGNDHNQTGITKQGNRFIRKLLTEAAQCFSRATSKKSKELKKRQEGNVEEVIAYADKANERLRKRYHHLVIHNMKSPNRAKCAITRELACFIWGMMTDNIHTVLV

SEQ ID NO: 188726 - protein, 358 aa, unidentified
MNRNTGMNVGQIIGTMNGLQVMGLDIAKHVFQLHTVDMGTGEIVNVQLKRARVLTHFVNKPACLIAIEACGGAHHWARELQALGHTVRLLHAKVVRPFVSGNKTDATDARAIWLAVQQPGVKFVGIKSTTQQATLTLHRQRELLMKMRTMQVNALRGLLYEFGATFAKGHKALFAEVEQAFVDLRAQLPQMVVDSLREQISRIKALSQDMAEIEKRLALQLKSDQDMRRVAQIPGVGLLTATAAIATMGQASAFKSGREFCAWLGLVPRQTGTGGKVRLGPISKRGDTYLRTLLIHGARSVLSRSKEPGPWLEGIKSRRPANVVIVAQAAKTARTIWAVTAKQQDYQRGHQSLRPQAA

SEQ ID NO: 188727 - protein, 364 aa, unidentified
MRTPRAADGARTPSGNHRGGAWDRCRSHARPNSRQTSIARTRQVTVAKMICGVDVSSSSLEARIGPAGLSASFPNTAEGILELLAFCRQHGADLVAMEATGGYEKQSFALLWAHGLPVALLNPRAVRRFAEGMGLLEKTDRIDAGVIAWFAAVKGIPASAPVSAEQQRLKALVTRLRQLTELQAAQRNQRLLVQETTVLASFREVLTLVASQIRTLETAIAALIAGDPLWQKLDQAFRSIKGVADRTVARLMAEMPEIGIASNKAVSKLAGLAPLARDSGKHQGPRAVRGGRRDVRAILFVVAGVVRRYDADFTAFHQRLSAAGKPKKVIRIALAHKLLVRLNAKARQVRNEFAALTNCTEARR

SEQ ID NO: 188728 - protein, 406 aa, unidentified
MMNAVGIDVSKSKSTVTIRRPGDEVILPPRDVRHTRSSIDALINKIKSLEGETKACMECTGRYYEPMATWLSDAGLFVSTVNPVLIKDFGDDSLRAPKTDKADSKKIARYTLDRWMKLKQYGLMDETRNQLKTMNRQFGFYMDQKTSMKNNLISLLDQTFPGANDFFDSPARSDGSQKWVDFVYTYWHVDCVTGRSLNAFTEHYHNWCIRKGYNFSAAKAKTIYNVSKDLIAVFPKNDVTKMIIHQAVDLLNAASKTVETLRSRMDETASTLPEYPVVMDMNGVGPTLGPQLMAEIGDVMRFEKRGSLTAFAGVDPGKNDSGQHVQKSVHTSKKGSPHLRKTLFQIMDGLIQRSPVGDAVYDFMDKKRAQGKPYYVYMTAGANKFLRIYYGRVKEYLESLENNESE

SEQ ID NO: 188729 - protein, 387 aa, unidentified
MYFVGIDISKFKHDCAIIDELGDVITPSWSFHNDREGFSLLRELLDALEGEKKIGLESTGHYGQNLKLFLENNGFSFMEFNPLLVNRFVRSKSLRKTKTDSIDALMIAQYLMTVEYKPYPPSFYTLEKLKSLTRFRDSLIRQRSKQLVELTNVLDKVFPEFKPFFKGKFSVTALYILSHYTSPEKISNMNSKSYESLRRLSRGKFSMVNFVELKTLARNTVGSTRDYLLQEMEIIIDIYNQLQSKVEEVEQLINDCVLVLDPPMLTIPGIGVSSAAVILSEFGDLSKFDSPSKLLSFAGLEPGYFQSGISESVGKMVKHGSSHLRYAIMNCAQTVINNEPTFAAYYAKKRAEGKEHRIALTHVAKKLLRVIYTLQTKELPYNPDLIR

SEQ ID NO: 188730 - protein, 450 aa, unidentified
MNTSFVLGIDPGKSFFAATLMHSTGERIWKARQFNMSCDGFEELRSSLPHGDLTVGIEASGRIDDNLLAWFGRWKSGCRDRKIKVIRVNPGQSARFGGPKPRRDQTDGSDSDHIGEFTRVYAHRLEAFEHDPEAQAMTRLINERQHLVEELAATKNRIHEQLLVCFPEFTEMFADPFAKLARAVLREVPTARQAATRRPLSLARVKAGRKERSLGTEQAQKLIQLAKKSIASAGEDNDAAAMIFLLDQLDLLEKRLVNMGETLTAYAAQAQNEVGPLGEQGVSAARQIGLLDSIPGIAIVAASTLVLGTRGLARFDSGSALAAQWASCPERTQTGTSLDKTRLTARGDHKRRAMLYLATQIACMYDPAFAFHKWRMVQRGLCPQQAVCAAMNRMARVAWALVAKNHIYDVNLMIGQIQIHHAELWKTFVRLHQNNGSLWKNVELKYKKIA

SEQ ID NO: 188731 - protein, 343 aa, unidentified
MTRYIGVDLHRNCFTVCVIAENGREYASEYRLSQLPQFVRKLRPTDELAVEVTGNTRLFYDAVAPHIQNVVVVNPAQFRVIRDSVKKTDSHDARTLAFYLSKGMLPEVRMKDKLQAQLASLTQTRDALVKQRTALKNKVNNILSAHGINLRREALSGDAALEQVLGMTFEPIVSSELRVIVSQIRALNQSVAELEKTIKTEGPKLAGHKNLRSIKGIGDLGATILLSVIGDIEDFAHPGKLAAYFGIVPRVRNSNETERSGRITKRGAKLGRTALVQCALIAMRYSPYLAKFYHKIARKRGAGKAIIALARKFLGVIYHTLKNNWVFADFPNFVLAEPSETAA

SEQ ID NO: 188732 - protein, 335 aa, unidentified
MKKIFVGIDISKEKLNLCFRTAREIVCEEEIENTSAVIKRQLKTNLKALGTAFDEILVCAEYTGRYIYPLTCACQELGIFLWMEDPTRIKNSLGVTRGKNDAIDARRIAEYAFRFNDKAVAYTMKDKDIVSLKNLLSDRDLLLADRKKYEAQLSDQKKYMSVEDYKNKSRRWKKVIAAIKEQLAAIEAEMKAIVDANGNISHQAELLKSVPGVGDKLAVNMIVITEGFSRFTDARQFNCYAGLAPFQYTSGKSIYSKAKVSQRANKHIKSLLHLSAVSVATHALSGEYKDYYERRKNEGKHPMCILNIIRAKLVARMFSVIRRNTPYTEEYHHAG

SEQ ID NO: 188733 - protein, 306 aa, unidentified
MLRPDGRHRTKKFANTTKGHDELVSWLKGHKIDHAHICIEATGTYMEPVAECLYDAGYIVSVINPALGKAFAQSEGLRNKTDTVDARMLAEFCRQKRPAAWEAPHPLERALRALVVRHQALTDMHTQELNRTETAREVQRPSIDAHLLWLEAELKRLEKQIKDLTDDDPDMKHRRKLLESIPGIGEKTSAVLLAYIGLKDRFAHARQFAAFAGLTPRRYESGSSVRGASRLSKAGHVSLRRALYMPAMVATSKTEWGRMFRDRLAANGKKGKVILGAMMRKLAQVAYGVLKSGVPFDASRHNPVAA

SEQ ID NO: 188734 - protein, 366 aa, unidentified
MKKISTVQTFSNEILKEQKLTVGLDLGDRWSFYCVLDEAGKIILEQKVATTPEAMQQTFGKIPRSLIALETGTHSPWVSRLLTELGHEVIVAHAQKVELITKSNRKDDRHDARTLARLARIDPELLGPVRHRSAKAQIHLTVIRARAELVSARTALVNAARGLVKSFGERLPKCGTYQVNEKLAEGVSAELRDVLVPLLREVESLNERIKEYDERMEKIATEMYPEVFLLKPVKGVGTQIALTYILTIEDPYRFPKSRQVGCFLGLRPGRRNSGESEPQKKISKEGDRYLRTMMVQGAHYILGPFGEDSDLRRWGLKLAERGGKNAKKRAIVAVARKLAVLLHRLWVSGEVYEPLRNSQKAMRAAA

SEQ ID NO: 188735 - protein, 361 aa, unidentified
MKKPSQHLIAEVPRKRGQVELTIGIDLGDVWSHYCTLNQQGEVIDRGRFRTTPKAINTWFTDVPHARVAMEAGVHSIWISEQLEQLGHEVIVANVRELRAISHSDRKSDDVDAEKLARYARLDPEILRPISHRTVEQQQALTLIRARELLVRLRTASINAVRGLTKACGYRMPASSTKCFAQRGQAAMPPGLKLALGPILTQIAEMTLKIKQYDKDIQRLTQTEYVETQAMMTIHGVGHITALTFVLTLGDKSRFRCSRDVGCYLGLRPKRSQSGERDPQLGITKAGNAYLRSLLIECANHILRPHGRDSALRQWGLHLAARGGKQAKNKSVVAVARKLAVLLHHLWTNQQPYIPFFQQAA

SEQ ID NO: 188736 - protein, 387 aa, unidentified
MAQLAQEEFAAFIGLDWADAKHDVCLQATGTARREFLSFAHRPEAIDAWVQTLRTRFHGHPVAVCLELNKGPIVSALRKYDFLVLFPVNPLTVARYREAFTPSRAKDDPTDAELQVELLLKHRDKLKPLQPQSPAMRVLAQLVEHRRRLVGDKVRCTNRLTSTLKNYFPQVLQWFPEKDTAIFCDFLSRWPTLKAAQLARRSTLEGFFRVHHVRSVDVIDTRVQAIKSAMALTTDDGVITPNVLLVHALVAQLRVTLQAIADFDNAIAQRAQAHPDFPLFDALPGAGAVFAPRLLVAFGEQRERFTSADALQKYAGIAPVTARSGKKSWVHWRLQCPTFLRQTFVEWAAESTRHAFWAQVYSQQQRDKGKAHQAAVRALAFVSAALP

SEQ ID NO: 188737 - protein, 349 aa, unidentified
MSQNLNSAVAVIGIDIGKNSFHIVGLDDRGAIVLRQKWSRGQIEARLANMPPCLIGMEACVGAHHLSRKLKAFGHDARLMPAKYVRPYSKGQKNDFRDAEAIAEAVQRPTMKFVATKTAEQLDLQALHRVRERLVSQRTGIINQIRAFLLERGVAVRQGLRFLRAELPRILAAPPDVLSPRMVRVINDLAEDWRRLDERIDQLSNEIAVLARQDTGCERLMSVPGIGPIISSAMVAAIGTGDAFSKGRDFAAWLGLVPKQISTGDRTILGKVSKRGNRYLRVLFVQAAWVVLIKPMSWERHGLKHWIEAARKRLHRNVLAIALANKLARIAWGVLAGGRTFEASKLQPA

SEQ ID NO: 188738 - protein, 400 aa, unidentified
MSVIIGVDPHKGSHTAVAIGRDEARLAKVRVRATRRQVDQLLAWAARFAQRTWAIESAGGLGYLLAQQLVGAGERVVDVPATLAARVRVLGTGRSNKNDPNDAHSVAVAALRAPRLASVARADHAGVLRLLAKRNNELGRARNKTACRLHALLAELVPGGISNEINASSGERMLAGVKPATPVEVARHALALEHLDDLRRLDAQMQISKARIAAAIAASGTSLTELFGVGPVVAAMLIGYTGDVARFRNRDHFAAYTGAAPIEVSSGGRVTHRLSRRGNRQLNHALHIAAITQIRFPHSPGRAFFERKVAEGKTKKEAVRALKRRIADAVYRQLLIDARTRTGPGGQPGTTLQSSVAGSTPRRPALRISHSRTRTNARTRRAATRTPSPSRTRTPSTKGS

SEQ ID NO: 188739 - protein, 339 aa, unidentified
MKVSTLGIDLAKNVFQLHGVGCNGQTVLKKKLTRDKFLPFLMQLEPCLIGMEACASSHHFARVLRQYGHEVKLIPPQYVKPYVKTNKTDAADAEAICEAVARPNMRFVQIKTAEQQAILVLHTERNILIRERTACANSMRAILAEFGIIMPRTLSQLYKRIPEILEEYDNELSPFVRCSVARQLEHLQGVEDQITLIEQELSRWAKTQPACQRVMKVPGVGLMTATYLVASVGNGQQFHSAKQFAAWLGLVPREFSSGGKQRLGRISKRGDRYFRYLLVHGARAVAAVIERHKDNMPWLYRLLNKKAYNVAVVTQANKTARILWSMLVHHTEYRTLSVV

SEQ ID NO: 188740 - protein, 386 aa, unidentified
MQKLNDLSRSLTPLEPDGTLIAVIEMSLSSWLVAGIVPGIERQPLKKLVVDENALLKLLHRWREEAEKAGHMIKRIAVAFEAGRDGFWLARWLGARDIEVHVIHASSVAVSREHRRAKTDRLDTELLKRAFLGWLRGERDHCKMVAIPTIKDEDGKRPNREHESLVGEQSRIINRIKATLARLGIRGFNPKLKKAAERLEGLRTPEGEPIPPNTLSELHRDMERRGLVRDQIRQIESARLNRLEHAPDEGVHAMVRLLARVMGIGIETADMLVQEVLSRNLRDRRAVARYAGLTGSPDESGKKRREKGLARSGNPRVRRGMIQLAWRFLMFQKDSALAQWFRARTENARGSRKTMIVALARKLLIALWRLVREGVVPDGVILRPAQ

SEQ ID NO: 188741 - protein, 343 aa, unidentified
MNVTTIGFDIAKGVIQLHGVDAAGAVTLRKRLSRAGALKFFASLAPCLVGMEACAGAHFWARELQGFGHTVRLIPPHYVKPYVKRSKTDAADAAAICEAVSRPHMRFTPVKSRDEQALAQAYKTRGLLVAQRTALINALRAHLTEFGVVAAIGPAGAGRLIALVRAKEEPLPEQAYETLAELADMIEATQARIAAFDAKLQRQARADEASRRLMKIPGVGLVTAGTIRALVGDVTRFKTGRDFAAWLGLTPRQNSSGEKVRIGAISKAGNRELRSLLVMGQMAVFRHAVAQPDKASPWLAAMIKRRPRLVVVVAMAAKAARVIWAMLSRGEAYRPRSAAVTPA

SEQ ID NO: 188742 - protein, 337 aa, unidentified
MYYIGLDIHKKTISYCVKDAAGCVHREGKIGSSRRELDAWIRTLPQPRMMAMEATIFTGWIYDYLLPHAEKLKVAHPLMLRAIAAAKKKNDKIDAAKIADCLRCDFLPECHMAPTEIRDRRRVLRYRNLVVKQMVQMKNRVSGLLLETGVTYNKRQLHKVGYFGEMMSTNADISEAVRPLLNLSRGMIRRSSKLEYDLASSLERDPLLRERLRRLRTVPGVGSITALTWALEIGDYTRFRSNRQAISYCGLCADEKSSADKVMRMPLSKQRNKHIQRVLVEAAKLAPRLSPELAMIRARELERGNPNRATLAVARKMVCYMLAVERRQQDFVQTAAA

SEQ ID NO: 188743 - protein, 344 aa, unidentified
MKITTVGIDLAKNVFQVHGVNEFGKTVVKKQLRRDQVSEYFVNLPACLIGMEACGSAHHWARKLQGFGHTVKLMAPQFVKPYVKTNKNDAADAEAICEAVARPNMRFVPIKNIEQQAVLSLHRVRQGFVKARTAQANQIRGLLSEFGLIVPQGIGYIASRVPELIEDASNELPGSFRLLVQRLLDHLKELDRQVDELESQIVKWHRQSDASSKLAQVPGIGPITASALVASLGDAKNFDGGRQVAAWLGLVPKQHSSGGKQNLLSISKRGDTYLRTLLIHGARSVIYRAQQKPESCSWINGVVNRRNKNVAAVALANKNARIVWALLAHDREFRSDYAPAKAAP

SEQ ID NO: 188744 - protein, 345 aa, unidentified
MKPATKQIATLGIDLAKRIFALHGVDATGVVVLRRTIGRAQLLEFVAGLPPCTVGMEACSGSHEWARRFQSFGHTVRLIAPAFVTPYRKSGKNDANDAEAICEAVGRPNMRFVPIKSVEQQAILTLHRARQGYVEERTALINRIRGLMTEFGHVFATRHAGLRDGPAEAIESLPELARQALTDLFEHLRRLSDRIGDYDRRLEALARQDEQVKRLLTIPGIGPITAIALMASVGDAKMFKNGRQFAAWLGLTPRQNSSGGKNRLGGITKRGNEYLRTLLVQGARAVMQRAAGRADRLGRWVISLQGRRGYHKANIAMAAKNARIVWCVLARGTVYEPAAAVAAAA

SEQ ID NO: 188745 - protein, 350 aa, unidentified
MVVVGADVHKHSHTFVAVDEVGRKIGEKTVRAITAGHAEAVMWARERFGNEVVWAIEDCRHLSARLERDLLGFGQKVVRVPPKLMAQTRASARTRGKSDPIDALAVARGFLREPDLPVASHDEVSRELKLLVDRREVLVAQRTATINRLRWRVHELDPERAPVPASLDRAKHRQLLGAWLTTVPGLVAELARDELADITRLTEAINALAKRIGGRVREIAPVLLAMPGCGELTAAKLLGETAGVTRFKSEAAFARHAGVAPVPVWSGNTAGRVRMTRSGNRQLNAALHRIAVTQIRLDGLGQTYYRHRLAQGDSTPEALRCLKRRLARTVFGHLHTDHQNRTKPCQLAAA

SEQ ID NO: 188746 - protein, 338 aa, unidentified
MNIVFLGIDLAKNVFQLCGLNQAGKPVYTKRTGRKELLQTLANIPACLIGIEASTGAFYWQREFEKLGHKVKVISPQYVKPFVRGQKNDGNDAQAIAVALMQPTMQFVPPKSPEQQDIQALHRARQRIVNHRTATVCQIRGLLLDRGIPIGSAVSRARRAIPLILEDAENGLSSRMRRTIAELYDLFNDPGRRIHFFDKEIETVFRQSEACQRIAKVKGIGPKTATAVVAAIGKGTEFKNGGHFAAWLGLVPRQHSSGDRQVLMNMTKKGDKHLRTLFIHGARAVVMVATNNNDGHMNQWVNQLKERRGFNKTTVAVANKNARIIWSMLRNDTEYQVV

SEQ ID NO: 188747 - protein, 388 aa, unidentified
MQVIADRPEAPSAIRTNLGAIFVSLELSLSTWLITSLSPGSGEKMSKHMVQGGDIAGLLRRFAQLQEKAQARTGRNFPIIVIQEAGLDGFWIDRVLKNEGIESHVVDPASVATSRRRRRAKTDKIDGEALVRTLLAYKRGEPRVCAMVKAPTPEEEDRRRLCRERKVLITERVKHVNRLKGLLFSQGVCGYEPLRRNRRLRLDELRTGDGRPLPKHLKAQISRELDRLELLLEQIKAVETERDALLAAQPIAAPPSAAMLLAIKGIGPDFAAILWTEGLFRHFDNRRQIASYAGLAPTPWKSGSIDREQGVSKAGNPRLRTTLIQLAWLWLRHQPQSALALWFKERVVRNGGRLKKAAIVALARKLLVALWKYVAAGVVIEGAIMKAA

SEQ ID NO: 188748 - protein, 346 aa, unidentified
MNSMNYIGLDIHKKSISCCVRQADGTIIQESTITATRHALDEWMRQLPDPWIAGMEATLFTGWIYDHLVLGGAVVKVAHPAMLQAIAVGKKKNDRVDARKIADLLRCDYFPECHMAPRDIRDRRRVLRYRNLLVRQAVQMKNKVSGLLMEAGVPYNQQKVHQKKYFAELLQKQKKDMPPSMPELLRLSRSTVEALTGMQRQLIRALESDALLAARVERLASIPGVGRVVALTWALEMGDISRFASVKKAVSYCGLCGAEKSSGGKTERTPISKQRNKHLQTMLIEAAKLAPRWNAELALVYDREKQRGNRNRATLAVARKLVAYLMAVDREERLFDTQVRVAGNAA

SEQ ID NO: 188749 - protein, 347 aa, unidentified
MRFYTRQHQHYCGIDLHARTMYLCVLDPTGAVLLHRNIPCDPTIFLQAIAPYRDDLVVAVECIFTWYWLADLCARETIPFVLGHALYMKAIHGGKAKNDKIDALKIATLLRGGMIPMAYVYPRDMRSTRDLLRRRLYLVRKRGQLLAHIQNTHHQYNLPGLSRKILYKVNRDGLAERFADPAVRRSIAIDLELVDHLDRLIRDLELDLVRTVKVHDPQTFFRLKSLPGIGKILSMTLLYEIHDIARFPRVQDFASYARLVKCARESSGKMLGTGGSKIGNVHLKWAFSEAAVLFLRANPRAQAFLQKLRRQHGKAKALSILAHKLGRAVYFMLQRETVFDMHKFLAA

SEQ ID NO: 188750 - protein, 413 aa, unidentified
MTVFCGIDWAEDHHDIALVDQHGTLLAKRRIGDDAAGFATLLQLLAEAGDSADAPIPVAIETSHGLLVASLRATGRPVFPINPMSVSRYRDRHSVARRKSDAGDALVLANILRTDLAAHRALPADSELVQAIAVLARAQQDAVWARTDAHNKLRSLLREFYPAILQAFASKRGGLLRPEARALLAAAPTPRAAARLTMAQLRALLRRAGLQRGIDAEAARLQQVLRGDYLHHPSLVEEAFGQQTLALLRQLDTAYANAEQLAAATAERFAQHPDAAIITSMPGLAELTGARILAEIGDDRARFADARGLKAYAGSAPVTRASGKSTAVLHRRVKNQRLASVGYVWAFAALTASPGARAHYDRRKAAGDRHVAAQRNLFNRLLGCLHHCLHTGQTYNEATAFPTPSNTTQARAA

SEQ ID NO: 188751 - protein, 319 aa, unidentified
METQKNRVCGADIHKKFLIATILSRDGTKITKRFGMIRDDLSKFKDWIVDNHCEQVAVESTGTYWIPIHAVLEGSVDLIVANAYKIKHTPGRKTDVIDSEWIAELCLNGMIEPSRIFPQADRELRRLTRAREGYVNDMTRVKNRIHHALESCGIKLSSVLADIFGKSGRYLLNSMMEGVGIEELIEGIPVKRIKKKADLIKESIRGSLDVTHIILIRGGLEQIESIQKRIDELDKEIKARIASRKEDLRIAMSIPGIGFTAAAIILSEIGDFKDFKKPEQLAAWTGLTPSVYQSADKLVTGSITKHGSRHIRRILIEVA

SEQ ID NO: 188752 - protein, 354 aa, unidentified
MSKINELNFAGQIIYCGLDVHKTNWKVNARIGGIEIEAFSQNPDPVELKNHFSRKFPGAELRVAYEASFCGFGIQRSLSELGIACMVVNAADIPASDKDRKRKDDKRDARKLSQELGKDALKGIYIPPAQIEHVRSLVRLRSRFSADQVTSKNRIRHLLHFNGLNVNAESERWSAKYVKLLQQMDCGDVVLKKTLNFAIDQYVQSRQLLKSITLEIKHLSRQEPFARVQAILQSIDGIGLINGMVIQTEIMEIQRFKTIDSLCDYAGLVPDIYSTNDKTVSRGVTKRRNEFLRHAIIESSWILIRKDPAMLLKYQKYCSRMHSNKAIIRIGKHLLARIRHVWNTGQLYERGKMS

SEQ ID NO: 188753 - protein, 353 aa, unidentified
MNILGMDLGQSKSAWEALNTKTGEVTWGEVRTSEDALSKLLTKIGPDQLVIESCPLAARVHDWATAAGISVLVADTTQDAWQWKNVKRKTDADDASKLARLAAMGQINAVHIPETAVRERRRLLEYRAALVAEKTRCKNRIRSTLLMQDLKLPRGKTGWRRAAREALADHARPLAECEASELWRGLLHTALAHLAQVEHLVTAVTDTLDKLAQADPRVARLRTIPGVGPRTAEVIVTVLDQPRRFATRRQVSAYSGLTPRRWQSGQMDRSGRITKRGNPLLRQILNQAAWVAVRCNPELRAFFLRVGGGRKQRRKQAIVAVMRKLLVVAWAMLRDETTYHPRRCGMTTAKVAA

SEQ ID NO: 188754 - protein, 427 aa, unidentified
MSKAEANRYEAFCQFRSSVRGSWDYLLVGIDVAKERHHAFFGTATGKTLLKRLIFDNNRAGFEQLIERVEQLMVVHSCRKCAFGLEPTGNYHKPLANWLLDQGQLLVLVSNKAVADNRESLDGRWDKHDTKDSANVADLMAQGKCQFFERPSADHTALRSLLSLRKRLKRDEHSLRMQIRNGLLVRHFPEMDHLWGSCLKENLAIVRSCLDPRAISAMDFNAFLRRVTDRDRGLRQVKRLQRIYDAAAVSIGCPTDAAARFEARLLVERLYDLREKIERTEKRIERICQRLPSYRRLLTIPGFGPYVASQVVARIGDPHRFAGRKQLIRLAGYDLNAKRSGKTSDTAVPVISKRGNGDLRYALYQAALIATYHNDGFRAVFTRYLQGRERERGIKTKMRVKLAVKMLVIAWCMMRDDTDYDPALLQV

SEQ ID NO: 188755 - protein, 338 aa, unidentified
MEYGAIDLHKQRSVIRIVDAEGRVVLERTIATVRDGFERVFAGRGPMRVVVETGTESEWVAQAVEACGAEVVVVDPNYALMYGVRQRLVKTDRRDVAALAEANRLGIFRPAHRVGAAQRAERRQLRVREQLVRVRTRAINLLRAQLRQEGYRLGSGRAESTVARYERLGVATALAEQLDPLIALLTHLAPEIAELDGAAAARAAADPVTRRLMTTPGVGPLTALSYRAALDEVSRFADAGQVTAFLGLVPREDSSGSRRRKGGITKAGPSHVRTLLVQAAWTLWRQRRSVDPLHRWVRAVAARRGRGIAIVGLARRLARVLFAIWRDGVPYRVMASAA

SEQ ID NO: 188756 - protein, 411 aa, unidentified
MDIVHERSVGMDISKRDAKVCIRVPGKRRGQFTSTVTTWGSTTNQILELRRFLEEQNVTVVVMEATSDYWKPFYYLLEESLPVMLVNARHARNLPGRKTDVSDAAWLAQLGAHGLLRASFVPPGPVRELRDLTRARAVTVQDRTRELQRLEKFLESTGIKLSGMVSELTGVSSRAMLEALIRGERDPHVLAQFARASMRSKIPALTEALTGMFGEHHAFMVRLHLDRIDQLARIITVLTEQINTVMEPFRAAREALSTIPGVSTLVADVIIAETGGDMSVFPTAAHLASWAGVCPGSNESAGRVKSTRIMPGNKHLKDALGIAAMSASRGKNTYLSVKYKRIALRRGRVKAIVAIEHVILTATWHMLANGEVYTDPGADFYLRREPEQTKTRAIRQLKTLGYDVSLTPAGA

SEQ ID NO: 188757 - protein, 403 aa, unidentified
MNSVGIDISKGRSTIAVMRPFGEVVISPFEVRHTDSELSELARQLKSLNGETRVVMEATGNYHAPVAKLLHDAGLYVSVVNAKLVHGYGNNDLRRVKTDRKDAVKLANYGLDRWLTLPRYVPEEDTRLLLKNCYRQYRQYSKVQTVLKNNLISLLDTVFPNVNRLFSSPIRGDGSEKWVDFVAEFWHCRCVSEKSEKAFTNKYQRWCKKHGYNFSEAKAHAIYEEASRHIGVMPKSETTRLLVEQAVSQLRATSAALATLKQEMQSLASTLPEYPVVMDMFGVGPSLGPQLIAEIGDVRRFYSKKALVAFAGIDAPPNDSGDVTGRHKSMSKVGASSLRRTLFLVMSVYLQRAPLDEPVYQFMDKKRAEGKPYRVYMMASANKFLRIYYATVKAYLESLEHTA

SEQ ID NO: 188758 - protein, 343 aa, unidentified
MTKISTIGLDLAKNVFQLHGVDGSGAVVLKKQLRRGALEKFFAQLPPCLVGMEACGSAHHWARVIGRYGHEVRLMPPAYVKPYVKRNKNDGRDAEGICEAVGRPTMRFVPVKSVEQQATLAVHGTRALLVRQRTMAANALRAALSELGIVAAQGYEGLRELMAKLEEPGEEIPEVMRGALLVLARHWQALDADERLLERQIAKAARSDQDARRLMEVPSFGPIIASTVLAKVPDAKVFRSGRDFAAWIGLTGKDHGTGGKHRPGRISKQGDRMLRAMLICGASAYLRHQKARGVSDPWLRELLARRPYKVVMVALAAKTARIIWAMLAKGEPYRDRASASAAA

SEQ ID NO: 188759 - protein, 344 aa, unidentified
MEHYAGIDVSLEQSSVCVVDATGRIVREVKVASEPEALVRFFRGVGLTVTRIGLEAGPLSQWLHAGLSEAGFEVVLLETRHVKSALSAMLVKTDRKDARGIAQLLRMGWFRPVHRKSPGSQEVRALLVGRKLLQNKLRDVELSVRGVLRGFGLKVGEVSKGQFAARVRELVAGHAMLEAVTTAMLSAREALRAEFMTLHKRVLAIVRADPVCRQLMTAPGVGALVSVTFKTAVDDPARFASSKAVGAHFGLTPKRYQSGETDVTTGISKVGDEMVRTALYEAANVILSRLTRFSALKRWAMQVAKRRGLKRAKVAVARKLACVLHRMWADGSEFRWSKEVEAAA

SEQ ID NO: 188760 - protein, 386 aa, unidentified
MQKLNDLSRSLTPLKPDRTLIAVIEMSLSSWLVAGIVPGIERQPLKKLEVDESTLLKLLIRWREEAKKSGHSIERIAVAFEAGRDGFWLARWLRARDIEAHIIHASSVAVSREHRRAKTDRLDTELLKRAFLGWLRGERDHCKMVAIPTIKDEDAKRPNRERESLVGEQSRIVNRMKAALVRLGIRGFNPKLKKAVERLDGLRTPEGEPIPPNTLAELRRDMARRRLVSDQIRQIEDTRLERLEQAPSDGPHAMVRLLARVIGVGIETADMLVQEVLSRNMRDRRAIARYAGLTGSPDESGRKRREKGLARSGNARVRRGMIQLAWRFLMFQKDSTLAQWFRARTENARSARKTMIVALARKLLIGLWRLVREGVVPDGVVLRPVS

SEQ ID NO: 188761 - protein, 341 aa, unidentified
MKNKSFIGIDISKNVIDASIFCEGASIKDFPHDVFNNSRKGFGEMCTWLKKNHVVLSNCLFGMEFTGSYSMELEKFLNTRNYQFCMLSTHVVKHYPMGPKDKSDKIDSAKIADFLYRYNGTECVKPYNMPDKTMQRLKALMNERKFLVEQRICFMNRRQLCTTKEDAQLYDGYIKKFSRDIENIELEVQKLLETDDSLSTTYKNLLTIPGIGFVNAMNVIVITRNFTAFETARQYASYVGVAPHFRTSGTSVKWRPRPSARCDGQAKADLSMAATVVVQYDAELQSFYNRKLGGKQDSDTKRKALNAVKFKLVLRMFAIGKQNRKWEPLDSKSSNEKLAIS

SEQ ID NO: 188762 - protein, 393 aa, unidentified
MKLVGIDIEKKHFFCIMDKDSGEVLLQPSSFSNTKDGFDSLIQKLSSYSKDSILIGMEDTGHYHFALLKYLLEKNFTVALINPKTTDYTRKIQNGITKNDKLDTLTICDVLDTPVRKKQYRITKVNSFDLYEQKQLTRHHHNLKEELNVYTNRLQKCIDIVFPEFNSLFSSKYGIIYMNVLKTFGSAENIASTDIRTIRKCFEIKGRGNRISLTAQQLKDSAKSSIGISSAAEVIKIKHLISQIELINEQLAETDKKIEEFSIQNNSPILSIPGISHFFGTSILAELGEISNYSKPSKIIKAAGVAPYHYESSQYNAQHTAITKKGSPYLRKTLYQIILPVINNNPVFKQNYDLKISQGKGHRCACGHCVRKLLRIIYHLSSTNQQFDDALLR

SEQ ID NO: 188763 - protein, 350 aa, unidentified
METAYDGRQVVGMDLHRRRSVLVRMTEDGRRLGTARITNSPAELRRAIAGAGKNPRVVLEAAYGWYWAADVLQAAGAEVHLAHPLGVKAFTYRRVKNDEKDAADLADLLRMGRLPEAWIAPAEIRELRELTRYRLKLVQRRSGYKDQVHAVLAKLGIPVTCSDIFGAAGNIWLDELPLPQPYAGKVASLRTLIAGLGTEIALLDAVISDLLAGHDGYRALQALPGIGPVLAAVIVAEIGDIRRFSSPAKLCCWAGLTPRHRESDLKVARGHITKQGSRVLRWAVVEAIQHQPATSPVRAVKDRIIARRGKEAKNIAKTAAARHLLTAVFYAMRDGQARSLAARTAAPAAA

SEQ ID NO: 188764 - protein, 361 aa, unidentified
MIVAEHFGFVVGIDTHAKTHTLAIIDTASGGEIANETFPATTAGGNRALSWILRRTDASSEMVLLSMEGTGSYGAKLRQQASDAGFQVTEAPIPNQRLGRYQGKSDSIDAARAARAVLGIPMDRLPEPRSGQNHMALRILSNARRSMARERTAAINALTALLRIVDLGVDARKPLTVSQINTIAAWRERDEEFGTRTCRREAVRIAKQILTLQDQLAENHAELEALVQEVQPALLEIYGIGPVLAAIILTAWSHAGRVRSEAAFAALAGTCPVPASSGGTTRFRLNRGGDRQLNKAIYTIALIRMNRDPVTRDYVAKRTSQGRTKKEIIRSLKTYITRQIFRHLNSKGSMNGNLGVVPATG

SEQ ID NO: 188765 - protein, 336 aa, unidentified
MSLYCGIDLHSNNHVVVVIDEEDNKVVDKRIDNNLNATLALLAPYKEQIKAVAIESTFNWYWLVDGLIEQGYQVKLVNTAAVKQYEGLKYSGDHQDAFHLAHLMRLGILPTGHIYPPEYRQVRDLLRRRRQLVKHASSHVISIQNQIWRSLGYRVSCVDIRKKDFKLPFEIGSFLYHSAHSNLMILNTLDKQIAIIEQQTLEAVELKDEFKLLTSVTGIGPILGLTIMLETGDIKRFEAAGNYASYCRCVNSVRESNGKKKGTGNRKAGNKYLSWAFSEAAHYLVRFDAKAKRFYERKKQKRNGIVAIRAVAHKIARAVFHMLKNKQVFDIERAFS

SEQ ID NO: 188766 - protein, 429 aa, unidentified
MSKRKKQVTRQEEYAALIGIDWASEKHDVWLYEPDTGKQDYRKVKHTPVALTEWVAELRSLFGGRQVAICLEQSKGALIYALMGYEFITLYPINPATLAKYREAFSPSRAKDDPTDAELLMDLLLKHRDKLKEWKPDDEQTRMLTMLNEERRKSVDLRTKLVLRLQATLKNYFPQALDLLAGNLTSELACVFLQKWSTLDALKRAKPQTVRALYYGHNYRRGDLITANLEKIRTAIPLTQDKAIVSVSAITAQALAKQIRTINEVIEQYEQQIKEVFKNHPDGFIFDSLPGAGPALAPRLLSAMGADRDRYSEARDIQTFSGIAPVVERSGKQVWIHWRWGCPKFIRQTFHEFANCSRNFSLWANAHYELQRERGKSHHAAVRSLAFKWQRIIFRCWKERKPYDEARYLQSLKANGSPLWERINALHAA

SEQ ID NO: 188767 - protein, 442 aa, unidentified
MSKHSEAFVGIDTSKLRNAIAIAEGGRGGEVRFVGEIDSADAATRKLVAKLAAKYRSLTFCYEAGPTGYGLYRLIRSLGHECVVAAPSLIPKKSGVRVKTNRRDAVQLAKLSRAGELTAVWVPDERHEAMRDLSRARQAARKHLISKRQQISSLMLRRGRHYPGKTTWGPAHMRWLMQQKLEHREQRIAFEELLEGMRQEAERMERLEQAIREAVPEWSLAEVAIALQAMRGIDLVAAVTVLAEIGDLSRFQNPRELMGYLGLVPSESSTGDRVKRGGITKAGNGRARRILVEAAWSYRHPPRVGLEKQAKVAAAPRRVREIAWKAQTRLCGRFRSLIRKGKLPTIVATAIARELSAFIWAINREVLAPGAGFEIRNVPTAHSVTPCSQPSRPGLATADRVADASRRPALTAAARGVPAAARVGTKKRAPRSNKETGLEAGL

SEQ ID NO: 188768 - protein, 321 aa, unidentified
MQVIIGVDPHKATHTAVALSDGEDELARKKVRATRVQVQQLLGWAEPFPTRRWAIEGADGLGFLLAQQLVAAGEHVVNVPATLAARTRLLGTGRSNKNDPNDALSVAVTALRTRGLRRVEAVGHSEVLGLLAKRNTDLGDQRCRLVSRLHALLVELAPGGIAKEINASDVDAFLAQITPATPVEQLRYDLAGELLDDIRRLDTQLKASHKRVRVAVQASATTVTDLFGVGPIIAAMLIGYSGDIGRFRNRDHYAAYNGTAPVEFSSGGRIVHRLSQRGNPNSTTPSTWRRSPSCANHTARAAPTSSDESPTARRTRRRSDR

SEQ ID NO: 188769 - protein, 388 aa, unidentified
MDVSKDFFSACVLDDEGEELFSGTYEMNSHGFSEFFKIVSSRSGRLDRVMVAMESTGCYHINLFSFLTSQAIRTVVVNPLLISNFAKLSLRKTKTDKKDASTIAKFLLVHQEEISQLSVSQDLQDLRDLSRERESLCHLVAATKVEMKRVLRATFPELESIGNLYTRVMLRFLQRYPSARLAKAAKPRDIAKVLKGPYVGNKLTFCAEQIHRAAQSSVAVVSPAKEVILQGKISTLLHLEGRLEEVTKLLTDLCKATRIQDLEILTSIKGVSTKTAAPFLAEMGEVKSFPSSKKLIAFAGMDPSVHQSGKFVGTSKLSKRGNRHLRRVIYLMTTSVVSQNAFFKAYFLKRKEEGLAPQKAIFATAHKLIRVIFAMLSQRTHFKVKGAI

SEQ ID NO: 188770 - protein, 311 aa, unidentified
MSGGVNAAIDVGKQTLAVALGSAGAQFAAPNEPRAIKRLTQRLVELGCERVLLEGGSYQNLLVGALRVAELPVVIVNPRRVREFARSLGRLAKTDRLDARVLALYGERVAPPLRELPGEQDQRLRELWVRREQLIEMLVMEQNRLEHASAALQRRLRAHIAYLRQELTQADEDLDQAVRNSPLWDKYEVLRSVPGVGPILSCALLADLPELGRVNRREVAALAGVAPFNQDSGSLHGARAIAGGRTRLRRVLYVATVAAVRCNPVLKPFYRRLRAAGKRPKVALVAAMRRLLLILNAMLRSQTPWRAPCPA

SEQ ID NO: 188771 - protein, 350 aa, unidentified
MIIIGVDFHPEFQQIASVDTDTGEFQEKRLTHREEAEKFYRALAGAGQKVRVGMEASGHARWFERLLAELQFELWIGDAAEICTKRVRKQKTDRQDAQLILRLLLEDRFPKIWVPSCENRDLRHLLWHRHRMVQARTRIMNQLQAVAMNEGLRCKKRLWRESGREQLESFRLAPWASRRRQDLLELLDRLNPMITELTQAIEQEVEKCPEAQRLRTHPGVGVLTALAFVLIIGRAERFQCGKQIASYLGLVPLEDSSGKRRRLGHITKQGSSMLRFLLVEAAQVTARSIPEWRSRYFHLMMRRGRKIAKVAMARRLAIRLYWMWRKGWNYEQVVKFGSHAGQLGTGDGVH

SEQ ID NO: 188772 - protein, 369 aa, unidentified
MASRKALTIGIDLGDKVSQYCVLDEEGTEVVWGSVKTTPQAFGKEFGEMARCRMAIEVGSHSRWVNELLTKLKHEVLVAEARRIPLISSSDNKSDAVDAEMLARLARLDPKLLHPIRHRGREAQKDLTMIRARAALVEARTKLINCVRGLVKPTGTRLGKASSEAFPQRATAGLPESLRVALTEMLEVIERMNEAVAAYDEQIEKLARKQYPETARLEQVNGVGALTALTYVLTVDDPHRFERSREVGCYFGLRPKRSQSGQSDPQLGITKAGDAYMRQLLVNCAHHILGPFGADCKLRRWGLALAQQTLERDRQKKQAGQKVKKSRAKKRAITAVARKLAVLLHRLWVSGKPYEPLRGCQQEPAAAKG

SEQ ID NO: 188773 - protein, 400 aa, unidentified
MDPQIRVGVDVGCRTHHVAIADPEGRILDEFAIPHAQEGFAKFFTRVEQRRCERGLPVAVAMEGLNGYGRPLDRMIQEKGYRLYNVNNLKLARFREIFPGAAKTDRLDTRRILELFHLKDHLSLAKDVLQEVPRVPPENERLKRLSRRRRQVVNEKVRVVNRMQADLQAVCPELLSITNNVGNLWFLRFLSSRDDLRKLARMQKKTVLKIPGIGKKYAGIIEEWQKKAQFSPEVAYVGPMIVSDARRILELLREIAALDEAMEALVGESEIAQRLLSIPGFGTTSAAELAGEIGTLGRFESEASLALYLGMCPLDRQSGQSHGTKSPRQVNWRAKAAMMTAVARHIEKVPESRAYYEKKRAEGKKHNQAVRALGRHLVRVMRSMIEQQRAYELREVSCAS

SEQ ID NO: 188774 - protein, 286 aa, unidentified
MNNTYYIGLDVHKETIAIAHACGGNREDATYHGQCGGSVPSAEKALRKLAEKLDVEFRDLKVCYEAGPTGFVLARRLIHLGLDCVLMTPSKTERKPNEKIKTDKRDACKIAKLFRNGDITIVRIPPALDEAVRDVCRARTDATDDLSRSKQRLGAFLLRNGYNYTGRSKWSAAHMRYLRELVMPHDAQNLVLEECLQAIDTGIERVARLVDKMKQLLVNWEWEPVVRALMACKGFQEVAAMTVISELGDLRRFKHPRALMAFLGLVPGEETSGSKRRQGAITKCGN

SEQ ID NO: 188775 - protein, 341 aa, unidentified
MKLTTIGIDLAKNVFQVHGADDKGRTVLKKQLKRSQVIEFFVNLVPCKIGMEACGSAHYWARKLQSLGHTVQLIAPQYVKPFVKRNKNDAADAEAICEAVMRPNMPSVPIKNASQQAILSVHRARQGFVKARTAQANQIRGLVAEYGIIIPQGIGHISKRVPELLEDGENELPGSFRLLIQRLVDHLKELDRQVGELEVEIQLWHRENDASKKLAKIPGIGPMTASALVASIGDARNFKNGRQLAAWLGIVPRQHSTGGKSTLLGISKRGDTYLRTLLIHGGRSVVRVAENKANPSPWLKQLLQRRNKNIAAVAVANKNARTIWALLAQDREYESEYGMAA

SEQ ID NO: 188776 - protein, 386 aa, unidentified
MTHSTNFLLHSVDYDQTLVLAIELSNKSWVLAAQVPGFPQTKAKRTIKPDKNALLAAIDGYRTRAADAGHSVKRTIVTYEAGWCGFWLARLLKAHDIEVHVVQPSSVPVDRRMRRAKSDGIDAELLLRTLLAWLRGEPRVCSMVPVPDEADEDARRCVRERSELVAERVGLVNRIGAVLATLGASDYNPLLQSRRRRLADLRTGLGDPIPPNALAKIERLLTRLELVLAQITELELDRDAVVETDAPDQAGKMIQQLTRLRGIGVQSATVLVREAFVRHFANGKALGSYAGLSPTPYSSGGIDREQGIGKAGNRRLRTVMVELAWLWQRYQPGSAQVIWFRERVGATGRRVRKVMVVALARKLLIALWRFVIDGVMPEGVIMKPSI

SEQ ID NO: 188777 - protein, 315 aa, unidentified
MTHSTAPNAGVDISKDHLDACLHPAGETRRFTNDAKGRRALIAWLIPHQVVRVVYEATGAYHRALERALAAADLPAAKINPRQVRRFAEVLGCLAKIDRCDAALLARFGALIEPSARPVPSPTLDVMRELHTARCALVKDRTAALNRQKMVRSPLLQRQNAQRLRQITAQLAAIEAELVALCAADPDLKERLSILESIPGIGQASALALLIEMPELGSLGQPQAASLAGLAPMARDSGQVKGRRFIRGGRAGLRQALYMPALVAARFNPDLKAKYQALTQAGKPPKLAITAVMRKLLLLANALLRDRRTWTPRLA

SEQ ID NO: 188778 - protein, 406 aa, unidentified
MEVIYPRCAGLDVHKQTVVACVRIVDNAPPRQEVRTFATTTSGLLALADWLDSLGITVVAMEATGVYWKPVWHVLEGHFELVLANAGHVKNVPGRKTDVNDAMWLADLLAHGLIRASFVPPVAVQELRTLTRTRKQFVRERAAHVQRIEKVLEDANLKLSVVLSDILGKSGRAVLQAIIDGQNDPERLLSCIGRVKASRAALLEALRGRISAHHRFMLKLHLGHIDALDKAIADIEKEVGLGLEPFRKAAKLLSTMPGLSEVSANVVVAEIGIDMSRFTTPGHLLSWACMCPRNDESAGKRRSTRLRRGGKWLKTTLVQAAWAAVKVKGGYLQAQFHRLRARRGTKKAIIAVAASMLTAAWHMLRDGTEWHDLGAAHFDRADAHKTAARLIRRLQQIGYTVHATPA

SEQ ID NO: 188779 - protein, 426 aa, unidentified
MKRTQNEKISQIKISTLVVGIDIGKETHYARAFDYRGIELAKLLIFRNTAEGFEALDRWMQDICKQQEKTEVIAGFEPTGHYWFTLGDHLKRQGHKLAIVNPFHVKRTKELDDNSPTKNDRKDPKTIAMLVKDGRYRDVYIPEDIYQELREAVAERERLQGRLIAIHNRVVSWLDIRFPEFTGVFKKWTGKTALLTLRNFPTPAKVLEAGEEKIMSTWRTEVKRSVGKKRAQALVKAASRSIGRATGQIASEVSLQNLLAEYELYHAQHERLEQLIRELLLQVPNAAKLLGIKGVGLITAATFVGEIGDIHRFRHPRQIQKLAGCNLVENSSGKHRGKTTISRRGRKRLRHGLFMTMISILGKNQEFRELHHRNLTREKNPLNKMQSIIALCGKLIRVFYAILKNGVDYNPEKMMGDIQQSMKAAA

SEQ ID NO: 188780 - protein, 361 aa, unidentified
MGHRVLSSQSPNRCPFLPEPEPLPGALQPVSCQAGPLGGCLSSQVFVGIDVAKAQLDMALRPTGERWAVTNDDAGIAALVTRLQEITPQLIGLEATGSYQRAVVAALAAADLPLVVVNPRQARDFATATGPLAKTDVLAARPLAHVAEAVRPARRPLPGAQAEELRALLARRRPLIARRTAAQNRLGSAPCRLQADIQAHITWLHRRLAALDDDLDTRLRASPVWREREELRRSVPGMGPVCARTLVLDLPELGTLSRQRIAALVGVAPWQRDSGTLRGTRTVWGGRAHVRATLYLSTLVAVRYHPRLRAFYERLRAAGKAAKVALTACMRKLLTILNAMVKHHTPWQSQEVSIASHTRTP

SEQ ID NO: 188781 - protein, 352 aa, unidentified
MPIQSNELDFSGQNFYCGIDIHKKSWSVTIETDDMPLKTFNQEADLRQLVKFLRRSYPGGKYIIGYESGYFGFNLYRYLLNQKIDCKVIHPADIPTTHKEKDQKRDPLDSRKIARVLRTGEVDSIWVPPSNLEQDRQLLRLRRTLAKDITRVKNRIKSLLQIHGIKYPGTFEKNGSHWSKRFIAWLEDIQLSEETGTEALQVAVRYLNYLREEQLTVSQKIKSLALTERYNTAYTELIKLPGIGVLIAMIILTEIGQISRFKNVNNFRSFIGLIPRSHSSGEKDYQGRITNRSNTHLRALIIEATWSAIKKDPYYLNVYYNYKNRMQHNKALIRTARKLANNIYYTLKQVDY

SEQ ID NO: 188782 - protein, 390 aa, unidentified
MFYAGIDVAMDKHDCVVLDSDGDVVVEVFTFENSRDGFKTLKRVLQSCSKNPKKIKVGLEATGHYSDNLLAFLNKIGYDPILFNPLHTNLFRKGLSLRKTKTDHVDAHTIATMLRTEDLKSYSQPSYHLNELKSLTRYRSNLVSDCSRCKVSLARLCQILFPELKAIVPTLHMSSVYTLLSELPSADKIAKCNLTHLTALLSSASKGHYGRDKAVEIRELARTSIGIKSVVKELELQQTIDRIQVYLQQIEAVEEEINKIMEEMDSPITSIPGIANRMAAVILAETNNFQDFDRAEQVLAFAGLEPSVYQSGQHTSSHSKMVKRGSKYLRYAIFNATKYVCNWDPTFHAYLAKKRAEGKPYNVAVSHAAKKLTRVMFHLVKTNKEFVPQE

SEQ ID NO: 188783 - protein, 314 aa, unidentified
MADEKWNVGIDVSKAGLDVAWLPSGEYWQFENTSRGIAKLTRQLRPLVLDRIVVEATGGYEAALVEALAEAGLPVCRVKPARVRRFAQGMNWLAKTDKIDAKVLARFGEKAQPRLLELPTEAEKRLAALVKRRQQVLEMLTAEQNRLELADQQVLASLTDTIQFLQKQVAELDAQIQDQIDQDPGLKKKQELLQSVPGVGKVLSATLISHMPELGACDRKEIAALGGLAPYSRDSGRYRGRRMIQGGRPFVRRVLYMATVAAIRFNPIIQAMYGRLIEVGKRVKVALVACMRKLLTILNAILRDQTAWKPAFSA

SEQ ID NO: 188784 - protein, 466 aa, unidentified
MENNYILYVGMDASKGKADAAILKVCDRRSVKPKFLRKKLSFKFVKSEVTSFLDTVRSYSDDNCTSICFALEVTGIYSTNVYNFIKANLNDNESIRFLNTDFVNQWRKAHNIAKSDPLDAQTISTIIGTDADVQYVNDNVFENKNGYQDLKALIHRHYQIKKIYSQEINRLIAQCDCLFPELQYVFEPKSAAFIAVLSSYPTTHDIINASKFEVFNVVYEATKHRCSMDKIDKLFDLCRDTLVPDDISSYGRNIILDLVENIKNIKGQLKAIQRYIEDVVSLNPAYKLLLTMTGCGPITAATVIAETGDISRFKNADCFVSYSGSSPRNKRSGTSVETMGKISKKGSRYLRHAIYMIAEFARRHNPVLRHQFERIKNGNKKRHKLANIAIANKIARYIYSIMKNKSSFVILHEHIMRLPEETRDTFFNSISLDFPKNTRKQIYQYSDINGEVHKFVYIKSEDTMIV

SEQ ID NO: 188785 - protein, 403 aa, unidentified
MKHVIAFDVSMGKSYMVIYNSAQKCEYEGDILHTRPSFNWLKDKVEEIIQVDGEQSSIVFESTGVYSRPLERFFRESSLPYCLLNPLEAKKQCDSLRIHKTDRSDAHRLALTHFKENRRVETPSDDVHQQLKSLSRLYDELDKELSMTRNRLHKVLQLTFPELDTLFSSKSELFLQIVQLFPHPDLVLAHSKTVIKNKIIHRTRKRLSKLQAEQKAIELLEAARNSYPAVHSMDVVCDQVRLYAQRYLDINEQKEDCITKMMVFAQELEEYPILLSIPGIGPNTAVRLIAEIGNIHRFTTHKQLNAYAGIDIRRFQSGKTFYRDKINKRGNKHLRKLLYLIIQNMIKQRRFGHNHIVNYYDKLKMQPYNKCHKVASIACVNKLLKNIFFLITHHVTYDFRLAA

SEQ ID NO: 188786 - protein, 469 aa, unidentified
MEVRLGIDVACRSDHQASLADQRGEFLWSAWRFRTTTVDLERLWAKIPAGMDVVVVLEPTRNAWVPLAAWLRARGARVVLVPPEQAADLRDYYNKHAKTDRLDSRILARLPMLHPEGLREIDGLGPAEPLRRAVRRRSGLVERRTSAALRLDALVELLGPSWADVLGTGDYTKTALAVLERWADPRALKRAGRKRLSVVLIKVSRGNWREPKADELLTAADETLALWAAGGLDFAELADDIAAEVRIIKALNAEIAAVEERIEALYEGADPHGIVLSAPGIGVTLAAGILGRTGDLRRYANLAGLRAFTGLVPRIDQSGLADHHRGPTKAGDPGLRQALFLAADLARKVDPTLAARYKRLVVECGKHHNSALCSIAPVLITRIAACWRNGQHYILRDVDGTPITEDQGRAICADRYKISPHERTARRTQRTAQKLKQGTSRSKKESTMKAAPAPGPSTKKPSQKTARVA

SEQ ID NO: 188787 - protein, 341 aa, unidentified
MNGSKTVVGVDIAKRVFQLHWIDMETGEIVSLQLKREKFLEHFANRQPCLIGMEACGGAQHWARKLTALGHQVKLLPGKAVKPFVTGNKNDRQDARAIWTAVQQPHVKAVAIKTEEQQAILALHRMRSQLVKFRTAQINGLRGLLAEYGEVMPQGKAGVRKGVAAALARLEDRLPAMVIDTLREQWARIEKLDGEIAAIEQRIQLWLKQDEACKRIAEIPGVGPLTATAAVAIMGDAKAFKSGREFAAFAGLVPRQVGTGGRIKLLGISKRGDTYLRTLLIHGARSVLTHAKDPGPWVTKLRQRRPLNVAVVALANKMARTIWAMLAHERTYQKGFVSQPA

SEQ ID NO: 188788 - protein, 342 aa, unidentified
MNVKQQIQQTFIGTDVSKLTLDVSIITVDGFQQHQQFENNLKGFKQLQTWLLSTNLFSYNNALFCMEHTGIYTRQFVQFLLMHQAKVWMESALHLKRSMGMTRGKNDKIDSYRIARYAMTNADNVKLVALSSKTLLLIKDLMSNRDRINKSYQSIKVSIREMERVDKATGKELVKLNKAAINGLLKSKEAIEKRMMELINQDDELKNIFELVTSIKGVGQVLATELMVYTHAFTRMNNAKQLACYCGVAPFTHTSGTSVKGRTGTSNFANMNLKSTLHMAAISSTRYVPDIKEYYERKVAEGKSKMSVINAVRNKILQRVIAVVNRGTPYVENYSEINLEYS

SEQ ID NO: 188789 - protein, 356 aa, unidentified
MSHEVKYIGMDVHKEAIVIAVLDGSGKQVMETIVETKANSILEFLYGLRGELRVTLEEGTWAAWLYDLLQPKVQEVVVCNPRRNALLKEGSKSDKVDARKLADLLRTGMLRPVYHGENGLRTLRELARSYQTINKDLTRVMNRLKAAYRSWGIPCGGTQVYAQRYREEWLGKLPQAGVRRRAELLYQQLDGLQALRREVRKEFVAESRKHKATKLLRKIPCIGPIRAGLLIALMQTPYRFRSKRQLWTYSGLGVETHDSAQYRFVRGQLQRSKKPQQLRGLNRNHNHAMKDIFKGAANRASCSTGPLHDFYAALLAKGMKPEMARLTLARKIAAITLTLWKKGERFDGEQLKTQAA

SEQ ID NO: 188790 - protein, 391 aa, unidentified
MIYVGIDVAKDKHDCFISNSDGEVLFKAFTIPNNLDGFNNLYQKIESVMEDISKVKVGLEATGHYNYNLLGYLIDKGLPTYVINPLHTNLYRKSLSLRQTKTDKVDARTIASMLMSDVNLKSYSDTSYHNEELKSLTRYRFGKVQERAKLKTSVSRLICILFPELEKLVPTLHISSVYAMLSEFPGAKHVANAHLTRLSNLLSEASKGRYDKETAITFREAARTSIGSNMPAKSLELKHTIKLIQELTSEIDEIENEIKIIMDKINSPILSIPGISYRMGAMIIAEIDDFSRFDSPDKILAYAGFSPSTYQSGQLDGAYAHMEKRGSRYLRYALYNATKYVCHWDPTFATYLAKKQAEGKHYNVAISHAAKKLVRVIYHLEKTKQQYIKAA

SEQ ID NO: 188791 - protein, 365 aa, unidentified
MDAAYHGVMCARMEFGFELQTEGASTMDITTIGFDLAKTVFQVHGADGEGRPVLRRKLRRGKVLAFFAGLPSCLVGMEACASAHYWARELQALGHEVRLIPPQYVRPFVKTNKNDAADAEAICEAVTRPTMRFAPAKSAEQQSVLMLHRARELLVRQRTMVINALRGHCAELGLIVAQGASKVEELIAIIEDPGDVRLPPLAREALGSLVEQLRSAQARIKQLEATLLAWHRSNRASRRLATIPGVGVITATALVATIGDGAQFRSGRQLSAWLGLVPRQHSSGGKDRLGRISKRGDGYIRRLLVHGARTVLRWRRAKPGTRPGWTDRLLARRPTNVVLVAMANKTARVAWALLRYERIYQPTPA

SEQ ID NO: 188792 - protein, 436 aa, unidentified
MVMTLGIDVACRAAHQASLADEAGRFAWSGRRFRTTPEDLAQLWARIPAGASVQVVMEPTRNAWVPLAAWFRRHGAAVIMVPPEQSADLRDYYSKHVKSDRIDSRMLAQLPLLHPGGLRPAGHQGPADALRRASKLRASLVKRRTMIIARLDAYLELLGPAWHAAFGGDLALLTPLRLLAGGYGDPHALRRLGQARLARLIWRHSHGAWGQPHAQKILAAAAATLQLWDGELSYPDLAEDIATEARLALALTAEIRDLDTKLAALLHQADPAGILTSVPGVGIINAAQILARLGDPARFASLAGARAFTGLVPSLTASGTSGRHGPPTKKGDAPLREALFIAADQARRADPTLAARYHRLMVTTGKHHNSALCHIATTLLTRIIACWRAGTPYQIRDTDGTALTAAQGRTIITNRYHVPADLRAQRRTSHTPRAGQ

SEQ ID NO: 188793 - protein, 312 aa, unidentified
MIPYPDYVGVDVSKKRLDLCMGTCVVHLPNTPAGMVRLVRTLAGLAHPHLVCEATGTYTRLMARVLGQQNIPISRINPRRVRDLARADGRLAKTDAIDAALILRFARLMQPEADAPYDPRAIEMADLVRRRRQMVDMLAMEKQRREHPEAERVQAGIDAHIGFLSNQIAEIDQAIAHQISGDATLARRADLLVTIPGIGKTTAAILIAEMPELGSIGNKQAAALAGVAPFHRDSGAMRGQAHIAGGRLSVRCALYMATLSAIRANPPVRDFYKRLRDQGKPAKLAIVAAMRKLITTANAVLANDTPWQNKST

SEQ ID NO: 188794 - protein, 346 aa, unidentified
MMLIGCDFHPSWQQISWFDEATGEIGEQKLVHASGDAEKFYRQLPAAVLIGMESTGNCQWFVEMVTAAGHQVWIGDAAKIRACDVRQQKHDKRDAELLLKLLMEKRFPRIWTPSSQQRDLRQLLIHRYKLVRLRAQAKNGLQHLAMNQGVQKKRRLWSKAGQKLLLELPLKPWASRRREDLLSVITMLDQQIQSLDLAVTEAAEKDPNARLLMTQPGVGPVTSLAFVLTIGDVSRFPRGKEVASYLGLIPREYSSGGHWRYGSISKQGNRFLRMLLVEAAQCAVRCDPQMRSEYLHRCHQKPKGVAKVAAARKLAVRLYWMLRTQKAYPAIVSIESSSRVALVGAS

SEQ ID NO: 188795 - protein, 318 aa, unidentified
MDSNNQVVLNKKYSRNKLLHALRQFEPTQVVMEACYSSHFWGREIQSLGHSVKLIPAYQVKPFVVGNKNDHNDAIAIAEASQRPKASFVSVKTVEQQDIQSLQRIRERQMKQRTATANQLRGLMAEYGVIVPAGLNQLRNSVPDILEDAQAPLTMIARGFVDRLYRELTAYDHAINELEDALKSLLKHNQDYQRLLTIPGIGPISGAALIAAIGDARYFKNGRQMAAWMGLTPKQHASGEKSRITGISKRGDRTLRRLLIHGARAVINWCEKKHDALSLWLKALSKRAHPCKVVVALANKLARIVWAVLASKQPYIAM

SEQ ID NO: 188796 - protein, 417 aa, unidentified
MKKDSNSLKQSEAQSKRRKSGVVVERKPQDVMAELVARLAEQLDVTIVPAVEETKGDRDRLRPNLDRLTVGGGLGDQWSNYCILGLGGETLAEGQFRTRKQETAEFFQGLATSRVVVEVGTHSAWVREIIAGFGHEVLVANPRLMEGSKRRRRKNDRIDAEKLARLGRIDPKSLHPIQHRSTEVREDLVVLRARDALVKSRTELINSVRGLVKSMGARVSGCSSFAFSQKAAAQIPEEVQETLQPLLRLIATLNDEIKTFDQRIEKLAADKYMHTQLLRQVSGVGPVTALAYVLTLETPKRFARSRDVGPYLGLVPKQEDSGDIQPQLGISKAGDRMLRRLLVGSAHYILGPFGPDTDLRRFGMRLCERGGKNAKKRAAVAVARKLAVLLHRLWASGEVYEPLRQSTLTKIPHDVAA

SEQ ID NO: 188797 - protein, 388 aa, unidentified
MQAAVDRPEALSAIRTDLGAIFISLELSRSSWLVTSLSPGSGEKMSKYAVRGSDVAGLLERFAQLKEKARARTGRVFSFVVIQEAGLDGFWIDRVLQNEGVESHVVDPASIATSRRRRRAKTDRIDGETLVRVLLAYKRGEPRVCAMVKAPTPEEEDNRRLCRERKVLTAERVLHVNRIKGLLFCQGISGYEPLRRDRRERLEELQTGDGRPLPQHLKAQVDREPDRLELLLKQIKTVEGERDALLAAAQTAMPAPAAMLLDIKGIGSEFAAVLWSEGLFRHFDNRRQVAAYAGLAPTPWQSGAVDREQGVSKAGNPRLRTTLIQLAWLWLRNQPQSALTIWFHERVRRNAGRLRKTTIVALARKLLVALWKYVTTGVVIEGATMKAA

SEQ ID NO: 188798 - protein, 470 aa, unidentified
MRIIGIDLALTSAHKAVVMDDRGKFLTPVFGVATLPEAMAGLLQQAREGVESSCPVAVVMEPTGLAWLPVTVYMLLHGVTVYLVNSQQVADLRRFYKKHAKSDRIDARVLAKLYVVAPEKLHALRLPAASGYALQRACKQLDWVVSEITKLTNQIIALDRMAWLSDWEDLGLGDLLSPAARWCREHYYNPSAVVQAGVERIRQDWRASNLAVLEESETWILALVERAGKVIEVYGDPCLYVDFDTLQAEVVMKQKWLGQLEADRNHLRKEVVLPLYHQLHPSGNLETLYGVGEESAAVFLRFFGDPSRFPTRRQMRGWSGMVPNSKQSADSESKGLHISQAGPDLIKKFAYLDADVARRYDPQLAAIYYDQMVKKGKHHTQAVCAVATHLLDRVLVVLAQDRPYDLRDVDGTPVTPKCARQIIAERYTVPDEVRKRNNRRTRQARSENRAEQRFVRQERKRESSPELVRG

SEQ ID NO: 188799 - protein, 342 aa, unidentified
MQIASVGIDLGKTTFHFVALDDHGKVVARSKFSRQQLLVYTANLPSLLVGIEACSGAHFIGAVLREQGHDVRLIPAQFVKPFLKSNKNDFLDAEAIAEAVARQNMRFVPIKTDDQLDLQALHRVRDRLVHRRTALINQIRGFLLERGIVFAQGPANLRRQMPLILEDAEQKITPRMRNLLARLWEEWKSLNAEVESISDEIDAIAGQDAACQRLRRIPGVGPLVATATVAAIGNGAAFRKGREFAAWLGLIPRQHSTGGKARLLGISKRGSIYLRRMFIHGARAMLLRVKYDTGRLGQWAHELELRAPRNKVVVAVANKLARIAWAVLSTGNEYRNQALAVA

SEQ ID NO: 188800 - protein, 357 aa, unidentified
MTTPQKYRSTLTLVAIDVAKVWNIVLLEEPNGKQRRFRVANTRNDHDRLVLFLRNQPGQCRVALEPTGDYHRPLAYRLLSEGFELYLVSSVAVARFREALFNSWDKNDSKDAAVILDLLKQEKLLRYYDPIVTGSHDLQEISKTYTQVTLAKTRLQHSILTHFLPLYWPEFGRYWHSSRANWFASFLLRFPVPELVRRVDRKTFIQEAGELVGRKVNKRAKLEEIYQLAHETIALPIAPESFAVQAFRLQLARYLSLNQLRSQLETWAQEVLSENKDSQLLQSIPGIGPVLALMILAEAGDLRRFGHHRQFLKFCGLDLAKSQSGAWRGKERLSKRGNARLRYAFWLAGTVAVRMRE

SEQ ID NO: 188801 - protein, 477 aa, unidentified
MRGKGKGNPALQILPMLAHETLYVGIDIGKLTHVAGFISATLLSRHQRFENCPALSFENSREGFRSLVDRISAYVPLTQVYAVLEVTGHYHRPLLQYLQELDIPVYVLHVQERPKGMVKTDKRDALGLANLLFNQLEKGIQVGDPLQAVRRLAPPTEAAAQIRGMVYHRYELIAESTQRKNKLTAICDEVFPEFTVILKNPNGSTALSIRKRFPTPAALAAASFTTLQEVRGKARMLSDAKLGELQRLAAQSIGTKDPARLRGLTFEQEQLIEELDLIHKHLEQLEGQMTQIVLASREGKILLSIPGIGPIQAAVIIAMIGTIANFERPTQLKSYFGWAPTLKQSGKTLDRAKLSPRGVRVMKQTMYLVVWQAIRLKECEWAKIYQRLVPIKCSYDERTRRYVGRGKIIGRIAGQIISVIFTLLKKDQETLSKLAPGTLPPEPVLYDPHLHRHHRAGQYQSTSSEQRPRKLIQFPAH

SEQ ID NO: 188802 - protein, 368 aa, unidentified
MDDFITASVGLDVHVDSIAIAAAAAGREPPRFVGTVAPKLPSLLKALGSVGPPAALRIVYEAGPCGYGLVRELRSRGYQCEVVAASKIPRASGERIKTDRRDALRLASLCRAGELTRVTVPDERDEALRDLSRAREDAVRARLKARQQLKGMLLRHGKRYTGKSSWTLAHERYLAEVSFAHPAQDIAFVEYRHAVREAHERVERLVESLRSQVETWRMRPVVEALMSLRGIDFVAAVTLVAELGDLRRFAHPRQLMGYLGLVPSEHTSGNTRRLGEITKTGNSHARRILIEAAWNYRFPARIGVELQRRQQTQPAVVRDIAWRAQRRLCARYRRLSARHLHLNKICVAIARELAGFIWDIARQVTPNP

SEQ ID NO: 188803 - protein, 290 aa, unidentified
MLILAIDLGKFKSVACLYSVATAEHSFRTLPTTPQAIHDLIVEVQPARVVIEVGPAAGWVQNLCTALAIPIQVANPSHEAWRWKNVKRKTDKDDSLKTARLSALGQLPTVTLPSTKVRQWRSLIAYRHKLVGRRTAIKNHLRSILDRQGRAWPAGKTGWTEEACAALAREARTAEQAGDEELWRFELHVELTALGQVQGLVDQVEARLEALAQADGRVALLRSIPGVGPRLAEVVVAVIDDPRRFQNGKQVGAYAGLVPRLFESGTMSRQGRISGGATGCCGPCWWRWRG

SEQ ID NO: 188804 - protein, 412 aa, unidentified
MDVMYSCCCGLDVHKKTVAACLITSTEGPEPVKEIRTFRTMTADLLALADWLQEKGCTHVAMESTGVYWRPVYNLLEGQFELLVVNAQHIKAVPGRKTDVKDAAWIAELLRHGLLRGSFIPSKPQRQLRELTRYRSTLVQEHARTLNRLQAVLEDANLKLASVVTDISGVSARAMLAAILAGERDVEALADLARGRLRAKRDQLKEALEGRVTAHHSFLLTEHLSMLEYLDEAVARVSAEIDQRLTADQEAIALLDTIPGVGPRAAESLIAEIGIDMSRFPSAKHLASWAGMCPGNHESGGKRLNGKTRKGSRWLRQILVEIAHVASKTKNTYLAAQYRRIAVRRGKKRALIAVGHTVLMIVYTMLTRKQPYQDLGAAYFDQRERHRVERRLVQRLERLGYEVALQPRALAS

SEQ ID NO: 188805 - protein, 461 aa, unidentified
MAESRARRPRVSRRASPTVLERINPDAAGIDCGGSMHVVAVPPDRDDHPVQSFRTFTTDLHRLADWLVACRVTTVALESTGVFWIPVYEILEARGLTVQLVNARHVRNLPGRKSDVSDAEWLRDLHSVGLVRGSFRPTADIVALRTYLRHRHTLVELSAMHVQRMQKALVQMNLQLPSVVSDITGETGLRIIRAIVAGTHDPAVLATYRNWRCRASPAEITAALTGHYRPELVFALRQNLELYDACQRQIDVCDQAIEAHGRELTAAITPPGPLPPARAARQRIEPAFEVRAVLHHLTGGVDLTQIDGIGAYTALKLIGEIGTDMRRWPTAQHFTSWLTLAPKNKVSGGRLLGSQTQPSANRAANAFRLAAAALGRTSTALGAFYRRLAARTGKPHAVTATARKLAVLVYHVLKGDFVYKDPGEHAYEAHQRARHLRQLRQRATRLGFALVDPHTGEVFAG

SEQ ID NO: 188806 - protein, 413 aa, unidentified
MRMTHEPVRVTGGVDTHMDVHVAVAVCSRSQRLLGCEEFDSTPAGYVKLLAWLLSFGPIDAVGVEGTGSYGAGLARFLTAERIAVIEVDRSDRKARRDQGKSDPVDAEAAARAVLSGRATGTPKTRDGVVETIRVLQVVYRSAISARTATINQFHAMVTAAPAELREQLRDLRRDDQLARARGFRNREHDDQVATTTRQALKALAKRVAFLTKQAEQVEAQLDVLTEQAAPALRDVHGVGTHTAAALLVTVGDNPQRIRSEAALARICGVSPIPASSGKTRRHRLNRGGNRAANHALWRIALVRRTSHPPTKAYHARRTAEGLSDREIMRCLKRYIVREIYRALTATSTLAPRGSELRQRRHDLELPLRIVAEATGTHISTLSRLERGLLHDPQLATRVHAWLHQPQEPELAA

SEQ ID NO: 188807 - protein, 388 aa, unidentified
MIYVGIDIAKLNHFASAISSDGEILIEPFQFSNDSDGFHLLLSKLDSFDKSSLIIGLESTAHYGDNLVRYLVSENYKVCVLNPIKTSVMRKNNVRKTKTDKVDTYIICKTLMMQDSLRFVSYYDLDLMDLKSLGRFRQKTIKQRSRLKIQLTAYVDEVFPELQYFFKSGLHQKSVYALLKEAPTPEAIASMHMTHLAHLLKVTSHGHFDKETAQQLRVLAQKSVGVSDSALSIQITHTIAQIELLNDQLDKVETEMTEIMKYNDSVIMTIPGIGYINGGMILGEIGDIHRFPSPNKLLAYAGLDPSVYQSGNFQAKKTRMSKRGSKVLRYALVNAAHNVVKNNSTFKAYYDAKMAEGRTHYNALGHCAGKLVRVIWKMLTDNIEFNLD

SEQ ID NO: 188808 - protein, 342 aa, unidentified
MEVAVLGIDLGKNSCSVVGLDGTGQIVMRRRMQRDSVIKLAAGMAPCVVAMEACCGAHHLGRIVRDHGHHVRLMSPEYVRPYVKAQKNDDRDAEAIAEAATRPTMRFVELKSVEQLDMQSLHRVRDRLVGERTALMNQLRAVLMERGITVPQGRRKLEQHLAVILDGEELRLSPRMISLVGDMRAEWGALDRRIEAFDDEFAAQAKTDDAARRLASIPGIGVLNATALAAAVGNAASFARGRDLAAWLGLVPRQMTTGGKPRLMGISKRGNKYLRKLLVHGARAALPSLSASTTPLGKWLWNLLQRAHKNTVIVALANKLARIVWAVLRHGGTYDAGALTAA

SEQ ID NO: 188809 - protein, 367 aa, unidentified
MTSKEYYIGMDVHKDTVQIAVFEEKGEAPIYERQMKNDTELLVKEVLRFSKIGKAEAAYEAGCLGYVIQRAMEKAGIICHVLPANKVAKKRSDRIKTDKRDARLIGRELRSGSIRPISVPDAADEAARDLLRYREDVNGDLRRAKQRLLKFLVRHGHIFTEGKKNWTQIHWRWMDKILFNHEHERTVYEEYRSQIKSLEERLDRLEKQVTETAESPRYKAAVSKLRAFKGIDYIIALSVICEIGDFRRFAGAKAFMSYLGFVPSENSSGGKRYQGGITKAGNGHLRRLLIEGAWHYAKSSRTGKRLEQRRQGCPASVVAIADRALHRLHKKYFRLVVHGGKHKNVAVTAVARELAGFIWAVQVNNVA

SEQ ID NO: 188810 - protein, 399 aa, unidentified
MIENYDSVDVFVGVDVGKGEHHAVALNRAGKVVFDKPLPNDEAKMRAVLQKLKQHGIVLVVVDQPATIGALPIAVAQAEGVLVGYLPGLAMRRIADLHAGEAKTDARDAAIIAQAARTLPHALRSIQLADESVAELSMLCGFDDDILGQMTATSNRIRGLLTQIHPALERVVGPHLDHPAMLDLLQHYPSPAAMKSAGTSRLATRLLKLAPRLGRRLAAEITQALSEQTVVVVGTNAAATVLPRLSEQLSALRQQRAEIAIVVEKLVEDHPLSPVLTSMPGVGVRTAARLLTEVAGKHFETAGHLAAYAGLAPVTRRSGSSIRGEHPSRRGNKILKRALFLSAFAALRDPTSRTYYDRKIAQGKRHNQALIALARRRCDVLFAMLRDGTLYQTDHTLAA

SEQ ID NO: 188811 - protein, 355 aa, unidentified
MNSEKYIGLDVHQATISVAVLDSTGKLVMESILETKAATLLEFFAGLRGTLSVTFEEGTWAAWLYDLLKPQVAKLVVCNPRKNALLKDGNKSDRIDAHKLAELLYLNKLSSVYHGETGVRMLRELARSYLTIVKDLSRVMNRLKAVYRSWAIPCAGRDVYYTRHRAEWLGKIKEAGVRRRAERLYQQLDMLQYLRQQARRELLAESRKHAITVKLRQIPSLGPIRSALAVALIQTPHRFRTKRQLWAYSGLALETRTSAEYCYVKGGLRRSKKQISIRGLNKDHNHDLKGLFKGAATRASVLPGPFQDFYQRSLAKGIKPTMARLTLARKIAAITLTLWKKGENFDADKLKSQAA

SEQ ID NO: 188812 - protein, 315 aa, unidentified
MKEFPLFVGIDVSKDHLDVAVRPTGEAWQVSYDSQGISDLVGRLRELAPQLVVLEATGGMELAVAGELAAANLPVVVANPRHVRDFARASGKLAKTDSLDAQVLAHFAEALQPEPRALPDADTQELGALVARRRQLVEMITAEKNRIRTATRRIRPKVQQHIRWLEENLEDLDQDLGDFIRSSPMWKDKEQLLRSTPGVGPVLSMTLLSDLPELGNLNRGEIAALVGVAPFNRDSGNFRGKRKVWGGRSQVRAALYMAALVATRYNPVLRAFYQRLCAAGKPKKVAITACMRKLLTILNVMVRDNCHWNPIVQNS

SEQ ID NO: 188813 - protein, 334 aa, unidentified
MKYIGMDAHSSICVFCVMDEKGVEVDEATIETNGRLLVEYVRSIEGKKKLVFEESELSQWLYELLHDEVDELIVCNPVANREYKKAKSDKLDARRLAKLLRGGFLTPVYHSGSARERFRSLMSGYQSLVEEATRLKNRYKSLFRKEGNNVKGKALYNDESLLEGFERSDFKFVGARTFELLQQMEKQRQEYVKEIKRVSKGFKEVRWLKTIPGIADIQASKIVAQVIDPHRFPHKYKYYSYCGLARHGRSSAGKPCGSVKGHGNQVLKCVYKMAAHSALRGDNGLRRYHDRLCAKGVNEGDAYNAVCRKIAAISLSLWKHERRYDDQLIDNPLK

SEQ ID NO: 188814 - protein, 452 aa, unidentified
MPPRLERKGPWSTTTHILQPNAAGVDIGATEIYIAVPPDRDSKPVRSFRTFTAELKAAAEWLKQCRIESVAMESTGVYWVPFFQILEAAGFKVFLVNARHVKNVPGRKSDVADCQWLQYLHSVGLLRASFRPQQAVCAVRSILRHRESLVQIGTIHVQHMQKALDQMNLQLHHVISDITGVSGIAIIKAILNGERDPVVLSQMCDKRVKASRQTIAAALVGDYRREHLFTLQQSLHAYRQCQDLIGACDREIEQHLAAFDSKVDLHATPLPKPKDRHKPRRNQMKFDLRAHMYRVYGVDLTAVPGIDALTAHVLFAEIGPDLSQFANAAAFVSWLGLCPDNRISGGKLLSVKTRVVRSRVAKALRMAAQSLHRSQSYLGSYYRRMRTRLGTPKAITAAAHKLARVIHHLLTTRQSYEESVFARCEALHQQRLENRIRRQARDLGFDLVRPAT

SEQ ID NO: 188815 - protein, 347 aa, unidentified
MDHYAGIDVSLECSSVCVVDASGKIVREGKVATEPEALIAWLGSLGFGLLRVGLEAGPFSQWLYAAMQKTGLAVELLETRHVRAAFEAMPVKTDRNDARGIAQLMRLGWFRPVHCKSLPAQEVRALLTARKLVQSKLFDVEMSLRGILRGFGLKVGRTTPKRFAGRIRELVAGHATLEVVAVSLLAVHEVMRREFGSLEKRVRSMAREDARARLLMSAPGVGAIVALTYVSAVDNPRRFTSSKGIGAHFGLTPKRYQSGERDVTGRISKIGDASVRAALYEAAHVILTRPVRGSALKSWAAKLVKRAGMKKAKVALARKLAVILHRMWVDGREFIFTTPRNAAAAAA

SEQ ID NO: 188816 - protein, 309 aa, unidentified
MFTCAGIDVSKDTLQIELDPQGMGAVFPNDINDFSRMVEWLKRHQVNRALLEATGGYERRAMKALQAAGFEVLRVNPCRAKSFARAMGLHAKTDPIDARLLAQFAAVIQSPESRITNAEQDNLRALVQQRENFVQQRDDDKRRLKTTFSEIVKPALQSHIDYLRKAIKSIEKLMGQSAEQLDSEKVAHLCSVKGIGLVTAASLMSYLPELGEVGRHEIAALAGVAPYNDDSGKHKGKRHISGGRFAVRRSLYMASWIVIRYQPEFNARYKALRDKGKCAKVALIACMRVLLIRLNAMIRDGSEWKEHVA

SEQ ID NO: 188817 - protein, 418 aa, unidentified
MSDSKRWYAGVDWGSQSHCVFLADDQGRKIGQKFFKHSGEGLAEMAAWLLKTSGADGPGQVFVAIEVPHGPVVESLIERGFVVHAINPKQMDRFRDRFSMAGAKDDSRDAEVMASALRTDLRCFRKLSSADPVLVELREWSRIAEELGVERNRLANRLREQLWRYFPALLELEEDCSAEWLLEFLVLAPTPAKAARLREAKIAELLKQRRIRRFDAATILKAVRAPPPKLAPGAVEAASAHVATTIPRLRLVNRQIREAEGKIGALIDSLTAGRDSQETEPGQEKQHDAAILASLPGVGRTVLATLLAEAWEPLQRRDYAALRSLAGVAPVTKRSGKSCIVVRRQACHDRLANALYHWARVAVQHDPRSRAKYAELRKRGCTHGRALRSVADRNLSVACAMLKSGTTFNSSLATQKTA

SEQ ID NO: 188818 - protein, 420 aa, unidentified
MKSFVPVAGVDVSKRFSDLCVLSPDNNVLLRQKIYHDMVSMKLAEKKLHEIELECGARPVVVMESTSHYHLILFQFFTDAGFEVVVVNPIQSGALKNINVRKVKNDRVDAYRIAMLYRLKVLRPSQIPTSSLRGLRLLTRQRSELKGDVARFKNRMTAYLDQIFPGYGEVFSDVGGSASRAVLHMCPTPEKLLNADGSLLAKAICEAGNKGPKFGAEKAAKLREAAGSAQVIGVRSASNASLIKNVLDIIEGLLAAIQRIEREIKELVTQDTRLDEDVKLLCSIPGIGFSSAVVIAAEMGNISLFRKPKQLAAYLGLDPGERQSGTFKGRKNKLSKRGSPQVRAALHMAAVSSVSRNRDGTYRNPVLAEYYERKCAEKPCKVARVAIMRKLSNIIYAVLRDHKPFELRTPQEHMALLAAA

SEQ ID NO: 188819 - protein, 370 aa, unidentified
MHGPYTQIVAIDLGKFNSVVCLFDPANGTHRFQSLATTPTSIHDLLASLIRTPADAASVLVVFETCEVCGWVHDVATALGFPVAVANPCHEAWRWTKVKRKTDKDDALKLARMAHLGELPTVYMPPPAMRQRRRLVHHRHALVHRRTAVKNQVRSIFAQQGLPLPARGKAWTKAGVAQLTAESRPLGDCGELDLWRGRLSVELALLASLDKQLAIVESKLEAIGLADDRVTLLTTVPGVGRCLAEAVVCHLDDVSRFPSAAEVAGYAGLVPRQMESGQMKRSGRITRHGPSLLRGMLVEVAWMVYRHNAWARDFVTRVSRGVKGRKKIAIVALARKLLVILWSMLKHKQSWREPVGAETTTPATAALAPA

SEQ ID NO: 188820 - protein, 412 aa, unidentified
MEVLHSRCCGIDIHKRSITVCVLIREAGRKEQEHLREFGTTTSAILNCADWLRSLGVSHVAMESTGVYWRPVWNLLEGQFDLLLANATHMRNVPGRKTDIKDSEWIAQLLQHGLLKPSFVPNTVLRDLRELSRDRTSLVAERSRLKNRIQKILEEANIKLGSVASDVLGKSGRAMLTAMVEGQENPQHLADLALGQLRLKIPQLVEALRGRVRGVHRFRLKQQLERVDFIDAQIAQLEAEIEKQNAPFDEAVSLLAEIPGFDRTTAWSVIAEIGIDMNQFPSADHLASWAGVCPGNNESGGKRLSGKTRKGSRWLRQKLCQSAWCASRCKNSYFTAFFQRIAAHRGRKRAIVAVSHSLLVVCYYLLKRRCHFQDLGVNYFDQLNQEKLTRYFVKRLTRLGHRVILEPCSAAA

SEQ ID NO: 188821 - protein, 410 aa, unidentified
MEVVYERCCGLDIHKQTVLACVVVPGAGKQPHKEVRTFKTMTADLLELADWLTSEGVTHVALESTGVYWKPAWNVLEASFTLLLVNARHIKQVPGRKTDVRDCEWIADLLRHGLLRASFVPDRAQRELREITRYRTSLVREGSAERNRIQKTLEGAGIKLGDVASDIFGASGTRILEALVGGTTEPALLADLAKGQLRTKVAQLERALTGQFGPHQRFLLAQQLAHLDSLDQLIDSLSTEIAARLQPVQDKLDRLDAMTGIGRRTAEIFLAEIGPDVDRFPSAAHLASWAGICPGNNESAGKRKTGKITKGDVWLRAALAEAAHAVSHTKNTYLASQYHRLAARRGKKRAIIAVAHSILRIVYHLLGHDCAYVDLGSRYLEERDRQQIERSLVRRLEKLGHKVTLEPSAA

SEQ ID NO: 188822 - protein, 379 aa, unidentified
MFIVGIDIAKRSHEAIIIAEDGQVVRKAFSFRNNCTGYNLLLEQVRRLTLVKSQIVFAMESTAHYWLALYARLLKDGYTVMVLNPIQSHSLRELYIRKTKTDARDSLIIADFVRFGRCKASNVPQDKILALRELCRSRAYLVDMAADLKRKLIALLDRIFPEYESLFDSVFSKASIAVLSKYSTPQKVKNANLRKLTDLLMESSNGHFGEWKAHQLKEAACSSFGIDDSGGVYSTLLGMFLEQILSLTAQADSLEKQISVFFQEFNNPLTSIPGVGTVLAATILSEIGDITRFSSADKLLAYAGLDPSVKQSGEFKSNQNRMSKRGSPYLRRAIWLASTVAAHRDPMFQTYYEKKISEGLHYMNVIGHVSRKMTAVPHL

SEQ ID NO: 188823 - protein, 342 aa, unidentified
MSEAYEGKQIVGVDLHRRRSVVVRMTEAGERLETVRISNDAEYLRQVMARAGEAPEVVLEATYGWYWAADTLAELGATVHLAHPLGVKAFSYRRVKNDERDAADLADLLRMGRLPEAWIAPPATRELRQLVRHRAKLVALRSSVKCQVHAVLAGAGVGVPMSDLFGVGGQQLLKRVELPPACRARIGSAIRVLESLNFEVEVFTNLVTGRLRGQRGYTAIQAIPGVGAILGAVFVAEIGDVYRFPGPGQLASWAGLTPKHHESDTKVHRGRITKQGSTLVRWAAVEAVQRISNRHRLGQFRDQVGARRGRNIGVVAAARELITLVFYGLRDGHIRCLHPASA

SEQ ID NO: 188824 - protein, 455 aa, unidentified
MLNHKFDPLPRKHLEQVNLFAAGIDIGSQSHYVSVPEELGTESVREFPCFTGDLNRMADWLVEIGIQTVAMESTGIYWIPAYETLEERGLVVLLVNSRHIKNVPGRKTDVLDCQWIQQLHTYGLLEGAFRPEEETVALRSYMRQRETLTQQSSDQVRRMQKALRQMNLLLDNVVSDIDGKTGMKIIRAILEGERDPIFLAKYRDGRCKKDEKMIAASLEGHYREEHLFSLKQSVELYDIYQAKIMDCDKMIQRQLDKMDTQGDKKDLPPSKKPKSKNTPKFDVRGDLYQMTGVDLTRIDGLSENSVLKILSETGADISSWPTEKHFCSWLGLSPGNKVTGGKNLSGKTKPSANRAAAAFRLAAFGVLNSKSALGAYCRRQRTRLGAPKAITATAHKLARTFYSMLKNGTEYVDKGQDYYEKQYQERIIKNLKKRATDMGFELIAKDTSILEISKA

SEQ ID NO: 188825 - protein, 343 aa, unidentified
MEHFAGIDVSLEQSSVCVVDATGRIVREAEVASEPEALVAWFRGLGLEVARVGLEAGPLSQWLYAAMRAAGLAVELLETRHVRDAFKAMPVKTDRKDARGIAQLMRLGWFRPVHCKSVPAQATRALLTARKLLQSKHLDVEMSLRGVLRGFGLKVGPTTPRSFPGRIRELVEGHPTLVAVAGALLAARDAPGEQLRGLDKRLRDQAREDERARLLMTTPGVGVIVALTFVSAVDDPARFRSSKAVGAHFGLTPRKYQSGETDVTGRISKIGDAGARTALYEAANIILTRPVEGSALKSWAARLALRAGTREAKVALARKLAVVLHRMLADGTPFVAARAAAAA

SEQ ID NO: 188826 - protein, 348 aa, unidentified
MLADQLDYVVGVDPHRDVHALAIVEVRTGGVVFETSVAASSGGYARALQLADEHAPGRRAFAIEGTGSFGAGLTRFLSGEGERVLEVGRLRRERRSGGKSDALDAIRAARSVLGQKRAAEPRAGGEREALRALMAAREGAVNARRAGLCQLRDLLITTPEPLRSELRPLTRAQLLHRLRAMRPQRQRDVELRGALQALRTVAGRVQHLTAEERELAGEIETLTRKLAPQLLDQPGVGPLAAAQILISWSHQGRIRSEAAFARLAGCAPIPASSGQTIRYRLDRSGDRRLNRALHMILVTRRRAHPPTIAYIDRRLQEGKSGREASRCLKRYLARNLYRLLEHGAPLAT

SEQ ID NO: 188827 - protein, 342 aa, unidentified
MQVTTIGLDIAKNVFQVHGIDAAEKVVVRKQLRRSQVLEFFKALPACLVGMEACATAHYWARELTKLGHRVRLMPAKDVKAYVRRNKNDAADAAAICEAARRPTVRFVQIKSIEQQGRLMLHRARDLLMRQRTQVINAMRAHLAELGIVAAQGRDGIKELLKIIASEADARLPVDAHTSLVVLAAELQAMQTLIGSIEKRIMVQHRLSEASKRLKSIPGIGLIGATAIAATVPDPKVFGSGRDFAAWIGLVPREDSTGGKQKLGPISKRGDRYLRRILVVGACAVLRYARHKPEKYPWLTKLLERKPFKVVAVALANKMARIAWALLAKGDTYRVPALAAAA

SEQ ID NO: 188828 - protein, 409 aa, unidentified
MQVQPGALHVGVDLALEKNVVIVINEKAQRLDHFSFPQDRGGYDYFLQRMEGLRQKHQAGEIIVAMEPSNYFWKLLAKELEEKKIPYHLVNAYTVKKHREGNQLDRSKDDRRDAGQIAELSRNGHYTETRLQKGAYEELRQYATLYDQLIQSLRREKNVLWGLVGQVFPELHQVFKDLTGETCQAFLGSFAAAASLRQLNIDDFITHVRKAFTGKKLCVSKLRQVYQLATNSIGVAEGLQTIQLATQVHLAELDTLQEQLKRVIPAMTTSLAPMPETPYLLSMKSLCTVSAAIFLAEVGDPNRYHTAAQWVKLAGIQPTPNSSGKKQRSQTPMSRQGRSRLRTMLYFTCLQLVHQDDHFAQLYSHLQRTSDNPLTKMQALGVLMNKLLHILWALIHNQTFYNPSLGQSI

SEQ ID NO: 188829 - protein, 308 aa, unidentified
MIAQNYVGCDISKQWLDFFDETSGRLRRIDNQADAIAAYVAGLDPSRDFVVMEATGVHDRLLRHALAKAGVPFSRHNPAHTHHYSKSTRRRAKTDPLDARMLSDYGRRYNPEAEPAPSEEVERLQSLAGHRDHLVEMRAALKKHLAEAFDEAVIADLEETIAYFDTRIKALESRIAEVIRQNQDTARDHALMVSVPGVSKVGALSLLALLPELGQRSPKAIAALAGLAPFDNKSGKLNRRSHIQGGRSRVRRALYMAALTAVRTCERFKTFYTALAARSGSKKLAIIAVARKLLVVLNAIMRDKIAFA

SEQ ID NO: 188830 - protein, 413 aa, unidentified
MTEPFRFYIGVDLGTQQHRLRLLDQEGNPVAALTMDHSGHGLTDLLKWLAQTQAIPVSTAVALEAPRGPIVDLLLEHGYAVYSINPKQLDRFRDRFSVAGAKDDDRDALALASSLRTDRHCFRRLQPDPPAQLRLRELVRAQASYQQDLRRATNQLWSLLQRYFPGSLALCPAADEVWLWKLLHRVQALPERAAKLRLRSLETLLRQHRIRRFSAQQLAQHLSQPLFLAPGVATALAEPVLRLLPRLTLLHLQSADIEHRIQDQLEKMSLPSSGSDYRTLQILSSVPGLGRMGTATLICEAAPLLRERDLQRLRTWCGVAPVTLQSGKTRGVSFRRACNPRLRNILFHCANVHMQQDPRAEQLYSQHRHRGQSHARALRSVGDRLLQLICTLLRTGKDYDPQRRTCPSGAASH

SEQ ID NO: 188831 - protein, 312 aa, unidentified
MTLPQNIIGVDVAKNWIDVFYLASAKAERIAMTKQALARFAKGAKGCLVVLEASGGYERPLTEALTRFKADFSRVNPRHAREYARATGKLAKTDRVDAEMLARMGRALELHPTPPTPPERVELAELVARRDDLVAMIGAERNRLGQSHNAWVRTQITSHINGMVRYRKAVEAEIAKLTTADETLAADSLRLQSMPGIGPTIAAVIQARLPELCRLDRRKLANLAGLAPHATESGQHRGKRRIWGGRADLTRAFYIAGFVASRCDPTLRAYREKLQAAGKPTKVAIIACARKLLTILAAMMRDQTDYGDKKPA

SEQ ID NO: 188832 - protein, 404 aa, unidentified
MSPKLNSKIAAIGIDLGKNSFCLVGPGSALQPRQRTKLAGTPKTKEHAMSQKLDSKIAVIGIDIGKNSFHLVGQDRRGSIVLRQKWSRGQVEARLANVPACLIGMEACTGAHHLSRKLQALGHDARLMPAKYVRPYSKGEKNDYRDAEAIAEAVQRPTMKFVATKTADQLDLQALHRVRERLVSQRTGIINQIRAFLLERGIPVRQGLQFLRAELPGILAKRTDVLSTRMLRIIEDLAGDWRRLDERIESLSAEITHIVEQDPACQRLMTVPGIGPIISSAMVAAIGTGDVFAKGRDFGAWLGLIPKQMSTGDRTILGAISRRGNRYLRKLFVQAAWVVLAKITPEGWERYGLKSWIETAKQRLHHNVLAIALANKLARIAWAVLHKGRAFECVKSNATAPRPA

SEQ ID NO: 188833 - protein, 367 aa, unidentified
MAKRSTTVGLDVHKETIDVVVAEPGAQGEVRHFGTIGGDLRAVDRMVKQLQGGGRRLQFVYEAGPCGFHLYRHLQAQGLECTVVSPSMTPKRSGDRIKTDRRDAEALARLHRAGELRGIYIPGPDDEAFRDLVRAREDAVTSQSRARHRLKALLLRHGYRYEGRAAWTFRYRQWLSNLKFPTAAQQMAFQEYIDTIGEAERRVERLTEQIRVLLPEWKRAPVAAALQALRGVSMVTAVTLVAEIGDITRFSNPRELMAYLGLVPMEYSSGPKTRRGAITKAGNGHVRRVLAEAAWAYRGQARVGQALMWRQNGLPRPIIDIAWKAQLRLTGRFRRLAARGKSLPKVATAVARELTGFVWDIARHAAA

SEQ ID NO: 188834 - protein, 383 aa, unidentified
MGAVARTQLRETPVKQNRTCVGLDVHARSVWACTVDDESGEMRTSRISPKTAEIVKWAKALPGEVEVAYEAGPTGFGLARALIAAGMQCHVLAPSKMERPSGDRVKTDKRDCEWIARLVRLGELPVVVIPSEGQEAARDLVRAREDVRGDLMRFRHRLSKLLLRQGIVYEDTAWTAAHGKWLRSQSFDKPGVQFAFDEAYDTVLTTLARRDRLDKAILTMAAEPAWAPVVARLGCLRGVGTLTGFGLAVEIGDWHRFTGNSIGSFLGMTPSEHSSGGSRSVGSITKTGNGHARRLLVESSWHHRKPYRLSAEMIRRRDGQSPLVRARADQANRRLNQRWRTFDARKKRPTVAAVGVARELAGWCWSLAVMDGEKDNSAMNRQR

SEQ ID NO: 188835 - protein, 338 aa, unidentified
MEHQQQYVGIDLHRRRSVIVRMTEDGEVLECVRIANDPVALSLEVAKAGPDPEVALEATYGWYWAADLLESDGARVHLVHPLGLHWDARRVKNDERDATELAHRLRRDDLPEAWIAPAEVRELRELIRYRAKLAALRTSAKAQIHAVMAKLGILPTLSDMFSAAGQVLLDGMPFAGPYALRVDSLRGLLERYEHELVLVERELHGRLVDHKGYTAIQALNGVGRITAAIFVAEIGDVTRFPDARHLCSWAGLTPSHRESDQKVHRGHITKQGSTLVRWAAIEAVARYHGGAPIAPAFMRIAKRRGTMIARVAAARKLLTLVFYGLRDGEIRCLVREAS

SEQ ID NO: 188836 - protein, 438 aa, unidentified
MKVMYERVAGIDVHKDMIKVAVRSPGDKPWTRKTEILTFRTFYGVLRAMARELRRRGVTHVVMEASGVYTEPVYYALCEEDFTEVAVVNPAHAKALKGHKTDAKDCARLAELSGCGLLQGSYIPAAGLKEMRDLSRYRMKTVQARTSEIQRLAKALESAGIKLGSVASEITGKGPVAMIEALISGERRGAVMADLARGRARTAGKLADLSMALEGRFTDHHALMCRLHLDRITALDAAVADLEARIAATAADWQREIGLLKTIPGFGDIVAWAWIAEIGPAPHQWFASHHKLASWVSLAPGNNVSAGKRKYGRTGDAGTYIKPMLIQAAWAATQVRGRLQARYNRLVRRMGGPKNPAAKKKAIVAIAHTLLKIAYTVLKTGTGYQEPGADFYTRRESPGHRQAWLERQIQKLHPGCTVTITISPSPDPAPEAALPPGA

SEQ ID NO: 188837 - protein, 365 aa, unidentified
MLSIGIDVSKGKSTVCGMKPGGEIVYTPFEIQHTREGMSELVSLLRGSGEEVRAVLESTGSYHCPVVAALLENGIFVSVINSLRMKRFCSQSIRKVKTDRIDAMQIALYGLAYWQELQPTRLPEDTYRELQLLARQYYQMTSMLIKAKVDFNALCDQVLPGMQELMSDHAGRHKLSDFVLRYRHTTHILEMGETRFRKDYCKWAEKKGYRNCERMAALIFATAQNGIPVLPNAPSTQIVITEAIRVLHTVEASRDAILTQMQALAKTLPEYSLVREMPCIGDTLAPRLIAEIGDVRRFHSKRALIAYAGIDAPPYQSGKFCANNRHISKRGNRYLRKTGYEVMQSYVMHKPANDPIFMFIEKKTR

SEQ ID NO: 188838 - protein, 388 aa, unidentified
MPQQRKPNDLGRSLISLAMDTTLIAVVELSLSSWLVAGIVPGVERQPLKKLKTDENALLALLNRWRDEAVRSGHKISRIAVAFEAGRDGFWLARWLKARDIEAHVIHASSIAVSREHRRAKTDRLDTELMKRAFVGWLRGERDHCKTASVPSLWEEDAKRPSRERESLVGEQSRLINRMKATLIRLGIRGFNPKLRHAEQRLETLRTPEGEPIPPNTLAELKRDMQRRRFICDQIQSIEQDRLERLERTPHTEPHAMVRLLARITGIGIETADLLVHELLLRNMRDRRAVARYGGLTGSPDRSGGTNREKGMARSGNARVRRGMIQLAWRFLLFQKNSALAQWYRRRTEHAPKARKTMIVALARKLLIALWRLVREGVVPEGVAMRPA

SEQ ID NO: 188839 - protein, 324 aa, unidentified
MIDGMLGIDVSKNTLDVSLSSCNKVRARSFPNSSDGWRHLLDWLISQKIRRVHACLESTGRYSLGVACLLYEMGHVVCIVNPAQIRDFARTKLGRNKTDRVDASRIREYCELFKPQPWAPPSEAHRRLGELQTIRAGVVAGLTEWNNRKNSGMDDATAQSLADATISHFTSQLGAVDEAIAKTIDNDSELRCKRDLLLSISGVGETLAGVVLTELPGPDVIRSGAEVVAYAGLNPRRHQSGTSIDRVTRISKIGNAVLRAALYMPAMSAMRYNPAIVALATRLKSQGRLKPMQIVVAAMRKLLVLCFGVLKTGKRFDPALAMGC

SEQ ID NO: 188840 - protein, 391 aa, unidentified
MIYIGIDVAKDKHDCFITNSDSEVLFKAFTIFNNLDGFNDLYQKIESVMDDVTKVKVGLEATGHYSYNLLGYLIDKGLPTYVINPLHTNLYRKSLSLRQTKTDKVDARTIASMLMSDVNLKSYSDTSYHNEELKSLTRYRFDKVKERAKLKTSVSRLVCILFPELEKLVPTLHMASVYALLSEFPSAKHVATAHLTRLTNLLSEASKGRYGKDTAITFRDAARASIGSNMPAKSLELKHTIKLIQELDSEIDEIENEIKIIMDEINSPILSIPGINYRMGSMIIAEIGDFNRFDSPDKILAYAGFSPSTYQSGQLDGAYAHMEKRGSRYLRYALYNATKYVCHWDPTFAAYLAKKRAEGKHYNVAISHAVKKLVRVIYHLEKTKQQYIKAA

SEQ ID NO: 188841 - protein, 315 aa, unidentified
MYYLGIDVSKKTIDCCLILDSIFYERRFDNTEDGFRRLDDWIQEYTSKAVHCCCEATGIYHEAIAAHLRQKNIVSIVNPSKIKGFREAEQTRTKTDRQDARLIAEYCRKMQPQAWQPPTEEQEYLQAITDYIARLKQQRAAEQTKQQTAPDTIRHHIQTTIDHLNRLIATVQNELKDFYRQNPIYNEKKNCLKTIDGIGESAASALLAKLTRYDFANQNQFAAYLGLDPKIKDSGTSVKGKPRISKQGQKNARKALYMPALVAYRMNAFPAFTARLKARGKPPKLIIVAIMRKMAVIAYQLYKTGKDYDRSRYRN

SEQ ID NO: 188842 - protein, 374 aa, unidentified
MYGLLPLTGDLRYKVKSIHSNQLLPGVHTMEQCNVIAIDLAKDIFQVCIMTANGKIIFNKAMNRAKLKEWLAKQKLSLVAMESCGGAHYWARFAQSLGHKVMPIPPKQVKPFRTGQKTDANDAIAIAVASRAANIKPARVLSIEQQGLQSIEKMRSLIDKQKLQLSNQVRGLLLEFGIVINKSIKSFKERIPEILENAENDLSFPMRRVLFQMWELYSRLEEDFEAINNELMQLTEQDSDCQRLMKLEGVGPITAIRLKIQLGNGEHFKSGRQVAACIGLTPKQHSSGGKVKLGSVGKNSCDKPLRSCIFLGARAVVSKLKNRPANTEKERWLKVLIERRGVNCASMALANKTARTAYALLKNNTDYKPVLIAA

SEQ ID NO: 188843 - protein, 329 aa, unidentified
MKKNWYVGIDVSKKWLDAAIFVENSDLKGFIHTQVSNDKQGYRELLRWLKEHDVDASTCTYGMEHTGFYSDGLQHFLDKKGYRYTMLEPAVIKHYPIQPREKNDRLDAAKIADYLFRFKDTIKLSRVPDKTMEKLRELHKERKFYVEDRVCYLNRKQVVGKEEAKRLDKMISMLDKQIDSIEEKIREIIQKDESLMENYLYLTSITGIGFVNAVNAIVITRNFTAFKTARDYASYLGVAPHTKTSGTTVRWKPKPRKHCDLTAKADISQAAKIAVVHDVELKRFYERKCNGKDDADTVRKAMNAVKFKLVLRMFAVVKQKHTYKQLTTI

SEQ ID NO: 188844 - protein, 347 aa, unidentified
MEHIAIDLGGKKSRICVRDDKGTILEERNHPTERLSSYLKKRPGSQVVLETCSEAFAIADQAKQLGHKVTVVPATLVKELGVGSRGVKTDKKDAQVLSQVSSRVDLPSVHIPSGQAREWKALCSSRDCLVASRTKLINHVRGWLRTQLVHVRSGGVQTFSQRVEEELLNRPDGMPMYIHRELQSIKMLNEQIAEADKELDEITAQETRCRNLMTVPGVGPVTALRFVATVDDVGRFRRAHALQSYLGLTPGENSSSMRERKTSITKAGAPEVRWLLVQAAWCAWRTRPGDPMVKWANQVASRRGIQIAIVALSRKLSGILYAILRDGSQYQSKRAADSLPLPANSPV

SEQ ID NO: 188845 - protein, 410 aa, unidentified
MDVLIPRCCGLDVHQKTVVASVRILGPTGEVTRETRTFGTTTRELEGLAAWLRPFQITHIAMEATGVLWKPVWHILEPDWELLLVNPRHLKRVPGRKTDVQDAEWIAQLLQCGLLHGSFVPPATIRELRDLTRTRTTLEDETTAVVNRIHKVLEDANIKLSTVASDIMGVSGRAMLRAIVTGETDPQRLADLARRRLRIKRPALVEALHGRVTDHHRFLLKRLLAQVMFLEEEIATFDRRIAEASRPFTPALARLDQIPGINQRTAENVIAEVGPDMTPFPAAPNLVSWAGICPGKRESAGKARRAPIRKGNRWLTRALGQAAWAARNKKQCYLAAQFRHIARQRGEKRAVIAVANSILTATYFILRDGVEYRDLGPSHFDRLAPEKVARDLVRRLEKLGHKVTLEKVAA

SEQ ID NO: 188846 - protein, 416 aa, unidentified
MPSIFGQGYDTGISVVKPSGQIADQRGLFTNGNVRMHYTACSQALSTPRERLFFVGMDVHKDTHAAVGTTALGEKLFEISLENNRADFDRLIKQSQLVASERGLGLVFGLEDSTAYGLRLAKHLFANKLLVKTVSPLYVDRERKYETHPEKNDSLDAYAAAKVLIQRIDTLPTYTITKQNELAKEIKELTLDREFLVKEQSRLKCHVHRLLHRAWNSDYQKKFKNHFSLKGLKFWLAHPLPTGEAKDDIVGTPNILKNQIKRKIKRLLAIREELKEIEIELQSLIEQTGQKITTLNGCGIALGAKVLAEVKDITNFTSPSALAKYAGLCPRERSSGKTFRHVKTKSGNRQLNTAIHRIALSQISRSGNHFAKDYFQRKISQGKTKAQALCCLKRRLVDIIYMMLKHKQAYHQPDNQ

SEQ ID NO: 188847 - protein, 339 aa, unidentified
MIAVGVDTHKERHYAAALDVLGQLLGELAFAATAAGYLELQRWAKSLSGTQQLNFGIEGAGSWGAGLCLHLQRAGHAVVEVERPRRRERRSGKSDRIDALAAAKCVLAGENVSTPRGRGILSALRALLIARRSAVAERTRLLNQLQALNTTAPILLHERIGEGTGKQLERRIASMRARANADIEERVVFGVMRDLATRSRALAADAKRYEQQLATLVRSLDATLLDEPGIGPISAAKLFACDPSRFKHEAAFARCNGTAPLPASSGKTVRHRLSRGGDRQANNAIHTIALIRAKHQPETRAYLDRRISEGKTKREAQRALKRHISRALFKRLASVNLTS

SEQ ID NO: 188848 - protein, 347 aa, unidentified
MRFYKQTHRFYCGVDLHARSMFVHVLDHEGQTLFDQDLPAGPDAFRAAVAPYRAGLVVGCECMFAWYWLADLCEDESIPFTLGHALYMKAIHGGKAKNDQIDAAKIAGLLRGGMFPMAYVYPRDMRETRDLLRRRTYFVRQRAQLIAHIQNTNSQYNLPPFDRKLSRHPDYSELAERFPHASTKLSIGADATLINHYHQTLAELETHLVRHAKVHDPATYHLLQSLPGIGKVLGLILLYEIHDIGRFPEDGNFLSYARLVRCDHESAGKKKGAGCRKIGNAHLKWAFSEAACLMLRALPAAKAWVGRQERKRGKKKALAILEAKIGRAVYQVWKKQQPFDAQKFLTH

SEQ ID NO: 188849 - protein, 359 aa, unidentified
MKENSREAEWKQRPEQTVGVDLGDRFSRYCVLDQEGEVIEEGRVKTDREAWRQHWEGEPRQRVVMETGTHSPWASRLLQELGHQVIVANARKLRAITENESKNDRRDAKTLAYLGYCQPRLLSPIQHRSVERQQDLNLLRARDTLVRARTMLINCVRGLVKSAGGRLPSCSADYFARCVPSAMPAELVMTTQPLLEQIAGLTLQIRRLDQAIEDLSQRYPEIELLRTAPGVGPVIAAAYVLTLDRADAAAHSRSVGAFLGLRPRQSQSGDSDPEHNISKTGNLYLRRLLVQAAHHILGRFGPDSALRRWGLKLAQGGKRAKKRAVVAVARKLAVILHRMWRTGQSYQPFPEQNTTVVAA

SEQ ID NO: 188850 - protein, 320 aa, unidentified
MSQKKSKSFIGIDVSKQWLEVAAHESDFKFRCPNKISCFGQLIAELLVLRPALIVLEATGGLEIPVVNALHAVALPVVVVNPRQVRDFAKALGQLAKTDRLDARVLAHFAAAIKPPLRPIKSKDEQELDALTGRRGQLVEMLSDEKNRRRSATSDRVRDKIKEHIDWLGDCIAEIDQQLKALLKTSACWQAKDKILQSVPGIGPVTSFSMVADLPELGKLDRQKISKLVGVAPLNRDSGQQRGSRHIYGGRAQLRRVLYMAALTAARHNPVIKAFYQRLIANRKSFKVAITACMRKLLSIINVMVRDSTLWKSSEVPVSA

SEQ ID NO: 188851 - protein, 341 aa, unidentified
MTLQLIGIDLAKNVFHLHGVDGSGREVFRKRVYRDELLESLRGVTPCRVVMEACGGANYWARSIESLGHKPQLIAPQYVKPFVQRNKTDWKDAEAICTAARQPHMRFVPRKSIEQQDVQNLHRVRQRLVTARTALVNEMRGLLHEYGIIIPRGRRVFTKVIPELLVAQGDALSSLTRETFYELLDEYRSLELRIDALERKMKALCAAHPICRRLMAIPGVGYITASAIVSAVGDIGVFKNGREFAAWLGLTPREHSTGGKQRLHGISKRGDVYIRTLLIHGARIALRYAHRHNDRQSRWALDLMQRKGTNRTVVAMANKNARVIWALIAKDDEYKAFPLAA

SEQ ID NO: 188852 - protein, 350 aa, unidentified
MQIIGVDLHARQQTLAMLNVETGEIVEKILPHEGDSVREFYSTLAGPTRVGIEATGSMQWFLELMEELGLDCQVGHPAKIRAAEPRKQKHDRRDAALLLQLLMENRFPSIWIPSREQRDVRSLILYRHQWVRIRTRVQNALQAIALGHGLRRGSSLWSESGQQAIASLSLTGYTAERRTALQSLYRHLEEQIEDLNRKVEEVAWQRPQARRLMTHPGVGPITALATETYLGEPQRFVDGKAVASYVGLIPSEHSSGGRQRLGRLSKQGNPLLRFLWCEAVGHAVRKDVELQRFYQHKLVQKGLGKAKVAAARKLGIRLWILLRDQIDYQEFCRRGQLRQKHGGAHAGMPA

SEQ ID NO: 188853 - protein, 371 aa, unidentified
MGKSSKSLFIGLDVHKDTIAVAYAAEDRGIEVVSLGMIGTRQYDIDKLIRKLEAKGATLLFAYEAGPCGYWLYRYLTRRGLSCAVVAPSLIPRKPGDRVKTDRRDAVTLARLLRSGDLSSIYVPTVDDEAIRDLSRAREDAVRDLKRHKVRLKAFLLRQDIRYEGRANWTAAHLRWLARVVCPTPAQQIVFQEYVHAVSEQTDRLGRLETELQTAVTTWRLYPVVAAVQALRGLNLTGAVTLIAEVGDLTRFDTPRKLMSYLGLTPSEYSSGEHRHQGGITKAGNGHARRALVEGAWAYRYPAKVSRHLQLRLENVPAEVRAIAWKAQLRLCKRYRLLSARGKHVNQVVVAIAREMAAFAWAIARTVPIAA

SEQ ID NO: 188854 - protein, 338 aa, unidentified
MKLYGGIDLHSTNSVVVLSDEQDRVVYQRRLPNDVQSILSGLQAYQESIVGLVVESTYNWYWLVDGLMEAGYRMHLANTAAIKQYEGLKYTDDNTDARWLAKLLRLGLLPEGYIYPKEQRPVRDLLRKRSQLVHQHTDNLLSVQNLMARNRGCSMSANRVKRLSFEQVHCLLEDPCLALAVNSTLAVMRSQEEMIEMLEKAAQKRVKLRPEFKPLLTVNGIGKILGLTIMLETGEIQRFKRVGNYASYCRCVGSKRLSNGKSKGKGNTKNGNKYLAWAYLEAANFAVRYSPRIKRYYQRKRARTNAIVAIKTVAHKLARACYYILRDQVEFDVERAFT

SEQ ID NO: 188855 - protein, 391 aa, unidentified
MVCVGIDVAKDKHDCCILDSDGMVRADCFTIPNNMDGFKQLLQTIRNCTKKSDKIKVGLEATGHYSYNILGFLLDNDLAVYVMNPLHTNLYRKSLSLRKTKTDRVDARTIATMLLSDVDLKSYTDTAYHNEELKSLTRYRFDKVRERAKLKQSVSRLVTILFLELEKLVPSLHGVSVYALFSEYPGAKQISEAHLTKLTNLLSIASKGHYGKEKAIQIREAAKSSIGSVMPAKSLELKHTIKLIKELTSEIDEIEDSIQQIMDELHPPILSIPGVGIQSAAMILAEIGDFSNFESPDKILAYAGCSPSTYQSGKLTNCYAHMEKRGSRYLRYALYNATKYVCHWNPVFAKYLAKKRAEGKHYNVALSHATKKLVRLIYALQKSGKAYLTAA

SEQ ID NO: 188856 - protein, 429 aa, unidentified
MYPQTIPVMGIDVSKDKSDYCILDTDNRVVRRGVVKHTLDSMNKFLNMLSVTCSELDAKPVCIMEATAHYHRILYKQLVDNGYTVMVINPIQSGSIKNVDIRNIKNDKVDAYRLAYLYRLGKLKASSIPEGVLSQLRSLSRFHMILTDDIADHIIRLRACVEQSFPGFEEVFSKLKGKTPLAVLEKYPTPAAVLSASDDELIELMSKASRKGVCYAKPRVKNLKSAAETALKIGLDRPEDEILIPALIAIIHQLQESLNKADAEIAELIKNNDHLKEQTDLLKSIPGVGDHSAAALLAEIGDISLFSNAKQLTAYFGLDPAQRQSGKFNGTRTKLSKRGSSYLRRVISMVAVKNAFKQKNGTYVNPVLAEYYKNKCEYKEKKTALCAVMRKLVHIIFAVLRDRKPFELRTPEEHERLIFEKNRMLRLSA

SEQ ID NO: 188857 - protein, 422 aa, unidentified
MSYCPVAGIDVSKRFSDMCILSPDNKIFAQEKIYHDETSINRANALLQKAERLFFSKPVIVMESTSHYHLILFQFFSEHGYDVIVVNLLQSNSMKDFSIRKRKTDRVDAFKLAMMYRTKTLRPSQIPQTATRALRQLCRHRAELLNDVSSYKNRLTALLDQTFPGYDKVFSDVGGVTSCAVLVRFPTPTILLVEEESELVEVIAAASKSGYSFAKKKAGLLISAAQKAQTLGIHSCADETLIVCTIQMLRTLSESVLQIETAIDNLLAQIKEMRNNVSLLQSIPGIGSHSAALLLGEIGDISLFKKPKQLAAYFGLDPTERQSGSFRGTKNKLSKRGSSYARAALHMGVVNSICKRGKDSAANPVLLSYYEKKCKNKPAKVAQAASMHKLVFIVFAVLRDQKPFELKTPEQHAVEQGFVKAA

SEQ ID NO: 188858 - protein, 352 aa, unidentified
MEIATVGIDLGKTVFHLVGLDAAGETVVRKRFSRAQLLRFTGNLKVGLIGREACAGSHFLGRALREQGHEVRLMPAQYVKPYVKTNKNDYIDAEAIAEAVGRARMRFVPIKSDEQLDMQSLHRARERWVRTRTALLNQIRGLLLERGITIRKGRRHAEETLPAILQDADANLTGTMRQLLARLISELEQLDVQISEIDAMIAGKADDHEACQRLLAIPGIGPITATAIVSAIGNGAEFSKGRGFSAWLGLTPAEYSTGGKQKLLGISKRGNCYLRKLLVHGARSVMQCREKQSPGLRAWLGQLVSRCHPNVATIALANKMARMAWALLAKGETYRPALLKSSLEAAAPQLVA

SEQ ID NO: 188859 - protein, 312 aa, unidentified
MKKVFIGIDIAKDKIDISILPSGECWTAGITPTALSETIDRLIALKPTNIVMEATGGYETRFAASLATAGLPVAIVNPRQIRDFARALGILAKTDAIDAQVIALFAEKVQPECRPLPTDDERTLKELIVRRHQLVDMRTSESNRRQQIVSQQVYESITTLIESINHQIDDIEREIDNRIKTSPVWRAKDKLLQSVPGIGKTTASMLIVALPELGTLNRRQIASLVGLAPMNRDSGTFRGRRMITGGRASIRAGLYMPILSAVRCNPKIKPFYGRLIAAGKLEKVALTACMRKLLTMLNAIVRENQPWHSIPA

SEQ ID NO: 188860 - protein, 338 aa, unidentified
MKLYGAIDLHSNNNVTVLIDEKDKVVYQKRLANDLPLVIEQLSPYASSMEGIVVESTYNWYWLVDGLMEKGHRVHLANTAAIQQYEGLKYTDDDSDARWLAHLFRLGVLPEGYIYPKEERAVRDLLRKRSQLVHHKTAHLLSIQNLYSRNTGASLSANRIKQLTSETVDARFTASDLALAIKANLSVMRSLETEIAVLERVVKERIKLKPAYRYLLTVSGIGQILAFTIMLETGEIRRFPKVGNFVSYCRCVKSEKLSNGKRKGSGNTKNGNKYLSWAFVEAANFAIRYEPLVARFYQRKKAKRHRVVALKAVANKLARACYYVMRDEVPFDVARAFA

SEQ ID NO: 188861 - protein, 345 aa, unidentified
MNITAVGIDLAKNVFQVHAIDARGKVVLRKQLRRAQVAGFFSNMPPCLIGMEACASAHHWGRTFERFGHTVRLMAAQFVKPYVKTNKNDVADAEAICEAVGRRSMRFVPIKSVEQQAILSVHRVRQGFVKARTAQANQIRGLLGEFGLVIPQGIYNIAKRVPELLEDASNELPVPFRHLIERLMQHLKELDRQVKEFEKEIIEWHRSSELSRKLEAIPGIGPLAASALVASIADAHSFDNGRQVSAWLGLVPRQSSSGGKPTLLGMSKRGDAYLRTLLIHGARSAILAAKNKVDNTQGWLTNLLKRRHPNIAAVALANKNVRTVWALLAHGREFQPDYVPTRMAG

SEQ ID NO: 188862 - protein, 326 aa, unidentified
MNSVRMHIGVDVGKNCLDICFPDGKKEHLKNNKPGRARIIHAAKKLDAIVCFEATGIYEEDLANECLAAGVRAARLDAWKTRQYAKSRGRIEKTDRLDCEMIRDFASSLEDGKMPFVKPRSAAHSLIKEYAKIRGNLMKARVVVSSQLEFVRDKSARKSIVAIVEKIEQEIARLEDECGKAVGEDERMSSLSRRFLEVKGVGPCLVRAIFAECPDIGSFSKKGIAKFCGKAPIASKSCTIEKQSRMRRGRQGLRQAFHMAALSASKHNHVLRETDRRLMSNGKSKMTALGAVGRHLAILLNNIAKYPDFKISHESEAGKRKLHATC

SEQ ID NO: 188863 - protein, 458 aa, unidentified
MRRKRTAGRDRQSLPMVHPHAAAIDVGATMHMAAVGPDRTDEPVRSFGTFTADLHQLADWFEVCGVTSVVMESTGVYWIPVFEILQDRGLEVFLVNARDAKQVPGRKTDVKDAQWLQRLHAYGLLRASFQPKAEIAELRAYLRQRERLLEYAASHIQHMQKALTEMNLQLHHVVSDITGATGMRIIHAILAGERDPGVLASLRDIRCHSSLETIEKALTGHYRAEHLFALEQALALYDTYQHKVAACDQRLEAVLKALSAHGPDPASVPAPRRRMSRQANEPGFDLRRALYGVLGQDLTQIHGLGPSLALKLVAECGTDLTAWPSAKHFTSWLCLAPGNKISGGKVLSSRTRRSGSRAAALLRLAAVTIGKTETALGAFYRRLSTRIGKAKAVTATARKIAVLFYNALRHGMDYADPGASYYEERYRKRVIDNLHRRAKAFGFVLQEVAVDASTGTVS

SEQ ID NO: 188864 - protein, 430 aa, unidentified
MKYNTQNAKIASITEETLVLGIDVGSATHYVRAFDWRNYEFSDKPLAFSNDEAGFLTFMAWVEDIKEKAGKTAVIPGMEPTGHYWFNLGKFLQDSGMRPVHVNPHHVKKSKEMDDNNPDKNDRKDPKTIAALVNEGRFSYPYIPTGVYAEIRSLSNLRFQTQEEITRIRNRIARWISIYFPEYKDVYGKLDAVSGMMVLKEAPLPVQIKELGAGGINQIWRDAKLRGAGMKRAKTLLSAAEHSVGSQEAPEAASMEIWNLLEDYEKYSSRMDDLMARIEEKIKEVPYVDKLLEIKGIGLKTVCGFIAEVGDLSRFDDPKQLQKLSGYAIVKNSSGKHAGESHISYRGRKRLRYVLYEAAISVIGKNGEFREIHRYYQTREKNPLKKMQSVVAIACKVLRVFYAILTKGVDYDGEKMLGDIRRPAMSVQAA

SEQ ID NO: 188865 - protein, 321 aa, unidentified
MKKSKNYVGIDISKLTFDVAIIDNKDTYKHYKFSNDHKGFESFIAVLNNKIDVCVMEASGPYYLQLATYLNQKSIGVCVINPLVIRRFCQMRMSRAKTDKKDAMMIAEYGKVENPSLWVPESNYVLELKQMQAYLEQLNKNRTGFIRQREAFSHNYNESLTVKESLNSMIKTIEQEIKGIEKNMESIIKTYHNTMFNQLQSIPGLGRKTSLFLIVLSGGFTKFENSKQLASYIGISPRIFESGTSVKGRSKICKMGMSKIRAMLYVCAWSAKKCNKSCKELYDRLVEKGKSKKLALIAVVNKMLKQVFAIATKKEFYLEIH

SEQ ID NO: 188866 - protein, 372 aa, unidentified
MGYHTEAFVGIDTSKLRNAVAIAEGGRDGEVRFLGEFPATEAAIRKLVAKLASKYRRLMFCFEAGPTGYWLYRLIKSLGHECLVVAPSLIPKKPGERVKTNRRDALSLAKLLRAGELTAVWVPDERHEAMRDLSRARQAAKKDQQGKRQQISSLMLRLGRIYPGKKTWGPAHMNWLMAQKLEHREQRTAFEELIEGMRQESERVERLEEAIREAVPEWSLAEVAAALQAMRGIDLITAVAVLAELGDLSRFRNPRELMGYLGLVPSECSTGETVKRGGITKAGNGRARRILVEAAWSYRYPARVSREKLPKVSAAPMRVREIAWKAQTRLCRRFRSFERKGKRRTVIATAIARELSAFIWAINREVMAGQQR

SEQ ID NO: 188867 - protein, 343 aa, unidentified
MKHYAAIDVSLELSSVCVVDASGKVVKESKVETHPDALVKFFKDLGLPLTLIGLEAGPLSQWLHAGLREAGFETVLMETRHVKKALSASTVKTDRRDARGMAQLLRMGWFRPVHAKSVGSQEVRALLVGRKQLQHKLTDIELSIRGILRGFGLKVGKVTKTAFAKRIRELVTGHPMLEQIAEAMLAARATLLEQFNKLHKAVLAIVRRDEVSRRFMTAPGVGAIVAITYKSALDDPSRITKSKNAGPLFGLTPKRYQSGETDVTGGISRVGDEMVRTALYEAANAVLSRRGRFSTLKRWGLEVAKRRGNKRAKVAVARRLAVILHRMWIDKTTFRWTKTEATV

SEQ ID NO: 188868 - protein, 371 aa, unidentified
MADYRKAFIGIDVAKLKNAIAVAESGREGEIRFWGEVDASDASMRRIIQRIAAKFDRVHFCYEAGPTGYGLHRLIRSLGHECLVVAPSLVPRKPGDRVKTNRRDALALARLLRAGELTAVWVPDEGHEVMRDLVRARAAAVETLRVHRQQISAFMLKHSRIYPRKKGWTMRYLRWLQEQHFDHPAHQIALQEMVEAVRVSKERVERLEKVIEEFVPTWSLAPVIRALQTLRGVDLIVAVTFATEVGDVSRFESPRQLMGYLGLVPGERSTGETIRRGAITKAGNGRVRRMLVESAWTYRHPPKVGTRKLYLMEQAPSKVREIAWKAQSRLTSRYRMLATRGKRTTVVCTAIARELTGFMWAVAREAQAIKS

SEQ ID NO: 188869 - protein, 353 aa, unidentified
MAAAEVGRAPARLIGKLTHDLKKLLKVLTKIGTAEQLHIVYEAGPTGFGLQRALKEKGYVCEIIAPSQIPRRSGDRVKTDGRDCMQLAECSRAGQLSSVWIPDPGDEAIRDLARAREDAVNSRVQARHQLKGFLLRHDIRYTGRTSWSIAYYRWLSTLNFGAGAAQTAFTEYWHAVEAADARVERLTKALEGSITGWRFEPVVCALQALRGVAAITAISLTAEIGDLTRFSHPRKLMGYLGLVPSERSSGERTSRGSITKTGNAHARRLLTEAAWNYRFKARIGREALARQEALSESIRTTAWKAQLRLTKRFAALRDRGVQINKACVAIARELAGFIWAIALQAQREKAQAA

SEQ ID NO: 188870 - protein, 442 aa, unidentified
MSTLTAPPVEPVFAAFAAIDWASKEHVVASVPAAGGRIEISKLKNTPEAVELWAASLRQRFPGAPAAVAVEQKRGAVIYMLSKYDHLVLYPVPPTMSASYRHAFFPSGAKDDNGDTLLLLDLLRQHRDRLFPLHQDTPDTRLLRFLTEDRRGLVEQKVSVVQQLTDSVAQFFPQVRAWFGPLDTPLSLALLERWPSLQQLQRSHPGTLKRFLTEHCSWDDDRMAEQILQIHAAVPATRDEVILEACHRKAAACLAQLRVLRDQIAAYDKRIAAVTADHPDAPIFSSLPGAGVALVPRLIAVFGTDREQWRDAADLQRFSGIAPVLVRSGNSSRVAIRRACPKFVRQTFHEFAGHSVRFCPWAKLLYEHHLKGDKKNHHRAVRVVAFHWIRIAYRCWVNREPYDERIFLAAQRRRNSFAGKNAADAGIAFQNHAGFQKLTAKD

SEQ ID NO: 188871 - protein, 454 aa, unidentified
MKPRRSSRRKHLTSPTLEPIQPNAAGIDVGATEIYVAVPADRDPQPVRCFLSFTDDLQALADWLQKCGIQSVAMESTGVYWISLFQILEARGIQVCLVNARHVKHVPGRKSDVMDCQWLQYLHSVGLLRASFRPEQAICTIRSLLRHRDSLVEMAAVHIQHMQKALTQMNLQLHHVISDITGVTGMAILDAIVMGQRDPQTLARLRDPRVKTPEETIVKALVGDYRREHLFALRQSMEAYRSYKKLMAGCDLEIEQYLVALDAKVDVKEKPLPAAKYPHKTRGNEFCFDLRSHLYRIFGVDLTAIPGMDAITAHTILAEIGADLSKFHSAAAFASWLGLCPDNRVSGGKVLSVKTRTVANRASAALRRAAQSLHGSKTYLGNYYRRMRTRLGAPMAITAAAHKLARIIFHLLTTRQGYDESIFAAEETRHRKRTELRLRKQAREFGLQLIPLNV

SEQ ID NO: 188872 - protein, 562 aa, unidentified
MKKMKSRSFRILMAAVISAAMLCPQVKVSAADGLVSKAATSYFPSKTVMKKTARKTEPEEWNQKEIKAYKFGTLEDALYYALTGGIKYYDQNYFKNPDLIKLTPVESGALGLAVVGDNKQEAILYDSNKKMIKKLPLSYVKAQVNAGETYYIETICNDPQVCRIVDLPVYYELETNNGNRDYRIQIGGHYMNYNTVYVGMDVHKESFTLCSCKYEDEKASHYQRTPASYKNVLRYLAFLRTIYGEDTRFVCGYEAGCLGYSLYHQLENFNVECVILAPTTMLEQRSKRRIKTDKRDAEIIARSLAQHNYSPVHIPTETDNQTKEFIRMRDDHKAELKKIKQQILSFCLRQGYQYDGSGNWTAKHVKWLRSLKPAGLYKEILDEYLLTYTILTDKLNRLDQRIEELASKEEYKESVSKLTCFLGIKTHTALSVIVEVGDFQRFVSARKFAGYLGLVPGQHSSGDDRNGLGITKAGNTHVRRLLVESAQSYTRGKIGYKSRVLRSRQAGNSPQVINYADRANERLRRRYYKMVLKDGKKYNIAKTAIARELACFIWGMMTDNIY

SEQ ID NO: 188873 - protein, 361 aa, unidentified
MPTQMNNLNFKGQNIYAGFDVHLKSWKVTILSQEMMLKSFTMPPKPEVLSDYLEKNYPGANYHSAYEAGFSGLWAHYQLLELGINNIVVNPADIPGTQKDKLQKEDKRDSRKIAYALRSGSLNPIFTPSESTLNDRSLIRSRKMIVNDLTRFKNRIKGLLHFYGIEYPEEFTSSRTHWSKRFITWLESIHMKETSGKTALQHLISEARYHKELLKTVLLDITLLSKTDKYKERVVLLRSVPGIALITAMTILTEIEDINRFPNAERFASYIGLIPMTSSSGEKQKVGEITFRAHDFLRSIIIEASWIAIGRDPALLMAYQQFSKRMESNKAIVRIAKKLANRIYTVLKYKKTYEFGKTDNL

SEQ ID NO: 188874 - protein, 398 aa, unidentified
MYYLGIDVGRHSHTAALINERGTLIRKPFRFDSVASGFAKLQEMLTEAVGGDSLTVALEASRHYWLSLYEHLHTAGYDVHVLNPLQVSAFRNQGIRGTKTDRVDALLIAQVLRFGIQLESPPPDDTLRALKQLTRYRADLTQQVVRTKNQVAALLDQVFPEYKAVFRDLFGAASLAVLAQAATPEELAAMELETLERTLRAHSAGRFGRAKAKELHQQALASFGVKMAAKAFGFQIKQIVDQIQYLQGQIKTLDEKIHELFQGLNCPLTTIPGIGETLGATIVAEVGDIQKFQHPKGGATALVAFAGIDPRLVESGMHKGKAKMSKRGSRYLRRALHMASFVGMRGDALFRQIYERQRARGKHHFIALSHVQNKLVHVIYSVLKHNRPYVPIEARAVS

SEQ ID NO: 188875 - protein, 359 aa, unidentified
MNKNSTIFIGLDLGDKFSYIAILDQDAEVIEETRLPTRKSAFKRKFSSFPPCRIAMEVGAQSRWVSHLLRELGHEVVVANARKLRAIYDNPRKGDRADAEILARLARLDPNLLSPIHHRSPQAQADLAVIRSRDALVRSRTLLINHVRGIVKSFGDRLPSCSANYFATKVAPSIPEPLQPALIPILDAIASLSQQIRGYDRQIEALCDNKYPETKLLCNVSGVGTLTALAYTLTLEDPQRFPKSRDVGPAVGLVPKRDQSGDRDPQLRITKTGNTFLRRLLVSSAQYILGPFGPDCELRRWGLQLAERGGKNAKKRAVVAVARKLAVLLHHLWKNGEVYEPFYHTQKEETGSAALPTAA

SEQ ID NO: 188876 - protein, 423 aa, unidentified
MAGVMIGIDPHKGSHTAFVIDGREKPLGQLRVRASCEQAEALLGWAGRWRQRTWAIEGARGLGQLLAQQLLAAGERVLDVPPKLTARVRLLESGQINKTDENDARAVAIAALRARELPQLTVEDQTIVMRVWARRYHDLGRLRTQAVCRLHTVLCELVPGGVRKQLRTSQAIAVVDSITAESPVAQAKLELAHDLVADLQRLDAQRREVKRRVSRAVAAAPTSITEVYGVGPIVAACVLGYVRDIRRFPSRDRFASYNGTAPIEVSSGDRKIYRLSRRGNRQLNHAIHIAAVSQISHRGSEGHAYYQRKRAKGMTGKCALRALKRKISDTLYERMLHDIRPRKDPGGHSGNDAVSSAAGSHPDGPALRTSHSRATANSKTATTNQRPLTSPPAPDKRRTSRSGTGVKLQPRPRPRRGRGQERA

SEQ ID NO: 188877 - protein, 403 aa, unidentified
MTYSAGLDWGSAAHAACVVDGQGATVAQFEVQHTAEGLQNLLRKLARLAPPGQIPIAIERPSGLVVDTLVEAGHPVVPIHPNALKACRPRYRAGGGKSDPGDAYILADVLRTDGHRFRPLRPLSDEVRALRALVRTRDDLVAERVAVANQLRALLDGFWPGAVAIFADIDSPIGLDFLESYPTPNRANNLGPKRLARFLARNGYSGRRRPTDLLQRLRSAPAGLAGPLEQEAKGHAVLDLVLVLRTIVERIRRLSSALEHAVAQLPAGRILMSFPRTGKINAAQILAELGDDPERFLTEDQLAAEAGVAPVTHASGKSRGVTFRYACNKRLRRALTTWVDNSRHASPWASSIYARARARDCDHPHAIRILARAWVRVLWRCWQTTTPYQPALHRAAKPFLHVA

SEQ ID NO: 188878 - protein, 391 aa, unidentified
MVCVGIDVAKDKHDCCILDSDGMVRADCFTIPNNMDGFKQLLQTIRNCTKKSDKIKVGLEATGHYSYNILGFLLDNGLPTYVINPLHTNLYRKSLSLRKTKTDRVDARTIATMLLSDVDLKSYTDIAYHNEELKSLTRYRFDKVQERAKLKQSVSRLATILFPELEGLVSSIHGTSIYALLSEYPGAKQISEVHLTKLTNLLTTASKGRYGKEKAIQIREEARASIGSVMPAKSLELKHTVKLIQELASEINEIEDSIQKIIDELNPPILSIPGMGVNSAAVILAEIGDFSNFSSPDKILAYAGCSPSTYQSGKLTNCYAHMEKRGSRYLRHALYNATKYVCYWNPVFAEYLAKKRAEGKHYNVALSHAMKKLVRLIYALQKSGKAYLAAA

SEQ ID NO: 188879 - protein, 386 aa, unidentified
MQYPSDTSRCLAALDQDTTLIAVIEMSLSAWLVASVVPGIERQPLKKLAADEHALLKLLHRWRREAAKAGHKITRIAVAFEAGRDGFWLARWLRAHGIEAHVIHSSSVAVPREHRRAKTDRLDTEMLKRAFLGWLRGERDHCKTVAIPTLAEEDAKRPNREREGLVGEAGRLVNRMKAVFVRLGIRGFNPKLKKAAERLDALHTPEGELIPPNTVAALRRDMERLRLVREQIRQIEAARQERLQSAPGEGAHAMVRLLASVRGIGIETADMLVQEVLSRELRDRRAAARYSGLTGSPDESGRRRREKGLAKAGNPRVRRGMIQLAWRFLMFQKNSSLAQWFHLRTQNAPRTRKTMIVALARKLLIALWRFVREGVVPEGLLLRPVS

SEQ ID NO: 188880 - protein, 569 aa, unidentified
MSTTPTSCDGQARGAKKDKSWASHSPGSNARLAHNRLLPGRRAAATSRIRLGGHSDISFAVIHKRARRSGTARPSELVNNCAASHNEIGGGPALVRSRSRAFNPVRVAARLPAEPVALAPTSNRKAPQEGHYIRTMGSRAKRRKEHKQQQKTMNESEQWQQHRAFGAVDWASEKHSIIVVDQAGKVIEDLQIEHSAIGWKKFRQKLQPYGSIPFAIETSQGAAVEQLLEAGMVVYPLNPKSAQAYRERKAPSGVKDDRLDAWSFADALRVDGQGWKALRPEEPLTKELRLLCRDEVTLIEQRTAFIQQLRHALAEYYPAVLEAFEDWTSVSAWMFLQRFPTPEALAQAGKRQWQKFLHSRRLWGSNQGPRRMEIFAHAGEFAGTPPTIKAKSLLALSLVQMLFAIEKQLAIYRQRIEELFARHPDHDLFGSLPGAGPKIGPRLLSEIGEDRQRFGGDAQALQCLGGTAPVTKRSGKYRHVHQRWACDKHLRHAIYLFAEQSVSRCVWAERYYQHHRQKDRSHANALRRLGHRWLKIIYKMWIDRTPYNAELHHRNQLRHGSWIFQFKPS

SEQ ID NO: 188881 - protein, 341 aa, unidentified
MSDYSYFGGIDLAKNHFSIHVVDSKGKVALHKSVTRSKLLTTIANMPPMRIGLEACGGAHYWARTLNKLGHDTRIMAVKYVVPHRIKGKNDLNDAVAICQAVQHVSTRFVPVKSPEQQAILSVHRMREHWVRERTALMNRIRALLSEFGLIIPVGRSSLMKQVPLLLEDAENELPHLARTVIEDAYYHLEQLNQRIADTEQVFDAFSKVSENVKRIMKVRGIGPQTATAILASIGNGSQFDKSRDFSAWLGLVPKQYSTGGKPRLGRITKHGDKYLRTLLVHGARTVIANLGDKQDKLSQWCRGVLERRGMNRAIVALAAKNARIIWSLLHNQTEYENYAA

SEQ ID NO: 188882 - protein, 344 aa, unidentified
MRKYIGVDYHRRYSYMVVMDEKGQMVDQGQVTNSSEAVRKFLGRAGVNGDSIAVLEATRNWAVMHDWLEEVVDEVHLAHPLKVKAIATAKIKTDKIDAKVLAHLLRSDLLPEAYVPAPATRGTRNVLRQRMFFVRVRTMIKNRIWTLLDRYPELADARPCHDLFSKQGLVWLKTIPLKEQDREMLKEDLELYDALEERISRSEQMVHKLAHGDKRVKLLKTIPGVGEFFAVLIANEVDDITRFANEKKFFSYIGIIPSTFSSGGRTFHGRLTKQGNKYLRWALVEAIWPAVRTDPELGVYYQRIKVKKGANPAKIATARRLATIVYRVLLQERPYRVYGSRLPS

SEQ ID NO: 188883 - protein, 416 aa, unidentified
MESKMMSGASSPKPTPAALAYVVGIDIGMESCLMCCLTMEKRQIIKPSQFSNDARGFDWLFGHLKSLRVAPNQILVGLEATSRYGENLYHALLKAGYRVCLLHPGQIHAFAQQRGLRAKTDRVDAMTIARALRSFEARFGYVPSEQVATYRELTRLHQQLSDDVVRYKNEMHARLLALFPEVTQVFADPTRPTALAVLKVYPSAQVMAQADPAALSKLLHEHCPSHYGRQTAEELVRLARGSVSSGLAIAARSSSLRILCDQLQHTQSNLKQLQEEIERLVNQDPKAKGVLSITELGPLTVAVVRAELGDLDRTTSMDQVVAYAGLDLRVKESGKWKGQTKLSKRGSGRLRRSLYLAALRSIRLPDSPFGIYYHRLVDRGMKKGMAVVAVMRKLLIVAAHLILTEQVYEPGKVAAK

SEQ ID NO: 188884 - protein, 336 aa, unidentified
MRYIGVDLHTTQLTVCYLKTVDDYEFKQYRLDEIETFAASLEAADELAVETTANSRWLVGVVERRISRVVVVNPSEFEVIKRSVKKTDKRDALNLARFLAVDMLPAVRQRSELAEAVARINETRNKMVGLKTSLLNKIHGLAVSRGWKLRRELLSSKKGLTKVTEFEWTAIERIELEIIIEQIGSLKESIKRLDEAIAEISPQMVGFENLITVTGIGTRSAAVLISVIGEVADFATKSKLASYFGIVPRVSNSNEQVHHGRITKRGSKMGRTTLVQCALVAIRYNPYLKKYYEQVKARRGHGKAKIAVARKYLGIIYNTLKNNWMFEDFNNFVLAE

SEQ ID NO: 188885 - protein, 343 aa, unidentified
MQTITTIGLDIAKSVFQVHGVDAGGQVIVRRQLKRRYVLMFFQKLSPCVVGIEACASAHHWSRELQALGHTVRLMPPAYVKPYVKRQKNDATDAEAICEAVTRANMRFVPTKTSGQQSGLLLHRARHLFIRQQTSVINAIRAHLAEFGIVAPVGRHGVEELLNVVADPNDKRVPEVARACLSAFGAQLRRIKEQVLEFDRLISAWHRSNELSMRLDEAPGVGPVLATALVAAVADPKSFRSGRNFSAWIGLVPKQHSSGGKNRLGNISKQGDRYLRGLFVAGALAVIRYAKIHGTTHRPWLTALLARRPTKVVAVALANKIARMVWAMMAKGERYKEPVTLAR

SEQ ID NO: 188886 - protein, 384 aa, unidentified
MKVVCGLDVHKDSVFCCILCANGEKIQHKFGVLTEELVTLRDLMVSEGVEECAMESTSIYWIPIWRVLEGSVKLHLVNPYFIKQLPGKKSDVNDAEWIATCLSKELIASSFVPDDKIQRLRQYDRRIFDLNVSISRNLVKLDQCIQRCNIRISNYISTTDSKGYRSIVKLISQGVTDAEVLVKELHGRTINRHGRETLVKALTGVVSETDIDIIKQLVEEIELQQRHKDEAQQKMTALCMEWFPQEVENLQTIPGVKERSATSIIAEIGTDMTHFQTPKKLVSWVGLRPRNEESAGKIKARGITHGNRFVRKTMIECSWGAARMKDSFFAEFSYRQCIERRKNKMKVQVAIARKILVAVWYVLSQGTQYIKPTDHYTAAHMTAV

SEQ ID NO: 188887 - protein, 439 aa, unidentified
MLRIRSLPTIGSYPVAQVKNKKGDIMKTCLFVGVDTHKYSHTAAVLDGYFEVVATISFDNSTEGFNHLFDKLNKLVSRRDLVFGLEDSQGLGSFLACYLISKGHLALEINPVYTDRSRRRTVSREKSDKRDAIVIAKTLIRERANLHPVRIERNSIALREMVGYRQTLVNESTRIKNRLHVALFNQYKGVLGQFGSPFGKCALAFFARYPDPFLLKKVDPDTLSVFLKTHSKGRFGDKKARAILSSIDNSIADSLTGTRAHIIESHTKRLVQIDKELKKIQEVLEELVEASSYGCLTSIPGIDTVTASKIISGVMDIARFSSSSKLARFCGIAPAEKSSGRKEKYEKSKYGNKSLYSTIYFMALAHISRTRDGRDKNPVSRAYYLKKISEGKTKKEALTCLARRLVDLIYAVMRDRSIYNFSKSRFTKQNDSVINTAVA

SEQ ID NO: 188888 - protein, 360 aa, unidentified
MLYLGIDQHRKQLTVNLRNEAGEVVLRRQVSTEWARVRKFLEELKERNVREGGFVTIVEVCGFNDWLLQLLREYGCRETVLVQPEKQSKKKTDRRDANALGELLWVNRQRLLAGQRVQGLRRVELPSAAVAEDRQITELRKRLGQSRTRTVNRIKHLLRKHNLEQECPTKGLDTIRGRKWLAGLALGPIDRLERDALVAQWQLWDEQIEKVEKEIKRRQKQNATACVVATMPGAGAYGSLALASRIGRIERFPRPESLPNYWGLTPGCRNSGEATDRLGSITKQGSPTARFILGQIVMHVLRRDAKMRAWYLRIKKRRGAKIARVAVMRRLATIIWHMVKHNEPYAVGGPPRRKLAAPAA

SEQ ID NO: 188889 - protein, 327 aa, unidentified
MRQAKSLTEKAKTTVAFDVCKAALDVHIRVDGKAFQVPNTYEGFDQIALVLADYDVSLVLMESTGGYEDAAACYFQSVGYDVAVINPRHGRNFAMAMGKFAKTDRIDAAILADFAAVIDTRPDRARFIKPPTDEERKFLSQMVARRRQVVDLLSTEKQRLSHADDYAKQSINKVVAFIESQLAEINKDVSFYLKKNYSGLSKMLSEIPGIGELSVGLLVGDVPELGQIGNRQLSAVIGVAPFNHDSGKMRGKRCISGGRQNVRNVLFMGVMSATRFNPVIKAFYDRLINKGKPKRVAYIACVHKLLRIINAMVRDGTSFNPDLHAVI

SEQ ID NO: 188890 - protein, 407 aa, unidentified
MLFLGNDWAEAHHDIELQDDQGRVLARRRLSEGVTGLSQLHEVIADHLDEDDEPASVLVGIETDRGPWVQALIATGYTVYAINPLQVARYRQRHATSGAKSDPGDAHVLAEIVRTDRNHHRPVSGDSEQADVVKTLARTHQSLIWTRQRQTNQLRSMLREFHPAALVAFGEELAGRDALAVLILASTPAVARALTPARVKTLLRRAGRQRNLDITATRIVQALRSEQLGLSDALTGAYGASVRSLVAVITTMVAQISVLEAEVNRCFGQHPDADIITSQPGLGVVLGARVLAEFGDAKDRYADAKARRNYAGTSPITKASGTRRAVLARYARNRRLADALHQQAFAALTASPGARAFYDHHRARGATHHQALRALSNRLVGILDGCLRHRTPYSETTAWAHRLNLAT

SEQ ID NO: 188891 - protein, 343 aa, unidentified
MQAITTVGLDIAKSVFQVHGVDARGNAVVRRQLKRRYVLAFFKKLPPCLVGIEACATSHHWSRELHALGHTVRLIPPAYVKPYVKRQKNDAADAEAICEAVQRPSMRFVPTKTAEQQSCLVLHRTRHLFIRQQTAVINTIRAHLAEFGIVAPVGRNGVEELLYAVADHKDERIPEVARGCLEALGALLGKLKAQILEFDRQINAWHRSNETSRRLDELPGVGPALATALVASVADPKAFRSGRDFSAWVGLVPKQSSSGGKEKLGNITKQGDRYLRSLFCAGALAVIRYAKIHGTKHRPWLAKLLERRPTKVAAIALANKIARMAWAMMAKGESYREPVALAR

SEQ ID NO: 188892 - protein, 417 aa, unidentified
MDVLHSCCAGLDVHKEIVVACVRRTIGGKVRQEVRTFRTETNALLEMADWLTDLEVSHLAMESTGVYWKPIWNLFEGVFELLLVNAEHIKAVPGRKTDVKDSQWIAELLPHGLLKASFVPDKPMRQLRDLTRQRVQLIRQKVQVANRIQKTLEDCNIKLSSVASDVLGASGRAMIAAIVKGENDPITLAELARQRLRKKIPQLQEALAGEIQDHHRFLLGMLMEQVEFLEKQIDCLTARIAEVLPPPFVEAIERLDTIPGIDRKAAQNIVAEVGADLETFPSAGHLASWVGICPGNHESAGKRKSGRTTKGNKWLRVVLVQCAWAASRSKGTYLKAMYGRLAARRGKKRALVAVGHRLLAIIYNALKQGQSYQELGADYLDKKQDKEQLAQRLLRRLEKLGVKVTVEPTPVVACGQE

SEQ ID NO: 188893 - protein, 358 aa, unidentified
MPMMTKSKHPVTGGVDTHAENHVAAVVDEVGRVLGTESFPADEKGYTALLTWMARHGDLGKVGVEGTGSYGAGLARHLTAQGVEVIEVIRPNRQVRRRRGKSDPTDAEAAARAVLSGEADGAPKSRDGAAEALRALRVARQGAVKARTQAANQLRDLVICAPEELRARLRPLATERRVALATRFRPGVLTGPFEATKAAMRSVARRYEELSEEIARLDDAMAELVAEAAPEGFTDKQGVGTRVAATLLSTVGDNPTRLKSDASFAALCGASPVDASSGKQVRHRLNRGGDRQANSALWRIVYTRMHHDPRTIAYVERRTKEGKTKKEIMRCLKRYVAREVYKALVVRAEVINPLNRAT

SEQ ID NO: 188894 - protein, 339 aa, unidentified
MKNELIKEFVGIKEFVGIDVSKLTLDVHLHVKNLHCVFSNDSKGHLSMFSWIRKQCRKNEELLFCFEHTGIYSLELAVFLKKNDQVIYIVSGLAIKRSMGLKRGKSDKTDAKEIAKYIFQNHYALKPTELASDAIQELQMHISFRSNLVKKLASFKMHRKEFGKINESKGYDQIEQVTAEIMTALKKGIKEVEKQIQEIIYSDEALKNTFENISSIKGVGPILAATMIVITRNFTSFETSRQLACYAGIAPFEHSSGTSYRGKNRISNLGNKDLKSLLTMAAISSITHNPELKIYYQRRISEGKSKMSTINAVRNKLVSRIFACANRNSKYVEIYKFAA

SEQ ID NO: 188895 - protein, 344 aa, unidentified
MAVDGATGAEVAAITVKARNPGHERLLVWARSLPTDEVLFAVEDCRHVSGGLQRFLLARGERMVPVPPKLMAGARRGGRRRGKSDPIDAAAVARAALRHPDLPAAHLAGAERDVRLLLDHREDLVGERTRMQNRLRWHLHDLDPGFSVPARALDRYVWLDRTEQHLEAMGRTVQVDIALDEVRRIRELTREVNRLERQIATLVRLLVPELLAIPGCAELTAAKLVGETGGAQRFRSEAAFAMHSGVGPLEVSSGERQRHRLNRSGNRQLNAALHRIAVTQKRIHPPAKVFLERKRTEGQGNREALRCLKRHLARAVYKTLLRNELRRQALLEETLADAALAATA

SEQ ID NO: 188896 - protein, 386 aa, unidentified
MAQPNDLSKSRIIFDQDGTLIAVIEMSQSSWLVAGIVPGVERHPLKKLTPGEDQLLELLHRWSDEARQAGQRISRIAVAFEAGRDGFWLARWLGTQGIEAHVIHPSSVPVSREHRRAKTDRLDTEMLKRAFLGWLRGEPDHCSMAAIPTLEEEDARRPGREREHLVGERVRITNRLKAAFTRLGIRNFKPALRGAANHLEALRTPEGVPLPPNTLAELRRDMARLKLVTEQIKQIEALRLERLEESGGQSSQAKIRMLASVTGIGVETADMLVHEILSRDLRDRRAVARYAGLTGAPDESGIRRRERGLARAGNPRVRRGMVQLAWRFLVFQPDSALAQWYRTRTAGSKGTRKPMIVALARKLLIALWRMVTIGEMPKGVVLRTPS

SEQ ID NO: 188897 - protein, 379 aa, unidentified
MKKDIRFVGLDVHAETISVAVADPSGEVRSIGIIPNRPEAIRKLVKRLGPPDTLRACYEARPTGYVLYWQLTELGVRCDVVAPTLVPVKAGDRVKTDRRDAEKLARSYRSGDLTPVWVPDAAHEALRDLVRAREAAKKDQMRARHRLGKFLLRHGRRPPNGIKPWTVKHLEWVKKEVDFDQQAQRAVLLDYISEVDHARDRIQRLERAIDEAVETAPERMRAVIEALQALRGVAQVSAVTIVAEVGELSRFARPRQLMGYSGAVSSEHSSGERTRRGAISKAGNSHLRRIVVEAAWAYRHKPSLGGALRSRQDGLSEEVKAIAWKAQHRLHSRYRRLAAKGKVRQQVVTAVARELLGFIWAIGVTVEMNTKAAGKQPAR

SEQ ID NO: 188898 - protein, 457 aa, unidentified
MKRKRTYGSVDVEKVDVLAIVQLLTVGCIVAVDVAKSKFVAALATATGEVLRILRFEHPRQTRAFLGVIEGLHANKLEPRVVMEPTGTYGDSLRHQCHARGVRVEMMSPKHTHDFAEVLDGVPSMHDLKATVALAQLARLRPGKVWTPDAADKRELRALMDRRWPMLQTQALYFGHLEGMLARHWPELDGLVKVHVQRSWMALLQQYPGPHLVAASSKAAAATLRKASQGKLAAACIESVIDSARTTLGVPMVGEEERRLRFLVEQIERETRGLDALDDEIAKHVHRDPVMSLLAVVVGPTCAAAIFSYLGSPLAYANGRALEKAIGLNLKVKSSGTGNGDGKLHITKRGPAQVRQLLYLAVLRLVQRDPIVAAWYRARSSYGDKNKQRAVVAVMRKLTHALWHVARGSQFDASKLFDVRRLKLSETTPASSTTSSVQAPSPPFKRRQQGGAPQARA

SEQ ID NO: 188899 - protein, 410 aa, unidentified
MEVLHRRCAGLDVHKKTVVACVRLAEENKVVTEVRTFATTTAGLLALSAWLSENGCTHVAMEATGVYWKPVWHVLSDGEFELVLANAAHVKNVPGRKTDVSDAAWLAELLAHGLIRGSFVPDGQTQELRTLLRTRKQLVREKTRHTQRIHKTLEDANIKLESELSDVLGKSGRAMLEAMVAGETDPVRLAALAHSGVKASQATLQEALRGRVTQHHRFLLRLHLGQVDAIDTAIVTIDGEIEAHLAPFRIGVELVSTIPGVSGLSAEVIVSEIGLDMSRFPTDGHLLSWACLSPRNDESAGKRRSTRMRKGSPWLKTTLIQCAWATKRKKGSYLQAQFLRLKSRRGPQKAICAVAASILTAAYHMLKDGTLYQDLGADHFKRRSKTTQTQRLVKRLQHLGYAVDIKPLAA

SEQ ID NO: 188900 - protein, 418 aa, unidentified
MKLWIELTHYAGFDWARDHHDVVVVDRQGQIVADFRIEHSLAGWQAFRDQVKAYPALAVAIETNQGTAVDQLLLLDCAIYPVNPLSAKSYRERKAPSGHKTDRLDAWSLAEALRLDGQGWKSLEPLDPLTQQLQLLCRDEISLIEQRTALINQLQQALVEYYPAALQAFEDWTQPFCWDFILQFPTPDKLATAGRRRWEKFLHTQKLWRPETTAQRMEIFEHARQFCGSAAVTSAKSLLALSLAKLLNALQLQLDQYRQQIGALFNQHPDHDLFGSLPGAAQTLGPRLLGEIGGSPRRFEDTEALQCVAGTAPVSFQSGQIHRVHVRYQCNKILRHTVHLWAQCSLRVCPWAEVYYRQKRAEGKSHACALRCLGQRLLKILWRMIQTRQPYDADLHARNQKQHGSWVLTLMKPTPGAG

SEQ ID NO: 188901 - protein, 396 aa, unidentified
MLYLGIDIGKRSHVASLMSQEGKVLFKAFSFANSTDGGESLLAKLGEHVTSVCDVEIGMEATGHYWLSLYSFLVEHGYAIHVVNPIQTDGWRKGVEIRKRKTDTIDSVLIADLIRYGDFLETALADENTMSLRNLSRFRHSLVSSIGDLKRKTIAVLDQVFPEYASVFSDVFGKTSKAILMEFGSPEDLEHITSEQLENLLSQLTLKKFAAEKVQTLAHLSKRSFGVSFCRDSFTLQLRLLIQQITFIEEQVLEIEREIAELLNRINSPITTVPGIGPVNAATILGEVGDITRFSSPAKLVAYAGIDASVTQSGDFHSTRNKMSKRGSPYLRKALFQAALVASNSDPVFNAFYQKKRNEGKHHLTALGAVARKLCYTIHAILKKNCPYEVQPPPEL

SEQ ID NO: 188902 - protein, 344 aa, unidentified
MTIAVIGLDLAKNVFQVHGIDGNGRAVLRRKIRRSEVLPLFSRLPPARVGMEACHTSHYWAREIARFGHDVRMMPAQFVKPYVKSQKNDATDAEAICEAVQRPTMRFVPIKSENQQAALMLHRARDLLVRQRSSLISSIRAHFAEFGIVVGQGIRNVERLLALLGAEGDNRLPALAAEMLGILAEQLRETAAHVSEVEIKLLAWHRANPASRRLESIPGIGPITASAIVATVGDPRQFQSGRQFAAWLGLVPQQRSSGGKARLGGISKRGDGYIRRLLVHGARAIVGWRKRSAAHTTPWIERLLKRRPMNVATVAYANKLARIAWAIMIREDRYNPVRAFAAVG

SEQ ID NO: 188903 - protein, 360 aa, unidentified
MLYLAIDQHRKQLTVNLRNEQGDVFLKRQVSTQWLRVRKFLEEVQKQSQAEGGFVAILEVCGFNDWLLKLLVEYGCRQTILIQPEKRSKKKTDRRDANNLGEILWVNRNRLLAGKKVQGIRRVQPPCERDAGDRQITALRKRLGQLRTRTVNKIKHILRKHNLEQECPTKGIGTIKGKKWLVQLALGVIDRLDMDQLLAQWQLWDEQIAKVETQIQKRQAESKTAAVLATIPGCAAYSSLALASRIGSIERFPRPSSLANYWGLTPGCRNSGQATDRLGSITKQGSAMARFILGQLVLHVLRRDPWMKAWYGRIKKRRGSKIARVAVMRRLATIIWHMLRHNEPYVMGGPPARKLATEAA

SEQ ID NO: 188904 - protein, 332 aa, unidentified
METIYFLGIDMAKKTFQAALTLDGSTMVEASVENTPTGIKSYFQELEKMFSASQLIVCVEHSGIYTYRLLDYLAKNHIKVCVESAVRIQRSQGLKRGKSDRIDACRIAHYAYKNIKDLLFWTPPRKVIERIKSLLVARTRLINAKVQLTVPIKERESIDADISKLIEKACKKTIAALAEDIDKIEKEIKLLIKSDQQVSEQMAYATSVPGVGQITALNMIICTGEFERINESKKFACYAGVAPFEHSSGTSVRGKTRVSKLANVNMKKLLHMAAMSSITCSTELRTFYDRKVAEGKNKMSVLNAVRNKLISRVFACVKNKRLYQKSYQNALA

SEQ ID NO: 188905 - protein, 342 aa, unidentified
MIDTMIGVDLAKSVFQLHGASLKGEVKFRKKLSRPQFRKFMEDQPPSIVVFESCGGAHFWTREMQQLGHQAKLIAPQYVKPFVKRQKNDAADAEAIVIAAQRPEMRFVEPKNNEQIARGVVFRARDRLVRQRTEQINALRSVLYEQGQVFPKGIHQMKKIAEFLQQTDNGLLALIREECEELLASIFDLTARIDAKTLKLKKLSKQSEVSRRLQTIPGVGPLTAMAIEAFAPPMDIFRCGRDFAAWLGLVPKQHSSGGKARLGKVSKEGQVDIRRLLIIGAMTRIAWMARKSIQDGSWLDRMLKRKPKMLVAIALANKMGRTIWAVLTKEEDYRDPAKTAAA

SEQ ID NO: 188906 - protein, 369 aa, unidentified
MSKASTFVGLDVHKSSIVVALLRPGASTPLEWKVANEPGAVHRLIRKLEREDDVQCCYEAGPTGYVLKRQLDRAGIACQVIAPSLIPVKPGSAIKTDRRDARKRAELVRAGILTEVAPPTEEEEAVRDLTRSRDDAQRDLTRARNRLSKFLLRRGCVYAIDRKPTWSQKYRSWLRALRFEHVADQVIFEDYLLAVEQVEGRLEALTDRIEHFAEQAPWRERVQALRCFHGINTVTALALVAEIHDPRRFAHPRRLMSYLGLVPRESSSGMRERRGGITGAGNRHVRRLLVEAAWHYRHKPVVGRALRLRRREQDPKAIALADRALRRLALRQRRMLYQGKHPNLVNIAVARELVGFVWNVLHTNAIAQA

SEQ ID NO: 188907 - protein, 343 aa, unidentified
MDHFAGLDVSVKDTSVCIVDSTGKIIREVKVASEPDALLAVLTNPAYHFKRIGLEAGPLSQWLFSALADAGLPVICVETRHMRAVLKAQINKTDRNDARGIAQMIRAGLYRPVHVKTLRSQKLRMLLTHRKLLQAKAIAIENDLRATLRNFGLKVGVVGTVKFEARVKELVENFPDLVALVEPLLVVRRVLREQISLLHRRVLAAVRDDEVCRRLMTVPGVGPVVALTYRATVDVPARFRKSKSVGAVFGLTPSRDQSGERDRPGAISRCGDEMMRTTLYEAAQAMLLRSAKWSWLKAWAMKVARHRGMKKAIVALARRLAVIMHRIWVDGTEFRWTREAAAA

SEQ ID NO: 188908 - protein, 415 aa, unidentified
MALKIVYKICCGIDVHKTFVVACIASTNDKGVTSYESHRFSTYTSGLKTLLQWLLDRNCKDVCMESTGKYWIPVYNILEKDCSIVLAHPKYVKAIRGKKTDKKDAKWIADLFKHDLVAGSFMPPADIRQLRDLMRYRFKLTCFKSSEKNRYQNCLTVSNIQLGNVVSDTFGKSSQKIIAKILENPDDTSFDIGSLIHGSMKDKLPELELAIDGYITPEQAAKLKIIKEHFDNLEARKAELEELILALANPYQQEISIILTAPGFKNTFTAIGIISEIGTNMEAFPSAKHLCSWAGLTPTNNESAGKKKSVRVSKAGCYIKPLLVQCANSVVKSEKHPEIRNRYLRLRKRRGHKKAIIAIARMLLTALYNMLKNKEPYNAELYRKSDVLPVNREITIEQAILMAQFQGYKIKSAAE

SEQ ID NO: 188909 - protein, 342 aa, unidentified
MTEVSTIGLDLAKNVFQAHGASQSGAVVFRKRLRRGQLLSFFAGQPRCLVAMEACAGAHHWARAIGEFGHEVRLIPPAYVKPFVKRQKNDMADAEAICEAAQRPTMRFVAVKSEAKQASAVIFRTRDLLVGQRTQIINALRGHLGEYGLIAPQGSAHVERLIVEVEDASSAIPQAARTCLLRLVGILRALQAEIAALDTEIAARAKRDDVAKRLMTVPGIGPVIATALEALAPPPETFKSGRDFAAWIGLTPLQKSTGGKQRMGRTSRMGERTLRRLLIIACSGVVRWAKRKGMSADSWLARMLARKPAMLVIVALANKTARIAWALMTRGEVYRAPSAVAV

SEQ ID NO: 188910 - protein, 271 aa, unidentified
MEHYVGLDVSLKQTSICVVNQAGSVVREGVVDSEPEAIAAFVRSKAPGAVRVGLETGPTATWLWSELKQLGLPVICIDARHARAVLKMQINKSDRNDAAGIARIMQTGWFKEVRVKGLDSHSVRALLASRALLVKIKRDLENQIRGLLKNVGLVIGRAKFNVFAVRAEELIEDRPELIAVVGPLLKARQAIEQQTDDLDRKVLKLARHDAQVRRFMTVPGIGPITALCFKATVDDPTRFKRSRSVGAYVGLTTRRHASGGDRLDGTHLEVW

SEQ ID NO: 188911 - protein, 320 aa, unidentified
MAQQGRIVGIDVAKLKADACIRSLQLRLSQPSTAQGQQDMITWLRRNEVGLAVMEASGGYERVWAEALRAAAIAVRIVDPKRVRYFAKSAGRLAKNDPIDAEMIAWFAETFAAAAEPAHDADRDALNRLVTARSLLVRLATPIRQLGEHGQPRVVENAQRAILKTIKAQLAKLEAAIEAKIAANAQFLARRAIIASVPGFGDHFVAGALAWLPELGRISNKAAAGLVGVAPYDDDSGQHRGERHIRGGRRDIRTLLYMAALGAATRHNPVVMAYYKRLRAQGKKTKVALVACMRKLVVILNTMLARGEMWNPTPRTTAVA

SEQ ID NO: 188912 - protein, 360 aa, unidentified
MNYNTVYVGMDVHKETFSLCCYTNEKELAEYSQKVDAHYSKVLNYLEAMRFHYGDDVMFICGYEAGCLGFTLYHQLTSHNVKCIILAPTTMSKPTGRKKVKTDKRDAALIARCLAHHDYSPVHIPTEQDEQVKEYIRMRQDHKLALKKIKQQILAFCLRHNYRYDTTKSHWTQAHLTWLRSLEPEGLYQEILTEYLATYDQLTDKLERLDKRIEELASKEDYQENVSHLSCLLGVKIQTALSTLVEVGDFKRFASAQQFASYLGLTPGEDSSGEDQNRLGITKAGNSHIRTLLVEAAQSYTRGKPGYKSKALKARQKGNPADIIAYADKANERLRRRYYQLVLGQNKKANVAKTAVARRL

SEQ ID NO: 188913 - protein, 350 aa, unidentified
MEYIAFDAHKRYTLASVARSDGRLVREQRIPHERGALQQFLERCERGSPVAVETIGNWYWIVDEIEAAGCVPRLVHARKAKLMMGEINKTDRLDARGLNRLQQSGTLPTVWIPPGELRDQRDLPRTRMVLVRQRTQLKNRIHATLAKYALHDLEVTDLFGVRGRALLRQRFDGLPPHTAYASRQLLEQVEALDRQVREFEKRIQATFKPTPVIQLLLTVPGVGLTLAVVIALEVGDVTRFATAEKLAGYAGTTPRVHASGGKTRFGPSRPDVNRYLKWAFVEAANAICLTRRHMPHRHVSRLYERLGRRKGHAKAIGAVARHLAEATYWILSKGECYREPKASGRFVHGG

SEQ ID NO: 188914 - protein, 356 aa, unidentified
MTTLHYIGFDVHKKSISFCVKTAAGEIVEEGSLLAQRGALRQWASARPQSWRGALEATLFSGWIYDTLKPYGEQLEMAHPAKMKAISAGKKKSDTIDARTIADLVRCNLLPACYVAAPRIRELRRLLRYRSLVVSEAVRMKNKMAGLLMETGAVYVKEKLHGKKYFASLLEELEEVPESVIDLLRLSRGALEMFESTQKRLVRELLADPELTQRVERLMTIPAVGEITALTWALEVGDPHRFRSGAEAMSYCGLTAALKSSAGKQQHGPISKQRNHWLQSALIEAAKLAPRWNPQLAALQARELERGHRNRATLAVARKLVTYLLAVDKSGQSFQLRAPLPEDRTEQEMAQKIKSA

SEQ ID NO: 188915 - protein, 412 aa, unidentified
MQTIVERPAALDVHKAQVTACARVPDGRGRREQHVAEFPTTVRGLLALRDWLAGHAVTQVVMEATGVYWKAPWAILEDEFECMLVNARHVKQVPGRKTDVSDAAWLCQLAEAGLLKANFVPPKPVRQLRNLTRYRKTQIQERAREVNRLHKALEDAGIKLDTVAADILGKSGRDMLDALVAGETDPNVLADLARRQMRKKIPALREALAGHFDAHHRLWVGAILRHIDFLDEQIEQLTGMIEEQIRPFAPAVELICTMTGIQHRGAQCIIGEIGTDMTRFATARHLASWAGRCPGNDKSAGKRRSGKTRDGSKWLDFALEEAAMAAIRVKGHYLEAQYRRLKPRRGHKRALGAVKHTMICAIWHMLSTGETYRDLGGDYFTNRDPERQTRRLVKQLERLGHHVTLAEGAAAA

SEQ ID NO: 188916 - protein, 347 aa, unidentified
MNFYTQQHKHYCGIDLHAKAMYVCILDHNGTKLVHKNLPTTPDAFLRVIAPYREDVVVAVECIFTWYWLADLCQKEGIAFVLGHALYMKAIHGGKAKNDKIDAQKIAVLLRGGMIPQAYVYPAEMRATRDLLRRRCHLVQKRAELLVHIQNTNSQYNLPEIGKKLAYKANREGVADHFPDPSVRKTIEVDVSLIDHYDQLLGEVELYITRTAKLHDVQTFTRLQSVPGIGQILALVLLYEIQDIHRFPRVQDFVSYCRLVKCAKESNGKRLGTSGKKIGNVHLRWAFAEAAILFLRQNQLGKEYFTKLERKHGKAKALTVLAHKLARAVYYMLTREHAFDLQRFVSA

SEQ ID NO: 188917 - protein, 425 aa, unidentified
MKRDLSVENQFSVYVGLDWGTEFHRACVLNPRGEILRECRIDHSGQAITDFVRSLNEMGNGKPDHVAVAIEVPRGPVVEALLEGGLVVFSINPKQLDRFRDRYTVYGAKDDCRDAYVAADSLRTDQHCFRRIAADHPDVVRLRELSRTEESLGEDFRRVVNQLYQLLLRYYPQLLQLNSTPDEPWIWALLELAPIPQRGARLTVARLKTLLSKHRIRRWTAEALREAIATPPLPLAAGSADAISEHALLLLPQLRLLYSQRKEVRDRIEALLNRMTLLGSERSECREHRDVGLLLSLPGLGYLIAANLFTEASDPLAQRDYYALRAHSGIAPVTKQSGKSRQVVMRRGCSERLRNAMYHWARCSVQHDPLSKLHYARLRKLGHKHGRALRGVADRLSSILIAMLKSGQPYDTKRRQNAAAAADTA

SEQ ID NO: 188918 - protein, 361 aa, unidentified
MTTMTQSTISVTGGVDTHKDVHVAAALDGLGRLLGTESFPTTAAGYRQLLAWLRAFGDIDGVGVEGTGAWGAGLHRFLTAHDVRVVEVMRPNRQRRRRYGKSDTADAVSAARAVQAGEAVGTPKSATGTVEAIRLLRIARRSAMKARTQAGNQIHAVVDTSPEELRHRFHGHTTTQIVAVAARFHRRFPDTPIDAAKSALRTLARRWQHLDAELAELDAHLDDLTATVAPTLRALNGVGPQVATALLAAAGDNPERLRSASSFAALCGVSPIDASSGRQQHHRLNRGGDRQGNWALHVIIISRLRWHEPTKAYMAKRRAEGRGEKAIIRCLKRHIAREVHRAITTDLCQQHDPARTPRIAA

SEQ ID NO: 188919 - protein, 323 aa, unidentified
MSKHTMVCAGIDTGKHKLDVALDGRSDQLQVDNTADSHKALSAWLRRHRVNRVGIEATGGYEQDVVLQLRQDGFVVIVFQPAQVRAYAMFHLQLAKNDKIDAALIATCAAATRKIHAPPDPRLAPFAQQLTFIEQITEDIAHIKTRRASCRNVRIRGLWNAEITRLKRLQNAELKALVKAIRQHHDLAERLDLIESVDGVGLATAVAILVRMPEIGSVAREQVAALAGLAPYDNDSCEQIGARHIRGGRKRLRAKLYCAALPAAFRWNTQLTTLYQRLITKGKSHKVALIACARKLLIFVNTVVARGTPWGAKPPAPSALATR

SEQ ID NO: 188920 - protein, 318 aa, unidentified
METAAVFVGIDVAQARLDIAVRPSGEQWTSPHDEAGIAALVTRLQALGPTLVVLEATGGRELALAGALAAAQVPTAIVNPRQVRDFAKAIGQLAKTDALDAQVLARFAEVIRPEPRALPDAQAQELAAVLTRRRQVVAMLTAEQQRLSTTLPAVRPRVDTHVRWLRQELRALDAELQERIRTSPLWCEQAALLRTVPGVGPVLALTLLAHLPELGTLDRKPLAALVGLAPRPADSGTRRGRRVIWGGRAQVRATLYMSTLAAVQHNPVLRRFYEHLLATGKPKKLALVACMHKLLLILNAVLRHRTPWQPPASPAPAS

SEQ ID NO: 188921 - protein, 344 aa, unidentified
MNEVSVIGLDLAKHVFQVHGITANGEVAIRKTLRRSQLISFFANCPPCLVGMEACGGAHYWSREIRRLGHEVKMMAPAFVKPYLKANKNDRNDAEAICEAVQRPSMRFVAEKSPEQQSVLHLHHSRRLLVKQRVAVSNHLRGLLSEYGIVLAQGERVLLRQLPSLLEDGDNGLPMLTRHTVATLRTQYLPLVEQIHDLEVYLQAWHKQAEQSQRLASIPGVGLQTATALAATVGDGQSFRNGRQLAAYLGLVPRQHSSGGKPRLLGISKRGDSYLRGLLIHGARAVIRHIRRRLALGQPGGNPWVEQLLLRCHPNEVAVALANKMARIAWVLLSRNECYHATAK

SEQ ID NO: 188922 - protein, 421 aa, unidentified
MGKPVDPGMQVIFERVCGLDVHKKGVVACRRILTGGGRVHTEVRSFGTMTRDLLELLDWLKQAAVTHVAMESTGVFWKPIYNILEGHLQVWLVNAQHLKKVPGRKTDVSDAQWIAQLLQCGLLRPSFVPGRPQRELRDLTRSRVRLTQQRATVCNRVQKVLEDCNIKLSSVASDVLGVSGRSMIEAIVRGEQDEAVLADLALKRLRGKIPQLRLALQGHVTAHHRFLLRELLDQYDYLERKIAILSERIQQSAPTLFKQCVPLLDTIPGVATDAAQAILAEIGTNMAQFPTHKHLCSWAGRCPGNHESAGKSHSGAPAKGSTWLDTVLTQVAWAAARTKATYLNAQYHRLAPRRGKNRAIGALKHSILTAAYFMIRDQVPYKDLGPDHFTRLNPNQQIRYHVRKLQQLGHQVQLTPLPTAA

SEQ ID NO: 188923 - protein, 373 aa, unidentified
MRIAIGMDLHKKTAVCCAVHAGPGKPSEDEEEFLRRFNRDHGTQPSEPEDIARIAEALRGHEAHVLIENSTKTHETYWVLTNLGIDTVVAQAQDLYRITKSVKKTDANDAAELAGYMRRRLNGEREFAVCKMPSPVWMERREICRAVLAEKRHLADLKRRARMHMLLHGIRLSKDYSDIFSKKAMKEMWDSRDTCLRLLVSEARSIKARTDEEARLIRATFGHITDFDLVMSIPGFGAVSAAYAVSMIIDVKRFGSSAQLAAYFGLVPKVRESAEASHRCATTHRGDREMRRLLCQSAIVHVRTAEDSVVSALYNRLRARGVSHREAQVAAARKLVTVVWSVLRNRRPFSTDRELLERSAEMAEEAEGDPAAD

SEQ ID NO: 188924 - protein, 424 aa, unidentified
MSEPLTTLYVGIDVSKNSNQICALTFESKKLINSSFKNNQEGAEELESKLVELCIKNDLKYIIIVLESTGVFSYHIANYLSTTHDLLKFNTIVYVVNAKMAKNYAKSYINTSKTDPKDAFILADFARVGRCKELTPYRGSQRLALQRLLRHRKHLVDLAAKEKEYVTANVFIKFSEFNNGKHGYGTFSNNFSNTAVEVLLKYKSAEQIAKTPIDKLTDFIIKTGKNRFGDSKEVAKTLQAAARASYRLDKAAYKPVNLAIASSIRMIEVYEKEIDSIDKEIELLIKGLDNQSEYQSLTSIPGIGAVYAAGILSEVGSIKDFKDDSALAKYIGLSWKKNDSGEKNSEDTPMQKAGNTYLRFYIIEAANTVRQWEPEYQEYYQKKYDEVKIHQHPRAVVLTARKLVRLIYTLASKDQLYSPKSNRK

SEQ ID NO: 188925 - protein, 346 aa, unidentified
MEHYAGIDVSLELSSVCVVDAQGKIVKEAKVASEPEAVVAFFEALGFAVKRIGLEAGPLSQWLHAGLKEAGFETVLLETRHVKAALSAMTVKTDRKDARGLAQLLRMGWFQQVHAKSMASREVRALLVGRKQLLGRLIDVELSIRGILRGFGLKVGAVTRKGFEARIRELVTGQATLERIAEAMLSARAALKAEYEKLHQAVLAIVREDAVCRRLMTVPSVGPLVAITYKSAMDDPSRIAKSKAAGALFGLTPKKYQSGEKDVTGGITRTGDEMVRTALYEAANVLLSRITRFSKLKRWGMDVAKRRGSKRAKVALARKIAVILHRMWIDGTTYRWAEAKPIAAQA

SEQ ID NO: 188926 - protein, 338 aa, unidentified
MAILYVGIDLAKSVFALHGVDEHGKATLVRPSVPRARLMEVVAALPPCTIGMEACSGAHHWARRFATFGHTVRLMAPKFVSPYRMSGKRGKTDAADAAAICEAVQRPNMRFVPIKSEAEQARLCVHRVRQGFIEQRTATINRLRGLLSEFGIVLPQKAQTVRRQAAAHLEDLPGWANTAVGDALSEIHRLDERVAEYDRHVAHIAAEDERSRRLMQLQGIGATTASALLATVGHGRDFKNGRQLAAWLGLVPGQYSSGGKTRLGSITKAGDGYLRTLLILGARSVLAAAAAKTDRLSRWAVALAERRGYWKAVVAIAAKNARLAWAVLVRGEDFRAIA

SEQ ID NO: 188927 - protein, 399 aa, unidentified
MNSPCVAVDVSKGKSYYEGFYDFKNPTTKATPFMHDLEGLKSMYEAGQKIKGTYGEVVYVFESTGIYHKIIETFLMNQGEKCIILNPLEASRVRKTAIRATKTDARDCMSIAKAYYTNDYRLHNQKDELYEKLQSMNGYYNFLVQQLREMKVCFRNALDIVYPRFDEVYPDPYLDIPKAILSRYPHPDELKSKRAETIVKYIMKDTKHRESKATEEAKKLKSYIDNVSSGCRNSAHEVSILKTLVTQINDQETGIDLCLDDMRDIVSEIPLYHQLMTIPGIGDNLSIRLIGELGDLDRFERSEQLVAYAGIDPRVHQSGQMTGEHLHITKRGNKHLRTLLFLAVSSNIRIGKQNPILEFYNKKRQQTNPLVYKAALIACANKLLRIIFGMYKSGRNFHQ

SEQ ID NO: 188928 - protein, 397 aa, unidentified
MYIVGIDIAKRKHEAAVIDGEGAVIIKPFSFTNNCSGYNRLLAMLTKAKLPLDEVSFAMEATGHYWLALFTRLQKEGFRVQVINPVQTNSIRSFYIRQAKTDPRDALLIAEVIRFGHFSESTLHPENIYELRELCRGRHAIVSMQADVKRKVVALLDQVFPEYETAFTNLFGDTSMAILQACPTPKELSEMPLEELCYLIEVSSHKRFRMAKAQELQELARNSFGFAMAGDVFSTMIRLYAKHLDFLKQQVREMDRKIAEIMDTLDTPITTITGIGPTLGAYILSEIGDISRFSSAAKLAAYAGIDPTMRQSGEYNGVRNRMSKRGSPYLRHAIWLAASSAVLHDPALKLYFQKKRDEGKPYMASVGHACRKMVSIIYAVMRDNKAYTPCIPNEISA

SEQ ID NO: 188929 - protein, 345 aa, unidentified
MEQYAGLDVSLESTSVCVVDSTGRVIREAKVLSEPEALIGWFQEHGTPMTRIGLEAGPLSQWLYAAMENAGLPVELLETRHVRAAFKAMTIKTDRKDALGIAHLMRMGWFRPVHCKSVPAQEVRALLTARKLLQNKRIDIEMSLRGILRGFGLKVGPTTPKNFEGRIHELVEGHTVLSQIAHAMLTARAAIMKEFKAIESRLLAQSRRDERVRRLMSTPGVGAFTALTFVAAIDDPERFGSSRMVGAHFGLTPRKYQSGETDVTGRISKVGDHAVRVALYEAANIILMRSAKTSALKSWAQALAKRAGMKKAKVALARKLAVVLHQMLKSGSRFSLTGVPQSVAA

SEQ ID NO: 188930 - protein, 343 aa, unidentified
MEVAIGIDSHKGTLAAAAVDTLGRVLGVREFTNDPKGHQAFQRWVREQGSPRRIGIEGSLHYGAALSQRLLAEGEDVREVPPSLTHLERRRRQKGKSDQVDAVAIARVVAGEETLPPARRLALFSDLKLLVDYRDQLVRARTQVVNRVHADLVVIHPGYERVVPNLRAKRHVGKARSLVGRDRSVRGELVRRRLGDVLRLEEQIAEADRRIADKLREADTTLTQIRGVGPFIAAKILGEVGQVSRVRSKASFASLSGTAPLVASSGLTHRHRLNRGGNRQLNWALHYIALVQSRTSPEAKAYLARQRGAGKSHKEAMRCLKRHLSNVVYRHLLADDRRLEQAA

SEQ ID NO: 188931 - protein, 343 aa, unidentified
MSQVTTIGLDIAKNVFHAHGADARGQGVFSKRLSRAKLLGFFAAQPPCLVALEACGGAHHWARELMALGHEVRLIPPAYVKPFVKRHKNDAVDAEAICEAAQRPTMRFVAVKSEEQQASALLFRTRDLLVRQRTQLINALRGHLTEYGWVAPKGPSHMAMLGDLLEDEMGSLLPPAAVAMFRVMLDLLADLDDRIAELDREIARRAREDETARRLMTIPGIGPITATALIALAPVAETFAKGRDFAAWLGLAPLQRSTGGKQKLGAISKMGERTLRRLLIIGSSAVVHQASRRGAPKGSWLEQMLARKPRMLVTVALANKMARIVWALLAKGGSYRAPAVATA

SEQ ID NO: 188932 - protein, 316 aa, unidentified
MDNKSSVYGVDVSKATLVVGEYDSGSMFTLSNTPEQIARWVSSIAEGSIVAMEATGAYHQVLATLAHAARMRVYVLNPRALKHYAEAIGQRGKTDPVDTRMIARYAMHEHSKLFAWEPPAPGAEKLAQLLQRRDRLVTACQMVAQSLAGVSALKAQREQLLANIKRMIRNTELLMRAELARAPHLAEVHQRLTSIVGVGFVVAAQLVVALTRLRFPRLESFIAYTGLDPRPDDSGQRRGRRRLSKRGPQLLRCRLYNAGMAAAHSKLFKPLYLALRARGLRSTEAIVILARKLARIAFALYRSGETFDAAKHLQTA

SEQ ID NO: 188933 - protein, 341 aa, unidentified
MKNLFIGVDFSKEKVDVAIIFADGLTETAARVFNEFKTTVSGYKQLVKWVEQNSYGIDSSLWLFCGENTGDYSKGLCNFLYGKGYDMWLENAKSIKDASGLRRLKSDRADASMIAEYAMRNYDKAVMYEPLSESLAQLRELFLYRQMVVRHRCSFQVRRGEKRLTMEKSPVKTMISQSGRHIVSELNKEVEKIDKRIAELIKSDEELTEVFTIVTSVPGIGTQNAVCLMVYTDNFRRFNYDSRKISCYYGIAPFGKDSGTSVHSEPHVHYMANRQIKAMLTQAALAAVNFNPVMARYYMRLVERGKKKQVALNNVKNKLVHLVTAMVRNRQTFTPEYKISA

SEQ ID NO: 188934 - protein, 361 aa, unidentified
MSGTMTWVGFDVHARSTHGAAIDTMTGELSRLRFGPGIEGPLAWLAELPGPVRACYEAGPTGFGLYRAATAAGIGMQVIAPGKTPRGPSDRVKTDRKDAELLARLLLAGSLTRVVVPPPEVEAARELTRSHDACRRDLMNARHRVSKMLLRHGRVYPKSTTWTAEHRRWLSAQQFPEPTSDLVFADLIASVDGLTSRKAAIALSLSEVATDERWWPTVSRLRAFRGIDTFTALSLHLELGGDWKRFERAPTLSAWLGLTPSLSQSGESSKQGAITKTGSTLARRLLVESAWHYSRQPRLGATLANRQAGQPDHILAISNRAQQRLFKVNRAMKARGKPHNVVVVACARELAGFLWAAVTAD

SEQ ID NO: 188935 - protein, 410 aa, unidentified
MEVLHPHCAGLDLHKDTVVCCVRHMVAGKVTAEVKIFRTTTHELMTLSDWLSAEGVTHIGMEATGVYWKPVCHILSDGEFELVLANAAHVKNVPGRKTDVNDAAWLADLMAHGLIRPSFVPDEPTQQMRDLLRTRKQFVRERTGHTQRIQKTLEDANIKLDSVISNIVGISGRRMVDALIAGQTDPEALAALADGRLKAAPAELEASLHGRMTAHHRFMLRLHLDQFDALDAAVARIDKEVDANVGPFLAAIQMLTTIPGVSSLSAEVIVSEIGIDMSRFRTEGHLISWAGLCPKNDESAGKRRSNRMKKGAPWLKTTLIQCAWAATRTKGTYLHVQFLRLRSRRGAKRAIGAVAASILTAAYHMLKNGTLYEDLGASHFDNREKGKQVLRLVNRLQNLGFVVQIIPVAA

SEQ ID NO: 188936 - protein, 403 aa, unidentified
MAAISAIDWAGEHHDVRIADEHSGVVLVERRFAHEEAGIGALIDVLVEQRVTRVAIERPDGLLVGRLLAAGVTVLAIDPNQVAAARDRFRAAGKHDRFDAMVLCELARTDAHRFPMLAPSGDQTLALRALVGTRQDLVGARVALANQLRARLDASWPGATRIFADIDSPIALCFLARYPSHADARGLGPKRPQAFLARHGHSGRRPVEELLDRLRSAPTAAIGELETEARRSAIVGLVRAPRPLVEQIGQLTSEIRGAIRAHPDGPISLSFFRDPNSVLTAAGLPCEIGDNRARYPDNDALAADGGQAPVTNQSGRHRAVSFRSACDKRLRNHLCVLADSTRHRHPWAHDVYQRAIDRACDHPHAIRILGRARTRVLWRCRQDHTPHDPTQHRALTRHLTQQG

SEQ ID NO: 188937 - protein, 317 aa, unidentified
MTTASEAYVGIDVGKTWLDVALWGSEDVWRVSNDDDGVAKIMTQVAQVEPQLIAVEATGGYEQLLVQSMLLNSLPVAVINPTRVRALAKATGKLAKTDAIDARLIAEYAFKIQPERLGPQEANEIRLRALVTRREQLVEMRTGEQNRLGTAQNSMQADIREHIEWLSSHIEGLEAQINELVESLPEWREQAERLDSIPGVGRITAVTVLAEMPELGQLDRQKIAALAGLAPFNRDSGHQRGKRRIFGGRKGVRRVLYMACLSAKKHNPVIRAMFERLMKKGKVFKVAITACMRKMLTIMNAMTRDQVNWRAPKAVPS

SEQ ID NO: 188938 - protein, 319 aa, unidentified
MTVCVIVDRQDGSAPEYQKRKLATHTEGIRELSTWLERCQVTDVGMESTGVYWKPVWNALEGQWGLHLSNPQHMRAIPGAKTDLRDGTRVGELLAYGKLPESFIPPQWQRELRDLTRLRARLAQETTRAGNRILKVLEDAQIKLDCVASDALGVTGRLILNRLVAGETDAAKLAELAVGKLKKKKAQLQQALEGNFTEHHRFQIRLLLKAVAEYEDKIFQLDRRIEQYLAPHEEIVRRLDAIPGIDRLGAAIILAEIEPEMSHWEAARKLASWSCARARGSGSAVVRAEATAGCGALSARWPGRPPARRTATSKLNTAG

SEQ ID NO: 188939 - protein, 341 aa, unidentified
MNQYAGIDVSLECSSVCVVAANGKILREARVASEPEALIAWFRSCGFELERIGLEAGPLSQWLVAAMREAGLAVELLETRHVRKAFEAMPVKSDRNDARGIAQLMRLGWFRPVHCKSMSAQETRTLLTARKLVQSKLRDVENSLRGILRGFGLKVGKTTERGFAGRIEELVTGHPHLQVIARALLSVRAVLRKEFAAFQKQTRKMAQSDARTRLLMSTPAVGPIVALTYASAIDDPARFKSSKQAGAHFGLTPKKYQSGETDYTGRISKIGDSSVRTVLYEAAHVMLTKPVKGCSQLKSWAMRIARRAGMSKAKVALARRLAVIMHRMLADATPFNAAAAA

SEQ ID NO: 188940 - protein, 387 aa, unidentified
MSRNARVPVPTTTLDPDSTLVVVLELSARSWLVGARVPGVGRLSRYALAPSAEALAGWLGTTKARAAAAGRTVARVVLAYEAGRDGFWLARYLGARGVEVYVIQPSSVLVDRRARRAKTDALDVEMLMRTLLAWLRGEPGVCSMVPIPDAAEEDGRRPVRERQGLIGERLALLNEIDGLLATLGITGYRPLRQDRRARLAALRTPEGDPLATNAAARIGRILDRLELVMQQIAELEQARDAVIAKAAAASEAETMIRGLARLKGIGAELATVLVWEAYVRSFPNRKALGAYAGLTGTPFASGSTTREQGISKAGNRRLRSSLVELAWLWLRYQPDSKLAAWFRSRTGSVGSRMRKVIIVALARKLLVALWRFCRAGVLPEGAALKAA

SEQ ID NO: 188941 - protein, 318 aa, unidentified
MLIHYIDIAKRNFVIAVSSLSKTKTETNNPKGIAHTIEYLKKHKVALVVTESTGGLEIPAAKAIRRAGIAVIIANPRQTHQFAQSQPLTKTDAKDAKMPAFFTQMMTQKEDWQTMPYQPPTEAEEVLEALVNRRNQSADMRTAEKNRLHQVHETQVGSVKQLIAHFDRLIDELDKQIDNHTHTHFDGKAQVAEQIKGIGSITTATLMAMLPELGRLSHKRIASLVGIAPHPRESGETKFKSRCFGGRSAVLKALYMATVAATRFEPLIRDFHQRPLSEGKPYKVAVTACMRKLLTISNARMRDYFAENDTAENGIRTA

SEQ ID NO: 188942 - protein, 342 aa, unidentified
MYYIGLDVHKKTISYCVKDASGQVHREGTIGANRNELDWWMKTLPQPWTVAMEATIFTGWIYDHVLPHAAQVKVAHPVMLRAIALAKKKNDRIDAGKIADCLRCDFLPECHMASTEIRDRRRSLRYRHLLVRQMVQMKNRVSGLLLETGVSHNKQRLHKVRYFQELISNQEEVPESIRPLLKLSRETIVRCQKTEYALVSSLQRDPLLAERIKRLRTVPGVGPITALTWALEIGDVSRFRSIKQAISYCGLCGDEKSSADKILRTPLSKQRNKHIQSVLIEAAKLAPRQNHELALIHEREKQKGNANRATLAVARKMVAYLLAVDRREKDFVPSEERSTAAA

SEQ ID NO: 188943 - protein, 391 aa, unidentified
MVCVGIDVAKDKHDCCILDSDGTIRADCITIPNNMDGFKQLLQTIRDCTKKSDKIKVGLEATGHYSYNILGFLLDNDLAVYVMNPLHTNLYRKSLSLRKTKTNRVDARTIATMLLSDVDLKSYTDTAYHNEELKSLTRYRFDKVRERAKLKQSVSRLVTILFPELEKLVPSLHIASVYALLSEYPGAKQISEIHLTKLTNLLATASKGRYGKDKAIQIRDAARTSIGSVMPAKFLELKHTIKLIRELTSEIDEIEVSIQKIMDELNPPILSIPGVGIQSAAMILAEIGDFSNFESPDKILAYAGCSPSTYQSGKLTNCYAHMEKRGSRYLRYALYNATKYVCHWNPVFAEYLAKKRAEGKHYNVALSHATKKLVRLIYALQKSGKAYLVAA

SEQ ID NO: 188944 - protein, 352 aa, unidentified
MTVTIVETRAETRAITGGVDTHADVHVAAALDPIGGLLGVREFAATTAGYARLLDWLAGFGTVALVGIEGTGSYGAGLARHMAGAGVRVVEVDRSDRQDRRRQGKSDPLDAVSAARAAQSGRARGAPKGRDGAVEAIRALMVARRSAAGERTRAINQARALLLTGPDDLRARFTRHTTAALVTGIARLRPRPGDVVGYAVRVALRELGRRAEFLDGQLECLDELIVPLVAARAPGLLAMYGIGPHTAALLLIAAGDHPGRIRSEAAWAHLCAAAPIPASSGKVTRHRLNPGGDRQANHALWRIAFTRMGSDPATRAYVERRTSEGKSKAEIIRCLKRYVAREVYPHLRPAAG

SEQ ID NO: 188945 - protein, 340 aa, unidentified
MQAIRFGIDLAKSVFQIHGVSATGEVVVRRQLRREQMLKFFAKQPPALIGMEACGSAHYWARELAKLGHDVRLMPASYVKAYVRRNKNDARDAEACCEAVSRPTMRFVPIKTVERQCGRAIHRARDLLVRQRTQTANAIRGLLYEMGLIASKGREGIGSLIEQIEAADAPIPPPLLVSLRPLAAQWRALDAEVARLDQAIAHQVRQDPLAQRLMTVPGVGPLTAHAVICAVGDGRQFGSARDFAAWVGLTRLNHDTGGKTRLTGHISKAGDQSLRKLLVLGAQSHLRRVRASPTGGSAWVRGVLARRPVKVAVVAQAAKTARIIWALLRSDQTYRAPAAA

SEQ ID NO: 188946 - protein, 428 aa, unidentified
MTSQNSIPADAVLVAIDIAKVRNEVLIEAPGHKRRRRLSVLNTRAEHDHLIAILQSYDRPVVCAFEATGNYHRPIAWRLVEAGFETRLVSSLALARTREALHNSWDKNDPKDAQVILHMLRIHSTQVYHDPLRAGINDVQELSKTHEAIANAKTEIQHRILTHYLPLYFPEIERFRGNSRSDWFFAFLDAFPTPSSITTLTKEKFVEAAWDVVGRKVSKSQILMDIYETARTSIGLPLPLDAPAIRMFRMVVAEARSLIRQRNEIEAQADDLLRNSRDYQILRQIPGIGPINALTIIAEAGDLRRFHHHRQFLKFCGLDLSTQQSGQYRGQTRLSKFGNARLRRTLWIAGQVAIRQRENGFRHKFERYIARDRDNPDLRRKAMTAIPPRWRVSYTPSSKAVQITGPSLKGGYQVEEPLSVRAVRASFE

SEQ ID NO: 188947 - protein, 354 aa, unidentified
MQKVIKKVVGIDVSQKTLDVQMGMFYDSLESILFTHRVLANNEKGFERILELCIKDLGGLDNVEFVMEATGVYHEKLAYYLCAKGLKVSIVLPNKISNYMRTLVTKTITDKTCAEALTRFGLERNLDYWSPPKKVYKELRRLVRERDQIVLERSGVKNQLHAEKASKDPLERTVARLEERINFLNSQEKEIKTDIDLIISRDGVLDHEVKLMTSAPGVGVLTAVTILAETNGFELIKNKKQLVSYAGLDVREKSSGTSVRGKARISKKGNKYLRKAMHLPALTAIKWNENYKAVYARQTQKHGIKMKSVVAVQRRLLELTYILFKTQTAYDKDYEKKVAHQKDNALHRLAQDCL

SEQ ID NO: 188948 - protein, 339 aa, unidentified
MHVTTIGLDLAKNVFQVHGIDDNGEIAFNRALRRAQVLAFFERLEPCLVGIEACGTSHHWARELIKLGHNVKLIPPAYVKPYVKRGKSDAVDAEAICEAVTRPTMRFVEVKTPEQQAILAVHRTRDLIVRQRTQTINMLRAQLAEFGLVLPQGVYHPLRFAKDCVDGEQPDLPKDAQEVVLDLCDELLFLHAKILRHSRHMTQIAKSEKRVALLRTIPGVGPITASAIVATVGSGKQFNNGREFAAWLGLTPLNRSSGGKERLGRISKMGDQYIRRLLVLGMTSRIRSIRLEPERFDQWFADILSRKPSRVAAVAMANKTARMIWAVLTRNEPYKVRTA

SEQ ID NO: 188949 - protein, 348 aa, unidentified
MSEIKRIGIDTSKAVFTLHAVDEAGKAVLRVNLRRAQMIPFFRKRPATEIALEACGSSHDWARKLIALGHDVRLIPPQYVKPFVKRAKNDRNDAEAICEAAGRPGMRFVLTKSAEQQAQGMVLKVRETLVGQRTQLANTLRGHAAEFGVIAAKGISRIAALLEAIEAETTIPLEAREMLALLGQEIEHLDTRIKELEAKLSAVHKASAISQLLATIPGIGPIIALTLSTEIDPSAFESGRHLAAWIGLTPKEHSTGGKQRMGGISRAGHERLRQLLVTGATAVIKLATRPGNKLATEWLLKLLQHKPRKLVAVALANKMARIAWAMMKSGEAYRQQPVADVSALTVVS

SEQ ID NO: 188950 - protein, 309 aa, unidentified
METIVGVDVSKDRLDIAVIPEGESFAVSNDDAGVGELAKRFAAHPPHVIALEATGGFENLAAAGLTAAGFAVIIINPAQVRAYASAVGKKAKTDTIDAALIAAFVQATKPQIRPLPDTQTQELSELVTRRRQIVQMITAEENRSRMVTAQQSRKSIKRLLTALRRELESLDADLNDHIRNSPVWRVREELMTSVPGVGTGTARTLLAELPELGRLDRRQIAALAGLAPWTRQSGKWKGKSFIGGGRSKVRAALFMAALVASRFNPVLKAFRDKLVAAGKPKIVAIVATMRKLLTILNAIVRDGKPWQTA

SEQ ID NO: 188951 - protein, 402 aa, unidentified
MEADQLWAGADVGKEHHWVCVVDDKGTAVLSRKLTNDEQPIRELIDEIDALGCDVSWTVDLTTVYASLLLTVLADAGKSVRYLTGRAVWQASVTYRGGEAKTDAKDARVIADQSRMRGADLPVLHPDDDLITELRMLTAHRADLVADRTRTINRLRHQLIAVCPALERVAQLTQDRGWVVLLTRYQRPKAIRHSGVSRLTKMLGDAGVRNAATIAAAAVTAAKSQTVRLPGEDVAAGLVADLAGEVVALDDRIKSTDADIEDRFRRHPAAEVITSLPGMGFRLGAEFLAAVGDPTLIGSADQLAAWAGLAPVSRDSGKRTGRLHTPKRYSRRLRRVMYMSALTAIRCDPHSKAYYQRKRDEGKRPIPTTLCLARRRTNVLYALIRDNRTWQPESPPITKSAA

SEQ ID NO: 188952 - protein, 342 aa, unidentified
MSKEPGPPFFANPNSCEGTTPHHKAGTEDMAQIARTVGIDVSMGWLDAAAYPSGERTRVSNDIAGHRQLIDWLKSIRPRAIGIEASGGYERDISIALHHAGLSIRQVNAWKLRQFARAAGQLAKSDPIDALMIGWFTATMPTREKNHDPVHERLVELVTARRQLVDLQTELSNQLGHLRDPELRRVRQRRLHQLALDLVRLDQRIAAAIEAVPPWRRKYRILCSMPGVGPVLAATLLARLPELGAITHREIGALVGVVPYDFDSGKMKGLRCIFGGRADVRRVLYMAAQSGGQHNPVLKTLKERLLAAGKKPKVAVVAVMHKMIRMMNAMLRDDTEWRTVPA

SEQ ID NO: 188953 - protein, 321 aa, unidentified
MNKCSQIYGVDISKNVFDVVDSEGNHSQFKNDGNGFKTFQKALPADALVIMEATGYYHYRLAQFLYEQRVKVSVVNPFSVKRFIQMKLFRIKTDKSDAKAICEYATINEVPLYTARDKNQAECLQLMRLIDIYLKQSTALKNKLHGEKTLGKPSKAVYHSLNRSLKAVQKEIQILEDRLMEIVKEEQQKQLTLLKSIPGMGSKTAIMLIVLTDGFSNFENARQLCSYTGITPSLRESGISVRGRSRITKMGNAKLRNLLFMCSFSACKHNKACREIYERIVAKGKSKKLALIAVCNKLLKQAFAIAKSGLPYQENFVSKLA

SEQ ID NO: 188954 - protein, 343 aa, unidentified
MDKIITIGLDIAKQVFQVHGVDAAGGVVLSRQLRRGEVLKFFAKLPGCVVGMEACASAHYWAREIVALGHEVRLMPPTRVKAYGRRGRKNDRADAAACCEAVTRPSMGFVPIKTPDQQAALMLHRARQMLIEQRTRLGNAIRAHLGELGIVARKGAGGLAALLQMLETAQDERVPAAIRPILQPLVEQWRGAAAQIAVLDRQIAAWHASNDASRRLATIPQIGPIIASALLATAGDATRFKNGRQFAAWIGLVPSQNSTGGKERLGAITKAGDRYLRQLLVVAASGMIRRVRANPLLSPWLAQLLARKPAKQAAVALANKLARIAWALLATGQTYRTPTAAAA

SEQ ID NO: 188955 - protein, 343 aa, unidentified
MDTVTTIGLDIAKSVFQVHGIDGAGQPVVRRQLRRRQVVAFFRKLEPCLVGIEACASSHHWARELMALGHDVRLMPPAYVKPYVKRHKNDATDAEAICEAVQRPSMRFVPVKSPDQQAGLMLHRTRHLFVRQRTAVINSIRAFLAEVGIVAPVGRRGLDQLLQLIAEGKDQRVPPSARTCLVALSIQLGALHEQIRILDRRILGWQRTDEVAQRLIAVPGVGPALATALVASVADPKAFRSGRDFSAWVGLVPKQNSTGGKVRLGNVSKQGDRYLRSLFTVGALAVIKYAKKHGTGHRPWLAQLLDRRPVRVAAVALANKLARMAWAIMASGEPYREPVALAR

SEQ ID NO: 188956 - protein, 365 aa, unidentified
MNEITTYVGIDAHKKDLFVAMLIGDAQTPVTWTVPNEPAAVRRLVRKLERESPGPVRVCYEAGPCGYVLQRQMTTARVTCQVIAPALIPRKPGERIKTNRRDARKLGELLRANVLTEVRPPTPEEEAVRDLCRARDDAREDRQRCRHRVGQFLLRRGLHFPRCHWTQTHRAWINSLVWTHAAERTLMEEYLLALDQIDARLIALDQQLTDIAETAPYREPVGWLRCFRGINTLSAMLILAELHDFRRFKSPRALMAYVGLVPSEASTGETHRRGHITRAGNALVRRLLIEAAWHYHHRRAIGATLIARRNGQPGRVIAIADRAQQRLCRRFRRLVERHKPVPKLAVAIARELAGFLWAALQAPAV

SEQ ID NO: 188957 - protein, 346 aa, unidentified
MSVYAGLDTSLDAVAICVIAETGEILWQGKVLSDPDAVTAALQRWRDDLVRVGLEAGATSEWIGGHLVDEGFPVVCLESRHVKAALGAMTVKTDRNDAQGIAHIVRTGWFKAVHLKSAAGQRLRTLTAARKAAVRAVTANEQVIRGLLRPLGLKIGAVTRVRFEARVRQLVGADRLLLGIFEPLLQMHRCLRENLADLHRLVLRAVRVDPICRRLMTMPGIGPVTALTYRATIDDPKRFRRSRSVGAYLGLTRRRYQSGEVDRVGRITKVGDSETRTASFEAANVILRPTTRWSSMKAWAMKIANRQGARRAKVALARRMAVTLHRMWVDEQDFRWSAAQAELSTE

SEQ ID NO: 188958 - protein, 334 aa, unidentified
MQNITLIGIDLGKHSFHIHCQDKSGKALLRKKFTRTKLMQFLATCPPSVVVMEACAGAHFMARCISDFGHETKLISPQFVRPFVKSNKNDFVDAEAICEAASRPSMRFVQPRTETQQAMRALHRVRESLIRDKVKTTNQIHGFLLEFGISLPIGDAVIKRLSLVLAEHEIPEYLSRLLVRLHTHYFYLVEQIAELESELSQSINADDTAQRIMTIPGVGPITASLLSSQLGDGKQFSCSRDFAASTGLVPRQYSTGGKSTLLGISKRGDKNLRRLLVQCARSFIMRLERKHGKLAEWVREQLNKKHSNVVTCALANKLARIAWAITTQQKEYQA

SEQ ID NO: 188959 - protein, 395 aa, unidentified
MAATVVALDVGKNKAALSVTGADGHRVFGPADFAMTAPALAALLERVKAVLPAGPVKVAVEAAGHYHRPLLGSGVWPAGWEVLELSPARVAEQRRVQGRRRVKTDAIDLAAITELVLAGHGIPSTARAAPVTELTGWAMHRSRRVQSRTATKNQLLAQLDRCFPGLTMVLPDVLGTKVGRLVAAEFADPHRLAALGASRFVRFAANRGLRVRRSRADRLVAAARTALPTPEAGVAHHVLANDLVLLACLDVQIGAAEAKLAQLLPDTPFAPLTTVPGWGTIRAGNYGAAVGDPRRWFGARQLYRASGLSPAQYESAGKRRDGGISREGSVALRRALIDLGIGLWHADPAARRYGQQLRARGKKGGVIGCAMAHRANKIAYALVRDQSGYDPGRWA

SEQ ID NO: 188960 - protein, 459 aa, unidentified
MAPRHKGNPPNAKSATQKSLHVLHPHAAGIDIGAREIYVAVPPGSDPRPVRAFPTFTEDLHALRDWLQACGVTTVAMESTGVYWIPLFQILEAAGIEVCLVNARHCKNLPGRKTDVQDCQWLQYLHAVGLLRGSFRPADQVCAVRTILRHRDALVRGAGRCVSHLHKALTQMNVQLHHVISDLTGVTGQAILNAILAGERDVQQLAALKDHRIKASRDTIAKSLCGDWRAEHLFTLKQTHALWSQHQSLIAECDAQMEQMLKAFDARVDVAAAPLPLQTKTRHKKAQRNEPQFAARHECYRVLGVDLTAVPGFATPTVLVLLCELGPEFAEKFPSAKHFGSWLGLCPDNRITGGKIYSVRTRDVKSRVAEALRLAAQSLWRAQNYFGDLYRRWKARLGSPKAITAMAHKLARILWHLLKYKQPFNPEVFAKEEAKMKRRKLARLEAMAMTLNYRLVPNQ

SEQ ID NO: 188961 - protein, 437 aa, unidentified
MQEVEGEPLFCERAAGIDIGKQSVFVTIRVPSDARESARQQETREFRTVRKDLLALADWLRCWGVGKAGMESTSDYWKPVFFLLEREGIDCLLYQASQVKALPGRPKTDKLDSVWLARITEQGSLAGSFVPPEEIRRLRTHTRYRRKLVQMRTAQKERSEKLLEDAHLKLSSVISDIHGVSGRAMLRAVIAGERSAKALAQMARGVMRRKIARLEEALDCSFFTPEHAFILQMMLDSIDQLTAQIAVLDERIAALCEPYERQIAQLDAIPGFGVTAAQDLIAEIGVDMSAFPTAGHLCSWARVAPRARESGKRKGKSATGRGNPYIGGTLGETAASAGLTQTFLGAKLRRLRRHMPKKKAQGAVMRTQLVIAHALLSDPAAEYQDLGPGYYEQRADTRRQARNHARAIERLGYKVTIEPIGPDADPETGELVTRTAS

SEQ ID NO: 188962 - protein, 353 aa, unidentified
MKYDKYMGLDVHQAMTVAVVMDAEGKVVLETMVATEAAAVLRLVKSLSGPMRVTFEESTQAEWLYELVRSHVTQVVVCDPRRNKLLSEGSKADKVDARKLADLLRSGLLRSVYHGHQATRKLKELVRAYETFSLDTQRTMNRIKAIYRGRGIATPGRGVYQARTRDQWLAKLAEPGLRQRAAWLYQQLDQLKPLRKQAKQVMLAESRAHRAVSLLRTIPQLGPIRAAFIVATVDTPHRFRTKRQFWSYVGLAVVTHMSAEYEMKAGKVVRRRKPVATRGLNRCCNHRLKEVFVSAATGGTRDESYKLYLERLINNGMRADMARITLARKIAAVALILWKKGKEFDPRELNRTT

SEQ ID NO: 188963 - protein, 359 aa, unidentified
MLEGKIDHVIGVDTHRDSHAAAILDPNGGLVAELTVTSNQAGSEALLGVVAQRAPGRRCWALEGTGSYGAGLASFLADQGEWVTEIDRPKRPRGRNGAKSDPLDAIRAGREALGRDHLASPRQRGHREALRVLQLTRSGAVKVAADSRRQLKALLVTAPEPLRAALCGGTWLAQARACAVLTAEASDPVEYRATVRALRLTAERALAAHAEAKQLAEELQMLVAVMAPALLAQPGVGPITGAQVLISWSHPGRLRSEAAFAMLAGVAPIPASSGRVVRHRLNRGGDRQLNRALHTIVMLRETWHEPTKRYVTRRTAEGKSRREIRRCLTRATARQLFRLLERKAGHPVAAGQPALPPTP

SEQ ID NO: 188964 - protein, 376 aa, unidentified
MNENLRFLGLDVHAETIAVAVAEPNGEVRSLGMIANREDSIRKFIRKLGSPEHLRACYEAGPTGFVLYWQLTQLGVKCDVVAPSLVPKKPGDRVKTDRRDALKLARSHRSDDLTAVWVPDEGSEALRDLVRAREAAKQDQLRAKHRLTKFLLRTGQRPPLGVKAWTEKYVEWVQQVRYTHPAQEATLLDCLNEVQHMEERVKRLEQSIVEVIQLAPAPMQEVVRGLQALRGIAHISAVTIAVELGNITSRFESARDLMGYSGAFPSEDSTGKRIRRGGITKSGNAHLRRIVVESAWSYRHRPAIGARLRRRQEGLPAEITEIAWKAQNRLHKRYMTLMARGKEQRKTMTAIARELLGFIWAIGIKAEAACKQQMAA

SEQ ID NO: 188965 - protein, 320 aa, unidentified
MSQPDLQCMGIDVAKATLDVAGTEGMTPFTVSNDGAGFTEITDRLRGPGISLILMEATGGLEAQAAGFLQSEGFDVVIINPRQARDFARAMGHLAKTDRLDAAVLAQLARVIDRHPDRNRYIKLMPDAARQALTALVVRRRQLNQMLVAERNRLYPSHPDGRESIRRVMTALKAELALVTRMMNRQVRQHFRDQARQMTSVKGVAEITAATLLAELPELGTLTRREISALVGVAPVNRDSGKMRGRRTIFGGRAGVRCTLYMAVVTAIQFNPAIRAFYVRLVAAGKAKKVALVACMRKLLTILNAMVRSGTYWEDHSAPS

SEQ ID NO: 188966 - protein, 427 aa, unidentified
MPYHIAGIDVHKKMLAVAVADVAVEGDFQFERLKVGTSPVQLRALADWLVEREVDEVVMESTAQYWRPVWEALERYWRPTRRTHPAASPVSGTLHLAQAQSNRAAGGRKRDFPDAERLVKRLVAQELTLSFVPDAEQRLWRTVMRRKYQITRNRVQLHNRLESLLEEAHIKISSVVSDLLGTSARRMLHAVGDGETDPTALAALADSRLRATPDQLRDAFGACADLHPVYRRLVKLTLDEFRLIEDQLAQLDQQMAQLLTHHHDAVHRLAEVPGLGVDSAQQIIAEVGASAAAFPSAKQLASWMGACPGNEESAGINYSHRCPKGNRQMRRVLNQAANAAVKAKGTIFAIVYRRLVPRLGHGQAIGAIAHRLCRLIWKILHEGICYEERGPAVSVEAKKVRTRKMIRELRTLGYRVELPQAPSSSPA

SEQ ID NO: 188967 - protein, 373 aa, unidentified
MKKRSSSEKSQKRTAKTKRTQERVTIGIDLGDKTSRYCMLSNEGEILREGQVTTTKAGMVEAFGSLGRARIAIEVGTHSPWVSRLLQKLGHEMVVANPKQVKLITESSRKDDRLDAQTLARLARIDPQLLRPIQHRSDKAQGALMFIRVRAALMGVRTSLVNTARGLARSMGERLPKCDADQMGVPQAVSLPPKLRQVLEPLLKEIESLTEKIKDSDREIEQIARKDYPETALLQQVGGVGPLIALTFILTIEDKGRFQKSRDIGCYVGLRPRRSDSGQSQPQLRITKEGDPYLRTMLVQGAHYIISRRGPDTDLKRWGLHLAKHGGKRGKKRAVVAVARKLGILLHRLWVTGEVYEPLRNHNARQEQKKIAA

SEQ ID NO: 188968 - protein, 338 aa, unidentified
MKITTIGLDIAKSVFHAVGVDKAGKLIKKKMLRRKDLLPFVAKIEPCLIVMEACGGASYWARELEQFGHVVKLIAPQYVVPFRQGNKNDYNDALAIAEAAQRPNMRFVKPKCVEQQDVQLLHRMRERLTKQSTALINQVRGMLAEYGIVITKSKSAFKAQLPDILVDEANTLTTKGRAIFYQLYEEFTDIDKRLKSCDTQVLNETQNNVVCQRLQTIPGVGPVTATAIYAAVGDGKDFSNGRHFSAWCGLVPKQHSSGGKDNLLGISKRGNAYLRTLFIHGARAVLRHSGSKSDKLSCWAIQLAERRGFNRACVAIANKLARMSWVIAAREEEFRLAM

SEQ ID NO: 188969 - protein, 404 aa, unidentified
MNKSTKKTTGVKRITQFEIIRPQVAGIDVSDNNGMVVAYPVSATEIAVEEFECYTRDLRLLSEKLKTYNIESVAMESTGVYWIPLFLLLQEEGFEVYLVNAKHVKNVTGRKDDEGDAEWIQKLHRCGLLSASFQPDNHTRTLRSIVRHRDSLVKTRSTYLNRMQKALEQMNLKIHTVISDIDGKTGLTIINAIISGERNPEKLADLRDGRIKAPREEIVKSLEGFWSEEHIFELSQCYSLYKFHNEMIRECDLKIEKHLQETIKSKNNGVIYSETGDNWNRFKNEKHFTSWLGLAPNTKKSGGKIISSRVPKKKHYAGQAFRMAAMSLSGNKGPLGDYYRRIRSIAGTSKAIVALARKLAVIYYQMITTKEKYDPQKLIDYQKKYREQKIKNLEKYLNRLKAVA

SEQ ID NO: 188970 - protein, 339 aa, unidentified
MKKSYSPTYLGIDVSKGSLDCCLYNGTEHKTRSFNSNKLSTVQKIISHFKISPDSCRVVLEATGVYHSAAFIGFTSQDFDVAVENPLRIRSFATMKNLLRTKTDPVDAKTIAEYGFINKPVSTKPKEAYQCKVVARLKLIGFFKKLIAQNRNYIEALNNNSFECNATSLITHVKNEINHLNVTINEIKSDIEKILTKHCPELYKQYKSIPGIGPTVAGAIICFYGDFSGFSNSKKAAAFAGLCPKVCKSGSSVDKKGSISKKGNSMLRTLFYMAALSAARCNDTCQEAYLRLRQAGKPAKVALIAIANKLLRQAMALARKGESFIENYKEISPCAAKTT

SEQ ID NO: 188971 - protein, 354 aa, unidentified
MNVTHDGGLVAGVDTHRDTHTAAICDSSGRELAQLQVPADPGGYDAVLAWARQAAAGRELRWAIEGTRHYGLGLARHLAAVGEQVEEIDASKHAGKRRKGKSDAIDAVRAARELLARPHPAQMRADGDREALRLMMCDRDNAVGSAKTARTVLASVIVTAPARLREQLRHIPRDRRVTVCAALACPDDADRQTRVLYQTLARLSERITSLAKTAADLEKQITGIIEDMAPGLVAAEAGLGALTAAQLMLSFSHTGRIRSEAAFAMLSGTAPVPVSSGNTSRHRLNRLGDRQLNRAFQVIAVARMRSDPRTKAYVRDRIAEGKTQREARRCIKRYLARHFYRVLTHQPGLAPRTT

SEQ ID NO: 188972 - protein, 385 aa, unidentified
MPKPNDLSRSFTAFEQDSTLIAVIEMSLTSWLIAGILPGIERHPLKKLDVDEEGLLQLLHRWRDEAINAGREISRIVLAFEAGRDGFWLARWLRARNIEAYVIHPNSVAVSREHRRAKTDRLDTELLKRAFLGWLRGESDHCSMAAIPTLEEEDARRPNRERENLLGERTRIVNRMKACLVRFGVRNFKPTLRKAPERLKTLRTPEGGPLPPNSFAELRRDMARLRFVMDQIREIEEARLQRLEHSPNEGLHPMVRLLARVIGVGIETADMLVHEILSRNLRDQRAVARYAGLTGSADESGKRRREKGLARAGNARVRRGMIQLAWRFLMFQKESALVQWYRSVTNEVRGARKIMIVALARKLLIALWRLVRTGEVPQGVALRTA

SEQ ID NO: 188973 - protein, 369 aa, unidentified
MGKYSEVFVAFDVAKKKHAVAIAEGGRTGEVRFMGNVENNPAPIERTIKRLATRYARLHVCFEAGPTGYGLYRQVQALGHDCMVVAPALIPKRAGERIKTNRRDAVTLARLHRAGELTGVWTPDPAHEAVRDLARAREAAGDDLRRKRQQLLSFLLRHSRIYSGGGHWTLAHRRWLAGQKFDHAAQQIVFQEGIDAIEDSLQRLRRVEKQLGLVVPEWSMAPVVEAYQAMRGASFLVAVTFAAEIGDVRRFDTPRQLTSFLGLVPAESSTGDTIRRKGLTLAGNRRARRALVEAAWTYRYPARVSETLRARLEGLPKPVRDIAWKAQVRLCARYRRLSATGKKSPVVVAAIAREIAAFLWAIGQVVAPA

SEQ ID NO: 188974 - protein, 355 aa, unidentified
MTTTKYIGLDVHKESISIAVLNLAGKVVMECVIETKASTILQFIHGLRGDLHVTFEEGTWAGWLHDLLKPHVTELVVCNPRKIALLKDGSKSDRIDARKLADLLYMNKIKPVYHGEHGLRMLKELSRSYLTISKDLGRVMNRLKALYRSWAIPCAGTQVYAPRFRSEWLSKITEAGVRRRAELYYQQLDALRLVRQQARKELLAEARKHRATKLLRQIPGIGPLRAAHLVALMQTPHRFRTKRQLWTYSGLGLETHDSAQYRVVEQQLQRSKKPVTLRGLNTNHNHDLKDIFKGAAMRASTAAGPLHDFYEALLAKGRKPTMARLTLARKIAAITLIVWKKEVRFDANYLKQQAA

SEQ ID NO: 188975 - protein, 340 aa, unidentified
MSLVLQSILPYPDSCLGTSPHQQGWDTKMEKLSYGGIDVSKDCLDVVVLPEGWFFSVSNDTAGWAELVARLRPLAVSAIGLEPSGGYERGIIRALLAAGLSVRRINPNKLRQFARARGVLAKNDRLDARLIAEYVAIMPTRVVQRDDAVERLAEIVTMRRQLCDEHVAVENQAAHLEDAMLRRLSKRRLIRLEADIRLLDKRLAEMVATNAAFAQLYELLTSMPGVGPVLAFTLIALLPELGKMSRKQIAALVGLAPYDFDSGKLRGHRSIYGGRMPIRNVLYMAALSASRHNPALKAFSNRLAHANKKSKVIIVAVMRKMITTLNAMLRDNAAWQPQSA

SEQ ID NO: 188976 - protein, 359 aa, unidentified
MSRCIPTDAAAITLGVDTHKDVHVGVALDGVGRRQGTLSVPANSAGYGRLVEWASGFGPLAHAGVEGTGSFGAGLARFLKARGIKVSEVIRPKRRDQYRSGKSDPIDAEAAARAVLAGTATGEPKDADGEVEMIRTLRIARRSAVKARAQAVSQIKTMLITAPEGLSSELCGLSTARLLEKASRLRPGANPSDVVEATKFALRSVARRYQRLSEEICELEEQLERLVAETAPEQLVAVEGVGTDTAASLLIAAGDNPERLESEAAFAHLCGAAPIPASSGKTVRHRLNRHGNRDANRALYVIALCRMNRDERTRRYVAKRTAEGKSKKEVIRCLKRYIAREVYRILSSLSLRKTSISAA

SEQ ID NO: 188977 - protein, 407 aa, unidentified
MLFIGIDLSDKFFDSCITNSDGDVLATNRFSFDDDGFSEFTCKVTSHESDNQNCIIGIENPRCRLVDFLIQRGFNVIVTHPLCISKYRESRMPSKVKSDPLDAKLIADYIREHHKSLRAVIIPDDTIRELSILLEDRDKLVEQKTRFSNQLTVTLKEYFPEALEAFGSITNKSALDFLSKFDTHQEVKSLSSQKLDNVLAECGFFRTDSKERFHRAMSKRPSVISKAVIKTKVMLKNVLVGHLLLLISQIEEYDKQIQRLMDDTPDSNIFRSLPGADYILGARLLVLYSIREFTSSSEAQSFFGTCPYTSRSGNMTRVGFRKGCNHFGRNTFHQLAFCSLKSSQWAKKQHAKKRKEGKKVHHSLRCVANTWVKITYAMWISKTPYDESKHLASIASHIMNQPSFIQV

SEQ ID NO: 188978 - protein, 356 aa, unidentified
MAGVLKKSARADPAVQTNANSNQSTPSQSRMNSTCSSLAILGLDVAKASVQAELQSTSGSKVRFAFANNPTGFKKLARVLEQHPPAMLHAGLEATGPYSQALARWLQEQGYRVSLLNPRRVKDYARSAGLRNKTDALDAGVIADFVRAHRERLPGWRPAVAEVQQLQELVRHRHQIEVILLAEKNCLEATPDTVRCSIERLISMLRAEKASLERALAQQIDSHAQLARNHQLLRTIKGIGPLSATVLLAEMAGPDQVQRARQAAARAGLSPRRQQSGTSVRRNKGIGKEGSRYLRKALYMPALVAIKHNAPLRHFARKLQAAGKPKMAIVCAVMRKLIHISFGVLKHQQPFNPSLA

SEQ ID NO: 188979 - protein, 335 aa, unidentified
MKHYAGIDLSMETSHVCVVDAEGRKVAAQCVDSTPEAIAALLERHGPVERVVIETGRMTPWVARGLHELGVAIVCIDARQAHQSLKAMKANKTDPHDAAGLAQLARTGFYKEVHVKSPTSHGVRSVITARAHLVEARVRLDNTIRGLCATFGIRPGAGQGERFLARVQAAVAIPGLGEAVASPLRARTGLVDEIRQMDRALKAISIASPACQALMSIPGVGVQTSAAFAAAVDEADRFKRSRTAGAYFGLVPRRHQSGELDWTGRITKQGDGTVRKLLYEAANSILTRTRQTFALKTWALKIAKRRGLKKARVALARRLAVIMHAMLRDGTLFEA

SEQ ID NO: 188980 - protein, 344 aa, unidentified
MTSIDYIGLDIHKKTISFCAKAQDGTILDQGTIVARRDTLLAWAKARPRPWIGAMEATLFTGWIYDLLKPLAQELKVAHPAMLKAIAASKKKNDQVDARTIADLLRCNLLPECYMAPSAIRDLRRVLRYRNLVVRQATRMKNRLAGLLMETGTPYNKERLHGRAYFSELLESLREVPRSVVELLQLSRGQLEFFATIQRRLLKGLCQNPDLSERVARLQTIPGVGEIMALSWALEVGEVKRLPSIAQAASYCGLTSAQHNSAGKEQRGPISKQRNKHLQTILIEAAKLAPRHNPQLAVVHERELKRGDRNQATLAVARKLVAYLMAVDKSGKPFAMRASGEEAA

SEQ ID NO: 188981 - protein, 436 aa, unidentified
MRGCRCSMIMGFTKPIEHFNLQRKKVITMNTLYVGIDVSSKSNVVYLMLPNGDKHSNFSVANSHEGSTLLVKKIYSALTSHSLDTVLIGLEATSVYGDNLVYFLREDATLAPFNRKIHVLNPKQVKKFHDTYNDLPKNDYVDSFVIADCLRFGRINKEVYMGDYRYKALQNLTRARFFAVQNLVKEKQRFMNVLFKKYSTMTQEKVFSDAFSTTALAVYDEFESAEALANMDLHELTDFIIEKGKNRFPDPDAVAKAIQKAARSSYRLPKTVNDSVNQVLSISITSMKALESQIKEFDKAIKALMELLPNVLISIPGIGPVYSAGIMAEIGDINRFDNQASLAKYAGLAWKQHQSGGFEAEVTRLIPSGNRFLKYYLCEAAFSLVRCDKEYSDFYHLKYKEVNRCQHKRALALTARKFVRLVFRLLKDNRLYCPAK

SEQ ID NO: 188982 - protein, 440 aa, unidentified
MKTKLRIINPNAGGIDIGAEKIFVCANDAGYKSFDTFTQDLHRAADYLKVNTIDSVAMEATGVYWLPVKDILEAEGIEVVLVRAGDANQLPGREKTDGEDCQWIRTLHQHGLLRPCFIPEEIIRELRTIIRLRQDHIEMAAAHIQHIQKAFTLMNLRLHQVISQIQGVSGRRIIEAILKGDRDAETLAILCDKQILHNKKEEVVKSLNGNYRSEYLFMLEQAYKAWSFYNQLIRECDKKIESWFIRSNENKPEVDSITPEKAIRHHKPEIENFHVKILRLTEGKDASQLPGLTDYSVIRIIAEVGLDLKEWKTEKNFVSWLGLAPKRYSSGKMRRRYKGKQQTAAGQIFKEAAQSILNSKYIGLGSFARKIKSRKGPQIAIKATARKLAVLYYHAITKGMEYVEKGIIEYNKQAKFTEEQRLRKQAYRLGFSLTEIVVHQ

SEQ ID NO: 188983 - protein, 344 aa, unidentified
MGILPLYVGLDYHDDSIQVCVMNSEGVELVNRSVPNDVEAVGELIWNYGPPRSVAIEACCGAADFIEQLGRVYEWDVRMAHPGYVSRLKQSPDKTDYDDAGLLADLLRVNYLPEVWIAPEETRQLRRLSRYRQGLADDRKRLKLRLRALLREERLKYTGEGRPWSKPWLAWVKGAPLGEHARWVMDQHLAALQALEEKLKEVEQHMEQATRDDPLTQKLLALPGIGPVTAFVMRAEIGSFHRFRSGKQLSRFCSVTPLNASSGKKQADAGLVRQGNPDLRRTIIEAAHRIGRYDEKWKALKQRLVSRGKANSVAVAAVANRWIRWLYHQVNNENVDSTLIEVAA

SEQ ID NO: 188984 - protein, 473 aa, unidentified
MERYIGLDVHAASCTAAVVDARGKRVGAPHVLETNGQTLVEFFKLQPGRLHLCFEEGTQSTWLAELLRPHVAEMVVVHVAVSRGPKDDARDAFALAESLRIGAVQTVVYKDTGPFTTLRQLAKAHAMVVQDTVRVQNRLRAIFRSRGLRTDKTLYTKRRRQDWLAQLPVSCRTAAELLFNQYDANSEVRENAYKELVAESHQHSIAKVLETVPGLGGIRVAQLLSVVISPERFRTRQQFWSYCGLGIVMRSSSDWVQTGKGEWSRAAVQRTRGLTWNFNHTLKEVFKGAATTVIQQHPDDPLHKDYERLLADGTKPNLAKVTIARKIAAITLAMWKHKEVYDPAKYAKSSSLVAVPTKVSSVETPHNHRRRGPRRVGFGGEHPLKYWTMPITRSRTRGRKSTWIGYAPPENRRKPWPIDAQRAGWFPHFRMRENMTTASTLAGWRTKWVWTRNEDRLARRQVCDVTRGARAAA

SEQ ID NO: 188985 - protein, 396 aa, unidentified
MLVTVLSDRRADTQTPYRLRRKAVVITMPKQIGSSKPGQALDAVPGQLLVFGGVDTHADTHTVAAIDERGGLLGHAKFPATPAGFDQLHRWLIGHGPVVQVGVEGTGSYGGGLATHLTARGVSLVEVNRPNRATRRARGKSDPIDAEAAARAALAGVATAVPKAHTGVVEAIRVLFVARRGAVQARTAAINTLHQMIITAPIQLRDQLQPLTRRQQIAACARFHAKDLTDPGRATRLALRRLARRIAHLNTEIDDAERDLTGLVADLTPQLLAEVGVGPLSAAQLLITVGDNPNRMTGPAGFAALCGTTPIPVSSGKTNRHRLNRGGDRQANCALHTIVLSRLRYHPETQPYAAKRNAEGKTELDIRRSLKRYLARRLFALILNPTQTADNTPVAA

SEQ ID NO: 188986 - protein, 415 aa, unidentified
MLKIVYPICYGIDVHKTFVVATIAATDQKSITTYKTKRFSTFTKGLTSLALWLQDNQCADVCMESTGKYWIPVYNILEPSCQITLAHPKYVKAIRGKKTDKKDSIWIADLHKHGLVPGSFIPPADIRAIRDLMRYRSKLVSFKSSEKNRVQDSLTVSNIMLSSVVSDTFGKSSSAIIQHLLKHPGDRDFDFRPLLHGSMLKKQEDIALAIDGAIDEVQAGKITLCLNHIDNLKYYIAQIEATAMKLAAPYSGAMRIIESEPGINQISALVVLSEIGADMSVFHSSKHLCSWAGLAPSNDQSAGKKKSVRISRAGTYIKPILVQCAIATIKDKSFPHYRGRYEAIRLRRGHKKAIVAIARMMLTAIYHMLSTGELFNPALYEKANCKPGFVASTEEHAVKLLQRLGYSIVKLPEGA

SEQ ID NO: 188987 - protein, 359 aa, unidentified
MGLHRIIALDLGKFKTVACVMNAVDRSHVFETIEMSPAAVHALLTRHATDDPRDTLVVLETCDCCGWVYDTCDALALPAKVVAANTEAWQWRRVKRKTDRDDALKLAKLALLDQLTVVHMPSPAQRQRRRLVLHRRSVVSRRTQSRNAIRSIFSQQGIALARGNKQWTIAGIAQLKAYAKPLADCDDDLDLWRGRLHAELQLMADADAQLKIFDRKLDALSRDDRRVHLLQTIKGVGPRTAEAVVMHLDDPHRFKSADDVAGYAGLVPKQLESGQMSRFGHITRRGPGLLRSMLVEAAWVVYRHNDWAKTWVAKISRGSKARRKIAIVALARRLLTILWAMLRDNQPFRAPGTKVPAAA

SEQ ID NO: 188988 - protein, 416 aa, unidentified
MTDDARWFVGIDWASETHQVCLVDAGGKIVGERGFSHAGAGLAEMCIWLLVTTRAEPTVIAVAIEVPHGPIVETLLERGFLVYAINPKQLDRFRDRFTVAGAKDDRRDAHVLGDSLRTDRHCFRHLAAEDAVIVELREWSRMAEDLQQERNRLANRVREQLWRYYPQALKISDDLGADWFLELWAAVPTPAKAARVRESSIDRVLKTHRIRRIAAAEVAQVLRQQPLTVAGGTVEAASAHIRAVAARLKLVNRQIKEAHRRLDALCGKLAAREETTASGQEPEPRDVTILRSLPGVGRIVLATLLAEAAEPVRRRDYHALRTLSGVAPVTKRSGKRCIVIMRQACHMRLRSAVYHWARVAIQHDPLSRCRYAELRTRGHSHGRALRSVADRLLAVACAMLDQQTMFDPGRAEKQAA

SEQ ID NO: 188989 - protein, 337 aa, unidentified
MDEIITIGLDLAKTVFQVHGVDAPGAAVLRRRLRRSEVLKFFARLEPCLVGMEACGSAHYWARELMALGHAVKLMPPAYVKPYVKRGKSDVADAAAICEAVTRPSMRFVPVKSTQAQAMRSLDKVRTTLVGQHTQTTNTLRSLLAEFGVIAPQGAAAVRKAWAGLAEDALPAAARLALGELVSAAAGLAEQIKRLETEILAHNRTSELSRRLATVPGVGPITAFALIANVPDATAFRSGRHFAAWIGLTPRQHSSGGQERLGHISKMGNQDLRRLFVLGATSILRRAAKHQTPQGQWLRTLLARKPARLVTVALANKLARIVWALMARGGVYRAAAA

SEQ ID NO: 188990 - protein, 342 aa, unidentified
MEIAVLGIDLGKNSCSVVGLDGTGQVVMRRRMQRDSVIKFASNLTPCVVAMEACCGAHHLGRIVRDHGHQVRLMSPEYVRPYVKAQKNDDRDAEAIAEAATRPTMRFVELKSAEQLDMQSLHRVRDRLVGERTALMNQLRAVLMERGITVAQGRRKLAQHLAVMLDGDEVRLSPRVRRLVEDMRAEWGALDNRIEAFDDEFAAQAKTDDAARRLASIPGIGVLNATALAAAVGNAATFARGRDLAAWLGLVPRQMTTGGKPRLLGISKRGNKYLRKLLVHGARAALTSLSASTTPLGKWLRSLLERAHKNTVIVALANKLARIVWAVLRHGGTYDAATVKAA

SEQ ID NO: 188991 - protein, 407 aa, unidentified
MDTRFAVVVGLDVGKSSHHACALDPAGNKLFDKPLPQDESELRELFTQLQNHGEVLMVVDQPNTIGALPIAVARDVGCSVAYLPGLAMRKAADLYPGRSKTDARDAFIIADTARTMPHTLRQVDRDSDVLSALKVLAGFDEDLAHETTRALNRIRSLLTQIHPALERVFVGGTLSTGLVLDLLEKFGGPTGFKSAGRSRVLRFARTHSRRNPEVLIDQIFTALAEQTVIVPATAAVELVIPRVAGQVKELKEQRATVAREVETMLEDFPLASVLMSMPGIGIKTAAQILLTIGDASAFETPGHLAAYAGIAPVTRRSGTSIRGEFPARSGNKRLKNALFYSAWVASHSDPISKAYYDRKRAEGKRHNAAVICLARRRCNVIFAMLRDGTYYQPPTTTPTPEPAALAA

SEQ ID NO: 188992 - protein, 390 aa, unidentified
MYLIGIDISKFKHDCFIATETGQVVKSSFSFDNNQEGFNQLLTVLLSLDHSQQIRIGLEATGHYGTNLKLFLHEHNFSFMEFNPILSDRFRQVSSLRKTKNDKIDAKLISQMLLSFDYKPNSLLSYHISKLKSLTRFRKKLVKDCTIYKERLINILDLVFPEYSNYFTQVWGKVSLYILKNYPTIQDIANINVESVLPIIKALSRGHYSMPKLIKLIEAAKVSIGCKNDSHTLELKLTINLIEQMNYAIENVENEITIIMNKYNFKTATIPGIGIISAASIVSEFNDFSNFNSSNQLLSFAGLEPSIYESGTQTTYGHLVKRGSSYLRETLMNVAPFVMNYNNVFYQYYLKKRNEGKHHRVALTHLVKKLLRVIYYLETNAVPFDSSKLK

SEQ ID NO: 188993 - protein, 402 aa, unidentified
MNCVGIDVSKGKSMIAVMRPFGEVVVSPFEVLHTDSELSKLAGLLKSLDGETRVVIESTGNYHAPVAWLLHDAGLYVSVVNAMLVHDYGNNSLRRAKTDKKDAVKLANYGLDHWLTLPRYVPDEDTRLMLKTCYRQYQQYSKVQTMLKNNLISLLDIAFPDANRLFTSPPRADGSEKWVDFVAAFWHCECVCGLSEKAFTAKYHKWCRKHGYNFSEDKALDIYASACGHFGVMPKTDTAKLLVEQAISQLRATSATLAALKQEMQSLAASLPEYPVVMEMFGVGPTLGPQLMAEIGDVRRFHSKKALVAFAGIDAPPYQSGQMDVRSRSISKRGSASLRRTLFLVMGVILQHAPMNEPVYQFMNKKRSEGKPYRVYMIASANKFLRIYYASVKAYLDSLEHD

SEQ ID NO: 188994 - protein, 418 aa, unidentified
MQTELSQFTAVIGIDWADKKHDVCVQDMATGRRRASQVRHRAEDLDEWARSLHRRFGGPIAIAVELSKGPIITVLQKYDFFVIFPIEPAGLASYRRTFALSGAKDDPTDAEFALKLLLSHAEHFKPLQPQSVEMRTLMTLVEQRRQLMNDRVRITNRLRNTLKQYYPQALEWFDRIDTPLFCDFIRRWPSLAQARRARRATLERFFHEHNMNRKPLLERRIKAIKSAMPLTTDNAVIVPHRLRALTLVAQLAVTLECIKQYDAEIALLAPQHPDYELFDPLPGAGPVFTPRLMVAFGEQRERFNNAAEVQKYGGVAPVTQRSGQSTWIHWRWQCPTFLRQTFVEWAAQTVNKSYWAGLYYHQQRAKGGSHQAAVRALAFKWIRILYRCWKTRTPYDESRYLRALQERGSPLLKTAKAA

SEQ ID NO: 188995 - protein, 414 aa, unidentified
MKLKIKEPKFNSNTLLVTMDVGKKLNYGYARCKNGTSLPVFTFSNTGEGFRYLLNKVEQFRRKKGLRKLLFGLESTGSYGQALIYFLYKRGFDIVQINPMHTKRVKEIQDNSPNKTDKKDPKVIADIIELNRYLSLIIPEGASADLRGLIHLREHKLDDITRIYNRIESQLYLIFPEFLSVMKTLKTKTALYLIKHYPTPQALCKLGLKKLIHEIERISRKQLGNKKAEDLYHAALSSAGITDGAESIIDGIQMHLNELELYQTHKDELENKIDNKLKAVPYSQRILSVRGIGVITTAAIIGEVGDLKQYQSNNEVLKVAGLNLYEISSGQHKGERHISKRGRSLLRKTLYFAALNVTRKDGILHDKYHSYIERGMLKNKALTAISRKLMGIIFALVRDNVNYIEGYKVLSKVA

SEQ ID NO: 188996 - protein, 495 aa, unidentified
MPLKEASDELTGDLQKRIPYRKVLNIKKYIPWSFSKTNNMKNKKTANLQIVNLNAAGIDVGSKSYMVAIDQERENVTEFGVYTKDHQKMIDHLRSHDIKTVAMESTGSYWQTLFSSLQAAGFEVLLVNGSQTKNVKGRKTDVIDCMWIQKLHSLGLLSGSFLLSNVFQELRTYYFHRQHLIEQTVMYANKMQKSLRLMNIRLDIVLRDVTGKSGLNIIEAILAGDRDSKNLAGLADIRAKKSQEEIANALQGSWRSELLFELKASLQFYKQYEQALNECDVIIEEKLLEYVPKENLSAQQSTQIKITNKKSRKHSPAFNVAKISYEYFETDLFAIPGISHTTVLCLMTNVGHDIHKFATGKSFASWLRLVPNNKISGGKIISSRSPSGKNHLAIAFRQAANSIGNQKDHPLTPFFKRIAFRKGRISAITATARKLAVIIWNMITKIQPYNKENEEVHNARHKHVMLRNIEKRIGSLQLNQEELKKLFVRTSLLTT

SEQ ID NO: 188997 - protein, 311 aa, unidentified
MGKYELEVATIPPDRPRSIPNTKAAILKELKAQQRRNVRLALPPILVVCEATGGYERMLLELAHELGLEAHRAEGRRVRLFALLTGQRAKTDPLDAAVIASFAQKSDYLIRYVPPSPVEKKLVALIARREELLKMKLAEQSREEHMSDPLIVKSLRTVITMLKKQLKLLETKIASLIRSDAELVRKNNLLQSVIGVGPITAQTLLAKMPELGTLPKGQAAALIGLAPFNRDSGQTNRPRHICAGRFEVRRCLFMAATVAIAKNPVLKRKFQNLRERGKPYKVALIAIMRKMIVILNAILKSDQPWKGAKIA

SEQ ID NO: 188998 - protein, 424 aa, unidentified
MRFIGLDVHRDFCEVAIAEAGVVRLAGRVQTEPAALELFAQSLGGDDEVALEATGNALEIARIIEPHVGRVVLANPKAVKGITRAGAKTDKIDARTLAQLLAGGFLPAVWLPDEQTRILRRRISARAQLVRQRTRAKNQVHATLIRNLKGRPPVSDLFGARGRRWLAAQDLPADEQETVAACLRQIEFLDSEIALIDRALAEQVLASAEMRRLLTLPGVNFVTAAALMAAIGDIRRFPTARQLVSYLGLDPRVHQSGTEPARHGRVSKQGRGETRHMLVEAAWHATRAPGPLRAFHQRVAVRRGGNIATVAVARKLAVIAWHMLSRGEDYAFARPSLTREKLRRLELMTGAKHQKGKRIGVFATKEQHRLDKETAAQAELASRRLVQDWQPAINKGAGAAPGRASRRPSSGQAARQETAPPPAL

SEQ ID NO: 188999 - protein, 395 aa, unidentified
MSAEGEAIRSNDYRKDTTVKAPSTRPAAVLGLDVGKSSHWACLIDRDGEVLASAPVRNREAELDALFASAPAGTLVVVDQFRNIGSLAVRRARAAGLGVAHLPGLAASRAAGLFAGEAKTDERDAAVIARTALGVPDSLSGVPGRGEALEAARALSSQRDHVVACATRDKNRLRAVLLESCPALEAAVDLSDRRWLELLAGFGGAWGIARSGAEGPRAEAAGEAAAASTAPPPALVEAENRQVRFLAARISEALDEAGALEAETAALLECDETYACLLTVPGIGPRTAAQLAVSVDIGRFPDHDHLASYCGIAPRVRSSGTSVRSVRAARRGDARLKSLLIFSCNSLVRSSGRYGEYYRACRARGMGHGRALKAVARKRLRAIYAVMRDRVPYRE

SEQ ID NO: 189000 - protein, 412 aa, unidentified
MTAKDQFAAHVGLDWADKKHDVCVQFKNGDRIFHVIEHTPEALDIWLNELHQKVKGRIAIAIELKKGPVVYALQKYPFVTVFPIHALSLARYRQAFWPSGAKDDPQDAELALDLMLRYPHKIKAIEADNPDIRLLQQLVEQRRLLVEDKRRFVNRLINTLKQYYPQPLEWFSHRDSSLFCELIIRWPSLQQLKRARSDTVRHFMNAKGGPAVAYTEQRVASIASAIPLTTDKTVIEANALMATALASQIKLAGDLIRTYDERIESLFDTLPDAELFKSLPGMGPCMGPRMLAALGDNRDRFNSAEEIQNYAGIAPVTERSGQKSWVHWRWQCAKFVRQTFVEWTAKTVNSSYWARLYYQGQREKGKLHQSAIRALAFKWIRIIYRCWKTKTRYDEAKYLLALEARKSPLLKP

SEQ ID NO: 189001 - protein, 352 aa, unidentified
MTMTTLTRQITGGVDTHLDVHVAAALDERGALLGVESFETTPVGYDKLLTWLRSFGTVELLGVEGTGSYGAGLTRHLHREAVRVVEVDRPNRQRRRRHGKSDPEDAISAARAAQGGDASGEAKTRDGNVEAMRVLRVARASARKGRTQALNQMRSLISTSPDCVRSDLRHLNVYRLLERAASYRPGTKRDLVSINKLTLRMLARRAIELEAEVTEIDAILKPMVKETAPALAALSGVGTDVASALLVAAGDNPERLRNEASFAHLCGTSPIDASSGKHERHRLNRSGDRQANSALWHVVITRMVSDPRTREYIARRTKEGQTKKEAIRCLKRYIAREVYNNLPMEHLAIDSP

SEQ ID NO: 189002 - protein, 390 aa, unidentified
MIYVGIDVAKSKHDCCIIGEDAVILEDVFSIQNSADGFTMLLEHIRCFVQDNSFVKIGLEATGHYSINLISFLRRNGFEPFVFNPLSVNLFRKAQTLRKTKTDKTDARFIAAMLLSQPVEVSMPIPKHINELKSLTRARHRLVAYRSRLKVSLSRLVDTIFPELASAVWSANQKSVYALLLALPNPQEIAACHLTKLTNILKQASHSKHGSEKAIQIRELASRSIGSNSPALAFELQQTIRLIQNVQSEIELLDAQIRHTVDELQTPLMTIPGISYTLAAIILAEIGDIERFATPAKLLAFAGMEPSTFQSGKYTASTTPMVKRGSSYLRWAILQAARLISMRDPAFRRFMLKKRAEGKHHFVAMCHVGKKLIRVIFHMLRSGCDFVPQS

SEQ ID NO: 189003 - protein, 338 aa, unidentified
MNIVFLGIDLAKNVFQLCGLNQAGKPVYTKRTGRKELLQTLANIPACLIGIEASTGAFYWQREFEKLGHKVKVISPQYVKPFVRGQKNDGNDAQAIAVALMQPTMQFVPPKSPEQQDIQALHRARQRIVNHRTATVCQIRGLLLDRGIPIGSAVSRARRAIPLILEDAENGLSSRMRRTIAELYDLFNDLERRIHFFDKEIETVFRQSEACQRIAKVKGIGPKTATAVVAAIGKGTEFKNGRHFAAWLGLVPRQHSSGDRQVLMNMTKKGDKHLRTLFIHGARAVVRVATNNNDGHMNQWVNQLKERRGFNKTTVAVANKNARIIWSMLRNDIGYQVV

SEQ ID NO: 189004 - protein, 321 aa, unidentified
MKKEIVYQQVIEVGCGIDVHKDVIVATIRKSSKDYETREFSSFTSSLTDLKDWCKKENVTHIAMESTGIYWKPVFNVLEDDSFEIILVNARHVKNIPGHKTDKKDSAWLSKLLLSGLLRGSFIPSVDIRELRDLVRYKKKKTQQVAAEKNRMIKILEDCNVKLSSVVSDVQGVSATKIIDAITNGETDIEVLISFIHGKVKADREVIKKALEGKVTNHHRFMLQMARESINVIEALITKLDKQIEIACKAYQVEIDLLQTIDGVGKDSAIAIISEIGVDMEQFPNEHHLASWSGVSPGNNESAGKKKVQEQSTEINTFKQP

SEQ ID NO: 189005 - protein, 430 aa, unidentified
MCYRIAGLDVHKRMLAVVVSDVEVDGEYQFERRMFGSNPEQLRLLAAWLLEQEVEEAVMESTAQYWKPVWEALERYWKPLREKREGARRKSGTLHLAQAQSNRGPRGRKKDFRDAERLVKRLVARELTLSFVPDAEQRLWRTVTRRKYQLKRDRVRLQNQLESLLEEAHIKLSSLVSDLLGASARRMLKALAEGETNPAALAALADWKLRATPEQLCDALGACTDLKPVYRRLLKMALEQLQFLEEQIDRLDQELASLLHLHQDAVQRLAEVPGLGVESAQQIIAEVGPTAATFPSAKCLSFWVGACPGDEESAGVNYSHRSPKGNRHMRRVLNQCANAAARTKGSIFEIVYRRSVPRLGHNQTIGAIAHRQCRLIWLILHQAVRYEERGPAVTKQSKQKRTARMIRQLRNLGYRIEPPTPQHANPAQGQ

SEQ ID NO: 189006 - protein, 357 aa, unidentified
MESQEVKYVGVDCGKKSIEVVRINSENSLERRQFSTTESGINNLLQWLTLNDIVGLEAGSQSFRIAKSILNKGVQVIVLNPGNLATIYQSLKKTDKEDSLKIARLIQRHPIEELPTVPIPNDEEEDNRRLCTEQENWTRQLTQSKNRLHSLFTQAGLTHITKKHLRTKANREISVALLPSRYQKEAERILKVLDLVEQNLKLIEEEIQEALKKNKAYVQTIMSMPGIGMITSLAIMSYMGDCKRFSSAKQAAYYAGLVPRVDISGDTVRYGRIINRGCHSIRRVIVQAAWSLVRCQHGGKVKEFYQRLYLKKGAKKSIIATSRKMIEVLYAMIRTGKLFDSMPENILNRKLTQYGLM

SEQ ID NO: 189007 - protein, 342 aa, unidentified
MTTFVSFVGVDIASATFMACIGATPWKITIKPVKFENSEDGFISFLDWLKEHNLQAESTVVCMEATGVYSEGLAYFLYASGYTVAVEPPLNIQRKFPPNASKTDELDCQYIAEYAYRYQDKLSFWKPRAEILEQVKVLLTTRQHFSVQLTGHKNALHAINRKKVSSELAKRSHQTMIEQIAKAIKEIDQEIHRLIDSDPTFRHTLLLLMTVPGIGLQLAAHLLILMQETLDPRVLASFIGISPVKHESGSSVYSAPTSRHFGPPMLRKLLYLAACSVRTHKKQFQQYFFRKVAEGKHKKLVLNNIQNKILKIACAVVRSQQPYISSYVSVNPLVFQKSLTAS

SEQ ID NO: 189008 - protein, 305 aa, unidentified
MTVTNLARSVTGGVDTHLDVHVAAALDERGALLGVESFSTTEAGYKKLLGWLSDFGPVELVGVEGTGSYGAGLTRHLQDERVRVVEVDRPNRQRRRRKGKSDPEDAISAARAALSGDACGEAKTRDGNVESMRVLRVARTSARKARTQALNQMRSLISTAPEPIRDELRGLNVFHLLERASSYRPGAKRDIVSLTKLSLRMLARRAITLEEEITELDAILKPLVKETAPDLVATLGIGTDAASALLVAAGDNPERLRNEAAFAHLCGASPIEASSGKQHRHRLNRSGDRQANSALWHIVITRMVY

SEQ ID NO: 189009 - protein, 372 aa, unidentified
MNYNTVYVGMDVHKESFTLCSCKYEDEKASHYQRTPASYKNVLRYLAFLRTIYGEDTRFVCGYEAGCLWYSLYHQLENFNVECVILAPTTMLEQRSKRRIKTDKRDAEIIARSLAQHNYSPVHIPTETDNQTKEFIRMRDDHKAELKKIKQQILSFCLRQGYQYDGSGNWTAKHVKWLRSLKTEGLYKEILDEYLLTYTILTDKLNRLDQRIEELASKEEYKESVSKLTCFLGIKTHTALSVIVEVGDFQRFVSARKFAGYLGLVPGQHSSGDDRNGLGITKAGNTHVRRLLVESAQSYTRGKIGYKSRVLRSRQAGNSPQVINYADRANERLRRRYYKMVLKDGKKYNIAKTAIARELACFIWGMMTDNIY

SEQ ID NO: 189010 - protein, 354 aa, unidentified
MIIIGVDFHPEFQEIASVDTDTGEYQEKHLAHPEEAEQFYRALASVGQMVRVGMEASGHGRWFERLLEELRIELWRGDAEVIRAKRGRKQKTDREDARHIFKLLLKDDFPRIWVPSWENRDLRQLLWHRHRMVQARTRVMNQLQAVALNEGLRCKKKLWRTHGRQQLESFRLAPWASRRRRELLELLDRLNPTIAELSRAVDEEAEKCPEAKRLMTHPGVGALTALAFVLIIGNAERFRCGKQVASYLGLVPLEESSGNRRRLGHITKQGSSIVRFLLVEAAQVTVRRLPDWRTKYVHLMMRRGRKTAKVAMARKLAVRLYWMWRKGWDYEQWKKFGSNVRQPGHRDGVQQNTE

SEQ ID NO: 189011 - protein, 428 aa, unidentified
MIPAVIERCAGIDVHKKFVMVCALLGPAQSNPEPKIRRFGTYNAELEQLRDWLQELNCLQVAMESTGPYWKPVFNVLEEAGVQTTLANPQQVKNLRGHKTDMKDCQWLAHLLRHGMIRPSYIPPRPIRELRDLTRRRKQLVRNGAMERNRVQKLLEEANVKLGNVLSDVFGASGQEMLFALVQGEATAEQIAQLAKQRARKKIPQIQAALEGHRMNQTQRDLISQCMSHMAFLEQQIEEVDRQIQDKIRNFGLSESYALLQTVPGMKKEAAATVLAEVGATVEAFSTPAKLSSWAGVCPGNNESAGKRKSTRTTKGNPYLRDMLLECAWASSHRKNSQMQHRYQRLQLRKGYKRAIVAVAHALIKAVHYVLSTRQPFVDTAEPTRSPATVRRLIRHHTRRLRKLGCWLQRGTQPIQTSTLQKPRVTSG

SEQ ID NO: 189012 - protein, 438 aa, unidentified
MRKKKNKASKRVHFQSLPLINPNAAGIDVGAKEHVVAVPCDRDLQPVRTFQAFTPDLHELAAWLKRCSIETVALESTGIYWLSLYEVLEQHGLEVRVVNARHVKHVPGRTKTDVVDCQWIQKLHSFGLLNGSFRPDQQIRKLRTYMRLRDNLVVERTQAIHHMQKALFEMNVQLSNVISDVVGETGLRIIEAILAGERDPEQLAALCSTRIKASRQTVAKSLHANWDEALLFCLKTAVETYRFSENKIQDCDHCIGSVLAQFETRAQLPNARQNLQSQLHRVCGVDLTKIPGIKEQAAQIIISEVGLDMNPWKTEKQFASFLGLCPNNLITGGKVFRRATRKVYNRAADTLRLCAQSLTHSKSALGAKYRRLRARLGAPKAIVAMAHHLARLVYRMLRYGENYVEKGIEHYEQKFRLQRIKWLKKEAKSLNLQLVAAQ

SEQ ID NO: 189013 - protein, 411 aa, unidentified
MKLFIGINVSSTDLETVMISSEDNGIVFQGKFANDITGASEIKDQILKLAQPARFDQIVIGMESTSIYSFHPAFFFKNDAELAKFNVQVVVINPRQTKRYHDIFEDNKNDHIDAFYIADYLRVGRYTIGIVRQENYSALQRLTRTRYELTQSLVRAKQHFLHNLYYKANNLAIGKQKTSVFGATMMDLLIEDMTLDEIVNTPTEALADYFSHKGRGRFADPQGLAKDIQKAVRSSYRLGKVMNDSVDTVLAVYAKEIKTFQKMIKEFDDAIAQIVDVIPEEQILQSIPGIGPVYAAGIIAEIGQIDRFEDETKLAKYAGLTWKQNQSGKFESTTTPLLRTGDSYLRYYLIEAANRVRREDSVFKEYYSRKYQEVQRTPTKRALVLTARKLIRVIFYLLKNHQIYKPKEWLV

SEQ ID NO: 189014 - protein, 346 aa, unidentified
MEISTIGLDLAKNVFQVHGISATGEVVIRKALRRSQMLPFFEKLPPCLVGAEACGTSHHWARELTKLGHEVRLMPAAYVKPYVKRGKNDAADAEAICEAVTRQTMRFVPVKSREQQAALSLHRVRQLLIKQRTQLVNMMRSVLAELGTAIPVGIVKALQVAREIVDGESKIDLPIEATNVVAMLAGQLLQLHAQLRKLDLRLAALQRSDERARRLATIPGIGPIGATALAASVTDPSQFSSGRQFAAWLGLTPRQSSSGGKERLGRITKMGDRYLRQLLVIGATALVRYAKEKPGTVDPRFVALLARKPARVASVAIANKMARIAWAVMARGGVFERGHAPMLAAA

SEQ ID NO: 189015 - protein, 303 aa, unidentified
MKKFLKEVAGIDVAQKELVVSLGRLYESLDVEIIAYKVFKNTDNGIKSLIDWVADHGHNADSVRYVMEATGVYHEKLAYVLDESGFDLSVVLPNKISNFFRTLDINTITDKTASQAIMRFGLERKLDNWNRPKEAYRELKQLTRERDQIVDQRSMVKNQLHLEKTEATPNERSLKRIAERIKFLNGQEKEIKMDIAVLLKDHPDIMERIKNICTIPGVGELTAVIVLAETNGFELIRNKKQLTGYAGLDVREKQSGTSVKGKPRISRKGNRHLRKSLHLPSLSSVKYNESHKNLCENRCQKRG

SEQ ID NO: 189016 - protein, 412 aa, unidentified
MEGETVIAGVDTHKDVHVLCLLDGLGRKIWSGSFGADPEGYDRLAEAIGDPGSCMVVGVEGTASYGAGLTRRLVELGYNVVEVLRPKRDKARPGEGKSDPLDAERAARKAASGKGCSVPKSQDGWVEAVRQLYVARRLAVATSTSCVACAKSMLTTAPGALRERFRGRERPKDLMPLLARGRKAGDALEESVLASLRSVAAVWKEARSQVESLDERIRALLEANAPALLGIEGCGTTTAAALVVAAGDNPGRLKGEAAFSMLCGASPIPASSGKTERHRLNRGGNRQANWALYEIAIKRMAYDERTRRYVAKRTSEGKSRREAVRCLKRYIAREVYRVLMDPNPDGAAPEGPELAKMRKAMRVTQKQAAAELGMSAASLGHLEHGRRRSTKLERRYYELLCELERTLPQTAS

SEQ ID NO: 189017 - protein, 366 aa, unidentified
MENAITFVALDAHKVEDQAAMLLPGESKAVEWDCLNERTAVERMVKKVLRQAPGEVRFCYEAGPCGYALQRWIEGAGCECTVVAPSLTPRKPGERVKTNRRDARKLVELFRAGLLTEVSPPTQEDEAVRDLCRGREDARQDLMRSRHRLSKLLLRRGYSFSQGKRAWSYRHRLWLRSLHFEQEYDQVVFDDYLLAIEQLEARMRALEETIERVSRSERFAAAVGALRCFRGFDTISAMSIVAELHDFLRFRSPRALMAFVGLVPSESSSGQKHTRGEITKTGDSLVRRLLVEAAWHYRHRPNLAYLQSRREGQPARVIALADRAMQRLNRRFQRMLERGKPKPKIAVAIARELAGFVWAALYPQLA

SEQ ID NO: 189018 - protein, 353 aa, unidentified
MRTYYVGMDVHRATIAIVVLNGAGKVVEQLVVETSATRVRCYLKQLQGRVYVTFEEGTQAQWLYDVVQPLVTEVIVCDPRHNKLLKAGNKSDRIDAQKLAELLRNGALKAVDHRDHGVRALKELVRNYDCLVSDTTRVMNRLKAMFRQQAIACGGHEVYRQDRRAVWLAKLTERGAKARASSLYRQLAALKALRHEAKLAMVREARRGAAYLWLMSVPRLGAVSVAQLLAVVGTPHRFRTKRQFWSYVGLAVVTSSTADMEVVDGVLRRSRRPVATRGLNRNHNHLLKRVFKNAATSACQSAPFKQHYERRLQQGMDPALARLTVARQLSAITLSLWKRGEKFQAERMKRQAA

SEQ ID NO: 189019 - protein, 346 aa, unidentified
MKVLIGVDPHKASVAVAAVDEALGELVECASFSQDRAGLRCLEGWAKRFPERRWAVENAGGLGRHLAVRLAASGESVVDVPPKLSARVRVLSTGNARKNDGVDALATALAASRNGRLAAVDSEAASEVLRLLSERREDLVAERTRALNRLHGFLRDLVPGGVARTLSADRAARILRGIRPKGTSARLRRRLASEILRDVRTLDRKIADLNGRIEAEVETFCTSLTEIFGVGPILAARIIGSVGDVTRFPTKAHFASYSGTAPVEASSGEAVRHRLSLAGNRKLNYALHMVATCQARSDARGGVYYRKKIAEGKSRKEALRCLKRRVSDAVFRSLVEDSQAPSRGAA

SEQ ID NO: 189020 - protein, 428 aa, unidentified
MRYVGLDVHKRLVQAHFCDEQGRMLQSMRFELTAASLSQFAHEHLGADCAVALEATTNSWAVVDILKSSCAKVVVSNPLKTKAIALSKHKSDKVDACMLAQLLRCDFLPLVWIPDVETRAARSLAERRTSLVRQATGVKTRIQSLLHERLIQTPFDPFTQRGRQWLQEVQLPTRDRGELDTLLRILDAVASEQAKVTELVNADAYGREEVKLLMTLPGVGATIAQAMMAAIGDISRFESPMKLASYFGLIPSVHQSADRAYHGKITKQGNANVRWLLVEAAHHAGRHPGPLGHQFQRIARKKGVNVAKVAIARKLAVLAWHLLTKGEPYRYASPVATEKKLADLRRSQHVLHPPHLGNRGSHWGHSTRVRKSLATVLATEELPPPTPPAPAEVRVFAPLGTTALLENLAREQRLEVPHRARSRRTSKR

SEQ ID NO: 189021 - protein, 316 aa, unidentified
MSSPEKTCLGIDTSKEWIDAHLLPHEKSWKVDNTFEELKKWIPTLPPGIDLALVEATGGLHYQVAALLEEAGIPVCIINPKAIHHFAKAMGYKAKTDALDAKLIATFAQRLEPEPRRLPTPEQAQLKELMTRRRQLVGIQTSEKNRLGTVRNNRVQESITAHLTWITAELDEIDRTLDSLLRCDESWWEKFTLLTSVPGVGKKTARALLCEIPELGSLTVKSSAALGGLAPHIQDSGKHKGKARIQGGRSGVRTTLYMAVLSAVRFNPILRAFYQHLISRGKLPKVALTACMRKLLTMLNAMLRDQKMWEFSPIPT

SEQ ID NO: 189022 - protein, 338 aa, unidentified
MHVTTLGIDLAKQVFQLHGVDARGHAVLSRRVKRSQLVAAVASLPPCVIGMEACASAHHWGRAFEQLGHTVKLMSPQYVKPYVKTNKNDCRDAEAICEAVSRPTMRFVAIKTVDQADLQAVHRSRTLLIKTRTAFINQIRGLLAEYGLVIAQSPEKVRPALVRFLDDAESGLTAFARETFSELYEQLVELEQRITKVNQRLDRLFNTHPVCRKLAAVPGIGPLTATALLAAISRPHVFQNGRHLAAWLGLVPRQFSSGGHGRLGGLSKRGNRYVRTLLIHGARAVVQRAAHKTDARARWMWALKCRKGTNVAAVALANKNARVIWALLAHDDVYRQSV

SEQ ID NO: 189023 - protein, 318 aa, unidentified
MKSDIVHIGVDVSKGKLDVYNPVTDEVSELPNDAAGFRKVREMARKGKAVVCCEPTGGCELDMVLFLQRFGVPVAYCDGYRVRHYALSTGEFSKNDRVDARMIARFADCTPVRTLAKKDLSHLELRRRWKLYQTLVDMHVVLAQKASSEPEAEMRTMLRAESARMERKAAKALRSCVELAKGDERMSYLLGRFVEIDGVAEKTAIAVIAGVPEIGSIGDAALSKLVGLVPMDNQSGAKDHAKKIRGGRKDVRRALYLAALPAVQHNHVLSAYYKEVKKRIPSRKAAKWAFVPVMRKLIHLMNRLARDPEFQLQKKRAA

SEQ ID NO: 189024 - protein, 347 aa, unidentified
MRFYTTTHKHSCGIDLHAKNMYVCILDREGKVLLHRNLRTDPELFLRAIAPFREDLVVGVECMFTWYWLADLCAREQIHFVLGHALYMKAIHGGKAKNDRIDAYKIATILRGGMFPYSYVYPSEWRSTRDLLRRRLRLVRHRGQLMSHVQNTHYQYNLPTPQKRIAYRANREGVDKQFTDACASKSVEVDLELIGHYDEIITDLELYLTRKAKVHDQDLFHLLRSVPGIGKVLSMTILYEIHDIARFERVQEFASYSRLVKCEKSSAGKKYGTSGAKIGNVHLKWAFSEAAVLFLRGNPRGQKYLKKIENKHGKRKALSILAHRLGRTVYYMLKKKRTFSMDAFLTA

SEQ ID NO: 189025 - protein, 334 aa, unidentified
MNIIGCDLHTRYQVIAWMNEETGEVVTRRLEHEAGEARSFYRSLPAGARVGMEATFPALWFERMLAEFSHELWVGDAAEIRARAVRAQKTDTRDAEPLLSLLLTDRFPRLWVPSPAERDLRQLLVHRNKVVRMRTAVKNQLPAMALSQGLCRRGKLWSARGQTELKGLGLLPWASRRRQELLGMLGQLDGSIGELDQAVEAAARSRAEVVLLQTHPGVGPVVGLAFVLTRGPVERFPHSKRVVSYLGLNPREHSSGGRQRLGAISQQGNPMMRGLRVEAAQTAARFDPELRRCYQRLKLRRASGVAKVAMARKLAVRLYWMLRSQTDYAHRVRM

SEQ ID NO: 189026 - protein, 387 aa, unidentified
MPQPNDLSKSLVALDHNSTIIAVVEMSQSSWLVGGVVPGIERQPRKKLEPSPERLLALLHRWRDEAIRTGGNITRIVLAFEAGRDGFWLARWLAARGIEAHVIHPSSVAVSREHRRAKTDRLDTELLKRAFLGWLRAERGHCSMARIPTIAEEDAKRPNRERECLVRERTRIVNRIKATLARLGIREFKPTLRKAAERLAALHMPEGSPLPPNVSAELQRDLARLGFVVSQIKEIEKARQRRLEQHSESGPHATVRLLARVVGIGIETADMLVHEVLSRPMRNRKAVARYAGLTGSPDESGAKRREQGLARAGNARVRRGMIQLAWRFLLFQKQSSLAQWYRARTADSRRGTRKTMVVALARKLLIALWRFTTTGEPLEGVILRPVG

SEQ ID NO: 189027 - protein, 412 aa, unidentified
MERSYKIAGIDVHKSMLAVVVADAAKEGEFRFERRKFGTMASELKALGEWLAAQQVREAVMESTAQYWKPVWRQLEGQCPLHLAQAYSNRAPRGRKSDFKDAERLLRRHVAGELILSFVPGPEQRLWRTLTRTKHQLTRDRVRLHSQLESLLEDARIKLATGVSDLLGMSGRRMLQGLADGETDAAALAALAEPELKATPEQLADALSAAATLSGLHRQILGLFLERLDLIEQQIATLHQTIASALQKHQEAVLRLAAVPGFGPDSAQQVIAEVGPEAATFASARELASWVGVCPGREESAEESKSNRSPKGNRAMRRVLNQVANAARNTKGSVFQAMYRRLAPRLGHNRTIWAIAHRLCRLAWIILRKGVEYIEYGKERDPKAMERRTAKLIRMLIALGYQVTPPTAKVVA

SEQ ID NO: 189028 - protein, 388 aa, unidentified
MQFAADRLEAPTAIRTDLGAIFISLELSRSSWVITSLSPGGGEKMSKHTVRGGDVAGLLKRIAQLREKALGRTGKVFPLIVIQEAGLDGFWIDRVLQNEGIESHVVDPASVATSRRRRRAKTDGIDGEALVRALLAYKRGEPRVCSMVRLPTPEDEDRRRLCRERKVLTMERVQHVNRIKGLLFSQGVSGYEPLRRDRRERLDALQTGDGRPLPPHLKAQVRRELDRLELLLAQIKAVEAERDVLLAAEQTKAPVAPAMLLDVKGIGPEFAAVLWSEGLSRPFENRRQVAAYAGLAPTPWQSGSVDREQGISQSGNPRLRTTMIQLAWLWLRHQPDSALALWFHDRVKRNGGRLRKITIVALARKLLVALWKYVTAGVVIEGAVTKTA

SEQ ID NO: 189029 - protein, 433 aa, unidentified
MNPSTPEPPPLAAAAFVGIDWADQKHDVVLRSAAEPDKLQHQVLPNEVNAVLDWINQLQQRFGSKGKVFVCLEQSRGALIYQLMGYDLFELYPINPSQLANYRKAFATSGAKADRPDADLLCELVYCHRDRLKAWKPDDALTRKLATLNEDRRKAVDQRSQLANEIKSQLKLYFPLALQVLDNDTSSALAADLLLQWPSLEALQKASPHKLRKFFYGHNCRQEQKLLDRLRLIKEAKPLLTDPAVIEPAMLRLQMLAQQLKTLLPYIARYEKQIAEVFDSHPDSFLFRDLPGAGAALAPRLLTAFGTDRDRFGSAAELASLSGIAPVRKASGKSSTIQLRWACPKFLRQSFHEFGAASIRFCPWAQACYEAQRARGKGYHAAVRAVAFKWIRILFACWKQRLPYNPDLYLQSLQTRGSAYAKALAEKGSLACE

SEQ ID NO: 189030 - protein, 418 aa, unidentified
MTKISEKGEGRKTEREKKMRGNCIAIDVSKDKSHIQGFRSLNEPIFKAMEIGHDREGFEKILEQTEMFGGKEEEKPKIIFEATGIYHRGLQSYLEQNGFEYYIVNPLQSAKCRKQDLRTKKTDKRDCVNLAKMFYTMELRKTTHEDENYYTLRQLSRHYEDILNHLRKTKVSFNATLDIVYPKYQDVFGNLYTNSSIAILRKYPHPDELGRKHPETVAKQVMRCGDHTEAWCIAKAERLIAYAKTTVSGCKATDINVRIMVDELEQVERYLGLAEKTLREMIQIAETIPNYKVIRTIPGIGENLAARLLAEIGDISRFLGSKQLVAYAGIDPIIYQSGQMDGLHLKISKKGNKRLRCLLYLAVFMNLHIKKETNTIREFFNKKTRQASPLCAKAASVACANKLLRIIYGMCKTGTVFK

SEQ ID NO: 189031 - protein, 470 aa, unidentified
MAAVMIGVDPHKATHTAVAISAAEEPLGELQVRACAAQAERLLAWAAAWPQRTWAVEGAGGLGHLLAQQLLAAGERVLDVPPKLGARVRLLAAGDTNKNDPNDARSVAVAALRSPGVREARPDDHAAVLKVWSKRYRDLGRTRTQVVCRLHAVLCDLVPGGISRPIYAAHAARILQQITPPDAVAAARCELAAAFLEDLRGVDARIRETRKKLATAVAATGTSLTGLFGVGPVIAAAVIGDVRDVSRFPSRNHFAAYDGTAPIEVSSGPRKIYRLSRRGNRRLNHAIHMAAVTQIHHQHSDGRAYYDKKLAEGKTGKEALRSLKRQVSNAIFACLQADARRAAARAGGPGGQQGNDSVASVAGSHPRRRLFGQATPGPAHHTTTAAGRPVPGPADAGGTAGPSSIAATLPPAQPQVQVERPQRSEDERPGGAARRRPHSAARKATGRGSPVKTQPPKGISHAAKRTDGTS

SEQ ID NO: 189032 - protein, 465 aa, unidentified
MSMIERTAETQDVRQQTVRSMKGLDVIHPGAAGLDLHKEVIVACAPMTAGETQHPVRKFGTYTSALLELAAWLKQHAVTTVAMEATGVFWLPVIGILRSKGLEVLLVNAREVRSVKGRPKTDKLDCEWIRRLHACGLLRGSFIPDAETEMLKSLWRHRLNMEEEDARAIQRMQKAFQIMNIRLDIAVTDIVGETGIRIIEAILAGERDPRKLAKLRDPRVAKSEREIADALTGNFKEEQLFIIRENLVHHRFLLERIRETDARMGAQMETMKKKSNATDLPAATKPDRSRHGETLSRERLYELLGVDLTQIDGVGVLTVSSFLVNAGRDMSPWMTENHFASWLGLSPNVKQSAGKTRSGATRKTASALAHSFRMAVMTIGRLDSWLGAYYRRLKGRIGAPKAITATARKLAIIFYRAVKAGGTVKRLTAEAYEQANRDRILKALRQRAAHFGFDLTMKSNVPVEA

SEQ ID NO: 189033 - protein, 342 aa, unidentified
MKIATIGIDLGKSTFHLVGFDEQGRIVARKRFSRLQLVRFMVTLPPCHVGMEACSGAHLLGRQLTAQGHDVRLMPPQYVRPFVKSNKNDFIDAEAIAEAVQRPTMRFVPLKTPEQLDLQAFHRVRERLVTRRTALINQLRAFLFERGLVVRQGRTYLARVLPTVLSDAAPVLSERMRTLLEGLWAEWKTLDAEISRTTREIETLAAYDPACQRLSSIPGVGPVIATALVAAVGNGTAFTRGRDFAAWLGLVPQQHSTGGKPRLLGISKRGNSYLRRLFVQGARSILLRADPARHAFGPWLTALRARVHHNVAVIALANKLARIAWAVLVKQEPYRGVATATI

SEQ ID NO: 189034 - protein, 378 aa, unidentified
MDAKSGTMTAMERAPLVKPWVLNGTNHQEAHEMLYAGLDLSRQKLDVHILDETGRTVELLAVRPDADALRTLAERIGRYGQPVEAAIESMNGARFVHDTLERLGWDVEIADAAKARGLAPLAAKTDKIDARVLAELARRELVPAIWLPDPPVRAERERARFRLYLVRYRTSLKNRIHATLIAFGQSVPVSDLFGMRGRELLAAMPIPEPWATTLTTSLRLVDELETEIDAIEAELRATGAHHRYVPLLMTVPGVSWVLAYTIAAEIGDIGRFEGPKRLTGYTGLCPRVYQSGAMDRRGALAKTGPKYLRWALIEAATTAARNPRYHDRYERTKRRLGKQRGSKVARVELARELAGAIWYILTRQEPFRAGGPTSGLVA

SEQ ID NO: 189035 - protein, 341 aa, unidentified
MKQKYLIGVDISKKKGDSALITDGLSVLSEKVVQNTDVKWERYLMTVLKKNKIAREDLLVCCENTGIYSNPLKRVCHKLGIALWVEHALKIKRASTDMRGKTDRQDALRIAEYACRYRDKAVIYQPEKPLVRALQHQVKIRETLIEKKVAMENQLREAKSHDPELYKALVKGYRTVLKTINAAIKKAEAEIEGLAAQDEEISTNEALLRSIPGIGAQTALRFIIRTDNFRNFSSAKHLACYAGVVPFANESGTIIKRQRISKMADKNLKQLLHMAAMAAIRSKGELQDYYKRKVAEGKNKMSVLNAVRNKLVHRIFAVILRQTPYQRENYFSIKNEISLAC

SEQ ID NO: 189036 - protein, 339 aa, unidentified
MELYSGIDLHSSNSYLAIVDASGKRVFKERSPNDMATILRLLEPYRDQLSGIVVESTYNWYWLVDGLIAAGYAVHLANPAAIQKYSGLKHADDKHDAFWLAEMRRLNILPEGYIYPKEERPIRDLLRKRGHLVNLRSSLLISLQNIITRNCGIKMKNNDIKRLRENRVHPLLTDNEDLALAGQVSKDTIDFLTRKIWAIETFIEKKLELRDAYKNLVTIPGIGKILGLTIMLETGPVDRFEKVGNYASYCRVVSTQWTSNGKSKGKGNKKNGNKYLSWAFSEAAEFARRYDEKARVYYNRKLRKTNFMVAHAALAHKLARAAYHVMKDQVPFMPEKIFT

SEQ ID NO: 189037 - protein, 320 aa, unidentified
MMAQNDLVVVGIDVAKDKVDACIRAFALRQVFPSTAHGNRKLVGWLRKHKVNKAVMEASGGYEREWRKVLHNAGIEARIVDPKRVRSFALSAGRLAKNDAIDAEMIAWYAETFSGAPSQTLDVAHEELRALMKARKSLLDVKTRLQSQNEHAAPGPVQKAHARILKSLTAEIAKLEAAISAKIKATPHLAERAEIIESVPGLAETASATLLAGMPELGQVSDEIAAALIGLAPYDDDSGKRRGERHIKGGRRWVRNAIYMPCLGAATQNNPVLKAFYQRLIAKGKPPKVALTACMRKLIIILNAMIARRQKWHPTRYAVV

SEQ ID NO: 189038 - protein, 340 aa, unidentified
MLGVDLGKNICSVVGLDGSGAVVMRRKVRRETLIALAEKLPTCIVGMEACCGAHHLGRVFAAHGHDVRLMSPEYVRPYIKAQKNDDRDAEGIAEAATRPTMRFVELKSQDQLDMQSLHRSRDRLVGERTALINQLRAILLERGMVAPQGKRKLEQFLAVLMDEQGGEGLSPRMTLLVADARAQWAELDRRITAFDAEFVRWVKDNQEARRLMTIPGIGAIVASALVAAVGRAESFDRGRDLAAWLGLVPRQFTTGGKPKLLGISKRGNKYLRRQLIHGARAALPYVAERDTPLGRWAKGLMSRAHRNVAIVAFANKLARIAWAVLQRGERFAATGMSMTA

SEQ ID NO: 189039 - protein, 372 aa, unidentified
MAPKRVTGTSPRRRGPSVATLELGKAVPSRRKKVPVEREYVGIDLHRRRSVIVRKNAGGEVLSKTRIMNDPMEMARAVGEAGPEPEVVLEATFGWYWAADLLQEMGGHVHLAHPLGNDWGNRRVKNDVGDANDLVDLLRLGRLAEAWVSPHEVRELRELVRYRAKLVRLRSGLKAQVHAVMGKHGVLPTRVDMFGPGGTAQLDALELPDAYAWRLKSLRQLVRTYDAEVDRLDRTIAKQMAHHPGFKAIQVIDGVAPVLGAVMVAEIGDVTRFPTAAHLCSWAGLTPKHRESDDKVRRGSISKQGSRLLRWAAVEAASKNHAGGNFKAAYRRIAERRGRNIAKIAAARRLLTLVYYGLRDGEVRCLASPARG

SEQ ID NO: 189040 - protein, 430 aa, unidentified
MDEVNRNRLEEFRQLRKEIRHSEEYLIVGMDIAKDRHYAFFGTATGKTLLKRIVFSNDHEGFRKLLDYAESLRVQHGLKKVVYGMEPTANYHKPLGEYLINLGRTVVLVCGVTVARNRESLDGRWDKHDGKDSANVADLISQGKCLYYEHPSAELRGLRGLLSLKRRLKKQEHGYRVRIRNQLIAQYFPEMDSNYERLGVEGLSIVRWCLPASQIARLDVDPFIDQVTSRRIRMEKRRRLEEVWEKAAESIGCEAVPGMDHEAKVMVEGLKQIREMIKETEDKIKELCEQFSEYQYILTIPGFGPDVSAKVLGAIGEPDRFQNGKQVLKMGGLDLSADRSGKNSDKAIPEISKRGKADLRYALYQAALVASVQNRDVMIYYTNKIRGREKEKGIHTKMRVKLAAKLLVIAWTLMRKKEAFNPAYLKAELS

SEQ ID NO: 189041 - protein, 408 aa, unidentified
MEVLHPRCAGLDVHKDMVMACLRNAEGNRVKQEVRSFGTTTSGLLELAEWLAEAGCTHVAMEATGVYWKPVWHVLEGSCELLLANAQHVRNVPGRKSDVNDAMWLADLLAHGLIRGSFVPPTPVQEMRDLTRTRKQLVREVAQHTQRIQKTLEDANVKLSSVISSIVGLSGRTILDALIAGENDPAKLASLAHPGIKASAQELAEALRGKVTPHHRFMLKLHLEQIDSLQKAVRDLEARMGDALEPFREQVTRLTTIPGVSDVVAQVIASEVGLDMTRFPTAGHLISWAGLCPRLDESAGKRRSTRVRKGAPWLKTTLVTAAWAAARRKTGYLRAQFLRLKARRGPKKAIMAVAASILTAAYHMLSRCLDYQDLGADHFDRRSKTKVTQRLIKRLQDLGLTVEVRATA

SEQ ID NO: 189042 - protein, 357 aa, unidentified
MAENKDSVIIGADTHKKEHTIALIGSMGQRIAAKPFKADSSGYEAALRWAYEYGMPLRAGIEATGSYGSGLCAYLKDHGIECFDVFAPDKKERRRRGKDDEKDAYQAAYAVLSGERCALAKEKSAELEIATLLESTYKQLVKQRTQTINALHGAIVKLPDHLRQSLSGLKTNVLVKKVAAYRTTNKDRNADKEFKKILRVYAQRIIQIDKEVKELDKDIEYYASILAPETLKLQGVGAHGAIKLLNTAGQNIDRMKNDGSFSMTCGTSPIPVSSADKCHFRLNHGGDRQANSAIHTMALTRMRYCDKTQTFIARKMSEGKSKKDAIRILKRYLSREVFYALKRDVTQFKLAAQEINC

SEQ ID NO: 189043 - protein, 355 aa, unidentified
MTSIKYIGMDVHTESTSIAVRNSIGKIVMECVIETKASTLLQFLDGLRGDLRVVFEEGTWATWLYDLLKPHVTEVLVCNTRKNAVRKGSKSDRIDARKLSEQLYMNNVKSVYHGEHGLRMMKELARSYLTIIKDLTRVMNRLKALYRSWGIPCAGKEVYARRYRAEWLAKISEAAVRRRAEHYYQQLDALLPLRQEARRDLLIESRKHKIWKLLRLIPAIGPIRAAILIAVMQTPHRFRTKRNLWTYSGLGLETYDSAEYRAVQGQLERSRKQATVRGLNKDYNHDLKDIFKGAAMRASTAPGPLRDFYENLLAKGRKPTMARLTLARKIAAITLIVWKKEVRFDANYLKPQQAA

SEQ ID NO: 189044 - protein, 520 aa, unidentified
MVRTRTRRRSSRRQIATSLGKPRGVLHPRVQQVGPEHFGIVCFDCAKVRSKYLLADFYGRLLIPPTTVEHTRPALDGAVAHLRRAFEQHQLRDGLVAIERTGRYHRVVQRTFAAAGFETRILHPFVTKQYRQPVDPGNKTDDADLAAIHRATVTGCALLEATRDEAWTTLQLLIRHRRDLVCKGAALNCQIRDHLEAALPGYAACFDKLWDSVIPWHLLRHYPTATQIREAGVTTLCHSLRQADIRFQQRTIQTVIDWAEQAAPGDIAAGQHLRIALALYEDRQRKTQEIKALERDIAGRLVQTPYVLLLSFPGINVVSAADFAGEMGPIEHYLNAKSITGRAGLRPSRYQSDQVDKANGPLVRCCNHALRAAILTIADNLIVCNHHFNVLATQWAAQGKDPRHTRVKVGLRFCRIGFQMVAGRQVFRHPCIQDRHYILEKLTAFHREHDTGMVEVLRDLHAAIRHVPPREYAAEAKPLQDEYRRIQDGRRRGPQLLGNILPIVFARLGVGLVSSNESGE

SEQ ID NO: 189045 - protein, 361 aa, unidentified
MTGTMTSAGLDVHARSIDAAAICVATGEVTRRRFGGASGPVIDWLRGLPGPVHACYEAGPTGFGLFRTAEAAGIRIDVVAPSKTPRAAGDRVKTDRKDAELLARLLLAGQLSAVRVPEARMEARRELFRCHEQARGDLMRARHRTSKMLLRHGRVWSGGSTWTQRHRVWLAGQQFERVESELAFGDYLATVDAAAARKAALAERLSRLALEEDLWPTVSRLRAFRGIDTLTALGLHLELGGDWARFERPAQLSAWLGLIPSLHQSGESQTRGAITKTGSLYARRLLVESAWHYRRKPYLGPTLAARQQGVPDQVLQGSWRAQRRLHRVFARLKARGKPANVATVAVARELSGFLWAAAVAA

SEQ ID NO: 189046 - protein, 376 aa, unidentified
MKRIVYIGMDVHSTNFTFCSLEPKLGGEDKFFGCMQSEADVKNVLKYIEGLKKELGDDVEYLCGYEAGCLGFSLYHQLKKQGVECVILAPSTMMASKGKRIKTDARDAKRIAQCLAYGTYSSVHIPSSDDDAVKEYIRMRDDHKIALKKLKQQINALCLRNGRQYTGTKWTLTHLRWLREMDWQEAVLKETLQEYLMTFEQMTNKLEALDRRIEELAQGEKYKERVKKLVCLLGVKTRTALASIVEVGDFCRFEKGSTYAAYLGLTPGESSSGDTVRRGGLSKAGNAHLRTLYIEAAQGVCKGRIGHKSKELKARQAGSSQEVIAYADQANERLRRKYYRLTHREKKRNVAVAAIARELACFIWGLMTNHTERRVA

SEQ ID NO: 189047 - protein, 465 aa, unidentified
MELTLGIDLACRAAHQASLARSDGTFVWTGRKFFTRPADLDALWAAVGLTEADTLRVVMEPTRNAWAPVASWFRRRGAKVSMVPTTQSADLRAYYSKHTKNDHLDSKLLARLPLLHPEGLRDHTGDGPAEPLRRAVKIRSSIVKRRTAVFQRLDAQLELLGPAWYDALGSNYGKAALAILARYADPHALIRLGQARLTRFLIRHSRGAWRDAHAQALITAAKQSIELWGADGIDFAELAADIAVEAEQAQVLTEQIEDLDERIANLYAEADPAGVIASAPGVGPVTSGIIAGRIGDPHRFTSLAAIRAYSGLVPKVAQSGQSHHQHGLTKAGDPLLREALFTAADSARRTDPQLAAKYKRLMSTDRHHDSATCHIATVLLTRIATCWRTGQHYVLRDTDGRAITPEEGRNIVKTKHQVDQKTRDKTAHARMSQRRKGRTSRESQESPSAPTSRPANTSIRATQVA

SEQ ID NO: 189048 - protein, 347 aa, unidentified
MALTIVDTPITGGVDTHADVHVAAALDPVGGLLGVAEFPVTPAGYARLLSWLGGFGAVCLVGIEGTGSYGAGLARYVATAGIRVVEVDRSDRQDRRRQGKSDPLDAVSAARAAQSGRARGAPKGRDGSVEAIRALMVAKRSARAERTQTINQARSLIVTGPDDLRIRFARHTVAALVAETASLRPRPGSTVGYATRIALRELGRRAQFLDGQLERLDELIIPLVTARAPGLLALYGVGPDTAALLLIAAGDHPARLRSEAAWAHLCAAAPIPASSGKRTRHRLNPGGDRQANHALWRIVITRMSSHPPTRAYVERRTAEGLSKTEIIRCLKRYVAREIYPRLRAAAD

SEQ ID NO: 189049 - protein, 337 aa, unidentified
MKMTTIGLDLAKNVFQVHSVDGRGKPVLRKSLKRSQVLPFFANLELCLIGMEACGGSHYGARKLAALGHTVKLMAPQFVKPYVKSNKTDATDAEAICEAVGRPWRRFVPTKTEDQQAVLALHRARQGFVQARTAQANQIRGLLGEFGLVLPQGIGHILPRLAEILEAGENELPAAFHALMERLREHLKELDRQVDGLEQQIQAWHRDQALNRKLAEIPRIGPLTASALVTSIGDAWGFENGRQLAAWLGLVPRQPSSGGQTKLLGISKRGGPLSSNLTDSWRTGGHPGDRTAVSGSDRGVGATVAGAAESQRGRRGLGQPECPDRLGADDERHAFSP

SEQ ID NO: 189050 - protein, 359 aa, unidentified
MVGIGVGMVVVGVDAHKRTHTLVAVDQVGRKLAERTVAATSDGHLQAVRWAAQWPQPQVRFALEDCRHLTRRLEADLLRAGHRVLRVPTRLMATARRSGRQPGKSDPIDALAVAQAALREPDLPAAHLDGPTRQVKLLADYRADLVVERTMLCNRLRWHLHELDPELHVPSRGLRRYKVIDELAAHLAGIDGTVAQIARELLGRCRELTVRINQLEADLRELVRVLAPGLLAIPGCGVLAAATILGETAGASRFRSRHAFARFNGTAPIPVWSGNAVRVRLNRGGNRTVNWALPMIAVTQARGVGPGQAHVERLLAGGKTRTEALRLLRRRLSDVVFRVLLADEHRQAEPVPASAPQAA

SEQ ID NO: 189051 - protein, 341 aa, unidentified
MTMFAGLDVGGKRTAVCVIDGSGKAVWRGIVDTHPEMIDAALQRFKGSLDKVGLESGPFTPHLFRSLEALGYPMICMDARRAADAIKSRRIKSDKGDAWALAEMLRTGWFSSVYVKSVDTHRLKALLGARDQLVKLKRSLGNQVRGLLRPFGIRLPSRAGAKRFDEAAYQATRNDPMLHAAIRALLEALAAIEGQQARLDDALDELAKRNEIAWRLMSVPGVGRITALAYMAAIETVERFRRTRDIGAYLGLTERRYQSGETDVGMGISKQGDAMARHYLYEAANVLSTTVRKHFALRNWGLRLVKTIGPKRARVAVARKLAVLLGRMWKDGAHFEAAVPT

SEQ ID NO: 189052 - protein, 318 aa, unidentified
MNASIFVGIDIAKFSLQIACLELKLEPQLPNSPVGWNQLVKLLKIHGAKVLLICEATGGLERGLVDQLQKAELKVCVLNPRQARDFARAGNRLAKSDKIDAAVLAEFGRRMEPRPAAKVAPWVRTLAALVGRREELTAMRSAENNRLEQNFLGFVAKQLKASIKRFNKDLKALEVQIDRLIASTPELKTKHQLLCAVQGVGSITATTLMATMPELGSLESNRVANLLGVAPLNCDSGQWHGKRRIYGGRRFARRVMYMASLTATRHNEILKAFYGRLVQAGKPKKVALVAVMRKLIIYLNRVLKPVTSQAPCLTAKPS

SEQ ID NO: 189053 - protein, 393 aa, unidentified
MICVGIDVAKDKHDCFILSSEGEALADVFTIQNNAEGFDRLLQTIRRCTRPEDKIKVGLEATGHYSYNILGFLLDEGLPTYVINPLHTNLYRKSLSLRKTKTDRVDARTIAAMLMSDVDLKSYTDTAYHNEELKSLTRYRFDKVLERAKLKQSVSRLVTILFPELEKLVPTLHMASVYALLSEFPGARQVAEAHLTHLKAVLYDASKGRYGRDMATTLRDAARCSVGSVMPAKSLELQHTIRLIRELDAEIEDIETAIQSMMDEIQSPITTIPGIGVRMGAMILAEIGDFTRFDSPDKILAYAGMSPSTYQSGQLSLSGAYSHMEKRGSRYLRYALYNATKYVCLWDPAFAAYLAKKRGEGKHYNVAISHAAKKLVRLIYAMEKSKQSYRNAA

SEQ ID NO: 189054 - protein, 339 aa, unidentified
MTIVGCDFHPGWQQVAVFDAETGEIRELKLENGNGEAERFYRQLSAPALIGFEACGNTQWFEDLLDRLGHEVWMGDAAAIRASYVRKQKTDRRDAAHILKLLMESRFPRLWRPSAGERDLRQLLIHRHKLVGIRARVKNGLQHLMLNRGVQMKRKLWSEAGQKALRALPLEGWAAQRRQDLLHLLSGLDPQIRQLDVAIERAAQENPRARLLMTQPGVGPITALAYVLTMGDVSRFQRGKQVASYLGLIPSERSSSQRRRLGSISKQGNSFMRMLLVESAQTVNRLDEGFRKQYQHRCHRMARGVAKVAAARRLAVRLFWMLRTNTAYPEIAHIESSPR

SEQ ID NO: 189055 - protein, 344 aa, unidentified
MITGASQKLYGGLDLHSSNVYVGIMDGEGKRLYQKRLPTDIEIILKALEPYQDRLEALAVEATYNWYWLVDGLQEAGYAVRLANPARMQKYEALKVTNDRSDAFWLAEQLRLGVLPEGYIYPKWIRPVRDMLRRRMLIVRQRTQMLLSLQTMTEQIKAARISAWRLKSWDLEEIKARFDDPYTVQTLWAMVQLIRKQDILARSLEDKVLEHVRLFDPYDRLLTLPGVGRILGITIMLETGPIGRFATAGQYASYCRTVPSRRESNQKKKGENNRKNGNRYLGWAYVEAANFAQRYDPVVRRWFQRKLVRSCRVVAIKALACKLSKAAYYILRDGVEYEPRMLFG

SEQ ID NO: 189056 - protein, 335 aa, unidentified
MLIIGCDLHTRFQQIAYLDMTTGEIVTRPLEHENCEARKFYAGLPEKARVGIEATGCTQWFERLLAELGHELWVGDAGKIRAGVVRRQKTDTRDAEHLLDLLLTNRFPRLWIPTPEERDVRQLLQHRSKLVSMRTSVKNQLHYLAMNQGVCRKRQLWTKRGRAELLALNLGPWASRRRQELLELLDRLDPRIEELDEVVKAEAERRPEVVNLMQQKGVGPVVGLAFALTLGPVERFANSRKVVSYLGLNPREYYSGGHQRLGPISKQGNEMLRWLLVEAGQSAAQYDPELRRKYQRLKFRRGANVAKVAMARQLAVRLYWRLRSAGCGTAGSHAK

SEQ ID NO: 189057 - protein, 358 aa, unidentified
MRKRTTKLRKGKSVVLNAEDRVFVGLDVHKKSYHAAVRVNDQEITTSVVAPKAEAVLKYLKPYRGARLHVVYEAGPTGFGLVRALRLSGVATDVIAPSKTPQTPARTNKTDRLDCRQLALYAEKGMLKTVGVPTAEEEADRQVIRLRDQVVDARRRVMQQIKSFLLQHGIAEPRGLGTWSKEALRALETLELEFALRFCLDQMLEHLSHLEGQLQEVNRVIGTLSEAPRHARAVARLKRPHVVGVLTAMQFRVEMFQAGRFANERQVAAYLGLAPRVSQSGNRLHAGPLLKAGHGRLRALLIEAAWRWIRVDDEIRTVYRRLLANTAQPNKAITGVARRLAIRLWRDLVPPQERKGAA

SEQ ID NO: 189058 - protein, 316 aa, unidentified
MTGTPTYAGIDVAKDRLDVVLRPSGEYVEATNDERGIRSVVRRLRKDDVALAVLEATGGLEQPAAAALALAGVPVAVVNPRQVRDFAKATGKLGKTDRLDAAVLAHFAEAVRPEPRPLADEHTRELSAVVLRRRQLLAMTTAEANRARTAPKAVSKRIEAHLRWLRKELARVDGELKQVVEESLVWKERAALLMSVPGVGPTLSATLLAELPELEHLDRRRLAALVGVAPLNRDSGTLRGIRTVWGGRSGVRTTLYMATLCATRHNPAIREFYGCLVASGKPKKVALTACMRKLLTILAAILRNRTPWQPGLLPAS

SEQ ID NO: 189059 - protein, 313 aa, unidentified
MENFVGVDLHKKVSQLATLREPKPASQVRFPNHTVTVEKVLKKLPQGSKIALEATGSWWWFVDLAQRTGHEVVMSHPKQTKAIASARLKSDKVDALMLAKLLKADLLPTVWIPPAAQRYVRELLTHRARLVRQRTSVINELHALYAKRNIDPGMIFHRVRPPAFRAEDLSGYGPRIVEEDVALLGFLNRQVQGLDKELKAIAEKDPESKRLMTIPGVGPVNAVAGSCWIGTIERFSNSKKLSSYFGSLLIQAALWHIRRGPMSSRRHYLGVCKRRGKPIARVAAANKLLGIIFQMMKEKIDYEEFLRRGGNAQ

SEQ ID NO: 189060 - protein, 412 aa, unidentified
MNVRVEKACGIDVHKSFLVATMLTCEGVKETKEFNTGLEDLINLREWIIERHCQRVAVESTGIYWIPLYTCLEGKVETIVANPRFIKNIPGRKTDYLDSEWIAELCLNGQIKPSFIPSKEIRELRDLTRTRTKMIQTRTAFKNRVHKVLQRANIRISVVLSDIFGVAGLQIINGILNGKCIDDVLKDVKKINKKKAAIKEAVCGELSQADVFVIRECLETIAFLQSKIDQLDSMINQRFEKVEKKNQMEILMSIPGISFTSASAILAEIGDINVFPFPKSLVGWSGLAPSLDESAGKSSNGHITKKGSKYLRRMLVQCANAIADGRPNKLRFFFQRILMKKGRKIAIVALARKLLSITHHLLKNNEKYNEEDLKPKQVRVPKFKVISELSIDEMIKIISNSGYTVDKRSSNC

SEQ ID NO: 189061 - protein, 428 aa, unidentified
MNYNQNEKIAQITSETLIIGVDIAKFKHVARAQDFRGLEFGAPCHFENTKPHFDLFLSWIKQLMEQHGMRKIIIGMEPTGHYWLNLAHFLKEEEIKFVVVNPMHVKKSKELDDNSPTKNDVKDARVIAQLVKDGRYAEPNIPQEVYAELRVARKIRDLLFVDLQAVQGQIHNWLDRYFPEFLTVFKDWEGKAALQLLKLNALPHELEILSEQEILIHLRKAVKRAVGLSKVQELKRVAKDSIGIREGSRMAKLELRTLLDKYELIYKKFEELESDIDGLLERIPGVQQMLAITGIGKDTVAGFFSEVGNLSYYSHPRQIIKLAGLSLKENTSGKHKGQTKITKRGRKTLRALLFRVAMPLVAKNTAFKALHEYFTTRKNNPLKKMQSLIAICNKLIRILFTIGTKQCEFSEDRMLKDIPHMALLQKVA

SEQ ID NO: 189062 - protein, 370 aa, unidentified
MRADRKRGKVKVGGMNAMVAGIDLGDRESLATVLSPVGDVADRFTFPMNEEGYAFFASRVPKNARVAFESTIMAYPISRALRMHGYSDVTVAHPKTLAWIVRSKRKNDRVDSLKIAKLHMAGMLPESHLLDRNDQIIRDLLVQRVKLGVEIGRLKNSVIGYLKREGVYESLPQTRDNFSLKRRHAIRSLRFHDKRDLVLGTMMDRLRFLEKQCTPLEDSIMENAKLSDDVKILMSIAGVDHYLASLISSFIGDVERFPSDDHLASFFGIVPTSRDSADIKRRGRMSKDGSSIARWALSIMVDTVMHHNEPIRMYYASVKKRTGSGKLAHVSTMRKLTRMLYHMLKTKQHWKWENQRLTERKIARIEFGRR

SEQ ID NO: 189063 - protein, 370 aa, unidentified
MSEPTPLFVGLDVHKDSIAVAHVRGQSTEAPVFVGEIGTRQSDLEKLVRRLQTKTARLVFAYEAGPTGYGVYRYLTGRGLECQVIAPSLIPKKPGDKVKTDRRNAEDLARLLRSGDLTRVYVPTVEDEAIRDLCRARDAARLTMKNAKHRLKAFLLRLGLQYVGRADWNAAHKRYLSKVVCPTPAQQIVFQETLRAVDDEVERMERLETELRERAPAWRWYPVVEALQALRGVQWLVAITVVAELGDLTRFTSPRQLGAFVGLIPSEYSSGQSRRQGGITKAGNGRARRALIEGAWAYRHPAKVSQHMQTRIDALPKPLQDLGWKAQVRLCKRFRRLVGRGKHPNVVVTAIARELIAFMWAIAKEVPVAD

SEQ ID NO: 189064 - protein, 462 aa, unidentified
MHKRVKKGGRKSKNPSPQSLPVTRSKVAGIDIGSREHWVCGPALPDGKVNARVFSTTTPSLNQMADWLIEQGVESVAMESTYVYWIPIYELLESRGLEVVLVNARQLKNVPGRKTDMHDCQWLQLLHSCGLLRGSFRPGESICRLRSLHRQRCNLIEQCSRAIQWIQKSLDQMNVQVHRAVTDITGVTGMLIVRAIVDGERDPSKLAAFRDQRCKKSEEEIAEHLTGTWRDEHLFNLASALRLYDALQAEVQLFDQRILEVLIELQPPQRRHHNVPAHPNPQKRYDMQHRGESQMRNELWRFAGRDLTRIDGISPTTAAIVLTEIGFDLSDFPFEKFFVSWLHLAPRRPISGGKQLSKRRNGTGSNRIAGALRLAAVSLSRSKTALGAYYRRTARRKDGKTAVFATARKLAQLVFRMLKYGQDYIDIGERAFEDRFRQNHINGLQRAAEALGYTLTPQASGG

SEQ ID NO: 189065 - protein, 358 aa, unidentified
MKYIGCDFHPSFQVIAMLDKETGELVERRLLHTQEARAFYEELKDPVVVGVEASGNMDWFESLLGRCHHEMWIGDAAAIARQEGRKQKHDRRAAALILKLMVENRFPKIWVPTVAERDLRQLLMHRQHLVRMRTRVKNQLQHIALNQGWQKKHKLWSQAGLELLRGLPLEPWCQQRRDTLLEMLEELEEKIKPLELAVAQAAEASEAARLLDTHPGVGPVISLATVLTMGDVKRFPDSRSWVSYLGLNPSEQSSGQRRRLGSISKQGNPFLRYLLVQGAASAARGDKDLGRVYTRLKARKHHGVAKVAVARKLAVRLYWMARTKKSYPEVVRTQGSQSRPVAETKAVRLSRPPASHQQ

SEQ ID NO: 189066 - protein, 344 aa, unidentified
MTYFTGIDVSLRSVSICVVDDKGEVCLEAKVAAEIDAIVDRLRRFSSDVKAVGFEAGTLTQYLTYGLQAAGFEVICLEARQVSVTLAAMRNKTDRNDARGLAQILRTGWYSRVHVKSLHSHQVRALLASRKAILKKCVDLENELRGLLKVFGIRLPSRVGHGSFDAELRETVCSDEMLACALVPLLDARTVLYKTYLKLDNAVKGLVRLDPICRRLMSIPGVGPVTALTFKAAVDDPNRFKSSPTVAAHFGLTPRRFQSGEVDNPGHISRAGDADVRSALYVAAHSLLTRNAQWSTLKAWGVRLAKIRGHRRAVVAVARKLAVILHRMWIEGSEFRWGAAETPA

SEQ ID NO: 189067 - protein, 325 aa, unidentified
MKIVGVDLHAKQQSIAMLDNQTGELTERVIRHEGNAVREFYAALEGPVVVGLEATGSMQWFLELLDELGIQYRVGHPAKIRAAEPRKQKHDRRDARLILELLTANRFPDIWMPCIEQRDLRTRLRDRHQWVKMGARLQHRLQSIALNHALRKGTSLWRAAGLETLQRLPLPPYARQRRNQLLSLYAELQKRIQELDRQVEEQAQQRPQARRLLTHPGVGPVTALATEVFLGDPSRFAKGKNVASYIGMIPCEHTSGKRQRLGKLTKEGNSLLRYLWTEATIHAVRKDPQLTLLSSQAYPERDGQGEDCGGAQTGYPLVDHVARPD

SEQ ID NO: 189068 - protein, 343 aa, unidentified
MDHFAGLDVSVKETSVCIVDDTGKIVREVRVASEPEALLAVLTNPAYHFKRIGLEAGPLSQWLYSALAEAGLPVICVETRHMRAVLKAQINKTDRNDARGMAQMMRVGLYRPVHVKTLRSQKLRMLLTHRKLLQSKAIAIDNDLRGTLRNFGVKVGIVGSARFEARVKELIENLPDLAVLVEPLLVVRRVLREQLGILHRRLLAVVRDDDVCRRLMTVPGVGPVVALTYRATVDVPARFRKSKSVGAVFGLTCAKYQSGESERTGAISRCGDEMMRTMLYEAAQSMLFHSTKWSWLKAWAMKIARHRGMKKAIVALARRLAVIMHRIWVDGTEFRWTREVAAA

SEQ ID NO: 189069 - protein, 331 aa, unidentified
MFPVGIDVSKDTLDLCMLYDGMKGRVKTRNIRNDRSAVAHILRWLRLQHCGPEDVHVVMEATGVYHERLATSLHDAGFCVSLANPHRSREFARGMGIMTKTDKVDAYMLACYALLKKPHRWEPPAADIRFLSALLRRRDVLLADAVREENRLEKYQSTETPADVVSSCIRMAQLLREEVRSIERQVKAHIQASPDLKRDYALLTSIKSVGPQLGMHMLVVLRSHHFESADQAAAFLGVVPVEKRSGTSVRGRPRMSKIGPPQLRAKLYMSALCGKIHNKRMRNIYEEMCLRGKPKMVVIGALMRKLVHWCYGVLKTGTAFCDGGPRAAMNT

SEQ ID NO: 189070 - protein, 335 aa, unidentified
MGLDLAKNVFQAHGIDETGNTVLVKRLHRKQMLPFFSKLPSCLIGMEACGTAHHWARTLAAMGHEVRLIPPSYVKAYVKRGKSDALDAEAICEAVQRPTMRFVPVKTVEQQGILMTHRARALLVRQRTMVANALRAHLADFGLVANPGIANLAKLAQQALSDEDGLPSYARTSLDILIRQIMVFTDEIAVLDQQLHAWHVDSEASRRLAAIPGLGVVTATAVAATVTDPDQFRSGRQFAAWLGLTPQQHSTGGKTQLGGISKQGDRYLRRLLVVGATAVIRHTKDKATPMANWIRKLLEKKPFRLVSVALANKLARIAWVVLTRKEAYRAHELTA

SEQ ID NO: 189071 - protein, 430 aa, unidentified
MGLIDLASMSPARDEQAISYHWYVGIDWGSQQHQVCVLDRDRHVVGERVVDHTGSSLAQLATWLWALSAGQPQRVAVAIEVPRGAIVEGLIERGFHVFAINPKQLDRFRDRHSVAGAKDDRRDAFVLADSLRTDRPSFRRLHLDEPQLLLLRELSRAEEALLEEFRRSANRLRDQLHRFYPQMLHLCSGADEAWLWDLLDLAPTPAHAALLSKEQIQRVLKAHRLRRVKATEVLTCLQASALPVAPGAAEAAQVHCAFLLPCLRVLAEQLRSCAQQGEALLKTLAEEPDETGGLSDVAIVQSLPGVGRKITAWLFAEAAQPLTERDYQVLRTQGGVAPVTKQSGKRRQVVMRRGCNPRLRHALYHMARVATQRDAYFGGVYEALRAKGQRHGQALRNIGDRLLRILIAMLHDRTCYDANRSRREPVVQMG

SEQ ID NO: 189072 - protein, 457 aa, unidentified
MSNRSRQLSRGDQRRNERLATLRSVVTRETAVLAVDLAADKQVFALCDPDSAVLARRTVRARAWELAPAVEWGISQATAAGFSSVVVACEPTGHRWRVLDQVTASLGVPLLCVQPMLVGRARVAEDLTRNKNDEADAVVIARLVTELRCYLPERADPAWARLRHLGARRARLVTERGAARQQVRDLLECAWPAALSAAAQPLDSMSWLAAVTVALDHIGTSGDLHAVRSLGWSRFAAATSKVLPRFGTTRRYTPVVRAVFDAATQPSLAALGVEDQRAGALERAAFCLADLVRLRGELADVEDRICALTDELGLSHLIGSIPGISVLGAALILAETGDPTRFGSARALVKHAGLCPRANESGRSAGTTTISGKGRPGLRLAAWRAVFSALQHNPVLAARYTHLTSRADRPLTDTQARVALCAALLRQLHAVVTTATPWSAARASGAGRSGEGAARAA

SEQ ID NO: 189073 - protein, 417 aa, unidentified
MDTLFAKVAGLDVHLKTISCAVRCRHQSGKLFTQVRSFGTMTRDLRTLADYLQSLGVTHVALEATGVLWKPVWNVFEGRFTLLLVNPRHLKKVPGRKTDQSDAAWLAQLLQCGLLCGSFVPPRPVRQLRDLTRHRAQLAAEHTRAANRIHKLLEDANIKLGAVASDVLGQSGRAMLAALLAGEQDASQLAEMALGRLRAKIPELKQALEGNCAEHHRFLLGRLLSHLGYLERQSEQFDTHIAHRLSELLPADAVERLDVIPGVNHKTIENVIAEIGADMTVFPDEHHLCSWCGICPGNEESAGKRLRSRTRKGNRWLRRALTEAAWAASHAKDSYLSAQYRRLAARRGKKRALVAVGHSLLVIIYHLLKEEVAYADLGADYFDRLEPARLQRYLVKRLQGLGFDVTLTPKQQADSVV

SEQ ID NO: 189074 - protein, 340 aa, unidentified
MIGIDPHEASHTAVVIDHRECVLDELRVRACSKQTDQLRCWAASFPDRVWAIESARGLGYLLAQQLVAAGEVVVDVPAVMSTRTRLLGSGRAQKNDPNDARSVAIAALRHDALSRVVLDDHARVLKLLVKRHRDLGRSKSKAACRLHALLMELEPGGMAREMTVTRANEILDRIEPATQMQAHRLAVARETLADLAHYETQMKASMQRLRTAVAASGTSLVDIRGVGVIVAAMIIGHTGDVSRFASAAHFASYNATAPIEASSGEKKRHRLNQSGNRQLNWAIHTAAVSQLRYPCEGRDYYDRKRAEGKNAKEAIRSLKRQISNVVYRTLVADARRRLEQ

SEQ ID NO: 189075 - protein, 316 aa, unidentified
MRKRETFVGIDVAKKDLEVAVLPGTDTRTWPNTEEGLVRLVEWLKPLCPAIIVLEATGGMEMPCVGTLAAEGLPVVVMNPRQIRDFAKATGRLAKTDRIDARVIARFAEAVRPKTRELKTAEMQELTALGVRRRQIIQMITAERNRLTSASKWTREDIREHISWLQQRLDDVTDELNKAIRNSPVWREKDDILRSVPGVGPIVSATLLSQLPELGSLNRRQIAALVGVAPLNRDSGLSRGKRSIWGGRATVRCALYMATFVATRFNPTIAAFYQRLRIAGKEPKLALTACMRRLLTILNAMARDRARWAPVCLRES

SEQ ID NO: 189076 - protein, 347 aa, unidentified
MDHVGMDLGKRESQIAILTEDGELIDMRIRTERDRLIEVFGRRPKAKILVEASTESEWVARCLEDLGHELIVADPNYAPMYAQRTRRVKTDRRDAHALAHACKLGAYRPAHRTSTERRHLRTLVAVREAVVRTRAAWIGRIQPLLRREGFRVRTGAPETFIRRVEELALPPALKTAIAPLLRLLRPVNEQIQALDAELERIVAADDVTRRLVTTPGVGSVTAVAFVATVDDVTRFRGAHQLEAYLGLVPSEWSSSEIQRRGRITKAGNGRMRWLLVQAAWCILRRRKQSETAALREWADRIAGRRGRPIAVVALARRLAGILFAIWRDGTVYDASKVRRAVVATQVA

SEQ ID NO: 189077 - protein, 339 aa, unidentified
MSQEIVVIGLDLAKNVFQIHAIDAQGQPVVRRQLRRAEVLKFFAKLPPCLVGMEACASAHYWGREIGALGHRVRLMPPAYVKPYVKRGKTDAADAEAICEAVTRPTMRFVAVKSEEQQAALMLHKTRDLLVRQRTMLINALRAHLGEYGIVKAQGPAGVNSLLALVQEAQDAVPVHAQSALRSIVAQFHALVREIGHLEKQILDWHRHDEVSQRLATVPGIGPITASAIAATVPDASIFRSGRQFAAWLGLTPRPHSSGGKERLGGITKQGDGYLRRLLVVGATAVTRMTRKDRAKQPWLARLLATKPAKIASVALANKTARIAWVIMSRGEVYRSAAA

SEQ ID NO: 189078 - protein, 369 aa, unidentified
MGKDSEVFVAFDVAKKKHAVAIAEGGRTGEVRFLGDVENSPLPIERAIKRLANRYDRLHVCFEAGPTGYGLYRQVKALGHDCMVVAPALIPKRSGERIKTNRRDAVTLARLHRAGELTGVWAPDAAHEAVRDLVRAREAAADDLRRKRQQLLSFLLRHSRIYSGGGHWTLAHRRWLAGQKFEHAAQQIVFQEGIDAIDDALQRLRRLEKQLAVIVPEWSMAPVVEAYQAMRGASFLVAVTFAAEIGDVRRFDTPRQLMSFLGLVPAESSTGDTIRRKGLTLAGNRRARRALVEAAWTYRYPARVSETLRTRLDGLPKSVRDIAWKAQVRLCARYRRLSATGKKLPIVVAAIAREMAAFLWAIGREIAPA

SEQ ID NO: 189079 - protein, 411 aa, unidentified
MRVHHTICCGIDVHKKSVTACLMWGPADQEPQFEIRRFGTMTSELKVLAEWLKQAHCQIAAMESTGAYWKPVWNVLEGETRLILANAKHVRALPGEKTDNKDGKRLASYLRHGLIRASFVPPRDIRELRDLTRYRKKLLANGAAERNRIQKVLEDANIKMGSVLSDVFGVSGQRMLHALVENPSVDVEAVAGLAHWRLEPKIEELKKALEGRITAHHRFMIELSLGHMQYIEQQILRLDQEISRHIAPYQKQSELLQTIPGIAKNAAATVLAEIGPDMSPFDDDGKLTSWSGICPGNNESAGKKFSTNTRKGNPHLVSALVESGWAATHTKNSHFKARYHRIKARRGSQRAIVAVAHTLLRTIYVVLKTGQPYHEPVRPPLTETQRTRKAQRLSRELQNLGFEVTLKTKAA

SEQ ID NO: 189080 - protein, 418 aa, unidentified
MTRRDDSRIIRIVHPICCGLDVHKESVSACVIFPDDKGEEQCDVKVFGTFTDDLMRLRDWLAAHNCPVVAMESTGVYWRPVHNVLEDSVQVVLVNARDMHNVPGRKTDIGDSRWIAGLLRHGLLKSSFIPTQDVRQWRDLTRLRKKYVHTVGDYRKRTHKLFESANIKIDSVVSDLFGVTGRNLMQLLVADRKLTLSDIQTCVRGKLRGKEAELFRSIQGFFTDHHRFVLKMILETIATLEAQIEALDLQIRCAMKEHEALLDRMKQAPGIADVASREILAEIGPTLDSFRKDTALVAWSGLCPGNNESAGKRKSGKSPVRKHHLKTIMIEVAWAAIKKKDSYFKDKYYRLKARRGAKRAIVAIAHRILLGIYHVIKDGADFRDLGGDYLTLRNKSQKVFHLRKQALAMGFDLVPQTV

SEQ ID NO: 189081 - protein, 325 aa, unidentified
MSEDRLINRRILMSEEVFVGIDVCKAWLDVAQLPASQPPGVSARVDNHDSARARLVEELVRLQPALIVLEATGGLETAIAAALCTAGLRVAVVNPKRVRDFARASGVLAKTDRLDARVLALFAQCLHPAAQTLPDEAQREVTELVDRRAQLVAMRAQEKTRLASVQRVARKSVREHIEWLDARIKHIEHDLDARLKDSPVYSPKYALLHSVPGVGRVTVRMLLGRLPELGTLQRKRAAALVGLAPFADDSGKRRGQRYVQGGRAEVRAVLYMATLSAVRCNPVIKVMFERLRAAGKPFKVAMTACSRKLLTILNAMLKHNTPWAA

SEQ ID NO: 189082 - protein, 445 aa, unidentified
MGQRTIGIDLAIRGDHVARIFDDGLPTGKPIRFRLTSDSLSHLLARLRDGLPADSATTAVMEPTGMSWFPVARWLQQSGIKVIRVKGQRVRALRRYLSEHAKTDAADAYVLGAIPLFGGVPADPVYVPNADRHALQRLTRQRERLEDEVSTIKRRLIDLVRWACPAIEAVLPDFRTNLALALLHDFFDPAVIIKTRRKTLLHFIAKHASGNHPHGGPFADKLVDGLKAAAEETQRLHGTAVNFDHLQLEVVLEIDRMRLLESQLGRLGHNIETLYAKLHPSDALRTIPGIGDALAPLVLGVLHEARRFAGVHQLRGFCGLFPRTNSSGGADRPGQAITQSGNNRIKRALYLAADAARRIDPGLAEVYWRLMVRKGHHHKQALCAVATRLVNRIGKVLRTGEEYELRDTDGTPISVAQGRSIVTERFSIPMEIRNARRRHREENYA

SEQ ID NO: 189083 - protein, 362 aa, unidentified
MKKGTKLQPAPAPQANTQPAITVGLDLSDRNLHFCEIDADGEIIAESRIPLTAAALRKQFGGREKLRIALETGAQSGWVQRELQAMGHEVIVANARAVESIHGNRHKGDQRDARQLARLARVDPALLAPVQLRARQQQLDLLRIRVRALLVEMRTMLVNGVRGLAKQEGERVPSTTTDRFAARARQSLTGALREILEPLLAVTQKVSDCIEKSEEDLDKIAETKYPDTRWLRQVPGVGNLTALTFLLTIGDPTRFEHSRDIGPYLGLTPARRQSGDSDPQLRITKCGDRYLRKLLVQCAHHILGRWGKDSALRDWGLKHTGGSRSSKKRAIVAVARKLAVLLHRLWTTKEAYKPYPNQVMAA

SEQ ID NO: 189084 - protein, 350 aa, unidentified
MPLILLGVDPHKSTHTTVAVAPEANRQLASVTVGARLPEYRRLLTWARKWPERTWAVENANGLGRHLAQWLIARGERVVDVPASATSRVRELSRGGGRKNDQIDAAAAATVACLHGDGREVGAEDHATALALLDERRVNLTQARVRVVNQLHALLRDLLPGGGPGQMSADQAAALLRTVRPVGAVEKVRKGLARDLVAEVRTLDKQLVANAADLETLVKAANSTLMHTPGIGPVLAARLIARVGRAGRFPTAAAFANYTGTAPVEIASADKSRHRLSRSGDRQLNSVLHTIAISQVRMPNSPGHVYYQRKLSEGKTPREARRCLKRRLADHVWKVMLADERRTRPPAVTP

SEQ ID NO: 189085 - protein, 392 aa, unidentified
MYIVGIDIGKNHHEASIVSPKGKQIGRSLRFATTHKGADSLMSFIFKNIGNSPCVFGMEATGHYWYPIYSFLKAKGYTIYVINPIQSDSLRKMYIRQTKNDSIDSFLIAEVIRFGQFGTTSMADENILAMRQLCRYRDSVISSRTEIKLRIGTIMEQIFPEYEKQFSSLWVSTSMGILEKYLTPENIENTPIDELFEIIKDKSHNRLTRAKAISIKEAAADTFGIKIAQDAFSFQLKQLIDRMNFLDKQIEALDIEIMKYYEQFDCYLHTIPGIGIIGAATILAEIGDISRFKNSSALVAFAGIDPTVRQSGEFNSTHNHMSKRGSPYLRHAIFLAATTCSFHNSPLNAYYKKKRDQGKHHLTATGAVARKLTTVIYAVLRDSKPYEPKKFC

SEQ ID NO: 189086 - protein, 347 aa, unidentified
MRFYTKQHRYYCGIDLHARSMYVCILDPQGEILLHRNMPCAPESFLKAIAPYREDIAVAVECIFTWYWLADLCSKQNIPFILGHALYMKAIHGGKAKNDKIDAHKIAVLLRGGMLPMAYVYPPEMRATRDLLRRRMYLMRKRAELLAHVQNTNSQYNLPEIGKKIAYKANREGVAERFSDPSVQTSIEVDLKLMDHYDQLLTDLELYIVRTAKEHDAHAFYRLRSVPGIGKILALVILYEIHDINRFATVQDFVSYARLVKCAKESAGKRHGTSGKKIGNAHLKWAFSEASVLFLRANPKGQRFVEKLTAKHGKAKALSILAHKLGRAVYYMLKRKQAFDMNKFFSS

SEQ ID NO: 189087 - protein, 399 aa, unidentified
MFIVGIDIAKKSHQAVIIDEEGNQRSKNFRFANSLEGFNLLLNNMEEIDSDHSNFEIGMEATGHYWINLYTRLIDKGFKIHVINPLQSDALRNLYLRKTKTDSVDSKLIANVIRFGQYTETRLTDDKLLTVRELSRQRFYLVDMNSDLKRKVVVIMDKIFPEFQGIFSDMFGKTSCAILKKCPSSKEVLEIDFDEFAAIIKKSSRSKFNIAKAKEIKLAARDSFSALIDPAPLSFLVKQMVEQIELLENQIQNLEHEISEIFMQLDSKITQIPGIGPVLGAVILSEIGDINRFSSSKKLVAFAGIDPSIKQSGEFVSSENHMSKRGSPYLRRALWIASFVNLNHNKEIIKLYGKKTSNGKGHYKTMGFLCHKLLNVVYAVLKNNADYIPYAWTESKACS

SEQ ID NO: 189088 - protein, 410 aa, unidentified
MKHSKSKIKANTVRVDERNIVGIDIGKRKHAATAVSPKGVTIAKLKSFENNRQGVDQLERHVLVPATATHKPMIAMEATGQYWNALHDELQRRGYSCVVLNPIQTSSRSKKQIRKTKTDLVDSGLIARTILSGDARWTIVPDEAMFELRLLVRHRWRLIRTHGIILRYAISLVDRVFPEFEGIFCKPFLSSIRQLIRDVGITPCSLIGNRQMVQTVLERASRKRFSQEKIDLLLSRATESIGTQQGDKTVNHQFRMIVDYLDFVEKQVKEINAELRKRMLETPNPITSLGIGPELAATILAESGDVTMFAGPEKYSAFCGLDPSEYKSGDSIQGRTPISKRGSPLLRWAMYMSAVTVCKKHHDFNRIFERHAHKGYRYAMIAVAHKLARVIWRLVKDNRKFTKRPPKRTV

SEQ ID NO: 189089 - protein, 355 aa, unidentified
MNTIKYIGMDVHLATISIAVLDANGKLMMEVTIATQAGALLDFIRGVSGTLHVTFEEGTSAHWLYTLLEPHVAKVVVCDPRQNPRRLGEKKSDRLDARKLAELLRLGSLKPVYHGNALGPALKELARSYRTLVSDTTRVMSRLKALYRARGIRCAGTRVYSPRFRDQWLEQLREPGARGRADLLYKQLDLLLPLRQEARAAMLTESRKHPAHKILCSIPALGPVRVAILLALLQTPYRFRGKRQVWTYAGLALVTRTSADYQMVDGQVTRSRKPALVLGLNANHNHTLKGLFKDAAASALAHPGPFKDFYTTRVAEGMKPELARLTLARKIAAIVLTLWKKGECFNAEHVKAQAA

SEQ ID NO: 189090 - protein, 322 aa, unidentified
MDFLGVDISKRDFHAVLMQGGRSSKKSFPNTVKGFDQLTHWLRNRKAAAVVVCMEATGSYWQDLAAAIFDAGHTVTVINPKRIKAFAESELLRTKTDAVDAALIARFAATQKWEPWSPPAREIREMQGLSRHLEFLKRSRAQYLTRIQTPGLPPRVIHSTQELISKLDLEIDDLERAIRDHIDRHPGLKAKDDLLQSIPGIGETTAATILSEMPGIEEFSSVGAVAAYAGLSPLIRQSGSSVRGKPRLCKTGNSRLRKALYFPAIVAQRHNPTLRALSDRLRALGKPPMLIIGALMRKLLALAYGVVKSGQPYNSAFYPLRA

SEQ ID NO: 189091 - protein, 355 aa, unidentified
MKAIKYIGMDVHSATISIAVLDVHGKLMMEVTIATQAGALLDFIRGLSGTLNVTFEEGTSAHWLYTLLEPQVAQVVVCDPRQNPRRLGEKKSDRLDARKLAELLRLGSLKPVYHGNALGPALKELARSYRTLVSDTARVMNRLKALYRARGIRCAGTRVYSPRFRDPWLEQWHEPGVRGRADLLYKQLDLLLPLRQEARAARLAESRKHPAHKILCSIPALGPVRVALLIALLQTPLRFRGKGQLWTYAGLALVTRTSADYQMVDGQVTRSRKPALVLGLNVNHNHTLKGIFKDAAASALAHPGPFKDFYTTRVAQGMKPELARLTLARKIAAMALTLWKKGECFNAEHVKAQAA

SEQ ID NO: 189092 - protein, 398 aa, unidentified
MAVPQIWAGMDIGKEHHHCVVINERGERLLSRRVLNDEAALLELIRDVLDIDQDVLWAVDVNHGGAVLLIGLLLNHGQPMAYLTGLAVHRASGTYRGKGKTDAKDAFVIADQARMRRDLGLLRPGDEIAVDLRILTTRRTDLAGDRTRQINRLRAQLLEFFPALERALDLTNKGPVILLTGYQTPAAIRRAGAKRIETWLRNRKVRGAAALAKAVLDAAQAQHTALPGETLAAGMAVRLAKAVMALDEEIAELDALIEARFREHPHADVICSLPGMGTQLGAEFIAATGGHMTAFASADRLAGYGGVAPAARASGRISGNHHRPRRYHRGLLRVFYLSAMASLKSCPASRTYYDRKRAEGKGHKQALIALARRRVNVLWAMIRDGACYQSAPSVAPAV

SEQ ID NO: 189093 - protein, 592 aa, unidentified
MRTAPSAPLDRIGVGIDTARYGHRVSFLRPDRQAAARPMTVLENHAGYQALQQRLEQLHQQHPQANFHVRIDAAGQYAANLEHFLRGLALPLTISIGEPKRNKDYQKAHFPKRTTDDTESQAMARFAVVELPPATLPVPPQLALLREVCARLQAQVKQTTQATNRLHNLMARVFPELATLADDFSARWLLRLLDRYPTAQRIAAAHLRSIEQVPYLPGEQAQPLHQAAKQSIGSLHGDVAETLVRELVTQVGHCLDHEEKLRKLLEDAFAELPPSGHQHLLTIPGIGTATAAVLVAKIIDIERFAGPEHLVGYFGAFPQEDSSGVDANGQPLPPGTMRMSHKGNDLVRAYLWNAARSATAHNPAVRALYRRLKARGKRGDVALGHCMRKLLHLVFAVWKTNRPFDENHFPWEPTDGTPAALPVPAPTNAAAAPAGSNDKTVGHTQGLPAEEVGTTAPVTVEEAAAPVNPPRTDPAESSPSRPWVDYAFLRQQVTIEQVLSHLGVFAVLRGRGQQRRGCCPVHDRAGVKKKTFSVHLGKNICQCFQAECGFHGNVLDLWAAVQGLPLYEAALHLAATFGLRRNREEEPVRGTR

SEQ ID NO: 189094 - protein, 422 aa, unidentified
MVQVETTKEKERRKAMISVGIDISKEKFTICALEQGSKIIWKPFDVSLNKRKVEEFLEKLEKLKEKVKITMEATGKYHLPILYELKDRGYFVAVINPLKMKQFCRALNFRKAKNDNIDAKQIAEYGLMYWKELEEYKIDEDNYMVLKELNRNYQHYMELRINQINFIDQTIHQTFPGIKKLIPHNSGDFSKDKLLDFLERWWHKDLVLEKTEEEFIEEYKTWAKEKRYHPNANKAKAIYKLAEDSISTQPSHNSKIETNIREGINLIKQINQILNSILSQMIEISEPLEEYQEAKKFSGISEKLAVQIVAEFGDLSKFKNKKSLISFIGIDAPPYESGNFKADQRKISKRGNAILRKVGYQAMKCMMSAKDPENEIYKYMIKKEKEGKAKKVCKFAGLNKFLRIYYARVMESKAEKKELKAA

SEQ ID NO: 189095 - protein, 403 aa, unidentified
MHGNEQIADGRSPWEHDSRVLGLQPTCAFVSVEETKLQVVLIKEMTTEQKRQTMFVGIDVHKDTHTAVGVSPFGEKMFEITIGNYKKDFEALTNKVAEMKESLSPYFGLEDCHGYGERLSAYLYESGHQILAVPSVMVDRDRQKATHPEKSDSLDALGVAKVMMQNIDSLPAYTISEEGKKAKQIKELSMDREYLVEERTRLKNHLHNLLHRIWNTEYIQKFKDPFTLKALRYWSKAKPKCDSFLLRSMKRKTKRLLDIYHEIIDLEKEMEILLDQNYTIQTASGCGTTIAGMIVGEIGDINRFHSPGALAKYAGCSPRECSSGKKHRHIKTRSGNRRLNCAFHRMALSQISRSGNELAKTYFRRKVSEGKSKSQSLVCLRRQMVNIVWMMLKHKTVYNPQMN

SEQ ID NO: 189096 - protein, 346 aa, unidentified
MIIVGCDFHPSWQQVAIFDFSTGEIVEHKLVNGNGEAERFYRSLPVPSLIGLESCGNSQWFVELLERLGHLVWIGDAAQIRASYVRKQKTDKRDAAHILNLLREGRFPRLWVPDAGVRDLRQLLIHRHKLVEVRARVKNGLQHLAMNRGMQKKARLWSEAGQKAFSELPLEGWAACRREDLQGLRAMLDIQVGKLDGAAQRAAAENEPARLLMTQPGVGPITSLAFVLTLGDVARFKRGKQVASYLGLIPREHSSGGKQHLGGISKQGNRFARMLLVEAAQTATRLDEGFRKQYQHRCHSKPKGVAKVAAARRLAVRLYWMLRTKTPYPEIVRIESSSRVPLDGES

SEQ ID NO: 189097 - protein, 355 aa, unidentified
MDSRKYIGMDVHKESIAIAVGNAAGKIVMECVIETKASMILQFIGGLRGDLQVTFEEGTWAAWLYDLLKPHVTKLVVCDPRKNRSMREGNQSDKIDARRLAELLRLDHLNPVYHGEHGLRTLKELVRSYLTITKDLGRVMSRVKALYRSWGIPCTGKQVYTSRHRAEWIGKISEPGVRRRAEFYYQQLDALRILRQEVRRDLLAESKKQKAWKRLCQIPSIGPIRSAELLGILQTPHRFRTKRQLWTYCGLGIETHSSADHRMVEGQLQRAKKQVEIRGLNENCNHDLKNLFKGAAVVAATKPGPFEKFYAELLAKGMRPEMARLTLARKIATIVLIVWKRGVSFDAQHLKPQTA

SEQ ID NO: 189098 - protein, 362 aa, unidentified
MSDGICFAGLDVHARKTAAAAVVLGSGEVFRAQIPGPPVSAIDWLRTLPGPVRAVYEAGPTGFGLARAARAAGIEVMVCSPGAIPRQPGDRVKTDMRDALKLARLHAAGQLRPVVVPEPELEALRDLVRAREDLRGDLMGARHRISKLPLRRGLVFAGPGDTWSQRHLAWLGRVRFDEPLADTVFGEYLACHEVLLARRDRLDALIGQQAELEPWASTVGRLRCLRGIDTLTAVGLIAEIGDLHAFTHPRLLASYLGLVPSEHSTGEKRRQGAITKAGSGHARRLLVEAAWHYRRPPRVSLTLRRRQQAQPPATVDAAWRAQLRLHKRWAHLDAARGKRRTTVAVAVARELSHYVWEIARQA

SEQ ID NO: 189099 - protein, 340 aa, unidentified
MKLYGAIDLHSTNNVTVVIDEQDRVVYQKRLPNDLALILKELSVYQSELQGIVVESTYNWYWLVDGLMEQGYKVHLANTAAIQQYEGLKYTDDHSDARWLAHLLRLEVLPQGYIYPRAERPVRDLLRKRSQMVRQRTTNLLSIQNLLTRNTGGSLSANRVKGLDVQQVDELLPNGDLALAVKANLSVMCSADEQTEILERTVTQRVKLRPQFSFLKTVPGIGEILALTIMLETGDIGRFSSVGNFASYCRCVGSQKISNGKKKGKGNTKNGNKYLSWAFVEAAHFAIRFNSKIKSFYQRKKAKTKVVVAIKAVAHKLCRACYYIMRDQVPFNITKAFGQK

SEQ ID NO: 189100 - protein, 367 aa, unidentified
MWEAPVRGQRTSVGLDVHARSVVACGLDGETGELFERRLTPEHGGVLSWVRSLPGPVSVTYEAGPTGFGLARFLVVAGVDCQVAAPSKLQRPSGDRVKTDARDARHLARLLHLGEIVAVAVPDAETEAARDLVRAREDVRGDLMSARHRVSKLLLRQGIVYSGGVAWTGVHDVWLRKQKFESAALQLTYDTAYDTMIAAVDRRDRLDKVIAAMAADSPFTPVVTRLGCLRGVSTLTAFGLAVEIGDWRRLTGRSIGAYLGLVPTEYSSGGSRSQGGITKTGNGHARRLLIESAWHHRQPYHRPSVDLRRRWDLADAASRARGQQANRRLHARWAGFDARKKRPVVANTAVARELAGWCWSLAVGENR

SEQ ID NO: 189101 - protein, 400 aa, unidentified
MNRTRTVAGLDVHKDSIYLCIMGYDQAIIWENTYGVLTPDLREMHHDMRAHGVTEAAMESTAVYWVPVWTELCESMELRLVNPYFIKQLPGRKSDVKDARWIAECLLKNLIKGSFVPEPIVQDMRKLNRRIMDLCEDTTYNSNKLDAALQRCGFRLSNYVATTKSKSYRSVLKAIIDGQTDPDELLRLVHGRILNKHGRERVKAALTGSFSETDLIVLRQLKETLDLIEKQTADCQQELVRLCKEHYPKPYERLQTIPGVKERAATAIIAETGVDMKMFATAASLVGWCGLKPRNDVSNGRFKSRKVTHGNRYLRQILIEIAWAASRTRNCFFSHFSYLQTTVKKKNKMKIQVAIARKILVAVWHMLSKEEDFIDIYLKRQEELKRTEEQIKLLESYMAD

SEQ ID NO: 189102 - protein, 343 aa, unidentified
MKNTIIAVDLAKNVFEIAVSEEPGRVSEHHRVSRWGLLRFFVKRPPATVLLEACGSAHFWGRKIQAFGHQVVLLPPHLVKPYRRGNKHDRADAKALLEAHRNEEIHPVPIKSVAQHTLAALHRLRSGWLSTRTARINAVRGVLRELGIFIPKGAARVVPELSHLVEDDESEVPDALRPFLLEAGAEIRELETRMEGVERQLKALAKQLPEVERLLTVPGIGLLSATAIVGFIGDLRRFRSGRRFSSYLGLVPKESSSGEIRRLGRITKQGDTYIRMLLTHGARAVLWAAKSNKDPDRLRGWALQIERRRGHNKAAIALANKLARIAWAVCTRETEFQSFPVAA

SEQ ID NO: 189103 - protein, 464 aa, unidentified
MEVINIGVDLGVTAKHHAEVINSEGTEICSSAKFTGTKQGFDMVSKHVLKHVDEEVKLRFICEPTSMSWFPLAVYAKRNGHEIMRVKAQKSHDLRKYYSRHTKSDKLDARALAMMPIVERESIEEVYLPDRVTNALNRRCRQREKISKEIVSIKTRIKSLYHWVMPGLTDCFEDPYGERAKAFYKKHTNPFKVKHLGISRLHRVLEKAGRQKPSEGLAERLYKAAIRGCELFDRCDEYIDFDELQKEVECELQLLESHEQIQKKVDEAIKQLYKQAHPTKNIETIPGIGETLGPVFLGILGNSERFSSQSKARGYSGMIPRQKDSGESSKKGLNITKDGPSRYRRALYLASDTARQWDPQLSKVYYDQMVHKGNCHNQAVCAVSTHLIGRIIRVLKDKRPYELRDIEGRPITKMEAKILITREFTVPEEVRKRTRSRRKTKGYKRNHIRGIAQKQSSRSAPYPS

SEQ ID NO: 189104 - protein, 391 aa, unidentified
MPTTLTHCTTPTATLYMALELAAHQWLLTFAAGPGSARRHVTIPARAGARLLAEVQRAKVKLGLPADAPVLSCYEAGRDGFWVHHWLTRQGITNAVVDPASIEVNRRLRRAKTDRLDGAGLVRLLARWHGGERDAWKVCTVPPTLAEDLRQPIRERLELVEERTRLVNRIRGLLAGVGAVVDGPLTAATDLDALRQWDGQALPPLLRARLARDRQRLALLERQVTDLENAERRAVRDDATPQVEQARRLLGVKGVGPTSTWLLVRELFGWREHLTPKQTGALAGLCPTPYTSGDSAREQGISKAGSKRVRWALVELAWGWLHHQPHSALSRWYQRKYGAGGARHRKVGIVALARKLLVALLRLALTGAVPEGAEVRDWYTKVTGRPRATAT

SEQ ID NO: 189105 - protein, 436 aa, unidentified
MAGVKVPRSEVDNQDKRKELELIDKRKELELIFVGDDWSEDHHDVCVLDEAGKVLARRRLPEGVAGVAGFHDLLGDFVERPEDVAIAIETDRGLWVAALAGAGYQVYAVNPKAVARYRERYGGGSGAKSDPGDAKVLADLARTNRHNHRQVAGDSPEAQGIKVLARAHQRLVWLRRRQVNALRHTLREFYPAALAAFGEDLEGRDALAVPAKAPTPRAGRSLSQAAVEAALRRGGRQRYVKHRAEEVRAALRSKQLAPPEGLAGAYGAVVTSAVAVVAEMNRQLEALEAELASHLDAHPDAKIIRSQPGLATVLGARVLGEFGDDPNRYKDARARKNYASTSPITVASGKRKSVKAHWVGNDHLKDACYLWAFAALTASPGARAYYDALRARNIGHDAALRVVANRLVGILDCCLRRRVLYDEQTAWGHWKAAKAA

SEQ ID NO: 189106 - protein, 366 aa, unidentified
MNAITVAVDLAKTVFELAITDEQGRLVERKRLSREGFARFFAHRPPCRIVMEACGAAHHWARTFQAQGHEVKLLPPQHVRLYVRRNKTDRADAAALLEADRCGDILPVPVKMVEQQGLQGLHRVRSAWMATRTDRINTTRGLLREFGLDLPQGPAAVLTQVPTWLADEESPIPPALRTALTELIAEIRALDTRIAAIEQQLCEQAKPRPEVQRLMAVPGIGLLIATALIAAVGGMEAFRDGRHLAAWLGLTPRESSSGRRRHLGGISKRGDRYLRMLFIHGARSARLCSQRPTRPGPGRNPSPDCSAERSISPPGSATTRPPARWPTNWPASPSLWSARSGPSTAISSRSRPSKLPPVPFTLNPNP

SEQ ID NO: 189107 - protein, 343 aa, unidentified
MQAITTIGLDIAKSVFQVHGIDAAGGVIIRRQLKRRYVLAFFQKLPPCLVGIEACATSHHWSRELKALGHTVRLMPPAYVKPYVKRQKNDAADAEAICEAVTRANMRFVETKTPEQQSCLMLHRTRHLFIRQQTSVINAIRAHLAEFGIVAPVGRHGVEALLEVVADVSDNRVPEVARACLAALGAQLRRLKDQILEFDRMIMAWHRSNETSRRLDAIPGIGPALATALVASVANPKAFRSGRNFSAWIGLVPKQHSSGGRDKLGSISKQGDRYLRSLFTAGALAVIRYAKIHGTPHRPWLTALLARRPTKVAAIALANKIARMAWAMMARGERYKEPVALAA

SEQ ID NO: 189108 - protein, 373 aa, unidentified
MKKVRFLGLDVHADTIAVAVAEPDGEVRSLGIIPNREESVRKLVKKLGPAEQLQACYEAGPTGYVLYWQLTALGVKCEVVAPSLVPVKAGDRVKTDRRDATKLARSYRAGDLTAVWVPNQEHEALRDLVRAREAAKQDQLRARHRLSKFLLRQGRRVPSGFKVWTQRYQDWVKEHVHFEQPAQEYTLLDYLHEVEHMDDRIRRLDLAIAEAIKLAPPGMQEVIQALQALRRIAQISAVTVVAELGKISRFDRARQLMGYSGAVSSEHSSGKRMQRGQITKTGNAHLRRIAMEAAWAYRHRPSIGPRLRKRQEGLSEEVKEIAWKAQHRLHKRYRNLSAAGKEKQRVVTAIGRELLGFIWAIGVQVEGNSKPVA

SEQ ID NO: 189109 - protein, 335 aa, unidentified
MDIFHYVGIDISKATLDWAIFDGKTLVLQTTTSNTVTGIKTALRQLKALVSWNPEKAVFCMEHTGIYNAHLLEFLYKAKLPIWLENSTQIKQAGGMQRGKSDAVDARRIAEYAYRFRDQMRLWEPPRQILQQLSFLSAVRQRLIQAHNLLAGPLAEQESFVETTLQKKLQATSRKSLIALKDEQKAIDAQIDTLIQGDSRLKELFNLIVSVPGVGAITATEILVATNELKTISDPKKMACHAGVAPFEHRSGTSVRGKTQVSHQARKRLKSLFHLGAMSTIRMKGELQDYYQRKVGEGKNKMLVLNAVRNKLIHRIYAVVKRGKKYDEKYVSPLA

SEQ ID NO: 189110 - protein, 417 aa, unidentified
MKEEFTFYVGVDWGVEFHQACILDAHGEKICQRRIEHSGPGMLEFCDFLQALTNGEASALAVALEVPRGPIVEALLEHNYAVFSINPKQLDRFRDRHTVAGAKDDRRDALVAADSLRTDQHCFRRVRPEHPDVIRLRELSRTEETLGIDLRRCVNQLSQLLLRYFPQLLRLGSTPDEPWLWALLELAPTPQQAAKVTEKRLKQLLAKYRIRRWTAEKVGEILTAPPLPLAAGSAEAISEHALLLLPQLRLLHLQRKQVADRTQQLLDQMATSTNDFPMSQEHRDIPVLLSLPGVGRIITATMLAEGSHILSLRDYHALRAHAGIAPVTKQSGKSRQVLMRYRCNQRLRNAFYHWARTSIQHDPRSKHHYARLRQAGHDHGRALRGVADRLLAMLIAMLKSGQTYDPNRRSTANLTAA

SEQ ID NO: 189111 - protein, 423 aa, unidentified
MEKRKGEEIAAFVGIDWADKQHEVRMQAAGSGKKETLTLKQEPEAVANWVQGLRERFGGRRIAVALEQRKGALIHALMGYETLVLYPVNPKTVAKLREAFYPSGGKSDPVDADLLLDIVTNHRDKVRAWVPDKARTRLLQMLVEARRNFVDERTRLTNKLRSALKEYFPQVLEWIEELGSQEVTDFLNKWPTLESVQRAKAETVRKFFAEHGHRNVGRVEERVKAIGAAKELTKDEAIVTAGKMKAQALARQLRPLLESIAGYDGQIAELFEKHPDREVFSSFPCAKEVLAPRLLAAFGEDRSRYDQALDIQNLSGIAPVTKTSGQSRVVQKRLACPKFLRQTFHEYAGQSIKKAGWARTCYNLLRARGVKHHAALRAVAYKWIRIMYRCWQDQEPYSEEKYSQALVRTGSPLASAIRLAAAG

SEQ ID NO: 189112 - protein, 340 aa, unidentified
MTIVMGVDQHRAQITTEWIDTTTGEIGRARVAPAHRESVRRFLRRFVSEELEVALEATTGWRFVVEELCRVGATVHLAEPAETAERRGRKKRAKTDRADARLLRELVMAGRLPESWIAPAHILDLRARVRLRHTLVDQRGEWQQRIHAVLYHHGVPHRRGLSLLTAEGRSWLEGVALPVSAREQITVALQMIDKLDGQLGPIDKELRCFARRQPGCKALMGLYGIGHLTAVTILAELGDARRFSSSREAVRYSGLDITVHQSDQRRAPGHLSRQGPPALRWALYEAAQSAHRKSSPDREYYLQTAERLGGNRACLVIARKLLKRSYHTLRELGEEALLPA

SEQ ID NO: 189113 - protein, 340 aa, unidentified
MEYGAIDLHTRRSQIRIVTADGTAVLEQRIDTRAAEFDRVFAGRPRMRILVESSTESEWVAQGLEALGHAVIVADPTYAAMYGSRTRRIKTDRRDVAALADACRQGIYRPAHRVSAEMQRRRQQLRTREHLIRMRTQTINAVRAILRQAGVRVPSGMTRTMVSRVREVPLRPELEAAIAPLLETLDALAPILTRADAWVRQTAAHDPVAQRLMTVPGVGGVVALTYQAALDVPGRFAGQAGRASAYLGLVPGEHSSGERQRKGAITKAGPRAPRALLVQAAWTLWRTGARHAPALHAWVEQLAARRGRRIAVIALARRLSRILYALWRDDTVFVRRPLAA

SEQ ID NO: 189114 - protein, 354 aa, unidentified
MRLKTKTLNFAGQVFHVGIDVHKKNWKVKVRSNHSVMKSLSVDPSPGVLSKTLNNLYPHAKFNTVYEAGFSGYWAHRQLKELGINNIIVNPADVPTSYKERDRKSDPIDCGKLSRELENGSLKGIYIPNEEKEGLRSISRLLHQNRKRSTQVKNRIKSFLHFTGVPITGQNESSHWSKAFVRFLHAIKFSTEYHQYTFNCYMEELLICRKERLNILRQIRSICKENETIQMLRTIPGIGPIIAFVLYTELIDIIRFSSFDRLASYVGLVPSTESSGEKLIVKGLTARHARYLRYLLVESAWHAVRKDAVMSFAFLNYTKRMSKQKAIIRIAKKLLSRIRYVWKNNTPYEMGIIE

SEQ ID NO: 189115 - protein, 391 aa, unidentified
MSMYFVGIDISKYKHDCCIISAADQQIVSKFTVKNDKDGFEHLLTTLNSLSNPEDIKIGFESTAHYALNLELFLENAHHSFMEVNPVLIKEYKKSTTLRRTKTDSVDCESIARWLMTVEYKPHSKGFYHAYSLKSLTRLRDKLIRQRSFYLVKITNVLDHTFPEFKPFFNERLSKTALYLLENYGSAEKMARMNSASYEKLRSLSRGKFSPQQFLRLKELADNTVGVNNSIFDVELNSLLSLYKSLVKEIDTIEKEINKLIEEVHPHYMSVPGIGPLSAAVIYSEYGDISNFTNSGQMLAFAGIEPGINESGTESHGSKMVKRGSSQLRYTLINCCLPLIRFDMTFAAYYAKKRGEGKPHRVAITHVAKKLIRVIYALERQDIDFNAQKLH

SEQ ID NO: 189116 - protein, 421 aa, unidentified
MQKEDEQFAAFIGIDWADRKHDVCLAAARSEQREGSVIEHRPAVIREWAAALRERFPEGRIAVCLELTQGPIVSALLEHDFFVLFPVQPATLARYRNAFTTSRAKDDPTDAEFALELLLRHRDKLKALEPESIPMRSLRRLVEARRVLVDDRVRLTNRMTAALKAYFPQVLDWFRDKDAAVFADFLERWPTLEHAQRARSETIADFFRAHNVRYKAAIERRVEAIRAEQPLTKDAAVVGPMRLLVETLLQQLRAACAAIERFDSEIAALCPDLPDYELFRALPGAGAALAPRLLVAFGERRERFPTAAALQKYAGLAPVTERSGNKSWVHWRWACPKFVRQSFIEWVGQTVPRSFWAQAFYKSCRARGMRHQAALRALAFKWIRILHRCWLDRTPYDESRYLMALQKRQAPLLKFAATTPT

SEQ ID NO: 189117 - protein, 408 aa, unidentified
MQVTFGIDVSKSTSTVCELIGESKNELTITNNRPGFIQLLHELAAFSKHPQIIFEATGVYSRRLQAFLEDYGYEYVVLNPLKAKKEMNMGLRYNKTDKTDAYHLALIQRLYRHPVNQSESQTYKQLNALSRFYDQLTSDLVIAKNRLHQALQSTFPEIENLFSSAKGKNYWQIVVRYPHCDLVRREDKKQLINWLMSLKGIAFKHALRTADKLIELAYQAYPVVSCSSTEVEQVQYYAHRLLNLSNQRQRIITKMVKLAKTLPNHDLENLESIPGFAQTTAVRVLAELGDLRRFSNPNKINAFIGIDPGRYQSGKMDSNLSITKHGNAVARKLLYRAIGQIDNAAKTNPCHIADYYESKKLSSQTKGFKKIAIASIHKLIRTIYALIINDQPYDYNVATHNQKDFSRN

SEQ ID NO: 189118 - protein, 454 aa, unidentified
MREAINKKTNIMNTSHPYDLIIGLDRSDKKADLHLITPATGQRRAQTIDTAPEALWEWLLELRQQHPQARVALCLEQPAVHLIAFLEAYEWITLYPINPITLQKFREAFVTSRAKDDAKDAQYLAELLLTHHAKLKPWAPEDSPTRAVQQLVFHRRAVVNERTGLTNRLIALLKQYFPQALVLCGEDLWRPLATRFLLKWSSLQAVQKAKPATLKQFYYLNGSRSAKRLEQRLALVQKAVPVTDETALIESFALRVQLICRQLQLVQQTLTYYEKQIAAAYAAHPDREIFASLPGAGPVLGPRLLASLGSQRERFGTAADLQHYTGIAPVTKRSGGSCYIHRRYLCPKFHRQSFHEYAKASLLSSRWAAAYYLQQRTKGSPHQTAVRALAFKWQRVIFRCWQNRTPYQEAIYEAALRKSGSPLVALFDRVELGKSPFKNPVKNPKKTVDGLPQR

SEQ ID NO: 189119 - protein, 343 aa, unidentified
MYFIGVDHHKQASVMTVLDEDGRELKNGRVFNLREKIGRFLEGYHPFTAVLEAGRSSYVMADLLRELGGEVKMANAFQVKAIAHAKIKTDKRDSRTLAQLLRADLIPEIYQRGEGNRRAQRVIRMRAYWVAKQTEVKNKIRALLAQQNEEIRLEVEKREDGLFSGKGVEFLSQLPLANPDKMVLDDLLQGYRETQAHIKRSDGLVRVLYGEIEEAARIDTVPGFAATLSVLVAVEIADVKRFPTVGDLHSYAGVIPSTHASGERTYHGHITKQGSAWLRWAALEAVYPAIKKDLGLRALYYRLTKRKGPNVAKIAVARRLLTIIYRVLIEKRDYIPDMKSSAA

SEQ ID NO: 189120 - protein, 409 aa, unidentified
MERLVKQLYVGIDVHSKEHKVAIVPKALFEEAGKPWKKVKPLTIKNNFESFKCLDEAMFSYICSADQVSIAVDHTGGHYSEPLVYHLQAQGYHVLYLESKGMKAAKERLLDEESKSDKIDCIATAYMLYLRDTHGLSFRVSETVPELGTNAATLNSLVLQREQFNKLLVQATNRLHQFLIAVFPEGEERYFNQLLKIIPYYPTPGDIVNSNGLDGIKGLRRKDKEGIIQLAEGSAGIHDDNYGWLIREHGILRMDFLERLDTITSMLRKQVAMHPYGEILLSFPQLGEIAAASIIAVIKDIKKWPDKKKLKKALGVYAVLVQSSTSCRTKQGREGNKRGRIALFQTCFRCIRINAPDNDFKDHYFRQVNQGKIRMKALVSTMGKLAEIIHHCLKSNEPYEYQGIYKVCK

SEQ ID NO: 189121 - protein, 391 aa, unidentified
MPTTLTHCTTPTATLYMALELAAHEWLLTFAAGPGSARRHVTIPARAGARLLAGVQRAKVKLGLPADAPVLSCYEAGRDGFWVHHWLTRQGITNAVVDPASIEVNRRLRRAKTDRLDGAGLVRLLARWHGGERDAWKVCTVPPTLAEDLRQPIRERLELVEERTRLVNRIRGLLAGVGAVVDGPLTAATDLDALRQWDGQALPPLLRARLARDRQRLALLERQVTDLENAERRAVRDDATPQVEQARRLLGVKGVGPTSTWLLVRELFGWREHLTPKQTGALAGLCPTPYTSGDSAREQGISKAGSKRVRWALVELAWGWLHHQPHSALSRWYQRKYGAGGARHRKVGIVALARKLLVALLRLALTGAVPEGAEVRDWYTKVTGRPRATAT

SEQ ID NO: 189122 - protein, 394 aa, unidentified
MVQSGRVVIGMDPHKRSVTIEVMAGDETVLGGGRFATDPDGFTALREYVRAWPDRVWAIEGCNGIGRHVALRLLAEAQEVVDVPPKMSARARVFATGQGRKTDATDAHSIALVGTRMAGLRPVMDDEQLAVLRTLVDRRRALGQEHTRMVAQLHHLLLELVPGGAKKFLSAAQAKEILSKVRPRDAAGKVRRRVAAELVGDLERTYKRKKAADKELTELVRATGTSLLDLTGIGPSGAARLLVEVGDITRFPTRAHFASWTGTAPIDASSGDHVRHRLSRGGNRQINRVLHIMATVQLRSPGIGRDYYDRKKADGKTSMEAMRALKRRLSDVAYRAMLDDAVAHTTDARTGPGGHRGTSLTSSATGSHPHTGTSDQSLPGPVTHDPRTALPAAS

SEQ ID NO: 189123 - protein, 360 aa, unidentified
MLYLGIDVHRKQLTVSVRNEAGEVIVRRQVSTEWPRVRAFFTELAERAKPEGGYVAMLEVCGFHDWVLKMLTEYGCRETVVVQPTTRTKKKTDRRDAQALSETLWVNRARLAAGQPIRGLRRIQPPSAVDAENRQLTTLRARMKQVRTRTINKVHHILLKHNLHQHCPTKGLATKGARAWLTALKLPELDRLEMDLLLAQWKLWNHQLEKVEAQIARRQKQSPTATLIATVPGAGAFGSLALAARMDNIERFPRPGSLANYWGLVPSVRNSGETTDRLGSITKEGSRLARFVLAQMVLHVLRRDPTMKQWYQRIKRRRGSKIARVAVMRRLATILWHMVKHQEPYQVGGLPRRQLSAAAG

SEQ ID NO: 189124 - protein, 359 aa, unidentified
MQTQSNKIDFTGQSIYVGFDVHLKSWLVTIMTEKLTHKTYSQAPNPEVLYNYLSKTFPGATYYSAYEAGFCGYWIHNKLLEFGIKSIVVNPADIPTTGKEKVMKTDSRDSVKIARSLRNGELKPIHVPLPITLEDRGLVRTRATLVKDMTKYKNRIKSFLYFHGIEYPEVFAKSETHWSNRFNQWLGTIEMKEKSGKDSLNALLDQSKHLRANILLVTKQIRELAKNERYKRPLEVLRSIPGVGIITAMIILTELESMNRFANIDQLCGYIGLVPSCNSSGDKQNVGDITPRGHSILRGAIIESAWVAARLDPVLTKCYHSYCNRMESNKAIIRIARKITSRIRYVLKNDQPYELAVVK

SEQ ID NO: 189125 - protein, 339 aa, unidentified
MKYTPVGVDIAKHLIQVHFINEHTGEVVDKQLRSQDFLMFFSNREPCLIGMEACGGSQHWARALAKLGHKVRLLQARFVKAFVMGNKNDVMDARAIWIAVQQPGKEIAVKTEEQQSVLVLHHSRRQLVKFRTAQINALHGTFLEFGETIHKGRAAMDRELPAALERMRVKLPPYLIALLEGQYNRLSELDSLIDDIEKQLISVARQSETCKRLMEIPGVGPLIATAAAATMGEASAFKSGREFAAYIGLVPKQTDSGGKVRLLGISKRGDTYLRTLFIHGARAAALLAKEPGPWITELKKRRPTSVAIVAMANKLARTVWAIAAHDRKYDKNHVSIRPY

SEQ ID NO: 189126 - protein, 346 aa, unidentified
MQISSVGIDLGKTTFHLVVLGEAGKVVVRKKFNQRQLLTYTANLRTSLIGLEACSGAHFLGRALRKQGHDVRLIAAQFVKPFVKSNKNDFVDAEAIAEAVERKNMRFVPIKTDDQLDLQAIHRVRDRLISRRTAVINQLRAFLLERGLTFAKTPAKLRNALPDILENPEVDLTTQMRNLIDLLWAEWKTVEDQIEALSRELERISAGDAGCTRLRRIPGIGPIVATAIVAAIGNGAAFRKGRDFAAWLGVVPRQYSTGGKARLLGISKRGNVYLRKVLIHGARAAVLRMKRDRAPIGAWLDALDARAPKNVVVVAMANKLARIAWAVLSSGEEYKPACNLVTASMS

SEQ ID NO: 189127 - protein, 411 aa, unidentified
MERIVERPGALDVHKESVMACVRVWEGRHLEEYMAEFGTTVQGLLALRDWLEALGVKQVAMEATGVYWRPVWAILEDRFELMLVNARHVKAVPGRKTDVKNAQWLCQLLEAGLLKASFVPPKPIRTLRNLTRYRKTQINDRSREAARLHKVLEDTGIKLGNVASDILGASGRAMLDALVGGTTDAAVLADLAKGKMRKKIPALREALEGRFDTEHSLIVSHILAHIDFLDEAIDRLSAEIEERIRPFASQRDLLMTIPGVKQRAAEVLIAEIGVDMSVFPTPKHLASWAKVCPGNDESAGKRRSGKTGKGNKWIRATLTEAANAATRAKNSYLAAQYQRLRVRRGHSKAVTAVGHSILTAAWHMLHNGELYNDPGGDYFARQNPHRITKRLVRQLEALGHSVTLEPREVAA

SEQ ID NO: 189128 - protein, 354 aa, unidentified
MKQDSTMQVCGIDIGDRFCRVFVMKNDGTREDAWRMPTTRKGLSKAFAGKERMRIALEVGTHSGWICRDLEAMGHEVVVANPRRLEAIWKNWKKSDDQDAECLARLVRVDPELLKPVKHRSESEARHMAMVRSRAVLVATRTSLINHVRSMLKTMGLRAPKCSSSAFVKRVNATLGEADLEALKGVLSCLAETDARVREYDRKLEELAKAHYPETTSLQTVPGVGPITALVFRLVVQSPERFPDSRSVAAYLGLVPRRDQSGERDPQLGISKAGDDYLRTLLVQAGHYLLGPFGPDCRLRRWGLALAGRGGKNAKKRAVVAVARKLSVVLLAMWRSGQDFDAWHQLVPEEVKAA

SEQ ID NO: 189129 - protein, 353 aa, unidentified
MSEYDGRQFVGIDLHRRRTVIVRQSETGEHLETRRIVNDPLGLAREIGKAGPSPEVVLEATYGWYWAADVLAENGARVHLAHPLGIKGFTYRRVKNDVRDAVDLADLLRMGRLPEAWIAPQAVRELRELVRHRAKLVIVRSGFKAGVHAILAKQGLHLPVKELFGPRGRAELAAAPLDRAYRARLNAYLRIVDVLDTEIVMADGWIAARLTRDAGYQVIQQIPGIGPVWAAVFVAEIGDVSRFASARHLCSWAGLTPRHRESDTTVHRGPITKQGSALVRWAAIEAVQRIPASAGWLVATRAQITERRGRNIATVAVARRLLTLVYYGLRDGHIRALHPRPTGPGAGSGAGVE

SEQ ID NO: 189130 - protein, 354 aa, unidentified
MSQKLDAAIAVIGIDIGKNSFHLVGHDSRGAIVLRQKWSRGQVETRLANLPPCLIGMEACVGAHHLSRGLQMFGHDARLMPAKYVRPYSKGQKNDFRDAEAICEAVQRPTMKFVATKTADQLDLQALHRVRDRLVGQRTGVINQIRAFLLERGIAVRQGLHSLRSELPGILATRTDVLSPRMLRIIEALAGDWRRLDERVEGLSSEIETLARHDKACERLMTVPGIGPIISSAMVAAIGTGDAFSKGRDFGAWLGLVPKQISTGDRTILGKISRRGNRYLRALFVQAAWVVLVRVKRWERYGLKSWIEAAKKRLHHNVLAIALANKLARIAWAVLNKGRAFECVKTEEMASRPA

SEQ ID NO: 189131 - protein, 373 aa, unidentified
MEVLHPRRAGLDVHKDTVVACVRLAEGGRVERHVETFATTTADLERLSAWLAGHGVTHVAMEATGVYWKPVWAVLCEGDFALVLANAHHVKAVPGRKTDVNDATWLADLVSHGLIRPSFVPPMAVQALRDLTRTRKQLTREKASHVQRIDKLLQGANLKLGSVLSDIMGQGGRAVLDTLAAGESDPERLADLVRTKVRASRAQLTEALRGRLADHQRLLLGLHLAQADAITAAIARIDVEVNARLEPFRDTVTRLSRMPGLSDVSASVILSEIGFDMSRFPTPAHLVSWAGLCPRNDESAGKRRSTRLRHGAPWLKTLLVQSAWAAVRAKATYLQALFHKLKARRGPKKAIVAVAASSRLWKTKLCWTEQRPD

SEQ ID NO: 189132 - protein, 432 aa, unidentified
MKNDNRKYLSVGIDVGADFSLMAIALPSQELLGKSYRIFHNSKRSLDGAIDRIYSVMEQYDLPARIFMESTGIYHFPVYHKMREAGLDAYVLNPLVTHASKDINVRNIHNDKFDAQKIALLGLRPDLKTSIVPSDDVAAMKAILREYYAMKKETSMYICRLKDQLRQVFPQFIPVFSKVNGVAAMAVLYEYLTPDSILAAGADELERFMKTVISKGPLHIRKKAEALVEAARDAQNFGHGNTGVFYLIRHYIEMIRLLDAQTKQILTQVKVLLKEQKNSQMAKQVRLLQSIPGIGFLSAVTLVCEIGDFSAFKRPKQLFAYFGLDPAVRQSGNFSGADLKMSKRGSPYARRCIYVLAIQSVSLRVAGTAKNPVLRSFYEEKCKSKSKMTALGAVMHKVCNIIFAVLRDERPFVLITPEEHRTAYFSASVKAA

SEQ ID NO: 189133 - protein, 426 aa, unidentified
MKVAGIDVHKKVLMVVVVDASTPEEKPARRRFVTMPTELHRLLTWLQEQGVEEAVMESTAQYWRSVWLELEPHMRLHLAQAFSNRAPRGRKHDFKDAERLVRRLIADELILSFVPSGEQRIWRSLTRMKLQLTRDRVRLQNQIECLLEEMRIKLSIVVSNLLGASGLRILHALANGETDPKKLAQLGGERLQCTEEQLVDALTGRAQPVHGAMLALQLERLQVIDQQMEQLNRMIAIAMKPHQDAVMRLAEVPGFGVDSAQQIIAEVGAQASTFASAAELTSWVGTCPGKDESAEQNRSSRSAKGNKYMRRVLNQAAHAAAAKKGSHFQIVFRRLLPRLGYQSAIWAVAHRLCRLVWKILHEGVRFIEHGAEVHPREKKKRAQMLARALRKLGYDVTITPINCDSQDLTLQAILSNGVATVRQTLS

SEQ ID NO: 189134 - protein, 312 aa, unidentified
MAKDTIGIDVSKDRLDAFWHSRTEACCLPNTPEGFGQLCAWLGKEEDVLIVFEATGAYHRGLERHLGLAGLPFIKVNPKQARRFAQAIGRLAKTDSVDARMLARMGVVLDLTPQVIESEDVHDLRELLTARRALIKDQVTAKTRLATALNPLVREQLGRRIEDIGADIQALDEVIAQIARQRGTLEERIRRLMTIPGIGRLTATTMLIDMPELGHLEGKKITALAGLAPMTQQSGKWQGKERITGGRSSIRRAIYMPALVAIRFNRDLHDKYQQLLKAGKAKKVAITAIMRRIIVLANTLLRERRDWLPDRP

SEQ ID NO: 189135 - protein, 406 aa, unidentified
MKSFIGIDWSEKHHNVCILNESGACLNRFQIPHTQAGFLSLEQQLAQVNKVASDCMVAIETHHNTLVDFLCSRGHSLFILPPNQVKSNRGRQRASRAKDDDSDALLLADILRTDQGRLIPWQEDGDLVQQMRSLLSWIDDLTDSIKRHRNRLRANLLRYYPQPLATFGNMLSQFSLKVVAAYPSSNHLRDLTYRQFVTFSRDQGYYQVGNLPAYYAQLREPMPAAPETIWPALEKQTVYLACLLLTLMEQKKATISETAHLFEQHSDAPIFASLPGAGDLLKPKLLVMFGDHRTRYPKPTILPAIAGTCPVTVQSGRFHSVRFRWACNRSYRQTAQLFAKSSIRKSVWAAGYFNRAKARGLSNSHAYRCLANRWLNIIWTLWQKRLPYDEAYHLRQVARHRQPVQS

SEQ ID NO: 189136 - protein, 421 aa, unidentified
MAYSKPQKVRKINSGTMIVAVDIGKGFHVGYFRAPSGEECKPFLFTNSLMSFNEFWLKIQGFFTKHALEEIVVGFESSGPYAEPLFHYLRKKSVKLVQVNPFHTKRVKELTGNSPNKTDRKDPRVIADVISLGHALTLVVPKGAAAQLRRLTQARERAIKRRTAALNQVQDLIFVIFPEFCSIIKNISTKTASYLIKKYPDPRDIVALGLEGLTTVIKTISRGKLGSQKAEALFHAARQCSGVQEGKRSILLEIEYLTSQIGADHCFIANLEKEMEKHLDEIPYSHSILSIKGIGKVTAAGLIGEVGDFRAFGTISEITKLAGLDLFEISSGKHRGQRRISKRGRGLLRKLLYFGAINMVKTNGILHEPYQQMVGKGMPKVKALVAMARKLLRIIFALARDNTVYVENHGGICNQHLKLAA

SEQ ID NO: 189137 - protein, 417 aa, unidentified
MKKHNNSRKKSEPTSKRAKSRGPVQRDTKEVLAELVGKLKEKLDPKVGAARAGKKNQRGELRPNLDRLRVGVDLGDQWSHYCILGLEGETLAEGQLRTTAQDVAEFFEALNAARVVVEVGTHSAWVREVICGYGHEVLVANPRLMEGSKRRKRKSDRIDANKLARLGRVDPQSLYPIRHRSREVRQDLVVLRARDGLVAARTELINATRGLVKSMGNRLPKCSSPSFAQKVEEAVPAEIREALLPLLPMTAALSDCIQGYDEKMEKLASEKYGHTALLRQVKGVGPITALAYVLTLENPERFATSRDVGPYLGLVPKQEDSGESQPQLGISKTGDTMLRKLLVGSAHYILGPFGPDTDLRRYGLRLCERGGKNVKKRAAVAVARKLAVLLPCLWVSGEVYEPLRQGMSARIAPAVAA

SEQ ID NO: 189138 - protein, 356 aa, unidentified
MQTQVTKKIDFSDKDLYIGLDVHKKSWSVTIVVDGIEHRTFTQPPDPESLRNYLHRMFPGAFYYSAYEAGFCGYSIHRELNSMGIKNIVINAADIPTTQKDKLQKRDPVDSRKIARSLEKGSLHAIHVFDRELEELRTLNRTRFYLMRDLRRSKNRIKSFLQYYSEPIPAEFDNNQWTLKFVSWLKQVKMETESGHDAFSHLIESYEHHRQQLLILSRIVRLRISQYDKELYSLLKTISGIGPLTSSALISELGDINRFKTIDQLSSYVGFIPRIRESGEITHTGGITFRCNTFLRTLLIEASWQAIRMDPAMMQYYHKHLVNNKGHKVIIKVARKLLNRIRYVMKNRQPYITGVA

SEQ ID NO: 189139 - protein, 319 aa, unidentified
MSKTEQTALCVGIDVSKEKLDVDFAPTRGPRQFANSPADHAALVKWLSPMNVRVIVIEATGGYERAIVAELAAAGLPVVVVNPRQPRDFARAQGRLAKTDPIDAEVLADFGLAINPPQRKLADAELLQIQEKLARRRQVVGMITAETNHLEHATAAAVQKSIKAVLKLLRKQLQQIEDDLDQSIRRSAVWQEKANLLESVPGVGSQTTRMLLFQLPELGQCSRRQIAALVGVAPMNRDSGMFRGRRTIRGGRREVRACLYMATLSAIRCNDKIQPHYQHLLAAGKSKKLALTACMRKLIIMLNAMVRDNKSWNSVPCGT

SEQ ID NO: 189140 - protein, 379 aa, unidentified
MGRRDEKMILAIGIDVHKETSSAYALYAGRGEEKDKHRKFLNSFNDEFMKFPSTPEKMKELMLFVNGHEPHFLLENSTKTHEIYWVLKNMGADVTVAQAKDLYRISRSDKKTDRNDSIELAGYMRRRLLGDNLEFAECYIPSPEWMMKREMCRGLFSEKEYLSDTKRRIRAHLLLHGIKLTKEYDDITSLRPLAEMKYSKDPYLMMQAGFAEDAKRRISFGEKAITQMFAGNRMCDLIFSIVGIGKNTAAYLTSLIVDISRFPTRSNFTASFGVVPKKGDSGDRNPNLGTTHRGDDIAREMLMHCTRSHARHAKDSVVTKMYERLVNNGKKKREALVAASRKLLTVVWSVLKSGRPYTSDIETLMMARRDSEDTERSAE

SEQ ID NO: 189141 - protein, 356 aa, unidentified
MANIETTNRAAIVIVGVDTHKSTHVAVAINDQGARLAAVSIPANPKGYRELEVWSRSLGHVQAFGIEGTGSYGAGLSRSLLAQGHKVIEVTRPNRQVRYRHGKSDSLDAEGAARSVLSGQAIAEPKTQTGSVEMIRHLKIVRDTAVKSRSQAMVTLKTLIINAPAELRDGLNPIKGKIALIRHIAAFRPGPINSTTASAKTAMRALARRWFTLNKEIIEFDKNLKTLIEAKAPSLLKAHGIATMTIAEMLILIGDNPKRIRSEAALAKLCGVCPIPASSGKTNRYRLNRGGNRQANAALYRVAIVRMRNHEPTLAYVHKRTKDGKSKSEIIRCLKRYIVREIYNHICRPEKPPITC

SEQ ID NO: 189142 - protein, 465 aa, unidentified
MTPHKDYCLDPRPLAPTPTLPQSPMLADALQVCHPHAAGIDIGEAEHWVAVPPGGDPQPVRRFGTFTADLDALADWLLDCGVTTVAMASTGVYWIPLFALLEARGMQVLLIDPRQAKRAPGRPKTDRLDCKWLQRLHAYGLLAGAFRPDDQVCVLRGYLRHRQMLLTYAAHHIQHMHKALQQMNLKLTQVVSDLTGVTGMAILKAIIAGERNPQHLAKLRNPHCHHDADDIAKALQGTWRAEHLFALQQAVALYEFYHQQLALCDQQITRHLETFADTSEGQPLPPKARRSKKTNEPRFDARTPLYRMAGVDLTTIEGIEENTALVILSEIGTDMHRWPSVKHFCSWLGLCPQHKISGGKVLSRRVRPGAHRVTVALRLAARSLHHSQSALGAFFRRMKARLGTPKAITAAAHKLARLVYHLLTHGSAYVQQGLENYEAQYHERRVKTMAKQAKVLGYTLVPLVA

SEQ ID NO: 189143 - protein, 367 aa, unidentified
MKNTIVHYEGTASLEAVATKVKPRGAVIKIGLDMHARLYVAVAQYDQLLPKAARRLRPGEFVPWVEALLRQGHSVHVVYEACGFGFGLYRQLMAAGAHCYVIAPRKLDEECSRVKTDPRDATTLCQRLSRYLEGNTRELAVIRVPSQEEEQARHVSRQRTQLVCHRQKLEAQGRSLLISHALPAPAHWWKEQTFSRLLQHLPAWITARLQMARPALLSLQKQIELLSSELEASAPSGVPRGVGKLTTVVLTREICDWHRFNNRRAISCYTGLCPGERTSGSKRVPGSVTKRGNPRVRATLVECAWRMVRFQPQYPPVQKRLAVLAKGSRAIGAVRKKAIVAVARRLAVDLWRVHTGRCTAEQLGLEL

SEQ ID NO: 189144 - protein, 479 aa, unidentified
MVTPNQEPRKPKKPRKPNLTKKPNTPRDISFPVDVPASPAPLSVINPDAAGIDVHSNMHMVCVPADRDPNPVRQFGANTADLLAIAAWLKKCAIKTIALESTGIYWIPLFEVLESEGFEVHLVEPGQLSRCGARPKTDVLDAQWIQRLHSYGLLRASFRPPDSVLALRAYWRQRQMQVRYAASHVQHMQKAMEQMNVKLAQVVTDITGLTGMSIIRAILDGERDPVKLAKLRDERCHCSADQIALALEGTWRPEHLFELRQAYDLYCFHHRQITECDQQVQAELARLPNRAGEKTRTRKPRRRGRKGNDVRFDATGPLFRALGVDLTLIEGIDVGTALVILAEIGVDVSRFPTEKHFASWLRLCPPQDESNRTKKRRRHRKGTNRVTIALRMAARSAGKTTTPLGHFYRRIRSRIGGLGAVKATAHKLACLVYRMLKHGQEYVVRSMEEYEAKIKANLLKSLERKAAAMGFQLTPMPAP

SEQ ID NO: 189145 - protein, 359 aa, unidentified
MNEITTVGVDLAKEVIAVCGADRSGKTVFTRVFRREAFAAWAVRLPPSVFGLEACGAAHHWARWLTSHGHTPHLMAAEFVKPFRKSRAAKNDRNDAEAVLTAVRQPNMRFVAVKSVEQQAYLSWHRMRQGFSEERTALINRLRGLLGEFGVWRGRSAEVLTRALPLLEHDEALPLLVRRLLSEARPHLARLDEAIIACEVEIKNHIKGNEVAKRLTAINGVGPLTAAATLATVTDARDFKNGRQFAAWQGLVPSQDSSGGHTRLGHITKRGDTYLRGLLTQGARSALQVALTKEPLRRTRLQAWIVQLHARVGYHKTLVAIANKHARMIWAILAKGEDYDPDAWRRWSRPAAATSSVTP

SEQ ID NO: 189146 - protein, 427 aa, unidentified
MISVGIDVSKGKSTVCILKPYGEIVSKPFNITHTQKDLSELSSMLFRLNDEVKIVMEATGIYHLPVLTYLQEKGFFVSVINPYLMKSYRNESLRKAKTDKIDSRIIANYGIDHWFKMKEFQTSGEIYEELKLLGQQYRHYMKLHLLSLAELTHLLDLTMPGIKNLLASWNETNRKDKRSDFVERFWHYDVITSMSEQEFTEEYILWAKEKKYVPSQEKAKVIYTLAQESIPTLPSETSLVKMLVTEAVRVLKEVDATLGLILSRMQEIAKTLPEYSVVREMGGVGNTLAPKLIAEIGDVRRFRNGKALVAFAGIDPPPYESGQFVGCNRKISKRGSASLRKVGYETMRSLKMRSRPEDPVYRYVVKKESEGKSKKSAKIAGLNKFLRIYYARVTELYKNICIFRKNRALAPHERSAVPLGTDHCPVC

SEQ ID NO: 189147 - protein, 316 aa, unidentified
MEIAPIFIGIDVSKARLDVAMRPSAEKLSVSNDEAGIQALVKRLSELKPVLIVLEATGGLERSVSGTLGSAQLPVVVVNPRQVRDFAKATGQLAKTDRIDAEVMARFAEVIRPPLRPLPDEVSLELRALIARRRQLIEMMVAEKNRLSAASKAVRKRIEAHIRWLETELDRADKDLDHSIRQSPIWQEHEDLLRSAPGIGPVVSRTLLAELPELGRLNRKQIAALVGIAPLNCDSGTFRGRRGIWGGRATVRAVLYMAALVASRRNSVIRDFYKRLRDKGKAPKVALVACMRKLLIILNAMIKHKTRWSEIIPQTS

SEQ ID NO: 189148 - protein, 403 aa, unidentified
MTVRPLVWVGIDVGKTSHHACAVDETGKVLWNQKVSNEQRAIEQLIARAHKGADEARWAIDLTSPMALMLITVLLGAEQSVVYVPGHVVNTMTGAFRGEGKTDAKDARVIAETARMRSDLSEVAMPDELVVELAQLTGYRTDVMADWVRGVNRLRSLLGSIFPGLEAAFDYSNRTPLILVAHLCTPAEIRAAGIKGVTAYLSDKGGWPTAIAKTAATAVAAAKQQPLALPGEAGTAALVKRLARKLLDLDHEIKDIDKTITERFRDHPYAHIIESLPGLGPGLGAEFVVVTGGDLASFATAGRLASYAGLVPVPRDSGRISGNLHRPKRYNRRLRRVFYMAALSSIRGDGPSRQFYDRKRGERLIHSQALLALARRLVDVLWALLRDGREFTPHKPTPATAAA

SEQ ID NO: 189149 - protein, 420 aa, unidentified
MGRCVSGVSHYCGIDWAEKHLDFAVINNKGDTLVEGRIGHDPAGVDELFRAFRTVARRRKAVQVGIETDRGAVVAALRAADQQVVVLCPSKVVRYRGRRTLHGGKSDRADALLLAQVLRWGGDELRPLPASSPAVLAIREVGRAQIEAARKQWTTASQVRGLLREFHWPASGAWAGRQGGPSGLFRPEARAVLAVAPTPAHACRLSRRQLREALEASGRKRLLDDEVDRLYDRFRTPALRHPTAVEDAMGERLLTLLRVLNQQIECTDDLTVRLTDRFYAHPHAPIYASLPGLGPVLGGRLLGEFGDDLGRFATARDRTTWAGASPITIASGATHVVRRRRHANRILMGAAFSWPFATLTRSPGARAHYDRRRAAGDRHATALRNLFRRLVSQLHYCLKSGELYDEARAYPAQSDREGDR

SEQ ID NO: 189150 - protein, 402 aa, unidentified
MTYDYVIGMDACKYFHHACVLDIDGTQVLSKRINQNEQSLRALFSAFSAYDHKVLVVVDQPNNIGRLTVAVAQDIGIDVRYLPGLAMRQLSRIHAGNAKTDIRDAYIIAHAAKNLPESLRSVDRVEEAFLQLKVLNGIDEDLARSYTRLINQIRSALVGCYPQFEQALRGQIIHRKWVLHLLARYGGPTKIKRLGKAKAAAFARRYKARNPEPVLDAIFAAISEQTVTIAGAHYAEMGVAMSAKDALLKLEHRQQIEKEVIKLINDIPHTQFLLSMPGIGPKTAAQILMTAGDMSDFPSAGHLASYAGLSPRTNQSGTSIMSNSLNRAGNKKLKNALWQSFCASIRFHERSQQFYERKRNEGKRHNAAVVALARRRLNVLFAMMHSGELYRDTPSSTNIATP

SEQ ID NO: 189151 - protein, 410 aa, unidentified
MTKEDFIYVGIDLHKETHTAVMIDCYNQKLGEITFPNRPADFPKLVTKVKKCNTDAKEVVYGLENAYGYGRALAVWLIDKGYFVKDVNTAISHRQAKHRGAMYRKSDSDDAEAIALATLNMLDKLPDACPNDAYWSLGQLVHRRDNIMKQRTRLVNQLHEQLCIAYPSYKSFFNDISRPTALYFWEHYPSRKYLRGKSVEDLRKELVPVSHNRCSTKNCEKILDAVASDKVKNNAYQDARDMVTLSIVSDLQHYDSQLAEVDKMLEQMYKMLGCTLTTIPGVNVITAVKILAEIGDIKRFSNANKLAQFAGIAPLHLSSSGKGKDVATKQGNRRLQATIYFLAIQMVQVSSKGTPRNSVVRAYYEKRKAEGKTSQQALICISRRLISIIYGMLKNGTEYRMPVVESAGEK

SEQ ID NO: 189152 - protein, 387 aa, unidentified
MSQTIAAPIPAAVDYERTLVLAIEVSNKSWVLAAQVPGLPHTKAKRTIDPEAEALLAAIAGYRTRAAVMGRSIERVIAVYEAGWSGFWLARWLLRHGVEVHVVQPSSVPVDRRMRRAKSDGIDAELLLRTLLAWLRGEPRVCSMVPVPDEADEDARRCVRERTELISERIGLTNRIAAVLATLGVSDYNPLLRNRWRRLAELRTGLGEPLPANAHAKIKRLLARLELVLTQIAELERERDAVVETEAPDKASKMIQQLTGLRGIGVQSATVLVREAFVRRFANGKALGSYAGLASSPYSSGGIDREQGIGKAGNRRVRTVMVELAWLWTRYQPDAAQVCWFRERVGSTGPRVRKIMVVALARKLLIALWRFVIDGVVPEGAVLKPAA

SEQ ID NO: 189153 - protein, 406 aa, unidentified
MAAVMIGVDPHKASHTAAAIGPAEEPLGQVRIRASESQVEQLVAWAAAWPERTWAVEGATGLGSLLARQLVAAGERVLDVQPKLAARVRLLEAGNTNKNDPNDARSVAVAALRSAARREVAADGHAAVLKVWSKRYRDLGRARTQAACRLHALLADLVPGGFAGEITAGQAADLLARITPADPAARARCELAAEFLADLRYLDTQIRGTRDRITAAVRASSTTLTEIFGVGPVIAAAILGAAGDVSRFADRNRFAAYNGTAPVEVSSGGRKIHRLSPRGNRRLNHAIHMAAITQIRYQHSPGRAYFDRKITTGKTSNEALRALKRQLSDAIYARLVADADRRGTPAQAQGPGGQSGNGSVSSAAGSHPGHRLFGQATTGPHPSLRPAAPARRPVPATPLKNSRRAP

SEQ ID NO: 189154 - protein, 423 aa, unidentified
MSYRIAGIDVHKKMLAVVVADVEVQGEYQFERIRYGSNPQHLRLLAAWLIEHEVEEVVMESTAQYWKPVWGALERYWKPSCQKREGAGPKSGTLHLAQARSNRGRKGRKKDFPDAERLVKRLVADELILSFVPDTEQRLWRTVTRRKYQLTRNKVRLQNQLEALLEEAHIKLSSLVSDLLGVSARRMLKAIADGGTDPAALAALADKKLRATPAQLCDALGACAELQPVYRRLLKMFLEELQLIEQQIGQLDQEMATLLSQHQEAVQRLAEIPGLGVDSAQQIIAEVGATAATFPSGKQLSSWVGACPGDEESAEVSQSHRSPKGNRHMRRILNQAANAAVKSKGTMFEIVYRRLVTRLGHNQTIGAIAHRLCRLIWIILHRGVRYEERGPSVSTSARRQRTTRMIRELHSLGYRVEPLGTAA

SEQ ID NO: 189155 - protein, 334 aa, unidentified
MQNVTLIGIDLGKNSFHIHCQEKYGNPLLRKKFSRSQLTQFLATCQPCIVAMESCAGAHFMARHISQLGHQVKLISPQFVRPFVKSNKNDFIDAEAICEAASRPSMRFVTPRTEDQQAMSALHRVRDSLVRERVKTTNQMHAFLLEFGVSMPRGIAVIRRLAAVLEENELPPYLARLLVRLHQHYGYLCEQIEDVEKELKNHMADDETAQRLLSIPGVGTITASLLATKLGDGKNYASSRDFAASTGLVPRQYSTGGKSTLMGISKRGDKNLRRLLVQCARVYMQRLEYQSGRLAEWVQGQLTRHHSNVVACALANKLGRIAWAVTTQRTVFSQ

SEQ ID NO: 189156 - protein, 447 aa, unidentified
MDLIDQLVDADPGEEEILERVAAIDVAKDSGMVCVRVPHQTQPGKRDTSVWSVPARTNSIIALANQLAEQGIQRVVLESTSDYWRPFYYLLDARGLTVWLVNARDVKHVPGRPKTDKLDAVWLAKLNQRGMLRASFIPPVEIRQLRDYTRLRFDLTGDRSRQVQRLEKLLEDALIKISSVATEVMGVSGRAMIEALIAGERDPRVLAELAKGRLRLKHAALIEALTGRFDDHHAELAALLLEQIDGLSAQIEHLDARIEQLIADIPAAQAPRPGSGQDSDAAHVPLDAVDRLDEVTGIGRHAAQVIIAEVGLAMAVFPTDAHLVSWSKIAPRTVQSGAKSHPGKTGKGNPYLKSVLGEAAASAARTNTFLGARYRRLARRIGKQKAQVAVARSILVIVWHLLADPTSRYRDLGPDFLDTRIRPERRKQNHIHQLEALGYKVTLEPAA

SEQ ID NO: 189157 - protein, 319 aa, unidentified
MAQNDLVVAGIDVAKDKVDVCIRSLSLKRTFAGTEEGRRELTSWLRRRKVGKAVMEASGGYERDWAKVLRNAEIEVRIVDPKRVRSFAQSAGRLAKNDTIDAEMIAWFAETFDEARGQAYDETREQLHQMVNARQALKGMQAKLESQGEHGLPAAVQRMHARILKTITVELVKFEAAIAAMIQATPRFTELAEIIESVPGIGRTTSAALIAAMPELGQANNKIVAALLGVAPYDDDSGRRRGERHIKGGRRRTRNVFYMACLGAATQHNPVLKAFYDRLVAKGKEKKVALIACMRKLISILNIMIERRQKWDASRYAVS

SEQ ID NO: 189158 - protein, 312 aa, unidentified
METKFVGIDVSKLTLDFDCLPVSAAQQFTNDAVGIAALVALLQNSGVERIVIEATGGYETATASALAVAKLPVVVVNPKQVRDFAKAMGHFAKTDKLDAKVLALFGERMKPALRALLDEAQRALADVLNRRLQLVTMRAQEKARLATVTVVARKDVEQHIAWLGKRIAKLETDLADRLKKSPVWCHKAALLESTPGVGEVTTFSLLADLPELGTLNRQKISALVGVAPFPDDSGKRQGKRYIRGGRAEVRCVLYMATLSAITHNPPIKALYERLTKAGKPFKLAMTACMRKLLTILNVILKNNQPWKIQPTS

SEQ ID NO: 189159 - protein, 334 aa, unidentified
MNKIKHFIGIDFSKDKFDAALVSLEEQETKSCHQVFENSKSGCNAFIKWLIRLGIDPGNCLVCAEHTGMYVNILANYLAIHSFNLWLEMSYRIIRSSGIQRGKNDKVDALRIAQYAEKHVDKAMLYKPRKPILIKISSLLKLRDKLIKEKASLLKTVNEYKVFDKDVATLLAKHQSRTLKSIVKDIEQIESTIKDLMKADEDFLRLYQQVISVPGVGQITALTLMCHTNEFMNFENPRQLACYCGVVPFEYTSGKSIRGKPHVHFMANKQLKQLLHMCALTASMHDPEMKAYFIRKVTEGKSKMLVINNIRNKMIHRICACVRENRKFETRLIA

SEQ ID NO: 189160 - protein, 368 aa, unidentified
MERKSSKLYVGMDVHKESIDLAVADEGGEVRHHGRIDGAVSALLRAVRKFESLHRELVFVYEAGPCGFGIYRALRARGHDCWVVAPSNTPRRVRDRIKTDRRDSVKLAGLARAGELTPIYVPDPGDEAMRDLVRTREDAVAMQRQARHRLAALLLRNDLRYAGKTAWTAAHRRWIASLQLAQPAQRIAFEEYVQTVTEASERVQRLSQALEQELATWRWRSVVGALQACRGIQLIHAVRIVAELGDLSRFTHPRQLMGYLGLIPSENSSGERRHQGAITKAGNSSARRALVEAAWAYRYSAKVSPVIARRQSDLPPAAIAIAWKAQLRLCARFRALSARGLNRNKIVVAIARELAGFVWAIGHQVKPV

SEQ ID NO: 189161 - protein, 347 aa, unidentified
MNTITIGLDIAKAVFQVHGEASGKIVLQKRLRRSQLVDFFAKLPRSLIGIEACGSSHYWARTLRDLGHDVRLLPAAYVKPFVKRNKTDARDAAAICAALGRPDMRFVAIKSAEQQAARAVERSRDLLVKQHTQLMNSVRSQLAELGIIETKGRRGFIALTERVTTADPRIPPMLLTALHMLIGHIEQLAKAIAKLESQIVATARAHPVMRRLATIPGVGPLTAHAIVTAIGDGKQFASARDFAAWCGLTRRVDQSADKRRERGISRQGEMRLRKLLALGASTIMRHLRSCPARATAWQHGILARRPIKVAVLAQAAKNARIAWAILQSGDIYRTPAITAAATTALAG

SEQ ID NO: 189162 - protein, 422 aa, unidentified
MLGVGLDWAEDHHDVALGLPGKGVIEQFRIDHGPDGVARLVARCLALETDPAEVRVVLETRHGLLVEALVDAGFTVLPVNPDLVARRRGPAKKKDDAEDARICCLMALDPFVQLRKLIPHGEVGAELRAIARDDDRAARDERRLGNRLRADLLAVFPAAVDIADGDLGAAVFLRLLERWPSHAELATAGRDAIEALARANRHGWPDRFADRVMAALAAARLVVRPELARAKAGSIRLTAAQLLLLRQQRRAWHRRMGELLLGGKRHGRAKQPKDPKPGNAFPGGEIYLSMPGLGDRLAARVAGEIGEHVEHFTTPNALQCYAGTAPVTRRSGRSEFVVARRLAYNRYLGNAVQRWAFCSLQQSAWARTFYDTKIATGKTHHAALRALANRWLEILWHCLHIGVTYNEHVHTTNRAHTLKQAA

SEQ ID NO: 189163 - protein, 334 aa, unidentified
MEKVTTVGIDLAKNVFSLHGVDAAGKTVLRRTVRRDQLLGVVAGLSPCLIGMEACSGAHEWGRRFQEYRHTVRLMAPKFVAPYRKSGKNDGNDAEAICEAVTRPSMRFVPVKSVEQQALLAMHRVRQGFVVERTATINRLRGLLAEFGVVLPLRSVTVRRQAAAAAENLPELARRAIGDLLEQLRVLDERILGYDREIEVQAKLCEPAQRLMKIRGIGPTTALAIVATVGNAREFKNGRQFAAWIGLVPGQYSTGGKPRLGHISKRGDAYLRNLLVQGARSVLNSAGMHQHRMSRWILALQPRRGYYRTLVAIANKNARIAWALLAKNETLRSA

SEQ ID NO: 189164 - protein, 348 aa, unidentified
MLADELDYVVGVDTHLDEHVLAVVAAPSGAVVARRAMPANARGYSAALRFAGEAAGGARVWAIEGTGSYGAGLARYLAGRGETVLEISRTPRAERRLRGKDDSLDAARTARAALASETLALPRSGERREALRLLLIARRSAVDVRREALGQLRGVIVTAPDGLREELRGLPVGRLLERCSRLRRSSATSADEVATRLVLRSLARRIQAATVEADELEQEILGHVRALAPRLLEEPGVGPIVAAQLIVAWSHHGRLRSEAAFARLAGVAPIPASSGQTTRHRLSRGGDRQLNRALHTIVLHRRQHDPTTKDYIAQRIAEGKTRRDATRLLKRYLARHLYRLLEQEPLMT

SEQ ID NO: 189165 - protein, 334 aa, unidentified
MENIALIGIDLGKNSFHIHCQDRRGKDVYRKKFTRPKLIEFLATCPATTIAMEACGGSHFMARKLEELGHSPKLISPQFVRPFVKSNKNDFVDAEAICEAASRPSMRFVQPRTESQQAMRALHRVRESLVQDKVKTTNQMHAFLLEFGISVPRGAAVISRLSTILEDNSLPLYLSQLLLKLQQHYHYLVEQIKDLESQLKRKLDEDEVGQRLLSIPCVGTLTASTISTEIGDGKQYASSRDFAAATGLVPRQYSTGGRTTLLGISKRGNKKIRTLLVQCARVFIQKLEHQSGKLADWVRDLLCRKSNFVVTCALANKLARIAWALTARQQTYVA

SEQ ID NO: 189166 - protein, 429 aa, unidentified
MSYRIAGIDVHKKMLAVVVSDVEVDGEYQFERRMFGSNPEQLRSLAAWLLEQDIEESVMESTAQYWKPVWEALERYWKPIREKQEGARRKSGTLHLAQALSNRGRRGRKRDFPDAERLVKRLVAQELTLSFVPNTEQRLWRTVTCKKYQLRCDRIRLQNQLESLLEEAHIKLSSFVSDLLGLSAQRMLKAISEGETDSAVLAALADKHLRATPEQLCDALGACTQLNPVYRRLLKLGLEELRLIDDQIGRLDREMASLLGEHQDAVQRLAEVPGLGVDSAQQIIAEVGPTAATFPSAKCLSSWVGACPGDDETAGVNYSHRSPKGNRQMRRILNQSANAAARTKGSIFEIVYRRSVPRLGHNQAIGAIAHRHCRLIWLILHRGVRYEERGPAVTRRSKQLRTWRMIRQLRSLGYHIAPPNPQPSQEQAR

SEQ ID NO: 189167 - protein, 347 aa, unidentified
MFAESVDVVIGVDTHRDSHALALLDAGLGALIAEERVDANRAGYRRALKLASGCGRRRLWAVEGTGSYGAGLARYLQRQGERVLELERPVRSGSRGRAKSDDLDALRAARAALTGEPLAELRSGGQREALRVLLVSREASVAVRRRGLNQLRALVLTAPAELRERLQGLPKRALVKRCVALRPRSGQQPQLRGTLLALRSCSRQVELASREAAVLERELAALVKQLAPQLLSHYGVGPITAAQLLVSWSHPGRLRSEAAFARLAGVAPIPCSSGKTIRHRLDRGGDRQLNRALHTIVLARRRSDQRTIAYIHRRTREGKTEREAIRSLKRYIARSLYRLLEHTHRTA

SEQ ID NO: 189168 - protein, 341 aa, unidentified
MKITTVGVDLAKNVFQVHGVDEHGHVVLRKALKRSQVMPFFSSLLPCLIGMEACGSAHHWSRKFQALGHTVRLMAPQFVKPYVKTNKNDAADAEAICEAVQRPSMRFVAVKTPEQQAVLSLHRARQGFVKARTATANQIRGLLAEFGITLPQGIAHLSMAGERMADEALPMSFRRLIEKLLSHYRELDQRVIELEHEIQTWHRGSDASQRLAAIPGVGLLTATAVAASVGDARQFKNARQMAAFLGLVPRQHSSGGKPKLLSISKRGDVYLRTLMIHGARSVLHHAAARPQAERLWHVQVMQRRNRNIAAVALANKNARTMWALLAKAQGFDPQYRAAHAA

SEQ ID NO: 189169 - protein, 449 aa, unidentified
MKEPQEIPDEEHEQVLARVAAVDVAKASGMVCTRVPHPQRPGKRLTRVWEVDATTNSVLEMSGHLSREGVEMVTLEATSDYWRIWFYLLEAAGLNVQLVKAHDVKQAPGRPKTDKLDAVWLAKLTERGMLRRSFVPPAEIRNLRDYTRLRADLTRERTRYWQRLEKLLEDALIKVSAVASSLGTVSARDMIEALIAGERDPQVLARLARGRMRVKHAALVEALTGRFDAHHGELARMLLDQIDALTAQVATLTTRIEELIGAIPAAQGVDGDGTAGPAAGLSEGAPVLPAIDRLDEITGIGRSAAQGIIAEVGLDMTRFPTPGHLVSWAKLSPRTIQSGARTRSGPAGKGNPYLKGILGEAAATATRTDTFLGERYRRIVKRRGKLKALVAVARSILVIIWHLLSDRTARFRDLGSGYYASRTDKERKARNHVRQLQALGYAVTLAPAA

SEQ ID NO: 189170 - protein, 414 aa, unidentified
MRHRPTRPIPECQPPFYVGIDIGKSMHHAYVVDAEGTPCIPKVLAFANTRAGYTQLFTMLTEATAQAEPTEVTVGCEATGPYWLSLYEALSAQGYRVLVLNPFYVKARRGTTLRGTKTDPVDARLITAILQREQVPSSHVPEVTVQGLRELTRLRADLVAQIGDVKRRVISILDRTFPEFATYFSDVCGQTARTVLETWTLPEQLAAVPTARLAALLARLSHGHFGTEKARAVKEAAQHSIGVRRAADALAFELRLLLRQIRELEHLVADLDQEIGGRYAGLDHYLRTIPGLGQATAPAIYAEIGDIRRFTDSDQLVALVGVDPQLHESGQTAGQAKMSKRGSPYLRRAVWHAALTACRLDPMFQAIYERQRQRGKHHLVALSHVANKLTRVIYAVLKGQRPYVPRSHLPANAH

SEQ ID NO: 189171 - protein, 426 aa, unidentified
MNCKLNDKINQVEETSLVIGIDIGSTTHYARAFDWRKIELAKVFKFSNTLEGFEALSRWIGNIQALRQKDKVIIGIEPTGHYWFALGQYLQGKGIKLVMVNPYAVKQSKELDDNNQTKNDAKDPSVIAKLVIDGRYSIPYVPTGAYADLRIMFSNRTRISREIGAVKNHLARWFAIHFPEYKEVFRDYASKGSLLLLKAAATPSSIVALGAEGINKIWRDAKVRAVGIKRATTLYETAKKSIGQNQGTAAAEVEMKLLLEDYEAKMRQYASIMAALEEAVRRIPGTERLLAIKGIGLVTVAGFLAETGDLRRFESPKQIQKLAGLSLKENSSGQHKGETTISRRGRHGLRNVLFNAVIPLLATNDEFRSLHEYYTTRAANPLKKKQSAIALCGKLIRVFYVVLVKGMVYDGQKMLADIHRNGTQVA

SEQ ID NO: 189172 - protein, 346 aa, unidentified
MTIVEADRAVTGGVDTHLDLNVAAALDGIGGLLGVSDFPTTRSGHGQLLGWLSAFGPVTRVGVEGTGSYGAGLARFLRSAGVEVVEVDRPNRQARRRTGKSDPLDAVEAARAAQAGRASGAAKTRDGNVEAIRALVVAKRSARSTKIKTLNQIRHLSFTAPDELRERLKGFSRHQLAAEAAALRPRPGGDPVTVATKTALRTLGRRVLALDEEKAALDEFLADLVTGTAPELVSLHGVGVDTAAVLLTAAGDNPDRLRSEAAWAHLCGVAPIEASSGKVTRYRLNRGGDRQANSALWRIVITRMGSDPRTRAYVARRLDEGRSKGEIIRVLKRYVAREVYRHLPRG

SEQ ID NO: 189173 - protein, 328 aa, unidentified
MKECLIIGVDISKSTLDIFAKPAGIEMKITNNLQGFKKWFNIFKKQFSDQKEVLVIMEHTGRYSYLFELFLRSKKIGYCKIAALQIKRSLGMIRGKNDKVDAERIASYGWLRRDILTADEYPVETIIELRSILSLRLKFVRDRSGYITRLKEIRAAGADIYNYEIRMQQQAIDFFTSNINMLNKKIQALIASDSDLRNTCELLRSIKGIGWIIAANMISCTDNFKRFGNARKFNCYAGIAPFRHESGSSIKGKARVSHLANKEMKTLLNLAASSAIQHDKEMRTYYQRRISEGKHKMNCLNIIRAKLVARMFAVVKRQTPYQEFTQAA

SEQ ID NO: 189174 - protein, 388 aa, unidentified
MNVGADKSEPLTAIHTDLGAIFVSLELSRSSWLITSLSPGGGEKMSKHSVRGGDFAGLMQRFAQLQEKARRQTGQSFRIIVVQEAGLDGFWIHRALQNEGIESHVVDAASIATSRRRRRAKTDKIDGETLVRALLAYKRGEPRVCAMVKVPTPGEEDRRHLCRERKALTAERVRHVNRIKGFLFSQGVSGYQPLRRDRRQRLEELRTGDGRAFPQHLKALVNRELDRLELLLKQIKTVEAARDALLAVGQTAKPAPAAMLLDIRGIGPEFAAILWSEGLFRHFENRRQIAAYAGLAPTPWQSGAVDREQGVSKAGNPRLRTTLIQLAWLWLRNQPRSALSVWFHERVSRNGGRLRKTTIVALARKLLVALWKYVTAGVVIEGVTMKVA

SEQ ID NO: 189175 - protein, 374 aa, unidentified
MENTITYVAMDTHKKQHKIALHYPCREEIVEFSVNNTARDIKKMVNKIKKQAPGKVEFCYEAGVCGFTLKRRIEQFDCCCSVIAPSLVPRKPGERVKTDRRDAKKLLMMHQAGLLTEVHTPNEQQEAARELTRLRETAKDNLKRIRHQLLKLLSRHGYVYRKGHHWTQKHIAWLRAIEFTDPMLTRVFENYFDEMIYCMGRLEALDKEVGLLADSEEYKEIVGLLRCFHGIETLTAITLLTEIFEFGRFESPRHLMSYLGLTPSEDSSGDKQKKGSITKTGNKRVRRLLNETSWHYRHRYVPSKVLKQRRKGQPQWVLDIADAAGRRLSKRHRHLVNNGKMPCKANIAVARELAGFIWFVVTQYHARKKTQGAA

SEQ ID NO: 189176 - protein, 307 aa, unidentified
MRAAGIDVGKLSLDLAVDGQPGARRFANTPAGITGLVAALRALGVERILVEATGGYEEPVLEACCDAGLWISRINPRQARDFARATGELAKTDAIDARLLALMAGMFGDRLRRHTAPPPWQRELRDWLRRRGQVVILIQAQKQQASLAPPAVRKLVARTVVALTRELVAIEQAMKALIHAHSTAAMRSSKGLGPVFQATMLALLPELGHLNRRQIAKLTGVAPMNRDSGQGQGKRRIRGGRSPVRVALYMATLSAVRWDPLMKAHYQQLRARGKLAKVALVACMRKLLGIVNARRRDELRAEGLVVL

SEQ ID NO: 189177 - protein, 370 aa, unidentified
MGNASTLHVGLDVHKESIAVAYATEDGAVAPVPFGTIGTRQCDIDALVRKLQSKSARLVFVYEAGPCGYWLYRYLTRKGLTCFVVAPSLIPRKPGDRVKTDTRDAVTLARLARSGDLTPVYVPAVPDEALRDLARAREDALHDLNAARFRLKALLLRNDVRYAGRANWGAEHLRWLARFVFPTPAQQIVFQEYVRTVTERTELLQRLEAELLEQAKTWRLSPVVEALQALRGVQFTVAITTIAELGDLTRFDTPRQLMSYLGLTPSEYSSGERRRLGGITKAGNRHARRVLIEAAKAYRHRAKVSEQIQVRQEHLPAVIRDIAWRAQVRLCGRYRKLVARGKHPNTVAAAIARELAAFMWAIAKARPVPA

SEQ ID NO: 189178 - protein, 341 aa, unidentified
MVTTIGIDPHKATHTAVAINETETVLGELTIPADQHQTETLLDWARNLDGDGRVWAVEAAGGLGFLLSQQLIADGEQVVDVPPVLASRVRLLGSGRSDKNDPNDARSVAIAALRQPGLAVVRGEDHTQVLRMLAKRHLELTGLRTQAACRLHSVLTQLRPGGIGQRLSAAKAARMLGGMRNLDLVGEQRRTMARTHLGDIRRLDREIKANKVLISKAVATSGTTVTDVYGVGPVVAAFLIGYTGDIGRFATANHYAAYNGTAPIEVSSGGKKRHRLSMRGNRKLNHAIHMAAVTQIRHDTVGRVYYTKKQAEGKTKKEALRALKRRISNVVYQQLVTDHQG

SEQ ID NO: 189179 - protein, 360 aa, unidentified
MSFNGTSVGLDVHALSVVAHAVDEETGRVERARLCPGHGEILDWLHRLRSPVRVAYEAGPTGFGLARALAAAEIDCVVAAPSRLIRPSGDRVKTDARDAAHLTRLLRLGEITAVTVPESDVEAVRDLVRAREDARADLMRVRHRLSKLLLRQGRVYSGGQAWSGVHQIWLRRQCFDDSHTKAAFDHHFDAVLTATAARDRLDEQIVTIAASPRWADQVDRLGCLRGISALTGLALTVEIGDWTRFTGSSIGAYVGLVPTEYSSGASRVQGSITKAGNAHVRRLLIESAWHHRQPYRNPGPTMRARWAKVDPALKDRGHAGNRRLHQQWCRFNERKKHHVVANVAIARELAGWCWSLATLQ

SEQ ID NO: 189180 - protein, 346 aa, unidentified
MKFYTGHHKFYCGVDLHARTMFLCVLDERGYPLLEKNIKTDPELFLKTIAPYREDLVVAVECMFTWYWLSDLCSREGIPFILGHALYMKAIHGGKAKNDRIDANKIAVLLRGGMFPVAYVYPPKMRSTRDLLRRRMFLNRKRSALITHIKCTFAQYNLPDPEQNVSRVSQREGVAELIPDPGASRNVRLDLEVLDFYDQTLTKLEQELTVLAKDHDPDAYFRLRTVPGIGKILSLVILYEIHDINRFPSVQDFASYCRLVKPAKESAGKRVGSGGAKIGNVHLKWAFSEAAVLFLRKNEAAKLYRARLVKRHGKAKSLTILAHKIARAVFFILKRRTVFQPETFFA

SEQ ID NO: 189181 - protein, 410 aa, unidentified
MVERFVGIDVALREHRIAVLDRDGEAVGQSFTIAASTDGVATLLRTLGARGATAAQTLIGLEASGHLWENLEAALVGAGYRVIVLNPLQTRRYRDVVRRKAKTDDIDAHVIAGLLRSGAAQASYVPDEQIQSLRELARLRARLMADRQDYLRQLVAQLDVVLPEHRTVLGDLLTARARGILAQFPTAPHLANANPRAIRRAAENAGARGFSLDDATGVRDRARRSLYSGKAAAARAHVVRTLVSQLERLTSAIDEVDRAATTLLPPSEPGTGLSDAELLQTIPGIGPQTAATLLGELGAFTRFIDARALVAYVGFYPVINQSGDRVATPRLSRVGSRIARHSLYLAAVNAVRRSGEWRTIYLRKKAQGKTAKQALVVVAVKLLHAVYAMLKHRQPYNPSRLLVAPATIGS

SEQ ID NO: 189182 - protein, 439 aa, unidentified
MEVVYRRCCGLDVHKDSITACVLVLDGKGQREVRTKEFQTYWKELQRLKLWLYASKVECVAMESTGVYWKPVWNVLEGHFPLLLANPYHMHNIPGRKTDQKDSEWIADLLAHGLLRASFVPPRPVQELRDLTRYRVKLMGEYNRVHNRIAKVLEDANLKLGSVVSDILGGTGRAIIRAIIAGEDRPEWLADKALSALRNKREQLRLVLRGQVSDHHRYLLQELMQDVERIEDKISRIEAEIVQRTMPLQETLERLTTIPGVDWITAWTLVAELGTDMSVFPDADHAASWAGLVPGNFESAGKRKSNRTRHGNCWLRRALCQSAWAVSHKKDCYLTAHFYRRAARAGVKKAIVATAHQILIVAFHILRDGTTYQEHGGDYFDRLNPHRTQRRLTNRLQQLGFEVVLKPRKVPDPQPLPSPSGRTPSCQCAKRGIGCKHRH

SEQ ID NO: 189183 - protein, 342 aa, unidentified
MSWGPTAFFVNPNSCKGQAPAHKEGTEEMAAQTVQDVGIDIAKRGLDVAVFQTQEQSRFDNDKDGWAKLIKWLQGRNVRAVGMEPSGGYERGVAKALHKAGLPARNVNPHKLRHYARALGRLAKNDRIDALLIARYTAELPTRPVRCDPIAEQLADLVVARRQLSDDKVSLANQLEQVREPTVRRIFTQRLRRIELDIALLAKRMADLVASQPALAARDRLIQSFHGAGPVFSHTVLALAPEIGQASRREIAALAGLAPYDFDTGTFKGRRIIWGGRHAVRRVVYMAALTASRSNPVLKAFHQRLIAKGKEPKVALVAVARKILTILSAMIRNNEPWNPNRS

SEQ ID NO: 189184 - protein, 324 aa, unidentified
MSTPSNPEQFIGIDISKAHLDIAIWPGETTWRAPHAEASLPRLVEQLQGFAPSLIVLEATGGYETDVATALAAAGLPVAVVNPRQVRDFARSLGKLAKTDRLDAQILARFAQAIRPQARFLPDEQATQLQAALTRRRQLIDMKVAEKNRLGLAHKTIRPRLQEHIAWLEEELAELDEDLHTRIRQSAIWREKDDLLQSVPGIGRVTATTLLADLPELGQLNRKQIAALVGLAPFNCDSGLMRGKRTIWGGRAPVRNALYMATLVATRCNPVIKRFYTHLKQQGKVFKVAITACMRKLLTILNAMVRAHQTWCPALASTKTSPAP

SEQ ID NO: 189185 - protein, 348 aa, unidentified
MNATPKPVVGVDTAKSVFQLYSVDMETGEVIRKQLKRAQFLQWFSNRAPCLVGMEACGASQHWARQLQGLGHEVKLMAGKMVKAFVSGNKNDAADARAIWLAVQQPGVKAVAVKSEAQQAVLAMHRVRQQLVKMRTAQRNELRGLLAEYGEVFGLGKVAFNAGMKDALARLAERLPAMLIDTLREQWAELTELDQRIAAIEARLLGWLHQDRQAQAIAAIPGVGLLTATAAVATMGQAKAFRSGREFAAWIGLAPAQTGTGGRIRLLGISKRGDTYLRTLLIHGARAVRIHAKTPTKWLLDIGQRRPPNVVTVALANKMARTIWAVLAHERAYDKEHVSMRPQVAMQT

SEQ ID NO: 189186 - protein, 356 aa, unidentified
MPVYLGVDFHARSQTVCWCSTEDGVIRQRTLDHERDNVPAFYAQFAAPAIVGLESSGYALWFHRLLAEQGHHVLVGDAAAIRKFAKRRQKNDRRDAELLLDLLLHGDFPAVYVPPPASRDVLGLLRYRHRLVRMRTMLRNGLQAVALNHQLRLGPGLFTARGRQQLSALPLDGADATQRTHSLALLEALQKKILEVEEILDARAADDPRVTRLRTHPGVGLLTSLAVVHTLEPVTRFDRARRIAAYCGLDPKEHSSGETQRYGHISKQGNRLLRFLLIEAAHHAVAPGQDDDLRRFYYHLLVKKHAAVAAVAVARKLVLRLYRMLRDQIDYDEFRRRGRDARRAREISSLPIHRDG

SEQ ID NO: 189187 - protein, 344 aa, unidentified
MKNPTYFIGLDVHKKKTTYVVKDNIGTIIIQGETTTQYTDLLPILQPYLKKGIIGLEASTSYYTLYQKFLKNGYTINVANTIQLRQLIAKNDTLDAKRLADMLRLGTFPCSYIPPEDIQHLREFIQIRHTLIEEKTRCKNRIHAILDKHHTIILPATKPFGIKWKKALQQYIASNPRSLELRHSIDHYRYLEQKSNQIAQELIAYTKSHWTNEYHLLQSITGIGPILSCYLIANIHPITRFNNKRKLRRYAGVIPVSKQSGDHTGKGHLPKTSSRKLLRWALIQAANTIAKTQTPLGTYYRRKKKQKESTGIAKVAVATSLIDIIYKVLTTKKPYQPHTSITST

SEQ ID NO: 189188 - protein, 408 aa, unidentified
MACPSSVIVTSGRPKRKGNDMNVRHEAEAVESATGVRRIFAAIELSKSTWVVAIQPPTVDKVSLFRIPGGDIDRLLMLLDQARSRAGGTADICACYEAGYDGFWIHRALTARGVVSTVLDSASIQVSRRGRRVKTDRTDAESLVRVLMALYRGEHQVAKTVQVPSPDEKDNKRLLRSRGNLLRDRIRHTNRIRGLLNLQGVRHIDPNKPNWEAALLNLKTRDGRSFPQQLMREIRREAKLLGMIVRTLKEVDAEIAGMIRDARKRRHPAQRGQNHPTARRLADIRGVGQQTAGILATEVFYRKFKNRREVASYVGLTPTPYNSGAQVRDQGISKAGNRRARTIAIELAWIWLRSQPDSKLSRWFRARVGDTTGRVRRIAIVALARKLIVILWRFLEDGAIPEGATMVA

SEQ ID NO: 189189 - protein, 394 aa, unidentified
MRFVGIDVGAERHVVAGVDEAEAVVIPPTGFTEDAAGYHQLRTLLGPATDTLVALEATGHYWKNVFAVLVSAGFAVALLNPLRTRRFAEEDLQRTKTDTIDALGIARFAGQKRPAATPLPDPATEELRELLRYRDRLSQDFGDRERQLHRLLDLGFPEFPRHVHDVGSELATAILRDYPTAAAFQGVAVRRLAGLRYDGRHKVGTDLATTLLTAAAVSVGQHHGAAYRGQVRDACADLDVLRGRLRTLDRDIERLLEDHEVGTLLTTIEGIGPQTAARLVATFGDFSGVRSAAALASYVGVIPGLRQSGKRTSVRASLTPIGAARLRAKLYMPVLSAVRHNPWLRAYYVRLIGRGKLPKVAIIAAMRKLLHAVYSVATHRRPFTPHVVTQEARA

SEQ ID NO: 189190 - protein, 339 aa, unidentified
MKQVRTIGLDLAKKVFPVHGVDAAGTVVVRRALRRRQVLVFLAKLPRCLVGMEAGATAHNWARELIKLGHDVRLIPPAYAKAYVRRGKNDAADAAAICAAVSRPALRFVAVKTAAQQAAAGLHKLRALLIKQRTLVINQLRGLMAEFGIVAAKGPGHVGALAAVLADPAAAPVPAPLGQALVPMAELWRDLERRIAALDRQILEWGRTNATLGHLLTSPGFGPLLASARAAIVGQPEACRRARDFAASLGLVPRQDGTGGKVKLGPISKRGNGDLRTLLVNGAMAVLASRRARRDPWLGRLLATKARKVAACALANKMARIAWAVMMRQEDFRARPQAA

SEQ ID NO: 189191 - protein, 371 aa, unidentified
MNHVTSIGLDVHARSVTAVALDSITGEVRSQKFGYSPAEIAGWILQLDSPKAVYESGVTGFHLARELREMGVDCIVGAVSKMHKPASDRRKKNDRNDAEFLARQLMAHNIVEVFVPDVETEGARNLSRALEDIRDDLTRAKHRLTHLLIRWGYIWNEFNEDGKRRGSWTHAHWEWIRGIELPDAAARESLDYYISEVRHIESQKKAIEKRVAQCASRPRWRDRVEALRCMKGIETVTAFALTVEAGVFSRFDSARAFASWLGLVPSEHSSGERASRGGITKAGNSHLRKLLVEASWHYTRATKERKRSLYDESVPASISNHAAVGVKRLVERRRHLSCELRKRPVVANVATARELACWIWALGRMSEGALA

SEQ ID NO: 189192 - protein, 364 aa, unidentified
MKKNSTTTQRGKRAPAGTEATVIGMDLGDKTSRYCELDRDGKEREEGSVATTKQALTQRFAGKKRCRIALEVGTHSPWVSRLLKNLGHEVIVANARQVRLIAHSSRKNDRLDARTLARLARADPRLLSPIQHRGEQAQQHLAMIRVRAALVEARTKLVNAARGFSKAQGERLPACDAAAIGVKEMAELPAGLKAVLRPLLEQVESLSGQIKKADVELEQIARTQYPETALLRQVKGVGVLIALTLVLTLDDPERFQKSRDAGCYVGLRPRQRESGASQPQLRITKEGDRYLRTLLVQGAHHILGWRGPDTDLRRWGLKLASRGGKNGKKRAIVAVARKLAVLLHHLWVTGEVYEPLRNSGKMRW

SEQ ID NO: 189193 - protein, 412 aa, unidentified
MAVFCGIDWAEEHHDVALVDGEGTLVAKRRISDDAAGFTALVQLLADAGDTEDQRIPVAIETNRGLLVACLRATGRQVFTINPMAVSRYRDRYSVSRKKSDAGDALVLANILRTDLAAHRPLPSDSPLAQAIAVLARAQQDAVWDRTTAHNKLRSVLREYYPAILDAFADKRGGLLRSEARTLLAAAPTPHAAAELSTAKLRAVLTRAGLQRNIDPEAHRLREILQREYLHHPQLVEEAFGRQALALLHQLDAACASAEDLAAAAAEQFDRHPDAEIITSQPGLGSLTGARILAEIGDDRTRFTDARSLKAYAGSAPVTRASGKAITVLHRRVKNQRLAATGYIWAFAALTASPGARAHYDRRKATGDRHIAAQRNLFNRLIGILHHCLQTRQRYDETTAFAATAIPTAAVA

SEQ ID NO: 189194 - protein, 455 aa, unidentified
MPGKKTRGKSSGQLSTINPDAAGIDIGATFHVVAVPRDRDDRPVRTFRTFSGDLYQLADWLAQIGIKTVAMESTGVYWIPVFEILEARGFSVLLVNARHVKHVPGRKTDVNDAQWLQQLHQYGLLRGSFRPRDGVVRLRAYLRHRERLVEYAAAHIQHMQKALMQMNVQLHHVVTDITGVTGMRIIRAIVAGNHTPDQLAAFRDVRCSASIETIREALTGTYRPEHLFALRHAVELYDVHYAKVAECDKAIEAVLQQLNADRPAPDGALPAVRHAKGRNEPQFEVRSALYTLLGADLSQIHGLGPYTVLRLVAECGDDMRKFPTAKNFTSWLSVAPGNKITGGRLLSSKTRRSTNRAAVLLRIAAVNIGRTQTALGAFYRRLAARIGKAKAVTATARKLAILFYNAMRFGMKYVDPGVAYYEERYRQRVIHNLHRRAQDLGFSLVPNSAGPTGVS

SEQ ID NO: 189195 - protein, 404 aa, unidentified
MLTSLSVERFVALDVHKHYVVAGAVTAGQQVVLAPRRVDLDDLPDWSQRHLRPTDAVVLEATTNAWHLCDQLCPLVASVTVAHPLLVKLITAARVKTDARDTLHLARLLAAGLIPAVWIPPQDVRELRALVAHHTRLIRQRTQAKNRLRSTLHRYTIVPPEGGLFAPAQRSWWEALALSAVEKLRIRQDLSILTSRELLIAEVEEELTRLSGTEPWLSQVVFLLQVPGIGVINALVLLAAIGDITRFPTAKQLVGYAGLGASVHASGETYQTGHITRQGRKEMRAALVESAWMAVEHHPSWKAQFERLSARIGKKKAIVAIARKLLVVVWHVLSKQEADRHADQAMVTRTIMEWARNKSTATRQDLTRVEFVRRELDRLGIGAEMDSFVFDGRVYHLPASASAR

SEQ ID NO: 189196 - protein, 423 aa, unidentified
MKLTYPICCGVDVHKTFLVATIITSEYVMPHYRQKRFSTFYSGLVAFKKWLLENNCKDVCMESTGKYWVPVWNVLEDSVHVVIANPKWVSAVKGNKDDKKDSKWIGDLFRMGLFPSSYIPSKDIRILREFTRYRSKLVSMRSSEKNRFQNAFTVCNLTLDAVVSDMFGKSATDIENYLLDTDIVDPAQCVSLLRGSLKKNSSDVVEAVSGFNMTPEQKERVRIVQGHFADIDRRIAQLDGVIGNLVAVYEGQISLLCTIPGVDRRIAITILSEIGTDMTKFGSSKRLCNWAGLTPASNQSAGKKKSVRISRAGVYLKPALVEAAHAAVKATEKHPYYRIKFERLMKRRGKKRAIIAIARMILTAIYAMLSTGEVFNPCDLDKFDMPEELKKKRTLASAKEAVRLLVSLGVVPAGSISLDALAG

SEQ ID NO: 189197 - protein, 497 aa, unidentified
MKAKARKAKAKHSNSSKRGAKIITPRGGVEGMEIVNPHAGGIDCGAQEHYVAVPPQSVEPGEPVIRCFSAFTEGLDALVEWLKACGVTTVAIESTGVYWIALCQKLEAAGIEVFLVNAQHVRHVPGRKTDVKDCQWLQRLHSFGLLSASFRPEDMICRLRSLQRHRLNLVWTAGAEIQHMQKALQQMNLHLHHVVSDITGLSGLRIIEAILAGQRDAVQLTKLRDYRVNKSTVAQMQAALVGDYRPEHLFVLGQSLQAYRFYQARIQECDAEIERHLQQLAQRFESSSALGAKLSPPEALNEADAPSQNPQPAKRKVKRKPQANEPKIDLADYLRRICGVDLTQVIGLNVLSVLLIVSEIGVDMSKWRSAKAFSAWLGLCPRNKISGRKVLDTRTCKVISRVATTLRLAAQSVGRTNTALGIFYRRKKAHLGPAKATTATARKLACLVYHLLKYKEQYREPDPATYQLKVQKTILAKIQKQAAALGYKLLPTALVPA

SEQ ID NO: 189198 - protein, 339 aa, unidentified
MEIMRIGLDLAKNVFEVYGVDEQEQPALRKTLKRSQVLKFFAQLNPCIVGIESCGSAHHWARKLRSFGHEVRMMAPQFVAPYRKSDKNDHNDAEAICEAAGRPNMRFVPVKTEEQQAVLMVHRVRSLMVGERTSLVNQIRGLLSEFGIVLPQGRCHVRSQLPSILEDAENDLPEVAREVFANQYERLCELDSKIDEYDRKIEALAKADEDAKRLMALEGIGPITATAIIASVGDITTFKNGRQFAAWLGLVPRQWSTGGRARHGRITKRGDVYLRTLLIHGARAVMRYLMNKDDRKSEWVKAVRERRGFNKAAVALAAKHARILWAMLAKGSEYLPARV

SEQ ID NO: 189199 - protein, 365 aa, unidentified
MKKSSKKQQGSAVVESKPEKVVGLDLGDRSSHYCILTSSGEAMEEGRIQTTASSMEKHFGSEGRMRIAVEAGTHSPWVSRLLKGYGHQVIVANPRKIPTLTKSESKNDRNDARQLARMAAFDPELLHPIEHRSTERQQDLNLIHTRSVLVRARTMLINSMRGLVKSAGGRLPACSSEAFPEKVPAAVPAALKAACTPVLKQIAQMNQTIAAMDKQIDGLEKKYPEIALLRTAPGVGPMVAACYVLTLGKPETMETNRQAGAYLGLRPRQQQSGDSNPQCGITKTGNTYLRSLLVQSAQYILGRFGPDSELRRWGLKLAAGGGKRGKKRALVAVARKLAVILLSMWRHRKKFETFPQSANQLARAV

SEQ ID NO: 189200 - protein, 408 aa, unidentified
MKTLHRRCAGLDVHSDTVVACARLTARTKASHEVRRFSTATRDLLELADWLAARGITHVAMEATGIYWKPIWHILEGRFELVLANAAHIRNVPGRKNDVNDAVWISDLLAHGLIRASFVPPGRIQDVRDLTRTRTQLAREVAQHIQRIQKALESSNIKLTSVISNIVGTSGRRILKAMIAGETNATKLAELGSTRLKCPRTELVAALDGRVTAHHRFLIAHHLGLIEELERHIADFDARIEELLAPFRDTVARLITIPGVSRVSAEVILAEIGSDMTPFPTAGHLLSWAGLVPRLDESAGKRRSTRVRKGAPWLKPVLVQCAWGAARTKGTYYQAQFFRLKSRRGPKKAAIAVAASLLMATYHMLKDGTFHQDLGADFLVKRDKARIAARLAKRIKDLGYDVSFAAAD

SEQ ID NO: 189201 - protein, 391 aa, unidentified
MIYVGIDVAKDKHDCIIKNSVGEVVFKTFTIKNNLDGFNDLYQRIESVMEDVSKVKVGLEATGHYSYNLLGYLIDKGLPTFVINPLHTNLYRKSLSLRQTKTDKVDASTIASMLMSDVNLKSYSDTSYHNDELKSLTRYRFDKVSERAKLKTSISRLVCILFPELEKLVPTLHMNSVYSLLYEFPGAKQVASAHLTRLSNLLAEASKGHYDKDVAIKFRDAARASIGSNMPAKSLELKHTIKLIRELDSEIDEIEGEINAIMDTINSPILSIPGISYRMGAMIIAEIGDFDRFDSADKILAYAGLSPSTYQSGQLDNCHPRMEKRGSRYLRYALFNATIFVCHWDPTFNAYLAKKRAEGKHYYVAVSHATKKLVRLIYQLEKSNQSYNKAI

SEQ ID NO: 189202 - protein, 340 aa, unidentified
MSSVTCFVGLDYHQDSVQVCVLDVQGRMLLNRACDNNWQRIVETVRPLGVVKRAAIEACCGAADLGEERVARAGWHLELAHPQYVAQLKKSPDKTDFSDGRLLADLTRVGYLPRVWLPPAYDRDLRQLVNHRQALVNQRRAVKLRIGAALRQHRAKPPAKISRWTKAWIAWAPTAPQLSEPVRWIIRELLEELEHLNRKVLAADLRLRQATADDAMVQKLMEQPGIGEVTAWVMRAYIGPFDRFNSGRQLSRYCGLSPLNVSSGTRQADAGLVKGYNRTLRATIIQAAQRLKRTEPRWIKLSEQMRRRGKPACVIVAAVANRWMRGLWHRMLPEKNLMLN

SEQ ID NO: 189203 - protein, 413 aa, unidentified
MANDNVTWFAGIDWGSEQHQACLLDAAGKVVGERAFPHGGAGLAALCDWLVSAAGDPRSVAVAIEVPHGPVVDTLLERGFAVHAINPKQLDRLRDRFSVAGAKDDRRDARVAAAGLRTDPQLFRAVQAGDPVIIELREWSRLAEELQQERVRLGNRIRQQLWRYYPQLLDLTDDVAAEWVLALWTMAPTPAKAARLREATLARLLKQHRIRRIDAVAALGILRQPAIQVAAGVTEAAVLHLRSLIARLRLANHEFHQAERKLDELCAALSEDASTAEDSGPGDVAILQSLPGVGRSTLATLLTEAGGPLARRDYAALRTLSGVAPVTKRSGKSCVVVMRRAAQARLRQAVFHWARVAVQHDAKSRSRYDALRARGHTYGRALRGVADRLLGVACVLLQRQMLFDPDHGTPAAP

SEQ ID NO: 189204 - protein, 339 aa, unidentified
MISNQGATPLYVGVDVHERESQLAVFEQDGSLVREKRIPTSSLESFVSSLPGEKHVAIESVGFIYPIYDRLSKIPSCHVAVADPNNVRLISKRRLKHDRADARALGELLRTNFLPTSYIPDEETREKKLLINDRVRYGLKRGELKGSIKWLLKRRGVEKIERVFSLDGRRRLRELGLREVDIRLDELELDESIIERLDAQIASTVPADPNARLLDTLPGVAPYTALFLSSAIGDINRFQDSKHLCAYLGLVPSLYQSGDVLMTGHITKLGNKWLRRNVVECARVAVRKDTHLRESYQRLRRKRGEKKALIGVARKLVAYAFWMLKRNQTYEELSPWFKH

SEQ ID NO: 189205 - protein, 342 aa, unidentified
MQISTIGLDIARNVFQVHGIDAAEKVVVRKRLRRRQVLEFFKALPRCLIGMEACATAHYWARELTKLGHEVRLMPAKDVKAYVKRNKNDAADAEAICEAVRRPTMRFVRIKSAEQQGQLMQHRTRDVLIRQRTQIINALRAHLAELGLVAAQGNAGVNELRAIVTDEQDTRLPIDARASVIVLAAQLEALESVIGAIEKRIKMQHRSSEASQRVEAIPGIGVIGASAIVATVADPTIFRSGRDFAAWIGLVPRQDSTGGKQKLGPISKQGDRYLRRILVVGAIAVLRRAQENPGKYPWLTQLLARRPFKVVAVALANKMARMAWALLAHGGTYRAPELAETA

SEQ ID NO: 189206 - protein, 310 aa, unidentified
MDMKAVGIDVSKDRLDVHVWPDGIAFAVARDGKGLAELIERLTPLTPDLVVVEATGGFETVVAAALAGAGLPLVVANPAQIRHFAQAAGTRAKTDPIDAAMIARFGHDMKPDVRPLPDEATQLLADLVARRRQIIEMIVAERNRERRATVRRIKKSIARLVRALEKELAEIDAEIDAGVRGSPAWRDKEDLLASVPGVGPVVARTLIAELPELGTLDKKKIASLAGLAPYTRQSGQWKGKSMIGGGRKSVRCALFLAALVASRHNPVLKAFRDRLRAAGKPKMVALIAVARKLLTILNAILRDQKPWQPA

SEQ ID NO: 189207 - protein, 337 aa, unidentified
MKYCGIDLHSNNCVVVVSDEQDRIVFNKRLPNDLGQIRAVLEPHRGELAGVVIESTYNWYWLVDGLMDGGYRVHLAHSSAIKKYEGLKYSGDFADAGYLAHLLRLGLLAEGYIYPREQRGARDLARKRMQLVRYRTAQILSIENILARQTGARMSGEAVKRLTEEQVKALGFVPDVALAVEANRAVSHALGQQIEALEKRLKERVSLRGEFKLLKTTPGIGEILATTIMLEMGTPERFAKVGNFSSYCRCVDSLRESNDKKKGQGNAKNGNKYLAWAFVEAANFARRYCPQAKIFYERKKRKTNGILATKALAHKLARACYHMLREHKPFDVSRCFG

SEQ ID NO: 189208 - protein, 400 aa, unidentified
MLSIGIDVSKGKSTVCGMKPGGEIVYTPFEIQHTREGMSELVSLLRSSGEEVRAVLESTGSYHCPVVAALLENGIFVSVVNSLRMKRFCSQSIRKVKTDRIDAMQIALYGLAYWQELQPARLPEDTYRELQLLARQYYQMTSMLIKAKVDFNAICDQVLPGMQELMSDHAGRHKLSDFVLRYRHTTHILEMGETRFRKDYCKWAEKKGYRNCERMAALIFATAQNGIPVLPNAPSTQIVITEAIRVLHTVEASRDAILTQMQALAKTLPEYSLVREMPCIGDTLAPRLIAEIGDVRRFHSKRALIAYAGIDAPPYQSGKFCANNRHISKRGNRYLRKTGYEVMQSYVMHKPANDPIFTFIEKKRGEGKSGKLAMVAGLNKFLRIYYGKVTELYRSLPAIE

SEQ ID NO: 189209 - protein, 339 aa, unidentified
MKLYAAIDLHSNNSVLVILDERDRVIYERRLPNELPAILNELKPHRKKVQGIAVESTYNWYWLVDGLMDAGYSVKLVNTAAVKKYDGMKYSGDEHDARHLAHLLRLGILPTGYIYPKKERAVRDLLRKRAQLVRCRTAQILSIQNLVTRNSGHGIAANDIRDLDEGALKELCGGNQMRALAVQGNLTVLRCLDEQIHALELVALKQAKLKPQFEKLLSVDGIGNILGMTIMYEAGDMERFAKVGQFASYARCVSSSRWSNGKKKGEGNRKNGNKYLSWAFMEAANFAIRYNERIRTFYQRKQSKTHRIVALKTVAHKLARACYHVLTDQVEFDLTRAFA

SEQ ID NO: 189210 - protein, 358 aa, unidentified
MTPTMIDTQVVVLGVDTHQRTHHAAIVAADGRPLSDREFPTTTAGYTEMWQWACGFGRIEHAAVESSASYGAGLTRMLTDHGVTVIEVNTPDLPRRYAHGKTDQLDAYAAAMAVITGRATAVAKDTRGAVESIRMLTLARTSAVEEATRIGNQIRDLCTTAPVEFADQARQARTIAARAAFIAGLPVPADTAELPGPAAAFVRAARSLLERHRLAQREVGSLTRELERLLATVVPTLLSRPQIGPVTAARLVITAGDNVERMRTEATFAKLVGAAPLPASSGKTSRHPLNRGGDRQANSALHMIAVGRMKSHAPTRAYVERRSAEHKTKKDIIRCLKRYIAREVFRDLTTDLGTLDKL

SEQ ID NO: 189211 - protein, 343 aa, unidentified
MDIAVLGIDLGKNVCSVVGLDASGAVVMRRKVRRETLIAVVAKLPPCVVGMEACCGSHHLGRLFAAHGHDVRLMSPEYVRPYVKAQKNDDRDAEGIAEAATRPTMRFVGLKSQDQLDVQTLHRSRDRLVGERTALINQLRSILLERGLVAPQGKRKLEQFLAVLMNEQGGAGLSPRMVALVADARTQWAGLDRRIAAFDAEFVCWAKENEDARRLTTIPGIGAIVATALVAAIGRAEVFDRGRDLSAWLGVVPRQFTTGGKPKLLGISKRGNTYLRKQLIHGARAALPHVAERDTPLGRWAKALMERAHHNVAVVAFANKLARIAWAVLRSGERFAVTGTMAA

SEQ ID NO: 189212 - protein, 315 aa, unidentified
MVNVPCFIGIDVAKAQLDIAIRPSGERWAVPNDASGVTMLVDRVQALQPTLIVLEATGGLERAATVALATAGLPVVVVNPRQARDFARATGQLAKTDALDARALAHFADVIRPTPRPLPDAQTQELRALLGRRQQLIGMRTAEQNRLAGTSERLTQDIKAHIAWLNTRIATLDDALETMLRASPLWRENDDLLQSVPGIGPVCARTFLLELPELGTLTRQQIAALVGVAPLNCDSGPLRGRRTIWGGRAHVRTVLYMGTLVATRFNPQIKAFYQRLLAAGKIKKVALTACMHKLLTMLNAMLKHRTSWQAQEVQN

SEQ ID NO: 189213 - protein, 388 aa, unidentified
MHVYVGVDIAKELHYAAIMDSDGVVSKPFSFENNDKGFNLLLSHLAPYNKESILIGYESTAHYQENLAYFLKSLGYRTAEINPLQTAALRKANIRNTKTDSVDARLICLALMNHHIQGDQRDSVRLDDLYQLCKMRMDTMKKRTTCKIQLVATMDRIFPELASFFDNNLHTNTIYRLIDSFPLPSQIKKTRIDILTKLLHKASRGHFKKEKAQKLKDLADISVGIPSDIFAFQAQQLVHQIEFYTDQIQTIEERINTNPDVMSSPLMTIPGIGTFCVACILSAIKNINDFGAPCKILAYAGLDPVIRQSGKFNASHTRMSKRGNSLLRYALVWSAGNVVKNNHTFAEYYRHKTEDQGKSHYQALGHCAKKLVKSIYHMLKYNESFNLD

SEQ ID NO: 189214 - protein, 426 aa, unidentified
MAYRIAGIDVHKKMVAVVVADVDVAGTWQFDRRQLGTSPAQLRGLADWLVEREVVEVVMESTAQYWRPVWEALERSWQPRMQQTDTAPRAGTLHLAQAQSNEGPRGRKRDVPDAERLVKRLVADELTLSFVPDVTQRLWRTVARRKYQSTCNRVQLQNRLECLLEEMHIKLSSLVADLIGPSARRMLRAIANGDTDPGAVVALGSRRLHATPDQLRDALGACTDLHPVYRRLLALTLDELEVIERHIHELDEELAQLLRGHQDAVERLAAVPGLGVDSAQQIITEVGPTAATFPAAKRLASWVGACPGHDESAGINHSHRAPKGNRQMRRLLNQAANAAVKAKGSIFQLVYRRLVVRLGHAQAIGAIAHRLCRLIWKILHDGVTYEERGPAVTKHRAQRRAAKMIRELRSLGYRVERDLPPASALA

SEQ ID NO: 189215 - protein, 346 aa, unidentified
MSYSTTVGVDLAKNVIQISVVSSRGKELSNRSLTRKKFAEFLGKQSQSLVAFEACASAHYWARAAKRHGHSARIIPAKAVAPFRQGHKTDSNDALAVAEAARRPNIKDAPMKTVEQQGLQSIQRSRYLLIQECIALSNHMRGILLEFGVTIPQGFASLLRKLPEVLEDGDNDLPDLYRPTLHRLYGRMLELRIDIEAMTKEIDGLVKQHPVCSKLTALEGVGPIGALSLYAALGSGAAFTRSREFAAYLGLTPRQHSSGGKTNIVGLSKKIGNRRLRSILIQGALAYVYRMKEPRTSKDRWLKDLIERAGPRRAAVALANKNVRTAWALVTQGTEYQRREQLEMAA

SEQ ID NO: 189216 - protein, 354 aa, unidentified
MTNTAQTLPSYAGESVYVGIDVHKHTYSVVARVNHTEVKRWTMTAEPKKLGEQLHKFFAGATIYSAYEAGFSGFGLHRELVRQGIHNRVVHAAAIEVAANHRVKTDRRDAHKLSEQLEAGRLRGIRIPSEAEEQRRLLSRTRAQLVRQRTQVQNQIRMKAHQFGLIAAGDRRQMTHSFVAELLAACPADAFQQVVKAHQAIWHALEHEIAHLEDQLKTQAAQDPYEATYRSAPGVGFISARILSNELGDCSQFANERQLFSYTGLTPSEDSTGEHVRRGPITKQGNTHLRSILIEIAWRAIGDDPTLRAFYERIKQRQGSKRAIVAVARKLVGRIRAAFRHQELYRIEPLESVA

SEQ ID NO: 189217 - protein, 406 aa, unidentified
MQVVHERCCGLDVHKKTVVACVLTKEGREVRTFGTMTRELLRLADWLGEERVTHVAMESTGVYWKPVYNLLEDQGIELMVVNAQHIKTVPGRKTDVKDSEWIADLLRHGLLRASFIPNRGQRELRELVRYRRTLINERADVVRRIQTVLEGANIKLGDVASDVMGVSGRAMLWALAEGREDPAELAQLARTSLRRKSAELQLALEGSVSTHQRAMLRRQLRHVEFLEQEIQELNVEIEERMRPFDAGIELIDGIWGLGRRSAEAILAETGIDMSRWPSDRHLTSWAKICPGNNESAGKRRSGWTGNGNPWLRTSLVEAAWGVSRKPDSYFGALYRRLATRRGKKRAIVAVARALLVAIYHMLKDGTQYQDLGPEHFDCIDREAVVRRSVRRLERLGYQVTVERLSA

SEQ ID NO: 189218 - protein, 341 aa, unidentified
MSNTNTYIGVDLHKKSCYITVMDTLGKVRKQTEISTDTDKVRKFFNRYQTARVAVESTMNWIPFYENLESLGCSVVLSNPLMTKAIAAARIKNDKVDSKVLADLLRTNLLPTAYIQPREIRDLKELVRQRVTYVQLRTMIKNKIHSVLFKNNLKHNFTNLYGKAGRIWLKSLETRDIYRAELDRYLTTLDLLDGQITELSEAIITVAKTDYDCKLLMTIPGISYFSALVIKSEIGDISRFPNASKLCAYAGLIPSTYASADKVRFGRITKRGSKWLRKSLIDAITSGSRHPSRLCFFYRKLKKNKGTGKAKVATARKLCAIIFAILTNKQPFREFTPVKQR

SEQ ID NO: 189219 - protein, 344 aa, unidentified
MNSTTIAVDVAKSVFEVAVSSHPGHVRDRHRLSREGFARLLGEQPPATVLMEACGSAHHWARHAQRHGHRVVLLPPHVVRPYVHGNKTDRTDAKGLREAFRNDEVRPVPVKSETQQALAALHRLRSTWQATRTARLNTVRGLLRESGVVIPVGARQVVPHVRALLEDADASVPGLLRPALAEAIQEIGELEARLRAVDHQLEAAAAASLVVGHLRTIPGIGVLTATALVATVGDVQRFPSARHFASYLGLTPREHSSGARRHLGAISKRGDTYLRMLLIHGARAVLWHAKRPRALPLDRLRTWALELERLRGHNKAAVALANKLARIAWAVWKHGTSFTAAPAA

SEQ ID NO: 189220 - protein, 347 aa, unidentified
MRFYTKQHQFYCGIDLHARSMYVCILSQDGEVVLHRNMPASPDTLLKAIAPYRDNIVIAVACILTWYWLADLGAQEGLPFVLGHALYRKAIHGGKAKNDKIDSQKIAVLLRGGMLPQAYGYPAEMRATRDLLRRRLHLTRQRAERLAHIQHTNRQYNLPEIGKKLAYKANRDGVVERFSEPAVQKSVEVDLALLGSYDPLLSDVEWTSVQTAKQHDAHTLYRRPSVPGIGKMLRVVLRYEIHAIRRFPRGQAFVAYCRLVTCAQESAGKRDGTSGAKLGNASLTWAFSEAAVLFLRHNPVGQKYLTRLEKKHGQGQAFTVLAHKLARAVYDILRRDPVCEMDPLLRG

SEQ ID NO: 189221 - protein, 341 aa, unidentified
MKAPEYFIGIDVASLSFTAAVGKTPWQLVIRPAEFANDFDSFPKFLHWLQQHNLQPDNAVLCMEATGVYGEALAYFVHANGYQIAVEPPLKVKRAFDTSGHKSDAVDSRQIAEYACRYFDELAFWQPKADILEQIKVLLTTREQFSAQLTAHRNALKTLQRKVVVTPLAEHLHQDNITQLKNHIKSIEEEIQRLIDQDPAYRQMVSLLMSVPGVGLLLAAQMLVIMENSPEPVSAKTLAAYIGICPYEHLSGTSVFKRSSSRHYGPAAVRKLLYLAAMSVRTHQAPFREYFLRKVAEGKSKRLVLNNIANKLLKIMCAVLRTQTPYIPNYRSVNPMLLKTT

SEQ ID NO: 189222 - protein, 315 aa, unidentified
MNYTTVYVGMDVHKETFTLCCYTNEQEKAEYPQKVNGHYSKVLNYINAMRKHCGDDAVFVCGYEAGCLGFTLYHQLTEHNVDCVILAPTTMPQPQGKKKVKTDKRDAMLIARCLAHKDYSPVHIPTDIDEQVKEFIRMRDDHKLALKKVKQQIIAFCLRHDYRYTEGKSNWTEKHLQWLRSLEPDGMYAEILEEYLLTYEYLTSKLEMLESRIKELAELDEYKESVQKLRCFIGIDTITALSLVVEVGDFNRFATAGHFMSYIGLTPGEDSSGQDQNLLGITKAGNRHLRKLLSESSQCFSRGKVGAKSVALKKR

SEQ ID NO: 189223 - protein, 350 aa, unidentified
MDRYIGLDAHSSSCTVGVVGPSGKRLQTQVLETNAKVLINFLLTIPGNRHLCLEEGTHSNWLYEVLSPHVQEIVVVRVRQNRGLKSDKIDAFALAEMLRVGTVKMRVYKKRGAFGPLGELSRAHSVLVTDSVRVQNRIKSLFRSRGVPCSRRQVYSPGKREEWLRKLPTKSRPRAETLYHEYDALEALRKRAEKAMLGEARRHAIYGVLKTAPGLGTIRVAQLLPIVVTPYRFANKRSFWAYCGLAIVMRSSSDWVRTPDGNWTKASVQQTRGLNRDSNHTLKCIFKGAATTVIDQAKDEPLYQHYQKLLDGGTKPNLAKLTIARQIASIVMSMWRSEEVYNPKKLTETT

SEQ ID NO: 189224 - protein, 356 aa, unidentified
MIFRSCLHVPGIIVGVDTHKDEHVAVAVDKLGVRIGQRNLPTTNTGYVGLERWASGLGEIDAFGVEGTGSYGAGLARFLRDQGHKVIEVNRPDRSTRRRLGKSDPTDAEMAARSVLAGVARDRPKSGVDKVEMIRMLKSTKDSAMKGRTQAINQMKALIVTAPVELRAVLRGLITTQLVIRCARWRHGQLGTPTAAAKYALRSLARRYIQLTQEIEALDAELARLTAAFAPALMESFGVGPDTAAALLVTAGSNPERLKSEAAFAALCGVSPVPASSGKTNRHRLNRGGDRQANAALYRIVIVRLRYHESTRTYFQRRMGEGKTKTEIIRCLKRYVAREVFGILHDIGKRRAFQNA

SEQ ID NO: 189225 - protein, 415 aa, unidentified
MEQVYERCAALDVHKAQVTVCVHVPDQAGERAELRAEFATMTGDLLGLRDWLKGLGVTHVAMEATGVYWKPVYYLLEDDFELLLVNAQHVKNVPGRKTDVQDAQWLCQLLEHGLLKSSFVPPQPQRELRDLTRYRKSLVWERGREANRLQKVLEDANIKLASVASRPLGASGKAMLRELCEGNNDPVALADLAKGKLRAKLPLLRQALEGRFRGHHALLVSHLLAHIEYLDQTIGELSEEIEERMRPFARERELLCTIPGVAERTAEVILAELGPDMSRFATHRHAASWAAVCPGHDESAGKRRSGKTRKGDSWLRVALIEAANSAAARTKDTYLRAQYLRIRRRRGHKKAIVAVAHSILVSAYHVLQEGVSYQELGGDYFLTREDRQRMTRRLVRQLERLGQSVTLEPMAAEAG

SEQ ID NO: 189226 - protein, 385 aa, unidentified
MTQQVLKYSVGCDISKDTFNTCLFEVYADMTSKVKASHKFKNEPKGFSEFDLWVNKHKKHEVPISFTMEATGVYYENLAWYLYEQECEVYVLLPYKTKHYLKSLGIKSKNDKIDAEGLSRMGVHQKHKPWKPYSKSIYTLRSLTRQHESVNKLKTQLNNQLHANEYSAFKSAIVRKQLKTTLRLLEKQLEELGAEIAGMIQNDEKLQRKYNHFKPVKGIGKLSWATVIAETNGFETFENQRQLVSYSGYDIVENQSGNHVGKTRISKKGNSRIRRILYMPSLVSVKLKEPVLYNLYQRVQTRTGIKMKGYVAVQKKLLVLMYHVWRNDKPFDRNYTKTFGEEESKSLFPLGSEGTTKKSSPDKRATQDEHSYELSPEVLFPLIQI

SEQ ID NO: 189227 - protein, 337 aa, unidentified
MNYSGIDLHSNNSVITVTDETDRVVAEKRLPNDLAKIIGFLLPWREGLAGVVVESTYNWYWLVDGLQAAGFVVHLANTGAIKKYDGLKHSGDEADARQLAHLLRLGILPTGTILPPAHRAIRDLARKRMQLVRSRTSHILAIENIMARQQAVKITSNVIKRMTAGDVDRMGLPADVGLAVQSNLAVITTLSAQIDLLEKRLQERVGERPDYVLLASVPGIGRILATIILLETGPIDRFAAVGNFASYARCVDSQRLSNGKKKGEGNTRNGNKYLAWAFVEAANFALRFCPEAKRFYERKKARTNTVVAIKALAHKLARACFHILKERKPFDVMRCFA

SEQ ID NO: 189228 - protein, 345 aa, unidentified
MKHYAGLDVSVKETSVCIVDEGGRICREMKVASHPDDLAEALKNPAWNLARIGLEAGPLSQWLFSGLAEAGLPAICIETRHAKAFLKAQVNKTDRNDARGIAQMMRVNLFRPVHVKTLMSQKHRALLTARKLLQEKAIAIENDIRGLLRNFGLKVGVVGAGKFADRIRDLSGDIPELRDIMEALLAARQKLREQFTVLHERLLSIVKGDTVCRRLMTVPGVGPVVALAFNATVDIPARFKNSKAVGPTLGLTPRLHQSGEDNRVGRVSLCGDAMMRTLLYEAAQVLLTVVKKWSWLKAWAMNVAKRRGRQRATVALARRLVVIMHRMWSDGSEFRWAREGAAAVI

SEQ ID NO: 189229 - protein, 323 aa, unidentified
MNKFSNISNDQIFIGIDVAKDSVAVFVDSTRQASVCLNQTKDLTKLAKQFKQLNPTLIVLEATGGYETLAAVVFAEFELPFAIVYPKRVRQFALGLGSLAKTDAIDAELLAYYGRVANIEPQPLASDELRGLQAFTTRRTQLIEMRLAEENRLETAHPKMRKNIKKHLAWLIEQIKDLETEIDNRLKADETLQQTNQLLQSVPGVGQVLSSTLLTELPELGVLSDKKISALVGVAPFPRESGKWTGKRFCQGGRNSVRRVLYMATLSAARFNPVIKQFYDNLCERGKIKKVAMIACARKLLTILNAMVRNNSHWQPKLMPISA

SEQ ID NO: 189230 - protein, 320 aa, unidentified
MANLEKKVIGVDVSSNILVISFLDDEKEQIITISNNKVHIEKCLKKWDTRQFKIVVEATGSYSSKILYYSYSMGFEVYQVSGLSIKKFSEVKNHISKTDQQDARLIRNFGETMTMNPYEPKKENIEFLEQELNLWQDLEQEKARYSLKLKSLSQKPIVNKSVIKHYEAIIKRINKDIKDLEKRLPHLEDKDLKENKDLLSSISGIGEKTALLLLVATNNFKNFKHSKALCKYFGVVPKMYHSGNKKISIGKCRTSKGFVRSILYVCSWSAMRFNTQCKALYERILEKKKCKKVALIAVCNKLLRQAFGILKNKIQYQHNY

SEQ ID NO: 189231 - protein, 354 aa, unidentified
MLIIGCDYHPGFQQIAFVDTETGELQARRLQHCEEAEKFYRDLAAQGMKVRVGMEASGHARWFERLLAELNIELWMGDAAEIHRKRKGKQKTDRQDAQHILRLLLKDDFPQIWVPSWENRDLRQLLWHRHRMVQTRTRLMNQLQAVALNEGLRRKKGLWRETGRKQLESFRLAPWASRRRGDLLELLDRLNPTIAELSAAIEGEVEKCPEAQRLRTHPGVGSLTALAFVLIVGEAERFQCGKQIASYLGLVPLEDSSGNRRRLGHITKQGNSLLRFLLVEAAQVTARSLPEWRSQYVHLTMRRGRKIAKVAMARKLAVRLYWMMRKEWDYEQVKKFGSHAGQPGNRYGVKSNIE

SEQ ID NO: 189232 - protein, 362 aa, unidentified
MVRHIFVGIDLGDKNSVARVAVDREKSERFGFINTRSGRQRLFGEVEKRAEKAGGAEIVMAYEASACGFVLRDEAAARKIRCEVLAPTKMEKSVDQKKHKNDDRDADDVVERLRGHFLAGNRLPVIWVPSVQLRDDRELTRLRIDLTEKSTQIKAQIQMLLKRFGVEKPSDVGKGWTQKFRHWLLALCTSGPLGGGTRQTLESLLRQLKFHEEEIERMEKPIYELAREARHKPIVDALTREKGVGVLSAMTFSTEIGYAGRFSRGRKVGKFTGLTPTSHESGEQNDHKGHISRQGPWRLRKMACQSSWVHILHDEDARKFFQKLVERNPKKKKIAIVAVMRRLVVRLWHRMRQAELEMAKAA

SEQ ID NO: 189233 - protein, 335 aa, unidentified
METVYFLGIDISKKKFDAALTQDGSTMHELIVTNSASAIKVAFRALKKEFGFSYDRLVVCIEHTGIYCQHLLDFAVEQGIRVCQEPALQIKQSQGIVRGKSDRIDAKRIAAYAFKNREQLKFWSPQRQVVQKLKALLVVRERLVRAKVQLQTPLIESQEFIEGSICKTMAKCCQKTLKALAEDIDKIEQEIDGLLAFDQNLSEQIKYATSVTGIGKITAANVIVTTGEFKRIAEPKKFACYSGIAPFEHTSGSSIKGRARVSKMANMTIKKLLHLSAMAAIRSDQEIKLFYARKVKEGKNKMSVINAVRNKLISRVFACVKNQRMYEKTYQHALV

SEQ ID NO: 189234 - protein, 310 aa, unidentified
MDVFIGIDVSKDRLDICVRPSGEAFVVTRDDEGLERLVERLRALAPILIALEATGGYETVVASALAAAHLPLAVVNPRQIRDFARSTGKLAKTDRLDAAAIAHFAEAIRPPARPVADAEAQALGELVARRRQVIEMIVAEKNRRRLAGQPRVLKAIDRHVDLLQVELSELDRDIDGAIRKSAAWQADADLLASVPGVGKATLRTLIAELPELGRLDRRKIAALVGVAPINRDSGVQRGRQTIAGGRAPVRTALYMAALVASRSNPVIAAHYQSLRANGKAAKQALTACIRKLLVILNAILRDRKPWSLSA

SEQ ID NO: 189235 - protein, 324 aa, unidentified
MPSENTVYVAVELSSSSWLVAIRLPGAEKSRLHRIESGDSKALLALLADVGQQPSAKLGRALDVACCFEAGRDGFWLLRLLAAHGVAAYVLEPTSVLVNRRARRAKTDRPDAEGMLRVLTAWLGVDRQLCSTVRVPTPQEEDAKRPHREREHLVQERLRIENRIEALLFTQGIRERPSLRSWERDMAEFPTGDGRALSPLLRAELDRLRRRLVLTLELIRELEAKRAAALAAAAEAAAADNAMAQKITALQRIRGIGVNFSAVLVRDVLYRSFANRRQLASYVGVTPTPYQSGGMDRDRSISRGKSACPHNAYPARLAVVALPT

SEQ ID NO: 189236 - protein, 436 aa, unidentified
MAELFVGIDWGSRTHTVCVVDARGEKVLETEVAHRGDAVLAFVDELTKLAKGDLSRVVAAMESPHGVMVEVLLERRVVTYSINPKQLDRFRDRHSNGGAKDDDLDAFVLADSLRTDLKLYRVITLPEPQMMQLSAFCRSYESLTEQVLALANQIRELLVRYYPQMRELGDWHDESWLWDLFEAAPTPSLTAAPTREKPLGLSAQKVGAILKKHNIRRHDPKLVLSGLRSTPLPVAPGVAEAASTQIASLLPVLRAAHQQRSQCSKNMKLLLSAFQKEADSPEKTHHDAALLLSLPGIGAHNGAVMLTEAALALQQRDYQALRRLAGAAPVSKRTGGKTSRPGRQSTAKPNLPRVEQRQACNRRLREATYHWGRVAAQCDPRTRQHYADLRARGHSHGRAIRGVVDRLFKVLLAVLNSGLPYDQERRTAQKIHPLAA

SEQ ID NO: 189237 - protein, 427 aa, unidentified
MKYKQNFKIMQITDTTLVIGVDIAKKIHYARAFDWRGIEVSKTINFKASSAGFTEFKEWAWEVAAKNGKEKVVVGFEPTGHYWYTFAQALQEDGIMAVQVNPYHVKSTKELDDNSPSKSDHKDPKTIAMLVKDGRYQIPYMPKNEYAELRKANNLREEWLKKIWAIKNKVQRWLDTFFPEFLDVFSDWEGKTAVMTLEKLGLPEKIATYSPEEIVSIWREEVKKAVGIKKAQKLIEAAGSSVGVRQGQKMAQYEIQLLLKEYREVRAILDDLEKQLEELVLSIPGAIRFLEVKGIGIKTVAGFLAEVGDIRRFSHPKQIIKLAGLNLKENSSGDHKGETTITKRGRSRLRALLFRAILPMTAKNAEFMALHKYNITRKENPLKKKQSLIALCNKLIRIAFTLITKNVKYDPVKMLGDIHREDSAVAA

SEQ ID NO: 189238 - protein, 345 aa, unidentified
MNYYAGIDVSLKESCVCVLDAGGKVIRETKVASEPEAIIAWFAQLGLAMELIGLEAGPLSQWLFAAMKQADLAVELLETRHVRNALKTMTVKTDRKDARGIAELVRIGWFRPVHCKSISAQETRAILTARKLVDTKLHDVEMSLRGILRGFGLKVDKTTATSFAARIRELVDGHPTLQGLVDALLSIREVLLREFKGFEKRVRTMARHNEQAKLLMSTTGVGAIISLTYAAAIDDPARFESSKVVGAHYGMTPKKYQSGQTDYNGRISKIGDASVRRALWQAAHVILTRSVKDSALKTWGLSVAKRKGMAKAKVALARKLAVVMHRMLVDGKSFDPALPKQAAAA

SEQ ID NO: 189239 - protein, 473 aa, unidentified
MGKGSGNGTTRGDRRRNARRERLRALLPRDGAVIGIDLAEDKQALGVIDHDVRVLARKTVKVKAFRLGEALDWAVAQAKVKGFAAVTVACEPTGPRWLQVQRLCAERGLPLVCIQPLISHIAREQQDYTPHKTDESDCVMIARLAVELHCYIPEELDEAWAHLRHLGRRRAQLITAATASAQRIRDFLSVAWPTVTETCVQPLESKTWLAAVQLVTGRCGADPGKLAAMGPEAFTALVRSAVGSWGGKKAWGTICGRVFAALTDTEGVVAWSRRGLLRRCADELGDLQRTRAQLRAVEADMVMVLGELGLSRLGDIPGLTAVGAAAILAETGDPRRYDSSSSLVKHAGLAPSDNASGAFYGEAHISRRGRPGLRLTVWRAVWPMLRFNPVMAAKYQAMTSAADAAALAAGTQDGARTRPATAAAAAARARRAKARVACAASLLRWIYTIVVHDTGWDPAAASGAAARHQAEAA

SEQ ID NO: 189240 - protein, 342 aa, unidentified
MNNSVISIDLAKNVFQVCLLNPHNKITTNKKVRRSKLLETVLNLDGKRIVMEACYSSNYWGRLFQQHGFHVDLIPPHQVKPFVVGNKNDHNDAIAIAEASMRPKATFVAIKTLAQQDIQSLERIRERLIKTRTALANQLRGLLAEYGVITEKKVSVLRSAIPFILEDAENSLTSISRAFIDNLYQELLSLDERIASTEKLSESLLVNNDDYRRLQTIPGVGPVTGRGIICAINDAKQFKNGRQMSAWVGLTPKQHASGDVSRMGGISKRGNRTLRRQFIHGARAVIRWCEDKDDALSLWLQKLLKTKPTCKVIVALANKLARIAWAVMAKGQEYNAKALIVA

SEQ ID NO: 189241 - protein, 489 aa, unidentified
MRILKVITSPGTHLGQERLGRPFAAMGRVSPLRYLDARRNLIWDGKAGQARIGSCSSDPKIRAPINKHQKECSMKIYPRTRPIQRYIALDIHKEYVFVGGMNVSQEWILPARRIELSKFGEWTRKNLCESDAVVIETTTNVWDIYDVVQPWAGYTVVAHAGGVRQIAEARVKTDKEDVKRLIRLLIADILPEVWVPPQPVRELRGLVSYRQRLVKTGAMIRNRLQSLLHKHNLLLPDGGLTDKAWWEQQTAVSAMEKLQIQQELCLLEQIEKHKAEVDNELGRQSLGDRWGEQALRLMQLPGIGVVIAMTILSAIGDIHRFESADKLVGYSGLGAGVHDSGQEHIDKRITKSGRKELRWVLVEAAWRAVRMSPYWKEQYEKYLQRMRRPSQAIVVVARKLLVAVWHVLSKEETDVHASAEDLAYKMLVLSWGLDETVRQGLTYKQFAKYALMKLGVEDDIIRFVRKNVPRRIASREEVLVRMAELGLNS

SEQ ID NO: 189242 - protein, 461 aa, unidentified
MQKLTKKTALPDVVQMPLVNAYAAGIDIGDTIHAVAIPEGLDDKRVQTFGTMTCDLEAIADWLINTGITSVAMESTGVYWKPLFSLLNKKGFEVYLVNARQVKNVTGRKTDEDDAMWLQKLHSCGLLKSAFLPDAEQEALRSLVRYRHSLVEDCSRFKNRMQKSLELMNIKFHTLFADLFGKTSQLFIEAILAGERNPAAFLPLVANNVKAESAAILKSLEGNWRTEHLFTLRHSYEMTKAYQQHIAATDIAIETQLQQYEASVNEGEVSVAAITDKPLDETKSDRKKKKKQQGAPLFNIRNYLEKIYGTDVLAIYGLNEMSGLEILSETGTDLSKWETAKHFVSWLNLCPNNKISGGKLISSKLLKKKPNTASQAFRTAANAVQRSNHWLGDYFRRMKSKGGNKFACVATANKIATIFYNMVTQKKIFTPLDLKAYQEKQRSAKIAFYERKLNELKAAAA

SEQ ID NO: 189243 - protein, 355 aa, unidentified
MNDIKYIGMDVHQTSTSIVVLNASGRILVSAVVETQGQALVAFIQGLRGTLHLTFEEGIYAAWLYGLLVSHASRLVVCDPRRNALLQAGSKSDPIDAHKLADLLRLNALRPVYHGENGLGTLKELSRSYLVLVQDSTRVMNRIKALYRSRAIPCAGTKVYLPRQRASWVDQLKEAGVHKRAEFLYRHLDLLSLLRREAKLALLAESRKHTVTRLLRAVPGLGPVRIAVLLAMVQTPFRFRNKRLFWAYVGLGLVTRISAEFALVNGQLKRSGKAPALRGLNPNHQRELKEIFKSAATAAVQRPGPWQQFYQQRVQAGRKPELVRLTVARKLAALTLHLWRKGERYDVKQLKPTAV

SEQ ID NO: 189244 - protein, 464 aa, unidentified
MTDKKLWRNRKERKEWARRLQSEDPGLEVVHPHAAGIDVGNGVHYVAVRPDRDPQPVRRFECFTADLHRLADWLRSCGVKTVAMQSTGVYWIPIYEILEERGIQVYLVNARHTKNLPGRKSDVQESQWLLKLHTYGLLNNSFQPPSEIRVLRTYWRQRGEHVHGAATCVQRMQKALTQMNVQLANVISDVSGLTGQTIVRSIVAGEHDPRKLAELSDPRIQASREEVAKSLEGNWRPELLFVLQQEVAMYDTYQQRIAECDQQLQKHLASFADTIPLQPTAEEPQRKKTKPAKNAPRFELRSELQRITGVDLTRIDGIDVMVAQTLVSEVGLDMSRWKTEAHFSSWLGLCPDNRTSGDKVLARGTRRVVNRAATALRMAAVTLMRSRTYLGAQYRRLRTKLGAPKAITAMAHRLARLVYRMLKYGQRYIDKGAEYYEHRYRQQQIEFLRKKAAKLGLQITLAQT

SEQ ID NO: 189245 - protein, 372 aa, unidentified
MKKIITFIGLDVHKSSIEIAIAELGRGGEVRSYGKVDGSLAALDKVVRKLVSLNYKLHFVYEAGPCGYDIYRHLTAQGFDCVVVAPSKIPKQSGDRIKNDRRDAIKLARLHRAGELTPVYVPCTEDEAMRDLTRGREDAKGAEKKSRQRLSAFLLRQGHRFTGRSPWSTAHMRWISDIKMPHPAQQIVLQEYVDTITECANRVERLTDQIQQLLPSWQLFPIAKSLQAMRGVSLIVAATTVAEIGDLKRFENPSELMSYLGLVPSEHSSGEKTKRGSITKTGNGHVRRVLIEGAWAYRFPARVSRELRRRQEGLSPEICAISWKAQLRLCARYRRLMAKGKSKQVVVTAIARELCAFMWAIAHKVETPVMGK

SEQ ID NO: 189246 - protein, 317 aa, unidentified
MANTTESFVGIDVSKDELEICVRPTNKSLTFANTEDGIALMVDHLKTLSPSLIVLEATGGYEMATVNALASKELPVVVINARQIRDFAKSIGRLAKTDRIDAQVIAHFAQAVRPPLRPLKNEQTQRLEALNTRRRQLVKMITAEQNRLHQAPKWTAKTIKSHISWLNKELKKIDKDISNLIKSSPIWREKDAILQSFKGVGPITSSKLLASLPELGTLSSRKISALVGLAPLNRDSGKFRGARGTWGGRRDVRSSLYMAALSASRSNPVIKDFYMRLTQAGKPHKVAITACMRKMLVILNSMIKNMTAWQEPVPEKC

SEQ ID NO: 189247 - protein, 626 aa, unidentified
MAFHPTRRALLRTVPAASLLLSGVKPALAAATVAATAPPDPWQRANDIIARFATPLVFRKEDFDVTAYGAKPAALMEVPGQVASLVDGMLDTPAPGSPDCYPAIAAAIAACHAKGGGRVVIPKGEWYCAGPIVLRSNVHVHLAAGARVHFSANPEHYARHGAHDCGANGKLVLSRWQGNDCLNYSPMVYAIDQQNIALTGEDWTSILNGQGGVPFEPGFAQQPECWWDWKGRGKPVRTRTEVAANPANAPLDRVVPGINGMDAPTRNGIDVPKWMCHTPLTEEGVTMKITTIGIDLAKSVFQIHGVDGNGKPQLKKQIKRSEMATFFSNMPPCLIGMEACGGAHYWARKLVDQGHTVKLMAPQFVKPYVKTNKNDAADAEAICEAVARPTMRFVPIKNVHQQAVLAMHRARQGMVKSRTAQANQIRGLFAEFGLVMPQGIANLYKQVPALLEEAKDELPGMFRELVLRLLTHLKELDRQVGEMEVQIQAWHRSNALSRKLEKIPGIGPLTASALVASIGDAKSFENGRQLAAWLGLVPKQHSSGGKQTLLGISKRGDCYLRTLLIHGARAVIYAAQRKLASTGWLASLLARRDKNVVAVALANKNARIVWALLAHDREFRSDYARA

SEQ ID NO: 189248 - protein, 435 aa, unidentified
MEEVTDEPLYRDRVCGTGIGKAGVPATIRVPPDENPSRRMQETRAFGTARRQVLALADWLRCWQVPAVVMEATGDYWKPVSCRLEAEGFECVLADARQVKNLPGRPKRDTCDSRWLAQDFERGAVRSCFVATPEFRVIWLHTRYRRDLTGERTREKQRVEKLPEPAAIKLSGVLAGLHGVSGRDIMEHLIAGERDPRALAQLARRRARAKIPRLEEALDGAGFFTGHHAALLDAMLRRIDFLDADVDRVSAVIEELLAPWEEQLQQAGSMPGWRRRAAQDVLAEAGPDMTRFPTPGHLASWAGRAPLDHQSGQRKGRGKRKKGNRYIGAVTGETSVSAGRTRTREGSRYRRIARRRGKQKAQAALGSTQLKVLHKLWSNPGMRYEDPGEDYYDRQASIRRKTRYHLTELEDLGWDVDLRPRAEPSPDHQDATPAA

SEQ ID NO: 189249 - protein, 405 aa, unidentified
MPYILALDVSMGHSYSVLYKDDTCLFEDEIEHTQRGFHALLEEIQHLPERPLIVFEATGIYSRPVEKFFQDHHFSYCLLNPLEAKKQMEESTLRSWKTDKSDAHRLAQTHLKNQRQPKEVQSNFYLEMRDLARFYQEIEKKITRLRMDLHNCLQLTFPELEQFFSNRLTPYALILIRLFPHPDFVLASTRTKIKNKLINETRKKISANRAEQKADQIIHYAQCAYPAVEKDSIHCQKTIYYAELLQDLLEQKKALATQMIKKAEGSPCFLLYQTFPGIGALTAALLLGELGDITRFKTHKQLNAFVGIDIRRYHSGKYTGQDRINKRGNPKARKIIFFTIRNMIRQQRAAPNHIVDYYYKLKKQPIPKKDKVATVACMNKLLKCMHAMVRAHTEYDYAYAVSVDH

SEQ ID NO: 189250 - protein, 318 aa, unidentified
MLTYVGVDVAKSTLEVAALSGDGEIERVQFGNYEEAHRALVTWLGTYEPCQVVCEATGSYHQRLVKHLQTCGVRVSVINPAQARDYAKSQRRRNKTDGVDDLLLAQYGRERQPEQAPAPVGVRQSLARELEALGQDLTRLKNRLEAAEAGVTHPQVTTSLRRRIKALEEEKQALEDELKHDLEQNKAQELRLLESIPGIGTRTACLLLAELGNPLRFSTARSLVAYAGLTPERCESGSSLRKQSHISRMGSAHVRRLLYMPALSGLRYNPLLKAFFERLVAKGKARKAALVACMAKLLRIAYGVLRSGQPFNPNLART

SEQ ID NO: 189251 - protein, 348 aa, unidentified
MTTAYIGIDLHRSVIQICVLDERGERIAEERIRYQSLEEGLEAVAFIRRFGPGCRVAVEALGLNRWLVNACQEAGLDVLVCDPRKLDLKKLGKKTDRRDAREIARRLWLGDLDRIAKTYYPSDAEYGRRKLLRVRHRLVQMRQQTVNQLRGMLNAYQVPAPRGVLYTRPSRERLAAAQLPVPELQQAFEALLAVREGRQGQIDALCRRVRRLPREEADVAALAAEIPGIGAQSAATLRAELGDPRRFAGPRAVAAYAGLVPRVSQSADKAHHGRMTKQGNPELRWILSQWAVRLMKDDPLVRDWAQRLRRRVHKNKARMALARRLLVGVWVVLTRGESFDLRRCLGQV

SEQ ID NO: 189252 - protein, 376 aa, unidentified
MGDHSEAFVGIDTSKLRNAVAIADAGRGGEVRFLGEIENTPVATAKLVRKLAAKYKRLTFCYEAGPTGYGLHRQIKGLGFECTVVAPSLIPKRPGDKVKTNRRDALSLAKLLRADELTAVWVPDGGHEAMRDLTRARETAMLDLRTRRQHVSAFLLRLGRPYPESRKTWTKAHASWIASQKLEHPQQRLVLEEMMLAIRQAQERLQRLEQAVAAAVPEWSLAPLVTALMAMRGLDLIAATTLLAEIGDLSRFQTPTELMAYLGLVPSEDSTGDTIKRGSITKAGNRRARRMLVECSWSYQHPPRVGQAKQPKVDAAPPAVREIAWKAQCRLYRRYRTLIRNGKLKTVAIVAIARELAGFIWAVARAVTTTRFAAAV

SEQ ID NO: 189253 - protein, 355 aa, unidentified
MRGSPEAPRAVKPASERGAPRIDPLIPNSRRGRERASPIRQGRDKMEITVGIDVSKARLDVHVAPSGESFAVGNDEAGVAALVARLGQLEGLLGIGIEASGRYERLAVAELAAAALPVMVLNPAQVRSYAQAIGFKAKTDPIDARLIALFVAAVRPEPRPLPDIQTQELAALMARRRQLVEMLAAERARRMKAQPGRVRASLARVVTTLEDELKALDADIDRTVRGTPVWRDNENLLASVPGIGPIIARTMLAELPELGTLNPKQIAALAGLAPFTRQSGKWRGRSFIAGGRPTVRTALFMGALVAARHNPTLKAFNDRLLANGKPKLVALIATARKLLTILNAIIRDQKPWQPA

SEQ ID NO: 189254 - protein, 363 aa, unidentified
MEHIAIDLGAKESQICVRSADGEILEERRIATRPEKLRRYLVGRPKSRVIVETGAEAFWVAEIARECGHDVRVVASMLAPSLGVGRRGLKSDLRDARVLSETSCRVDLPSVHIPRVETRRLQSRLAMREALVRNRTQLLNVVRGYLRTIGERAPRRTAEGLIVELREKLAYAAEQLQPVLESIEVLNRSVKTFDEELKRLASKDKLAKRLQTAPGVGVVTSLRYMATLDVANRFANGAAVGSYLGLVPSDHSSGQSQRRGSITKAGSPAMRAVLVQASWAALLSRRHRNDPMMIWAREVARRRGKKIAVVALARKLSGILFAMWRDGTDYDATRAAKVIPAAPRRLVLNEDSRRSRHPESVPA

SEQ ID NO: 189255 - protein, 412 aa, unidentified
MFYVGVDIAKKFNVAFIVDDKDNIIKKSFKFNNDEKGFNDFNTLLSSTDNDVSNFIIGMEATGLLFENLYLYLKDKGYNVILLNPYQTSKFREMDTMKKVKNDNIDAIMIASLIKSGRYSKAYVSKEVYASLRALHRHRASLKEELKKHKRQLSSLLSVVFPEMEQIIKDPFSVTGMALLEKYPTPKHYKYASPQRILKLFRNIKGNNFNMEKAQKLLDLAKSSVYSGNAYDERAYVIQSHIRAIRFLESEITSVENRMAELFNQSPSLTKEEEKEITDIIDNLRTIPGVSDKTLFTIMGECGNLDRFKNIDAFIGYLGLYPTLEQSGNTTKYGKLAKRGSKLAKKALYQAAVAAIRHNKEMNKLYCDKVSQGRAKKEALVIVARKLAAVILAVYKHNTPYNPQRVFNQNIT

SEQ ID NO: 189256 - protein, 356 aa, unidentified
MPETNPAEVIIGVDTHKHTHAAVALTALGARLGTITVPASRRGYQELETWARSFGPVRAYGVEGSGSYGAGLSRFLQASGHAVIEVNRPNRQLRYQHGKSDPLDAEGAARAVLSGQADARAKPGTHAVEMIRHLKVARDTAVKSRTQAMITLKALIVSAPAALREQLEGLAGKMALIRHLAALRPGTLTSPTASAKAALRALAQRWLALDAEIKAHEAHLDALTAACTPILRTAYGMSTGTAAEMLILVGDHPDRIRSEAAFAKLCGACPIPASSGKIIRHRLNRGGNRQANAALYRVVIVRMRSHPPTLAYVRRRMGEGKTKLEIIRCLKRFVAREIFGYLCGAKTLPTAPMTAS

SEQ ID NO: 189257 - protein, 384 aa, unidentified
MLAVTSLSERPAAIRVDLGAIFVSMELSRSKWLITSLAPGGGERMSKHTITGGDLPALFERFALLQEKARARTGQDFPIVVIQEAGLDGFWIHRALEKEGLESHVVDPASIAASRRARRAKTDKIDGEALVRALLAYKRGEPRVCAMVRPPNPEEEDRRRIMRERKALITERTRHVNRIKGLLFAQGVMGYEPTRRDRRKRLDTLRTGDGRELPGHLKGQILRELDRLELLMSQIKAIEDERDEIILTHEAAGPAAMLMKLKGIGPEFASVLWSECLYRRFENRRQVAAYAGLAPTPWQSGQIDREQGVSKAGNPRLRVMLIQLSWLWLRHQPKSALSLWFEERVTRNGGRLRKPTIVAMARKLLVALWKYVSSGVVIEGAVYS

SEQ ID NO: 189258 - protein, 387 aa, unidentified
MSKQNDLSRCLVALEQDATLIAVVEMGQASWLVAGIVPGLDRYPLKKLGPDRDALLQLLHRWRSEAEKGGHAIDRIAVAYEAGRDGFWLARWLRSQSIEAHVIHPSSVPVSREHRRAKTDRLDTELLKRAFLGWLRGEPKHCSMAAIPTLEDEDARRPGRERQVLVEERTRIINRLKANLARLGIRGFRPNLARAPSQLEALRTPEGVAIPMNTLAEMRRDLDRLRFVKQQIKEIEKTRAERLAKAPDERRHVAARALIRVVGVGVETADMLVQEVFSREIRDRRALARYAGLTGAPDESGQRRRERGLAKAGNARVRRGMIELAWGHLTHQKGSPLSAWYRMRTADARRGTRKTMIVALARKLLIVLWRLATTGEAPEGLQLRPAA

SEQ ID NO: 189259 - protein, 359 aa, unidentified
MGVMEGRERRIVGGVDTHKDLHVAAVVDEQDQVIETRCFATTRQGYRQMLTWMRSFGELQRIGIESTGSYGAGLLRFMQQAKVPVLEVTTPDRQDRRRRGKNDDLDAQNAAHAAFAGQRTVTPRSRDGMIESLRVLMACRKTAVSARRVALQMIHNTIVCAPDDLRDQLRRLTRMQLVRTLAAWRPDLTAYRDLDSAYRISLKSLARRYLELHDEIADLDAMITAIVDELAPNLVARNSIGHIGAAQLLLTAGDNPERLQSEASFASLCGVSPVPASSGKIVRHRLNRGGDRAANSALHIIAIGRLRTDQRTRDYIARRMAEGHSKLDAIRALKRYLAREVFTLITQRRREINATRIAA

SEQ ID NO: 189260 - protein, 368 aa, unidentified
MSERTRFLGLDVHKETIAVAIADEGSQPQIHSTIRNEPGAVRSLVKALKGPGVRLVAAYEAGPTGYTLHRQLTRLGVESQVIAPSLTPRPKGNRVKNDRRDALLLARLLRSGDLTPIWIPDEAHEALRDLVRARADAKADQLRARHRLSKFLLRKDSRPPAGARAWSVKHQDWLRHLTFEHEPETVVFRDYCQQVEAAGERVKRLEAELRHCAESSPHLPLIAALQSMRGIAFLTAVTIVTEAGDLRRFKTARQFMGYTGLVPSEHSSGGSTHRGPITHTGNGPLRHVLVEAAHHARHAPRVEAALKQRQAGVPPRIVDISWKAQQRLNLRYRHLSARLGRPKAITAVARELAGFVWALGQEMEAPAA

SEQ ID NO: 189261 - protein, 359 aa, unidentified
MKDPKSPSPVIIGGVDTHKELHVAAVVDATDTVLATESLSTTRAGYRAMLRWMRSYGDIARVGVECTGSYGAGLMRHLDTAGLDVLEVTAGDKTDRRKRGKDDTIDAEQAAHAAFARVRTVTPRAHNGMVESLRALKIVRKTAIAGRRTALQMIQALIISAPEELRDQLRNMTRMQLIRILAAWRPDLSDYRDPVTATKIALKSLARRYLELHDEIADLEVHMHALVDELAPDLLARTGIGYESATQLLITAGDNPDRLGSEGSFAMLCGTAPLPASSGKTTRHRLNRGGDRAANSALHMIAVSRWRLDPDTKVYVSRKRAEGHSNPEILRLLKRYIAREVYYLLRNQHHTINQTTTAA

SEQ ID NO: 189262 - protein, 344 aa, unidentified
MSVIFCGIDFHKNTSTLCFIFPDGTKEIKTISSSKVVTELANRPIMRVAVEATGGSNHLAGEIKALGHTLILIDTVKFKAIGIGGKKTDKKDAEALAHILKVDYVPQVYLKSLGARRLKSLLVSRELCVQDRVTVTNHIRGILREYGLTMPQGVDEFYSQVSEKISSLNFGYLEDALRFQLRRSTELKTKEKEIENQLAELVTDDERARILQSIPGVGIMTCAAFLAVIDDIARFKTSKELASYLGLVPRESSSGDKRRMGAITQSGSEMLRRYFIHGARSVLMHTNEKSTEPLRKWALKIKNKSGMNKATVALAHRLARISFSLLKENRFYVKEHAVGVKKIA

SEQ ID NO: 189263 - protein, 379 aa, unidentified
MWKKVSKFGSSLVNQTVQDAKPTFFLNLNSTLGKSLYNCDDRFSTSNPFKERKMKLIVGIDVSKKKLDLSVYDGDHHKALFINNDRKSIEKMLKSFVSMKDDCLFAMEATGVYHLQLATLLHEQGFNVGVINPLIIKRFAQMKMIRAKTDAVDARLIAEYGYEQKVSLFQPRSIERQKIIKILRAIDALIETKESYHNRLEALAQDPLQVKSVTKSFKQLIRNAEREISKFEAELLQIVKEYYSDVYDRLLSINGVGVKTAVVIIGFFGKFEDFENSKQVASFIGINPSPSESGSSVRGRGRISKKGNSYLRKQLYMTSLSAMQHNKSCKEFYERLVLKGKEHKVCRVAVVNKLIKQIFAILKYERTYDQDYCKNCLAS

SEQ ID NO: 189264 - protein, 385 aa, unidentified
MGSQAFIARDYDVFGGLDVDKKSISVTFTDHQGLLKSMRMPYSVDHLVNHVRKHYGDKKVAFAYEAGPTGYGLYDGLVAQQYPCLIASPSMIPKAPGRRVKTNRLDSLGLAENLRAGQLKSIHVPTTLYRELRHLTQLRDALVSEVVAMKQRIKSLLLMEGLEFPPAPPGSQWSFLVKAKLRKLPCSSVVRFKLDQLLDNLEFGEKQVLKTTREIRRFCQNDPELSQCIEYLKSVPGIGWIVASQMMARIGDWRQIKNIRELPAFLGLVPTESSTGERTTRGSITHSGDPRLRSKLIQASWSAIRQDGELLKFFRTVAKKHPRHLGPRVAIVAVAHKLCVRAAVVLMKQRPYEVREKVQSAPLTQEETVPRGTTRRQAVPGEQTS

SEQ ID NO: 189265 - protein, 343 aa, unidentified
MKVMAIGVDLAKNLIQLHGVDAQGKVALKKQLKRNQVLSFFANLSPCVIGMEACAGAHHWARKLESFGHRVKLMAPQFVKPYLKTNKNDAADAEAICEAVTRPSMRFVPTKNIEQQAVLALHRARQGFVKARTAQANQIRGLLAEYGIVIPQGLSHISKRVPMVVEDGESELPGVFRQLLQRLVEHLKEIDRQVLELEARIQLWRRQNEASRKLAQIPGIGPITASALVASIGDAKSFANGRQLAAWLGLVPRQHSSGGKQVLLGISKRGDVYLRTLLILGARAVLRILEQRTDCTQAWLKRLLARRNSNVAAVALANKNARIVWALLAHGREYDAAYAAALK

SEQ ID NO: 189266 - protein, 346 aa, unidentified
MIMIGCDFHPGLEELCLLDTETGRRREQWLSHDLGPAPVRQFYAGLPQPVRVGLEASGYSQWYEEMLEELGIELWVGDPARIRKAAPRKQKTDRNDARLLLQLLEENRFPRIWVPDKATRDLRQLLMHRHKLVTMRSSISHQLQAIAINRGMRKKKALWNQEGREQLKSLELPPWAKRRRDELLALREQWDKEIAELNQVVMREAERNPEARYLMQHQCGVGPITALAVVLTLGPVERFASARKVASYAGLVPAEYSSGGRQRLGHISKEGNVFLRWVLVEAANVAVRYDHELKRVYWRLVERRGKSIAKVAMARKLLTRLYWMLRRRSQSRKLSQRSRVAGKLEA

SEQ ID NO: 189267 - protein, 419 aa, unidentified
MAKVLQKVFDQLHERVAGLDVHKAQVTAAVRVPGPDGTRLLEVTEFKTTVTGLLALRDWLSAHGVTYVAMEATGVYWKPIWAVLEDGFECVLCNARDVKQVPGRKTDVSDAEWLAQLAEAGLLRASFVPPKPIRALRNLTRYRKSQIEDRQREANRLHKILEDTGIKLDCVATDILGKSGRAMLDALVQGTTDPAILAELAKGRLRAKVAELREALEGRFDPQHALLVGAILAKLDFLDEQILLLSDAIEEQLGPFEQAVELLCTIPGVQRRTAEVIVAEIGADMSVFPTAKHLASWAGQCPGNDQSAGKRRSGKTSKGSRWLGIALTEAALAATRQKTTYLGAQYRRLRGRRGHKKAVGAVRHSIIIAAWHMLTTGELYTDPGADYFDRRVDPQRKIKRLIAQLEDLGQRVVLEPVAT

SEQ ID NO: 189268 - protein, 368 aa, unidentified
MSKLRFIGLDVHKDTIVMSVAVAGTDEANLVGSFPNDVNRILKQLKKMSSDRSLLRVCYEAGPTGFGLCRRLNQAGIDCIVVAPSLVPRQAGLRVKTDRRDSRKLAHFLRSGDLTEVWVPDEQTEALRDLERSRDDAKNAERSVRHQLSKFLLRNDRKYSLGREWTQKHMAWVRTQQFDDPCRQCVLDEYIKAVEDVTERVKGLMKYIETYVQTHSLQPLVKALMSFRGIQLLSATVIAAEIGDLRRFKTARQFMAFLGLVPSERSSGKSIRRGSVTKTGNAHVRRILVEAAQHYRHSPRMSAALRQRQEGVSEDVVKISWEAQQRLCRRLKHFIDNGKTRNKAIVAMARELAGFIWSIGQVSQLLKS

SEQ ID NO: 189269 - protein, 316 aa, unidentified
MDVASKSLEVRIGQQGAAGSFANNSEGIAALGAFCRVHQVDLVAMEATGGYEQQAFAQLSEQGLPVAILNPRSVRQFAQSMGSLEKTDRIDASMIAWYAEVKKSRPVCLAPDSQQHLRALVTRLRQLTEMRAVQLNQQRLVTDRAVQASFKKLLAVLARQIRELEQRIAALVEKDPLWRELNQDFRTIKGVADRTVARLMAEMPEIGTLGNKTISKLAGVAPLARDSGQYQGKRVVRGGRAAVREILFIVASVVGRYEPDFVAFRQRLRAAGKPPKVVRIALAHKLLVRLNAKAREVRQRLAALQPDSNALMAESR

SEQ ID NO: 189270 - protein, 318 aa, unidentified
MKEATIHNERGELTELAREYPGATVVMEAGTHSPWVSRYLQEQGMQVIVANPRKTRAIYENVRKSDRKDAMMLARLGRMDPELLYPIEHGSREAQEDMVQIKLRDSLVRSRVALINAVRFILKSQGYRVSNPSSDRFHKVVGAELPETIRAMIAHNVAAIGEITERIKALDKEISRLAAERYPETEYLQQVSGVGPITSLYFVLKVENPHRFESTRDIGPYLGLCPKRDQSGETDKELHVSKCGDRYLRKLLVSAAQYIIGPFGCPSALREYGMRLAEDGTGRAKKRAVVAVARKLAVLLLTLWKGKVCYEPYPALAV

SEQ ID NO: 189271 - protein, 359 aa, unidentified
MQQATGSATERTVGLDLGDRTSRYCIVSQDGTLLEEGQIATTETALRRHFSPMDRARVALEVGTHSPWVGRLVAECGHEVIVANPRQLRLIYENQRKSDRADAEYLARLARLDPKLLAPVTHRGEQAQADLALLRSRDMLVRARADLVNHVRGAVKSVGCRIPKCSTPAFARRAKAHVPELLEATLRPVLSTITQLSEQIHQMDHQIEEVAQSSYPETEVLRQVPGIGGLTALCYVLTLENPARFPTSRSVGAYVGLVPKRSSSGQRDPELGITRAGDEMLRRLLVQAAHYTLGPFGPDTDLRRFGEKLAARGGKNAKKRAIVAVARKLAVLLHSLWSTGEVYEPLRHHPGTTQEQEAA

SEQ ID NO: 189272 - protein, 411 aa, unidentified
MDVFCGIDWAEDHHDIAIVGADGTLLARKRIGDNAAGLAALLDLLAAHGDTAEDPVPVAIQTPRGLLVACLRATGRKVYPVNPMAVARYRDRHSVAGRKSDPGDAFVLANVLRTDMHAHRPLPAGSELAQAIAVLARAQQDAVWNRTTAHNKLRSHLREYFPGFLAAFAGTRDGIVRPEARTILAAAPAPDAAGKLTLAQLRALLKRAGRARGIDAEARRLREAFREQQMRQLPLVEQAMGQQALALLRQLDAACASAGDLERAAVESFNQHPDAGIITSFPGLGPLTGARVLAEIGDDRSRFSDAKGLKAYAGAAPITRASGKHMSVTHRKVKNNRLAAAGYIWAFAALTASPGARRHYDRRREAGDGHAAAQRNLFSRLPGCLHHCLLTGKHYDEATAFPAAASKNDAA

SEQ ID NO: 189273 - protein, 325 aa, unidentified
MSNFAKKTILQKTKMKTTKEKEIGFTQMVSVGCGIDVHQHLIVASIRKSDDDVETREFEAYTSSLTSLREWCKSERVTHVAMESTGVYWKPVFNVLEEDFEVILVNARHVKNVPGHKTDKKDSRWLSKLLLSGLLKGSFIPPRDIRELRDLVRYRKKVVGQIASEKNRIIKILEDANIKLSSVLSNVDGSVGTKIINDLIDGETSINKLMRHYHGKQKASREEFRKALEGHVTEHHKLMLRIHKDSISDKESQLQRLDEAIDKATEAYTVEIELLQTIPGVGKDSAINIVSEIGVDMSRFPDETHLSSWSGMSPGNNETGGKKKV

SEQ ID NO: 189274 - protein, 345 aa, unidentified
MELFTLGIDLGKTTFHLVGMNQRGDVVVRKRFSRTQLLCFTANLQVELIGMEACGGSHFLGRALREQGHEVRLIPAQYVKPYVKTNKSDYIDAEAIAEAVGRPRMRFVPIKSDDQLDLQSLHRVRERWVMRRTAVVNQIRGLLLERGITLRKGRRYVDAALPGILADTDSKLSGSVRVLLMELKLELEQLADKIERSDQSIEHIARENEACQRLVAMPGIGPVTATALIATIGNGSAFRKGRDVAAWLGVVPEEHSTGGKQTLWQIPLRGNQYLRRLFVQCARAVMQHKTKQSSGLSAWLVQLTARTHHNIAIVALANKLARMAWAVLAKNEVYRPPILVDAIAG

SEQ ID NO: 189275 - protein, 434 aa, unidentified
MYGIVGIDVGSETVSVCVLTEAGTELGRRHEIANSEAGARQLVAELSQLAAAQELAGYRIGLEASGMYWWPLALHLSTNPALAHSQVFALNPKPIKDFRSTVGSGAKTDRADAHLIAQWVRFGQRLPAPFAVDWRYEPLRRLTRFRVHVAESLAREKTYFLTVLYLPFSGVVSSDAVKDPFTPTAWALLADYTTDQLIGADLTELAAYLQAHGRGQFADPAGTAAKIKRAAADSYRLHQALDDPVRLMLGTARATITTLQQQLRLIDATIARELAGIRQTLSTVPGLGPVLTAGLVAEIGMISRFTDEAALAQFAGLTWTVHESGHFQAEDTRLTKQGNRYLRYYLVEGANSVREHCPEYRAYYQAKVAQSPKHAHKRALVLTARKFVRLVDALLRTGQIYQPPERRMPRKEITQPSARRPARHHRTRAVSATT

SEQ ID NO: 189276 - protein, 356 aa, unidentified
MDSTKYIGMDVHKEATTIAVMNSAGKLVMESIVETKAATIVQFFEGLRGELYVTLEEGTWAAWLYDLLKPHVTKVVVCNPRKNALLKTGNKSDRIDARKLAELLRAGLLSAVYHGETGLRTLKELGRSYLAISKDLTRTMNRVKALYRSWSIPCGGPSVYAPRHRAEWLSKITEPGVRRRAELFYQQLDGLQKLRQEARRDLLAESRKHGATELLRRIPYIGPIRAALLIALMQTPHRFRTKRQLWAYSGLALETHSSAEYHYVQGQLQRSKRPVALRGLNQNHNHDLKSIFKGAATKAGTAKGPFHDFYTALVAKGMKPTMARLTLARKIAAITLIVWKKGVCFDAQQLKQQVSV

SEQ ID NO: 189277 - protein, 414 aa, unidentified
MIVTEEPTAKRVCAGVDWAKDDHAVCVVGPEGEALQRFMIKHDRAGLKDMVRRLLRAGVDEVGLERPDGPIVDALLQAGLTVLVIPPGQVKNLRSRYGSAGNKDDRFDAYVLADVVRTDRHRLRPLELDTAATTALRTTVRARRDMVIHRVATANQLRAHLQIVFPAAAGLFEAIDSDVSLRFLERFNTQGQADWLSVKRLGSWLTSIGYTGGTDPAVIYARITAAPRGTTGPEADILAVSTRSYIAVLRTLNTQIRTLATSIAEQLDVHPDAKIFTSLPRSGSVRAARLLAEIGDARGRFPTASSLACLAGVAPSTRQSGKVKAVTFRWGANKELRDALCDFAGDSRRANPWAADLYDRARARKCDHPHAVRILARAWANIIWRCWQDNTAYDPAEHGGLQRILNQDQQPAAA

SEQ ID NO: 189278 - protein, 463 aa, unidentified
MRTIGIDLAVKASHKAIVMNAEGKFVTPVLSFHARWDEIKQVVARAREGVEPDHPLQAMMEPTGMAWFTVAVPLSRMGVSPIFLVNGRKVHDLRRFYKRHSSSDRISARVLARITVVDPESLYPLEIPTAVQFACQRGCKELDRLEERITAIKNRLRDTDRFAWPGLESVFKDIFSPAARLFRETWYDPAAVLAAGVDQVRQSFLAIADQEDDLAWVEGLVQLAIEVLMLYGPDALDYSLLQQQVCRDQRWLTALEAEADAVWRETVRPLYHQLHPSRNLETLYGVGERGAAVFASFIGRAARFPSNRKFRGWHGLIPDSRQSGEAESKGLHVSQAGPDPIKKFGYLGGDVARRYDPQIAVIYHDQMMNKGAHHNQAVCACATHLLDRVRVILLEDRPYELRDVDGTPVTPEEARAIIAERYTVPDEVRRRNNRRTRKERAEQRAEREWQRQQRRKKGSRPRS

SEQ ID NO: 189279 - protein, 357 aa, unidentified
MYSIGVDFHKAYSHMTVMDAQGQVVKVGKVPNTFEAVHAFVAPYRDDAQAVLEATRNWTVMYDMLERELRAVYLAHPLKVRAIAEARIKTDRIDSKILAHLLRCDLLPTAYVRPREQRVSQQILRQRMFFVRVRTMVKNRIHVLIDRQLDVREVAAQFSDLFGSAGLAWLRTVGLADIERQLLNAELALFEAVQDRITESDSLVRNLAAGDPRVRWVRTIPGFGRFFAVLVVHEIGTIRRFATPEKLSAYAGLVPSVHASGGKVFHGRLTKQGNKWLRWAVVEAVRPAVTTDPDLRRYYERLRQRKGPNPAKVATARRLLLLAHRVLSQERPYRKPGPVTIRPRPRTALMNPLPAAG

SEQ ID NO: 189280 - protein, 347 aa, unidentified
MRFYTQQHPYYCGIDLHARVLYVCIINDKGEKVLHQKIPAEKDALLELITPYQDQVVIGAECMHCWYWVSDLCLDYAFEFVLGHALYMKAIHGGKTKNDRIDSYKIAMLLKGGNFPIAYVYPRQMRATRDLLRRRTRIVRHGADLKAHVTNTFSQYNLPAHNLNLRYPFARKELRNCFADPSVQRNVDIDLNIVDFYTRELSKVEWFIEKHAKYHSAQDYSLLRTIPGIGRILALTIIYEIGDIKRFSSVQKFASYSRLVKCKAESAGKIYGTSGNKIGNAHLKWAFSEAAVLYLRGNEEAKRYLQRLLKRMSKAKALSALAHKLGRCVYFMLRNKTVFDPERFLSS

SEQ ID NO: 189281 - protein, 354 aa, unidentified
MNTIKYIGIDVHQATSVFAVMNQNGKILGEAVLETKPATIIDFLKGWRGTVWVTFEEGTYANWLYDVIQPHVAKLVVCDPRKNRLDGNKSDKIDARRLAELLRMNALSPVYHNRNSAGTLKELARSYVSLQQDRTRSMNRLKAMFRSRGIDCHGTSVYRPRNRKEWLEKLDSGGPRHRAERLLKQLDFLGELCLEAQKDMVREGRKHKSYKLLREIPGLGPIRVSLILAFVMTPHRFQNKRQFWTYTGFSVVRRGSAEYEISEGALKRTKKKPLPRGLNRNYNHVLKDVFKGAALTAAYRGPFRKAFDQRVANGIAPNIILLTLARKIASITLALWKRGESFDIKKYCLSEQTT

SEQ ID NO: 189282 - protein, 406 aa, unidentified
MKQIVSVGIDVSKGKSTVCAMIHPNTIIKESFEVLHTVEEMSMLADYIGSLDGEIRIVMESTGHYHLPVAQFLYQKGFFVCVENAYIIRQFSRIMLHGAKTDPLDAKKLAKYGLAYWSELKPYKFHPSCYTKLSLLSKQYQTYIKLLIAAKQNVIHLMDEMLPGFKEALDTASSVQFSKVKYVDFAKEFYHVDMIKSMGKEIFRENYKQWCKEKGYRFQSEKADELFHLAEDGIPTLPTEFPSTRLCMEVATEQVSQLGYALEQILSQMQNLAKTLPEYQTIRQMGGMGEKLCVRFIADIGDVRRFHNGKALVAYAGIDAPPYQSGQYTGTKRRISKRGNSALRKTGYEVMKSLKSHPPKTDTRVYDFIIKKENEGKSKKQAKIAGLNKFLQIYYARVMEIYKNIA

SEQ ID NO: 189283 - protein, 352 aa, unidentified
MQHFIGCDVHTRNQVVAWIEEETGEIRKRRLEHEGQEVKEFYAQFPPGTVVGIEATFPAYWFERLMGELGHELWVGDAARIRASEVRYQKTDARDAEGILDLLRSGRFPRLWVPSLDERDLRQLLVHRMKQVRARTQVKNQLQALAISQGVCRKRKLWSAKGRAELEKLVLLPWAARRRKELLEWLDRLDEQVRELDRAVEEAGRARPEVALLRTHPGVGMVVGLAFVLSVGPVERFSNRRKLVSYWGLNPREDSSAGRQRLGSISKQGNTMMRWLLIEAAQTAARLDPQLRRTYQRLKHQRNSGVAKVAVARRLVVRLFWMLRTRHNYAQLVHMSGSPSSAVVPPQGGPKV

SEQ ID NO: 189284 - protein, 410 aa, unidentified
MMTTTTFATDPGGLIGGVDTHADTHTLAILTANGGVLCTETFPATTAGYDQMITTLNDAGQVATIGVEGTNSYGAGLTRALTGAGFSVKEVLCPTRRVRRMDGKSDPVDAIAAGRTILAGVGVSEAKDTTTPAEQLRLLLVARDLLINTTRAISNSLQSLLVTAPQPLREQYQGLSTRALIARLAACRPGTDITDVTSAAKYTLKHLAQAYVDAQERAEELKGQMHMILKTHYPDLLAVFGVGAVVAAQLVVTIGGNPHRIRNEAAFASLCGVAPLPASSGKTTRHRLNRGGDRRGNAALHRIVLVRMQRDQRTREYLARRTKEGKSKREIMRCLKRAIAREIYRVLTRPHATQAQATVDLTLLREARGLTLTDVAHALGTWPARISDIEKHRRPLPALRQRYETWLLAG

SEQ ID NO: 189285 - protein, 412 aa, unidentified
MDVIYERCCGLDVHKKTVVACLVVPDAAGQPHKTIRTFRTMTADLLALADWLAEAGCTHVVMESTGVYWRPIYNLLEGQFDVLVVNAQHVKTVPGRKTDVRDAEWLADLLRHGLLRGSFIPSAEQRALRDLTRHRSSLVQERARIANRLQKVLEDANIKLAAVATDVLGASGRAMLSALLEGETDPAVLADLARGRLREKRAQLEEALQGRMQDHHRFMLLEHLEHIDYLDEAITHFSTSIEERVQADLEAIELLDTIPGVSQRVAEIMVAEVGSDPQRFPSAKHLASWAGVCPGNHESAGRRLSGKTRKGSRWLRQALTEAAQAAGRSKTTYLGAQFRRIAARRGKRRAVIAVAHTILVIAYHVLTRKEAYCDLGATYFDELDRQAVERRLVRRLERLGYQVELKASPQTT

SEQ ID NO: 189286 - protein, 422 aa, unidentified
MSYCPVAGIDVSKRFSDMCILSPDNKIFAQEKIYHDETSINRANALLQKAERLFFSKPVIVMESTSHYHLILFQFFSEHGYDVIVVNPLQSNSMKDFSIRKRKTDRVDAFKLAMMYRTKTLRPSQIPQTATRALRQLCRHRAELLNDVSSYKNRLTALLDQTFPGYDKVFSDVGGVTSCAVLVRFPTPTILLVEEESELVEVIAATSKSGYSFAKKKAGLLISAAQKAQTLGIHSCADETLIVCTIQMLRTLSESVLQIETAIDNLLAQIKEMRNNVSLLQSIPGVGSHSAALLLGEIGDISLFKKPKQLAAYFGLDPTERQSGSFRGTKNKLSKRGSPYARAALHMGVVNSICKRGKDSAANPVLLSYYEKKCKNKPAKVAQAASMHKLVFIVFAVLRDQKPFELKTPEQHAVEQGFVKAA

SEQ ID NO: 189287 - protein, 353 aa, unidentified
MMIIGCDFHPSFQQIACVEQETGEYEERRLSHRGEAEAFYRSLAGRAVRIGMEATGNDRWFHKLMSELGHELLVGDASAIHASAPREQRTDKRDARHILRLLMENRFPAIWQPSVGNQEQRQLLLHRCRLVRMRTRIKNQLDSIAKNEGLTGSRVWKAKRRQQIEALPLTGWYAERRKDLLALLDEMDKLIEPLDEAVRAAAEQNAEAQLLMTHPGVGPVVSLSYVLIMGDWRRFPRGKQVGSYLGLIPAEASSGKHQQQMGHITKQGNTLLRWLLVEAATKAQSKDPSWHRQYVRLSMNKHHGVAKVAIAHKLAVRLYWMLRSGQNYTQIVERGSHAGQSDLAGGCGLRPIN

SEQ ID NO: 189288 - protein, 348 aa, unidentified
MITIARIGIDTSKSVFQLHGVDEREQVLLQRKLRRREFLTVVGKLEPTSIGLEACGASHYWARELQALGHRVMLIPPQYVKPYVGRNKNDKVDAEAICEAMSRPKVQQRLVPAKSVEQSAGQMLLGVRDSLIKRRTQLSNAIRGHAAEFGLVAAKGLDKVAPLLARIAAEEAVPGLAKELFAVLGQEFDELGPRIAQIDKKLMAFHRSNELCRRLMEVPTIGPIGACLLVTKIVNPRAFRSGRRCAAWLGLTPKDHSTAGKQKLGGITRAGDETLRATLVSGATAYIRHVRSGRSTPSPWMAELLKRKPPKLAAVALANKTARIAWKLMTSGERYDPARRAAREALAA

SEQ ID NO: 189289 - protein, 352 aa, unidentified
MISTQTTAVPKLFIGMDVHKKSWTVHIKTDLFDYKTVTMPADPVCLQQYIEKNFPDHEVSCCYEAGCCGYWIARRLGQINWKVMVVNPADVPRTNKQDWQKTDKIDCRNLSEQLQKSNLHSIHIPDEEQEQLRSLFRRRNHLVRQLRTIKNHIKSQLLYYGIKLPEQFDNPNWSREMKNWVNNLSWKFTAGTETMQSRLRQLDFLWHEQLHVNNELRAYCRKHHKTDYYLLKSVPGIGGITAAGILAELGDIRRFDRFDELAAIVGLVPGIYQSSDNRICLGLSPRANRYLRSLLVEAAWVAVRIDMVLQAYYRKHAHKEPNKAIIKVAHKLLSRIRSVVNSGRPYQTGLVK

SEQ ID NO: 189290 - protein, 372 aa, unidentified
MDYNTIFVGMDVHKEKFSLCCYSIEKDEFSHPHTTAANYKHVLAYIASLRGVFGENASFLCGYEAGCLGFTLYHQLTEHNVNCVILAPTTMPVVKGKKKIKTDKRDARNIAKCLAHHDYSPVHIPTEQDEQVREYIRMRTDHKLALKKIKQQILAFCLRNNLRYEGRSHWTAAHVGWLKNLTPGALYEEILKEYLLTFENLTDKIERLDKRIAELAATEEYSEKVKKLSCFLGVQTQTALSSIVEVGDFKRFPSAEKFASYLGLVPGEDSSGDSQTRLGITKAGNTHVRRLLVEAAQSYGRGQVGHKSKALKARQQGNPPEVIAYADKANERLRRKYYKMVLSKGKKANVAKTAIARELACFMWGMMTGNIA

SEQ ID NO: 189291 - protein, 406 aa, unidentified
MTYPQLFVGIDISKFKHVVAILNDAKHLLGKVFEVLETRTGYQHLLTTLEHLEREYQTQEFRIGMEATGDYWKNLYHFLTQKSPRFRVTVINPVQTKRFAQSELRRAKTDAVDAITIARFMAEKKPRPAAPRPPLLDSIKDLDRQIHAVHKQQTMTLNKLRIELGKVAPEIEHHIALSRHQQVLVLLQHYPTAEAIAHASHDELRSLRYGKKHWRLSVPFITKMQTLATDSIAHKTGPGAGLVVQALVDQIFHQRQMVTALQAHITQLYQRVKEQPSLLATIPGISEQTAIALEAYIGDVARFPRAKNLVAYFGMNPTVNLSGIVTKRASSLQKKGCAMVRHKLFMAVLNMISNQVEPFYSYYQRLVAAGKPKLVAIVATMRKLLVIIYTMLTKQQPFRPRKNPSP

SEQ ID NO: 189292 - protein, 337 aa, unidentified
MDYFAGLDVSLEKTHICVLDRDGTVVHEATAASSPEAITAALTASPRCTRVVFETGRMAPMLYHGLAELGVPIICIESRQAYQALKSLATHKTDRNDARGLAQLARTGFFKPVHVKSLPAHAVRALIMARKKLVGQRVTLENQIRGLAVVFGVRLPRGLSPAFVEQVIRMSDGIAGLSGAMRGLLAARGAVLGAIAAIDADMKKLVHASDACRRLMTIPGVGQLTALAFTAAIDDPSRFRRSRDLGAYLGLVPRRYQSGEIDYVGGISKVGDRRVRTLLYEAANVMLTRYRGELKLKDWALAIARRSTMRQARIALARRLAIIMHAMLRDGTRFQPA

SEQ ID NO: 189293 - protein, 418 aa, unidentified
MKWERNSRGAELRYIGLDVHKHYITVGGLNAQQEIVLRPRDVEMERFKTWAESNLRKTDEVVLEATTNTWDVYDMISQWAGRVVVAHPAEVKQIANSRVKTDTQDVIRLVRLLIADIVPEVWVPPVEVRELRATISYRWRLVKMSTAIQNRMHSLLHRHNIQAPKGKIDTGENREWWEGLKLSELENLRLKQEIKTLRLIRENIVEVEKELGRLSNSERWGDQAVYLMQIPGVGIIVTMTILSAVGDIRRFESPKKLVGYAGLGAGVHDSGQKHREKGITKMGRKELRWALVEASWQAIRSNPIWRAEYDRLCKRKHPNQAIVAIAHKLLVTIWYLLNRKEVYKPSSEEDLAYKMLTWAWHMDKPALSGMTNQQFAKYGLLRLGKGEDITRIVRGGVPRRLASKEEVLALKPELRIQQ

SEQ ID NO: 189294 - protein, 448 aa, unidentified
MKEKKPIKRKSIKLPKHLQNLNPYAAGIDIGSKSHFVAVPEGTDEQSVREFSSFTDDLERLAQWLTACGVTTVAMESTGIYWIPVFEILETYGLEVRLVNARHVKNVPGRKSDVLDCQWLQQLHTYGLLRGAFRPADQVCALRAYVRQRSTLVRSSASHIQRMQKALAQMNIQLHNVVSDITGVTGMRIIKAILAGERDTKILSAMRDPRCKNSEETIARSLQGNYRQEHLFSLRQAVELYDFYLAKINDCDQQILEQLRIFDASDDNDNADYKAPKNIGEALQRMSGVNLADINGIDTNTALKIIAEVGIDMSRWKTAKHFASWLGLCPGTKVSGGKILSSATKQVANKAAAALRMAAFALINSKSALGAYIRRQRARLGASKAITATAHKLARLVYSMLKNGTTFTDAGQDYYEERYRTRVVQNLKRKAQEMGFKLVSIQVEPQTA

SEQ ID NO: 189295 - protein, 429 aa, unidentified
MNVLPVAGIDVGKEFSEMAILSPTNKVCARMKIFHDSFKKVDKAIELLKKAEKDFANRPIVVMESTGHYHKILFHAFAEAGFEVVITNPLQTDSIKNLGIRKVKSDKVDARKVALLYRFQELKTTSIPNDTINCLKSLCRQYYKMTDQLTVYKNKLIGIVDQVMLNLTDVFKDVTSKTALALLERYPTPSHMLKGNREEIISLISETSRKGIKRATSKYELLIQKAKDFEPLSISSPANISLIQVNINMVRTLEKSISDIEDAILKLIKDDKEQDMPVLTLTLELLCSIPGIGLMTAATILAEVGDFSAFQKSNKLVAYFGIDPSVKQSGKFKGTQNKMSKRGSRFLRKVIYTSALACIRKKRNGELNNPVLYEYYQKKCISKPKKVALGAVMHKLVSIIFAVLRDKKPFELKTPEQHARSLVAKNKAA

SEQ ID NO: 189296 - protein, 348 aa, unidentified
MKITIVGIDLAKNAFRLHGCDEEGRAVLRKQLTRGQLLAFIAQLPACTVAMEACASAHYWAREIEQLGHRVRLINPRFVKPYVKANKNDASDAEAICEAAGRRSMRFVPVKTAAQLEVQALHRVRQQLVKSRTALINQVRGLLAEHGIVISQGRAQLQRALPRILEDADHRLSGIMREILSEIGERLKFIEARLHQYELHIERLFRQDPRCRRLAEVAGVGPLIATALVAAVGNAAEFKNGRELAAYLGLVPRHRATGGRTQMLGISKRGDRYLRSLLIHGARAALWTIARRGDQRSAWAARLKLRRGTNVAAVALAHKNARVLWALLSRGEGYRGAPCSPRMAQAAG

SEQ ID NO: 189297 - protein, 414 aa, unidentified
MEENMEAIVECCAGLDVHQATVVACLNRGPAGKRSSKEIRTYGTTCQELRELRDWLKGSGCSLVAMESTGVYWKPVHAELEGHFELIVGNAHHIKNVPGRKTDVKDCDWISDLARHGLIANSFVPPRPIRDLRDLTRYRRKLVEAQAAERNRLIKLLESASIKLSGVISDVFGVSGRAMLRALIEGDQSPAEMAQLAQRRMKRKQPELARALDGHVDEHHRFLLRLQLQRITAAEADLAQLDERLREKLAPYDEELGRLMQIPGVDWVTASALIAEIGVDMSVFHGAAHLAAWAGLCPGNHESAGRQKSAKTRKGNVWLKTAMVTAAIAAGKTRRSYFAAKYRRLTARRGKMRAAVAIAHKILVAAYHMLAQRSDYRELGADYLDRLHHHRTAINLTNRLRAMGYDVQITAKAA

SEQ ID NO: 189298 - protein, 320 aa, unidentified
MNEKIPTVYAGLDIAKATLQLHLQNVQHVLANNPEGHAALLKKIRAVPGVQIVCEATGGYEKGIVAALHAAAQPVSVLNPALVRHFALAQGQRAKNDPLDAAILTAYGLALQPEPTPPREPARDELRALVQWRDHVKEQLMRTGQTVEHGVPAYVARQQKKLVAHLKKQMAAVEKECQSALARTPQIQAQVRQLEQLDAVGTVTALSVLSHLPELGTLNRQEAAALAGLAPWVRQSGPWEGQRHIGGGRAAVRRALYMSAVGLARMKKTTLGKFYAHLRAAGKPAKVALTAVMRKLLLQMNRVLKEHAIQAQAKTQMQPA

SEQ ID NO: 189299 - protein, 451 aa, unidentified
MSKRSSKNAGLPIIHAHAAAIDIGARFHVAAVAPELSDQPVQTFQAFTGDIERMGDWLVSLGITTVAMESTGVYWVPVFEVLEDRGLEVIVANARDARAVPGRKSDVNDAQWLQRLHACGLLRASFRPGREIAALRAYLRLRERHLDDAAAHIQHMQKALTFMNLQLHHVVSDVTGATGMKIIRAIVAGQRDPELLARMRDVRCKSDFAAVRAALVGNYQPEHLFALKQALALYDFYQERVNECDLEIEHMLTQLNSDQDVPSEPLPKARHRTQQPNAINFDTRPMLYQLTGVDLTQIHGIGPYLALRLVSESGTDLSRWPTAKHFTSWLALSPGCKISGGKVLSARTRRTSNRLAAHLRLAATTVGRTNTALGAFYRRLAARIGKAKAVTATARKIAVLYYNAMRFGMRYTDPGADEYERRYRERVVKQLHRRAAEFGFTLQEAPSSCVS

SEQ ID NO: 189300 - protein, 430 aa, unidentified
MKSNTQNAKIEAITEKTLVLGIDVGSETHYARAFDYRGVEYSKKPFKFSNTEAGFVTFKAWVLDIKEKHGKDKVIPGMEPTGHYWFNLGKFLQDNEMKPVLVNPHHVKKSKELDDNNPTKNDRKDPKVIAGLVREGRYMIPYLPDGVYADLRTASNIRFQLQAELTRIQNRINRWFNIYFPEYKTVYGKPDAKSGILILKEAPLPEDILTLGIDGVNQIWRDAKLRAVGKARAKTLIEAAEHSVGSKEGAVSARMEIRMLLEDYESRNIRLQEVMGLIEGLVNQIPMAEKLLEIKGVGIKTVSGFLAEVGDIRRFNDPKELQKLAGLALVENSSGKHKGKTTISRRGRKRLRYLLFEVAMSLVAKNPEFRELHNYYTTRRLNPLKKMQSLMAIAAKLLRVFYAILTKGVGYDPKKMVNDIRRPAAYAQAA

SEQ ID NO: 189301 - protein, 346 aa, unidentified
MLIIGCDFHPGFQQVEIFDNQSGEIASKRLKHREEAEQFYRSLVGRARVGMEACGHYPWFERLLAECGHELWLGDAGRIRASVVRKQKTDRRDAEHLRQLLVEERFPRIWVPSLEERDVRQLLLHRHKQVQARTRIKNQLQAMALSQGVQKKRKLWSQGGREELEQLELLPYAAARREQLLATLDGLEVEIAELNRQVEAEVQQRESALRLMTHPGVGPVTALAMVLTLGPAGRFASGKQVASYFGLIPSEHSSGGGQRLGHISKQGNSFLRFLLVEAGQSAARYDAELGRFYRRLAVRKHRALAKVAVARKLVIRLYLMLREDWTYAQLCKAVVQVSPSHSVVES

SEQ ID NO: 189302 - protein, 485 aa, unidentified
MRKSQPHPVALAIDAPPLPVVLPTLTAAPVFAACIGIDRADRKLDICLQATPATGLAAAAPEIQVLPNKPAELHQWVAQLRQRFEGQPVAIGFEQPAPALLHFFLGYDFVTVYALNPVVLAKYRQAFTPSRAKDDTRDAGYLMELVRDHRAKLRAFRSDDVATRSLTTLSEARRKAVQLRTRLANMLRDHLKVHFPQALDLIGDDLHCALSCDFLLKWPTLQAVQRARPATVRAFYNAHQSRSQTRNDARLALLASTRPLSDDAALAACGALTTTMLATQLQALIPAIAAFDTQLAALLAEHPDTFIFASLPGAGAVHTARLAAAFGTDRSRFSSAEEVARYTGIAPIIKQSGQSLVVQRRHARSKFLHQSLLEYAHQSRLHCAWANAHYEQQRARGKSHYAAVRSLAYKWIRILFRCWQDRVAYDEAAYLAALQRHDSPLLTPPTPPAPAASGAKGAKRNVTVQPRAQAATMKAVKHYAPTSLA

SEQ ID NO: 189303 - protein, 354 aa, unidentified
MIEAVLERCAGIDVGKKYVVCCLSLGAANSTATEETRQYDTTVAELEKMRDWLLENQCSHVAMESTGPYWKPVFNLLEDHFTVILANAQQVKSLPGKKTDRKDGRRLAHFLRHNLIEGSFIPPVAIRQLRDLTRRRRKLLGAGGSERNRVQKVLEDANVKLGNVLSDVFGASGQAMLEALLSNQGTPQQLAEFARGKLRRKMPEIVTAVEEHRMREHHRFLIRQSLRHMAFLEEQVAALDEEILRQMKPFEKEFESLQTIPGIKATAAASILAEVGVDMKQFPTAHHLASWAGICPGNNESAGKHKGTQTRKGDPWLRGTLTESAWAASRKKGSSFAAASGNVIRCARATSDSR

SEQ ID NO: 189304 - protein, 370 aa, unidentified
MAHTSTLFIGLDVHKETIAVAYGSEEREAEVVFLGTIGTRQCDLDKLMRKLQGKDKKLHLVYEAGPCGYWLYRYLTKKKLLCWVVAPSCIPKKASDRVKTDRRDAVQLARLLRSGDLTPVYIPSVDDEAIRDLVRAREDVLKDLKAAKVRLKAFLLRQDIRYEGRANWGAAHLRWLAEVVCPTPAQQIVFQEYVRAVSEQTERLQRLEAELQPLVQSWRWYPVVEAIQALRGVQFTTAVTLIAELGDLTRFDNPRQLMSYLGLTPSEHTSGERRRQGAITKTGNAHARRVLVEGAWAYRYPAKVSRHLQLRLEHVPKTIQDISWKAQVRLCKRYRRLVARGKNVNQVVVAIAREMAAFVWAIAREVAVAH

SEQ ID NO: 189305 - protein, 353 aa, unidentified
MKILALDLGKFKSVYCFGIDDQPPVYGKTATEGQSIHDLLVKLEPDRLVIEIGPSAGWVHDLAVALGLAVQTVNPNDERWHWKRVKEKSDRKDALKMYELSRRGDLPLMPMPDAHTRQWRSLIRYRSNLVDRRTMVKNSIRAIFQMQGMLLPKMDNAWTIQGLKQISRQANDKPPVDQLWRLQLHSELTCLQSLEQQIEQITAQLDALGKADRRVQRLQTAPCVGPRLSETVVAAIGDPRRFKNARQVGCYAGLTPRRWQSGNSDRQGHISRAGNRQLRKLLVEIGWIGVRNKTWMKNVYENVRRGSDKRKKVAIVAVARRLLVKLWAMLRDGTDWKDPDPQKAMTLAMATGG

SEQ ID NO: 189306 - protein, 369 aa, unidentified
MQRKEISFKGQKVFIGIDVHKDSWRVAIAPEVGVVKGHSQKPSARELLDFLKKYYPDGEYHAVYESGFSGFSTYYALQDVGIDCIVIHAADVPTTQYEETMKTDKVDAAKLVRSLKSGLLTGIYIHKRDDIDARSVVRLRKTIQKQLGSYKSRVKHLLHSNGVTFPERFSTPGSHWSKVFIRWLKEEVVLLSATRTSLDLLIAQVESIRKTLLMATRNVRELSRSERYRHDYELLTSIPGVGINVAMTLLTEIGDINRFHNEKEFASYLGLVPTSHSSGGKVAHGEKTFRGNKYLGPQIVEASWVSIYSDRGLGCAYFNYKKRMKPQEAIVRVARKLSNIIFSVLKTGKKYKPYEWNEKQKHTDLQATS

SEQ ID NO: 189307 - protein, 333 aa, unidentified
MTYIGVDISKKSFVAAFPSANGYLTKEFENTPRGVRKFIGSLPNSCMVVMEATGNYCFLLLYLLHNAKIEAALVNPKQIKHFARMMMTVTKTDAKDACLIALYGEKMNPASYKLPSATILTLKQKRTVISQLKKQLNATHNLLESITVLPYADKTCLNSLKKTISFLEKQIKSLESELVNLAESEFDALLKRLTSIKGIGVTLATALIIATGGFTYFNNAKQLSRYIGICPTVCQSGTSISIHGSINRNGDESLRSMLYIASWSAIRYNASCRQMYERMRSNGKPAKVALVAVSNKLVRQCFAVANSNMSYIDGFVSTKPETQKCVSSKDQTL

SEQ ID NO: 189308 - protein, 351 aa, unidentified
MPSRSTVRAVATIGIDMGKNTLHMVGLDLYGAIVLREKVSRGRIVSRLANLPSCLIGIEAGMATHYVARELAALGHDVKQVPPTYAKPFRQGHKNDFRDALAVAEAVQRPTTRFVPPKSNEQLDLQALHRVRSRLVSQRTAVINQIRGFLLERGIIVRQGLRFLRQLLPDILAKRTDVLSPRMARIVSDLAGDWRQLDDRIETVTDEIETLAKNDDSCRRVMTVPGIGPIISSAMVAAIGNGSAFSRGRDYSAWLGLVPKQMSTGDRTILGRLSKRGNSYLRMLFIQAARVILVRPANWPKHGFGAWLIRAIQRLHPNVLAAALANKLARIAWTVLAQERSYEARVQKAEV

SEQ ID NO: 189309 - protein, 342 aa, unidentified
MRKYLGLDVHRESTTVCVLSESGKRLGQEVVETDGTVLIRLVQQMAGELHLCIEESEWAQWLSEILSEHVAEIIVCRGRKRQGTKNDSRDAYDLAERLRTGQVRPIFKSAGRFTKLRESKRVYRFLRGDLVRARNRLKSGFRRRGVPCGDEVYVAADRVERIAELPESCRAAVELLGREMDALAELKAEAQTAMVRESHRHKISRVLETLPGLGPVRVAQLLAIVVTPHRFRAKRCFWAYCGLGVVMDTSSDWVRDEGRWVRAPVHRTRGLNRNFHHELKEVFKGAALSAISARSNPFRQSYDRLCAQGTKPNLARLTVARQLAATCLAMWKSGKEYDPSKP

SEQ ID NO: 189310 - protein, 347 aa, unidentified
MNILKQTVGIDVSMDSFEARFGTIDTNQEQSISKSQKFINDLMGFKKFLKWALNNKLSDKLPLTFVMEVTGVYHENLAYFLHEKGYQVVIVLPNKIKNYGKSLETKSKTDPIDAMTITRFALERKLTAWNPPEPFIRAIKTLSREYLSLKVMMTDIKNKIHAEESAHYPDKDTIKRKRRLLKELQRQIDEILGQIKILFQSKPELNKKINKVATIKGIGEITVIIILAETNCFEHVTNSNQLTSYAGLDVVLNESGKKKGKTTISKRGNKFIRRALFMPAMSACKYNNKMKETFARLVSKGKNKKAALIAIARKLLVLIYTLWKNDAVFIQDYKQTKPFRLKPALGS

SEQ ID NO: 189311 - protein, 452 aa, unidentified
MSTEILPHPTATPAVPFAALVALDWADQKHTWALQAADSTRTEQGEIEHTPEAVEAWAAELAQRFAGQPVAVALEQSRGALLFMLTKYAHLVLYPVHSASLARYRAAFYPSGAKDDPSDAQLLLDLLLHHRDRLRRLEVDTVETRTLQFLVEERRRLVNERTRQSNRLTAKLKLYFPQILDWFAEVDSPLVGALLRRWPTLEQLQKARPATLRQFLQQRNCRSAERIEQRLEQIRQALPATRDAAVLQANVAAVRVLVDLLATLREGIAELDRQIAKLFAAHPDFPIFESLPGAGPVLAPRLLAALGSRRERYASAGQIQCYSGIAPVLERSGTASWVHSRWSCPKFLRQTFHEWASHSVGFSDWARCYYQRQRTKGKSHHAAVRALAFKWIRILYRCWKDRVPYHESLYQQSLGQRTSPKPGQPADPVADAGPAIRWITCASFSKPVLATS

SEQ ID NO: 189312 - protein, 411 aa, unidentified
MIQPDKLVYVGVDLHKQHHTAVIIDCWNRKLGEIKFDNKPTAFPLLEKEVKKHTKKGMSVVYGLEDVGGYGRALAVYLTEKGCSVKEVNAKLANSRRKSHVTIQKSDSWDAECVAKVVRDELYNLPDAKPIDLYWAISQLVTQRNWQSKNLTNVVKRLHQQLAYHYPSYKKFYSEIDGKTALAFWHKYPSPNHLSGVTSEELAKYLRKLSNNGLSTKKAEQILSLVAEDGDTTRDFQDQRDFIVKGLVRNIRFYKRELGRVEEEIRELMKQLGFQLESMTGIDLVTAAELVAEIGDIHRFATPDKLARFAGIAPIIVGSGNKVRNYKSKQGNRVLHDIIKSLAIRQLIVTRSTKVPRNPYFHAYYGQKLAAGKTKQQAVVCIMRKLVNVIYYLMKTQATYVIPEVSMPQAG

SEQ ID NO: 189313 - protein, 400 aa, unidentified
MISVGIDVSKGKSTVCILKPYGEIVSKPFNITHTQKDLSELSSMLFRLNDEVKIVMEATGIYHLPVLTYLQEKGFFVSVINPYLMKSYRNESLRKAKTDKIDSRIIANYGIDHWFKMKEFQTSGEIYEELKLLGQQYRHYMKLHLLSLAELTHLLDLTMPGIKNLLASWNETNRKDKRSDFVERFWHYDVITSMSEQEFTEEYILWAKEKKYVPSQEKAKVIYTLAQESIPTLPSETSSVKILVTEAVRVLKEVDATLGLILSRMQEIAKTLPEYSVVREMGGVGNTLAPKLIAEIGDVRRFRNGKALVAFAGIDPPPYESGQFVGCNRKISKRGSASLRKVGYETMRSLKMRSRPEDPVYRYVVKKESEGKSKKSAKIAGLNKFLRIYYARVTELYKII

SEQ ID NO: 189314 - protein, 368 aa, unidentified
MPRMAEQAGPVTGGVDTHADVHVAAVIDPVGRVLGTQAFPATAAGYRAALAWMKLHGELARVGVEGTGSYGAGLARYLADCGVEVAEVIRPNRQARRQRGKSDTADAVAAALAALSGEASGMPKSRDGAAESIRALKVARAGAVKARTQAGNQLRDLILTAPEPLRQQLAGLPTGRQVETAARFRPGDPARPAEGAKAAMASVARRHQQLTAEVTRLDTMLDELVRHAAPEQFLAKRGVATQVAATLLVTAGDNPARVGREASFAALCGASPVDASSGKQIRHRLNRGGDRQANSALWTIAMTRLDCDPRTKAYAARRTTEGKTRKEIIRCLKRYIAREIYKALCRPSGPGRPSTPQIKQDLSVPVLT

SEQ ID NO: 189315 - protein, 351 aa, unidentified
MFYSGIDLHKDMSFITTIKETGEIISQQKLPNDPACIMAHFLSLGSDHKAVVEATSNWYWLSDLFKGEGIDLTLAHAKYLKAISYAKVKTDKVDSQTLAQLLRLDMVPRAHQISTELRPVRDLMRARLSLVTKKTSCINSIHRLLGKYNLSVSSKFKLEDLNTFRSRLEPEPWFQLEQLKAQLQLIRSQIAELEQNLTPKLVPNPDIQRLLWIPGIGRTLAFTIYLEVDGIQRFPDVKRFYSYCRLVPGASNSNRVNRHKSGNKDGNRYLKIAFSEASVRAIQYYKEIRSFYQSKARKKHKQIAKTLVAKELAAISYHVLKEGVDFDNRFRGQELSRIKTTKWPRLASPAA

SEQ ID NO: 189316 - protein, 372 aa, unidentified
MGRIIFVGLDVDDQSFHGYAVCAAGELNFEFSCKPNVGSLTKKLEKISPDKSLFRICYEATFLGFSLSRALLKYGYQCAVIAPSLIPEVNGPRVKTDRLDSRKLAEFHRSGLLTVVSEPSEEDEQVRDLVRSRVFLNRQILSFKKHALSICRRAGIDYRKAVNKPTACHWTDQHRRWLETELNKMNSGAMKSNLELMLMTFGQMEKQLETYDEEIERSAQSGRFARKVNSLVCYRGINTLTALTFITEIGDVKRFGHPRQLTSYCGLDLSEYSSGGLHLRRGITKMGNKHMRTAAVEVCQKAMAHPKISSHLKRRRKDLSALDIAIADRCMIRLYKKSRRLIEREKPRNKVKVACARELLGFVWESLNQAIV

SEQ ID NO: 189317 - protein, 335 aa, unidentified
MAKRSTFVGLDVHKESIAVAIAESGRFGEVRAYGTVGGELEALEKVLRVLRAPGRTLHFVYEAGPCGFTIFRHLRQLGEDCAVVSPSMTPKRAGDRVKTDRRDAMTLARLHRAGELRAIYVPNENDEALRDLVRAREDAVEVTREAKQRLKAFVLRHGLRYRGRAGWTIPYRRWLAGLTMSEPAPQMALQEYLATVDEAEQRVTRLTEQLRQLVPAWRWAPVVTALQALRGVSFITATGLVAEIGDIRRFAHAPELMAYLGLVPSERSSARSLDGAASPKRAIPTRAGCWRKPRGPIAVSRGSVASCSSVRTRSRRRCARWPGRPNSGSAAAFDA

SEQ ID NO: 189318 - protein, 341 aa, unidentified
MNVSVLGIDLGKNSCSVVGLDTTGKVVVRRRMRRETVITYAAALPACVVAMEACCGAHHMGRALARQGHSVRLMSPEYVRPYVKAQKNDDRDAEGIAEAATRPTMRFVELKTEEQLDMQTLHRIRDQLVGDRTSLMNQIRSLLLERGYIVPQGRAKLAVRLGEMLDGDEPVLGSRIHRLVSDMRLRWIALDERISDLDAEFTSAARTDERTRRLLTIPGIGALNATALVAAVGDARTFGRGRDLSAWLGLVPRQATTGGKPRLLGITKRGSRYLRKNLIQGARSALPTMSKSDTRLGAWLRGLLSRSHPNTVVVALAAKMARIVWALLRHERTYDPVAQAA

SEQ ID NO: 189319 - protein, 326 aa, unidentified
MQGKESSEQETAGKSNAGIDVSKSWLDIHVLPSTATLRVPNTGHGLRKLKRWLARFDIALIVVEATGKWHRQACRSLSADGFRVAVVDPFRVRAFAKAQGILAKTDRLDARVLASFAAVMNPTIRPPAPEALENLAELVTARESAVAEQTALKNQLAAAVMSFLKRHLERRCARIAKDIEDIQREIERRVDADEGLARRYAILTSIPGFGPVVAVTLIACLAELGTCSRRQIGMLAGLAPIADQSGKREGIRVIWGGRAKVRRTLYLAALSAAVHNPAMKILYQRLISKGKEAKAALIAVARKLVVLANTLIEEDRTWQPRSPEQA

SEQ ID NO: 189320 - protein, 515 aa, unidentified
MSTMVVSSPDPPAPQREAPPPNLSPAERLGLLALSDRETPEITQRRQFFREVERFFGLDVHREYMVATAVNQELRVVAGPTRVTWEHFEAWIDRTLSRKDAIVVEMTTNTWQIYDRLVEHVHSVTVVHPPHIKLITQVPVMNDKKAAEALAILLGAGLLRSVWVPDAVVRDRRQLVAQRHDRVRAATQAKNRMHAILFRHQMDKPEASQPFSAKQRDFWKSLPVSPVEKLGIDLDLATLDLAEAQRAQLETFMTQEALKDERLPFLLQIPGLSVLGALTILAAIGHIERFPTAKKLVGYAGLGARVHDSGQTRSTGKITKTGRRDLRRVMVDAAQAASRSHDFWKAELTRLEPRLGRNKAMVAIARKLLVVVWHVLTKREADRHADARQVAEHMLNRVYIDVGARNLPDGQTAAEYVRKSLDQLALGKGLQRVKLSRKHEALLPPSSQPGAAPAAEPKGRGQAQNTKVAQEKRKADAAAKRAAIAAEREATMTKKGKPRKPRSDKGVKRGPRAQK

SEQ ID NO: 189321 - protein, 349 aa, unidentified
MASLPAVVRQVTVGVDSHKDVHVAAAVDQVGRVLGTTWIPTTTQGSAQLLRWATRLGQVQRFGIEGTGSFAAGLSRWLQQQGYQVVEVNRPNRQTRRRRGKSDPVDAEAAARAVLAGEATTTPKAANGTVEMLRVLRVARRSAIKARGQAANQLHSLLVTAPDPLRHQLGALPLARLVQVAAAVRPGPLTDPLAATKFTLRELARRYQFLTAELDRLDAQLAALAPKAAPRLLTRRGVGAQVAGALLVVAGDNPGRLRSEAAFSMLCGSSPLEASSGKTVRHRLNRGGDREANNALWTIAMTRLSCDERTQRYLARRTAEGKSKREIIRCLKRYIAREIYQDITAAVGS

SEQ ID NO: 189322 - protein, 355 aa, unidentified
MESTKFIGMDVHKETISIAVLTSTGKLIMESIIETKAITIVQFIQGLRGDLNVTFEEGTWAAWLYDLLKPHVTKVLVCNPRKSALLRDGNKGDKIDARKMADLLRGDHLKSVYHGDNGIRTLRELSRSYLTISKDLTRVMNRIKALYRSWAIPCGGTQVYALCHRSIWLSKITEAGVRRRAEHFYQQLDALQPLRKEVRRDLLAESRKHSATKLLRRIPCIGPVRAAQLIALIQTPHRFRTKRQLWTYSGLGLQARDSAQYRYVEGQLRRSKKPQQLRGLNQDHNHDLKNIFKGAATKASISAGPFHDFYQALLAKGIKPTMARLTLARKIAAITLVIWKKGINFDAKYLKQQTA

SEQ ID NO: 189323 - protein, 343 aa, unidentified
MEINRVGVDLAKNVFQLHGADRTGKTVWKRQLSRGKWLKVLCDTVEPGTEIGMEACAGAHHWARQLIKKGYVVKIIPPQFVKPFIKSNKNDANDAAAICEAMSRPNMHPVRVKTVGQQDLQAMHRIRDEIKSHRVAKANQIRGLVTEYGLVAPQQLPALRRAIPDWLEEADNGLTFLFRQLLQGLWGDLYALDQRMTELDKQIAVIAQEDPTARRLQQLRGVGPLIATALVATVGDARQYRKGRDMAAALGLTPRQHSSGGKDRLLGISKRGDAYLRCLLVHGARSAVRTAKDKEDRLSRWIIDLQARRHANVVAVAMANKMARMAWAMMVKEADYDPGFTAC

SEQ ID NO: 189324 - protein, 376 aa, unidentified
MKQFNEIYVGLDVHKDTIAVAIARGLRTKPYYFGEVPNTPTAITKLLKQLSPDGEVLNFCYEAGPCGYEVYHQVTQQGHACDVVAPSLIPKMPGVRIKTDRRDAMSLAKLHADGSLTAVWVPDKEQEGIRDLSRAREDFKQTETKARQRLGAFLLRNGKVFSGKSKWTVAYWRWMETLTFETPTQHIVMQEYVEALKEASRRVLGMEKQILLAVRGWSLEPVLNSLLAMRGVNMITAVTLLAELGDITRFDNPKQLMSYLGLVPSEYSSGGKRQQGAITKTGNGHVRRVLIEAAWNYRFPARKSRTIEMRAEKTSERVQAIAWEGQKRLCGRYQKLLTSGKLKQKVCTAVAREMVGFIWAIACEASGRVHGSRATA

SEQ ID NO: 189325 - protein, 425 aa, unidentified
MSTDIEMAAFLGLDWADQQHVIRLRVAGSAQIEARVLDQKPESLRAWIQDLRQRFGGRPVAMALEQSRGSLLYALMNVDFLRLYPVNPQNLAKYRKAFYPSGAKDDPQDALLLLEMLEKHRDRLRVWVPDEASTRCLRLLAEHRRKLVNRRTALTNQLTSLLKETFPQALDWAGPLDSLRACDFLQKWPSLQDLQKASKAGVRKFYRDRGREDGESIQLRLEQIRQAQPLTSDPALLTATALMIQALVGQLRPLIESIRQFDQQLKERFQQHDDYTLFHSFPGAGPVFGPRLLSAFGSNRDRFERVMEVQNLSGIAPVTERSGKSYRVHWRLACPKFLRQSFHEFAAQSIHHSLWAKALYDKLRAHGVSHHAAVRTLAYKWIRIMFRCWKNRTPYDEALYIASLKRRGSPLFAALSSQLQEVTCE

SEQ ID NO: 189326 - protein, 323 aa, unidentified
MEMPEDKVYVGIDVAKASMDVAVHQSQQRWSFSNDDEGIGKAVCCLREVAPALIVMEATGGIELPIAAALAAAGLPVAVVNPRQVRDFARATGKLAKTDAIDAQVIAHFAAALKPTPHPLPGAQAQEFDALLTRRRQVVEMLTAEKNRLSSAPSKAVREHIKAHIGWLERELANINSDLGRRVRQSPIWREKDALLRSVPGVGPVLSFTFLADLPELGALDRKQIAALVGVAPLNHDSGALRGKRAIWGGRATVRAVLYMSTLAATRYNPVIRAFYRRLCAAGKAKKVALTACMRKLLTILNAMVKHHTPWRYAPSPIMGPCY

SEQ ID NO: 189327 - protein, 338 aa, unidentified
MKLYGAIDLHSNNNVTVLIDEQDQVVYQKRLPNDLPLITQELSGYQDRLQGIVVESTYNWYWLVDGLMDQGHRIHLANTAAIQQYEGLKYTDDHSDARWLAHILRLGVLPQGYIYPKEERAVRDLLRKRSQLVHQRTANLLSIQNLVTRNTGSSIRSNRIKTLDRETVDALLPNPDLALAVKANLAMIQCADGQIDILERTVTDRIKLRPAFGFLKTVPGIGQILALTIMLETGDIKRFSTVGDYASYCRCVGSQKLSNGKKKGSGNTKNGNKYLAWAFVEAANFAIRYSPRIKSFYQRKKAKSHGVVAIKAVAHKLCRACYYIMKDQVPFDVAKAFA

SEQ ID NO: 189328 - protein, 348 aa, unidentified
MDTIGVDLHKRETQLCIGQADGTITEQRIVTSRERFTAVLGQRPPARILVEASTESEWVACHLESLGHEVIVADPNYAPMYATRSRRVKTDKRDARTLMEACRAGTYRPAHRLSAARRHVRAELAVRDAVVRTRTRYVALAKALVRRDGLRVPSSAAERVGAHLAALAVSPALAAELAPLLTLLPPLTATIAAADQRLAALEHTDSSVALLMTAPGVGAVTASALVATIDDVQRFASAHQFEAYLGLVPGERSSGELRRIGPITKAGNRRTRWLLVEAAWRILRSKDAAGAPLRAWARPIVARRGSRIAVVALARRLAGILYAMWRDGAPYEAGKIRRPRSARQNPGA

SEQ ID NO: 189329 - protein, 408 aa, unidentified
MLFVGDDWAEDHHDVEIVDDTGRRLATRRLAEGLAGLTGLHALIAEHLPDPGPDAEAAQVKVGIETDRGPWVAALVAAGYEVFAINPMQVARYRQRHSTSGAKSDAADAHLLAEIVRLDREHHRPIAGDTPLAEAVKLMARAHQTMIWDRSRAVLRLRAALRDFFPAALEVFDDLDAPEALELLSRAPDPDRAARLSKAKITAAFTRARRKDVEPRALHTQQIFRAPQLRQPPAVQTAYAVIVANTVRLIDEFNRQITELGEVVSEHFGRHRDAELYLSQPGLGSILAARVLAEFGDDPQRFTDAKARKNYAGTSPITRASGTRRIVLARYARNRRLGTAVHQWAFCAMRGSPGAKAYYKTMRGRGIGHQAALRQLSNRLVGILHGCLKTGTLYDENTAWAHHISAAA

SEQ ID NO: 189330 - protein, 341 aa, unidentified
MDITTIGLDLAKNVFQVHGINAAGDVIVRRRLRRAQVFAYFASLKPCLIGMEACGTSHFWARELLSLGHDVKVIPPSYVKPYVRRGKNDAADAEAICEAVTRPHMRFVPIKTEDQQAALMLHKVRELLVRQQTMLVNALRGHMAELGMVAPLGRGHIKDLIAVIEDCEDESISTLAKAALKPLVMQLAANEDSTAMLDAEIKIWHKTSAASQRLATIPGIGYLTASAIAATVPDPSFFKSGREFSAWLGLVPRQNSSGGKERLGRISKQGNPYIRRLLVIGATSMLRYARAKTAPGANWVNGLLERRPARLVTVAMANKTARIAWAVLAREETYQAPKLAV

SEQ ID NO: 189331 - protein, 425 aa, unidentified
MNYKQNEKINQVKESTLVVGIDIGSTTQYARAFDWRGIELGKVFTFSNSREGFEAFKAWMQHLQDKYRKSDVIVGIEPTGHYWFDLGAYLEDEGILLVMVNPYAVKQTKELDDNSQSKNDRKDPKVIAKLVTEGRYSAPYTPDGVYADLRIMVANRKRLIREMTQIKNRFARWFAIYFPEYTDVFGDYEAQSSMLLLKKVCTPEAIVELGAEKINQIWRDAKLRAVGMKRATTLCETAKRSIGLKKGSSAARYEMKLLLEDYEYKKAQLDAVMEEIEKLCRKIPESEQMLAIKGIGVITVAGFLAEVGDVRRFESPRQIQKLAGLSLRENSSGKHKGQTSISKRGRSKLRAVLFNAAIPLIAKNPEFKSLHEYYTTRANNPLKKKQSVIAISCKLIRVFYAILAKGVTYDAQKLISDIHRQPQVA

SEQ ID NO: 189332 - protein, 355 aa, unidentified
MRYFNNVSEFVGQKTVFCGIDMHLKHWNVCVLCDGEVVEEVRIEGNIIRLFNLLKPYSTARQVRIVYEAGFYGFWVYRQLNAQGYSCMITPPSLLPQPHDKVKTNRRDAKALASYLATGLLKAVYVPPPEVEADRRVVRRRAQMVKNVTRTKNQIKSFLHLHGLQAPEQAGSKWSHTYLAWLSQLQWEHASDRFTLEHLLASYQHQRAELANVTRQLRQLSREARYAEGFKRLSAARGVGLMTAMTFLLEIFDFGRFRRAEQFASYLGLTPAQYSSGEKVRLGHITRQGNAHLRAALVESAWTVIRHDPHLREKYDRIRQRGVNGKKAIVAVARSLAIRLRCCLLHQQEYVIGVC

SEQ ID NO: 189333 - protein, 339 aa, unidentified
MLYVGIDVAKNKHDVTALNVPGKTVLKPLTFSNNKAGFELLDLSIRQINQDCLIALEDTGHYAFNLLNFLHEQGYKVYTYNPLLIKEFAKSLSLRKTKTDKKDAHGIALKLLSDPNREQFQHDNRQVELKILARHIHRLKKKQSDWKVQYTRCLDIIFPELDKIVGKHSEYTYQLLTRYPNPQKRIEAGFDKLIEIKRLTASKIQDILSVAPRSIGTTSPAREFEIIKHYKRLIDKAETCVNDLMAEFNSVITTVTGIENRLGAVILAEIRNIHAFDNPAQLQAFAGLDSSIYQSGQIDLAGRMIKRGSPHLRWALIQAAKACARFSPAFKAYLKTKLE

SEQ ID NO: 189334 - protein, 457 aa, unidentified
MNKRRKKAQSQSFNLQSLPKQLQHINLKAAGIDIGSERHMVAVPEGRDEVSVREFGAFTADLIALADWLQQCGVTTVAMESTGVYWIPLFELLERRGFEVKLVDARHVKNVTGRKSDILDCQWIQQLHTYGLLAGAFRPADELCVLRSYLRQREMLTQTASMHIQHMQKALQQMNLLLHNVVSDITGVTGMKIIKALLAGERDPQVLASHRDNKCHHDRATIAKSLVGNYRAEHLFALGQAVDLYEIYQTKISDCDEAIVKQVSTQPDVTDEPPPAEQKRTSARDRQRGGVNVRDLLFQKSGVDLFAIPGLAADTLLVLASEVGFDLSPWKTEKHFSSWLSLCPGTKISGGKVLSRRVKRNPNRAAQAFRMAAATLSRSQSALGAFYRRIKARSGGKQAITATAHKIARIYYALLTQGTTYVELGQQAYEQKYAERRLKHLMAQAKSLGFQLVPSQT

SEQ ID NO: 189335 - protein, 337 aa, unidentified
MGDVRHAVCVLDDEGNIIDERTITNHRESLRRLAKKYPKARLALEVGTHSPWVSRFLRQLGLEVIVANARKLRVIYLNDRKSDELDAQMLAKIARLDPSLLYPITHGSEQAQRDLLQIKLRDNLVRQRVAIISSVRGTLKSLGVRLPSPNTACFAKRARTLLGGKHPELLAMVEPSLSVLDVLTLRIRELDGAIERLCEERYPQTALLRQIPGVGPITALCYVLVIDDPARFGEPRAVGPYLGLVPRRDQSGGCDKKLPISKAGNAYLRRLLVGSAQYILGPFGQESDLRTGGLALAERGGRGAKKKAVVATARKLSVLMLALWQREADYQPHRKAA

SEQ ID NO: 189336 - protein, 350 aa, unidentified
MIIIGVDFHPEFQQIAFVDTETGELQEARLRHREEAETFYRELRARAWPVRVGMEASGHGRWFERLLSELQIDLWVGDAAEIRTKRVRKQKTDRQDAQLILKLLLKDDFPRIWVPSWENRDLRQLLWHRHRMVQARTRVMNQLQAVALNEGLRCKKRLWRERGRQQLESFRLAPWASRRRRDLLELLDRLNPSIAELSQAVEREVEKYPEAQRLATHPGVGPLTALAFVLIIGKAERFPCGKQVASYLGLVPLEDSSGNRRRLGHITKQGSSMLRFLLVEAAQVTVRSLPEWRSRYFHMMMRRGRKIAKIAMARRLAIRLYWMLRQGWDYQQCVKFGSHAGQPGNRHGVR

SEQ ID NO: 189337 - protein, 355 aa, unidentified
MTSTKYIGLDVHKESISIAVLNSAGKAVMECVIETKASTILQFIHGLGGDVHLTFEEGTWAGWLYDLLKPHVTELVVCNPRKNALLKEGSKSDRIDARKLAELLYVSKLSSVYHGEHGLRMLKELSRSYLTITKDLGRVMNRLKALYRGWAIPCAGTQVYAPHYRSEWLAKIHEAGVRRRAELYYQQLDALRLVRQQARKELLAEARKHRATKLLRQIPGIGPLRAAHLVALMQTPHRFRTKRQLWTYSGLGLETHDSAQYRVVEGQLQRSKKPVTLRGLNDNHNHDLKDIFKGAAMRASTAAGPLRDFYEALLAKGRKPTMARLTLARKIAAITLIVWKKEVRFDANYLKQQAA

SEQ ID NO: 189338 - protein, 316 aa, unidentified
MDKSAVFVGIDVSKARLDVALVPTGEVLALDNDAVGIAGLVERLKAQSPELVVLEATGGLQLPVAAALGVAGLSVAVVNPRQVRDFARATGKLAKTDRIDAQVLAEFGQRLQPTPRALPEQATQELGALLDRRHQVVEMLTAEKNRLHRAMRPVQPRIQAHILWLTQQLKELDKDLGDAVRASPLWREKEELLRSVPGVGKVLSLTLLSHLPELGTLERQQVAALVGVAPWNRDSGVLRGKRAVWGGRAPVRAVLYMATVAAVRSNPVIKVFYQRLLAAGKAKKVALVACMRKLISILNAMLKHGTPWDPEYSFTH

SEQ ID NO: 189339 - protein, 348 aa, unidentified
MESCFAGKELFVGVDVHKKRWVVSVRTYDLELKTFSMIADAEQLEKFLAENYKDALLHIVYECCFSGFWIYDYFHNKGYDIIVTPTNRIYRDGSVVKTDKIDSRKLAFQHSRGLLRAVKVPTEKIREYRSIFRIYDKEKVREGQILRQIRCILEVRNHPLKWERWNKEMIERLRSVKFQEAIFNSKFEQLLREYEYVKDQIKDSEIRIKELGEDEELRSKIKRIEKINGVGIVSAARLVVFLFDKKSRFETGEKLAHYLGLTPGEHSSGEEIIRQRTGLVGNKQLRSIIIQLAWVAVRKDGSLLNKFERVYRKSGSKQKAIVAVARKLMMKVYAITEKEEEYEINKAA

SEQ ID NO: 189340 - protein, 367 aa, unidentified
MKKVSTAAAKQSRNISQPTLTIGLDLGDRNSWYCVLDEAGQIQLEQRVRTNAKALQEVFGTMPRSRIALEIGTHSPWISRLLKQLGHEVIVANARKVRLIGESRKKDDRLDAQTLARLARIDPELLYPVKHRSAQAQADLMMIRARAGLVRARTGLVNTARGLAKSYGERLRGCNVRDMDPEKAENLSPELQRALEPLLSAIAELSEKIVEYNDRIEALAEASYPQVELLKQIKGVGTLIALTFLLTLEDPHRFGKSRDVGGYLGLQPGRRNSGESEPQLHISKEGDPYLRTLLVQGAQHILGPFGIDCDLRRWGLKLAERGGRNSKKRAIVATARKLAVLLHHLWVSGEVYEPLHNSSRVTVAAAA

SEQ ID NO: 189341 - protein, 461 aa, unidentified
MDKNTTKDKKKSTNGFPTIQPNAAGIDIGSASHFVAVPIDRDDQPVKEFLSFTDDLIAMVAWLKKCGITTVAMEATGVYWIPVYEILEQNGFEVKLVNARHLKNVSGRKTDVLDCQWIQRLHSCGLLDSSFRPEDQIIQLRGFIRHRSVLVEEASSKVQHMHKALVLMNIQLKNVISDITGVTGMKIIRAIVAGERNPEKLANHREGKCKNDEKTIAKSLRGNYRSENIFSLKQALEIFDIYQLKIQECDQEIAKLLTLFEDRRDTQKRNDPSPRSPRGRKTSAEGLFALNLQKELKRMAGVDITEIPGIDTTTGLKLISEIGLDMSRWKTTKHFVSWLGLCPNNKVSGGKRLSSRTKPVPNRAAIALRIAASTLYKNKTALGAFLRRLKARLGPAKAITAAAHKIARQLYVMLKTKTSYTELGNKYYEERYRDRLVKNLKKKAEDLGFALIAKPNDAVTA

SEQ ID NO: 189342 - protein, 430 aa, unidentified
MKSNTQNAKIEAITEKTLVLGIDVGSETHYARAFDYRGIEYSKKPFKFSNTEVGFATFKEWILDLKERHEKDKVVLGMEPTGHYWFNLGKFLQDNEMKPVLVNPHHVKKSKELDDNNPTKNDRKDPKVIAGLVREGRYMIPYLPDGVYADLRTASNIRFQLQAELTRIQNRISRWFNIYFPEYKTVYGKPDAKSGMLILKAAPLPEDILTLGIDGVNQIWRDAKLRAVGKARAKTLIEAAEHSVGSKEGAVAARMEIRMLLEDYESQNMRLQEVMVLIEELVRKIPMAEKLLEIKGVGIRTVSGFLAEVGDISRFNNPKELQKLAGLALVENSSGKHKGKTTISRRGRKRLRYLLFEVAMSLVAKNPEFRELHNYYTTRRLNPLKKMQSLMAIAAKLIRVFYAMLTKGVDYDPKKMVSDIKRPAVYLQAA

SEQ ID NO: 189343 - protein, 337 aa, unidentified
MTLYCGIDLHSNNSVVAVLDEQDRTVYEKRLDNDIATITEALCIYQSELSACVVESTYNWYWLVDGLMDAGFPVRLAHTSALPEYSGLKYSNDFSDARQLAHLLRLGLLPTGYIYPKEERGLRDLLRRRLLLVRQRSLHHVSLQSLIARHSGQRLNTLQIKQLTKGQLADYLQGHALLGGEITHQARCWLEVAVRKIERELQRHIKPREDYQLLQSVPGIGSVLGTTIALETGTIERFASPGNYASYARCVKSEKISNNKYKGQGNKKNGNKYLAWAFMEAGHYGAIWDPRIKRFYQRKKAKAHILVAKKAVANKLARACYHMLKRGEKFDVTRAFS

SEQ ID NO: 189344 - protein, 311 aa, unidentified
MKILALDLGKFNTMCCLFDSKTRKHQFFAVTTTRTYLTTIFKTYKSDLVVMEACGPSGWINDLAISLGHKTLVCSTNEDAWKWSNVKRKTDKDDALKLARMASMNELKAVHMPSKTHREFRSLGKYRKTLDQRINKIKCTIRAWFVNHGITIDSGEKAWHSGRERINSFRKPLAECQANELWKGELDIELTQLDALTNQLDSVVKKLEAIGKDDPRIKRIRTILGVGPRTAEILVACIDDPHRFKNGRQVSAYFGLVPRQYQSGETDRNGRITLCWSFDAPHRGRQSAGTNDLGGMCVGFASIQRLVQRGL

SEQ ID NO: 189345 - protein, 465 aa, unidentified
MRHNRRHSRRAARRSPTKLPCLNPDVAGIDCGAAEHYVAVPPDRDPQPVQAFSTFTDGLQRLADWLTACRVKSVAMEATGVYWIPLYELLEARGFDVLLVNARHLKNVPGRKSDVSDAEWIRDLHCVGLLRGSFRPTAAIAALRAYLRHRQTLVESAGIYTQRMQKALLQMNLLLTQVVSDITGVTGLRILRDIVAGKRDPQRLATHRDTRCRASQEEIVAALTGQYRPEHLFVLQQNLELFDMCQRQLATCDDAIKTQLATLTAQCPAPPAPLPPPRVTRKPRDNSPTFEMREPLHHLTGGVDLSQIDGFAPYTALKLVSEIGTDMSRWPTEKHFTSWLTLAPKNKISGGRLLSSRTGPSANRAAAILRFAVMSLSRTQTALGAFYRRLAPRIGKPQAVTATARKLAILVYRALKGELQYRDPGADAYTHQQRTRALRRLRQRAATLGFELVNRETGELLSCAS

SEQ ID NO: 189346 - protein, 422 aa, unidentified
MSYCPVAGIDVSKRFSDMCILSPDNKIFAQEKIYHDETSINRANALLQKAERLFFSKPVIVMESTSHYHLILFQFFSEHGYDVIVVNPLQSNSMKDFSIRKRKTDRVDAFKLAMMYRTKTLRPSQIPQTATRALRQLCRHRAELLNDVSSYKNRLTALLDQTFPGYDKVFSDVGGVTSCAVLVRFPTPTILLVEEESELVEVIAAASKSGYSFAKKKAGLLISAAQKAQTLGIHSCADETLIVCTIQMLRTLSESVLQIETAIDNLLAQIKEMRNNVSLLQSIPGIGSHSAALLLGEIGDISLFKKPKQLAAYFGLDPTERQSGSFRGTKNKLSKRGSSYARAALHMGIVNSICKRGKDSAANPVLLSSYEKKCKNKPAKVAQAASMHKLVFIIFAVLRDQKPFELKTPEQHAVEQGFVKAA

SEQ ID NO: 189347 - protein, 416 aa, unidentified
MKKHNNSGKKSEPTSKRTKSRGPVQRDTKEVLAELVGKLKAKLDPTKVAATSAGEKHQRGELRPNLDRLTVGVDLGDQWSHYCILGLEGERLAEGQLRTTQEDLATFFQGLNEARVVVEVGTHSAWVQEVIRGCGHEVLVANPRLMDGSKRRKRKNDRIDANKLARLGRVDPESLYPIQHRSREVRQDLVMLRARDALVAARTEIINTTRGLVKSMGTRLPKCSSRSFAQKGEEAVAVEMREALLPLVRLAATLSADIKEYDKKIEELGREKYGHTALLRQVKGVGPITALAYVLTLENPQRFTKSRDVGPYLGLVPKQEDSGESQPQLGISKAGDTMVRKLLVGSAQYILGPFGPDTDLRRYGLRLCERGGKNAKKRAAVAVARKLAVLLHRLWVSGEVYAPLHHAMSAPIVAAA

SEQ ID NO: 189348 - protein, 339 aa, unidentified
MTVKTVGLDLAKDVFQVHGISAAGRKIFNKKIKRPKLLAFFETLPRCVVGMEACGSAHYWGRELSRLGHDVHLMPAAYVKPYVKRGKTDAADAEAICEAVRRPTMRFVEVKSEDQQAILALHRTRDLAVRQRTQLANMIRSLLREFGHVLRSGIEAVIAFAKRHLEGERPDMPDLASGILGTVCYQFLGVHQRVEGYSKMIEKHALLDAGARRLIRMPGVGPITASAIVATIGDAKQFRTGRDLAAWLGLTPLNKSSGGKERLGKITKKGDRYIQKLLITGMTSRALMGRKHPERIDIWSARILAEKPFRLATVAMANKSARIIWAILTKQQEYRQPTA

SEQ ID NO: 189349 - protein, 345 aa, unidentified
MEYFAAIDVSLELSSVCVVDGTGKIICEKKVASEPEALVAWFNDTGLEFTRIGLEAGPLSQWLHAGLTAAGLSAILIETRHVKAALKAMTVKTDRNDARGMAQLMRMGWFRPVHVKTVPAQEIRALLTGRKLLLGKLRDVELGIRGLLRGFGLKVGRVSKGRYEARIRELTAGHPMLEPVAAAMLQARVSLRAEYGKLHRMLLGIVRADATCRRLMTVPGVGPVVAVSYKTAVDDPARFRKSKELGPYFGLTPSKYQSGEVDWTGRISKVGDAMVRTALFEAANVMLSRVTRFSSLKAWALRVAKLRGMKRAKVALARKLAVVLHRMWVDGTDFCWRKMPAAAAA

SEQ ID NO: 189350 - protein, 431 aa, unidentified
MKRIYVGIDWADDHHDIHVTDDTAEVLDSFTIPYNYEGMEKLRERLAKFSSSPENVLVAIESNEGLLFWNLLEEKYQVYLINPKAMSRYPDRYRISSSKSDPEDAMVLANILRTDLHLYKPFSKDSWADARLKHLTRAHKSLIQEKVKLVNQLTTQLKNYYPVVLQIFSHLDQEITLAFLQQYPSPEKAKTASLEELQDFFRKEKYSHPDKVLFIHKSLHRPSLKAPRELAEIYEMIVLSLVPVLHCLLGQIKGLEKRIALVFEENPAHDMFSSLPAGPIIAARLNAEVGSASARYPTRESLQTEAGTAPVTKRSGKSIIVCFRWQCNKHLRNAVQSLARESVHKCPWARRYFANQLRLGHKASRAYRALGNRWTAIIWKMLQEGQCFSQARLEDSLTKALHSSIGINKVLATLQKSGSRGLDKGSPSPSW

SEQ ID NO: 189351 - protein, 312 aa, unidentified
MEAKFVGIDVSKARLDVDCLPVSTSRQFSNDAGGITALVEWLLGSGAERIVVEATGGYEIAVASALAAAGLPVVVVNPKRVRDFAKAQGVLAKSDRLDARVLALFGERIAPPVRALPQAAQRDLTELLDRRHQLVSMRAQEQARLATVLPVARGDVEQHIAWLDQRVRKHETVLLKRLRANEIWDAKVKLLDSVPGIGPVNLFTLVGRLPELGTLNRQQIAALVGVAPFNDDSGKRRGQRYIRGGRAEVRCALYMATLSAKRWNPVIAQMFERLIAKGKPFKVAMTACMRKLLTILNAILKSTQPWENRLTT

SEQ ID NO: 189352 - protein, 458 aa, unidentified
MYRELQPFREALSRELKASLFPAVAGVDPTKLLETYLDRLTMFTGVDVADHTFTALALDAGREILGSLDGCPNEPAGFERFVTWARDLRDQHGLRIIAVAGETTGIYYWALWDFLGEQPDVVRVLYNPRTTEHMGEVLSKKVRNELVDALLLAEQLRLGSTPEVLLQDNADLLTARYYSRSARDLAQQINRKKNQLRALLRAYCAPVCQVFPGEKLHHPAVYALLQEHVFPADFVQAGAEALTTILTSHCRGVFGSAQVEQLLAASRQAISRPIGQDAIRSLVRAHIHDVTAFQERKALYLKAGYALIKDRKETELLRTVKGAGVSNTLALVSEIGDVARFSSGEHLASFLGLTTSKHISGATLFQSKRITKQGSPNGRYAAVNVAHHLTRWVPRYEEMYKRIKARKPPRKGHFIALVAVGRDFVSNVLYDMWHNQRPFFVEVSDYRAYRQKHSHAND

SEQ ID NO: 189353 - protein, 314 aa, unidentified
MAMPASRPEIGIDVAKDDLVIHLQGLNQTFTIDNTPQAIRQWLATLPEGCDIAIEATSTYHMDITERAHAKGHRVYVVDGYRLSNYRKGVGGRAKTDLADAQLLARHLHKEKDELRPWSPPPKAYRMLQSLLRRRAALVKARTALRQSLSGEPELKAPLRALIAKMDRIDTLIQKRLKSAVSAAGLQTQVQRCDAIDGVGEITATALVMAFLRGDFKNSDAFVAFLGLDVRVRDSGKLTGKRKLTKQGDTEVRRLLHCAAMSASRHPVWRAFYQRYRDRGLHTTQALVILARKIARTAFALMKQQQEYCPAKLF

SEQ ID NO: 189354 - protein, 322 aa, unidentified
MKCIGIDVSKLNFTVAYPTENTYRLATFDNDSKGIRKFISSIGACDYHCVLEATGTYSTLLVYLIQEAQIPVSMVNPKQINHFAKMMLCVTKTDNLDAKLIAMYGEKMKPAIYKMSSSTIQFLRQKRTLLRQFKKQLRMLLNVQESFQVLPEIDVKASKALKKSITFVEKQIKELHLDMVLVTRAEFSMQLDHLKSIKGIGNGVATALIMATGGFTYFDSPKKFAKYIGVCPSYQQSGTSIKTKGIITRHGDPELRSLLYISSWSAIRFNASCKELYERLKAKGKPSKVALMAVINKLLRQAFAVVISKSDYVDNYAIGEIK

SEQ ID NO: 189355 - protein, 338 aa, unidentified
MGIVYVGIDLAKNVFAVHGVDEHGKPTLVRPAVPRAKLHELIAALAPCTVAMEACSGGHHWARLFAAHGHTVKLIAPKFVAPYRMSGARGKNDAADAAAICEAAQRPNMRFVPVKSIDQQARLMVHRTRQGFVEARTACINRLRGLLSELGVVLPLKAATVRREAGARLEDLPGWANTVVGDLLSELHRLDERIARYDEHILAIAREDERAKQLMRLSGVGPTTATAVLAMIGNGHEFKCGRQFAAWLGLTPGQYSSGGKTRLGRITKAGDAYLRTMLILGARAVLAAAKNKTDSISRWAIALEQRRGYWKAVVAIAAKNARMSWAMLARGEDFKLPA

SEQ ID NO: 189356 - protein, 373 aa, unidentified
MHKSEESYTYAGCHTSKDTIDVVRCSPEERTAHRRFPNTAAGHQHLINWLTKPGHSIRGVVEASGIYSLDLALALHGADGLEVMVANPRALKEYRRAHMERSKTDKVDATIICDYAQRMPFVPGQPPSENVLALQQIARRIQALIVERTREKNRLRTACATVTTSPVVINDIEVNIRHLDRRIGELEKQALRRVVSSASIKQAHRHLTSVPGISDRSAVQLLAEILVLPQGLSVREWVAFAGLDVRHYESGTSVERPRRISRVGNVRLRRALYMPALVAIQHDEAIGAFYARLIGKGKKPLVAIVAVMRKLLHAIYGMLKHDADFEGSKFYQIPFRVYMILLGVVGWKLPKTNQIIFIKCSVFRKPRATRLII

SEQ ID NO: 189357 - protein, 350 aa, unidentified
MITIGIDPHTRTHSAAALDEGGRVLAEITVGSDPPELDRLVRWVEGIGPERIVAVEGARGFGLALCRRLLAAGETVLDVAPALTASERRSGRKAGKDDRGDAVAVARIAMREPGLPRVSAHVIGSELKLLVDARDQLVAEATRTRNRLHALLLAIAPGYHQHVRDLTSSSALLIARRLAARARADDRVRSTLACAAITRLRSLAGEIDALEREITAALDQAAPANLLSICGVGPLMAAKILGEVRDVGRFSSVSAFASYSGTAPIPASSGTVIRHRLHRGGNRQLNRALHTVALTQARRDDRAKVFLTRKRTEGKTPREARRALKRHLASAVYRALLLDAEEARSAAILT

SEQ ID NO: 189358 - protein, 343 aa, unidentified
MQAVTTIGLDIAKSVFQVHGIDAEGNVLIRRQLKRRYVLAFFEKLQSCLVGIEACATSHHWSRELKGLGHNVRLMPPAYVKPYVKRQKNDAADAEAICEAVTRASMRFVETKTPEQQSCLMLHRTRQLFIRQQTSVIKAIRAHMAEFGVVAPVGRQGVEALLEAVADVGDNRVPEVARACLAALGAQLRMLKAQILEFDRRILAWHRSNETSRRLDAIPGIGPALATALVASVADPKAFRSGRNFSAWIGLVPKQHSSGGKDKLGSISKQGDRYLRSLFTAGALAVIRYAKLHGTQHRPWLTALLARKPTKVAAIALANKLARMAWAMMARGERYREPVALAA

SEQ ID NO: 189359 - protein, 400 aa, unidentified
MNKSSFSGFLGVDISKDKFDAHCIDIKGEKQFYLSCSMDKAGFEKLVKHLEKLSIPKENLLIGMESTACYHINLFSFLLAEGYTAIVINPLLISNFVKMQLRKTKTDKKDALVIAQFLLMYVDTLAQRSISPQISDLRDLSRQRESLLSQMTALKCDMKRILTITFPELEKVTGVFTKSILKLLCRFPSAHAIVQADPAEITQLLINHSMGRNSSKAAEIIIKAAHSSIGTTSPAREVILKQKAEVLIHLDGHLKELTAVMVELCRSGMGDDIDIMTSMRGIGEKTATNFLVEMGGDIRRFKDHKKLIATAGIDPSIYQSGKHDGHGRITKRGNRHLRRVIWLMTIRVIQFNDCFRNYYKKRIQDGLPFKKAVLATAHKLLRVIFAMLTQRTFFRYEVSS

SEQ ID NO: 189360 - protein, 389 aa, unidentified
MSEAFDASRSLTMLEQDSTLIAVIEMSQSAWLVAAVVPGFKRQPLKKLDADAEALLKLLHRWRKEAGTAGRQIKRIAVAYEAGRDGFWLARWLRMRNVDAYVIHPTSVAVSREHRRAKTDRLDTELLMRAFIGWLRGEKRHCNMVAIPTVDEEDARRPNRERGNLVTEQTRIVNQIKAILARFGIRTFRPTLRRAEEKLQELRTAEGMVLPHNTRAELCRYLARLGVVRQQIRAIEQGRLRQLAIAPAEQEGPHAMMRLIARVLGVGIETADMLVNEVLSRHLRDGKAIARYAGLTGSPDESGKRRREKGLARAGNARVRCGMIQLAWRFLRFQKDSDLAQWFRARTADGRGSTRKTMIVALARKLLIALWRLATTGEASDGIVLRPAS

SEQ ID NO: 189361 - protein, 376 aa, unidentified
MNQDSTLYVGLDVHKDSITVAYAMGLDEVELFGKIGTTQMEVDRLCKRLQSKARHVHVVYEAGPCGYGLNRRLVEKGFDSMVCAPSLIPRKPGDRVKTDRRDAFKLVRSLRAGDLSAVHVPTVEDEAFRDLARAWSSARDDLKQARQRLKSFLLSHGVQYSGRANWGPAHRRWLSTLSFNSAWQQLAFNEHRRTIEDRLAQCARLEVALREAVAGWRFYPVVLALQAMRGIQFTSAVGLVSELGDLSRFDHPRQLMAWLGVTPSEHSSGSKRRQGSITKAGNSYARKLLVESAWSYQHPARVSKDIQSRQEGIPKPIVDRAWDAQLRLCGRYRRLVARGKSRQVAIIAVARELAAFIWDIGRMGMTLAVPQSEQPA

SEQ ID NO: 189362 - protein, 440 aa, unidentified
MKRRRDRVCGADVHKDLIVATITGDDVLPIRENFGTTKTELKRFRNWLVANKCEQVAFEATGVYWMPIYDALSKTIDTIVANPLQIKTIPNDKSDSKDSNRIATLCLNGQIKRSRVFTDDDRNLRMMTRARSGYVKTRTQFRNRIHKYLSSSGVKLSSTMDDIFCKSGRYILDGLAKEKPLEEILKCIPSGKIRKKKDEIRAALENGLNYSNRLLLTDALEILDHLESKMEKLSLEVLKGVQQKSKDLAIVMSIPGIGFTSAAAILSEIGDYRDFQTPDQLAKWCGLIPGENESAGKKKKCGITKKGSKHIRVMLVQAAQTISNMNKTALSRFFKRLAKKKERNVAIIAVARKLICLIYHLLINQELYQEDGECRKRGSSHDKSCHASSLQEEQLTDKVAAIVDAFYHLDESRRKNALMRELGDIAMANPGKKRPSGGGE

SEQ ID NO: 189363 - protein, 397 aa, unidentified
MKQGSKGRQAEAWDARQSERTYVGLDVHKRTIAVAVADEGRGEVRSYGTIQTTPEAVAKLVKRLGPAAGLACCYEAGPCGYGLQRQLVGLGASCIVVAPSLIPRRPGERIKTDRRDAVKLARRLRSGELTAVWVPDAEHEALRDLSRAREAARDARHRARQQLRSLLLRLGVAELTGTQRWSQRYWSWLRAMRLEQPLQQMVLADAIETVDVSTTRLKKLEGQVKAAATTGRHAPLIAALQSLRGVGVITAVTLVAELGDLSRFATPRPLMAYVGLVPSEHSSGSSQRRGRITKAGNSHARHVLVQAAWHYRHAPKLTRALQQRQVGQPEAVTDVAWRAQERLHARYRRLVGRKGSQEAVIAVARELIGFVWALAQAQAERQDPTTTDAPATAELVA

SEQ ID NO: 189364 - protein, 455 aa, unidentified
MEQRAWSFLRENLVRKNAHLLLELENLFKSNKDKDPVSMTKIRKEREGRKERKRTMKGKCIAIDVSKDKSHIQGFKSWDEPISKAIEISHDKEGFDKILEMADQFGRKEEEKAKVIFEATGIYHRGLQNYLEQNDIRYYIVNPLQSAKCRKQDLRTKKTDIRDCKNLAKMYYTMELRETTLEDEKYYTIRQLSRHYEDLLGHLRKTKVSFNETLDIVYPKYNDVFENIYTTSSMAILKKYPHPNLLARKHPETLVKQLLKTREHIESWCMTKAEELIHYAKGCASGCKETDINVQIMIEKLEDVEHYLYLTAKTLENMIQIAETIPNYKVIQTIPGIGKNLSARIVAEIGDINRFSGSKQLIAYAGIDPIIYQSGQIDGLHLRISKKGNKRLRCLLYLAVAGNLRHKNELNSIREFYNKKTQQAPPLCAKAASIACANKLLRIIYGMCKTGTVFK

SEQ ID NO: 189365 - protein, 407 aa, unidentified
MFYGGIDVAKHSHEVCLVNDSGDIVLKMHLDNNHKGMNKLLQALERLGLKPDDVKFCLEATGHYWLPIYCYLTNQGFELHVINPIQSDALRNLYVRKTKTDQKDALLLADLLRLGRAPETRLPSETTLKLQSLSRLRFEFVRQVGGLKNRVLGILDRIFPEYPDCFSDVFIRTSRELLKSYPEPEELAEVDLSELSAFLKEHSRGRFGEERAKKIQSLAKGTFGITMALDAFTLQLRLLVEQIEFIEEQIKVIEDAINEVMEELRPSKDTPYRHVIETIPGIGPVLAAAIIGEIGDISRFPNPRALVAYAGLDATVRASGLFEGTRNRMSKRGSPVLRNSLWLAAVSARRFNPELRAYYEQKRSQGKHSNVATGAVARKLVHLIYSLWKDNRPYDPDYQWSPPGKNA

SEQ ID NO: 189366 - protein, 350 aa, unidentified
MKKFIIGIDFSKETVDASIVQKEQPETLIAYKKFRNNLKGVDGLIAWAKSKVAQDGEIIFCGENTGTYSTLFSDELTDRGFIIWIEHSMNIVRGMGDVRGKDDKTDSLRIASYAARFYDKMKPYVRPKDETRVLKTLLAKRDRLKSFLKAEITNTKENPLMLQDSNIASSINEFFKRLEESLRKELKELERMILDVVMSSSEYAKNFNILTSMKGIGLINAVALIVYTDNFTKFNFNHRKIATYWGVVPFKNESGTSVRRGTHVSPKCNSWLKALLTEATLCAIRYNSRIKAYHDRLMARGKAIGIVFNNCKNKMLKILVAMVRDSKIYSDMDVSKDPHTTTTTNSIVVC

SEQ ID NO: 189367 - protein, 358 aa, unidentified
MSSTAEPVVIGMDPHKRSATIEVMTGDERVVGGHRFGTDRHGYSAMLSFATQWPDRVWAIEGCRGIGRHIALRLLGEGEQVVDVPPKLSARARLFATGQGRKTDATDAHSVALVGTRMSGLRPVIDDQELTVLRILVDRRRSLGDDHTRMVSQLHQLLLELIPGGAKKDLSAAQAKALLAKVRPKDAAGKARRRVAAELIADLERVYQRKRAANKELKALVAATGTTLMDLHGVGPSGAARLLVEVGDITRFPNRDHFASWNGTAPIDASSGDQVRHRLSRAGNRQINRVLHIMATVQLRNPTEGRDYFDRKKATGKTSMEAMRCLKRRLSDIVYRHLVDDAITHALTGPGRATGKRL

SEQ ID NO: 189368 - protein, 342 aa, unidentified
MTITIGIDPHKGSHTAVAIDSNEHVLDEIRVRSCSTQTTQLRDWAQRFEERTWAVESAHGLGYLLAQQLVAAGENVIDVPPMRASRVRVLGSGRSQKNEPNDARSIAIAALRADDLAVVRADDHSRVLKLLSKRHRDLGRLNNKASNRLHALLLEMVPGGASFRITSVTRVNAVIDDFEPVDAMGRQRQEIAREFAVDIDRYNQLLDASKQRINTAVAASSTSLTTICGVGPITAAMIIGQSGDVDRFKSKHHFASYNATAPVEASSGSKVRHRLNQRGNRQLNWAIHVVAISQLRHDNVGRAYFDRKVAEGKTSKEAIRALKRRLSDVVYRHLVADARQQS

SEQ ID NO: 189369 - protein, 395 aa, unidentified
MEFLKYGLGIDMAMEKFDACISIIDKQQHVMIRAQCSFNNNKKGFETFILWVTKNTKLPIPAVYLMEATGIYYEQLAWFLHNKKCSVSVVLPNKAKKYKEALGLKSKNDRIDAKGLAQMACEQNNTIWKPLSGNLYVLRLITRQIQSVSEQSTVLKNQLHALEYCMYRDKAIEKMYAGQIDLLQKNKKSLQLRVEQIVEKDEILKKKFKNIGKIKGLGLQNLAVIVAETNGFTAFENVAQLVSYAGYDVVENQSGKRSGKTKISKKGNNHIRRCLHFPAFNMITYDVAPFKNLYERVYEKSKIKMKAYTAVQKKLLAFIYILWKKDEAFDPNYQDKESGDEESAPSFASVPQEPLIACGNEEKKLNLIKQKITPAITRVTQDKHPSKYRRMPSFA

SEQ ID NO: 189370 - protein, 355 aa, unidentified
MTKRMTEDLSDLSVVGVDIGKDVFHLVGFDAAGNLVLRRRIKRLALNATFEALPRCVVGMEACLSAHFVSRTLRGLGFEPRIIPAIYVRPFIKGQKNDYNDAEAIAEAALRPNLKTVTEKSQDQLDLKALHRVRSRLVSRRTATINQIRAFLIEQGITVRKGLRALKSSFLTILDERQDEISPRMRTILTGLYGDWLWLDERIETVTGEIEDISRTEENCANAMTIPGIGPLISTAMVAAIGQGDAFERGRDFAAWIGLIPRQYSTGGRTVLGRISKRGSRYLRMLFVQAANVVLKRPHHWPGFSFGDWLARASSRVHRNKLAIALANKLARIAWSVLRHGTPFDAPRDQVRVGV

SEQ ID NO: 189371 - protein, 316 aa, unidentified
MAKDITISAGIDTGKYKLDIALEGTSEQLQVDNTPADHNVLADWLRRHRVKRVGIEASGGYEQAVVAALRRKRFVVVVFQPAQVRAYAKFRLQRAKNDKIDAALIAACTVAVKTIHAPPDPRLAPFAEQLTMIDQIGEDIARLKNRLETCRDRGIWRTWSEEIARLTKRRNSELKALVAAIRQHWDLAERLALIESVDGIGLPTAVAIVVRLPEIGRITREHAAALAGLAPYDDDSGKYVGIRHIAGGRQRLRRALYSAALPASMRWNPQLIALYRRLIAAGKEHKRALIACARKLLIFANAVVARGTPWQPQGAF

SEQ ID NO: 189372 - protein, 310 aa, unidentified
MERLFVGIDVSKARLDVHVRPQNESFSVSSDDAGIAMLLGRLSGLAPTLVALEATGGYEASVAAALAHAGVPVAVVNPRQIRDFARATGQLAKTDGLDAQVIARFAEAIQPPVRALASEQAQALAELVARRRQLVEMLTAELNRQRQVSQRAIQQRITAHVTWLRRAIAEIEDDIQRLIRSSPVWRAKEDLLTSAPGIGDVTAHALIADLPELGQLDRRRIAALVGVAPFTRESGQWRGRRMIGGGRAAVRTALYMATLVAIRYNPRIGAIYRRLTEAGRPKKVAIIAAMRKLVTILNAMLRDHRPWQTA

SEQ ID NO: 189373 - protein, 410 aa, unidentified
MEVMFDRVAGLDVGKETVTVCLRTPGPKGRRHAETRTFKTTTGSLRMMRDWLVEAGVSIAAMESTSAYWKAPFYCLEEVMEVWLLNAAHMKAVPGRKSDVRDAEWIAQLLEHGLLRPSFVPPPEIRRLRMLTRYRVQLMGDRRRDIVRLELMLEDASIKLSSVASSLKTVSARAILTAMINGETDPLRLADMAKGRMRRKIPDLAQALTGHFDANHARLARSMLRRLDLVEQAMAELDAVIVEACQPWAHQIELLQTIPGVGPKVAQVIIAETGGDMTRFPTAAHLAAWAGLAPAMNESAGKQSPAGKRHGNKWLAAMLVEAAGSVGRMHGKNYLAVQHARLMKRRGMGRAQVAVAHSILVSAYWMLKRDEPYHDLGADWHTRHNDEAHTRRLVAQLERLGHTVIINPAA

SEQ ID NO: 189374 - protein, 336 aa, unidentified
MFFVGIDLHKKTITLCVVNQQRQVWQRQTLHCSEPEKIRRFFAELGPFQAVVEATASYEWLWQLLEPLAERLVLAHPKKLRIIAESTRKSDRLDAQVLAEFLALGMIPEAYRPTPRQRQQRVLVRQRCYLRKQITALKNKLRRILSNYNADRKDLFSAEGLAYLAEIKVLAVDRVVIDQLRGLWEYLEKQLAGLDQELRSFARQAPVREQEARAVLESIPGVGAVTVDVVLAEVGDVQRFRSEKRVASYAGLAPGQRESAGRSKELGISKEGSRLLRWALVEAAWRLVRHSQRWQRVYEQLCKRRGKKKAIVAVARRLLGVMVALLRSGQAYRLAS

SEQ ID NO: 189375 - protein, 386 aa, unidentified
MQPILECCCGVDVHKDMIEACIIKGLNNPELIRRQFSTFPNSLKEFVVWLFENDCYHIAMESTGVYWRPVYEAIEANSAYYENIIVANAHHMRNLPGRKTDVKDAEWIATLLQHGLLEPSFVPERLIRDLREFSRTYKNAVSDKTRYVNRLEKFLQTHGFKLSSVLSDINSVSGINILTLLAQKGRLSISEVSAALKGNHKNTADDIQKAICGILNDNECFLLHDFIDEIKHIQEHISKILEKMQELSEPYSEIIARLDSIPGIDITAALLILAEIGECPNKSFKTSKHLCSWAGLSPRNDESAGKIKSKKVMPGNPYVKSILCQVAWVAVKNRKTPLGNWFWSHQSKLGRKKAIIAVSRKILALAYTLISNNTFYDNNYLQTQLN

SEQ ID NO: 189376 - protein, 326 aa, unidentified
MEHELHYIGIDTAKEKLDVDVLRPDGRHRTKKFANTTKGHDELVSWLKGHKIDHAHICIEATGTYMEPVAECLYDAGYIVSVINPALGKAFAQSEGLRNKTDTVDARMLAEFCRQKRPAAWEAPHPLERALRALVVRHQALTDMHTQELNRTETAREVQRPSIDAHLLWLEAELKRLEKQIKDLTDDDPDMKHRRKLLESIPGIGEKTSAVLLAYIGLKDRFAHARQFAAFAGLTPRRYESGSSVRGASRMSKAGHVSLRRALYMPAMVATSKTEWGRAFRDRLAANGKKGKVILGAMMRKLAQVAYGVLKSGVLFDASRHNPVAA

SEQ ID NO: 189377 - protein, 431 aa, unidentified
MVAVRGRGPGVQIVYQRCAAIDVHKDQVTVAVRAPGPGPGGRATTVRKFPAFYGVLREMTRWLVSLEVTHVAMEATGIYTMPVYHALLEPAVFEQVLVCNAAHVKNVPGRKTDAVDAAWLAELAECGLLRGSFIPDEKVKAVRDVARYRKKLVAQRTSEFQRLGGVLQDAGIKIDSVASSIGTMSGRAMIEGLIAGERDPRVLAEFARGVMRKKIPDLSMALEGRFGDHHALMCKLHLEHIDHLDDMIARLDGQVEKMMIPFKERRDLLVTIPGIGPVAAAAIISEIGVNIGEFFTTDAHLASWAGLCPGNHESAGKRKHGRPRKGSQHLKPLLVEAAWAAVKADGRLQARYHRLVLRFGGYRSPAAKKKAIIAIAHTLIVIVWHVLTTGKTYTDLGPDYYTRRLDPEKETQRLIAKLHALGHTVTLTPAA

SEQ ID NO: 189378 - protein, 398 aa, unidentified
MFIGLDWGNSHHQLCILDAAGRMVHQGKFAHDIAGARGLTERLHRHGPVQGIAIERSEGLLVETLQQQGHRLFCVSPKMSARARERYRLAPSKSDAFDAFVLADSLRHEHRHWRPLAAPSSLLAELRALTRDRERLIWNQRDVENQLRAVVLAFHPGVLHLFSSLDRDITLAFLRDYPTPAHAGRVGVARMAAFCARHGYSGRTRPELLVERLRANLLSASAGTTAGKAFTAALFVEQLELLNTQVRAITKRIRERLAEHPDAAIFLSFPGMGEVTAAIMLAEMGEDRARFPTAGVLLAETGTAPVTRSSGRSRTVKFRYAANKRMRHAIDWWAFVAVRENDWAHEAYWQARARGQLHNRAVRGVGARWTRILWRCWTDHTIYDSALHLKGPPASITA

SEQ ID NO: 189379 - protein, 400 aa, unidentified
MISVGIDVSKEKSTVCILKPYGEIVSKPFEVYHVEKELSELATMLLRLNDEVRIIMEATGIYHLPVLSYFKEKGFFVAVINPFEMKEYRCQGLRRVKTDKQDAITISHYGIDHWYRLKEYKAQENIYTELKLLGRQYCHYMRMRVESVLELTHLLDYTMPGIKTLLQGWNEKNGKDKLGDFAEEYWHYDNITKKSEKQFIDSYLKWAKKKGYHQNQDKAIKIYALAKEGIPTVSSNTPSTKMLVQEAVRVLREVDHTLMTILTQMRSLAKSLPEYPIVRAMGGVGDVLAPKLIAEIGDVRRFHSGKALIAYAGIDAPPYQSGRLVGTERKISKRGSSNLRKIGYEVMRSLKTHKAPEDAAVYEFILKKEREGKSKRAAKIAGLNKFLRIYYARVMEVYRK

SEQ ID NO: 189380 - protein, 342 aa, unidentified
MGEVITVGLDIAKSVFQVHGIDAAGEVIVRRRLSRARMLPFFAKLPRCVVGIEACNTSHHWARELIALGHDVRLMPAQYVKPYVKRGKNDAADAEAICEAVTRPTMRFVAVKTPEQQSVMMLHRVRLMLSRQRTQLTNAMRAHMSEFGIVAPVGRMGVERLLEVIADHDDTRIPADARVCLEMLGAQLVVVKEQLLENDRRIRASARETDVGRRLMEIPGVGPLLASAFVASVADPTIFKCGRDLAAWIGLVPKQNSSGGKERLGGISRAGNRYLRQMLVVGAMAVIRHAERHGTKRAWLLQLLARRATKVAAVALANKTARMVWALMTSGERYREPAVTLA

SEQ ID NO: 189381 - protein, 357 aa, unidentified
MEYTQADFTGQHVYVGIDASRKSWRIAVRVGEHFHKRFTQGPQPEQLVTYLHRHFPGATYHCVYEAGYEGFWIHDRLRALGLDCLVVHPADVPTSDKERQYKNDPVDADKLARDLSNGELHGIYVPARSVVEDRTLVRMRSCFVRKQTRCKNQIKALLEFYGYRVPEERLERHWSRAYIRWIESLAMERPSGQQALESLVTELLFLRQTIARINRQIRQLALEEPYAGVVPYICSVSGISVLAAMIFVVEVVDIDRFDTLDELASYVGLIPGERSSGESQLFTGITHRRNAALRHMIIECAWVAQREDPALLHAFTQLSSRMPKTQAIVRIARKLLNRMRFAWKNRQPYIVGVATSS

SEQ ID NO: 189382 - protein, 364 aa, unidentified
MKEKKTETRYVGIDLGKRTYQMAIVDKKGKARMSGGKTYVAARQSMYRKLNPSDKVALEAGAMAFTIAKEIEAAVGCKVFVLNPGRLAIIYKSMKKTDKEDALKIAHMLQDFQEERLPIVPVPSDKEMNRRKLVAGCKRAQQYRNRSINQLHGLFLLQGITTIVKEDLATSENRSEAIKILIGLELEEARYLLKCLELYEERIRNLDKKIEEESAGDEQIEILKSIPGVGPKTSFAFVSHVAAERFENASQVSNYLGLVPRVYMSGDTARYGRITKRGNGYLRALLVQSSWALVRSRNGGKLKQRYEYMTREKSISKKKAIVAIARRLAELMYTLMKYEARYLCMPLLIEKKEDYPKKQLAKCA

SEQ ID NO: 189383 - protein, 342 aa, unidentified
MDHSAGLDVSVKETSICIVDDTGRIVREVKVASEPEELLAELKNAAYHFKRIGLEAGPLSQWLFSALAEAGLPVICVETRHMRAVLKAQINKTDRNDARGIAQMMRVGLYRPVHVKTLRSQKLRMLLTHRKLLQSKAIAIDNDLRGTLRNFGLKVGVVGALKFEARIRELVENLPDLAELVEPLLVVRRVLREQFIMQHRRLLAIVRDDEVCRRLMTVPGVGPVVSLTYRATVDVPARFHKSKSVGAVFGLTCAKYQSGEVEWSGRISRCGDEMMRVMLYEAAQSMMRSKKWSWLKAWAMQIARRRGMKKAIVALARRLAVIMHRIWVDGTEFRWTREAAAA

SEQ ID NO: 189384 - protein, 348 aa, unidentified
MLIIGCDYHPGFQQIAFVDTETGECGERRLTHREEAEQFYSELKGRSVRVGMEASGHARWFERLLNDLQFELWIGDAAEIRTKRVRKQKTDRQDAQLLVRLMVEERFPRIWVADAENRDLRQLLWHRHRLVQMRTRVMNQLHVVALNEGLRRKKALWRPAGRKELESLILAPWASRRRQDLLGLLDQLTPKIYELTRALEAEVEKRPVTRRLMTHPGVGPLTALAFELVIGTPERFPCGKQIASYVGLVPSEESSGDRRRLGHISKQGNSLLRFLLVEAAQVTVRSSPQWRGKFFHLAMRRGRKIAKIAMARKLAVHLYWMWRQGWDYGQFEKLGSHAGAPGNRHGEQ

SEQ ID NO: 189385 - protein, 340 aa, unidentified
MGCSQKIRRRKATAKFMYAALDLHEKSIQCVLKDDAGKIVRESKVPKDEERILEFLDGTHASVVMESGYNHQHISDVLKEKGYDVKVAHPLMVKAIAYAKVKTDKVDARTLADLLRADMIPESYVPDEKTREVRDLVRRRHHLVETRTAFKSKVQAEVAKRWVKHEGDVFTKEGRDFLRSLHIDAVDDYLDAIEFLDGKIGELDRKVKEVAQQDRYAKLLVTVPGISYYSGLLISSEIADVSRFSDHEHLCSYAGLVPGLRQSAERSHPTPSKTRSAMLNWIMVQCTRVHVRSCDSSITRFYTELAMRRGEKVAIVAAARKLMRAMYIMLKEEKTFRLDG

SEQ ID NO: 189386 - protein, 349 aa, unidentified
MLTDEVDYVVGVDTHRDQHTLAVVASPTGAVVAQCSIATSGRGYAQALRIAQDYAAGARVWAVEGAGHYGAGLARYLSGHGEIVLEAGRSPRDERRLRGKDDGLDAIRAARAALGSDQLALPRAGQRREALRLLLLARRGAVDVRRQALVQLRSVIVTAPERLRRELRVLPQQRLIERCSRLRRSASRAPDELAATLVLRTLARRVQAATAEAAELEAEIAAHVRALAAPLLDEPGVGPIVAAQLIVAWSHSGRIRSEAAFARLAGAAPIPASSGQTTRHRLSRGGDRQLNRALHTVILHRRLHDPVTKDYSARRVAEGKTRRDAVRLLKRYLARHLYRLLQNQEPLMA

SEQ ID NO: 189387 - protein, 353 aa, unidentified
MNNIKYVGMDVHKAITVIVVLNELGQFESRSQIKTKAENLCDFFRGLSGKVQLVFEEGTYSAWLYQLLKPLVASVTVCDPRHNKLIEDGNKSDDEDAETLAQLLRLGAVKSVYKGDDQQRQLKEICRAYDNLVEDSTRVRNRLKAIYRGRGISCSGHALYRADQRSDWLAKLSEEAARFRAQTLLEQLESLSQLRKEAKQRLIAQARTHADYPILIKLPGFGPVRVAQLIAAVGTPHRFRTKRQFWPYCGYAVVSRSSADYEIIEGKIVKQRKKVSTRGLNRNHNPRLKQIIKSAALTALRHAAVKAYYQRLISKGTRPELARVSVARKLASIALTIWQRREEFDAKKTFAQD

SEQ ID NO: 189388 - protein, 328 aa, unidentified
MTKRTTICAGIDTGKRKLDVGLDGSGKQLQVENTPEGHKVLLAWLSQHRVKRVGIEASGGYEQPVVAELRRKRFVVVVFQPAQVRAYAKFHLQRAKNDKIDAALIAACTAAVRKIHAAPDPRLLPFAEQLTMIDQINEDTARLKNRIESCRNAQIKKLWKEDIARLEQREKAELKALVASIRKYPDLAKRLGLINSVHGIGLPTAVAILVRLPEIGRITREQAVALAGLAPYDDDSGEQVGVRHIEGGRKRLRRALYTASLAASFRWNQQLIQLYQRLTAAGKEHKRALVACARKMLIFANTVVARGTPWCDEPPAVKASMAGSLSVS

SEQ ID NO: 189389 - protein, 367 aa, unidentified
MKKVSTAATQQIRNFSSTTLTIGLDLGDRSSYYCVLDESGRIILEQKVSTTPKALQAGFGAKPRSRIALETGMHSPWVSRLLSALGHEVIVAHARNVRLIGESRKKDDRIDAQTLARLARIDPQLLCPVKHRSAKAQADLTVIRARAGLVRARTALVNTARGLAKSYGEWLSGCNVRNRNPGGAEGLSPELQLALAPLLAGIESLSQRIRECNEQIEKLAQESYPQVALLKQIKGVGTLIALTYMLTLEDPHRFRKSRDAGCYLGLQPGRRNSGQSEPQMHISKEGDPYLRTLLVQGAQHILGPFGADSDLRRWGLKLTERGGKSGKKRAIIATARKLAVLLHHLWVSGEVYEPLRNSSRMVMPTAA

SEQ ID NO: 189390 - protein, 449 aa, unidentified
MGNGSGVSRGDRNRNARLARLRALVPVTNAIAGIDLAGSKQMVVVTDHYSKVIARRTFRCRAWDLGAALDWAAGRAAAAGWAGVTVACEPTGHRWRVVGQLAGDRSMPFVCVQPLVTSWSRRTEDLTSDKTDDKDAVLIARLTGQLRCYVPEPADETWARLRHLGTRREQLITEAGSQVQQMRDLLECAWPAVLDTARQPFKSATWVAALSVIAGRDGGDLARTRRLGMQRLEQAVRREVTRRGKRRPCLRIVRSVFAALADPAGVIAHRRGALERVQLLLEDWQLTGERIGQAEQRMTGVLDELGLTGLVTSITSLSAVGAAAILAETGDPRRFATARALVKHAGLAPREKLSGGFTGRTRLTGQGRPGLRLAAWRAVWGAQRGNPVYRARYQYLTSRDQSRLTPTQAQTVIAAAILRHLHAVITTGQARDPVTAAHGLGQANAALAA

SEQ ID NO: 189391 - protein, 410 aa, unidentified
MEVLYPHCAGLDVHKQTVVACARHMVNGTVTREVRTFRTTTKDLLALSEWLAGQGCTHVAMEATGVYWKPVWHILSDGDFTLVLANAGHVKNVPGRKTDVNDATWLADLMAHGLIRGSFVPDIQTQELRGLLRTRKQFVRERSSHVQRLQKTLEDANIKLDGVISDIVGLSGRRMIEALIAGESDPEALAALAHRQIKASPAALREALRGRVTNHHRFLLRLHVQHIDALDAALNAIDREVDIHVESFREAVLLLTTIPGVSDLSAQVIRAEIGGDMSRFPTVGHLISWAGLCPRNDESAGKRRSNRMRKGAPWLKTTLIQCAWAAARKNGSYLQAQFHRLRARRSAKKAIGALAASILTAAYHMLKDGTLYHDLGPDHFDRRAKTVQTRRLLTRLQRLGYAVQITPLAA

SEQ ID NO: 189392 - protein, 456 aa, unidentified
MVSSGRSKVNFQTIHPNAAGIDIGADRHWVSVPPGREQECIRSFGCFTPELYALSDWLKQCGIETVAMESTGVYWIPLFQILETQGFEVNLVNAHHVKTVPGRKSDVLDCQWLQQLHSYGLLASSFRPDNQVCMLRSYIRHRDTLVNSASTHVLRMQKALTEMNVQLHRVISDITGSTGMRILRAIVAGERNPQTLAAMKDIRIKASQTDIAAALTGDYRAEQLFILQQELQLYDIYQQQIKACDVEIEQLLNNFTDQVNTETNPPPKSKQRRTKKPGSNTPEFDLHTHLYRISGVDFTQIPGLGTLNVLIILSEVGLDPSRFPSAKHFTSWLGLCPGSRITGGKVKSSKTRPVANRAAHAFRMAAQALSRSQSALGAFYRRIKTRLGAPKAITAAAHKLARIFYHLWSRQQSYVDPGVEFYEQQYKERTLKQLQRKAHALGFDLVPQPVADECVS

SEQ ID NO: 189393 - protein, 394 aa, unidentified
MKIFVGLDVAKDLHWAYVIDSDAKPVLSHSVANDPDQIAALITEIEALGADEVTVALDLLGGTATLLCAMIAEAGLRLVHTPGLSVNRARQGMRGGENKSDPRDAATIAELARTRPDLRPVETEREIDVDIRLLVGRRSEIVRDQTRRLGRLRDLLSSLFPAFERQIDVKTKTGLTFLSHFAAPHELRTARAARIARKLMRSSPHLRGVLQLAEEAIMLAKAQSLDVPGATTRARLIKELAAEALAARQARDRIDSDIAELLARHPDAALVQSLPGMGVVMTAELIAHIGDIRRFRSADALAAAAGLTPVLRQSGKSYAIRRATSGDKALKRVFFQSAFAALSHPGSKAFYNRKRTEGKRHSQALIALARRRINVIWAMLNSRQPFVENFKNVA

SEQ ID NO: 189394 - protein, 354 aa, unidentified
MKRTTKYVALDVHKSMTAVSVRESGGRVIARSMIPTEQAAIVEFFEGLRGTIHVTFEEGTQAQWLHDLLVPMVDRVVVCDRRGKARQGNKSDRVDADELSNLLRLGALRAVYHDRADRTTLRELTRTYQNVVEDSTRVMMRLKALFRARAIKATGRSVYHRRNRTEWLDKLRDRGVRYRAEVLYTQLDVLRELRPEVKAAMVAEARRDPAWDVLTSIPFLGPVRVAQLLATMRTPWRFRTKRHLWAYSGLAVVTHSSADYAFVDGRAVRRKRAPMTRGLNRNHNRVLKNVFKGAATAATVRPGPLQDLYHSMIERGMRAELARVTLTRTLAAVTLRLWKTGERYDPAMLTMQAH

SEQ ID NO: 189395 - protein, 401 aa, unidentified
MSKFNPKQDRIETASALEVVGDPAGVERHAAYVGLDVHKETIAVAVAELGRGEPLYRGEIANKPKSVEKLLAKLSESYDGGLLLFCYEAGPCGYVLYRQILACGHDCQVVAPSKIPKTPGDRIKTDRRDALKLARLLRGDDLTAVWVPDQEQERMRDLSRARDDMKAQERKARQQLNAFLLRHGHHWPRGKTRWTAAHENWLAGLKMEHPWQQVVLQEYIDAERAAGERVAQLTDHLMRALPEWSLAPVVDSLIALRGVDKLSAIVLLAELGDISRFDSPKQLMGFLGLVPSEHSSGPRRRQGGITLTGNGHARRMLVESAWSYRFPARQTKHLKDKAVNASPAAKKIAWKAQTRLCGRYRTLTRAGKNTKLVCVAIARELAGFIWDIVRQEMPRLALQEG

SEQ ID NO: 189396 - protein, 343 aa, unidentified
MYYIGLDVHKKTISYCIKDASGRVHGEGKIESSRSALDHWMKTLPQPWTAAMEATIFTGWIYDHLLPHASAVKVAHPLMLRAIAAAKKKNDAIDAGKIADCLRCDFLPECYMVSTEIRERRRTLRYRHLLVRQMVPLKNRIAGLLMETGVSYNKQKLHKVGYFRELLATNPEVPEGLRPLLRLSREMVVRLQKTDYALVSSLARDPLLAERVKRLRTVPGVGPITALTWALEIGEVARFRSSKQAISYCGLCGDEKSSADSVKRTPLSKQRNKHIQSVLVEAAKLAPRQHPELALVYEKEKQKGNANRATLAVARKLVAYLLAVDRREQGFVLAPENQQSTAA

SEQ ID NO: 189397 - protein, 437 aa, unidentified
MFTLDTLPPDLIFRVVTQRKQEEQRMQVVYQRCAGLDVHKLTVVACVLISQEDGKVHEQVRTFGTMTADLAALSQWLQEGKVEQVALESTGVFWWPVFNLLEEAGLAVVLVNPQHVKAVPGRKTDVADSKWLADLLRHGLRRASFIPPAAIRDLRELTRYRKALVQERTQEANRLQKVLESANIKLAGVATDILGVSGRHMLMALAAGETDPTLLADLARGQLRKKLVALEQALCGRVKPHHRVLIRAILRHIYSLEQSIEEMDREVEQVLAPFAQEFELLQGIPGVNRTAAATIIAEIGVEMARFPSAQHLASWAGVCPGNKQSGGKRLRSRTTQGNPWLRALLGEVAWAAIRQKNTSFGARFRRLARRQNKQKAMVAVMHHLLLVIYHVLRKQEPYHELGPDYFQPTDPQRLVHRHIHQLEQLGYQVTLVPMGAA

SEQ ID NO: 189398 - protein, 339 aa, unidentified
MCILYVGIDLAKNVFAVHGVDEHGKAVLVRPSVARAKLHELIAALPPCIVGMEACSGAHHWARLFLQHGHTVRLMAPKFVAPYRLSGKQGKNDAADAMAICEAVQRPNMRFVPVKSQDEQARLCVHRVRQGLVEQRTATINRIRGLLAEFGIVLPQRAATVRREATVHLEDLPGWANTAIGDLLSDVHRLDERIAEYDHHVLQMARDDQRSRALMQLSGIGNTTASALVSTIGNAHDFKNGRQLAAWLGLVPGQYSSGGKTRLGSITKAGDRYLRTLLVLGARAVLAAARTKVDRLSRWALALEERRGYWKAVVAIAAKNARMAWAVLAKGENFKLLEA

SEQ ID NO: 189399 - protein, 409 aa, unidentified
MQVVYEVCCGLDVHKKSVTACVVWASGRRKQTREFGTFTRELLELSDWLRACGVTQVALESTGVYWKPVWNLLEGQFEVLLVNAQHIKAVPGRKTDQKDSEWIAELLQHGLLRASFVPPTPIRELRDLTRYRASLAQEINRIANRIQKVLEDANIKLASVATDALGASGRAMLEAMVHGEQDSGRLAEMARGLLRNKIPELQQALQGRVTEHHRFLLRELLDHLYFVESKMRRIEQEIEERLRPFGSEVARLCTIPGVDRVTAWGLLAEIGLNMKQFPDAQHLASWAGLCPGSHESAGKRKSGKIRKGSLWLRRCLCQAAWAVSTKKNNYLSALYRRLAARRGSKRATIAVAHNLLVIAYYLLRDKVCYRDLGPDYFDRLNPHGLRRRLVRRLEGLGFKVSLQPLSQVA

SEQ ID NO: 189400 - protein, 335 aa, unidentified
MHYLYYVGLDVSKETFDASLVAFEDANEMAHRKFTNSRKGICSCLHWVEKRHGILLDDVIFCAEDMGSYISEMAVCASDRTLNFNFSLISPLVIKYSMGIARGKTDRVDARRIAEYAITHYRKIALYLPAEKELCQLRTWLILRAHLAKQRVAKLVLLEKLDYKEKFADVSIQRSMLQEEIAYAETHMKTIEREMKELIAADSNICRNYKLLTSIKGVGPITAIVMLCSTLNFTKITDHRKFACYCGLAPFEHSSGTSVRGGCHTSSMANRDIKVQLNRSALIAIRCDPQLKAYYERKVAEGKHKFSVLNAVRAKIAARCFAVVRRGTPYVALQI

SEQ ID NO: 189401 - protein, 446 aa, unidentified
MANLPILDAHAAFIDVGSEQMHGSVAGGAPRVFGTVTAQLHALRDWLKAQDVRSVAMEATGVYWLPLYGVLEAAGFEVCMVNGRQTRNLPGRKSDMQDCQWGATLHAHGLLRAGFVPPADIRRLQDYMRLRADHIEMAAAHVQHMQQALERMNIKLHDVIAKLTGVSGLAVVRSILDGERDPQRLLLLCDTQIQRAKAERVKQSLLGTWTEEHLFALRQALQSWEHYQDQIAECDRRIETLLHDIDPGDPNHTTALAARPSRPGVNAPDIADLRVMLAHMCGGQDLTQLPANTEYSVLQVVAEVGTDLTKWRTEKHFTSWMGLAPGSHQSGKRKRSVKRNRNRAGRIFCVIARSLARSKDIALGGFYRRLAARRGGLVANIALARKLAVLFWRVMVRGMDYVEHGLQQYEAKVLETKQKSLRRLARQLGQQLVPIAIQMPPASPKT

SEQ ID NO: 189402 - protein, 546 aa, unidentified
MAVSTKKSKNRRSKSRTTTRSKKRFIGKPNGKIQSRVQQAGPQHFGVISVDCAKRRSKWMLTDFYGKVIIEPTIVEHNAGALRAMTDYVRTVCNDNDIRDSIVAIEMTGIYHRLPQRAFRKAGFDTRVVHPFASSHYRRPLHPDAKTDDNDLEAIFHAAINGYGLATLEVDPVYQQLQAASRHRHNLVKQRGRLQVQIRRLMHLTMPGYADLFVDDKLFNRSIALPVAEPFSSAMAIGALGVDGIAKHLKKNKIRFQLRTIEKIVAWSKTAADASELATMQTRQWKQLNELRLMLSQQVLGVEGELAGLLAKTPYILLLSVTGINVVSAARLAGEAGPIKHYASGRAINGRAGLYPSRYQSDEVDHADGSLVRQANRKLRGAAMLVAENLIKCHPYYRGLSALWSQQKVDPRDRRCRVANRAMRMVFQLVSGRQLWRGKGVDREYLLFKLREFHRGHQTPLTECIADLQEAFKWLPKSSYASEAKPLVELTRRKRRGVVSIGELLVPLLIRLGVGEEAEEIETATETGVASESPLESNTSEARDSD

SEQ ID NO: 189403 - protein, 343 aa, unidentified
MKITTVGIDLAKNVFQVHGVDERGKAGLKKALKRDQVLPFFANHAPCLIGMEACGSAHYWARKLEALGHTVKLIAPQFVKPYVKTNKNDAADAEAICEAVGRPNMRFVPVKNGEQQAVLSLHRARQGFVKARTAQANQIRGLLAEYGIIIPQGIGHIARRLPEILEESENGLPGVFRQLLKRLGDHLKELERQVDELEGQIQTWHREHEASKKLARIPGIGPLTASALIASIGDAKSFANGRQLAAWLGLVPKQHSSGGKPILLGISKRGDIYLRTLLIHGARAVIRVAEHKPDYAESWLARLLGRRNKNVAAVALANKNARTVWALLAHDRNYEAGYEPSGA

SEQ ID NO: 189404 - protein, 360 aa, unidentified
MCRVGKPVGSLLSFLTLQINIMTIQSKKAVQELNSLFAGIDVGAEELILVIRKNGTPYKPQKFANTPADRARLVKKLVNLPGIIVCLEATGVYHFDLSIALHDAGVALMVVNPKSSHNFAKALMKNSKTDAVDADTLAQYAERMNFVAWTRPSDEKIALRSFARRIDALTRQKAAAKNQLHALSVSKENPKAVLRDVELAISQLEKRIASLSKEALVLIEKHPDLERVFQLLTGIKGIAQTSAIALMGELLLLPQGLSHREWVKSAGLDPRAFDSGKSVHKKTRISKAGNRHIRSALYMPALSAKQHDPYVKAYFQHLVDNGKLPLQALCAVMRKLLHAIHGMLKHDKPFDNTRFYAIPA

SEQ ID NO: 189405 - protein, 457 aa, unidentified
MAQRNLGVKPKPGKCRAAALTITHPNAAGIDIGSASHFVAVPPDRDDEPVREFPSFTADLNALADWLQACRVDTVAMESTGVYWIPLFELLESRGFTVLLVNARHVKNVSGRKSDVLDCQWLQQLMTYGLLRGAFRPAEQVCMLRALYRQRGMLLRSQGRHVQHMQKALTQMNIQLTNVLSDVVGETGQKILRAILAGERDGLALGAMKNVRVRASAEEIAKSLQGNWRAEHLFALKQALAAFDFVGTQLAECDAEIELQLQSLKVHDGEPAKGKKRGRARNAPKFDLRTQLFQMCGVDLTRIDGIDVTTALAVVSEVGADMSRFPTVKHFTSWLGLCPGTKITGGKIMSGKTKRVVNRAAQALRLAAAALRSSKSALGAYFRRMCSRMDKPKAVTAAAHKLARLVYTMLTKGEEYTDQGQDYYEERYRERVLRALSQRASKLGMQMVPITPVQQPT

SEQ ID NO: 189406 - protein, 316 aa, unidentified
MSQSERVIGIDVSKNLLDVAVVPEKDTWLVDNDEEGIRTLIKDAKRLRPRLIVLEATGGLETAVVALLAAARLPVVVVNPRQVRDFAKSLGKLAKTDKIDALVLAHFGEATKPEIRSLKDQQAQQLSALVARRKQLVEMLTAEKNRLMTAPEPVDNDIKAHIAWLEQRLNDINKDLRKAIKASAVWRAKEKLLRTVPGVGPVLSVSLLAGLPELGKLNRKQIAALVGVAPFNRDSGKFRGRRSIWGGRGHVRAVLYMGTLTAIRFNPVISAFYQRLCAAGKAHKVALTACMRKLLTILNAMMKNHAPWQPYSRETA

SEQ ID NO: 189407 - protein, 347 aa, unidentified
MEYIGIDVHKNQSQICILSEEGEVTQQRIKTERKRLEEVLGGRWGCRILLEASTESEWVARCLEAFGHEVIVADPNYAPMYGQRNRRVKTDRRDAEALAIACRMGTYRQAHRVSDEQRHRRAVLSAREALVRTRVRYIALVRALLRRQGYRVPTGTSASFGIRIDKLQLPGEMDSEIGPLLTILGELNRQLEECDQQVEEMVGQDESVQRLCTVPGVGILTATAFVSVVDEVGRFQGAHQLESYLGLTPREMSSGDKQHRGAITKAGNGRMRWMLVESAWCILRSRRAETWHLRRWTERIALRRGRRVALVALARKLAGILYALLRDGTVYASLKVAQPEAQESTVR

SEQ ID NO: 189408 - protein, 408 aa, unidentified
MKILHRRCAGVDVHSANVVACIRVMTKGRVRHEVRRFATSTRDLLTLRDWFEAEKITHVAMEATGVYWKPVWHILEEKFTLILANAAYVRNLPGRKSDVNDATWVADLLAHGLIRASFVPPAPVQELRDLTRTRTQLTREAARHIQRIQKALEDANIKLASLISDIVGLSGRRILKAIVAGETNAAKLAALGSKRLKCSRCELMAVLEGQVSDNHRFLISQHLGILEDLERRIEAFDKRITDVLAPFRHLVELLMTIPGVSRVSAEIILAEIGFDMAPFPTAGHLLSWAGVVPRLDESAGKRRSTRVRHGAPWLKPVLAQCGWAASRAKGTYLQAQFYRLKARRGPKKAVIAVAASILTAVYHMLKNHMSYQDLGPDHFVKRDAARIAAKLARRIKDLGYDVKYSLAA

SEQ ID NO: 189409 - protein, 339 aa, unidentified
MYYGAIDLHKNNSVLGIINADGQRLCMRKIPNDLDLIKKALDPFAENMEGIVVESTYNWYWLVDGLQDAGYRVHLANPTAIQQYSGIKHTDDVTDAWWLAELLRTRLLKEGFIYPRAERAVRDLLRKRAHLVKQRTQNILSIQNLICRNTGGRLSANQTKQLTEEAVQKFYDKEEERALAINCSLRVIQTLKREITIIEKKAKSKLKLSQPYQVLQSVPGIGELLAMVIMLEAGDMSRFPGVGNFSSYCRCVNSVRLSNGKKKGSGNRKNGNKYLSWAFMEAAHYATRYYPVIRKFYQRKSAQKGMMVAQMAVAHKLARASYYVLRDQVPFEETKCFGH

SEQ ID NO: 189410 - protein, 343 aa, unidentified
MQGITTVGLDIAKSVFQVHAIDAEGNVIVRRQLKRRGVLAFFQKLPPCLVGIEACASSHHWSRALQGLGHTVRLMPPAYVKPYVKRQKNDLADAEAICEAVTRPTMRFVATKTPEQQSCLMLHRTRHLFIRQQTAVINAIRAHLAEFGIVAPVGRKGVEQLLDVVADANDKRLPEMARVCVAALGAQLRTLKAQILEFDRQIMAWHRSNATSRRLDAIPGVGPALATALVASVADPKAFRSGRNFSAWVGLVPKQNSSGGKERLGSINKQGDRYLRSLFTAGALAVIRYAKIHGTRHRPWLTALLARRPTKVAAIALANKIARMAWAMLARGERYKEPIALAT

SEQ ID NO: 189411 - protein, 372 aa, unidentified
MDERIKFFVGLDAHKDTMAVAACEAGREPARFAGTLGPDVRALLKVLSKAGDPAGVSVVYEAGPTGYGLYRELSRRGYHCEIIAPTLIPRRAGERIKTDRRDCLRLAELSRSGELKSIWVPDEAHEAMRNLWRAREDAVGMRLKARQQLKAFLLRHARRYPGKTSWTKSHERWIADQRFDHQGDRIALAEYQLAQQSAEHRVQRLTTALTEAAAGWRLEPVVAALRALRGIDTVSAIGLVAEIGDFRRFATARQFMGYLGLVPSEHSSGNSVRRGAITKTGNAHARRLLTEAAWNYRFPARLSQALRERSSSLPDAVRLHAWKAQLRLCARFARLSSRGVQANKVCVAVARELAGFVWAIAQQASFPTTPPH

SEQ ID NO: 189412 - protein, 363 aa, unidentified
MKIMVGIDLHSNNALCGFMDENGRRLLHKQLPCDLASILQLLKPYKKRIDTIAVESTFNWYWLVDGLQDHGYHVVLANPAAMQPYSGKKHTDDVSDAFFLAELLRLKLLPTGHIYDRQLRPVRDLLRRRLLLVRQRTTLILSFKSLNERTLGERVPLARVKAMSPEDAQARFTAPADQLLAGEQITLMDHQTAAITKIEQHILKVAEKTPAYQRLQEMPGIGKILGLTIALETGDARRFADAGNFASYCRCVKSIRQSNQKKKGENNRKCGNTYLAWAFVEAAHFACRHDDQCRRFYDRKKRKTNPIIATKSLACKLAKAAWHVMAEDVPYDATRVFGAGKEKDFGETGREPAKGSGRKSQQN

SEQ ID NO: 189413 - protein, 431 aa, unidentified
MSKFFYRPIVGIDVSADFSVIAILAPDGEIYRKPFKIMHNRNGFDYLVDQIKKVEEEFNMKTAIFMESTGVYHLTLFHFLKDTFEVCILNPLITNCNKNGDIRKVKNDKKDALTIATIGKFQNVKYSSNFDVEIYTLKSLYRDYYKFTDSKSTFKKKLSTDLRVIFPRYSSVFSDITSKTSIAVLKKYSSPEAVLNAERDELINLISNNSRKGLAHSENTYKKLYDAAEEAVYIGLKSPSLFVKIINTIAVIESLENQIKNLLSEIHLLMRSDRISDEFKKNVQLLYSIPGVGELTAITIISEIGNIKGFVKPKHLVAYFGLDPSVSQSGKFNSDRNVMSKRGTRIGRRALYAVALASIRKNRNGEPINRVLLNFYNENMKGKSKKVGLVAIMHKLINYIFSVLKNQKEYELRDPKIHSKMYLTNKSNKAA

SEQ ID NO: 189414 - protein, 407 aa, unidentified
MRYYIGVDWADEEDAVWVVNDAGDTVLKRQVAHTVGARSEWGRWLREYTAQGMELWAAIERPHGRTVDFLLDHGVVVYPINPKSLDRARDRFRVGGAKSDPFDAQVLALFLRSDHAQLRPLHPNSAGAQELKGLTRDYRRQVHLQTRLRNQLTATLKEYYPRALELCEDLTAAWAQAFLAQYPTPAAAAALTEPAWQTFARAHRLSHTRTAALWAILQQPQLPLPAHVVRTKARLLQALLRELAATQTVVAEYRQAIDDFFATLPTAEIARSLPVGKSGTTVPTIWAELGDQLDRWDSFQHLQGYGGSVPETVRSGKHCVVKFRFACNTPLRDAMHQLAFLSLPHSLWAHAYYDRYRARNHTHHEALRALGAKWLKIIFAMWRRHTPYSETHHLASIARQQLQQPAA

SEQ ID NO: 189415 - protein, 312 aa, unidentified
MAKDTIGIDVSKDRLDAFWHSRTEACCLPNTPEGFGQLCDWLGKEEDVLIVFEATGAYHRGLERHLSLTGLPFIKVNPKQARRFAQAIGRLAKTDSVDARMLARMGVVLELRPQVVEGEDVHDLRELLTARRALVKDQVTAKTRLATARNPLVREQLGRRIEDIGADIQALDEVIAQIARQRGTLEERIRRLMTIPGIGRLTATTMLIDMPELGHLEGKKITALAGLAPMTQQSGKWQGKERITGGRSSIRRAIYMPALVAIRFNRDLHDKYQQLLKAGKAKKVAITAIMRRIIVLANTLLRERRDWLPDRP

SEQ ID NO: 189416 - protein, 406 aa, unidentified
MEVIHERCCGLDVHKKTVTACIITPKGKVIKTFGTMTGNILELVDWINANRCTHVAMESTGVYWKPIYNLLELAGVDVMVVNAHHIKTVPGRKTDVKDAEWIADLLRHGLLKGSYIPSRPQRELRELVRYRKSLIEERTREVNRLQKVLEGCNIKLSSVLSDIMGVSGRSMIEAIIKNIDDPQPIAKMAKGRLKSKIESLEQALHGLVGSHQRMILATQLRHIDFLDAEIQRLDREVEERLRPFEEELELLETIPGVGRRSAESIVAEIGFDMHRFPSDGHLSSWAGMAPGNNESAGKRKSGKVRKGNKHLRSTLVQCARSASRTKETYLSAQFRRIAARRGSNRAAVAVGHSILVICYHILKKRQPYYDLGANYFDKRKSTSVLTNAVKRIEALGFKVIVEEKTA

SEQ ID NO: 189417 - protein, 315 aa, unidentified
MTDTRPTAGIDVSKDFLDLATYPPTEPVRLPNTPDGCVALAARLAGIRLVVLEATGGYESAVVAALHLGGVPVAVVNPRQARDFARVVGRHAKSDAVDALVLAEFAAKIDPPQATAPDPDREALAAVLTRRRQLLDMRVMESNRLRPDTPAAIRAGIQDHLAWLDEHIAAADRELACAIRRTPAWRAEGDLLRSLPGIGPVVSRTLIADLPELGHRSADQLVALVGLAPFAQDSGRRSGGRHIRGGRATVRRALYLAALTARRVAGPLKDFADRLKARGKAAKVVLVAVARRLLVIANAVVRDGRPWQPALAEAK

SEQ ID NO: 189418 - protein, 338 aa, unidentified
MNYMGIDHHNQYSHITVMDETGEVIRSEKVANLRREVERFLTGIKETKAVIEAGRSSYTMVDLLSDMGVEVAIAHPKEVKAIAKAKIKTDKRDSYKLAHLLRMDYIPEVYQRSCENRTCQRVLRQRAFYVRMATRLKNRIRALLAQQSEEIRLEIARQKNIFGTKGLAVVKGLDLPANEKKLLKAMLATFEHVEKKITETSALVDALYERLPAAQLIRTVPGFGKFLSVLVAVEIADIGRFENVGHLHSYAGVIPSTHSSGERTYHGKIIRSGNRWLRWAAVEAVWPGICADFDLRCYYDRLKKRKGANSAKVATARRLLTIIYRMLKEGRNYILFKR

SEQ ID NO: 189419 - protein, 353 aa, unidentified
MITIGVDAHKRVHVALALDEAGQELGEWRGLNNAAGWQAISQWAASLGSPRRWGIEGAWGYGRNLAQHLVAAGETVYEVNPRWTAMGRRGARKPGKTDRLDARAVALLVRQEASALPLVHAEDDTAVLDLLTSEREAAIAESTRLRNQIHALLLQTDPEYRAYLPTLKSQAALDTLETYRAAGSNPLQAQRAAAIRRLTQRLRLALSQAEELAEQIKDLAERRFSPLTNLCGVNLITAGTLAGILGPGDRFATDAQLAAYAGVAPLEASSAGLVRHRLNRGGNRRLNSVLYRIVLTQAHHLPAAKAYIERRVSEGKTRREAHRALRRFVIRAIWRLWQECQRARISASVERAA

SEQ ID NO: 189420 - protein, 368 aa, unidentified
MGRKSSKLFVGMDVHKESIDITLAEEGGAVRHYGRIGGEQSALIRTVRKLESLGKSLVFVYEAGPCGFWIYRLLRERGHECWVVAPSNTPRRVRDRIKTDRRDSLKLAGLARAGELTPIYVPDAADEAMRDLVRAREDAVATQRQARHRLAALLLRNDIRYCGKTAWTEAHRRWMARLPLPGAAQRIAFEEYVLTVNEATASVQRLTASMEQELVHWRWQPVVHALQACRGIQLIHAVRIVAEVGDLSRFSHPRQLMAYLGLIPSEDSSGERRRQGPITQAGNRSARRALVEAAWAYRHHAAMSPIIVRRQSGLAKPVLDIAWKAQLRLCARFRRLSARGINRNKIVVAIARELAGFVGAIGQRVKLN

SEQ ID NO: 189421 - protein, 464 aa, unidentified
MRTDKRRWRNRKAKKELARRLQSENPGLEVVHAHAAGIDVGNGAHYAAVRPDRDLQPVRRFECFTADLYRLADWLQNCGVKTVALQSTGVYWIPLYDILEERGFEVYLVNARHTKNLPGRKSDVQESQWLLKLHTYGLLNNSFQPSSKIRILRTYWRQRLQHVTGAATCVQRMQKALTQMNIQLANVISDLSGVTGQLIVRAIVAGERDPQKLTELSHPRIQASRGEIAKSLEGNWRQELIFVLQQEIEMYDTYQRRVAECDQELQKHLRAFADTVAPVQQELPPKKKKKQNKNNPHFRLADELQRITGVDLTRIDGVDVMVAQTLVSEVGLDMSRWKTEAHFASWLGLCPDNRISGDKVLSRGTRHVLNRAANALRLGASTLLRSQTYLGAQYRRLRSKLGAPKAITAMAHRLARLVYRMLKYGQQYVDKGAEYYERRNRQQQIEFLKKKAARLGLQLTPVYP

SEQ ID NO: 189422 - protein, 351 aa, unidentified
MLYTGVDFHKRYSVACTMDADGARVKEARIVNTPEAIASYFRELPDVSQVVMEACWNWGWLYDLLGELEGVEEVVLANPAKTKIIADAQIKTDKIDARALCTLLRGHFVAQVHAPSRATRAKKNVLRQRVYLVQLRTRLRNRIHIILDRQRSLERPVWADLFGKKGLHWLRGLSLPEPDGLLLNQSMALHDALNEHVRVLEGKIKEENLGNPMAQRLDSLPGVGPILAAVIASEIETVDRFRRADKLCAYAGLAPTTYASGGHVHHGRLLPFCNRWLRWAFVEAAWTAIGCSPYFGDIYRRHRARGKKANVAITIAAHRMCQIAWSLLREQRDFSQMPPIKSLSPVAPNAD

SEQ ID NO: 189423 - protein, 349 aa, unidentified
MRCYQPPADSRFYAGVDLHARSLFLGILDRAGQPCFARNLPAAPQPFLRAVAPFRDGLVVGCECMHCWYWLADTCRDEAIPFALGHAWAMKAVHGQKTKCDRHDALAIARLLKGGNFPLAYAYPKQRRGLRDLLRARLRLVRQRAQLYGHVHTARRQANLPAVSNDVKYKSKRGAITADVADPFVRRRVETDLALLEPLDTTIRRLEAEIEDAAQQHYPTELAVLQSTPGVGVVLSLTILLEIDTIDRFDTRQQFCSYARLCGAVQTSDNKRVGMGNRKAGNAWLKWAFSEAAVLAAQKDERIGAFLERLASRLGKPKAYSALAHKLGRAFYHMLHTKEVFDVQRFVRH

SEQ ID NO: 189424 - protein, 320 aa, unidentified
MRNTVGLDISKLTFDATAIVGNAEYSAKFDNDSKGLDQFSDRLKSLGCQNLHICMEATGNYYEEVADYFAQYYSVYVVNPLKISKYAESRFKRTKTDKQDAKLIAQYCRSAQESELVKRQKPTDEQYRLLRMTAAYAQIKSECAAMKNRHHAAKDEEAAKAYAQIIKAMNEQLEVLKEKIKEQTEKPNCKEGVKRLETIPAIGRMTAAVLFHHLTSSKFETSNKFAAFAGLSPQQKESGTSVRGKGKLTKFGNRKLRAVLFMPAMVAYRIRAFPGFIARLEEKKKPKKVIIAALMRKLAVIAYHVHKKGGDYDPSRYKSA

SEQ ID NO: 189425 - protein, 485 aa, unidentified
MKGKGREKCVRTPRAKTSAPAKAAPTTEAQQKLQSHPKPGTDWKELEVVHENAAGIDIGGSEHWVAINPKLDEQPVRSFPCFTKDVVQMANWLWDRGVRTVAMQSTGVYWLGVFEILQQRGLEVYLVNARHTKNLPGRKSDIQECQWLLKLHTFGLLNNSFQPSDEIRKSRTIWRHRGNLVTQASSSIQRMQKALIEMNIQLSTVLSDLSGVSGMRILEAILKGIQDPYVLASLAEPSVKASQEVIVKSLQGNWRKELLFVLKQEVQLYQTYQKQIAECDQKLQSHLQSMQPREGTDTPLGPRPKGKKARGNAPQFDLRAELYRLTGVDWSQVDGIDVQTAQTVLAEVGIDLKAFKTEKHFASWLGLCPRNDTSGGKVLNRRIPKVKNRAKAAFRQAATTLLQSDSYLGAQYRRLRTRLGAPKAITAMARKLACLFYRLLTHGQQYVDKGQEYYEKRHRDQQIRYLAKKAQLLGVKVVTPEPAVA

SEQ ID NO: 189426 - protein, 325 aa, unidentified
MEKVFIGIDISKLTLDVFVNKCLKTQYYQIGNNSKAIKKFFKSFSNDANTIVGMENTGRYNFELYEVLSRMNLLVFVINPLHLKKSIGLLRGKNDKLDSQRIGMFLEKNYMDLKPWIPKSCDIQKINLLNSERRHRVKIKAGLSRQMKDLSFLKNHTDKEIIELNKQLILLLDKQIKTIEKKMVEIIESNIELKEQYTRIQTVPGVGKILATMLILKTNGFTEIQSARKMACYSGVVPFDHRSGSSIYYKPRVSTMADKELKKILHLAALSSIRLKNDLALYFQRKVLEGKNKMSVLNAIRNKIIHRVYALIKNNSVYENNLQMS

SEQ ID NO: 189427 - protein, 436 aa, unidentified
MPLSAMYCVRRCPVKPAIEPSFTALVGIDWSDRKHDFCLQAASSSQREFGVLVHSPEAITLWAKALYRRFGGPIAVCLEIAKGPLVHALQRHEFIVLFPVNPATLAKYREAFVPSRAKDDPTDAQLALELLLRHRDKLQPLQPQGPDMRTLATLVEQRRLLVGDKTRITNRLGGTLKEYFPQALDWFEDRDTVLFCDFLQRWPSLKHAKRARQATLRSFFSAHNLRRASLIEERIHGIRSATALTDDPAVLGPHQLLVQALVAQLRVTLQAIDHFDAEITAVAKRLPDYALFAALPGAGSILAPRLLVAFGEQRERYASAAQLQQYAGVAPVLERSGNKCWVHWRLACPTFLRQTFVEWAGSTIPRSFWASVYYHRQRAKGSSHQAAVRALAYKWIRILYRCWQTRTPYDESVYLLALKHRGSPLIAAMATTPQNT

SEQ ID NO: 189428 - protein, 406 aa, unidentified
MQVYLGIDCSQHSYEASFVNQAGAVLARLAIPSSPEGFLHLDAARDKLGIPPSDCLVALESAHNLLVDFLWDHGYSQVYVIAPHVIKSCRDRYRHSGARTDPSDAYVLADVLRTDRHRFYPWYPDQPSTRQIRAMNSLIGHLGRTILRHSNRLRAVLARYYPGLLQAFRDIHGPVALHFIQAYPTPQATAQLTWEQFQLFARQHRYTHRARVSRCFSRLQTPQPEAAPPIVEAYQQEAVLLAGLLLSLVEKRRALIRQMDLLFERHPDHTIFASLPGAGPQLAPALLAKFGDDRSRFPTPATIQALAGSCPVTDSSGKRRTVKFRRACDREFRHIAQQWARCSLQRSLWAQAYWSQVRPRCSSDSHALRCLANRWLAVAWSLWQKHQPYDEAYHLHQRALNTRLPT

SEQ ID NO: 189429 - protein, 326 aa, unidentified
MYSIGLDVSKSTINVYIPINDIDLIIDNDLKSIKQLYLKMKKIYKKDLNKLIFVFEPTGNYSSILKYFCANQEIKCFIINPKQSSNFAKALGNKTKTDTVDARMLSSAISVAEKRNVKVPIINEIYEKLQELTSYKSLLIKQRTQIINHLESKQHNNSKYIISKLKDDINRIDKEEENILKEIKSLLKKDKELYQSFLNLQTIKRVGQKIAIELLLHFIKYPNANKKQIVSLAGLEPIHKESGSSYKTKARISKNGSVSCRSSLFMAVFCYKQLNTTFIEFHNRLKEKGKPTNVIKVALMRKLLIVAHSLYKNNDVYIEKCSTNYN

SEQ ID NO: 189430 - protein, 403 aa, unidentified
MSIDGAPVKAASVVAVDVGKNTVTLSVTDAARRRLLGPVDFAMTAPAVAVVLERVCAVLPAAPVKVGVEAAGHYHRPLLGSGVWPAGWELLELSPARVAEQRRVQGRRRVKTDAIDLEAITELVLAGHGVPVTARSAAVTELTGWAMHRSRRVQTRTATKNQLLAQLDRCFPGVTLALPDVLGTKIGRLVAAEFADPHRLAALGVTRFVRFAANRGLRVPHSAADRLVAAARAGLPTPEAAVARQVLADDLVLLADLDAQIAAAEAKMAGLMPDTPFAPLLTVPGWGTVRAGNYAAAVGDPQRWPGARQLYRASGLSPAQYESAGRRRDGTISREGSVALRRALIDLGIGLWHADPAAKSYGQALRARGKKGGVIGCAMAHRANKIAYAMVRDQTGYDPTRWA

SEQ ID NO: 189431 - protein, 457 aa, unidentified
MSKSVKKATPIRFHEGLQQLRKDAGGMDIGASEIWVDVGLENDSEPVRRFETFTADLNRMAEWLIDCGIKSVVMESTGVYWIPACQILEDKGIEVLLVNPRYAKNVSGRKTDALDCQWLRTLHCYGLLPASFRPAREIASLRSYLRHRQMLIEYAAAHIQHMQKAMTQMNLQLHHVIADITGLTGMRIIRAIVGGERNRKKLASMRHERTHANEATIEKALEGDYRTEHLFALKQSLEAFDHYQKQILECGQQIAQHVRSLETKADRSLKAPSKAMQKRRNRMKFNVREEAFRISGVDLTQIDGINESAALGLISEIGIDMSPWQTEKHFASWLTLCPNNKISGGHVLKRRTRKSANRARNILCFCAQSLLRSRSALGAFCRRICSRLGKPKGLIATAHKVALFIYRMMKYGRDYADIGQEQYDKQFKERTLRSLARKAKDLGFQLVPPPRKRFLRI

SEQ ID NO: 189432 - protein, 347 aa, unidentified
MDHIGIDLHKRESQICLLAEGGELIERRIRTEPQRFAEALGGRAPAQVLLESSTESEWVARCLEALGHHVVVADPNFAPMYATRTRKVKTDRRDARALAEACLLGAYRPAHRLSDAQRHVRARLTVRDALVRTRTRYISLIRALLRQHGWRVPSGSAEGFPRRVLALPLPGRLRSEVAPLLAVMRHLQPPLAYSDERIAAVTATDERVRRLQSMPNIGPVTAAAFVAAIDEASRFRRGHEVEAYLGLVPRELSSGETQRRGRITKAGSSRVRWLLIQAAVSMLRLRDPRTAALREWAGRIAARRGKGIAVVALARRLAGILFALLRDGTVYEPRRRPACPVTQAVPA

SEQ ID NO: 189433 - protein, 391 aa, unidentified
MDEEIRVVIGMDPHKRSVTIEVMTSDEQIVGGGRFATDVEGFTAMLAYVAAWPNRIWAVEGCEGIGRHVAQRLIAKGEPVVDVPAKLSARVRVFATGQGRKTDDTDAHSIALVGVRMSGLRSVVNDEQLELLRLLVDRRRRIGEEHTRMVCQLHQLLLELIPGGAKRDLSAAQARQLLAGVRPRDVVGKTRKRHAMELVVDLERIYQRKKAANKELIELIKTTGTGLLDLHGIGPSGAARLLVEVGDITRFPDRGHFASWTGTAPIDASSGDRVRHRLSRGGNRQINMVLHMMAVVQLRNPTEGRAYYDRKIASGKSPNEAMRCLKRRLSDIVYRTMLNDLVANKATGPGGHRGATLQSSAAGSHPHTGSSDKSLPGPAKIKPRTPLPTAS

SEQ ID NO: 189434 - protein, 321 aa, unidentified
MKNFTDSVPVGIDVAKASLEVSLGTDRSTQSFANDVEGHDALLARLQGTPISLIVLEATGGYEAAIAGALQAAGLPVAVVNPRQARDFAKAMGILAKTDSIDARVLARFAQALLQRGDLQRLIKPLADEALKALQAQLLRRRQLCGMLIAERQRLSTCHRSTRADIEASIRFLKNRLDKADAELARIIQQDHAALNDLLRGVKGVGPNTLATLIAELPELGHMTRREIGALVGVVPLNRDSGQFRGRQRTWGGRATVRRTLYMAALVASRHNPAIRRFYAHLIEQGKAPKLALTACMRKLLTILNAMARDHVPFNPALHQC

SEQ ID NO: 189435 - protein, 427 aa, unidentified
MKGRRAGDLSGKDGLMMEVLYERCCALDVHKKTVIVCVATRDGKQTRTFATMTSDLLELADYLVSKGCTHVAMESTGVYWKPIYNILDGLGMELLVVNARDIKAVPGRKTDVKDAEWICDLLRHGLLRGSFIPDRSQRELRELVRYRKGLVQERSREVNRIQKVLEGANIKLGDVATNVMGKSGQAILEALVQGNTDPESLAGLAKGKLRRKNEQLARALQGLIGPHQRMMLSTQLGHIRFLDGQIERLNREVEERMRPFEEAIEAIDAIPGVGRRIAEEVLAETGADMAQFPTAAHLASWVGVCPGNNESAGKRKSGRARKGNPHARQALVEAAQSAAHTKDTYLSSQYHRIAARRGNKRAIVAVAHTILTIMYHILTERTTYRELGPDHFDKLNQDAVARRAIKKLETLGYKVTIEPLSTLECSA

SEQ ID NO: 189436 - protein, 346 aa, unidentified
MTHYVGLDVSVKSVSICVVDAAGSVLARGDTTSDPDEITAFIAKHAPAPDRIVHESGILAIWLTRELEKRGLPITCIDARLAHKALSGRINKSDPGDAEGLAHLARTGWFSQVHIRSEASERVRVLIGTRERLIRLRKDLEGHVRGVLKVFGICMGAVGQAGMRQRFRDQLAEAGETDLAISVMADVFLPIHKALCAATQAMDDELKAIAKESDLVRRLMTVPGVGPVVALSFTATLDDPGRFRRAKDVGAFLGLTPRRHQSGDMDWSGRISKCGDRDLRRLLYSAATTLITQVRKPSPLRTWALRLQERKGFKKAAVAAARKIAIVLMCIWRDGTVFNPTQEANA

SEQ ID NO: 189437 - protein, 316 aa, unidentified
MEKVAKVFVGVDISKQHLDFHLYPINKSFRVENSKKGMQLLLSELSTHKDCIEVIACESTGGYESLMLKTVKFADYKTWRVDPARIKAFIKSEGKKSKTDKGDAAMIALFAAQKTQPYEVIERSEKETLLNELCKRKHDLKKCIASEKLRLEHEQISFCKKQLQKHIRFIEKQVDALEKEMNLIVDNDKVLKQKIAVAESVPGVGRATAIAMIAGLPELGKIGNRQISSLVGVAPFTNESGKYKGISRTAAGRSEVRQALFMAALSARTCNKRLRNFFEHLTEKGKRGMVAMVAVMRRLIVMINAMMRENVKWKEA

SEQ ID NO: 189438 - protein, 368 aa, unidentified
MKNVITYVGIDAHKKDLFMAMLVGNQATPMTWTTPNEPRAVRRLVKKIEREAPGAVRVFYEAGPCGYALQRQVTTSRVSCDVVAPALIPRKPGERVKTNRRDARKLAELGRAGLLTAVQPPTPEDEAVRDLARARDDAREDLQRCRHRLGKLLLRRGLHYAGRNWTRGHREWIDSLMWTHAAERAVVDDYLLAIDHTEARLLELDARLAEIAERDPYREAVGWLRCFRGIDTLTAILILAELHDFRRFASAPALMAYLGLVPGEDSSGEKHRRGRITRTGNALVRRLLVEVAWHYQHRPGVGVALARRRKGQPARVIAIADKAQQRLCRRFRKLVAEHKPAPKIAVATARELAGFLWAALQPAPSTVN

SEQ ID NO: 189439 - protein, 348 aa, unidentified
MNRTHYIGLDVHKKSVSYCIKLADGTVVAEGKVAARREDLRQWAKQLPQPWEGAMEATLFSGWIYDVLKPLAAKLEMGHPRMLKAITAAKKKSDGIDAGKLSDLQRANLLPSCYVATPQIRELRRMLRYRNLVVWQAVRMKNRISGLLMETGMEYNQQRLHGKGYFAELMKNLVEVPESVRQLLRLSRAALEMFEVTQLRLLKQLRTDAQLAKRVQRLTSIPGVGEVTALTWALEIADPSRFPSIHQAQSYCGLTAALNSSADKQKRGPISKQRNPHLQTVLIEAAKLAPRWNSALAAVHERELTHGHRNRATLEVARKLVAYLLAVDRSQQPFQMRAGATTAGAAPT

SEQ ID NO: 189440 - protein, 472 aa, unidentified
MGKGSGNGTTRGDRKRNARRERLRGLLPRDGAVIGIDLAEDKQALAVIDHDVRVLARKTVRVKAFRLGEALDWAVAAAKVKGFTHVTVACEPTGPRWLQVQRLCEERGLPLVCIQPLVSHIAREQQDYTTHKTDEADCVLIARLATELHCYIPEELDETWAHLRHLGRRRAQLITTATASAQRIRDFLSVAWPTVTETCAQPLESKTWLAAMQVVTSRCGGQPGRLAAMGLEAFTALARGAVAGWGGQKARGTISRRIFAALTDTEGVVVSSRRGLLRRCADELGDLQRTRAQLRAVEADMAAVLDELGLSRLADIPALTVVGAAAILAETGDPRRYDSSSSLVKHAGLSPSDNASGAFYGQAHISRRGRPGLRLTVWRAVWPMLRFNPVLAAKYAAMTKAADGAAEAAAIQADTGSRQATAAAAAARARHAKARVACAASLLRWIYSLVVHGTSWDPDVAPGPSTCPAEAA

SEQ ID NO: 189441 - protein, 413 aa, unidentified
MEVIHEHCAGIDISKADVKVCIRVPSDTGTRRRSEVRTFSAVTSGLLAMRDWLLAQGITVVGMEATGVYWRPVFYLLEHDLECWLLNARHMKSVPGRKTDVKDSEWIARLVEHGLVRPSFVPPEPIRQLRDVTRYRTEIVRERTREAQRLEKLLEDTGIKLSATVSTILGVSGRAMLEALIAGERDPHVLAGLAKGSMRRKTDALIEALTGSFTAHHAFLARAMLDRIDACTATETRLSEHIEVMLQPFRRHVELLVTIPGVDARAAQVILAEIGADVTRFPSAADLASWAGVCPGNHQSGGRTGSGTTRHGDPWLKAALGQAAVSASRTKDTYLAARYRRLAARRGKKRALVALEHSILIAVWHMFTHDTGYTDLGGQYFVERTGRARQTRRLVSQLNQLGYQVTLQAEEAA

SEQ ID NO: 189442 - protein, 357 aa, unidentified
MHERTFIGLDVHARSTKAGVLDGLTGEVKSLAVPVATNALVAWVCAQPDPAVTYEAGPTGYELARALLAAGVPCLVAAPSRIPRAPGDRVKTDRRDAVRLARLLRLEELTPVRVPGLAEEAARDLVRAREDARGDLMRARHRLSKLLLRRGIVWEARAWTGAHELWLSRQRFSERPLQIAYEEALAAMLSVRDRRDALDAAIAVEAAVEPWAPVVDRLSCLRGVSTLTAFALTVEIGDWQRFSGRSLPAFLGLTPSESSSGASRRQGSITRAGNAHVRRLLVEAAWQQRRRPGKSLRTHLARSAQPAAVRERAVAAERRLRRRWVRFDERGKRSTVAAVAVARELAGWCWSLAVMDA

SEQ ID NO: 189443 - protein, 353 aa, unidentified
MSNIKYVGLDVHKAITVIVVLNALGQVESRSQVKTKAENVCDFFRGVSGKVEVVFEEGTHSAWLYQMLKPLVASVTVCDPRHNKLIKDGSKSDDQDAETLAQLLRMRAVKAVYKGDDQQQHLKELCRAYDNLVEDSTRSRNRLKAIYRGRGIDCSGHAIYRADQRGAWLAKLGDEAARFRAACLLEQIEAISRLRKQAKQRLVAQVRDHADYPVLIKLPGFGPVRVAQLIATVGTPHRFRTKRQFWPYCGYAVVTRSSADYGIVEGKIVKQRKKVSTRGLNRNHNPQLKQVFNGAALTALRQEAVKAYYQRLIDRGTKPELARVCLARKLASIALTLWQRREQYSAQKAFAQD

SEQ ID NO: 189444 - protein, 455 aa, unidentified
MPRKSAKASFDLTRHIQGAAAIDIGSRMHMAAVSPEAAKDPIQSFGTFTSDLHALAEWFKECKVTSVAMESTGVYWIPVYEILEQHGFDVILVNARYAKNVPGRKTDVSDAGWLQQLHSYGLLRGSFRPQADIAALRAYLRQRERLVEYAAGHIQHMQKALMEMNLQLHHVVSDITGVTGMQIIRAIVGGERDPETLAAKRDVRCRSSAEVISAALMGNYRDEHVFALTQALELYDIYQERIMACDRRMEGLLLLLSHGSAKPAADLPKPRIKTKQVSAPSFDVRGILYRLLGVDLTQIHGIGVSLALKLVAECGTDLRAWPSAKHFTSWLCLAPGNKISGGKLLSSRTRRSSSRAAALLRLAATTLGRSDTALGTFYRRLSARVGKAKAVTATARKIAVLFYNTLRYGMVYADPGAGHYDEIHRKRVVSNLHRRAQSLGFVLHPIPVATEPAVS

SEQ ID NO: 189445 - protein, 330 aa, unidentified
MNAAGIDVSAKTVTLVISREGRTGKPREFKNTPQGHTALSNVLRKTRVTRVCLEATGSYHLDLAVALDDAGLEVMVINPKAAKEFAGAMQTRSKTDAVDATLLAEFAQRMPFKPWERPDDLALGIRACARRITALGKQRTQTKNQLHAARQTALTPDFLLANLRHNIEYLDAQIEHLRQRVLDLIAADAHLQQSFDLLTSITGIAAASAIQLLGELLVLPPDMKAKQWVALAGLDPQVHDSGSSVHKKPRLSKAGNRYLRIALYMPALSAASHNPHVRGYYRHLIADRGLKKIQAVCAVMRKLLMAIHAMLKTRSTFDSRRFYSLTETPA

SEQ ID NO: 189446 - protein, 489 aa, unidentified
MSEPLQKSQKGKNRRQKAIVSPKPSKWGEMNRQQRREMMRKMQSEDLSLEVVHPDAAGIDIGNDIHYVAVPPSRDRQSVQCFGCTTAELNAMADWLKRCGIRTVALQSTGVYWIAVFDILEHAGLEVYLVNARDTKNLPGRKTDVQESQWLMKLHTYGLLRNSFRPSPGVRTLRTYWRQRQDLVQAAGEHVQRMQKVLTQMNIQLANVISDISGVTGQAIIKAILNGERDPRELAAYRDRRVQATEEEIARSLEGNWQDDLLFVLRQEEAGYEFCQKQMAECDRQLEQCLQQMEDRSRGAALPAEKRKSRLRKKTGKNAPGFDVRTLLFRMTGVDLPQIDGIEVMTAMTVFSEVGWDMSKWKTENHFVSWLKLCPNNMISGGKIIGKDRMPTNNRATTALRMSARSLRLSDSYLGAQFRRLRSRLGAPVAIKAMAAKLARLVYHMLRDGMKYVDKGAQLYEFQHRQHQINFLKRKAAMLGFQVTEVPAV

SEQ ID NO: 189447 - protein, 344 aa, unidentified
MTYFTALDVSLRFVSICIVDDTGEVRYEAKVPAEVHRIVGCLRKFSDQIETVGFEAGALTQYLTYGLQAAGFEVVCLEARQINAALAAMRNKTDRNDARGIAQILRTGWYSRVHVKSLESHQIRALLASRKAILKKCVDLENELRGLLRVFGIRLAPKVPHGAYDAVVRKQVEPEPLLARALLPLLEARQVLYRTYLKLDNEVKAMVRHDRICQQFMSVPGVGAITALTFKAAVDDPHRFKRSRTVAAHFGLTPRRYQSGEIDNPGRISKAGDPDVRCALYVAAHSMLSRSATWSALKAWGVRRAKSRGHRRAVIAVARKLAVILHRMWIDGTEFRWSAESAQA

SEQ ID NO: 189448 - protein, 400 aa, unidentified
MNPVIGLDVSKGESHAQAFADRGTPYGKIFRFKHDLDGLASFLRYAQELESFTGKRAAVVLEATGHYHSPVVQFLDEHQFVHIVINPLLSHQAKKANLRKVKTDAADAYQLGEMFYKEELEPYKKRGQYLMNLRYLTRQHESLTDMYVQAKLQFQAVLDQVFPEYHGVFGDLYAKVSLRFLALYPTSQAVLAMSEQDVMTHIQNLAGYVNPNVWTLERAQKLMAAAERNPFKETAFPSHLISLELLINLLLQYQEHLSKLDQSIEELAQQLLEYDLIQSIPGIGTKLAATILAEIGEIDRFDHAKKLIAFAGIDPSVFSSGKFTATRNPITKRGSRKLRTALYQAVRCGLRSSRNKKLRLYYDKKRAEGKLFKVAVIACANKLIHWIYAILTKKEAFRLD

SEQ ID NO: 189449 - protein, 453 aa, unidentified
MKKDKRKEQKVVELDAFAQIHPHAAGIDVGAEEFYVAVPKGRDRESVRTFPTFTADIQRLADWLAQCGVKTVAIESTGVYWIALYEILEKRGFEVYLVNARHLKNVSGRKTDVLDCQWLQQLHTYGLLRASFRPSEQICAIRSLVRHRDMLVAYRSAHIQHMQKALTLMNVRLTNVLTDITGVTGMKIMRAILSGERNRKTLASYRDARCTKSAEEIEKSLEGNYKLEHVFVLKQALELYDFYDQQIQRCDQELETLYHEFEEPDQPGTPAPEKRKRKRRKNQPHFDLSASLYRMTGGIDLTQIDGLDALTVQEALSETGADMSKWRTVKHFVSWLCLAPNNKITGGKVKSSHTPHTKNRAANAFRIAAQSLMKSKSALGAYCRRMAALHDAPTAITATAHKLAKIFYFMLKRREAYRPLAADYYEKEHRDKVVRSLQRRAASLGFRLEAAVG

SEQ ID NO: 189450 - protein, 522 aa, unidentified
MSATRSRRRSRSRPSDVIQKPAGTIHPRVQKVGPEHFGIVSVDCAKARSKWMLADFFGNVLIPPTDLEHNRPAFEQAIAQLRQAIARHDLRDLLVAVERTGRHHHAPKRAFAAAGFDTRIVHPFTTKRFRQSDDADTKTDELDVVAVHRAAVNGFALAEQPLDDFWCSLQLLIRHRRDLVRKMAILCCQIREHLDAAYPGLAARFSKFWDSDTPWHLLRHFASPQALLAAGKQGLCDSLHQAHVQFHRGTVDKVLDWAAQAAEPDLAAAEHRRCALALDDDRVRKTLEIKAIERDIAGRLAQTPYVLLLSTPGINVVSAADFAGEAGPMTDYPSHRALTGRSGLCPGRYQSDKVDITGPLRRRCNRRLRAVLMTIADNLIKCNHHFNALAQHWRGQGKDPRASRVKVASRFARIAYQMVAGQQVFCHPSVQGRDYILHKLNVFHQEHQTPIPDQLRDLQAAIGQVPRAEYSAEARPLAEELARIEAGRRHGPQPLGDILPIVLARLGVGRVESTESGAGNLR

SEQ ID NO: 189451 - protein, 387 aa, unidentified
MTVRTVNNLPAATHGETVRCLFAIELSKQSWVIGFNTPLSEKISRRTLSGCDWKGLLELIEDVRARVSREMGRAVAVMSCYEAGYDGFWLHRQLEAHGVRNYVIDPASLQVDRRARRVKTDRIDAERLLRSLMAYLRGEPKVWSVVRVPSVAEEDARRLHRERDRLVLERVQHVNRIKGLCALHGIYDYHPLRPQATARLEQLRTAQGGELPPRLKSEIKRELHRLELVVEMIATLEAERDAIVEDEASTHLNAEKIQNLHKLKAIGPEFAAVLVGEIFHRSFDNRRQLASYVGVTPSPFQSGSMAHEGGISKAGNRKGRTTGIELAWLWLRYQPDSDLSVWFRARVGTVKGRIRRIAIVALARKLLVALWRYLETGLVPRGAVLKG

SEQ ID NO: 189452 - protein, 370 aa, unidentified
MLDTTTFIGLDVHARSIKAVSLDVMTGEVRAATFGYDAGAVAEWVRSVDPRARCVYESGVTGFDLQKRLSGLGVDCVVGAVSKMIKPSADRRRKNDRNDAEFLARMLSVGNVVEVWVPDDECEAARDLTRALEDARDDLSRSKQRLSKFLLRHGLAFDERTPTGRRKGNWTRAHWSWIESIRFAERADNDVLAYYVDAVRRAAEEKARLEGLVEAEARKPRWRKRVDSLRCLKGVDTASAADLVFEAGEFSRFRNARSFAAWVGLTPSEHSSGESDRRGAITKAGNKHLRKTLVEAAWHYLTCSGRPKDLARGQAPDRGARRHAAKGVRRLVERREALLARGVHGNKANVATARELACWVWAVGLMAEEA

SEQ ID NO: 189453 - protein, 410 aa, unidentified
MDAIIERCAGLDVHQRTVVACILYGPLDRKPKQLVRTFGTTTRELLSLLDWLTEYEVTHVAMESSGVYWKPVWNILEGDFTLILANAQRIKNVPGRKTDVNDAVWIAQLLRCGLIESSMVPPKDIRRLRDYTRYRRKLLSAATSEKNRIHKVLQDANIKLTTFMSDVFGVSGRALLQALVKGKVLQPHQVQSMVHTHLKKKVPALVEALNGRVDQHHRKMIQYHLNHLDFVEKQIAEIEYEIEQLLIPYREEMGLLNSIPGIDKNAAAAILAETGVDMSKFPTEPQIASWGGVCPGNHESAGKKKSTRTRKSNRTLKAILCQVAHVNARSQNRISAFFHRIRKRRGALKAVVATAHLILRIIYHILKNRIPYHELGPEYDKAQKPSVHHWVQKIKQQGYEVFVTPVNGLP

SEQ ID NO: 189454 - protein, 414 aa, unidentified
MMEVFCGIDWAEDHHDIALAGRDGQLLARRRISDDAAGLAALLGLLAEHGDSAGDPVPVAIETPRGLLTACLRATGRQVYPVNPMAVARYRDRHSIAGRKSDHGDAVVLANILRTDLHAHRPLPADSELAQAIAVLARAQQDAVWERTCAHNKLRSHLREYFPGFLAAFAEARGGLMRPEARAILAAAPAPAAAAKLTLTQLRALLRKAGRSRGIDAEAARLRDAFRAEQMRQPPLAGQAMGRQALALLRCLDAACASAGDLEQAAIASFDQHPDAGIITSFPGLGSLTGARVLAETGDDRSRFADAKGLKAYAGAAPITRASGKTLAVLHRRVKNQRLAAAGYIWAFAALTASPGARAHYDRRKTAGDRHAAAQRNLFARLLGCLHHCLLTGQHYDETTAFPAPSQTTRKVAA

SEQ ID NO: 189455 - protein, 437 aa, unidentified
MRRKKNNANKSVNLQVLPVVNPNAAGIDVGAKEHLVAVPCDRDPQPVRTFQAFTPDLHELAAWLKRCGIETVALESTGIYWISLYEVLEQYGFEIRVVNARHVKHVPGRTKTDVLDCQWIQKLHSFGLLNGSFRPDQQIRKLRTYMRLRDNLVVASTQAVHHMQKALFEMNVQLSNVISDITGETGLQIIEAIIAGERDPKQLAALCSSRIKASREMVAKSLHGNWEEALLFALKAALETYRFNQTKIQECDCRVQQHLAQFESRSQLTNTLQNLKTQLHRVCGVDLTKIPGIKEQSAQIIISEVGLDMTKWKTEKQFCSFLGLCPDNSISGGKVLHRATRKVYNRAADTLRLCAQSLTHSKSALGAKYRRLKARLGAPKAIVAMAHHLARLVYRMLRYGQNYVEQGIHQYELKFQLQRIKWLKKEAKSLNLQLVPA

SEQ ID NO: 189456 - protein, 348 aa, unidentified
MSRIARIGIDTSKSVFQLHGVDEKEQVVLLRKLRRREFLAFFAKLAPVSIGLEACGGSHCWARQLQALGHEVVLIPPQHVKAYVARGKNDAADAAAICEAMSRPRIQRYLVPVKSAEQAAAQMLLAIRENLVRRRTQLANAIRGHAAEFGLVAAKGLDKIEPLLALVADDAAVPALAKEMFAVLGREFVDLRVRTAEVDKKLKAFHAGNELTRRLAEIPGVGPIGACLLATRIVNPRGFRSGRMCAAWMGLTPKDHSTAGKQRLGGITRAGDESLRSVLVSGATAYIQQVKRGRTVPSPWLASLLARKEPKPAAIALANKTARIAWKLMTGGQRYDRGHAAAPAMVAA

SEQ ID NO: 189457 - protein, 374 aa, unidentified
MRFYNRVHRFYCGVDLHARTMYLCILDHGGAIVFHREVPAEPGALLEAIAPFREGLVVACECLFCWYWLADLCQAENIAFVLGHALYMKAIHGGKAADDKIDSSKIAHLLRGGNLPFAYAYPKGLRETRDLLRRRMYLVHKRAEVVAHVVNANSQYNLPPFGKKLIYARNRQVLKIAQRFADASVRKNIELDLALLDSLDELIGDVELYLDRTVKVDDADSFYRLRSIPGVGKILALVLFYEIHDIGRFASEGEFLSYARLVRPLKTSAGKVKGGGGAKIGNAHLKWAFSEAACLLARESDQAKRFLARKEKQHGKPKALGILAARLGRAVYHMLRQKRAFDRNRFWNGEPKVAPEKLGRQKVAPRAMQPLVNK

SEQ ID NO: 189458 - protein, 339 aa, unidentified
MDHVAIDLGARKSQICVRNGAGEIVEEKRWDTWDLKRYLAERPKSRVIVETCAEAFGVAAVAKELGHDTRIVPATLVRTLGVGARRTKTDQRDARALSEASCRVDLPSVHIPKAESRERKTFCGMRDSLVGARTKVINTVRGWLRGQGRRLGKGSRATFTERVRAVCDADLPEYVERQLRVVDGLTAEITEADKELETQAAEDQICRRLMTVPGVGPLTALRYVAAIDDVSRFANAHQIESYLGLVPGESSSADRQQRLSITKAGPPALRWVLVQAAWALRTRCRQPTAVPLQLWAHQIELRRGKRIATVALARKLTGILYAIWRDGTEYDGALGAKMI

SEQ ID NO: 189459 - protein, 314 aa, unidentified
MFLLGIDIAKLNHVASCIDSSTNEIVFSNFKFKNDFKGFSTLLDKIKTFDTKNLIIGLESTSHYGENLINFLFKQHFKVALINPLQTSHLRKANIRDAKNDNLDSLNIAKSLIFAKLNFISEKNINCFSLKKLTRFRSSLIKQRSKAKIQLTSLLDLLFPELQYLFKSKIHSKAIYSLLKKYPSAEEIAALKDDEISNLLYASSKGHFKKEKSIELKSLAKTTVGIKDTSISLHVIQLIELIELYDKQIKDIVTKIADTVDKLDTKLLSVPGISIIACAIILGETNNFNNFSDSTKLLAFAGLDPKIRQSGNFM

SEQ ID NO: 189460 - protein, 407 aa, unidentified
MNGNGKRYIGLDVHKYYLIALGVNEALEVVMPARRVELAHLEDWMKKNLTKQDEVVLEMTTNTWQLYDELVEYAGLVTVVHPPHVALITRSQVMTDKIAASILARLLAKGLLVGIWVPPQEIRELRGLVAQRQKMTRLATQAKNRLHAVIQRHHLKPPAGNPFAKTNNGWWDSLPLGKLEKMNLQSDLETLQFAEQQEARVQKEMTGIAAENEEIGSLLHISGIGVITALTVYAAIGDISRFVEAKKLVGYAGMGTRVHDSGLTTRAGKITKAGRRDLRVAMVEAAHVVANSHPHWKAELARLQPRLGYNRAIVAIARKLLVTVWYVLARKVADRFAEPEKVSEKMLHFAYEVGKANRAGKSAAQFARERMDTLGLGSELTSIPWGSKKPIPLPPSKLKKESAVPNK

SEQ ID NO: 189461 - protein, 305 aa, unidentified
MISWVGIDISKSNLVVWVQPQKEGFEIPNTSEGFVELIKRLSCYEVGRVLLEATGGYERQVMAALQQTNFQVLRINPRRARAFAVAMGKNAKTDPIDAAVLADFAEVLHGSHEKVISPEREALRELIQLREHFVQQRDDNKRRLQQAQLPTVVSATKDHIRYLQAQIKALEKHLVQGMFDLDVEKARRLMSVKGIGKVAAASLLVYLPELGELDRREVAALAGIAPYNDDSGNHNGKRQIYGGRTRVRHALYMSSWVVIRFQADFKTRYEALRERGKSAKVALIACMRILLIRLNAMLRDGTEWR

SEQ ID NO: 189462 - protein, 336 aa, unidentified
METFSFFIGIDISKVTLDFAVVVANKLLFHYQSTNDKAGIEGFIKLLKLHCPDANFSNSLYCMEHTGIYNNHILNFLHLKKGKIWLEHPIHIKDSLGMIRGKNDKVDAQRIATYAYKNRDEVRLWIPKRDIIQKLDRLTATRSRLVKVRKILKSPLTDSKDFLSQKDHKEAKKACKKSIDALKKDIQKIENQIHNTIQEDSYLKELFELIESVKGIGPVIATEILIITNEFKDINDAKKFACHAGVVPFEHQSGKYKGRSKTSNKANKQLKALLHNGAASAIQHSKEIKEYYVRKTAQGKNEMLVRNNICNKLIHRVFSCVHRKEKYKDFYTSSVA

SEQ ID NO: 189463 - protein, 411 aa, unidentified
MASQLQRAVPLETLLVAIDPAKVSHRVWLATGERGLIGEPVTLPAFREGVDELERLIASTGSASELVIGVEATGSLHRSLTTELERRFPGRVRLLAPSETKAARAQLGSRRFKTDDRDCAALVWLLRQGLGRPPEPPALEGLLGVVRHRRQLVAELKVLRQRLHGQLNALCPGLSAPQGHGRVLDLLRPSGQAVLACAAAFAGRPASVRSLLARAPGRLSHSSAVYWAQRWRRCLPPPSDAELRAERLALDLTRLQALLHALAAADAQSAVLLTQTDGQVLTSLPGVATVRAAAFAAHSLPIERYPSPEHLYSATGLAPATYESGTISRRGGISRQGLAEHRDALMAIAWGLSQAAPAFRERAHEYRARGFAPMQVRVALARHSCRLCHALLRNQNPYDEARYRQARRCGR

SEQ ID NO: 189464 - protein, 457 aa, unidentified
MSKRKSKAKRKSFNVPKLPPHLQHMNLNATGIDIGSERHMVAVPEGRDTVSVREFGTFTTDLEALATWLKQCGVTTVAMESTGVYWIPLFELLERRGFEVKLVDAGHVKNVSGRKSDVLDCQWIQQLHTYGLLAGAFRPPDEVCVLRSYLRQREMLTQSSSMHIQHMQKALQQMNLLLHNVVSDITGVTGMKIIKAILAGERQPRVLARNRDEGCHNTAATIAKSLVGNYREEHLFALRQAVDLYETYQAKIADCNQAIIKQVQKQPDVSDDEPPTSDKQVKARDRIRDGVDVRDLLFKKSGVDLFAVPGLAADTLLTLASEVGFDMTPWKTEKHFGSWLNLCPGTKISGGKILNKKTKRNPNRAAQAFRMAAASLHHSQTALGAFYRRIKSRAGGKYAVTATAHKIARIYYAMLTHGTSYLELGQQAYEQRYKQRRLDHLKIQAKSLGFQLVPCAT

SEQ ID NO: 189465 - protein, 359 aa, unidentified
MNKISMFFIGLDLGDKYSYIAILDKEGELIEETRLPTSKSSFHQRFSLLPPCRVAMEVGSHSRWASHLLTELGHDALVANARKLRAIYHNPRKDDRADAETLARLARLDPELLSPIHHRSPQAQADLAVLRSRDAIVRCRTLLINHARDIVKASGSRLPSCTADSFAHKVASDIPEPFRPALAPIIDTIASLTQQIKSYDRKNEDLCSESYPETKLLRCISGVGPLTSLAFILTLENPDRFRRSREVGPAIGLVPRRDQSGDQDPQLRITKTGDPYLRRLLVSSAQYILGPFGPDCDLRCWGLKLAERGGKNAKKRAVVGVARKLAVLLHHLWKTGEIYDPFYLARKHDQAPEAVPAAA

SEQ ID NO: 189466 - protein, 417 aa, unidentified
MTANSLMQRRCAIKPDTLIVGIDVAKSNHVARTMVPGGAIGRPFGFSNNREGFLALSAEIEARKPTPASAVIVGLESTGVYWINLARWLAEHGCQVVQVSGLYVHRAKELIDNSRGASDGKDALLIADLVAQGKYLGFVRPVGILADLRQLVGLRQRLVHERAARYNLLHQSVDLLFPEFVTVFRDVTGPSARRVLRRFPTPAAVLAHPPDEMRRLLSEDGRVQASVTKLARLQTVAEQSIGAREGTAGIEYALNDTLLELDSLDARVKQVEAEIGRLLPQVDETPILTSLVGPMTAAVILSETGGVRQYSCAAAVLKLAGLNLYQISSGKYCGDRHISQMGRPLLRQALYLAALQHTHPGTPLYPYYAELLQRGKPKPVALIAVCCRLVRLLYALVRDARCYSAQPPDNNRQTLAA

SEQ ID NO: 189467 - protein, 338 aa, unidentified
MKLYGAVDLHSNNNVTVLIDEQDQVVYQKRLPNDLPLITQELSGYQDRLQGIVVESTYNWYWLVDGLMDQGHRIHLANTAAIQQYAGLKYTDDHSDARWLAHILRLGVLPQGYIYPKEERAVRDLLRKRSQLVHQRTANLLSIQNLVTRNTGSSIRSNRIKTLDSETVDALLPNPDLALAVKANLAMIQCADEQIDILERTVTDKIKLRAAFGFLKTVPGIGQILALTIMLETGDIKRFSTVGDYASYCRCVGSRKLSNGKKKGQGNTKNGNKYLAWAFVEAANFAVRYSPRIKSFYQRKKAKSHGVVAIKAVAHKLCRACYYIMKDQVPFDVTKAFA

SEQ ID NO: 189468 - protein, 319 aa, unidentified
MNTTYQKHMKSTERNIGIDVGKETLDIFVFELELYWQEANTEEGIRRLTSRLKRFNLTRVLVEATGGYERAFVEIATEKDIPVVIVQPIQVRQFARAQGVFAKTDKIDARLIAQYGVTMQPIVKLLPGKKVRLVKDLLARKRQLLEMRTMELNRQHKAQEVVAPSHRRLIQLLDKEIASINEKLAKEVAEIEAWQRTYEIVSSAPGIGDGVAFTLLGELPELGRINNRQIGALCGLAPFNRDSGKMKGKRRIRGGRAPIRTVLFMAMLSAIQHNPVIQRFYKKLIAQGKHKKVAITACMRKMMTILNTMVRNDEVWHMN

SEQ ID NO: 189469 - protein, 346 aa, unidentified
MEHYAGIDVSLESASLCIVDATGRIVREAKIASEPEALTAWLKGLREGGCEIIRIGLEAGPLSQWLYAGMKQAGLPVELLETRHVRTAFRIMPVKTDRKDARGIAQLMRLGWFRPVHCKSLAAQETRAVLGARKLLQIKLHDIELSLRGTLRGFGLKVGKTTPKTFEGRVRSLVAEHPTLLAVTDALLRARTVLAEQFNKLDNQAHRVARADKRARLLTTAPGVGSIVALTYASAIDDPGRFKSSKMVGPLFGLTPRKYQSGETDVTGRISKTGDAMVRTALYEAANAILERSTGDSPLRKWALGIAKRAGMRKAKVALARKLAVILHRMLVDGTPFDAAKAAAAP

SEQ ID NO: 189470 - protein, 454 aa, unidentified
MAKARGRRGTLDGFAEINHDAAGIDVGNAQHWVAVPCGRDVESIRMFGCFTADLHALANWLERCGIKTVAMESTGVYWIAPYEVLESRGFRVCVVNARQAKNLPGRKTDVKDCQWLQQLHTYGLLTASFRPQGEIIILRRYLRHRETLVQEAATCIQRIQKALTEMNLQLANVISDISGTTGLRILHAIVEGERDPQCLAAMRDWRIKATPDEVAKSLLGNWRDELIFVLGENLVLFEVYQQKIERCDYRIEQHLKSMSAQVDNNTNPLPKPRKGKRPHGNSPSFDLRSELYRVTGTDLTQIDGINVVTAQAILADTGTDMSAWKTEKHFVSWLGLCPDHRISGGKVLQRATRKVTSRAATAFRLAASSLRRSQSALGAKYRRLQSRLGAPKAITAMAHHLARLFYRMIKYGSAYVDHGVAAYETRFREQQLTWLSRKAAELHLCLAPLPNSAG

SEQ ID NO: 189471 - protein, 425 aa, unidentified
MTARVEVTPAATWVAIDIAKRSHAVLIETPDGKQKRFRMGSSQEDHRRLVDHLHACPPPVRVALEATGDYHRTLAYRLLQEGFEVCLVSSVAGARYREAMFNSWDKNDPKDAGVILALLKQGITQRFVDPLIAGHHELQELSKTYYQIGLARTRLQHSLLTHYLPLYFPEVERFFDGTHAEWFARFLMRFPTATSIRTQSFEAFQREAWPIAGRKVNKRAWVRELYDAACTSVGLPVADDNVAMETFRLQLRRYQQLVEQRDELAETAHRILQGRPDYQALRSIPGVGPVLALTILAEAGDLRRFAHHRQFLKYCGLDLAKCQSGQFRGQEKLSKRGNARLRFAFWFAATVAVRMRENSFREKYERYVQPDPLNADRKRKALTAVAAKMARVAYSLVKHQASYRCYFETSLPRGSTPLCRAVGTA

SEQ ID NO: 189472 - protein, 491 aa, unidentified
MVPIAAASVALLVDETRRMIRWSCLSKERTMLSPKSRHLHVGVDIGSRCHAVAIGLSDGRLLEEFEIPHSSAGFEKFFSRIETQAKDHPFPVAVAMEGYGGHARPLDGLVAERGWLLFNVNNLKLARFKEIFPAAAKSDRIDTRKTLELLQLREHLPLAADVLQEVMARPEENDILKRLTRRRRRLVNERVGLTSVLQSDLQAAAPGLVEITREVANLWFLNFLTCRKDLRKLAGVRRASLLKLPAIGVCYADRIQTWQTSACFSRDAGLVGEMIHQDALRVLELKRQIKALDDKIARVAETSSSARQLASIPGFGDVCSAELAGEIGTIARFKSEASLALYLGMATLDHSSGKRRGSKSPKHVNTRAKAAMMTAVDRHRKEVAQSQRYYEKKRSQGKTHNQAIRALGRHLCRVIFKMLCQDRPYRIDTQGDLPGAPDETIHPQSCPDNRDRTGGPPAVDRENGPSKDEPFKVIPSPLAAIGSPACTAGPP

SEQ ID NO: 189473 - protein, 432 aa, unidentified
MKFNQSNKQNQRISRISETTLVIGTDIAKYNHVARAFNYRGIELSKRCLFQNDENGLLNLLAWAESIKQEHGLTDVLLGVEPTGHYWFPLFHFMKQRGIEVVLVNPHHVKKSKELDDNSPTKNDIKDAKVVAKLVIDGRYTQPQLPEGVYADLRVLMNQRDRLCGDLNRVKGRIHNWLDRFFPEYTQVFKDWKGKASLITLQNFPLPQDVIAAGETTIVATWKKNGVNRAVGPKRAELLYRKARKSIGLTEGATAARHELAMYLEQYAMLCRQIEELMALVAGLVEQIPGAVHMMSIPCIGLITVAGFLAEVGDLSGYDHSQQIVRHAGLSLRENSSGLHKGETTISKRGRCRLRALLFRAALTMVAKNPEFRALHLYFTTRRDNPLKKKQSMIAICNKLIRVLFELGRKQKNYEASKVLGPHREAQLQAAA

SEQ ID NO: 189474 - protein, 426 aa, unidentified
MTYRIAGIDVHKRMLAVVIADVAVEGEYQFERRKVGTSPSELCRLADWLVAQHVEEVVMESTAQYWRPVWATLEQRWRLKRLQESDGARSGQLHLAQAQSNRGAAGRKKDFPDAERLVKRLVAQELKLSFVPDVEQRLWRTIMRRKHQLTRNRVQFQNRLECLLEEAHIKLSSLVSDLLGKSARYMLQAVAEGETNPETIAALADHRLRATAPQLRDALGACRDLHPVYRQLLKMALEELKLMEEQIDKLEQEMANLLSAQQDVVQRLAEVPGLGVDSAQQIIAEVGPQAAAFPSAKHLASWVGVCPGEEESAGVNYSHRSPKGNRQMKGLLNQASNAAVKTKGSIFEFIYRRLVVRLGHAQAIGAIAHRLCRLIWMILHQAIRYEERGPAVSRSTTERRAAKMIRELRRLGYRIEPVECKAESSV

SEQ ID NO: 189475 - protein, 392 aa, unidentified
MIIVGIDVASEKHDCFMLQKETGLVFRASSVTIGNTEEGYKKLHADIQSFCGATGDSDVRIGLESTGIYHTNIITFLIAQNYKVMMINPILTNMARKAAKVHSAKNDNLDAKTICRYLVDHPDEFSPYTPTLYHTSVLKSIARKRYFITEDLRKAKMAVNNIVQLIFPEFKKLFSNIYGESALAILKEYPSVKKLAKARVSRLAALIHGRCKCTAEQLIDAAKHSIGLSDDWYTFELEDAIAELEHIQKRIAAFDAQIKRYVDEICPNILTIPGVGYVTAGLILGEIGDISRFRSPDALVSFSGLDLTVYQSGKYKALHVSPSKKGSVYLRYALFQVSRVIWQCNSTFRDYYGKKQAEGKHHYVILGHIQKKLARVIFSVLKNNSAFQERPA

SEQ ID NO: 189476 - protein, 449 aa, unidentified
MEGLSPLYRRVAGIDVHKMLHVVTLIIEEPDGTIKQQSREFGGFKRDCCALTTWLLESNVELVVMESTGIYWKSLYAHLERAGIQAWVVNAHFVKHVPGRKTDMNDSQWLAVLARFGLVRGSFIPPQDLRELRLVSRYRRKLTAMRASEINRLHKILDDGGIKLGGVVSDINGLSARAMVTGLIEGRSITALLDMARGRLKLRRDDLQAALDGDLSARHRLVLEHIHEHIEILEHSLAELDAYILAAMAPYQWAHRLLQTIPGIDQIASALILIEIGDDMARFGSADRIAAWAALCPGNNESAGKRKSARIGKGSSVIRYIMCECANSAWKTKSSLAAKYKSLMVRKTHKTAIIALAHKMIRLIFLLLTRKVAYHDPQIDYEAISAKKNAPRWIKQQANGPIAHLRLLPRNDRYNEGSGLAIFLLAATRAGMRMPLLPSFHGNEMPLRR

SEQ ID NO: 189477 - protein, 357 aa, unidentified
MTQSKGFSFKGQNIYVGIDVHLRSWSVTILSETSVLKRMSQGADPDALHRFLTSHYPEAEYYSVYEAGFCGFWIHDRLTELGIHNIVVNPADVPTMSSEKLRKTDAVDSKKLAVSLRAKQLKGIYTPDSEALEIRSLIRLKNSITKDMTRQKNRIKSQLRYLGIEIPVEYLEPYSNWSKRFLNWLKQVAMRTPSGRQAMDILIMQFNALRMQKAEMTRKLRALSHTERFEETLELLMTVPGIGQTTGLALMAEIVDITRFANAEQLAAYVGMIPMCHSSGDHEDVGDITLRKHAILRSNIIEAAWVAIRKDESMQLCYLNNCKRMVPSKAIVKVARKLVNRIYFVLKRHQPYVNAVA

SEQ ID NO: 189478 - protein, 369 aa, unidentified
MDHYAGIDVSLEYSSICVVDATGQIVREDKIASEPEVLIAWFGSLGYALTRIGLEAGPLSQWLYAAMKKAGLAVELLETRHVRDAFKAMPVKSDRNDARGIAQLMRLGWFRPVHCKSIGAQEIRAELTARKLVESKLRDIANSLRGILRGFGLKVGATTERSFPDRVRELVKGHPVLEAIAEALLSVHEVLLREFNGFQKRVQSAACSNVKARLLMTTPGVGPVISLTYAAAVDDPARFKSSKKAGSHFGLTPKKYQSGETDRSGRISKIGDASVRATLYQAAHVILTKPVKGCPELKSWGMRLAKRAGQEKAKVALARKLAVIMHRMLADGTPFNPNAKAERTAATAAKAARKVLALPASGETVAEAV

SEQ ID NO: 189479 - protein, 469 aa, unidentified
MKNSVARKLRQVPAGYLRVGVDPHKKRHAAVTMTEDFVIHSKFKFDNSRRGFEEALERAKADMVKTDCHGIIFAIETGGHYWRNFAYFLDNNGIPFHLINQFTLKRRREGKELNRRKNDYRDAEVAAQLLSSGEFTETKLLHGVYAELRAAYNAYRRLVKERTRITNLLKDLLDGLFPEFTQVFKDPCRPTALSVLSTACVVPSIIAGMTEKEFIATVEAHHHGRRLMRKKLGALHSIARTSIGIEAGAPSVSMEISFLVEKLGLITQHIRTVEGSLITLVDETEEAKYLLSIRGLNYIAVAGLLAELGCFKWYRSAKQMIKMAGSNPTESESAGKRGTHTPMSKKGRPVLRYCAWTSVIPMLRFNPDFRAWAKQRRERPVHANPLNGREVVGAALNRLLRLAFTLVKNQTFYQIPKPTAVLKRQLVAAIQEVIECIRWAGRRRCQFWELNRANPHNEHGAPAPLAKPV

SEQ ID NO: 189480 - protein, 339 aa, unidentified
MELYAGMDLHSRNTFVGVIDSSFKRVFEKRVPNDLSLIVDKLEPFSGRLKGIVIESTYNWYWLVDGLMDRGYRVHLANPSAIKQYEGLKHTDDRHDSFWLAHMLALGILPEGYIYPKEDRPVRDLLRKRSFLVKHRTAHILSLQSMLEREKAYKLRGNEIKSLRAEDIGRIFSEEHLVLSAQANRASIEFFGHHINRIEKAVRKRVKLRKSFEYLLTVPGIGDILALTIMLEVGDIARFARVGNFSSYARCVSSQRLSDGKKKGQGNRKNGNRYLAWAFVEASHHARRYNERLRSYYQRKCAKRNKAVATKAVCNKLARACYYIIRDQVAFREEALFCS

SEQ ID NO: 189481 - protein, 340 aa, unidentified
MPGPRARIRKAGRSGVLNPSRKEHVNSTREIFVGIDVSKARLDIHVLPSGDLWTTENQTDAITTLVSRLRSLQPTLIVLEATGGLERRVLAALLTADLPAVAMNPRQVRDFAKGMGYLAKTDAIDARVLALFAEKARPEVRPLPDAQTQELEALMVRRRQVVDMLTAEKNRLSSAPPSKRVIRAIRKTISCLEDQLEDLDKDIDNAIRESPAWREKDEVLQSVPGVGRVLSRTLLGHVPELGTISKKKMGILIGVAPLNCDSGKYRGQRHCWGGRTEVRNVLYMATLSAIRRNPVIKAFYDRISSGKLRKVAIVACMHKLLTILNAMVRSNSRWSPALPA

SEQ ID NO: 189482 - protein, 406 aa, unidentified
MDQLFVGIDVGSRGNVAYIMRPDGELFSTFAIGNTLGGYRDVSKRIVAAMDKLGLDVVQIGMEATSIYGDGLVHAIREDGSLGRFQRKIHVLNPKQVSKFKEAYNDLPKTDWVDAFVIADALRFGRIKNEVYCDDYRYEALKTLTRARFYAVQNLAREKQRFGNLLFKKCSGLAQSSDVNNTASSTFALMEHFESVDDLANAELEDISAFLHSASRGRFANPDETAKIIQAAARGSYRLPKTVNDSVNQAMSVSIAGIRALQSQIKDLEAAIQKQFEIIPNTIISVPGIGKVYSAGIIAEIGDIHRFQSQASVAKYAGLVWNKHQSGIFDAEDTRLIKSGNRFLRYYLLEAANSVRGCDSEFQRYYNLKYKEVRHHQHKRALALTARKLVRLLFRLMKDNRLYIPA

SEQ ID NO: 189483 - protein, 389 aa, unidentified
MLLDHPSHEPTAIRTHIGAIFVSLELSRSNWLVTSLSPGKGEKMSKHSIAAGNVAELLTLFAELKRKTEVRTGQSYPIITIQEAGLDGFWLHRVLQQEAIESHVVDPASIATPRRRRRAKTDRLDGEALLRALLAYKRGEPRVCAMVVAPSPEEEDQRRLCRERRTLIAERITHVNRIKGLLFAQGICDYAPLRRDRRARLAALRTGDGRELPWHLKAQLGRELDRIELLMEQIEAVEAAQDALLAAARKPASQQAAPDPVTMLLALKGVGANFAAVLWSEAFYRQFANRRQVAAYAGLAATPWQSGGIRHEQGVSKAGNPRLRTTMIQLAWLWIRHQPQSALTHWFKQRSQQGRKRAIVALARKLLVALWKYVTQGVVIEGAAMKPVA

SEQ ID NO: 189484 - protein, 327 aa, unidentified
MTEYTVGIDISKAKLDVAHYREGSYEEATFDNSRDGYRRLAKWLKKGRARQAHICIEATGQYGEEVAEHLYNRGYPVSMVNPARIKAYGDSQLKRNKNDRQDARLIAHFCSTQRPSLWQPPPPEVKELRALTRHLASLKADRTRVLNRRQSGVSSVLVLQTLDEHLAFLDAQITLLKEQIQDLIDQNPSLRQQRDLLTSIPGIGEATAASFIAEVPDVSRFDSAGQLAAHAGLTPRHHHSGSSVHRPGRLAKTGSVRLRTLFYLPALAAKRCNPIVRALAERLEARGKKKMTIVGAAMRKLVHLAYGVLKTGRPFDADYLVNVQGTA

SEQ ID NO: 189485 - protein, 347 aa, unidentified
MPSIVGGLDIHRKQLTFDYLDTVTGEVSCGQVAPADRGHFRSWLARFEEPGQVAFAAEACTGWRYVTEELRRAGMEAHLAEPADTAAARGRKRRAKTDRADARLQRELLAQGRLPECWIPPSQVLECRALLELYHDLRAEHTAWVQRAHAVLFHQGAPAFHDLSRADAPAELAELAELARGHLSPAGQVQVGVCLRMLAALEAELDATRRRLLAAARQLRGAKVLAETIYGVGPVTALALTCWLGGAGRFTSARKAVRFTGLDITVYSSDGKRSPGHLSRQGPPVLRWALYEAGKTHARSVAPDHGYYAAVKDRKDGKRAALSEARKIVRQACHILAELGDDALAPA

SEQ ID NO: 189486 - protein, 455 aa, unidentified
MRKKIKKAIPVRYHDGLSQLRPNAGGIDIGASEVWVDVGHKDAEPTRMFETFTADLNRMGDWLKSCGIQTVAMESTGVFWIPVCQILESKGIEVYLVNARQAKNVSGRKSDMLDCQWLRILHSYGLLPASFRPAKDIGVLRAYMRHRQMLIEYAAAHVQHMQKALTQMNLQLQHVISDITGWTGMKIIRAIVAGERDRRRLAALREARTKADEETIAKALEGDYRAEHLFALKQSLELFDTYQKQIDSCHVQIQQHLKSLATKVDPAELKAARTRKRRYRNQPEFPIREQAFRISGVDLTQIDGIHESAALSLIAEIGVDMNAWRTEKHFSSWLALCPNNKISGGKILRRSTRKTANRAREILQLCAQSLLRSHSALGAYCRRMCGRLGTPKGIVAAAHKLAVLVYRMLKFGHQYTDIGQERYEQQYKQRVLQRLARRAQDFGFQLVPCPEKQVP

SEQ ID NO: 189487 - protein, 421 aa, unidentified
MKSTIPTILAGVDMHSTTHTLALLDEHGRVTDTETFNADPKGYERLIAMIGDPALCLGVGVEGTNSYGAALSRRLAAAGYTVHEVLRPKRSVRRSDGKSDPIDAIAAARSVLAGDGISTPKASDGWCEALRHLIAAREQLVTSMTAISNCLAELLTTAPEGIRERYRSLPSKRRIGKLAACRPSGGIVERNVLSSLKTLASSWRELHDRADVLECRMRQILEENARPLLDVYCMGTMSAAQLAVIGGDNPERIRSEAAFAKLCGACPLPASSGKTNRHRLNRSGNRQGNRALYNVALVRMSHHQPTKDYVVRKTKEGKGKLEIMRCLKRYIAREAYRALIAIRNGEAGREPAVERGARLREVRVSLGKTQQQVGDALGVPSSRVSEIERGVRDLPELERQIIEWMDSILGQSQHSNTFDNV

SEQ ID NO: 189488 - protein, 397 aa, unidentified
MEGRVPPRPWCPPELPLVEMELDEMVSSLSLYGVVMRLRIDAKHLLRSERRQEETMNKSMTVGIDLAKAIFFVVVLDPSGKQVHRKKLRRQQVLAFLANYPQAVVAMEACSGSHYWAREIEAAGHQVKLLPPQHIKAYLRRQKNDYNDAEAIAEAAQYGRVRAVAVKTVEQQLDQSLQRMRQALLADQIGLINRTRALLAEHGIVMPEGKANFRKTVVALLEDPENGLPWRLRELVNRQYQQYCIWEQELEWYTQQIEIRANQDEVCQNLMSIPGYGEIVSSAFRCWIGDGHQFKNGRDASAAMGLVPKQYSTGGKIILGRISKCGDKRMRALLVHGARAFARVASKRNDRLSRWVCNLIERRGYNKAVIALANKLVRIGWAVVTRCEPYRAINISQ

SEQ ID NO: 189489 - protein, 431 aa, unidentified
MPESTVSRQPQEPQFAAFVGIDWADQKHVWCLQAAGSTQRESGELEHKVETVEAWVAQLCQRFGERPIAIAVEQLKGALVYMLTKYECLHLFPVPSTMAASMRKALYASGAKDDPRDANLLLDFLLQHRDRLHRLAPDNEATRRVQNLVEERRKLVDEKTAQLNRLTSNLKIYFPQILDWFKDLDTELVCALLEHWPTLEELQQPSPVELRKFFHQHHCRNGELIEHRIQEIGHARPAIHDRAVIEAKRVVVKVTVQLIRSLREAIAELDGKIAEAEAAHPDFFIFDSLPGAGAVMAPRLLAVFGSQRDRYGSAEEVQIYSGIAPVLERSGKMKWVHFRWACPKFVRQSFHEWAGHSMVKSAWARAYYQQRRNQGQDHHAAVRALAFKWIRILFRCWKDRVAYDEEKYLAALAKRGSPLSALLVVPTRATM

SEQ ID NO: 189490 - protein, 338 aa, unidentified
MQLYAAIDLHSNNSVVVVLDENDRQVYRRRLPNSLEAILAALRSCEGQVCGVAVESTFNWYWLVDGLRADGFTVHLVNTAAVRQYDGLKHSGDFEDARHLAHLLRLGILPTGYIYPREARALRDLARKRSQLVRTRTQQILCIHNLLARNLGRNARGDEIKALEPHQLDELDLLPEHKLAIKANLALLACVQEQIRTLEREVVSQAKLREDYQHLLTISGIGKVLALTIALESGDVTRFAAAGNFASYARMVQSRRDSNGKTKGEGNAKCGNKYLCWAFIEAAHHAIRNDEAIKRFYQRKCAKSMQVVAIKAVAHKLARAAFHVMREGTPFEVQRAFA

SEQ ID NO: 189491 - protein, 416 aa, unidentified
MKIVRPICCGMDVHKNIIVATIGITNKKTRITEYIQETFSTLNPDLLNLKQWLINHKCFDACMESTGKYWIPIFNILEDEINIYLTHPKYVKAIKGKKTDKKDSKWICDLFKHDLIKFSFIPPKEIRALREISRYRYKLVGMRSSERNRYQNCMTVSNIGIGSVFSDPFGKSAQAIMKEVLESDIIEDEKILKCIHGSCKNKDKILDSIKHCNIETDQRFKMNESMTHMEELQVHIDNCEIEMMKRAAPMFDQFMHITQLPGISTLSAILIISEIGVDMKQFESDKQLTCWAGLAPANNESANKKKSVRISKAGQYLKPLLVQCALGAIKDKEGYFGIKYSRIKKRRGHKKAIIAIARMMLVSIYHMILTGETFNPSDYESFRNPKPPIKQQDLTEESAIEFLKKSGFDVSKLTKP

SEQ ID NO: 189492 - protein, 344 aa, unidentified
MIKRIGIDLAKEVFQVHGVDTEDKKSLTRKLKRREFLEFFATKVDPNCLIGMEACSSAHHWARQLMKLGFSVKLIPPQYVKPYVKRNKNDANDAEAICEALSRPTMSFVPVKTIEQQDIQALHRVRSERVKQRTAIVNQIRGLAAEYGIVAPLRLNNLRCKIPLWLEDAENGFSVAFRAMLSELHEQLKTLDDSIKEFDKQITLIANREPACKKLQTLPGVGPITATALYAAIGDGTQFSSGRQLGAWLGLTPRQHSSGGKEVLMNISKRGNAYLRTLFIHGARSAAIGMENKDTAVAQWFTRLADRRPKNIAVVALANKNARIAWAILTKGEDYRGDYFQQAA

SEQ ID NO: 189493 - protein, 461 aa, unidentified
MAKKAKKVKTAKGAELRIVNPDAAGIDIADGIMQVCVPADRSKDNNRAFGAYTSDLHAISAWLRECGIKTVAMESTGVYWIPLFCRLQEDGLDVVLTNARDVKNITERKTDESDAEWLMLLHQYGLLKASFQPHNDAKRMRTLTRHRDTLSREASSIVLRMQKAMQQMNIKLTLVLSDITGKSGIRIIEAILAGERDPKRLADLADIQCKTPKEEIAKALEGNWEEDLMFVLRQNYDTFKHYCTRLGECDAELEKLLENYRAEVAKVEDTSYSPAKKRRDYKKTRHTVGFDVERKAYEMWGVNVFEIPGISHLTALELMSELGHDFTRKFPSSKQFCCWCNISPNTKISGGKRISSHVPHRRNNVGLIFRSIASSLANAKNQLGNFYRRIRSRAGGKAAVIATAHKVAEIFFAMVANQTTYNPERVGIDEKVLLEKRITRYKRELERITGTHIEIGNACVP

SEQ ID NO: 189494 - protein, 348 aa, unidentified
MPKIMTPEITTIGLDLAKTVFQVHGADGAGRAVLRKRLRRGQVLEFFASLPPCLVGLEACASAHYWARELQALGHEVRLIPPQYVKPFVKTNKTDAADAEAICEAMGRPTMRFAAVKSADQQAVLMLHRSRELLVRQRTMLINALRGHCGEFGMIAAQGARKVATLIEVIEDPDDDRLPPLARDALGSLVAQLRAAEAQIAALEKKLTAWHRSSEASLRLATIPGIGVITATALVATVGDATQFRSARQFAAWLGLVPRQRSSGGKDRLGRISKRGDGYLRRLLVHGARIVLFWSRRKQEMRSDWLEALLARRPTNVVMVAMANKTARVVWAMLSRGEAYQPNRRAAA

SEQ ID NO: 189495 - protein, 440 aa, unidentified
MSKRAYRATRVNDVNWDQLAQGKDGLDIALGVDVGKYSLWAVCRWADGRFERPWRVQNPGEIPTLLTLLKRVSAGRKLVVAMESSGTYGDALRQALADNQLEVRRVGGKAAHDYAEVFDGVPSQHDGKDAAVVAELAALGKAMPWEYQPADPWEQELAYWVEWMVAHRQMLTIWQGRLEGLLARHWPEATQVRKLSSGTLLRVLKRYGTPQALAADGEAAKLLARWGGAFLAPEKIEQLLAGAGASVGVRLGEWQQRQIQNYAQQALAARQEANRAQRRLRSLAAGHAVLQAQGKVVGVPTACVLWVSTGDPRKYHAAGAYRKAMGLNLVERSSGTYQGRLRISKRGSPRTRQWLYFAVLRLVQKCGVRPWYEAKKAHDEADARRVVVAVMRKLAVALYYVGVHNEEFQPGRLFGRIRRRRDSPGEQKSRTKRRSRAEQI

SEQ ID NO: 189496 - protein, 402 aa, unidentified
MNAVGIDVSKGKSMVAIMRPFGEIVSAPFEIKHTASDIHSLVELINSVEGESRIVMEHTGRYYEVLAHQLSEANLFVSAINPKLIKDFDNDSLRKVKSDKADAVKIARYALDKWQNLKQYNVMDELRNQLKTMNRQFGFYMKHKTAMKNNLIGILDQTYPGVNTYFDSPARSDGSQKWVDFASTYWHVDCVRKMSLNAFIDHYQNWCKRKKYNFSQSKAEEIYGKAKELVPVLPKDDITKLIIKQAVNQLNSASTTIESLRTLMNETASQLPEYPVVMAMKGVGTSLGPQLMAEIGDVSRFTHKGAITAFAGVDPGVNESGSYEQKSVPTSKRGSSDLRKTLFQVMDVLIKTHPQDDPVYQFIDKKRAQGKPYYVYMTAGANKFLRIYYGRVKEYLSSLPES

SEQ ID NO: 189497 - protein, 468 aa, unidentified
MERKGGEGSAAAAVPGRSKSGRGRRKRARKASFELAHPDCAGIDVGSSSHFVAVPPDRNAQPVREFGSFTDDLCRLADWLSACGIKTVVMESTGVYWIALYELLESRGFAVYLVNARHVKNVSGRKSDVLDCQWLRELMSFGLLRGAFRPSQEVCALRAVMRQRDTLLAGQARHVQHMQKALAQMNIQLANVISDVVGETGQRIVRAIVAGERDRSRLAALRSPRIHASEQEIARALEGTWRAEHLFALKQAVALFDAYAQMLAECDRELERMLAELARHDGDPGKPKRRGRQKNAPRFDVRASLFRACGVDLTRIDGIDTTTALKVVSETGPDLGRFPTQKHFTSWLNLCPNTRITGGKRLKGRERNRCNRAGQALRQAAVGLSTSKSALGAYFRRMAGRLGKGIAIKATAHKLARLIYAALTKGMVYVDRGMAAEEERYRLRALQHLAKRAAALGYSLSPTLREAN

SEQ ID NO: 189498 - protein, 387 aa, unidentified
MKKVKSNVACAGMDVHYKFSNVTFRDIGGKVVSRQRLAHPDREQLAEHLSRWPAGIPVVMEASFGWGWLSDLVEQAGMEVHLSNCFKVEQMRKARGWVKTNKKDADLISLLPFELSDWWKVWRAPPEVRNRREQMRFRSDLVAMQTAVKSRIHAVFHRHGVFHEFSDLFGAKGRKFLSELCMDNPAKLPDQALMALRGNVRILDHLRRQLAEIARVLHSQLDKTPLTMRLKTISGIGLILAHVLAAEIGRIKRFRNHKALASYCLLAPRADDTGQDDPSHSPLGRHLGLRGNRTLKWAFIEAAHGAVRSGGKWRDIFDRVTNGGRKDRNRGYIKVARELVKVVYAVWAKGVDYQEVPPVRPGRKRNKKKSRSETGQLYHPLVHAPEA

SEQ ID NO: 189499 - protein, 377 aa, unidentified
MTIVADPPAPVDTLEVTLGIDTHADTHVAAVIDPLGRHLGHATFETTLSGFKALLAWAAGFGTIALAGVEGTGAYGAGLTRFLTTETVPVVEVDRPDRKTRRDQGKSDPIDAYAAARAAASGRASGTPKARTGDVESVRALRVARNSAVKARATALTQLKSLIVTAPDTLRAQLVDLDGAELVTTCARLRPARSPNPTPPPSTKRAPRPGPLADPTAATKRSLASIATRIKTLSTEITELDDDLDALLTPLAPTLLGLLGVGLDVAGQLLVTAGDNPDRIHNESAFAHLCGVAPIPATSGKTVNRHRLNRGGDRAANAALYRIAICRLRWDPDTRAYVERRTKEGLSKKDIIRCLKRFIAREVLAAIRTDLNPRNPA

SEQ ID NO: 189500 - protein, 407 aa, unidentified
MCILNDSVPLRYIGLDIHKAYFVAIGVNRDKEQVFGPQRVANGQLAAWIRQELTDRDAVVLEMTTNTWTMVDALKPYVHSVTVTHPPHVHLITRAQVMTDKKAALILAQLHAAGLLPAVWIPPVEVRSLRALVAQRWKMVQLATQAKCRLQSMLHRYHFDRPPKSDPYTPQMRDWWEALPVEPLERFRLQSDLDTVTFAQQQKVRIETCLAQFAARDVRVPLLAQIPGIGFINAVTILAAIGDIVRFPTANQLVGYAGLGTKVHDSGQTQWRGRITKMGRRDLRRAMVEAAQSAARCHVHWRAEYNRLCRQTASKKAKVAIARKLLIAVWYILSNGEADRFATDAQVACSFFALAYKLQVRNLPDGMSALQFTRHHLDRLGIGRDLTHIHWGSKTFKLPPSGLAQSG

SEQ ID NO: 189501 - protein, 413 aa, unidentified
MEQLIQRCAGIDVGQAESVVCVRVPDAVTGGPAELIASYGTTTPDLLELVDWLRGLGVTHVAMESTGVFWKPIYYLLEDDFTVLLVNAAHIKHVPGRKTDTIDSAWIAQLLAHGLLTASFVPPPPVRELRDLTRYRKALVNEKTAQVNRIHKVLQDSGIKLTTYASDVMGVSGRAMMRALIAGQSDSTVLAELAKGRMRTKIPDLRKALTGRFREHHGFLLKRMLDHVEAQEAEIAALDERIEAAIAPFVAQVELLSTIPGVDRRSAQVILAEIGPDMSVFPTAGHLASWAGMCPGQRDSAGKHGSGKTRKGSKWLRAALVQSARGASRSKSTYLSERYRQIMRRRGDAKAIVAVGHEILLAAYRVLVTAQPYTDPGPTTFSRLTTQRLTRQAVRRLQDLGYQVTIAPRTDAA

SEQ ID NO: 189502 - protein, 357 aa, unidentified
MESPIVSIDVSNGNSHYMCFIKNNKRFGKVKKIDHDIEGFKRLLEDIQKLEAETNEKVCAVFEATGVYTKPLERFLSKNSIKTYIINPLESARKRKEEIHNKKTDKLDPISISKVYYDKEEMMELTKKDETHNWLRKKNRLYEDQLNHLRKYKVTFQNQLSICFPGYLDLFKDGYSDIPMTILKKYPHPDLLKNKKAETVARYLEKNTCHTHKVSLEYALKIIEFAKKTYPGCEKDDVEVEIFKILLDKVIETQRECEKTLNEMITVASTLEEYRYISSIDGIGPNLAARIIAEIGDIEEFKSREALVAYAGLDPHIYQSGDQDGKHLKISKKGNKYLRCLLFLAVGCWYYVKKKDS

SEQ ID NO: 189503 - protein, 366 aa, unidentified
MSDHTATRLPVAGLDVHAASIRLAVVREDELLDERTLPFDCQLVERELRRLGATRVCYEAGPTGFGLARHLRDAGLQCDVIAPGLVPRRGSDRVKTDKRDARKLALLYQGGMLAPIWVPSLEQEAVRDLIRAREDARQDRARARQRLGKFVLRRDRRLPGKGWSLARRQWLGQQAFEHAAQQAAFDDYLLACDLLDRRIETLERQIDEWATHESFQQLVGRLRCLRGVDTLTAIGLIAEIGDFSRFKTAPAFMAYLGLVPSECSSGERRRQGSITKTGNNHARRLLIEAAHNQRRRPARSAQLARRQAGQPADVVARAQQAQLRLHKRWQRMSARGKHSNKIAASVARELAGFVWAIATEQPLRAG

SEQ ID NO: 189504 - protein, 331 aa, unidentified
MKILDTVGIDISKLSFDAKIHGSQAYAQFENTKKGFKELVNWAYKNSSSNKENIFFVLEHTGLYSHEISVYFTEKEIPFALVPGLEIKRSLGLSRGKDDKVDAKNIAKYAYRLRDEIRPYKLPSKQIQSLKRLLSLRERLVKQRAGYKANIKEQKSVLIKKENNVLFEIQEKMILYLNKQISKIEQEMMCIIEDNEELNLQYELITGIKGVGKQTALFFIAYTEGFTKFNNWRKFASYCGTAPFPNQSGTSIRGKTKVSNLANKKLKSLLDLCAKTSIQCNFEMIKYYNKRVDEGKNKMSTINIIRNKILARIFAVVQRKSPYVDFMKYAA

SEQ ID NO: 189505 - protein, 345 aa, unidentified
MTEAYDGRQVVGMDLHRRRSVLVRMSMDGRKLETVRIENSPAALRRVLARCGQRPLVVLEATYGWYWAADVLAAAGAEVHLAHPLGVKAFSYRRVKNDERDAADLADLARMGRLPEAWIAPPGVRALREVVRYRHKLVRQRTSCKDQVHAVLAKLGIPVTHSDIFGRGGGLWLGQLVLPEPYAAKVASLRALIGVLDGEIARLGEQAAGVLAADPGYAAVRELDGIGPVLAAVIIAEIGDVTRFRHAGQLCSWAGLTPRHYESDTKVIRGHVSKQGSKMLRWALVEAIQHQPAGTRPRAAREAIIARRGKEARNIAKTAAARVLLTQVFYALRDGHVRRAQDPAA

SEQ ID NO: 189506 - protein, 310 aa, unidentified
MNKTLVGIDIAKAHFDLYDSLTHKHLRFDNNTSGIKKCTRYLVPLKPTLIVLESTGGYELDLVLSLQETKLPVAVENPRRVRDFGRASGRLAKTDRIDAVLLSEYAAALNPLPQPVKSPQSRKMKALVARRHQLLQMRTAELNRRDHAKDKDIDQSIKTIIAVFEKEIDRIEQQLRTLIEVTPDYRKKLQILTSVPGIAETTATMLLVELPELGQLNRRQIAALVGVAPINRDSGTFRGKRMTGGGRRLVRTRLYMPTVVACHHNPQISAFYKRLVEKGKTKMTALVAAMRKMITIINTMIAKNQSCCLQ

SEQ ID NO: 189507 - protein, 339 aa, unidentified
MKITTFGLDLAKRVFQLHWMDMETGEIFRRQVKRKELLEFFGNQAPAVIALEACGSAHYWGRKLTALGHEVKLIAAQFVRPYVKTNKTDAADAAAIWEAAQRPGMRFVAVKSEGQQGVLTMHRMREHLVKIRTMQVNQLRGLLYEFGAELPQGRQRGTKEIPNALAQLDSVLPAMVIEALRQQLERLGELDRDIAEIERGLAAWKKEDAASRRLMDIPGVGLLTATAAVATIGDARSFKSGREFAAFLGLVPRQSGTGGRVKLLGISKRGDVYLRSLLIHGARSVITRQKERGPWLDQLLARRPLNAAVVALANKMARTIWALLAHERTYQKGYAAAAA

SEQ ID NO: 189508 - protein, 445 aa, unidentified
MHYKRLLSLIDSVSSYLSVGLDVGADFTWMSIALPNGSFIGKPFKIVHSDPGSRDLAVAKIKEAQETYSLKSRCFLESTGIYHIPLLCFLRDKGFDCSVINPIITKNSTNINIRKLHNDKFDSKKAALVGLNVSLKTSIIPDDSVVDLRNLVRDYYYFKDLQSAVALKLTAELKVSFPAYAKVFSKITTQSSLKLLSAYPLAKDMLAASKDDIVEIIRSTARFGEAYALRKYNAIIAAAQDAAVFGRALPSNAVRIRLYIDTYQEYQKHLDALLKALHETVDRLQDTLVYDQICLLQSLRGIGFLSAVVLIAEMGDFKLFSSPKKLYAYFGLDPAVKQSGKLNGDKVHMSKRGSSLARRVLHMAALNNVKVDKGSGTPVNPVVYDYYTRKCSGKKKPVAMGAVMHKICNIIFAMLRDNKPFEVIPPEEHCRRFAAEHPDKIRKAA

SEQ ID NO: 189509 - protein, 425 aa, unidentified
MLGVGIDWSEEFHLVALGRPGEGVIDISRVEHSPTAVDTLVGRIAGLEPDPAEVRVVIETRHGLLVERLVDAGYVVVPVNPDLVARRRGPAKKKDDSEDARIACLIALDQHERLRPLIPHGEIAGELRSIARDDERAARDERRLGNRLRQDLIATFPAALQIGGDDLGAPTFLRLLERWPTANALAGASREELVAFARSCRHGWPERFADRVATSLAADHFRPKEYLVRAKADTIRLAATQLLAIARQRRAWERRMGELLLGAPRRGRDHQPRGDGLGNGFPDGEIYLSFPGLGDRLAARIAGEIGDHPEQFDSPSSLQCYAGKAPVTRRSGKSELVVACRLAHNRFLGAAVQQWAFCSLKRSDWAREFYDAQRARGKGHHAALRALGNRWLEILWHCVRRGVLYDETVHVANRNRALGRTAEAA

SEQ ID NO: 189510 - protein, 337 aa, unidentified
MQHLAIDLGGRESQICLRDAKEKILEERKYPTKRLGEYLAKQPPSRVILETSAEAFAVADLARRAGHDVRVVPATLAPSLGVGARRIKTDQRDAQVLSQVSCRVDLRSVHIPSAQARAWRTLCNSRDGLVSSRTKLSNTVKSQLRSRLVLTHRRRSTATPDQIRALWTEVAGSVPDHVERMLTVITMLDVQITAADKEIRQLVKANETCRRLMTVPGIGPVTAMRFVATLDDVTRFETAHDVQAYLGLTPGENSSSSRKQRTHLTKAGSPQMRWLLVQAAWTVLRCAKKHPMSIWAMQVAERRGKRIAVVALARKLAGIAFAMWRDGTTYNHQRGAD

SEQ ID NO: 189511 - protein, 406 aa, unidentified
MAAVMIGAGPHKGSHTAVAIGAAEEPLGELRVRSSAVQAERLVSWAAAWPERTWAVEGAGGLGYLLAQQLVAAGELVLDVQPKLGARVRLLATGATNKNDPNDARSVAIAALRSATPRRVTAENHAAVLKLWSKRHRDLGRARTQVACRLHAVLCELVPGGISKQITAAQATIFLQQIELSGAVAVARCELAAEFLEDLRRIDAQLRDTRKRLTAAVQASGTTITDVFGVGPVIAATMIGYVADAARFPTRDRFAAYNGTAPIEVSSGNRKIYRLSRRGNRRLNHAVHMAAVTQIRQPHSDGRAYYDRKIAEGKTRKEALRCLKRRVSDAIYARLQADARRAAAAVRTAGPGGQPGSDSVTSAAGSHPENRLFGQATPGPDTTLRPLGGRTPARPPAAPKKTRKAP

SEQ ID NO: 189512 - protein, 336 aa, unidentified
MTEQRRSYAGECVYVGVDVHKETYTVTCVCHKQIVKTATIQAEPAGLAASLPRWFPGATLYSVYEAGFSAFVLHRALTKAGITNIVVNPASVAVAANDKVKTDRRDSKKLAIDLADGRLRGIYVPTEAEELARLLPRTRAQIVEHRATIARQIKAKLHQFGLITPSSRRLISNRYLREIAAWSLPPELSVSLTLLAEQWRFATRQLIEMRRLLRDQAKAQEEIEKVYRSVPGIGEVVARTLATELGDMTRFANERALFSYTGLTPSEHSSGTAVRRGPISRQGSSRVRHLLVETAWRAIPRDKALKEIFDRIAATRGKKRAIVAIARRLTGRIRTL

SEQ ID NO: 189513 - protein, 345 aa, unidentified
MLYLGLDVHGKWTTMVGFDPETGEVVERKRVGNEPETMAGVLGSLGGPLHGVMEVGTNSWAMYRQLQPFFAQLVIADPGQLWDRKRDRQAKTDRRDALRMAQLLYRGQIKGIYVPDERTQDLRVLARSKVRASRWVTKLTNEIGSLLRSWGYVGQRSLLSKGGCKDLDQAELPGRSARVLQLWREMLEKAQAIEAELEAAVKEEAEVEPVCAVLQSMPSVGPLTALVVRAEIGEVGRFEGPEALVSYAGLAPRVFQSGERGSYGGLGRWGNRWLKYVLGLLANRIGRSPRDNRLHRLFWRTCLRRDKSSAKMAVARKAAHLIYHLLRQGETWLEPQEEKRVTVSA

SEQ ID NO: 189514 - protein, 357 aa, unidentified
MKYVGVDVYKKMCQAAILDEDGALLDELRFPNDPEGIEEFAGKLTTFRDEVKAVVESTGNLWIQIHDRLEEHGFDVALSNPSKTRLIAEAKVKTDKVDARTLAGLLRAGMLFTCYVPGEELRSRRELLRHRLNLVKNRTEVKNRIHGLLDKHGLRMPGPTPFSRGNIAWLRGLDLGFMDVAILRSDLALLETVDEQVEVIEEKIAALAVEDRRVRLLMTMTGVGYFTAMLVLSEVGDIGRFHGDKAFASWMGLAPSVRQSGDRTRIGGVDPGNKRLRWALVECAQAAVRFDPRFRGLHERVSRRRGAGCATVAVAHEMTRIIYFMLCRNEPYRGADGGLVKRKLKSMSKKAMDSLRN

SEQ ID NO: 189515 - protein, 448 aa, unidentified
MSKPQVIDDEEHERAFEKVAAIDVAKKDGMVCVRGPHPSRPGQRQSRVWTVSATMNQVRELASELAAERVEKVTLESTSDYWRIWYYVLESAGLDVQLVSARQARQLSGRPKTDRLDAQWLARLTENGLLRPSFVPPAEIRVLRHYTRARTRLTGDRTRCWQRLEKLLEDALIKISSVASTLTTASARDMIAAMIAGQRDPQALAALARGRMKAKHDALVEALDGMFDDHHGQIARLLLDQIAFCDTAITRLTMLISEHLAGITAAWGIDPGGTAGPAAGTGDDAIARPAITRLDEIPGISADLAAAIIAETGLDMSRFPTPGHLVSWAGLCPRTIQSGPRTRHGKSHGNSYLRGSLGQAANAAAGTATFLGERYHRIARRRGKAKAQVAVARSILVIIWHLLADRQARYADLGPDHYQARTDKNRKARNHIRQLQALGYTVTITPAT

SEQ ID NO: 189516 - protein, 331 aa, unidentified
MKFEETIGIDIGKLTFETCIHTQQLSKEFENTSSGIKAMVTWVLKNTAYEKQSILFALEHTGLYSQRLSMYLSENNYLFLLLPGLEIKRSMGITRGKTDKIDAKKIALYAYRRKDELTPYRLESKEITEIKKLLSLREKLVSQRSGYKSTLCEYRHFLIRKENVVIFSIHEKMIKELSKQILKIEMNIDKLIKSNDKLKKQYDLINSIKGVGPQTALFMIAFTDGFTRFETWRKFASYCGVAPFPHRSGTSVRGKTKVSNLANKKIKSLLDMCAKSAIQSNPEMKIYYERRTTEGKPKMSTINIIRNKLLSRIFAVVKRETPYVNTLAYSN

SEQ ID NO: 189517 - protein, 393 aa, unidentified
MHNCLAVDVAKGKSMVTLVSSSGEVLIDPYEVNHSINDFSNLLNRITSFKLDNISVIMESTNIYHRPIERFFLENNFKVFVINPIYGRMHKRNLRKTKTDKEDCFNLVNLFISNTFKEYIKPDQLYLDLNALSRQYFALDELCVNIKNRYRNLVYLCFPEYEEIFKGTLIYSNIALEFIESYPHVDIISNTRIDKLQNFFKKREFRYWKSKANLIKEIASKSYPSVNMNDELVSNLSQIARLVNEYQKAIDIIKYKIISLAKKSKYFEPINSIYGIGEFTTSIIIAELGDINRFNNIKELTAYCGLDPSIKQSGKSINIRGPISKSGNKYMRKILYIACSNIIRLAAISKQENDIEIYYRKKRNEGKHHYAAIVACTTKLLRKILALCKQLDN

SEQ ID NO: 189518 - protein, 526 aa, unidentified
MVTKTRKRKSTGTKKRFIGKPTGQIQQRVQVVGPEHFGIVAVDCAKRRSKWLLCDFYGRVVIEPTKVEHDRGSLQAMTQLVAAACEAEGLTDTIVAVEMTGVYHKPVYRAFRKAGFDTRIVHPFASNHYRRPLHPDQKTDDNDLEAIFHAAVKGYGLVTLPVGEVYQSLQAVSRHRHNLVKQRARLMVQIRRLLHQTMPGYADLFDDDKLYYKSIAMPVALQFPSAEAIRRAGVDGIAKHLNNLKVRFQARTIERIVAWSGTAAEPSELATMYTRQWQQLNEVRRLFDQQIVAAEQELAGFLVKTPYVLLLSVTGINVISAARLAGEAGPIEHYASAGAIKGRAGLFPSRYQSDEVDHPDGSLVRQCNRKLRGAAMLVAENLIKCHAYYRGLSELWKQRKVDPRDRRCRIANRAMRMVYQLVGGRQVWRRKGVDREYLLAKLQEFHRVHKTPIEQSIRDMNEAFRWLPQSAYAAEAKPLEELARKKRRGVQRIGDLLMPLLIRLGVGIQKEEENVELNTSEARSSD

SEQ ID NO: 189519 - protein, 426 aa, unidentified
MSESEVLGQELQFAALVGIDWADQKHAWCLQAAGTTERENGEVEHTPEAIEAWVGQLCRRFDNRPIAVAVEQVKGALVFMLSKYEALHLFPVPPVMSAKMREALYPSGSKDDPQDADLLLELLLHHRDKLRRLSPDSEATRRVQNLVEERRNLVDEKTAQINRLTHQLKIYFPQMLEWFEQLDTELVCTLLERWPTLEELQKVPPERLRTFFRKQRCRYSELIERRLVGIRQAIPAIRDRAVIEAKSAAVKVNAQVIRSLVRGIGDLDRKIEEAAAAHPDFFIFESLPGAGAVLAPRLLATFGSQRERYASAEEVQTYSGIAPVMKQSGKKKWVHFRWACPKFVRQSFHEWAGHSIAHSQWARSYYQQQRERGKGHHAAVRGLAFKWIRIVFRCWKDRAAYDESRYLMTLAKRNSPLTAVPGGTML

SEQ ID NO: 189520 - protein, 420 aa, unidentified
MELVVERCAGLDVHKDLVVACVRFPGPDGKRKTEIASFSTFTADLLALRDWLVGFGASRVAMEATGVYWKPVFYVLEDAVECWLLNARHMRNVPGRKTDVGDAEWICQLTEHGLVRPSFVAPPEIRDLREFTRYRRTLAEERTRVAQRLDKVLQDAGVKLSSVASDVLGASSRAMLAALVEGSRDPAALADLAKGKLRAKLPALRAALEGRFAARHALLVSEILSHLDYLDEALARMTTAIEEAIAPFVDARDRLCSIPGVDRRIAEAIIGEVGVDMSRFPTAAHLASWAGMCPGQHESAGKQKKGTARHGDSWLQRQLAVAAMAAVSSKDTYLRSQYRRLSPRRGKLRARKAVGHSILVACWHILANPDATYIDLGPNWLDRRNTPAVRARRKLSELRSLGCEVLHNNDGTTTIVLPAA

SEQ ID NO: 189521 - protein, 415 aa, unidentified
MKAWKESTYYAGFDWARDHHDVVIVDRRGQIVADFAIAHTAEGWQRWREQVAALGAENFAVCVETSQGMVVEQLLESGVTVYPIAPVSSKAYRERKAPSGTKTDRLDAWSLADALRLDGHSWKALAKEDPLIAELRLLCRDEIALIEERTALLNQLQSALQQYYPAALEAFEDWTLPAAWAFVELFPTPAALAAAGKRKWEKFLHLHKLARPQSYAKRLEIFARGSELAAGEALTRSKSRLALARIRMLRVLQHQIEAYRAEIEKLFAQHPDHHLFGSLPGAGPKIAPRLLGEIGSDRARFDDPNALQALAGTAPVSYQSAQIHKVYLRRHCNKSLRATIHLWANLSRRASPWAALYYQALRARGKSHASALRSLGQRWLKILWKIWQTRRSYDPDLHAANQLKHGSWVLTLQSA

SEQ ID NO: 189522 - protein, 408 aa, unidentified
MNPLFVGIDVSSKNNVAYLMKPDGSKHSSFSVQNNLGGAKLLSERIVSALGSMQLERVVIGLEATSIYGDSLVYALREDGRLGRFQRKIHVLNPKQVRKFKEAYSDLPKNDWVDAFVIADHLRFGRINREVYMDDYRYKALQTLTRARFDVIQNLTREKQRFANYLFLKCSGMAQDKDIQNTSVTTIALMEHFETVDDLANADLEELTAFITETGRGKFADPDATAKAVRAAAKGSYRLPKTVNDTVNQAMAVSIASMRALKGQVKVLDKAIEQQFEIIPNTLTSIPGIGKVYSAGIIAEIGDIHRFDSQASVAKYAGLVWNRSQSGDFEAEHSRMIKSGNRYLRYYLLEAANSVRRCDSEFRRYYDLKFKEVNKYQHKRALALTARKLVRLVFRLLKDNRLYIPPEG

SEQ ID NO: 189523 - protein, 333 aa, unidentified
MKKQTPSEKMPSTTYVGIDVAKATLQVHLNGHQIEFNNNSKGHAKLTKKLAQLTRPHVICEATGGYERPVVAVFHQDKILVSVLNPAHTLAAAKAQGMRAKSDCCDAEALTDYGQRYQPEPTVPVPQELREMTELALWLQQLIDQRAVAKTQAEHHDNAFVRHQHQELLAHYDEQIKTVEKEIKKRIQSQPEFQQRLDCLVEIQGVGFRTALMMLVLMPELGQMNRGGAAALAGLAPWTRDSGTMKGKRCIGGGRAQVRPVLYMSALCASRCNPVLAPFYAALKQRNKPSKLALTALMRKLVIYMNHKLKALATMPPAQETKNATKPKKVLAN

SEQ ID NO: 189524 - protein, 438 aa, unidentified
MLNTNQNKPMQNLKTTTNFAATIGLDWADKKHDLWIHPADGDKAQHLQLEQTPEALHEWVAQLRKRFDKRPVAIAVETSRGPVISALRAYDFIVIFPVNPKALKDYRAAFAVSGAKDDRTDAQLLEEFLRFHRDKLRALAPDTELTRKLGGLVENRRHLVDERTRLINQLHSTLKTYYPLAETLLKDQFNTPMAAEFLARWPDLPSLQQAAAKTLRAFFYKHNGRSAKTIEARLKSIAAATALTTDEAILAPARMLVRALASLLKPLHQAIAQLEGVIEQALDQHPDAAIFRSFPGAGPALTPRLLVAFGTQRDRFQSAQEVAQFYGLAPVVIQSGNSKVTHIRRRCPKFGRQTFHENANCALRQETWARCYYDQQRQRHQDKHHQACRALAFKLIRIYFACWRDRKTYVTQTYERALQTNGSPLHKKLNPTTPANCE

SEQ ID NO: 189525 - protein, 477 aa, unidentified
MTTFPLTDHAGPVPIRHQYYAGIDIGYKNHTVAAIPVEAFGGRKPDTWQRAPVCKFSSDASGFEDLQRYLDKRSVDPNDFLVVMEPTGGNYGLSLLFYLLGKSYKVVQVDNSAVGKYQELLAKETKTDPVDARTMARMGFIHEVIGQEFRIREVRQATEAQVALRILVTDSIRVQADVVRRRNQLQQVAAVGFPELKTFFKHSPTSATACAILAAFATPADIVSAGTEQVRRVLLEARAYTLAHHSDDLVALAKATIGVPLSERMRLRQTWLLEQIGTLEAQREQLLAQMEQASASHPYRPLIESLPVRSPIWTASLIAAIGDIAHFETPNEFRAYMGWFPMLDHSGKSANGTKLANRGVRLARRALGQMVFVLLTPRTADNPFRIYHQRLVARGMKPLKAVGHDAAKLATVLYYMLKTDRPYDEARHRRRMKLPQAQAAVVRPLDVPLEVLDAQVIEEQRHGYASDEIPQDEGAPL

SEQ ID NO: 189526 - protein, 427 aa, unidentified
MAVVMIGVDPHKGSHTAVAVSAAEEPLGQLRVRASAVQAERLLAWAQAWPERVWAVEGAGGLGHLLAQQLLSAGERVLDVPPKLAARVRLLATGNINKNDPNDARSVAVAALRSAQVREAWRDDHAAVLKVWSKRYRDLGRMRTQVACRLHQVLCELVPGGVPGEITAGQAGRVLGSVTPAGTVNAVRWELAAELTEDLRGIDARIRETRKKAAAAVRAAGTSLTGLFGVGPVIAAAVIGDVRHVSRFPDRDHFAAYNGTAPIEVSSGGRKVYRLSRRGNRRLNHAIHMAAITQIRYRHTKGRAYYDKKLAEGKTGKEALRALKRQISDAIFACLQEDARRAAAAAAKSPGGQPGNHSATRAAGSHPDHRLFGQATPGPAIHPMTPAAPFPAPLPSRASGQPGPGPGAARPRSGARRASSTWPPASR

SEQ ID NO: 189527 - protein, 318 aa, unidentified
MNAEFETFVGVDIAKDSFDVCFLETEKRFTTTNDQAGFRQLLGELPTAGSCLVVVEATGGYQREMVAELIAAGHQVAVVNPRQVRDFARALGILAKTDRLDAQVIARFGQQAKPRPTEKLPENQEELQQLVVRRRQLIDLRTAEKNRLPMAHSRSVIKSIRSMVEQLQKKIRQIEKHITDLVESDEQLQCQTVLMESVPGVGPVTAVSLLAELPELGQLNRQEIAALVGVAPFNRDSGKFHGRRSIWGGRSAVRKTLYMAALTARRCNPVIQAFAQRLEAAGKPFKVVLTACMRKLLVILNTIVKNNSAWNPKTQPFS

SEQ ID NO: 189528 - protein, 398 aa, unidentified
MTESSDCESVQVFIGVDVGKDTHHAVAINRSGKRLFDKALPNDENKLRSLISDLKQHGQILLVVDQPATIGALPVAVARSEGVLVGYLPGLAMRRIADLHAGEAKTDARDAAIIAEAARTLPHALRTLKLADEQIAELSMLCGFDDDLAAQTTQASNRIRGLLTQIHPAPERVLGPRLVHPALLDLLQRYPSPEKLASLGEKKLAAQLCKLAPRLGKRLAADIAQALAEQTVVVPGTNAAAVVLPRLALQLITLRKQRDEVALEVEQRVLAHPLYPVLTSMPGVGVRTAARLLTEVACRAFASAAHLAAYAGLAPVTRRSGSSIRGEHPSRRGNKALKRALFLSAFTALRDPLSRAYYTRKMSQGKRHNQALIALARRRCDVLFAMMRDGTFYTPQGS

SEQ ID NO: 189529 - protein, 455 aa, unidentified
MTGAKSGGMDAMAMINPGAAAIDIGSTMHMAAVNPRADDNPVRAFGTFTGDLHELARWFKACRVTSVAMESTGVYWIPAFEILEQHGFHVILVNARYAKNVPGRKTDVSDAAWLQRLHSYGLLRGSFRPEAGVATLRAYLRQRERLIEYCASHIQHMQKALMEMNVQLHHVVSDITGVTGMRIIRAIVTGERSPGTLAVMRDVRCHASAEKICAALSGNWRDEHIFALCQSLALYDFYQTKILECDRKLEVALQGLRTGKGHDTSSLPKVRTKTRQVNAPDFEVRSALFRVLGVDLTQIHGIGPSLALKLVGECGTDLAAWPSSKHFTSWLCLAPGNKISGGKLLSSKTRRSSSRTAAHLRLAAITIGRSDTALGAFYRRLSARAGKAKAVTATARKIAVLFYNSLRYGMAYHDPGATRYEEQYRSRVIGNLQRRAKTFGFTLQEMPAEPDISVS

SEQ ID NO: 189530 - protein, 339 aa, unidentified
MDTVRFLAIDLAKNVFQVHGVDAAGRLVLRRRVGRAQLTELVLRLAPCTIGMEACSSAHHWARQFQQQGHTVKLISPQFVKPFVKGNKTDGNDAEAICEALQRPSMRFVPIKSVEQQDVQSLHRARSRLVSNRTGLVSQMRGILAERGIVFAQSITRARREIPAVLADTSNALTPLAREMLADLMDQLREFDKRITGFDRRIDAVFKASETCQRLAQIEGVGPKTATAIVAAVSDPKDFRNGRHFAAWLGLVPRQSSSGDRTHLLGISKRGDRHLRTLLIHGARAVLRTAPTKHDKKHAWALALQARRGANRAIVAIANKMARVIWSMLATGQSYQKAV

SEQ ID NO: 189531 - protein, 355 aa, unidentified
MRSTATQYVGIDVHQSTLVCVVKDAAGQLVLESKVATRSEAIDRFLRGLGKHIEIAFEEGSQAQWLYDLSRPIAERVIVCDPRKIATKGNKDDQRDAERLCDLLRLNALQPVFHDQRDRTLKELVRCYEALVDDSARLMLRIRAVYRSRAIAVRGRSVYHPARRIEWLEQITDAGGRYRAEQLYAQLDTTLQLRRKTRSAVLRQACNAKVYRILRTVPGIGPLRAAELMAVIIDPHRFRTKRQLWSYAGLGVITRTSGDWITEAATGSLHRRKRAPMTRGLNPNFNRLLKKIFKMAGRDVTSRPSEMQQWYERLLEKGVRPEMARLTLARKIAAIVLAVWKQGGAYNPRLIAQQV

SEQ ID NO: 189532 - protein, 356 aa, unidentified
MDNKKYIGRDVHQATISVAVMDSAGKVVMDSVIETKAVTILEFIQGLRGALWVPFEEGTSAAWLYDLLKPHVAKVVVGDPRKNALLKAGNKNDRIDARKLADLLRSGLLSPVYHGGAGVHTLKELARSYLTITKDLTRVMNRIKGLYRSWAIACAGQKVFSPRYRSAWLKKLTEAGVRRRAEWLYQQLDDLQPLRREARRELLAESRKHPVNTLLRQVPWLGPIRVALLIARIQTPHRFRTKRQLWAYSGLALRTRVSGEYRVTGGGQLQRAKRPPALRGLNENHNHELKSVFKSTATRASTSAGPLGDFYAALLTTGMRPTMARLTVAGKIAAIVLTIWKKGERFDPEHLKRQAA

SEQ ID NO: 189533 - protein, 356 aa, unidentified
MSRDIKYIGMDVHKEAIVIAVLDGSGKLVMETIVETKASSILQFLHGLRGELHVTWEEGTWAAWLYDLLQPQVPHIVVCNPRRNALLKEGSKSDKVDARKLADLLRTGMLRPVYHGENGLRTLRELARSYQTIGKDLTRVMNRLKALYRGWGMACAGTQVYAARYREEWLNKLPQAGVRRRAELLYQQLDGLQALRREVRPELLAESRKHKAAKLLRQIPCIGPIRAARLIALMQTPHRFRSKRQLWTYSGLGIETHDSAQYRYVGGQVQRSKKPQQLRGLNQNHNHEMKEIFKSTATRASCGTGPFHDFYAALLAKGMKPEMARLTLARKIAAITLTLWKKEERFDAEQLKTQAA

SEQ ID NO: 189534 - protein, 417 aa, unidentified
MGKRRNRVCGADVHKDLIVATIQCSDETTFREKFGTTQDELERFRDWLIANNCEQVAFEATGAYWFPVYDVLGHSIDTIVANPWMIKGLPKDKSDDHDSKSIANFCLNGQIKRSRIFSKEDRDLRTMTRARSGYIKTRTQFRNRIHKYLALRGIKLSSCINSIFGKSGRHILNGLIEGTNIDTILDGIPSGRIRKKRDLIKAALGSGFDEATRLLVTDALDILDNLENKVEKMSQEILNRTLKKSKDLAIVMSVPGISFVAGSIILSEIGDYRDFHTPEQLAKWCGLVPGLNESAGKKRQCGITKQGSKNLRTILVEIAHVVARMKNTRFTTFFKRILARKNYNVAITALARKLICIIYHLLVNQELYEENCHKTIVSKPDENVQVSSSEEKLQDKVAAIVDAYYRLNQRCGLRGGG

SEQ ID NO: 189535 - protein, 433 aa, unidentified
MRNLSLGRCDVKPLYTQTFTAYVGIDWADTKHDVCLQAVGSDQREFACIPHQMHRIDAWAKLLHQRFGGTIAVALELAKGPIVYALQKYDFIVLFPINPLTLAKYRQAFKPSRAKDDPTDAELALDLLLRHPERFAPIQPQSVAMRSLISLTEHRRELVGDKTRLTNRLTNTLKQYYPQTLDWFEQRDTVLFIDFLTRWPTLAQAKRARIDHLKAFFHAHNSRRTKVINTRLESIKSALPLTEDLGVITPCRLHALMLVKQLRVTLQAIEQFDHEIAELAPTLPDYSLFQRLPGAGEHFAPRLLAAFGEDRQRFQHADELQKYSGVAPVTERSGKKSWVHWRWQCPTFLRQTFIEWAGQTINKSFWAGAYYRQQRVKGSSYQAAVRALAFKWIRILHRCWKTRTPYNETTYLNALRKRGSPLLKNLMPDATNT

SEQ ID NO: 189536 - protein, 406 aa, unidentified
MNEIGKRYIGLDVHKHYLIALGVDESLEVVMPARRVELAHLESWMKKNLTKQDEVVLEMTTNTWQVYDELSAHAGCVTVVHPPHVALITRSQVMTDKIAASILARLLAKGLLVGIWVPPQEVRELRGLVAQRQKMTRLATQAKNRLHAVIQRHHLKPPAGNAFAKANNGWWQGLTLGRLEKMNLQSDLETLQFAEQQEVRVEKEMRMIAAEDENIGRLLHISGFGVITAVTVYAAIGDITRFSEPKKLVGYAGLGARVHDSGMTTRTGKITKAGRRDLRVALVEAAHVVANSHPHWKAELARLQPRIGYNRAIVAIARKLLITVWYVLARKVADCFAEEEMVSKKMLHIAYEVGRENRAGRSAAQFVRERMDTLGLGSELTSIPWGSKKPIPLPPSRLKEKERRPK

SEQ ID NO: 189537 - protein, 420 aa, unidentified
MEYAPVRLPGTPPGGVTAGIGWASADHAVCVVGVAGVVMARFAVPHTAPGLAALVRGLARAGVGEPAIERSDGPLVGALLAAGVTVVVITPRQVKNLRSRYGPAGNKDDRFDAFVLAGVLRTGRARLRPLIPDSPATVTLRQACRARQDLVRHRVAAGNQLRARLLAAFPGPVGLFCELHSAISLAFLGRFGGQDRADWLSQKRLAAWLKAAGYSGRTSLAGRYRRLRAAPRGATGEHRAASAQVTRALAAVLATLNTQIKHLEAQIAAQLASHADGHIFTSLPRSGTIRAARLLTEIGDCRAKFPGPQALICLAGAAPSTRQSGKHKAVTFRWAVRNQLRDAVCDFADGSRHASPWAAHLYNDAIARGKDHPLAVRILARAWLYVIWECWHNGTACNPARHRALQRLLAAQDAAAQPAA

SEQ ID NO: 189538 - protein, 397 aa, unidentified
MHYVGIDIGKERHAVGAIDDRCQVVLRSQFFAGDRGGYSSLTGLLHKLGLYGEVLIGMEATGHYGKLLAHRLREDGWTVHMFNPAVTAAAAKSDLRGRKTDKLDALVIAHALRDGRHSQSQAASPDEEKLKALGRQRTLLVRQRTECKNHLTALLDVLFPELDGTFSASFTTSHLAMIERFPSAAVVASADIRTLTKVLSTASCGQLGREEAMALKKKAQTSLARPRTNAGEEFAAQQTAAMIRTFDTQIQRVEEEMKTCTSPIATYLMSIKGTGKIMPFVIAGELGNLDRFQGPNMSHRVLAFAGCEPRIRESGKWKGHSKMSKRGSATLRCALYLIAHTIQLNSPAFTDVYQRQKARGKTHAVALSHVMRAVVNTLCGMHKTRTLYRPPEVRKAC

SEQ ID NO: 189539 - protein, 422 aa, unidentified
MEEITEEAAELVARVAALDIGKASLVACVRVPHETKPGARQQEVRTFATTTRSLLGLQDWLVAQGVTLCVMEATSTYWKPPFYLLEDAVECWVVNARDVKNVPGRPKTDRLDAVWLAKLAERGMLRPSFVPPPWQRELRDLCRYRRTLIHERTREKQRAEKLLEDTQIKLSAVISDIFGKSGRAMLEALIAGQRDPYALADLALGSMRGKRSVLQEALTGHFRDHHGYLLRMMCDRVDALTAQGEALTGRIEEVIAPFAHQVAQLDEVPGIGRTGAQELIAEVGVDMTRFATAGHLVSWAKYAPKARQSAGKSKPGTTGKGNPWLASTLGEAGIGASRTKTFLGSRYHRLARRRGKQRALVAVGNSLLVITWHLLSDPDARFADLGPDWHDRLAPIRRKRQLIAELERLSGKKVLLQQEATA

SEQ ID NO: 189540 - protein, 345 aa, unidentified
MEIHTIGIDLGKTVFHLVGLNLRGEVVVRKKFSRTQLLRFTANRHVQLIGMEACGGAHFLGRALREQGHEVRLIPAQYVKPYVKTNKSDYIDAEAIAEAVGRPTMRFVPIKTDDQLDLQSLHRVRERWVMRRTAVVNQIRGLLLERGITLRKGRCHLDAALPGILEDATLKLSGALRLLLAHLKLELDQLAMRMEEADGLIKKTAQESDVCRRLDAIPGIGPLTSTALIAAIGNGAAFRKGREFAAWVGLVPREHSTGGKQKLLGISKRGNAYLRRLFVQGGRAVLQFRKKQSSGLSAWLAQLTSRTHYNVAGVALANKLARIAWAVLAKNEPYRPPVFASATAA

SEQ ID NO: 189541 - protein, 426 aa, unidentified
MKKADLLSTLFVGIDVSSRENVVCAIDYEAQKLLRFSVPNNHPGAIEMAEKLHAFLYGNRDINKLMLALESTSFYGIHIANYLSSCELLMPFHTHVYCLNPKMIANYKKSYIDLGKNDAVDAFVIADFARVGRITTAPWRGSQFLALQRLTRHRLHIAASLTREKTYMLLNIFLKFSQLSMLHEDQQPFSDHYGATASSVLTDFLSTEDIANMPMQALIDHIGQKGKNRFVNPGHTASLLQQAARNSYRLDKCLYEPLTLSIASSFNLISAYESEIKAINKAIEKTLKGLDPNAYHSLLSIPGIGPVYAAGIIAEIGSIDAFNSHSALAKYAGLVWRENQSGNFRADDTVLSKAGNSYLRYYLIEAASHVKNHIPEYAAFYHKKYDEVKTHQHKRALALTARKFIRLIFGLLANHQLYSKSRVSQI

SEQ ID NO: 189542 - protein, 413 aa, unidentified
MEQQIRVLGVDLAKQVFHLVGMDAHGTILGRTRRYRAQVMACIAQLPPTRIGMEACGGAHAWACRFREHGHAVKLMAPPGVKPYVQANKHDRRDADAMAEAVTRPTMRLVAVKSVAQPDVQALHRVRERLMQARTALINETRGRLHEEGMIVPPGAATFRTQVLAKVATEDAKLTPPSLGLFRPLLEAWDGLAARIPTDDAPLAQVAQTHPVCPRLMTIPGVGELPATALVAAVSDAAQFNNGRQFAAWLGLVPRQHRTGGKPRLWSLSTHAARDLRQLLGHGARSGLRWIDRQHDRRSRGVRSVLERRGWNRATVALANNHARIAWVLMGPAQVSRAAASGTPQHPRPSQDVATPHAFRTMLGESREEVTGQTGVPRSCCGRGPARPIHQSGGHAQMASGLEGQAGFQQEAG

SEQ ID NO: 189543 - protein, 366 aa, unidentified
MPSVTSPAGLIHLGMDTSRNTIVVGVLMPGEELPVADRIFNDEASVRRLICRFPDRGLLRACYEAGPGGYDLHRLLASMGVACDVVAPSLIPKGGSDKVKTDKRDSFRLARLHRAGELTPIRVPTPAEEAVRDLCRVRAAVLSDRKRAQQRLTAMLMRHGRIWRSGSYWTGPHRAWIAAQSCDEPALATALAHYRATLDTRETELACIESELAPWARREPLAPAVRQLGCYRGIAELTGLTLAAEVVDWRRFPSARAFMGFTGLVPAEYSSGQRTWRGHITKAGSGPVRTALIEAAWAYRHSPAIGVTLRRRQEGATAETIARSWKAQRRLHGKYRAMTARGKAAPEAITAIARELAGFVWAEMTS

SEQ ID NO: 189544 - protein, 366 aa, unidentified
MKKTSTVRVNGNMVFKGHKLTIGLDLGDRWSFYCVLDEAGKVLLEQKVATTPEAVKQAFERIPRSLIALETGTHSPWVSRLLAELGHEVLVAHAQKVQLITKSNRKDDRHDARTLARLARIDPELLGPVRHRSAQAQIHLTVIRARAELVSARTALVNAARGLVKSYGQRLPKCGTQQVSRELGAGLHAELREVLEPLLKEVESLNERIQEYDERMEKIAKESYPHVELLKQVKGVGTQIALTYVLTLEDPHRFPKSREVGCFLGLRPGRRDSGESQPQMHISKEGDPYLRTMLAQGAHYILGPFGADSDLRRWGLKLAARGGKSAKKRAVVAVARKLAVLLHRLWVSGEVYEPLRNSDKALRAVA

SEQ ID NO: 189545 - protein, 371 aa, unidentified
MKSIIYIGMDVHKKTYSLCALLKETGEIIGETKIPADVSLIIRFIENAKKSVDSDDVQIKTGYEAGCLGYSLYWQLAEKGIECDILAPSTMHRSAKNKVVKNDRRDARNIATNLANGTYKSVYVPTDEDVEIKEYIRMMHDFKIELKKVKQHINAFLLRFGHQYPGKSKWIPAHIKWLKELKLSDMHREILDEYLSQLEILTEKIERFKYRLEELSQKETYKEKIGQLRCIKGIDTTVAMTMHAETSDFDRFPTANAFASYCGLTPGEDSSGESYHRLGITKQGNSTIRTTLVEAAQVLVRGTIGKKGKKVKSKQKDQDVKVIDYADKAVIRLQKKYHRMIFRGVKRNIAITAVARELACFVWGIETGHIS

SEQ ID NO: 189546 - protein, 370 aa, unidentified
MKKSIMYVGLDVHKNSIEVAFADAGRDGEVRSYGKIDGNLTALDKVIRKLEAKGAELHFAYEAGPSGYEIYRHLRRHGYNCIVVAPSLIPRQSGKRIKTDRRDAQMLARLHRAGELTSVYVPALDDEAMRDLTRAREDAKSVERKAKQRILAFLLRHGHRYGGKTPWSRAHFRWIATLKMPHPAQQIVLQESLDALSECTERVNRLTEQIRQLLPEWRMSPVVEALQTLRGVSLIVATTTIAELGDLTRFASPVELMSYLGLVPSEHSSGEKAKRGSITKTGNGHVRRVLVEAAWAYRRPARISAKLHGRQEGRPQKVCAISWQAQLRLCGRYKRLLAKGKASPLITTAIARELCGFMWAIANEVDTRTA

SEQ ID NO: 189547 - protein, 435 aa, unidentified
MKMTHRVEKINRKFYLTVAFDVSKDKLNYYYEIPGRLKSKHRELVECYEGEIENKAQVINESLLDLDRFAKDHGYEGLHVVCEPTGPYDRKLMRIARAQGHTTAYVSGESVCKMKVVENNDTGKTDIKDPRVIYMLSKNMGKELTCRDLKDEYQLLRELNRMYDAEDSAHTSMKCQIHFLLQRLFCDYSFKKDFLYTLTGRVLVEQYHASPYRILKSGYKRFCTKMKKHAPRVRKLTLERLWQDAQSSILHQMDKEIIMLLERRLLFLWEEYELHRRRKAQIKQEIIVLYRHLLKKGEPVPRPHKRFLNEFRIGRILGETGRLTDFPNKRAVLKYGGLNLRERKSGYYFGKTRLGKKGRSTLRNVVGQAAFRLVRKHEVFGPYYHRKKKEGMVGTKALAAVERKLLQVFYVLGIRKQDFYLHRLHQCESRMEKVA

SEQ ID NO: 189548 - protein, 360 aa, unidentified
MPGRRFLIVDHRDKEGNVIAVGIDTHKESLAVCAVDDLGRQLGELSVSNSPRGFRRLERFLASLATPRRVGIEGAGGLGAPLARALDVAGEEVVEVPARLTARERRRLRRLGKSDPADALAIARVVVSEQNLPVAIHGELTTDLKVLCNYRAQLLGERTRQSNRLHADLAMLSPGYGAQLPAFDSAVRQRRAAALLAAQGGVRARLAERRLARILAIAAEIDALDRQITALVGGCGTRLTAICGIGSLTAARLLAECGDARRFRSAAAFAMAAGVAPITASSGKVQRHRLNRGGNRQLNLALYTIAFVQSRCDPRAQDYLARKRADGKSWREAMRCLKRQLANVVYRQMVADLNEGRLTT

SEQ ID NO: 189549 - protein, 353 aa, unidentified
MKCDKYIGFDVHQATTVVAVLNAEGKVVLETIVTTEAAAIIRFLQSLSGSLHVTLEESTQARWMYDVVRGYVSEVIVCDPRRNKLLGEGSKADKSDARKLAELLRAGLLRPVYQGHEATRELKELVRGYETLSADTQRMMVRIKAIYRAHGIRTSGSGVYQQKQREQWLQLLTEPGTRQRVSWLYEELDQLRPLRKQAKQAMLAEGRKHQAFRLLRTIPQLGPIRCAMLVATVDTPYRFRTKRQLWAYSGLAIVTSMSAEYEIKAGRVVRSRKPLATRGLNRNCNRRLKELFISAAVAGSRSEPYHSYVAGLQRKGMRTEMARLTLARKIAAVALRVWKKGETFDPKKLNSTT

SEQ ID NO: 189550 - protein, 317 aa, unidentified
MAKHVEPLLIGADISKAEIMLGVQGRSGVQTLANERMVIRRYLKTFAGPVRLAVEATNTFHLALVEEAHALGHVVYVIDGYRLNRYRESVGGRAKTDRCDAELLLRYLEREGKDLRAWIPPPPGYTSLQRLLHRRATVVQARMSLTQSFADVPEMKSAIRSLLQRFQQLDRLLQKRIAQVAMDTGIAVDLRRCQAIEGIGLLTAAALANTFRRGTFSSSDAFIAFLGLDVRVRESGTYRGRRRLTKQGDSETRRLLYNAAMAATKTPHWQMVYQRYLKRGLKRTQALVILARKLARVAFALMKNQSDYRPLLAANAA

SEQ ID NO: 189551 - protein, 354 aa, unidentified
MKQDIKKLAQGKRVFVGIDVHDKSWTVTALAEEELLFTHTIPGQWQALKQLLDPLRGSAQLFSAYEAGFSGFGLHDDLVNWGAKSIVVSPAHIPVVAGSRVKTDSKDSVKLAVCLAKGLLTGIFVPSKAARAQRQIMRTRKQMVNQRTRCKNMLKSMGHFHGVIIPKYAGLWQGAYLIRLRQVIWANLDLQLSANCHLDQIESLNGSIAQLDARLKKMSQESEFAEKAKRIKTIPGVGPVVSMSFLLEIPQLEQFARGKELASYLGLTPGQYSSGEHVRMGGITRQGKADLRGLLVEASWVWVHKDPAARKRYSRLSATRGPKRAIVAMARKLALVIRAMLKNQEDYQTERVAA

SEQ ID NO: 189552 - protein, 463 aa, unidentified
MPKARKSRKKLALKVDVTAGLEALHHHAAGIDVGNAEHYAAVPVGRDPQPVQTFGSFTADLHRLAKWLKACQIETVVMQATGVYWIALYEVLEGYGLQVNVVNAKYTKTLPGRKTDVLECQWLQKLHSFGLRNNSFLPPEEIRVLRTYLRQRENLGAAAGTCIQQMQKVLTQMNVQLANVSSDLSGMTGMAILQAILDGQRDPQQLAALADPRVQASRKEIAQSLAGHWREDLLFVLRQVHGLYFTYLESITACDQRIEAHLKTMPAKVDVVAQPLPETRPKDRLPNRKHIPQFGLREELYRITGVDLTRIDGIQVQTAQVLVSEVGVDMTRWPTEHHFSSWLGLSPNNQITGGKVIRRGTKKVLNRAATALRLAAQTLHRSKSYLGAKYRRLRARLGAPKAITAMAHHLARLIYRLLRFGTQYHDKGVEYYERKYRETEMKWLQKQAAKLNMQLIPTGALTK

SEQ ID NO: 189553 - protein, 353 aa, unidentified
MSTIAQPDIACRVTGGVDTHKDFHVAAALDQLGRLLEIAEFPATAAGYGQLRAWLVNHGEIDAVGIEGCGSWGAGLARHLTAAGVAVVEVNRPNRQTRRRRGKSDSIDAEAAARAVLNGDASATPKSGDGPVEALRQLRVARAGARKARTAAANQLHSLLDTAPDDLRAKMAKLTFKEKVKVAERFRPGSGSDIETSTKRALRSVARRWRFLDDEARSLYTDAKTIIDAIAPSLVDRHGVGYDTAGQLLVTAGDNPERLQSEKSFAALCAPTPVLASSGRTNRHRLNRGGDRHANSALWTIVGPVQASACIRRAGGEPRARGAPSGDRRRAASLCPAMRVGWCRDGAGAGPML

SEQ ID NO: 189554 - protein, 429 aa, unidentified
MSSADKANQKPIAAFVGIDWADQKHDIALRAASSEALLERSRIESQPEALNDWVLELRERFASQGKILICLEQSRGALIHFLMGYDCFELYPINPKQLDNYRKAFRPSGAKDDPLDAELLCQFLSLHHHQLHLWRPDDEQTRKLALFCEKRRQAVDARTALSNQLKSELKQYFPLALAVLDNDLTTVLAADFLLKWPNFESLKKAPAHKLRKFFYGHHCRSEQKIKARIQRIQSAEPLTRDCAIIEAGSLTVEMLARQLKELAPYIARYEKQIAQLFAQHPDSVLFDNLPGAGDQLAPRLLSAFGSDRDRFQSPLEAVTFFGVAPVTERSGKSTWIHFRWACPKFLRQSFHEFAGHSVRFCDWAAAFYDQQRARGKGHHAAVRALAYKWIRVLFRCWKTRQPYDPQLYLAALRQRGSPLAAVNNSPQKS

SEQ ID NO: 189555 - protein, 341 aa, unidentified
MKVTIIGLDIAKSVFQVHGTDASGKCLLKKKLGRSEVISFFERLERCLVVLEACSTSHHWARVIRDTGHEVKLIPPEMVKPFVKRGKKNDAVDAAAICLAAIHPDTRFVPIKNREQQSLLSLHSTRTLLVKQQTMLVNALRALAAEFGLIVPLGNARLPELLAKIETSSNLPDALKQTTMLLFEQYGRLNESIENLEGGIRTHAKQDEDARRLLTIPGIGPVTASLIVASVTDIGAFDTARHFAAWLGLVPRQHSSGGKTRLGRITKTGNREIRKMLVLSATSMLYRAQKWDSAAGVWLCKLLERRPGRLATVALATSWPGSSGFCCRAKRSIVRPVAVSL

SEQ ID NO: 189556 - protein, 361 aa, unidentified
MDPSEQQPMTTAGLDLGDKYSYLCLIDSQSGEVIEEGRLRTSPEAFRRRFSSEQPPMRIAIEAGTHSPWASRVLEECGHEVLVANARKLRLIYANKRKTDEVDAENLARLARVDPKLLYPLKHRGEESQAHLAIVRARQALVGARTQLVNHVRGAVKSFGARLPKCPARSFHNKAPEHIPEALLPALGPVLEQIGSLTERIKDYDRKLETISEDHYPETKLLRQVEGIGPLTALTFVLTVEDPHRFKKSRAVGAYLGLVPATDRSGDSDPQKRISKEGDEMLRKLLVGSAHYVLGPFGKDSDLRRHGEKVASRGAKNAKKRAVVAVARKLCVLLHRLWVTGEVYEPLYNTHRRQEQQEAAA

SEQ ID NO: 189557 - protein, 335 aa, unidentified
MLYVGIDLHKEKVYGIVMNENGKLIKKEKFENKPEEFHKFLKNMEKAIVAIESTGFATPIYDFLKENGYETKVAHPLKTRAIAEAKIKTDKIDAKILADLLRSDLLPSSYIPSKEIRKIRDMTRHRAYMVRFRTRLKNKIHAELAKRWIKTKGNIFTKKGIEWLRSLGIESINRYLDVMELLNEKIREISLKIKEIAKENENAKLLMTVPGINYYSAMLILAEIGDVKRFPDSHKLCAYAGLIPSTYQSGNKIYHGHITKQGNKWLRWILIQCVHIHIKYDTHLTRFYKRIARRRGKKIAVVATASKMLRVIYQMLINKEEFKPFPVKSRKFSVG

SEQ ID NO: 189558 - protein, 335 aa, unidentified
MGIVIGCDFHSRFQLLMVYDEGNGSRQEVRLEHAEQAVVAAFYQQLPAGTVVLIESTAFTHWFLDLLAELELCVKVGDAARLAAMRPKKLKTDRRDAAHLLDMFLQGAFPEIVVPTAAQRELRHLLLHRDRLVRVRTRLKNGLHWMAMNHGLNRKRSLFTGRGRRELAQLRLDRWEQAGREDLLRLHDQLEARIGELDQEVERAARADARAVQLMRHPGIGPVTALAWVLIMGDCRRFPSSAHAASYLGLVPQEHSSGSRRRLGGITKQGNQFLRWTLVQAAQTAVRGDAALGRYYRRLAARKQRAIAKVAVARKLAERMYWMCRRDVGYPEVVR

SEQ ID NO: 189559 - protein, 379 aa, unidentified
MNQTTRAQDFTSRQAVLHLSFDLGWKEWKLAFGTEPGQRPRLRSVGAGDLTGLLQEIERAKQRFGLPPTSQVVSCYEAGRDGFWLHRFLRSQGIDNSVVDSSSIEVNRRARKAKTDRLDAEKLLSQLIRFHQGEKALSVLRVPSPEQEDSRHGPRELSSLKEERTAHSNRIKSLLAGQGIRLEVNQDLLEQLEQARLWDGSTVPVELKQRLQREHDRLALLNQQIKELEKQRRQVVRAPQEAAHQQVGALLKLRGVGENSAWLLVREFFGWRRFHNGRELGALAGLAPMPHQSGDLDREQGISKAGNRRVRTMLIEIAWGWVRFQPRSRLTLWFQQRYGPGNGRSRRVGIVAVARRLLIALWRYLNQGMVPDGAEFKST

SEQ ID NO: 189560 - protein, 412 aa, unidentified
MLFVGDDWAEDHHDVEIVDDSGQVLARRRLPEGLDGVTRLHALIGEHTPVEWADLEPDRAAAMVKIGIETDRGPWVAALAATGYEVFAINPMSVARYRERHSTSGAKSDAADAHLLAEIVRVDRAHHRPLAGDTAGGEAIKLTARAHQSLVWDRARHVLRLRSALRDFFPAALKAFRDLDAPDTLELLARAPGPDKAARLTKSRIIAALSAARRHHVETKANEIAAILREDQLRQPPPIQSAYEAVVSSEVAIIAALNTQIDQLGTVVAAHFGQHPDAEIYTSQPGLGTILAARVLGEFGDDPHRYRDAKARKNYAGTSPITRASGTKKAVLARYARNRRLADALQQWAFSAMRGSPGAKTYYQQLRARNIGHQAALRQLANRLVGILHGCLKTHTRYDEHTAWAHLTTAAA

SEQ ID NO: 189561 - protein, 564 aa, unidentified
MRYNGELAQLVERLVRNEKVRGSNPLTSTSNRPRPYSRSEVIHRAGDESLFSAFERERPRIVNNFAASASSGYELSSISVKMNSTRLSNLPVVLGSGNEYSDEDESALETITSGYKEFASGSSPREQPYPHLSNMNESVCEQPLSPKVAAFVGIDWADQKHDVVLRSAADQAKPEHQVIKSELNALAEWIAQMHERFAAKGKVLVCLEQSRGALIYQLMAYELFELYPINPSQLANYRKTFFSSGAKDDQPDADLLSELVMCHRDRLKAWRPDDQLTRELASLNEGRRHAVDRRTELANEIKSQLKVYFPVALQILDHDITTALAADLLVQWPTLAELQKVSPAKLRKFFYGHNSRQEKKILERLALIKEAKPLTTDLAIIRPNALSVKLLAQQLKSLLPFIAEYERRIAELFGSHPDRFLFDDLPGAGPALAPRLLTAFGTDRDRFEVVGDLLELSGIAPVRIASGKKTGKHASVHCRRACPKFLRQSFHEFGACSIRYCPWAQACYQAQRSRGKGHHAAVRAVTFKWIRILFACWKQRTPYDPQRYFQALQTRGSDYAQTTA

SEQ ID NO: 189562 - protein, 385 aa, unidentified
MAPIRMPEAVIGLDVGKSSHWACVATRDGEVLLSTPVANREDDLDSLFGRFPDALVVVDQSRNIGALALARARAAGMSAAYLPGLAAHGAARLFAGDAKTDERDAMVIAKTALGIPDALLPVGDPGPTIAAARALAAQRNFLTCENTRNKNRLRSILLESCPAFEALVDLSDGPQLRLMASLGGAWSVADAGPRRAAALTRGAARGKIEALVRSTTSSTRPDASVVAAEDRAVKLLARRISENSAEIEAITAEISALLEGDDTYRCLLTVPGIGPKTASELAISIDIEDFPSHDRLASYCGLAPRNRQSGTSISSVTASRQGNKRLKNLLIFSCNCLTRTEGRWGDYYARCRERGMPHGKALKALARKRLKVIYAIMRDRVPYAA

SEQ ID NO: 189563 - protein, 368 aa, unidentified
MVNGVPGCLSTGAPSIANPLGDSLVNYYAGIDVSLESSSICIVDATGEIVKEAKVESHPDALVKFFKAFGLPLTVIGLEAGPLSQWLYAGLTKAGFVTSLMETRHVNAALSATTVKTDRRDARGISQLLRMGWFRPVHAKSAGSQEVRALLVARKLLQHKLRDIELSLRGILRGFGLKVGKVTDKTFEARIRELVTGHPMLEQIAEAMLAARAALLEQFNTLHKAVLKIVRQDEVCRRFMTTPSVGAIVAITYKSALDDPGRIKKSKNAGPLFGLTPKRYQSGETDITGGISRVGDEMVRTALYEAANVLLSRVTRFSSLKRWGLEVAKRRGLKRAKVAVARKLAVILHRMWIDGSTFRWTKTEAAYA

SEQ ID NO: 189564 - protein, 339 aa, unidentified
MTDHSLVSIDLAKTVFQVCQFSDDNKILSNKKVSRKKLSQQIAQLLPTTIAMEACYSAHYWGRTFEQYGHTVKLVPAQHVKPFARGNKNDANDAVAIGEASRRPNMKFVPVKTTEQQDIQSLHKIRDRFVGHRTRISNQTRGLLSECGLVARPGFKALKALIQKALESDTLSGLFKEELASIYEEFMDLSERLERINNKLKVIADQHPLCRLLMTIPGIGFVNATALFAAIGDGRQFETARDFAVWMGLTPQQYASGTKSFSGKITKRGNRYLRKQLVHGARALMYKTKGKDDKLSVWINDIRERRGAHKACVALAHKLARIIWAVLSKREGFKLHPAA

SEQ ID NO: 189565 - protein, 361 aa, unidentified
MSIVFYGGLDVHQKSIAAFLFSPGTGESMEEEIPNDRVRFLHAVSRWRKRGELHLCYEASSAGFVIKRWLDEVGVDCEVVAPGFIPKGSGDRIKTDRRDARRLAQLYQSGMLRAVRVPDSAEETVRSLVRHRDDLTRDMTRTKNRILKFLGLRGLRYTDGHNWTEQHRKWLHHLNLEPLQAVVLQSHLSSLDQLETQRAQIDQRIAEVAQTPAYHDKVQRLMCLRGIALYSAMVLVTEIVDVHRFRGAPELMSYLGLVPREHSSGDSRHSGRITKVGNTRGRWVLSEAAWNQTRNPGTSDRLRKQRRSQPAAVAAISRKAEQRLHHKFWKIAVRKDRNTAATAVAREMAGFVWALLTLEVA

SEQ ID NO: 189566 - protein, 397 aa, unidentified
MYGVRFQLFLKPPAMGAHFSGVINGMDAPTLNGIETCQSGVVYQPLKQTGASDMKITTLGIDLAKNVFQIHGVDEFGKVLVKKQLKRDQLAAYLVNLPPCLIGMEACGGAHHWARKLMGFGHTVRLMAPQFVKPYVKTNKNDAADAEAICEAVARPNMRFVPIKDVAQQSVLSLHRVRQGFVGARTAQANQIRGLLAEFGVIVPQGIAHLYTRVPELIEDASNEMTGPFRLLIQRLLDHLKELDKQVDALEAQIVQWHKHSQASLKLAAVPGIGPITASALVASLGDAKNFENGRQVSAWLGLVPKQHSSGGKDKLLKISKRGDTYLRTLLIHGARSVLYREQSKADSCSWVKGVATRRHHNIAAVALANKNARIAWALLTREKGFDAKHVSLRVAA

SEQ ID NO: 189567 - protein, 459 aa, unidentified
MAKRRKKIVIEGKPGTEGMPEHLQHINVYAAGIDVGSDRHMVAVPEGRDASPVREFGAFTEDLQEMGRWLVKCGVKTVAMESTGVYWIPVFEMLEREGLEVKLVDARSVKNVSGRKSDVLDCQWIQQLHTYGLLAGAFRPGDEICVIRGYIRQREMLVHSRSTHIQHMQKALQQMNLLLHNVVSDITGKTGMAILKAILSGERDAKKLARNRDERCRNTEETIAKSLVGNYREEHLFALRQAVSLYETYQEKVLECEEALMSYVVGRAKVTDEGPPPGQGNSGKKARERMRGGVDVREQLYKMAGVDLFNVPGIGADTLLTLVGEVGLDVSKWRTDKHFSSWLSLCPGTKISGGKVLSKKSHRSANRASAAFRIAASTLSSSKTALGAFYRRIKARKGPAQAVTATAHKIAIIFYSMLKYGTEYVEAGQAAYEEKYQARRLKAIKNQALKLGYQLHPVE

SEQ ID NO: 189568 - protein, 486 aa, unidentified
MERFLNRIRNRAEPRLSTNEDEDMSKAPKGARRKSGKEKPDVLEGLPPLNLNAAGIDVGNAEHMVAVPPGRDAQPVQSFGSFTADVHRMGRWLKACRVDTVVMQATGVYWVALYQILETYDLDVKVVNARYTKTLPGRKTVVLECQWLQKLHTFGLLNNSFLPNEETRVLRTYFRQRENLVAAAGTCMQHIQKALTEMNVQLANVLSDLSGATGMAILRALLRGERDPQRLAKLKNQRVQASREEIARSLEGNWREELLFVVEQSLAMYDTYHEKIAVCDQRIAAHLKTMEAKVDVEAQPIPEARRGKWPRKHQPRYNLRGELYRVTGVDLTQMDGLDVLTAQTVISEVGVDMSPWRTEHHFSSWLGLCPDNRISGGKVLKRGTRQVVNRAATALRLAAQSLWRSQSALGGNFRRLRARLGAPKAITAMAHKLARLLYRMLKYGQAYVDKGIAYYEEKYRQHQVKWLQKQAAALNLQLVPSTGVVS

SEQ ID NO: 189569 - protein, 464 aa, unidentified
MTKKGKKSTPSPENMPILHPHAAGIDVGAEEHWVGVPADRDAQPVQKLSAFTCDLHRLADWLTACRITTVVMESTGVYWIPLFPILEARGFEVALVNARHVKNVPGRPKTDRFDCRWLQKLHTYGLLAPSLRPPEDICQLRSLLRHRDHLLRMTVKHIQHMPKSLDQMHLHLPHGMSEVTGVTGMRMLRAIVAGERDPQTFAQYRDYRMQSNEETIAKALEGDDRAEQVFTLTQSLALYDFTQQHIAACDQDIERVLATFDSLVDPAEHPLPPPTTAPRRPQRNEPAFDLRTHLYRSTGVDLTQVPGLQAPTIHIVLAEVGLNRHTWPTDKHLASWLGLCPDHQISGGKVLSTGSRRVQNRASRALRMAAQSLRTSPSYLGAFFRRMRSTLGPAKATTATAHTLAKIIYHMLKEKAPYRARSAEDYLPKDHERQLRQLRKQAQYVGFDVVPQTNHESPRHCCDD

SEQ ID NO: 189570 - protein, 454 aa, unidentified
MSRRKKKAKSFPITNLPAQLRHVNLDAAGIDIGSDRHLVAVPAGRDQVSVREFGAFTADLEALADWLAQCQINTVALESTGVYWIPLFDILERRGFEVKLVDARRVKNVPGRKSDVLDCQWLQELHTYGLLAGAFRPPDQICVLRGYMRQREMLVQAAAMHIQHMQKALQQMNLLLHNVVSDITGTTGMKILKAIIAGERNPQVLASHRDPHCRNSAETIAKSLVGNYREEHLFALTQAVELYETYQSKISDCEVAIARHLAAQSASSDEPPPPSGKRIQAKNVMRGGVNVRTQLFKLTGVDLFSISGLGADTLLTLVGEVGVDMRPWKSEKHFTSWLALCPGTRTSNRKILSTKTRRSSNRAAAAFRIAATSLGRSKTALGAFYRRISARVGRPQAVTATARKIAVIYYSMLKFGTQFVEFGQAAYEQKYQTRRLKGIKQQALALGYQLVPIN

SEQ ID NO: 189571 - protein, 416 aa, unidentified
MNAVGIDVSSRKSTVAVLRPLGEVVCLPFDVTHDIAGLASLAEKLKAIDGETRVVMEHTGRYYEAVAKALHEAGFFVCAVNPLLIKEYGANSLRRVKTDKADAIKIARYALDNWADLRDFTPMDAIRYDLKTLNRQFQLASKQRTASANNLIALLEQSFPGIRKCFDSPVRSDGTQKWVDFAHSFWHVDCVRKQPFPAFCERYRKWCKRHAYFFKLRNAEKVYALAKSAVVLTPKSKVVKVLVQEAANQLISISRSVEVYRAEMDRLAAMLPEYPVVMAMYGVGKSYGPQLMAEIGDVRRFERKQALIAFAGIDPMPNQSGDKNVRSNKSSKRGSPYLRKTLFNVIRTYLQCAPQDEPVFQFLNRKRAEGKPFYVYMLAAANKFLRRYYAKLRDYFASLDTLQPVDPIPTTLKASL

SEQ ID NO: 189572 - protein, 400 aa, unidentified
MRTVFGIDVSKATSEVAIFVNGERVQGYSIPNDVIVFFRLFHDLTQVVNPEIIFEATGVYSRRLEAFLKNNNYVYTRLNPLEAKKQLDGLRHRKTDKIDAETLAQTQFFLNRKPSYVQEEIFEHLCDLSRFYQNLTEDIVRSKNRLHKGLQATFPEIEKLLSIPSGAQYWNLVITFPSASLVLEKSRIELQDIVRQSTAKQISEKRVIDLTDKLIESAEQSYPAVAKDSPMIETVRYFARELLRLNVQRQSVLNHMVEQAQTLPEYDVLLSIPGIAETTAVSIIGEIGDIRRFRSSNQINAFIGIDLRHYQSGDYLAQEHITKRGNPYARKILFKAIHNIVSASRTKPSHIADFYAKRKRQSPNAPTKPYTIASMHRLIRCLYYLIIHNKTYDYTLTQNQ

SEQ ID NO: 189573 - protein, 409 aa, unidentified
MEVQHPRCCGLDVHKETIVACVRLVIDSKTVKEVRTFSTTTADLMALSEWLAETKCTHVAMEATGVYWKPAWHILSDGGFKLVLANAAHIKNVPGRKSDVKDADWISDLLAHGLIRASFVPDNATQEMRTLLRTRKQLVHEKARHILRIQKTLEDAIKLDSVITDIMGLSGRKMIEALIAGESDPAKLARLADPRVKASQETLRQALRGRVIGHHRFLLRLHLEQIDAIDAAIAKIDREVEAGIGPFRTAVEQVSSAPGIKSLAALQILSEIGTDMSRFASDANLVSWACICPRSDESAGKRRSTRIRKGSPWLKTTLVQCAWAASRKKDSYLHAQFHRIKARRGPKKAIVAVAASILTAIYHMLKDGTMYQDLGPNHFDARTKERQKNRLVKRLADLGYAVELAPLSN

SEQ ID NO: 189574 - protein, 344 aa, unidentified
MKEVITIGLDLAKNVFQVHGVDGSGDTVMRRQLRRSQLLPFFKKQRPCLVGMEACATSHHWARQLIELGHGVKLMPARYVKPYVKRNKNDAADAAAICEAVTRPTMRFVAVKSTEQQGVLMLHRTRELLVRQRTMLVNAIRSHMAEFGIVAPVGVPRVKELFAVIADADDDRLPAIARACLEGLANQFLSLHEEIATAERRIHAWHHSNEASRRLETIPGIGPITATALVATITDPSVFTSGRELAAWIGLVPRQSSTGGKERLGRISKQGDQYLRWLLVAGAMSVIRHAKRRGTTNLPWLADIIARKPTKVAAVALANKIARIAWAVLTQGGTYQKPATAAAA

SEQ ID NO: 189575 - protein, 414 aa, unidentified
MFAVGVDVSNGRSMVAVLQSKLKVVMKPFEVQHTSEGFAALAEKLNGLGGETRIVMEHTGRYYESFAMSMHQAGFFVSAVNPLLIKNYQDGITVRKVKTDKADAVKIASFALDKWELLPQYTPMDTIRYDLKTLHRQFQLSSKTRTALNNNLIALLEESYPGANRYFDSPVRPDGSQKWVDYVDTFWHVDCVAKVSQKTFVERYEKWCNRHKYNFSEQKAIELHEDAKRKFALVPKSDTCKLLVKEAVSQLNAVSRTVEAYRAEMDRLASQLPEYETVMGMYGVGKSMGPQLMAEIGDLRRFAHQKSLVGFAGTDPIKDDSGDKVSDSKPASKRGSPYLRKTLFVIMTILLQLQPQDDPVYQFIDKKRSEGKKYYVYMTAGMTKFLRIYYGKVRDCLKEKGLWDQPSMDEVNPG

SEQ ID NO: 189576 - protein, 352 aa, unidentified
MSEKLNSAIAVIGIDIGKNSFHVVGLDARGAIVLRQKWSRGQVDVRFANMPPCLIGMEACVGAHHLSRKLQGLGHDARLMPAKYVRPYSKGQKNDFRDAEAVAEAVQRPTMKFVATKTADQLDLQALHRVRERLVSQRTGIINQIRAFLLERGIAVRQGQRFLRAGLPDILSTPPDVLSPCMVRVIEDLAGDWRRLDERIEGLSSEIQAVALQDAGCERLMSVPGIGPIISSAMVAAIGAGDAFSKGRDFAAWLGLVPRQMSTGDRTILGKISKRGNRYLRVLFVQAAWVVLIKPKSWERHGLKPWIEAAKKRLHHNVLAIALANKLARIAWSVLARGRAFEARTIADVAAA

SEQ ID NO: 189577 - protein, 338 aa, unidentified
MAMYCGIDLHSNNNYVAIQDEAQRDVACRRLPNHLGKVLEYLEPYREELEVMAVESTFNWYWLVDGLNEAGYDVRLVNTTKASDYSGMKYTDDRHDARWIAHLLALGILPEGYIMPPEERGLRDLLRRRSFLVHKRTSLYLSIKTIFARSRSEKISVQKIQSLDSESVRMMFDDPHVAESIIVMLPVLRVITAQIKGIEKSVLETGKLRDEFQLLQTAPGIGKVLALTIMCETGDIGRFAKVGNYGSYCRCVSSVKISNNKKKGKGNRKNGNKYLSWAFSEAAHHAIRCEPRAKRYYDRKKSGKHPMVAARAMANKMARGCYFVLRDQVPFDVSRAFC

SEQ ID NO: 189578 - protein, 345 aa, unidentified
MEHVCRIGMDTSKRIFQLHGVNAAEEPILRKKLRRSDMIAFFKRLSPTVIAIEACGASHHWARLLGSFGHEVRLIAPQLVKPYVRRGKNDAADAEALCEAMSRPAMRFVPVKTAEQQAALMQMGLRDRMIRNRTQLANAIRGYAAEFGLTASTGMAHIPSLLARIQADEGLPALARELFAAQAEEYEQLQTRIGDVEARLRTWHKADPCSRRLAKIPGVGPVGAAMLILKTPAPEAFRSARQFAAWIGLTPKDHSTAGRVRLGSITRAGDESLRSVLVVGATAIIRQLRMSRGNTFPWLVNLLKRKPPKLVAVALANKMARIAWKLMVSGENYSPRSASFPNATA

SEQ ID NO: 189579 - protein, 354 aa, unidentified
MPKTASTQIAVIGIDIGKNSFHVAGHDKRGSIVLRQKWSRGQIEARLANLTPCLVGMEACVGAHHLARKLAAFGHDTRLMPAKYVRPYARGQKNDFNDAEAIAEAVQRPTMKFVATKTADQLDLQALHRVRERLVSQRTGIINQIRAFMLERGIAVRQGIRFLRAELPIILASRSDVLSPRMLRVIEDLAGDWRRLDERIETLSREIETIARRDAGCDRLMSVPGIGPIISSAVVAAIGSGDVFSKGRDFAAWLGLVPKQISTGDRTILGKISKRGNRYLRVLFVQAAWVVLITPMSWERHGLKSWIEAAKKRLHHNVLAIALANKLARIAWAVLAKGRGFEATRTVNGSTQSA

SEQ ID NO: 189580 - protein, 337 aa, unidentified
MSKITMIGIDTAKQVFHLVGIDQHGKYELRQKRSRSKLLSTLAQREPCTVVMEACAASHHWARQIAALGHRVRLIAPQHVKPYRRGQKNDYRDAEAIVSAALSPGMHFVGVKGVEQQAEQALHRVRSRLLSHRNAAANGLRGLLGEYGLAFAKGLKSLRRGAIDFIDRGDAEALGLSELIRDVLAELDELDSRMKLYERQIKQRVRRDELSRSLCTELAGVGELSASALRVKVADVRDFNNGRNFAAYLGLAPGHRGTGGAVTIGKLPRGRDRYVRQLMIHGARSVVSRLGDKHDAQSRWLRGLVERRSFNTACVALAHKNARQAWAIMARQQALAA

SEQ ID NO: 189581 - protein, 355 aa, unidentified
MSQEKYIGMDVHQATISAAVMDAQGKLIMECLLETKAATIVEFIRGLQGPLSLTFEEGTSAAWLHDLLKPHVDRLVVCDPRKAALLKEGNKSDRIDARKLAELLRTNQLKPVYHGEHGVRTLKELGRSYLTLTQDVTRVMNRIKALYRSWAIPCSGTTVYAPRHRVEWLAKIAEPGVRVRAQRLYQQLDLLQPVRQEARRDLLRESHKHPAVRLLRQIPSIGPIRSALLVALLQTPHRFRTKRQLWAYSGFAVETHDSGEYRWVRGKLQRNRERITVRGLNDNHNKDLKNLFKSAAISASTRPGPLRDFYVARVEQGMRPTMARLTLARKMAAISLTIWKKGVEFDAQQLQRPAA

SEQ ID NO: 189582 - protein, 376 aa, unidentified
MTAKTDPQPSSVCEAALYVAFDLGKTSWTVAMTTGLGVAPWVRAVRAGAWEEVGSVVVRARARFGVAATAPVISCYEAGRDGFWIHRALVAHGWANRVVDSASIEVNRRARRTKTDRIDACKLVVLLVRVCLGDRGAWREVHVPPVEAEAARHATRERMALQKEHTALLNQMRGWLTTWGTALPSRRRDAWWERLRDWRGAALPVAVQARLARASARLALVREQLRALTRAEQRAVQAAAPTSAAGRLMRLRAVGVKGTTTLLGEGLLWRGFTNRRQVGGMLGFAPTHASSGEQHRDQGISHAGNWRWQGTMIQLAWSWVRLQPTSALTQWYLARFGTGKRARRIGIVALARKLLIALWRYATTGLVPAGAVLKTV

SEQ ID NO: 189583 - protein, 422 aa, unidentified
MKGEFPVIGADVAKDFCYYAALSPTGETYLKPFKALNTGEGLASVINQIEKVEKAFNRKPVIVLESTGHYSNRLVHFFTRHNLKVYLINPLLSHSIKNSTVRKVKTDKVDAEELAKMYFFMNLKEHQMQDEYLENLKILTRTHYHLSEQRVSVMNQLKAAIEQVMPGFTKVFKSISCKTSLELLVRYPSPTSFLEGTKDDIVQIVRTTSRTSMAYATKKYELILKSAQEGKETGILLTAYEQIIIVYANHLKHINEQLDLIDKKIEALAINIPAIQLLRSIPGIGKNLAPIIAGEIGSIARFQSSKQLVAYCGIDPSVKQSGNFIGTKNKFTKGGSRFIRKALYIAATVAIRQNPNGQYVNKVIYDYYHKKIQIKAKKQALGAVMNKLVRIIFSVLKNENPFVLITPEEQVKMHRSNVKIVA

SEQ ID NO: 189584 - protein, 391 aa, unidentified
MICVGIDVAKDKHDCCILDSEGTTLADCFTISNNLDGFKRLLQTIKDCTQKSDKIKVGLEATGHYSCNILGFLLDNDLPVYVMNPLHTNLYRKSLSLRKTKTDRVDAKTIATMLLSDVDLKSYTDTAYHNEELKSLTRYRFDKVQERAKLKQSVSRLVTILFPELEQLVSSIHGTSIYALLSEYPGAKQISEAHLTRLANILVTTSRGHYRKDRATHIRDAARTSIGSVMPAKSLELKHTIKLIQELTSEINEIEDAIRKIMDELKPPILSIPGMGFYSAAMILAEVGDFSNFNSPDKVLAYAGCSPSTYQSGKLTNCYAHMEKRGSRYLRYALYTATKYVCYWNPVFTEYLTKKQAEGKHYNVALSHATKKLVRLIYALQKSGKAYLAIT

SEQ ID NO: 189585 - protein, 323 aa, unidentified
MAVVVGVDIAKRSFDLAVLQSNGKYRTKGKLSNDQAGFAVFADWLQQHAEPGAWIVMEATGIYHESLAGHFHALGYRIAVLNPAQIARYAQSQLQRSKTDKLDAKLIATYGQRHEDSLRAWHPEPVSIRTLRALTRRLEDLQSLRQMELNRLEISPEKVQDSIRAVLQRLDEQIAWTLEQIKRHIDDDPDLRGKRDLLVSIDGIADKTAALILAELGDIDRFADARAVTAFAGLNPRLQESGLARGHTCISRMGSVRLRSALYLPAVVALTYNPAINAQAERLKARGKKGKQTVCAAMRKLLTIAYGVLKSGKPFDPALAIAH

SEQ ID NO: 189586 - protein, 331 aa, unidentified
MSVFVGVDVGAKTVALAWRKGGRTRGKLDIQQTPEGHAQAVERIKALEAVQVVMEATGVYYLDLAVALSKAGIVVSVINPKSFHHFAQLKLAQSKTDPLDAALLAEYAERMTPAPWTAPDTLRMALRDIGRQINRLTATRTQAKNRLHALRSKRDTLALLIEDEVEAVERLDQRIERLSNAAQRLIAEDAVLNSQFQHLLAAKGVGVASAIALLAELSVLPQHLKAPQVSRYAGLDIRLCQSGSSVNKASRLSKAGNAYLRSALYMPALSAVRHDPNAKAFYLSLQRRGKKKIQAVCAVMRKYLTGLWACIQLGEPFDSSKLFSKIHLAEA

SEQ ID NO: 189587 - protein, 449 aa, unidentified
MGNCAGIDWASEKHDVLIEDPAGEELWAATFAHDEDGVSALCAAFARFEVEVVAIERPDGLLVELLLEAGVQVLGLHPNQVRAARDRFRASGGKSDRFDRFVLCELARTDRHRFRVLEPDSDQTKALRALTRAREDLVAARVALANQLRAELERCWPGPIGVFFAIDSPISLAFLARYPSPLDARGLGEKRMAGFLKAHGYNNRKTPAQLLERLRSAPTGRAGEIETRTRRQIVLHLTSTLQVMVEQIRGLESEIAEALRAHPDGEIFRSFFHSPDCVICAATLLGEIGDCRGRYPHRDAIAADAGHAPVAVESGKRKHAKFRWACNKRLRNALGILAYSTTRWNPWAADRYAQARARGHNHRRALRTLGRAWSRIIWRCWQTRTPYDPERHTGLQQHITVTIPTPSGPRPDLNATQRMAGAAVTQRAAHRAERAALDSKPPIATNAMA

SEQ ID NO: 189588 - protein, 419 aa, unidentified
MSFKIIKNNCCGLDVHKTWIYACIGITDSCNRTEYKQARFSSFTRGLNELCEWLAKYSCKDVCMESTGKYWIPVFNILEKRGLWVTLSHPKYTKPMKGNKTDRKDAKWICDLYMCGMVKPSFIPPADIRHLRDLVRYRFKLTCMITGEKNRAHNCLTVSNFKLDDVFSDIFGKSSRSITEQILQHPGETFDVAPFVDGKCKTPIEEIQAAVDGAISEEQAIKLRQCLDHIDELEKHKAEIEREIFRLSEKYEAALNLIRTVPGFDKNPLTAIQVLSEISGDMSVFPTAKHLVSWAGCCPRNDQSNQKIKSTRISRAGSYFKPVLVQVANALIKSKKHLEFTNRYRRIKARRGHKKAIIAICRMLLTAIWHILSDLKPYTPEGYLESRPVNKEKTLTTSQALNLLRQRGYLIKDDPLPAS

SEQ ID NO: 189589 - protein, 415 aa, unidentified
MSNPLFVGIDVSSKDNVICCLTNDDEKKPLCRFSVLNNRPGILELKERISQLVQKHNFDEIRFGLEHTGCYSTHAAMYLQRHLDFGCEYINVYMFNPSLIKEFKKAYFLDAPKNDRVDAWYIASKLMAGHLPHPFTWSEPLIALQRLTRARYHLMQALTRESNFLMTNLYLKCSDYTLAFDNKLSATSLAVMEEFESAETLAEASLDELAQFLIQHGKNRFHDPHAVAKELQKAARSSYRLPKAMADSVNLAMASSIRVIRTIQEQLKSLKKAIEDHLDTIPQTLDSVPGIGPVFASGILAEIGDINQFNSHKQLAKLAGLAWTQHQSGNFTANNTRLIRSGNRFLRYYLIEAADSVRMHDPVFAQYYALKKAEPKQFAHKRALALTARKLVRLVFCLLKTNQLYQPEGGNRHDS

SEQ ID NO: 189590 - protein, 323 aa, unidentified
MNAPIYCGIDVAKRNFVIGFSHQKKTKTETNNAKGIQHTLDYLSQFNVALITLEATGGLEIPVAKALARAGYRVFIANPLKASEFAKSQTRAKTDAKDAVNLAFYGLTCELKGEVEHQLYVPLSEQEEQLEALVVRRRQLVDMRVAELNRLQQSHETQLDNIQQHIEMLDKLIAELDKDIDDQSKHFSDKADLISDIKGVGKNCVAVMMSSLPELGKLSSKRIASLVGVIPHSQESGQWKGKSFCYGGRAIVRNALYMAALSAIRFEPVFKAFYTRLVAKGKAKKVAIMACMRKLLTIMNALVRRNEKWDATRYLSTESVGQN

SEQ ID NO: 189591 - protein, 417 aa, unidentified
MNRNKCGWKQLRILQRRSKMISVGIDISKEKSTVCVLKPYGEILMKPRDVRHTESELSKLVSELHKMQGQLRVVMEATGAYHLPILTYLKEKGFFVALVNPLEMKRYRCQGIRNAKTDKIDSRIIANYGIDFWYHLTDFQGSEQHYLELRLLGRQYRQYMKFRVENVLALANMLDQMMPGIKTLLGDWNKQTGKDKLADFAYDYWYFDNITKKTEKQFLESYIKWAKKKGYRQNESKAKQIYALAKEGIPTLPSSTPSTKMLVQESVKIVREVDDTLTQILTRMSEIAKMLPEYQVVHDMGGVGDVLAARLIGEIGDVRRFRNAKALIAYAGIDAPPYQSGKFTGTDRHISKRGSSTLRKVGFETMTCLVMQKKCGDPVYDFIKKKQDEGKACKVAKIAGFNKFLRIYYARVMEVYQ

SEQ ID NO: 189592 - protein, 335 aa, unidentified
MQIYGIDLAKEKFDVSFFDLTSKKVSNQPSHKVVKNNLKGIGKFFKDLPSDAVLVAEHTGVYGDTLLKCCMDSNVKIAFVGGYVIHRYRATPDRAKTDVLDCALLRDFGERYPDKLKYKTFPEEALYELRQLARHREMLVEQRKQLITADRSEDCRPIRSLAVKRSMDRIKEMLDTEIAETEKEMLKVINGHESIHHNYELVKSVDGVGLITAVELLVKTENFTKITTARQYAAYAGTAPYEKSSGKMDKGAHISKIGNRRSKTLLYICAESARLHNKEIKLYYERRTLIDKKPRHYVLNAIANKLLRIIFTLVEKGEYYDANFIRQDPRVVKYN

SEQ ID NO: 189593 - protein, 360 aa, unidentified
MTMLAEPKEQIEQYPPIDAVVGGDTHRDTHHLCMLTPTGVVIDQIVISNDAEGYLAALDWITEHAPGPRVLVGLEGTRSYGVGLCRALQAAGLEVVEVEQPRKADRRGRGKSDPIDAQLAALAALRMPADRKVLPRTDGDREALRILLAARNEISPARTRQINQLRALLLTGDDADRELGRGEMTKAHLNLIARRRGPRGGETTEQAVRRGEARRLAVAIRAADIALLENTKQLKALVKKFAPGLLDRTGIGPYTAAQAIVSFSHHGRCRNEAAFAALAGASPLLASSGQHHRHRLNRGGDRQLNRALHTIMLTRWRVCPRTAAYIERRRKEGKTDREIRRCIKRYIARELFHQLTTATR

SEQ ID NO: 189594 - protein, 335 aa, unidentified
MKAPSTRPAAVLGLDVGKSSHWARLVDRDGEVLASAPVRNREAELDALFASAPAGTLVVVDQFRNIGSLAVRRARAAGLGVAHLPGLAASRAAGLFAGEAKTDERDAAVIARTALGVPDSLSGVPGRGEALEAAVDLSDRRWLELLAGFGGAWGIARSGAAGEAAAASTAPPPALVEAENRQVRFLAARISEALDEAGALEAETAALLEGDETYACLLTVPGIGPRTAAQLAVSVDIARFPDHDHLASYRGIAPRVRSSGTSVRSVRASRRGDARLKSLLIFSCNSLVRSSGRYGECYRACRARGMGHGRALKAVARKRLRAIYAVMRDRVPYRE

SEQ ID NO: 189595 - protein, 352 aa, unidentified
MSATAAQNVIAVVGIDIGKNSFHVVALDDRGAIVLRQKWSRGQVEARFANMPPCLIGMDACVGAHHLSRKLKAFGHDARLMPAKYVRPYSKGQKNDFRDAEAIAEAVQRPTMKFVATKTAEQLDLQALHRVRERLVSQRTGIINQIRAFLLERGIAVRQGLRYLRAELPRLLAAPPDVLSPRMVGVIEGLAEDWRRLDERIEHLSGEITALAHQDAGCKRLVSVPGIGPIISSAMVAAIGTGDAFSKGRDFAAWLGLVPKQISTGDRTILGKISKRGNRYLRVLFVQAAWVVLIKPQSWERHGLKPWIEAAKKRLHRNVLAIALANKLARIAWSVLARGRSFEARPVMASAA

SEQ ID NO: 189596 - protein, 319 aa, unidentified
MLIGIDVAKAELVVAARPSGERWTVANDERGVRTLVERLRSEAPELIVLEATGGYELLSVAALVTAMLPVVVVNPRQVRDFAKSTGQLAKTDRIDADILALFAERVRPAVREIPDADAQELDALLARRRQLLEMLGAERNRLGQVFGRGKQKVKKSLKGHIAFLERELRIADTDLGDMVRRSPAWREKDDLLQSVPGVGRVVSFTLLADLPELGRLSRREIAKLVGVAPLSRDSGTLRGRRFVQGGRASVRAVLYMGALVATKRNAVIRTFYQRLLTAGKPKKLALVACMRKLLTILNTMIRTGQRWSIDQSSPALISA

SEQ ID NO: 189597 - protein, 389 aa, unidentified
MKIFVGIDIAKLNHFAAAISSDGEILIEPFKFTNDADGFQLLVSKLESFDKNSIIIGLESTAHYGDNLVRYLVAEFYQVCVLNPIKTCQMRKNNVRKTKTDKVDTFVIAKTLMMQDDLRFITFFDLDMMDLKALGRFRQKTIKQRTRLKIQLTTYVDQVFPEIQYFFKSGLHQHAVYALLKEAPSPKEIASMHMTHLANLLKVNSHGHFTKEQAKELRVLAQKSVGANDSAISIQITQTIQQIELLDSQLEKIEAEMTDIMRFNDSVIMTIPGIGYINGGMILGEIGDIHRFSNPNKLLAFAGLDPSVYQSGNFQAKTTRMSKRGSRVLRYALVNAAWNVVRNNATFEAYYNAKRAEGRSHYNALGHCAGKLVRVIWKMLTDEVDFNLE

SEQ ID NO: 189598 - protein, 372 aa, unidentified
MNSILYVGMDVHKENYTLCCYSIGDEELMYKQTIEPDYKMILKYLERVRNRYHEEEVEFVCGYEAGCLGYTLYHQLTNHGVKCIILAPSTMGITNNDRIKTDKRDAGNIARCLAFHTYSEVHVPTAEDEAVKDYIRMRNDKKKLLKITKQQILAFVLRHGYRFSGGKNYWTIKHVGWLKSLNLGGVLQESLTEYLITYDYLTNKIESMDKRIEELAGGERYQEKVKRLSCLLGVKTHTALSVVVEIGDFRRFAKAEKLAAFIGLVPSEDSSGGKQKRGNITKAGNSHVRSLLVESAQSYTRGKIGHKSKELKRRQNGNSPEVIAYADKANERLRRKFYRMVLSNNSNRNIAATAIARELACFMWGLMTDNIA

SEQ ID NO: 189599 - protein, 347 aa, unidentified
MSLHGQIVLGIDTHKHTHVAVVLDGLGRVGGQLQFAATETGTEQLLAWNQDNGGALIAGVEGTGSYGYRLTRTLQLAGMTVLEVNRPDRANRRRKGKSDSVDAEAAARAVLSGQASAVPKNREGAVDALRALTMARSSAVKATTQASNQIKSLLVGCPDDLRDQLNVKSLLRLATRCSELGPGTGMQSALRSLGLRWLLLHEEVLGLDAQIRDLVRATAPALIARPGIGVHSAAQLLVTAGGNPDRFHSDAAFAALCGASPVQASSGQRQRHRLNRGGDRAANNALWTIANNRLIHDPRTREFAARRRAQGDSRNDILRVLKRYIARETFNLILAALRCDRAVLVAA

SEQ ID NO: 189600 - protein, 360 aa, unidentified
MVVQRTNVGLDVHARSVVACGLDRQTGEVFEQRLTPSHEEIAAWIRSLPGPAAAVYEAGPTGFGLARSLRAVGIDCEVAAPSKLMRPSGDRVKTDTRDARHLARLLMLGDVTAVAIPSREQEAARDLVRAREDCRGDLMSTRHRLSKLLLRQGIVYSGGKAWTGKHELWLRCQRFDDPALQLAYDTSFEAMLATIARRDRLDRAIEQMAADSEFTAVVSRLCCVRGVATLTAFGLAVEIGHWHRLTGRSIGAYLGLVPTEYSSGASRVQGGVTRTGNGHARRLLIEAAWHHRARYRPGATLRRRWDAASAPARARGQLANQRLHARWQTFDARKKRAVVANTAIARELAGWCWSLAVLDG

SEQ ID NO: 189601 - protein, 356 aa, unidentified
MSQQCNCAIAVIGIDIGKNSFHVVGHDLRGAIVLRQKWSRGQVEARLANQPSCLIGMEACVGAHHLSRKLQLLGHDARLMPAKYVRPYSKGQKNDFRDAEAIAEAVQRPTMKFVATKTVDQLDLQALHRVRERLVSQRTSIINQIRAFLLERGVAVRQGPRFLRAELPGILATRTDVLSPGMLRVIEALAGDWRHLDARIEGLSGEIETLAHQDQHCERLMTVPGIGPIISSAMVAAIGTGEVFSKGRDFGAWLGLVPKQISTGDRTILGSISKHGNRYLRALFVQAAWVVLVKLGPKQWERYGLKSWIEAAKKRLHYNVLVIALANKLARVAWAVLNKGRAFTCVKTDAMASRPA

SEQ ID NO: 189602 - protein, 404 aa, unidentified
MTATVAADTVGPDVFGGVDSHADTLHVAVISDNGGHLADAEFTTTAAGYAAALAFLNAHGRVIAIGVEGTSSYGAGFTRAARSASLHVVEVNRPDRAERRRIGKSDPIDAYAAARAALSGRASSAPKDDTVTGIRALHNAARSAVKARTAALNQIGHILISAPEAIRAKYGPLKGTARTDALARLRPSGDPVHTAVLTALKSLARRVKDLTAEHTALTKALDTDVTAHNPGMGAAYGVGPDTAAQLLITAGGNPERMRTGASFAALCGVAPVPASSGRTNRHRLSRGGDRAANAALYRIALVRMSSDPRTRDYVTRQTATGRTKKEIIRLLKRAIAREMFRCLTTTVAVPGVADLRPLRQSKNITLTAVADHFGVWPAVISTLERGIRRDDVLTNAYRDWLQTA

SEQ ID NO: 189603 - protein, 332 aa, unidentified
MSNYSNAIGIDVSKDTLDVHDYKLNSHKKYVNAESGFKEILAWARKNHDRKLEGIIICFEHTGIYSLPLAVFLSKKKVRYTIVPGLEIKRSLGMVRGKNDKIDAFQIAKYAYLRREEIKEYKLPSQDILKLKSLLSLRERMVKHRVSYQGHLKELKTFFKKSHNPQLFKSQEKLIKQITVQIKEVEQEMMDIIRKDPELKKLYGLATSVKGVGMVIGITMIVYTNCFTAFDTWRQFATYAGIAPFEDQSGISRKKPKRVSHMANKRIKALLSNAATTSIQHNPEMRLYYEKRLSEGKDKMSTQNIIRNKIVSRVFAVIRRGTPYVDTLGYAA

SEQ ID NO: 189604 - protein, 344 aa, unidentified
MDATTVGIDLAKNVFEIALADERGHIFDRQRLNRARFERFFVNRSPCRIVMEACGSAHHHARRLRAQGHEVCLLPAQYARAYVRRNKTDAADAAALIEAARCPDIRPVPIKSPDQQALQQLHRLRSQWMGARTSRINFLRGCLREFGVSISLGPKRAIETVRASLADPAGPVPSLLHACIFELLEEIEALEQRCRHLDRELKRLHLNDPVVERLLKIPGVGDLTATALRASVVDIQRFPSGRHFASYLGLTAREHSSGERRRLGCISKEGDTYLRTLLIHGARSVLLAARSAQRRGLTLDRLRTWALDLQERRGHNKAAVALANKLARIVWASWRHERDFVSHP

SEQ ID NO: 189605 - protein, 387 aa, unidentified
MIFVGIDIAKNTHWASAMNSDGEILLEPFSFQNNNEGFQKFISKLSNFDKQKMLIGLESTAHYGENIISYLFNLDYKIGIINPIQTSNLRKSNIRKTKNDKVDTFIIIKSLTLNNYNLVTTRDINNIKLKGLSRSRHNLIVMRSRSKIQLASFIDQLFPELNKFFKGNLHLNVSYQLLKDYSSPKDISSLHLTKLYNILHDNSHGRYNKEDAIRLRELAKNSVGIDNPTLSLQIKQAILQIELYSEQIEEVEKLSKQILDEMKSKLLTIPGMSYNQATAIHGFIGDIRRFNKSCQLLAYAGLDPSIYQSGNFEARSTRMSKRGNSLLRYHLVYAAHNLVLHNITFKKYYDLKRSQGKTHYCALGHCAHKLVRIIFKMLKSNVDFNLD

SEQ ID NO: 189606 - protein, 340 aa, unidentified
MKKVYAGIDLHGNNNYLGIIDKQGKRIFKKKLANIPEVILEALKPFQKAIMGIVVESTFNWYWLVDTLMKEGYKVHLANPAAIQQYAGKKHADDQHDAFWLAEMLRLGILPEGYIYPKEDRPIRDLLRKRGHLVRLRTSLMISLQNIISRNCGVKISAGQMKKVRKDEVLPVLCGQEDLALSGKVSKEAIDFLTRQIKQVENYVEDKVELKAPYHYLQTICGVGKILSLTIMLETGPIERFAKVGNYTSYCRKVPTKWTSNEKTKGKGNKKNGNKYLAWAFSEAAELARRYEGQARAYYNKKSAKTNFMVAHTALAHKLARAAYFVMRDQVPFDPIKVFV

SEQ ID NO: 189607 - protein, 401 aa, unidentified
MEGPIVSIDVSNGNSHYMCFIKNNKRFGKVKKIDHDIEGFKRLLEDIQKLEAETNEKVCAVFEATGVYTKPLERFLSKNCIKTYIINPLESARKRKEEIHNKKTDKLDPISISKVYYDKEEMMELKKKDETYNWLRKKNRLYEDQLNHLRKYKVTFQNQLSICFPGYLDLFKDGYSDIPMTILKKYPHPDLLKNKKAETVARYLEKNTCHTHKVSLEYALKIIEFAKKTYPGCEKDDVEVEIFKILLDKVIETQRECEKTLNEMITVASTLEEYRYISSIDGIGPNLAARIIAEIGDIEEFKSREALVAYAGLDPHIYQSGDQDGKHLKISKKGNKYLRCLLFLAVGCSIRGAKDNPVNRFYQKKKQQSNPLNSKAAKTACTAKLLKIIYGICKNKTTYER

SEQ ID NO: 189608 - protein, 320 aa, unidentified
MMAQNDLVVAGIDVAKGKVDVCIRSLSQRQTFPGTPDGRRALIRWLRKHKVGKAAMEASGGYERDWAKALREARIEVRIVDPKRVRSFARSAGRLAKNDAIDAEMIAWFAETFGEAPSQAYDAARDKLVQIVRARQSLLDLQTSLQNRGEHAAPEVVQKMQARLLKTIALEVAKLEAAITAMIKATPHLAELAEIIESVPGLGKITSAGLVAAMPELGQVSNNIAAALLGVAPYDDDSGQRRGDRHIKGGRRKVRNLFYMACLGAATRHNPMLKAFYDRLIAKGKEPKVALTACMRKLICILNVMIARRQEWDPNRYIVS

SEQ ID NO: 189609 - protein, 349 aa, unidentified
MKKIFIGIDFSKEKFDATVIKAEDLSEMLSVGHQEFINKATGYRKMLRWVDSLCGADTCEDWLFCGENTGGYSQMMSDYLYSKGYDLWIENALSIKRAFAMKRGKSDRSDSLMIAEYAMRYQDKARLYEPLSPALSQLREVFLYRHMLVRHKCSFEVRRIEKRFTQQKSSAKTMISQSSRHILTELKHEIQKCDQRIQELIRSDEELSRIFGIITSMPGVGTLNAVCLMVFTNNFIKFDYNARKIACYYGVAPFSRDSGTSVHSAPKVGYLANKMIKSLLSQAALAAVNFCPAMSVYYHRLLDKGKMPMVALNNVKNKMLTIITAMVKNECKYQPEYISINARSEMLNK

SEQ ID NO: 189610 - protein, 317 aa, unidentified
MEAPVAGIDVSKDKLIMYFQGKLYEFTNDRQGFEEIRKILPSGCKVGIESTGVYHVNLAKYLNNEYDVRIINPFILKKFKDFRGKKSDKNDAKKLAEIVVSMGSELTTSDARELTSQWDFVIRSIARVKNRLRRDLVLLGYRDSLSKKNLEEVLRGGGDSVVLFEVRFLLEELERLEGRKREIEKELEDFVPKDSLIFTIPGIGKTLGCIILARVGDVRRFSDKKRFVAYCGLDPVVESSGKSVVSRGISKRGDAVLRRAFYLAALTAIKVNPVIKRFYEDYKGRLRGKKLIVACARKLAVITWAVLYYNKPFDASE

SEQ ID NO: 189611 - protein, 354 aa, unidentified
MKDQAIQYLAFDVHQATIVATHRDPGGSIVMRATIPTEAQAVVRLIRSAGARVHVAFEEGTQAQWLHDVVAPHAERVIVCNTRGESEGGNRNDRLDADRLSERLRLGSLKSVFHGGKNLLTLKELVRNYNNLVEDSTRVMQRIKALFRARAILTPGVSVYRLSQREQWLERLHGGARVRAGSLLAQLDVLLELRPKAKAAMIVEARRQPAWKILRSIPFLGPIRVAQMLAIIRTPFRFRTKRNLWGYVGLAVVTRSSADEEFAGGKLRRRRKAPLTRGLNRNHNPVLKAIFKGAANAATARPGPLRDFYEAFLARGVRDELAKVTLARKIVAVALRLWKKGELWDPKKLTMQAT

SEQ ID NO: 189612 - protein, 349 aa, unidentified
MTMVGGFDVHRKQITFDYVDNDGLVRWGQIRPATRTTLRGWLREHCPDGDGEFALEGCTGWRYVSEELAAADVGVHLGDPAEIATLRGPKKRAKTDRADARLLRTLLLEGRFPESWIPPAHVLETRTLGRLYCTLMDERRAWQQRIHAQLFHQGCPPVKGLLSTAGRETLAGAELSATGRQYVDTALRRIDELTAEIDPMRRQLISFARRQVGCQALQARQYGVGWLCAAIMWAEIGDARRFHSSDQLVRFAGMDITVYSSDGKRSPGRLSRQGSPELRWATFEAAKCAARRGSPDYAYYRRLAAAPDSGKNPTLAVQRKILRRSYHTLRELGDAALAMPVPEAKGVAA

SEQ ID NO: 189613 - protein, 418 aa, unidentified
MKKKYYKFTKINHSTLIVGIDIGKNTHYGYLRTLLYDGSKSFPFSNTKEGFEQLIKRIKQFEAKHKTTNVIIGLESTGSYWLPLAYYLKQNTHYQLVQINGKHTKRFKDVTDNTSRKTDQKDPRVIAQIILIGSSLRVSLPEGDKAVIRELTRSRKAILEDKKRAQNRLLRYLSQYFPEFEKLFKDITCKTALYLLKEYPNPDDILKTNEGQLISELRKLSRGRFTAEKVKQLITYSKDSIGIKQGIEAYEMSLLIQIEQVEFALKKIQEIENRIKAKLVRISEYYILKSIKGLGDMTIATIISEVGDFARFRNTHELEKYSGLNLVENSSGRHYGQKRISKIGNEHLRCALYFGVLRMIKKGGVYYEVYQKHLEKGMKKKKAIIVISKKMLRTIHSLVKNEQMFELKYIDTTYHQAA

SEQ ID NO: 189614 - protein, 470 aa, unidentified
MVAVMIGIDPHKASHTAVAIDPAEVPLGQLRVRASAVQAERLLGWAQAWPERAWAVEGAGGLGHLLAQQLLSAGERVLDVPPKLAARVRLLATGNINKNDPNDARSVAVAALRSAGVREVRRDDHAAVLKVWSKRYQDLGRARTQVACRLHQVMCELIPGGVPGEITAGQAERILASITPAEAVQAARWELAAELTEDLRGIDARIRQARTKLAAAVRAAGTSLTGLFGVGPVIAAAVIGDVRHVARFPDRDHFAAYNGTAPIEVSSGGRKIWRLSRRGNRRLNHAIHMAAVTQIRHRHSQGHAYYQKKLAEGKTGKEALRALKRQVSDAIYACLQADARRDAAHVKSPGGQPGNGSDSSAAGSHPGHRLFGQATPGLRHHTTTAASDPAPGPASARGRAGHSSIAATSPLAKPQVQVQRPQRSEDERPGGAASQRPYSAARKARGQGSQAKPQRPKTASRAHENDRRNP

SEQ ID NO: 189615 - protein, 341 aa, unidentified
MSEVSTIGLDIAKHVFQAHGADASERAVFRKKINRSKLMEFFASQPRCVVALEACGGAHHWGREIGKLGHTVRLIPPAYVKPFVKRQKNDAADAEAICEAAQRPSMRFVVVKDEEQQANGVVFRARDVLVRQRTQCINALRGHLTEYGWVVPKGTAHVTTLIGQIEDPNCSLPESARAIFKVLVTSLTSLDESIAVLDSEISRRSKEDPVARRLMTIPGVGPITATAIAALAPPIETFGTGRDFAAWLGLTPLQKSTGGKQRLGAISKMGERTLRRLLIIGGSAVVSHACRRGAPDGSWLARMLARKPRMLVTVALANKMARIVWALLAKGGVYQAPVVAA

SEQ ID NO: 189616 - protein, 366 aa, unidentified
MLYLGIDQHHKQITVSVRNDEGTVILRRQVSTRPEKTRAFLEDIRRQSGEDGYMAVLEVCGFNDWLLALLPEFGCREVVLIHPDKRSRRKTDRRDAGKLSELLWLNGERLRNGQKPQGLRRVVIPSANDQQDRQLTSVRKRVGQQRTRTINKIKNILRRHNLTWQQPTKTFQTRMVRHWLEKLQLPEIDRLEMDQLLAQWDLWEKQLEQLEARIGDRFRKNRTALRLSTAPGASAYSALAIASRIGSVERFASPRSLANYFGLTPGCRNSGETTDRLGSITKEGSGMVRFIVGQMVLHALKKDCRMRDWYGRIRRRRGSKIARVAVMRRLVTIFWHMLKHEEYYVAGGPPRRKWQAACRQEVALSQ

SEQ ID NO: 189617 - protein, 362 aa, unidentified
MSMLAEVAQASRLGDVVEVVIGVDTHKDTHTAAVLDARTGAVLECSTASAAADGYAALVELAERHPGLRAWAMEGSGGYGAGLARHLADHGEFVIELDRPQRPARRGGAKSDPIDAERAARDALARTRLAQPKTGPERAALQMHLTARRAAVDAATDAQRQLHALIVTAPEAVRDRFRGRNTPTMINIAARLRPAATRGDAETIAAVTVLRRLAERIRFLETEAREHETAIRALVRSWRPDLLDLTGVGPIVAATVLTAWSHPGRCRNDAAFAMLAGAAPIPASSGRTIRYRLNRSGDRQLNRALHTITIVRLRLDPTTRAYADRRRAEGKTDRDIKRCLKRYIARQLYRHLEPPHPALDTS

SEQ ID NO: 189618 - protein, 412 aa, unidentified
MFYVGVDIAKKSHVGFIMNDKDKVIKKPFKFNNDEKGFNEFNSLLSSVDENVSNFIIGMEATGLLFENLYLYLKDKGYNVILLNPYQTSKFREMETMKKVKNDNIDAIMIASLIKSSRYSKAYVSEEVYASLKALHRHRASLQEELKKHKRRVSTLLSVVFPEMEQVIKDPFSVTGMVLLEKYPTAKHYKYASPQRILKLFRNIKGNNFNLEKANKLLELAKSSIYSGNAYDERAFVIQSHIRAIRFLESEINSIENRMSELFNESPTFTKEEEKEVADIIDNLRTIPGVSDKTLFTIMGECGNLERFKNINAFIGYLGLYPTLEQSGNTTRYGRLAKRGSRLAKSALYKAAVAAIRHNDEMKKLYCDKKSQGKAKKEALVIVARKLAAIILAVYKNNTPYNPNRVFNQNIT

SEQ ID NO: 189619 - protein, 398 aa, unidentified
MISVGIDVSKEKSTVCILKPYGEILSSPFEILHTEKELSELVTMLKRFDEEVRVVMEATGAYHLPLLTYLKEKNLYVSVINPLIMKEYRYRGLRRGKTDRLDAIMIANYGIDNWFHLDNYEFSEGKYRELRLLGRQYAHYMKMRIESVLGLTNMLDYTMPGIKTLLNGWNESSGKDKLSDFVEEYWHYDNISKKSEKQFINSYLKWTEKKGYHQSEAKAVKIYAMAKEGIPTLSSSTPSTKMLILEAVRVLREVDNTLKMILTQMKELARSLKEYPLVRAMGGVGDVLAPKLIAEIGDVRRFHSGKALIAYAGIDAPPFQSGQFVGTNRHISKRGSSLLRKIGYETMRCLKTTKNEEDSVYQFMIKKENEGKPKKVAKMAGLNKFLRIYYARVKEAYQ

SEQ ID NO: 189620 - protein, 400 aa, unidentified
MISVGIDVAKGNTVCILKPYGEIVSKPFDISHVEKDLGELAAMLLRFDDEVKVVMEATGIYHLPVLTYLQEKGLFVAVINPYLMKVYRSGDLRKAKTDKIDSRIIANYGMEHWFTMAEFKASDDVYGELKMLGQQCRHYMKLHIMSLHELTHLLDYTMPGIKGMLASWNEGNRKDKLSDFVERFWHYDTITCLSETEFIKQYTFWAKEKKYHQSQDKAQAIYALAREGIPTLSSETPSVKMLVTEAVRVLKEVDATLSIILSRMQELAKSLPEYSVVRGMGGVGEVLAPKLIAEIGDVRRFHSGKALIAYAGIDTPPYESGQFVGSNRKITKRGSAALRKVGYETMRCIKTHPRPDDPVYQYIVKKEAEGKAKKAAKIAGLNKFLRIYYARVKEVYTDIK

SEQ ID NO: 189621 - protein, 348 aa, unidentified
MLIIGVDYHPSDQYIALADTETGECGERRLNHSDGEAEKFYRNLQQRAASVRVGMEATGYSRWFERLLAELGIELWIGDAAEIKTKRVRKQKTDPNDARLLLKLLLEDNFPRIWVPSPENRDLRQLLWHRHRMVQMRTRIMNQLQALAMNEGQRRKKKLWNEPGRAQLEKLPLAVWASRRRQDLLELLDRMNPPIEELTRAIAHESRKRPEVQRLMTHPGVGPLTALAFVLIIGTPKRFQCGKQIGSYIGLIPSEESSAGRQRLGHISKQGNALLRYLLGEAAQAAVRCNADWHRRYVHLAMRREKNIAKARRIAVRLYWMWRNGWEYGQSVEFGSHAGQLVTGHGAH

SEQ ID NO: 189622 - protein, 342 aa, unidentified
MTEVLIEAPGHKRRRRLLVLNTRVEHDHLIEVLQAYGRPVVCAFEATGNYHRPIAWRLAEAGFEVRLVSSLALARTREALHNSWDKNDPKDAQVILHMLRIQATQVYHDPLRAGINDVQELSKTYEAIARAKTEIQHRILTHYLPLYFPEIDRFRGNSRSDWFFAFLHAFPTPASITALTKEEFVTAAWDVVGRKVSKTQILMDIYETARSSIGLPLPLDAPAIRMFRMVIDEARGLIRQRNEIEAQADELLRHSQDYQLLRQIPGIGPINALTIIAEAGDLRRFAHHRQFLKFCGLDLSTQQSGQYRGQTRLSKFGNARLRRTLWIAGQVAIRQRENGFRH

SEQ ID NO: 189623 - protein, 389 aa, unidentified
MPSVSERPEAPTAIQTHLAASYVSLELSRSIWLITSLSPASGEKMSKHSVRAGDVAALLARFSELKRKASERTGKSFPIVVIQEAGLDGFWLHRVLQSEGVESHVVDPSSIATSRRRRRAKTDRIDGEALLRALLAYKRGEPRVCAMVKAPTPEEEDRRRLCRERKVLIAERVKHVNRVKGLLFSQGISGYEPLRRDRRQRLDELTTGDGRPLPVHLKTQIRRELDRLELLLDQIKEAEAERDVLLAAPQPAAPAPAGRMLLEFKGIGAELAAVLWLEALFRHFDNRRQLASYAGLAPTPWQSGSVDHEQGVSKAGNPRLRTSLIQLAWLWLRHQPQSALTLWFKERVSGNGGHFKKSTIVALARKLLVALWKYVTAGVVIDGAVMKDA

SEQ ID NO: 189624 - protein, 346 aa, unidentified
MEHYVGVDVSLELSSLCVLDVTGKIIREAKVASEPEALVMFIRGLDLEITRVGLEAGPLSQWLYDGLHEAGLAPVLLETRHVKAALSAMAVKTDRRDARGIAQLLRMGWYRPVHRKSVSSQEIRALLGARKQLQIKVIDLEQTVRGLLRGFGLKIGDVSRGKLPARIRELAAGHAMLEKIVEPLLSAREAMWREFARLHREVLVIVKEDQVCRRLMTVPGVGALVSLTYRAGVDDPARFTKSKSVGAFFGLTPRRYQSGETDVTGSITKVGDAAVRTALHDAANALLTRATRFSTLKRWALDVAKRRGMRRAKVALARKLATVLHRMWADGTEFVWGKDPAATAAA

SEQ ID NO: 189625 - protein, 415 aa, unidentified
MEVLGPMDVVYARCCGIDIHKQTAVACVIRSDTQGPPRKQIRTFGTMPDDLLALADWLRTEGVSHVAMESTGVYWKPPYNLLEGEFEVILANAQHIKAVPGRKTDVQDAEWIADLLRHGLLKASFVPDRPQRELRELTRYRTSLVRERAAEVNRLQKTLEGANIKLGDVASDILGLSARQMLEGLVTGTDPTILAQFARGRLREKIPQLERALVGHFAAHQRFLLATQLAHIDYLDALIEQLSAEVAQRLAPFAPLIERLDAIPGIARRTAEIVLAEIGTDVHRFPTAAHLASWAGMCPGQHESAGKQTSGKTRKGSPWLRSALVEAATAAAKSKRSYLASQYSRLARRRGAKKAAVAVGHSILVIIWHLLEHDCPYVDLGSTYFDQRDHSHVKRHLVQRLEQLGYAVTLSRAAA

SEQ ID NO: 189626 - protein, 368 aa, unidentified
MSHDTTFVGLDVHKDSITAACIGPDPDEPVIDLGTVGTQQYAIDRLCKKLSGRGRLRFVYEAGPCGFWLQRYLAARGYECQVAAPSLIPKKPGERIKTDRRDARKLALALRAATLSYVHIPTPEQEQFRDVVRAWQQGKRDVTAARQRLKSFLLRHDIRYTGRANWTGAHRRWLSEMVLPTPAQQIVFQELVDSITERERRRDRLERQLDALAPEWSGYPLACALLAFRGIQKTVAYTVVAEAGNLSRFAHPTQFMAWLGLVPGEHSSGTTRRQGPITRCGNRWARTLLTEAAWAYRYSPKVSRIIEARAQDMDPTIRAIAWKAQIRLHHQYAKLTARGKHKNVAVTAVARELAAFIWDAARQLEPRP

SEQ ID NO: 189627 - protein, 411 aa, unidentified
MDLLYARCAGLDVHKATVVACVRRPGPQPDARHAETQTFATTLRGLAALAAWLTAHGVTHVAMESTGVYWRPVFAVLEGTVQVRLVNARHVKMLPGRKTDVRDCEWLAQLLECGLLRGSFIPPAAVRDLRDLTRLRKTLIRERGHHVNRIAKTLELANIKLGTVVTDIMGKTGRAILQALSTGVDDPAQLAACAQGSIRKKQAALREAVEGRLTPHYAFLLQQHLALIDTLDAHIATLDTRIDVAMVPFAETAALVQTMPGVASCAAEAILAETGMDMSPFPTAAHFASWARLCPGNHESAGKRRSTTTGKGATWLRATLQEAAWAAVHTKKSYYRALYYRLKARGGPKKAIVAVQHAMLVALWHMLTRRVPHQDLGADYFAQRNTERTLRHHVRRLEQLGYQVLLAKEAA

SEQ ID NO: 189628 - protein, 342 aa, unidentified
MKAITTIGIDLAKNSFSVYGVDAKGKPVLQRTLSRSGVVRFFANLPACLVGMEACASSEYWAREIESLGHTVRRIHPRYVKAYLLGAKNDANDAAAICEAVQRPNMRFVPHKSPEQVDIQCVHRVRQGYVHSRTALINQARGLLAENGIVIRQGTAQIRAHLPAIIADESNTLSGLMRRNLASLYDSLCFLDRQITEQEDILKTIAKENEACKRLMQIPGIGFITATILLTVAGVASNFKNGREFAAFLGLVPRQNSTGGKTKLFGISKRGDKYIRTLLIHGARAVLRSLTVGRMAEGRHSKWLADLVARRGTKRACVGLANKTARIAWSLLAQGTQYKLAA

SEQ ID NO: 189629 - protein, 374 aa, unidentified
MSDHSEAYVAFDTSKLRNAVAIADAGRSGEIRFLGEIENSSAAIAKLVRKLAAKYGRLTFCYEAGPTGYGLYRQIKGLGHACMVVAPSLIPRKPGERVKTNRRDALSLVKQLRAGDLTAVWVPDARHEAMRDLTRARETAVEDLRRKRQQVSAFLLRQGLHYPSERTWTKTHRNWLASQKLEHAEQRIAFEEMLLAMRQAQERIERLEQAIRAAVPDWSLAEVVTALMAMRGIEFISATAFLAEIGDLSRFATPRELMAYLGLVPSEASTGDTVKRGRITKTGNRRARRILVECSWSYQHPPRVGKEKQERVAAAPPAVREIAWKAQCRLTARYRALIRKGKLKTVAVTAVARELSAFIWAINREIANSRAAAK

SEQ ID NO: 189630 - protein, 465 aa, unidentified
MKSNRRPHRKKPAAGPSLLERLNPNAAGIDCGSDTHYVAVPADRAPTPVRAFQTFTADLHRLADWLTACGVTTVAMESTGVYWIPLYEILEGRGVDVVLVNARHVKNVPGRKTDVVDCQWIQELHSVGLLRGSFRPTAAIAALRAYLRHRETLVQSAATHVQRMQKALVQMNLQLPIVISDITGVTGLRILRDIIGGQTDPQALAQHRDHRCQASAAEITAALTGHYRPEHVFVLQQNLELFDAYQHQLAACDTAIEAHVLTLAAHAPTPASPVPAARTRKTPRNNEPRFEIRTPLHQLTGVDLTQIDAIGPYSALRLLSEIGTDMSRWPTEKHFTSWLTLAPRNKISGGRLLSSKTQPSANRAAVILRMAAMNLGRTDTALGAFYRRLAYRVGKAKAITATARKLAILVYRTLRDGLAYQDPGAAAYDAQHRVRVLHRLRQRAAHLGFSLLNRETGELLEGAVS

SEQ ID NO: 189631 - protein, 342 aa, unidentified
MEQYDARAVIGLDLHRRRSVLVAMTAAGERLGMCRIDNDPQVLAETALGWGEAPQVVLEATYGWYWAADVLADAGCEVFLTHPLGIKGFAYRRVKNDERDAADLADLLRMGRLPQAWIAPPPVRELRELVRHRAKMVALRSGLKAGVHAVLAKHGIAVPMADLFGPSGRRLLEQLTLPEVYAAHIASLRRLITMFDTEIDGFGARITARLAGDDGYRAIQRLDGVGPVLAAVFVAEIGDVHRFRGAPQLCSWAGLTPKHRESDTKVRRGHITKQGSPLVRWAATEAVQRVSRGPLAHTRARVGERRGKGIGTVAAARKLLTLVYYGLRDGHIRVLAPAQPAG

SEQ ID NO: 189632 - protein, 460 aa, unidentified
MNEYFIGIDASKGYSDFVMINAKKQTVIENFQLDDTFQGHTRLYELLHGFNQDYPEATIYAAVESTGGYENNWFQSLLKFQASLPIKTAHLNPLGVSHNSKADLKRNNTDKISAKNVAEYMIAHPEKVSYQHQDSLASLRKQWGFVTMLTKQSTQLLNQLESLVYNANPEILIYCKGDTPQWILKLLTSYPTALRLSRAKVKLLARIPYISLDRAKQLIATAKKSVASASDKVTEQLIVATVKQIVHLKKTIKVQSEVLANECQIPEVALLKTFTGIGDYSAIGLMLQIQSVNRFLTSKKLSSFFGIHPEYKKSGDGTYKYRMSKKGRKEGRRILFIVAMSAVQSNPLIRDVYQQAVEKGMEKMSAMGLCMHKILRIVYGMLKHNKAFDPQVDLKNRQKKPSRQRKVGQDKDRRYQNFDSNAPISRRQKMKRKERKQSQNVINVEYGISEASVPSTQLAN

SEQ ID NO: 189633 - protein, 420 aa, unidentified
MPNIEIGVDSMVKENFIYVGIDLHKETHTAVMIDCYNQKLGEITFPNRPAAFPKLVTKVKKCNTDGKEVVYGLENTYGYGRALAVWLIDKGYLVKDVNTAISHRQAKHRGAMYRKSDSDDAKAIALATLNMLDKLPDACPNDAYWSLGQLVHRRDNIMKQRTRLVNQLHEQLCIAYPSYKQFFNDISRPTALYFWEHYPSRKYLKGKSVEDLRAELVPVSHNKCSTKTCEKILDAVASDKVKNNAYQDARDMVTLSIVSDLQHYDSQLTEVDKMLEQMYKMLGCTLTTIPGVNVITAVKILAEIGDIKRFSNANKLAQFAGIAPLHLSSSGKGKDVATKQGNRRLQATIYFLAIQMVQVSSKGTPRNSVVRAYYEKRKAEGKTSQQALICISRRLISIIYGMLKHGTEYRMPVVESAGEK

SEQ ID NO: 189634 - protein, 283 aa, unidentified
MRFYDTTHPYYCGIDLHARLLYVCIIDQLGKVLVHKEISADPEKLQKLLQPYIDRVVVGVECMHCWYWVSDFCEALSIDFILGHALYMKAIHGDKAKNDRIDSHKIAKLMRGGNFPLAYVYPKEMRATRDLLRRRTRIVRHGANLKAHVANTTSQYNLPPNSVNLKNVNAREQLRSTFPDSVVQRNIDMDMSILDHYAKELSKVEWFIEQQAKQHNPTHLQLLKTVHGIGRILALTILYEIGNINRFESVQNFASYSRLVKCKAESAGKSYGTQGNKIGNAHL

SEQ ID NO: 189635 - protein, 340 aa, unidentified
MDITTLGIDVSKNSFHVIGANRAGKPVFRQKFTRQKLTEFIANHPPCLIGMEACPGSQHFARKFEELGHQVRLMPAQFVKPYVKSNKNDFNDAAAIAEAVCRPTMRFVTTKTTEQHDLQAMHRVRERLVRTRTSIICQIRSFLLENGITVRTGRAALARALPAILEDPDQRLSERMRSLICRLRDQWCFIDEDINAVSKELEAIARSRDDCRRLLTIPGVGPLVATALVASVGNGRHFKRGRELAAWLGLVPREHSTGGKQRLLGISKRGSSYLRKLMIHGARSCYLNMNREPHRMGQWIDQLSQRGAHRNIVVVALANKLARICWAVMRDGSVYHCVKA

SEQ ID NO: 189636 - protein, 352 aa, unidentified
MIVLGADTHRRSHTIAAIAAGTGELLGARRIAAGRRGFGVLLRWARSVDHERVWALEDCRHVSGSLERFLIERGERVLRIATQLTAKARRSARQRGKSDPIDALGVARAALREGLECFPAARLDGPELDLRLLVDDRERLVRHRVELNSTLLWHLHDLWPELRLPGGALLLNKWATRIGRRLARARQTMRVRIARDELRRLRELTLAINRLEREIGELVAQIAPQLLSEPGFGPLIAAQLVGEIAGAQRFATAAKLARAAGVAPIPASPGNTQRHRLDHGANRQINAAPHRVIVTRARRQPPTRDYIERRRSEGKSTREATRCLKRYPARRVWRLRQPAGPTPDQAINTSIP

SEQ ID NO: 189637 - protein, 339 aa, unidentified
MTTYAGIDLHSSNNFLGIINQKDQRVFARRLPNELEPILNALEPHKETLNAVVVESTYNWYWLVDALQANGYPVRLANPSAIKQYEGLKHTDDKYDSFWLAHLQRLGILPTGYIYPKDQRPLRDLLRRRLLFVKHRTAHLLSLQSMIERHLGRRISANQLKSVDTLQLMQWFESEHEQFIVRCQLDLIHYLKQLIDTIENHILSAVQLRKQFQLLLTITGIGKILGLTIMLEVGDIRRFAKVGHYSSYCCCVQSQRYSNGKKKAMNNRRNGNRYLAWAYVEAANFARRYCKLAQQFYQRKAAKSNPALAVKALSNKLARASYYVMRDQVPYQAQHLFRS

SEQ ID NO: 189638 - protein, 334 aa, unidentified
MAMMTIGLDISKSWFQIHWITADGEIVRKKLARGKVLDFFSRLPSCLVGLEACGSAHHWARELMKLGHKARLMPARYVRAYVKTNKHDAADAEACWEAVQRPGMRFVPVKTVEQQGILMLHRTRDLLIRQRTGAINALRGHLGELGIVTGKGKANARELMALVDVDERIPQSARSALSILVDQIEDLELHIESYEKMILATAKDNEVCRRLMKVAGIGPFAATALAASVDHPQQFASARHFAAWLGLVPKQHSTGGKERLGGISKRGDGYIRKLLIHGARAAVHRVRIHQVPNTWIRELLDRRPFNVVTVALAHKTARIAWAIMANGEEYRPQV

SEQ ID NO: 189639 - protein, 348 aa, unidentified
MSPTNMHQYVGLDVSLKETSIRVIDEAGKIVWRGRRDSTPEAIAEAIEKHARHAVRIGLESGQLSTWLYHGLKERGLPVICIDARHARAALSLKVNKTDDNDAEGIAQIMRVGWYREVTVKGLDCQAVRALLVARAQLVSQITTLKNCVRGILKTFGLIVRKRLRSQFSQHVREAIRANPVLAAIVEPMLRVLETTRDQLRIYDRAVIRRARGHETARQLMSVPGVGAVVVLAYMTGVEDPVRFRRSSSVATYFGMTPARYQSGEVDRAGRVSKCGDSMVRGLLFEAAKVLLSRLARPCALQTWGRALAERIGGKKATMAVARKLAVLLHRMWSSNTTFRWPTGALAP

SEQ ID NO: 189640 - protein, 373 aa, unidentified
MPKYSTAFGMDVHLRSTTVCALDADTGEAVTRRFPGNPWGEIAGWMDGFPGPSLAAYESGYLGFAPQRELAGLGVECVVAAVSKIPRSAADSASKNDRNDAARMAKAILAHDISPVWVPSPEVEGIRDLAGAYDGATARLATAKQRLLAFLARRGFVYGGTTPAGNPRKYWTYDFLRWLDKVRPEDDGGVRALAALRNEVEAAAEARADLLSEYRAAVDASPIAAEVAALQSIKGCAFALAAAFSAEVGDFTRFRSGRQVTAYFGLAPSQRSSGDSVRLGGISGAGNALVRKLAVEGSWCYAAARHQPKLMPRDTGVPLEIRVHGRKGSERLLRRREEMLARGMPAAKANAATAAELVRWLWALGMMCREGAE

SEQ ID NO: 189641 - protein, 324 aa, unidentified
MRLYNTQHPFDCGIDLHARAMDVCILNQAGETLLHRHMQTTPEAFLTVIAPYRPDIVVAVECMFTWDWLADLCADEAIPFVLGHALSMKAIHGGKAKNDQIDSQKIAVLLRGGLLPQAYVYPAEMRATRDLLRRRMHLAHTRGALLAHVQNTNSPYNLPAIGTNIADTANRDGVAERFADPAVHKSLEVDLALISSYDALLRDVELTIVKTARQHDANTLYLLQTVPGIGKILRLVLLDAIQHIDRFPRVQEFASSCRLVKCAKESNGKRSGTSGATIGHAHLTWAFSEAAVFFLRDHPAGQTFLARVEKKHAKGKALTIFAHK

SEQ ID NO: 189642 - protein, 369 aa, unidentified
MLDSMFIGLDVHKATISVAVAEGERGGDVRHWGTIPHRPDHVRKLVEKLDADGVRLHFCYEAGRCGYGLHRQLVEMGHDCIVVAPSLIPVKAGDRVKTDRRDAVMLAKLHRAGELTAVWVPDAAHEAMRDLVRARATAMRVLGKARQHLQGFLLRHGRIYPGKKGWTVAYRRWLTTVRFQHPAQQIVFQDYVDAVADAEARVARLTGQIADLLPSWSLAPVVEAVQAMRGVAFIVAVTVVAEVGDFHRFDSPRQLMAYLGLTPSEHSSGTSVRRGGITKAGSGLARRALIEGAWSYRMQARVSRKLHDRIEGLPRTVRDIAWKGQLRMCQRYRHLVAAGKAKVVVTTAIAREMVGFIWAIARAVTAAPA

SEQ ID NO: 189643 - protein, 416 aa, unidentified
MALKIVYPICCGMDVHNSFVVACIASTDSVGVTSYKSRRFSTFTNDLKLLAAWLSNNNCRDICMESTGKYWIPVYNILESSCRVVLAHPKYVKAIRGKKTDVKDAKWIADIFKHDLVSGSFIPPYEIRQLRDLMRYRYKLTNFTVGEKNRAQNCLTVSNVKLDDVFSDVFGKSSSAILDKLSVCPNGNFDVSSLVSTKCKTPIAKIQAAVDGSVCPEQLHKLGIIRSHLTAIHECKSNLESIICSLADKYRAQVELVSSVPGIQFFSAVSVISEIGVDMSVFPTAKHLCSWAGLVPQNNESAGKKKTTRVSRAGAYLKPLLVQCALTVCNSAKHPEIQHRYLMLKKRCGHKKAIIAICRMLLTAIYAILKTATPYNPYLYRSHSSAPQNRTFTSDSAIAFLKYHGYVIVDCDGVVT

SEQ ID NO: 189644 - protein, 415 aa, unidentified
MDVLFRVRIQGKECVERTTAANHLERNQKLMFYVGIDIAKTKHDLACMDETGETVITNFRFANSYQGFHQLKIKLEQLSPITQDVQIALESTGHYNYNIVAFLREIGYNVFAYNPFIIKQFAKSQSLRKTKTDTKYTLLIARKLRSDVTPDYYQTDKVMDELKELTRYQNRLIQSRSKCKNLYIRLLDIIFPEINSYVSNLHSHFVYELLTKYPSAQKIARARVSSLLKIKRLTADKAHQIQEIAKQTIGNTSTVLSLELVQLIESIKHYDKQINQVQEEINLLMIELNSPITSIPGIGSRLGAIILAKMKTIHNFRNPNQLQAFAGLDPAIYQSGQMDNTGHMVKRGSSYLRYALIQAAKLISIYSPHFKAYLKLKISQGKHYNVAVTLVAKKLIRVIYHLLKTNQTFDEAKLR

SEQ ID NO: 189645 - protein, 363 aa, unidentified
MHSIRDTELSSHEGTRCQFNGSKAVIKLGIDVHQDFYVVVMQEGGTNPKPPQRLRKEAFLHWAAKLKSQGVEVHAVYEACGFGFGLQRQLSAFGIHCYVVCPQKLDEHNRRIKTDSLDAKALCLKLDRFVQGNRDALALVRVPSEKEEQLRAIHRQREQLVKARKQLEAQGRSLMVNHGVEPVKSWWKSRTFAALQVASWLKELLRNSQPILVALQEKIRALTVELQNAADPDQARGLGAMSSVIIDREIGNWHRFNNRRQVGSYTGLCPGEYSSGNTRLQSCVTKHGNPRLRAALVELAWRLVRFQPNYKPVLKWRETLRQGALSTGAARKKAIVAVARQLAVDLWRIRTGRVSAESLGLSN

SEQ ID NO: 189646 - protein, 343 aa, unidentified
MKITMIGLDIAKSVFQAHGTDANGKCLLKRKLGRSEVASFFGKLERCQVVLEACGTSHHWARVIRDAGHDVKLIPPDMVKPFVKRGKKNDAVDAAAICLAALHPDTRFVPIKNEEQQSLLSLHSTRTLLVKQQTMLVNALRALAAEFGLIVPLGNSRLPDLLAKIETSPDLPDVMKQTVILLFEQYGKLSESIGCLERRIQAHARQDEDARRLLTIPGIGPMTASLILASVTDIDTFESARHFAAWLGLVPRQHSSGGKVRLGRITKTGNREIRKLLVLGATSMSFRAQKWTSAAGAWLCKLLERRPTRLATIALANKLARIVWALLSRKEIYRPAGRNVAVI

SEQ ID NO: 189647 - protein, 410 aa, unidentified
MEVVHAHCAGLDVHKDSVVACARHMVDGKITTSVKTFNTTTAELILLSDWLSGEGATHIAMEATGVYWKPVWHILSDGEFELVLANAAHVKNVPGRKTDVNDATWLADLMAHGLIKASFVPDEPTQQMRDLLRTRKQMVRERSSHTQRIQKTLEDANIKLDSVVTDILGLSGRRIIEALIAGQTMPQALARLAHRRIHASTDELEAALRGRVTRHHRFLLKLHLDQIDAFDAAIARIDEEVSANVEPFRIAIEMLAAIPGVGDLSATIIVSEIGIDMSRFPTAGHLISWAGLCPKNDQSAGKRRSTRMKKGAPWLKSTLVQCAWCASRTKDSYLQAQYLRLRSRRGAKKAVCAVAASILTAAYHMLKNGTVYQDLGASYFDNRAKDKQALRLVSRLKNLGFQVQIKPVAA

SEQ ID NO: 189648 - protein, 341 aa, unidentified
MKVTTIGLDIAKSVFQVHGEDCNGKVVVQKRLRRSQVVAWFSQLPRSLIGIEACGTAHYWARTLRELGHEVRLIPAAYVKPFVRRNKNDARDAAAICAALNRPDMRFVAIKSVEQQASRGLERSRDLLVKQRTQLMNCTRSLLAELGIIAAQGRRGFAELVARVNDGDAAIPPVLLTALLPLIRQIEGLHTTIAALEDRIIAAARENPVMRRLAGIPGIGGLTAHAIVTAVGDGRQFGSARDFAAWCGLTPQEHASAAKRHDKGISRQGDIRLRKLLALGASTVMRNARSRTDRATAWQRGILARRPVKVAVLAQAAKNARIAWALLVSGEIYRTATPTAA

SEQ ID NO: 189649 - protein, 361 aa, unidentified
MHATTVAVDLAKSVFQLAVADATWKVIESHRLTRAQFERWFQNREVALVIMEACGSAHHWARWINGLGIEVKLLPAAYVRAYVKRNKTDAADACALLEAARASDIVPVRVKSVEQQALQGLHRTRSLWMSTRTSRINALRGFCREFGLAIPQGARTGVEAISRVLADPHSPVPGLIRGSMKLLVEEIRLLEARIAQLERELSAVAKHSPACTTLLTIPGVGLLTATAMVATTGGEVSHFKDARHFASWFGLTPREFSSGNRQVLGRISKRGDRYLRMLLTHGARSVLRAATVARRAGKKIDGLRTWATTVEGRTNHNKAACALANKLARICYATLRDATPYGQPAPRQQRKIGRTAFAIAD

SEQ ID NO: 189650 - protein, 402 aa, unidentified
MNAVGIDVSKGKSMVAIMRPFGEIVSAPFEIKHTASDIHSLVELINSVEGESRIVMEHTGRYYEVLAHQLSAANLFVSAINPKLIKDFDNDSLRKVKSDKADAVKIARYALDKWQNLKQYNVMDELRNQLKTMNRQFGFYMKHKTAMKNNLIGILDQTYPGVNTYFDSPARSDGSQKWVDFASTYWHVDCVRKMSLNAFIDHYQNWCKRKKYNFSQSKAEEIYGKAKELVPVLSKDAITKLIIKQAVDQLNSASTTVESLRTLMNETASKLPEYPVVMAMKGVGTSLGPQLIAEIGDVSRFTHKSAITAFAGVDPGVNESGSYEQKSVPTSKRGSSDLRKTLFQVMDVLIKTHPQDDPVYQFLDKKRAQGKPYYVYMTAGANKFLRIYYGRVKEYLSSLPES

SEQ ID NO: 189651 - protein, 391 aa, unidentified
MVCVGIDVAKDKHDCCILDSDGTVRADCFTIPNNMDGFKQLLQTIRDCTKKSDKIKVGLEATGHYSYNILGFLLDNDLAVYVMNPLHTNLYRKSLSLRKTKTDRVDARTIATMLLSDVDLKSYTDTAYHNEELKSLTRYRFDKVRERAKLKQSVSRLVTILFPELEKLVPSLHIASVYALLSEYPGAKQISEIHLTKLTNLLATASKGRYGKDKAIQIRDAARTSIGSVMPAKFLELKHTIKLIRELTSEIDEIEVSIQKIMDELNPPILSIPGVGIQSAAMILAEIGDFSNFESPDKILAYAGCSPSTYQSGKLTNCYAHMEKRGSRYLRYALYNATKYVCHWNPVFAEYLAKKRAEGKHYNVALSHATKKLVRLIYALQKSGKAYLVAA

SEQ ID NO: 189652 - protein, 342 aa, unidentified
MDYFAGLDVSVKETSVCIVDDAGKIVREARVASEPEALLQVLSNPAYRFKRIGLEAGPLSQWLFSALAEAGLPVICVETRHMQAVLKAQINKTDRNDARGIAQMMRVGLYRPVHVKTLRSQKLRMLLIHRKLLQSKAIAIENDLRATLRNFGLKVGMVGKVRFEARIKELVENLPELAVLVEPLLIVRRVLREQIVVLHRRLLAIVRDDEVCRRLMTTPGVGPVVALTYRATVDVPARFRKSKGVGAVFGLTCSKYQSGEIDRSGRISRCGDEMMRVMLYEAAQSMLRSKKWSWLKAWAMQIARRRGMKKAIVALARRLAVVMHRIWVDGTEFRWTREVVAA

SEQ ID NO: 189653 - protein, 356 aa, unidentified
MARTSLSNIHEFVEHAGNAGLYVGIDIHKKTYSVAIRRYDGMVLTWAGPSDPHGLIRSLLDTRTPISCVAYEAGPTGFGLARAVENAGLPCIVAAPNKIPRPVTTGAKTDRLDCIKLAEFAAKGLLKPIAVPTPQEEAERSLLRRRAQIVDSIRRAKLRIKSLLLVMGIKEPAGLVKWSNFAVKELSVIQLEPFAKLTLDSHLRELNWLKQELSVVMADLKAILHTERHKEAVKRMCSVVGVGITVAATFRLELFRPERFNRQEEVTSYLGLAPMVRHSGDRSPHGRLVPVGQKRLRSLLIEAAWLWQGKVPVVKKLYNKLLARTGIPQKAIAAIARRLAVLLWRLSLSVQNPQTI

SEQ ID NO: 189654 - protein, 310 aa, unidentified
MDVIIDKGCGLDVHKETVVACVMGSGIKKEIRTFSTMTGDLFRLKGWLSEKGITHVAMESTGPYWKPVFNVLEDSFEVILANARHIKNVPGRKTDVKDSEWICKLLRSGLLAASFVPPKAIRELRDLTRYRRKLTQSISAEKNRVQKVLEDANVKISSVVSDTFGVSASRMIEAIMAGELDTEAIADLAKGKLKGKKEELKKALVGHFQEHHRFMIQASLDHIEFLEKVIAGLDQEINRKLKDYHQEYELLQTIPGVKEHGAASIIAEIGADMDRFPSESHLSAWAGMSPGNNESAGKKKVERRPTAIRI

SEQ ID NO: 189655 - protein, 343 aa, unidentified
MLQAGLDLSRKRLDVCLLIEHGELIDHVTAPPVGDGLCGLARRVAPFGAPVRGVVESMNGARFVRDTLEEHGWEVLVADAQKVKGLAPLACKTDRIDARVLAELSWRDLVPAVWLPDPTIRRERELARFRLHLVRHRASLKNRVHATLITFGTPCPVSDLFGHAGRELLDRLAIPDPWRRTVDASLALIDDIDLQIAQLTVELRGLGADHRYVPLLVTVPGVGWVIAFTIASEIGDIGRFSSPTKLCGYTGLCPRVLQSGNTDRRGPISKHGPKHLRWALFEVALHACTDPLYRERYERTKKRLGRQRGPKVAQIDLSRKLTEAIWHLLTRNQPFAPAGARFV

SEQ ID NO: 189656 - protein, 341 aa, unidentified
MKNKSFIGIDISKNVIDASIFCKGAPIKDFPHAVFNNSRKGFGEMCTWLKKNHVVLSNCLFGMEFTGSYSMELEMFLNARNYQFCMLSTHVVKHYPMGPKDKSDKIDSAKIADFLYRYNGTECVKPYKMPDKTMQRLKELMNERKFLVEQRTCFMNRRQLCTTKEAARLYDGYIKEFSHDIENIELKMQNLLETDDSLFTTYKNLLTIPGIGFVNAINAIVITRNFTAFETARQYASYIGVAPHFHTSGTSVKWRPRPSARCDGQAKADLSMAASVAVQYDAELQSFYNRKLGGKQDSDTKRKALNAVKFKLVLRMFAIGKQNRKWEPLDSKSSNEKLAIS

SEQ ID NO: 189657 - protein, 365 aa, unidentified
MNKISKSKSNGKVYPKNNMMMMRYVGMDLHKNYLQIAVVDEKGKLIENSKIENDIQKIGKFFDHINGVKIKKQNTHTKVVMESSCVWYYIYEYLTEEKNLNVKLSNPIKTRAIASAKIKTDKLDAIKLANLLRGGYISECYVPDKRIIELRELVRHRSALVRMRTKLKNKIHGILLMKGIKIINHHPFSIGYIEQLKKLNNYRIDTYIRLFSSIDNEIRTISKNIISFTRQNATTKLLMTIPGIGYYSALLVMSEIGDISRFPDSNHLCSYAGLVPSTHSSGGITHHGPITKTGSKYLRWIMIECTRSHVRYNKKSNVTTFYNKLLKNKGSSSKAIIAASSKLLKIIYWIMKEKREYTNKINNQN

SEQ ID NO: 189658 - protein, 393 aa, unidentified
MPQESKAAIPTQDQKNAGDIFISVEMSRSKWVIGVHTPLAEKIALHTLTCGDVDALLTLIDRAQVKLTAAGVGAPAVVVCYEAGYEGFWLYRRLVALGIRVVVIDPASLLVDRRAKRAKTDRIDARAMVRALMAWSRGERQVLSEVRVPTVEQDDARRGLRERQRLVKERTAHGNRIKGLLKTQGIMDFDPRAADAIARLDAIVTGDGRPLGPCLKREIVRELERLALVMRQIEHVEAERDAVVRECGQQADTAAESEREAEMIAVLNRLKGIGMNDATILAREAFWRDFRNRREVGGWSGLAPSPWASGSVSRDQGITKAGPPMLRAHMIQMSWRWLFWQPDSELTQWYRKRTEGTTGRMRRIMVVALARKLLIALWRYATTGMVPRGAIVT

SEQ ID NO: 189659 - protein, 400 aa, unidentified
MRAVFGIDVSKASSEVVILVNGEKVHGYTMSNDAIGFSRLLGDLKTVHKPEIIFEATGVYSRRLQAFLDEHSYAYTRLNPLEAKKQLDSLRVRKTDQIDAEKLAQSQFVLNRKPTYVQEEVYQNLRDLSRFYQNLTEDIVRAKNRLHKVLQVTFPELENILSTPTGEQYWNLVITFPCKDFVLKLSKDELSKSIRLSTSKRISDKRVAYLAEKLTALANQSYCAVKKTSPIMEEVRYYAKELLRLSEQRQAVLDEMVELAQPLPEYDILLSIPGIAETTATSIIGELGDIRRFQSANQINAFIGIDLRHYESGNFIAKEHITKRGNPYARKILFKCIHNIASASHTNPCHIADFYEKRKRQSQTTSTKPHTIASIHRLIRTMYYLIIHNKLYDYASTQNR

SEQ ID NO: 189660 - protein, 486 aa, unidentified
MAKRKMSTFERLRRGEKLGRRERRALERSLQAEGPELEIVHPHAAGIDVGNKSHFVGIKPGVAEQPVQEFGSWTADLKRMAEWLKSQGVKTVAMQSTGVYWIALYEVLEQAGFEVYLVNARGTRNLPGRKSDVQECQWLRKLHTYGLLRNSFRPPEEVRAVRTLWRLRERHVREAGRAIEHMQKALTTMNVQLANAISDISGATGLAIIRAILAGERDPRQLAKLRDRRVEASEEEIAHSLEGNWRDDVLFELQQALDGYDFLGRQIALCDVELQKYMAALPSREVGESSPVASTSALEAGPLPQKARAKRKSKNAPSFDLGAELRRITGVDFLSVDGINVMTAQVILSEMGADLGAFPSESHFTAWLGLAPRRDISGGKVIGHKSRRVKNRVANALRMAAEALAHSDSYLGARYRHLRARLGGLKAVKAMARYLACLVYRLLTQGQAWVDRGSVEYERKRKACELVALQRKASEMGLRLVAVQVS

SEQ ID NO: 189661 - protein, 444 aa, unidentified
MSSSLPCIRPNAAGIDVGSRSHFVAVPADRDSQPVREFGFFTEDLRNLADWLKRCRIETVALEATGSYWIPLYEILTENGIEVCLVNGRHIKNVSGRKTDVLDCQWIQQLHSCGLLRPSFIPDQVTSRLRHFVRHRDSLIRQAASQLQLMQKALIEMNLHLQNVVSDISGDTGMKIVRAICAGERDPAKLAAYRDRRCKNTREVIEKSLIGKYKQEVLFCLKQALETYDHYQTQISCCNDEIEAALKSFDNKNDGQPLNGRKREAKKNNLGFDLQGELWRTLGVNLLEIPGLNIKTALTFIAEIGPCVDRWMNAKQFASWLGLSPNNRVSGGKRLSGKTRSTSNHLRHALKLSAVTLERSATSLGAFYRRMKARLGAPKAIVAAAHKMAVLIYSLIKKKLSYLERGPLYFEKEYRERTERRLKRLAEQLGYQLLPKPEPENAKT

SEQ ID NO: 189662 - protein, 410 aa, unidentified
MQTLVECGCGLDVHQATVVACLLMVRKDGRVQKQMRSFGTTTRELLCLREWLLSQSCTHVAMESTGVYWKPVYAILEGGLEIVVANAQHVKKVPGRKTDVKDAEWIADLLCHGLLRSSFVPPKPIRELRDLTRYRRKLVESQAAERNRLLKLLESANIKLASVATDVFGMSGRLMLRALIEGKATPQEMAELAKGLLRKKIPQLELALEGKLEEHHRFLLKLQLHRLEAVEQDLTILEQRIQHKLEPYATQLALLDEIPGVDWTLAAVIIAELGVDMSVFQSVSQMASWAGVCPGNNESAGKRKSSRIPKGNMYLKTALVEASHAAAHTKGTYLRDKFFRLKARRGYKRAAVAVAHKISVAIYHMLSQQVSYNDLGDLYLDKLNKHHLTRNLVHRLERLGFTVTLEPKAA

SEQ ID NO: 189663 - protein, 391 aa, unidentified
MRGAVPCSIDESRRNDMTIIAASPQQRHRRVTMRPDRAVYAGVDTHKELHVAAVIDAGEAVLGTGSFSTTRAGYRAMLAWIAEFGELARIGVEGTGSYGAGLTRHLAKAGVVILEVDRPDRSDRRRKGKDDDLDAINAARAALHQRRTTIPKSKDGAVEALRVLRVARAHAVRERRNALQLLRMTIISAPEELRDQVRNLTRMQLIRTLAAWRPDVSNATDPVTAHRVALKSLARRYLELSDEIADLDELINPIVEALAPQLLERIGVGIEVAGQMLVTAGDNPDRMTSDAAFAMLCGVAPLPASSGMTQRHRLNRGGDRQANRALHLAVISRLRLDPSTQAYVAKKTAQGHSKLEIIRSLKRYLAREVYYLLNPCSPSATRRPKQSAIRA

SEQ ID NO: 189664 - protein, 423 aa, unidentified
MNVVYPICCGVDVHKKFFVATLIITEGMIPTYQKKRFSTFNNQILAFKAWLLENNCYDVCMESTGKYWIPVFNLLEDSINVTIANPKWVKTIKGNKDDVKDSKWIGDLFRIGLVPGSFIPGKDIRILREYTRYRFKLVSCKSSEKNRYQNVFTVCNVALDAVVSDMFGKSASSITDYIINSDTFDPQHCVSLLKGSLKKKSAEVIESIEGFYMATPQKHRAKLVKHHYDYLLAHIQTLDAAVAELTKPFEPAISLLCTIPGIKRDTAVTIISEIGTDMSQFGSSKRLCRWAGLTPGNNESAGKKKSARITRAGVYLKPALVEAAHAAVLSTDSPYYRMKYERISKRRGKKRAIIAIARMILTAVFNMLTTGEVWNPVDLNQIDMPPELREKEVQKSLQRAAKLLLSHGIISPDSVHLPDNATG

SEQ ID NO: 189665 - protein, 425 aa, unidentified
MKITRIAEKINLNQVMDISVDVHKDTLNFFFASAGKEYTDLCSNRTDVIQRRIIKYKQIAKEHGMSNLRIICEPTGQYQNSLLRTARRNGCLTCYVNAESVKKFRVVETNDTGKTDIKDPRVISTLAGLNKVIRHRMIGEDYLMLRKLGKIYDETDVEIVRLKGRLNKLMVELFCDYSFKKDFLYSNSGLALIKKYGCNPYRIVKSGFNRFGKTMRHAVPRIQGNTLKRLFEDAQSSVLNELPTGYIEVLQNRFYHLFQNYLNQQKRKEGIVKEMIEILDRLREKDPNIPPPTPGVISAKNLARLFGETGPINDFSSYRKLMRYFGLNIRMRQSGKYQGQNKITKKGRPLGRKVLDNIVLPLVKKGCLYGDYYHVKKEKEKRPGNKAMTIIMRNFLKKFYGWYKSGKTFDEKRFFDNKSLYLKAA

SEQ ID NO: 189666 - protein, 474 aa, unidentified
MARTRSGPASPPVPGDAGAEVTDEPVQVIGRAAAIDVAKGSGMVCLRLPHESRAGRRTQKVWEVTATFAAVVALMDHLVCQGVERLVLESTSDYWRIWYYLAEAAGLEVWLVNARDVKHLPGRSKTDRLDCVWLCKLNEWGMLRRSFVPPEPVRDLRALTRLRANLTHDRVRHQNRIEKILEDSLLKVSSVISDLMGGSGRRFLQALADGERSPAALAALGDYRLHASKSELQEALTGRFRDIHGFEIGMLLKLIDDLSAKITELDERIEAQLENVPGLDGVCTSCGQPGPDGPCTGCGEPVLGVIARLDEITGIGRGAAQVIVAELGTDMTQFPTPGHAASWAKLTPRAIQSGAASKAGRTGKGNPYLRGATGAAVMTAARTETFLGARYRRHARRRGKQKAIVAGCRTIIEIAWHVIADPGFRYIELGPDYHDQLDPGRKTRDKIRQLEKLNPGMTVTLTPRPEPGGQAPAA

SEQ ID NO: 189667 - protein, 424 aa, unidentified
MNFKMQDKQNQLIERISDTHLIVGVDIAQQLHVARAVNFRGIVVGDPLTFENNEEGYRKLLNWIQNLQRLKNLDSTIVGMEPTGHYWINLSKWLDKQNIEVVTVNPHLVKRNKENRDNTQSKSDKKDALVIADMVKNGYYSFVRPTSESFEKLRVLMSNRDVIVKRLVMSINQVNRWVDIVFPELRQVFKDVTCKGAIATLRLFPTPDEISSLETLDVMRGWKSLMKRQPGPKKAQLLINLAKSSIGTGQALDAYKFHLEQLLEEYDLAVKQLERVEKQVNEVLNQIPFAKKLLKIKGISEISLAGILGEAGDLSGFSHGNSLLRHGGLHLAEASSGKWKGQIVISKRGRSRLRRFLYLATMSLVMNNPEFKAIHSHNVKVKKMKKMKSIMKLIGKLARIFVGIARRNESYCPNKVQVLIPLAA

SEQ ID NO: 189668 - protein, 402 aa, unidentified
MKHYLGLDWAKDAHAVCVIGAEGEVVDRFEARHDRAGLADLIRRLKRFGEPAELPIAIERPSGLLVDSLVEAGFVVVPIHPNVVKACRSRYSTVHAKSDPGDAYLLADLLRTDGHRFEPLRPLSDELRALRAMVRGRDDLVAERVAVANQLRSLLDSYWPGAVAIFADIDSPIALSFVERYPTPRSTQRLGPKRLARFLAAHHYCGRRSPEALLERLRGAPESQAGELEAEAKRLVALRLVATLRPLVAAIKQLTSAIEHAVAQLSTGRVVMSFPRAGKVNAAQIVAELGDDPARFGSEDSLAAQAGVAPVTFASGKKLGVGFRWAANKRLRRAITTFADNSRHSNEWARGVYRRARSRGKDHPHAVRILARAWVRVLWRCWVDGVEYDPDKHLSARALEAA

SEQ ID NO: 189669 - protein, 411 aa, unidentified
MDVIYERCAGLDIGKNEVTACLRTPGESGRRRQEIRTYPTFTAHLKALADWLAHEQVTQVVMEATGQYWKPVWYVLEERGFELMLVNARHVKILPGRKTDVADAAWLAELLEHGLLRGGFVPPAAIRELRDLTRYRKRLVQTHTSESQRIEKTLEDAGIRLGSVASHVLGVSGRAILRGLIAGELDPQVLAALARGRLRAKSTQLREALEGRFTAHHALLVRLALEHIEQLERSIAELDAEVDRLMGPFSEARHHLDTIPGVGKRAAECLIAEIGVDMSVFPSADHLASWAGVCPGNNITGGKRRSGKTRKGDVWLADVLTECAWAAARTRTTYLAAQFWRLARRIGKKKAAIAVGHSMLVIAWHLLARDCDYEDLGGDYFARRDTDRARQRAVAQLQALGYQVTLQPAAA

SEQ ID NO: 189670 - protein, 339 aa, unidentified
MKVSTPGIDLAKNVFQIHAVDEKGRQVFTKRLSRSRLLSFLAQLPPCLIGMEACGSSHHFARTLIAYGHEVKLIPPRYVKPFVKRSKTDAADAEAICEAVVRPNMNFVPVKTVDQQAVLALHAERNLLVSHRTAQSNSLRGILAEFGECIPTGFARLYACAEELLANDTDRLPGLLRASVTRQLIRLRELTEEIKLIESELNIWSASQESCRRLQTVPGVGPITATVLVALVGNGSQFKKSREFAAWVGLCPNEHSSGGRQRMGRISKRGNIDCRTLLIHGARSLARLASPEKAHTAWLHNLLCRKAYNVAVVAQAAKTARIVWAILRDGTEYRAPVTA

SEQ ID NO: 189671 - protein, 362 aa, unidentified
MEYFAGLDVSIEETAICVVGDDGKVVLETEVPTEPQLIADALERFAGRLRRVGHEAGSISPWLHAGLIELGLPAVCLETRHVRAALSAQRNKTDAADALGIAHIMRTGWFREAHIKTEDCYRIRLLLVQRRNLKRKFLDIENAIRHSLKVFGIRLGKVGRGSMEKAVRKAVADDAMTAGLMECMLRARAALWAEYLILHKLVTQLAMRDELCRRFMAIPGVGPVTSLSFKSAIDDPARFRRSRNVAAYFGLTSRRWQSGSSIDVKGRISKAGDPDVRRALYEAASAMLTRFKGRDTIKTWGLKLAKTKCHAKARVAVARKLAIVMHAMWRDDTFYVGDPDAEAHETDSAYAAKMQRLSLARS

SEQ ID NO: 189672 - protein, 391 aa, unidentified
MEPILQCCCGVDVHKDIIEACIIKGVENSKYIRMQFSTMPDELKSFVKWLYENDCYHIAMESTGVYWRPVYEAIEDYSEYYECIMVVNAHHMRNLPGRKSDVKDAEWIASLFMHGLLKPSFVPERIIRDLREYSRLYQNFVNEKSRYINRLEKFLQTHGFKLSSVISDIYGVSGRNILYKLSNQGFLNYEDVYQCIKGKTKHTPEEIQLAVCGKLNRPEMQLLTIILHKVDGALADIQEILSIMLELAEPYKEVLEILDSIPGIDTTAALIILGEIGNNPQDNFERSENLCSWAGLSPRNDESAGKIKSKKILPGNPYIKSVLCQVAWAAVKTRRTPFGQWFWSHQGKLGRKKSIIAVSRKILTLIFNLIQSNSLYNPDIAMKPYSQPIET

SEQ ID NO: 189673 - protein, 407 aa, unidentified
MDLLKTVFGIDVSSRKSNVCIMVNGQKVNDYAISNDMVGFNRLLGDLKQVTKPQIIFEATGVYSRRLQAFLDMHELRYVMMNPLEAKRKTKDDLHQNKTDKLDALYLAKLQSEHPQRLAYVQNKEYQELMANNRIYEQASHDLITNRNRLHKAIQLTFPEIEHLMVNPRGKNYWSIVLRFPHPDIVLETKEADIIDFLKGLTGIGKKRANDIAQSPIRLAKVACPAVKKNSAHIRGLKMAINNILSAEEECQSPLQEMAKLAPKRDLEILTSIPGIGKNTALRIISELGDIRRFNNPSQLNAFVGVDPQVYESGNLTAHLSISKRGTAIGRKVLYLAINQIQSAKKAGKPCHIADYYEKRKRSSETASHKKAAIASIHKLLRTIFALIKNDQLYSYDVAKHNQRLLS

SEQ ID NO: 189674 - protein, 346 aa, unidentified
MSYYVGLDVSVKSVSICVVDAQGAVLARGETTSDPDQITSFISRHAPDPERVVHESGILAIWLTRELEKRGLPIICIDARLAHKALSGRINKSDVGDAEGLAHLARTGWFTEVHIRSEASERVRVLIGTRERLIRMRKDLEGHVRGVLKVFGVCMGAVYRTKQRQGFRDQLAGAESADPAISVMEEMFSPIHKALCAATETMDDELRRIARGSDLARRLMTVPGVGPVVALSYIATLDDAGRFRRSKDVGAFLGLTPKRHQSGDMDWSGRISKCGDRDLRRLLYSAASTLITQVKKPSPLLTWARRLRDRKGFKKAAVATSRKLAVILHCIWRDGTVFETSMEAKA

SEQ ID NO: 189675 - protein, 313 aa, unidentified
MFSSLSPIFIGMDVSKDTLEIAIFGDVDSWQIGNSAKQLTLLANQFKVLQPKLIVLEASGGYESLALDILGQAGLPVALINPFQSRNFARSTGKLAKTDRIDAQMLAHFAHAIRPAVHQGTSEQEKHLAGLLRRRKQIIGMLIAEKNRLETVRLQLHERIVQHIEWLQAELEDIREEMERLLSNNQAWHQKRELLESVPGVGAVTSFTLLADLPELGFVNRKQIAALVGVAPMSHDSGKWHGKRFIKGGRPIVRSALYMATLSASRCNPVIRSFYQSLIARGKPPKVALTACMRKLLVMLNAMLRDQKSWKFA

SEQ ID NO: 189676 - protein, 405 aa, unidentified
MLYLGIDLHRKQMTISLRDGSGDVRLRRQVSTRWSKLEEFRTQLHEMMAADEKYVAVVEVCGFHHWLVKWLRQDERCHQVLVVQPLGRSATKTDRRDAHGLSELLWVNRERLQREDRVHGVRTVQIPTEQEQEERHLTQMRERLVRRRTQTLNQIHKILRRQNLEWEQPTKTFQTVKVRQWLKTLPLGPNDRLAMNQLLAQWQLWGEQLMAAEGWIAERFRKNQDAQLLATMPGVSMFIAVAIVSRIKPMARFPRGRSLANFLGLTPGCQSSGDTERMGSITKIGSRMVRYLLAQAIQHVLRRDGSMRAWFQRIKRRRGSKIARVAVMRRTATIMWRMLSTGQPWRPGKSNSETQSATGEPGQANSRRCKSSPTLVSDCEPDCSSTGSTSCMFKSSCIPMDLGAS

SEQ ID NO: 189677 - protein, 394 aa, unidentified
MEHFIGIDNSSLDHKVRVIDENGKLDLSFTITNDFDGFEKLNHEINQLKESKIGFELPHGPLVDYLHEHGYKLYSLNPLKIKRFKESLKVSGNKKDDIDAVAIAEYLRSNDRYTRELIYNSHEIEKLKNLSIIHTRMIQNRARHINKLHFVVRQYFPLQEALFGDFACTVQLKMLIKYPTFADLNNTSDKEIDEFLKLNKYRMQDYIDKIIQKIRNYNQLISEDVESTYRIEAEYLCDLLLVINNRIKEIEIEMNKITDAHNLGKVFKSLPGAGNILACKLLSIFGDNKDRFDNYNGVQCLFGTAPKNYQSGMYHKVIMRKACSKSARAILYTFAFSTLRFSKWSRDYYDRQKARGKTHSVAVRALSNKWIRVIYKLWKKEIFYDELKKVTAAA

SEQ ID NO: 189678 - protein, 356 aa, unidentified
MITIGVDAHKRLHVAVALDEAGREVGNWKGANSGAGWAEFGIWATSMGLARRIGIEGAGNYGRGLAQYLVQQGETVYDVNSRWTALGRRSARKSDKTDRLDARAVAMFVRQEADSLPSLSSEDETALLDLFTTEREGAVGEATRLRNQIHALLLQLDPLYHLRVPSLKSAAGLAAILAYEPSDEHPMSKARAGAVRRLAQRLQLALGQATELAERIRGIAQARYAPLIQICGINLLTAGALAGMLGPGQRFASEAALAAYAGVSPREASSAGHIRHRLNRGGNRRLNAVIYRIALTQAHYSPEARAYLARRVAQGKTKKEAIRALKRFIVRSIWRVWVECHSSQTQTSYVQPAGCT

SEQ ID NO: 189679 - protein, 460 aa, unidentified
MKRKRQEELVQTKEAASHWKELEVVHENAAGIDIGGSEHWVAINPKLDDQPVRCFDCFTADVMKMADWLWERGVRTVAMQSTGVYWLGAFEILQQRGLEVYLVNARHTKNLPGRKSDIQECQWLLKLHTFGLLNNSFQPSDEIRKARTLWRHRGGLVAQASSSIQRMQKALIEMNIQLSTVLSDLSGVSGMRILEAILEGQRDPYVLAALADPQVKATQEVIAKSLEGNWREELVFVLRQEVWLYRAYQKQIGECDLQLQNHLQTMTPKAGLEPLGPRPRGKRARGNAPQFDLRKELYRTTGVDWAQVDGIDVQLAQTMIVETGIDLKAFKTEKHFASWLGLSPSNETSGGKILNRRTPKVINRAKTAFRQAASALLRSQSYLGAQYRRLRTRLGAPKAITAMARKLACLFYRLLKRGQQYVDKGTEYYEQRYREQQILFLVKKAKQLGIQVVTPVPAHV

SEQ ID NO: 189680 - protein, 339 aa, unidentified
MTIVMGLDQHRAQITADWLDTETGEVKRGRVAPGDRAGVRKFLGRFDDQELEVALEATTGWRFVVEELRHLGAGVHLAEPTETAARKGKKKRAKTDRADARHLRELLMIKRLPESWIPPDHILDLRARVRLRHTLSEQRSEWQQRIQATLYHHGCPQRRALMVGDGREWLAAQPLPAPAREQVTVATAMIDAIEAQIAPLDKELRAYARRQVGCKALMAHYGIGELTAVTILAELGDCTRFSSSRQAVRYAGLDITVFQSDQRRAPGHISRQGPPALRWALYEAAQVARRGERSPDREYYLATKERIGGNRACLAVARKLLKRSYHTLRELGQEALAPA

SEQ ID NO: 189681 - protein, 343 aa, unidentified
MDHFAGLDVSVKETSVCIVDETGKIVREVKVASEPDALVEVLTSPSYHFKRIGLEAGPLSQWLYNALAEAGLPVICVETRHMRAVLKAQINKTDRNDARGMAQMMRVGLYRPVHVKTLRSQKLRMLLTHRKLLQSKAIAIDNDLRGTLRNFGLKVGMVGTAKFEARIKELVENLPDLAMLVEPLLVVRRVLREQIGVLHRRLLAIVRDDDVCRRLMTVPGVGPVVALTYRATVDVPARFKSSKAVGAVFGLTPSRHQSGESDRPGAISRCGDEMMRTTLYEAAQIMLMHSAKWSWLKAWAMKIARHRGRKKAIVALARRLAVIMHRIWVDGTEFRWTREAAAA

SEQ ID NO: 189682 - protein, 342 aa, unidentified
MEHYAGIDVSLECSSVCIVDASGKIIRESKVASEPAGLIGWFGSLGFSLTRIGLEAGPLSQWLYAAMKSTGLAVELLETRHVRDAFKAMPVKSDRNDARGIAQLMRLGWFRPVHCKSIGAQETRAVLTSRKLVQSKLQDVENHLRGILRGFGLKVGKTTNLSFARRIRELAANHASLEMIAEALLSVHAVLLREFKAFEKQVRSMARQDAKARLLMSTPAVGPIVALTYASAIDDPGRFKSSKRVGAHFGLTPKKYQSGQTDYTGRISKIGDASVRTALYEAAHIMLTKPLKDCSQLKSWAMRVARRAGMSKAKVALARRLAVIMHRMLADGTAFNAAAAAA

SEQ ID NO: 189683 - protein, 356 aa, unidentified
MTQVKSLDFSGQSIFCGIDVHKKSWSICLRNEDRELKTFSQDPDPILLSRHLNKYYPNAEISIVYEAGFCGYWPQQAFSKEGLNCRIIHPSDVPQREKDRRYKTDAVDCRKLATELSKGTLNFIHIPTELTIACRALVRGRQSLVKDQTRYKNRIQSFLDMHGMKVPQGYKNGTHFSNHFLQWLHNLPLDEKRKLALGSQLKVLATVRSEILSINKELRKLTQDPRYSQPIELLRSIPGIGIISAFIIISELEDIRRFRGFDQLASYVGFKPDIYASGEKQVTKGITQSCNHILRETLVECAWMAIGKDPALTMAYTNYKQRMHYNKAILRIAKKLLNRIRYVLLNNTTYEIGIVE

SEQ ID NO: 189684 - protein, 336 aa, unidentified
MNGSTGRWVGIDVAKSKLDVALLDERGKFKNHVFANDAKGHALLIAWLLDRVGAAAQVRVCMEATGPYGEASAIALADAGFVVSVVNPARIKGFAQSELVRNKTDRADAALLARFGQTMQPEPWVAPPPEVRELRALVDRLHSLKEMHQQEANRLEAAMNQPGMRASIESHMQWLQSSIEELERQIDDHIDGHPSLRADATLITSIPGVGKTTAAKLLAYLGDVRRFKNGKALAAFVGVTPRLKLSGSSVRGRSMISRSGHAQVRHSLYMPALVALKHNPLVSVFGIRLKAAGLAPKAVIAACMHKLVLLVYGILKSGRPFNPNFGANRLDFQDGI

SEQ ID NO: 189685 - protein, 347 aa, unidentified
MTEVSTIGLDIAKRVFQVHGVDEAGAVVLRRQLRRTEVVKFFAKLPPCLVGLEACASAHYWGREIAALGHQVRLMPPTRVKAYVKWGKKNDKIDAAACCEGVTRPSMTFVPLKTVEDQGALMMHRARQLLVEQRTRLGNAIRGHLAEVGIVAAQGQRGLAALLAMVGHPEDAHVPAVIRPVLQVLVEQWHGLAPQIAGLERQIIAWHKSNPDSLRLATQPQFGPIVASALVATAGDATRFTSGRQFSAWVGIVPKQNSTGGKERLGGITKTGDRYLRQLLVVAATGLIHRTRAKPEIAPWFAGLLARMPAKKAAVALANKMARIAWAMLTKQTAYRAPLLKPAAQAA

SEQ ID NO: 189686 - protein, 422 aa, unidentified
MLEETQDAEAIIERVAALDIGKAELMCCIRISADSPGGKRQQEVKPYSTMTRSLLRLADRLAELEVARVVMEATSDYWKPVFYLLEAHGFEVWLVNARDVKHLPGRPKTDTLDAIWLCKVAERQMIRPSFVPPPPIRRLRDLTRYRIDLVNARGAEKNRVEKLLEDACIKLSVVASDIFGVSGRDMMSALTAGERDPKVLAQLARSRMRTKITLLEEAFTGHFTDHHAFLLTRMLTRVDAINADIAAIDTRINEVIAPFASAVARLDDIPGIGPTAAAVIIAEIGIDMTRFPTPGHLVSWARFAPGVKESAGRKKGNAATGHGNRYLARVLGEAAVGAARTNTFLGERYRRIAKRRGKKRALVAVGRSILVIVWHLLADPDSTFHDLGPGFHNTRTATDRQRRNHVRQLEALGYTVTLEPAA

SEQ ID NO: 189687 - protein, 537 aa, unidentified
MCYKSVSPIKPLNSSGSSQGPYTSGAILPLYKHDPGRPLINDEAYALSHTRINQEPPRAAAATIPRRRQIIMARNRKSDKSKKHGRPIRSLETIQPNAAGIDLGSREHWVAGPPQEDKAPNVERFGTTTPELLRLADWLTQQGVKTVAMESTGVYWIPLFEILDSKGFEVLLANARQVTHVPGRKTDMLDCQWLQLLHACGLLRGSFRPSDDICRLRALIRERNTMVEQRSDWVRRMQKSLNQMNICVHHAVSDITGVTGMRIIRAIVDGERDPQTLAQMRDRRCQKSEEQIAEELTGNWRPEHLFNLRQALKMYDQLCTVVADYDSEIFAYVQTLQPADDNDTAAPPPGSKAKARNIAKQGQEPMRQALYRFSGFDLTTIDGIGVDTATVVVSELGLDFTVFPDEGHFVSYLRLAPNLSISAGKKVSSKSKASTCTRVATALRMAALTLRRSKTALGAFYRRVAWRKGASVAVFATARKLAQLVYRLVRYGQAYVDAGAKAYETRFNQRRLKFYTKALKDMGYNVEPLSAVEASTM

SEQ ID NO: 189688 - protein, 341 aa, unidentified
MQITTIGLDIAKNVFQVHGIDAAEKVVVRKQLRRGQVMKFFGALPACLVGMEACATAHHWARELTKLGHEVRLMPAKDVKAYVKRNKNDAADAEAICEAVRRPTMRFVRAKSAGQQGRLMQHRTRDLLLRQQTQVINALRAHLAELGIVAAQGREGLKQLLTIIADEKDARLPMDARASLIVLAAQLQALHTMIGSIEKRLTVQHRANEASKRLESVPGIGIIGASAITATVTDPKSFQSGRDFAAWIGLVPRQDSTGGKQKLGSISKQGDRYLRRILVVGAHSVLRRAKQNPEKYPWLTQLLARRPFKVVAIALANKMARVAWVLLARGGTYRVPALAAA

SEQ ID NO: 189689 - protein, 359 aa, unidentified
MKQNNEKVMVGIDVSKDKLDIWLNPINAHQVIKNTPREIGNWIKKMQEQHEHFEVILEPTGGYENQLLKLLFSHHIKTFYVHPNRLHHYSKSLGSDAKTDKLAACLLAQFALDKDSQLTALTEKHLDNKVFSELSSRLNQLKKMLHQETCRTEHDFFSKEMKRSNKRVIKSLRTELERVQNIIDDMLVADQEKSEQLDLLKTFKGVGPVTAQTLVVDLPELGALNRKQISRLIGVAPLNRDSGKKSGHRYIHGGRGHVRKVLYMAALVAIRYNPEMREHFQKLSVQGKPFKVAIVAVMRKMICILNAMSKHKVAWQDNYRSHSVPPQAERLRRTYPRPKHALERDLETTLMPAAKQTAP

SEQ ID NO: 189690 - protein, 360 aa, unidentified
MNKITRVGADLAKHVIQVHAVDAAGQRITSRALVPGKFMAWCAQLPPGCLVAMEASSSAHHWARRLIALGLDARIIAAHLVAPYRLQGKSGKNDANDAAAICEAASRPQMHFVPVKSVEQQSMLCIHRLREGFKEERTACINRIRGLLAEFGLVFPQQPAALRLALPDVMEDASNELGAQARLALQRALMQWQELDGHLAWCDERIAAHLKDSAQVRQAGQLLGVGPVTASAVVASVGDFKQFRNGAQFGAWLGLVPRQNSSGGKNHLGAITKRGDMYLRMLLIQGAKSAVMTAHRRDDPISMWAYQLRERSGWAKSGGGAGQQERPNSVGGVRAGHAVRCAPCERQTSLSGVHRFPCKT

SEQ ID NO: 189691 - protein, 412 aa, unidentified
MVLANCDREGQRMTVMIGVDPHKRSHTAVAIDGDDVELAAIEVRASARQVDELVGWAAGFADRTWAVEGAGSVGYLLAQQLVAAGERVLDVPATLAARVRVLGSGRSNKNDPNDGYSIAVAARHAPRLEQVARADHAAVLRLLSKRNRELGSARTRTVCRLHGLLVELVPGGISKEITANRAAALLATVTPANPVEATRHALASEHLEDLRRIDEQMRASKRRLAEVIRASNTTVTEVFGFGPVGAAIAIGQTRDVTRFADRDHFAAYNGTSPIEVSSGGRIVHRLSRRGNRQLNHAIHIAAITQIRHLHSPGRAYYDRKLAEGKTKKEAIRALKRRISDALYDRLVADAAAKAGPGGQPGTTEQASVTGIAPRKPALRKSHSRTHTERRTRRAVTASTRRRRASTRERNRT

SEQ ID NO: 189692 - protein, 358 aa, unidentified
MGQFIGCDAHKKFSTFASINEKGEYGPTARVGHEREVFRRYLQELPPKSEIALETSGCYYWMVDEMERAGHFPRLAHAFTAKRRMEGSRHKTNERDARGLAMLLRNGTLPVVWIPPGELRDQREMLRWRMTLSNLRTRIKNRIHGVLQRYNLTIAVSDLFGDRGRAQLLERQNELPTYSRRSVLEQLDMIDRIETQIQDCEQVLEEMLYSSVERNLLDSLPCVGKVLSAVLALELGDVRRFSGPDRVVSYAGLVPVARESADWKRQDRCPRDCNVYLKWAYVEAANLISIQRNRWQQRHVARLYERVKEHTHMHGKAVVAVARHLAEASYWMLTKQQVYQEPKPRLFVKKKVLSSTHG

SEQ ID NO: 189693 - protein, 340 aa, unidentified
MKQYGAIDLHSTNNVTVVIDEQDRVVYQKRLPNDLALILKELSVYQSELQGIVVESTYNWYWLVDGLMEQGYRVHLANTAAIQQYEGLKYTDDHSDARWLAHLLRLGVLPEGHIYPRVDRPVRDLLRKRSQMVRQRTTNLLSIQNLLTRNTGSSLSAHQIKGLDVQQVDQLLAEPDLALALNANLSVMSSADPQARLLEQTVTQRVKLRAQFSYPKTVLGIAEILALTIMLETGDIGRFFSVGNFASYYRCVGSQKISNGKKKGQGNTKNGNKYLAWAFVEAAHFAIRYNAKIKSFYQRKKAKTKIVVAIKAVAHKLCRACYYIMRDRVAFDMSKAFGPK

SEQ ID NO: 189694 - protein, 365 aa, unidentified
MTGVDSPARPRHGWKPAAASDVTPRMSLVLQSFLPYPDSCLGTSPHQQGWDTKMAELSFGGIDVSKDRLDVLLLPEGLCFSVCNDAPGWAELIVRLRRLAVSAIGLEPSGGYERGIIRALLAAGLSVRRINPNKLRQFARARGVLAKNDRLDARLIAEYVAIMPTRVVRRDDTVEHLAEIITMRRQLCDEHAAAMNQAAHLEDPMLQRLSKRRLVRLEADILLLDKRLAELVAADPRLAHRYRLLVSMPGVGPILAYTLLAMLPELGQIDRKQIAALVGLAPYDFDSGKLKGHRCIYGGRMPVRNVLYMAALSASRYNPALKAFSKRLAAASKKSKVIIVAVMRKMVVTLNAMLRDNTEWRPSSV

SEQ ID NO: 189695 - protein, 341 aa, unidentified
MKNTTTISIDLAKNVFQLAVFNKHGKLKSNQKMNSKKMAIVTAQHPEANICMEACGSSHYWGRRFAKEGHEIYLVPAQIAAKYRSGNKNDPNDTLAIYEAAKRPGTHFVAVRTLEQQDLASQHKLRQGYMKQRNQTANRIRGLAMEYGVKFPKGINKLREGLPEALEDAENELTAPARYILRNLLDQLLLTEDVFAEVTRVLVEHTKQIPACRALERMPGVGWLVAGALYARIGNGSAYRCGRDASASVGLVPGHTGTGGNNKMLGITKRGDKYLRSLLVHGARSAVSHVGDKQDGLSCWIRKQLATNHMNKTSVALANKLVRMAWAILSSGGQYQEPVAQ

SEQ ID NO: 189696 - protein, 311 aa, unidentified
MYYIGIDVSKKDLSVFDGKDLKFANKEGLKSFKKYLKKKYNLSEIAIIFEPTGIYSLHLKEFCAENSIKAYIINPKKSHNFTRALGKRSKTDKIDARILYQFHKHIDLKDIQVPQIDQQAKTLASYLVSYEFALKQRISLSNHLESLRDKGLIALMKKDLKRAKMLEDKLFHDIKEYVSKNQNLREDYQRLLTISGVGEKTAIALLTLFKTYQGTNRAQITALAGLDPVRRESGTSVKDKAKISKNGKGIYRKIFYLPTVCATVHNQKIRVFYQRLLAHHKTKKLAVIASMRKILLIAHAMYRDKTEYIAV

SEQ ID NO: 189697 - protein, 344 aa, unidentified
MEYYAGIDVSLESSSVCVVDAKGQVLREAKIASEPEALVGWFNQLGVELARVGLEAGPLSQWLYAGMRDAGLAAELLETRHVRDAFKAMPVKTDRKDARGIAQLMRLGWFRSVHCKSLPAQETRALLTARKLVQSKKHDTEMSLRGILRGFGLKVGQTSQRAFASRVRELVAGHPTLQLVAEALLATRAALGEQLSKLEKRVRMLARSDPQVRRLMSTPGVGVIVALTYAAAIDEPTRFRSSKAVGAHFGLTPKKYQSGETDVTGRISKIGDASVRTALYEAANVILTRPVKGSSLKSWAMRLAARAGMRKAKVALARKLAVVLHRMLVDGTTFSAERAAATRA

SEQ ID NO: 189698 - protein, 370 aa, unidentified
MLDTTTFIGLDVHARSIKAVSLDVMTGEVRAATFGYDAGAVAEWVRSVDPRARCVYESGVTGFDLQKRLSGLGVDCVVGAVSKMIKPSADRRRKNDRNDAEFLARMLSVGNVVEVWVPDDECEAARDLTRALEDARDDLSRSKQRLSKFLLRHGLAFDERTPTGRRKGNWTRAHWSWIESIRFAEGADNDVLAYYVDAVRRAAEEKARLEGLVEAEARKPRWRKRVDSLRCLKGVDTASAADLVFEAGEFSRFGNARSFAAWVGLTPSEHSSGESDRRGAITKAGNKHLRKALVEAAWHYLTCSGRPKDLARGQAPDRGARRHAAKGVRRLVERREALLARGVHGNKANVATARELACWVWAVGLMAEEA

SEQ ID NO: 189699 - protein, 353 aa, unidentified
MKTTHPVIIGIDTHKASHVAVAIDTQGTRLATLSIPTNPKGYLELERWSQSLGKVQAFGIEGTGSYGAGLSRSLLAHGHNVIEVTRPNWQLRYTQGKTDSLDAEGAARSVLSGQATARPKTQTGSSEMIRHLKIAPDTVVKSRSQAMVTLKTLIINAPADLRDALNHIRGKIALIWHVAAFRPGDIDNPLASAKAAMRALARRWLWLHEEIIAHDKELERLVTERAPELMASHGIATLTVAQMLILVGDDPTRIRSEAAFAKLCGVCPIPASSGKTHRFRLNRGGNRQANAALYRVAIVRMRSHEPTLAYVKKRTKDGKSKSEIIRCLKRYIVREIYSQLCVPKSSQIKAWRI

SEQ ID NO: 189700 - protein, 343 aa, unidentified
MQIHSVGIDLGKTTFHLVALSAAGKVLLRKKFTQKQLITFTANMQTSLIGMEACSGAHFLGRVLRDQGHDVKLIPAQFVKPFVKSNKNDFLDAEAIAEAVDRQNMRFVPIKTDDQLDLQAMHRVRDRLVARRTAVINQLRAFLLERGMVFAKTPFKLKQAMPEILENADANLTPRMRNLVSLLWSEWKDLEHQIVAMNLEVEQIASSDPACQRLRQIPGIGPLVATAIVAAIGNGAAFRKGRDFASWLGLVPRQHSTGGKARLFGISKRGNCYLRKLLVHGARSAVLRVKRERSPFGPWLDALERRASVKVVITAAANKLARVAWAVLSSGEEYRPPIALMHC

SEQ ID NO: 189701 - protein, 327 aa, unidentified
METFSFFIGIDISKATLDFAVVVAKKLLFHYQSTNDKAGIKSFVKHLKSQCPDADFTNSLYCMEHTGIYNNHLLNYLHSKKAKIWLEHPIHIKDSLGMIRGKNDKIDAQRIANYAYKNRDEVRLWMPKRDVIQKLDRLTAMRNRLVKTRKMLQSPLTDSDGFISKKDHNEAKKACQSTMDALKKDIKQVQKDIDTTIQGDPYLNELYELIESVKGVGPVIATEILIVTNEFKDINDPKKFACHAGVAPFIYSSGQYKGKAKTSNKANKQLKALLHNGAASAIQHSKEMKEYYVRKTAQGKNEMLVRNNICNKLIHRVFSCVHRKAPK

SEQ ID NO: 189702 - protein, 312 aa, unidentified
MNDNTIGADISKDHIDLHSLPDGQTLRVSNDRKGFATIVRWITEKGVARIVYEPTGPYHKAFEQFMMAQGLPLSKVNPRLARRFCEATGRLAKTDRIDAELLARYGQLLEPRTLKANPQIHNDLKELHAARLALIKDRTATKNRANNLTSPLLKRHNADRLAQVERQLKAVDHAIMTMIGADASLSARFDILVSIPGVSQITAFTLLIEMPELGQLDEKAAAALSGLAPMTRQSGRWNGRAFIAGGRAIVRQALYMPALVACRFNPNLKAKYHQLKAAGKPPKVAITAVMRKLIILANALLRNKRKWTPKSA

SEQ ID NO: 189703 - protein, 425 aa, unidentified
MTRLPMDEFAAFVGLDWADAKHDVCLQAAGSQKREFSVLEHQPDTIDAWVSTLRTRFKGQPIAICLELNKGPIVSALGKYDFLVLFPVNPLTLARYREAFTPSHAKDDPSDAELQLELLLTHRDKLKPLNPQSTAIRALEQLVEHRRRLVGDKVRLTNRLTSALKNYFPHVLQWFDDKDTTIFCDFLTQWPTLKAVQLARRSTLERFFRAHHVRYADVIDQRIQAIKSATPLTTDAGVIAPTALLVQALVSQLRVTLQAIDAFDAAIAQRAQSHPDFPLFQTLPGAGPVFAPRLLVAFGEQRERYASAADLQKYAGIAPVTERSGKKSWVHWRLQCPKFLRQTFVEWTAESIRNSFWARVYDQQQRDQGKTHQAAVRPLSFKWIRILYRCWQDRTPYDESVYLNALNSRGSSLLHNLAKGSPETP

SEQ ID NO: 189704 - protein, 342 aa, unidentified
MIDTNQKQEIEFAAFVGIDWADQKHAWALQIPGHLDVERGDLDHTPEAIEVWAAELSRRFGGRPIAVALEQSRGSLLFMLTKYAHLVLFPVHPTTLSDYRKGFRPSGAKSDPSDAGLLVDLLVRHRERLRRLSPDTEQTRTLQFLVEARRKFVNDKTRYSNRLTAYLKMYFPQVLDWFSEVTSPIAGDFLERWPSLQKVQKARPETLRKFFVQHHSCAPDSIDRRLEEIRGAMPATHDAAVTCSCSAAVLALVRIVRAVRDAIVCYDQQIETLAREHPDFAIIDSLPGVGPALAPRLIAALGTQRDRYHSASELQSYSGIAPVLASSGKQCWVHWFSARLRG

SEQ ID NO: 189705 - protein, 311 aa, unidentified
MTDDTIGIDISKVTLDIHRLSDGKMMSFSNCPAGFKALSKFCAKTRVTRVIYEATGAYHSGLERALGVYLPLVKVNPLQARRFAQAQGVRVKTDAVDARMLAVMGNAFALEPDETATKIQHDLKELRSFRSGLVKDRTSIISRMKTQTLAVTRRQSKARLAQVDKQIAEINAEVDRLIHSNGTLAHSMKILRSIPGIGAVCAATILIEMPEIGSMDRKQVASLTGLAPMTRQSGQWRGKSFIQGGRKVVRGALYMPALVAMRHNPDLSVKYQAMIKAGKPPKVALTALMRKLIELANTLIKADRNWVKKGA

SEQ ID NO: 189706 - protein, 453 aa, unidentified
MSQSRPRSKELKVSALQKQLQHVNLNAAGIDIGSDRHLVAVPEGRDDVAVREFGAFTADLQALANWLSKCGVTTVAMESTGVYWIPVFELLERLGFEVKLVDARRVKNVSGRKSDVLDCQWLQQLHTYGLLTGAFRPSDEVCVLRGFMRQREMLVQASSMHIQHMQKALQQMNLLLHNVVADITGMTGMKIIKAIIAGERNPHVLAKHRDNRCRSSAATIAKSLVGNYRAEHLFALKQAVELYETYQAKVRECELAIADYLSTQVNRTEAEPPASERTIRARDCMRGEVDMRVQLFKLTGVDLFSISGFGADTLLTLAGEVGFDMSAWKTEKHFTSWLSLCPGTNKSGGRVLTGKTKRSANRAAAAFRIAASCVAKSKSALGAFYRRIKARAGAPKAITATARKLAVLYYTMLKNGSSYVEVGQAAYEQRYRQRRFSAMQKQALAMGYQLVPA

SEQ ID NO: 189707 - protein, 375 aa, unidentified
MIAAPRSTVSVSNNVMYVAFELGKRQWKLAMTSGFGVAPVLQTVASGNWAAVDRALVAGRARLGLAAEAVVVSCYEAGRDGFWIHRALQARGLQNRVVDSSSIEVKRRARRTKTDRIDALKLVSMLVRACLGEPRVWSEVRVPSVAAEAARHVSRERQALTEERTRLINQMRSWLATWGASLPRQQAEGWWEQVRDWAGAALPDAVQQRLARAHERLALIAEHLTALDAQQAAVIATAAPETPAQRLVQLKGIAVTSASVLLDEGLVWRAFANRRQIGGLLGFAPSKYESGETSRDQGISRAGNDRLQSVMVQLAWSWVQWQPTSALTRWYQERFGQGKRARKVGIVALARKLLIALWRWATHGVVPTGAILKTA

SEQ ID NO: 189708 - protein, 343 aa, unidentified
MAQQTIIGIDLAKHVFQVCMVTPTGTLKTNTAVARGKLLALMARQPPALIFMEACGGAHDWARRFGALGHEVRLLAPQYVTPFRRGQKNDPNDALALTEAGQRPHIPTVPIKTVEQQDLQALHRVRERLVKHRTAVVNQVRGLLLEYGIVIPQGIARLRKRLPRILEEADNGLSFLMRDLLQRLQSELSALDTRITEVTSQLARLSHEMEACQRLQEMEGIGPLSATALVAAMGNGHDFQTGRQVAAWLGLVPRQHSSGGTTRLGGITKGGNGYVRRLLIHGARSVISHVRDKPDAKSAWIRQLVMRIGVNKACVAVANKMARIAWALLHTGEQYRKPVALSI

SEQ ID NO: 189709 - protein, 346 aa, unidentified
MKITTIGIDLAKEVFQVHGVDEHGKTVLRKQLRRNKMANFFANLEPCLVGMEACGSSHHWARKLGEFGHTIKLMPPQFVKPYVKTNKHDMADAEAICEAVSRPNMRFVPIKDIEQQAILAVHRARQGLVKARTAQANQIRGLLYEFGIVIPQGIHSIAKRVPDILEDAENDLPGTMRHLIKRLNDHLKELGRQVGELELQIKLWHKENEASKKLEAISGIGPITASAIVATVGNAIEYKNGRQLAAWLGLVPKQHSSGGKQTLLGISKRGDTYLRTLLIHGARSVIRFAENKAEPESWLHKLIMRRNKNVAAVALANKNARIIWALLAKGTTFHPDHASAACAAAA

SEQ ID NO: 189710 - protein, 339 aa, unidentified
MKYTPVGVDIAKHVIQVHFIDEHTGEVIDKQLRRQDFLMFFCNREPCLIGIEACGGSQHWARELTKLGHKVRLLQARFVKAFVIGNKNDVMDARAIWMAVQQPCKEIAVKTEEQQSFLVLHRTRMQLVKFRTAQINSLHGMLLEFGETIHKGRAAMDREFPEALERLKERLPPYVISVLDNQFNKLNELDLQIDDIEKQLTSVARQNETCRRLLDIPGVGPLIATAAVAIMGEASAFKSGREFAAYVGLVPRQTGSGGKIRLLGISKRGDKYLRTLFIHGARAAALLTKEPGPWITELKKRRPASVAIVAMANKLARTVWAIAAHGRKYNKNHVSIRPY

SEQ ID NO: 189711 - protein, 402 aa, unidentified
MKYYTSTTEFNCGIDLHARQMYVCLMDRSGKILVHTNVRNNDFNFFLKLVGPYRHDLTVCAECMFGWYWLADACHAAHLKFVLAHALYLRAIHGGKNKNDRIDSEKLAHLLRTNLIPPGYVYPAALRPLRALLRQRTYFVWQRADLLARLQSHQLAHNRPTLSGATRCNREPWAAQLQTSEADPDYQFALQNQLTLVGHFDEQIRALDRELQGRTKQTAARDYALLQTVPGLGVQLAATLLYEIGDIARFPTVRDFLSYCRLVKGTVASAGKIKGLRGAKLGNPYLRWAFGEAAVIAKRDPVVIGPLAQRLEARNGGNKFKANTVLAIKLARAVYYMLRTGTGFDPERLVTPLTKQQSDPGARQPARLTGRITPRHPHESQPLVPGTASPSGCVGCAGSPSL

SEQ ID NO: 189712 - protein, 385 aa, unidentified
MSAHPTQIQAAAQLQANTLFASLELSKARWLVTVSAPGSDKLSRHQVPGGDGQALLELLWRLQAAAARRTGAPVMIIVIQEAGLDGFWIHRLLVQNGITSHVVDPASIAVNRRHRRAKTDKIDGVKLLRTLMAWMRGERQVCTMVQPPSPEDEDRRRLARERARLLKERIQHTNRIKGLLSGQGIPDYDPLHRDRRPCLAALTTGDGRPLPERLKAEIGRELDRLEMVVSQLTVVERERDALVARTAEADACAAPAALARLRGGGPELAALLWLEALFRRFDNRRQIAAYAGLTPSPWQSGGIDREQGIAKSGNPRLRRAMIELAWFWVRHQPGSALSRWFVERVGTARGRVRRIAIVALARKLLVALWRYVTQGVVPQGAVLKA

SEQ ID NO: 189713 - protein, 356 aa, unidentified
MSKTNSVKIIIGVDTHKDIHAAVAINEIGARLGTLTIPVRPKGYRDLEIWARAFGVIHAFGIEGTGSYGAGLSRFLQAKGHSVVEVNRPNRQLRHQNGKSDSLDAENAARAVLGGQANARPKSADSSVEMIRHLKVARDTAVKSRTQAMITLKTIIINAPAALRQALDRIIGKMALIRHLAALRPGPILSATASAKAALRAIARRWLMLDAEITAHDADLEALTASCAPAMLEAHGISTGTTAEMLILVGDNPERIRSEAAFAKLCGACPIPASSGKTNRHRLNRGGNRQANAALYRVVIVRMRSHQPTLDYVKKRKADGKGKMEIIRCLKRFIAREIFGYLCGARQSLTSLPKTT

SEQ ID NO: 189714 - protein, 346 aa, unidentified
MEKITRIGMDTSKRIFQLHGVDGAEQPALRRKLSRDRMIAFFNALPRTVVALEACGASHHWARVLGAMGHTVKLIAPQLAKPYVKRGKNDAADAEALCEAAGRPTMRYVPVKTVDQQAALMLATARERLVRAHTQLANAIRGHAAEFGLIAAKGASHVAELLAMVQADASIPRLARQVFAGLAADHAHVETQLAAADAELRAWYKQNAVARRLTQIPGVGPVVAAMLVMKTPDPKAFASGRDYAAWLGLTPKDHSTAGRARLGRITRAGDETLRSLLVVGATAVIWPTRRGTARRVMPWLASLLARKPPKLAAVALANKIARVAWKLMASGEAYDINRAAPKPAAA

SEQ ID NO: 189715 - protein, 345 aa, unidentified
MMIIGIDAHKRSHTAVTIDGNGRQQETKTVGTTTQDHLKLLKWATALGGERLWAIEDCRHMTRRLERDLIAAGESVVRVSPKLMADVRDSARTYGKSDPIDALAVARAALREPDLPVARLDGVERELRLLIDHREDLVAERTRIISRLRWHLHELDPGWLPPASIDRTSAFTAITAHLETCWEDGLVLRLSRRLVQYLQVLTLEINALTAEITERVTVVAPSLLAIVGCGPLTAAKILGETAQVRRFRSKDAFARLNGTAPIPVWSSNKQRHRLSRTGNRQLNAALHRIAMTQARMHPPARELLARRKAGGDGGMEALRVLKRRLSDVVYRAMLSDETQSAPAAA

SEQ ID NO: 189716 - protein, 398 aa, unidentified
MESQLRVGVDVGCHAHRVGIADPEGSILEEFDISHSEAGFQEFFRRVEVQRAALGFPVAVAMEGYNGYARPLDRLVQERGYRLFNVNNLKLARFKEVFPGAAKTDPIDARKILELFHLREQLPMAKDVLQEVLPAPEVNEKLKRISRRRRQLVTEKLRVLNRMQADLQAVSPELLAATHDADNLWFLRFLSFRDDLRQLARLRRASIRQIPSVGVKYARIIEEWQTKATFSDEVDYVGPMIIEDAKRILELRRQIAALDEALAQLAEQSEIASRLATIPGFGKTSIAELAGEIGTLSRFSSEASLALYVGMSPLTVQSGQSLRARAPRQVNTRCRAAMMTAVARHIGCVPQSQAYYARKRTQGKTHNQAVRALGRHMVRVIWAMLSDGRDYEPRGDAA

SEQ ID NO: 189717 - protein, 307 aa, unidentified
MSQNTMTTIYTGLDIAKLNLQLHLAGRIHDLPNTAAGHRRLLKLLACQPGAHVVCEATGGYERDVVAALHEANVAARVRHFARATGQRAKTDDIDAAVLTAYGQALQPNPTTPRTEQEQQLAELVRRRVQVLEILVGQRQQVERLTLPALRRQAQSLIRRLERDLEQIEEQLKALRTQVATLHERAQKLEAITGVGAITALGVLAELPELGTLNRRQAAAPAGLAPHPRESGQWHGRRSIGGGRAPVRRALYMAALVAAHSNHQLKEFYQRLRAAGKPAKVALTAVMRKLIVLMNHILKNPNFALQN

SEQ ID NO: 189718 - protein, 418 aa, unidentified
MREEVSTVELLVPRCAGLDVAKDEVVACIRVPNGQGGRRQEVRTFPTFTSGLEALADWLTAEGVTQVVMEATGQYWKPVWYVLEEAGFQLLLINARHVKILPGRKTDVCDAAWLAELLEHGLLRGSFVPPAAIRQLRDLTRYRKRLIQTHSAECQRIQKTLEDAGIKLDSVAADVLGVSGRAMLAALVGGERDPEVLAELARGRLRTKLPQLRQALRGRFSDHHALLVRLALAHLEHLEGAIAALDTEVDQVISPFARARDQLDTITGVGKRAAETIIAEIGVDMAVFPTASHLASWAGRCPGNNLTGGKRRSGRPTKGNRWLGEVLTECAWAAARSRDTYLAAQYWRLARRIGKKKAAMAVGHSILVIAWHLLANDCDYQDLGGDFFVRRDADRARQRAVAQLQALGYRVTLEPLAA

SEQ ID NO: 189719 - protein, 341 aa, unidentified
MDIVTVGIDLAKNVFALHGIDHSGKAVLVKPKVARDQLLELVAQLPPCLIGMEACTGAHHWARQFVRYGHTVKLIAPKFVAPYRLGGKRGKNDAADAAAICEAITRPHMRFVPVKDIDQQAILCLHRTRQGFVEERTALYNRVRGLIAEFGIVLPQKVERLRREIGAHLEELPGWANRCIGDLLAHADRLNERIEEYYRAIAEAARQDSRSRQLMQLPGVGPTTASALITSLGGGHDFKNGRQLAAWVGLVPGQYSSGGKARLGRITKAGDAYLRSLLVMGARAVMSGLGEKQDRFSRWVRSLVERRGYWRAAVAIAAKNLRLAWAVLKYGEDFRLTAGNA

SEQ ID NO: 189720 - protein, 332 aa, unidentified
MSKIKLVGIDLAKRCYQICAVSEHNKVLYNRKYTAKKFAEAVHQLEPITVAMEACAASHYWGRRLHALGHQVLLVPAQHAKAFRRVHKSDEHDALSIAEAAQRPNLHCVPVKTLTQQDLQILGGLRERCVAQRTSLINQARGYAREYGVNFPVSRPALMRELPLAIEAANNDLTPIAREALAGVYEEIKQVSTRIDDLLARMTTLAQEDPAHKGLQTIPGVGPVLAPTLLAKLGHAQQFDSGRDCAAWVGLVPKQNSTGGKTQLGGISKNGDRLLRTLLIHGARTVIRWADKHDHAQSRWIKQLVERAGKKDFNLHHVMNVLRLQLSSQPIL

SEQ ID NO: 189721 - protein, 338 aa, unidentified
MNISLVGLDIAKSIFHLVGLNQAGKPVKRKILKRPHLPRFFSQLGPCTIVMEACGSAHYWAREFQKQGHQVKLIAPQYVKPFVKGNKNDYNDALGIAEAGQRPNMRFVPIKALEQQDIQMVHRLRERLVKNRTALVNQIRGLLAEYGIAIRKGIYAVHAELPLILEDAENGLTVMARESFNALYAELLELNVKHRACEKKVIEINKANEICLRLDEVIGIGPVTATAVYAAVGDGRDFENGRHFSAWVGLVPKQHSSGGKANLLGISKRGNAYLRTLFIHGARSVLQYVDGKDDRFSRWASALVERRGKNKACVAVANKLARMAWVIMAKGERYRVAE

SEQ ID NO: 189722 - protein, 427 aa, unidentified
MNHTQNEKIKQVTNDTMVIGIDIGSEKHWARAFDNRGMELSKKAFGFNNTAEGFTSFETWYENQRRAAGLKRIIVGLEPTGHYWFNLNQFLSENGVRVVLVAPQHVKHSKELDDNTQRKDDRKDPRVIAKLVTEGRYFLPYRPSGVYADLRDGFNRRCGIVESMTRAKNRLHRWFSINFPEYMHAYGSVTAKTGLMVLKKAPLPKDIVALGVEGIEKIWRDAKVRGAGKKRATTLVALAEQSIGEKTANEAARLELWQLLEDYEHFAHQFEVIEEMLMRKVHEIPNADKLLQIPGIGYFTVIGFFAEVGPIERFDDPKQIQKLAGLSVVENSSGKRKGLSGISKRGRDKLRWVLYQAAMSAVKNNQEFKEIHLYFTTRKDNPLKKMQSIMAVAAKIIRVFYGMVRTGSDYDVERLMRDIRRPEKAAA

SEQ ID NO: 189723 - protein, 327 aa, unidentified
MEHFAGIDVSLEHSSVCVVDGVGKIVREAKVASEPEALVRFFRGLETGVTRIGLEAGPLSQWLHAGLVAAGFEVVLLETRHVKAALSAMVIKTDRKDARGIAQLLRMGWFRPVHAKSPGSQEVRALLVARKLLQAKLLDVEFSIRGILRGFGLKMGEVSKGRFAARVRELAAGHAMLERITEPMLRAREALRTEYAKLHGEMLAVVKPDPVCRRLMTVPGVGALVAITFKSAVDDPGRFTRSRVVGAHFGLTPRKYQSGETDVTGAISRVGDGMVRMALYEAAHIMLGRVTRFSSLKRWALDVAKRRGLKRAKVALARKLATVLHRM

SEQ ID NO: 189724 - protein, 400 aa, unidentified
MDHQLYLGIDVGKTEHHATAITAVGTVVHDKTLPQSEPKIRALLQTLRAEQGAVLVVVDQPKTIGALVIAVAQDLGIDVAYLPGLTMRRVADLHEGQAKTDARDAFIIADTARTLPRTLRGITVAEENIAEPAMLCGFDDDLAAQLTQVRNRLRRFLTQIHPALERILGPRLGHTAVVTLLTRYPSPTRLRSAGRGHVRALLKKHAPRLAERLTEEIFTALAEQTVTVSGTTAAEKIIGRLAQQLAQLCSQRVEIEAEILAVVDAHPLTQVLTSMPGVGVRTAARILTEVVGKNFKDAAHLASYAGIAPVTRRSGSSIRGESPSRRGNKTLKRALFLSAFASINASPASRAYYDRKRAQGKRHNQAIIALARRRTDVLYAMLRDGTFYTEPTPPAVALAA

SEQ ID NO: 189725 - protein, 329 aa, unidentified
MNHYAGIDVSLECSSVCVVDANGKILREAKVASEPEALIAWFRSSGFDLERIGLEAGPLSQWLFAAMREAGLAVELLETRSDRNDARGIAQLMRLGWFRPVHCKSMSAQETRTLLTARKLVQSKLHDVENSLRGILRGFGLKVGKTTELKFAGRIEELVAGHPHLQVIAKALLAVRAVLRTEYAAFEKQVRKLARSDMRTRLLMSTPAVGPIVALTYASAIDDPARFKSSKQAGAHFGLTPKKYQSGETDYTGRISKIGDSSVRTVLYEAAHVMLTKPVKGCSQLKSWAMRIARRAGMSKAKVALARRLAVIMHRMLADATPFNAAAAA

SEQ ID NO: 189726 - protein, 367 aa, unidentified
MKKTSTVRVNGNMIFKGHKLTIGLDLGDRWSCFCVLDEAGEILLEQKVATTPEAMKQTFERIPRSLIALETGTHSPWVSRLLKELGHQVLVAHAQKVELISKSKRKDDRHDARTLARLARIDPELLGPVRHRSAKAQIHLTVIRARAAELVSARTGLVNAARGLAKSYGERLRKCGTQQVSRELAAELSAELREVLEPLLKEIESLNERIKEYDARMDKIAKESYPQVALLKQVKGVGTQIALTYVLTLDDPHRFPKSREVGCFLGLRPGRRDSGQSQPQMHISKEGDPYLRTMLVQGAHYILGPFGEDSDLRRWGLKLAARGGKNAKKRAVVAVARKLAVLLHRLWVSGEVYEPLRNNQKAIRAAA

SEQ ID NO: 189727 - protein, 336 aa, unidentified
MTLYAAIDLHSNNNYVCVIDGKDKRLLETKLANDANLVIQALKPFKRRLMAVAIESTFNWYWLADALIEAGFEVKLVNTAKVIQYEGLKRTDDRYDAFFLAHLMRLGILPTGYIYPLEQRGLRDLLRRRMRLVQDRTRYINSLNTQYQRQTGLHLSCNKINSKLFRLPIVGDANVQLAMKANLNMCKALKVQIKLLEKSIMSQVKECKEFNLLKTTNGIGDVLAETILLETGDISRFSSPGNYASYCRCVDSCKSSNGKKKGMGNRKNGNKYLAWAFIEAANFAIRYNLKAKKFYERKKLKTNNLIALKALAHKLSRACYYIMKQGVPFDENKIFS

SEQ ID NO: 189728 - protein, 346 aa, unidentified
MKIIGCDFHPSYQQIAVLETTTGEVMEAKLMHGDGEAERFYRELEEPALVGMESVGNSLWFEQLVERLGHQLWIGDAAQIRASYVRKQKTDKRDAGHILKLLLENRFPQIWVPSHQQRDQRQLLIHRHKLVGMRTRIKTELQHVALNQGMQKKRSLWSKGGMSDLKKLSLEGWTSRRRADLLSLLSMLETQVSELDKAVEQAAARDPQAQLLMTQPGVGPNTALAFVTTIGDVARFQRGKQVASYLGLIPSERSSGSKRRLGAISKQGNVFLRTLLVEAAQSAVRHDEDFKKEYRHHCHHKPKGVVKVAVARKLAVRLYWMLRTQTPYPQVVHNEGSPSHFVVSQS

SEQ ID NO: 189729 - protein, 356 aa, unidentified
MSRKQEKINQPNTKVYAGIDVSKITLDFFIVPYGITITVGNNSKGIQELVRQCREHRVSLVALEATGKYHRQVHEMLHDAGIATAVINPFRARQFADSMGKLAKTDTIDSEVLARFAERMKPLPTKPPGSSVKALHDLHTARRQVVDEIGDLKRQLQTTEHPLAARQINARMKMAERHKSALEDEIQLLIASDPEMKRRYSLLISIPGIGKTTAAIMIADLAELGQVNTREIAALAGVAPMNWDSGARQGNRMIRGGRKSVRNALYMCAVSCVSRPGLLGTFYRRLIQRGKSPKVALTAVMRKLVIIANTLIAEDRPWQAENPARTIAPVSQGRDALEMSEVSARPACDTNLWISA

SEQ ID NO: 189730 - protein, 341 aa, unidentified
MNTTTYGLDIAKGVFQLYWVEPSGECFNRRFTRKALLNFLAKRAPGRVALEACGSAHWWARQLAALGHKPVLLHAAFVRPFVQTNKTDVADAKAIWTAVHQPGMRQVARKTETQQAILALHGFRALRVKMRTMLINQLRGVLFEFGIHFRRGRRAGLEEIKQHMAELEQQLPRVLFDSVGEQLQDIARLDEEIGQIEIRLNTWLKEDHDCQTVAAIPGIGPLTATALVATIGDVHAFRSGRQLAAFLGLVPRQRGTGGKVNLGGISKRGDTYLRTLLIHGARIVLSHLRRKGQSHWSTALVQRRPANVVGVAMANKMARTAWALLAHNRTYDRDYVSVKLA

SEQ ID NO: 189731 - protein, 406 aa, unidentified
MEQQRIGRVYVGIDIHRLKHFVSILTESFLKESESDWRKVGSFCIENDIKSYRELESAIIKEAADVNDVLVAIDHTGGHYCEPLVFFLTGKGYHVYHLESKAVKAARERLLDEESKSDHLDASCAAYLLYLSDLHNISLRIPRIEPALRRDSDILNHLILQRDIYKKLITQCTNRLHQLLLATFPEGERRNFGSLLRVIPHYPTPFDIVQSDNLKGVKYLRQGYREELVQLANNTVGSPCAIYRDLILDLSQQRCEYIEKRTGIERLIESQVDKHPYGEILRSFPFISHITAATIISVIKDIERWPNKKKLKKAMGIYAFTKQSGSSVASRRRGREGNRRARCALYLVALCMMGFKGGDNDFKNYYTRRVASGKPKKQALFATAGKITEIIYHCLKNGEKYSYQGK

SEQ ID NO: 189732 - protein, 368 aa, unidentified
MKEVTTRYVGLDVHKATISIAVADDGVAPVLFGTIANDATAVRKAVSQLKRGGKLVAAYEAGPTGYGLHRQLTQLGVDCVVVAPALIPRRAGDRVKTDKRDAIALARLLRSGDLTPVWVPGQQDEALRDLVRSRFDAKDDLRRAMHRLAKFLLRQSIQAPPGIKPWSARHLQWLETLRLDHPTSQLVFQDYRVAVHVARERVRRLEADLERCAEQSPRLGTILALQVLRGVAFLSAVTIVAEVGDFRRFPNAPRFMSFTGLTVSEHSSGQSRRQGRITRAGNRYLRHILVQAAHNARFAPSLEGELKRRLKDVPADLVALSVTAQNRLHRRYRHLDRRIGRPKAVTAVGRELAGFVWAIGQRMEASAA

SEQ ID NO: 189733 - protein, 317 aa, unidentified
MAMQVGKLIVGADVAKAELVIHHDDRDEIIRLKNSKLEIKRWLKQQPLNTAIAVEATNVYHLDLVELAHGLGFDVYVIDGFQLSNYRKSVGGRVKTDPSDARLLSRFLKNEGEDLRPWSPPPPVYGKLQSLLRRRAALVTARTAMTQSWANETLLKAAFETLVKSIDQLDKLIQKKIKDVLREAGLQEQVARCQAVEGIGFLTAAALVMAFMRGEFKSSDSYIAFLGMDLRVSDSGQKNGRRRLTKRGCSEIRRLLHNAAMAASKSAAWKGLYEQHRNSGKATTQALVILARKLARVAFALMKNQDEYVTKGGKLAC

SEQ ID NO: 189734 - protein, 412 aa, unidentified
MQAIIERCCGLDVHQETVVACLLIGAAGARARKEVRTFRTVRRELEALRDWLKAAGVTHVGMESTGVYWRPVYAVLEGHVELIVGNARHIRNVPGRKTDVKDAEWIADLVRHGLIAKSFVPPPPLRELRELLRYRRKLIEAQAAERNRLLRLLETANIKLASVMSDVFGVSGRAMLKALIAGSAAPEEIAALARGQLRRKRAGLIEALTGGLEEHHRFLLAMQLGRIEAIEADVATLDARIGERLLPYDAEMALLMTIPGVNWLVAAVVIAEIGTDMSVFLSVHHLAAWAGVCPGSYESAGKQKSGRARKGNVHLRTILVGAAISAARTKGSYLRDKFHRLKARRGALRAALAIAHKIVVAAYHMLARGVAYRDLGEAYLDQIGERRTVANLKRRLERLGYHVALKPRAEAA

SEQ ID NO: 189735 - protein, 370 aa, unidentified
MNKTLLFVGLEVDDKNFHIAASSESTEIIEFQTRPRLDSLVSKLQELADKGYELNVCYEASYLGFSLCRDLRKKGFNCEIVAPSLIPQTPGPKVKTDRLDAKKLARFYQTGLLTIIHVPTEVEESDRDLVRTRDFLASQIRALKLHILSHCRRRGWNYRQDAGQGSNFWTKAHRAWLDHKIALEVIASTKTSFKVLLTQMIQMEQQLVSIDFEIESLAETEKYSKRVDALVCFRGIKTLTAMVYITEIGDVARFSSPLKLVSYLGLDISEYSSGANQRRYHITKMGNVYARTALIEAAQHVGLPPKISRDLRDRRKNADHKFIEIADRGMNRLHKRYQHLIHRGKPSNVAKVACAREMIGFIWESLKAAA

SEQ ID NO: 189736 - protein, 356 aa, unidentified
MISSTKYIGMDVHKESISIAVRNAAGKIVMESVIETKASVILQFFDGLRGDLHVTFEEGTWAAWLYDLLKPHVAKLVVCDPRRNALLLDGNQNDRVDARKLSDLLYMNKLNTVYHGDHGLRTLKELGRSYLTMTRDQSRVMSRIKAIYRSWAIPCSGKQVYGSRHRAEWLGKIPEPGVHRRAELYYQQLDALRTLRQEVRRDLLAESKKHKIWKRLCAIPSIGPIRAAELLGILQTPHRFRTKRQLWTYCGLAVVTSSSADHEVEHGQLRRRKKRKETRGLNENCNHDLKNLFKGAAVVASLKPGPFAEFYAALLGKGMRPEMARLTLARKIATIVLIVWKKGVCFDAQHLKPQTA

SEQ ID NO: 189737 - protein, 385 aa, unidentified
MPSDLSKSLVVLNQDSTLIAVIELSLSNWLVAGLVPGLRRQPRKKLDPDPDALLALLWRWRDEAIKAGRTIERITVAYEAGRDGFWLARWLHAHGIEAHVIHPNSIPVPREHRRAKSDRLDTELLLRGFLGWLRGEEKHCSMAQIPSIEEEDLKRPNREHQRLVNERTSLINRLKACLIRFGIRNFNPKLKKAAEQLSRLLTPEGVALPANTLAELGRDLARLQLVKEQIKTIETERVKQLTQAAQGRHATTVRSLIRVVGLGVETADMLDSEMFCRHLRDRWAAARYGGLTGSPDESGAMRREQGLARAGNSRVRRGMIQFAWRFLRFQKDSPLAQWYWQKSQSARKDIRKLMIVALARKLLIALWRMATQGVIPEGIRLREAA

SEQ ID NO: 189738 - protein, 425 aa, unidentified
MNLLILKGVPMSLKIVYKICCGIDVHKTFVVACIASTNDKGVTSYESHRFSTYTSGLKTLLQWLLKRNCKDVCMESTGKYWIPVYNILENDCSIVLAHPKYVKAIRGKKTDKKDAKWIADLFKHDLVAGSFMPPADIRQLRDLMRYRFKLTCFQSSEKNRLQNCLTVSNIQLGNVVSDTFGKSAQAILDKLLENPADTSFDLEPLVYKSLKKKLPQLRDAIDGYITPEQAGKLKVIKSHYENLESRKAELEELILALAAPYQQELAILQTAPGIRSDFTAIGIISEIGTNMEAFPSAKHLCSWAGLTPTNNESAGKKKSVRVSKAGCYIKPLLVQCANAVVTSKKHPEIRNRYLRLKKRRGHKKAIIAIARMLLTALYHMLKNGENYNAELYRKSYLPPVDREITVEQAVIIARNQGYKIKSATA

SEQ ID NO: 189739 - protein, 334 aa, unidentified
MSDSLDIGVDVDSKEFVPAVADRKAGDRIANTRAGIAQWLNTLPQRCRIGMEATGRYYELLARMAGQAGHVVYVINPRLIKHYGRATGSRGKTDAMDAEAIARYVKKENDRLREYVPRTDEQQQMHDLLRKRQTLVKTRARLEQSFGVSKSAPGELSDLFCALAGTLSELESELQRLGRDGEHGTLYKRLLTIPGIGPAVAAHLIYYMTRWPLANANAWIACTGLDPRPNESGGRTGRRRLSKQGAPVLRQMLYMAAMGLKRCRRGQPLYDELSKRCRRGQPLYDELSKRGHPSTAVFNILARKLARIAWGVFKSGRDFDPAMLKVGQACFQQA

SEQ ID NO: 189740 - protein, 338 aa, unidentified
MKLYCGIDLHSNNLWLSIIDECDRRVLEKRIGNDLDTTLAMLAPYRSDLESIAVESTFNWYWLVDGLMAAGYEVKLVNTCAVKKYEGLKHADDRHDAFHLAQLLRLGVLPTGWIFPKELRGVRDLLRQRSRLVRQRTTHLLTVKSAYARCVNVKVKAATLKGEDSKTWPVVADAHQALAIEVHRPIIGALNTQIEHLETTILKQTRGNDRFKLLTDMCGIGPILAWHILLESGEMHRFANVGRYTSYCRLVPAVKISNGKKKGVGNRKNGNAYLAWAFHEAAHMAIRFMAPAKRYYERKSKERNRIVAMKALAHKLARACYFILRDGVAFKPDKLFSY

SEQ ID NO: 189741 - protein, 488 aa, unidentified
MKVVYQTCCGVDVHKSFLVATIIKTISGVEPSYQKKRFSTFNNSILQFKNWLIENQCRDVCMESTGKYWVPVFNLLEDDINVTIANPKWVKAVKGNKDDTKDSKWIGDLFRLGLVPGSYIPCKPIRILREFTRYRYKLTSCRTSEKNRYQNALTVCNVALDSVVSDIFGKSATSVIDYLIERSDNSINHEEIASRLLRSLKKKSDSVIESIEGYQMTDSQKYRMRLVRAHLDYITSTINDIDTMLDSLIAPYENAVQLLCTIPGVDRNSAITVISEIGTDMTPFSNSKRLCCWAGLTPGNNESAGKKKSVRITRAGVYLKPALVQVAHAAVKSDKSPYYKQKYERIMKRRGKKRAIIAIARMILTAIYQMLSTGEAWNPTDLFKIDMPEPMKEKQKEKAIKQAMKLLIREGKISESQLASLLFKTIVFFCAAIRQLIKVRHLLAVLYFLSQYPLVCCYRDLYVDELQTELGKCCIYFSESVPPDIALP

SEQ ID NO: 189742 - protein, 412 aa, unidentified
MDRVVERCAGLDVHKDSVAATVRVPGSATGERLQETRTFSTTTRGLVTLADWLASYGVTLVGMESTGVYWKPVYYVLEERFECWLLNAQHLRNVPGRKTDVQDSAWICQLVEHGLVRASFVPPRPIRELRDLTRYRKAQIEERSREVQRLDKVLQDAGIKLSSVASKTLGLSVRLMLEALVAGTHDPEVLAELARGRLRRKLPALKEALSGRFRGEHHGLLVAQILAHIDYLDETIATLSERIEQLIAPFSRQRDLLETIPGVGRTAAQVLIAELGVDMSVFPTSAHLASWAGQCPGNHQSAGKRRSGRPRHGSKWLHTTLTESAKAASRTKGSYLSAQYTRLRGRRGPRKATGALRHSILVAAYQILDHNVPYHELGADYFDQRSTEQRTKRLIRQLEQLGHKLNLEPLAA

SEQ ID NO: 189743 - protein, 359 aa, unidentified
MYFAGLDAHLKYVSIAVLDRRGQVALETSVSTREPEQLLAALAPYRPLEVVVETCPFWPWLYDLLVPAGIGFHLAHAKQLRAIAAAPQKSDAVDARLLARMLLAGLIPEAYPRPADQRGLLRLLRHRTTLVRYRTRLAGRIHSQLHQQRLSLPREKLLRQATRAWLEETAWPRLTVEQQAIVTTHLELIDGLTPLVQALERRIATAAAGHATAPLLATIPGIGPYRSLLLAAELSPITRFPRAEHLVSYAGLAPVTRSSGGHTHHGSIPQGANRWVRGALVSAIPTHVRWAPTSPVTMAYAQLKARLGWRVARVAAARKLARVVYVMLTRRTPWCGAPVAGDVRDEVQNSHVAATTSFC

SEQ ID NO: 189744 - protein, 409 aa, unidentified
MRLFVGLDVSSFDMKVCFLDGEGNKLDRFSVSNDLPGAMTLKEKLLQRVTDKGIETLKIVLESTSVYSFHPSMFLHHDEDLQRFGTKVFLLNPKQIANFKKSYSDMNKTDEIDAFVIADYLRFGRNQMSIVKESQYVALQQLTRSRYQLVKMLTKEKQHFLQHLSFKCNTFSQEVDSSVFGTAMMELFLEKFSLEELADMPLEELAEFLQKKSKNRFGDPTCVASTIQKAVRTSYRLDRVVEDSINVLLGTSIEVIRAYQKQIKELEKSIKRIMAGLTQTLESIPGIGPVFAAGIIAEIGQIERFDDETKIAKYAGLYWRKHQSGRFTAENTSLSRNGNHYLRYYLVEAANSVRKHVSDYQEYYVKKYNEVPKQQHKRALVLTARKLVRLVDALLRSHQLFTPERCVKV

SEQ ID NO: 189745 - protein, 447 aa, unidentified
MKEIGLGREGFGAVIGLDWADEKHVVYMRDISTCRVETCEVEQKPEALQQWVNGLRKKFAGSKVAIAVEQSRGPLIYALMGYEFIVLYPINPKALAAYRESLRCSGAKDDPSDSELLMSFLEGHWQRLRAWEPEEEISRKLAMLVEFRRKLVGEATRITNRLTALLKGYYPQALELIGDLKTALACDFLKKWPTLQQLKKARRAQLRNFYYAHNCRSSKLIERRIAEIPRAVPLTEDGAIVSASQMMVQTLVEQLRVVIGNIEKFDQEIKKVFAIHPDHQLYGSLPGAGPVLQPRMAAGMGTNRNRYETAAELQQFVGTAPVTRRSGKSRRVHWRTACPKFVRQTHVEFAAQSVPQCLWAAAYYQHRLNRGDSRQKALRALAYKWDRIIFRCWKDRTPYDENKYLEALQRRNSPLLKLLNTKKSNWVSCAEILRSPEFQKNLHSKTN

SEQ ID NO: 189746 - protein, 407 aa, unidentified
MKLYIGIDWSQNKHDICFLNPSGVVQLQFVIEHTQTGFWKLEHRRQQMGVALEDCLIGLETSHSILIDFLWDRGYSNIYVLPPTLVKGSRTRFRSSAARDDPGDAHLIADIMRTDQGRLQAWKPDSGLTRQLRTKVKFIHFLTINIVRMTNRQRAVLHRYYPAAIELFSSLNTLISQHFILEFPTPQSVLGLDLPTFCSFAKKHGYTHTHKLAGVLAKLDRSYAQADHEIIEACQHEAQGLAKLLLEMIQLKRTNLKELQGLLDQHPDRDIYASLPGTGVYLQAALISKLGDDRNRFSSADRVQALAGTSPITVSSGKRKQIRFRHSCDHDFRHVVQQWAKLSLRSSVWANAYYSQIRPQANSESHAFRCLGNRWLAVLWRLWQDRVPYDEVHHLHQRALRSQPKTV

SEQ ID NO: 189747 - protein, 411 aa, unidentified
MPKIVYPICCGIDVHKSFVVACIATTNEKGVTIYSKPKRFSTFTGDLRRLGAWLAENNCRDVCMESTGKYWIPVYNILEPTCNIVLAHPKYLKAIKGKKTDKRDAQWIADIFKHDMLSGSFIPPAEIRQLRDLVRYHSKLTSYTTGEKNRAQNCLTVSNIKLDDVFSDVFGKAASAITERLLESNEPFDVKPYLTKAIKASPEEIQAAVDGVMCANQAEKLRIIKYHMDSLDLCKANLQSEILGIAQNYLPQINLLVTAPGISTFSAIAIIGEIGVDMSVFERSRNLCSWAGLAPCNDNSAGKKKTTRISRAGVYIKPILVQCANAAIKSNKHPEIRNRYNSIKKRRGHKKAIIAIARMLLTAIYNILKKNEPYNADLYHKSNLPPKNRQVTLEQAVFILQRQGYIVATSP

SEQ ID NO: 189748 - protein, 351 aa, unidentified
MVVVVGADVHKRSHTFVAVDPAGRRLGQLTVKADAQGHDKAVRWAESTFGTDLRWGVEDCRHLSARLELDLLDAGQQVVRVPPKMMAEQRRVARTRGKSDPIDALAVARAVLREPDLPAASHDEASREVKLLVDHREDLVRQRTAIINRLRWHLHRIDPALDPAPQSLDRASTRARLAEFLTGIEGIDARLARELLDDVAALTARADALAKEIAQLADQLAPELLELPGCGPLTAAKILGETAGIGRFAHEAKYAMHAGVAPIPVWSGRTAGKVRLNKSGNRQLNAALHRIAVTQIRLGGLGKAYYDKRLAAGDSKTEALRCLKRRLARVVFNTLKNAQQAAAAAQYATAA

SEQ ID NO: 189749 - protein, 336 aa, unidentified
MSHYCGIDLHSNNHLVVVIDEDDKRVLEKRLDNDLSLTLETLSPFRESLHGIAVESTFNWYWLVDGLQEQGYDLHLVNTMAVKQYDGLKYSGDRHDAFHLAHLMRLGILPTGYIYPKEQRAVRDLLRRRLFLVHSASAQLISVQSQIWRTTGRRIRSADLRKPDFIAPGVEGYTLQAVEAGLAVYQAVQREIDALEQSAQQAVRLSNDFKILQTVTGIGKVLGLTIMLETGTIERFAGPGNYASYCRCVDSRRDSNGKKKGEGNAKAGNKYLSWAFSEAAHFAVRFEPLAQRFYERKKARTNGIIAIRAVARKLSRATWMLLKHQVPYDARLMFPG

SEQ ID NO: 189750 - protein, 341 aa, unidentified
MNVTTIGIDLAKTVFSIHGTDQHDKVVVRKRLNRPKLLSFFAQLPPCLIGMEACSGAHYWARELTKLGHDARIIAPRFVAPYRKSSKNDDNDAEAICEAVGRRNMRFVPIKTEDQQAVLCLHRIRRGLTKERTAQINQIRGLLAEFGLIVPQGRYAARRRVPEILEDAENGLPMLARCLLNNINQRILRLDEEILAYDREIEAMARRDENAKRLMAIPGIGPQTATALLASAPDPRQFKSGRHFAAWLGLVPRQYSTGGKVRLGRITKRGDKYLRTLLIHGTRAVIAKLADKNDRLSNWAKDLVERRGYKRAAVALAAKNARIIWALLMNQTEFKTQPVEG

SEQ ID NO: 189751 - protein, 421 aa, unidentified
MSVAETTALLHGGLPTPAGPTAGVDWARDDHAVSVVDPAGRQVARFSVAHTTSGLRELTGRLDRAGVSQVAIERPDGPVVDALLAAGLTVVVIPPGQLKHLRSRYGSAGNKDDRFDAFVLADVLRTDRHRLRPLQPDTPATVTLRATCRARKDLIGHRVALTNQLRAHLQLAFPGAIGLFADLDSPISLRFLTRFPNQQAADWLSPKRLAAWLAAAGYCDRKPPTQLHAHLVAAPRGPLGPDGDARTHITRALLAAITTIVSQIQALDAQVREQLELHPNRDIYRSLPRSGIVRAARLLGEIGDCRARFPTPASLACLAGVAPSTRQSGRHRAVAFRWSCDKQLRDAVCDFAADSRRASPWAARLYQQAISRGHDHAHATRILARAWLGVIWRCWQDHTPYDPTRHRALQAITSNPTNHAA

SEQ ID NO: 189752 - protein, 353 aa, unidentified
MQKEKVIKQSVGIDCGKVELVVAYGVMQVGFEEKIISNTAFKNNAEGFKKLQKWASKLTDPAVELVYVIEATGVYHEKVSLYLHNEGCKICVMLPNKVKSFSQTLMVKTVNDKTSSQAIAYLGLEKRLDAWQPPHPVYRELKQLTREREQLIEERTLCKNQLHAEESGAWPNTRSVKRIKQRVKLLNEQMTEIEADIAAIVAKHEWLKKKLEYVCSIKGVALLSAVIIVAETNGFNLVRNKKQLVSYAGLDVVEKESGISVKGKTKISRKGNKYLRKSLHFPALVAIRHNEQMKAMYNRLLSRHGIKMKAAVAVQKKILEFVYVLWKKEEMFDQQYLKNKGQQLKVATLCELT

SEQ ID NO: 189753 - protein, 451 aa, unidentified
MESSFAGVDWASEKHDVVVQNAAGEELLAASFAHDEAGLRSLCRQLVRLNVQLVAIERPDGVLVERLLDAGLRVLALHPNQVAAARARFRVSGGKSDRFDAFVLCELARTDHHRFRVLEPDSDQTKALRALCRGREDLVQARVALTNQLRAELERFWPGAVKIFRSIDSPIALAFLEKYPSPIEARTLGEQRLAAFLRRQQYSGGKTPRELLRKLRSAPEGRAGETEIRTRRQLVLALVGLLRPLVAQIKELERQLARALDEHPDGQLFRPLFRDPKSVITAAELVSEIGDCRGRYPTGDALAGDAGQAAVAIESGKRKVACYRWACNKRLRDAFCTLADSTRHWHPWAADHYARQIARGHDHPRAIRSLGRAWCRVLWRCWQDRTPYDPARHRALQQHVSVTIPGASGPRPDTAATQRMLGDAVTRQGGPKAPSATRLTASRHPLTRIVR

SEQ ID NO: 189754 - protein, 377 aa, unidentified
MKRIKFVGLDVHAETIAVAVAEQDGEVRSLGVIPNREESIRKLVKKLGPVEQLRFCYEAGPTGYVVYWQLTALGAKCEVVAPTLVPVKSGERVKTDRRDALKLARNYRAGELTPVWVPDAAHEALRDLVRAREAAKKDQLRAKHRLGKFLLRHGRRPPTGVKPWTLKYLTWVKKEVHFEQPAQEATLLDYVHEVEHAEARIARLDLAVEEAVKSTPPKMKAVIEGLQALRGIAQVAAVTIVAELGEISRFSRARQLMGYGGIVASEHSSGESNWRGGITKTGNAHLRRVVVEAAWAYRHRPNLGAALRQRQELVSEEVREIAWKAQHRLYTRYRKLMARGKDKGKVITAIGRELLGFIWAIGVKVEAAQKVTERRAA

SEQ ID NO: 189755 - protein, 416 aa, unidentified
MSVALPQALFFTGIDWASAEHAVCVLDAAGKITARFTIKHSAGGIASLVRRLARYGDPAGLPVAIERPSGRLVDLLLEAGHPVVPVSPNAIKTWREGEVLSGAKSDAGDAAVIAGYLRLRYHRLAPAAPYCDQTRALRAAVRTREDLVQMRVAATNQLSALLEAHWPGARAVFADVESPISLEFLTRYPTPAAARHLGHKRMAAFLVKHGYSGRRPAAQLLARLHGAPAGTAGRALTEALQDAVLAVVAVLRALNGAVKDLDRSVAAHLGEHPDGPVFTSLPRSGQINAAQMLAEWGDCRQAYDGPDSVAALAGVTPVTRQSGKHRGVEFRWACNKRFRRAVTTFADNSRHASPWAAQIYAEARAAGKDHPHATRILARAWIRVIWPCWVNRVPYDPARHRAAAALAGQTPNQSAA

SEQ ID NO: 189756 - protein, 343 aa, unidentified
METVTTIGLDIAKSVFQVHGVDAVGQVVIRRQLKRRSVLAFFEKLPPCLVGIEACASSHHWSRELQSLGHTVRLMPPAYVKPYVKRQKNDTTDAEAICEAVTRPNMRFVPTKTIEQQSCLMLHRARHLFIRQQTAVINSIRAYLAEFGIVAPVGRRGVEQLLEVVADAADRRLPEVARVCLAALGSQLRRLKSQILEFDRRIMAWHRSNATSKRLDAIPGVGPALATALVASIADPKAFRSGRDFSAWVGLVPKQNSSGGKDKLGNISKQGDRYLRSLFTAGALAVIRYAKIHGTGHRPWLTGLLARRPTKVAAIALANKLARMAWVMMARNERYKEPAALTA

SEQ ID NO: 189757 - protein, 344 aa, unidentified
MQITTIGLDLAKNVFQVHGVSSGSEVVVKKTLRRVQMRRFFEQLDPCLVGIEACGTSHYWAREITKLGHEVRLMPPAYVKPYVKRGKTDAGDAEAICEAVTRPTMRFVAIKAPEQQAALALHRTRDLFVKQRTQLVNMIRSLLAEFGIEIRRGIEQALTLAKHIAAHEVPDIPPLAAKVIAGLAGQVLDLQARLGEIERELLAWHRSNDISKRLATIPGIGTVCATALAASVTDPHQFRSGRQFAAWLGLTPLQHSSGGKERLGRISKMGDKYLRRLLVVGMTSLIRRAKYKPEAVDPWLADLLSRKPARLVTVALANKAARVVWAIMVRGGVYRRPAGVTTPV

SEQ ID NO: 189758 - protein, 337 aa, unidentified
MERRYVGIDLHRRRSVIYAMTAEGEKVSCVRIANDPVALSLAVADAGGDAEVVIEATYGWYWAVDLLQADGHRVHLAHPSGNDWGNRRVKNDERDARDLADLLRLGRLAEAWMAPPATRELRELVRYRAKLVALRSGLKAQVHAVMAKEGVLPGVLDMFGPGGNIQLDALELAPAYTNRIESLRDLIERYDREVAMFERLIHRQLRDHTGYQAIQALTGVGRTIAGIFVAEIGDVNRFRSAAALCSWAGLTPRHRESDTKPVRGRITKMGSRLVRGAALEAVARYHGGTRLQRDFRRIADRRGKNKARVAVARKLLTLVYYGLRDGEIRCVADQQAA

SEQ ID NO: 189759 - protein, 344 aa, unidentified
MDHFAGLDVSVKDTSVCIVDGAGKITREVKVASEPAALLAVLTNGAYRFKRIGLEAGPLSQWLFSPLAEADLPVICVETRHMRAVLKAQINKTDRNDARGIAQMMRVGLYRPVHVKTLRSQKLRMLLTHRKLLQSKAISVENDLRATLRNFGLKVGVVGTVKFEARIKELVANLPDLAVLVEPLLVVRRALREQIGVLHCRLLAIVRDDEVCRRLMTVPGVGPVVALTYRATVDMPARFRKSKSVGAVFGLTCSRDQSGERDRPGAISRCGDEMMRAMLYEAAQSMLRSKKWSWLKAWAMKIARHRGMKRAIVALARRLAVILHRIWVDGTEFRWTRETAAATH

SEQ ID NO: 189760 - protein, 338 aa, unidentified
MASLTLFVGLDYHQCSVQVCAMDASGKVLVNRRCPNCRQTIAAVVRRFGERIHAAIEACSGAAELADELVQQEGWSVDLAHPGYVARLKRSPDKTDFGDAQLLADLERVGYLPRVWLAPEPLRELRRLVRYRQQLAQQRRNVKLRIRALLRDLRLVVPAGRSPWTRSWFTWLQSTDVFAEQTRWIMDRHLAELKRLNSEVRDVEARLALVIKDDGMVQTLMQTPGIGLITAVTLRAEIGRFDRFRSGKQLARFCGLSPRNASSGQRQADAGLIKAGNPQLRAVLMEAAHRLMRYEDRWVRLGHSLKSQGKANSLVVVAVANRWIRWLYHQMPSLDLAA

SEQ ID NO: 189761 - protein, 352 aa, unidentified
MNKRLPLRGRHKKYYGIEDIRFEQIVKVGCGIDVHQNLIVASIRKSDTEVETREFTAYTSSLTSLRDWCKQESVTHIAMESTGVYWKPVFNILEEDFEILLVNARHVKNVPGHKTDRKDSRWLSKLLLRGLLKGSFIPPRDIRDLRDLVRYRKKVIAQAASDKNRIIKILEDGNIKLSSVLSNVDGSVGTKIVDKMTEGVTDVDELMQFYHGKITVSREEFRLALEGCLTAHHRLMLQIYKDSISDKERQIKRLDAEIDKAAKDYQVEIDLLQTISGVGKDSAIAIISETGVDMDRFPNEEHLSSWSGMSPGNNESGGKKNGKNSQSQCTSSKRISRMCMGRHPKERRFFET

SEQ ID NO: 189762 - protein, 339 aa, unidentified
MFYTGIDQHRRSSVLTTFAEDGQVLGHATLPNEPLRLRRSFAQFPGPHRAVVEATGRWYWLRDLLRRDGIDLRLAHAKFLKAIAYAKVKTDAVDAGTLGQLLRTGFIPEAHMISEALRGPRDLLRTRLRLVERGTSCRNSVDRLLEKFNVATVDQLPPLYQAQAAVHAAQIALLRDQIRQLERLVRPALLDCPEIQRLLWIPGIGPLTAGTIYLEVDGITRFPTVQHFWFYCRLVPGAANSAQRMRHRSGNQDGNRYLKLAVSHATIRAIQYFPEIRAWYQRWKRKKPRNVARALVAKELAKSVYLVLHEQVDFNQQFKGTPLTRQKQARWPRRASPSA

SEQ ID NO: 189763 - protein, 299 aa, unidentified
MQPMYYIGLDVHKRTIRYCVKDGSGAIQGEGTLPATRAELDRWMKTLPQPWTAAMEATVFTGWIYDHLKPHAATLKVAHPLMLRAIAASKKKNDRIEAKKICDCLRCDFLPECYMASTAIRERRRTLRYRNLLVRQMVQIKNKTSTLLMEAGVSYNKQRLHKTGYFRELMATNPDINDGLRSLLRLCRETVVRLSKTESALVRSLERDPQLLERVERLMTIPAVGPITALTWALEVGEAMRFSSIKKAISYCGLCGAQKSSGNTTVRTPLSKQRNRHLQTTLIEAAKMAPRYSPTLALL

SEQ ID NO: 189764 - protein, 340 aa, unidentified
MGDITTIGLDLAKSVFQVHAIDEAGKVMLRKRLRRSQVLAFFARVPPCLVGLEACATAHHWARELIALGHEARLMPPSYVKAYVKRNKHDVADAEAICEAVRRPSMRFVPVKMADQQSALMMHRARDLLIRQRTMLVNALRGHLAEFGLIEGQGLHKVTRLIAIVMDETDGRVPDIARQVLKVIVNQIEDTQTRIAGLETQVIAWHKSNPVSQRLATIPGIGPIIATAIAATVADPNIFRSGREFAAWLGLVPRQNSTGGKARLGGISKRGDSYLRRLLVNSAHTVLLCSKQARNDPWLTSLLSRKPRLVAAVALANKTARVAWAVMSRQDTYRHAAVAA

SEQ ID NO: 189765 - protein, 357 aa, unidentified
MKIVGCDLHAKQQSIAMVDTETGEFIEKKLLHEGNSVREFYAALEGPVVVGIEATGAMQWFLELLEELGIECRVGHPAKIRAAETRKQKHDRRDARLELELLVGDRFPTIWMPSTEQRDLRALLRDRHHWVKIRTRVQNTLQAIALNHALRRGRGLWSQAGQRALRALPLPPYTSERRDELLRLHAQLQKRIQELDRQVEEQARQRSQALRLLTHPGVGPLTALATEVFLGDAQRFANGKAVASYIGMIPCEHSSGKRQRLGKLSKEGNSLLRYLWTEATIHAVRKDPELKRFYRRKLIQKGMGKARIAAAHKLGIRLWIMLRDQIDYKEFCRRGQQRQCGEAHAGMPNYNSGPALQ

SEQ ID NO: 189766 - protein, 469 aa, unidentified
MAAEKKLWNRKERKELARRLQSADPGLEIVHPHAAGIDVGNQAHYVAVRPDRDPEPVRRFGCFTADLYRLADWLKNCGVKTVAMQSTGVYWIPLYDILEERGFEVYLVNARHTKNLPGRKSDVQESQWLLKLHTYGLLNNSFQPSSEIRTLRTYWRQRAEHVAGAATCIQRMQKALTQMNLQLANVISDLSGLTGQRIVRAIIAGERDAQRLAGFRDPRVKASQEEIAKSLEGNWRPELIFLLQQEMAMYDTYQQRIAECDQQLQKHLTSFADHAHQVRSQSAQSKAEGKKAKKPAAKNAPRFDLSSELERITGVDLTRIDGIDVMGSQTVLSEIGLDMGRWKTEAHFASWLGLCPDNRTSGDKVLRRGTRHVVNRAALALRMAANSLLRSQSYLGAQYRRLRTKLGAPKAITAMAHRLARLVYRMLKYGQQFVDKGMEYYEQRYRNQQVQLLQKKAAKLGLQLVPAQT

SEQ ID NO: 189767 - protein, 330 aa, unidentified
MKEYKQIYGVDVSKKSVDIVYTDRQVTVHQKFTNDLAGMEQLMAWLAQNQASPDDTLFCMETTGLYCFTLTHFLCSRSIDVWVEHSTTIKKATALARGKNDKVDALRIALYATKNLDRLRLWKPMNATLEKIKHLATLRERLVDTVKRLTVPIQEFEQMGNLAMSKLLTKSIKKTLAAIDNDLVKVESHIMEIVGQDENLKQLYKIITSVVGIGFVTAINLMVHTHGFTAMNDARKLACYCGVAPFEYSSGTSIRGKTRVHPMANKKLKCNLHMASITAVRYDAGLKQYYERKVAEGKNKMSVLNAVKNKLLARVVSCVNNQKMYVKMVA

SEQ ID NO: 189768 - protein, 376 aa, unidentified
MKGRPPIPEWYLWVSQPGKAPEGSSPMSNHMFAGADVHAATTTYAVLNDSGRSVMEGVVETTTECLLSMVKSIPGAVHLTFEEGTHASWLYGLLRPHVLELVVCNPRKNASSKENKSDRIDAEKLARLLRSGDLSPVYHGHDETKVLKELVRGYEHVVIDSVRSKNRLKAIYRSQGETTSGTSVYKLEGREEWLSKLSSPGLRARAEWLYCQMESLDHLRDEAEKAVLREARKHRACRLVRSVPGIGPIRSATIVAHIATPFRFRTKRQLWAYCGLAVVTSSSSDWEIVGGQMVRTRKPVVTRGLNRNHNRSLKNVFKSAVHDAGVFRPHFEYLVESGIRESMARLTVARKIAATTLAIWKKGEEFDLSKAEIKSV

SEQ ID NO: 189769 - protein, 408 aa, unidentified
MLFVGDDWAEAHHDVEIQDETGRALARRRLPEGIGGIATLHALLAEHLPGDAEPDQVVVGIETDRGPWVQALLAAGYQVYAINPLSASRYRERHVTSRAKSDPRDAKVLADLVRTDRRHHRPIAGDSELAEAVKALARTHQNLIWTRQRQTNALRSTLREFYRPALVAFDDLASRDALAVLAKAPTPTAGAALRVTQVEAVLRAAGRQRNLHTRAEEISAALRTEQLSAPPLVAAAFGAAVAALVAVTAELVRQTAAVEAKLAAAFEQHPSAEILRSLPGLGPVLGARVLAEFGDDPHRYADAKARKNYAGTAPITRASGKSRVVLARVARNRRLADALYQWAFSALSSSPGARAYYDAHRARGATHHAALRALGNRLVGILHGCLRRHQPYDEARGWQQHAAVPRAA

SEQ ID NO: 189770 - protein, 343 aa, unidentified
MAKASIIGVDLAKHVFQIHGAGADGSVAFRKKISRLKFLPFLASQPRCVVAMEACAGAHSWARDILAQGHEVRLIAPVYVKPFVKRQKNDMADAEAITEAAARPTMRFVAVKSAEKQASGMVFKTRDLLVRQRAQTINALRGHLTEHGIIAPQGVFHVGRLAAEVENVNSRLPSIVTELCKLLLRHIAILNEQIATLDRRIRDRAREDERARRLMTIPGVGPICATALEALAPPSETFAKGRDFAAWLGLTPRQNSSGGKARLGRISRMGQRDLRRLLIVGAMAVVRSAARRGAPAGSWLARMMARKPRMLVAIALANKIARVAWALMTKGGVYQISAAAALA

SEQ ID NO: 189771 - protein, 286 aa, unidentified
MTQYVGLDVSLKETKLHVLDEAGSRVWRGRCATEPAAIAAAVRRYAPAAVRIGLETGPLTTWLWTALTAEGLPMVCLDARHAKKALDMKVNKTDANDAEGLAHLVRAGWYREVRVKGRSAMLAKALLGARGQLLNMSLSLENQIRGMLKTFGRIVPKGAGGLFEKNVRAVIADDAEIAAVIMPLLQARGMARSKCAALDRRIIRSVQGDASCRMLMTMPGIGPITAVAYVAALERPDTFKRSRAVGAWLGLTPRRFQSGEVDYDGHISRRGDRQLRALLYEAAAVL

SEQ ID NO: 189772 - protein, 346 aa, unidentified
MLYAGLDLSRKRLDFHLLDREGATVEVGACPPDADGLRGLTERVDRHGAPIRAAIESMNGARFVHDQLELAGWQVEIADAQKVKGLAPLACKTDRIDAWVLAQLARRDLVPAIWLPDPQVRAERERARWRLHLVRHRSSLKQRVHAVLLTHGTPCPVSDLFGLRGRQLLARLGLPEPWQATIEASLRLIDDLDREIGDCERELRRLGADHRYVPLLCTVPGISWVLAYTIAAELGDINRFPTPRKLAGYTGLCPRVYQSGDRDLRGPLAKQGPRYLRWALVEAATHACTHPAYRDRYQQTKARIGKQRGAKVAQIDLARRLSEAIWHMLSRNQAFAPKGATDPLAA

SEQ ID NO: 189773 - protein, 471 aa, unidentified
MVCFNPSTKLTRVRPAELIVARWKQLSTRRKFVSYFAPLVDLSEDEERLLREVGTGMQVVHERCCGLDVHKKTVVACILITLANGEVQRHIRTFSTMTAGLLALSDWLESLTVTVIAMESTGIYWRPVFNLLEDGRTVILVNAQHMKAIPGRKTDIKDSEWLADLLRHGLLKASFIPPAPIRELRDLTRYRKSLVQERAREVNRVHKVLETANVKLSSVATDVLGKSGRDMLSALIEGTTDAQILADLARGKLRKQLPQLQQALDGRVQAHHRLLLKHLLAHIIFLEETLEQLQQEIEQHLGPLEEAMTLLMSIPGIAALAAAAILAEIGDDMTRFPSAKHLASWAGVCPGNKQSGGKRLSGKTTQGNATLRAMLAEVVWVLSHMKDNYLSAQYHRLARRLGKKKAVVAVSHSLLVIIYHVLSTKQPYSDLGADYFEQRDSARLTQRSVRQLEALGYTVTLVPKEAAQRIG

SEQ ID NO: 189774 - protein, 334 aa, unidentified
MRQVSQVGVDVDSEKLVCMMQRVGQRMPLTTFANTAAGHKKFIRWATKRARSVRVCLEATGIYSLQFALALHNAKNVEVMVVNPRAIKDFARACMQRAKTDAVDAGGILEYLERMPFTAWQPPAPEILQLQAINRRIVQLQTELTREKNRGHASEFAGASGDAVANDIEVNIRHLERRIERMHDSGLHLVHGVPALATKLAHLVSAKGIGEASAMRLLAEVLVLPVDLAAPQWVAHAGLDPRPYESGTSIHRPRRITKVGNRHLRAALYMPALVAIQHEPNVKAFYNKLVAAGKKPMQAVVAVMRKLLHAIWGMLKHDQDFDGNKFFRLAEKTA

SEQ ID NO: 189775 - protein, 343 aa, unidentified
MSEVSIIGLDLAKNIFQAHGADKDGKAVFRKRLRRDEVLAFFARQPLCLVVMEACGGSHYWARQIKELGHEVKLIAPAFVKPFVKRNKTDAVDAEAICEAAVRPNMRFVAIKNEQAQAEITLLRTRQLLERQRTQAINSLRGLMAEQGFIVAQGRWHIDRLIDMIDDETSALREEARIGLRALAATIASLTEHLDKLDGQIKASVKQNKTAKRLMTIPGVGPMIAAAIMALAPDPSTFRRGRDFGAWLGLTPAENSSGGKQRLGAISKRGDKTLRRLLLLGATAVVRQALIKPPAPTSWLGKMLAKKPRMLVITALANKIARVIWALMAKGGEYCERAEAKAA

SEQ ID NO: 189776 - protein, 315 aa, unidentified
MSESQGPYVGIDVSKASLEVAVRPAGDSWSAANTPQGIARLIQRLAQVCPGLVVVESTGGLERPLLAELCFAHLPVALVNPGRVRDFAKSTGTLAKTDKLDAGVLAHFAEAVKPAVVVLPSEQEQLLSALMTRRRQLVEMLTAEKNHLLSTPGAIRNWVERNIASLEQQLAELNREIDDFIKHDPAFRDKEQILRSAPGVGPITAAILLSDLPELGKLDRKKIAALVGVAPFNRDSGPRSGKRQVKGGRAAVRTVLYMATVCAVRFNPALKAFYSRLLQNGKLKKVALVACMRKLLTFLNAMVRDSRAWTSGSIT

SEQ ID NO: 189777 - protein, 352 aa, unidentified
MMIIGCDFHPRFQQISFLLEETGECGQRRLRHTAEAEQYYRTLRGARVRVGIEATGSYGWFRRLLSELGHELLVGDATQIRASNPRRQKTDKRDAEHILGLLVADRFPAVWQPPAENEQLRQLLLHRSRLVRLRTRVTNQLDGMAKNEGLLAAGGWSGKRRKAIEALPLPGWHGERRKDLLGLLDRLEERIAPLNKAVSQAAANNAEACLLMTHPGVGPVVSLAYVLTIGNWQRFARGKQVGSYLGLIPSEDSSSDKRRLGHISKQGNTLLRWLLVEAASTAQRYDPSWHRQYLRLSMSKHHGVAKVAIAHKLAVRLYWMLRSGEDYQHVRERGSHARQSECPVGRSRRPIE

SEQ ID NO: 189778 - protein, 347 aa, unidentified
MNFYNNMHPYYCGIDLHARSLYVCILDQDGNTCNHKEVPADPDKLRKLLEPYIGNIVVGVECMHCWYWVADFCDHLSIDFILGHALYMKAIHGGKAKNDRIDSFKIANLIRGGNFPLAYVYPKRMRATRDLLRRRMKIVRHGADLKAHVVNTTSQYNLPPNKVNLKNIIAREQLRSAFSDLSVQKNIDLDISILDCYAEQLSKVEWYIQQQAKQHNPIHFHLLKSVWGIGPILALTIIYEIGNINRFDSVQKFASYSRLVKCKAESAGKSYGTQGNKIGNAHLKWAFSEAAVLYLRGNKKAQNYLLKLQKRMSKAKALSALAHKIGRCVYFMLKNETVFDESKFLKG

SEQ ID NO: 189779 - protein, 372 aa, unidentified
MQTYYVGLDVHSRESVFVVENDTGAIGARGSVPTTVNGLKHLRDSCGLPAATGVALETGTSAFFVARELARLELKPVVIDAHEVRRKAQRPEQKSDTRDALELCEGLRRGFYRSLVHVPSPAISDLRTTLSRRRHFIRIQTAEVNAVKRLLRGVGRNSGRRGSLRTDTHWQSLLAGDLVPEQLQEHVRHPYAVWRQAAERVRALGLSLGDNARERRDAVKRLETVPGVGPIVALTAIAVFAEVSRFESAKHAASYAGLVPSTFQSGERDAHGHITKRGSAELRAMLCEAAHHARRSAHPLHPHFAKVCARRGYKTAVIAVAHRLCRILFAMLRDGTDFSVTRVGVEQGDFERTTTYRYRLRPKPASRLPATG

SEQ ID NO: 189780 - protein, 347 aa, unidentified
MNITRIGLDLAKNVLQVHGVDERGKALLRKRLKRGEVVAFFARLSPCLIGMEACGSAHHWARELAALGHTVRLMAPQFVKPYVKANKSDARDAEAICEAVGRPSMRFVPVKTLEQQSVLSLHRARQGFVAARTAQANQIRGLLSEFGIVIAKGIRQIEGRVPEILEEAENGLCGMNRALFQRLFEHFRQLDRQVKQLEEQIHAWHREQVDSRRLAGIPGIGPLTASALTAAIGNAREFAHARQLAAWLGLVPRQASSGGKDRLLGISKRGDVYLRTLLIHGARSVLRRTRACPDPAQGWLAQLVHRRNPNVAAVALANKNARIVWALLAHGREYQPGYVGARLPTAA

SEQ ID NO: 189781 - protein, 336 aa, unidentified
MTLYAAIDLHSNNNYLCVIDGKDKRLLEAKFDNDASLVIQALKPYKRRLMAVAIESTFNWYWLADALMEAGFEVRLVNTAKVIQYEGLKRTDDRYDAFFLAHLMRLGILPTGYIYPLEQRGLRDLLRRRMRLVQDRGRYINSLNTQYQRQTGQSLSCNTINTKLFRLPIVGDSNVQLAMKVNLNMFKALKVQIKLLEKSIMSQVKDCKEFNLLKTTNGIGDILAETILLETGDISRFSSPGNYASYCRCVDSCKSSNGKKKGMGNRKNGNKYLAWAFIEAANFAIRYNLKAKKFYERKKLKTNNLIALKALAHKLSRACYYIMKQGVPFDENKIFS

SEQ ID NO: 189782 - protein, 349 aa, unidentified
MKTYCGIDLHKKYSYLTLVDDKGNILKQGKIETSKEAAEKFFASLEEKPACVIEPVSQWYWYSQVLEDIGCSVKLAHPMKVKAIASARIKTDKIDSSVLAHLLRSNLLPEDYLCPPNYRDFKELVRFRASLSHLRTRVKNKIHAILHKNGLKHQFTDLFGKAGRKWLRGLGLNKTFDTALQSYLFLIDSLSAEIKKCEEVIAKTVSNHESAKILTSIKGISFYSALTIVSEIGEIDRFPDAKRLMSYAGVVPSVYSSAGKTRTGRITKQGSKWLRWTMVEVAHRQARYRNTYFGRYYKKIQSKKGSGTAAVAAARKLLAVIYRMLKDGKPFDEQRLMSESGTRRKTIAF

SEQ ID NO: 189783 - protein, 385 aa, unidentified
MEVLLPRCAGLDVHKETIVACVLIGEADQTLRSETKTFPTMTRDLFALMTWLESEGVTHIAMESTGIYWKPVYNILEGYFDIALANAQRIKNVPGRKTDVSDAEWIAKLLRVGLIEKSFVPAEDLRELRDLTRLRKKRVGNLTAEKNRIQKMLEASNVKLGTVISDVFGVSGRNLLARLMEQGYVDADDIEHRVHGNVKRNVKRVAESLFGTLNTHQMLMIRNCWEHIAFLEQSIAALDAEIEAHLKPYQEAQVLIQTIPGVSDVTAAAIIAEIGVDMEQFPTAAHLASWAGVAPGNHESAGKKKRTHTRKGNPHVKTALCEAAWAATKCRKSGLSVRFWKLAARRGKKKAIIALARKILTIIYMMLKTKIAYVEGGPESARPVA

SEQ ID NO: 189784 - protein, 403 aa, unidentified
MAKVIIGVDPHKLSATIEVVDHHEKLLGSGRFATDQAGYTAMRTYVKSWPDRVWAVEGSNGAGRSLAQRLLEAGEQVVDVPAKLAARVRLFDTGHNRKTDARDAHSIAIVAVRTTTLRVLRRDGELEALRMLCDRREELTRLRVQTVNRLHRLLAELVPGTAKKDLTALQAKAILASVRPRDIAGKTRRRIAADELADLVAVEAKMKKATAELKVMVKARGSRLMDLPGVGPVVAARTLADVGDVARFADRNRFASWTGTAPLDASSGEQNRHRLSRAGNRRMNHMIHIAAISQIRLDTPGRAYYRRKLAAGKTPLEALRCLKRRISDAFYRQLLADAQETHAAPVETDPGGHCGATLQSSAADLHPHIDTSDQPLPGPANTTLQPLQRPRKTAGPRTPQTTG

SEQ ID NO: 189785 - protein, 325 aa, unidentified
MEKLYGGIDIHKENLAGCIMDKNGNITREHTFPSSKKAVERFLCGIPSSGITIAIEACGMWRGVHKVLTEIGYEVKLANPKKTHDIAGSKKMDKIDAKTLADLIRTHYLPEVWIPDEQTLQFRDLTRHKSNLTRLKTQVQGKIRGYLLRKGAKYSKLSTEKTLSTLAEEDPDIKNLVQVYHCIKEEEREVMRRIKRISQNMKETTMLMSMPGIAEFSSLMILAEIGDIKRFPNPKELVSYAGLCCGIYQTGTTERPVHNTAVNKWLKWIIYECSGRALMLDPRFQNYYYKIKEKKGFKTARRATARKMLTIIWYMLNNEEPYHAS

SEQ ID NO: 189786 - protein, 369 aa, unidentified
MKKIIKYIGLDVHKNSIAIAIAEDGQKRDVSFYGVVNNKMDQLLKFLRKQISKGAELRCVYEAGPCGYNIYRGLSDKGIDCVVVAPSLIPRKSGDRIKTDRRDAESLARLHRAGELTAVYVPLIEDEALRDLVRAREDSVNALKRAKQQLGAFLLRHHICYSGKSKWSKAYFNWLSDISMLHPAQQITLQEYIDTVHNCKQRVERFSGQVRKLSGETRLNGLNKALQSLRGVSEIVSAVVVSELGDLTRFESPANLMAYLGLVPSQYNSGDKRKSGKITKTGNGHARRALIEASQAYRLPARKSRAIAKRNEGLPREIREIAWKAQIRLCDRYKRLVFRGKNSNLVKTAIARELVGFMWSIARDHPSLF

SEQ ID NO: 189787 - protein, 389 aa, unidentified
MQFVGIDIASETHVFAILGADGTVLVKPKPIAEDATGHGALLAALAPPGEALVVMEATGHYWKNLFAVLAAKGYEVALINPLRTHRFQGESLERTKTDAIDALGLARFGREKRPTATRLGSQAGEDLRELVRHRDRLRRDFDDRVRQLHRLVDLGFPEFRRYVRTLDSMLATTILAEYPTAEAVAKVTPRRLAKLRYDGRHAVGSELADQLIAAAKRSVGQHHGPAYRVQVRDICQDLDLWRRRLAERDDDIARLLDEHEVGTLLTSIDGIGPGTAARLIAELGDPARFDSPAALAAYVGVIPALRQSGKRRPTRAGITSIGNARLRTALWMPTLTAVRRNPWLKAFYDRLRAQGKPPKLALVAAMRKLLVAVYAVAKARKPFEQKLAA

SEQ ID NO: 189788 - protein, 323 aa, unidentified
MNKDNEIFGVDISKDVFDVYGSKRGHNQFKNAASGFMSFLKNLPKESLVVMEATGYYHYSLAQFLFKQGVLVSVVNPLSVKRFIQMKLAKVKTDKSDAKSICEYGQINQGPLYNALSDVQSECLQLFRLLDSYLKKRTMTKNKLHGEDVLGIPSKHVYRSLKRNRKHLDTEIESIETKLLSLVKQDQQAQLTLLKSIPGLGVKTALYLIVITDGFTKFETADQLCSYVGITPTIRQSGSSVRGRSRISKVGNKKLRNLLFLCSFSACKHNKSCREIYERIVNKGKSKKLALIAVANKLLKQAFAIAKSGNPYDETFVSVLMAK

SEQ ID NO: 189789 - protein, 343 aa, unidentified
MDHFAGLDVSVKETSVCIVDDTGRIVREVKVASEPEALLAVLTNPACHFTRIGLEAGPLSQWLFSALAEAGLPVICVETRHMRAVLKAQINKTDRNDARGIAQMMRVGLYRPVHVKTLRSQKQRMLLTHRKLMQSKAIAIENDLRATLRNFGLKVGVVGTVKFEARIKELVENLPDLAVLVEPLLIVRRVLREQIGILHRRLLAIVRDDDVCRRLMTVPGVGPVVALTYRATVDVPSRFRNSKAVGAAFGLTPSKHQSGESNRTGGISRCGDEMMRMMLYEAAHIMLVRSAKWSWLKAWAMKIARQRGLKKAIVALARRLAVIMHRIWVDGTEFRWTREVAAA

SEQ ID NO: 189790 - protein, 338 aa, unidentified
MSVLVVGVDVSQAHLDVAVGTSPEHVEYLDRFPNDTSGWETLAQAVQRYQQQWKTDQVHLVMEPTGGYEQPLARFALKQGWRVSLPNPRQVRDWARGMGRRAKTDRTDAQILAAYGAATQPPPWRPLPEEVAQLEALLNRRDDLKEMLRQERNRCHALQVQGGGYAPVTANLEGHIAYLEQALAEVEELIRQHLEQHPHLKQEAAHLQQVPGIGPRNVLFILVLFYRWGVLTNFQGHHKGLTAYVGLDPVPHTSGKSVWRPSRISRAGNRRIRRYLFLGALGGVRGDNPLRTFYLRLVNRGRPKKVALVAAARKILVWAWAIFRDGTSFDPARASCRT

SEQ ID NO: 189791 - protein, 304 aa, unidentified
MNGIGIDVSKRQLDIGTTDGETLQVSNNRSGFSELDVWLKKRPTRQIVLEATGGYEQPVLDFLHKAGHPVARANALRARKLAQGLGQTAKTDRLDAYALAQMAALVKLPPYQPLQSWQQKMREFVRARRQAMDALTIARQQQEMVLDRELRRLLQGNITRLQTLVERLGKQIVEQVGQQPQLKMLKSMKGVGPVLQAVLASYLPELGRITGKRIASLVGVAPMSHDSGTMRGKRSIHGGRAEIRQVLYMAAMSAMRHEPRLRDFYQSLRARGKEGKVAIVAVMRKMLVILNARVRDAESGLVPA

SEQ ID NO: 189792 - protein, 461 aa, unidentified
MKKPKRRATGRVDQGSKLSVIQSDVAGIDIGSREMFVCGPADEEGRREVRVFATTTQQIQQCVRWLKQQKVRSVAMESTGVYWIPVLEVMESSALEVLLVDTRPLSRVPGRKTDVEDCQWLQTLHSHGLLRGAYRPSEQISELRTIVRQKAVLVRQQADWIRRIHKCLDQMNVRVHHAVKDTQGVTGMAMLRAIVGGERDPRNLAKLRDPGCQKSETEMIELLTGNWRSDHLFNLKQHMAMYDSAARQIAVYEEEIQRRMQEVTPAGRKDIQAPPLANIEKRKTMKKRDQEGKRQALYRMMGVDLTTIDGIGVETVEVIMSEYGTEMSKFPTEGEFVKHVGLAPHRPVSGGKVLKNKRKKQKGTRTAEVLRNAATSLKHSRSALGAYYRRMARRKDSGVAVFATARKLGGLIYRMLRYGQQYVDVGQAVYEKQYEEKRIRALRNTVNQMGYNLVKQEAVSA

SEQ ID NO: 189793 - protein, 366 aa, unidentified
MTSVASAAERIYLGMDVSRDKIAVAVLRPGEDVPAVEVISHDGEMVRRLIGKFADRSVLAACYEAGPGGYELCRQLAAAGVACDVVAPALIPKAAADRVKTDRRDCVRLALSHRAGLLTAIRVPSEQEEAVRDLVRTRADLVDDRKRMMQRISALLQRHGRVWRAPRWTCEHRAWLGRQSFTEPALQAALRTYLAALDARDAELAVLESQLRGCWASVDPLAPMVRQLGCYRGIAELTALTLAAEVADFRRFASAPAFMGFTGLTPSEYSSGARTRRGAITKAGPQLIRGALIEAAWAYRHRPAIGATLRRRQAGCAAETLARSWKAQQRLHATYAKLTRRGKIPQVAVTAVARELAGFAWAEMTS

SEQ ID NO: 189794 - protein, 372 aa, unidentified
MNYNTVYVGMDVHKESFTLCSCKYEDEKASHYQRTPASYKNVLRYLAFLRTIYGEDTRFVCGYEAGCLGYSLYHQLENFNVECVILAPTTMLEQRSKRRIKTDKRDAEIIARSLAQHNYSPVHIPTETDNQTKEFIRMRDDHKAELKKIKQQILSFCLRQGYQYDGSGNWTAKHVKWLRSLKPAGLYKEILDEYLLTYTTLTDKLNRLDHRIEELASKEEYKESVSKLTCFLGIRTHTALSVIVEVGDFQRFASARKFAGYLGLVPGQHSSGDDRNGLGITKAGNTHVRRLLTESAQSYTRGKIGYKSRVLRLRQAGNSPQVINYADRANERLRRRYYKMVLKDGKKYNIAKTAVARELACFIWGMMTDNIY

SEQ ID NO: 189795 - protein, 430 aa, unidentified
MTKRTFTPADAVLVAIDMSKHRQEVLIERPEGGRRRRMTVMATKADYDRLATDLGDIGRPIIVGFEATGNYHRTLAHRLLAAGFELRLISSVALARTREALHNGWDKNDSKDAQVILHMLRIGATQRYVDPLAAGINDLQEMSKTHEAISKAKTQTWHRLLTHYLPLYFPEIERFAGNSRSDWFLALLERFPTPASMTALGQEAFTREAWDLVGRKVSKARLLNDIYAAASASIALPVEEDSISIAMFRMVIAQARSLIRQRDEIERTAHAMLAENRDYQLLRMIPGIGPINALTILAEAGDLRRFGHHRQFLKFCGLDLATCQSGTFRGRTKLSKYGNARLRRTFWMATQVAIRQRDNSFRDKLGRYVAGHSNDPDRRRKAMTALTAKMARVAHAVIKTGTEYRPFVERADTRWKDPSLWSREGASATL

SEQ ID NO: 189796 - protein, 313 aa, unidentified
MRMSVGVDLHKGQFTAHWRSEDGIGGGTRRYATSDGGYRAFEKQLCAARDAGAELKVAVESTGNTRYFKNRLESVGIPVTVVNSMKFKVVTESVNKSDKRDAATLAQFLEKDMLPEARLCSQESEELRRLLKVRANLVKTIVSVKNQVHGLLLSMGIESKRAQLQSAKERRRVKCELAAHNVAGATVDPLFETIERLSAEVKKIEKILQEKTAKDEVVQRIRTIPGAGLITATTIRAFTDDISRFATPAKYASYAGLAPWVQNSNETVRHGRITKRGPSELRTAMVQVLLGMVGILSSLVDGHPFRPGHFVTR

SEQ ID NO: 189797 - protein, 468 aa, unidentified
MSKLSAPIPETTLIVDTQSFADIRRIQPHAAGMDIGAHEIWVCVPGEGETQIVRLFGTYTADIHAIGAWLQEHHIRTVAMESTGVYWIPIFEHLEQLNFQCCLISSRSIKRVPGRKTDVEDCQWIQTLHSYGLLESSFRPETDMVALRTLLRHRAELIQHRSPHIQHMQKALLQMNIQLSQALSDVTGQTGQHIIRAIVAGERDPFKLAALRNYRCKKDESEIAKALTGTWRDEHIFVLQQALELFDFYTRQIEACDAEIERTYSIIRPDWPGDMPDDLPKKRNDSHSKNTPKNAGDLRRHLFRISGVDLASVDGISVSIAQTILSEIGTDMSKWPTVKHFCSWLGLAPKNDITGGKVIRSRTGKTKNRAGQAFRLAASSVTRADCAFGAFYRRKKSQIGPAQAIVATAHMIARTVYFMLKKQVQYIHTSSEAFNKRFQEQQIRFLHRKATKLGFRLIPIAPSSLAVS

SEQ ID NO: 189798 - protein, 403 aa, unidentified
MNNVAGIDVSKGKSMVSVLRPFGEVVAKPFSIGHTGSELKELVDYLKSLDGETRVVMEHTGRYYEPVARFLHEEGIFVSAVNPKLIKDYGNNTLRKVKTDKADARKIARYGLDNWAELRQHTPMDTIRMQLKTLNRQQSLYAKTKTMMKNNLIALLDQTYPGVNALFDSPVREDGSQKWVDFATAFWHVDCVRNMSLTAFAERYRKWCKRHGYNFSQSKAVEVHTGAQDLIAMLPKDALTKTMVRQAIDALNAISASMERLKAEMQALAAQLPEYPVVMAMHGVGDSLGPQLMAELGDVTRFTHRNAITAFAGVDPGADQSGTHEAKSTRVSKSGAPELRRALFLVMDCLLKTQPQDDPVYRFMDKKRAEGKPYLVYMTAGANKFLRIYYGRVKEYLASLEEN

SEQ ID NO: 189799 - protein, 355 aa, unidentified
MENQKVSFEGQCLYVGIDVHKKQWSISIFSNELHHKTFSQAPSPASLKSYLDLHFPHAKISCAYEASKFGFWIQRELSTYGYKCLVVNPADIPTSNKEASGKTDPIDSRKIGKTLRSGLLTSIHVPAVHTEGNRQLFRYRKKLWGDLVKVKNRIKDKLLFAGINIPTELDGSNWTKAFLKWLKELEIQAASTRLTLDLLLDQYHYLYKHFLKVSTQVRSLQRLPRYKNNAKLLRAIPGIGPLTTVQLLCEIEDINRFPSFKKLNSFVGFKPSSHSSGEHDWRGSMTYRQHKELRSSLVECAWTTIGVDPVMMQRYEELKKRITAKRAIIIIARKLLSRIYYVLKNQKPYELGVIK

SEQ ID NO: 189800 - protein, 355 aa, unidentified
MDRYIGMDTHSQTCTLRALTPSGKEVTRQVVETNGAALVQAIRSIPGTKHVCIEEGTQSAWIYELLKNEVDELVVTMPARRAGQKDDARDALGLAEGLRTGAIRQRVYKACGPYSELRAAVRSYVLLREDVSRAKNRLKALYRSRGIATPGDEVYRPDRHLQWERLLPPPQQHSAAVLFSQVESLMDLWTTAAERLMTASKPHAMVKTLATAPAIGPIRAAQIVATVVTPHRFRTSRQFWAYCGLAIAMRSSSDWVRDRQGQWARSKKFQTLGLNRNRQPALKAVFKGAAHQVAVQMTSHPLHADYQRLLDAGTKPNLAQLTIARRLAAAVLAMWKKEEVYDPDKHRSHIINAPA

SEQ ID NO: 189801 - protein, 361 aa, unidentified
MQSTTIIAFDQHAATTVAAVLLPNHRTPVLHTLTSDTATILRFVERVQRQGPVVCCYEAGPCGFELQRGLSAHEIPCDVIAPALIPRRAGDRIKTDRRDAGQLAVLYRAGALTAIHVPTEQEEAARDLLRCREDIKTDLLRARHRLSKFLLRHGRRFTATKTAWGTRHQTWLRGQTWPIPALDQTHAAYLRAVDEAVERLRAVELDLRTLLDLEPLRPRVQRLRCFRGIDDLTALTIAAELGDARRFGSAPRAMAFVGLVPSEHSSGTKRARGAITKTGNAHLRRVLVEAAWHARHRPFVGRVLRRRQQGAPATVIAQAWTAQQRLYRRYHRLAARGKPSQHIITAVARELTGFVWAALIQ

SEQ ID NO: 189802 - protein, 338 aa, unidentified
MTLYGGIDLHSNNNVVALTDETDRIVYRKRLANDTQTVLEALEPYREAITGLVVESTYNWYWLVDALMAAGYQLHLANTAAIVQYSGLKYSDDDTDAAWLAKLLRLGLLPEGFIYPKAQRAVRDLLRRRSSLVQQRTANVLAVQNLFSRNRGRSISANDIRRLTPERVAELVADVNLALAIQSTLLAMQGQQAAIDLLEREAWRQTKTTQVWQPLLTVSGIGRILGLTIVLETGPIERFAHVGNYASYCRCVGSQHLSNGKQKGKGNTKNGNKYLAWAYVEAANFAVRYNPQIKRYYQRKRAKTKGVVAIKAVAHKLARACYHILRDGSDFDVNRAFA

SEQ ID NO: 189803 - protein, 455 aa, unidentified
MKHEPEEIPDAEHELVIERVAAVDVAKASGKVCVRVPGKAGRRVSRVWDVAATTAAVTELAEDLVELGVERVTVESTSDYWRIWYYLLEAAGLEVQLVNARDVKNVPGRAKTDKLDAVWLAKLTEKGLLRPSFVPPTEIRRLRDYTRLRADLTHDRSRQVQRLEKLLEDALVKLSTVATDIMGVSGRAMIEALIAGQRDAKVLAGLARGRMKTKRAALIEALSGRFDDHHAELARMLLDQIDALTAQIDTLTARIEQLLAAMPEAQPVDPRRDGPTSGHPVGVTADTLAECARLTTVERLDEIAGIGEHNAQVIIAEIGLDMSRFPTPAHLVSWAKLCPRTIQSGPVTRGGRTGKGNPYLKGVLGDAAAAAAKTNTFLGQRYRRIVKRRGKLKALVAVARSILVIVWNLLNDPTARFHDLGPDYHTNRIATERRMRNHIAQLTAMGYRVTLEPAA

SEQ ID NO: 189804 - protein, 397 aa, unidentified
MIAVGIDVSKGKSTVAILNGDGSIRAHPYEMNHSKAELEALIKYIKAVDDHPIILMEPTSHYHYPVLKAFRDAGLSPSLVNPYLLKKYGDAELRKAKTDKKDAMRIAHYALEKWYSLVPYSPMDQKYEDLRFLSSQYRQRISMVVKSKNQLINLLDESMPGITRILALKSRNPEKCMLLQFIKRFHSFDYINSIGKTRFMNSYTTLARKVGERNAAAKGLAIYELSKACITTRSNSDYMDIALDQCVDILSDSQRAADEIMLQMQNIAETIPEYKVLLSMNGVGDRLGPVILAEIGDIRRFHSGKALNAYAGNDAPPYQSGQFESRNRHISKRGNPALRKACFEVMQALKLTKPQDDPVYLFMMKKEQEGKPYNVAKMAGVNKFLRIYYARAMELYR

SEQ ID NO: 189805 - protein, 324 aa, unidentified
MEKKKVIGIDVSKKTLDIAILDAELCIQLQLSNTITAIRKFLKQFIRQSVIVAMENTGRYNWPLYESLKAFSYDVYVIPPLHLKKSLGMTRGKNDQIDALRIANYALKNHQDLIKWKAPSTLIETLKVLLAERMQRIKMRKQLLSNEHDYSILKGLDLKRTQKLNSSLVKQLNAQIKGIELEIQSLIKQDENLKKQYDLIQTVPGVGPILACSVLIKTQGFTILLDPRKLACYCGIVPFQFRSGSSIKRKDRISIFGDKPLKTLLHLASMRAIQLNGEIKNYYLRKTKEGKSKMSVLNAVRNKIIHRILAVIRNQRPYINLEMS

SEQ ID NO: 189806 - protein, 358 aa, unidentified
MSRCIPTDAQAIILGVDTHKDFHVAVALDGIGRRLGTLSIPTTPAGYEKLVEWANGFGPLEGVGIEGTGSFGAGLARSLRTEGAKVFEVDRPKRRDQYRSGKSDPIDAELAARAVLAGTATGRPKGADGKVEMIRTLRVTRRSAVKARAQAINQLKNLLVTAPEGLRSELRGLPTAKLVAKVSGFRPGANPSGVEAATKFAMRSVARRHQRLSEEISELDEQLDRLVAEAAPELVAIEGFGTDTAASLLIAAGDNPERLKNEAAFAHLCGVAPIPASSGKSVRHRLNRHGNRDANRALYVVAVCRMSRDERTRTYVAKRTAEGKTKKEIIRCLKRYIAREVYRVLASLSLTKPPMLAP

SEQ ID NO: 189807 - protein, 454 aa, unidentified
MGKRGEKRERRSAILEPDAAGIDIGAEEIYVAVPPDRDEEATRRFSSFTCDLYALAEWLERCRIRTVAMESTGVYWIPLFQILEERGFKVYLVNAHSLKIVPGRKSDVSDCEWIQYLHSVGLLRASFRPPEDICAVRTLWRHRSSLLQMAAEHTQHLQKSLSLMNLQIHHVLSDITGASGLAILDAILAGNRDPVCLAHLCNIRVKSPRETVAQALVGDYRPEHLFTLKQSLDGYRYYQKLIAELDEEIARFMHTLLNAVEHPSPMPKRTKRTAYQRMGNDPTFDLRSELYRIAGVDLTDIPGVSATAAQVILTEVGPDVSRFRHASAFASWLGLCPDKRVSGGKLLSTKTRKVKNRVAIVLRLGAKSLSRAKDYFGAFFRRMRARLGNAQAITATAHKLARIVYHLLRSKEPYSESIFHHCDEQAQQRAEMRLRKQAAQLGFQLLPISTNSAA

SEQ ID NO: 189808 - protein, 406 aa, unidentified
MMWYAGIDWADQHHDVAVIDEQGKQIAKQRVPHTVEGLADLIAFLKATGDVAQHPDHLACILETNKGLLITTLLEAGLLVYPVNPKTLEKWRKPSGAKTDAIDAFLLARKGRSDLDQLRRLEPDSSLVQELKQLTRDQDGLIQMQTRLVNQLTACLKAYYPVALDLFALLQQPTTLAFLQAFPTLEAARQASVAEIAALLRRSKHPQPETKAHWIVEQVQHPQLQADAITKRTKSRLLLAVVAQLASVVETIAAYDKEIARLFLTHPDAAMFANLPGAGKRIAPRLLAEWGDDRTRYQDASSVQALAGSSPVAFQSGKFAKAHRRYACNKVLRNTLHQFAWQSTRAEPWALAYYQRKRAEGKTHSVALRALANLWVRILYAAWLHHRSYDAQRFLAARAAHAPRAA

SEQ ID NO: 189809 - protein, 338 aa, unidentified
MVYGAIDLHMRYSQIRIVDEMGGVVRDQRVATSRERLVQAFEGWGPMRILVETGTESEWVAQTLEAAGHAVIVADPNYAPMYGERQRRVKTDRRDVAALAEANRRGWYRAAHRPAAAQRTTRQVLRARRQIVQMRSGAVALIRALVKQEGYRLPRCGAERVPARLARLELPTALGAALGPLVRMIETATTEIATLDEQLQRRAAADPVVQRLQTIPGVGLVVALTFRAQIDDVRRFRHAGQVSAAIGLVPREDSSAERRQRGHITKVGPRELRSLLVQAAWACWRSKQSATLRAWVEQLAARRGRRIAVVALARRLSRVLYALWRDGTTFEAKTLAAA

SEQ ID NO: 189810 - protein, 464 aa, unidentified
MAVLNIGIDLGVTAKHYAEVINSEGIKVCSSVTFPGTKEGFDMVSKHALKHVAEGTKLRFICEPTSMSWFPLAVYAKRYGYEMMRVKAQKSHALRKYYSKHSKSDKLDARTLAMMPIVDRESLEEVYLPDKVTNALDRRCRQREKIAKEIASIKTRVKSLYQWVMPGLTDCFEDPYGERAKAFYKKYSNPFRVKRLGISRLRKVLDKAGRQQPSDGLAKRVYEAAIRGSALYDHSDEYIDFDELQKEIECELHLLESHEKVQKRVDEAINRLYVCVHPNKNIETIPGIGETLGPVFLGIIGNSDRFSSQSKARSYSGMIPKQNDSGESSKKGLNITKEGPSRYRRALFLASDTGRQWDPQLAKVYYDQMVNKGNCHTQAVCAVSTHMVGRIVRVLKEKRPYELRDLEGRPITKKEANILITREFTVPEEVRKRTRSRRIKKGYKRDQIQSIAQMQSSRSSQYPS

SEQ ID NO: 189811 - protein, 302 aa, unidentified
MFQLGIDVSKKTLDLCLLREGVKGKVKTRKLKNDFNAADAVIGWISKQHCEPANVHIIMEATGVYHESLAYALYKAGAKVSLANPHRSREFARGMDILTKNDQVDAYMLACYGALKVPQPWVPPPENVRHLSALLRRRDAPVTDSTREKNRLEKCRATDTPLAVTESIENVLRNLSAEPEHLDALILTHLDQHPELKKDFDLLTSIKSVGYQLGLNMLVILRGHHFDTAEQVAAFLGVVRVEKYSGTSVRGKPKLSKIGPPEIRAKLYLASLCGLRFNPVMKAMYERLCLRGKAKMCAIGAL

SEQ ID NO: 189812 - protein, 343 aa, unidentified
MEAKRYIGIDLHRNCFTACLRLENGREYLKQWKLEDMGKFTAKLRPTDQVAVEVTGNTRLFHDAVAPHVERVVAVNASQFKVITHSVKKTDPNDARNLALYLAKDLLPEVRMKDKTQAQIASLTQTRDTMVKLRTALKNKVNNLCSAHGVNLNKESLASEKGLKAVLEMHFDLLVNLELKIIVEQIRSLNQSIAELEETIGKEGQKLEGHKNLTSIKGIGGLSGGILLSIIGDISDFADEGKLAAYFGIVPRVSNSNETEHSGRITKRGTKLGRTTLIQCALIAQRYSPYLKNYYEKMKSRRGTGKAIVALARKFLGIIYRTLKNKWVFADFPNFVLAEEATA

SEQ ID NO: 189813 - protein, 435 aa, unidentified
MSKRLQVGFDISRKYNDVCFMTQAGEVLIPHLRFDNNWPGLQQLLNLLLLTLRQGDFDGVDIAGEATGLLWFHPFYHLAQSNDLALFDPHLYLFNARIVKHFRKVLAERDKCDPKDAQVVTECLRFGRLPHELTFDERYLPLQRLTRYRYHVAHTLAREKVYFITVALYLKASDYTRFKPFSDPLGATSSHILTEYATIDELASLPLDDLAAELDLVGKGRFDDPTDNAHRLQQVAQTSYPLAPCLVKPVNLILASLLQHIRFLEDLLQTLNEPIEVTLQDTPGAPYLRSVDGLGLVYTSGILAEIQDPQRFFAGLKRDKHGHPHPKTKHDAQAALAKFTGLWWPRGDSGDFQAEDRRLPHTGNCYLRYYFIEGANSLRRHNAEYGAYYDHKYRESLKHKHWRATVLTARKLVRLVFTLLHEEQTYQPPEVRYRH

SEQ ID NO: 189814 - protein, 410 aa, unidentified
MEPILKSCAGMDVHEKKVDVCIAHGPFDKPPKFEIRTFSTMTSDLEEITTWLKKYEVTTIGMESTGIYWKPIFNVMEGEFEIVLANAQRLKAIPRKKTDIIDCKRIANLLRYGLVPNSFIPPKEIRELRDLNRTRRKLVGMMTSEKNRLVKVLESANIKLSSVVSKIYGVSSLAMIRSLLEKNKLSREEISLMAKGKLKKKVDLLEKALNGKITDHHRFLLGMHLENIDHLAKQIKKMDEEIDRKMVPFQKESKLIQTIPGISDVNASAILAEIGVNMSQFPDDAHLSSWAGVCPGNNESAGKKKSGKTQKGNSFLKGALTESAWAASKTKASSYSAIYHNIVRRRGKKRALVALAHRMLIDIYYVLKTGEPYQEIGAKAVYERTSKRREQSMIRSLERAGYSVAKAATA

SEQ ID NO: 189815 - protein, 353 aa, unidentified
MRKMQEFIVQGKQIFVGLEDSKRTWRLCVRCEGMVVHTASMPTRYEGLRAYLMNRYPGCTIAVMYEAGFQGFWLHDLLTHDGIRCEVTPPNKVSCPKDERVKTDKRDAYRLALNLETGDYVFCRVPDKERREDRQISRTLSQMQKNIRAEKNRIRRFLDYHGLNGELPAGAWTDKDYLRLKDMELPHSLKVSLDAYLRVLDTLFAAEKELETELKALCEKERYTESVRIKRSVPGVGWLSAIRFTLEWGNFDRFPTGKRFAAFTGLTCREYSTGETIRRGRITGQSSTFVRSWLIECAWRAIRIDPALLAIFRRVWRNSGSKKKAIVAVARKMAVRMRAIELAGQLWCMSVVE

SEQ ID NO: 189816 - protein, 316 aa, unidentified
MTSQQPFVGIDVSAKHLDVAVLPAGAHFTVAYTDSGIASLISRLRDLNPQIVVLEATGGYEIPVAYSLSEAQLPVVIMNPKVLRHFAKSTGKLAKTDKLDARVLAHYAQAIQPEVRPLKDPEQAELGTLMSRRRQLRDMIVMEENRRRTTTPRVRGNIDQHLAHLRQLLKDLDQDIHDTIRRTPLWHEKSEILQSFNGIGPKVSASLIADLSELGAARRTQISALAGIAPMNRDSGQWRGKRTIQGGRPAVRQALYMAALVASRRNPVIREFYQRLRQAGKPPKVALTACMRKILVILNAMLKNGTYWNPQLPIAA

SEQ ID NO: 189817 - protein, 466 aa, unidentified
MSKLSRTQRGGVPISDPHPWEGLTRMQPQAAGLDIGAHEIMACAPGPNDTQDVRAFGTYTADLHALVAWLLERHVQTVAMESTGVYWIPVFETLEAHGLRGCLIRATAIHRIPGRKSDVLDCQWIQTLHTYGLLADSFRPDADLIALRTLLRHRAQLIEHRSPHILHMQKALTQMNIQLAQALSDVTGQTGQAIIRAIVAGERDPHRLAALRNYRCQKDAHEIALALTGTWRAEHVFVLTQSLECFDFYTRQLNACDAEIERLYTSLRPAWGMPEPPLPPQKPHSHNKNTRPDTPLRNQLRRLTGVDLVAVPGLSVSLAQTIVAEVGTTLDQFPDAKHFCSWLGLAPHNDISGGKVLKSRTLKNHNRAGQAFRQAAAALMRAKCHFGAYYRRKKSQIGPAQAAVATAHKIARTVYHMLKFKVEYRAMSADEYDQQFEARELKRLQHKAAHFGLSLVPLTAAKVAVS

SEQ ID NO: 189818 - protein, 414 aa, unidentified
MTGSLQIGVDVSRAEHVAEILDPAGAAVGRRRVPNSPAGGQQLIAWVLEQARHLSVAEIRVGMEATNVYWWHLFHQLLAHAELRAFPTHLFLLNPHDIAHFKKALGIVDKSDPVDAHTIAQYLRFRTDLHEAYTPDPRYEALQVLTRARFQLVHVQAQEKNRVLARVFQAFSAYGKGRPFADVFGATSQHVLAELTVSEIASLDLPCLAQRVFGASADAYFPAGRPEAILHELVQLARDSYRCDAYTESALRTAIRAHLEVIRQIQRQTRHLEQEIETAMARIPGRLQSIPGLGPVFEAGIVTEIGPLDRFRDDDQVARFAGLTWRRNQSGEFEADTRPLTRRGNSYLRYYLCEAANSVRVHEAGLASYYARKYREARHHPHKRALVLTARRLLRTIYALLKRGEEFDPKRRSA

SEQ ID NO: 189819 - protein, 408 aa, unidentified
MQVTFGIDVSKSTSTVCELIGESKNELTITNNRPGFIQLLHELTAFSKHPQIIFEATGVYSRKLQSFLEDYGYDYVILNPLKAKKEMDMGLRHNKTDKTDAYHLALIQRLYHHPINQLQSQTYRQLNSLSRFYDQLTADLVMAKNRLHQALQSTFSEIENLFSCAKGKNYWQIVVQYPHCDLVRREDKKQLINWLMSLKGIGFRHALKTADKLIELSHQAYPVVSCSSIEVEQVQYYAHRLLNLSDQRENLIARMVKLAKSLPSHDLENLQSIPGFAQTTAVRVLAELGDLRRFSNPNKINAFIGIDPGRYQSGEMDSSLSITKHGNAVARKLLYRAIGQIDNAAKTNPCHIADYYESKKLSSQTKGFKKIAIASIHKLIRTIYALIINDQLYDYNIATHNQKDFSRN

SEQ ID NO: 189820 - protein, 388 aa, unidentified
MPYRIAGIDVHKRMLAVVVADVEVEGEYRFERRLFGSNPEQLRLLAEWLIEQPVEEVVMESTAQYWKPVWGVLERYWKPIRQKREDASPMSGTLHLAQALSKRGRRGRKNDFRDAERLLKRLVAQELTLSFVPYAEQRLWRTVMRGKYQLTRDHARLRNRVESMLEEAHIKLSSLVSDLLGVSACTELNPVYRRLLKMALEELQFLEQQIGKLEQEMASLLSQHQDAVQRLAEVPGLGVDSAQQIIAEVGAEAATFASAKNLSSWAGACSGEEESAGVNPNHRSPKGNRHMRRILHQSANAAVKHKGSIFEVVYRRLVPRLGHNQAIGAIAHRLCRLIWLLLHRGVRYEERGPAVNQRSKQQRTARMIRDLRRFGYRVEPLTVQLNPA

SEQ ID NO: 189821 - protein, 394 aa, unidentified
MKLVGIDVGKNSHHFCVMDKETGEFNVAPSSFSNNKEGFDFLINSLKPYSKKSILIGMEDTGHYHVALLKFLLSNGYTVALINPKTTDLTRKMEGGITKNDKLDTITICDVLDTPERKKQYRITKVDRFDLYEQRQLTRHHHNLKEELNVYCNRLQKSIDLVFPEFNTLFSSKYSIVYMNLLKTFGSAEAIASTDIRTIRKCFEIKGRGNRISLTPEKLKECAKNSIGISSEVETIQIKHLVSQITLIKEQIAEIDKKIEEFSITNNSPILSIPGISHFSGTSILAELRDIGNYSKPSQIIKFAGVAPYHYESSQYNAQHTGITKKGSKYLRKTLYQIILTVINNNPVFKKYYRLKISQGKGHRCAQGHCIRKLLRIIYHLLETGQSFDPALLR

SEQ ID NO: 189822 - protein, 382 aa, unidentified
MQTITLYLGLDVHKDSITIAIAEPGSKGEIRVFGTITNDVDRLEKAMARIRKAHPGAILETAYEAGPCGFVIARRLKQLDVPCLVAAPSLIPKQPGSPFKTDKRDARAIARLLRAGELTAVYVPEATDEAIRDLCRARTDAVDDQRRCRHRLKAFLLRHGYRYQGRANWSQPHMRYLRELVLPHPAMKAILEEYLQGIDAAHNRVERIEASMLALLETWRLKAAVEALMAFRGFQLVAAMITVSELGDIHRFEHPRQLMTYLGLVPTESSSGPRQRLGAISRCGNGHQRWLLTECAEHYAMPPKISKELSRRQEGQPESVRALSWKAQNRLHLRFIKLLGRRLQRNKAKVAIARELCGFIWALLRTLDCYKKAPPSQQPVAS

SEQ ID NO: 189823 - protein, 344 aa, unidentified
MYFIGVDHHKQVSVMTVLDEDGQERKNGRVPNLRRYVEQFLEGCRPFTAVLEAGRSSYVMADLLRELGGEVKIANALQVKAIAHARIKTDKRDSRTLAHLLRANLIPEVYQRGEWNRRAQRVMRMRAYWVHKQTEVKNKVRALLAQQREDVRLEVEKRESGLFSSKGLEFLAKLPLESKEKEVLEDLLQGYKEIQAHIKKSDGMVDALYGEMEEASRIDTVPGFAKTLSVLVAVEIADVKRFARAADLHSYAGVIPSTYSSGERTYHGPITKQGSRWLRWAALEAVYPAIKKDLVLRTLYSRLARRKGPNVAKIAVARRLLTIIYRILTEKREYIPGLMKQTAA

SEQ ID NO: 189824 - protein, 332 aa, unidentified
MNLIHIGIDISKKTLDLSIYGRERRDSGFLHVTNDKKGFSKILSWVKGLKIQLSQVWFCMEHTGEYGYALALFFDEHGITYSMVSGADIKGANPSKKGKNDKQDAAMIARYAHEKRDSLAPSHLNIRPLYELRCLLNERRMYVRQRAQWKAQRSERRLFSTKHRDSRVNRAIKTLSATIREIEEEIRSVIAVNEDIRRNFELIMSIPGIGLINAVNFIVATANFSTFNNARRYASHICVAPFAVVSGTSINKGTHTSKIGRHDLKTELRTTVLAVLKADSEMRKYFDRRKADGKKYNVIANNIMFKLICRVFAVVRRGTGFVETHKYLQKKE

SEQ ID NO: 189825 - protein, 416 aa, unidentified
MKRNKTKKLGKVNGNTLIAAIDIGKKANYGYFRAPDGQDVKPFAFYNLRDGFEKFWTKLLEFQKDHNLDEIVVGFESTGPYAEPLLHFLKIKEVTLVQTNPMHTKRLKELTGNSPNKTDEKDPKVIADVISLGHALTLVIPEGPAAQLRRLSQARERAIKSRTSMSNQLQHLLFVIFPELSWRMKSKSVLHLVENYPTPQSIVGMGLDALCAILKKVSKGKLGRERAREIFEAAQKLVGITEGRESILKEIGHLVSNIGNENRFIDGLEKEMKHYLGKVPYSHSILSIKGIGKVSAAGLIGEVGDFRKFSTISEITKLAGLDLYEISSGRKKGQKRISKRGRSYLRKILFFAAINVVRSEGILNAQYREMLGRGMAKIKALIAICRKLLRITFAIVRDNTVYVSDHQHGCQSKLAA

SEQ ID NO: 189826 - protein, 304 aa, unidentified
MLSKLQLRKEPVMKSIAYVGMDVHQKEIRVAMVDGESGELVSEHVIDNNEDRVRKLMRKLRTGRELNCCYEAGGCGYVLQRWLAAMSIPCAVIAPSLIPRRPGERVKTDRRDALKLASLYRAGELTQVHVPSRGQERGRALVRARETLRREVLRSKHYVLKFLQCRALVYREGRNWTQRHWRYLRRLRFEGPEDVSYRELLALLEFKLEQMKRIEAAVAELAGEEPYRSVVPRLRCYRGIDTLTAMVLVSELWDMRRFATAGQLMSYMGLVPQEHSSGARRWQGSITKTGNAYCRRILVESAWH

SEQ ID NO: 189827 - protein, 371 aa, unidentified
MEQSSKTLYVGLDVHKDSIAVAYALEDRGAEVESLGPIGTRQCDLDKLIRRLASKGAALVFVYEAGPCGYGLYRYLTGKGFACHVVAPSLIPRKAGDRVKTDRRDAMTLARLMRSGDLSAIYVPGVEDEALRDLSRGRDDAMQDLKRSKRRLKSFLLRQDIRYEGRATWNAAHLRWLAEVVCAAPPQQIVFQEYLRAVSEQHERRQRMEHELHEAVQGWRLYPMVQAIQALRGVEFTSAVIVMTELGDLTRFENPRQLMSYLGLTPSEYSSGARRHQGGITKAGNSHARRALVEGAWAYRYPAKVSRHLQLRLEKLPAEVQAIGWKAQVRLCRRYRQLTTRGKHVNQVVVAIAREMAAFAWAIARLVPLAS

SEQ ID NO: 189828 - protein, 353 aa, unidentified
MRCEVKALVDGVDEFIGIDHHKVRSQVLVKDREGKVLKRGRIATREEALDKFLGPSNGAVRMAVFEAGPRYRPMYRWLRELVDEPVMANPGRLKIISETAYKDDKIDTEKLTDLLMLGMIPEAYACSDEAWDRRQFLRQRASLVRMRTSLKNRIHALIDLNPEAKPQRPKATDLFGKQGMGWLKRLELPRADRKRLDQLLEIYEGLDGQIRKTDKEVRRMVRQDRRAQHLATIPGIGDFFAALILAEVDDIHRFNKSKHFVSYTGLVPGRDQSGDREHRGRIHKCGSRWLRWALVEAAIPATRANLALKNLYDRVCRKKGREAGPNVAKVAVARKLAEIVYRVLMEDRAYEAR

SEQ ID NO: 189829 - protein, 327 aa, unidentified
MSLFCVGVDVGARELVVSIDRNGIRESGIVFSNDAGGHRKLIRWATKKGATAQVVLESTGVYGLDLAFALHRAKRVTVMVANPRAIAAFAKASLQRSKTDALDAETILEFSIRMPFVNWNPPAPSILELRALSRRIEALSKTVTQEKNRLHANQQSEKLSNFVREDIRELVELLRSRINRLRKQALLVIEQNPGLAKAFRHLTSIKGIADAAGIQLLAELGTLPKDMTTRQWVAHAGLDPRQYQSGTSVHKPARISKTGNAHLRRALFLPAMVAVRWEPNVKAFYEKLLAKGKTKMQALVAVMRKLLHSIHGIWSTARTSMERSFLL

SEQ ID NO: 189830 - protein, 326 aa, unidentified
MKVFYLGVDVSKKKLDLCLRSNGKDILYDVIPNDLSSIKSWLTRTFEKFFLSEDSLVVCAEHTGQYTYPLVCATKSAAKIKYCHGIPRGKNDKIDACRIAMYAERYNDCLQPYTASELIIQKLKNLSTERSMLVADRAKYQSQLKDQVDYMEHSIYIAKCNRVEGIINTFTDYIAQIDLEIKELINQAPVIAHQMDLLMSVDGVGERVALKMIMETDAFTSFTDPRKFCCHAGVVPFVYVSGSSQRSKNRVSNRADKSIKHLLHMAALSVSQVKNSPLKKYYDRKVEEGKNKMSVLNAVRAKLVTIMFAVIRTDAFFSRNYQNSLA

SEQ ID NO: 189831 - protein, 388 aa, unidentified
MTQVDDLSRSLITFEQNSTMVVVLEMSQSSWLAAGVVPGIGRRPLKKLDPDPTALLHLVEGWRDHAVKVGRMISRIVLAFEAGRDGFWLARWLRARSIEPFVIHSTSVAVSREHRRAKTDRLDTEMLIRVFLGWLRGEPRHCKMVAIPTLEEEDARRPSRERESLIGERTRIINRMKAALIRLGIRGFKPELLKAPQRLDAQYTAEGVPIPPNMLDELRRDMARLAWVREQINAIEQARLERLEQAPSTGPHAMVRMLASIIGVGVETADMLVQEILSRNLRDRRAVARYAGLTGSPDESGVKRREKGLAKAGNARVRRGLIQLAWRFLRFQKESALGQWYRARTEGAAGKRKTTMIVALARKLLIALWRMVTTGEIPAGVALRTAAA

SEQ ID NO: 189832 - protein, 413 aa, unidentified
MSNPYAAFVGIDLGSESHQLCVIDAQGNILGREHIEHSGAALAQMLTRLSDLTGAAAPESIAVALEAPRGAVIDVLLERGYATFSINPKQLDRFRDRYSVAGAKDDSRDAYVLANSLRTDLPHYRLLKPDHPLIVRLRELSRAEDALKQDWRRGANQLWSFLQRYFPGLLRLSPAADEMWLFELLEKTQGLPSQAVRWSRKRWDALLQSHRIQRFSAEQLQQQLQQPLLLAAGVELALAEQVLLLLPRLRLLHQQLSDLAKRIDLVLEEMAQQKNFPEHRSVQILRSIPGVGRVFTATVFSEATAPLLERDYHGLRALAGIAPVTQQSGKTKIVSMRRACNGRLRNAVLHAANIHVQKDARAKQTYARLRAQGNSHARALRGAADRLLDLICILLRSHQRYDPQRRLCPIAVA

SEQ ID NO: 189833 - protein, 343 aa, unidentified
MELHAVGIDLGKTVFHLVGLDSSGTVMVRKRCSRTQLLAYTANMRVHLIGMEACSGSHFLGRALRAQGHDVRLMPAQYVKPYVKTNKSDYIDAEAIAEAVQRPTMRFVPIKTEEHLDLQAVHRVRERWVMRRTAVVNQVRGLLLERGLTLPKGRSHVDHALPEILTDPTRRLSGSFRVLLSQLQLELEQLTARIEQMDAVIQQTARENEACQRLTAIPGIGPVTATALVAAIGNGAGFRRGKDLAAWVGMVPREYSTGGKQKLLGISKRGNSYLRRLFVQGARVVMQYRTKQAPGLSVWLSQLMARTHQNVAVVALANKLIRMAWAVLCKNERYRVPLLASAP

SEQ ID NO: 189834 - protein, 347 aa, unidentified
MGILYVGIDVGNKNSQLFGFTEAGEAAEERIPTLSDWAWGGMFGQWSKRFEVRACFEAGPHYEWLYDLLRESCAQVVMVDPGSFKVICKSQKKTDKTDARKLAEGLRRGDLPAVYVPEKRIRADRRLTHFLRWHSQKLAGIKGRMRSLLVTYRLACPKRDLLGKEAQAWLEQQGREGMDEQGRILLEVLLDEARNVQRHHKKLSALLPERLKAYGEEGEIVDSIPGFGPLVSLAVLSAIACIGRFKQPKELASYFGVCGRVFQSGDTLRLGSITKRGNKTVRWLLSQALTHVHRKDPKARMRYQRLKRKKHKGVARGAQVRWLTNIIWHLLTSHQEYRIACAKTKAA

SEQ ID NO: 189835 - protein, 377 aa, unidentified
MSEFSAYVGLDVHKETIAVAVAVSGRGKAESRGEIKHERKSLERLTRRLSPHGEVLDFCYEAGPCGYGLYRWIIEMGHRCEVVAPSLVPRKPGDRVKTDRRDALSLARQHRAGELTAVWVPGPEQEAMRDLTRAREDMKGIELKARQRLGAFLLRHDRVYREGKSRWTQKHFRWLETVKFDHPIQQVVFQEYVDTVTEAQARVSGLEAQMRQALEGWSLRPVVEGLMALRGVDVITGMTILAELGDITRFDSPRQLMSFVGLVPSEYSSGGCRRQGAITKTGNGHVRRVVVEASWSYRFPARKTAHLRRKSELASREVQAIAWAAQKRLCGRYWHLYQAGKAKPQVCVAIARELVGFIWAVACEVQGKAHGSHVALV

SEQ ID NO: 189836 - protein, 432 aa, unidentified
MKKIRENAAGIDIGAKKVFVSIEGQEVRYFFTFTEDFEKLRDYLCEHKIKTVAMEATGVYWNILYEILEESGIDVWLVDGRQTKQVPGRKTDVKDCQWIQQLHSYGLLNRCFVAEADIKELRAYQRLREDHIRSASMHINHMQKALTEMNIRLTEVLSQIHGVSGIAMIEAILKGERNKETLLKMCDSRIIKHKKEDVLKSLNGRYTKHGLFALQQAFDSYLFYQHQIEQCDQMLSDVIGKIGKGKPDQNPQGRRKPIRHNKPDINDLGGSLLKIFDGKDATALSGITDYSWMQLLSETGTDLSRWPSEKHYTSWLGLAPGQHSSGKMKRTKRKKGHPQAGQIFRQIAQSLITSKHIALGAFGRRLRARKGSQIAIKSVARKLAILYWRIMVKGMAFVEEGIKKYEEQLLVQKHKSLERLAKDLKVQIAYNV

SEQ ID NO: 189837 - protein, 514 aa, unidentified
MSEGTAQPPFSRLCPRLLRKHSAWLIRHIPLTQNFHPQPLAPAKKADWVHAHCARVRSPYAAQDKPFASGFTNPHRNGGDIMLKLNYMSTLFVGIDVSSKTNAVYAMDFEENKYLSTSFGNNQPGADELVNRIAACMQKHKNLDTLLIVLESTSVYSVHISNFLASSEVLMPYKPYVFCVNPKATANYRKSYIGMEKTDPTDAYLIADFARVGRTKKLEPWRGGQFIALKRLTRHRMHLSECITREKTYMVSNLYLKFSELQLLEGDDKPFGSLYGATSSAVLTEFLSPQEIIDMPEEELLTFLAGKSRNRISDLSKTSELLRKAARDSYRLDKCMYEPLSISLASSFNCIHAYQKEIKLIEQAIEKCIKGMNPNALIILQSIPGIGPIWASGILSEIGDITVFHSSDALAKYAGLYWPKGDSGDFTSEDNKMSKAGNPYLRCYLGEAANSVRKHIPEYADFYARKYAEVSKHQHKRALALTSRKLVRLVFGLLVKNQLYTGEKLDTEYNIESN

SEQ ID NO: 189838 - protein, 339 aa, unidentified
MKYTPFGVDIAKHLIQVHFINEHTGEVVDKQLRSKDFLTFFSNREPCLIGMEACGGSQHWARELKKLGHEVRLLQARFVKAFVMGNKNDVMDARAIWMAVQQPSKEIAVKTEEQQSVLVLHRSRRQLVKFRTAQINALHGTLLEFGETLHKGRAAMDRELPAALERMKTKLPPYLITVLEDQYTRLSELDMLIDDLEKQLNSVARQSEICKRLMEIPGVGPLIATAAVATMGKASAFKSGREFAAYVGLVPKQTGSGGKVRMLGISKRGDTYLRTLFIHGARSAALLTKEPDPWITELKKRRPTGVAIVAMANKLARTVWAIVAHDRKYDKNHVSIRPY

SEQ ID NO: 189839 - protein, 475 aa, unidentified
MQEERNAIGIDPDALGFVCAYVKRLEAKVATRGYMVTDSDLKSFLKWVQGEVDVIIAIEGSNGWSRPIEKALREAGVIFYSFKPAATDKFRKAVLGQNKTNRKDAESVARYAMALEAQGKLEQYRRVWFPDMELQLLTRRYGSVTKQLTAEVSRLWKLLRYASSDLYLALGGKNPEVECDPKMLKNQGILNLLRSTPDVGQWKSLSDEQLLEAMGGRDKGRCALIGELRKAMDSFQPLSESMSLLLRASAQDVFRLKEEQRDIERMLERLTAENAAVQALCAMRGIATNTAAKMIAEIIDIRRFAREDSLAFYSGLGMREYSTGQTTTMVATELFNHRLKDAFMTAARNVVHFNPDSHIAGYHRNLIKGGMSELCATKRVARALVRVIYRRLSALTVQTSEAQAPQSEERQQEGESGMASGLTRSGRSHLSNMPPSSPTNNRARTASRVKRVVSATRSAMKVARRKKTEIFEENA

SEQ ID NO: 189840 - protein, 409 aa, unidentified
MLDVRVKWSAKPREIEGIDCVMRTQPMVKEESSFIGIDYHKRYSVFCVLDAQGEVLERGRIDHLCPEQFVVLVQRWPGCRVVFEACMNWHWLLEILEEAMPREDIVMANPFKTRIIAEAQIKTDKVDARILADLLRGNLISRVHVCAKATREIKEVLRQRCFFVRQRTMMRNRIHRLLGAQHDLQLPQCSDLFGAKGMSFLNQLELPAPAGFLLRQQLALLGELAVRIREDEKGLQGMIEASPALHYVRSIPGMGPILAAVGLSEIDNISRFASAQKLCGYAGLCPSTNSSGGKTFQGKLLPRCNKWLRWAFVEAAWVAVGCSPYFGDFYRRKRSLGKKANRAILATARLMARITWQLLTQHRDYANFPGDQKLRCPPAKEMKDFPKSKKPISSKETFPSRSHARLVGR

SEQ ID NO: 189841 - protein, 599 aa, unidentified
MQVIYERCAGLTIRNRMVEVCVLILQTGGTVEKLLRNFSTRITDLLALEEWLGSLSIERVVMESTGEHWYLVYNLLEDGRHILPIQPQQLKALSGRKTDIHDCEWLADLLLHDQLKAGFVSPEPIRELPDLLRYRKMLLAERASEFNHLQKILEGTTVSLETIISEQHDAKVLKELAHGYLRPLFPALHLALAGQEHLYQQFLLQRIVTHVETCEDTLTGVQREIEQRLALFEELVTLLQSIPGMHLMAAIGILSEVGTDMSRFPTYKHLIAWAGVSSNSKQNGSRLLSDATTSGNRHLQVILNDVAKSIAHSEEANYLTMLYTRTVYWGGKRRAIREVAHTVLMITYYVIRDKKMYRDGADYSDKRNAVYSGQYNNRRSKGLRYTVPLAHPVQATRETRALFSAVETRSNVWRLFCIWAWIGLTSFGGGASSIFLIQREFIEKRNWVSSKEFSHFWNLCGVTPGTSQIALSILIGQKLAGTPGLIASMVGLVLPSAVVTYLLAAGFQRIESIPIMQAIWRGIIPATSGLMFLVALRLAQPLIAQGRQEGRPALTISLVMILACVIAIIFFKITIIVVLLAASLAGIILFTTVRSRSRE

SEQ ID NO: 189842 - protein, 320 aa, unidentified
MQTTLATPVYIGVDVSKDTLVSCVYSSGVRRTLANQRSAIEAWLKGLPAGSAIGMEATSTYHELLADLTQRKGMLVYVLNPKDVHRYAKGVGMRAKTDRVDAALIARYIAHEHAKLHLYRPPSPEQRQLQRLLTRRAKLSRSRAGVQQSLHGLPGLKVPLRNLLERFDALIAVIDARIQALVNACPQRQAACQRLRTINGVGPVVGPALLNPLEHYVFASADSFVAYTGFDPRPDDSGQRSGRRRLSKHGPSELRRLLYNAAMAAVTSPAWKPLYQRYLAKGLPRTVALVIIARKIARTAWSVYTHETTFDPQRLTSGLT

SEQ ID NO: 189843 - protein, 358 aa, unidentified
MKIVGCDLHARQQTIAMVDTETGEFTEKTLSHEGNAVREFYAALEGPVVVGIEATGAMQWFLELLEELGIECRVGHPAKIRAAEIRKQKHDRRDARLVLDLLVMKDRFPQIWMPSTEQRDLRTLLRDRHQWVKMRARLQHTLQAIALNHALRQGHALWSAAGQSALQALPLPPYTSQRRTELQSLYVQLQKRIQELDKEVEAQARQRPQARRLLTHPGVGAVTALATEVFLGDPSRFATGNQVASYIGMIPCEHSSGKRQRLGKLTKEGNSLLRYLWTEATMHAVRKDPELKRFYRRKLIQKGMGKARIAAARKLGIRLRIMMRDQIDYEEFCRRGKLRQKGEAHAGMPDFNSGPARQ

SEQ ID NO: 189844 - protein, 375 aa, unidentified
MTKKTTQVNINAVSSNLYVAFEMGSKNWKLGFSTGFGQKTRRRTITAGDLDQLKLEFESARKRFRLPEKCKIYSCYEAGRDGFWLHRFLTSIGVTNSVVDSASIEVNRRKRRAKSDRLDVESLVKLLMRSMYENKVWSVVRVPPVEDEDRRQLSREFATLVKERTRQRNRIRGLLALHGIRISGKLDLSDPKLKSLTAWDRKPLPPQFKNRLAREWARLEFICEQIKSVKSDRDEEAANEPVEQLVKLRSLGDVTADSLAREVFGWRTFKNGKQVGCLAGLVPTPYQSGEINREQGISKAGITHVRRVAIDLAWNWLRFQPKSKLSLWYNSRFGPGGKKARKVGIVALARKLLIAIWRYLTTGEIPQGAELKSAA

SEQ ID NO: 189845 - protein, 372 aa, unidentified
MSNTVPSITVPSTGVPSITVPSIGVIVGVDTHKLTHAAVAISALGARLGAITIPVNGKGYRALKTWAQSMGPVRAFGIEGTGSYGAGLSRFLCEHGHTVLEVNRPNRQLRHQKGKDDPLDAESAARAVLAGQATALPKSGTSTVEMIRHFKVARDTAVKGRTQAMQTLKAIIVSSPHALREQLDCLAGKMTLIRHVAALRPGPLTSTTASAKTSLRAIARRWLALDAEIKGHDAHLEQMTQQLAPELVQAHGMGAGTAAEMLLLVGDNPERIRSEGALAKLCGACPIPASSGKTSRHRLNRGSNRQANAALYRVVIVRMRGHQPTLDYIRRRTAEGKSKPEIIRCLKRFVAREIFGYLCRPPNAAPPGQMAA

SEQ ID NO: 189846 - protein, 355 aa, unidentified
MNSEKYIGLDVHQATISVAVMDSRGKVVMESILETKATTILDFLAGLRGTLAVTFEEGTWAAWLYDLLKPHVAKLVVCNPRKNALLKHGNKSDKIDARKLAELLRLNDLEPVYHGETGVRMLRELARSYLTIVKDLSRVMNRLKALYRSWAIPCAGRDVYYPRHRSEWLGKIPDVGTRRRAEQLYQQLDMLQHLRQQARRELLTESRKHDITAKLRKIPSLGPIRSALAVALIQTPHRFRTKRQLWAYSGLALETRTSGEHCYVQGQLRRSKKQISIRGLNQDHNHDLKGLFKAAATRASVQPGPFQDFYQGSLTKGVKPTMARLTLARKIAAITLSMWKKGENFDAEKLKSQAA

SEQ ID NO: 189847 - protein, 347 aa, unidentified
MVTLGTDSHKRSHTLVAVDEHGRKVGELRVDATPAGHFEALSWARQWSERRWAMENCRQLSRGLERDLLKADEQVLQVSPKLMGTSRRSGREPGKSDPIDALAVARVALREADLPVARREGRSRELKLLVDHREDLVGERTRVQNRLHWYLHELDPELGVGKRTLTRKVVLADLRRRVQAHQGVVAEIARDLIERMTELTVSVNHLQRRIETLATGLAPNLLRMPGCAGLTAGKLVAETADVGRFRSSSAFAMYNGTAPIPVWSGNVARHRLNRGGNRQLNVALHRIAVTQIRLGGEARTYVGRRMALGNTRTEAIRSLRRHLSNEVYKRLCLDRREQTSTAKTKAA

SEQ ID NO: 189848 - protein, 351 aa, unidentified
MLIIGCDYHPGVQQIAFMDTETGEFGERRLEHGEGEAEKFYRDLQQAGISVRVGMEATGHARWFERLLEELHFELWIGDPLEIRATRVRKQKTDRHDAQLLLKLLLEDRFPRIWVASWENRDLRQLLWHRHRLVQMRTRIMNQLQAVALNEGVRQKKRLWGQAGRAQLESFVLAPWASRRRQELLELLDRLNPSIRGLNAAVEQEASRRPEVRRLMTHPGVGSLTALAFVLIVGTPQRFACGKQIASYVGLVPTEESSGGRRRLGHISKQGNSLLRFLLVEAAQATVRSDPDWRRKFLHLAMRRERGIAKVAMARKLAVRLYWMWRKGWDYEQVKRFGSHAGQPGNPLGVQ

SEQ ID NO: 189849 - protein, 370 aa, unidentified
MVKRSMFVGMDVHKESIDISVAEEGRQGEVRHYGVIAGDLEALAKVVRALRAPDRVLHFVYEAGPCGFGIHRYLTAQGEDCVVINPSSMPQRSGDRIKTDRRDGDALARLHRAGELTAIYIPTPDDEALRDLVRAREDAVGLSTQAKHRLKAFLLRQGRRYPGRAGWTLSYRRWLADLSFPLAPQHIALQEYRDTIDETERRAARITDQLRQLTPAWRWAPVVEALQALRGVSFVTAVGLVAEVGDFRRFQHPRHLMAYLGLVPSEYSSGPSVRRGGITKAGNPHARRLLAEAAWAYQGLPRIGRQMLYRQEALPKSICDIAWKAQLRLTSRFRRLVARGKAKPKVATAVARELTGFIWAIAREVPAPPA

SEQ ID NO: 189850 - protein, 412 aa, unidentified
MQVMYKKCCGIDVHKMKIVCCLRKGNKQEIREFSAETKELKEIAKWLKENKCEMIAMESTGSFWKPLWNIFETSGLNQILVNAKDMKNVPGKKTDIKDAEWISDLLQHGLLKASYIPDRAQRELREVIKYRQSMIQERTRELNRLQKMLEGANIKVVSKFSKLENKTCRGLIDYILELEENEEIEEEKVRKLINNNVKSSLEEIMIAMEGVVTPIQKELMKLVINHINDMAERIEEINKVVNKYMREYEENIKKLEKIPGIGRTSAQVILAEIGQDMNQFPTGGHLASWAGVCPGNNESAGKRRNGKTRKGNKILKSTLVQCANASKRHKDSFYHAQYQRILVRRGKKRATVAVAHSILISIYYMIKYDKEYNELGAQFYNQFNTEKKINSYIRKLHELGVDVHVDTSLLKT

SEQ ID NO: 189851 - protein, 310 aa, unidentified
METWIGIDVAKDQLDLAVHGGKHWCARNDEAGVETVATDVVALAPTLVVLEATGGYERAVTAALAAKGLSVAVVNPRQVRDFAKATGVLAKTDELDARVLAHFAATVRPTPRTLADAQAQELKELVTRRRQVVSMLTAEKNRLPRTTKAVRERIKVHIVFLETELEEQNRDLDTLLQESPLWRAREDLLRSVPGVGPVTSATLVAALPELGRLSRKEIAALVGVAPLNRDSGQQRGHRIVWGGRAEVRAVLYMAALVATQHNSVIRTLYARLLEAGKPKKVAVVACMRKLLTILNAVLRTETPWREPASA

SEQ ID NO: 189852 - protein, 315 aa, unidentified
MEQPATAPSFVGIDVSKDRLDVHLRPSGQAFAIARDSKGLEQLVSDLRGLAPALIVLEATGGFELTVAAALAGAGLPLAVVNPRQIRDFARATGRLAKTDALDAQIIALFAERIRPDPRPLADVDSQTLAELVARRRQVIEMIGMESNRLHQARDLRVQRTIKATLKTLEAQLAQLDREISDTVKGSPAWRAADDLLTSVPGVGNITSFTLIADLPELGQLDRRRIAALVGVAPINRDSGQMRGRRTIAGGRTDVRNALYMAALSAIRWNPVISEHYQSLVERGRPKKVALVACMRRLLGILNAIIRTKTPWQSA

SEQ ID NO: 189853 - protein, 431 aa, unidentified
MITEPSEESSGDQISWFVGFDWGSEKHRAALFDRNGKLVAHRDVAHSGAAYSECGDWLLRTTQATPAEIGVAIETSHGPVVDALIDRGFRVYAINPKQLDRFRDRYSVAGAKDDTRDADTLGRSLRTDRAAFRHLSPDNPLIVQLREATRVASELVTERGRLANRMREQLWRYHPQMLRLDDDLGAAWLLDLWQQAPTPAKGAKLHKPTIARILKTHRIRRLDADQVRAILQQPPLPSAPGVVEAATDHIRMLLPRVRLLNTQIKAVHARIDALCEQLAGPQQIEPGESVPGQSTEQRDVAILQSVPGIGRIVLATLLAEAPEPLRRRDYHAIRALAGAAPVTKRSGKSCFVQRRLACNKRLANAAYHWARVAVQRDLISKQRYAALRARGHSHARALRTVVDRLLKLTCVLLRRQVLFDPDHRTRSLAAA

SEQ ID NO: 189854 - protein, 360 aa, unidentified
MTQPDREVIGGVDTHSRTHHAAVIDAQLGRHLADREFPATAAGYRELATWMTTHGQVLAVGVEGTGSYGAQLAQHLAATGLHVVEVDRPDRKTRRTKGKSDPIDAYAAATAVASGRATGSPKTRTGAVEAIRVLRIARTSAVKARTQTINQIRTLLVTAPTALRERLAGTTRTTLIRTLATTRPGPDLSDPVNATKTALRHLARRHQDLDREIAELDTAIGPLVDHANPTLLAIYGLGPETAGQLLTTAGENPERLTSEAAFAHLCGVAPKPASSGRTQRHRLNRDGDRQANAALYHVVIVRMRHHQPTRDYIARRTREGLSKPEIIRCLKRYIAREVYHALTTGLPAQTSQTTTLIPAT

SEQ ID NO: 189855 - protein, 354 aa, unidentified
MQETTPASDVVIGIDTHKQTHTAVALSAIGAHLGTITVPVSREGYQRLEAWAQAFGPVRAFGIEGTGSYGAGLTRSLQTGGCRVLKVNRPDRSARRRKGKDDTIDAEAAARAVLSGQATAEPKSGNSSVEMMRHLKVARDAAVKAKTQAMLTLKSIIISAPEELREQLEGFRGKVALARHLAALQPGPITSTTASAKAALAATARRWLALRHEIEEHDRALETLVSTAAPDLITAPGIATATAAEMLLLVGDNPERIRSEGALAKLCGACPIPASSGRTSRHRLNRGGNRQANAALHRIVVTRMRLHQPTKDYVVRRTKDGKTTKEIMRCLKRYVAREIFGALCKPSQAAPIPA

SEQ ID NO: 189856 - protein, 471 aa, unidentified
MKENYRRCCGIDVHKSSVTVCVLAPAGQAHLAVKRRKFRTFTRDLRQLRSWLKNCQVTEIAMESTGQYWRPLWNLLEGEFAKLLLVNPQHIKGLNGYKTDPKDAQWIADLLESGKLRGSWVPPRPIRELRDLTRQRVHVLEDLNRAKNRIEQLCQTGNIKVSSVATDLFGVSGRRMLKAIVEGQHDAGWMADYAKGRLRDKRQELGLALEGTFTNEQRWLLEKELRQVEWLEGQVATLEAEIERRVAVFEELIQRLLTIPGIERKTAWTILAEVGADLSAFTDARHLASWAGLCPGNRESGGKRFSGRSRKANRYIKRAMCQAAWAASHTKNTYLSAFYRRMSVRKGAPKAVMALAHHMLLVVYQVLSRGEEYVEFGADYYDRRNKPKVVARLVARLMKLGYKVDLQPTEPEASGESASAELPVPAAAGAPAKRRRGRPCKCAVRGITCRHGTSLGTNSMIQQPLVAGEFS

SEQ ID NO: 189857 - protein, 383 aa, unidentified
MLKTKFQKRRQAQQAAAVVGVDAGKHRHALVVRPRGGLDSRPILFESTRAGFEKAMEAIRTHAPGTTPQDVLVGIEFAGNYGFTLAHFLDQQGFQVVSVLPAHTKRWKEVMHNQALKTDPMDALTITDLVSQGHFVGFPFLEPVYADLRYLVSTRERLSRLRTASISRLKAILQVVWPEFEHRFSNFTKKTPLALLRAFPGPNAFLSAPRPRVLRLMKKVSRGHLGAATYAELRAGAESTIALPGAQGVLSDEIPLQLELLETYERQIATVESAMVEALAHAPEAEALLSIPKLGPMTAAVFLGSIGNPQVYDSSRQILRIAGLSMVERSSGQVRGKARVSKRGRPELRRQAFMFALRAVRSSDGIFRCQRRSKNDPPLTVEN

SEQ ID NO: 189858 - protein, 340 aa, unidentified
MNTTQVAVDIAKSVFQVAVSHDPGQVHEQHRLSRARFQRFFANYPPAEVLMEACGSAHHWGRELQAMGHQVSLLPPSDVSRYRDGNKTDRADAKALLEASRNKKIDPVPIKSTDQQAVTALHRLRSQYLATRTARINAVRGLMREFGVVVPLGAKNVVPRVRAALAEDVVPTFLRLAFEEALDEIGQLQARADAIRSQLEQLAKLMPDAQRLMTVPGIGVLTATALVAFVGDPHRFRSGRHFAAYLGLTPREHSSGTRRRLGRISKRGNSYLRMLLIHGARSVLWSAKRCAELDDLRAWALEVQERRGHNVAAVALANRLARVTWRVWRDQRPFDRRIAA

SEQ ID NO: 189859 - protein, 379 aa, unidentified
MQSMNQQDTLVVGGVDAHADTHHAAALDQRGTLLATKQFPTTTCGYAKLLDWLCGFGEIAVVAVESTGSYAAGLVRYLREHDVHMVEVNQPHEHTRRRRGKSDSIDAEMAARLALAGKATAVPKQTDGIVESIRLLRVARESAVKSRSAAITQLGGLIITAPQELRDDLSCRKTLRGKATLCRRWRPATGELASPTHAAKFALRSVAKRISTLDEEIAQLDRQLEQLVRVAAPRTVQLLGISTAHAGRLLVSAGQNIDRLHSEAAFAALCGASPVPASSGKTTRHRLNYGGDRQANRTLHMIAVCRLRYCERTRTYAARRTAEGKTKREILRCLKRYIAREVYNTLRADLAQPGDPQRPAQVTTIMCGAGPIGITQRRT

SEQ ID NO: 189860 - protein, 343 aa, unidentified
MQAITTIGLDIAKSVFQVHGIDAEGNVLIRRQLKRRYVLAFFQKLPPCLVGIEACATSHHWSRELKTLGHTVRLMPPAYVKPYVKRQKNDATDAEAICEAVTRANMRFVETKTPEQQSCLMLHRTRHLFIRQQTSVINAIRAHLAEFGIVAPVGRHGVEALLEVVADVSDNRVPEVARACLAALGAQLRRFKEQILEFDRRIMAWHRSNETSRRLDAIPGIGPVLATALVASVADPKAFRSGRNFSAWIGLVPKQHSSGGKDKLGSISKQGDRYLRSLFTAGALAVIRYAKIHGTQHRPWLTALLARRPTKVAAIALANKIARMAWAMMVKGERYKEPAALAA

SEQ ID NO: 189861 - protein, 410 aa, unidentified
MQTLVERGCGMDVHQATVVACLLVVLKDGKVQKQIRTFGTTTRELLTLREWLLSEGCTHVAMESTGVYWKPIYAILEGAFQIVVANAQHVKKVPGRKTDVKDAEWIADLLCHGLLRSSFVPPQPIRELRELTRYRRKLVESRSAERNRLLKLLETANIKLASVATDVFGVSGRLMLQALVQATTTPQEMAELAKGLLRKKIPELKLALEGKFEEHHRFLLGVQLRRLQAVEEDLRLLEQRIQEKLKPYSMQLALLQEIPGVDWTLAAVIISELGVDMSVFGNVSQLASWAGICPGNNESAGKRKSSRIPKGNVYLKTALVEAANAAAKAKGTYLRDKFYRLKARRGYKRAAVAVAHKILVAIYHMFSHQVCYHELGDLYLDKLNQHHVTRNLVRRLQRLGYSVTLEKKAA

SEQ ID NO: 189862 - protein, 409 aa, unidentified
MLKVLHERCCGLDVHKKTVTACIITPEGQETRTFPTMTSDLIRLADWLRDKGITHVAMESTGVYWKPIYNLLEGEFTLLVVNAYHIKNVPGRKTDVKDAEWIADLLQHGLLKSSFIPDRPHRELRELVRYRRTLIQERSQVINRIQKVLEGANIKLSSVATNVVGASGRAMLEAMVMGTEDAQTLASLAKGKLRDKRTALEEALHGLMGAHQRMMLQSLLRHLEFLDEEIPRLDTEVAERVRPFEEDIERIDAIPGLGRRVIEQVIAEIGVDMSQFLSAEQLSSWARMCPGNNQSAGKRHSGRTGHANPWLSSTLVEAAWAAVRVKATYLSAQYHRIAARRGKKRAIVAVAHSILVIIFHMLSKHTPYQDLGGNYFDERQRDQTTRRAVNRLQRLGYKVSLELAQPVFS

SEQ ID NO: 189863 - protein, 385 aa, unidentified
MTVRIVSRAATHGETVRCLFAIELSKQSWVIGFITPLSSRISRRILSGGDWKGLLELIEEVRARVSREMGRTVEVMSCYEAGYDGFWLHRQLEAHGVRNYVIDPASLQVDRRVRRVKTDRIDTERLLRSLMAYLRGEPKVWSVVRVPSVAEEDARRLHRERDRLICERVQHVNRIKGLCALQGIYDYHPLRPQAVARLEQLRTAQGGALPPRLKSEIKRELHRLEVVVEMITTLEAERDAIVEDEASTHVNAEKIQALHKLKAIGPEFAAVLVGEIFHRDFNNRRQLASYVGYAPSPFQSGNVARDQGISKAGNRKGRTTGIELAWLWLRYQPDSDLSVWFRARVGTVKGRIRRIAIVALARKLLVALWRYLETGLVPRGAVLKG

SEQ ID NO: 189864 - protein, 344 aa, unidentified
MQIARIGLDLAKYVFEIHGVDAHGKTVLRKTLRRHAVSTFFANLPPCLVGMEASNGAHFWAQALSDLGHDVRLISPQFVTPYVKSNKNDRNDAEAICEAVGRPNMRFVPVKSAEQLAVQAVHRIRSRLVADRVRLVNQVRGLLGEHGIVVAKDIGNLRQALARIVGDDEDRVLNPLVRALMAELREELTELDARIAGYDRKIRELYRNSEICQRLGKVEGIGPVTATALVAAVGDRSSFKNGRQFAAWLGLVPKQRSSGGRARLFSISKRGDRYLRTLLIHGARSALGRVRDKQDPRSLWLGRMRQRRHPNIVAVALANKNARIAWSLLANDSAYDASLSVGAA

SEQ ID NO: 189865 - protein, 410 aa, unidentified
MTTVFCGIDWAETHHDVALVDTEGRLLARCRIADDLAGLETLIELLAKHGDGAEHPIPVAIETGRGLLVACLRATTRQIYPINPMAVSRYRDRHSPAGKKSDHGDALVLAHILRTDRAAHRPIPADTELAQSIAVLARAQQDAVWDRTQAHNKLRSHLREYFPAFLTAFASKRDGITRPDARAVLAAAPTPEAAAKLPKSRIILLLRKAGRERGIEAEGARLLLIFRQPQMRQLPLVEEAMGRQTLALLGQLNAASQSAHDLGEAAVQAFRTHPDAVIMTSFPGISDITGARVLGELGDDRSRFADARAIKAYAGAAPVTRASGKSRAVNHRRIKNQRLASTGYLWAFSTLTASPGARAHYDRRRAAGDRHAAAQRNLFNRLIGCLHHCLGTGVLYSEAAAFHQPQTLAA

SEQ ID NO: 189866 - protein, 321 aa, unidentified
MLESTLTVTPTETYVGVDVAKDTVEVFIASTGRRLTLADPARLVAVLKDVGPCRVVMEATGGYERRWSAALLDADIEVAVVNPKRVRDFAKALGYLAKTDAIDAWVLAEFARVAEPRLLAKMPAQQAELAALVNRRRQLLTLHTMELNRQTQPNTLSARQSIATVLKALDRELKRLDQAITDLVESDDQWNDKVQLMQQVPGIGKVTAVTLVAEVPELGQINRQEIAALVGVAPFNNDSGVYRGQRSIIGGRTSVRNALYMASLSACRHNPWLRQFSERLKAAGKPSKVRLTACARKLLTLLNTMVQTNTPWDPERCLQST

SEQ ID NO: 189867 - protein, 309 aa, unidentified
MDQIIVGIDVAKNRLDVAVRPSGGAFPVARTAAGIDALIERLKPLTPYLVALEASGGFETVVVASLAAAGLPVIVVNPAQVRSFAKALGQRAKTDPIDAAVIAHFAEATRIAPRALPDDATRFLADLVARRRQIVEMIIAENQREKRATPRLRKSIARLVKALEKELSSLNEDIDDAVRGTPAWAEKEDLLASVPGVGSVIARTLIAELPELGTLDRKQIAALAGLAPFTRQSGQWKGRSFIGGGRTEVRCALFMGALVAKRWNSPLKAFFDRLVAAGKPKMVATIAVARKLLTILNAIIRDRKPWQPA

SEQ ID NO: 189868 - protein, 287 aa, unidentified
MENTVAGCAAVVQQLQAANVALVVLEATAVYHRAITTALVTAGIPVAVVNPRQVRDFARSTGQLAKTDRLDATLLARFAAVVRPTPRPIPDDATQALAALLERRRQLVDMLTAEKNRLSVARREVRPSVQQVIRTLEKALAASDEEIDRWIRSSPIWRAQEELLRSVPGVGPQTARLLIAALPELGRLTRREVAALVGVAPLANDSGKMRGKRRCWGGRSHVRAVLYMAALTAARCNPVLQRLYRRLLAAGKPAKLALTACMRRLITILNAMVKTQQSWRAPALVIP

SEQ ID NO: 189869 - protein, 410 aa, unidentified
MTDTAYQIYVGIDWGSQTHQVAVLDPARRVIGERTVSHDGLALQALASWLAALAPPRAVAVAIEVPHGAVVDTLLERGIAVYALNPRQMDRFRDRYTVAGAKDDRRDAQVLAAALLTDQPAFRRLQPHDPLVVQLRELTRMEAELHEEIRRLANRVREQLLRFYPQALTLCPAADEPWFWALLTLLPTPTAATRRRRGPVAALLREYRIRRVTVDEVLTVLRRPPLTVAPGTIDAAGAHIALLLPRLELAATQRRLCAHRLEALLETLAAAGEQQGHRDVTVLRSFPGVGRVVAATMLAEASQLLATRDYHRLRAYAGIAPVTRQSGTHRAVHMRYACNLRLRNALYYWGFIAARHDPATHQHYQALRARGHSQGRALRGVADRLLFILMAMLKTQTLYDAGRRQAQVAA

SEQ ID NO: 189870 - protein, 330 aa, unidentified
MNSICLSTDQLTAALPVLGLDVAKKSVQAELRTNGKRVRFGFENNAKGFAQLARMLKEQGAPKVWAGLEATGPYSHALALWLHGQGHRVSLLNPRRVKQYARSAGNRNKTDLLDAAIIADFVCAHLPAAWQPPTLEVAQLQALVRRREELSLMLQAEKNRLEGVASHVRCSLERIIDTLSAEKTRLEKLITQQIRSHQQLSRDHQLLCTIKGIGSLTAAILLAEMARPGQVERARQAAAHAGLAPRREQSGTSVRRNRGLGNEGNRYLRKALYMPALVAIKYNAPLRHFASRLRTAGKPKMSIVCAVMRKLIHIAFGVLKHQKPFNPSLA

SEQ ID NO: 189871 - protein, 338 aa, unidentified
MYSIGMDVHSKVTMLCVLDEFGKVVKETSVRGPLGHVPAFVKDLQRCLGGPVKVCYEASCGCGWLHDQLRAAGMRVQVAHPGRVRMIFRSKRKNDRIDARKLATLLFLDQVPLAHVPPAEVRQWRALIEYRSKLIGQRGAAKSRLRALLRTNGMVAPRGLWTIRGRHWLEEQAFSEFEGLQRDMLLVELGQIQARVGVVEGALKKKAAEVPAVGLLMTIPGVGIRTAEAVVAYMDRADRFRRNKSVGCYFGMVPCEDTSVKARFGHITKEGPSLVRRLVTEAAWQAIRRDAGVRAYFERVCRGDRDRRKIALIATAHHLLRVMHAMMTHGEVWRSAAA

SEQ ID NO: 189872 - protein, 357 aa, unidentified
MKIVGCDLHARQQTIAMVDTETGEFVERALSHEGNALREFYGALEGPVVVGIEATGSMQWFLELLQELGIQCRVGHPAKIRAKETRKQKHDRRDARLILELLIEDRFPEIWMPSIEERDLRTLLRDRHQWVKMRARLQHTLQAIALNHALRRGHALWSQAGQNTLQALPLPPYSSQRRTELLSLYEQLQQRIQELDKEVEAQARQRLQARRLLTHPGVGAVTALATDVFLGDPSRFDTANQVASYIGMIPCEHTSGKRQRLGKLTKQGNSLLRYLWTEAGMHAVRKDPELQRFYRRKLIQKGMGKARIAAARKLGIRLWIMMRDQIDYQQFCRRGRLRQKGKAHAGMPDFNSGPAMQ

SEQ ID NO: 189873 - protein, 348 aa, unidentified
MDHYAGIDVSLECSSVCVVDANGKIVREGKVASEPEALIAWFGWFGASLGRIGLEAGPLSQWLYAALRDAGLAVELLETRHVRDAFKAMPVKSDRNDARGIAQLMRLGWFRPVHCKSLGAQEMRAMLTARKLVQSKLQDVENSLRGILRGFGLKVGKTTPRSFVGRIRELVAGHPNLATIAQALLSVQAVLLREFNAFEKRVRAIARSDLRAKLLMSTPAVGPIVALTYTSAIDDPARFKSSKQAGPHFGLTPKKYQSGQTDYSGRISKIGDAAVRAALYQAAHVMLTKPVKGCPELKSWAMRIARRAGHNKAKVALARKLAVIMHRMLADGKPFNPNAKAETMAAAA

SEQ ID NO: 189874 - protein, 424 aa, unidentified
MNLTQNDRLNQVTADTLVVGVDIGSETHFARGFDWRGYEFSKRAFRFSNTQVGFLTFIRWVEEMMKKTEKTKVIVGCEPTGCYWLTFQKFLTDRDILLVTVNPYSVKKCKELDDNSPEKSDLKDPKTIAGLVREGRYSTSYLPEGVYAEIREAQVCRDQIMKQHVRLSNQIQGWLQKYFPEYLECYKDFDTASGMMVLEHAPLPEDIIKLGAGGINEIWRNAKLRAAGIKRAKTLVEAAQESVGLSGGEAARLEIWFLINDYQTKTKQLERLDEFLSKEIMKVPHVEKLLAIKGVGLSTVIGFVADVGDIGRFTDPKQVQKLAGLEITKASSGKKKGQPCISKRGRRRLRRTMYESARSLISWNEAFSEVFMYYRYRTRNPLGGMQAKIAVACKAIRVFYTILKTGCEFDAEKLRRDIIRPEAA

SEQ ID NO: 189875 - protein, 348 aa, unidentified
MTVYIGVDFHARQQTISYLTTEEGEIQQLVLEHEQPAEVRAFYAQFGEQRVVVGYESSGYAAWFEELLEELGCEIWVGHAADIRRFARRRQKNDRRDADLILDLLVTGDFPRIHRYSAASREVLQQLRYRQKLVKMRTMVVNGLLFMASSRGVTLRSQLQSQRGQARLRQLALPEPLAQQRDELCQLLQELSSKIAKVQAWLEAKAKQDVRVQRLRTQHGIGPLTGLCLAATLECPERFANGRKVTAYAGLDPTEDSSAERRRMGAISKQGSRLLRFYLVEAGQVAMRRDADLARVYQRVSRRGGHAKAKVAIGRRLLVRAFIMLRDEIDYAEFQRRGVAARSSRGTA

SEQ ID NO: 189876 - protein, 357 aa, unidentified
MQTIERRNALYVGIDVHKDTHTAVGVTPFGEKLFEITVGNYASDFESLAKKVEQMKGTLSPYYGLEDCHGYGERLADYLLGTGYPVLHVPSILVDRQRQNNTHPEKSDSLDAYGVAEVMIKKTDTLPRYTVSEETKKAKQLKELSQDRLFLVEEQTRLKNQLHSILHRIWNTEYRQKFKNPFMLKALKYWSRAKPDCDAFLLKSMKRKVKRLIDLRAEIMELEDEMAVLLEKGGYTIQTAVGCGTVLSAMLVGEVGDISRFHSPGALAKYAGCAPRECSSGKTFRHRKTRGGNRQLNAAFHRMALSQISMYGSEKAKAYFKKKVSNGKSKSQALVCLRRHMVNIIWCMMKHRTAYRF

SEQ ID NO: 189877 - protein, 389 aa, unidentified
MLLDHPTDGPTAIRTHFGAIFVSLELSRSNWLITSLSPGKGEKMSGHSVPAGDVAGLLKLFADLKRKAAARTGESYPVITIQEAGLDGFWLHRVLQQEGIESHVVDPASIAISRRRRRAKTDRLDGETLLRALLAYKRGEPRVCAMVVAPTPEEEDRRRLCRERRTLIAERITHVNRIKGLLFAQGVSNYAPLRLNRRVQLEALRTGDGRALPLHLKVQIGRELDRLELLLDQIKAVEAEQDALLAEARKPAGEHAAPDPVTMLLALKGMGANFAAVLWSEAFYRQFANRRQLAAYAGLAATPWRSGGIEREQGVSKAGNPRLRTTMIQLAWLWLRHQGQSALARWFEAHSKRGRKSAIVALARKLLVALWKYVTSGVVIEGAKMKSAA

SEQ ID NO: 189878 - protein, 337 aa, unidentified
MAKEKAVRMVGVDVSAAVLDVSREAADEAVVGRQYANTAAGQRELARWVTQGKRHARVVLEATGLYSLDVALCLQRTPGVEVMVVNPRVSKDFAGALGQRARTDATAAGALRVFAARMPFVAWRPPPAAALAVRALMRRVVALIEMRVQERNRWQALRATSALPAVLQADLREHIKRLGQQIARLEREARTLVSATPVLQEAYTRVRSIKGFGPRSVLMVLGELAVLPDTLTTRQWVAQAGLDPRPIRSGSSVHPPVRISKRGNTYLRRALFMPALVGVRCNPAVQRFALELSARGKAPLQVLVAVMRKLLHAIHGMLRTHSDFDGEKFRRSLRAAA

SEQ ID NO: 189879 - protein, 509 aa, unidentified
MGVIIGMDPHKRSATIEVIDERAVVLAAGRYGTDKAGYADMLAAARRFADRVWAVEGCDGIGRNLAHRLVHDGEPVFDVPPKLSAQVRVFATGNGRKTDPAGAHSVALAARRAPGLVQVRVGEDLVVMGMLADRRDELGQARTQVAGRLHRLLLELLPGGARKFLSARQARTLIATVKPRDLAGKTRRRLAAGLISELEAIDKKTRALDKELAGLVTARGAALTDLHGIGPSGAARLLADAADVHRFARRDRFASWNGPVPLDASSGSQSRHRLSRAGNRRINRVLHIMAAGWLRNQTKGRAYCDARRAGGMPSMMAMRALKRRLSNVVFARMLADQKRREASPGGQSGTPADSSVAGPDPRTPALRTSHVPGPPLHSLNGVCASKGSAPSPCAPSPGYPGNPEAIQPPLGETAHWCGAYLPMDPARLGAARVGGEHNGALVFRVSAPAVGGRATEAALTAVVGALGVRRNAVTLIAGASSRTKIVEIEGADCGALNRLLANAGHGDPT

SEQ ID NO: 189880 - protein, 310 aa, unidentified
MDATFVGIDVSKDRLDVHVRPSGEAFAVPRNGKGLSELVERLRSIAPALIAVEATGGFEMIVAAAIAGAHLPLAVVNPAQVRYFAQAVGRRAKTDPIDAAVIAHFAEAVKPEPRELPDEAARLLAELVSRRAQLIAMVVAERQREKRASSVRVRKSLARHIAALEKELPVIDRDIDTMVRGSPLWREKEDLLVTFPGVGNTIARSVLADVPELGRLDRRKIASLIGVAPFTRRSGKWKGKSMIGGGRPAARSAIFLAALSAIRCNPVLRAFYQRLLAQGKPKMVALIAVARKIVTILNAMLRDKKQWQPA

SEQ ID NO: 189881 - protein, 347 aa, unidentified
MEYFAGLDVSLETVNVCIVNAAGDILLEKKIAAEPAAIVHLLKSFGSPFKRIGLEAGPTSSWLYGELRAAGYGAICLECRHVKAGLSAMRNKTDRNDARGIAQLVRLGWFRQVHVKSEEAQRTRMLLVNRQQLLTKALDIENSVRGSLKVFGLRVGVVARRGFEARVLELVADDPILLAVTKPMLRVRQALLEEFERLDRLCQQLARRDPVCRRLMTVPGVGVVVALTYRTGVDAPERFSKSRDVGAHFGLTPKRYSSGQTDYDGRISRCGDEMVRTALYQAANVLLHHGRWSSLRSWAMRIAKRGSVKGAKVALARRLAVVMHRMWTDGTDFRWSDTSRMTAPTAA

SEQ ID NO: 189882 - protein, 353 aa, unidentified
MKKYIGCDLHKKYAVFVAMDESGRKESPVRVATDTLELREYLKTLEAGTPVSVEAGGSWYWFVDLLEEYRLDVRLANPVELKKRLPGRNKTDNSDAGGSAMLLRNGTLPEVWIPPAGLRDFRGLLRTRLSLRCHTTTLKNRIHGAIRRYGQYDEEEPKTLFEGKGRVCLSRYVGGLPPSTRLATRHEWDVVDTIERHIGELEKQIRGSIGQIGYVRLLKSLPGVGEILSATIYLEIGDVTRFPSCDRLASYAGLTPTVNASGGKSRLGHTSPVCNHYLKWAFVEAANAIVMRKALYAGTHAVQLYERLQKSKGHGKAATAVARHLAEASWWMLTKKQPYREPAPASTSSSKNG

SEQ ID NO: 189883 - protein, 340 aa, unidentified
MSTIQVIGIDLGKSNFHVYALGSNPQASFKKHFSRKQLIDFLANQPPTIVAFEACGGAHWLARKCQELGHDAKLIPPQYVKPYVKTNKNDFVDAEAITEAATRHNMRFVSPKTEEQQVIAICHRVRDGYVKERTAVMSRIGATLLEFGLSLQTGHKCMKELFCWLARQAHVTLPPLLLRELEVMHSDYHRLNDQIAEQDRKLKEWAKQEELCELVKSIPGVGDMVATALVMEVGSAVQFKNGREMAAWMGLVPRQYSTGGKQKLLGISKRGNKHLRCLFVHGARAMMSRLGRNKGPYDAWLLKLRESKPFNVVCIALANKLARIAWAVLTTRTPFQGTAC

SEQ ID NO: 189884 - protein, 282 aa, unidentified
MTIVDARVVCVTGGVDTHLDFHVAAALDQIGGELGIESFETTTVGYQQLLDWLSGFGPVTRVGVEGTGSYGTGLARFLAEHGIEVVEVDRPNRQLRHRQGKSDPTDAVAAARVALSGQATGTPKLRNGPMEQMRVLLIARRSGREQRVQTLNQIRQLVTATAPDLLDIMGLAAEGAAVLLAAAGDNPQRVRTEAAWAHMCGVAPIPASSGKTVRHRLNRGGNRQANSVLYRIVITRMSADPRTQTYIQQRRDQGRSTKEIIRALKRYVAREIYKHLPRPDLT

SEQ ID NO: 189885 - protein, 341 aa, unidentified
MSDYSYFGGIDLAKNHFSIHVVDSQGKVTLHKSVTRPKLLTTIANMPPMRIGLEACGGAHYWARTLNKLGHDARIMAVKYVLPHRTKGKNDLNDAVAICQAVQHPSTRFVPVKSPEQQAIMSVHRMREHWVRERTALMNRIRALLSEFGLIIPVGRSSLMKQVPLILEDAENELPHLARTVIADAYYHLEQLNQRIEDTEQVFDAFSKVSENVQRIMKVRGIGPQTATAILASIGNGSQFDKSRDFSAWLGLVPKQYSTGGKPRLGRITKHGDKYLRTLLVHGARTVIANLGDKQDRLSQWCRGVLERRGMNRAIVALAAKNARIIWSLLHNQTEYENYAA

SEQ ID NO: 189886 - protein, 385 aa, unidentified
MRGNSFIPRDYDVFTGLDVSKKSMSVTFTNHQGFIRSLNMPHKAEHLLHYVRKHFPDQKIAFVYEAGPTGYGLYDGLAAQAYPCLIAAPSMIPRAPGQRVKTNRLDSKVLSENLRGGQLKSIHIPSPTYRHLRHLTQLRDVLVSELAGMKQRIKSLLLFEGIEFPPAPPGSQWSFMVKDKLRKLPCSGTVRFKLDQLLESLEFNEKQVLKTITEIRRFCRNDPELSQCMQYLMSLPGIGWITASQLLARIGDWRELNNIRQLAGFLGLVPTEHSTGEKVDRGSITRTGDERLRSKLIQASWSAIRQDGELREFFRSVCRKHPRAVASRVAIVAVARKLSVRISVVLMKQRSYEVREKVHSAPLTQEETSPQGTTRRLGEPGEKNS

SEQ ID NO: 189887 - protein, 345 aa, unidentified
MRDVSITRYNVGVDFGSEQMDAKLAAQYEDGIRKILFSRRFENKDSGFKNLDGWLKEKCKCKGVEIRINCEATGVYHERCCYFLDGLGYYVTVEVPSRVKSYKKSCGFNSKNDKIDATALAYMGLERNLRKWEPINSFYYELRMLTRYHESVQQMHTSACNQLHAMQAGMRTSKLVVKQLKANIKLYEKQLAELEKAIEEKIASEPEVKRKIDNIIEDMKGVNVMTVAVVIAETNGFSWFTNRRQVVKYSGYDVVEDQSGKRRGKTKISKKGNAHIRRALYFPAINLVTHNVKPFVDKYERIFERSRIKMKGYTALQKDLLLMLFTLWKKDQKFDPSYQNQQKKK

SEQ ID NO: 189888 - protein, 343 aa, unidentified
MDHFAGLDVSVKETSVCIVDDMGKIVREVKVASEPEALLAVLKNPAYQFKRIGLEAGPLSQWLYSALAEAGLPVICVETRHMRAVLKAQINKTDRNDARGMAQMMRVGLYRPVHVKTLRSQKLRMLLTHRQLLLSKAIAIENDLRGTLRNFGLKVGMVGKVKFEARIRELVETLPDLAVLVEPMLIVRRVLREQIVILHRRLLAVVRDDEVCQRLMTTPGVGPVVSLTYRATVDIPARFRKSKSVGAVFGLTCAKYQSGEVDWDGRISRCGDEMMRTMLYEAAQAMMRSKKWSWLKAWAMQIARRRGIKKAIVALARRLAVILHRIWVDGTEFRWTREQAVAA

SEQ ID NO: 189889 - protein, 318 aa, unidentified
MNVIGLDVSKDTIDATLITTKGSKDYIKISNNTEGFENLINWIKTKRIRKIAISMEATGIYYEQAAEYLSALYTVYVINPLKIREYAKSQFSNTKTDKADSKLIAEFANRHLDKLTPFRPSENPTFYKLINLLQQLKEQQKETQNRLHTAKDIYIKSTHEAIIELLEEKIDQTSKRIEGMIKQKESLNIEYQNLQTIPAIGKETAVILLRHLTDKSFETANKFVAFAGLSPKIEQSGTSVNKKGRLSRYGHRQLKRALFMPALVAYRMNAFPQLVRNLEAAKKPKMIIIVALMRKLAKIAFYIHKTKKPFDKARHQTV

SEQ ID NO: 189890 - protein, 352 aa, unidentified
MKSYSQIYIGIDLHHNQSTVGYMDNDGEYFAKDRIPITSKALQGAVVSITADHKHLTIEQGNMSFWVGEQLRDYVDRLIICDPRKNSLISQGLAKNDGLDAYHLCELLRMGSLKPVWRPKQFGDRRLFFHRIKEHLRLKKSIVANKRQLQATFRHWGYNRTLTKGDYVHPEAALAGIEPAGLARELAEKFTYIQMITRQRTQLFERIREQGQKYPEISEFQKMAGAGPITAHTFSGYLQTPHRFRDRGQLIRFCQLAVRKYSSNGRRLRAEHLSKAGHGCLKDVAYTIWNGAMKGTNEVSGFYQASLERCGDKVNARLNTERKILITLWSIWKHNRTYQPEKFFSANGDSAR

SEQ ID NO: 189891 - protein, 371 aa, unidentified
MKKSITFVGLDVHKNSIEVAFADVGREGEVRHYGAIDGDLDSFSRLVRKLVSTGKELHFVYEAGPCGYEIYRYLTAKDFDCAVVAAPAGDPTKGGRKRIKNDRRDAMTLARLHRAGELTYVFVPREDDEAMRDLTRAREDASNAQRVARQQLSGMLLRLGVRYNGKTSWGLAHLRWLAHIKMPTPAQQVVIQEYIHAIKETTDRLERLTSQIAELAPAWRMFPVLQAYQALRGVSLIVAATVVAELGDLTRFDNPKQVMAFLGLVPSEHSSGEKTRKGGITKAGNGHARRVLTEAAHAYQFPARVSRAILQRQEGLDKAILDIAWKCQVRLCSRFRRLMAKGKNRKTVVTATARELIAFMWAIAQQVPVAA

SEQ ID NO: 189892 - protein, 365 aa, unidentified
MKKHTSNAHALNEISACTTVAVDLAKRVFQLAGEDAHSQVVYAQRLKSREAFQAFLVALPAGVTVLMETGPGAQAWARLLQAQGQRARILPAQRVAEHRSGAKNDRNDALAILRAGRDSSIAAVPIKSAAALAMQALHRARQGYVRRRTALGNQMRGLLLEHGIALAQGEVALSRGVPRILEDASQLLPDMLRELLDELLGEWGQLGERIEVLTGRLDTHARTDETAKRLMTVRGVGPIIATALLAKQTEPERFANARQFAAYFGLVPDQHSSGQTVRLGKMSKRGDAYLRSLMIQGAHAVLRQLRPDAEQPDDRRLQRWLQRLGRKGAAVRLANRNLRILWVLLQSEQTYRRQPGQDQEAAMTH

SEQ ID NO: 189893 - protein, 345 aa, unidentified
MTIVETRAITGGVDTHLDVHVAAALDANGGVLGIESFPTTTAGYQQLFDWLAGFGELARVGVEGTGAYGAGLARFLHAAGIEVIEVDRPNRQARRRQGKSDPLDAVEAARAALSGRARAIAKTADGHVEAIRALVVAKRSARDMRIKMLNQIRHLGFTAPDQLRERFRGVPRSSLAERAAALRPRPDTDEVTYATKLALHTLGRRVLALDDDTAALDALLSQLVTVTAPDLLELYGVGVDTAAILLVAAGDNASRIGSEAAWAHLCGVAPVPASSGKVTRWRLNRGGNRQANHALWRIVFTRMGSEPRTRAYVQRRTDEGLTKPEIMRVLKRYVAREIYRHLPGN

SEQ ID NO: 189894 - protein, 397 aa, unidentified
MATLWAGVDSGKTAHHCVVINTAGMVLLSRRVSNDETELLELIAMVVDLGEGEDVCWATDLNGGGAALLITLLAAHGQRLVYLPGRVVHHAAATYRGDGKTDAKDARIIADQARMRTDLQPVRGGDQISVDLGMLTARRAALVCDRVRAINRLRATLLEYFPALERAFDYSKSKAALALVSEYSTPDRLRRVGVSRLAGWLRKRGCRNSDAIAATAVDAAHQQSTSLPAERIGSELVARLAGEITAIDRDLVELDAQLTARFHQHEAAEILLSLPGFGPVLAATFLANIGGNLDGFDTVDRLAAVAGLAPVPYDSGRISGNLHRPRRFNRRLLRTCYLAALSSLKNSPSSRAFYDRKRREGKSHKQALIALARRRINVIWAMLRDHTPYQEPALATT

SEQ ID NO: 189895 - protein, 350 aa, unidentified
MNQLKYVGMDVHKATTVIVILNALGHFQKQVIIKTKADSIREFIKSESGTLHVIFEEGTQSTWLYELIKPLVAEVAVCDVRKHKTGHKGNHADAIDAEQLANLLRLGSVKSVYKGDTQQRQLKELARAYENLVSDSTRASNRLKAIYRARGIDCDGQDIYKPSQRERWLGKLTEPAARFRAQGLLTELETIKKLRKEARVELIKQSKKHPDYKLLIKTPGFGPLRVAQLLAWVGTPHRFRTKRQFWPYCGLAVITHSTAQYKIVNERIEKQRKATATRGLNRNHCPTLKQVFKGAATRALSCEPFKAFYQERIENGIRPEMARLSLARKLAATVLAIWQRQEVFDPTKVA

SEQ ID NO: 189896 - protein, 341 aa, unidentified
MQIKVMGIDIGKSTFHVVGLDEKGNIVLRKRFSRTQLLLHTANLPACLIGMEACCGAHHLGRALAAQGHQVRLMAGQYVRPFVQNNKNDFRDAEGISEAVQRPRMHFVPLKTDEQLDLQALHRVRDRLISQRTALINQIRGFLLDRGLAVPKGIAKMISLLPTILEDADANLSPRIREVLEELKQECADLNEQIEAMDQKIAATAKESPVCRRLLTVPGIGPIISTAIVAAIGNGATFNKGRSFAAWLGLVPRQWSTGGKTTLLGIGKRGNPYLRKLFILGAQSLMMHMSNSQRPYMQWLKQLAARAHRNVVVVALANKIARVAWAVLTKEEVYRAALAAC

SEQ ID NO: 189897 - protein, 315 aa, unidentified
MTNRKMSKTIVNIGVDVGKYSLDICIYEKGIHWQEDNNAQGISRVLKRLSHYQVERLVMEATGRYEFNLAQAAYSKGLAVCIVKPLSIRRYAGAIEQLAKTDKIDAAVIAEYAAIAQPRITPQKSKNLIAIKDLIARRRQLMGLRTQELNRIKIMGKAFEVSCRRIIRTLDAEIARMETRLAKHVDDQAEWTEKHTLLKTAPGVGDTLIYTLLADLPELGTMNNKEVAALVGVAPINRDSGKLRGKRRIRGGRHSVRTVLYMATLSATQCNPVIKAFYKKLVSQGKHKKVAITACMRKFIILLNAMVRDKCEWTY

SEQ ID NO: 189898 - protein, 351 aa, unidentified
MLIIGCDFHTRYQQIAMADDATGELLIERRLDHESGEALVFYRSLQGPVLVGIEATGPIHWFERLLAELGHELWIGDSAKIRASEVRKQKTDERDARLILDLLLAKRFPKIWVPTPAERDLRQLLWHRHKLVCLRTMLTNQLHFLAMSQGLCRKKKLFTKKGRSELIGLALGPWASRRREELLKLLGQLDPPIAELDRAVLEEAKRRDAAVLLMTHPGIGPVTSLAFVLAIGPITRFQRSKKIASYLGLNPSEASSGGRRRLGAISKQGNTMVRWLLIEAVYPAVRLDPELRQDYQRLKFRRGHAVAKVAIARKLAVRMYWMLRSGADYVQLVRRQGSPGATLMNASSSPG

SEQ ID NO: 189899 - protein, 372 aa, unidentified
MIERTTLSFIGQEIYCGFDVHKNLWSVCVRHCGRELACYSMPANAREVGRKLRKDYPDASIHSVYEAGFSGFEAHRILVDEFGIHNIVVNPADVPTNGKERVHKSDRIDCRKLAKSLEAGLLEPIYVPSREHLLLRNLLRRETQTSGAIVRTINQLKSHWYFNGEPVPHRAGKTVLGARREQAHARGDYVAVNLIDQWHCLTESRQRIVKCEHETLAKLSLTKEIKHVASAPGIGMRSAIVLLSELWDMHRFPDKNHLASYVGLAPHLVGSGDKEETVSGGNRKQKQLHYILIQAAWRASRSDPQMISLYGRLRLRHLASQRIACIIAKKILFIIRALLLEDRDYQAIFPTREITCKQTKATRNETPPENGR

SEQ ID NO: 189900 - protein, 339 aa, unidentified
MKDQDVSDVVRTKKRTAMRYIGIDVRKATFVVAYSSDKGGEIRTFNNTTAGIRQFIGTLPKDGSIHCVMEATGNYSALLLYMLNVAGITVSMENPLKVKNFAKAMLSTIKTDKSDARLITLYGEKMNPRPFKVQGEAILRLRQKRTVIRQLTKQITAMSNLRGSLACLPVPDKGATHTVDETIKFLEKKRDRLQSELTDLVEVEFSRQLALLTTIKGIGITLATALIITTGGFTYFQNAKQVSRYLGICPTYEQSGTSVNIKGHINRNGDAYTRGLLYIAAWPASRFNAQCKETYTRLRQNGKSGKLAMIAVANKLVRQAFAVVAHDKEYVDGFVSNRP

SEQ ID NO: 189901 - protein, 368 aa, unidentified
MSKAEKNRMCVGVDLHKTQFTVCALDEGTGTVELECEFRTNADGYEDFISRMHEIESERGNSIELAVESTGNARFFKNKMEYEGFRVVVVNTNKFKVITMSTKKNDANDAATLAFYLLKEMLPESHLCDQTSEEIRRMLKTRSILVQATVKMKNQIHGMMLGYGIETKSAQLQSKKKRQELYKDLANHNFSEFTTSSLKVILDILDDLQKQIKTIEGQLQKMVEDNDNVELLKTMPGIGQIGAITIAAYTNDMSRFDGDFKRFASYLGIVPSVRDSNQTVRRGKITKHGPQELRTAFVQVAMGIIRQPQNTSEWKLMIDYHRMKKEKGSGRAIIALTRKVARIVFVMLSKQKEFNPALMIREKTKLTA

SEQ ID NO: 189902 - protein, 401 aa, unidentified
MNAVGIDVSKGKSMVAILRSYGEIISKPFEVKHTVSGIRSLIEQIQSIDGESRIVMEHTGRYYEPLVRELSKADLFVSAINPKLIKDFGDNSLRKVKSDKADAVKIARYTLDSWTELRQYSLMDEIRNQLKTMNRQFDFYMKHKTAMKNNLISILDQTYPGANTYFDSPAREDGSQKWVDFSATYWHVDCVRKLSLNAFIDHYQKWCKRRKYNFSRSKAVEIYEASKELVSILPKDDLTKLIIKQAVEQLNTASQTVEQLRTMMNEAASKLPEYPVVMAMKGVGKSLGPQLMAEIGDVSRFTHKGALTAFAGVDPGVNESGSYEQKSVPASKRGSSTLRKTLFQVMDVLIKTKPQDDPVYLFMDKKRAQGKPYYVYMTAGANKFLRIYYGRVKEYLSSLPE

SEQ ID NO: 189903 - protein, 405 aa, unidentified
MGKVFVGHDWAETHHDVYVEDGAGQRLGKARLDEGVSGVARFHELVSSFVVDPGEVTVATETDRGLFVGALVAAGYRVLAVNPMSAARYRERHSTSGAKSDPGDAFVLAELARTDGHHHRPVAADSELAEAVKVLARAHQSMIWTRQRQVNQLRSTLREFYPAALAAFDDLASSDALAVLALASTPSLGRGLSRSKIASALRRGGRQRRIDERAAEIQTILRADTLQAPGPVAEAMGASVRALVAVISEQVAQTARLEAELADHFELHPDAKIIRSLPGLGMILGARALGEFGDDPNRYTDAKSRKNYAGTSPITRASGKHHVVLARHARNRRLADVCYQWAFAALTASAGARAFYDQHRAAGDTHHQALRALANRLVGILHGCLRHRTPYDEHTAWGHRTAAAA

SEQ ID NO: 189904 - protein, 441 aa, unidentified
MQVIHECCAGLDVHKKTVVACPVQTLANGQKRQEVRTFGTTTPDLQELRAWLQEWGCTHVAMESTGEYWRPIWNVLEGHFELLLVNARHIKAVPGRKTDVKDAEWLADLLRHGLVRGSFVPARDQRELRALTRQRDNLVRERARVVNRLHKVLEDANIKLTAVATDVTGVSGREILAAIIGGVGDPALLAELAHGRLRNKRAELEKALTGAVRAHHRFLLITHLTHLDFLDEQIERFNGEIAARIQAPPPPAPPQGEAPTVPPPPPAEPPLTRAAAVELLDTIPGINQRLAEVIVAEIGTDMARFPTAAHLASWAGVAPGNNESAGKHFSGRTPPGNRALHKGLIQAAQAAKRKKDCYLREQFHRLAARRGKQRATAAVAHSILVIIYHMLSRREPYRELGGNYFDERKRDSVINRLTRRLEKLGFRVALEPQPVAVPVAA

SEQ ID NO: 189905 - protein, 431 aa, unidentified
MANRLQVGIDFSQKRADFCLLFPNGQPLERHQVFGNSCSGYSLAKQLLLDALDSYQFDGVDVSGEATSYYWLPFFLQLAADPDLEPHDLNLFLLNPRWVYWYKKCFAQDDKCDEKDPYYIADRTRTHRPDVVWSPQMDTLSLRFYTRFRFHLVQDLAREKCYFSAFLFLKASAYRRIEPFSDIFGATSRLVLTQLPSLDELADLPVEALTNYLHELSGHHLREPADNARKLQHVAQESFTLHPALTLPVQRILELTLDHIRFLEDQIQQVEDWITAELSSHPAIPQLATIPGVGPVFSSGIGAEIGDTQRFLQGTKWDKRRKRYRSRNLRDAEDAVAKIAGLWWPRSGSGDFETEDRRMAKTGNRYLRYYFIQAANKMRQNIPDYADFYARKYHQASKHKHKRALVLTARKSVGLIVGLLHRNEAYRSKEG

SEQ ID NO: 189906 - protein, 352 aa, unidentified
MSKITITGIDLAKNVFHLHAVDSTGRQVKAIKLSRLKLTEYLHRSEPITVAMEACASAHHWGRLCQLLGHEVRLISPQFVKPFVKSNKNDRNDARAICEAAQRPDMHFVPVKTVEQQAVLSLHRVREMLIGQRTATINQLRGLLTEFGLTAPIGRRALHNTIPALLEDLMKISPTFLVNCIRQQWEHLGELDQRIDNVTTQIEMHTRQSDVARRLQTIPGIGPITASALEAYVGNATQFRAGRQLAAWLGLVPRQHSTGGKPMLLGTSKRGDSYLRRLLVHGARAVVASVRCSPNVPKQDKTIMGWLARKHMNVAVVAMANRNARIAWAVMTQERNLDRNFRDQLANQLTAA

SEQ ID NO: 189907 - protein, 392 aa, unidentified
MYIVGIDIGKNHHEASIVSPEGKQIGHSLRFATTHKGADSLMSFIFNNIGNSSCIFGMEATGHYWYPIYSFLKARGYTIYVINPIQSDSLRKMYIRQTKNDSIDSFLIAEVIRFGQFTTTSMADENILAMRQLCRYRDSVISSRTEIKLRISTIMEQIFPEYEKQFSSLWLSTSMGILEKYLTPENIENAPIDELFEIIKDKSHNKLTMKKAISIREAAADTFGIKIAQDAFSFQLKQLIDRMNFLDKQIEALDCQILEYYEKFDCYLHTIPGIGMIAAATILAEIGDINRFKSSSALVAFAGIDPTVRQSGEFSNTHNHMSKRGSPYLRHAIFLAATTCSFHNSPLNAYYKKKREQGKHHLTATGAVARKLTTVIYAVLRDGKPYEPKSFC

SEQ ID NO: 189908 - protein, 393 aa, unidentified
MICVGIDVAKDKHDCVILNSEGKVLAGVFTIPNNADGFDTLLQKIHGCTSPDDKIKVGLEATGHYSYNILGFLLNQGLPTYVINPLHTNLFRKSMSLRKTKTDRVDAKTIAAMLMSNVDLKSYTDTAYHNEELKSLTRYRFDKVQERAQLKQSVSRLVTILFPELEKLVPTLHMSSVYALLIEYPGAKQIAEAHLTHLKSLLKDASKGRYGRDMATEIRDAAKRSIGSVMPAKSLELRHTIRLIRELDSEIKDIEAAIEAIMEELQSPITTIPGMGFRMAAMILAEIGDFSFFDSPDKILAYAGMSPSTYQSGHLSLAGTYSHMEKRGSRYLRYALYNATKYVCHWDPGFAAYLAKKRAEGKHYNVALSHAAKKLVRLIYALEKSRQPYRRAA

SEQ ID NO: 189909 - protein, 337 aa, unidentified
MKKASSIKVFKDCTGIGIDISKAELVVVGLTPKMTYLKRVPNQMKAVKIFVQKLHASGYQGKILCESTGHYHLKLAVVCHKVGLPLIVLNPLQSSKHSKASVRKTKTDPHDGLMLATMCITEPDLPQPAELTESKVLIRLKMGQIAAIEKQLQKMNQSLAQYEETYNELGLALSDLQLSLREHCGTLKKLQRQLSKELEDLLTEALPEDTSYDRLCEIPGYSNIVSGLVGQFDRNVKGAHSWTAYVGLDVSVRESGTWKGRGKLTKRGNAYLRKRLYQSAWGACLNYDYVRAYYDRLKEQGRKHVEAVCIIARKLLRIAYHVIMDNVHFDQKIAFSN

SEQ ID NO: 189910 - protein, 424 aa, unidentified
MNLTQNDRLKQVTSDTLIVGVDVGSQTHFCRAFDWRGFELSRRVFKFSNTGMGFLTFLRWTEELMNKTEMKKVIVGCEPTGCYWLTFQKFLQDHDVQLVTVNPFTVNRSMELDDNSPEKSDLKDPKTIELLVKDGRFSTSYLPSGVYAEIREASVCRDQIMKQHIRLSNQIQGWIQKFFPEYLECYADWDSTSGLMLLREAPLPQDILKIGAGGINQIWRDAKVRAAGIKRAQTLVEAAQNSVGLEAGEAARLEIWVLVNDYILKAEQLKRLDEYLEEKVKEVPNVEKLLAIKGVGMSTVIGFVAEVGDIGRFTDPKQIQKLAGLEIVKKSSGKKKGQPRISKRGRRKLRRTMYESARALMNWNTAFQDVFLYYRNRTKNPLGGMQAKIAVACKAIRIFYVVLQTGCDFDEEKFRKDIIRPEAA

SEQ ID NO: 189911 - protein, 343 aa, unidentified
MGIDISKEKLNICLRKGTQTVREEEIKNTVSDIKKCVKRIEKENSVTKDDVLVCAEYTGRYIYPLVCACDEMELFLWMEDPTRIKNSFGVTRGKNDRVDARRIAEYAFRFSDKAAAYEMPDKTLVSLKNLLADRDTLLADRHKYEMQLHDQKGYMDSEDYTRKKRLWSAVLKTLDKQITLIDGEIQRLVESDEKLKHQTELLKTVDGVGDKVAVRMVVLTMAFTRFETPRQFNCYAGLAPFRYTSGKSIYSKSKVSQRANKQMKALLHLAAVSAATHMKSGEYKDYYKRKTEEGKHPMCVLNVIRAKLVSRMFAVIKRDEAYQRNYRISTSTEKNFQKAIANS

SEQ ID NO: 189912 - protein, 338 aa, unidentified
MYYTGIDLHKKTSFITTIDARGKIVTRANLQNVEEDILAYFANLGGETKIVIESMASWYWLYDLLTGEGFEVVISNPVKTKAIASAKIKNDKVDSHMLAQLLRADLISTVHVSSLETRKLKELLRHRSRLVRDATRMKNRIHMLLMKNNFRSPFSDLFGVKGLRYLEEIDLPDYHRQQVETYLLLYEKLQEQIEPLTKTVRALAKENHTAQLLMTIPGIGPITAMFIVAEVDDISRFRSYRNLASYAGLVPSLDASAGKEKRGRITKQGSRYLRTALVEAAQAAARMQNCRLRIFFRRRIVKAGYQKAIVATAHKILQYAFYVWKNQTPYKETYPVCA

SEQ ID NO: 189913 - protein, 341 aa, unidentified
MKSTTIAVDVAKEVLEVAVSVRPGQVSEQKRLSRTAFMKFCTDQPPATVLLEACGSAHYWGRRLQSLGHRVVLLPPHATRPYVFRNKTDRTDTRGLLEAFRNEDIHPVPVKSVSQQALTALHRLRSTWLATRTARLNTVRGLLREFGCTIPVGAHHVLAKTWDLLADPESGLPDALRPGLAAACTEIRDLEGRIRVVEDQLQALADQTPAVARLRSIPGVGLITATALVAFVGDVQRFPSGRHFASYLGLTPRERSSGLVRRLGAISKRGDVYLRMLLIHGARAVLWAAKKRPTPDRLRAWALHLQTLRGHNKAAIALANKLARIVWAVWKHDVDFREEAA

SEQ ID NO: 189914 - protein, 414 aa, unidentified
METTNGCVAGIDVHKKMLAVVVRRQNGSQMEYIKRQFGTMRREIEHLAAWLQHEGVSEVVMESTAQYWRPVWYGLEGHFLLHLTHPLKTKAPRGRKRDFRDAQRLADRWASGDLEESFIPGAEQRGWRWLTRARVHAKRKIGVIRCQVEGLLEQGSIKLTAVVSDAFGASGWAILERIAKGETDVEAMVELALGALRKKSQKLREALQGRLEPTYQLLLRQHMDQVRLLRKQVEEINEELAVAMKDHVAVLCRLSQIPGVDLYAAQELLAEIGPRAAAFPSAEQFSSWVGVCPGSHESAGVNYSRRSPKGNRYLRRLLMQTAWGAIHTKKTFFASLFQRLQRKLKAKGAAWAVAHRMAHVVWLIMHQEVEYQERGEAVPNPRTLARKLRHLVREFQLQGIDVRAVFDQTVGPHA

SEQ ID NO: 189915 - protein, 373 aa, unidentified
MNTIYIGVDFHARQQTICYLTTETGELVTAALKHEPKTAVRTFYEQFSGHVIVGLEASGYSPWFERLLEELGHQVWLGDATEIRRRARWRQKNDRRDAELILDLMLHDEFPRLHRPSLQSREVMRMLRYRQKLIKMRTMSKNSLQSLALQSGIARRGHLFTREGKAELDAAVMSPAMEWQRAHWWQLLEPLNQQVLEAMTWLKAASQNDVSIARLRTHPGIGLLTSLCLVHTLQPVARFGNTRKVAAYAGFDPMERSSAERKHFLGISKAGSRVLRYLLVEAANTAVRKDEELKRFYQRLAQRRGRPKAKVAAARKLLIRAYIMMRDEIDYAEFRRRAVAARLARLRQGPQIPAALIGQPASTARQEFLPRGK

SEQ ID NO: 189916 - protein, 402 aa, unidentified
MNAVGIDVSKGKSMVAIMRPFGEIVSAPFEIKHTASGINSLVELINSVEGESRIVMEHTGRYYEVLAHQLLEANLFVSAINPKLIKDFDNDSLRKVKSDKADAVKIARYALDKWQNLKQYNVMDELRNQLKTMNRQFGFYMKHKTAMKNNLIGILDQTYPGVNTYFDSPARSDGSQKWVDFASTYWHVDCVRKMSLNAFIDHYQNWCKRKKYNFSQSKAEEIYGKAKELVPVLSKDAITKLIIKQAVDQLNSASTTVESLRTLMNETASKLPEYPVVMAMKGVGTSLGPQLMAEIGDVSRFTHKSAITAFAGVDPGVNESGTYERKSVPTSKRGSADLRKTLFQVMDVLIKTHPQDDPVYQFLDKKRAQGKPYYVYMTAGANKFLRIYYGRVKEYLASLPES

SEQ ID NO: 189917 - protein, 340 aa, unidentified
MNTMTLLGIDIGKHSFHLHGQDSKGHQVLRKKTNRGQLLSTLAQLPACTVVMESCGGAHWLARQIGALGHEVKLIAPQYVKPFVKGNKNDFIDAEAICEAASRPAMRFCSIKTAEQQTLSALHRVRESLIGHRTVATNQIHGFLLEFGISLPIGVTALHRVPALLDDPQHPVPVRLKGVVMRLHRQIQQLNDEIKDIESDLKQQLKEDDAGSRLQSIPGIGPITASAVLADVGDVSNYRSGRDFAASLGLVPKQYSTGGKTVLQGISKRGDKHIRQLLVQGARALMQHIDKREDALGPWVRELLTRRHANVVACALANKLARIVWAVLAKGGQYAPHPNV

SEQ ID NO: 189918 - protein, 342 aa, unidentified
MDITTIGIDLAKNSFSLVGMNKHGKVLVRKTLSRKKLLPFIAQCPPCLIGMEACSGAHHWGREFSKLGHRVGIIAVKFIAPYRRGDKNDNNDAEAICEAVLRPNIWFVPIRTPDQQAVLCIHRVRQGLVRDRTRMMNQLRGLLSEFGIVMPRGRYLAQSAIGGILEDAENGLPMMARGIIDDLWQRIKQANEHINGYDRELSQLVKANPVARQIMTIPGVGDQTASGVVASVPDPRMFRNSRQFSAWLGLVPRQYTTGGKIKLGRITKRGDQYLRTCLVHGVRAVVANLRDKQDRVSCWIRALIARRGYLRAVVALAARNARLIWTLMMKQEDYRAMPATNR

SEQ ID NO: 189919 - protein, 351 aa, unidentified
MEQISRIGMDTSKYIFQLHGVNTAEQPVLRKKLRRKEMFAFLEKLAPTVIAIEACGASHHCARLLQSFGHSVKLIAPQLVKPYIKRGKNDAADAEALCEAMSRPVLGLDPGMRFVPVKTAEQQAGLMLVGVRDRLIRNRTQLSNAIRGYAGEFGLTAAKGKAHLAPLLERIHADESLPALARELFAAQAEEYAQLQAQIDEVDARLMAWHRADECSRRLTKIPGVGPIGAVMLTMKTPEPELFRSGRQFAAWIGLTPKDHSTAGKVRLGGITRAGDEGLRSVLVVGATTVIQHAQRGGRPSPWLTQLLKRKSPKLAAVALANKTARIAWKLMVTGENYAAKAAPAALAAAA

SEQ ID NO: 189920 - protein, 358 aa, unidentified
MEKLYLGVDLHKKSCWVTVLDADGHQLESRKLGTEKWELLEYFGKVRQPAALAVEATFNWYYFLNVIEPLGLELHLVHPWKTRAIASARIKHDKLDSRVLAELLRTGFLAEAWIAPRPVREQRQLLRYRVHTVQWATRAKNCIHGVLNRNGIRSPLGSPFGPRGRAFIAEAELPETDRWEVKGQLARLDLLGEQLRELDREIRKRSEASPIAQALEEIPGVGPFIASLLIAEIGDVRRFPTAKHLASYTGLVPSLYASGEHRWGGPITKQGSAILRWALVQAAHRAALSPRFQGFYQRHRQRHGAGKATVALARKLAVIAYYRWRHALHASDPPKELEKVRERSCGSAWSEQRPVTSD

SEQ ID NO: 189921 - protein, 297 aa, unidentified
MRSLQISDRQRGPSVDQISRIGMDTSKHIFQLHGVNAVEVPVLRKKLRRKEMVTFFEKLAPTVIGIEACSASHQWARLLQSFGHSVKLIAPQLVKPYVKRGKNDAADAEALCEAMSRPTMRFVPVKTAEQQAALMLVGVRDRLIRNRTQLTNAIRGYAGEFGFTAAKGKAHLDPLLERIHADESLPTLARELFAAQAKEYAQLQAQIDEVEARLMAWHRADECSRRLAKIPGVGPIGAVLLKMKTPEPELFRSGRQFAAWIGLTPRDHSTRARSDSALSHEPVTKDCAACWWSGLPP

SEQ ID NO: 189922 - protein, 403 aa, unidentified
MKHVIAFDISMGKNYMVIYNAQKRCVFESEIKHAKPEFKKLQEKIHELTDKTGELPEIVFEATGIYSRQLERFMQDNQYTYCLLNPLEAKLQCDSLRIHKTDRSDAHRLALTHFTATRRVFTGTDNLFYQLKSLSRLYSELDSELSIIRGRMHKVIQLTFPELERMFTSKSDLFLNFVQLFPHPDCILGLSKTIIKNRIRANTNKKISNITAEKKAIQILEIAKTSYPAVSQNDVLCDQLKLYARRYQELLHQKECCINKMVYIAEQRAEYDIILSLPGIGSNTAVRLMAEIGDITRFNNNKQLNAFAGIDIRRFQSGKTFFKDKINKRGNKHLRKLLFLIIQNMIKQRRYGQNHIVEYYDKLKTQPYNKCHKVASIACVNKLLKLLFYLITHNMHYDYRLTA

SEQ ID NO: 189923 - protein, 354 aa, unidentified
MRRTTKYVGLDVHQASTVASVREASGRVIMRSVLPTEAGALTEFLRGMRGAVHLTFEEGTQAQWLHELLTPLVNRVIVCDRRGAPRQGNKGDQVDADLLSELLRRGGLRAVYHGSAHHATLKELTRAYRNLVEDATRVMLRLKALFRARGIPTRGTKVYQVRERARWLAQLPDRGARIRARVLYAELERLRALRPKVKAAMLAEARRDPAWPILRTIPYLGPVRVALLLATLGTPWRFRTKRHLWAYAGLAVVTHSSADYQVVGGQVVRRRRAPWTRGLNRNHNRVVKDVFKGAATTATARAGVLRDFYQRLLTQGMRPELARVTLTRKLAALTLHLWKRGEHFDPTYLMTPAR

SEQ ID NO: 189924 - protein, 368 aa, unidentified
MLIIGCDYHPGFQQIAYVDTETGEFQERRLQHPEEAEKFYRALWEPSVKVRVGMEASGHARWFERLLEELSFELWTGDAAKIRAKRVRKKKTDREDARHILELLVENRFPKIWVPTWQNRDLRQLLWHRHRMVQTRTRIMNQLQAVAINEGVRYKKRLWREAGRQQLESLSLAPWASRRREDLLEVLDRINPTIAELTQAIENEAEKCCEARRLMTHPGVGALTAVAFVLIIGEAHRFGCGKQIAAYLGLVPEEDSSGERRRLGHISKQGNSLLRFLLVEAAQATARCDQRWRNQFFHLAQRRGRKIAKVAMARRLAVRLYCDVAARMELRATTKFRFARRTARKSSWCAVNHRRNDWASCSSSEGGV

SEQ ID NO: 189925 - protein, 334 aa, unidentified
MELSSVCVVDGRGKVVKEAKVASEPDALASFFKGLGFPVKLIGLEAGPLSQWLHAGLMRAGFEAVLLETRHVKAALSAMTVKTDRKDACGLAQLLRMGWFQPVHAKSIGSQEIRALLVARKQLLGRLLDVELSIRGILRGFGLKVGQVTRKTFEARIRELVTGHATLGRIAEAMLSARATLQAEYEELHKAVLAIVREDAVCRRLMTVPGVGPVVAVTFKSAVDDPSRIAKSKAVGALFGLTPKKYQSGEKDVTGGITRAGDEMVRTALYEAANVLLSRITRFSKLKRWGMDVAKRRGSKRAKVALARKIGIILHRMWIDGTTYRWAEAKPIAA

SEQ ID NO: 189926 - protein, 339 aa, unidentified
MSKQVNCPQTTLFCGIDVSAKTLAVAVQQQDRPFQQREFANSAAGHKQLIAWLHKRGAPVRVSLEATGIYSLDVALALDATHGIDVAVLNPKLVNRFAQTLRRSKTDKADAVALAEYSLRMPFVPWRRPRPVTLQLRAISRHIATLTQLHTAQSNRGHACGSSAAVPRCVREDIKRSMDGLKKRIARLRREAIALIQHDVEMAQKFRQLHSIKGIGETSAIQLLGELASLDPEMTVRQWVAHSGLDPAHQVSGTSVHKPSRISRHGNSHLRQALFMPALVAVRFEPYMRAFYLQLQARHKAKLQALMAVARKLLHAIYGIFKSNTPFDGAKLFPEITIL

SEQ ID NO: 189927 - protein, 329 aa, unidentified
MSPDLQGRVADMINESFVGIDVSKAWLDVGFLATGSAERLAHDEVGIAGLCQRLCEQPPTLVVMEATGGLETALASALAAAGVPVAVVNPRQVRDYAKACGRLAKTDRIDALILAAFAQAIRPQVRVLKDEETQALAALLARRRQLIDMRVQEKLRLDRAEVVQRTSLKEHIAWLDERIAALDIDLTHRLRTSEVWREKDDLLQAIPGVGKVTRMTLLAELPELGKLDRKEIAALAGLAPFNRDSGKHRGERVIWGGRAQVRQVLYMAALSATRSNPPIREFYQRLCAQGKPKKVALTACMRKLLTVINAVVKNNTPWCASGLDLQHSC

SEQ ID NO: 189928 - protein, 412 aa, unidentified
MDVFCGIDWAEDHHDIAVVNRDGQLLARLRISDGAAGLAALLELLAEHGDSAEDRIPVAIETPRGLLVACLRATGRQVYPVNPMAVARYRDRHSIAGRKSDHGDAVVLANVLRTDLHAHRPLPADSELAQAIAVLARAQQDAVWDRTTAHNRLRSHLREYFPGFLAAFAAPRDGIMRPEARVTLAAAPTPATAAQLTLAQLRALLKKAGRSRGIDTEAQRLREAFRIPQMRQLPLVEDAMGRQTLALLRQLDAACASADDLEHAATESFNQHPDAGIITSFPGLGPLTGARVLAETGDDRSRFQDAKGLKAYAGAAPITRASGKSRSVTHRKVKNNRLAAAGYIWAFCALTASPGARAHYDRRRDDGDRHAAAQRNLFGRLLGCLHYCLATGQHYNEAIAFPSTPNKLPQAA

SEQ ID NO: 189929 - protein, 318 aa, unidentified
MLNESFVGIDVSKDWLDVGWEPAQRSERLAHEEVAMVGLCERLTQERPCLIVLEATGGLETHLASALAAAGLPVAVVNPRQVRDYARACGRLAKTDRIDALVLAAFARAIRPQVRAPKDDETLELGALLVRRRQLIDMRVQEKLRLERASPVQRDSFKEHIAWLTERIARLDTDLTHRLRASSLWRDKEDLLKAIPGVGTITRVTLIALLPELGKLNRREIAALVGLAPFNRDSGQHRGERVIWGGRAQVRRVLYMASIAAIRSNPVIRVFYQHLRVQGKPGKVALVACMRKLLTIMNAMLKHNTPWNPNALDLEHSC

SEQ ID NO: 189930 - protein, 348 aa, unidentified
MAHFVGLDVSVKETSVCVVDDAGKVILEQKVLTEPDAIIALLTSLGVTSGRIGIEAGPLSQWLVNALTAAELPVICVETRHMKALLTAQQINKTDRNDARGIAQMMRVGLFKPVHVKTLVAQEQRMLLTSRKLLQRKLLDVESDLRGTLRNFGLKVGVVSGGRYETRVRELVAGFPRLAAIVEPLLSVRRVMRQQFAVLHKMLLDMVRGDPVCRRLMTAPGVGAVVALTYRATVDQPQRFVHSRAVGAHVGLTPKRYQSGEIDYDGGVSKCGDALLRTMLYEAAHVLLTRGAKWSWLKAWGVRVAQRRGMRRAIVAVARRLAVVLHRMWVDGSEFRWSKDSTAVSAVA

SEQ ID NO: 189931 - protein, 403 aa, unidentified
MDITVSDFMKRRYNLMIYVGIDIAKLNHFAAAISSDSEILIEPFQFSNDYDGFYLLLSHLAPLDQNSLIIDLESTAHYGDNLVRFLICKGFKVCVLNPIMTSSMRKNNVRKMKTDKVDTLVIAKTLMMQDSLRFMSLEDLDYIELKELGKFRQKLVKQRTRLKIQLTSYVDQVFPELQYFFKSDLHQNSVYALLKEAPTPNAIASMHLTHLAHLLEVASHGHFGKEKARELRILAQKSVGVSDSSLSIQITHTIEQIELLDSQLFHTELEMANLVTCPHSVVMTIPGIGFVNGGMILGEISDIHRFSEPKKLLAFTGLDPPVYLPGNFQARRTRMSKRGSKVLRYALINAAHNVVKNNTTFKAYYAAKRVEGRSHYNALGNCTGKLVRVIWKMLTDEVEFNLE

SEQ ID NO: 189932 - protein, 484 aa, unidentified
MAKRKQSTFERLRNGKLQWNRKERREVERRLNSADPGLEIIHPHAAGIDVGNESHYVAVPPGRDARPVREFGSWTAALEEMAQWLKSCGIETVVMQSTGVYWIAVHDVLERHGLEVNLVDARGTKSVPGRKSDVQECQWLLKLHTYGLLRSCFLPAPEIHGVRTVWRLRDQHVKDAGRCIQHMQKALIEMNVQLHIAISDLSGVTGQAIIRAILSGQRDPRTLAALRDRRIQATEEEIIQSLQGNWKQDVLFELQQAVDAYDFYQKQMAECDTQLQSYLAALPTREALPTTPASSQPAAAAETGKKRRSRKPKGNQPDFDLAEELERILGVDATRIDGIDVMTIQTVLAEVGPDLSAWKTAARWCSWLNLAPKRDISGGKVIRHRREYRTNRVGNAFRMAAQSLVRSQSYLGARYRYLRARLGGLRAVKAMARVLACLYYRLVKQGQVWIDRGTVEFEQRRQQRDLASLQRKARSLGMQLVPAA

SEQ ID NO: 189933 - protein, 322 aa, unidentified
MTYIGIDISKDSFVAAFPTVSGYQTRTYPNTAKGIRKFIGSLSVTEHHCVMEATGNYGFLLLYLLERQGIAASMVNPKQIKHFSRMMLTVTKTDTKDACMIAMYGEKMNPPVYKMPSETIMLLKQKKTIIRQLKKQLIATRNLKSSLDVLPFHDKNGMKALNKTISFLAGQVETLESELADLASSEFDKQVKLLTSVKGIGITLATALIVATGGFSYFDNAKQVSRFIGICPTYQQSGTSVHIKGGINRNGDANLRSLLYVASWSALRGNTACKECYARLKANGKPSKVALIAVANKLVRQAFAVVKSETPYKDGFVSAHQS

SEQ ID NO: 189934 - protein, 483 aa, unidentified
MSYSAYTDVSSSGEAPAKELPESMLIMRGFGQHMIPRINLLLQTPRIHGRKGGDIMLKINPLSTLYVGIDVSSKSNFVCALDFYKNKYINSSFANNQPGADELAKKILECLKEHPDLNTVVAALEATSVYSIHIANYLSSCEELMSFKPYVFVVNPKCTANYKKSYISVGKSDPIDAFVIADYARAGNIETKPWRGSQFLALKRLTRHRLHLVECMTREKAYLVSNLYLKFSELQMLEKDDQPFCDIYGTTSSGVLTQYLSPEEIIDSSEEELVAFLAEKSRNRIKDISKTADLLKKAARDSYRLDKALYEPLNVSIASSFNCIETFKKEIKVIDAAIEREIKGLNPNAFIILQSIDGISPVFAGGIIAEIGDIAAFHSSDALAKYAGLMWKSNQSGDFDGEDTPMSKAGNRYLRYYLGEAANSMKKHNVEYGAYYLKKYNEVPKHQYKRALALTSRKFVRLVYGLLAKNQLYSGVSLDTSTE

SEQ ID NO: 189935 - protein, 350 aa, unidentified
MLIGVDYHPSFQQIAFLVEETGECSERRLNHSDGEADKFYRDLQLRGVHVRVGMEATGYSRWFERLLAELGFEVWIGDPAEIKARRVKKQKTDRQDAQLLLKLMMEDRFPRIWVPSPENRDVRQLLWHRHRLVQMRTRIMNQLQALAMNEGRRWKSKLWSEQGRAELEKLALAPWASRRRHELLELLDRMNPTIVELTAAAEQEARKRPEALRLMTHPGVGPLTALAYVLIIGTPSRFHRGKQIGNYVGMIPSEDSSGGKQRLGHISKQGNSLLRFLLVEAAQAAVRNNPDWRRRYMHLAMRRHKSIAQVAMGRRLGVRLYWMWRNGCAYSPSLEFGSYAGQLGTGHGVK

SEQ ID NO: 189936 - protein, 309 aa, unidentified
MDATYVGIDVSKDRLDVHMVPSGEAFAVARDGEGLGALVAHLAASPCATVAVEATGGFETVVAASLGAAGLPVVVVNPRQVRAFAAALGLRAKTDPIDATVIARFAAATKPEIRALPDEETQRLADLVARRRQIIDMIVAERQRQKRATKRTAKSIVRLLAALQKELSNIDQDIDDSVRGSPAWREKEDLLRSVPGIGDVTARTLIAELPELGRLDRREIAALAGLAPWTRQSGQWRGKSFIGGGRASVRSRLFMAAMVASRHNPALKAFHQRLLAAGKPKMVAIVAVARKLLTILNAILRDQTPWQLA

SEQ ID NO: 189937 - protein, 317 aa, unidentified
MAEVLFPSQVLRGCGIDVHLKVVVATINGEGIRKETRSFDTFTSSLTELKEWLLQNGITHVAMESTGVYWKPVYHVLEDAIPNVWIVNARHIKNVPGHKTDKMDSEWICKLLLAGLLKPSYIPPKEQRQLRDLTRYRNKLIQHVSSEKNRIMRILEDCNIKLSSVVSNTSGTTATKLIDWLCEGKFITLQDIESIYHGKLSASPEELLKACTGFVESHHVYMLQMIRRDIDQTTVLIDELGTKIRDVLSKYDNAIELLKEIPGFSDKVVEDLVAEIGFDMSKFPSEKHLASWAGICPGNNESAGKKKAEGSPTETNK

SEQ ID NO: 189938 - protein, 349 aa, unidentified
MNLYQTQHPFYCGIDLHANKMYACVVDSTGKKQLHSNFHTQDTQTFVQSITPFNKKPGDLVIGCESTFNWYWLCDLCEGKDIPFVLGHALYLKAIHGAKVKNDKVDSEKLAYLLRGGNFAVAYAYPKPWRATRNLLRRRTHYVRRRGQTLAHITNLHHQYNLPLGKPLQYASNRIGVAERFSDPAVAFSVTSDLEMLSHYDDNIRSLERFLEQSAKVDDANNFFRLQTIPGVGRIIAMTMLYEIHDIKRFPEVGDFLSYCRLVKGEHSSNGKSYGSPGKKIGNAFLKWAFSEAVPLLKRCSPEAKAWAQRMEKKHSTARANSILAAKLGRAVYMMLRRGEVFDIKRMIN

SEQ ID NO: 189939 - protein, 466 aa, unidentified
MKHNRRRSLGKARVSPSVLDRINPHVAGIDCGSAEHFVAVPPDRDSHPVQSFRTFTSDLLRLAAWLTACGVRSVAMEATGVYWIPVYEILEAHGFEVLLVNARHLKNVPGRKSDVSDCEWIRELHTVGLLRGSFRPTESIVALRAYLRHRQTLIESAGTYIQRMQKALVQMNLQLPLVVSDITGVTGLRILRDIVAGHRDADHLAQHRDHRCRASKADIVAALTGNYRSEHLFVLKQNLELFDACQAQLTACDLALETHLRTLTAHMAMPAAPLPAPRVTKKPRDNEPRFEIRAPLHQLTTGVDLSQIDGIAPYTALKLLSEIGTDMSRWPTEKHFTSWLTLAPKNKISGGRLLSSRTQPSANRAAAILRMTAMTLGRTQTALGAFYRRLAARIGKPQAITATARKLAVLVYRALKGELVYQDPGAEAYDLQQRTRILRRLRQRAATLGFELVNRETGEILEACAS

SEQ ID NO: 189940 - protein, 392 aa, unidentified
MSQQHCHFDASRSLTALEQDSTIIAVIEMSQSKWLVAALVPGVERQPLKKLDAQEEELLKLLHRWRNEAGQAGREIKRIVVAYEAGRDGFWLARWLQARDVEVYVIHPTSIAVSREHRRPKTDRLDTELLTRAFLGWLRGEKRHCSMVAIPSIEEEDARRPNRERQNLVTEQTRIVNQMKAIFARLGIRTFRPTLRKAEEKLKGLRTAERTPLPENTRAELRRHLARLHVVREQIRALEQERLRKLAAAPAAENGSHAMVRLIARVLGIGVETADMLVNEVLSRHWRDRKAVARYAGLTGSPDESGRRRRERGLARAGNARVRCGMIQFAWRFLRFQKDSALAQWFAARTADRRGSTRKTMIVALARKLLIALWRLATTGEASDGIVLRPAS

SEQ ID NO: 189941 - protein, 426 aa, unidentified
MRVLYDRVAAIDVHKDMVKVAIRVPGAKRGTRKTDVLEFRTFYGVLQAMARELRGRGVTHVVMEASGVYTDPVYYALRELDFTEVMVINPAHAKALKGHKTDAKDAIRLLDLYECGLLSGSYMPSEDLREVRDLARYRMKTVQARTSEIQRLQKTLETAGIKLSSVLSDVTGASAAAMIEALISGERRGSVMAGLAQTRLRTAGKMADLSMALAGRFTDHHALMCRLHRDRITIFDDAVKDLDAKIAPLVARYAREAELLKTLPGFGDVIVAGWLGAIGPAPYQHFATASRLASWATICPGNYMSARKSKGGRTGDGGAYIKPLLIQAAWAAVRVPGRLQARFGRLVRKFGGPRNKGARKRAITAIAHTLLKIAYSVLKTGKPYADLGADFYTRRESPDARQDYLMRQLQKLNPGCVITITPAETA

SEQ ID NO: 189942 - protein, 385 aa, unidentified
MQVMIEGQSHFQPFGLSYWGFANLNKGVGSMTASYDYHIGVDYHKTYSHLVVQDSSGKTLRSGRVKNDRQSLGGFLERYRENSHAVVEATRNWMVMYDWLDDICDDVVLAHPWKVKAIADAKIKTDKIDATVLAHLLRADLVPEAWAPGERARELRVALRERMFYVRLRTMTKNRIVTVFDRYPEQMALLKKLGDLFGKAGRIQLAQVNVSPIDRIQIDRGLDFIGDIDARIKQSEATIRAMTKANTNVKLLKTIPGIGEFFARLIDAEIDDIGRFRNPKKLAAYAGLVPSTYSSGGKTFHGKIIKQGNKWLRWAFVEAVSPTIAVDAQLRAQYEHLKIRGVNKARVAIARKLLTIAFQILRDQRAYELRGESTMEGASTISRLS

SEQ ID NO: 189943 - protein, 340 aa, unidentified
MKINKESAFTPVLFLGIDVGKLDLFCHIIGTKEPIAGRFDNSDRGIAELLSWLERLGAPIEITACLEQTGHYGFKVSKALYQHQIHSLFLVNPRQIKAFGQQKLRRNKSDTADAKLIARFLQSEHSDLRPWEPRSAENERITELSRYSESIVREVAKLKTKCEAAREPAIQRSLRRRIKIGEKEIADIRHRITKLIDSKKALKSDHDLIATIPGMGEISCQIMIAELPEISLFESARELAAWAGVTPCHHASGTSGRSTTPITKIGSANLRRALFMPAMNARVFNPLLKEFGDRLQENGKKKKQIIVAIMRKLIHQIYGILKSQEPYNPGKRGFTTPAKA

SEQ ID NO: 189944 - protein, 313 aa, unidentified
MKKTICGVDVSKARLDACIEPGHRFASFDNDPAGITELAAFCRKHAVTLVVMEASGGYERGVFVELWEKGISCALTNPRSVRRYAEAMGILEKTDRIDSSLIARFALAKDLVPTPLPSQAQQRLKALVTRLRQITDDLTVQKQRRASTFDNVEMRASIDEVIALLKRQSRSLEGEIASMIDDDPLWAKLAETWREVKGVAGRTVARLHAELPEIGTLSNKAIAKLAGLAPIANDSGKRKGKRPTRGGRAGVRSILFLVAAIAARYDKSLGEFRDRLLKAGKEKMVVRIALARKLLVRLNAKARDARAASAKAT

SEQ ID NO: 189945 - protein, 345 aa, unidentified
MELHTIGIDLGKTVFHLVGLNLCGEVVVRKKFSRAQLLRFTANRHVGLIGMEACGGAHFLGRALREQGHEVRLMPAQYVKPFVKTNKSDYIDAEAIAEAVTRPRMRFVPIKTDDQLDMQSLHRVRERWVMRRTAIVNQIRGLLLERGITLPKGRSHVDTVLPRILEDADLKLSGALRTLLAQLKLELDQMAVRIDEADTVLSRTAHQNPACQRLVAIPGVGPVIATALIAAIGNGAAFRKGREFAAWMGIVPGEYSTGGKQKLLGISKRGNSYLRRLFIQGARSVLQHSTKQTSALSAWLKQLQARTHPNVAAVALANKLARIAWAVLAKYEPYRPPLLPCTAAA

SEQ ID NO: 189946 - protein, 349 aa, unidentified
MLADELDYVIGVDTHRDEHVLAVVVAPAGAVVAQRSVQTSARGYAAAARFAEEHANGARVWVVEGAGHYGAGLARYLSGRGETVLEVGRGPRAERRLRGKDDSLDAIRAARTALASETLAMPRAGQRREALRLLLLARRSAVDARREALVQLRSVIVTAPDGLREQLRGLPVQRLVVRCSRLRRSSSAPLDELATRQVLRSLARRIEAATAEAAALEREILAHVRALAPQLLDEPGVGPIVAAQVIVAWSHQGRVRSEAAFARLAGAAPIPASSGQTTRHRLSRGGDRQLNRALHTVILHRRQHDPATKAYIARRVAHGKSRRDAVRLLKRYLARHLYRILDNQTPLTT

SEQ ID NO: 189947 - protein, 441 aa, unidentified
MSDITPSVSPEPEWAAFVAIDWADKKHCWKLLAAGSVTPEEGTLANTPEALSMWAANLQERFGGRPIAVCLEQSRGPLVYALCKFPHLVLYPVHSTTAARYRQAFFPSGSKDDPVDTTLLLELLTRHRDRLRRLNPETPETRLLQMLVEQRRKLVDERTRYSNQLTAWLKMYFPQVLIWIDNIDSPLGCDLLERWPSLEQLKCVNPAKLHDFFTTHNSRSEQRIQERINAIYQAVPAVNDPALLQAGPASVQALVRILQVLNSAIADFDQRIESAANNHPEAPLFVGLPGAGPVLRPRLIAAFGTQRERYQDAGELQNYSGIAPVTKRSGGTQAIHFRRACPKFLRQTFHEFAGHSIQKSTWARAYYRSQRELRKDHHAAVRALAFKWMRVLYACWRDRQPYDEATYARSLEKRNSPLAKLTTALQWKDVAGFKKLSPKTT

SEQ ID NO: 189948 - protein, 337 aa, unidentified
MNWKYFIGIDVSKLTLDICINQGKEKIFSRSVENRPKALEQLWNELLKKIPDFIPAEILCCCEHTGIYNEHLLCFLNNKKVAICLENATHIKFSGGLTRGKNDKVDAERIANYAYKERESLRLWEPPREIIKTLKHLSVLRVRLLNVRKALVVPLEEMKRFQKDAVKMMHSHTQATLKSIEKDLAAVDIKILEVIKKDETLNRLFSITKSVTGVGKVTAVEILITTNEFKNIKTAQQYACYAGVAPFEHSSGTSIKNKPRVSHKANKRVKTLLHMAAMASIKQSGEMRDYMLRKLEQGKSKMSVLNAVRNKIIHRIYSCVMNERKYEKNYKKTLLYP

SEQ ID NO: 189949 - protein, 358 aa, unidentified
MAEIAGPVTGGVDTHAGTHVAAVVDQVGRVLGTESFPAGADGYAGLLAWLRGHGVLVRVGVEGTGSYGAGLARFLASQDVPVLEVPRPDRQRRRRRGKSDAVDAVPAAIAALSGEDCGTPKSGNGAAESIRALRVARVGAMKARTQAGNQLRDLITTAPERLRAQLSHLSTPRRVRAAAAFTCGDAADPAEGAKAAMASVARRWQDLDTEITRLEAVLEQLVARAAAPEYLALTEVGSLSVAALIAAAGDNPGRIRTEAAFAALCGVSTVDCSSGKQERHRLNHGGDRQANSALWRIAVTRLRHDPRTQDYYARRTAAGKTRKEIIRELKRYAAREAYRKLIRPGFIQAAVIPSEKTA

SEQ ID NO: 189950 - protein, 407 aa, unidentified
MEVVYRCCCGVDVHKKKTVACLYTGKSHEVREFGTTTGEIRGMANWLTEAGCEIVAMESTGAYWKPLYNLFEISGLETMVVNAAHMKALPGRKTDIKDAEWIGDLLRHGLLRASFIPDRTQRELREIARYRKSLTEERSREWNRLQKILEGANIKISSVIDINTASARNLMKVIIADKAIDRDELEDLVYGKVRSKVEALLPAIDGFTTPLQRRLLGCIIDHIDDMTRRITDLDVVINDYMAEYESAIDRISQLPGIARHSAEVVIAEIGKDMNRFPTAAHLASWAGVCPGNNQSGGKRLNGKSNKGNKTLKSTLIRSAHSAVKVKNSFFSAQFQRISVRRGKRRAILAVAHSMLIAIYHVLKHDVDFRDLGSDYYDTYNRERKIKGHLKRLEALGWSPEGSATVPA

SEQ ID NO: 189951 - protein, 412 aa, unidentified
MSLALPEALFFTGIDWAAATHAVCVMDAAGKIMTEFTIEHSADGIAALIRRLARYGDPADMPAGIERPNGQLVDLLLEAGHPVVPVSPNAIKTWREGEVLSGAKSDAGDAAVIAGYLRLRQHRLRVAAPYSDQTKALRTLMRTRDDVVVMRVAATNQLSALLDAHWPGARAIFADVESPISLAFLTRYPTPAAARHLGEKRITAFCASQGYSGKRPAAVLLARLRSAPAGTTGPALTVTLRDAVLALVAVLTALNTAVKDLDRSAAARLGEHPDGEIFTSLPRSGQVNAAQVLAEWGDCRQAYDGPDAVAALAGCTPVTKQSGKHRDVTFRWACNKRFRKAMTTFADNSRHASPWAAKIYNDARAAGKDHPHAVRILARAWIRVIWPCWLNHTPYDPARHGAAAALAEPIAA

SEQ ID NO: 189952 - protein, 442 aa, unidentified
MRQIGLDVHQTFCEVAIREGGKTRSAGRVATNRETLELFAASLCATDEVAMEVTGPAMEIARILEPYVARVVVANAQDVRAISHARVKSDRFDARTLAELLAAGMLESVWIATPEIQALRRRVARRAALVRQRTRAKNEVHATLARGLLGRAPVTDLFGSGGRAWLQAQELGVEEHETIAGCLRQISFLDSEIAAVDRQLAHWAISSADAKRLMTIPGVGAGVAVALIAAIGDINRFPTARQLVAYLGLDPKVRQSGEQTPRHGHISKRGNGHARMVLVEAAWQSLRQPGPLRAFGERVRARRGAQVAAVAVARKLACLAWQLLTTEQDYAFAQPSLVRAKLRRIELAAGLPPLTTRHSGPRVKPRPGEREAERELVERAEAAYRRLIADWKATGTTQSAHVRPRRPTRAHRAQPAAAASPTATARPLATAPETFTDRTRGT

SEQ ID NO: 189953 - protein, 412 aa, unidentified
MTVTNQFAAHVGLDWADKKHDVCVQFKNGERIFDVIEHTAEALDAWLTELHQKVKGRIAIALELKKGPVVYALQKYPFITVFPVHALSLARYRQAFSPSGAKDDPQDAELALELMLRYPQKIKAIEPDNADIRLLQQLVEQRRQLVEDKRRFVNRIINTLKQYYPQPLEWFSHRGSLLLCELIIRWPSLQQLKRARRDTIRNFLNAKGGRAMALTEQRVASIDNAIPLTTDPSVIEANALMAAALATQIKVVSEIIKTYDERIETLFDTLPDAGLFKSLPGMGPCMGPRMLAALGDNRDRFNSAEEIQNYAGIAPVTERSGQKSWVHWRWQCAKFVRQTFVEWAAKTVNSSYWAKLYYQGLREKGKSHQSAIRALAFKWIRIIYRCWKARTCYDEAKYLLALEARHSPLLKP

SEQ ID NO: 189954 - protein, 335 aa, unidentified
MKEITTVGVDLAKSVFTVHGVDAMGRVVLRKTVRREQLMELIAGLPPCLIGVEACGGAHEWGRKFQIHGHRVGIMMARFVAPYRKSSKNDGNDAEAICEAVARPNMRFVPVKSAEQQAILSLHRVRQGFIEQRTATINRIRGLLAEFGIVLPQRAEQVRRAAVVVAEELPVLAREAIADLRAHLTYLDERITRYERQLVSLARQREAAVRIQRLPGVGPLTASAITASINDGHEFANGRQFAAWLGLVPRQYSTGGKPRLGRITKRGDPYLRTLLMLGARAVLQSAAQKTDRLSRWALALRARRGYHRAIIAVAAKNARIIWALLVKNRDFVLPA

SEQ ID NO: 189955 - protein, 348 aa, unidentified
MSVSSSTVLQYSMILPAKFSSNPSSSQTIGRDLIYSILKQKQFIRRKHSVGMEDTGHYMINLTNYLLDKKFTVKYINPRATCLRRKELGVSAKNDRKDALLIAEMLSEKRFWRSISSRTIENSKFRDITRLYHQLQEQQNQDMNRLQRALDIVFPEVNLLSWTRYSKAYMKFLSTYPSASSIAFEDIRNLRKALKTEGKGRQCKVTAEEIRELAKHSVGEDNSSIELEVTSIIAVIITREEQLRILEKKIEEFSHKLNSPIISIPGISHISGMTILAEIGDINHFQNTGNLISFAGMDPLVYQSGKYDAAHMPISKHGSRYMRKALYQAVFTVCKYSPTFHAYYTKKT

SEQ ID NO: 189956 - protein, 357 aa, unidentified
MEKLYLGVDLHKRSCWVTVLDADGHLLESRRLGTEKWELLEYFGKVRKPAAVAVEATFNWYYFLNVIEPLGLELHLVHPWKTRAIASARIKHDRLDSRVLAELLRTGFLAEAWIAPRRVREERQLLRYRVHTVQWATRAKNSIHGVLNRNGIRSPLGSPFGPKGRPFLEEVELAGTDRWEVDGQLERLDLLGQQLAALDREIRKRAKASPVARALEQIPGIGPFIASLVIAEVGDIRRFPSAKHLVSYTGLAPSLYASGEHRWGGPITKQGSTVLRWALVQAAHRAALNPRFYGFYQRHRERHGTSRAAVALARKLAVIAFYRWRHALHSTRPLPVEKVRERTSGGAWSEHRPFTSD

SEQ ID NO: 189957 - protein, 381 aa, unidentified
MTKIIRIGMDTSKSVFVLHGVDAAEQPVLRKKLRRRQVLEFFAKLEPTKIGLEACGGAHYWARELRALGHEVVLLPPQYVKPYVKRNKNDAADAEAICEAMSRPTMRFVPVKSTEQQAALMLAGMRDQLVRRRTQVSNAIRGYAAEFGLTAAKGLCKIEPLLARIAADTALPELAKELFAIYGQDYARLKVQIAKTETKLMAWHKGNELSRRLAEIPAIGPVGASLLAMKVTDPHAFRSGRDFAAWLGLTPKDHSTAGKTRLGVITRAGDEALRSTLVVGATAVIQQVRKGRGHSSPWLVGLLKRKPPKLAAVALANKTARIAWKLMVSGEHYNRARNFGRSEAPVVDREERCAARYEGSAQRSSLRLRTTRPPEAAMGKA

SEQ ID NO: 189958 - protein, 332 aa, unidentified
MEHELHYIGIDTAKEKLHLDVLRPDGRHRTKKFANTTKGHDELVSWLKGHKIDHAHICIEATGTYMEPVAECLYDAGYIVSVINPALGKAFAQSEGLRNKTDTVDARMLAEFCRQKRPAAWEAPHPLERALRALVVRHQALTDMHTQELNRTETAREVQRPSIDAHLLWLEAELKRLEKQIKDLTDDDPDMKHRRKLLESIPGIGEKTSAVLLAYIGLKDRFAHARQFGAFAGLTPRRYESGSSVRGASRMSKAGHVSLRRALYMPAMVATSKTEWGRAFRDRLAANGKKGKVILGAMMRKLAQVAYGVLKSGVPFDASRHNTVAVEKSRKG

SEQ ID NO: 189959 - protein, 383 aa, unidentified
MRKESSRPESTLTTRSAASTLYLALELSHREWKLAFTSGLAVKAQIRSVPAGDLARLREEIARARKVLALAAKCRVLSCYEAGREGFWVHRALTSIGVVNVVVDSASIEVNRRRRRAKTDRLDAAALADLLVRYDLGGRRVLAAVRVPTPEQEDARPLHRELCTAKDDRTRLINRVRGLLAGQGLRVETVHSDLDLAALRTWAGKPLLLGLARRLASELERLGVLHRRILELEAERRHALTLADTKASEQAALLTRLRAIGPNSARLLAHELFSWRDLRNRRQVGALAGLTPTPFTSGDTEREQGISKAGIRSVRYLAIEIAWGWLRFQPRSALARWYQKRFGKGGSRLRKIGIVALARKLLIALWRFVTFGEIPAGAKLKPA

SEQ ID NO: 189960 - protein, 364 aa, unidentified
MANIALDVIGGVDTHKHTHYAAVIDRHGHLLGDKEFPACDDGYRELLSWMRSHGSLGAIGIEGTGHYGTTLTRFLTGAGERVLEVNRPNRAARRLEGKSDRLDAEQAARSVLSGAATADPKAKSGPIEVIRILRVSRANAIKSRTMAFNLLHGVVVTAPSPLREELVHLTRRTLVNRCARLRPETEDLVSLTEHAERLLVAGTKLTLRDLARRFKTLDEEVKRLSAQIAALVEQAAPDLMKVFGVGAELAGQFLVTVGDNPGRIRSEAALAKICGVAPKPTGSGKTSGRHRLSRSGDRAANSALYIITIVRMRHHEPTRAYFERRTAEGLSKREIIRCLKRYIVREIYLALPKIADQKEIKQAA

SEQ ID NO: 189961 - protein, 345 aa, unidentified
MRIFGIDLGLRKSVACSYDTVSAEERITTIATTPVDLDRLLDRERPDQVIVEAGTPAGWVHDRCVARKLRCRVASPTTDAWKWKSVKRKTDLDDARKLVELAERDQLPEAHVPVPAMRQKRALLRMRHKLLAHRVAWQNHLRGTLLSQGLPVPVGHRAWSEEGLKGLAAQAKKLRDCGDEELWRGELSEALVTYRWLRRQQRRLEQRLDELNAADASVQRLQTIPGVGPRTAEVVAAFLDEPRRFQRGDEVSAYAGLVPRQWQSGQTDRRGRISKRGPGLLRKVLVECGWGLLRHNRWGATVSQRISRGQKTRRKQSVVALARKLLVRCWALLRDETEWREPNPA

SEQ ID NO: 189962 - protein, 355 aa, unidentified
MRQDKYIGMDVHQASVSVAVLDGGGKLIMECVLETKASTIVEFIRGVRGSLAVTFEEGTCAAWLYDLLQPHVSRVVVCDPRKNALLQDGSKSDRIDARKLAELLRGNQLSPVYHGDHGVRTLKELARSYLALTQDLTRVMTRIKALYRSWAIPCSGTRVYGARHRSEWLAKISQAGVRLRAERLYQQLDLLRPLHQQARCALIEESRRHPAVKWLRQIPSIGPIRAALLVALLQTPYRFRTKRQLWAYSGFAVETHDSGEYRYVRGKLLRNRERIRVRGLSDNYNRDLKNLFKSTAISASTRPGPLRDFYLALLAKGIRPSMARLTLARKIAAITLTIWKKGVDFDATQLGRQAA

SEQ ID NO: 189963 - protein, 427 aa, unidentified
MKYNQNKKIMQVTETTLVIGVDIAKHKHYARALNYRGIELGKGIEFENNSSGFARLGFWICEIRKKHQLGHVIVGMEPTGHYWLNLEQHLRRHRIKQVLVNPAHVKKSKELDDNSPTKNDPKDAYTIARLVVDGRYSEPHILENEYAELRLAMNHRERLVKDQNAVKARIINWLDRYFPEFTKVFKGWEGKAALSTLENFSTPAEIADKTIEEIVTTWRLSASRSVGRKKAQELVEAAKESVGLDSSLSMARSMLLSLLRQYRMLEHELNELECVVEGLLKQIPGTSYMLAIKGLGVITVAGILAETGNLLDYRHYRQIQRLAGLNLKESSSGKHKGKTTIAKRGRPRLRALLFRAIMPLVSKNPEFKALHNHFTSRETNPLKKMQSIVALCCRLLRVLFAISKQQVPYDPNKVLKCIQRKQEALVA

SEQ ID NO: 189964 - protein, 315 aa, unidentified
MQTVADRPEAPTAIRTDLGAIFVSLELSRSTWLITSLSPGGGEKMSKQVVRGGDVAELLERFARLREKARARTGKVFPFVVIQEAGLDGFWIDRALQNEGIESHVVDPASIATSRRRRRAKTDGIDGEALVRALLAYKRGEPRVCAMVKAPTPEEEDRRRLCRERKVLIGERVQHVNRVKGLLFSQGISGYEPLRRDRRERLDTLQTGDGRLLPDHLKAQVCRELDRLELLLEQIKAVEAERDVLLAAQQVAAPAPAAMLLDIKGIGPEFAAILWSEGLFRHFDNRRQVASYAGLAPTPWQSGSVDREQGVSKTA

SEQ ID NO: 189965 - protein, 401 aa, unidentified
MNTTTMFYVGIDVSKGKSDICIKDENGNDLIQRFKITNNKADLDMLYETIERIRSKTPGNSDVVFGMEATGIYSLPLYSALKRDGHKVKLYNPIQTNGFRKMNIRKTKTDPIDSAVIADMLRHSEPPQVSEIQDFHLFQLRELVRVRHRLIEKQALCKVQLVRNIDAIWPDYENVIKRVFGVASLAILKKYSVPSKLKAESFEQFHEFVQKKSRSKISRSKAEEIYSHAGNVLTVTELDSVIAIEIKTLITQLELYDEQIHSVEKKINHMMKQIDTKIKSVPGIADILGPTILGEIGNIDRFSNVKKLVAFAGLDPAVSQSGRFENKSGKISKRGSPLLRQALFLGANIAIQNDENLKRFYSKKRSEGKHHFSALNAVAAKLLRIVYWVLKNNKEYKTQLN

SEQ ID NO: 189966 - protein, 361 aa, unidentified
MARSMSLVGLDVHASQTHAAILDMSSGELRGVKLRMAPSELVEFLATLPGPVRAVYEAGPTGFGLARAAGERGIDVRVVAAGKVPRASGDRVKTDKRDAERLARLLAAGELRFAFVPSVADEQFRDVIRAIEDCRGDLMRARHRLGKLLLRRDLRWTGPGSTWTTRHMNWLRSLRFEDVCSQAVLVDYLSAVEMLVAQRAALIAALEQVIPDSRHAVTIARLRCLRGIDTLSAAGLCAEVGDWHRFRPKPLSGFLGIVPTEHTSDTKRRQGSITKAGSIHARRLLVEAAHHYRHQPAVGEGLARRQAGQDPRAIEISWRAQRRLHQRWQVLRLQRRKPAGVVAIATARELAAFCWEAATLN

SEQ ID NO: 189967 - protein, 470 aa, unidentified
MLTRGPKRSEPPEAHPQSVPVGKRTALKVQEKVAPRRAGIRATCRSRSAAASAVPEGGGPVRYHLGVDWADQTHAVWVVDERGTKITARTVPHTAEGLSEWGRELDEWRAHGIELWAAIERPEGRVVDFLLDHGIVVYPVNPKALDRARDRFRQSGAKDDPFDARVLADFLRTDHAHLRPLRPSSEAAQELKLLTEDYQRQVRQQTRLVNQLTITLKAYYPRALEVAELTTGLAQAFLQAYPTPAAVAALTERQWQRWARAHRLSATRTRELWEVLQRPQLPVPAHVVRAKARLMRSLVAQLTPVVAAVGEYREAIEDFFARMSTAQWIRTLPIGDHGITAPTLWARLGDAPGRWEAFRHLQAQAGAVPVTKRSGKQQRVVHFRVACDKALRYVVDQVAFLSLRSCEWARAYYDQQRGRGHSHRRALRALGAKWLKIIFVMWQRHASYDEQYHLATMARQQLRQPQTKIA

SEQ ID NO: 189968 - protein, 351 aa, unidentified
MFLPRPDSIVETIASLDAQGWPDGTCVFKERSMSKTVLGIDVAKSKLDVVLLLNDKALVKKFDNNMKGFKLLHGWLSSLKIEQVHACLEATGTYGEPIAEFLHEHGHRVSVVNPLRIRSFAKSDLKRNKTDRADARTIAEFCLLKDPEDWHPLPPEIKQLQALTRRIESLERMLFAETNRLEAAQAATRPSIERMIDNLKQEIDNVQRLIKDHIDNNPDLRQQSDLLQTIPGIGEKTARLLLGEIEFRSFESARALAAHAGVTPRQFQSGTSLNWTRLSKLGSGRIRKAMYFPAITALKYNAVIKQFARRLSENGKSPMQIVCAAMRKLLHIAFGVIRHNRPFDPTPALHV

SEQ ID NO: 189969 - protein, 476 aa, unidentified
MATPDEKPDKPTNPDKPTKPNPSRKRSLPVPVPVSAAALDVINPDAAGIDVHSDMHMVCVPADRDANPVRQFGANTADLQEIVAWLKKCRVRTIALESTGVYWIPLFELLESEGFEVNLVEPGQLSRCGARPKTDVLDAQWIQRLHSYGLLRASFRPPDSVLALRAYWRQRQMQVRYAASHVQHMQKALEQMNVKLTEVVSDITGLTGMAIIGAILEGQRDPIQLARLRHERCHHSEEQIALALEGTWRPEHLFELRQAHELYQFHHRQITECDQQVQAELAHFPNRAGAKTHTVKPRKRGRKSNDVRFEATGPLFQALGVDLTLIEGIDVGTALVILAEIGVDVSRFPTEKHFASWLRLCPPQDESNKTKKRRGHRKGTNPVTLALRMCARSLGKTMTPLGLFYRRIRSRIGGLGAVKATAHKLACLVYRMLKYGQEYVKQSMEEYEAKMEANVLKALKRKAAAMGFELSPLPPQ

SEQ ID NO: 189970 - protein, 368 aa, unidentified
MYGLHLPNKLVGFLFNQKQKRVHTMNNRNLIALDIAKNIFQVCRVSKSGKTQSNKPVSRNQLKELLVGSKPSMFAFEACGSSHYWGRFAESYGHTIRMLPPKAVKAFRQGHKTDETDAQAIAIAAQHEAIKSCALMNIEQHTLQSFESSRRYIGKQCRGLANHIRALTYEYGLTIPKGNSALLKAIPEILEDAENGFPHSLRVILHSLYEQLKVQQRLFKEIEKEKAHQIKTIEPCQRLSALEGVGPVGSAMLYSCLGKGEMFKNGRQAATYLGFTPKQHSSGGKTIIVGIDKKGGNKELRAVLYQGALSVISRLPEEPTTAKQRWLIQLVQRVGVKRACIALANKTVRTAWAMLSSGEAYNPQPLTV

SEQ ID NO: 189971 - protein, 369 aa, unidentified
MSKEKKKKTISKQTMLLKYSIGNDISKDKFDACISSIDSMQYVKVIATRSFSNTKKGFESYLGWVTRKCKLELPVVHSMEATGVYYEKFAWYLHRSDEYLNVILPNKAKKYLQSLGLKTKNDKIDARGLSRMGAEQNLSRWEAPDKNMMELRSVTRQREHLQETRTQINNQLHALQSGEYINKELIKQQRAIIAMLDRQIKETFKMIERAVKSDEELKEKIEKITVIKGLGLVSVATVIAETNGFKLFANQRQLVSYSGYDVIENQSGKHVGKTKISKRGNAHIRRILHMPAFSVVSNNEPIFKNLYERVFDNTKQKMKGYVAVQRKLLIMIYTLWRKNEKYDNKYYFKKKQGEHPEMQSKSSSFRSVA

SEQ ID NO: 189972 - protein, 402 aa, unidentified
MNAVGIDVSKGKSMVAIMRSFGEIVSTPFEIKHTTSDIHSLVELINSVEGESRIVMEHTGRYYEILAHQLSEANLFVSTINPKLIKDFDNDSLRKVKSDKADAVKIARYALDKWQNLKQYSVMDKLRNQLKTMNRQFGFYMKHKTAMKNNLISILDQTYPGVNTYFDSPVRSDGSQKWVDFASTYWHVDCVRKMSLNAFIDHYQNWCKRKKYNFSQSKAEEIYGKAKELVPVLPKDAITKLIIKQAVDQLISVSTTVESLRTLMNETASKLPEYPVVMAMKGVGTSLGPQLMAEIGDVSRFTHKGAITAFAGVDPGVNESGTYEQKSVPTSKRGSADLRKTLFQVMDVLIKTMPQDDPVYQFLDKKRAQGKPYYVYMTAGANKFLRIYYGRVKEYLASLPES

SEQ ID NO: 189973 - protein, 507 aa, unidentified
MKRPAPARRSELVNNCAAGQNDGGERPALARSRSAESYPKTVAERLPAEPAALAPTSNRKAPQEGHYISSMGGRAKRRKNQQPNKQTMSGSEPWQQHRAFGALDWASEKHSVIVVNPAGKVIEEFEIEHSALGWKKFREKLQPYGSIPFAIETSQGVAVEQLLEAGMVVYPINPKSAQAYRERKAPSGVKDDRLDAWSFADALRVDGHGWRALRPEEPLIKELRLLCRDEVALIAQRTSFIQQLRQALADYYPAALEAFEDWTSVSAWMFVQRFPTPEALAKAGKRKWQNFLHTRRLWGSTQGPRRMEIFARASQFAGTPPTTSAKSLLALSLVQMLFVIEKQLAVYRQRIEELFARHPDHDLFGSLPGAGPKIAPRLLAEIGDDRQRFSGEAQNLQCLAGTAPVTKRSGKGRKYWQVHQRWACDKHLRHAMHLFAEQSLSRCVWAELYYQHHRQKNQSHANALRRLANRWLKIIYKMWIDRTPYNAELHHRNQLQHGSWIFQLKSI

SEQ ID NO: 189974 - protein, 388 aa, unidentified
MNVTADQPEAPTAIRTDLGAIFVSLELSRSSWLITSLSPGGGEKMSKHTVRGGDVSGLLQRVAQLSEKARVRTGKVFRLIVIQEAGLDGFWIDRVLQNEEVESHVVDPASIATSRRRRRAKTDKIDGETLVRSLLAYKRGEPRVCSMVKAPTPEEEDHRRLCRERKVLTAESVRHVNRIKGLLFCQGISGYEPLRRDRRERLEELQTGDGRRLPQHLKAQVDRELDRLELLLKQIKTVEGERDALLAAAQTAMPAPAAMLLDIKGIGSEFAAVLWSEGLLRHFDNRRQVAAYAGLAPTPWQSGAVDREQGVSKAGNPRLRTTLIQLAWLWLRNQPQSALTIWFHERVRRNAGRLRKTTIVALARKLLVALWKYVTTGVVIKGATMKAA

SEQ ID NO: 189975 - protein, 421 aa, unidentified
MPNIEIGVDFMVKENFIYVGIDLHKETHTAVMIDCYNQKLGEITFPNRPADFPKLVTKVKKCNTDAKEVVYGLENAYGYGRPLAVWLIDKGYFVKDVNTAISHRQAKHRGAMYRKSDSDDAEAIALATLNMLDKLPDACPNDAYWSLGQLVHRRDNIMKQRTRLVNQLHEQLCIAYPSYKSFFNDISRPTALYFWEHYPSRKYLRGKSVEDLREELVPVSHNRCSTKNCEKILDAVASDKVKNNAYQDARDMVTLSIVSDLQHYDSQLAEVDKMLEQMYKMLGCTLTTIPGVNVITAVKILAEIGDIKRFSNANKLAQFAGIAPLHLSSSGKGKDVATKQGNRRLQATIYFLAIQMVQVSSKGTPRNSVVRAYYEKRKAEGKTSQQALICISRRLISVIYGMLKNGTEYRMPVVENAGENR

SEQ ID NO: 189976 - protein, 348 aa, unidentified
MAHFVGLDVSVKETSVCVVDDAGKVILEQKVPTEPSDILALLPSLGVTYGRIGIEAGPLSQWLFNALTAAELPVICVETRHMKALLMAQQVNKTDRNDARGIAQMMRVGLFKPVHVKTLVAQEQRMLLTSRKLLQRKLLDLESDLRGTLRNFGLKVGVVSGGRYEARVRELVAGFARLAAIAEPLLNVRRVMRQQLAVLHKMLLDTVRDDPVCRRLMTAPGVGAVVALTYRATVDQPQRFVHSRAVGAHVGLTPKRYQSGEIDYDGRVSKCGDALLRTMLYEAAHSLLTQNRKWSWLKAWGVRVAQRRGMRRAIVAVARRLAVVLHRMWIDGSEFRWRKDSAAAPAAA

SEQ ID NO: 189977 - protein, 428 aa, unidentified
MDQVNRNRLEEFRQLRKEIRHSEEYLIVGIDIAKDRHHAFFGTATGKTLLRRLVFSNDHEGFRKLLDQAEALRVRHGLKKMVYGMEPTANYHKPLGEYLITLGRTVVLVSGVTVKRNRESLDGRWDKHDAKDSANVADLISQGKCLYYEYPSAELRGLRGLLSLKKRLKKQEHGYRVRIRNHLIAQYFPEMDRDYERLGAEGLSIVRWCLPASQITQLDVEPFIERVISRRIRMEKRRRLEEVWEKAGESIGCEDVPGVDHEAKIMVEGLKQIRAMIKETEDKIEELCEEFPEYHYILTIPGFGPDVSAKVLGAVGDPDRFQNGKQVLKMGGLDLSADRSGKDSDRAIPQISKRGKADLRYALYQAALIASLKNRDVMIYYTNKIRGREREKGIQIKMRVKLSAKMLLIAWTLMKKKEAFDPAYLNVD

SEQ ID NO: 189978 - protein, 392 aa, unidentified
MIFIGIDVAKNKHDCFITNTDGDVLFNSFTITNNLDGFNDLYRKIASVMKDMSKVKVGLEATGHYSYNLLGYLLDKGFPTYVINPLHTNLYRKSQSLRQTKTDKVDARTIASMLMSDVNLKSYSDTSYHNEELKSLSRYRFDKVKEWAKLKSSVSRLICILFPELEKLVPTLHMASVYALLYEFPGASYVASAHLTRLTNLLSKASKGHYSKDTAVLFRQTARDSIGSVMPAKSLELKHTIKLIQELTSEIDEIEAVIKQIMDEEIKSPILTIPGISYRMGAMIIAEIGDFNRFDSADKILAYAGMSPSTHQSGQLDNCHSHMEKRGSRYLRYALYNATKYVCHWDKSFGAYLEKKRSEGKHYNVALSHAAKKLVRTIFAMERSGQSYIASV

SEQ ID NO: 189979 - protein, 366 aa, unidentified
MIQHTQQDFRGQVVWIGLDVHVRFWLVAIMVGDIFHKSFHQVANAQLLVNYLHRNFPGAEYRCVYEAGYCGFWIQQELERSGLRCSVANPADVPTTDKEKRNKTNRVDAHKLVRSLRNGDIDAIYIPSRQAQEDRSLVRTRHRMVSKQTRCKNQIKSLLCFYGISLPEDMDKRYWSRRFIAWLKGLKLQSDSGTNALQILLNELEYYRVSILSVTKAIRQLARQERYVRHVNNLVGISGISTLVAMVFLTELVALDRFRSLDALAAYVGLVPGEDSSGDDRTITSITPRKNRYLRWVLIEAAWVAVRHDPVLMLAFTHLSARMPKNLAIIRIARKLLNRVRFVLKNQKPYVSIVVDQNSTIVVQET

SEQ ID NO: 189980 - protein, 316 aa, unidentified
MSISKTFIGVDVSKERLDCFCRPTGTTFSCDNTLPGIAALVQWVEAQQPQLIVLEATGGLERPLVAALVVAQLPVVVVNPRQVRDFARAIGQLAKTDRIDAAVIAHFGEAVNPEVRPLPDHLTQQMDALMTRRRQLVQMLATERNHLVSTPGQVQNYVKEHIVHLEELIKQLDQDIDQMITTSPIWKTKENLLRSVKGVGPVLSRTLLAELPELGRLSRQEISKLVGVAPLNNDSGKYKGKRSCWGGRASVRGPLYMATLSATRCNPVIKEFYQRLLSKGKLKKVAIVACMRKMLTILNAMIKSNKPWDASFAQRG

SEQ ID NO: 189981 - protein, 347 aa, unidentified
MKKIFIGIDVSKEKCDATAISAGNGLTGVEKLDYLVFENRPKGFRTLLSWAKKLRPDIPQEDILFVCETTGAYDRALCDYIYSKGLDIWRESALQILWSSGVRRGKDDKTDSLMIAEYALRHMDKVHLYESPDSRILEIRALFLYRRKLEQEKTSKLVRIKELEATAGKSRTLTFILRDAKKSIRQLEKSIKECEDKILELIEADKALNKSYQHLDSVKGLGIVNITALIVYTNNFKAFKTSRKMATYWGVAAFRSKSGTSVDKRADVRNLSSSMLKSYLTQAAMHTIAKGGIYHDYYHRKIAEGKTHSIALNNAKNKLLHLAMSLVTHDMDYEANHEFLRTQRVAN

SEQ ID NO: 189982 - protein, 398 aa, unidentified
MTDDSTCSVLKEASYGNSQLGASQIKEYILEFSQKFEIESLVIGMEATSLYSFHPAMFFKEDLELNQLNLMVSVEQPNKIKKYRDIFEENKNDQIDAFYIADYFRIQRQVNSIIKEEEYLALQHLTRTRYQLIKQLVRTKQHFIENIYYKCNTLSKELKAEGGSVLSATLVTLMTEDYTMDQLAELSLEEFANLIQKLGKYRFKNPEGIAKAISKAIRSSYRLGKVHQDSVDIVLGVLAKEIRSLEKLIKDLDKAIDDLVVVLPEYQCLTSIPGIGPVYAAGILAEIGPINRFSDESKLAKYAGLYWRQNQSGNSEYENTPMAKRGNRYLRYYLVEATNSVRRYEPEYHAYYKKKYAETPKHKHKRAIVLTARKFTRLVDTLLRNHQLYMPPRSVIDK

SEQ ID NO: 189983 - protein, 312 aa, unidentified
MTQIICGVDVSKRRLDAHVEPLGKFESFANDADGIAELGAFCRRHNVQLVAMEASGGCERRAFLLLWEAGIACALTNPRSVRHYAEAMGVLEKTDRLDAGVIARFAIAKGLKPTRPPSPAQQRLKALVVRLRQVTDDLTIQKQRRSSAMNEEMVESLDEVIALLKRQARSLEGEIASLIDDDPLWAHLDAALRATKGVAGRTVARLLAELPELGVYSNKAVVKLAGLAPLAHDSGAKAGQRHIRGGRAGIRSILFLVAGIVRRFDASMDAFHRKLTQAGKPKMTVRVALARKLLVRLNAKAREARQNYAIAT

SEQ ID NO: 189984 - protein, 360 aa, unidentified
MIVQGTSVGLDVHALSVVAHGIDEETGKVARARLCPDYGEVLGWLGQLRAPVRVTYEAGPTGFGLARAITAAGMACLVAAPSKLQRPSGDRIKTDARDAAHLARLLRLGEITEVTVPEREIEAVRDLVRAREDARADLMRVRHRLSKLLLRQGIVYYGGSAWTCKHEEWLRRQRFDDRHLTAAFDHSFDAVLAATAARDRLDEQILEVAASPRFADPVNRLGCLRGISALTGLALTVEIGDWSRFTGSSIGAYVGLVPSEHSSGTSRVQGSITKAGNTHVRRLLIESAWHHRKSYSTSGPTLRARWAKVDPALRARGHTGNRRLNKRWQGFIDRGKNPIVANVAIARELAGWCWSLATLQ

SEQ ID NO: 189985 - protein, 421 aa, unidentified
MSNSTLSKKLASVKPGTLFVGIDLALDRNVAVVLTERAEQLSRFGFPNERDGYDYFYRRLEAIQEQQQAPAVLVGMEPTNYFWKLLATDMEQHRPDYGYRLVNPYTVKKNREGNQLDRSKDDNRDAFTIGELLRTGKYTETRLLHGAYAELRQYVTLYTRLQRDVRRQKTLIRNIAGQLFPELPRVFKDLTGETALATLRNHAAAAVVRKMSQEAFIASVRADFCGQRMQVAKLRRAHVLAKRSVGVSDGVEALQLALRLHIEALEVLEQQLEAACIALTDTFLALPESKYLLSVPGLGLIAAATILSEIGDPSHYTSARQLIKLAGTQPVPNTSGRKSRSKTPMSHKGRPRLRTALFFAVMRLVRVDEAFAREYQHLQTREKNPLTKMQALGVLMNKLLRILWSLMKNRTFYVSGFQTAD

SEQ ID NO: 189986 - protein, 326 aa, unidentified
MSIIELPILGIDISKAKFDVALLVDGKVKKTRVFENNLTGFKALSLWIIKHDITHLQACMEATGTYGDELATYLYDQGFEVSVVNPAQIKSFSGAQLNRAKTDKADAKLIAQFCASMHPMAWMPPPVHVRELQALVQRLAALLQMERQEQNRLGTAAPVTQPSIKAVLATIKAEIKAVERMIRDHIDHHPDLKDQSKLLDSILGIGVATIARLLAFVGDVHRFNDAKALAAFVGLNPTVHQSGSSVRGKSRLSKKGNATIRKALYMPAVVARRYNPIIKEFAERLKKAGKSNMLIIGAVMRKLLHIIYGVLKSGKPFDANYAVKNA

SEQ ID NO: 189987 - protein, 324 aa, unidentified
MDRKGFEKLKGHLAAVSISSVLIGMESTASYHVNLFSYLVSEGYKVLLINPLLISNYVKMQLRKTKTDKKDAVVIAQFLLTNGATLVQRATTSLISDLRDLSRQRESLVDEMTSLKIEIKQLLNITFPELEHVAGIFTKSILKLLQQYPSAFALRDADLGQLSQTLIADSYGHKRETFAAGLIKAAHSSIGSKSPAKDMILKQKIALLRHLEDALQEITGMLIEMSRKLMEGDINIMTSLKGIGEKAAANFLIEMGGDINQFERSGKIIAMAGLDTAVYQSGKHEGKGRITKRGNRHLRRIIWLMTTKVIQYTDIFNVYYLKRR

SEQ ID NO: 189988 - protein, 412 aa, unidentified
MTVTNQFAAHVGLDWADKKHDVCVQFKNGERVFDVIEHTAEALDAWLTELHQKVKGRIAIALELKKGPVVYALQKYPFITVFPVHALSLARYRQAFSPSGAKDDPQDAELALELMLRYPQKIKAIEPDNADIRLLQQLVEQRRQLVEDKRRFVNRIINTLKQYYPQPLEWFSHRGSLLLCELIIRWPSLQQLKRARRDTIRNFLNAKGGRAMALTEQRVASIDNAIPLTTDPSVIEANALMATALATQIKVVSEIIKTYDERIETLFDTLPDAGLFKSLPGMGPCMGPRMLAALGDNRDRFNRAEEIQNYAGIAPVTERSGQKSWVHWRWQCAKFVRQTFVEWAAKTVNSSYWARLYYQGLREKGKSHQSAIRALAFKWIRIIYRCWKTRTRYDEAKYLLALEARHSPLLKP

SEQ ID NO: 189989 - protein, 339 aa, unidentified
MVLYGGMDLHGNNVYCTLMDTAYRPVLERRLPNDLEVVLETLEPFRERLAGLAIESTFNWYWLVDGLQKHQYSAHLANPAKMQENIGLKSANDKTDSRFLAKQMVMGVLPEAYIYPEEERPVRDMLRRRMSLVHTRTGEWLRLEGLVARHSGKDLGVRELSTLETEKLEELLGHDAMVVEIAQTCFRHIAFLDKEIRTIEKRVEKQVKLSNGYERLLGIPGIGRILAMTIMLETGPITRFKGPGNYASYCRAVKAEHTSNNRKKAEGNSKCGNKYLAWAYIEAANFAIRYSPELRAWYQRKESRTKRVVALKAIANKLAKAVYFILRDEVDFDVKRLVG

SEQ ID NO: 189990 - protein, 339 aa, unidentified
MGRFIGVDLHKNMFVVSFYEAASGKHQLWKYKLSAIGSFKRRLEKTDIVGVESTGNTRYFVDQIRECVERVKVINPSQFKVISHSVKKTDDNDAKVIAEFLSKDMVPEVRMKDAQTARVSSLANTRDKLVKLRTALKNKVHNILSAHGIILKKEVLSSKKALRAVLEQPVNPVAIVELRVIVEQIESLNEGIKKLDKELEDQGKKLDGHENITSIKGIGGRSGSILLSVIGDINDFENEKKLAAYFGIVPRVSNSNETERQGRITKRGSKLGRTTLVQCTLVAIRYSPYLNDFYQRIKARKGSGKAIIATAKKLLGIIYFTLKNKWVFEDFPNFVLKAG

SEQ ID NO: 189991 - protein, 459 aa, unidentified
MVASSTRVRLAFLPVGSPGNLPACGHDEVEVIDIEETDEAVDLVERVCALDIGKAALTVCIRVPHDDKPGHRRQEVREHATTTRSLLDLAARLHAAGVTLVAMEATSDYWKPAFYLLEAEGFTCWLLNARHVKNVPGRPKTDKLDAVWLAKVVERGMCRPSFVPPAPIRRLRDLTRYRRTLIRERTREKQRVEKLLEDAQIKLSSVASDIFGVSGRHMLQAMIAGQRDPKVLAQLARASMRAKIRQLEEALTGHFDDHHGFICQMMLERIDELTSRIEELTARIDEQVAPFAAQVAQLDAVTGIGGVCAQELIAELGVDMAVFPTAAHLVAWAKFAPQANTSAGKAKTAATGKGNPWLAASLGEIAVTAGRTNTFLGERYRRIAKRRGKQRALVAVGNSVLTIVWHLLADPHASYCDLGPDFYQSRSSRHRQEHNLIRQLQQLTGKTVTLTPRPATPAA

SEQ ID NO: 189992 - protein, 427 aa, unidentified
MKKIKIDYLSTLFVGIDIGSRTNVISALNFDQDFLIKMVPVANAQGGAEQMEEMVAEVLSQHHEFKTVFIGLESTGFYGVHIANYLSTSEKLAPFSTKVYCLNPNEVKQYKKSFNSLDKNDGIDSFVIADFARVGRIHTEPWRGAQYLALQRLTRHRLHITKCIAREKTYMLNNIFLKFSEFAMLGKDEHPFSDKYGATAEAVLTDYLSTEDIVDASVDDLVAFISSKSRGRISDPEQTTYLLQKAAQDSYRLDKCLYEPLTVSIGCSFNCISAFEKELKAINGAIHRAVKGLNPTEYQILTSVPGIGPVYASGILAELGTIKCFKSNDALAKYCGIVWKENQSGEFQAEDTPMNKAGNRYLRYYMIEAAGSVIQHCPEYKAFYDKKFAEVRTHQHKRALALTSRKLIRMLFGLLANGKLYSVEKSR

SEQ ID NO: 189993 - protein, 418 aa, unidentified
MEVLHERCAGLDVHKKTVVACVRLARDGGVEKEVRTFKTTTVDLLALGEWLDGHDVNHVVMEATGVYWKPVWHILDDGDRELVLANAAHVKNLPGHKSDVSDCDWLSDLEAHGLIRGSFVPNRQTQELRGLLRTRKQKVRERSSNTLRLQKTLEEANIKLDSVISNVIGVSGRRMIEAMIGGETDPVALAALADRRIKAPPEVLCEALRGRVTGHHRFLLGLQLEHIDALDRMIDKIDQQIDASVEPFRAAAGLLTTISGVNQLAGRAIVSEIGIDMSRFETAGHLISWAGLCPRNDESAGKRRSTRIRKGAPWLKDILVQCAWAATRTKATYLHAQFVRIRSRRGPKKAIIAVAASILTAAYHMLKNGVPYRDLGPQHFHSRNKQAQAKRLLARLRDLGFTAEFDSLKPIPDAVVSY

SEQ ID NO: 189994 - protein, 429 aa, unidentified
MEVVFSRCCGMDVHQASVVACALLDEGGRKPKKVVRTFPTMRQGLEQLRDWLASLAVTHVTMEGTGVYWRPVYSTLEGHVDIALVNARHVKALQGRKTDVNDAEWLASLLRHGLLRKSFVPAKDVRAIRDLCRYRRMLVQSQTTEKNRIIKLLEIIGIKLATVASDVFGTSGMLMLRAIAAGSCTAEQIAPLAKGRLRSKLPELRLALDVLVEEHHRVMLSDQLARLDQTAAEVARYDSLLEKQVAPYEESLALLCTIDGIRRIAAIEIFAEIGPDVASFPSAAQFASWAGTCPGQHQSGGKSFSTRRRKGNPYLQSILVEASLAATRKKATYFTDKYRRLKSRRGSMRALFAIAHKLACAVHRVLQTHEPYRDLGGNYLDLRHKRSTAHALAKRLQSLGYDQNNVVALFERLTPVASTTQLSPEISEG

SEQ ID NO: 189995 - protein, 333 aa, unidentified
MNYIGIDVSHKELVVVISVKGKARAAKTYENTVAGHKAIIKKCFKLKGESRICLEATGIYHFDLAVAISRTQELKVMVINPKTSHNFSKVLMKRSKTDAVDAEVLAIYCERMPFDPWERPADEIITLKAISRRIAALSKLKTQTKNQRHALSSTQETPGLVIDTTDELIKILEQQIAVLRDAALKLIQEHAELKKGYSLITSIKGIADASSIQILAELMVLPKELSARQWVAYAGLDPRHFESGSSVTKKTRISKAGNKYIRHALYMPALVATRHEPHIKGYYEHMINDNGLKKIQAVCAVMRKLLHAIHGMLKTGKSFDGERFYAFPTKANA

SEQ ID NO: 189996 - protein, 409 aa, unidentified
MKYYRSSTEYNCGIDLHSRQMYVCLMDRSGNKLVHTNIQGNDFAYFLKRIEPYRHSLTVCCECTFNWYWLADACQREGIPFVLAHALYLKAIHGGKNKNDRIDSEKLAHLLRSNLIPPSYVYPGAKRPVRALLRQRIFYVWRRAELLARIQSHQLAEGHTPVRQSRPNRDPWEERLLAQYDHPLHQTALAIDLHMIRAYDEMLLRLERELLAATRQLASRDYALLNTVPGIGRSLALTILYEIDSVERFPTVKDFCSYCRLVKGSVASAGKIKGTRGAKLGNPYLRWAFGEAAVIGKRDHPLLRAYAQQLEAAHGKFKANAILAHKLARAVYFMLQRGTGFDVEKLVATSVGGAKKAASYPLALTAGRPESLTGKSLWSARFQRERAQCSAGRRNVGSFLGTTGPPSRV

SEQ ID NO: 189997 - protein, 373 aa, unidentified
MKNSTTKLFVGLDVHKDSIAVAYAPEQRGSEIISLGSFGTRHCDVDKFLKKLLHHSSNLSFVYEAGPCGYWLYRLLTSKGYPCLVAAPSLIPKMPGDRVKNDRRDSILLARTHRAGDLTSVYVPDVHDEAIRDLARGSEDAKRDLRAAKHRLKSFLLRQDIRFEGTANWGPKYLRWLGDVTCETSAQQFVFQEYVHAITERNDRVERLEAELRDQVDSWRLKPVVTAIQAMRGIQFITAATLIAELGDITRFDNPKQLMGYLGLTSSEHSSGKRRKLGGITKAGNGHARRVLVEGAWSYRFPAKVSRQLQYRLELVPKEIQDISWKAQVRLCKRFHRLASKGKHRNKVVVAIAREMAAFVWAIAMKTPIESVK

SEQ ID NO: 189998 - protein, 377 aa, unidentified
MKDLSALQHFVGCDVSKDTLDFALYERGVAYTGFKHIRVDNSTEGFQAMRKWLRGLGVGMSDTVIAMEHTGYYSVALSEWCAGKKITFVLLHPLDVKNACGRGRNKTDKADAQFIADYAYTMREKLAPSQPEPPVIGRLRQLRNERHMAVKTRASFLNMARTLTDKSALRRVRKTVETLTAQISAIEENIRQVVESDVLVAENYRLLTSITGIGLVNALATIVATGNFTRFQTARQYAKFVCVSPLRRESGTSVRDADHVSKAGHSELKATLTEAARSAINHDGQMRAYYGRKRAEGKSYGCVMNAVKFKLICRMFAVVKRQTPYVALELFRGTPQNSSVGERRAARGRTTGPDERIRSQQPLSSNVKNIEGDICKI

SEQ ID NO: 189999 - protein, 423 aa, unidentified
MSETVSGAEPRFAAFVAIDWADQKHVWSLQPANSEKRQHGQIEHTPEAVESWVAMLCGRFGNQAIAVAIEQSRGALVFMLSKYEQLHIYPIHPRAAAQFRAALFPSGAKDDPVDAELLLDLLVHHRARLRPLRPDTEQTRLVQHLVEGRRRLVDEKTRQSNRLTAKLKLYFPQVLNWFDEVDSALVSALLERWPTLEDLQKARPATVRSFLTGHGCRGNERIEQHLEQIRQAVPAIRDLAVIQSSVTTTKILVDMISTLREGIATFDQQIDRAVTAHPDFAIWDSFPGAGPALAPRLLAAFGSRRDRYETAADMQKFSGIAPVVERSGKMEWVHFRWACPKFLRQSFHEWAGHSIGFCGWARAYYQLQRQSGHDHHAAVRALAFKWIRIAFRCWKDGVPYDDSRYVASLRRRGSPLAQASSQP

SEQ ID NO: 190000 - protein, 398 aa, unidentified
MRRSNQDRIVGLDVHPDSFAGAILQGTDPWKARVVSTSTRVALPLLEKWALRHTREEDILVMEASGNAFCVAERLRALKRKVVILDSHRAGKVGKTYCATDRVDAIKIARIYLSALSPVVWQPDAKTRERREVFSAYQAVVEEGMRLKQQIKSMLNEHCVRLEKGFRLSHPSAIGRLLQRRKWSEAQKMLLSQLHAGLVGARVRRQRLRHYMAQEILAEKELLRLTRLCGINLITLYGLIAAIGEIKRFATARKLSAYFGLNPTVEQSGNYEGSGALKRHGRGAIRALLVQSAKKLLQVDNPLQKWGLALTARRGRNKAAVAVARKLCVAVWHVMQGHLIGAIERMDTLHTKLHKLATELGVPTIKELGYETKEAFVQKKLYLLRSYACPNHMSAATG

SEQ ID NO: 190001 - protein, 343 aa, unidentified
MDHFAGLDVSVKETSICIVDDTGRIVREVKVASEPEALLQVLGNPIYRFKRIGLEAGPLSQWLFSALAEAGLPVICVETRHMRAVLQAQINKTDRNDARGMAQMMRAGLYRPVHVKTLRSQKLRMLLTHRKLLQSKAIAIDNDLRGTLRNFGLKVGMVGTAKFEARIKELVENLPDLAVLVEPLLMVRRVLREQFSILHRRLLAIVRDDEVCRRLMTAPGVGPVVALTYRATVDVPARFRNSKAVGAVFGLTPSKYQSGEINRTGAISKCGDEMMRVMLYEAAQIMLVRTTKWSWLKAWAMKIARHRGMKKAIVALARRLAVIMHRIWVDGTEFRWTREVTAA

SEQ ID NO: 190002 - protein, 388 aa, unidentified
MQTVADRPEAPTAIRTDLGAIFVSLELSRSTWLVTSLSPGGGEKMSKQVVRGGDVAGLLERFARLREKARARTGKVFPFVVIQEAGLDGFWIDRALQNEGIESHVVDPASIATSRRRRRAKTDGIDGEVLVRALLAYKRGEPRVCAMIKAPTPEEEDRRRLCRERKVLIVERVRHVNRVKGLLFSQGISGYEPLRRDRRRRLDTLQTGDGRLLPDHLKAQVCRELDRLELLLEQIKAVEAERDVLLAAQQVAAPAPAAMLLDIKGIGPEFAAILWSEGLFRHFDNRRQVASYAGLAPTPWQSGSVDREQGVSKAGNPRLRTTLIQLAWLWLRHQPHSALALWFEERVRRNGGRLKKTTIVALARKLLVALWKYVTAGVVIEGAVMKRT

SEQ ID NO: 190003 - protein, 344 aa, unidentified
MQIASLGIDLGKTTFHLVALGERNKVLVRKKFSRAQLLAYTAKIPSALIGIEACAGSHFMGAKLREQGHEVRLIPAQFVKPYRKSNKNDFQDAEAIAEAVRKENMRFVPIKTQEQLDIQGMHRVRDRLVQRRTALINEIRGFLLDRGITFAADPQHLRKNLPAVIEDAEQNLTPRLRWLLDRMWQEWKQLELNIETMSDELERISEENELCRRLRKIPGFGPLVSTATVAAIGNGAAFQCGRDFAAWVGVVPRQYSTGGKQKLLGISKRGNRYLRRMLIHGARAVLFRVKYDTGGFGEWFRRLAQRAPRNKVVVAIANKLARMAWAVLSSGKEYQYQRPQATAA

SEQ ID NO: 190004 - protein, 451 aa, unidentified
MVKNSKQTTASPQLAIINRHTAAIDVGSMLMMVAYTDAHGHQHLMETDGFTESLDELAKTLQGEGVTHVAMEATGVYWMALYEKLEQHGLVVTLINPQHFKNVDAQKTDVKDCQWLQQLHAHGLLRASHIAPELYRELKSYLHERNILQKQKSDTLNRIHRLLTQMNIKVQHLISDLEGVAGMKLLRAIALGISDPQELLSRIDVNKLKATNEDLLKSLRGCYKEQYLFILQQALKAYDFFKEQMKSYELKIEAVLKKLLPENEQGSTPVIARKKGLVRKNQYSINLKEYLRHITGVDITKIDGLDEITSLEIVSVTGIDMNKWPSADHFTSWLNLSPRPKISGGKILGHQKRFTNNKATQAFRMAAQSMWKHKGGLGQLYRRLSAQKGSKKAIKAIARKLAVIFYTMIKNNQEYDKSKMLIDSEKQQLKRITRLRQEAIKYGFTLQTATS

SEQ ID NO: 190005 - protein, 342 aa, unidentified
MEITTVGIDLAKSISQVHAVDAAGHVVVRKALRRAQVVPFFAKLPRCLVGIEACGTSHHWARELTKLGHEVRLMPPAYVKPYVKRGKTDANDAAAICEAVTRPSMRFVPVKSTEQQAALALHRTRDLLVKQRTQLVNMIRGLLAEFGIEMARGLRHALELAARLSAGDAAEVPPLAQRVVTGLADQIGALQIQLTRLEKELLAWHRENDLSQRLATIPGVGIVSATALAASVSEPERFRSGRQFAASLGLTPLQNCSGGKERLGRISRMGDRYLRRLLVVGMTSLVRRAKAAPTSVDSRLPALLQRKPVRVVTVAAANRTARVAWAIMTRGGTYRAPAATAA

SEQ ID NO: 190006 - protein, 337 aa, unidentified
MAIIRIGLDTSKHLFQVHGVDDGEQAVLRAQLRRSVVAKFFAKLPPTRIGLEACGAAHHWARLLRGLGHEAVLLPPQYIKAYVKRGKNDAIDAEAICEAVSRPGMRFVPVKSAEQQAALMLLRVRELLLKQRTMLMNAMRGHAAEFGVIAAKGPVRVAELLQHAGCEAAGVPALAQQLLALLADQLAALDAKLKAIEAQLRAWHKQDPMSQCLATQPGIGPIAAVSFALKVPDPKLFRSGRHFAAWLGLTPKENSTGGRRRLGRISRQGDESLRKLLVLGATAVIQFAKPGRASVWLINLLARRPKKLAAVALANKMARVLWAMMASGEVYRRPQPA

SEQ ID NO: 190007 - protein, 351 aa, unidentified
MFNLGIDRHKNYSQVAVLDEKGKFVMNVRLANKKETFTTFINQLGKPCQAVIESGYSWGIIYDLLEELGVDVTLAHSLKVKAIASAKIKTDTIDAHTLAKLLYANLIPTVYVPTKDVRQQKDILRQRSWLVKLRTMVKNRIHQIIERNHVQLPGFSDLFGRGGRKFLDSLTLPQPDESLLRQHLQLLDFTSEQIKQTETWIEETLKDNRYRKIIETIPGFGKTLSALVALEINEIARFSYPGKLAAYAGLVPTTYASGGKVYHGDLLPGCNRWLRYAFIEASWKAMVTSPYCRALFERMRKNKGPHTAVVVLARRLAEIVYCCLKENRGYEERCYPIDKIYFRLPSGRVNH

SEQ ID NO: 190008 - protein, 373 aa, unidentified
MKKVRFLGLDVHAETIAVAVAEPDGEVRSLGIIPNREESIRKLVKKLGPAEQLQACYEAGPTGYVVYWQLTALGVKCEVVAPSLVPVKAGDRVKTDRRDATKLARSYRAGDLTAVWVPNQEHEALRDLVRAREAAKQDQLRARHRLSKFLLRHGRRVPSGIKVWTQRYQDWVKEQVHFEQPAQEYTLLDYLHEVEHMADRIRRLEQAIAEAVKLAPQQMQEVIQALQALRGVAQISAVTIVAELGEISRFDRARELMGYSGAVSSEHSSGKRIQRGQITKTGNAHLRRIAIEAAWAYRHRPTIGAALRKRQQGLSEEVKEIAWKAQHRLHKRYRNLVAAGKEKQKVVTAVGRELLGFIWAIGVQVERNSQPVA

SEQ ID NO: 190009 - protein, 352 aa, unidentified
MSDKISRHTLKPSDGKELLDLCERIRTRVAKETKKRVEMVSCYEAGYDGFWLHRLLQAHDIRNHVIDPASLQVDRRARRAKTDRVDAERLLRSLMAYLRGEPKVWSVVRVPSVAEEDDRRLHRERGRLINERIQHVNRIKGLLAIHGIYDYQPLRRDRIQRLQQLHTADGRTLPPRLEAEILRELQRLEIVIGMIKTIEAERDAIASANTETERGSVKKIQHLAKIKSIGPEFATTLVGEVFYRSFDNRKQLASYVGLTPAHFQSGAMSRDQGISKAGNAKARTVMIELAWLWLRHQPDSDLSVWFRDRVGKLKGRIRRITIVAVARKLLITLWRYLETGLVPKGAALKVCD

SEQ ID NO: 190010 - protein, 347 aa, unidentified
MRFYNTSHQYYCGIDLHTKMMYVCILDNEGEILLHQNIPTQPNRFLKLIGPYREDIVVGVECIFSWYWLADLCQAEGIPFILGHALYMKAIHGGKSKNDKIDSEKIAKLIRGGTFPLAHVYPQEMRATRDLLRRRNYFVHRRAELQAHIKLTNFQYNLPSIPQKLERRSNRDDLAERFHDTSVRKNVEADIHLMDSMEDEIKSLEAYIIRHAKGHDPRTYFRLQTVPGIGAVLALVILYEIEDIGRFPSTQQFCSYARLVKCPKESAGKRYGFSGGRIGNAHLKWAFSEATALFMRESERGKRYVAKMARKHGKGKAMSILGHKLGRAVYAILRKQDSFDENYFFSH

SEQ ID NO: 190011 - protein, 389 aa, unidentified
MKIFVGIDIAKLNHFAAAISSDGEILIEPFKFTNDADGFQLLVSKLESFDKNSIIIGLESTAHYGDNLVRYLVAEFYQVCVLNPIKTCQMRKNNVRKTKTDKVDTFVIAKTLMMQDDLRFITFFDLDMMDFKALGRFRQKTIKQRTRLKIQLTTYVDQVFPEIQYFFKSGLHQNAVYALLKEAPSPKEIASMHMTHLANLLKVNSHGHFTKEQAKELRVLAQKSVGANDSAISIQITQTIQQIELLDSQLEKIEAEMTDIMKFNDSVIMTIPGIGYINGGMILGEIGDIHRFSNPNKLLAFAGLDPSVYQSGNFQAKTTRRSKRGSRILRYALVNAAWNVVRNNATFKAYYDAKRAEGRSHYNALGHCAGKLVRVIWKMLTDEVEFNLE

SEQ ID NO: 190012 - protein, 366 aa, unidentified
MGKSSTTFVGMDVHKESIELATADEGEARHYARIGGDAAAVDRAVRKLRSVHRELVFVYEAGPCGFWIYRRLRAQGLSCIVVSPSMTPRRAGDRVKTDRRDCLMLARLARAGELEPIYVPDAKDEAMRDLVRAREDAVSMQRQARQRLQALLLRNEIRYVGKTAWTAAHRRWIAHLKLPHPAQQIAFEEYVQAVQEAGERLQRLAASIAAELEHWRWRPVVQALQALRGIQVIHAVRLLAEIGDFARFQAPRKLMGYLGMIPSEDSSGSRRRQGSITKAGNSSARRALVEAAHAYAHPARVSWVIARRQTQLPKGVCDIAWKAQLRLCARFRRLAARGLNRNKIVVAIARELSGFVWAIAREIKPA

SEQ ID NO: 190013 - protein, 418 aa, unidentified
MKKHNNSGRKSEPTSKSTKSRGPVQRDTKEVLAELVGKLKERLDRKNVPATSAGEEHERGELRPNLDRLTVGVDLGDQWCHYCILGLEGETLAEGQLRTTQEAIAEFFQALNTARVVLEVGTHSPWVQEVICGCGHEVLVANPRLMEGSKRRKRKNDRIDANKLARLGRVDPQSLHPMQHRSREVRQDLVVLRARDALVAARTELINATRGLVKSMGSRLPKCSSPSFAQKVEETVPVELRDALLPLVRMAAALSDCIQGYDEKIEKLGREKYEHTALLRQVKGVGPITSLAYVLTLENPDRFVKSRDVGPYLGLVPKQEDSGESQPQLGISKAGDTMMRRLLVGSAHYILGPFGPDTDLRRYGLRLCERGGKNAKKRAAVAVARKLAVLLHCLWASGEVYEPLRQDMSATMTPAAAA

SEQ ID NO: 190014 - protein, 265 aa, unidentified
MKTHVGVDLHQRFCYLTAVNASGKVCKQGQVVNEGEGLRAWLRQLPGPRQVVVEASGFWPAFARAAGAEAARLVMVHPQRVKAIASAKLKNDRVDSETLAHLSRCDLLPEAWMADEATQQLRLLVRLRITLGRQRARARCLQTVPGIGPYAAMVILAELGEVSRFGSKRAPASYAGLTPVVRESAGKRKRGGITHQGSNTLRWIMLQVAQVAARYSPGARSYSAGLRARKPAQVAKIALARKLLTVVWALLRHGVCFDEELFIRS

SEQ ID NO: 190015 - protein, 413 aa, unidentified
MEIIYQCCCGLDVHKRSIAACVRRLLEDGGIHQETRTFGTMTRDILELADWLAAAGVTHVALESTGTYWKPVYNLLEGRFRMVLVNARHVKHVPGRKTDVKDCQWLAQLLQAGLLRGSFIPERPQRELRDLTRHRSQLVGERSRAANRIQKILEDANIKLASVATDILGASGRDMLRALIRGETDSEKMADLARRQLRSKIPELRPALEGKVTEHHRFMLGELLNHLEYLESRIEGFSRRIEEVSRPFAPAIAKVATLPGFDQRSAQNVVAEIGADMDTFPSAQHLASWAGVCPGNNESAGKRKSGKTTKGNRWLGSALSQSAWAAARKKDSYFQAQYRRLAGRRGKKRAIVAVAHSLLTIIYHMLKDASEYRELGCHYFDKLNAHRLLPHLLKRIKDMGYQVTLQEATQEAA

SEQ ID NO: 190016 - protein, 423 aa, unidentified
MKPAIEPSFTALVGIDWSDRKHDFCLQAVGSSQREFGVLTHSPETITLWAKALYRRFGGPIAVCLEIAKGPLVHALQQHEFIVLFPVNPATLAKYREAFVPSRAKDDPTDAQIALELLLRHRDKLQPLQSQSADMRTLATLVEQRRLLVGDKTRITNRLSGTLKEYFPQALDWFEDRDTVLFCDFLQRWPSLKHAKRARQATLRAFFSAHNLRRAPLIEERIHGIRSATALTSDMAVIGPHQLLVQVLVLQLRVTLQAIDHFDPEITAVAKRLPDYALFAALPGAGSILAPRLLVAFGEQRERYASAAQLQQYAGVAPVLQRSGNKCWVHWRLACPTFLRQTFVEWAGSTIPRSFWASAYYHRQRAKGSSHQAAVRALAYKWIRILYRCWQTRTPYDESIYLLALKHRGSPLIAAMATTPQNT

SEQ ID NO: 190017 - protein, 328 aa, unidentified
MNEQVKAIVGIDMSKKKFDLALLRNNKLKHKVFVNTKSGHESFVTWLHKNNVSRAHVCMESTNIYGEALAEHLHDQGYTVSIVNPARIKGFAQSELSRTKTDKADASLIARFCLAMAPDAWTPDPQEIRELKALVRRLESLMEMRQQEVNRLHVAQDIVVSRLEEHIEYLDQEIQTTKQAIRDHIDNHPDLKEKKTLLQSIPGIGEATINVVLSEFANINKFRGAKQLAAFIGVAPRERQSGSSVRGRTRMSKTGRSQLRKTFFMPALVALRYNPILIQMKQRLTDAGKSKMAIVGAAMRKLVHLIYGVLKSGVPFDADYAMKQAKKA

SEQ ID NO: 190018 - protein, 395 aa, unidentified
MEKAQVIGYGVFVGIDVGKSSNYVVALARDKEKPLVSREVPQDEAAIREVLDEASSHGRMLVTVDQCGAFGRLTVAVAKDMGFDVAHIPPRKFKQAADTYGEDKDDLLDAYIIADTACSTPRLVELVGDRPEVLAQIKVLSSARDDCVTERTRCYNRLHDLIHQVCPPLEAVFAKDKLHNDLEMRLLKQYGGPPGFRKAGNLKYHCTRGPERVEEVFEALSRQTVALPAAEVIEQQIKKLAKRVIELNEEEDSYNAQIEALSASVPEVGILRTMPGVGRVYGATIAAEIGDIARFKDSAHLATYAGLSPVRKKSGSSLDQKKKRKGGNRRLKNALIQSVDRARSCEDWAEEYYQRKRREGKKHKQALFALARRRVDAIYAMLSNGTFYEPRTKEA

SEQ ID NO: 190019 - protein, 354 aa, unidentified
MSQTPNTAIAVIGIDIGKNSFHVVGHDARGAIVLRQKWSRGQVEARLANIPPCLIGMEACVGAHHLSRKLASLGHDARLMPAKYVRPYSRGQKNDFNDAEAIAEAVQRPTMKFVATKTAEQLDLQALHRVRERLVSQRTGIINQIRAFMLERGIAVRQGIGFLRTELPTILATRTDALSPRMLRVIEELAGDWRRLDQRIDGLSGEIEALARQDQACSRLMTVPGIGPIISSAMVAAIGTGDVFSKGRDFGAWLGLVPKQISTGDRTILGKISRRGNRYLRVLFVQAAWVVLVRIKNWERYGLKSWIEAAKRRLHHNVLAIALANKLARIAWAVLAKGRAFELTRTYDASVRPG

SEQ ID NO: 190020 - protein, 410 aa, unidentified
MERIVTRAGGLDVHKDVIVAEVHLPGGVVERGRFATTTPGLLVLRDWLIELGVTRAGIESTGVYWKAPYYMLEDAMEVWLLNARHMRNLPGHKTDVSDASWICQLIEFGLVRPSFVPPKPIRELRNLTRYRKAQIEERTRETQRLDKILQDAGVKLSSVASDILGKSSRAMLTALVAGTTDTRVLADLALGKLRKKIPALREALTSRFSGHHAVIVASILSKLDFLDELIASLSTEIEQAIAPFAHQVQLLDTIPGIDQRTAQGLLAEIGADMGVFGTAARLASWAAVCPGNHESAGRSKSGATRKGPKWLGIYLHDAAMGALRTKNTYLAAQYARLRPRLGHAQALVAVEHSILVSIFYMLQRNQPYHDLGADYFIRREDPARRARKLIRQLEAIGYTIQAQPPPPAAA

SEQ ID NO: 190021 - protein, 421 aa, unidentified
MTRRIAGIDIHKNVLMVVVATVLEKEIDGGMEQQIEYEGRRFGSGTQERGHLVAWLRERQAQAVVMESTAQYWKPVWMDLELHFPKLHLAQAHSNKAPKGRKNDFADARRLTRRMAAGELILSFVPDAEQRTWRTMTRGKQQLVRDRVRLQNQTEALLEEMRIKLSGVVSDLFGVSGRRILEALAGGETNPEKLADLGDDRLKCGREALVDALTGHSEPMHLQILKLSMERLKLLDRQIEALEQMAAGALRKHAAAVTRLAGVPGFGVDSAQQVIAEVGSDAKSFPGAGELASWVGTIPGSDVSAEQNHSSRSPKGNKFLRRIFTQAAQAAVKTKGCHFQNVFRRLVPKLGYKGAIWAIAHRLCRLAWKILHDGVSYIEQAAETTPQAKKRRAQRLTQALRRLGFQVAITPIAPKAEVAQG

SEQ ID NO: 190022 - protein, 340 aa, unidentified
MDNIAVIGLDLAKNLFQVHGVDIAGRVLLRRKLRRGEMVDFFAGLPPCLIGMEACSSSHFWARELGRLGHDVRLMPPAYVKPYVKRGKTDAADAEAICEAMTRPTMRFVSPKTEAQQAGLVELRVRDMLVRQRTQMANALRGHLAEFGIIAAQGIWKVGELLVIVRDTDDDRLPGTARAALMELADGLESLQVRIERLEAGLVRRTRADMTAQRLVTVPGIGAITASALLAMVPDPRGFASGRHFAAWLGLTPRPHSSGGKERLGGISKQGNTMLRTLLIRGAMTRLQYARRTKGSSGWLDQLLTRRPFKVVAVALANKMARVAWALLAKGGSYRTPAAT

SEQ ID NO: 190023 - protein, 375 aa, unidentified
MSETIVAHRSFIGVDLHKTTVTLVAVAPDGTEIARLKIDTKCRQKIRTWLLDLPRPSHMAVEAVGFVEWFIECFRPCVDAIDIADATELSNRRGKRRKNDYRDALDMARRLARGECPVGYIADDELMQLRKLGRHWRQLSSVLARTKQFMRSILLAANLRGPKLDGSSGQRWLLAHGHKLKPVQRRAFANLIQLVQLIELQRNPLRFAIIEASRSERFAPMTKILQSVPGIGEIWSCIIIAEIGPFDRFPNADALEFWAGMTADLKESAGRTQSGPITKAGSRTLRWALCNAALTLCHSDAGQEAIRQRLIRKTGGIKGKANTAMGRRLLRLLYAMVRDGKLYEPGPSRHRTAAANKARAAKRAQKVRKTRKEAA

SEQ ID NO: 190024 - protein, 315 aa, unidentified
MNSTEMDVVGIDVSKAMLDCCMGREKKVFFRIPNKERELREAFKKLKEQFPKLFLVVESTGKYHALLYSVATELEVPVAIVNPKRIRDFAKAIGQLAKTDKIDARVITDFALTVSVAPTQAVGKEVEHLRSLVTRRNDIVTMITQERNRIADITDTFLRRHIRKHITWLVKERDALTREIKSVASSPVFVEKLHLLKGFKGVADVSAAVLMALLPELGTLSKAKVAALVGVAPFADDSGSSCRGKRRIWGGRSAVRTALYMCTLTAVRCNPTMRQFYQRLKAAGKANKVALVAAMRKTIIILNAMLRDNAKFQSI

SEQ ID NO: 190025 - protein, 447 aa, unidentified
MAAVMIGVDPHKASHTAVAISAAEEPLGELRVRACVAQTERLLAWAAAWPSRTWAVEGAGGTGHLLAQQLVSAGERVLDVQPKLGARVRLLAAGDVNKNDPNDARSVAVAALRSAGVQQVRPDDHAAVLKIWSKRYRDLGRTRTQVVCRLHAVLGELIPGGVPKAITTARAGRVLKAIRADGAVQAARCELAAALLDDLRRIDARIRETRKTLAVTVAAAGTSLTRLFGVGPVIAAAAIGDVRDVARFPGRDHFAACNGTAPIEVSSGPRKVYRLSRRGNRRLNHAIHMAAITQIRHSHSQGRAYYDKKLAEGKTPKEALRALKRQVSNAIFACLQADARRAAARPGGPGGQQGNDSVASAAGSHPRHRLFGQATPGPGHHPTATTSGPPPGPGRGRGTAGPSPIAATLPSATPKVQVERPQRSEDERPGGTARRRPHSAARKARDR

SEQ ID NO: 190026 - protein, 316 aa, unidentified
MAPKERYVGIDVSKKVLDIAVRPGDEHWTVANDEDGIDELVTRLRSIGPRLVVLEATGGIELAATGSLADAGLLVAVVNPRQVRDFAKAIGRLAKTDRLDAQVIAQFGEVVQPMPRPLRDAEAQALSALLSRRRQLVGMMTQEKNRLHAAQLSVQRDIRGHIVYMEKRLAKLDDDLGSTLRKSPLWRERDDLLRGVPGVGRVLSVTLLAELQKLGTLNRKQIAALVGVAPLNRDSGLLRGRRTVWGGRARVRATLYMATLTATRYNPVIRAFYERLCASGKAKKLAITACMRKMLTILNSMLRHHATWQPDYALNA

SEQ ID NO: 190027 - protein, 410 aa, unidentified
MGLLHEALPASTLVVAIDPGKVSNRVWLSSGEAGPVVPPLSLPVLRPGLDQLHRLIVDHTGPSAPVLAIEATGALHQAWVRELNQRFPGSVRLFAPSETAAARAQLGSRRFKTDDRDCAALTYLARQGQGRLVPDGFQDALTAAVRHRRGLIAEHKVAQQRLHDQLHALCPGLAPDGHGRALKPDSVIGQAVLDCAAAFAGRPPTARSLRARAHGRVLTSEAAFWIDRWRACLPPPVDAAARAARLARSMARWRALNADIAAVDDEIAALLAGSDGQVLTTLPGVATSRAAAFAAFSLPIARFPSAEHLYSATGLAPASYQSATLHRRTPISRQGLPEHRDALMSLAWGLSQHCAPFIDRHRELRARGLPPIPARIALARHACRLAYTLLTTQQPFDEQRYRRARHQSER

SEQ ID NO: 190028 - protein, 411 aa, unidentified
MDVVHARCCGLDVHKKSVVACVLITQPNSSVERHVRTFKTVTADLLKLADWLSTLQVTQVAMESTGIYWRPVFNVLEDDERTLLLVNPQHMRAVPGKKTDVKDAEWLADLLRHGLLRASFIPPAPIRAIRELARYRKTLVQERADETNRLHKTLEGANLKLAGVATDVLGLSGRAMLAALLQGERDPEVLADLAQGRLRAKLPQLREALDGRVQPQHLVLIDHILAHIDFLGQAIAEVQAAIESCLPPYEDALQLLQTIPGVKPIAAAAILAEIGTDMSRCPSAGHLASWAGLCPSNKESAGKRMKAPMNHGNVWLRAMMGEVAWASIRTRATYFHAQFRRLSRRRGPKKAAVAVAHSLLVVIFHVLRTGKPYTELGVDYFNTLDSARLERHHVRRLEQLGYKVSLTPAAA

SEQ ID NO: 190029 - protein, 355 aa, unidentified
MNQEKYIGMDVHQATISVAVMDSSGKLIMECILETKAATILEFIAGLRGTLSVTFEEGTSAAWLHDLLKPHVSHLVVCDPRRNALLKDGSKSDRIDARKLAELLHGNKLHAVYHGEHGLRALKELGRSYLTITKDLTRVMSRIKALYRSWAIPCSGATVYAPRHRAEWLAKILEPGVRLRAERLYQQLDLLQPVRQEARRDLLVESHKHHAVKLLRQIPSIGPIRAALLVALLQTPHRFRTKRQLWAYSGFAVETHDSGEYRFVRGKLQRNRERITVRGLNHNHNHDLKNLFKGAALSASTRPGPLCDFYVALVEKGMRPTMARLTLARKMAAITLIIWKKGVEFDAKPLNRQAA

SEQ ID NO: 190030 - protein, 442 aa, unidentified
MEVIHARCAGIDISKRDAKVCVRVATMGRGGTQETVTTWGSTTNRILGLREHLIEAKVTCAVMEATGDYWKPFYYLLEDAGFEVMLVNPRHVKNLPGRKTDVSDATWLAQLGAHGLVRGSFVPPEPIRQLRDLTRTRTAITRERGREIQRLEKLLEDAGIKLSSVASDIVGVSARAMLEALITGQRDPAVLADLAKRRLRSKIPDLTEALTGRFGEHHGFLARIHLDLIDRHTHAIAELTARIEVVIESFRGFRDLICSIPGISTGVADVITAETGADMTRFPTDGHLASWAGTCPGSNESAGRIKSTKTRPANPYLKGALGVAAMSAARSKDTYLSVKYRRIASRRGPMKALVAIEHAMLIAIWNMAHTGALYDDPGPDFFTKLHPDKAKNRAVEQLRHGLHRHPRTHRLSQPAPAAKGIFASDPVFFSGAEGIRTPDLLS

SEQ ID NO: 190031 - protein, 454 aa, unidentified
MMHGAHIGGQRAGAFLELVDGVDPRRVLLVGVDVAKATWFVVASNLVGEVVVDGVRLVADRAGLAVLERLIAATSGQLDAAVVVVGVEAAGHHHQTLVGHLGDREGLVVRLLNPAQVAAVCKQQGNRRRKTDWLDAAAIGELLARGEGSPPHLDASPAATLRPLWSGRKDLVDARGRLRQQAGALVDCLWPGFSATDKHAGVAPVLSSPFDTKAGRVVVGLLAEGWTPAGIAAADPAELRQIFAARGCRLSGPLAGRLIARAASALAPHPAATAGKAATLAGLLGALAALDLQIAGLEAEMAPLLAATQGAKLTQIRGVATVAAAGFVAFVGHTGRWADWSKVWRAAGLDPARSQSGATDASYGISREGSAWGRRAILDLAAGVCRQPGRFHDSYQARLRHRKHPKVALAAVGNQVGRTCFALMDSGADYDPDHQTNDAERRTATQPKAGGRAA

SEQ ID NO: 190032 - protein, 328 aa, unidentified
MTKHITICAGIDTGKRKLDVAIEGRCEQLQVENTPEGHKALLAWLRKHRVKRVGIEASGGYEQPVVAELRRTRFVVVVFQPAQVRAYAKFHLQRAKNDKIDAALIAACTAAVRKIYAAPDPRLLPFAERLTLIDQISEDIARLKNRIESCRNAMIKKLWQEDIARLEKREKAELKALVASIRKHRDLARRLELINSVDGIGLPTAVAILVRLPEIGRITREQAVALAGLAPYDDDSGERVGVRHIDGGRKRLRRALYTAALAASFRWNGQLIQLYQRLIAAGKEHKRALVACARKMLIFANTVVARGTPWRDEPPAVNASIAGPLSVS

SEQ ID NO: 190033 - protein, 361 aa, unidentified
MTGMVTYAGLDVHARSTHAAAIDLSTGEVLRARFGPGVEGPVAWLKALRGPVRACYEAGPTGFGLYRAASAAGIAVEVIAPGKTPRGPSDRVKTDRKDAEMLARLLLAGSLTAVVVPPVEVEAARELMRAHDACRRDLMTARHRVSKMLLRHGRVYPEPSTWTVAHRRWLSRQQFDETVSELVFADLIASADGLSARKTAIAERLSRLAEDEQWWPTVARLRCFRGVDTLTAFALHLELGGDWQRFARANALGAWLGLIPSLHQSGESSHQGSITKTGSGFARRLLVESAWHYGRPPRIGVTLKNRQQGQPEHVLQIANRAQHRLHRVYHRMRGRGKPHNVTVVACARELACFLWAAATAD

SEQ ID NO: 190034 - protein, 390 aa, unidentified
MDVLYQSCAGIDVHQANIVVCILHGPLTSTRPKREMATFDTTTKGLRACHDFLSQFHVEAVGMESTGVYWRPVWHALCDDFKLILAQPAHMKAIPGQKTDKKDAHWIAKLTRIGLLPRSFVPDETIQELRELTRQRKHYVESRNRETNRIHKILQSGGIKLTTYIEDIMGLSGRNLLQLLVDGTPMTPRIVHQSVYTSLKKKVPQLMEALDGYFSDHHRFMLKQSLEIYDFYQKQIGLLEERMNVYLSQYENHVEILDSIPGIDVITASVIISEVGVDMSQFPTAGHLASWTGLCPGNNESAGKKRSTKIRHGNSYLKKCLCQAAFAVKKQKGSPLADRFYQIQSRRGSQKATIALAHQLLKIAYILLKEQITYPEFLAQKKTTRDELVA

SEQ ID NO: 190035 - protein, 448 aa, unidentified
MKKYFLGCDVSKGYADFIILDSDKNIIENNFQLDDTFNGHNQLYSILTDFYKGHPNSAIFSAVESTGGYENNWFNTLSKLNEIMSINVVRLNPLGVSHSQKALLNRAVTDEISAKNIAVYLINHLNKIKPSANSYYSSLRKQWGFVKLLVKQRVQLLNQLESIVYTANTEVLTYCKHSTPNWLLMVLRLYPTAKRLARAQVSSLVKISYVSREKAENLIAKAKLSVSSSEDKITESIIKATVKQILQLDKTIAHHEKQMSDSCNLPEVKILESFKGIATYSAVGLILEIGAIERFSSSKKLASFFGLHPTLKSSGDGIAYVRMSKKGRREPRLILFNVARTAINCNPLIKEIYEKHVKRGMSKMGAIGCVMHKILRIVYGMLKNKLNYDPEIDKKNRDKSLPKKLRIKVNKTRRYQVYDNQAPVSRKQNKKRKEEKKSQVLKLHKAES

SEQ ID NO: 190036 - protein, 503 aa, unidentified
MMHGRGKSDFAIVAVKPANKAEHPAEQSAVEATAAEPVERRAETKGNASQQSTHRTQSWVSVSQALERIRPAFAVMTRGKSRMRESCMYGSARGAPGNGRPLYVADCLANKTDLLSSEENGEPLASLWRMSLCGRLGPVFPSSAVQTGRYPGTRMSVDPVYKVARSGARVEEMRWRDRTVIDGILGIDVCKNTLDVSISSYTKVRTKSFTNSPDGWRHLLDWLIAQKIQRVHACLESTGRYSLGIACALYEADHVVSIINPAQIRDFVRTKLGRNKTDGVDASHIREYCELFKPSPWAPPSEAHRRLGELQTIRSGIIAGLTEWKNRKNSGIVDAEAQALADATISHFTSQLGAVDKAIALTIDNDCDLQSKRDLLLSISGVGETLAGVVLAELPGPDVLRSSAEVVAYAGLNPRQHQSGTSIDRATRISKIGNAVLRAALYMPALSAMRYNSAIVALVTRLKSRGRLKPKQIVVAAMRKLLVLCFGVLKTGRPFDAAIAMGG

SEQ ID NO: 190037 - protein, 410 aa, unidentified
MEVLYPHCAGLDVHKDTVVACVRHMANGSVRREVRTFKTTTKELLALSDWLAGEGCTHLAMEATGVYWKPVWHVLGDGDFTLLLANAAHVKNVPGRKTDVNDATWLADLLAHGLIRGSFVPDEQTQEMRSLLRTRKQLVRERSSHIQRLQKTLEDANIKLDSVISDIVGLSGRRMIEALIAGQTDPEALATLAHRRIKATPDELEAALRGRVTRHHRFLLRLHLQQIDAIDAAIDQIDQEVDADVEPFRAAIALLTTIPGVSVLSAEIILAEIGRDMSRFPTAGHLISWAGLCPKNDESAGKRRSTRMRKGAPWLKTTLVQCAWAASRRKASYLQAQFHRLRARRGAKKAIGALAASILTTAYHMLISGQLYRDLGPDHFDRRAKARQTSRLVARLQNLGYAVQITPLAA

SEQ ID NO: 190038 - protein, 387 aa, unidentified
MPQPNDLSKSLVALDHNSTIIAVVEMSQSSWLVGGVVPGIERQPRKKLEPSPERLLALLHRWRDEAIRTGGNITRIVLAFEAGRDGFWLARWLAARGIEAHVIHPSSVAVSREHRRAKTDRLDTELLKRAFLGWLRAERGHCSMARIPTIAEEDAKRPNRERECLVRERTRIVNRIKATLARLGIREFKPTLRKAAERLAALHTPEGPPLPPNVSAELQRDLARLGFVVSQIKEIEKARQRRLEQHSESGPHATVRLLARVVGIGIETADMLVHEVLSRPMRDRKAVARYAGLTGSPDESGAKRREQGLARAGNARVRRGMIQLAWRFLLFQKQSSLAQWYRARTADSRRGTRKTMVVALARKLLIALWRFTTTGEPLEGVILRPVG

SEQ ID NO: 190039 - protein, 356 aa, unidentified
MAVFGIDLHSDNFVVANKLGNKISKYYLASNGINKFLKTVSLKDYAVVEASTNTFSFYDKIKEHLKDVFVINPLKFKMICDSVKKTDKIDANKLSEVGIWHINNGFSVLPTINVPGKKIRLLRSLFTTYSLLKKEIVVIKNRIHSIFKENLYVIKAEIIFGKMRDNLDGLEIDASNIFQLKTLYRHLEQIHEEKEELKKQILFLGSTYLTEINILTSIKGISPFTAIAIISDMNDINLYKNAKAFSSYLRSTPKIDSSNKTVHIGKTSKQGRKLSITLILQSIRHFTDSNKNLADFKERKKDAKSKGKIRMAIARKMFVIIYFMLKEKKYYNYRDEEAHNNKMKIYLNFLSKNNIS

SEQ ID NO: 190040 - protein, 339 aa, unidentified
MRIVPVFVGLDYHQSGVQVCVMDGKGNVLLNRKVDNRTGKIAKAIRRVGQPAGVAIEACCGAADLADRLHQQTGWSISLAHTGFVARMKQNPDKTDYGDARLLADLLRVGYLPKVWLAPADIRRLRRLVRYRQQRVNHRRDAKLRIRALLRENRLRCPLDVSAWSRPWMRWLRTVQELGAEDRWLLDQHLEDLELFGKQIEEVEKLLTARAEEDAVIRKLLSFHGIGLVTAVTMRAEIGRFDRFRSGKQLARFCGLSPRNVSSGERQADAGLIKAGNPQLRAVLIQFGQRLASRTTGRWAGLVARLLKHGKPRNVVVAAVTNRYLRWLYHQMQPEQLAA

SEQ ID NO: 190041 - protein, 337 aa, unidentified
MKRYLGVDLHRTQFVVCTRWENGEQEIRQWRIGELPKFVEQLRNEDQIAVEAMGTTARFYDAVVGRVARVVVVNPHQFKVISESVKKTDRKDAAALALYLEKDLLPEVRMKPKQNRELMHLAETRDLLVKQRSALKGKINNLLAMQGIELKREALSSKIALERVLAQPVSGMVQLELRILVEQIRSLSESIAELEERLEEEGQQLPGYENLTSIKGIGALSATVLLTVIGKISDFADENKLAAYLGLVPKIANSNESERSGRITKQGNKLARTALVQCGLVAKRYSPYLQRFYERIKQRRGGGKAKIALARKLVKIVYDTLKNQWVFEDFPSFTLAA

SEQ ID NO: 190042 - protein, 360 aa, unidentified
MTTDETAPPRRITGGVDTHKDLHVAAVVDERDQLIGSQSFATTRQGYRQMLAWMRSFGQLERVGVEATGTYGAGLLRHLQAAGVAVLEVTAPDKPDRRRRGKNDDLDAEAAAHAAFAGKRTVTPKSRDGMIEALRVLKACRKTAVAARRVALQMIHNTIVCAPDELRDTLRKMTRMQLVRTLAAWRPDLTDYRNTLSAYRIVLKSLARRYLELHDEIADLDDMIGAIVDELAPDLVARAAIGHGSAAQLLLTAGDNQERLGSEASFAALCGVSPIPASSGKMTRHRLNRGGDRAANSALHLIAIGRLRTDERTKTYVAKRIADGHSKLEAIRCLKRYIAREVFTLLRGRQRQINQAQFAP

SEQ ID NO: 190043 - protein, 364 aa, unidentified
MYQVTNTTELSSLEETRCQFNGGSGAIKLGIDVHQDFYVVVMQEGGTNPKPPQRFPKQGFLRWAEQLPRRGQPVHALYEACGFGFGLQRQLSSLGIQCHVVCPQKLDEQNKRVKTDGLDAKALCLKLDRFVEGNRAALALVRVPSEAEEQARALHRQREQLVKVRKQLEAQGRSLMVNHGLEPIQQWWKPRAFAALDVPPWMKHLLSNTQPTLIGLQQKIAALSLQLQAAAEPRQPRGLGLMTSVIIDREIGDWHRFRNRRQIASYTGLCPGEYSSGKSRLQSCITKHGNPRLRAALVELAWRLVRFQPNYKPVQKWRAILAKGALNTGAARKKAIVAVARQLAVDLWRIRTGQLTPEQLDLTF

SEQ ID NO: 190044 - protein, 475 aa, unidentified
MNIKGTKKKNQVVTANIFEQQELLKKAEVIKENLTASTWRELETNGKFDKNEKLSFISDDMLILGCDVGSETHDMRAIDTRGRELSKSAYSFNNDHEGFQSAKEWAVKIAAEHDKSQIVLGLEPTGHYWFCLATWMIANGISVVQVNPYAVKQTKEVEDNSQLKDDRKDPKLIANLVKDGNFGMPYLPEKIYAELRRLSMFRDQLNEDRIRTINRMHREMKIYFPEYKDALGKVDGAFSLELLKEAPFPDELTALGEEGIRQIWHAAKLRGRGYSRAGEILQYAKASVGIKDGSIASKAAVKWFVQKIMELDVELAVIENQIKQKCQEIPHTGNVLEISGIGENTLSGILAEMGDISRFDDVKEIQKLSGLGLVACSSGKHKGETKISHRGRKRLRYWLFQAAKSAVAHAEEFKELHMYYTTRADNPLKKMQSLIVIACKLLRIIYTILNTGTIYAPKKMLMDIRRPENKGAIVA

SEQ ID NO: 190045 - protein, 404 aa, unidentified
MYNAVGIDVSKGKSTIAVLQPGGTVIRKPFDVSHTSQNLIELAHYLGSLEGSTKIVMECTGRYHEPMLKALYEAGLFVSVVNPHLIKNFGNNSLRKVKSDPADARRIARYTLDNWAELRQYSGMDNTRTQLKTLNSQFSFFMKQKVAAKANLIALLDNTYPGVNKLFDSPPREDGSEKWVDYAYSFWHVDCVRRIGLKTFTERYKAFCKKHHYIFQQDKPEKLFHASKELVAVFPKEKTYKLLIQQSIQQLNLASGHVERLRQEMNALASTLPEYSTVMGIYGVGKTYGPQLIAEIGDVSRFTHREALTAFAGVDPGVDESGQHKSKSNRASKVGSARLRKTLFQIMTTLLQNAPEDDPVYRFLDKKRAQGKPYYVYMTAGANKFLRIYYGKVKECLRNLEQAE

SEQ ID NO: 190046 - protein, 344 aa, unidentified
MKITTVGLDLAKNVIQVHGVDERGKTVLKRQLKRDQVASFFANMPACLVGMEACGSAHHWARKLQSLGHEVKLMAPQFVKPYVKTNKNDVADAEAICEAVARPNMRFVPIKTAEQQSVLSLHRARQAFVKARTAQGNQIRGLLNEYGIVIPQGIGHVTRRLAQIVEDGENELPGRFRRLLQRLADNLKEMDRQVGELEREIKTWHRESEASRKLEKIPGIGALTASALTASIGDASCFTSGRQMAAWLGLVPRQRSTGGKATLLGISKRGDTYLRMLLIHGARAVIRVCERKPDPDRWLKGLMGRRNKNVAAVALANKNARIAWALLRYDKEYASDYAPAFAAE

SEQ ID NO: 190047 - protein, 357 aa, unidentified
MFFIGIDVHKRQCQICILDEQGQVHYETRVPTSRPDLADVLRSYLPARVVIEACPPSEWVARHLESLGFEVIVADPGFSPMYATRDKKIKTDKRDARMLANACKLGAFKPAHRLSDAQREVRTFVQVRQTLVQMRTRLTNQISGVLLAQGYVMATGAPENFTKRLAQIELPDALSALIEPLCSLLGPLNERIEQLDKELASRAEQDAQAVRLQTIDGIGPLTSLMFVAVLDGAQRFEHAHQVMAYLGLVPREKSSGDKQMRGSITKAGHPQMRVLLVQAALRVQRLQKPQTVRLHQWAEKIKERRGKRIATVALARRLCGVMWAMLRDGTEYQAEPPRRTPGAERGSGDSPSNALAA

SEQ ID NO: 190048 - protein, 405 aa, unidentified
MIEPIVKRIAGLDVHKMVVVGTVLIEEEGGSIKQETREFGTFKRDRRQMCQWLKDHDVELVAMESTGIYWKSIYATLEKAQILAYVVNARHVKNVPGRKTDVSDSQWLAALARVGLLRPSFIPTKDLRELRIISRQRTKINVTLSAEKNRLNKVLDDAGIRLGGVASDIDGVSAQKIIEGIIDGKPIIELIACARGRLKAKTDDLRACLDEELSERHIFLLKALQKHIQFLKSELEDIDAYLFAAMSPYQKQWEILQTLPGVDKVAAMVLIIEIGIEMERFGSADQLSSWAGMCPGNNESAGKRKSGKTRKGNQAIRSILCEIANAARRTKSQFKGKYESLVIRRGHKRTIIALGHKILRVIFVMLNNVRPYFDPGIDYEELMVDRNAPRWLQALKKFGYLPQTV

SEQ ID NO: 190049 - protein, 359 aa, unidentified
MEHYVGLDVSLKLTAICIVDRTGKIAREGMVASDPETIAAFIKSHAPHVVRVGLETGATSTWLWTELNKMGLPVICIDARHAKAALKLQINKSDRNDAVGIARIMQCGWYKEVRVKDLDSHAIKALLVSRALLVKIKRDIENQIRGLLKNLGLIIGQAKMNVFSVRAAELAEARPELAAAVEPLLKAREAVGQQIADLDRKAMRLARNDAQVRRFMTAPGVGSITALCFLATIDDPTRFRRSRSVGAYVGLTTRRFASGEIDWTGRISKCGDKMLRSYLYEAANVLLTRVAKWSALKVLGSQGCEAQRATQSQGCRGSKACRHSAPDVDRWQRIQLVIKGGCQSNLHSRTTRIPPISGN

SEQ ID NO: 190050 - protein, 297 aa, unidentified
MGHVATIGLDIAKSVFQVHGVDAEGGVVIRQKLTRARLLKFFEKLGPCLVGIEACGTAHHWARELIGLGHDVRLMPPSYVKPYVKRQKNDMADAEAICEAVTRPTMRFVPVKSPEQQSVMVLHRTRSILIRQRIQISNAIRSHMAEFGMAAAVGRQGLHSLIEVVHDAADERVPVEARGCLAMLAAQLQLVNEQVLETDRLIRTNARSTEVGRRLMEIPGVGPLLASALVGTIADPRAFKTGRNLAAWIGLVPKQNSSGGKERLGGITKQGDRYLRQMLVVGACSASAPLAQIWGCG

SEQ ID NO: 190051 - protein, 319 aa, unidentified
MTQIVLGIDVSKLTLDMALIFDNRTLCRQFQNSTAGFKSFAAWLESLQIKQVHACLEATGIYGEAVALFLHECGHRVSVVNPLRIKGYAQSNMQRNKTDRLDARLIADFCQTQKPESWPPPSLEVKHLQSLVRRVEVLEEMLQAEENRLTNAAPEIKSSIERIITLIKEEISELERQIKKHISQNSNLKEQSELLQTIPGIGARTANLLLSEIEFDRYDSARAIAAQAGVTPRKKQSGTSLKQTSLSKLGNARIRRALYFPAIVARQHNEIVKEFAKRLKKNGKTPMQIVCAAMRKLLHIAFGVLKHKRAFDASLAFSA

SEQ ID NO: 190052 - protein, 325 aa, unidentified
MIKTMQTQNAVVYAGVDVAKATLQLHLQGQQSEFSNTAKGLHQLCAQLRKVPSVHVVCEATGGYERAMVKVLQQEQIPVSVTNPARVRAAAQAQGQQAKSDPIDARGLTDYGQRYQPEPTPPTSATQDRLVALTQWLKQLIHGRALAKTQAEHHQDPFVRRQHAKLMTHLQSQIEAVEKQIEALLEQDAALQQRVNCLDEIEGVGPRTAWMVLAHMPELGRLNRHQVAALAGLAPWTRDSGTMKGMRCIGGGRPEVRLALYMAALSAARCNPVLRALYKRLRAKGKLSKVALTAVMRRLLTYMNHRIKALLSETATAKAEELKTA

SEQ ID NO: 190053 - protein, 361 aa, unidentified
MSTIAEDDVRVVAGVDTHKEFHVVVVLDELGRKLDMATFAATPRGYRELTGWVTDFGEVLAIGVEGTGSWGAGLCRHLRERGLNVIEVNQPDRHKRRRKGKSDRLDAEVAARAVLAGDATGLPKSGDGPVEALRQIRVARAGAMKARTAAANQLHSVCDTAPDQIRSQLRGLSTRRKIAIASRYRPGDPLTPSGAAKRALVTIARRWAALDAEIAELDRAIKTILDAIAAPLLARHGVGYETAGALLCTAGDNPDRLATEASFASLCGTAPVPISTGNSNRRRLNRAGDRRGNSALWTIVMARLRSGHAPTVEYLQRRVAEGHSKRDAIRCLKRFVARELYGDIQAITAAQTTKSPLEIAA

SEQ ID NO: 190054 - protein, 392 aa, unidentified
MFFVGIDIGKNNHVASMMDESGKVVFKAFSFPNTSDGGHALFSKLASYSSSPDDFEIGMEATGHYWLSVYSFLFEKKSLLHVINPIQTDGWRRGTEIRKRKNDIIDSVLIADLIRYGQFVETRLADEDLFSLRSLTRFRTYLVESISDLKRKVVCVLDQVFPGYQSIFSDIFGKTSKEILLQFSSPIDFESVSSQTLAELLAKLSRKQVGPAKAAQLKAAASCSFGVAFAKSSFTFQLKALIEQIAFIEKQVKETETEIAGIMEKLESPITTITGIGNVTGAAIISEIGDISKFDSPRKLVAFAGLDATVTQSGEFEAAHNVMSKRGSPYLRKAIFQAALVAAFKDPVLSAYYQKKRAEGKHHLTCIGAVARKMCNIIYAVVKNNQPYVPKA

SEQ ID NO: 190055 - protein, 355 aa, unidentified
MNSVRYVGLDVHRDTISAAVLNESGRLIQQSILATRAAAILDFIGGMRGTLHVTFEEGTHSSWLYDLLSRRVARVVVCNPRKNALMKSGNKSDAIDARKLAELLRADMLSPVYHGEKSAMEVQHLARSYALLTEDTTRVMARIKAVFRGQAIACAGKKLYGKKHRDEYLAELGTGALRRRAEFLYQELEAVQQLRRQAKRDMIVECRKYPETKLLCSVPFLGPVRAAVLIGRVQTPHRFRTKRQFWAYCGLALEMRDSGEYRVVDGQVERRKRPAQIRGLNWNHNHELKNLFKAAATSAAACNGVFHDFYLGLLKKNMQPEMARLTLARKIAAIALKIWKKGEAFDADHLKLQAA

SEQ ID NO: 190056 - protein, 504 aa, unidentified
MSGDVIGEALAIPFKREPYIDIPTISACPILWQEGIIVGRPKQLDRKTMQLPKHLQRLNLNAAGIDIGSKSHFVAVPEGTDDEPVREFECFTADLYRLADWLISCGVTTVAMESTGTYWIPVFEILESLNIEVKLVNARHVKNVPGRKTDVLDCQWIQQLHTYGLLEGAFRPPEQICELRAYIRHRMNQVRYSSAHIQHMQKALTQMNLLLHNVVSDITGVTGMRIIKAILDGERDTQILASMRDKRCKNSIATIAKSLQGNYRPEHLFSLKQAVEALEFYEAQIAECDREIESLLASFDSVTKNSLPSQPEEDNKSSKSQCATPAFNLQTELCRVAGVDLTKIDGIDTTTALKIVSETGFDMSRWKSAKHFASWLGLSPGSKISGGKSLSGKTKPVVNRAAIALRMAASSLYRSSCALGAYYRRMKARLGAPKAITATAHKLARLVYSMLKYGTDYTDVGQEYYEQRYKSRVIQNLKKRAQQLGYELVETMGVNKKFIVTQIQ

SEQ ID NO: 190057 - protein, 365 aa, unidentified
MERDRSIRLRSEETVPEPGRHVPHHPSPNSCQGHRARIITRSGYTKEAAMQTPSVFVGIDVSKVRLDVAVRPSSDPLSVAYDATGITTVITQLIQQHPTLIVVEATGGLERLLLRALVDAALPVIVVNPRQVRDFAKATGQLAKTDTLDAQVLACFAEVIQPALRVIPDAQTQELAALLARRRQVLAMQGAEQNRLDRAPDRVRKRIEAHLRWLHAELARLDEDLDEMIQESPVWRAREELLQSVPGIGPVMSRTVLAELPELGLLNRKQIAALVGVAPFNRDSGRLRGHRTIWGGRAPVRRVLYMAALVATRWNPVIRLFYQRLRVAGKAPKVALVAAMRKLLTILNAMVHAGTPWQPVVAQDT

SEQ ID NO: 190058 - protein, 461 aa, unidentified
MAKQPGKRKKDGAKADATVGLPPLNLHAAGIDVGSAEHYVAVPPDRDAEPVRKFGSFTADLHRMARWLKDCRIKTVVMQSTGVYWMALYDVLEKHGFEVNVANARHTKTLPGRKTDVQECQWLQKLHTFGLLNNSFRPAEEIRVLRGYLRQRENLVAAAATCIQHMQKALTEMNIQLANVISDISGTTGLAILYDIVRGERDPYKLAMHKHSRIRASRQEIARSLEGTWRQELLFVLEQSLDLYQTYQQKIQTCDERIDGQLRSMEPRIDPLSEPIPEPRRGKDARGHQSGFDLRGQLYRITGVDLTRIDGIEVQNAQTIVSEVGVDMSRWKTEKHFASWLGLCPDNRISGGKVLKRGTRQVVNRASTALRLAASALLRSQSALGAKFRRLRSKLGAPKAITAMAHMLARLVYRMLKFGHDYVDRGIAFYEARYQQQQLQRITKQAAALHMQLIPLTRVVS

SEQ ID NO: 190059 - protein, 323 aa, unidentified
MLGMGDSAPRKGADAMTFVGCDLHTRMQQVAVLDTGTGEVSEHRLPHEGTAVEEFYAALPRPVTVGIESTGYAVWFHTLMQRLGHTLLVGDAAKIRAMVVRKTKTDRRDALHILDLLRHDRFPAIWIPDPATRDLRALLTHRMRLVRIRTMVKNGLQAIALNSRLACGAQLLRQAGLAQLQALALPPHTARRRDQSLELLAGLTSQIRELDDAITTTALGHPDAPRLITHPGVGALTALTTIVVLGPVSRFPDSKHVVSYVGLAPALHASAEKYHLGRITRKPKSPSPVSSSCASSLCCVIRLTMTSSVAGVARRRPRPKEGD

SEQ ID NO: 190060 - protein, 406 aa, unidentified
MPFAALDLHKKVIQAATFDDLGNPQWRGRFPATRAAIAAFAQQHLTPHHQVALEATFNTWAIVAILQPLVAEVVVSNPLQTRAIAQAKVKSDKIDTDVLAHLLRCNYLPRVWIPDPQTRQLRSQSTERANLSSDRTRLKNRIHAVLHQRLIEAPHGDLFSPANLAWLRTLDLDPHGRATLDRHLRQFDLIEAELTSLGDELARHAWEHPQVKLLMTIPGVDFTVAESMYSTLGDIERFATPDQAAAYFGLVPSTYQSGETCYHGHITKHGRAHARWLLVQAAQHLTAHPGPLGVFFRRLARRKNRNVAVVATARKLVTIAWHMLKHNEPYRYAQPKASQAKFDRLRIGATGRRRQGGNPKGAPRPAAYGSGHPTRAIPALDQVYQDAGVPPLPGEFDALIWPTSML

SEQ ID NO: 190061 - protein, 432 aa, unidentified
MSQFLNDFVVGIDVSSEFSIVAMLAPTGELIRKPFRIDHNPAGFHKLLDILKKEEERLNRKPIYFVESTGIFHLPLFFFLKSNDLKGFVLNPLCVHSTKNFDLRKVKNDNKDSEAIARLAKYQAIKVSMMPEPQILALRMMTREYYAVSDRLTEMKNRLCTDLYLLFPGFLNVFSGPFGKTALAILRSYPSPRAVREADTDVLTLFISKISRKGLAWASNKVAQLRDCAQLAFSMPSEFSLLDTKIKFHIDGIEHMQASLDGIEAQIHKMMDSNEFTAEAKRNVELLDEIPGVGFLTAATLIAEMGDFSLFNSPKALTAFFGLDPSVNQSGKFTGDRNKISKRGTRIGRRILFTSAMASIRTTRNGTEINPVLREFYKSKCVSKKKKVALVAVMHKLLHYIYAVLRDQKPFVIIRPKDHQTWRTTKPQPAVA

SEQ ID NO: 190062 - protein, 362 aa, unidentified
MDDATTPICKDKVTVGLDLGDKYTHICVLDSDGEVCEESRLRTTPMALRRRFAPMPRARMVLEAGAHSPWISRLLKECDHEVYVANPRKLRLIYQNDSKSDRVDAQYLARIGRLDPALLAPFQHRQADTQTDLALIRSRDVLVRSRARLINHVRGAVKSQGGRLSTCSSATFAAKALPDLPAQLEPALAPLLEVIATLDEQIRSYDRRIEELAKERYPETGLLRQVAGVGALTALTYVLTLEDPARFPDPRAVGSYLGLRPRRADSGDLSPQLHITKAGDEMLRRLLVSSAHYILGPFGPDTDLRRWGLALAERGGSRGKRLALVAVARKLSVLLLRLWATGEVYEPLRNSAGHGGSLPCSA

SEQ ID NO: 190063 - protein, 437 aa, unidentified
MAELNSSAVLTNKELPLLYGVGIDIGKANCSLSILRIDKTAVTKPMEFPNAKAGYEWLDHKLEQLGCEKTQLLIGLEATSRYWENLLHHLVAEGYPTQLLHPAQTYQFAKRRGMRAKTDRIDAELIARFVLSGDARPAYVPNELITTYRELIRLHTNLADEATRYKNELRAMLEVLFPEFTQVFADPSAPTALALLQRYGGAEAMVRAGIDEIYSTLHELSPRRYGRGAAQRLVALAQASQASPLAHSARATSLGIICDQLAHTQTNLAKLEEALGNLLQSDKEADSLASVPEFGQKVRAVLRGELGEVERFERGDQVVAYGGLDLVIKESGKWKGQPKLSKRGSGLLRRMLYMAVLHCLRMKQSAFKDYYQAMVTRGLRGRKAIMAVMRKMLLVAFHLLKSGETYDPTKVWAAPKPETADCLPLPVSDPKRVAARA

SEQ ID NO: 190064 - protein, 310 aa, unidentified
MEHTTVVGIDVSKDRLDVHVLPSEEAWSVSRDADGLGELCRRLAGMSGVVALEATGGYENIVAASLSSAGLPLVVVNPAQVRAFAKALGQRAKTDPIDARVIARFAEATKPMVRPLPDRATRMLADLLGRRRQIVEMMASESQRLRRSEMPRVRKSIERLLAALKRELADIDHDIDDTVRGSPVWREKEDLLASVPGIGPIIARTMVADLPELGTLGRKQIGALAGLVPFVRQSGQWKGQAHIGGGRPTVRTALFLGAQVAKRHNPVLKAFYERLIAAGKSKMAATIAVAHKLLIILNAILRDKKPWQTA

SEQ ID NO: 190065 - protein, 412 aa, unidentified
MEVVYRCCAGLDVHKKSVSVCVSCREADGSKRQEIRAFATTTRDLLALADWLGEQGVTHVAMEATGVYWRPVWAILEGHHHLLLANPQHMQAVPGRKTDTKDCEWIADLLQHGLLQGSFVPPTEIQDLRDLTRYRAELTQAQTGVANRIQKLLEQANIKLSSVASNTLGVSGRQMLRALIAGETDSGQLAERARGRLRSKIPELRLALEGRVRDHHRFLLGEYLEEWDAIGQRIARLEAEIERRIGPFEYAVALWQTIPGIERVTACSLVAEIGVDMRQFPSARHLASWAAVCPGNNESGGKRKSGKTRDGNRWLRRTLCQAAWAVTRKKKCYLSAQFKRIAARRGVKRAVMAVAHTMLVTAYTMLKKGRSYQDLGGDYLERINKDQLQRYFVKRLQNLGLKVTIQSVTATA

SEQ ID NO: 190066 - protein, 391 aa, unidentified
MFLLGIDIAKLNHVASCIDSSTNEIVFSNFKFKNDFKGFSTLLDKIKTFDTKNLIIGLESTSHYGENLINFLFKQHFKVALINPLQTSHLRKANIRDAKNDNLDSLNIAKSLIFAKLNFISEKNINCFSLKKLTRFRSSLIKQRSKAKIQLTSLLDLLFPELQYLFKSKIHSKAIYSLLKKYPSAEEIAALKDDEISNLLYASSKGHFKKEKSIELKSLAKTTVGIKDTSISLHVIQLIELIELYDKQIKDIVTKIADTVDKLDTKLLSVPGISIIACAIILGETNNFNNFSDSTKLLAFAGLDPKIRQSGNFNASSCRMSKKGSPYLRYALIFTAWNIVRHSEKFNKYYCLKRLQGKSHYNSLGHVAHKLVRVIFTLIKKNIVYQEENLE

SEQ ID NO: 190067 - protein, 354 aa, unidentified
MSGEKYIGLDVHQATISVAVMDSQGKVVMESILETKASTILEFLAGLRGTLSLTFEEGTWAAWLYDLLKPHVAKLVVCNPRKNALLKQGNKSDKIDARQLADRLRLNDLKSVYHGETGVRMLRELARSYLTVVKDLSRVMNRLKALYRSWAIPCAGRDVYYTRHRSQWLEKIPEAGTRRRAEQLYQQLDMLQHLRQQARRELLAESRKHTITAKLRQIPSLGPIRSALAVALIQTPHRFRSKRQLWTYSGLGLETRDSGEYHFVKGQVQRKKPVWIRGLNKDYNHDLKGLFKAAAMRASIQPGPFQEFYQRSLAKGIKPTMVRLMLARKIAAITLTLWKKGENFDAEKLKSQAA

SEQ ID NO: 190068 - protein, 408 aa, unidentified
MVETTSEVEECTLASVLSVERSEAGKTLAADDRSLHLGSGSAEIVGEQDRRRSFGPSPNSRQSRSTLRSPSSHLQGRDTSNMDFQASLVSTLPKPNSMSLDYLNEASGHQQLLKQLPSPGTCLIVFEATGGYESPAVLELVDANHIVCVVNPRQVRDFARAHGILAQTDKIDACVIARFGKEVRPRAVEKTHEKQQELDQLVTRRRQLIVTRTAEKNRQATATSKVVRKSLQHSLDRLNKDIRKISAEISKLVKSDDEWKGKAEILESAPGFGEVTAATLIAELPELGRLNRQEISALVGVAPFNRDSGTLRGRRTVFGGGRAVRNVLYMAALCARRFNPVIATFANRIQSQGKKPKVIIFACMRKLLVIRNDYESQDLSNRFFGHSLTRLFFSRLVGAHLHRSCFGC

SEQ ID NO: 190069 - protein, 387 aa, unidentified
MAQVIIGVDPHKRSATIEIINAREKTVGQGRFGTDRDGYQAMLAAGRKHKDRLWAVEGCNGIGRHVAQRLVADGETVVDVPAKLSARARVFATGQGRKTDPVDARSVAVVALRTEGLRQVVTDDTTVALRLLVDRRDQLGRARTEVVSRLHHLLLELVPGGAKKDLSAQQARALLGTVRPRDVVGKTRRRLASELIGELVVIDKKIKIAKQELTDLVNSTGSRLMDLTGIGPSGAARLLGDIADIARFTSRAHFASWNGTAPIDASSGEQNRHRLSRAGNRRINRALHIMAIVQLRRDTAGRRYHRRRLAEGKTSMEALRALKRRLSDIVYRQMVADTKLVRTGPGGHAGATLQSSAADLNPEIDTSEKSLPGPAEPQPRTPLLIIT

SEQ ID NO: 190070 - protein, 455 aa, unidentified
MPKRTTGDRPELKPINVGAAAIDIGSKMHMAAVNPTCTDTPVRAFGTFTQDLHDLADWFKACGVTSVAMESTGVYWIPAYEILEQRGFEVILVNARYAKNVPGRKTDVSDAAWLRQLHSYGLLRGSFRPDAEVATLRAYLRQRERLVEYAAAHIQHMQKALMEMNLQLHHVVSDITGATGMRIIRAIVAGERDPDVLATYRDVRCHSSIETIRAALVGNDRDEHVFALTQSLELYDTYQAKMLDCDRKLESLMAALADKGAKPVGKLCRPRVKTKQVNTPSFDVRTALYGVLGVDLTEIHGLGPSLALKLIGECGTDLRPWPTAKHFTSWLCLAPGNKISGGKVLSSRTRRSSSRAAALLRLAATTIGRSDTALGAFYRRLSSRAGKAKAVTATARKIAVLFYNTLRHGITYKDPGADRYEEQYRSRVLANLKRRAKSLGFVLQAVPCDADVAVS

SEQ ID NO: 190071 - protein, 345 aa, unidentified
MRFLGEIDNTVAATCKLVRKLATQYDRLWFCYEAGPTGYGLYRQITSLGHACIVVAPSLIPKKAGDRVKTNRRDALGMVTQLRAGELTAVWVPDPAHEAMRDLVRARGAAVEDLRRKRQHISSFVLRLGLAYAGKKTWTKAHMKWLASQKLEHAEQRIAFEEMLLAVREAEQRIARLEEAIRGALADWSLAAVVHALMAMRGIDLISATVLLAELGDLSRFGTPRELMAYLGLVPSEHSTGDTIKRGPITKTGNRRARRTLVECAWAYRHPPRVGQEKQARVEAAPRAVREIAWKAQHRLYARYRALTRKGKLKTVVVTAIARELAGFIWAINREITGARAVATP

SEQ ID NO: 190072 - protein, 348 aa, unidentified
MATTIVEAGRTVIGGVDTHLDVHVAAALDPIGGVLGVESFVATPGGYKAMLEWMGEFGTLSKVGVEGTGAYGAGLGRFLRRAGVEVIEVDRPNRQVRRTKGKSDPADAVEAARSVLSGRCTGAPKSRDGNVEAIRALLVAKRSAREGRLRAVHQMRQLSYTGPDQLRCRLKGLSTTDLIDETAALRRRVGGDPVLLATKTALASLGRRVHALDEEASHLDDSLAELVTATAPAMLELFGVGIDTAAVLLVAAGDNPERLRSEAAWAHLCGVAPVEASSGKVTRHRLDRGGDRNANQALWRIVMTRLSFDPRTREYMERRTKEGRSKREIIRILKRYVAREIFKHLPRG

SEQ ID NO: 190073 - protein, 351 aa, unidentified
MQRFIGIDVHGQSCTLVVMGPSGRRLGEHVVETSAKALIERIRSIPGDKYVCMEEGTQSEWLYEVLESHVKQIVVTQPLKRAGSKSDAIDAWALADMHRRDALDRTVFKSPKTSTALRQAARGYIAVRRDMVRAKCRLNALYRSRGCNPTGEIYDPDTRNSWLAKLPPAYRTLGELLSEQLDGLCQSHQAAESWLLKEAERIPVARRLATAPGIGPIRAALLVAIVVTPTRFRTSRQFWSYSGLAIVTRSSSDWVRDGRGWTRKLTAQTRGLNRNRQPELKAIFKGAATTVIQQMPNHPLHKDFQRMTDAGIKPNLAKLTLARRIAAATLAMWKHQEDYDPSKQTRAPQSQ

SEQ ID NO: 190074 - protein, 321 aa, unidentified
MQEQAQCGIDVAKATLEVCVLRVVGQPKSREFDNDPRGHRKLVSWVKALCGETPIHFCMEATGAYGTALATYLAELGELVSVANPQRVKSFGMSCGALNKTDKADAKVIAQYCRAMAPKPWGPSRPEVKELVGMMRRLEDLEAQRQREQTRLGEPGLTPVVRRSLKRMLRLTKTEIELLKKEVKQHIDRHSGLKADKKLLKSIPGIGDVTAHWILAELPDVSTFSCAKSAAAYAGLSPLEWRSGSSVRKRTRLSKAGNRHLRRALYMPAVVATRSNPFVHDLYERLLASGKPKMVAIGAAMRKLLMIAFGVLRTKTVFAAP

SEQ ID NO: 190075 - protein, 404 aa, unidentified
MYNAVGIDVSKGKSTVAILQPGGTVIRKPFDVSHTSQNLHELAKYLDTLNGDTRIVMECTGRYHEPILKTLSEAGLFVSVVNPHLIKNFGSNSLRKVKSDPADARKIARYTLDNWANLRQYSGMDNMRSQLKTLNSQFSFFMKQKVAAKANLIALLDNTYPGVNKLFDSPTRDDGSEKWVDYAYSFWHVDCVRGIGLKAYTERYQAFCKRHHYIFQADKPEKLFNASKELTAVFPKEKTYKLLIQQSIQQLNLASAHVERLRREMNELASTLPEYNTVMSIYGVGKTYGPQLIAEIGDVSRFTHREALTAFAGVDPGVDESGQHKSKSNRASKVGSARLRKTLFQIMTTLLQNAPEDDPVYRFLDKKRSQEKPYYVYMTAGANKFLRIYYGKVKECLRNIEQES

SEQ ID NO: 190076 - protein, 458 aa, unidentified
MSRAKKKQSPGTRKKNRKVLEQINHHAAGADMASEEVVVCVGEGVDEEPIRTFGTTTAQLNKAGEWMLSCGIDTVAIEATGVYWVPAYEIWQEQGLKPVLVESNSIHSLNGKKKSDFIDAHWLQLLHTFGLLRPCQRAERSMIELRGYMRRRREVTEASSACIQHMHAALTLMNVRLDQAVTDITGLTGMRIIREILKGERDPLVLAQMRDERCLKNEQEIAEALTGHYRAEQVFVLDQAVQAWDFHQQQLRQCDQQIEKVLQTLPSKADRKNLPKARRSAGKPRKNELRINDGRTLLYERLGVDLTLIDGLQVITILTVISECGIDLSRFPTYKHFCSWLGLCPGTRRSGKRVLSSRSRRTTNRAATALRLAAQSLHRSQTALGAFYRRIKARLGPEKATTATANKLAKLIYLSLTTGRVYIDPGPDYFDSANQLNALKQLRRRASKLGYQLTPIAA

SEQ ID NO: 190077 - protein, 339 aa, unidentified
MDTLYGGIDLHSNNNVVVITDGEDKVVYRKRLRNELDIVLEALSPYERELSGLVVESTYNWYWLVDGLMDHGYLVHLANTGAIDQYSGLKYCDDESDARWLAKLLRLDILPEGYIYPKEHRPVRDLLRKRAHLVRQRTSNLLSVKNLFTRNTGRGLSVSGIKRLTDADVDEMLPNADLALAVKSSVAVIQCLDAQIKILEKVILKRVRLRADFKRLLTVPGIGPILGLTIMLEVGDINRFESVGHFASYARCVGSARVSNGKKKGKGNTKNGNKYLGWAFVEAATFAARFNDTIESYYQRKKAKAHLMVAKKAVAHKLARACYCMLRDQTDFEVDKAFT

SEQ ID NO: 190078 - protein, 341 aa, unidentified
MEMTTLGIDLAKSVFQLHGVDGSGSVVLQKKLRRGAVLDFLSRFEPCLIGMEACPTSHFWARAIAALGHDVRLIPPAYVKPYVKRQKNDAADAEAICEAVTRPNMRFVPVKSEEQQAVLVLHRSRDLLMRQRTMILNAIRAHLAEFGMIAAQGPRKVADLVQRLSNPDGGLNLPALARSALLSLAAQLETLAEEIGKIERQLMAWHRQNQSSQRLETIPGVGIITATAIAASVPDPSVFKSGRQFAAWLGLVPRQNSSGGKERLGRVSKMGNGYLRRLLVVGATSVTRRAPTTDTRTGAWVRSLLERKPTRLVTVAIANKTARTAWALLAKGESYRAAPAN

SEQ ID NO: 190079 - protein, 352 aa, unidentified
MRKYYVGLDVHKVSIAIAVLNAHGKLITRTVIETSMEAVRDFFRNLRGEIHLTFEEGNHAAWLYDLVEPLVKRVVVCNPKHNRIEGSRNDRVDAVKLAELLRLNGLKPVYHGEHGTRTLKHLMRCYECLVKDITRVKNRLKALYNSQAIKQRGRELYHASKRQSWLEKLPNQGQRTRAELFFQQLDELKVIKRAAQKAMVAESKRHPAYGVLSTVAELGPVRIAQIIPTVETPWRFRTKRPFWHYAGLAVVTRSTADHEFENGRVRKRKKQVIQTRGLNQDYNRRLKSIFKSAATHACHGGAYREYYEGLLKTGMREEMARLAVARKLSATVLAVWKSGESFDAGRILRKAV

SEQ ID NO: 190080 - protein, 336 aa, unidentified
MEHLAIDLGGRESQICVRSEDGRIVEERRCRTAALPAYLAGRSRSRVVVETCSEAFWVADAALAVGHEVRVVPATLVRSLGVGARRLKTDRRDAQVLSEVSCRIDLPSVHVPSPEARQRKTLCGMREALVGARTKVLNTVRGWLRAEGRRPRGGDTATFTARVRQLYEDGRLPVHVERQLRTIDALTVEIVEADRELATTAKADPIARRLMTVPGVGPSTAVRFVAALDEISRFSGAHAVESYLGLVPGENSSAERRRRTSITKAGPAALRWCLVQAAWAARRSRRKDPMQRWADEIEKRRGKRVAVLALARKLAGMLYAIWRDDTVYEPRLSGAT

SEQ ID NO: 190081 - protein, 388 aa, unidentified
MTEPYLIKRLSKYPKEGGWMYAACKANLKKEMKNMNHLGIDVGKRKCRAALKDDKGKILDEFFFSNEGNGIHNLLSRIQSHGKCVAVLESTGNMWMRIHDMLEEIGIDTKLANPNKTRIIAEAKIKSDKLDARILSDLLLRTDLIYESYVPKRENRDKRSLVRHRITLSRTKTKLVNKVHSILDKYDYRTELTDIFGKSGIEWLKALSSQVTPVDRIILDTSIESIEAINRQIDTVSKEISKYARDNNDIKILLSITGIDIFSAMLISTEIVDIKRFSTPWWKLVSYAGLAPSIRESSGKIKTGGITKQGSPWLRWILVQCALIAIKYDTHLRIFYDRIKNRRGHATAIVATAKELLVIIWYMLTRNELYRYMDKQRYERKIKKLEQR

SEQ ID NO: 190082 - protein, 353 aa, unidentified
MGVYIGVDLHVRTETVCWMDTSDGEVHERTLEHDRDDVRGFYAQLAAPAVVGVEASGYSLWFHQLIEATGHRLLVGNASAIRQFARRRQKNDQRDAQLLLDLLLHGDFPSVHVPSPASRDVLALLRYRHRLVRMRTMLRNGLQAVALSHQLRLGPRLFTVRGQQQFVALPLTGAYAAQRQHSLGLLESLGERVGAIEKELEARAQQDARVLRLRTHPGVGLLTGLAVVHALEPVGRFDRARRIAAYCGLDPKEHSSGEVQRFGHISKQGNRLLRFLLVEAAHAAVREDEELRRFYFRLESRRNSAIALVAVARKLVLRLYRMLREEIDYDEFRRRGRDARRARVGHSSVARQD

SEQ ID NO: 190083 - protein, 394 aa, unidentified
MMSNYFCGIDISKDSFHAALIDDQGQLLWSRSFPMSSEGFRDVFIALCPQGSSVTSLRLGMESSGSYYLNLFSFLQSHHLDVRLLNPLLVSNFSKLSLRKTKTDKRDAATIAEFLRVNAQNLPPACDSTDEFRALAREREALSGQSIALKNEIKRLLGILFPEILRLLNPFTVSALRLFSAFPSKDAVLKASPRAILKVLSSNRRGRKLSISPKLLIETAQTSVGLSSPAFETILQSKIRVLERLQEELEDMSRQLVQLCRDQIPDSLRILNSIRGLNDITSAHFLAETYKRSFSTPQKLIAYAGLDPTIYESGQWKGRGHISKRGNKSLRRILFIMAVCVIRVNPIFQEVYMKKRTEGKRYKQAVLVVVHKLLRVIHALLRHQVPFNPVPQSL

SEQ ID NO: 190084 - protein, 343 aa, unidentified
MDYFAGLDVSVKDTSVCIVDDTGKIIGEVKVASEPDALLAVLTNRAYHFKRIGLEAGPLSQWLFSALAEADLPVICVETRHMRAVLKAQINKTDRNDARGIAQMMRVGLYRPVHVKTLRSQKLRMLLTHRKLLQAKAIAVENDLRATLRNFGLKVGVVGTVKFEARIKELIENFPDLVALVEPLLVVRRVLREQISILQRRVLAAVRNDEVCRRLMTVPGVGPIVALTYRATVDVPARFRKSKSVGAVFGLTPSRDQSGERDRPGAISRCGDEMMRTTLYEAAQAMLFCSAKWSWLKAWAMKIARHRGIKRAIVALARRLAVIMHRIWIDGTEFRWTREAAAA

SEQ ID NO: 190085 - protein, 421 aa, unidentified
MHVVYERCAAIDVGKDEIAVAVRMPGDGPEGRVTVKRTFRTFYGVMGEAARWLVSLGVTHVAMEATGVYSMPVYYALVEHGDFAKVLICNAAHVKNVPGRKTDYADAEWLAHLLECGLLAGSFIPPAEIKAARDVVRYRTKIVRQRVSEIARLGNTLQDAGIKIDSVAWSIATKSGRAMIEALIDGERRGPVLAQLAKGTMRAKIADLSMALEGRFGDHHALMCRLHLDHIDHLEAAIARLDARIEQMMEPFQCWRDLLATIPGIGQHAAAAVISEIGVAVAEFFPDDAHLASWTGLCPGNHQSAGKRRSGKPRPGNTHLQTLLVECAWAAVRHDGYLKSLFHRHVMKNGGYRSSTAKKKAIVVVAHAMIVIIWHVMVTGKPYHELGAGYFASLQDPERETRRLIARLQALGHTVTLDPAA

SEQ ID NO: 190086 - protein, 343 aa, unidentified
MDHFAGMDVSVKETSVCIVDDAGTIVREAKVASEPEALLNVLTSPGFHFKRIGLEAGPLSQWLYSALAEAGLPVICVETRHMRAVLQAQINKTDRNDARGMAQMMRAGLYRPVHVKTLRSQKLRMLLVHRKLLQSKAIAVENDLRGTLRNFGLKVGIVGKLKFEARIRELVESHPDLAVLVEPLLVVRRVLHEQIGILHRRLLAIVRGDDVCRRLMTIPGVGPVVALTYRATVDVPARFKSSKAVGAVFGLTPSKYQSGEINRTGAISKCGDEMMRVMLYEAAHSMLTRTIRWSWLKAWAMKIARHRGMKKAIVALARRLAVIMHRIWVDGTEFRWTREVEAA

SEQ ID NO: 190087 - protein, 351 aa, unidentified
MPLMKYYIGLDAHSTTSTFAVVDENGQCVLRETVKTSEQSLVHVINKINGERHMTFEESSISQWLFLQLKDKVDHLLICNPTYVAKKQGAKTDFRDALHLAQELRTNHLQAVFHDTSHWMEIRTTVSGYLDIVEEIVRFKNRLKSVFRAEAIQTDENSFYKNKERVKELSNLSAKFVAEKLFHQIEFLESEKEKYKEVFEKNRKKYRPIRNLMTIPGISIIRANIIAAIVCQPARFENKHKFWGYCMLVRHIQVSNGRIYGNKRFFGRRELRNVFLGAAENVMRLDGELRDRYDALRAKGVAHKETKINLARQIASIALCLLKNNDKYNEKYLDYLKERKKLRKEFFEQTL

SEQ ID NO: 190088 - protein, 433 aa, unidentified
MPRALISATNPYVAVPPSRDSQPVRRFGCTTAELKAMADWLKQCGIRTVAMQSTGVYWIAVYDILEQASLEVYLVNARETKNLPGRKTDVQESQWLIKLHTYGLLRNSFRPSQEIRTMRTYWRQRDDLVQSAGRHIQRMQKAMTQMNIQLANVLSDVSGVTGQAIIKAILGGERDAHKLAEFRDPRVKASEEQIAQSLEGNWQEDLLFVLKQEHEGYEFCQKQMVECDRQLKQYLQQREDRSQGAPLPEEKRKGRLKKKKGNAPQFGLREGLFRMTGTDLTRIDSIDVMTATTIVSEAGYDMSKWETENHFVSWLRLCPDNRISGNKVIGKGRLPTNNPVSIALKMAASTLRLSKTYLGAQFRRFRTRLGAPIAIKAMAAKLARLVYRMLRYGMKYVDQGAAFYEAQHRQLQIKHLKWKAATLGYQLIQVPAA

SEQ ID NO: 190089 - protein, 355 aa, unidentified
MAQEYLPRDYDVFLGIDVDKKKFSFTVKDHHSIISKSKTIPSQPQQLYNYVTKQFAGKKVLFAYEVGPTGYQLYDFLSAKKQDCLVVSPAAIPKASNQKVKNNRIDSQKIAEELKAGNLIPIRVPQGAYRELRHLVNLREDYVHNRKVAKQRIKALLLYVSLNSEIKDVEQNWSSNYIKTLKTLPCSNAVRQRINMLLMDLEYARKQTSAVMRALRALVKDQPEIQEQVRHLLSIPGIGFITAVTLLGRIGDPGKLKNVRELSAFIGLVPTEKSTGDDVNRGSITHLGNRMLRSLLIEAAWSAIRKDSELNQFYFRIKSRHHPKIAARKAIVAVARKLTHRIYCVLKEQRSYIVR

SEQ ID NO: 190090 - protein, 395 aa, unidentified
MAFVPAAEEAEAAIELGTTGPNRGAIAMTEVSAYIGLDVHKETISVAVAEAGRNGEIRHLGNFQNTPDAIAKLARRLGRQHGAIEFVYEAGACGYAVQRQLSGLGFACRICAPSMTPRRPGERVKNDRRDSIALARLLRAGELTYVWVPDPLHEAIRDLVRARHAACRDVRRARIRIQAFLLRNDLRFVGKAWSHRHRMWLCNRGFAHPAQQIAFQTYLNALEYEERRKLELEAQIKEAIELSPWSGLVRALQALKGVGPIVAATIVAEVGDFTRFTHPRQLVAYFGLAPGEHSSGGSIKPRGITKAGNATARSILCEAAWNYRTTPKVGQWMKQHRPDVPKEIIQIAWKAQLRLHKTYKRLISRGKRTVVATAAVARELLCFMWSIGRALPAAG

SEQ ID NO: 190091 - protein, 464 aa, unidentified
MKPIYRRCCGIDVHKKSLSVCVLPPEGQQGIVKAEKFRTFLRDLKRLRVWLTKCNVTEVAMESTGQYWRPVWNVLEGHIPNLVLLNPAHVKGLAGRKTDRRDAEWLARLHEREHLRGSFIPHVELREMRELTRTRVHLLEDCNRMKNRIAQICEAGNIKISSVASDLFGTSGRRMLAALIEGKHRAGWIADYACTRLRGKRDQLEMALEGTLSGHQKGLLARLIRQLNAQETEVASLTAEIESRAAAWEQIIGRMVEIPGIERVSAWTILAEIGTDMNVFSDSRHLASWAAVCPGNRESGGKRMSGKTRKGNVYLRRILCQAAWAATRKKGSYLGAFYRRIRARRGHQKAIMALAHHMLTVIYHMLRDNQPYQEPGASYYEGKRKPEITKRMVQRLERLGYQVTLEVRLTAGEIQELGAAMPQHSADPQPVRRRGRPCKCAERRLTCIHRTPARAQETAETIPE

SEQ ID NO: 190092 - protein, 357 aa, unidentified
MKKGYQKDKTLARGKDVYIGIDVHKENWHVAVRVDGEEVFHGSMASEYHSLRKLLDRFKECRIKVAYEAGPFGFWLYDKLIVDGIETIVVPPSLIPMESGNRVKTDKRDSRKLARLLESNMLKKVYVLTEEDRADRELTRTRRQLLEHRGDVMRQIKSKLLFYGIKSPFSNRREYWSKLYVKWLRELTFEHEVLKAPFESLIDLYEYLTLQVKKISKQVVKLSRSDKYNHKMNLIRSVPGIGILIGMELLVELADIERFKTAEEIASYMGLTPSEYSTGQHVRQGRITRCGNKRARTCLVESSWHLIVKDSLMRSKYMKLKSRKGAKKAIIAIARNLIIRIRRIFLNDEPYVVGMAA

SEQ ID NO: 190093 - protein, 414 aa, unidentified
MGVDTVVAWIGLDWADQRHAGQLQTADGTVEAFVLEQTPAALHEWVAQLCQRVGEGKVALAVEQRKGAVIHALLMYDCFVLYPINPKALARYREAFRMSGAKDDPGDAALLCRLVVHHRDQLRAWVPDTVESRTLQALCEQRRKWVNHRVALTNRLTSLLKQYFPQALDWVGGLASPQGCDFLTQWPTLAAVQRARPRTVRQFYRAHNCRTAAVIDARLTAIAAARPLTTDAAVVEPLSLAVQGYATQLRTLLATIQTVDDRIAAVFATHADQPLFDSFPGAGAVCAPRLAAAFGTDRERWTSAADLPSHAGIAPVTERSGKSIWVHHRLACPKFLKQTFHEFADQSIRFSRWARVYYDQQRGRGNEHHAALRALAYKWIRILFRCWKERRPYDEEAYIAALRRRGSPLAKHLA

SEQ ID NO: 190094 - protein, 367 aa, unidentified
MDQTTRYVGLDVHADSITLAVAEAGREEARHVGRYANDLTRLLRALDRLGDRGSLRCAYEAGPTGYGLQRALVAAGIDCVVIAPSKTPRGSGDHVKTDRRDALRLAHFLRSGDLVEIHVPGEACESMRDLLRAREDAKRAQLRARHQLSKFLLRHGRRWPKSNWTKVHLEWIAKQRFEHPALDCVLAESLQAVQDQTARIERYDRRLAELVPATDQARLIEALQAFRGIQLLTAASIAYELGDLRRFPSAKKLMGYIGATPSEDTSGDRIRRGRITKAGNSGLRRLLVEAAWSYRHRPAEGYRHRKRAENVAPAVRSIAWRAQTRLNARYKRMLARGKPKQKTLVAVARELAGFIWAVGQEEQLTLT

SEQ ID NO: 190095 - protein, 402 aa, unidentified
MNCVGIDVSKGKSMIAVMRPFGEVVISPFEVQHTASELSELAKLLKSLDGETRVVMESTGNYHTPVAWLLHDAGLYVSVVNAMLVHDYGNNSLRRAKTDKKDAVKLANYGLDHWLTLPRYVPEEDTRLLLKNCYRQYQQYSKVQTMLKNNLISLLDAVFPEVNRLFNSSPRADGSEKWVDFVSTFWHCQCVSTLSLKSFSARYLKWCRKHGYYFSQEKAFEIHSKAQSCIGVMPRNETTKLLVQQAIAQLKATSAALAALKQEMQSLAASLPEYPVVMEMFGVGSTLGPQLMAEIGDVRRFHSKKALVAFAGIDAPPCQSGQMDIHSRSISKRGSAALRRTLFLVMGIYLQSAPLDEPVYQFMDKKRSEGKPYKVYMMASANKFLRIYYASVTAYLNTLARI

SEQ ID NO: 190096 - protein, 337 aa, unidentified
MKNVTALGIDLAKNVFQLHGADAKGRCVLRKRLSREKLSDFMSNLPPCLIGIEASTGAHYWARLFERMGHEVKIMAPQFVKPYIKSNKNDSNDAAGIAEAVTRPGMRFVPIKQIEQQDVLLSHRARELAVKQRTAQANQIRGLLAEYGIILTKGINQIRKVPEVLDTYKANLTVKSTIVFNRLYDQFKIYDTQVKTFDKEIEIEANQDMRCKEIMAIEGIGPLTASAIVATIGDPKLFKNGREVSAWLGLVPKQYSSGNKIRLSGISKRGDRYVRTLLIHGARTVLKYCENKNDPRSIWLKNKKNRSNYNIAAVALANKNARVIWSMLATGECYRKF

SEQ ID NO: 190097 - protein, 410 aa, unidentified
MQILYERCAGLDIGKDEVVACLRVPDLAGGRRQEVRTFGTFTGQLEALAEWLAGEGVNEVVMEATGQYWKPVWYVLEERAFELLLVNARHVKIVPGRKTDVKDAEWLAELLEHGLLRGSFVPPAAIRELRDLTRYRKRLIQTHSSEAQRIAKTLEDAGIRLGSVASDILGVSGRAMLMALVAGERDPEVLARHARGRLRTKRAQLEEALRGRFSAHHALLVRLALEHVEQLERSIEALDTEVDRVIAPFARARDRLDTITGVGKRAAECIIAEIGVDMTVFPTAGHLASWAGRCPGNNVTGGKRYSGKTRHGSVWLGEILTECAWAAARSRGTYLGAQFWRLARRIGKKKAAVAVGHSILVIAWHLLTDDADYEDLGGDYFVKRDAERAQSRAISQLEALGYRVTLEPAA

SEQ ID NO: 190098 - protein, 336 aa, unidentified
MLFVGIDLHKKIISLCVVNQERQVIQRKTLHCSQPDKIREFFAQLGPFEAVVEATASYEWLWQLLEPLAQRLVLAHPKKLRIIAESTRKSDKLDAQVLAEFLALDMIPQAYRPTPRQRQHRVLVRQRCYVQRRITSVKNKLRRILSDYNADRKDLFSSEGLAYLAEVQVSAADRFVLDQLRGLWEFLEEQLTASAKELRAFARKAPAREAEARAVLESIPGVGVVTVDVVVSELGEVARFRSEKKVAAYAGLAPGQRESAGRRQELGISKQGSRLLRWALVEAAWRLVQKSQRWETVYERLHKRRGKKKAIVAVARRLLGVMVALLRSGQAYRLAG

SEQ ID NO: 190099 - protein, 343 aa, unidentified
MITIGIDPHKRSLTAAALDPHSRLLGQQRLPASGQADRQLLAWAEQWPERRWAVEGASGLGRGIAQQLVAAGEQVVDVPAKLAARARLLGTSSARKTDLADAGSVAAAAIHHRRLRPVAVEDQTVVLRLLSDRRDDLVAERTRTLSRLHVLLADLAPGGATRELTAARAAALLRRVHPVTVVDVERKRIARELLADVRRLDRQVKTASQAIRSAIREHGTTLTEVYGVGPVLAAKLLGHAGDVTRFPDRDHFASYTGTAPVEASSGDVRRHRLNRGGNRQLNTALHVIAVCQIRDPSPGQTYYRRKLAQAKTPEEARRSLKRHLANVIYSHLSSDHRHRTRGC

SEQ ID NO: 190100 - protein, 272 aa, unidentified
MITYTSFIGIDIGKYSFVVALHGNKKVDEYENTPSGIEEFIQSYKKDLIKGLCILETTGGYEMGVLLTLCSQGFAVHRANTRKVKHFIKSYGNAAKTDKLDAKNLGLYGFERGKALELFTPQSKQSGELYEMIQRRTDLKQMLVAEKNRLKAPRAACVKESIQSLIEMLKVKLEAITEEINSLIAQDPVLSEKKKILKTIPGIGDIIANELLILLPELGQLSRREIASLVGVAPRCNDSGTLQGYRRTTHGRAGVKPLLFLAAMAARNSNMN

SEQ ID NO: 190101 - protein, 407 aa, unidentified
MKVLYERCAGLDVHQREVVACARVQGPKVARELQRFETTTKGLLELVEWLIGRGCTHVAMEATGVYWKPVWHVLEGHVELVLANAAHVRNVPGRKTDMSDAAWISDLLAHGLITASFIPPTPIQELRDLTRTRRQLVREITQHTQRIQRVLEDANIKLASVVSDVLGMSGRRILDAIVAGESDPEKLRALGSERLKCSDHELREALRGCATAHHRFLLRQHLGTIDHLRRAVEDFDAQIARQLEPFRAEIERLLTLPGVQEVAAASILAEIGADMSCFPSAAHLVSWAGLCPRMDESAGKRRVTRLKKGAPWLKPVLVQCAWGAARTKRTYTQVQFLRLKARRGPMKAVVAVAATLLTASYYILRDGVTYHELGPDHFVRRDRSRAAQRLARRIRELGYEVTIRPAA

SEQ ID NO: 190102 - protein, 345 aa, unidentified
MKNRLPNTIVESPHRLFAGVDVGAEELVLVIRKNGKSFDPQKFANSRADRVRLVNKLIKLPGITACLEATGIYHFDLAIALHDAGIPVMVVNPKSSHNFAKVLMKNSKTDAVDANTLAEYVERMDFVAWTRPSNQVLALRGFARRINALTGQKAAAKNHLHALSATQETPKALLRDAKLAISQLEKRIDTLATEALELIHKTPELERIFNLLTGIKGIAQTSAIALMGELLLLPPNLSHREWVKFAGLDPKAFESGKSVHKKMRLSKVGNRHIRSALYMPALSAKQHDPYVKAYFQHLVDNGKKPLQAVCAVMRKLLHAIHGMLKYDQPFDNTRFYTIPAPIIAN

SEQ ID NO: 190103 - protein, 433 aa, unidentified
MKRFIGLDVHKAVVEVCVIDEKGERVFRRRIDCTREALLRFAEELTGEDSVALEVTTNAWAVADLLRPFVGRIVVSNPMKTKAIAEAKVKTDKVDAEVLAQLLRCDYLPSVWVPDDVTRTLRQLTGRRERLVAERTRLKNRIQSVLASILVPVPVKTLFCQVGLRWLAGCGLPAELRALVESDLRLIAVVDQEIDALEATLRQQAWGLPRVRLLMTVPGMDYCVALSLIAALGDLSRFEDGEHAASYLGLTPSVKQSAATCHYGPITKRGNSHARWLLTQAAQNMARQPGPLGVFFRRLAKRKCWNVAVCATARKLVGVAWLMLKNNEPYRYANPTTTQRKLSRLRVAVTGELRKPEHKGRRPGVKNGANPPSRLEPSLQRVCEQEGLPPVHGFEQLPAGEQQVLRTLGVIDFVQQINQDRRSPRKSPTRARN

SEQ ID NO: 190104 - protein, 440 aa, unidentified
MRNAYPRPVAFKTQRGLQRIFYLHHHELIEYCQPILGQGYNTGFSVVILSAYFVGICRKKINKRKSMSNITSLETERHQFLYVGMDIHKDNHTAVATNCFGQNLLELAISNSKQDFDDLVARVKGLSKTENLKPIFGLEDSYGYGLRLAKYLYEKGLLVKMIAPVLVDRERQYETHPEKSDSLDALGVAKVLIQRIDRLPNYSISKNDEISKNIKELTLDREFLVKEQGRLKNQLHRLLHKGYNSEYRGKFKDPFSLKALKYWAGHPVPRKNTDIMGNVAILKNQIKRKVKRLLDIREETKEIEQELNCLIQQTNQKIETLNGCGTVLASQVLAEVRNIDRFQSPHSLAKYAGLCPREKSSGKTFRHIKTKSGNRRLNMAIHRIALSQISKSGNQYAKAYFQRKISEGKTKVQALCCLKRRLIDIIFMMLKYKQEYNYSN

SEQ ID NO: 190105 - protein, 346 aa, unidentified
MLHAGLDLSRRKVDVCLLSSAGEIVDEWASPPDGDGLRGLAARAAMWGAPVRGVIESMNGARFVHDRLEEHGWDVLIADATKVKGLAPLACKTDRIDARVLATLSARDLVPEIWLPDPTTRRERELARFRLHLVRHRTTLKNRIHAALVAFGHPCPVSDLFGHAGRELLDRLAFPDPWRSNVEVSLGLIDDLDLRIAELTVQLKRQGADHRYIPLLVTAPGIGWINAYTIASEIGDIARFSSPAKLCGYTGLCPRVKQSGAVDARGPISKHGPKYLRWALFEAALNACKHPYYAERYQHTKRRLGRQRGPKVAQIDLARRLTEAIWHMLTNNQPFAPAGAPFRLAA

SEQ ID NO: 190106 - protein, 370 aa, unidentified
MLNTTTFVGLDVHARSIKAVALDAMTGEVRSATFAYDAAAVAEWVGSLDPAAKCVYESGVTGFDLQKKLTALGVDCVVGAVSKMIKPSADRKRKNDRNDAEFLARMLSVGNVVEVCVPDDECEAARDLVRALDDAREDLKRCKQRLSKFLMRHGYVFNEATPTGRRKGNWTAAHWAWIRSIEFPEKADNDALAYYADAVRQAMEDKKRLERLVEAEASKPRWKKRVDSLRCLKGVDAMTAADIVFEAGEFSRFKNARSFAAWLGLTPSEHSSGESARQGGITKAGNKHLRRVLVEAAWHYISASPHPKDLAKGQVPDPAARRHAAKGIRRLVKRREEMLGRGVHKNKANVATARELACWCWAVGRMIENG

SEQ ID NO: 190107 - protein, 396 aa, unidentified
MLYLGIDIGKNNHVASLLDDNAKPLFKAFSFTNTTDGGNSLIEKLNTYIKTVGDVEIGMEATGHYWLSVYSFLIEKSFVVHVVNPIQTDGWRKGTEIRKRKTDAIDSVLIAELIHYGDFLETTLADENTMSLRNLSRFRNYLVGSIGDLKRKTICVLDQVFPEYQSVFSDIFGQTSKELLLNFQTTEDFQNITAKQLENALDNITFKKFAKNKIVQISELASNSFGLSFCRDSFSLQLKLLLEQIKFIEAQVSDVETEIKVILEKVNSVITTAPGVGDVIGATILGEIGDISRFSNPAKLVAYAGIDASVSQSGDYQSTNNKMSKRGSPYLRKALFQAALVASFSDPTYSAFYQKKRAEGKHHLTAVGAVARKLCYAIHAMLKNNVPYEIQPLVPN

SEQ ID NO: 190108 - protein, 356 aa, unidentified
MSQNLDSKVAVIGIDIGKNSFHIVGQDRRGALVLCQKWSRGQVEARLANLPPCLIGMEACTGAHHLSRKLQALGHDARLMPAKYVRPYSKGEKNDYRDAEAIAEAVQRPTMKFVATKTADQLDLQALHRVRERLVSQRTGIINQIRAFLLERGIAVRQGLHLLRAELPGILGTRTDVLSPRMLRVIEDLAGDWRRLDERIEGLSGEIDALAQHDKGCERLMTVPGVGPIISSAIVAAIGTGDAFSKGRDFGAWLGLVPKQMSTGDRTILGSISRRGNRYLRKLFVQAAWVVLVKLGPEQWERYGLKSWIEAAKKRLHHNVLAIALANKLARIAWAVLHKGRAFEYVKTNATASRSA

SEQ ID NO: 190109 - protein, 420 aa, unidentified
MTDEIEWFVGFDWASEKHRACLLDRHGGVIGERDAPHGGAGLTELCDWLVDSAGAEAGAIAVAIEMPHGPVVEMLMERGFQLFAINPKQLDRFRDRFTVAGAKDDSRDARVLGASLRTDRHAFRRLAVDDPVIIELREWSRMADDLQQERTRLANRVREQLWRYYPQALQLTDDLAADWFLALWHQAPTPAKAAKLRKTTIERVLHAHRIRRLGADAALQILRQKPLAVAPGATEAATAHIRTVAARIRLVNEQLKTAHRMLDELTARLEPAAESAPGQTSEQRDVAILRSLPGVGRINLATLLAEAWQPLRRRDYHALRALSGVAPVTRRSGKSCIVIRRLACNKRLERAVYHWARVATQHDPASRRRYADLRKRGHSHGRALRTVGDRLLAVACTLLQRQVVFDPDYNADPAQDDAAA

SEQ ID NO: 190110 - protein, 447 aa, unidentified
MHPVSDEESSGKNPADRSFHFFSSVGMPRKPSATPPLLKYVVGVDIAKDSFTACMGCIDLTQQLHFLGKVTTFSNDVAGFIALQAWAATRQVQVELPLGYVLEATGVYYEELAYYLHTQQQMLSVLLPSKAKHFARSTELKSKTDLLDARLLCRLGLERHLPQWQPLTPAMRLVRSLTRERAGLRQQLVPLKNRVHAYAHSYQPDPRALARLAQQVALVEAQIEEIDAQLAGAIGAAPDLARKLSQLTSVPGIGLVTACIIMAETSGFALVENERQLASYAGLDVVERQSGSTSRATTISRRGNTRLRTALYLPAVSSLRYNPHQRAFYARLRACQPTGKPGVIAVMRKLLLLCYALWKKDQVYDPLFQPAHGAIWPDKGQDNNIRSGIEGTETPGSPLVERSRVAHEVALPVKNSPATATNTAPGYRAPAGQRLAECITQALPISQ

SEQ ID NO: 190111 - protein, 347 aa, unidentified
MRFYTKQHKYYCGIDLHARSMYLCILDQNGAIVLHKNYRTSPQSLLRAVEPYREDIAVAVECIFTWYWVADLCAEEKIPFVLGHALYMKAIHGGKAKNDKIDSHKIAVLLRGGTMPMAYVYPPEMRATRDLLRRRTHFMRKRSELLAHIQNTNSQYNHPEFGKKIAYKANRTDVLERFDEASVQKSIEVDLKLLDFYDSMLNDLELHIVNTAKEHNPNTFYLLRSIPGVGKILSLTLLYEIHEISRFPRVQDFVSYARLVKPLRESAGKKHGTGNGKIGNVHMKWAFSEAACLFLRNNPAAQRHHDRLVSKHGKAIALSIIAHKLGRAVYFMLKRKETFDMKRFLKG

SEQ ID NO: 190112 - protein, 352 aa, unidentified
MRKYIKTLPEGENVFIGLDLHNQKWHVTIRTTDVELQSMSINGTWDSLRSLLSRYREHPLSVVYEAGYFGFWLHDLLREYGAECLVTPPSLIPHESGNHVKTDRRDSRKLALLLAKGMLKRVWVPSPQERAERQVIRRRRQLVRDRVRTQNRIKAELRFYGLPLPEHQGKWSKRFVENLSRLRFDSRWQQESFSCLLEQYCFFTSQIEHQNKLFKKLSETDRYCQRVRALRSVPGIGLIAAMELLLELQDVERFRRAEELAAYVGLTPSQHSSADKIRMGRITRAGKPSVRATLVEAAWYLIGKDRAMRKRYEQIKARAGAKRAIIAIARQLLLCTRRLLLDEQIYVVGKAV

SEQ ID NO: 190113 - protein, 357 aa, unidentified
MAEGSWVGLDVHARSTVAGVLDGRSGELRTLRVPPESGRTVEWLRALPQPVRVAYEAGPSGYGLARACAEAGIACTVAAPSKIPRASGDRVKTDRRDAERLARLLRLGELVAVRVPEPHVEAARDLVRAREDARGDLMRARHRLSKLLLRHGIVYDASAWTLAHDAWLRRQRFPSRPLALAFDECYGAVLQAKTRRDALDAAIGEIASEPPFAEVVGRLVCLRGVSTLTALALTVELGDWQRFRPQSLGPFLGLTPSEDSTGERRRLGAITETGNRHARRLPVEAAWHQRRPLRASATLERRRQGQSAAVRSQADQSARRLHQRWHALESRGKRRTIVAVAVARELAAHCWALATMK

SEQ ID NO: 190114 - protein, 310 aa, unidentified
MDAIFVGIDVSKDRLDVHVRPSREAFAVTRDGKGLEELIDRLRALEPQLIAIEATGGFETIAAAAIAGAALPLAIVNPAQVRHFAQAVGKRAKTDPLDAEVIAHFAEAVKPQVRPVPDEQARLLAELVARRRQIIEMIVAERQREKRAAIARVRKGILRHVRMLEKELLDVDQDIGALVRGSPAWREKEELLITVPGVGNTLARTFLAELPELGRLNRREIASLAGVAPFTRQSGRWKGKSMIGGGRAPLRAALYMAALSAIRCNRSMKVFYQRLLSAGKPKMVGLIAVARKILVTLNAMLRDKTQWQPA

SEQ ID NO: 190115 - protein, 321 aa, unidentified
METVEFAQVVSRGCGLDVHKKTVVATIDGEGLQRSTREFGTFTSSLTELKDWLLENGITHVAMESTGVYWKPVYHVLESSGIKVWIVNARHVKYVPGHKTDKKDSAWLCKLLLAGLLKPSYIPPKEQRELRDLTRYRKKLVQDIASNKNRIIRILEDCNVKLSSVLSDTSGVTATKLIDKLCEGKVVTMEDIDAVYHKKIEASKEELWEACNGIVEEHHIYLLQTIRENNRHIEHLIDELNQQIKKSLSPYDNALERLREIPGLSRKTVEDLIAEIGLDMSVFPTENHLSSWVGVSPGNNESAGKKKVDEPHTVTNKSNLY

SEQ ID NO: 190116 - protein, 351 aa, unidentified
MIVIGVDYHPSFQQIAFLIEETGEYDEQRLSHQGGEAERFYRDLKRKGIHVRVGMEATGYSRWFERLLAELDFELWIGDPAEIEAKRVKKRKTDREDARLLLRLMREDRFPKIWIPSPENRDLRQLLWHRHRLVQMRTRIMNQLQALAMNEGKRWKSKLWSKPGRAEFEKLVLGPWASRRRCELLELLDRLNPSIEELTIAVEQEVHKRPEALRLMTHPGVGPITALAFVLIIGTPERFARGKQIGTYVGMIPTEDSSADKQHLGHISKQGSSLLRYLLVEAAQAATRFNPHWRRRYIHLAMRRHRSIAKVAMGRRLGIRLYWMWRNGCAYSPSLEFGSYAGQLGRGHGVQ

SEQ ID NO: 190117 - protein, 408 aa, unidentified
MEVVFSRCAGLDVHKQTVVACVLGREGRETHQAVQTFGTTTPAWLALQTWLTEHRVTHVAMEATGSYWKPVFNVLESSFTTWLVNPAHIKRVPGRKTDVKDAEWIADLLPHGLLQPSLVPDRSQRARRELTRYRQALIEERAREVNRIQKILEGANIKLGAVLSDVLGSSGRRILTALAAGETDPGRLAALADERVRATAEELQRALHGVMGAHQQFLLRQQLRHLGHLEDQIAELDAEVAARLAPFVPTRDLLETIPGVGRRTAETIRAEIGPTVTPFPTPAALAKWVGLAPGNHESAGKRLSGRTVPGNRTLRAALVEAAQAAGRTKATYLGAQYRRAARTKGAKRAAVIVAHSIVVDIWYILHRQEPYADLGVDDFDRRDREHAARQAVKRLEALGYQVTLTAIV

SEQ ID NO: 190118 - protein, 381 aa, unidentified
MVLSTFCAAAISSDGEIIIEPFKFTNDADGFQLLVSKLESFDKNSLIIGLESTAHYGDNLVRYLVTELYQVCVLNPIKTCQMRKNNVRKTKTDKVDTYVIAKTLMMQDNLRFVSFFDLDMMDLKALGRFRQKTIKQRTRLKIQLTTYVDQVFPEIQYFFKSGLHQHAVYALLKEAPSPKEIASMHMTHLANLLKVNSHGHFTKEQAKELRVLAQKSVGANDSAISIQITQTIQQIELLDSQLEKIEAEMTDIMKFNDSVIMTIPGIGYINGGMILGEIGDIHRFSNPNKLLAFAGLDPSVYQSGNFQAKTTRMSKRGSRVLRYALVNAAWNVVRNNATFKAYYDAKRAEGRSHYNALGHCAGKLVRVIWKMLTDEVEFNLE

SEQ ID NO: 190119 - protein, 485 aa, unidentified
MDYYPIQENVYNTREQIALTILKTSKHPINMEKNIKNGELGGFEMINPDAAGIDISSREHYVAVPKDRDKESVKKFGTFTEDLHGIAKWLQTCRIKTVAMESTGVYWVQLFLVLESYGFEVFLVNASHVKNVSGRKTDIKDCQWIQQLHSYGLLRNSFQPENQIRELRNYVRHRRKLIEDKSRYVQLQQKSLEQMNIKLHNVISDINGTSGSAIIRSILSGERRPEELAKYTHPRIKASRAVIIKSLQGNWRDDQIFMLKQAYESGEFVDKQIIDLDTQIEVVVQSITKKFGKTDSQKSEKRGKSSYKNRLRFDSKTYLNSLFGVDVTKMEGIDEISALSLLSELGVDIKGKFKTEKQFLAWLNVVPNNKITGGKIKSSRVMKKKNKAGQIFRNAAYTLFNSKGYFGQYLRSRKAKDGTPQAIVATASKMARVFYKMVTEKIEYNSGILYLSNEKYLRKKLAKMKSTIENIESVINTNTVNYAVC

SEQ ID NO: 190120 - protein, 347 aa, unidentified
MLIIGCDFHPGFQQVAIFDNRTAEVQEKRLQHRAEAEEFYRSLAGQEVRVGMEACGHYPWFERLLEELGFELWFGDAAQVRASVVRKQKTDRRDAEHLLQLLMQDRFPKIWVPSLEERDVRQLLVHRHKQVQARTRTKNQLQAMALSHGVQKKYKLWTKVGRAELEQLPLLPYAAQRRQQLLRALDGLEAEIRELDRRVAEEARQRPEAVRLMTHPGVGPVTALAMVLTLGPASRFESPKQVGSYFGLIPSEDSSGGKQRLGRISKQGSSFLRFLLVEAGQTAVRLDPQLKRFYKRLARRKNRSVAKVAVARKLATRLYLMLREQWTYVQLNQALMQVSPSHSVAGQ

SEQ ID NO: 190121 - protein, 335 aa, unidentified
MYYLGIDLHKDESHVAVLDDDAEVVEEIRVANANLDDVAEEYAGAKAAIEATSNYYTVYDTLDEHLDVVVADPSQTKAIGYAEVKNDRLDAKLLAQLRRAGMIAESYVPSEELRERRALVRGRKRLVEKRTDFKNEVHALLDKHGITYDWDPFSVNGREILAGEDFSLGVVGDQLMESFLSIIDELTSQIEELESLIEETAASLEETQLLMTIPGVSFYSSLLITSEIGEIDRFDEAKQVVSYAGLDPVVRESGDSRTEGSISKRGSGDLRWILVQCVQTAVHRCNDPYLGRFYAWLKQRKNHQIAIVATARKLLVSIFHMLEREEVYDPPEVSA

SEQ ID NO: 190122 - protein, 341 aa, unidentified
MELFVGLDVSVRTTSVCVLDAAGKLIRESKVESEPEAIADLLHAIGGPYKRVGLEAGPLSQWLYSGLASAGFPVICVETRHMKAALSAQINKTDRNDARGIAQMMRVGLYKPVHVKTVRSQEIRMLLTARKFVQNKILDAENNLRGLLRNFGLKVGAVTRLQFERRIVELLEQSPHLRLIIDPLLEVRRVLREQFQHLHKAMERLAESDETCKLLMTAPGVGPMVALSFRAGVDEPARFGRSRSVPAHFGLTPSRYQSGEIDRDRGISKCGDAGIRWVLVEAAGILLRISKKSSPLKTWGLAVARRRGMAKATIAVARRLAVILHRMWLDNTPFRWEAEAA

SEQ ID NO: 190123 - protein, 344 aa, unidentified
MDHFGGLDVSVKETSICIVDDTGRIVKEVKVASEPAALLKVLGNPIYRFKRIGLEAGPLSQWLFSALAESELPVICVETRHMQAVLKAQINKTDRNDARGIAQMIRAGLYRPVHVKTLRSQKLRMMLTHRKLLQSKAIAIENDLRGTLRNFGLKVGMVGKVRFEARIQELVENTPDLAALVEPLLIVRRVLREQIVILHRRLLAIVREDEVCRRLMTTPGVGPVVALTYRATVDVPARFRKSKSVGAVFGLTCSRYQSGEIDWSGKISRCGDEMMRTMLYEAAQSMMHSKKWSWLKAWAMQIARRRGMKKAIVALARRLAVIMHRIWVDGTEFRWTREQAVAAA

SEQ ID NO: 190124 - protein, 404 aa, unidentified
MGYHAGLDWGGAVHAVCVVDEAGRIVVRFDVRHDAAGIAELIVRLARIAPSAEMPIAIERPSGLLVDALLEAGHPVVAIHPNVVKACRPRYRAAAGKSDPGDAYILADVLRTDGHRFRPLQPCSDEIRGLRALVRSRDDLVAERVALGNRLRSLLDGFWPGAAAIFADIASPIALAFMQRYPTPDSAARLGEKRLAAFLAQHSYCGRRSPTELLARLRATPAGHAGETEAEIKGELARSLAAVLSTLVAEIAKLTARLEHAVAALPDGRIVMSFPRAGRVCAAQILAELGDIRERFQTEQQLAAEAGVCPVTHASGKSRGVSFRWACNHRLRQAITCFADNSRHASQWAAHLYQRARARGCDHPHAVRILARAWIRVLWRAWIDRKPYDPSAHRAFQALTHASG

SEQ ID NO: 190125 - protein, 429 aa, unidentified
MATIPDNATRIKRFRELKATLRVRHDRLVVGIDIAKAQHVAQIRWAHTRVLDPTLTIPNTHAGFEAFWARLDARRREAGLAEIVCAVEPTGTYHQALATFLEQQGATVVFVSNHVAQLNRRTLDGTWDKSDPKDAHNLCDLLEQGKVLFYSLPDEPLAELRRLVRLLRRARVERSACRVRFKTTLLPQFGPVGDGLAPAVVAGLPAPLRALLPKAADASAPPARAGAARRPALAYECTDLAAQLTAVQARIADIEAELVRRADRLPAYTLLRTLPGIGPTIAAILVAEIGDIAWYTRFSQLRKLAGLDIVSVQTGQWTGSGRISKAGRALLRWALYQAAIGATRSPVWRARRETLIAKRQGNRYAFFQANVELAAKLLRLVWGVWRSGRPYDPARGPAVAPAKSHTQTRGRRRASIVAPPTRSPILLRP

SEQ ID NO: 190126 - protein, 370 aa, unidentified
MTSIIYVGMDVHTTNFTLCCYSIEDNSIFAETEVKPDYRNILKYLEQVEKNRGGDCFFQCGYEAGCLGYTLYNQLTHHGIDCVILAPSTMPQTRKKRIKNDKMDARNIAKCLAYHTGSAVYVPTKEDNAVKEYIRMRNDAKDTLKRTKQQLMAFCTRNGKQFTEGRKYWTQKHLAWLKKLNFNDTLLQEAFQGYVIQYYQMSEKVALYDKRIVELAHGKTYEERVKKLTCFTGIKEHTALATIVETGDFKRFGTAQQYSAYLGLVPSEESSGESIRRGTITKAGNSHIRKLLVEAAHCYTRGTIGAKSKDLARRQAGNDPMVIAYADRANERLKRKYYRIQYHSKSNIAITAVARELACFIWGMMTDNTA

SEQ ID NO: 190127 - protein, 401 aa, unidentified
MAEGRDKVWVGIDIGKTHHWACVLDANGKTLLSMRIANDEAEIVSLVAKVCGLAPQLVWAVDIIGAPSALVLGLLARAGQSVHYASGRVVAVMSAAFSGEGKTDLKDAYVIAETARLRRDLAVIDPDTDLVRNLAVLTAHRADLIADRVRMINRLRDLMTSVFPSLEREFDYSACKGALVLLTGYASPDRIRRCGQTRLAGWLRHRSVRDSAAVAARAVAAAKAQSILLPGQDLTAEIIAELATGILALDQRLKGLDAQIEALFVEHPQAEIIQSLPGFGPFLGACLLVSTGNLRAFPSAGHLAAAAGLVPVPNDSGRRVGNLHRPLRYSRPLRHVFYLSAQTSMMRAGPNRDYYLKKRAQGVTHTHAVIALARRRIDVLWALLRDDRIFSVDPPSRAVAA

SEQ ID NO: 190128 - protein, 379 aa, unidentified
MGQHSEAFVGIDTSKLKNAVAVTEAGRDREVRYHGEIDTTDAATRKLVAKLAAKYGKLTFCYEAGPTGYGLHRLIRSLGHDCIVVAPSLIPKKAGDHVKTNRRDAENLARLLRAGELTSVWVPDERHEAMRDLSRARAAAVDDLKSKRQQISSLLLRLGLHYAGKTTWGKAHRNWLASIKLEHREQRFVLEELRGAERQAQERIERINQIIRGAVPEWSLREIVAALQAVRGIDLISAVTLMAEIGDLTRFASASDLMGYLGLVPKEDATGDRVRRGGITKAGNTRARAALVEASWSYRHPPRIGREKQAKVDAAPEVVRAIAWKAQTRLTTRFRTLVRNGKKPVVAVTAIARELAGFVWAIGQAGRPGGAASSSSSVR

SEQ ID NO: 190129 - protein, 385 aa, unidentified
MQASNVSTLTSGHCGTIYVAVELSQRSWLVTIHSPDRDRFSHHKVEAGDHTGLLALIGRVRDRATRRLGSAPSVVSCYEAGYDGFWLHRVLIAAGITNHVFDPGSIAVDQRSRRAKSDRIDGEQLLRTLMAYCRGEPRVVRIVRVPSRDQEDSRRATREHDRLVKEQTAHTNRLKALLRLVGVAVGNPRRRDWLSWLAVQRDRQGEPVPRYMMAELTREHGRLMLVRKQLEELAAPVAEEELTPDAAEMGRRREHFLRLKSLGPAFAGTLTNEVFYKDFRTSRQVGSYFGLAPSPWKSGRIDREQGISKAGNPRARQKAIELAWLWLRHQPDSALAHEFRRRTANASGRMRRIAIVALARKLMVALWRYLTTGLIPQGAVLKPQG

SEQ ID NO: 190130 - protein, 401 aa, unidentified
MIDTGDIDVFLGLDVGKGEHHATAVTPAGKKAFDKRLPNTEPKLRELFAKLQAKHGTVLVVVDQPTSIGALPLAVARDMGCPVAYLPGLTMRRIADLYPGEAKTDARDAFIIADAARAMPHTLRAIDGEDETIAELEMIVGFDDDLAGEATRVANRLHGLLTQIHPSLERVLGPRLQHPAVLTLLERFGSPAQIRKAGRRRLVTLLRPKAPRMAERLVEDIFAALDEQTVTVPGTEAAALIVPSLVASLAAVLDQRKLLAGRIEELLEAHPLSKVLTSMPGVGVRTGARILIEVGDGRTFPTAGHLAAYAGLAPATRSSGSSIRGEQPSRRGNKQLKRAFFLSAFAALGDPASRAYYDKKIAQGKHHTQALLCLARRRADVLFAMLRDGTFYEPQSSAAVT

SEQ ID NO: 190131 - protein, 360 aa, unidentified
MAKAKTLVGLDVHATKIVAAVLDAETGQLQCFTISGDTEKAAAFCAELPRPVRVAYEAGPTGYGLARELVKRRMECVVAAPSKIPRASGDRVKTDRRDAEHLVRLLLAGKLHAVRVPGPEEEALRDLIRARESVRMDLMRSRHRLSKLLLRHGIRFDDGNAWTARHRRWLASVELGWPAAQTTLLDVRGAIDALVIRRDSLEREILAILPACPWTLQVGRLRCLRGVDTLTAVGLCSEIGDFERFARAEQLMSYIGLVPSESTTGQQRRLGSITKTGSGHARRLLTEAARHYRPRPNLAKALTERQHDQPQAAVAVSWKAQLRLHRTWTRLEARAKRRTIIAVAAARELAGFCWAITQIE

SEQ ID NO: 190132 - protein, 423 aa, unidentified
MKLTYPVCCGVDVHKTFLVATIITSDFITPKYKQKRFSTFYNGLLSFKQWLLENNCKDVCMESTGKYWVPVWNVLESSVHVVIANPKWVSAVKGNKDDKKDSKWIGELFRMGLVPGSYVPSKDIRILREFTRYRSKLVSMRASEKNRFQNAFTVCNLTLDAVVSDMFGKSAASIENYLLSTDSVDPDYCVSLLQGSLKKKASDVVEAIEGFSMTAEQKTRVRIVQGHFADIDKRIAELDETIGNLVSDYEGVISLLCTIPGIDRRLAITILSEIGTDMSQFGSSKRLCRWAGLTPGNNESAGKKKSVRISRAGIYLKPALVEAAHAAVKSSQSNSYFRTKYERIMKRRGKKRAIIAIARMMLTCVFAMLQSGEVFNPCDIQKFDMPEELRKRQVLSSAKDAVKLLVSLGVVSEGMISLEKLAS

SEQ ID NO: 190133 - protein, 347 aa, unidentified
MRFYTRQHRFYCGVDLHARSMYVCVLDQEGSVLVSKDIATAPEPFLELIAPYREDLAVAAECMFTWYWLADLCAREGLVFVLGHALYMRAIHGGKAKNDRIDAHKIAALLRGGMLPQAYVYPQAMRATRDLMRRRNYLMRQRAELLSHITNTNHQYNLPALGVRPARPAERSGLAEHFTEVSVRKSIEVDLSVIGHYDRELPRLERYLESNAQAHDPMALAIVRTIHGMGKVLGLSILYEIHDIGRFARVQQFLSYCRLVKPTKESGGKILGHSGRKIGNAHLKWAFSEAAVCFLRANKPAQALRARLMAKHGKGKSLAIIAARLARAVYFMLRRSEAFDAERFFAH

SEQ ID NO: 190134 - protein, 382 aa, unidentified
MELIVERPAALDVHNASVTACVRSPAVGGRREQFVEEFQTTARGLLALRDWLASQRVTQVAMEATGTYWKPVWAVLEDDFRCVLVNARDVKQVPGRKTDVSDAEWLCRLLEAGLLKACLVPPKPIRTLRNLTRYRKSLVRDRQREANRLHKVMQETGIKLDTVASKLLGKSGRSMLDALVSGTTDPEVLAELAEGRLRKKLPALREALAGRFDAEHALVVGQILAHLDFLDESIAQLSAEIEERIRPFASAVELLQTIPGVAQRTAEVIIAETGGDMTAFASAKHLVSWAGVCPGNDRSAGKRRSGKTTKGSKWLRGTLIEAAKSAARTKDTYLSAQYNRLRARRDPERTTRRLIAQLEKLGHVVTLQPATSTTTTTDVVAA

SEQ ID NO: 190135 - protein, 446 aa, unidentified
MMQKVMAMTSIHHSRRTLMNCTQNEKLNQVTPHTLIVGVDIAKFKHVARAQDDRGKILGKALVFTNTKEGFEAFFSWLEEMQHKHEKSDVLVGMEPTGHYWLNLAYTLKERLVSFGVVNPLHVKRSKELDDNSPTKNDIKDARVIAQLIKDGRFSYPRLPMDEDAEIKAGITIRNQIVGDLQVLQGRVHNWLDKYFPEFLTVFKDWSGKMALATLEHIPLPGQLNQATPERVAEIWSIYGGVQRPSLKRIQRLQEAAARSVGLNVGLQMAQREIATNIKRYKMLKEELRALEKELETLVLTLPGIAEMLTVPGVGMVTVIELYSELGDIKNFKNPRQILKYAGLNLRESSSGKHKGQARITKRGRAKLRALLFRTVMPLVRHNRAFKALHQYYTTRQENPLRKKQSLIVLCGKLVRVLHTVGQKQCPFDEERMIQDIPHLSLALKV

SEQ ID NO: 190136 - protein, 356 aa, unidentified
MSEITRVGVDLAKSVIQVNAVDVGGKLVTNRQLSRDKFLQWCAQLPPGCLVAMEACGGAHHWARKLIALGLNVKIIAAHLVAPYRLQGKGGKNDANDAAAVCEAASRPNMRFVPVKTTVQQGILCVHRLREGLKEERTASINRIRGMLTEFGLVASKSPEKLRERLTDMLEDASNDLSGLARLVVQEAYDQWKDIDERIEWCDERINAHVKDDAQAKAAKELVGVGPVTASAVVATVGDFNQFKNGAQFGAWLGLTPRQNSSGGKNSLGGITKRGDMYLRMLMIQGAKSAVMTAHKRSDPISKWLYELREKSGWQKAAVAMANKNARILWAIMTKGSCFDPRHVSVKPAGPTTAMA

SEQ ID NO: 190137 - protein, 363 aa, unidentified
MEATKRRYIGIDLGKREYTLAIINRNGKMSIHQGKTSEQGRQALYRLLEKSDKVALEAGNLSFIMAREIIERVGSEVRVLNAAKLPFIWDAPTKTDKEDAMKLAHLVEERRDEKLPIVPLPSEQELERRKTLASYAREMRNRTRHINTLHALFVHQGHTTIVKKNLATAAKRQEAVKLLTGLEREEAVWILQYLALHEQRIKELKNTIQQAAKQDEGMQNLQSIPGVGPVVAYAFSAHIGDGSRFSTGAQVSNFIGFVPRLDYSGTIRHNGSITKQGNGYVRGLLVQAAWTAVRSKTAGALQQRYTYKTAGQGASKKKTIVAIGRRLAEMMYAVVRNKTTYEVRQWKGVKDKTTIMVEHALRV

SEQ ID NO: 190138 - protein, 412 aa, unidentified
MLKIVYPICCGMDVHKSFVVACIASTNIQGVTTYKSHRFSTFTKGLRELSQWLLQNDCRDVCMESTGKYWIPIYNILEPACKIVLAHPKYVKAIRGKKTDKKDAQWIADIFKHDLVSGSFIPPADIRQLRDLVRYRFKLTNYITGEKNRAQNCLTVSNIKLDDVFTDVFGKAASAITTRLLENTEPFDVTPFLTKNHKASAEEIQMSVDGVICPEQAEKLRIIRSHMDALTLAKLNLESLILSVAEKYLPQLNLVLTVPGIQSFSAIAIIGEIGVDMSVFPTSKQLCSWAGLTPQNNESAGKKKTTRINRAGTYIKPLLVQCANCAIRSKANPEIRSRYLALKKRRGHKKAIIAISRMMLTAIYNILKKNEPYNPTLYRQSDRPPVHREVSVDEAVYILQRQGYLISAPVTI

SEQ ID NO: 190139 - protein, 351 aa, unidentified
MRLKKSEDMNQVDVNVNEVLYIGADVHERETQLAIFEPGGTLLQEKRIPTKDLQSYVASLPSKEKHLALESVGFIYPLYDKLRQIPGCEVAVANPKRLRQVSDSKQKHDRADAKVLGNLIRTNFLKRSHMSDLETREKRFLINDRVKYGLRRSELRGSIRWLLKRRGIEIGCDPFSREGRRKLREEVVLQEIDIRLQELELVESIIEKLDKQIINVVSGDEKAKLLDTLPGIAPYTALFLSSAFDDVDRFVDSKHACAYLGLVPSLFQTGDVSFTGHITRDGNKFLRRNLVECARVAVRKDPHLKEFYLKLRRKRGERKALIAVARKMVAYAYWMLKRNQTYEELAPWTHT

SEQ ID NO: 190140 - protein, 339 aa, unidentified
MKKYALFIGIDISKMWIDVSLSLDGQKPDMLHQQFDNQLKGFKKMLKWIEGFARHKRLATRHWLFCMEHTGVYHLPLCCFLREQQLGYVLETALRIHKSLGLKRGKDDKADSMDIARYAYLHRKELKMSDLPEHAIMKLKNLLAFRARLIKHKNALKVAAKEMADFSIPEWIEDIVEDSAHITAAVEAKIRKVEKQLKKIIAQQAELQQIFDLVTSVKGIGMISAMYLIVYTNAFRAFPDARKFACYIGIAPFFRKSGSSTDQPAKVSPLGNRKLKSVLSNAVMAAIKHDQQLKAYYLRKLAEGKHKFSVMNAVKNKLVSRVFATVNRKTPYIEINAYA

SEQ ID NO: 190141 - protein, 369 aa, unidentified
MDETITSYVGLDAHAESSAIGVAAAGELTAPRFLGTVGAKFSELTKALGKLGKPSALRIVYEAGPCGFAMVRQLRQAGYHCAVVAPSKTPRKPGERVKTDRRDALTLAGLARAGQLTFVTVPDERDEAMRDLSRARIDAVRARLKARQQLKALLLRHDRRYTGKSSWTAAHERYLSAVSFDHPAQEIAFVEYRRAISEAQARVGLLTQALSEQLEHWRMRPLVRALMTLRGVDEVVATSVVAELGELKRFAHPRDLMGYLGLVPSEYSSGQKRSLGAITKTGNSHARRMLIEAAWNYRFPARISLPLQKRQEGQPATIREIAWKAQLRLAHRYRRLSARGLQHNKICVAIARELTGFIWSISQQVTIGT

SEQ ID NO: 190142 - protein, 354 aa, unidentified
MGIVGGIDIHRRQLTFDIVDFATGENVRGRVSPADRVELRRFLAGLGGAGGDVAMEGCTGWRYVTEELERAGFRAHVAEPADTAALRGNKRRAKTDRGDAQHLRKLLMTGELPESWIPPRHVLEARGVVRLYKDLADQRVAWTQRLHATLYHHGVPELGCPVASEQARTLLHNAELSPAARRAVEVALAQIEVVNEMLAPIKLDLARLSRHQPGCQALTAHYGIGPVTSVAIWCEMGDTRRFSSSSDAVRHAGLDITVYQSDTNRAKGHLARQGPGVLRWALYEAAMSSTKKASPDHEYFCSLRERLGTQRAALAVARKLARWCHHALRAAGDEPGPRPPERRLLPCASRPQSK

SEQ ID NO: 190143 - protein, 356 aa, unidentified
MATYSLSALQAFISIHQADPFWIGVDVHKCSYHIALLRADSKTFTFTTTASPDAFIEQLRRLNLPVAGVAYEAGGTGFSLARALLAEKIPVTVAAPSKIPRSVSAGSKTDRLDCLKLAHYAAKGLIRPIAIPTAEEEAQRALLRRRHQLVDRVRQCKQRIKGFLLYHGFKETDAIRNWRSDCDEQIAALPLLPEGRLTIESHLRELRFLQQELSEVAMQLHYLNRQPEHRTVIKALTSVPGVGQVVATSFHLELFRPERFQRGEEVTSYLGLAPTVRHSGEKTPRGYLAPCGQKRLRSLLIEAAWMWRTKDAKAGELYNKLLGKTGIPQKAITALARRLAIILWRLSIEQRTYRPI

SEQ ID NO: 190144 - protein, 430 aa, unidentified
MNYNTQNAKIAAITEKTLVVGIDVGSESHFARAFDWRNYEYSKRPFEFSNSEDGFISFKAWMDELAEKHGKTEILPGMEPTGHYWFDLGIYLQNNGMRPVHVNPHHVKKSKELDDNNPNKNDRKDPKTIAGLINEGRYSYPYIPEGVYAEIRTASNLRFQAQAELTRVQNRIARWISIYFPEYKDVYKKTEAVSGFMVLRQAAVPEDIKALGVEGVNKIWRDAKLRGAGLKRAKTLVEAAERSIGCQEGLRAGRREIKDLLDDYEVYKKRLDEIMVLIEELLQEVPYIDKLLAIKGVGIKTVSAFVAEVGDIGRFDNPKQLQKLAGYALVENSSGKHQGETRISRRGRKRLRYALFEAAMSLVGKNEEFSELHHYYTTRSKNPLKKMQSLIAVACKVIRIFYVILTKGVDYDGAKLLGDIRRPEEFTQAA

SEQ ID NO: 190145 - protein, 354 aa, unidentified
MIGEKFIGLDVHQATICVAVMDSKGKVVMESILETKATTLLEFLAGLRGTLSVTFEEGTWAAWLYDLLKPHVANLVVCNPRKNALLKHGNKSDKIDARKLANLLRLNDLEPVYHGETGVRMLRELARSYLTIVKDVSRVMTRLKAIYRSWAIPCAGRDVYYTRHRSEWLGKIPEAGSRRRAEQLYQQLDMLQSLRQQARRELLVESRKHSITAKLRQIPSMGPIRSALAVALIQTPHRFRTKRQLWTYSGLGLETRDSGEYHYVEGQVQRKKRAFIRGLNKDHNHDLKGLFKAAATRASVQPGPFQDFYQRSLAKGIQPTMARLTLARKIAAITLTLWKKGENFDAEKLKAQAA

SEQ ID NO: 190146 - protein, 375 aa, unidentified
MSNVTKYVGFDVSKTKIAVAIAEEGRQEPRYWGVIPHSKEAIRKLIEQLRKTEDIVLEVCYEALPTGYVLYRWLLEMAVSCTIVAPTLIPKRAGDRVKTDKRDALRLAQLFRAGELASIYIPTPADEALRDLVRAREDAKEDLNRHKQRLGKFLLRNQLADPKGSSPWTHGYEAWLDTLKFADDCQRLAYQEYRQSIWETKERIKRYEKEIERQEEINIQAPLIQALQALRGVAVLTATTLASEICSISRFPHASSFMSYCGLVPSESSSGDSRWQGKITKAGNAHLRRVLVESAWSYRYSPAVKRKMRERITGLTPEVQGIAWEAQNRLHKKFKNMMRMGKHKGAITVAIARELAGFVWAIAKEIEKGRQNVAV

SEQ ID NO: 190147 - protein, 343 aa, unidentified
MQDITLIGIDLGKHSFHVHGQDRHGNALLRKKFSRKQLIEFLTKFHACTVVMEACAGAHYMARQLAGYGHNVKLISPQFVRPFVKSNKNDFVDAEAICEAASRPSMRFVTPKTEAQQTLSALHRVRESLVRDRTKTSNQIHAFLLEFGISLPIGYAVIRRLPAVLAEHTLPPRLMQVLQRLHAHFKYLDEQIAEIEKDLTRQLADDDLGQRLMTVPGIGPITASVLASEMGDGRQYRCGRDFAAALGLVPRQYSTGGKNNLLGISKRGDKDLRRLLVQGARAYMQRLERQTGPLARWVSTMLTRRHSNVVACALANKMARIAWAIAAHHTTFETKEAPTPTAA

SEQ ID NO: 190148 - protein, 353 aa, unidentified
MKRDKYMGMDVHQATTVVAVIDAEGKVVLETIVATAAGPIRRLIESISGPLHVTLEETTQAEWLYELLEGFVAEVVVCDPRRNKLLSEGSKGDKADARKLAELLRTSMVRSVWHGRQTTRVLKEMVRAYETFALDTRRTMLRIKAVYRSRGIPTAGTGVYQVKQREHWLKQLTEVGMQQRAAWLYRQLDHVRELRKQAKAAVLAEGQRHRAVELLRTIPQVGPLRAAQIVATAGTPHRFRTKRQFWSYCGLAVITHTSAEYELRAGRVVRRNKPVATRGLNPNCNRRLKSLFISAATAGGVSHPWQPYLDNLARKGMRAEMARLTLARKIAALALAIWKKGERFDPKKLNWTT

SEQ ID NO: 190149 - protein, 349 aa, unidentified
MELDTIGIDLGKTVFHLVGLNRAGEVVVRRKFSRLQLLRFTANLRVRLVGMEACGGSHFLGRSLREQGHEVRLMPAQYVKPYVKTNKNDYIDAEAIAEAVGRANMRFVPIKSDEQLDMQSLHRVRDRWVARRTSVINQMRGLLLERGITFRKGRRHAEASLPAILEDADNRLSGLLRMLLAQLHGELRQLQSQIDEADALIAKAAHEQEACQRLMAIPGIGPLTATAVVASIGNGAEFRKGRSFAAWLGLVPKQESTGGKQKLLSISKRGNHYLRRLLVSGAHAVLQCKDKQSAGLSAWLGQLASRVHTNVAAVALANKMARVAWAVLAKSEAYRPPLLLISTEALACN

SEQ ID NO: 190150 - protein, 406 aa, unidentified
MNAVGIDVSKGKSTVTILRPGGEVIASPFEVSHDPRELSELVALIKSLDGDTKVVMEYTGNYYLPVALFLQKYGLFVSVVNPILVKDYSNKSLTVRKGKTDKKDSAKLAAFALDRWNELPLFSSQSDTRTLLKAFNRQYNQYIKLKVMLKNNLISILDQTFPGANTLFTTPARKADGHEKWIDFVLKFPHCKCVSKKSFSVFSKCYLSWCRKCGYNFSETKAREIYAFACNCTPSLADSEAAHTLVSTAILQLNTLNETLASLQREMDLLASSLPEYDTVMDLYGVGSVLGSQLIAEIGDVSRFSNKKALVGFAGIDAPPFQSGNFNPQSRSISKRGSAVLRKTLFQIMAVILQNAPANEPVFLFMDKKRSEGKHFYVYMMAGANKFLRIYYARVMEHLNSLQEAA

SEQ ID NO: 190151 - protein, 351 aa, unidentified
MSEYIAFDSHKHYTWVERQDHSGGKNRCDRLEHAPGAVREYLSGSEPGTAVAVEATGNWYWIIDEIEQAGMQPRLVHPRKAKLMMGLTNKTDKLDAQGLNRLQRNGTLPTVWIPPGPLRDLRELTRTRLVLVAQRTRLKNRLSATLAKYGTPASEYSDPYGKRGRAELEKHLERLPEQTRWVSGQLLAQLDFVSAQVKQLEQRLEELVEVTPEMQWLLTLPGVGVILAATIALEIGEVERFPSAMHLASYSGTTPRVHASGGKVRYGPLRVDVNRYLKWAFAEAANSVAVNQRSHPERHVSRLYQRIRQRKGHPKAIGAVARHLAEAAFHVLRRKQIYRDPELDRGCTNPG

SEQ ID NO: 190152 - protein, 482 aa, unidentified
MKKKNIFQNRSQQLLRLFEKAGDRLKMMCVPIDYAKKDHIVMFCNGYGDILRKPFSVKNTLEGVKYLIDQVMRSCRQRHIKKEYVFFGGEDVNSCAENFANALRTKGFLVANVNAHDAKKQRENLQASTDRIDLMGIALMLLNLRAKCSPAQDGIYRNLRTLVRHRKKLVVMKTEVKNRMHTLVDRLFPGFLNEKNTGINPFSKSSLVLMEDRFSAQQIRRRQKSTLIKILKRCATPDAESIAAKLHNYAAQVITTPDEYAATLQLSLQHHIGHFRCLQENIDQLLSEIALLLAQTQGAFLTSIKGVCIVLATGVSSEIGNPFEQKPLNNLTSYSGIIPRVKQSGGIEGHTHTGRVSRRSNHLLKDYVVQSAFHIGIRGPQPLLQDYKRREAAGQHADFGIGRRFLRMAMCLMRNSQIYLPPNLRSPKTQMHERAGYYLTAWPLLRDKWKKSHAHQTAFATDQPLGQWRQVVQELYEIKLKL

SEQ ID NO: 190153 - protein, 367 aa, unidentified
MKKVSTTVAKQGRNISQQKLTIGLDLGDHNSWYCVLDEAGQIQLEQRVRTNAKALREVFGKMPHSRIAMEIGTHSPWISRLLSELGHEVIVANARKVRLIGESRKKDDRLDAQTLARLARIDPELLYPVKHRSAQAQADLMTIRARAGLVRARTALVNTARGLAKSYGEHLRGCNVRNMNPEKAESLSPELQAALEPLLNAIESLIERIVEYNDRIEALSQESYPQVALLKQIKGVGTLIALTFLLTLEDPHRFHKSRDVGGYLGLQPGRRNSGQSEPQLHISKEGDPYLRTLLVQGAQHILGPFGIDCDLRRWGLKLAERGGKSGKKRAIVATARKLAVLLHHLWVSGEVYEPLHNSRRLTVAAAA

SEQ ID NO: 190154 - protein, 347 aa, unidentified
MTTLTDTVDIVIGVDPHKHFHAAAIVAAGTGKKLAALNVNADPAGFNLLVKKADEYSKSRCWVIEGCGSWGRNLANWLIEAGEFVREIDSPKRPARRMGKKTDDIDATRAAREALGREDLAEPRSAGDRDALAALLMARRSAVQMATDTERQIHALASICPEALAKRLRGLKTHRMVTTCARWRPRGDIAVVIIAQTMRNLAQRVRLLREESSEYENQIDILVRSWRPDLLELVGVGPIIAATALTVWSHPGRIRNEAAFAMLSGVAPIPASSGLTTRHRLNRRGDRQLNSAFHIVTIQRQRHDARTQAYFEKRRAEGKTDREIRRCLKRYIAREFYKILENPLDKQ

SEQ ID NO: 190155 - protein, 402 aa, unidentified
MRSVMHPIACGIDVHKKKLACTIIIAESMQVEPVYHHRKFSTHNYDLVKLVDWLDHYDCHCVCMESTGKYWIPVFNYLEDRDFNIVITHPKYVKSPKGKKTDFLDSIHIAELFQMGEVQPSYIPNKEFRQLRDLSRYRYKITNFISSEKNRVQNCQTVSNISLASVVSDPFGVSASAVFSELLTSSDVDEVHIRSLLRGSLKKKSEEILNSIRGFHLDDDQSYKSLLSLGHMQFLEDMKSALSSEIDKRTSKYHVYIDLATQLPGIGHLSATTLVSETGVDMSVFSDAEHFTSWIGLTPTNNASADKKKSVRISHAGTYLKPMLIQCALAALKDKKCPYFKIKYDKIKKRRGHKRAIIAIARMMAVCLYHMFKDLKDFHPSDYEELMNPIPPKPRKQDIQDA

SEQ ID NO: 190156 - protein, 387 aa, unidentified
MARVIIGVDPHKRSATIEVINEREQTIGQGRFGTDTDGYKAMLAAGRRHKEREWAVEGCNGIGRHVAQRLVADGETVVDVPAKLSARARVFTTGQGRKTDPVDAPSVAVVALRTAGLRRVQADDTTVALRLLVDRRDQLGRARTDIVNRLHTLLLELIPGGAKKDLSAQQARALLATVRPRDVVGKTRRWLASELIHELAVIDKKIKVAKQELTELVGNTGSRLLDLHGIGPSGAARLLGDVGDIRRFASRAHFASWNGTAPIDASSGDNNRHRLSRAGNRRINQALHIMAIVQLRHDTEGRRYYRRRLAEGKPPLEALRALKRRLSDVVYRQMLADTKRLETGPGGHAGATLTSSAADPNPEVDTSEKSLPGPAEPQPRTSSLAAS

SEQ ID NO: 190157 - protein, 395 aa, unidentified
MFIVGIDVAKRSHEVCMITSDGQTVQRPFSIRNNCTGYNLMLEKIRKHTNIKSQIVFAMESTAHYWLALFTRLRKDGYHVILLNPIQTSAMRDMFIRKIKTDAKDSFIIAELIRFGRYAESNVAQDRLLALKELCRNRFYLVDMAGDLKRKLIALIDRVFPEYEAQFDTIFCKSSVALLKKYPTPQKLSNAHLDKLTELLWNSSNGHFGEWKARELRELARSSFGVEDCDGAYSTLILLMLDQIQSLSGKADALEKEISRLFQSFDTTVTTIPGVGPIIGAVILSEVGDISRFSSADKLAAYIGVDPSVNQSGEFQAAHAHMSKRGSPYLRRCIWMASQVAVQRDPMFRAYYEKKAAEGLKYMTIIGHVTRKMTAVVFAILRDHKVYEPVLPTAA

SEQ ID NO: 190158 - protein, 377 aa, unidentified
MHSENIAAYIGLDVHKETLAVAIAAPERLGEVRYYGTINNEAQAVRRLFQKLQGLYGNILSCYEAGPCGFGLYHQLTAMNIKFQVIASSRIPKSPTDRIKNDHRDAISLARLLRAGELTPVWIPDLTHEAMRDLIRARAAAKRDSRVARQRILSMLLRTDKRYAGKHWTGKHRTWLANQSFSQPSQQIAFQHYCQSLEQIEDRILQLDQEISRLLPEWSLCNLVCQLQALKGVGQLIAITLVAELGDFSRFSNPKQLMAFLGLVPGEYSSGNSIRPRGITKVGNSELRRLLYEAAWSYRTPAKVGAWLIYYRPDSVTQYSKDIAWKAQQRLCSRYRTLTAKGKKSQVAITAVARELTGFMWDIALAAQSSFSQQKQN

SEQ ID NO: 190159 - protein, 358 aa, unidentified
MWTRVMIVLGADTHKRSHTLAVIEVATGQVLGDKTVQVGPRGFATLLGWARGLDGRRVWALEDCRHVSGALERFLLGRSERVVRVSTRLMAASRRSSRQRGKSDHIDAVSVARAALAAGIETLPTAALAGVELDIRLLVDHRERLVRTRVALNSTLQWNLHDLWPELALPGGALFSKKWTSKIARRLARAEQTMRVRIARDELRRVRELTHTINALETEIADLVAQVAPELVAERGCGPLTAAKLVGEIAGADRFATDAKLARAAGIAPIPASSGRTDRHRLDRCGNRQINAAIHRMAVTRARCDPQTRDYIARNKAEGKTNRDAIRCLKRHLARRIWQLLRAPAPSRPSPHHQNSLT

SEQ ID NO: 190160 - protein, 352 aa, unidentified
MAATAQSAIAVIGIDIGKNSFHVVGLDGRGAIVLRQKWSRGQVEARFANMSPCLIGMEACVGAHHLSRKLKALGHDARLMPARYVRPYSKGQKNDFRDAEAIAEAVQRPTMKFVVTKTADQLDLQALHRVRERLVSQRTGIINQIRAFLLERGIAVRQGQRFLRVELPRILATPPDVLSPRMVRVIEGLASDWHRLDERIEVLSSEIEELAKRDAGCERLMSIPGIGPIISSAMVAAIGTGDSFSKGRDFAAWLGLVPRQISTGDRTILGKISKRGNRYLRVLFVQAAWVVLVKVKPTRWEGHGLRPWIEAAKKRLHHNVLAIALANKLARIAWSVLAHGRAFETNKLQAAA

SEQ ID NO: 190161 - protein, 424 aa, unidentified
MKVTYQTCCGVDVHKSFLVATIVKTTGGIEPSYQKKRFSTFNNSILEFKQWLLDNHCHDVCMESTGKYWVPVFNLLEDKINVVIANPKWVKAVKGNKDDTKDSKWIGDLFRLGLVKGSYIPCKKVRILREYTRYRYKLVSCRSSEKNRYQNALTVCNVALDSIVSDIFGKSSTSIIDYLLEQSGTSINHEEIASKLLRSLKSKEDAVIESVEGYQMTDAQKYRMRLVRAHMDYITAEINDVDKMIENMISSNPDFENAVQFLCTIPGVKRDSAITIISETGTDMSQFSSSKRLCCWAGLTPGSNESAGKKKSVRITRAGVYLKPALVQCAHAAVKSDKSPYYKKKYESLVKRRGKKRAIIAIARMILTAIYQMLSTGEQWNPSDLYKIDMPVALVEKQKAKAIKQAKKLLQREGLLPPDKPLAS

SEQ ID NO: 190162 - protein, 415 aa, unidentified
MLFIGDDWAEGHHDIEVEDDTGRRLARMRLPEGVEGLARLHEVIAEHLDTDPDGIGTDVPTDGAVVVGIETDRGVWVSALLACGYQVYVINPMSAARYRERHGTSGAKSDAGDAHVLAEIIRVDRDHHRQIAGDSTQVEALKLLTRAHQGLIWDRTRHLQRMRSALREYFPAALTAFDNLAAPDTLALLQKAPDPDRAARLTTGQITAELARAHRRGDRTAKATRIRDALRAPALRQPAEIENAYAIVVVGQARMLEHLNVQIDELEQEVKHSFRRHPAADIVRSCPGLGDVLGARVLAEFGDDPHRYRNAKARKNYAGTSPITRASGKRKTVSARYARNKHLADACHQWAFCSMNTSPGARAYYDALRAREVGHHAALRQLGNRLVGILHGCVKTGTVYDENTAWPQVTTQTAA

SEQ ID NO: 190163 - protein, 355 aa, unidentified
MSQEKYIGMDVHQATISVAVTDSRGKLIMESILETKAATILEFLQGLHGSLSVTFEEGTSAAWLHDLLKPHVTRLVVCDPRKNALLKDGSKSDRIDARKLAELLRGNQLTSVYHGEHGMRTLKELGRSYLTITTDLTRVMSRIKALYRSWAIPCSGTSVYAPRHRAEWLGKIPEPGVRLRAERFFQQLDLLQPVRQQARHDLLSESRKHHAVKLLRQIPSIGPIRAALLVAQLQTPHRFRTKRQLWAYSGFALETHDSGEYRYVRGKLQRNRERMTVRGLNNNHNPEVKNLFKGAAISASTHPGPLYDFYVALLEKGMRPTMARLTLARKIASITLTIWKKGADFDATQLHRQEA

SEQ ID NO: 190164 - protein, 361 aa, unidentified
MASISLSRIASFVLGFEKKVFWIGADVHKKSYSIALRRADDKFLTWTCSASPDLLVDQIKRLGVRIGAVAYEAGPTGFSLARALRCAGINVIVAAPSRIPRPVTAGAKSDRLDCIKLSAYASKGMLTTIAVPTVEEEARRALLRRRHKAVDAVRRCKQRIKSQLLCQGIEPPKELGNWSKGAPAALRKLTMEPGFGITLDSLLRELAFFQKELCRLERELVRMVKDRKCRANMGYLKSVPGVGSVVAATYSLELFRPERFQVADQVSSYIGLAPMVRQSGQSRGSGRLVPVGQSRLRSLLIEAAWNWKRKDPYAAALYNKFVSRTGIAQKAICAVARKLAIILWRLLVEQRVYRPRPVAAR

SEQ ID NO: 190165 - protein, 383 aa, unidentified
MTTAIDTRDVCCVALELSKTSWVCAFAVPGESKVAIHKIKAGDTDRLMAVLTGSKARAEQQLGRPLQIVLCYEVGYDGFWLARYLIARAIHTIVFDPASFLMPRRSRVAKTDRLDAEGMTRILRRWLSGDREMARPVQIPSVEQEDAKRIERERKYLVEERISVIGRIKGLLALHGIWLVKKNIGKGLRQRLDAMKTGDGRPLAPFLRSEIERMLTRYDLISRQIADVEADRKAALNNEKGVFPHADKVRRLTTLGAVGETTATVLVAEIYHRTFLTRRQVASFVGLAPSPYKSGEVDRDRGINKAGSKLARHMLVELAWFWLRYQSNSQLSQWWHSRFGNQGMRGRKVGIVALARKLAIALWRFVEDGIVPDGATLKVRHAS

SEQ ID NO: 190166 - protein, 466 aa, unidentified
MAAVMIGVDPHKASHTAVVISAAEEPLGELRVRACAVQAERLLAWAAAWPQRTWAVEGAGGLGHLLAQQLLSAGERVLDVPPKLGARVRLLAAGDTNKNDPNDARSVAVAALRSAGVREVRADDHAAVLKIWSKRHRDLGRARTQAACRLHAVLCELIPGGVSKAITAAAAARLLESIAPAGAVEAARCELAAAFTEDLRGIDARIRETRKKLAVAVQATGTSLTGLYGVGPVVAAVVIGDVRGVSRFPGRDHFAACNGTAPIEVSSGPRKIYRLSRRGNRRHGHAIHMAAVTQIGHRHSQGRACYDKKLAEGKTPKEALRSLKRQVSNAIFACLHADARQVAARAGSPGGQPGNDSASSAAGSHPRHRLFGQATPGPGHHTTTATSNPAPGPAHARGRAGRSPVAATPPQVQAERPQRNEDQRSGGAARRRPHPAARKARGQESPRKPQRPRGPSQAAKNTGGAP

SEQ ID NO: 190167 - protein, 430 aa, unidentified
MKSNTQNAKIEAITEKTLVLGIDVGSETHYARAFDHRGIEYSKKPFKFSNTEAGFVIFKEWILDLKEKHEKDKVVPGMEPTGHYWFNLGKFLQDNEMKPVLVNPHHVKKSKELDDNNPTKNDRKDPKVIAGLVREGRYMIPYLPDGVYADLRTASNIRFQLQAELTRIQNRISRWFNIYFPEYKTVYGKPDAKSGMLILKQAPLPEDILTLGIDGVNQIWRDAKMRAVGKARAKTLIEAAEHSVGSKEGAVSARMEIRMLLEDYESRNIRLQEVMTLIEELVNQIPMAEKLLGIKGVGIKTVSGFLAEVGDISRFNNPKELQKLAGLALVENSSGKHKGKTTISRRGRKRLRYLLFEVAMSLVAKNPEFRELHTYYTTRRLNPLKKMQSLMAVAAKLIRVFYAMLTKGVDYDPKKMVGDIKRPAVYLQAA

SEQ ID NO: 190168 - protein, 392 aa, unidentified
MRYVGIDIASERHVVAVVNEAGEVLIRPTGIGEDAGGYEKLIGLLGEPEGVLVAMEATGHYWKNLFAELAARGFSVALINPLRTRRFAGEDLERTKTDAIDALGIARFALQKRPAVTRLPDAATEELRELVRHRDRLVQDFGDRTRQLHRLVDLGFPEFTRYVHSLDSMLATAVLHEYPTAEAFLGLPWKKLAKLTYDGSHRVGEETAKALVETAKVSVGRHHGLAYRVQVRHSCEDMDVLRRRIRELDRDIETKLGEHEVGSLLTTIDGIGTQTAARLVAELGDPADFRDSAALAAYVGVVPALRHSGKRSPSRAGLTTIGNARLRAALWMPTLTAVHRNPWLKAHYDRMRARGKLPKVALVACMRKLLTAVHSVAKHRRPFVPEVAGGSP

SEQ ID NO: 190169 - protein, 355 aa, unidentified
MQSNKISFKGQNIYVGIDVHLKTWHVTTLTESGCKYSFAQHADAKELFDRLNKKFPEAHYKSAYETGFCGFSVHYALTELGFENIVVNPADIPTTGKEKAMKTDAVDSEKIAWSLKRGELTGIYVKDKRYMDDTNLMRLRQRFIRDLSRQKNRTKHLLYTQGVVYPERFSKKGTHWSRNFMKWLREDVELLSEEKRTLMLLCNQVEHIRKDILTITREIRRLSTTDKYKENFSLLSSVPGFGLITSMSVLTELDNDPIRFPNERKFVAILGLIPTCHDSGEKKSSGVKTFRGNKQIGPLIVEASWVAIHRDYQLGCYYTNCCQSMNPQKAIVKVARKLACKAYAVMKTKKAYVQS

SEQ ID NO: 190170 - protein, 338 aa, unidentified
MSNYAGLDVSDKTTHICVVDVDGKVLRRDVVASDPDVLAKWLNRHCPDIVRVVLETGMLSTFLYHGLIERDVAVECICARHAKGVLSTRVNKSDVHDAEGLAQLARTGWYKRVHMKASATHIDRAALRIRAQLITARTSMANQLRGLLKLFGLRMGTARTPGRRAERLAAFYAQRPDLKALFAPLIASMEAIEEQLRTSNRLLNDRAKADVVCTRLMTVPGVGPITALTYTSTIEDPRRFARSEDVGAYAGLVPRRSQSGERDMSGHISKAGDPMLRKALYEAANVALSQVKRPFALQEWGRKIAEAKGAKRARTAVARKLAALLHSLWLNETEFRWA

SEQ ID NO: 190171 - protein, 368 aa, unidentified
MNTVKFIGMDVHKKTITVAIIDEGRQKQPRIYGTIVNQPEALDKFCRKMVSTAARLHFVYEAGPCGYGIYRHLTEKGFDCMVAAPSMIPKKSGDRIKNDRRDATMLARLHRAGELTAVYVPDAQDEAMRDLTRAREDAVMATRKSKQRLNAFLLRNGLTFAGRTKWSKAFFNWLSDIAMPYAAQQVALQEYIDTVHENLNRVNRLTDQIRQLVAGWRLVPMVSALQAARGVSLIVAVTVLAELGDLSRFDKPSQLMAHLGLVPSEHSSGESIKRGAITKTGNGHVRKVLVEAAWAYRMQARVSRLLLKRQQGVPERVCQIAWKAQLRLCARFRRLTARGKTKQKVVTAIARELSAFLWAMAKQLQPVV

SEQ ID NO: 190172 - protein, 455 aa, unidentified
MRTKIKKAIPVRYHDGLSQIRPNAGGIDIGASEVWVDVGNKDAEPVRMFETFTADLNRMGDWLKSCGIQTVAMESTGVYWIPVCQILESKGIEVYLVNARQAKNVSGRKSDMLDCQWLGILHRYGLLPASFRPAQDIGVLRAYMRHRQMLIEYAAAHVQHMQKALTQMNLQLQHVISDITGWTGMKIIRAIVGGERDRRRLAALRDARTKANEETIAKALEGDYRAEHLFALKQSLELFDTYQKQIASCHEQIEQHLKSLATKADSAELQAARKVKKKRRNQPEFSIREQAFRISGVDLTQIHGIDETTALSLIAEIGVDMNAWKTEKHFSSWLALCPNHKISGGKILRRSTRKSANRAREILQLCAQSLLNSHSALGAYCRRMCGRLGKPKGIVAAAHKLAVLVYRMLKFGHHYTDIGQERYEQQYQQRLLKRLARKAHELGFQLVPSPENQVP

SEQ ID NO: 190173 - protein, 343 aa, unidentified
MKHYIGLDVAMKRTFICILDENGKIVHEGSEKTDPKLLVDYLQKTGLEAALIGFESGSLSHYLLNGFKERALPAVCIDARKMSAILSLKINKTDKNDARGIAEALRSGMFTRVHHKDQESVDRGVVLVARKTMVNQRTQLKNCVRGLLKSYGVRLGSVGSSRFSATVKSHLNGLDKAVQLSFEGLLNSFDHLTLEIEKLDKKLLEMASQDKDVKLLLTIPGIGVITALTYKAEIFDPHRFSDSRSVGAYLGMTPKQYSSGDTQIQGRVSKCGSNELRSLLVEAGLVVITRTKKWSKLKAWGLKLMRKKGAKKAALAVGRKLAVIMHRMLIEQKEFVYGEQKAA

SEQ ID NO: 190174 - protein, 433 aa, unidentified
MGLIVPTVMPPERADQPPSYDGFVGIDWGSQQQQVSVLDRDRRRMGERVVDHDGASLAQFVAWLWGLSAGQPQRVAVAIEVPRGAIVEGLVERGFHVFAMNPKQLDRFRDRHSVAGAKDDRRDAFVLADSLRTDQPSFRRLRLDDPQLLVLRELSRAEETLLEAFRRSANQLRDQLHRFYPQMLQLCSAADAPWLWDLIDLAPTPAHAALLREEQVQGGLKAHRRRRLKAHEVLACLQTPALPVAPGAVQAAQAHCRFLLPCLRVLAEHLQACGQQVGALLHTLAEMPGAGEGPSDVAIVQSLPGVGRKMTAWLFAEAAQPLAERDYQVLRTHGGVAPVTKQSGKRRVVVMRRGGNPRLRHALYHMARVAMQRDAHCNSVYAALRAKGQRHGQALRSIGNRLLRILMAMLRHRTCYDASRIHREPVVQMGETI

SEQ ID NO: 190175 - protein, 335 aa, unidentified
MTITTIGLDTSKAWFQVHCVDADGRTVLRRKLARSKVLSFFANIPSCLVGLEACGGSHFWARELAKLGHDARLMPARYVRAYVKTNKHDAADAEACCEAVQRPGMRFVPVKTEEQQSMLMIHRTRDLLVRQRTAAVNALRGHLAELGIVAAKGTAKAHELMRLAGDDERLPPTAREALGYIVAQIHDIESRLKIFEQRILSLAKEDEVCRRLMTVQSIGPYIATAIAATVGDPRNFASGRHFAAWLGLTPKQHSTGGKEKLGGISKRGDSYIRRLLIHGARATVARVRSGQMKSAWLSGLLSRRHFNVATVAWANKTARVAWAVMSTEQTYRRAA

SEQ ID NO: 190176 - protein, 434 aa, unidentified
MQGCRCSGIMDIAKPIDPKSNMKEGENVNQLFVGIDVGSRDNAVYIMLPDGSKHSSFEVQNNLGGAQTISKRVVSALAEKNLPAVTIGIEATSVYGDNLMCFLREDGALAQFERKLHVLNPKQVNKFKGSYSDLPKNDPVDAFVIADNLRFGRITVPIYMDDYRYKALQNLTRARFYAVQNLTREKQRFMNYLFMKCSGLAQEKTFSDNYGAAALAVFETFETPDDIVNTDIQQLAAFIAEKGKNRSPRPDEIAKAVQAAARGSYRLPKTVNDSVNQVLSISISSMRAMQAQIKALDKEIERQFENIPNTLTSVPGIGPVFSAGIIAEVGDINRFDGQARLAKYAGLAWKEYKSGMFEGQNTRLIKSGNRFLKYYLCEAAMSLVRCDAEYRRYYDLKFKEVNKYQHKRALALTARKLVRLVFRLLKDNRLYRSA

SEQ ID NO: 190177 - protein, 349 aa, unidentified
MRFYTKQHQFYCGIDLHARSMYVCIMSHPGEILVHRNMAATAKELIKVVEPFLDDIVLAVECVFTWYWIADLCHRLGVHFVLGHALYMKAIHGGKVKNDKIDSQKIASMLRGGMLPEAYVYPQGMRSTRDLLRRRLYMARQRAELQAHIQNTNTQYNLPSFEKRLGPRSNRKGIGERFTDPAVRTSIEVDVAIMDALHEQILAIERQINALVGEHDPVAVHLLRSIRGVGKTLALIILYEIHDITRFPSVGQFISYARLVKCPHESAGKRTQGKGAKIGNVHLKWAFSEAACLFLRGNPRAQLYHQRLLSRYGKAKALSIIAQKLGRTVYSMLKKRKAYDARRFFETVR

SEQ ID NO: 190178 - protein, 352 aa, unidentified
METAYDGRQVVGMDLHRRRSVLVRMTEDGRRLGMARITNSPQELRAQIARAGTSPRVVLEATFGWYWAADTLTAAGAEVHLAHPLGVKAFTYRRVKNDERDAADLADLLRMGRLPEAWIAPAGVRELRELTRYRHKLVHLRTSCKDQVHGVLAKLGVPVTCTDIFGTAGSAWLDGLGLPQPYGGKVTSLRHLTGELTGEITMVSEVIADLLAHHRGYQVIQQLPGIGPVLAAVIIAEIGDVTRFKTAAQLCSWAGLTPRHRESDTKVTRGHVTKQGSRLLRWAVIEAIQRVPQDSVIGGVKAAIIARRGKEAKNIAKVAAARRLLTLVFYGLRDGQIRCLSQAPAGSSGPVA

SEQ ID NO: 190179 - protein, 349 aa, unidentified
MIRNKPRGATVYGIDLGKNIFHVVGTDPAGNVVQRVKFRRDTLRAFFERAERAVVGMEACPGSQWLARKLQAMGHTVRIIPAQFVKPYVKSHKNDTIDAAAIAEAVTRPTMRFVQVKQPEQVDLQSLHRIRDQMVGSRTRLICQMRAFCLEYGVAIRQGAGLFKSDLPRVIADECNDLTPTMRRLLNELFEDLMRLEKRIAEVTREIEALAASDEKARRLMTIPGIGPLGATALLAAAGNGQQFKKARDLAAWLGLVPQQYSTGGKPQMFGISKRGNRYLRRLLIHGARSCVMHLDRSRDRLGAWLRQLHSRMHVNKVTVALAAKIARIAWVVLNRPGAIYERRDPALA

SEQ ID NO: 190180 - protein, 342 aa, unidentified
MQITTIGLDIAKNVFQVHGIDGSEKVVVRKQLRRSQVLRFFEALSPCLVGMEACATAHYWARELTKLGHEVRLMPAKDVKAYVKRNKNDAADAEAICEAVRRPTMRFVQAKSAEQQGQLMQHRTRDLLMRQRTQLINALRAHMAELGIVAAQGREGIKQLLTIVAGERDARLPVDAHASLVVLAAGLQAVQTMIGSIDKRIVVEHRANEASKRLKTIPGIGIVGATAIAATVPDPKVFRSGRDFAAWIGLVPRQDSTGGKQKLGPISKQGDQYLRRILVVGAHAVLKRARQQPEKYPWLTQLLARKPFRVVAVAVANKMARIAWALLAKGGTYRAPALPVAA

SEQ ID NO: 190181 - protein, 412 aa, unidentified
MLFVGNDWAEDHHDVEIVNEQGRRLARKRLPEGLDGITRLHALIAQFFPEEWADLEPAEAASRVKVGIETERGPWVQALIAAGYEVFAINPMSVARYRQRHSTSGAKSDAGDAHVLAEIVRLDRAHHRPVAGDSELGEAIKLVARSHQSLVWDRTRHILRLRSVLREFFPAALAAFADLDAPDTLELLAFAPDPDRAARVSKPKITAALRRANRRGIEEKATEIESVLRAPALRQPAQVQAAFAVIVTSQARLITALNLEIGQLGEVVAHHFGRHRDAEIYASQPGLGLILGARVLAEFGDDQNRFADAKARKNYAGTSPITRASGTRKLVLARYARNERLGDAVQQWAFGALKGSPGARAYYDALRARKVGHQAALRQLANRLVGILHGCLKTGTLYDETTAWAHHHTAAA

SEQ ID NO: 190182 - protein, 516 aa, unidentified
MRAKLQAIKQELRRRIHQPIPVQGKWLRQVVTGYFNYHAVPTNSPALAAFRFFVTELWQRTLRRRSQKDGMTWGRITRLANDWLPQPHILHPWPQARFAVTHPRWEKLWGGRAEVVAPSSSIRTDGGCPMAQVNDLSRSLTAFDPISTLVVVVEMSKASWLVSGAVPGVERQPLKKLEPDAPALLRLIERWRNEAVRAGRPISRIALAYEAGRDGFWLARWLIARGIDAHVIHSASVAVSRERKRAKTDRLDAAMLMRVFLGWLRGERGHCGMVAIPTMEEEDARRPSRERESLVNERSRITNRMKSALARLGVRGFKPHLRKAPERLAGLRTAEGTGLPTNIIEEFRRDMARLALVREQIGSIEKTRAERLERAPDTGPHAMVRLLARVIGIGIETADMLVREILSRKLRDRRAVARYAGLTGSPDESGLNRREKGLAKAGNARVRRGVIQLAWRFLMFQKDSALARWYRTRTEGPSGARKTTMIVALARKLLIALWRLVTTGEVPDGVELRPAA

SEQ ID NO: 190183 - protein, 368 aa, unidentified
MNEVTTYVGMDAHKKDLFIAMLVGATPTPVTWQLANEPQAVRRLVRKLEREAPGPVRVFYEAGPCGYALQRQLTTPRVQCDVIAPALVPRKPGDRVKTNRRDARKLAELGRAGLLTAVQPPTPDDEAVRDLARARDDAREDLQRCRHRMGKLLLRRGLHYSGRNWTRVHRRWIDQLTWTHVAERAVVNDYLLAIDQTEARLAELDAKLAEIAASDPYREPVGWLRCFRGIETLTAMLILAERYDVRRFPSAPALMAYLGLVPGEHTSGEKHRRGRITRTGNALVRRLLVEAAWHYQHRPSVGVALTKRRKGQPGRVIAIADKAQQRLCRRFRKLAAEHQPTPKVAVAIARELAGFLWAALQPAPVSVT

SEQ ID NO: 190184 - protein, 304 aa, unidentified
MFGIGIDVSKATLDVAVHGEQFRQFSNDKRGFVRLIRWLKKWPIKQVVLEASGGYERAALDVLHAAGLPMVRINPARARRFAQGTGRAAKTDRLDATVLAQMAHLLPLTRYVPPAPWQQRLSEFAQCRRHLVQMRVSEMQRLRRLVDPDLIAMKQRHIAQLSDDLKQLDKAIAEQLEGQPGWKSIGALKGVGPILISTLACELPELGSLGSKAIASLVGLAPMNRESGTWQGQRRISGGRAVVREALYMAALTAIRYEPRLRAFYAGLKAKGKASKVALVAVMRKMLVILNARKRDAEVTPGCP

SEQ ID NO: 190185 - protein, 339 aa, unidentified
MSHYAGIDVSLEQASVCVVDGDGRIVREGKVASEPAALIGWFGSLGLELTRVGLEAGPLSQWLYAAMKEAGLAVELLETRHVRDAFKAMPVKTDRKDARGIAQLMRLGWFRPVHCKTAAAQEIRALLTARKLVQSKLYDVEMSLRGVLRGFGLKVGPTTVARFDARIRELVAGHATLEAIAAALLAVHAVLARELSGLEKRLRRMARGDGRVRLLMSAPGVGAIVGLTFAAAIDEPARFRSSKQVGAHYGLTPKKYQSGETDVTGRISKIGDKSVRTALYEAAHVILTRAIKAPRLKSWGMRIAKRAGMKKAKVALARKLAVILHRMLADGRTFQAVPA

SEQ ID NO: 190186 - protein, 347 aa, unidentified
MRFYTETHKHYCGIDLHARTMYVCILDREGQVLLHRSLPCDPECFLRTIAPYRQDLVVAVECMFTWYWLADLCGREGIAFVLGHALYMKAIHGGKAKNDRIDAHKIASLVRGGMFPQAYVYPPKMRATRDLLRRRLYLVRKRAELLAHIQNTHHQYNLPEPPAKIVYKANREGVAERFPDPCARKSVEVDFALIAHYDDVLRELELHLTRRAKEHDPDAFHRLRSIPGVGKILALTLLYEIHDIARFPRVQDFVSYARLVKCERSSGGKKQGTGGSKIGNVHLKWAFSEAAVLFLRKNPRGQRYLERLTRRHGKGKALSILAAKLGRTTYFLLTRETTFHMERFLMT

SEQ ID NO: 190187 - protein, 355 aa, unidentified
MCILAIDLGKSNSVACVYEMADGAHRFRTVSTTPSAISGLISEEQPERVVIEICLQAGWVGDLVRARGIVLQVANTNEEAWSWRRVKRKTDRDDALKLARMSWLNQLPTVHLPEHGTRQWRSVLHYRQTLVARRTSVKNRVRSILEAEAIRLPSGKTAWSLVQRLRLREMVRSWDEVGMEELWRAELGEELDHLEQLEATLKRVESKLDALAAQDSRVKLLKTIPGVGPRLAEMVVAVIDDPKRFRSGKEVGSYVGLTPRRFQSGQMDRQGRISGRGHKDLRKLLVEVSWIGLRFNPRLRTVFDRTCRGVKKRRKIAIVAAARRLVIWCWAMLRDGTAWKTAPPAKRARRLVQAA

SEQ ID NO: 190188 - protein, 312 aa, unidentified
MSSASVYVGIDVSSQRLDVAIGDDPVESYDNDDAGVVALCQRLRTVQCELIVLEATGGYEALAVATLAGEDLPVRVVNPRQVRDFAKATGLLAKTDALDARLLRQFAERIRPVVLPHKSEATRELAALVARRRELVQMLTAEKNRLKLATRAVGRDITAHIRFLEKRLHDSDDELKRRIETHDDFRVTDELLRSVPSVGRVSSSTLIALLPELGALPHRQIVALVGLAPLNDDSGRRVGRRRIWGGRSEVRTVLYMATISALRSNPVIRTTYQRLVAAGKPKKVAIVACMRKLLTILNAIVRDQTPGNPAIA

SEQ ID NO: 190189 - protein, 340 aa, unidentified
MNRIGLDAHSASFTMAVVNETGKVTRCLSRPTSAENLIKLVGEVRGPKELVVEESTITQWVKDTLEPYVDRLVVCDPKHNRWIAKDDFADDRTSAIKLAQLLRGGLIKEVAHPDSDGAQLRRAFLHYSDLNEQVVRFKNKLKSTYRQAGIAVSGKRIYESDSHGKWLARLADSPALMRQAEHLFVLIDEIEVMKQECLKTMVKAARKDQGYDLLRTMPGAGPVVTCGYMALIGTPHRFSRKNKLWRYAALGNALHISDKRVYQDRPSKSGNRALKWVVVQQFMGAVERSKQENHFKRRYAQLRARGLDLKTARRQVCRSMLSVTRAIWMKGEPYRDKPLS

SEQ ID NO: 190190 - protein, 304 aa, unidentified
MFVGIDVSKDRLDIHVRPSGDAFAVMHDGEGITALVERLKGLGPELIVLEATGGLQTRVAATLAAAQLPTAVVNPRQVRDFARATGRLAKTDALDAEAIARFAEAVKPELRPLSDEDGQALQALVARRRQLVEMRVAEKNRRQQVKAQLRKRLDDHIEWLAQAIAELDIDIDDHIKGSPVWRAKEDLLVSVPGIGNTTARALIADLPELGTLSRRRIAALVGLAPFNRDSGRMRGKRSISGGRTSVRNALFMATIASVRFNPAIRTTFQRLVAAGKPKMTAIVACMRKLLVILNAIMRDRTVWT

SEQ ID NO: 190191 - protein, 368 aa, unidentified
MKKNLRFVGLDVHKDTISIAVAESGREPARLLETIPADVWLLLKVLDRLGPKSRLRVCYEAGPTGYGLARQLNEQGICCVVVAPSLVPTQKNRRIKTDRRDAVRLAHFLRSGDLVEVTVPEAQTEAMRDLERAREDAIQVERVARQQLDKFLLRHGRRWSVGGKWTHKYWQWIKVQEFAEEASRRVFNDYIHTVEQALARVQRLTADISELVERWTLGPLVRALQALRGVDLVTAVVLAAEIGDFQRFGTPKQLMSYLGLVPSEHSSGGHRRQGGITRTGNRHARWVLVEAAWNYRFGPCASKRINARRQRVAAGVRSIAQRAEQRLSRRFRRLIDRGKSSQKAVTAVARELVGFVWAIAQEDQLLAA

SEQ ID NO: 190192 - protein, 326 aa, unidentified
MSEALLPLGIDISKTDFHVALLKSAKRSKYEHFSNDTEGFRQLSQWLDQPGVGPVHACLEATSIYGHALALYPHQQGHQVSIVNPLRVKGYSKSQLSRTKSDRADAKLIAQFCRDLKPAPWQPSAVEVSQLQGYTRRLDALEHMLTEEKNRLQVTPQDFEADIVAHIQFLQGQVETVKKRLREHIQAHESLQSQQALLTSIVGVGESTAARVLAEIGSIEHFTSARQLAAFAGLTPQEHTSGTSVQGKTRLCKIGNRRLRKALYFPALTWWRRCPQARAFGERLLAAGKAKMQVIGALMHKLMRVIYGILKSGKPFDPGKLLPRSS

SEQ ID NO: 190193 - protein, 341 aa, unidentified
MKVVYTGLDVGSRLFQIATMEESGELLFCKKIAMSEENLIAAFSALEGEVHVHLEAGEMAPWIRDVISRLVHRVVISHPMNNAWIAKDPNKCDRIDAIKLADLLRMNRFREVYYSDDRSRREFKLLVQHYNDLTKQQAGIKRKIKARFRAQGIIVHSLELFTVKGKEKALGLLSSDWLRKAVEQLYEVLEQSQTAQQQARQLMCKQGQAFAEIKLLQSVPGVGPIGAARYSAYIQDPTRFSSRRKLWRYSRLGVSFRSSDGEPLSHPRLDRNGCGVLKNVARVAFIAALRAKVENSFQRAYKEALKSTHNAVHARLSVMRKIVSVMRAVWITNTPYRDDLG

SEQ ID NO: 190194 - protein, 338 aa, unidentified
MTIVMGLDQHRAQITADWLDTASGEVSRARIAPADRVGVRRFAGRFHGQQLEVALEATTGWRFVVEELQATGARVHLAEPAETAARRGTKKRAKSDRADARHLRELLMVGRLPESWIPPAHLLDLRARVRLRHTLVDVRREWQQRMQAVLYHHGVPSRSWLMTEASREWLAQLELPTTAREQITIALAMIDAHDTQLAPLDRELREYARRQAGCRALMRHYGIGPLTSITILAELGDTRRFSSSREAVRYAGLDITVHQSDARRAPGHLSRQGPPALRWALFEAAQCARRTSSPDHDYYQQAAERLGGNRACLAVARKLLKRSYHTLRELGEEALQPA

SEQ ID NO: 190195 - protein, 342 aa, unidentified
MDQYVGLDVSMKDTAISIRENGKRLWRGRCSSNPKDIADLICKRAPNAKRVVFETGPLSTWFYHTFKAVGLPAICIEVRHAQKVLSETLNKTDANDADGLAHLAEAGFYKEVRVKAFDSMLARTLVSARDRLISISTQLSNQIRGLMKTFGLIVPRGTGRVFDGKVRELLTANDNLAAIILPLLAAWRDVRRQAAELDLQLLAAARKSHPTKLLMTIPGIGAVTALSYVAAIEDPENFRNSRSVGAWLGLTTRRYQSGEVDYDGHISRRGDNRLRGLLYEAATVILTRTKPNSDSAIRHWGIGLRDRLGFKRAAVAVARKLAVIMHAMLTKGQAFNRSVGVV

SEQ ID NO: 190196 - protein, 407 aa, unidentified
MEVLYPRCAGLDVHKDLVVACARLAEGTKVEQHFGRFGTSTRELLRLRDFLVSHGVTHVGMESTGVYWKPVWHILGDAFELQLGNAKQMRNVPGRKSDQNDAAWIADLVAHGLIRRSFVPPEPIQRLRDLTRTRTQLMHERGRQVQRLQKVLEDANVKLASVLSDITGVSGRKMLAALVNGATDAAQIAKLANARVKASQEQITRALEGHVTEHHRFMLGLHLRHIDELDALVVKLESRIEQELAPFRHIVEHLITIPGVKEDAAAAILAEIGTDMSAFPTAGHLCVWAGVSPGLNETGGVKRPARTKQQRWVKAKMTQCAWAAVKKRDSYLCSRYNRIRARRGKQKALLAVAATMLRAIYHMIVNDVDYQDLGPDHFERKDHELAAQRLKRRLEKLGYEVHLQKAA

SEQ ID NO: 190197 - protein, 428 aa, unidentified
MYRSAIGIDVHLNLLVCCHQKQVAGHREQSESRDFNTDRASIDAFAAWCRECNPDIILMESTGSLWQSPYEALERAGFTSEQLALINARDAKAAAGRKTDRKDASRLASLARTGNFKKSFVPEKAFRLQRVISRDLQKNRNDISRTSNRFGKSLNLTGCRPTTVFSDIRGGKAASLILMAKLRDDPHLFDVIKQNSRRLRASPEQIMQALNFEIEPMMKEQILALRKKIDQLEEYDRSTFERLRQLQAPYEKDIQLLITITGIQERSARMIYAELCADLKDHFPTSEQFTSWLGICPGDNTSAGKQKSGKCPKGNKHLRRTLIEAARGLAVGGTAALKEKFQVLKMRRGYRRAMVAFAHLLARIIYSVLTHQKGFEPYLSTAFRDALIERAKNGVKQLLKLKGTKYVIADGLVVETKTGAILGAVVSS

SEQ ID NO: 190198 - protein, 352 aa, unidentified
MTVTIVETCVQARAITGGVDTHADVHVAAALDPVGGLLGVQEFPATPAGYGRLLGWLGGFGTVCLVGVEGTGSYGAGLARHIAAAGVRVVEVDRADRQDRRRAGKSDPLDAVSAARAALSGRAAGAPKGRDGAVEAIRALMVAKRTARAERVQTINQARALVLTGPDDIRARFAKHATDALVAELAALRPRPGSMVRYHTLLSLRELGRRAQFLDQQLGRLDELIVPLVTARAPGLLARYGIGPHTAAMLLIAAGDHPERLRSEAAWAHLCAAAPIPASSGKVNRHRLNPHGDRQANHALWQIVITRMSSHPPTRAYVARRSKEGLSKKEIIRCLKRYVAREVYPHLRPGTG

SEQ ID NO: 190199 - protein, 361 aa, unidentified
MKSTTIIAFDQHAATTVAAVLLPGHRTPALHPLTSESPTLLRFVERLRRQGPVICCYEAGPCGFELQRTLTTRDIPCEVIAPALIPRRPGDRIKTDRRDASQLAVLYRAGALTAIHIPTEQEEAARDLLRCREDIRADLLRARHRLSKFLLRHGRRFTGTKKAWSKRHDLWLRAQTWPLPALDQTHRAYLRAVDEIVARLRAVEQDLRALLDLEPLRPRVQRLRCFRGIDDLTALTIAAELGDPRRFATAPRTMAFVGLVPSEHSSGATRAQGRITKTGNAHLRRVLVEAAWHYRHHPFVGDALRARQRGAPDAVIAQAWTAQHRLHRRYARLAARGKPKQHIVTAVARELTGFVWAALTQ

SEQ ID NO: 190200 - protein, 428 aa, unidentified
MKITRRADKINPNYIVDVSVDVHKETLYFFFVLCGREYSDTCPNRTAALEKRLRHYHAIVSEQGQKSLRILCEPTGQYQNKLMRTARRLGFLTSYVNAESVAKFRQIESNDMNKTDTKDPRVISSLGKLNKTIRFRLLDEDYLMLRKLHKIFDETDVSLTSIRCRISKLLLELFCDYSFESCFLYSRSGQALLQHYGCSPWRILADGFPGFCRTMKKTVPRIRTKTLERLWDDACSSVLNELPAGCIAIQENRLREYMEDYHRELGRKEETTRQMIEILKRLREKDPNIPPPTPQVLSEKNLARLLAETGPVHDFSHWRKLLRYAGMNIRMRQSGVYRGKNKLSKKGRPLLRKVLMQIVLPLVRKGYLYGEIYHRKKEQENRPGTMAMAIVARQFLRKFYGWYRSGREFDEQRFFTCESRYVKLAEAA

SEQ ID NO: 190201 - protein, 324 aa, unidentified
MSQPNPLCVGIDVSKATLDIAANGDGDIAQFTVSNDSDGFDAIIDELRKHSLALILMEATGGLESAVACQLQAEGFDVTVINPRQARDFARAMGYLAKTDRIDARVLAQMAEVINRHPERERFIRTLPDTERQVLAAMVVRRRQLITMQVAERNRLYTAHPQSRKSINIIIKALEDELARIDEDMKNHIRNHFKDLAARLSSIKGVGTMTVAALLAEVPELGNLSRRAISALVGVAPINRDSGTMRGRRTIFGGRDGVRTSLYMAALVATRFNPVIKTFYIRLLAAGKPKKVALVACMRKLLTILNAMLRKNEEWNESYHQVIP

SEQ ID NO: 190202 - protein, 415 aa, unidentified
MTESYAWYLGIDWGTAEHVLCLLDATGQVRGTRPVAHTAEAVQAALGWVTATAGVEPAAIAVGIERPDGVLVATVLEHAFPVFAINPKQLDRFRDRFTAAGAKDDQRDAHVVADALRTDRRAFHRIAPEAPAIVQLREWCHLAEDLQGQQARLANRLREQLGRVDAPWLAVSPAADDPWLWAVLAARPHPDHWARLGPGRLTTLLRTHRIRRLTAADLRAVLRQPRLAVAPGVADAVAAAIGILVPQLQLLHTQRRTVDRQIERGLDALADEDDPPGPGGHPRDVVLLRSLPGVGRRVAATMLTEAPGPLAARHGAGLRAHAGTAPVTKRSGKRARVVHMRYACNARLRQAVYHWARTSIQRDPAARAYYEALRQRGHGHARALRSVADRWLRILIAMLRSQTPYDATRPARAAA

SEQ ID NO: 190203 - protein, 339 aa, unidentified
MKITTVGLDLAKNVFHVVCFNDHDKEIKKRMLRRNQVLEFFTQLPPCQVSMEAYAGSHYWGRQLRALGHNVKLISPQHVKPYVRGNKNDYNDARAIAEAATRPDMPAVGIKTVEEQDMQAIHRMRSQCSRDRTALSNSIRGLLGEYGIVFAKGVATLRRKIPEILEDAENGLSLGFRNLLVRRYEQLVELEGHIAFYTKELERLSKQDDACQRLQTIPGFGPIVASAFRSVIGDGRTYARGRDAAASIGLVPRQYSSGGKNVLLGISKRGNKYLRKQLVHGARSVVLQAANKEDPLSRWINRIREERGWNKAVVALANKMARIGWAVLRHRSQYQPASI

SEQ ID NO: 190204 - protein, 401 aa, unidentified
MKRLSGGIDVGSESHHITILDEEDNVLYNQKVSNKLSEFAESIKLFKQIEKQEGGKLSFALEGKNGYSAPLDRILLDQGFTLYNVDNFKLKRFREAFAGEWRDDQRDSLMLSKMLKLKEHINSPREKVFIKIEKPSLLTESLKLLSRHQQTLIDEKVRLINRLGKKLLEVCPQILKLGKLKNKKIIAVLAKYPDFSKYKRITLCSLLKIKGIGKKGAFFLLKRLNNIEYMPGLTDIYQTIIFSYAKRILELQKEIEDLDKKLDEIGEESKEVKHLKTIPGVATKLASRLIGEIGDINRFPAEKQLAIYCGIACVDNNSGKVTKARAVYKANKICKQALITMAGGSIRFSFQCKYYYLKKRAEGKSHNHTLRCLARQLIKVIYKMLTEDRDYIVRKELKKVA

SEQ ID NO: 190205 - protein, 341 aa, unidentified
MGEVSTIGVDLAKSVFQVHGADASGTVLFRRKLRRHQVLTFLAGQPPCTVAMEACGSAHHWAREISKLGHAIRLIPPAYVKPFVKRQKNDAADAEAICEAAQRPTMRFVMPKSEQTQAAALVFRARDLLVKQRTQIINALRGHLAEFGLVVAKGPAHVSQLVRAVADPEEPIPQVARPVLQMLSETLHRLEEQIAGLDREVAQRAKENETARRLMTIPGVGPVTAVALAALAPPAETFKRGRDFAAWVGLTPLQHSTGGKQKLGATSKMGERTLRRLLIIGASAVVSWVARNGAPAGSWMARMVARKPPMLVRVALANKMARIVWVLMARGGVYQAPVAMA

SEQ ID NO: 190206 - protein, 310 aa, unidentified
MKLDGEILKKERVATNKNELRRCLASVPKGSRVALESVGFCWPWIDFLKELEFEPLLANPLKVKIRAEDVKNDKVDSKTLAHLTRMNWLPTCYVPPAELRWLRSLLRHRAFRTKLSTGVKNRTKSEFRKRDITLDVDLKTKKGRVAASGLDVFEVNQNVELLELMDRQSKEIEAILKRKFGDVKPVQLLMTIPGVGFVTALTLYAEICDVKRFSNPEKLAHNAGLLTKVRQSGEHSNMGRESKGDKWLKWILVEASWSHVRNCPGGHLAKVFWDTFRRKRNSKDAIKVVARKLVNVVWAVWTYEQEFMVK

SEQ ID NO: 190207 - protein, 338 aa, unidentified
MKKRYFLGNDIAKETFDFCLLNAKKICLWRGRLSNNAAGFKALLEGLKARGIKLKAIHFALEATGVYGRALIGALHRAGLAVSVLNPAQVKFFATSYNRRTKNDRVDAELIALYCLERQPMATRPLRPVEEQLKVLVHECETRVNEQTRERNRRHKDHYQSAGLPPILHLQRRQRLEQLQSQIGQLDRAIDALLGSDPQLSQHAKLLCTIPGIARRTAAKLLAELAGKEVSSARQLAAYAGLTPEERRSGQNLYGKTRLSKIGNAFLRKALFMPASVTRRWCMPIAKWANSLEARHLEPLQIRGAVMRKLLHLVFGVLRHQQPFNPVRTSRPTLTHVA

SEQ ID NO: 190208 - protein, 414 aa, unidentified
MKPCLFVGVDTHKNSHTAAVLDGYFDVLTTIGFTNSQEGFCHLDLKLKKLASGRNLVFGLEDSQGLGSFLAQYLLDKGHLAMEVNPVSTDRGRRYTVSRDKSDERDAIVIAKTLIKERESLHPVSINKNSVALREMVGYRQMLVRESTRIKNRLHVALFNQYKGILGQFGSLFSKCALAFFARYPNPCLLKEVDCDTLSGFLKANSKGRYGSKKARAILSNLDNSIAGTLEGTRAHIIESHIERLIQIAEELKKIGYILEELVEKSSYDCLVSIPGIDTVTAAKIISGIMDIARFSSSAKLAKFCGIAPTEKSSGRKEKYQKSKYGKKSLYTTIYFMALAHISRTRNGRDKNPISKAYYLKKISEGKTKKEAITCLARRLVDLIYAVMRDRSIYNFSKSRFTKQQSCVLNSAVA

SEQ ID NO: 190209 - protein, 354 aa, unidentified
MTEEHNSVTAVIGIDIGKNSFHVVGLDGRGAIALRQKWSRGQVETRLANMPACLIGMEACIGAHHLSRRLKLLGHDARLMPAKYVRAYSKGQKNDFRDAAAIAEAVQRPTMKFVATKSADQLDLQALHRVRERLVSQRTGIINQIRAFLLERGVAVRQGRRFLRAALPGILATRCEVLSARMVRLIEDLAGDWRRLDERIEGLSGEIDALARQDAGCERLMGVPGIGPIISGAMVAAIGAGDGFAKGRDFAAWLGLVPKQFSTGDRTVLGKISKRGNRYLRVLFVQAAWVVLIRPKSWERYGLKPWIVSAKKRLHHNVLAIALANKLARIAWSVLAHGRSFEASKLAEGATQPA

SEQ ID NO: 190210 - protein, 352 aa, unidentified
MAKNDFDELMSIGIDIGKDTFHIVGFDLSGQRVLRKQIKRLALVATFEKLPRCVVGMEACLSAHFVSRTLREMGSEPRIILAIYVKPFNRGQKNDYNDAEAIAEAALRPNLQTVSEKSQDQLDLQALHRVRSRLVSRRTATINQIRAFLIEQGITVRKGLRALKNSFETILEERKDEISPRMRSILIGLYGDWMWMDDRIDKVSQEIEEISRTEENCVNVMTVPGIGPMISTAMVAAIGEGEAFDRGRDFAAWVGLVPRHYSTGGRTVLGRITKRGSRYLRMLFVQAAKIIMMRPHRWPDFSFGDWLARASERMHRNKAAVALANKLARMAWSILRHKTAFDAQRDEVAIGI

SEQ ID NO: 190211 - protein, 386 aa, unidentified
MEKANDLSRSSTVLEPNSTLIAVIEMSLSSWLVAGIVPGLARHPLKKLDADPEALLLLLHRWREEAAKYGHGIARMAIAFEAGRDGFWLARWLRARGVEAFVIHSTSVAVPREHRRAKTDRLDTEHLKRAFLGWLRGEPNHCQMAAIPSLDEEDARRPNRERENLVNQQTSIVNRMKACLIRLGVRNFKPTLRHASERLEMVRTPEGAPLPPNTLAEMRRDMARFRLVREQIREIEAARSQRLQVSESRAQAMVKLLTRIIGVGIETADMLVHEILSRQLRDRRAVARYAGLTGAPDESGKRRREKGLARAGNARVRRGMIQLAWRFLLFQKDSALAQWFRARTAEARGGTRKTLIVALARKLLIAFWRLTMTGEMPVGIKLRPVV

SEQ ID NO: 190212 - protein, 465 aa, unidentified
MKRHRRRHAPKPRVSPSVLDHINPHAAGIDCGSAEHFVAVPPDRDPTPVRSFATFTGDLQRLADWLSACRVKSVAMEATGVYWIPLYEILDARGFTVLLVNARHVKNVPGRKSDVSDCEWLRDLHIVGLLRGSFRPTDGIVALRAYLRHRQTLIETAGSHVQRMQKALVQMNVQLPLVVSDITGVTGLRILRDIVAGRTNPHALAQHRDYRCHASEAEIAAALTGNYRPEHVFGLRQNLEAFDHTQQQIAACDTAIEAHLQTLAAHTTRATTPLPAARPRQKPRDNEPRFELRTPLHQLTGVDLSQLDGIGPYNALRLLSEIGTDMTRWPTDKHFTSWLTLAPKNKISGGRLLSSRTQPSANRAAAILRLAAMNLGRSQTALGAFYRRLAFRVGKAKAVTATARKLAILVYRTLKDGLVYHDPGAQAYDAQHRTHVLRRLRQRAENLGFALVDLKTGEVADGTVS

SEQ ID NO: 190213 - protein, 400 aa, unidentified
MRAVFGIDVSKVSSEVAILVNGEKVHGYTMPNDAIGFARLLGDLKTVHKPEIIFEATGVYSRRLQAFLEDNGYAYTRLNPLEAKKQLDSLRVRKTDQIDAEKLAQSQFVLNRKPTYVQEEVYQELRDLSRFYQNLTEDIVRAKNRLHKVLQVTFSELETILSTPTGEQYWNLVIAFPCKDFVLDLSKNELSKSIRQSTSKRISDKRVAYLAEKLTVLANQSYCAVKKTSPILEEVHYYAKELLRLSEQRQAVLDQMVELAQPLPEYDILLSIPGIAETTATSIIGELGDIRRFQSANQINAFIGIDLRHYESGNFLAKEHITKRGNPYARKILFKCIHNIASASHTNPCHIADFYEKRKRQSQTTSTKPHTIASIHRLIRTMYYLIMHNKLYDYASTQNR

SEQ ID NO: 190214 - protein, 367 aa, unidentified
MTQMKFIGLDVHKETIAVAIADAARDGEVRVYGTIPNTPEAIRRLFDRLSGSGVGLYFCYEAGGCGYGVYRQLQDLGASCDVIAPSMMPKKRGDRIKNDRRDAVTLARLLRAGELTAIWVPDEDHEAMRDLVRARRQAKGDLVAARQMLLGFLLRHGRKFPGRTNWTRMHWRWLGEQAFGSPHQQFVFGECIHRIEEAQARCERLDRMLQEAMESWSLAPLVKALQALRGVGLVIAATLVTEIGDLGRFRTPKHLMGSLGLVPSEASSGTRTRRGAITKTGNGEARAMLVEAAWSYRLPAREERRYRMRVEDLPEEIKVIGCKAQTRLCQRYRRLSATGKPQPKVITAIARELAGFVWDVSRHMRPA

SEQ ID NO: 190215 - protein, 317 aa, unidentified
MATREPLWIGIDTGKDELVIDDGRRTISVSNTSAAIRQWLKQLPGPARIGVEATGTYHLQVLELASEKGHQPYVIDGFRLNRYRDVVGDRAKTDLTDARLVRRYLRNEFDELRPWQAPPVAYTRLKSLLRRRAKIVQARTALRQSLAGVPELRAVSRGLLEGINGALAQIDRLLKRWVEKAGLQDAVRRLDQIEGIGPLVAAAFATSYLRGEFRSSDAFVAFLGLDVRVRDSGKRVGQRRLSKKGDGEMRRLAYIAAMAASRSGRWKEQHLANQARGLSRIQSLVIIARKLVRLAFALLKSGEEYRPQLPQGATATT

SEQ ID NO: 190216 - protein, 340 aa, unidentified
MTGTMTWVGMDVHARSTHAAAIDTMTGELTRKRFGAGVDEPVGWLMGLPGPVRACYEAGPTGFGLYRAAVAAGVGMQVIAPGKTPRGPSDRVKTDRKDAELLARLLLSGALTRVVVPPPEIEAARELTRCHDACRRDLMTARHRVSKFLLRHGQVYPLGSTWTVAHRRWLSRQQFQDPASELVFADLLAAVDGLSARKAAIAQRLSELATDERWWPTVARLRSFRGIDTLTAFSLHLELGGDWKRFERPTALSSWLGLTPSLTQSGESSCQGQITKTGSMLARRLLVESAWQCNRQPRIGATLANRQVGQPDHVLQISNRANTGSTASTKRCAPAENPAT

SEQ ID NO: 190217 - protein, 370 aa, unidentified
MSQSSTLYIGLAVHKESIAVAYVAPEHHAAVVSLGNIGTRQCDIDQLIRKMQSKSKHLIFVYEAGPCGDWLSRYLTKKGHVCWVVAPSLSPKKPGDRVKTNRRDAIKLARLMRSGDLTPVYVPQVEDEALRDLCRAREDALRDLKTAKFRLKAFLLRHDIRYTGRATWGPAHLRWLSEVVCPTPAQQIVFQEYLRAVTDHTERLARLEQELTEQVQTWRLAPVVDALQALRGVQCTVAVTTVAERGDLTRFENPRQLMNYLGLTPSEYSTGERRRQGGITKTGNSHARRALVEGAWAYRYPAKVRRHLQLRLEKVSKPIQNISWKAPLRLCKRYRQLSARGKNANQVVVAIARERSACMWAIAQEVALTP

SEQ ID NO: 190218 - protein, 348 aa, unidentified
MRFYTKQHNYYCGIDLHARSMYICIVDEQGKTVFHRNRKASAEALLKAIEPFREDIVVAVECMFVWYWLADLCAKEKIPFVLGHALYMKAIHGGKSKNDKIDSKKIATLLRGGNIPMAYVYPRKMRSTRDLLRRRNHLMRKRSELLAHIQNTNSQYNLPEFGKKLAYKANREGIAEHFPDPSVSKSIEVDLQLLDFYDQLLNDLELYIVKKAKVDDAYSWYRLRSIPGVGKILGLILLYEIHDIKRFPRVQDFVSYCRLVKCPRESAGKKFGTKNSKIGNAHLKWAFSEAACLFLRGNEQAQHYHARLVSKYGKGKALSILAHKIGRAAYFMLKRKEPFSMKAFFNET

SEQ ID NO: 190219 - protein, 417 aa, unidentified
MLPLIEAIHNHPVRHDLEKKVASGKLLKRVVTKEMLMNTETTLTNQYNRFEPYLFLAFELSQNLWKLGFTIGVAQRPRIRNISARDLFALQHEIQAAKKRFGLPANAPVLSCYEAGRDGFWIHRYLEENGIQNLVVDSASIEVSRRARRRKTDKLDVNKLLAMLIRFHSGEQKVWRVVRVPTKEAEDARHLHRELMTLKSERTRHTNRIKGLLTSQGISISVKPDLLDRLETLRLWDGSRLSEGLVMRLQREYQRWVLVDQQIDQLTAHRKELLKTSQQPSVEQVRQLMRLKGIGVNSAWLFVMEFFSWRDFRNRREVGACAGLTNAPYQSGDTSRDQGIEKAGNRFIRAVAIEIAWSWLRYQPISKLSQWYQRRFGHGSKRQRKIGIVALARKLLIALWRYLETGTVPEGALLKAA

SEQ ID NO: 190220 - protein, 403 aa, unidentified
MNSVGIDISKGRSTIAVMRPFGEVVISPFEVRHTDSELSELARQLKSLNGETRVVMEATGNYHASVAKLLHDAGLYVSVINAKLVHGYGNNDLRRVKTDRKDAVKLANYGLDRWLTLPRYVPEEDTRLLLKNCYRQYRQYSKVQTVLKNNLISLLDTVFPNVNRLFSSPARADGSEKWVDFVAKFWHCECICERSEKAFVSKYQKWCKKHGYNFGEKKACAIYAEASGHIGVMPKSETTKLLVEQAVSQLRATSAALAALKHEMQSLASVLPEYPAVMDMFGVGPTLGPQLIAEIGDVRRFYSKKALVAYAGLDAPPNDSGDVTGRHKSMSKIGASSLRRTLFLVMSVYLQNAPLDEPVYQFMDKKRAEGKPYRVYMMASANKFLRIYYATVKAYLESLEHTA

SEQ ID NO: 190221 - protein, 349 aa, unidentified
MSEPYAGRQIVGFDLHRRRSVLVRMTEAGERLETVRISNDPEYLREVMTRAGEAPEVVLEACYGWYWAADTLAELGATVHLAHPLGVKMFSYRRLKNDERDAADLADLLRMGRLPEAWIAPPATRELRGWVRHRAKLVGLRSNLKCQVHGILANAGITVPMSDLFGASGQRLLATADLATESRSRIDSLQRMITALDFEVELFAKLVAGRLRTHPGYQAIQLIPGVGPILAAVFVAEIGDITRFRRPEQLASWAGLTPKHHESDTTVHRGRITKQGSRLVRWAAIEAVQRLPGHTRIGQVRDRVAARRGRNIGVVAAARELTELVFYGLRDHRVHALAVHSPARTPLPA

SEQ ID NO: 190222 - protein, 429 aa, unidentified
MRAVGLDIHRAFCEVAIWEGGETRSAGRVQTTPEALELFASSLGPEDWVALEVSGNAAEIARIIEPHVARVVVVSPSDTGIRQARAKTDRLDARTLARLLAAGSLDGVWMPDERTRVMRRRLARRAGLVEARTRLKNEIHAVLIRRLITSPDVSDLFGQAGRRWLAKLELPVEERETLDSSMRQIEFLDTEISQVERVIALDALQWPDLRRLMSVPGVNVICAASFLAAIGPIERFHNPRKLVGYLGLDPKVRQSGPGPGTSGRISKQGSSSARWALVEASWSAVQQPGPMRAFYQRIRARRGHQVAVVAAARKLACLFWCLLTREEDYAYQQPSLTKKKLRRLEIAAGSPKYPGRTNIWSTNVAMREAERKLAEQAELAYRNTVRDWHAAQAKRTTATTTVKAGASVTPGRASNRPSKGKAARQTTSP

SEQ ID NO: 190223 - protein, 348 aa, unidentified
MTMIGGFDVHRQQITFDCVDDDGLVHWGQIRPATRTRLRDWLVKHCPDGNGEFGLEGCTGWRYVSEELLAAGARVHMGDPAEVAALRGPKKRAKTDRSDARLLRTLLLEGRFPESWIPPAQVMEVRTLGRLYCALMDERRSWQQRIHAQLFHQGCPPITALLSHAGREALAGAELSAAGRQYVGTTMRCIDQLNAEIVPLRAQLVDFARHQPGCQALQARHYGVGWLSAAIMWAEIGDARRFHSSDQLVRFAGLDITVYSSDAKRAPGHLARQGSPELRWAAFEAAKCAARPGSPDYAYYHQVAARKDGKRPTLAVERKILRRCYHTLRELGDTALAVPSTKINHIAA

SEQ ID NO: 190224 - protein, 435 aa, unidentified
MVETRLQVGIDFSTRWVDVCLLNPENDIPVAQQRFANSLPGYAGVKQLLLETLATHSYGGCAISGEATGMYWLPFFLHLAADADLQAYDAELYLLNPRWVSWYKKCFAQDHKTDPRDAYYIAHRTRTQPPSVSWQPDSDGLALRSYTRYRFHLVETLTREKCFASAYLFLKANLYRQLKPFSNVFGVTSRTLLSDSATFADLTALPVAELAAQLDALSQGKLPDPLRNAQRLQQVAQESFPLDSPLAEAVQRILSATLEHIAFLETQIAQAEAWITTALTQYPAIQQLQTIPGFGRTCAAGIGAEIGALDRFLSGTKWDPRRRRERPKNLRDAEDAIAKIAGLWWPRAQSGEFEAEERRMAKSGNDYLRYYLIQGADHLRKCVPEYRRFYARKYAEATKHKHKRALVLTARKSIGLIVGLLHRNEPYRSEEERQT

SEQ ID NO: 190225 - protein, 411 aa, unidentified
MSVNTNGNRIQPTSFDLFVGMDVDKRSIVMTVADRDKIIERRKMPYDGEGVINYFSRRYEREKTAFVYEAGPTGYGLHDKLTEGGYICLIASPANIPVVPGSMVKTNRIDSLKLAESLRAGQIKGIHVPSEPYRRLRHLVQLRDTFVKQAAATKCRIKALLLLEGLPFPVAPVGGQWSRKVLEQLRTEKIYERVCFKLGMLLKTLEFAQEKVKLTQQEMRRFCKGETEIAESLKYLMSIPGIGKTIATEMLARIGDWRKIENVMSLGAFLGLTPREFSTGEDVNRGRITRSGNERLRNKLIEGSWAAIRQDGELLEFYWKVYRKQPPQMAAKKAIVAVARKLTCRVYRVLKDRRCYEVRVAVAEKQKARIKLEQKETNTPGKLGEPDYEKKERQALGDASTPNRTRYVIKS

SEQ ID NO: 190226 - protein, 391 aa, unidentified
MVCVGIDVAKDKHDCCILDSDGTVRADCFTIPNNSDGFKRLLQTIQDCTQKSDKIKVGLEATGHYSYNILGFLLDNGLPTYVINPLHTNLYRKSLSLRKTKTDRVDARTIATMLLSDVDLKSYTDAAYHNEELKSLTRYRFEKVQERAKLKQSVSRLVTILFPELEQLVPILHIASVYSLLSEYPGAKQVSEVHLTKLTNLLATVSKGRYGKDKAIQIRDAAKTSIGSVMPAKSLELKHTIKLIRELTSEIDEIEDSIQQIMDELHPPLLSIPGMGIHSAAMILGEIGDFSNFESPDKILAYAGCSPSTYQSGKLTNCYAHMEKRGSRYLRYALYNATKYVCHWNPVFTEYLAKKRAEGKHYNVALSHATKKLVRLIYALQKSGKTYLTAA

SEQ ID NO: 190227 - protein, 335 aa, unidentified
MKNYLFYVGIDISKLKLDVVVIKKDTLNSTEHFIVENNLKGVKSILDYLIKRKIDAAQTLFCCENTGIYTNHLSYYLSEKKLDYWIVPAIEIKRSKGISRGKTDKTDAKDIALYSIRNIDKLNLSIIPEKEIQQLKLLFGEREKVMKSILLFEASRESEDFTSKEVYKTISLVNSKTIKMLKNSLKALETKMNEIIKNHTLLSKQFELIKSIPGVGSQTAMYFIIVTKGFKSFDSSRKFACYSGVAPFEHSSGSSIRGRTKVNHMADKKMKSLLQMCALTAIKYDPELKIYYNKKKEEGKSGMLVLNNIRCKIISRVFSVIKRETPYINIYKFAN

SEQ ID NO: 190228 - protein, 395 aa, unidentified
MLKYSLGLDVSKASLHACLSTIDNRQTVKVQRSGTFKNNEKGFSELHLWVTKEHHESSVPLVITLEATGIYHERLALFLHQRDYAISIILPNKAKKYIASLGIKTKNDTADARALSRMGAEQSLQLWEPMGELFYTLRAMTRQYQRLQEIKTMLTNQEEAISHGAYQIEAVVDSNKAMVAMVEGQLKDMQKAISKHLHSDKEVSRKVGHVTVITGVADLSIAVVLSETNGFALFTNSRQLVSFCGYDVVENQSGKHQGRTKISKKGNSRIRRALHMPALSVVRWKVKVFQDLYERVYGRSGIKMKGYVAVQKKLLTTIYALWKSDSGFDPNYQEQVVTKTNEKAKTTSDGEAEYSSRHSNSADQPGKAKKLAPRKGRAKQGIQPSDGAGVCILSA

SEQ ID NO: 190229 - protein, 406 aa, unidentified
MFNHAAPVTSSTVVVAVDVGKTTVALSVTDAARHRLLGPVDFAMTGPGLVGTTKKIWGVLPTPRVAVKVGIEAAGHYHRPLLSSSVWPAGWEVLELNPAHVSEQRRVQGRRRVKTDAIDLEAITELVLAGRGVPVTVREQRIGELAAWAAHRTRRVATRTATKNQLLGQLDRCFPGLGLALPDVLGTKVGRLVAEHFADPHRLTGLGTTRFIRFAEHRGLRVRYPVAERLLAAARDALPTPDAAVARQVLHADLALLADLDAQVAAAESAMAALLPTSPFATLTTVPSWGTVRAGNYGAAVGDPARWPGHRQLYRASGLSPMQYESAGRRRDGSISREGSVELRRALIDLGVGLWLTDPAAKAYGQSLRARGKKGGVICCAMANRANRIAFALVRDHTDYDPTRWT

SEQ ID NO: 190230 - protein, 388 aa, unidentified
MVMIGLDPAKHSHAMAVLDSAERQLAALQVANDNDGYRAMLRLARRWPQRTWAVEGASGVGTQLAQRLLADCESVPDVPPKLSTRARIFDTGHGRKNDPTDARTIAVVGLRTAGLRQVQPDGDAVALKLMSERRRELVRTRTQTVNRLHQLLMELIPAGASKDLTASRAKTLLATARPRDVASRTRRQLAADFIDDVAALDRKIKDIEKRLADAATATGTTLTDIVGIGPVPAAAILGEVGDVRRFASRHRFATYTGTAPTEISSGDIKRHQLSRAGNRRLNHALHMAALSNKRHDERGRSYYARKLAAGKGKKGALRCLKRRLSDAVYRTLVADAERKAAGPGGHSGAATKSSAAGRSPVASTSDKSLPGPAATEATPKVLVATAPA

SEQ ID NO: 190231 - protein, 309 aa, unidentified
MDAIYVGIDVSKDRLDVHVRPTGEAFAVARDGEGLAVLVARLLPLAPHLVAVEATGGFEITVAAAIGGAGLPLVVVNPAQVRHYAQALGRRAKTDAVDAEVIARFAEATRPEPRPLPDEATQALADLVTRRRQIIVMMVAERQRAGRLPKRLKRSCERVVRVLEKELTALDQDIDDTVRGSPAWREKEDLLASTPSVGDITARTLIAELPELGTLDRRKISSLVGVAPFTRQSGRWHGKSFIAGGRSNVRAALFVATMSAVQHNPTIRAFRERLLAKGKPKMVVMVACMRKLLTILNAILRDRKPWQPA

SEQ ID NO: 190232 - protein, 347 aa, unidentified
MVIVDSARHVVGGVDTHRDVNVAAVVDMNGGLLGVESFPTTGDGHKMLASWMAGFGTIERVGIEGTGAYGAGLARHFARASVMVIEVDRPNRQKRRQRGKSDRLDAVEAARGALSGRCEGIAKSGDGAAEALRALLVAKRSARSTRIRTIVQLRYLMFTAPDELRAKLGGLSAALLVSEAAKLRPRPGGDIVMHSVKTTAVILARRVQALDVELSVIDAQIGPLVKAAAPDLLNVFGVGIDTAAVLLVTAGDNPERITTEAKWAMLCGIAPIPATSGLVDGRYRLNSGGDRHANNAIWRIVITRLGQHEPRTVAYMERRLEQGKSKRYIIRCLKRYVAREVFLALPR

SEQ ID NO: 190233 - protein, 309 aa, unidentified
MKQSVVYIGIDVAKAHLDVAWAGTFRRLPNERSGHAALVRWIKQSTTPVQLICEASGGYEQALLESLEKSEVKVTLVQAVRVRQYARAAGILAKTDRIDAKVLAAFGSAMQPQPIPPLSVEQKRLRQYEAQRRHLSRTLVAEENRLAQLSCAQLRTLSRSLISKIKTQIKTIDRGISDLIAQDQTLCVKAQKLTAISGVGVRTAALLLAQMPELGQLNRRQAAALAGLAPFNHDSGSIRGKRAIFGGRPALRSGLYMAALSAARFNPILSSFYQRLRAKGKPHKLALTAVMRKLLLALNQTLKPLPYSA

SEQ ID NO: 190234 - protein, 344 aa, unidentified
MNEVITIGLDLAKNVFQIHGVDASGESVIRRQLRRRYVLSFLKKQPPCLVGIEACATSHHWAREIGALGHTVRLMPPRYVKPYVKRNKNDAADAEAICEAVTRPTMRFVAVKSVEQQSVLMLHRTRELLVRQRTMLVNAMRAHMAEFGIVARVGLPQVKVLLTVIADPDDARLPPVARICLEGLAEQFMSLHEEIYAAEMRIHAWHRSNEVSQRLETIPGIGPITATALAATITDPSVFKSGRELAAWIGLVPRQNSTGGKERMGRISKQGDQYLRWLLVAGAMTIIRHAKRRGTTNLPWVADLIARKPTKVAAVALANKTARVAWAVLRNGGTYRKPKVVPAV

SEQ ID NO: 190235 - protein, 424 aa, unidentified
MKNCNKQNEKIELVDEKTLVIGVDVGSYDEYARAFTCRKQELSKKPLHFHNTAEGFKTFKYWAVNIMKTNGLEKIIVGMEPTSIYWEALATYCKDNGMILVHVNPAAVHKSKELDDNDPSKNDRKDPKVIADLVTDGRYSFPYMPEEEYAQLRELSNLRIRTQESLTQCKNRLARWYSRYFPEFKEAYKNVVSKTAMIIMDMYPLPEDIVTLGVEGILQIRRNKKVRAAGKSRAKKLYEAAKNSIGRKEAAAVARLEFQSIKEDLDRYQERLEAIDKEVDEILPKIKNADKLFEIKGVGKATVLTFLSEVGEISRFDNPKEIQKLAGYAIVTNESCKHQGEKRISYRGRKRLRWALYQTALSVIGKNEEFRQIHQYYTTRKKNPLKGIQSVVAVACKMIRIFYKILTDGVSYDGTKMTQDIVRV

SEQ ID NO: 190236 - protein, 350 aa, unidentified
MVVVGADVHKRTHTFVAVDEVGRKVGEKVVAATTVGHRQAVRWARTQFGVELVWAVEDCRHLSARLERDLLSADQKVVRVPPKLMAQTRASARTRGKSDPIDALAVARAYLREPDLPVASHDEVSRELKLLVDRREDLVGQRTSTINRLLWRVHELDPGRAPKPASLDLTKHRRTLGDWLATQPGLVAELAREELADITRLTEAINALAKRISERVRAIAPALLAMPGCAELTAAKIIGETAGVTRFKSEAAFARHSGVAPIPVWSGNTAGRVRMTRSGNRQLNAALHRIAVTQIRLDGLGQAYYHHRLNTGDSGSEALRCLKRRLARVVFHHLHTDQQNRILPCQTAAA

SEQ ID NO: 190237 - protein, 401 aa, unidentified
MNAVGIDVSKGKSTVSILRPFGEIVYSPFDVNHSSSDINALIQLINSVEGESRIVMEYTGRYYEVLAHQLSEANLFVSVVNPKLIKDFDNDSLRKVKSDNADSVKIARYALDKWHNLQQYGDMEELRNQLKTMNRQFGFYMKHKTAMKNNLIGILDQTYPGVNTYFDSPARSDGSQKWVDFASTYWHVDCVRKMSLNAFIEHYQKWCKRRKYNFSKTKAEEIYEKAKELVPVLPKDDITKMIIKQAVDQLNNTSATVEKLRSLMDETASKLPEYPVVMQMKGVGPSLGPQLIAEIGDITRFHKKSALTAFAGIDPGVNESGSYEQKSVPTTKRGSADLRKTLFQIMDVLIKTAPIDDPVYQFLDKKRSQGKPYYVYMTAGANKFLRVYYGRVTEYLSTLSD

SEQ ID NO: 190238 - protein, 318 aa, unidentified
MRALRTHSAGVDVHKEIILVTTLIGAADEDPKEEVFECSTMTDDLIGMGRILLDKGIREVAMESTGIYWRPLYNVWTPMGINVTVGNAHHMKNVPGRKTDVKDSQWIAHLHRMGFIKPSFIPEPIFQRLRQLSRHRTNMVGDLSRVKNRVQKVLEDGNIKWSSIVSDTFGVAGVKILREIADGVTTAKTLAAHATTNIKRKEDAEKALKNYLTTEHCIVIKSLMNQYDFLMHEIRQIENEMSEKMVPYAHLIAELDKIPGIDKVLAMSILAEATTRMEAFPDERKFAAWAGVAPGNNESANKKKDQNVEKGIPISEKS

SEQ ID NO: 190239 - protein, 359 aa, unidentified
MNKLPKIDNFFNNVNLTADDDLFVGIDVHKKSYHVALFLNDAPATDFVMPSKKQQLIEKLKPAARALRNIAYETGPCGYALARHLKKADMPVCVAATSKIPRPAGQEDKTDRIDSKKLAQYAAKGLLKSVAIPTIKQEADRQLYRMRHRQVRNLAKVKTQIKSFLMMHDINEPEKLSHWSKKAVEQLRILPLTKTLRLSLDELLGDLDYYTCRVKALDKSIAEHLDKGLLARRMALLKTHPGVGIVVSCQFATELYHYRDFNSTRQVYKYLGLSPRIHQSGEHSERGSINKVSNSRLRSNLVQAAWRWVSVDVQAKKSYHRLLNNCGQIKQKAIIAMARKLSGHLWMMLIKDQPYDPAK

SEQ ID NO: 190240 - protein, 335 aa, unidentified
MNSVITNTQLSSLEGTRGQFNGSRASIKLGIDVHQDYYVVVKQEDGTNPKPAQRFRKETFLHWAAKLQREGGEIHAVYEACGFGFGLQRQLSALGIHCYVVCPQKLDERNKRVKTDGLDAKALCLKLDRFVQGNRDALALVRVPTEEEEQNRAIHRQREQLVKTRKVLEAQGRSLMVNHGMEPVQQWWKRRAFAQLSVPEWMKELLSQSQPILLLLEEKIHALTVQLQAVADPKQPRGFGALTSVVIDREVGNWHRFSNRRCVGSYTGLCPGEYSSGKTRLQSCVTKHGNPRLRAALVEAAWRLVRFQPDYRAVKKWRHLLAKGALAYARKPSSQ

SEQ ID NO: 190241 - protein, 345 aa, unidentified
MDKIIRIGMDTSKHVFQLHGVNAGEKPVLREKMRRKEMIDFFTTCPPTLVAIEACGGSHHWARLLASFGHEVKMIAPQLAKPYVKRNKNDAADAEGLCEAMSRPTMRFVPVKTADEQAALMLISVRTRLIANRTQLANAIRGYANEFGVSAAKGLAHIPMLLERIQADATVPELAQELFMSQAEEYAQLEKKIADVEAKVKAWQRNDERSRRLNTIPGIGPIGSALLIMKTPAPELFQSGRQFAAWIGLTPEDHSTGGKLRLGGITRAGDEALRAVLVAGATAVIHHARRSGKASQWLAELLRRKPPKLAAVALANKMARIAWKLMISGQTYSAQSGAALTGCAT

SEQ ID NO: 190242 - protein, 423 aa, unidentified
MMKLKYSICCGLDVHKNVIVATIVTTNKDGISEYLQKSFSTINSDIQRFHNWLIENNCYHVCMESTGKYWIPIFNYLENDIDVCLTHPKYVKAIKGKKTDKKDSKWIADLYKFDLVRCSFIPPKDFRQLRELSRYRFKLVCMKSSEKNRIQNCMTVSNVGIASVLSDPFGKTATEIISYLLEHTADSMDEKAVRKLIKKGAKSKADEIIEAIKGYTIETDQAKKLELARGHLEYLDDMITQTELELYVRIKPYYEFVEFVSTMPGMTELSSTIVLAETGVDMDIFDDAKHLCSWCGLSPANNESAGKKKSVRIAKAGDYLKPMMVQCALAAIKSKKKPYFAIKYGRIKKRRGHKKAIIAIARMMMVCIYHMVSEKKPFTPTDYEELMNPQNHVERVVLNENNVFAYLESLGYDSSKLVKRNDN

SEQ ID NO: 190243 - protein, 342 aa, unidentified
MQVNTIGFDLAKNVFQVHGIDADEKVVTRKQLRRGQVIGFFAALPPCLVGMEACATSHYWARELAKLGHEVRLMPAKDVKAYLKRNKNDAADAAAICEAVRRPTMRFVQVKSPEQQGALMQHRTRDLLIRQRTQLINALRAHLAELGIVAAQGGEGLKELLAIVADERDERLPPDARASVIVLARHLEGLQTMIGAIEKRIKLQHRTNETSQRIESVPGIGVIGATAIEATIADPTVFRSGRDFAAWIGLVPRQDSTGGKQKLGPISKQGDRYLRRIFIVGAHSVLRRAKQDPGKYPWLTQLLARRPFKVVAVALANKMARTAWALMVKGGTYRAPELAEAA

SEQ ID NO: 190244 - protein, 427 aa, unidentified
MTRISVGVSKNRSTVCIMDQDGKVIMRPFLVWHSTEELDFLADTLKRLNGEVRVIMESTSVYQYPIALQLKERGLFISIVNAYEMKQFANIDFRGGKTDKKDSRTIASYGISYWDKLVEWQIPKDTYFNLDLLNRTYMNAKKHRQIILQELQHYIDCAMPGMDKELHSLNLNTKKDFMLDFVEKFWHRDEIVNMTEAEFTEVFTAWAKEKGYRPGKGKAAKIYAIAKSCIPYYPANPTVKPILQCIVDKLSGVNRTLVTIVTQMIEEAKKLPEYQIVREMPGVGDPLAARFFGSAGDIRRFKNSKALVAYAGIDSPPDESGDFSSTHRHITKKGSKVFRDTGYEIMMALRAQKRTWEKVRKNAEVYDYMLRKEAEGKPPKVAKIAALNKFLRIIYARIKELYDNMALAERAKTKTRSKTRAKTKVTA

SEQ ID NO: 190245 - protein, 423 aa, unidentified
MSRLRPARNSHRGEPPCKTPFAITIGLDVGKTEHHACALDPTGKKIFDKPLPQDETKLRALFTTLLDHGRVLLVVDQPNTIGALPVAVARDAGCEVAYLPGLAMRKAADLYPGRAKTDTKDAFIIADTARTMPHTLRQVDHNSETLSALKVLSGFDEDLAHECTRALNRLRSLLTQIHPALERVFTGTTLSSELALNLLIKYAGPTGLATAGKTRVLRYARTHRYRNPGQLIDRIFTALEEQTVTVPATRAVESIIPRFAAQVVELKTQRATVAQEVEAMLADFPLSKVLMSMPGIGIKTAAQILLAIGDGSSFATASHLAAYAGIAPITRRSGSSIRGEYPSRAGNKRLKNALFYSAWIASTRDPASKTYYQRKRAEGKRHNAAIICLARRRCNVIYAMLRDGTPYQPPTPSPNPKPVTLAA

SEQ ID NO: 190246 - protein, 393 aa, unidentified
MICVGIDVAKDKYDCFILSSEGEVLADVFTIQNNAEGFDTLLQTIRRCSRPEDKIKAGLEATGHYSYNILGFLLNEGLDTYVINPLHTNLYRKSLSLRKTKTDRVDARTIAAMLMSDVDLKSYTDTAYHNEELKSLTRYRFDKVRERAKLKQSVSRLVTVLFPELEKLVSTLHMASVYALLSEFPGAKQVSEAHLTHLKAVLYDASKGRYGSDMATTLRDAARCSVGSVMSAKSLELRHTIRLIHELDAQIEDIEAAIQSMMDEIQSPITTIPGMGVRMGAMILAEIGDFSRFDSPDKILAYAGMSPSTYQSGQLSLSGAYSHMEKRGSRYLRYALYNATKYVCLWNPTFAAYLAKKRAEGKHYNVALSHATKKLVRLIYALEKSKRPYSTAA

SEQ ID NO: 190247 - protein, 457 aa, unidentified
MRQPKRSRKSRDLVPVHHAAAAIDIGATIHVAAVGPERDNEPVRTFRTFTDDLHRLADWFGGCGITTVVMESTGVYWIPIFEILEQRGFEVMVVNARDAKHVPGRKTDVSDAQWLQRLHEYGLLRASFRPQAEIAGLRAYLRQRERLLDYAAAHIQHMQKALTQMNLQLHHVVSDITGVTGMSIIRAIVAGERDPNVLASHRERGCHSSVETMCQALVGNYREEHVFALTQALELYDAYQTKVTACDKQIQAILTRLKQTAPSPANKLLPVRRRSRQPNAPAFDARAALHAILGVDLTRIDGLGPYLALKLVGECGTNLTAWPSAKHFTSWLALAPHNKISGGKMLSSKTRRTSNRAASLLRLAAGTVGRTDTALGAFYRRLSARVGKAKAITATARKIAVLFYNTLRHGMSYADPGATYYEDRYKQRVLSNLQRRAKSLGFVLREVAQEAAQEGVS

SEQ ID NO: 190248 - protein, 476 aa, unidentified
MVIPNKDPKPSPKKAANAKPPKAPKRRHNRSEAVPAPMGIINPNAAGIDVHSDNHVVCVPADRDPQPVRTFGANTADLHEIAAWLKKCGVTTVAMESTGVYWIPLFELLESEGFGVHLVEPGQLSRCGARPKTDVLDAQWIQRLHSYGLLRGSFRPPDSVLSLRGYWRQRQMQVRYAASHVQHMQKALEQMNVKLTEVVSDITGLTGMLIIDNILEGERDPTKLAKLRHERCHRTEAEIARALEGTWRPEHLFELRQARALFRFHHTQITECDQQIQAELAKLVNRAGTKGLTGKGHRRGRKHNDIRFDARLPLLQALGVDLTKIEGIDVGTALVALAETGGDVSRFPSEKHFSSWLGLCPRQHESNGTKRRTRRKGRHRLAIALRAAARSLARTNTPLGHFYRRIRSRIGGLGAVKATAHKLARLVYQMMKYGEEYVQTSMDEYAAKMQENVLRGLKRKALAMGYELAPLQTRPT

SEQ ID NO: 190249 - protein, 457 aa, unidentified
MEKGMSQYRLKSKELKVSELQKQLQHVNFNAAGIDVGSDRHLVAVPEGRDDVAVREFGAFTADLHALANWLSKCGVTTVAMESTGVYWIPVFELLERLGFEVKLVDARRVKNVSGRKSDVLDCQWLQQLHTYGLLAGAFRPSDEVCVLRGFMRQREMLVQASSMHIQHMQKALQQMNLLLHNVVTDITGMTGMKIIKAIIAGERNPHVLAKHRDYRCRSSAATIAKSLVGNYREEHLFALKQAVELYETYQAKVRECELAIAHYLSTQLNRTEAEPPASERTRRARDCMRGEVDMRVQLFKLTGVDLFSISGFGADTLLTLAGEVGFDMSAWKTEKHFTSWLSLCPGTNKSGGKVLTGKTKRSANRAAAAFRIAASCVGKSKTALGAFYRRIKARAGAPKAITATARKLAVLYYTMLKNGSSYVEVGQAAYEQRYRQRRFSVMQKQALAMGYQLVPV

SEQ ID NO: 190250 - protein, 270 aa, unidentified
MQVNTIGVDLAKNVFQVHGVDNAGKVVISRQLRRKQVIDFFSKIPPCLVGMEACGTAHHWAREVSKLGHTVRLMPPSYVKGYVKRSKNDAADAAAICEAVTRPSMRFVPIKSADQQALLMLHRTRDLLIRQRTQLINALRAHLAEFGLVAETGREGLAQLAAIITDESNREALPSAMKQALQAIVDQLAALELQTGALDRAIHAHHRANDMSCRLETVPGIGVIGATAIASTVTDPNGFKSGRDFAAWVGLVPRQHSTGGKERLGGISKQ

SEQ ID NO: 190251 - protein, 339 aa, unidentified
MTVKTVGLDLAKDVFQVHGISENGRVIFNKAIKRAKLLAFFETLPPCTVGMEACGSSHHWGRQLRQLGHDVKLMPAGYVKPYVKRGKNDAVDAEAICEAVRRPTMRFVDIKTEDQQAILAIHRTRDLAVRQRTQLANMIRSLLREFGHILPIGIEAVTAFAKRHLSGDHPDMPEIANGMLGIQCYQFIGLNERIDGYSKMIEQHALLNADARRLMRMPGIGPITASAIVATIGDAHQFRTGRDLAAWLGLTPLNKSSGGKERLGKITKQGDRYIRKLLVVGMTSRAVMAKRSPEKVDLWTAKIIADKPFRLATVAMANKAARAVWAMLTKKQEYRQPAF

SEQ ID NO: 190252 - protein, 426 aa, unidentified
MESVHRSCVGLDVHKKSVAACVRRLDSSGKVHKHLRQFGTMTGELEELVAWLKSHEVTHVAMESTGVYWKPIYNLLEERFEVLLVNAQHIKHVSGRKTDMKDCEWIAQLLQHGLLKASFIPERLQRDLRDLTRSRVKCVEQRTGVANRIHKVLQDANIKLSSVATEILGVSGRSMIRAIIAGEEDPEKLANLARQSLRGKIPQLKEALRGKVRDHHRFLLETLFEQLISTEETIEKYSKRIDELLGSEPFVERAEEDKPLPFGEATTLLRTMPGISRVAAHAILAETGTDMSQFPSAGHLCSWCGISAGNNESGGKQRSAKIPKGNRWLRRILVETALSAGRSKNTYLSAQYRRIASRRGRKKAAVAVAHSMLESIYHMLKRHVEYQDLGPHHFDTLEPDRLTRYLVKRLENLGHKVTLEPRAMSA

SEQ ID NO: 190253 - protein, 342 aa, unidentified
MSNVTTIGVDLAKNVFQIHGVDASGATVIRKRLRRRQVLAFFEKQPPCLVGMEACATAHHWAREITALGHEVRLMPPRYVKPYVKRNKNDAADAEGICEAVTRPTMRFVAVKSVDQQSVLMLHRTRELLVRQRTMLVNAVRAHLAEFGVVARVGLPHVKELLAVIVDKGDDRIPTLARTCLKGLARQLLSLEREIVAAEKRIHAWHRANDDSRRLETTPGIGPITASALTASITDPQVFKSGRMMAAWIGLVPRQNSTGGKERMGRISKQGDQYLRWLLVAGAMSVIKQAKRRGTADPWLAKIIADKPTKVAAVALANKNARIAWALLRHGGTYRKPATAAA

SEQ ID NO: 190254 - protein, 396 aa, unidentified
MPATTRHARVPALPESTTGQARLLYLALDLGERHWTLAFTVGRGQRPRVRTIPAGDLERLTTELAAARRRFGLPPEAQVVSCYEAGRDGFWLHRALLAAGVTNVVVDAASIEVPRRARRAKTDRLDARKLVTMLVRYIEGERPVWHVVHVPSEADEDRRHLERERETLVADQTGLVNRIQGLLATQGVRLALRGDVPAQLAAVRRWDGTPLPPELCARLEREWMRVEAVRTALRALTTTRHRRVTTPTPLAADTAAVHLTRRLAALGAVGETTAWLLATEMFSWREFRNRRQVGGFVGLTGTPDQSGDRMREQGLTRNGSVELRARVIELAWGWLRYQPASALSQWYRQRYGGGNARLRRIGIVAVARRLLIALWRYAMGGPPPAGAHLNDDAMVA

SEQ ID NO: 190255 - protein, 374 aa, unidentified
MDTIYIGVDFHARQQTICYLKTETGELVTCELKHQDKQKLRAFYAEFRGQVIVGLEASGYSPWFERLLEELGCEVWLGHATEIRRRARWRQKNDRRDAELILDLMLHDEFPRLHRPAVQSREVLRMLRYRQKLIKIRTMSKNSLQALALQAGLAKGSSLFTKDGQQQLGAAEMSPVMQWQREHWLQLLQPLNQQLLETMVWCKAQSKGDLCITRLRTHPGIGLLTSLCLVHTLQPVSRFRNTRKVAAYAGFDPVERSSAERKCFLGISKAGSRLLRYLLVEAAQTAVRKDEDLKRFYKRLADRRGRSKAKVAAARKLLIRAYIMLRDEIDYAEFRRRAVAARLARSIHRPNVPEVLIGQPASAERQEQTHCSEK

SEQ ID NO: 190256 - protein, 399 aa, unidentified
MQRVIGMDIHRTFAEVVFWEAGRLRPAGRIDMTRSGLEGFGRGLSKEDEVVVEATGNAMAVVRVLGPYVARVIIANPLQVKAIAHAHVKTDRIDAGVLASLRAAGFLPEVWLPDADTERRRRLVARRNQVVRHRTRIKNEVHAILQAHLIPPCPHADLFGRLGRSWLGRQELPDDEIAAIERHLRELDRLAEDIELLDREIAEEVIEDPSVKRLLTITGINIIVAAGLVAAIGDIRRFSSPQKLVSYVGLNPRVRQSGLGLAQHGRISKRGRSHARAMLVEAAWAASKAPGPLRSFFLRIRARRGHQVAAVAVARKLAVLCWHLLTKEADYQWARPALVAHKIRAMGLQAGLPTRKGNTRGEAYAYNIKELRNREIDVARPRRACLRTVRQPMAAAWPW

SEQ ID NO: 190257 - protein, 345 aa, unidentified
MAQVTTLGVDIAKNGVCVHGIDTQEHVIVQKRLARQKVLPFMAQLPPCLIGMEASGGAHYWAREFTKLGHTVKLMSPQFVKPYVQSQKNDPNDAAGICEAVARPRMRGVPVKSVDQQDMQALHRIRERQIKARTALINQIRGLLTAYGIVIPQRASQVRHKLPFILEDADNGLTATARAWLSALAEELKALDQRIATTDTQIEEVFQSDDACQRLAQLAGIGPLTATALVAAVGDATAFKNGRQFAAWLGLVPRQHSTGGKTVLLGMTKGGNGYLRTLLIHGARAVLRVVDRKTDPWSRWLQGVKARRGMHCASVAQANKTARVAWALLARGERYRPPASPRLAA

SEQ ID NO: 190258 - protein, 369 aa, unidentified
MSDCITMHVGLDVHKDSIEIATADVRGGEIRHVGRIGGDLPALDAALARLRCPVAGMQVVYEAGPCGYAIYRHLVARGIACAVVAPSLTPRRPAERIKTDRRDALKLARLSRAGELRAIRVPDTQDEAIRDLLRAREDTVRVQRNARHRLKALLLRQDVRYTGKTAWTPAHERWLARVRLPTPAQQIVFQEYVDSVHQATLRIARFDTVTGDLLPHWTRYPLVRELQALRGVRQLHAAMLIAEVGPFERFDSPRQLMGFLGLTPSESSSDSRRRQGAITKTGNAFARRALVEAAWQYRFPARVGTTIARRQGECSETARAIAWKAQVRLCARFRRLQARRMLSTKAVVAIARELSGFVWAIACAEAASH

SEQ ID NO: 190259 - protein, 310 aa, unidentified
MAQNIGVDISKDRLDVAVLETGEAFQESNDKAGWARLVARLAGRQIAAIGLEASGGYERGPIRALLKADLPVRRINPYRLRRFADALGIKAKNDKLDAGVIAQFVALLPTRPVEVDPKLERLAEQATARHQLSDELTRAQNQAEQVRDPVIKRLGKQRIAQITRQIALLDKLIAQAIAADPDLAHKDRLLRSVKGVGPVYSHTLLAFMPELGKLTRAQAGSLLGVAPFDHDSGKLKGQRCIWGGRQNVRDVAFMAALSASLHNPALRAFHQRLRAAGKPPKVALVAVMRKLITILNAILRDNVQWQSQPA

SEQ ID NO: 190260 - protein, 354 aa, unidentified
MKYFAGLDVSLEETAICVVDEVGRMIKEARAASEPDALHVTLASFNLSFERVGLEACSLTAWLHGELRSAGWPAICIESRHAKAAMGAMPNKTDRNDAHAIAQIMRTGWFKAVHVKTPICRSWRSLLVARRAVLNEMRTIENVVRAILRETGLKLGTPARKDFIVRARELIAGEQTLASMIEPLLEILGTMLREFARLTKQVVTIVRDEPICRRLMSAPGVGPLTALAFRATIDRPERFRKSRDVGAHLGLTPRRYQSGETDIQGHVSRCGDELVRTALYEAAHSLLIRSKKWSSLRAWGMKIAKHRGMARARVAVARKLATILHRMWIDNAEFRIGQEHNIAPTVKAIAGAAA

SEQ ID NO: 190261 - protein, 347 aa, unidentified
MRFYNRQHRHYCGIDLHVKTMYVCLLDPAGQVLVHRNVKSTREAFLEIVTPYRDDLVVAAECMFTWYWLADVCAAEGIAFVLGHALAMKAIHGGKAKNDKIDSHKIASLLRGGLLPQASVYPAAMRSTRDLLRRRLHLVRKRGELLAHIQNTRAQYDLPAFERHLAYPANRDGVSAHFADPSVRKSIDVDVALIDQYDTLIVDLECTIVREAKRHDADAFHRLRSVPGIGKVLALTILYEIHDVTRFDRVQEFASYARLVKCVKTSGGKKLGTGGAKMGNVHLKWAFSEAAVLFLRHTKDGKKILAGIERKHGKGKALSILAHKIGRAVLYMLSRGTVFSIERCLAA

SEQ ID NO: 190262 - protein, 341 aa, unidentified
MYRTKVGVDLAKNIIQVCTLHGKKVTSNVEMSTDEFSLWLAQSKPVTVAFEACSTSNYWYQQAIKSGHDARLISAKLVKAVRQNQKTDKNDALAIAQTLFLPEVSFINGKSIEQQQLQSIQRLRELAIKSQNASQKQIVSLLLELNIRLPNTQGGVLRGLEGVLEDGTNNLSDTFRATLSIAKVQLKNMISAIREYDKYLEQSIQSLPDCKKLLKLEGVGPVNAVNLYIALGANQSQPFKSGKNASACIGLTPIQHSSGGKEVMGTIGKYCKNGSLRSQLITGAMSVVIKVIKYGAKTKKELWLQGLMQRRGNRCAAVALANKTVRTAYSMLQNNTEYHAA

SEQ ID NO: 190263 - protein, 327 aa, unidentified
MNTIGIDVDSKYLVCQIRRNGKDYPNAQFANDAAGHRKFIKWATKHGKPARVCMEATGVYSLPFALALHTIPLIEVMVVNPKAIKHFATASLQRGKTDRMDAAIILEYLERMTFRRWQPPGNEILEIQHICRRVVQLNTELTRERNRHKAACRLGSYGRIVVNDTAVNIRHLERRITLLEQSSVGLIECIPDLSNQLSLLTSTTGIARKTGPRILAELATLPADMTGSQWVAHAGLDPRPYESGTSTHKPRRITKAGNRYLREALYFPALVASQKDPHVSAFYKQLIKRGKKPLQAIVAIMRKLLLAIWGMFKNHEKWDGNKFYKIA

SEQ ID NO: 190264 - protein, 367 aa, unidentified
MALKIVYKICCGIDVHKTFVVACVASTSDKGITSYESHRFSTYTSGLKTLLQWLIDRNCKDVCMESTGKYWIPVYNILEKGCSIVLAHPKYVKAILGKKTDKKDAKWIADLFKHDLVAGSFMPPSDIRQLRDLMRYRFKLTCFKSSEKNRLQNCLTVSNIQLGNVVSDTFGKSAQAILDKILENPADTSFDLEPLVFKSLKKKLPELRDAINGYITPEQAGKLKVIKTHYEDLESRKAELEELILALAAPYQQELAILQTAPGISSDFTAIGIIFEIGTNMEAFPSAKHLCSWAGLTPTNNESAGKKKSVRVSKAGCYIKPLLVQCANAVIKSTKHPEMRNRYLRLKKRRGHKKAILLENRSSSSRA

SEQ ID NO: 190265 - protein, 356 aa, unidentified
MKHYAGLDVSVKETSVCIVDETGRICRETKVPSHPDDLAQVLHDPAWRLERIGLEAGPLSQWLFSGLAEAGLPIVCIETRHTKAFLKAQVNKSDRNDARGIAQMMRVNLFRPVHVKTLTSQKRRALLTARKLLQEKAIAFENDIRGLLRNFGLKVGIVGAAKFDIRIRELLDCLPDLAEIIEPLLASRRKLREEFERLHRKLLSIVRDDGVCRRLMTIPGVGPVVALAYASTIDVPARFRNSKAVGASLGLTPVLHQSGESNRIGRVSLCGDGMMRTLLYEAAQVMLTNVHVKWSWLEAWAMNIAKRRGGRKAIVALARRLGVIMHRIWSDGTVFRWTRESIPAAVQDAIPERAMR

SEQ ID NO: 190266 - protein, 391 aa, unidentified
MVYVGIDVAKDKHDCFIVSSEGEVLQDVFTIPNTMTGFDDLFQRISAVSGSLDKVKVGLEATGHYSYNILGYLLYKGLLTFVINPLHTSLYRKSLSLRKTKTDKVDARTIASMLMSDVNLKSYTDTAYHNEELKSLTRYRFDKVKERAQLKQSISRLVTILFPELEKLVPTLHMVSIYALLSEYPGAEQVAVANLAHLKTLLSDASKGHYGREKAIEVRDAARCSIGSRMPAKSLELRHTIKLIRELDAEINEIESEIESIMDRLQSPILTIPGIGYRMGAMILAEIGDFSRFDSPDKILAYAGLSPSTYQSGQLTSSYSHMEKRGSRYLRYALFNATKFVCHWDPTFSDYLAKKRSEGKHYNVAISHAAKKLVRLIYALEKSRQPYNIAA

SEQ ID NO: 190267 - protein, 405 aa, unidentified
MNAVGIDVSKGKSAVTIRRPGDVVIMPPCDIPHTQSAINCLIEQLQNLDGDTKVCMEHTGRYYEPVATWLSDAGIFVSAVNPILIRDFGDDSLRTPKTDKADSKKIARYALDRWAKLKQYGNMDKTRNQLKTMNRQFGFYMAQKTAMKNNLIALLDQTYPGANDFFDSPARSDGSQKWVDFVHTYWHVDCVRSKSLNAFTEHYQNWCKRKGYNFSVGKAEKIYHLSADLIAVFSKDDNTKMLIRQAVAMLNNASETVESLRSQMNALAATLPEYPVVMDMNGVGSTLGPQLMAEIGDVTRFTHREALTAFAGVDPGKNDSGQHVQKSVKTSKKGSPYLRKALFQVMDSLIKRSPVDDPVYAFMDKKRAQGKPYYVYMTAGANKFLRIYYGRVKEYFATLPKNEEI

SEQ ID NO: 190268 - protein, 347 aa, unidentified
MLHAGLDLSRKKLDVCLLSDQGEHLDQFAVPPDVDSLRRLAGRIEEVHRQPVCAVIESMTGARIVHDTLEQQGWSVEIADAQKVKGLAPLACKTDKIDSQVLAVLSHRDLVPAIWLPDPSVREERELARFRLHLVKHKSALKCRIHSTLINFGKPCPVTDLFGLEGRRLLQRLQVPEPWRGNITASIELIDDLERQIVEINRRLKEGHAEHPYVPLLLTVPGIGWVLAFTIAAEIGEIERFPSPEKLAGYTGLCPRVNQSGEKDRRGPLTKHGPTYLRWALLEATMHALRHPAYAERYQRTKRRLGKQRGAKVAQVDLARRLAHAIWHMLSRKEKFAPRGAAFRLAA

SEQ ID NO: 190269 - protein, 356 aa, unidentified
MSEKLNSEIAVIGIDIGKNSFHLVGQDRRGRIVLRQKWSRGQVEARLANLPPCLIGMEACTGAHHLSRKLQALGHDARLMPAKYVRPYSKGEKNDYRDAEAIAEAVQRPTMKFVATKSADQLDLQALHRVRERLVGQRTGIINQIRAFLLERGIAVRQGLNFLRAELPAILAKRTDVLSPRMLHVIEDLAGDWRRLDERIDALSDEIMTLARQDKGCERLMTVPGIGPIISSAMVAAIGNGDAFSKGRDFGAWLGLVPKQMSTGDRTILGSISKRGNRYLRTLFVQAAWVVLVKIKPEGWERYGLKSWIEAAKQRLHRNVLAIALANKLARIAWAVLHKGRAFECVKTNATAPRPA

SEQ ID NO: 190270 - protein, 424 aa, unidentified
MNLTQNDRLNQVTFDSLVVGVDIGSQEHFARAFDWRGFEFSKRAFKFGNTNVGFLSFLRWLEEMLNKTGMKKIIVGCEPTGCYWLGFQKFLQDHDVLLVTVNPYSVKKCKELDDNSPEKSDLKDPKTIAGLVKDGRFSTSYLPTGVYAEIREAFVCREQIMKQHVRLSNQIQGWLQKYFPEYFECYKDWDSTSGLMVLEHAPLPQDIIRIGAGGINEIWRNAKVRAAGIKRAMTLVEAAQNSVGLNGGEAARLEIWILVNDYIAKAEQLKRLDEYLAQKVMEVPNVEKLLAIKGVGLSTVIGFVAEVGEIGRFTDPKQIQKLAGLEITKISSGKRKGQPGISKRGRCKLRRVMYESARSLIAWNPAFQDVFLYYRHRERRPLGGMQSKIAVACKAIRVFYVILQTGCDFDEERFRKDIIRPQVA

SEQ ID NO: 190271 - protein, 437 aa, unidentified
MGKEDEETTMSGKETVQAEPEFVAFVGIDWADQKHVWCLQKANSTQREAGELEHRPEAVEAWVGELCRRFGYGRITVAVEQVKGALVYMLRKYECLHLYPVPSTMSASMREALYPSGAKDDPRDADVLLELLVLHRDKLRRLKPDNEATRRVQNLVEERRKLVEEKTAQLNRLTGYLKVYFPQMLEWFAKLDSKLVCDFLERWPSLEELQKVPSAELKKFFRHRRGRHGELTEWRMHGIGQATPAIRDRAVIEAKQTVVQVIAQLLRTLLEGIATLERKIAEAAEVHPDFFIFESLPGAGAALAPRLLAAFGSQRDRYSRAEEVQKYSGIAPVTERSGKKKWVHFRWACSKFLRQSFHEWAGHSIAQSVWARAYYQRQRERGKEHHAAVRALAFKWIRIVFRCWQDRVAYDETRYLTVLAKRGSHLTSAFVDVAVSM

SEQ ID NO: 190272 - protein, 345 aa, unidentified
MDHFAGLDVSVKETSVCIVDDTGKIVREVKVASEPEALLAVLKNPAYHFKRIGLEAGPLSQWLFSALAEAGLPVVCVETRHMQAVLKAQINKTDRNDARGIAQMMRVGIYRPVHVKTLRSQKLRMLLTHRKLLQSKAIAIENDLRGTLRNFGLKVGIVGRVRFEARIKELVENLPDLAVLVEPLLLVRRTLREQTMILHRRLLAVVRDDEVCRRLMTIPGVGPVVALTYRATVDVPARFRKSRAVGAVFGLTCSKYQSGEIDMSGRISRCGDEMMRVMLYEAAQSMLRSKKWSWLKAWAMQIARRRGMKKAIVALARRLAVIMHRIWVDGSEFRWTRGQAAAAAA

SEQ ID NO: 190273 - protein, 423 aa, unidentified
MHWFRQFKGNAEKRRNILIVGIDIAKDKHHAFMGTVDGHSIRRRLIFENTLNGFSDLVSHAERHVKDESFKDVVFGVEPTSVYHKPLAEYLITMGYMVVYVTNNAIKKNRALLDGRWDKNDTKDAANVADLVSRGKCHFYDFADINLRDIRNLLSLRKRLKKQEHRLMSRIRNNLVAQYFPELDRAWYSCQHENLSIVRWCLWPEKITQIGFDEFCRLVTTRRRGIGQYQRLRHIYQVADVSIGCATGVSVDLEAKLLVENLQSTRDQILLVQQNIEAICQNYLEYEILQTIPGFGPFVSASVFGAIGYAQRFENAKQLLRLAGLDLSANRSGKGSKSAVPVISKIGKADLRYALYQAARVATGITTEFKAYFAYLMKGREKEKGIVTKLRVKVAAKMLVIAWAMMKTMRPYKPGLLRYDEPD

SEQ ID NO: 190274 - protein, 317 aa, unidentified
MAMQVDRLIVGADVAKAELVIHYDDRDEIVRLKNSKLEIRRWLKQQPLNTAIAVEATNVYHLDLVELAHSLGFEVYVIDGFQLSNYRKSVGGRVKTDPSDARLLSRFLRNEGEDLRPWSPPPAVYGKLQSLLRRRAALVNARTAMTQSWANEGLLKAAFNTFVKSIDRLDQLIQKKIKEVLREAGLHEQVARCQAVEGIGFLTATALVMAFMRGEFKSSDSYIAFLGMDLRVSDSGQKNGQRRLTKRGCSEIRRLLHNAAMAASRSAAWKEIYERYRNNGKATTQALVILARKLARVAFALMKNQDEYTSKGGKPAC

SEQ ID NO: 190275 - protein, 351 aa, unidentified
MTETNIGIDISKDHLDVHRLPGDERRRFDNSKAGHKALIHWIGETPARVVYEPTGRYHRTLERALAAAGMPIAKVNPRQARRFAEATGNLAKTDALDAAMLTRMGAVLSLEARPVPSAIINELRDLRTARNALIKDQVAAQTRAKAITLPLLKRQNAARLKQIEAQREAVDAAINALMQGDPDLAQRFAILCSIPGIAEVSAAMLLIEMPELGSLDEKQVAARKHFQAKWPHLAARKMRQDEGNFQAKWPHLAARKMRLTKSSTGLAPIARQSGNWKGKSFIRGGRQQVRQGLYMPALVAIRFNADLKTKYEQLIKAGKAPKQAITAIMRKLIILTNALLKKGRKWQTRVA

SEQ ID NO: 190276 - protein, 371 aa, unidentified
MKDTIKYVGLDVSKEKIAVAIADEGRDEPRYWGMISNTPEAVKKLMKKIGSSENLRVCYEAGPTGYALYRLLLTLNIHCTVIAPSLIPQKPGERIKTDRRDSVRLAQLYRAGELTSVYVPTPEDEALRDLVRCREDAKEDELRAKHRLSKFLLRYDIQPPSKGKKWTVRYYRWLDTLKFENSKLKVVFQEYYHQIKEIQQRVLRLEEEIRIQATEGIHAPTIQALQALRGVALITATSIVAEIGSFKRFSTPRQFMAYVGLVPSEYSSGESRRQGKITKTGNRHVRRLLVESAWSYRYQPSVKGELQKRQNGQSPTVQAISWKAQNRLHKKYFRLLSRGKESGKAITAVARELAGFIWAITQELDEVVPTA

SEQ ID NO: 190277 - protein, 388 aa, unidentified
MRRSNQDRIVGLDVHPDSFAGAILQGTDPWKARVVSTSTRVALPLLEKWALRHTREEDILVMEASGNAFCVAERLRALKRKVVILDSHRAGKVGKTYCATDRVDAIKIARIYLSALSPVVWQPDAKTRERREVFSAYQAVVKEGMRLKQQLKSMLNEHCVRLEKGFRLSHPSAIGRLLQRRKWSEAQKMLLSQLHAGLVGARVRRQRLRHYMAQEILAEKELLRLTRLCGINLITLYGLIAAIGEIKRFATARKLSAYFGLNPTVEQSGNYEGSGALKRHGRGAIRALLVQSAKKLLQVDNPLQNWGLALAARRGRNKAAVAIARKLCVAVWHVMQGHVIGAIERMDTLHTKLHKLATELGVPTIKQLGYETKEAFVQKKLYLLRSYA

SEQ ID NO: 190278 - protein, 496 aa, unidentified
MPDEERGPGSHAIAYLVALTPLRRFLNQSQPGWLTSIDGGKGTMSEPSNESKGTSLEIVHPNAAGIDIGNAAHYVAVPPDRDPQAVRRFECFTEDLKKMADWLIQCGIDTVAMQSTGVYWLPAYEILTERGLRVFLVNAAHTKNLPGRKSDVQECQWLMKLHTYGLLSNSFRPTEEICVLRTYWRQRDAQVKAASMTIQRMQKVLTEMNVQIANVISDISGVTGMAILDAILQGERDRYKLAELAHPRIQASKEEMAKSLEGNWRSELVFVLRQERDIYREYQKKIGECDEAIQAHLKTMEDKAEPGSKPGTPKAGKRAGGNAPRFDLRGELYRISGIDLTRIDGINIMVAQTILAEVGLDMSKWPTEAHFASWLGLCPNNQITGGKVYHRGSRHVENRAATAFRMAATSLWRSKTYLGAKFKRLRAQLGAPKAITAMAHNLARLVYRMLRYGKEYVDKGMEFYQQRYQQQQIKWIEKKARDLGLVITLAPAGTVN

SEQ ID NO: 190279 - protein, 410 aa, unidentified
MQKVKPIGTAKVYTIGVDVGRRFHLAVVLDERGEEVGSFRVVNRLKEIAEFGEEVMRKFAGRRRFCIEMVDGHAAPLVRELTARGEEVWLCHPYGVKRLRESLQGENKSDRIDARAIAEYALARGEGGRRLRHRDGYVRALRGYSRHLRRLREELVRVGQKIQAAVVGYCPDLLTSGSFPKPDSDTFGAILEHCLPLSKLKGKGLGRKLERWSRGRYGEEAACALLRAVQYLRIEPEEEAAVCLELKHLLARRRQLLKEIAEVEGKIEEMVAGSEAAQALCREMAGIGPLTAAFLMGEVGDITAFARESSFAHFCGVTPKVTQSGSRRQTALCQQSQKRIAGRLYITNLSAIRSEGADRVYFEKKRKETHAKKALIALGRHRVRKIYRILQEHSWRPVAPAPPCYAGRVA

SEQ ID NO: 190280 - protein, 418 aa, unidentified
MSKNAAETGRRPAQKPTEEDPMTTIDYIGFDVHKKTISFCAKAQDGRILDEGTILARRADLSAWAKARPRPWEGAMEATLFTGWIYDHLQPFAQKLKVAHPAMLKAIAASKKKNDRVDGRKISDLLRCDLLPECYMAPSWMRDLRRVLRYRNLVVREATRMKNRIAGLLMETGTPYNKKRLHGKRYFNELVGTLGNLQETPASVVELLKLSRGQLEMFETVQRRLVKALGENPALAERVERLQSIPGVGQILALTWALEIGEVERFGSIKRAASYCGLTSAERNSAGKEEHGPISKQRNKHLQTVLIEAAKLAPRWNKQLAALHAEELGKGNRNRATLEVARKLVAYLMAVDKSGKRFQIRSSDEGAPRRESVSGVTSGARARPGETRKAGVSHQRRSGAKKCVQDATKSTIGGGDDR

SEQ ID NO: 190281 - protein, 375 aa, unidentified
MSNHSEAFVAFDSSKLRNAVAIADSGRTGEIRFLGEIENSTTATAKLVRKLASKYERLTFCYEAGPTGYELYRQIKSLGQECIVVAPSLIPKKPGDRVKTNRRDAVSLAKLLRAGELTAVWVPDRHHEAMRDLTRARDTAVDDLRSKRQQISAFLLRQGLHYCAGKKTWSQAHLNWLARQKFEYLEHRLVFEEMMTAMRQAQERLERLEQAMRAAVPDWSLAHLVTALMAMRGIDLISAATFLAEIGDLSRFQSPCELMAYLGLVPSEDSTGDRIKRGPITKAGNRRARRTLVECSWSYQHPPRVGKDKQAKVAAAPQAVREIAWKAQSRLNRRYRALVRRGKLKTVAITAVAREFAGFIWAVAREATAARAAAK

SEQ ID NO: 190282 - protein, 413 aa, unidentified
MQCLAVPGDDAMRFFVGIDWASQTHAVCVLDPRGHLHWQGTVPHTSEGLAALLGRLRRFRRRGPVRVALERPSGLLVDTLVDAGFEVVPIHPNALKASRPRYSAAGGKSDPGDAFILADVLRTDGHRLRPLHPPSDDTRALRALVRGREDLVAQRVALANQLRALLERFWPGAAAIFADIASPIALAFLTRYPTPHRAARLGERRLAQFLGQHAYCGRRPVAELLARLHRAPASQVGQAEAEASGDIVRAIVAVLGPLVAHIQHLSAAIAAALPQHPDGRLVQSLPRSGAVNAAQILAELGDDRARFSTDDQLAAEAGLAPVTQASGKHHAVVFRWACNKRLRRALTTFADNSRHASRWAALVYQRARARGCRHPHAIRILARAWARVLWRCWQDRTPYDITRHRAAQAVAAA

SEQ ID NO: 190283 - protein, 318 aa, unidentified
MDKEKVYVGIDIAKERIDVAVHSSEQRWSFSNDDVGITKAVSCISGVCPVLVVLEATGNLQGSLVAALAVAGITPAVVNPRQVRDFAKATGRLAKTDVIDAHVIAHFAAAIQPTPRPLPDTQAQELKDILARRRQVSEMLTAERNRFGSGHKTVRDRIQAHITWLQQELDEIDVTSRRVIRESPVWREKDDLLQSVPGVGPIVSATLLAQLPELGTLNRRQIAALVGVAPFNRDSGTLRGKRTIWGGRSRVRAVLYMAAIVATRYNPIIRNFYERLCNAGKAKKVALTACMRKLLTILNAMSKHRVPWNYELPVVAVS

SEQ ID NO: 190284 - protein, 409 aa, unidentified
MTTNASSSVFAGLDWAVHTHAVCVIDASGAVRDRFEIAHDREGLAELMRRLARFGASVRVAIERPSGLVVDALVEAGHRVFPIHPNAVKASRPRYRSHGGKSDTSDAYLLADLLRTDGHRWTALSPQSDSIRALRALVRSRDDLVATRVALGNQLHSTLEAFWPGAACIFADITSPIGLAFLRRYPSPASAARLSQAGLLRFCHAQHYSGRRSPAELLARLHAAAQGLVAPLTADSMAQVVRSLVAVLDPLVAQISALSRRIERFVESLPDGQIIMSFPRAGRVCAAQILAELGDVRERFPTLERLVAEAGAAPVTYQSGKTRSVSFRWACNHRLRQAITCLADNSRHANAWARSIYAAARARGCDHPHATRILARAWLGVIWRAWTDRKPYDPALHNAALKLASGGRG

SEQ ID NO: 190285 - protein, 337 aa, unidentified
MQRYLGVDLHRTQFVVCTRLENGEQEVRQWRIGELPKFVEQLQSEDQIAVEAMGTTARFHDAVVGRVARVVVVNPHQFRVISESVKKTDRNDAQALALYLAKDLLPEVRMKPKQNRELMHLAETRDLLVKQRSALKGKINNLLAMQGIELKREALSSKIALERVLASPVSGMVQLELRVLVEQIRSLSESIAELDERLEEEGQQLPGYANLTSIKGIGSLSATVLLTVIGKISDFADENKLAAYLGLVPRIENSNESERSGRITKQGNKLARTALVQCGLVAKRYSPYLNQFYERIKQRRGGGKAKIALARKLVKIVYDTLKNQWVFEDFPSFTLAA

SEQ ID NO: 190286 - protein, 418 aa, unidentified
MDVHRDFVIACVASTDDKGVTEYSSKRFSTYSKGLRELAAWLDVHNCKDVCMESTGKYWFPVHNILEKSCHVVVSHPKFVKAIKGKKTDKKDAMWIADLFKHDLVRGSFIPPDAIRQLRDLCRYLQKLIWNTNSEKCRTRNCLTVSNLKLDDVFSNVFGKSASAIISYMLEHPGEEFDPTPFLHHRCKATPEQVKEAIDGSINPWQAEKLKIIREHVSDMGELKEKLEALILKLAEPYQRQIDLLLTVPGISDRITAIRILGEIGADMTVFESSKHLCSWAGLTPQNNESAGKKKTTRIGKAGQYIKPLLVECAIAACNHKSNKHPEILRKYQQIKKRRGKKKARVAIARRLLTAIYHMLLKDEPYQPQIAPAQEQVPKQRVMKAEEALAMLRRNGYILVDAQGAVVDGNPLVNPAPA

SEQ ID NO: 190287 - protein, 342 aa, unidentified
MQITTIGFDIAKNVFQVHGIDAAENVIVRKRLRRSQVLVFFKALPPCLIGMEACATAHYWARELTKLGHRVRLMPAKDVKAYVKRNKNDAADAEAICEAVRRPTMRFVQVKSAEQQGQLMQHRTRDLLMRQRTQLINALRAHVAELGIVAAKGDKGVKELLTIVADEKDTRLPIDARASVIVLAAQLQAVQTLIGSIEKRIKAQHRSNEASKRLETIPGIGVIGASAIAATVADPTVFRSGRDFAAWIGLVPRQDSTGGKQKLGPISKQGDRYVRRILVVGAHSVLRRAKQNPEKYPWLTQLLARRPFKVVAVALANKMARMAWALLAHGGTYRAPELAEAA

SEQ ID NO: 190288 - protein, 433 aa, unidentified
MLKINYMSTLFVGIDVSSKSNAAYAMDFEENKYISSSFGNNQPGADELAGMIAECMQNHKNLDTVIVCLESASVYSVHIANFLSTCETLMPYKPYVFVVNPKATSNYRKSYIGMEKTDPADAFLIADFARVGRTKKLEPWRGGQFIALKRLTRHRMHLSECITREKTYMVSNLYLKFSELQLIEGDDRPFGNLYGAVSSAVLTEFLSPQEIIDLSEEELLAFLAEKSRNRISDLSRTSGLLRKAARDSYRLDKCMYEPLNVSLASSFNCIQTYQKEIKLIGQAIEKCIHGMNPNAFLILKSIPGIGPVWASGILSEIGDITAFHSSDALAKYAGLYWLKNDSGSFTSEDNQISKAGNPYLRYYLGEAANSVRRYVPEYADYYAKKYAEVSKHQHKRALALTSRKFVRLVFGLLVKNQLYTGEKLDAELNIIQN

SEQ ID NO: 190289 - protein, 320 aa, unidentified
MPQPVPQYTVGVDVSKNTLDLYELATAHSSVIANDTGSIERWLDRWSGPLRLAMEPTNTYHLAIACAAQARGHQVYLVDPYRLSHYRAGIGQRVKADCQDAQLLARYLQHEAAELRLWEPLPPASQQFWRLLKRRATLVQTITRMQQSLTDLGALQADIDALIEQGRTTVKKIDQALLAQAKALGWAAQVRRCQGIPGVGPLTALAMVATYQRAQFRSDDAFIAFMGMDVRVRESGQFRGRRKLTKKGEPELRRLLFNAAMQGRRNPHWQPYYLALRERGLSSTAAFVALGRKIARLCFVLLRQEVDFHPNFHSGACIST

SEQ ID NO: 190290 - protein, 411 aa, unidentified
MRRVIGIDIHRTFGEVVFWEDGRLRRAGRIDMTRTALEGFGKSLLTSDEVVIEATANSMGVSRVLEPFVARVIIANPLQVKAIAQAHVKTDKIDAGTLASLQAAGYLPQIWTPDASTERKRRSAARRYQVVRHRTRLKNEVHSILHAHLIPKCPHADLFNARGRAWLSAQPLPEDERAAIDRHVRELDRLAEDLALFDREIAQDAIDDPAVNRLMTITGVNLTVAAGIVAAIGDIGRFKSPQKLVSYFGLNPRVRQSGLGAAHHGRISKIGRSHARAMLVEAAWAAAKAPGPLHAFFVRIRARRGHQIAAVAVARKLTVLCWHLLAKGEDYQWARPALVANKTRAMQLQAGHPQQKGSRRGPAYAYNIKALRDREMIIAAQAERSYERFVAQWKPRRPKEARGRLSSAGHK

SEQ ID NO: 190291 - protein, 331 aa, unidentified
MEILETLGVDISKKVIDTHLHKENLFQQFENNKKGFKQMVKWLEKSSKVPTENLLFAMEHTGIYCHSISLFLFEENFNYVILPGLEIKQSMGMTRGKNDKADAKRIALYAYEKRDRLKSNIPSSESIVKLKRLFSLRERMVKQRAGYKMSLKEQSEILSKSKNKLLLKIQKRLIKCLTKEIDILETEIETIISEDDNLKFQYDLIITIKGVGKQTALYMIVFTEGFRKFDSWRKFASYCGIAPFPNTSGSSIRGRTKVSHLANKKLKSLLDLCAKSSIQYNEEMKLYYQKRIALGKNKMSTINIIRNKILARIFAVINRKSPYVDLMKYAA

SEQ ID NO: 190292 - protein, 357 aa, unidentified
METAYDGRQVVGMDLHRRRSVLVRMTEDGRRLGTARITNSPQELRREIARAGKSPKVVLEATFGWYWAADTLAAAGAEVHLAHPLGVKAFTYRRVKNDERDAADLADLLRMARLPEAWIAPAEVRELRELTRYRHKLVHLRTSCKDQVHGVLAKLGVPVTCSDIFGTAGSAWLDGLGLPQPYAGKVTSLRHLTGELTAEVTMLSAVIADLLAHHRGYQVIQQLPGIGPVLAAVIIAEIGDVTRFKNPAQLCSWAGLTPRHRESDTKVARGHITKQGSRMLRWALIEAIQRAGADTVTGAVKDGIIARRGKEAKNIAKVAAARRLLTLVFYGLRDGQIRCLSQTSEDLPPVTPAQRAA

SEQ ID NO: 190293 - protein, 491 aa, unidentified
MSTRGKQSRKKKDPTLNARASKRHASTSHCQQGKGGQRRSELTIANPNAAAVDVGSQVHYAAVPEGRAEQSVRSFGAYSAQLEELMQWFKDCEIKTVAMESTGVYWIPLYQKLEEAGFEVLLVDARQVKHVPGRKSDVQDCQWLQQLHSYGLLRAAFRPEDSICRLRTLQRHRKNLVECGAMWIQHIQKALNEMNLHLHHVLTDISGQSGLAILDAILGGERDPKKLASLVDRRVKKSQAQIEAALRGDYRTELLFVVSQTLHDYRQMQQQIAQCDLNIEKQLATIAACTEPKHSPKQTPPPQQGAVVKARTRKRRPNDALELSLAGHLKRILGVDLTTIPGLNVLAVLSLISEIGTNMAKWRSEKAFVSWMGLSPNNKVSGERVLSSRTRKVNNRAATTLRLAAMLVGRTDTPLGSFYRRKRAHLGAPKAITATARKLGCLIYRLIKDGQTYQEPDLHTYELKYKNQILRSLRRRANGFGFDLVELPKAA

SEQ ID NO: 190294 - protein, 468 aa, unidentified
MVLTSFNHILRKNGSRWARFVRQIGAENLLIVGVDAAKYVHKAMICSFYGDIFIRPFEFDASESGFRKLVSKINEVKANQGTCEVVLGVEATGHYYEDIVLRSQASGFHVRVLNAVITAQERKYLLNRSKTDNLDLMVIVNAVISGRGTDSPLPTGSVHDLRKLTRARRELVNRRTAVQNSIRVHADHIFREFQGKYIWKNGKKEFVKPLSDFFGKASRYIMRHCLHPSDILALGDKGLRELSVKENLKLRDSSIQRLLKFAEDSISRPKEEVEIEQYLLNHQLDLLDLLDGQIKELERRIEDLFVQTEGAVILSVPGIGVITGAELYAEMGDISDFDHAGQLIKMAGTNPVVKQSGDRKPSFMSISKQGRRPFRNVVFLIGKSLSQNNPEMNVKYNEFRNRGKYPRQAYIALGNRMIRMAFSMIKNQSLYRTNHKYYDLNHEITKKLRNPNVKLFYESFVKPSSIVA

SEQ ID NO: 190295 - protein, 316 aa, unidentified
MQTPSVCVGIDVSKARLDVAEHPSGAQVSVIQDEQGMATVVQWVRQRQPTRIVVEATGGVERPLLWALVDAALPVIVVNPRPVRDCAKATGQLAKTDALNAPVLARFAAVIQPAVRALPDPQTQELAAVLTRRRQVLTMQRAEQNRLDRAPARVRKRIEVHLHWLRAELARLDADLDDMIQQSPVWREREDLLQSVPGIGPVMSRTVLAELPELGLLNRKQIAALVGVAPFNRDSGRLRGHRTIWGGRAPVRTALYMATLVATRWNPVIRPFYQRLRAAGKAPKVALVAAMRKLLTILTAMVHAGTPWRPVVAPNA

SEQ ID NO: 190296 - protein, 347 aa, unidentified
MNATRKAVVGVDTAKSVFQVYTVEQETGEVINKPIKRAQFLQWFANRAPCLVGMEACGGSQHWARQLQKMGHEVKLMSGKMVKGFVCGNKNDAADARAIYMAAKQPEVRSVAVKTEGQQAVLAMHRMRQQLVKVRTAQINELRGLLGEYGEVFGLGRKAFDTGIKEALGRLVDRLPGPLIDTLRDQWNELARLDERITRIEASLQAWMRQERGAMAISAIPGVGLLTATAAVAAMGDAKTFRSGREFAAWIGLVPGQTGSGGKVRLLGMSKRGDTYLRTLLIHGARAVLRHAKTPSEWLQQLSQRRPPNVVVVALANKIARTIWAVLAHDRAYDKDHVSMRPYAAAT

SEQ ID NO: 190297 - protein, 337 aa, unidentified
MSIIRIGLDTAKHVFQVHGVDQMERAVLRRRVGRNEVARFFAKLPPTRIGLEACGAAHYWARVLQALGHEVMLLPPQYIKPYVKRGKNDAIDAAAICEAMSRPGMRFVPLKSAEQQAALMLLKTRELLVKQRTMLVNAMRGHAAEFGVVAPKGVAKAGELLQRAHTAEAGVPALALEMLRLLASQVEALEAKLKVIEAKLMAVHKENPVSQCLATQPGIGPIGAVSFALKVTDPRAFRSGRHFAAWLGLTPKENATGGRSRPGRISRQGDEGLRRLLVLGATAAIQFAKPGRASPWLIQLLARRPKKLAAVALANKMARILWAMMVSGELYRRPQPV

SEQ ID NO: 190298 - protein, 339 aa, unidentified
MKYIPVGVDIAKHLMQVHFVDEHTGEIIDKQVKREKFLEYFSNREPCLIGMEACGGSHHWARELQKLGHKVRLLKGRFVKAFVMGNKNDVMDARAIWLAVQQPVKSVAVKSEEQQATLGLHRMRQQLVKFRTAQINALNGLLLEFGETTHKGRAALAKEVPEALERLKERLPLYLINMLDEQYQRITELDEHLDHIEKQLQAVARQNETCQRLLNIPGVGPLIATAAVATMGDASAFKSGREFAAFIGLVPRQTGSGGKIRLLGISKRGDKYLRTLFIHGARAAALLTKEPGPWITELKKRRPASVAIVAMANKLARTVWAIAAHGRKYDKNHVSIRPD

SEQ ID NO: 190299 - protein, 456 aa, unidentified
MRSTKKQGRSLSLECIEPNAAGIDVGATEIYVCVAAERDAKSVRCFATFTQDLQAMAAWLLGCGVVTVAMESTGVYWIPVYEVLEEAGLRVCLVNSRHVKHVPGRKSDVSDCQWLQYLHSVGLLQASFHPDSAIRALRALNRHRASLVEVASVHVQHMQKALTQMNLQIHHVLSDLTGKSGLAILDAIVAGQRDAEQLAELADGRIHADKETVVKSLVGHYRREHLFTLRQSLEAYRQYQKMLADCDREIERQMGQLPDHGDGGAPPSSVHKGGRGKRRKNQFHFDMGKELYRVLGTDLTDVPGLNALTVHTLVSEIGTDVSRFANAGAFASWLTLCPSNKKSGGKVLSSATRKSKSRAGKALRLAAQTLHKSRSYLGSYYRRLRARLGGPQAITAAAHKLARIVYHLISTRTAYDESVFAKEEQKHNLRHQHRLHKQAQALGFQLVPLPSPEVVH

SEQ ID NO: 190300 - protein, 461 aa, unidentified
MTLPPPASPEPRSDDKGTRRRAPVSDHSAVGSLASAWLLPLTTSRKATGLSLEDQPLFFVGIDWAAAEHAVCVLDRAGKKVTAFTIDHTAAGFARLATRLGKLGAVDRIPVAIERPDGRLVDALAEAGHPVLPVKPTAIKSWRENEVPSGAKSDPGDAYVIADYLRVRFHRLRPAAPLSSHTKALRAVVRTRGDLVETRVAATNQLAALLDAHWPGAKAIFAALESAIALAFLTAYPTAATAAGLTEHHLAQFCAQQGYSGKKPAAVLLARLRSAPAGTLDPVVCEGIRAAILAQVSIVTALNTAIKNLDRATAERMDTHPDGKTFQSFPRAGTINAAQILAEWGDAREVFDRPDAIAALAGITPVTKASGKHRSVSFRWACNKRLRVAITTFAANSRFASPWAADIYDRARASGKDHPHATRILARAWVRVMWRCWQNGTPYDPDLHGNARRPAETQVAA

SEQ ID NO: 190301 - protein, 375 aa, unidentified
MIATTRSEVSVNEPTLYVAFELGKKDWKLAMTSGFGVDPWLRTVAAGDLRAVEGALRQGRLRLGLPAQAPVVSCYEAGRDGFWIHRALTQLGIRNRVVDSASIEVNRRARRAKTDRLDALKLVRMLVRVCYGERRVWSEVRVPTVAEEAARQVSRERTALTQEQTRRINQMRGWLATWGCALPRHRSCGWWAAVRDWAGAPLPIEVQTRLARAEARWAVVERQLAELEDQQQAAVTAAAPASALRQLVQLKGVATTSASVLLDEGLVWRAFRNRRQIGGLLGFAPTPHDSGESTREQGISHAGNKRLQTISIQLAWSWVHWQPLSVLTQWYYQHFGTGKRARRIGIVAVARKLVIALWRYVTTGVVPAGAILKVT

SEQ ID NO: 190302 - protein, 403 aa, unidentified
MEQPTRFIGMDVHKDTIVVAVTAAGDVGKATPYGTFPNTAAAVEKLVRRLRQAGNGPLKFCYEAGPCGYGIHRTLTKLGVDCMVVAPSMIPRKSGDRQKNDKRDAASLAVLNRGGLLTAVWVPDAAHEAMRDLIRTRLAAVRAVRTARQQLSAFLLRHERIYRDGRKAWTKAHRGWLAEQSFAQPAQQIVLEENIEAVRLSERRRDRVDGYLRAQIPTWSLFPLVQNLGALRGLDTIASAGLAAAIGDPSRFASAPDFMAYLGLVPSEHSSGPKRRTGAITKSGDIHARTLLIEAAHSYRFPARIGRAKLVAVDAVPEAVREIAWKAQTRLCQRYRQMLGKGKLKPVVVTAIARELAGFVWSIACVTSDPHPKPATTTASEEVCPTRLTGRSRAPRRQTPKAD

SEQ ID NO: 190303 - protein, 459 aa, unidentified
MKIRLGIDIACRAAHQASCADDTGTLLWSGHRFRTDAGELEALWAKLPAAAAEVMVVMEPTRNAWVPLAAWFRRRGASVVLVPPEQAADLRAYYAKHTKTDRLDSRVLARLPVLHPEGLHLHQALGPGDPLKRAVKLRSSLVHRRTTCMQRLDALLELLGPGWVAAIGSDMTKTAFRFLAAYADPHQVKRLGRARLGRWFARCSRGAWGEERAGEVLAAAEATLALWGDDGLDYVALAEDIAVEARTALGLTEEIHELEERIAVLYRAADPDQLVRSAPGVGKVLAAQIRGRLGDPDRFTSLAAARSFSGLVPRHHASGTTDHDGGPTKQGDACLREALFMAADHARKVDPTLAARYQRLMTDTARHHTAALCTIAAVLLTRIVACLRSGQPYQLRDVDGQSITPSQGRAIVAQRYRIPPEIRAARRSLTTTQRPPRRDERAKQGVAKRSKATPAPTGA

SEQ ID NO: 190304 - protein, 424 aa, unidentified
MKVTYQTCCGVDVHKSFLVATIVKTTGGIEPSYQKKRFSTFNNSILEFKQWLLDNDCHDVCMESTGKYWVPVFNLLEDEINVVIANPKWVKAVKGNKDDAKDSKWIGDLFRLGLVKGSYIPCKKVRILREYTRYRYKLVSCRSSEKNRYQNALTVCNVALDSVVSDIFGKSSTSIIDYLLEHSGTSINHEEIASKLLRSLKSKEDAVIESVEGYQMTDAQKYRMRLVRAHMDYITAEINDVDKMIENMISSNPDFENAVQFLCTIPGVKRDSAITIISEIGTDMSQFSSSKRLCCWAGLTPGSNESAGKKKSVRITRAGVYLKPALVQCAHAAVKSDKSPYYKKKYDSLVKRRGKKRAIIAIARMILTAIYQMLSTGELWNPSDLYKINMPVALVEKQKAKAIKQAKKLLQQEGLLPPDEPLAS

SEQ ID NO: 190305 - protein, 385 aa, unidentified
MVYIGIDIAKFKHFASVVSSDGKVIVKPFPFENSRQGFMKLVEEIENFQDCLIGLESTGHYAENLIYFLYERGYQIGVINPIQTDALRDSNIRKTKTDKIDTKLIVECLMLKKYSLVNSQDINIIKLRRLSRFKLETIQQQTRIKTQLTACLDIVFPELANFFKGNLHLKVSYALLEKYSSAKAIAHCRIDGLTNLLYDNSKGHYNQEKAIQLKELAKQSIGLNNPAIELQIQCLIKQLRLYQKQIKDIDLAIMTLMELLNSPILTIPGVGYTLGAMIISEIGDIKRFSNPSKLLAFAGLDPVVKQSGNFQADQMKISKRGSTYLRYAIYRVAFLIIYNNETFHNYYISKRAQGKTHRVALGHVCNKLVRVIFKILTDETPFNLS

SEQ ID NO: 190306 - protein, 460 aa, unidentified
MNTKRSKSRNDGKMPMVHPNAAAIDVGATMHMAAVRADRAPEPVRSFGTFTADLHRLVDWFTECGVETVVMESTSVYWIPIFELLDARGFTVFLVNARDAKHVPGRKTDVSDAQWLQRLHSFGLLRASFRPKGQIAELRAYVRQRERLLEYAASHIQHMQKALMEMNLQLHHVVADITGTTGLRIIRAILAGERDPEALACLRHYSCHSSAETIAKALTGSYRAEHLFALEQALALYDAYHEKASACDARIEAVLKELSLHRGHGHGPAPRVSRRRNRTDQANALAFDVREALFALLGKDITTIDGLGPYLSLKLIAECGDDLSSWPSAKHFTSWLGLAPSNKISGGKMLSSRTRRSGGRAAALLRLAAVTVGRTDTALGAFYRRLSARIGKAKAVTATARKIAVLFYNAVRYGMDYVDPGASSYETRYRTRVVNNLHRRAKAFGFVLQPLEPKVVAAVS

SEQ ID NO: 190307 - protein, 356 aa, unidentified
MEQISRIGMDTSKQYFQLHGVNGAEEPILRKKLRRSEMVTFFEKLPATVVAVEACSGSHHWSRLLQSFGHEVRLLSPQHVKPYVKRGKNDASDAEALCEAMSRPTMRCVPTKTEEQQAALMLVTVRDRLVRRRTQLSNAIRGHAAEFGLTAHRGLSHINKLFERIATDEALPALARDVFTLLEDEYSHLQSELEAIEAKLLAWHRSNECSRRLAQIPGIGPIGASMLLMKTPAPSLFRSGRDFAAWIGLTPRDHSTGGKLKLGRISRAGDEILRSTLVQGATSLLFQVRLGKSKHATAWMQDMLERKPPKLVAIALANKIARIAWKLTLTGESYQNKAALPAMATAAKEISLQRCA

SEQ ID NO: 190308 - protein, 316 aa, unidentified
MSNEHNNIFIGIDVSKATLDISISGKHFKINNNIKAISAFIKAEIDSKKMAPSLVCLESTGGYENVAMQAFHEASIAIHKAHPNKVYNFAKFSNHFAKTDKLDAKLLEKYAKYVYLEGEEKGDIPATQATAELQALSSVQSALNDNLHAAQCRLKLLKGKAAKYTEKQIIFIKKQLESIEADIKKVIDSDDDLSQKREILKSFKGVGEKTTNILLAELSELGTLNKKEMASLVGVAPKLQHSGIKSPGGHIFGGRFYVRKALYMAALVAMRYNEKMKVFYQQLVQAGKPKKVALTAIMRKIAVCLNSMLKNNTFYA

SEQ ID NO: 190309 - protein, 375 aa, unidentified
MESLSSTQGETFVGLDVHRKTVVATAVDPLGHPVSQVTLGPSDAELAEYLRTLPGTKHVALEACPVWEHFFDAAESTGAAVVLSNPLKTRLIAEASLKTDRVDSEALATLLRLGALPTSYAPPSAIRDLRAQIRERVFYRRKTGAVLQRIYPALLRRGIEYEDGLLQHRRKREVLRDLHLSEVDRGLDALRYLEDLCRELDRGIEEACENSPEAQLLRTIPGVGPLTATAVVAFLTPIERFSSVEKLSSYVGLCPTTRQSADSIHYGSLKRDSNGLVRWLLVEASWHRRRVPRGAVARVANRVGRRRGKQQGTIAGTHTLLKIIYAMLKRKEAFRSQAPGPSTSVRIRRRHTTTARICVRRTALELPTANSPSAS

SEQ ID NO: 190310 - protein, 344 aa, unidentified
MTIIRIGLDTSKHVFQIHGVDENEKPELRRQIRRGEVAKFFAKLPPTRIGIEACGASHHWARLLRGLGHEVLLMPPQYIKAYVKRGKNDAIDAEAICEAMSRPTMRFVPVKTVEQQAALTMLGVRDLLVKQRTMLINAIRGHAAEFGITVAKEPALAKAGDHSKWSSCLQRVATGEGVPALAREMLAMLAGQLEAVNGKLKAIEARLMAWHRQDQTSQCLATIPGIGPISGVSFALKVPDVKAFRSGRHFAAWIGITPRENSTAGKHRPGKISREGDEDLRRLLVLGATAVIQQAKTGRASAWLLGLLARKPKKLAAVALANKMARIIWAMMMSGETYRRPKAA

SEQ ID NO: 190311 - protein, 337 aa, unidentified
MNTITVGLDIAKSIFQVHGVDAHNKPVLQRKLRRAEVLRFFAKIESCLVGIEACHSAHYWGRELGKLGHQVRLLPTQYVKPFVLGGKNDANDAAAICAAVRRPDMRWVAIKSAEQQSVQSLHRMRARLMQERTAKSNQIRSMFAEEGFVFATSIAQLRKGVVNLISREDDRLTPILRRLASMYLEQLDAVERWLAELHTQLQELFAQREDCRLLASVPGIGPVVATALVGTVGDPLQFKNGRQFAAWVGLTPRQRSSGGKTMLGGITKHGDTYLRTMFVQGAHAVMRFADRRTDRQALWLKQLRQRRHRNVAVIALANKIARIAWAVLARRGAYRAC

SEQ ID NO: 190312 - protein, 415 aa, unidentified
MGIQERWYAGVDWASESHHVRLIDDEGHDIGERIFEHAGQGLAEMVAWLLAASGATGPDQIHVAIEVPHGPVVETLIERGFAVHAINPKQMDRFRDRYSPAGAKDDSRDALVMASALRTDPHCLRRLAPCDPIVVELREWSRIAEDLVGERTGLTNRLRQQLWRYFPAFLDLDADLGAPWLLELWQAAPTPDKARRIRQTSVAAILKRNRIRRLDATQVLEILRQPPLAVAAGTAEAARAHIVTLIARIRLINRQIADAHHQLDALTARLGTDRETEPGQPTQRDADILASLPGIGRIVLATLLAEATDALQRRDYPALRSLTGVAPITKRSGRSLLVVRRYACHRRLANAVYHWARIASQRDRTSRAKYAALRSRGHSHGRALRSVADRLLNVACSMLRAGTTFEPSMAPQNAT

SEQ ID NO: 190313 - protein, 354 aa, unidentified
MPRKSNRLEAVATLGIDIGKNTFHLIGLDRKGAIVLRQKLSRGQVQARLANIPACLIGMEACVGAHHLSRQLKAHGHEARLMPARYVRPYSKGQKNDFRDAEAIAEAVLRPTMKFVATKTVEQLDLQGLHRVRERLVCQRTSVINQIRAFLLERGIAVRQGLRALRTEMPIVLAMTDKLSPRMIHMLEDLCTDWRYLDERIETVSNEIETLSEQDVGAKRLMTVPGIGPIISTATVAAIGSGDVFSKGRDFGAWLGLVPRQMSTGGRTVLGPISKRGNRYLRMLFVQAARAVLLRPQSWEKHGLKSWIEAAARRLNRFKLAIALANKIARMAWGVLHGGRNFEVRPMKPAPQAA

SEQ ID NO: 190314 - protein, 337 aa, unidentified
MLFCGIDLHSNNSVVVVSDESDKVLYSKRHPNSLGEILSALSPYRADLFGVVVESTFNWYWLVDGLQDAGYSIHLANTAAIKQYDGLKHRGDESDARHLAHILRLGLLPEGHIMPKASRAVRDLARKRMQLVQQRTVQILSIETLFDQQRGAHLSSNNIKKVTSDDIDSMGLDPMGALAIKANLAVMQALQTQIDAIEKELAKHCRSNPAFPLLKSVAGIGDVLATVILLETGNIDRFADVGNYASYCRCVGSIHESNGKKKGEGNTKNGNRYLAWAYVEAANFAIRYNESAKKFYQRKKAKRNGVVAIKAVAHKLARACFHMLKTGELFSVERCFT

SEQ ID NO: 190315 - protein, 291 aa, unidentified
MLSCSVVGLDASGRVVLRRRLQREGVVKLAADLPGCVMAMEACCGAHHLGRRLRDQGHQVRLMSPEYVRPYVKAQKNDDRDAEAIAEAATRPTMRFVELKSETQLDMQSLHRARDRLVGERTALINQLRAFLLERGVIVPQGLRKLELHLGTLLAGKEVSLSPRTRLLIEDQRAEWRDLDRRIEAFDEEFACEARADEAARLLLTIPGIGSLNATALVAAIGKAETFGRGRDLAAWLGLVPRQMTTGGKPKLLGISKRGNGYLRKMLIHGARAALPTLSKGETPLGGWLRG

SEQ ID NO: 190316 - protein, 427 aa, unidentified
MSEVESVKQEPQFAAFIGIDWADKKHAWSLRAVGSEKRERGELEHTPEAVEAWVGQLCQRFANRPIAVAVEQSRGALVFMLSKYEPLHLFPVPSTMSARMREALYPSGTKDDPRDADLLLDLLLQHRDKLRRLSPDTEATRLVQNLVEARRKLVDEKTAQTNRLTGHLKIYFPQMLDWFERLDTELVCALLERWPKLEELQKVPPAKLRTFFHKHHCRDEELIERRIVAIRQAIPAIRDRAVIEANSTLVNVIVQLIRSLMEGIANLDEKVKEAAAAHPDFFIFDSLPGAGAALAPRLLAAFGSQRERYGSAQEMQSYSGIAPVTESSGKKQWVHFRFACPKFLRQTFHEWAGHSIAYSVWARSYYQRLRSRGKGHHASVRALAFKWIRVVFRCWKDGVAYDESKYLASLARRGSPLSAIVATGKTL

SEQ ID NO: 190317 - protein, 429 aa, unidentified
MNSTRNKKIEQVKETTMIVGIDIGSEKHYFRAFNWRGIELTRKPVAFSNSMEGFNSFYNTIVELIQKSELEEALVGIEPTGHYWFDLGQFMGEKNIKFVMVNPHHVHKSKELDDNSPSKNDRKDPRVIAGLVRDGRYFYSYMPTGVYAELRNASNRRFVLVEEQTRAKNRLQKWIAVYFPEYKGIYTRIDAKGGLLVLKQAPTPEEIVRLGVEGIIKIWKDAKLRGNGHKKAMLILNAAMKSIGLKAGLTEARMEIQDLIEDYELQTKRLERVNDLIKELCQQIRYADKLLEIKGIGITTIAGFIAEVGDITRFDSAKELQKLAGLELVADSSGKHNGKTKISKRGRKRLRYLLFEAAISVVGKNKEFKEIHRYYTTREKNPLKKMQSLIAVACKLIRVFHVILTKGISYDASKMLKDIQHLGEPLKAA

SEQ ID NO: 190318 - protein, 407 aa, unidentified
MMDSRKRYIGLDVHKYYLIAFGVDEDLNVVLPARRVELSHIEAWMRKTLTKHDEIVLEMTTNTWQLYDELVEYAGSVMVVHPPHVALITRSQVMNDKIAASILARLLAKGLLVGIWIPPQEIREARGLVAQRQKMVRLATQAKNRLHAVIQRHHLVPPRGNPFGANNKEWWQSLSLGKLERLNLQSDLETLQFAEQQVKNLTEIMEGMAVEQEEIGRLLHLAGFGIVTAVTVWAAIGDIRRFAEPQKLVGYAGLGTRVHDSGMTSRSGKITKAGRRDLRTVLIEAANVVANSHPHWKTELARLEPRLGRNKAIVAIARKLLMAVWFVLQGKTDKYAEPEAVAQKMLKFAYAVGKANRPKGQTAAQFARIRMDTLGLGSELTSIPWGSKKPIPLPPSKLNKESAVPNK

SEQ ID NO: 190319 - protein, 408 aa, unidentified
MTVVGIDVSKGKSMVAAMKPGGELVAAPYEVRHSDIELSHLALDVLCIEPDTRFVMEATGRYHEPVAALLHSEGIFVSILNPLLIKQSGAGSLRKVKSDPKDALKIAKYGLDNWSTLREYTPMEAIRQQLKLCARQCDLYNKSIIMLTNNLISLSDKTFSGVNELFSSPEKADGHLKWVDFYRTFWHCDCINRMSPDAFEDRYKKWCKRKGYHFSADAADALYAASCGLYTTLPRDNNARLLVTVAADQLIALRENQSKLEAEMLNLCKQLPEYETVMAMYGVGKSTGPHLMAELGDVRRFPHRSSIVAFAGVDPGVVGSGKMQLSSVATSKRGSPQLRKALFQVVSTYVKCKPENEAVYQFYAKKRDEGKPFFVCTTAAANKFLRIYYARVKECLNAAESATQVEEG

SEQ ID NO: 190320 - protein, 411 aa, unidentified
MLKIVYPVCCGMDVHKSFIVACVATTDDKGITTYKSKRFSTFTGDLRRLAEWLSENNCRDVCMESTGKYWIPVYNILEATCRIVLAHPKYVRSIRGKKTDKKDAKWIADVFKHDLVSGSFIPPVDIRQLRDLVRYRWKLTNFTTGEKNRAQNCLTVSNIKLDDVFSDVFGKAASAITERLLESDEPFDVKPYLTKGLKASPEDIQAAVDGAMCANQAEKLRIIRSHMRSLELCKMNLESEILTVAEKYLTQIDLVMTVPGIQSFSAIAIISEIGVDMSVFPTSKHLCSWAGLTPQNDQSAGKKKTTRISRAGAYIKPLLVQCANAVVASKKHPEIRNRFLALKKRRGHKKALIAIARMLLTAIYNILKKSEPYNPELYRKSDRPPSHREVSVDEAIFILQRQGFLVTAPTG

SEQ ID NO: 190321 - protein, 432 aa, unidentified
MNPLSVSPEPPKVAAWVGLDWADQQHVICLYDVSTGQREIARLEQKPEAFEDWLSQLRQRFSEAKVAIVLEQARGAVIYALLSVDFLLLYPVNPQSLASYRKAYAPSGAKSDPADAVLLMEMVRHSPERFRPWKPDDADTRSLQLLTENRRQLVNQKTAFTNQLTSLLKNYYPQALELAGELDSLQACDFLKKWPTLETLQRAKPSQIRKLYLDYGRPRPEQLQQRLDKIRQARSLTTDPAVVLSGSMMVQVLVEQLRPLLGAIERFDRQIAAIFRKHPDRSLFECLPGAGAVLAPRLLAAFGADRDRFESAQQVQQLSGIAPVTEQSGKQRWVHWRWACSKFLRQSFHEFADHSRKWCRWAKALHQRLRRAGKGHHASVRVLAFKWIRILFHCWKTRTCYDEQIYLKSLEKRNPTLWAEIQALPPRKKKAA

SEQ ID NO: 190322 - protein, 360 aa, unidentified
MKKVSKQMRKMEAADKPELILGLDMGDRYSHYCLLNADSEMVEEGRIQSTEAALRRHFEGDPPMRIALECGTHSPWVSRLLTALGHQVIVANARKIPAITGSESKNDKNDAEKLARFAAYDPQLLSPLQHRSPERQLDLNLIHARSTLVRARTMIVNALRGLIKSAGGRLPACSTESLPARAPAAIPAALATVATPLIEQIALLNAQIGGMDKQIEKLAAKYPEIGLLRTVPGVGPIVAAAYVLTLDRPDAASNRSAGAFLGLRPAQSQSGDSDPQRRISKTGDRCLRSLLVQSAQYILGRFGPDSELRRWGLKLAATGGKRGKKRAVVAVARKLAVVLHAMWRNGECFQAFPQPATIAA

SEQ ID NO: 190323 - protein, 404 aa, unidentified
MGFPETMLRICPGLYDYSVRKNRPVLSDGGPDAVSGLRLSRLFRRSFAPDRRSFSCDKPDSIMDRLSPVTRICKVGFTMENELHFIGIDVAKAKLDVDILRPDGRHRCKKFDNTLSGHEALVRWLRGHDVNRAHVCMESTSTYMEDAAAHLSDAGYTVSIINPALSKAFAQSEGLRSKTDKVDARMLAHFCREKRPSAWEAPHPTERALKALVLRHQALTEMQTQEKNRRETAPEVQLASIDILLGCLSAELARIEKQIKDLTDNDPDMKRRRKLLNSIPGIGEKTAAVLLAYTGLRLKFGTARQFAAYAGLTPVQHESGSSVMRASRMSKAGPVQLRKALYMPALSALYHTAWGKAFRKRLEESGKRAKVIIGAMMRKLAQVAYGVLKSGKAFDASQHELLIA

SEQ ID NO: 190324 - protein, 394 aa, unidentified
MIYAGVDIAKTDHVIGAVDERGAETCRPMPFKNTEAGLERAVAWLEGLAGSPSDVVVGMEATGHYWMACYSFLVARGYSVAVINPMQVKAVRKLKKLDKVKNDRIDAWLIAETLRIGQYDETRLATDEVASLRSLSRYLQSLRGMAAELKTQCVCLMDAHFPEYAGIFSDMFGAGSRAVLSKSPLPFELARRRADSLARDIAEASRRGGKSAGYAARIKAAARSSIGVRLGQEAASFQVKSLIRQIEFADSECAKVEARVRALLDEVEPLVLTIPGVSYATGAQIVSEIGDVSRFRNASALVSYAGLNSSVSQSGQFDSGGGPITKHGSPYLRRALWLAANRARQYDPGLRAFYDKKRAEGKPHRVAVTAVARKLCHIAFAVMRDQVPYDPGRE

SEQ ID NO: 190325 - protein, 346 aa, unidentified
MNAITIGLDLAKSVFQVHGEDAAGRIVFQKQLRRGQVETFFAKHPRCIVAMEACGSAHYWARELRALGHDVRLIPAAYVKPFVRRNKTDARDAAAICAAMGRPDMRYVALKSVAQQAMRAVERGRELLVKQQTQLTNCVRGLLTELGIVAPQGRRGFAQLRALVEAGDARVPEPLAATLQELTRQLDSLAKSIAELEARIMAAAKQDPVMRRLCTIPGIGGLTAHAIVAAIGDGRRFDTARDFAAWAGLTPRESSSGGKTTKLGISRQGERRLRSLFALGASTIMRNARASEGRATPWQRGILARRPVKVAVLAQAAKTARIAWAVLVSGQAYRQPANPQTQTLAA

SEQ ID NO: 190326 - protein, 358 aa, unidentified
MNSKAFIPRDYDVFAGLDVDKKSISVTFTNHQGFIRSLRVPYSAEHLVNHVRKHFPDQKVAFAYEAGPTGYGLYDGIVAQDYPCLIASPSMIPKAPGQRVKTNRLDSRGISENLRGGQLKSIHVPAVLYRELRHLTQLRDTFVSAMVAMKQRIKSLLLMEGLEFPPAPAGSQWSFMVKAKLRKLPCSSTVRFELDQLLDSLEFNEKQIVKTTQQIRRLCQNDAELSQCIKYVMSVSGIGQIVASQLLARIGDWRELRNVRQLGAFLGLVPTENSTGERTDRGSITHSGDPRLRSKLIQAAWSAIRKDGELREFFRAVCQSHARPVASRVAIVAVARKLTVLISVVLMEQRPYGVRKKV

SEQ ID NO: 190327 - protein, 309 aa, unidentified
MDIIVGIDVSKDSLDVAVSPSGASFCVHNDHDGIEELVRRLKAEKADLVALEATGGFETLAVAKLAACDICVIVVNPAQVRAYASAIGRRAKTDTIDAALIAAFVVATKPQIRPLRDAQTQALSALVDRRRQIVQMIVAEENRLRMALDKTTHKSIKRLLAALRREMESIDADMDDHIRKSPLWRVREALLTSVPGVGRATARTLLAEMPELGSLDRRQIASLAGLAPWTRQSGKWKGKSFIGGGRTKVRAVLFMAALVASRHNPLLKEFRDRLVASGKPKIVAIVATMRKLLTILNAIIRENKPWQSA

SEQ ID NO: 190328 - protein, 346 aa, unidentified
MEYYAGIDVSLEYSSVCVVDTSGKIVRESKVASEPAALIAWFGGLGLALARIGLEAGPLSQWLYAAMREAGLAVELLETRHVHKAFEAMPVKSDRNDARGIAQLMRLGWFRPVHCKSMGAQETRTLLTARKLVQSKLRDVENSLRGILRGFGLKVGKTTDRSFSGRIRELAAGHPSLEMIAEALLAVHAVLLREFNGFEKQVRRMARSDAKAKLVMSTPCVGPIVALTYASAIDDPARFKSSKQVGAHFGMTPKKYQSGETDYTGRISRIGDASVRTALYEAAHIMLTKAVKGCSELKSWAMRIARRAGMSKAKVALARRLAVIMHRMLVDGTPFNPAAKQTAAAA

SEQ ID NO: 190329 - protein, 343 aa, unidentified
MQTITTIGLDIAKSVFQVHGVDGAGQVVIRRQLKRRSVLTFFQKLAPCLVGIEACASAHHWSRELQALGHTVRLMPPAYVKPYVKRQKNDATDAEAICEAVTRTNMRFVPTKTPDQQSGLVLHRTRHLFIRQQTAVINAMRGHLAEFGIVAPVGRHGVEELLNVVADPNDKRVPEIARACLSAFGAQLCRIKEQILEFDRLIRAWHRSNEMSMRLDEAPGVGPVLATAVVATVADPKSFRSGRNFSAWIGIVPKQHSSGGKNRLGNISKQGDRYLRGLFVTGALAVIRYAKIHGTKHRPWLTALLARRPTKVAAIALANKIARMVWAMMVKGERYKEPVALAA

SEQ ID NO: 190330 - protein, 370 aa, unidentified
MKYIGIDIHKKNCVATIVDKEGEILKTKTIPTNATEISRAFRRYKGSKAAIESNTVWEFVYEVLSKNGIDVILTNAVEVKAIAHAKVKTDKVDSKTLAHLLRTDMLPISYIAPIEVRELRKNVRGRMFLKKVSTGLKNQLYAELTRKGIEYPKGFLGTKMGRRKTLELLPIPRVKRKIDLLNIVEEEIAEYNHELLIPAYNADPNSQLLATIPGVGYYTALTVMAFIGRIDRFKNSDALVCYSGLVSRIRQTGEAVRMGPITKAGPTNLRWVMAEAVQCHLMHCKEKKTCNLCKFFHRINRRRGKQKATIATAAKMLRIMYWMLKLNQPYRPQGLDPGFFYAGKPRVMNEGGSVSERPKMSHHEGKPRIR

SEQ ID NO: 190331 - protein, 428 aa, unidentified
MSNQEIIRRGKFCQIVKEICGSNEYLVVGIDVAKDKHHAFMGTATGKSLFRKLIFENNIEGFSRLLKTGDEIKSQNGLSKIVYGLEPTGNYHKPLARHLIRCDCNVVLVTGQAVKKNRYLLDGRWDKNDTKDAANIADLVSRGRCLYYDCPSPSIIEIRSLLSLRRRLKKEEHGIRMRIRNNLLAQYFPEFDRFYSACESESLSIIKYFLYPDTISAMEFGEFFHLVARTRRGIAQTLRLRKIHGLAIESVGCPLGPAGEYESDLLVEKLNQVREQIKKTDNLIKDFCLEFDEYSYLLTIPGFGPYISARVLASIGDPFRFKNRKQLIKMAGYDLCAERSGRTSDKAIPVISKKGNGELRYALYQAAKVASSRVDLFRTSFTKLLRGRERERGIRTKMCVKLAAKMLVIAWTLMKKREPFDPAYLDIE

SEQ ID NO: 190332 - protein, 321 aa, unidentified
MSTVGIDIAKRKFDVALLSNDKFKVKVFENTPAGREEFLVWLKKHELTPENCRLAMEATSQYYEGVALSLFDAGYVVSVVNPLQIKAFGESMMLRQKTDQADAKLIAHFCEVNKPQPWQAPSKHVRELQRLLARLEAVQGMHVQEQNRQHESEGMALESIGRVIATLEAEIRQLQKKIRDHIDRHPDLREQDQLLKTIPGVGDGVASYALAWLRAERFHDAREAVAFVGLSPRHRQSGDSVNGKSRLSKLGHGRLRKILYFPAMSAMRYNAAAKDLVERLTASGKNKKVAIIAVMRKMVHWMVGVLKSGKPFDVNLALAKT

SEQ ID NO: 190333 - protein, 341 aa, unidentified
MENVALIGIALGKHSFHLHCQDKSGKALQRKKFTRTNLMQFLATCPSTVVVMEACAGAHFMARRISDIGHEAKLISSQFVRPFVKSNKNDFVDAEAICEAASRPSMWFVQPRTEVQQAMRALHRARESLIRDKVKTTNQINGFLLEFGISLPVGDTVIKRLPLVLVEHEIPEYLSRLLMKLHAHYLYLVEQITELESELNQSIKTDDATQRIMTIPGVGPITASLLSSQLGDGKQFSCSRDFAASTGLFAASTGLVPRQYSTGGKSTLLGISKRGDKKLRRLLVQCARSFMMRLEHQQGRLAEWVREQLSKKHSNVVACALANKLARIAWAITTNHNAYQA

SEQ ID NO: 190334 - protein, 355 aa, unidentified
MDSKKYIGMDVHKESISIAVMNGAGKIVMECVIETKASMILQFIDGLRGDLQVTFEEGTSAAWLYDLLKPHVTKLLVCDPRKNASMREGNQSDKIDARRLAELLRLNHLSPVYHGEHGLRSLKELVRSYLTITKDLVRVMTRVKAIYRSWAIPCTGKQVYAPRHRVEWLGKIGEPGVRRRAEFYYQQLDALRSVRQEVRRELLAEGKKHKAWKLLCQIPSIGPIRAAVLLGILQTPHRFRTKRQLWTYSGFGIETQSSADHRSVDGQLERVKKQSSIRGLNRNCNHDLKNLFKGAAIVASSKPGPFQEFYTALLTKGLRPEMARLTLARKIATIVLMVWTRGACFEAQHLKPQTA

SEQ ID NO: 190335 - protein, 346 aa, unidentified
MHTDRDVILTVDYHLEHLEVRWLNCATGQEQRRNITTDRRSIERLVAAALAEATPAGGKVIWIMESTTGWARVKELIGSRVEFVLANVLQMPLPPKAYRRKSDKIDTGRIQREFLNGSLPQSYQPSSWWRQVRRLVDSRQDLIVRQTAIKNWIRHFLYHETWTQRQSLWTQEGLRWLKRLSLSESDRLVLNLKLKDLEGIGALLSAVEARMQQVYDQWPEAQRIDAIRGIGMVTAVSILAHIGAIERFRDAEALISYAGLAPGHRQSDGTRHSGRIGGGGTDNHMRYLIIETMQWICQIPRYRPAFERAQAKHGTNVARIIVARQLLRSIYKMLRDQVPFNQMLVA

SEQ ID NO: 190336 - protein, 314 aa, unidentified
MSESGAVWIGIDVSKETLECAVRPSGERWSLPNADPAFAGLVERLHAAAPAGIVIEATGGLEVPVVSALGLAGLPVIVVNPRHVRDFARAAGKLAKTDRIDAALLALFGERMQPAPRPLRDEDTRGLEALVVRRRQLVEMVTAEQHRHSSAPSHAVRQRISKHIAWLQGELATIDQDLDRSVRRSALWRAKDDLLRSVPGVGRVLSLSVLTQLPELGTLNRKQIAALVGVAPLNRDSGTQRGRRCIWGGRAPLRAVRYMSALVATRHNPILATFYQRLLAAGKLKKVALVACMRKLLTILNAMLAANTRWHATI

SEQ ID NO: 190337 - protein, 325 aa, unidentified
MQAPHSSVVFLGIDISKAKFDVALAVNTKFRTKSFENTPKGFAALDAWLQKYDVQRVHACMEATHVYWEELALHLAKAGHHVAVINPALAKAHAQSLGLRTKTDAVDAKMLADFARSKQPPAWQAPSTTEQRLRALVLRHQALTDMQTQEKNRREGLREDVRESLETHLRWLAEELTRLEKAIKQTVDDDDDLRRKRDLLDSIPGLGKRSIPTLLAYGICGERFEHARQFVAFAGLNPCIRESGTSVRGRTRLSKMGHAPLRRALYMPAVVALSRTKWGIRFRERLKASKKIPMVIIGAMMRKLAQVAFGVIKSGRPFDPALHNT

SEQ ID NO: 190338 - protein, 280 aa, unidentified
MTSQFAGIDVGKDSLTGNLYGQDAVKDYPNTSRGIQRLSAWLQKHEVHLVVMEATGGYEKMASRQLERAGLAVAVVNPTYVRRFAQGMGTLAKTDPIDARMIAWYASVKQPKPRPPRSEAAEALSACVDRRDQLVAMRTMEKNRLGSAAAYVQSSITAHIESIDEQIKQMEVEIDHLIDQEEEWQSRIACMTSCKGVGKVTAVTLLAEMPELGHEKREQIAALAGVAPMNRDSGRKSGRRKTRGGRSKLRRVLFMAAMSAAKFNPVIHAFYQRLIEKGKT

SEQ ID NO: 190339 - protein, 387 aa, unidentified
MLIIGCDYHPGFQQIAFVDIETGELQERRLQHREEAEKFYRDLAAQGIKVRVGMEASGHTRWFERLLAELQYELWIGDAAVICTKRVRKQKTDRQDAQLILNLMLKDDFPQIWVPSWENRDLRQLLWHRHRMVQARTRIMNQLQAVAINEGLRCKKRLWRESGREQLEAFRLAPWASRRREDLLKLLDGLNPTIAGLMQAIEQEVERYPEAQRLQTHPGVGPLTALAFVLIIRKADRFQCGKQIASYLGLVPLEKSSGNQRRLGHITKQGNALLRFLLVEAAQVTARSLPEWRSKYVHLTMRRGRKIAKVAMARKLAVRLYWMMRKEWDYGKLTKFGSHARKPETGDGVKWNIEQLTGYPAPLYGGVRSSNHDRSCDRRDAWVGLSS

SEQ ID NO: 190340 - protein, 405 aa, unidentified
MAANQYQLWAGVDVGKEHHWVCVVDTAGAVVLSRKLANDEQPIRALIAEVDALGQRQVSWTVDLTMAYATLLLTVLADAGKSVRYLTGRAVWQASTTYRGGEAKTDAKDARVIADQSRMRGEDLPVLHPDDDLVTELRMLTAHRADLVADRTRTINRLRQQLIAVCPALERVAEVTSDRGWAVLLSRYQRPKAIRNSGVSRLTKILSDAGVRNAATIAGAAVEAAKTQTVRLPGEEVAAGLVADLAQGVIALDERIKTTDADIEGRFRRHPLAEVITSMPGIGFRLGAEFLAVVGDPALLGSADQLAAWAGLAPVSRDSGKRTGNLRTPKRYSRRLRRVMYMSALTAVRCDAQSRIYHQRKRDEGKRPIQATLCLARRRTNVLYALIRDNRTWQPDSPPLTKSAA

SEQ ID NO: 190341 - protein, 388 aa, unidentified
MQSLVAIGIDVHKDKFALVAVLLVLGAQDQILGEVEVGSDYKEILAFIESIKKKSLPGQTYSFVCGYEAGCLGYVLYHQLTAAGVRCVIMAPTTMLSEQGKRIKTDRRDARLIAKCLCCNGYHPVHVPSAEDEAVRDYLRMRDDHQGALKKLKQQINAFVIRHGYIYDGTKWTARHKSWLTDLQNKLGEMLAETLKEYMISYAEQESKIERFDAKIEEIARSDRYRKLVSKLVCFLGIKTHTALSLIVETGDFMRFAKGNIFAASLGLAPGEHSSGSGVHRLGITKAGNTHLRTLLIEAASGICKGAIGHKSKALKARQAGQDSEVIAYADKANTRLRSKYYRMVRRGKKRNVAVAAVARELACFIWGMATGNTGLTRQAQASAKAGV

SEQ ID NO: 190342 - protein, 313 aa, unidentified
MMASQDVFVGIDVSKDRLDVHVRPLGVGFAVGNEAAGYAALIARLRPLRVKRIVLEATGGYERALWLALSEAGLVAAVVNPRQVREFARAAGRLAKTDRLDAAVIAHFAETFAPRIGKPDPVADRLAEHVLYRRSLQDELVALEHQRRRLETPALRERADRRHAALRAEVKEIEREMRAIVDSEPAKKALFACLTALKGVGLVLACTLIANMRELGSLSRHQAAALIGVAPLNHDSGTRRGYRAIAGGRRRVRNVLYVATLSAVRSNPPIKEFYRRLSASGKPPKVALVACMRKMLVMLNGRVRDELAAATIP

SEQ ID NO: 190343 - protein, 341 aa, unidentified
MDKTYLRQAIGIDIGSKKLQCRHGVLDSQMKIHLKASKSISNHYGEFDQLQQWIERHSGKYSGVKLIFIIEATGTYHEELLYFLTDHGYSVCVTLPKSTRHFAKSLNTKTKNDRVDAGVLARMGLERELTPWQAPSDQMKTLKDLTRELEQLKKDRTRLLNQLHAKQKAYHVHEEIIERLKSRIAFIDEQIKLVETQIEEIISNSPDLQEPIDRIEKVQGLGRMTIISIIAETDGFALFKSIKQLSSYVGLDVVERQSGDFRGKTRISKAGNRRIRASLYFPAISASIHNPTLSKFYHRLLNKGKAKKLALTAVARKLLGIIYSLWKSGQEYQKDLNIKSL

SEQ ID NO: 190344 - protein, 332 aa, unidentified
MDVHRKSIGFCVKRADGTVVREGKIAATREAIGEWAGTFDAAWCCGLEATICSHWIYEQLKQYAGRVQMANPAKLKAISAAKRKNDALDARTLANLLRADLFPCCYVPPMEYESLRCYLRERALLVRARVMFKNKTAGLLIQRGVPYETKKLHGKRYFGALLEDHAGLVEDLKPLLKFNRTQIERLEEMDDVITRQLIHEPLLKERVQRLKAIDGVGDLTALCWAVEVGEPSRFPNERHAISYCGLCAAERESAGIQKRGPLSKQRNAFLQTTLIEAAHMAIAHNDKLRSIYDAQCQRGPKNRATLEVARRLVRWLLAIDRQYFAALKTAAA

SEQ ID NO: 190345 - protein, 344 aa, unidentified
MKVTTLGIDLAKNVFQLHGVNEFGKPVIKKQLKREQMTAFLVNLPPCLIGMEACGSAHYWARKLQGFGHTVKLMAPQFVKPYVKTNKNDAADAEAICEAVTRPNMRFVPIKNVEQQSVLALHTVRQGFVKARTAQANQIRGLLSEFGLIIPQGIGHIANRAPELLEDASNELPGAFRLLIQRLLDHLKGLDDQVKELESQIVRWHRQSELSSKLAGVPGIGPITASALVATIGDAKNFDNGRQVAAWLGLVPRQHSSGGKQNLLGISKRGDIYLRTLLIHGARSVIHWESRKPDSCSWVSGVLKRRNKNVAAVALANKNARIVWALLAHDREFRPDYVSTKAAT

SEQ ID NO: 190346 - protein, 390 aa, unidentified
MEARVVNNLSPAAAHDGAVRCLLAIELSKKSWVAAVNTPLSDKISLHKLKPCDWKELLQLIERIRKRIAQELKKPVEVISCYEAGYDGFWLHRLLEAQGVRNHVIDPASLQVDRRARRAKTDGIDVGKLLRSLMAYLRGEPRVWSVVRVPTIIEEDDRRLHRERSRLINERIQHVNRIKGLLAIHGIYDYEPMHPERIQRLERLRTADRHSLPLRLKAEILRELQRLELVLGMIQTIETERDAIVSAKSKSQQTSAKKIKHLVKLKSIGPEFATVLVGEVFYRTFNNRKQIGSYVGLTPSPFQSGSTSRDQGISKAGNTKARTTMIELAWLWLRNQPDSLLSVSFRERVGSRKGRIKRIAIVAMARQLLIALWRYLETGVVPEGAVLKCK

SEQ ID NO: 190347 - protein, 343 aa, unidentified
MKITMIGLDIAKSVFQAHGTDANGKCLLKRKLGRSEVASFFWKLERCQVVLEACGTSHHWARVIRDAGHDVKLIPPDMVKPFVKRGKKNDAVDAAAICLAALHPDTRFVPIKNEEQQSLLSLHSTRTLLVKQQTMLVNALRALAAEFGLIVPLGNSRLPDLLAKIETSPGLPDVMKQTVILLFEQYGKLSESIGCLERRIQAHARQDEDARRLLTIPGIGPMTASLIVASVTDIDTFESARHFAAWLGLVPRQHSSGGKVRLGRITKTGNREIRKLLVLGATSMSFRAQKWTGAAGAWLCKLLERRPTRLATVALANKLARIVWALLSRKEIYRPAGRNVAVI

SEQ ID NO: 190348 - protein, 382 aa, unidentified
MNRILKIGMDVHSTSYTLCAMEPVLGGEDRIFANIQVTSDYRNVIQFIDKLKEKLSSSDSYSIECGYEAGCLGYSLYHQLTKSGVKCTILAPTTMLTQQGKRVKTDKRDAVMIAQCLSYGGYHAVHVPADKDVSVKEYLRMRDDHKVALKKIKQQINAFCLRQGYFYAGNKWTIKHLNWLKKLVLSDLYRETLNEYLTSYEEQTAKIERFDKRIEELAEDSDYQENVKKLGCLLGIKTHTALSLIVETGDFKRFRKGNTYAAFLGLAPGESSSGEKINRTGITKAGNSHLRTLLIEAARGMCRGRIGYKSKVLRSRQDGNPTEVIAYADRGNTRMRSKYYRMIRHGKKDNVAVAAVARELACFIWGLMTNNITPKEEGTKAA

SEQ ID NO: 190349 - protein, 332 aa, unidentified
MVIIGCDLHTRYQVIAMLDTETGEMTTRRLEHESGEARRFYAELGKGSLIGIEATGYTQWFERLMAELGHELWVGDPAEIRARAVRRQKTDTRDAEHLLDLLLTKRFPRVWVPTPEERDLRQLLKHRDKLVKMRTSVQNQLHFLAMSQGVCRKRKLWSEQGRTELQGLKLGVWASQRRQELLDLLDRLGPRIEELERAVKAEAARRPEARELQQERGVGPVTALAFVLTVGPIQRFPRSRQLVSYLGLNPREHSSGGHQRLGHISKQGNEMLRWLLVEAGHTAARCDPQFRQQYAHLKFRRGGRIAKVAIARRLAVRLYWRLRRYAAGSHVQ

SEQ ID NO: 190350 - protein, 369 aa, unidentified
MADYREAFVGIDVAKLRNAIAIAEAGREGEVRFFGEVDASDTSMRRVIQRIAAKFDRIHLCYEAGPTGYGLYRLIRSLGHECTVVAPSLIPRKPGDRVKTNRRDALSLARLLRAGELTAVWVPDEDHEAMRDLVRARAAAVETLRVHRQQVSAFMLKHGRAYPRTKNWTMRYLRWLQEQRFDYPAHQIALQEMVEAVRVSKERVERLDRVIEEFIPNWSLAPIVRALQTLRGVDLIVAVTFATEVGDVSRFESPRQLMGYLGLVPGERSTGETIRRGGITKAGNGRVRHMLVESAWTYRHPPRIGKAKLYRLEQAPPKVREIAWKAQARLTTRYRKLVARGKRTTVVCTAIARELVGFMWAVAREARST

SEQ ID NO: 190351 - protein, 457 aa, unidentified
MSKRRKRAQSKSFNLQSLPKQLQHINLNAAGIDIGSERHMVAVPEGRAEVAVREFDAFTGDLVSLADWLQQCGVTTVAMESTGVYWIPLFELLERRGFEVKLVDARHVKNVTGRKSDILDCQWIQQLHTYGLLAGAFRPADELCVLRSYLRQREMLTQTASMHIQHMQKALQQMNLLLHNVVSDITGVTGMKIIKAILAGERDPQVLASHRDNKCHHDSATIAKSLVGNYRAEHIFALRQAVDLYEIYQTKIGDCDEAIVTQVSTQLDVTDEPPPPEQKRTSARDRQRGGVNVRDLLFQKSGVDLFAIPGLAADTLLVLSSEVGFDLSPWKTVKHFSSWLSLCPGTKISGGKVLSRRVKRNPNRAAQAFRMAAATLSRSKSALGAFYRRIKARSGGKQAITATAHKIARIYYALLTQGTTYVELGQQAYEQKYEARRLKHLMAQAKSLGFQLVPSQT

SEQ ID NO: 190352 - protein, 476 aa, unidentified
MARTSALNRKQRKALARQLRSDDPGLEVMHPQAAGIDIGNTAHSVAVRPDRDRESVRRFECFTADLHRLADWLQQCGVTTVAMQSTGVYWIPLYEILDARGVEVYLVNARHTRNLPGRKSDVQESQWLLKLHTSGLLRNSFHPPADIRVVRTFWRQRGDHVQAVSTCIQRMQKALTQMNIQLANVISDLSGWTGQRIVRAILAGERDPEKLATLRHPGIHATPETIAKSLAGTWQPDLLFVLQQEVTMYDADQERIAECDQHLEPHLKGVADKVTDTAADGEPSPTPPQRKLRSGPTRRRKAGSHAPQFDLGGELHRITGVDLTRIDGIDVGVAQTLISEVGLDMTRWKTEAHFASWLGLCPDNRISGDRVLHRGTRRVINRAATALRLAATTLLRSQSYLGAQYRRLRTRLGAPKAITAMAHKLARLVYRMLTGGQDYVDKGLQYYADRHREQQVQLLKKRAATLGLHIVEPSAA

SEQ ID NO: 190353 - protein, 394 aa, unidentified
MFSACVPPASDARSGSKEVWEQGPKSECPSREPMAQRSDRNGGACALMKVLIGVDPHKASLAVAALDEAKGELLERASFPQNRAGLSALERWARRFPERRWALENACGLGRHLAGRLAGSGESVVDVPPKLSARVRVLSSGNARKNDELDALAIALAASRNERLAQVDPEAASEVLRLLSERREDLVAERTRALNRLHGLLRDLLPGGVAGKLSAERAARILRSIRPKGGASVRLRRRLASEVLRDVRTLDRKIADLSGRIEAEVEASGTTLTEIFGVGPILAARIIGTVGDGASFPTKAHFASYSGTAPVEASSGEVVRHRLSLAGNRHLNYALHMVAVCQARSDARGGAYYRKKIAEGKSHKEALRCLKRRISDAVFRSLVADSQAPSSSAA

SEQ ID NO: 190354 - protein, 341 aa, unidentified
MRKTLFCGVDLHSNNAMYVITDQEDQQLFQRRLPNQLPVVLESLEPYRPRLKVVVVESTYNWYWLVDGLLDRKYPVVLANPGAIDQYDGIKEADDLTDAAFLARLARLGILPTGYIYPKEDRPVRDLLRRRSLVVRQRTSMILSLQNMALRQTGQNFGWRALRRLSDQERAEVLGDHDCLAFVTTEQLDLIELLSEKIKRFEAKVLEHAQLRPAYECLLTLPGVGVILALTIMLETGDIGRFATVGDYTSYRRCVRATHTSNGKSKGKNNGKNGNASLAWAFVEAVHPALRTCPPARSFYDTKVAKRNGALATKALAAKWSKAAYYMIKRQEPFDLARVFG

SEQ ID NO: 190355 - protein, 350 aa, unidentified
MTSLSEIVEVVIGVDTHVRTHSAAAVDARTGGVLGEVTVEATPEGYQALVDFAGAHSLLRAWAVEGTGGHGAGLARLLARRYELVLELDRPERARRRNGAKSDPLDAIRAAREALSRAKLGTPRSAGQRQALSVLLAARRSAVQAGTDAQRQLFSLVIAAPEQLRERFRGQTLPAMTRLAARLRISPRWDLETATTARVLRDLARRALELSDEAARHEKDILAIVRSWRPDLLAQPGIGPIIAATVLCAWSHPGRIRSEAAFAMLAGTAPLPANSGQTTTRYRLNRYGDRQLNRALHTAVLCRLRYDPTTQAYAKRRTTEGKTSREIKRCLKRYLARDLYRLLENPSQPT

SEQ ID NO: 190356 - protein, 337 aa, unidentified
MTIIRIGLDIAKHVFQVHGVDENEVTVLRRQLRRSEMKKFFNKLAPTRIGLEACGASHYWARLLRVLGHEVVLLPPQYIKPYVKRGKDDANDAEAICEAISRPGMRFVPMKSAESQAELMPLGGRDLLIKQRTAVINTIRGYAAEFGVIATKGPVKVAELLQQAHAEEASVPALALDMLRLLAAQLDALDAKLKLIETWLMALHRENPVSQCLASQPGIGPIGAVSFALRVTDPKSFRSGRHFAAWLGLTPKDNSSGGKRRQGRISRQGNEALRKLVVLGATAVIRFAKPGHGSPWLLNLLARKPKKFAAIALANKMARTLWAMMVSGEVYRRPLPA

SEQ ID NO: 190357 - protein, 343 aa, unidentified
MECYVGLDVSLKQTSICVVDQTGSVVREGVVDSDPEAISVYVRSKAPDAVRIGLETGPTSTWLWTELKQLGLPVICIDARHAKAVLKMQINKSDRNDAIGIARIMQTGWFKQVHVKDIDSHSVRALLASRALLVKIKRDLENHVRGLLKNLGLVIGRAKFNVFAVRAEELIEGRPELIAAIRPLLEARNAVEQQVSELDRKVMKLARHDAQVRRFMTAPGVGPITALAFKATIDDPARFARSRSVGAYVGLTSRRHASGEVDWTGRISKCGDAMLRSYLFEAAGVLLTRVPKWSSVKAWGVRLAKRNGLRKAKVAVARKLAVILHRMWIEGTEFNWSKKEIAA

SEQ ID NO: 190358 - protein, 345 aa, unidentified
MEKVSVIGIDLAKRSFQAHGAHADGGVAFRKKLSREKVLAFLAERSPCVVAMEACGSAHHWGRAIGDLGHEVRLIPPIYVKPFVKRQKNDAADAEAICEAASRPTMRFVAVKTEEQQARAMLFRTRDLLVRQRTQLINALRGHLAEHGVVAPQGPANVKELELAVEEEKTSLPLLVVELSRVFLEQIDVLSKKIGELEKATVHEAARGATSRRLLTMPGVGPITAMAIETFAPPMAVFKRGRDFAAWLGLVPRQHSTGGKQVLGKISKMGQRDIRRLLIIGATTIVRWACRKGAPEGTWLQRMLARKPRMLVAVALANKMARSIWAMLTKGENYGSSRILVADFC

SEQ ID NO: 190359 - protein, 356 aa, unidentified
MDVHKESFTLCSCKYEDEKASHYQRTPASYKNVLRYLAFLRTIYGEDTRFVCGYEAGCLGYSLYHQLENFNVECVILAPTTMLEQRSKRRIKTDKRDAEIIARSLAQHNYSPVHIPTETDNQTKEFIRMRDDHKAELKKIKQQILSFCLRQGYQYDGSGNWTAKHVKWLRSLKPAGLYKEILDEYLLTYTILTDKLNRLDQRIEELASKEEYKESVSKLTCFLGIKTHTALSVIVEVGDFQRFVSARKFAGYLGLVPGQHSSGDDRNGLGITKAGNTHVRRLLVESAQSYTRGKIGYKSRVLRSRQAGNSPQVINYADRANERLRRRYYKMVLKDGKKYNNCKNSNCKRCCLLYGE

SEQ ID NO: 190360 - protein, 316 aa, unidentified
MSDALYVGIDVAKDSFDVASDPAGLALALPNDPTGRQHLLDALRNHTVALTVMEATGGYERALVADLIGAGHKVVVANPRQVRDFARGIGQLAKTDRIDARVLAQFASMVKPEPRQKTSEQAVILAELVTRRRQLSDLMTQEANRLPHARHPDVRRSLKKSLRALERQIDDLDKIIRQNIDSDNGLRRKDEIVQSFKGVGPGTSAMLLSHLPELGRINRQQIAALAGLAPWDFKSGKWAGQSKIWGGRRPVRNMLYMAALSAIRSNEIIRKFYQRLQSQGKKFKVAITACMRKILVILNTLVRNDCLWSPSLPKNA

SEQ ID NO: 190361 - protein, 408 aa, unidentified
MNPLYVGIDVSSKSNVVYFMLPDGSKHSNFSVANSHTGSSQLVKRILSAMTSCSLDSVLIGLEATSVYGDNLVYFLREDAALARFNSKIHVLNPKQISKFKEAYNDLPKNDLIDSFVIADCLRFGRINKEVYIGDYRYKALQNLTRARYFAVSNLIKKKQRFMNILFKKYSTMTQEKVFSDTFSTTALAVYDEFESAEALSDMDLHELTAFIMEKGKNRFPNPDAVAKAIQKAARSSYRLPKTVNDSVNQVLSISITSIKALEAQIKEFDKAIAAQMELLPNVLISIPGIGPFFSAGIMAEIGDINRFHNQAQLAKYAGLAWKQHQSGDFEAQTTRLINSGNRFLKYYLCEAAFSLVRCDKEYSDFYHLKYKEVNRYQHKRALALTARKFVRLVFRLLKDNRLYTSAE

SEQ ID NO: 190362 - protein, 367 aa, unidentified
MKDSITVVGVDSHKNSMEIVTADNFGAMEVRRFGTIGGTMDALDRAVRKLANRGTTLHFIYEAGPCGYEIYRHLTRKGFSCQVVAPSKTPRKSGERIKNDRRDAETLARLGRAGELTAIHVPSEEDEAMRDLTRGREDAVRALRTARQQLGAFLLRYGKRYPGKKPWTPAHLRWLADLSLPHPSQQIVLQEYIATVREGTERTARMTDQILQLLPAWRWNPVVEALQALRGVAPLVAATTIAEIGDLSRFENPRRLMAYLGLVPSEDSSGETTYRGSITKTGNGHVRRALMEAAHAYAFPARVSRHLLKRQEGLPEPIRAIAWKAQVRLCGKFRRLTARGKLHNKAVTAIARELSGFMWAIAREVKV

SEQ ID NO: 190363 - protein, 316 aa, unidentified
MSESMSFVGIDVSKNVLDVHVLCTGEHWQVGNDQAGCASLVERLKPLGKTMLVVMEATNVFWRMAAAALAGAGLACAVVNPRQVRDFAKSMGILAKTDAIDAQVLAQFAQRVKPPVRALPDAQCQVAAELLARRAQLMGMRVAEKNRLGTANAKKVRKDIEATIAFLEKRLAALDEEIDRWLKSTPIDQSRADLLQSFTGIGQNAARSLLITLPELGRLSGKQIGALAGLAPFAKDSGGKRGQRHIAGGRAVVRAALYMPALSAITHNPVIRALYQRLVQAGKHHYVAITACMRKMLVILNAMLRSGKPWKASHHA

SEQ ID NO: 190364 - protein, 379 aa, unidentified
MRTVCGLDVHKDSIFVCILNESGILFQDKIGVLTPDLERLVNVLHEHSTIEVCMESTSIYWMPVWRILEPYFSLKLVNPYFIKQLPGKKSDVKDAEWIATCLLKDLIRGSYVPEDRIQQLRQYDRRIFDLNKDIVYKLTKLDAALQRCNIRISNYVSTTDGKSYQKVVEKISEGITDPKVLASLIHGRILNRVGKDIITASLTGVITQTDIDVIRQIRDEVTLAQKHRKECLDKMEELCNRWFPEQMKNLQTVPGVSLRSATSVIAELGTDMSSFEDAAHLVSWSGLKPRNDESAGKIKSRKITHGNKFLRKTLIECTWAASKTRGCFYNKFSYHQTVVRHKNKMKVQVAIARKMLTAIWFILHNNVPYRDYTPDIAAE

SEQ ID NO: 190365 - protein, 465 aa, unidentified
MGDGVRRRRRGQGQPRNRQIEELLEEVNLDAAGVDIGARAIVICVPKGRDPQGQSIRTFSTLMPQLREASEWMKQCGVRTVAMESTGVYWIPLYELLEEQGFEVYLVDARKVKNVSGRKKDETDAEWLQKLHRYGLLHRAFRPEGAICALREYQRQRSMLVRTASRHIQHMHKALSQMGVQLHHVLRDITGVTGQKIVRAILAGERDGKVLAKFRDANCKNSEQTIAQALEGNYREEHVFSLRQAVELYDYYQEKIRDCDREIERKLREFEPRTRVGGLPKGKHKKSGGNEPQFDLRSRLYEMTGVDLTQVPGLNSYTALQAVSETGMDMSRWTDPKHFTSWLTLSPNHRESGGKILGRSTQSSANRAAMVFRLGARALYNADNALGAFYRRIRARRGAPQAITATARKIAVIYYSMLRYGTEYVEKGQEWYDGQYRSRVERNLRRRAAALGFHLVPSEEVATCP

SEQ ID NO: 190366 - protein, 342 aa, unidentified
MQTMTTIGLDIAKSVFQVHGVDAGGQVIVRQLKRRYVLTFFQKLSPCLVGIEACGSAHHWSRELQALGHTVRLMPPAYVKPYVKRQKNDATDAEAICEAVTRVNMRFVPTKTAEQQSGLVLHRARHLFVRQQTSVINAIRAHLAEFGIVAPVGRHGVEELLDVVTDPNDKRVPDIARACLSALGDQLQSIKKHVLEFDRLIRAWHRSNEMSMRLEAAPGVGPVLATALVAAVADPKSFRSGRNFSAWIGMVPKQHSSGGKNRLGNISKQGDRYLRGLFVAGALSVIRYAKVHGTKHRPWLTALLTRRPTKVAAIALANKIARMVWAMMATGERYKEPVALAR

SEQ ID NO: 190367 - protein, 416 aa, unidentified
MNDPHWFVGFDWASEDHYVCLLDADGKCIAERGVKHDGAALSELCLWLMEKSGASPGCLAVGIEVPRGPVVEVLLERGFQVFAINPKQLDRFRDRFTMAGVKDDRLDALVLGSSLRTDRSAFRQLSVDDPLVIELRECSRIHDELVQERTRLANRLRGQLWRYYPQAIELTDDVAADWFLDLWEQVPTPEQAIRTSDKTVARILGNHRIRRLDAAAALRILRKPPLVVAPGTVPAATAHIRVIAAQVKLINQQIKQVGRRLDQLCAAIEDTAENSPGQICEQRDLEILRSCPGLGRITMATLLAEASEPLRKRDYHVLRVLTGSAPVTRRSGKSCIVLRRHACNKRLAQAVYHWARVAAQHDPRSRQRYAELRRRGHSHGRSLRTVGDRLLRVLCTLLQRQTPFDPDLISPSAAAA

SEQ ID NO: 190368 - protein, 453 aa, unidentified
MEKEKSISMPVINEHAAGIDVGSRSHYVAVGQSTGDVCKFSVYTKDNIALVEHLRANGIKTVAMESTGTYWQTLYSCLQEAGFEVVLSNNYIKDPQKKTDTKDARWLQRLHTLGLLKGAFIPAPDVERIRAYHRHRDNIVALASASQQRMQKALRLMNVRLDVALSDITGLSGMKMLEAIVNGERSGEKLASLAHGTVKKTQQEIADALQGQWKDEQLFILADELEAYKNYQKRMAECDKKIEKLLKEVVERLPVSNTQVARSAKRPHIKNRPHYDVEMLSMKYFGVNLLTVEGIGENTVMTFISEIGTDILKFPTKKNFTSWLRLAPNNKKTGDKTMSSRTPKGKSIMANAFRLAANTIAQRRSGVLKKIFVRIALKKGRAAAITALARRLAEIFWIMTVKKVPYKCMNEEEYSQKIKMTVIKNIRTKMKKLNINTEELIFEGMISNSLSSH

SEQ ID NO: 190369 - protein, 402 aa, unidentified
MPKKAQRFVGLDLHKYYLVATAVDAELNKIYGPQRVDLSDLKAWIKKAITPTDAIALEATANAWLVHDELLPYAHSVIIVHPAHVTLIVRAQVMNDKIAAMQLARLLAKGLLTGIWVPPQEIRDLRSLVAQRQKMSYMKTQAKCRLQSTLHRYQILPPEEGQPFAEDNLPWWQSLPLSELEKMRVESDLAALAFAREQISRFERRMAQWAAEQPEAARLMQITGIGLVSAVTILAAIGDIQRFPSANQLVGYSGLGARIHDSGLTTRTGRITKAGRKELRLALVESAQVAVLHDPRWKAELQRLAPRIGRNKAIVAIARKMLVLVWHLLTKKVPDNKVDPDRLGRKFLEFAYVMNAEERGKSAQEFVRERLDLVGVGAEMEFVRQGRKHIALPKSALSAKEK

SEQ ID NO: 190370 - protein, 346 aa, unidentified
MEHYVGLDVSLKLTSICIVDRTGKIEREGVVASDPEAIATFIKLHAPHVVRIGLETGATSTWLWTELNKIGLPVICIDARHAKAVLKMQINKSDRNDAAGIARIMQCGWYKEVCVKDLDSHATKALLVSRALLVKIKRDIENQIRGLLKNRGLVIGRAKMTMFAVRAAQLAEDRSELLAAVDPLLKARKAVEQQIVDLDRKVLRLARNNAQVRRFITAPGVGPVTALCFLATIDDPARFKKSRSVGAYAGLTTRRYASGEIDWTGRISKCGDKMLRSYLFEAANVLLTRVAKWSALKAWGIRLAKRSGLRKAKIAVARKLAVILHRMWIDGTEFKWSSKDAADQPA

SEQ ID NO: 190371 - protein, 526 aa, unidentified
MTNTQRWARGCKLDNRRWLDTATGGMCVTGHSIGIDLSINGAHDCTVLDATGQLVQRFTFDSSSAGLQKLEQCVRATDPSYGAPVVIMEPTGLAWFLPCLCLRAEHPEVKVVRIKTSKVAALRRYLKQDAKSDRLDSLTLAKMPLVDPEKLYAVDLPPAAVQGLDRMTRQRARLVASLTGRKNRLQALVGGYLPGLMAVAGKPWEPVFRAMLAVSLNPFTLTDQGTTALRKSLQDKRSREALPEARLPRLRIACEQLTRLYRPIIEAGLLTEAFFDNVQDEVARELRLMDVEEQEVKELEAAIARRYQEIVPEDHLRTIKGLGAVTAPTILAAVGTPQRFHSQAAFRGWTGVVAHASQSADSDAKGLPMTKAGPRRVKLALYQAAEIARQWDPQLAKIYYDQMVHKGKPHYKAIGAVMSHLASRIHAVLSEQRDYVLRDTDGREVTPQEARAIILTRYRVPAEIRAERRTRKRRKPDVSTGSHRGSTKRSSRRSSTSSHLHSTRSQEAHQTGAVAISHDGSAVARA

SEQ ID NO: 190372 - protein, 360 aa, unidentified
MNNLKYSVGIDVSMKDFACCLSVINDQQEVKVRATRKFTNGESGFKSLLEWVKKHAKEQIPIFYIMEATGVYHEQLAWFLYSKDQSVSILLPNKAKNYLKANGAKSKNDQIDARGLAQIGAEKKLDLWIPPSKDLYALRAYTRQHQSINEMYTATANQLHSIAHSQFQNKDIIKQLKSTLKLLEKHLKEMEGIMAKVIKSDPVLNGHYQNICSIKGLGILSFAVIAAETNGFALFDNAASLVSYAGYDVIENQSGKHTGRTKISKKGNSRIRRILHMPALCAVRDDQPQFKKLFERVYERTRIKMKGYVAVQKKLLVMMYYLWKKNEKYNPALNIIAPDYAGATRDEFQINETLSKPQKY

SEQ ID NO: 190373 - protein, 342 aa, unidentified
MKVLKQVLGIDVAQKELVVTLGRLNDDLSIELCAYSVFKNTDKGFLKLSQWIDKLTDKTTKVQYVMEATGVYHEKFAHYLDEKKEDLSIVLPNKISNYIRTLEIKTITDKTCSEAIARFGLERKLDNWKKPKAIYRTLKQLTRERRQITDERTIVKNQLHAEEAEAMPHISSIERSNRRIHFLNTLEKEIKNEIESSIKENKELSKDISNICTIPGISILTAATVIGETNGFELIRSKKQLTSYAGLDVKEKLSGTSVKGKPSISKRGNRYLRSCLHLPALSSIKWDDNFRDQYSRIVAKHGIKMKGCVAVQRKLLELIYILYKNKAVYDKDFESKKNSVPA

SEQ ID NO: 190374 - protein, 391 aa, unidentified
MTILVGIDVAKDKHDCFIMNSEGEVLANPFTILNNKEGFDFLYEKIQSVSSSDKIKVGLEATGHYSYNIIGFLLNKGLATFILNPLHTNLYRKSLSLRKTKTDKIDSKTIAMMLLSDVSLKSYSDISYHNEDLKSLTRYRFSKVEERAKLKTSLSRLAQILFPELEKLVPTLHMTSIYQLLEEFPSASAIASVHLTRLTNLLSKASKGHYDRETAIKIRDAAKNSIGSNMPAKSLELKHTIKLIRALTIDIDEIEAEISKMMDKIASPITTIPGIGRNMGAMIISEIGDFSRFSSPDKILAYAGFSPSTYQSGKVDNCYAHMEKRGSHYLRYALFQAAQLVCHWDSTFSAYLAKKRAEGKHYYIAISHVVKKLVRVIFHLEKTKQAFLKAS

SEQ ID NO: 190375 - protein, 372 aa, unidentified
MTSIIYVGMDVHTTNYTLCCYSMEDDRFFVEVQVEPDAKNILKNLARIEKQQSRDCRIVCGYEAGCLGYSLYHQLHAHGIDCVILAPTTMMTKPGKRIKTERRDARLISKCLAFHTYSPVYIPTEVDDAVKEYIRMRDDANSALTRVKQQIIAFCIRHGKIHDGKSYWTNKHLEWISSLDLGNKILSEVLQEYLIRYYQLREQVDMYDMRINELAQAEPYRQKVEKLGCFRGIAAHTALSFCVEVGDFRRFATAQQFASYLGLVPGECSSGDKQQYTGITKAGNSHLRKLLVETAQVFGRSATKSGKSVALKERQAKCDSLTVAYADKANARLKKKYFKIAMRSKVNIAKTAVAREMACFIWGMMTDNISCA

SEQ ID NO: 190376 - protein, 435 aa, unidentified
MSPRHTAKKKARSVSKTTPNLPVLHPHAAGIDIGAREIYVAVPPDRDPKPVRVFASFTEDLLALGDWLKSCGVLTVAMESTGVYWIPLFQILEAAGIEVCLVNARHCKNLPGRKTDVQDCQWLQYLHAVGLLRGSFRPSETVCAVRSLLRHRDGLVRAAATCVSRLHKALTQMNVQLQHVIADITGVTGLAILEAIRAGERDPIALAKLKDGRIRATAAVIAKSLRGDWRSEHRFTLRQWLDTWKHYQTQITDCDTAVARLLQNFTAKVDPVAQPLPPRTSTRKTPQKNEPRFEARAELYRTCGVDLTQVPGLQSGTALGLVAELGPDFADRFPTAKNFGSWLGLSPDNRITGGKIMSSATRDVKSRAATALRLAAQGLHKAQNYFGNLYRRWKARLGTPKAITAMAHKLARVLWHLFKYREAFNPEVFQQEEKK

SEQ ID NO: 190377 - protein, 350 aa, unidentified
MVVVGADVHKRTHTFVAVDEVGRKLAEKVVKATTTGHAEAVMWARERFGADVVWAIEDCRHLSARLERDLMGFDQSVVRVPPKLMAQTRASARTWGKSDPIDALAVARGYLREPDLPVASHDEVSRELKLLVDRREVLVAQRTATINRLLWRVHELDPDHAPKARSLDLAKHRRILGDWLATVPGLVAELARDELADITRLTETINALAKRIGQRVRDVAPALLSLPGCGELTAAKLVGETAGVTRFKSEAAFARHAGVAPVPVWSGNTAGRVRMTRSGNRQLNAALHRIAVTQIRLDGLGQAYYRKRIDAGDSKTEALRCLKRRLARVVFHHLHTDHHNRIQPCQPAAA

SEQ ID NO: 190378 - protein, 407 aa, unidentified
MRVIGLDVSRTVAEVAYLEEGRIRPGGRVELLHGPLARFAGTLLLSDHVVLEATGNTAAIVAALREHVERVVIANPLQVRLIAEARVKTDKIDAAVLAQLYASGFLPEVWIADDRTQALRRQVARRAQIVRQRTRLKNEIHSVLATHLIPRCTATDPFGKRGRAWLAEQPLPLDERTGVEQRLRELDRLGEDLAVIERALGSAVLEDESIKRLLTITGINATVAISLLAAIGDIHRFASAGKIVSYFGLNPRVRQSGLQPAQHGHISKVGRSHARAMLVEAAWAAAKAPGPLRSFFLRIRARRGMQIAAVATARKLATIVWHVLHDEEDYTWARPSLVAMKERALQLQAGASPKRGQKGIAAAYSVKALRDHERKVVENAEQAYTRFVGRWRVQGLKKKTSGAGVSS

SEQ ID NO: 190379 - protein, 360 aa, unidentified
MLYLGIDQHRKQLTVSIRNEAGDVVLRRQVSTEWGRVRAFFDELRRLAEPEDGFAAIVEICGFNDWLLKMLIEYGCRETVLIQVEKRSKKKTDRRDAHQLSGVLWVNRGRLLAGRRVEGVRRIQPPTDREAEDRQLTAVRQRMGRQRTRTINKIKHLLRKHNLEQQQPAKGLDTKRTRKWLATLSLGTIDRLEMDLLLAQWKMWDEQIEKLEAEIEKRQAENTTAAVVATIPGCAAYGSLALASRIGSIERFPRPASLANYWGLTPGCRNSGEATDRLGSITKQGSAMARFVLGHMVLHVLRRDGRMKAWYSRIKRRRGSKIARVAVMRRLATVIWHMVKHNEPYVVGGPPQRKLTARVA

SEQ ID NO: 190380 - protein, 355 aa, unidentified
MNSGKYIGLDVHQATICVAVMDAKGKVVMESILETKATTILEFLAGLRGTLSVTFEEGTWAAWLYDLLKPHVANLVVCNPRKNALLKHGNKSDKIDARKLANLLRLNDLEPVYHGESGVRMLRELARSYLTIVKDVSRVMSRLKAIYRSWAIPCAGRDVYYTRHRGEWLGKIPEAGSRRRAEQLYQQLDMLQPLRQQARRELLAESRKHTITAKLRQIPSLGPIRSALAVALIQTPHRFRTKRQLWTYSGLGLETRDSGEYHYVEGQVRRRKKQVFIRGLNKDHNHDLKGLFKAAATRASVRPGPFQDFYQRSLAKGIQPTMARLTLARKIAAITLTLWKKGENFDVEKLKAQAA

SEQ ID NO: 190381 - protein, 359 aa, unidentified
MRMASGSMPQGGTGVTIGVDTHGEIHVVAAFTSDLGRPLGHLEIPTTPAGYRQLLEWARGLGTDLRFGIEGTGSYGAGLARFLSDAGCSVIEVNRPNRQTRHARGKSDPVDAEAAARAVLSGEATGIAKADQDRVGMIRALRVARRSAVKTTTEIVNQMRALIVAAPAELREQLRELSRAPLIAAAAAMRPGPIITPTAAVKLALKGLAQRHQLLTHEIHILDAELGRLTARAAPKLYALMGVGTDVAGALLVAAGDNPERLRSEAAFARLCGVAPLPASSGKTTGRHRLSRGGDRQANSALWRIVMVRLAWHQPTKDYMARRTGEGLSKKDVVRCLKRYVAREVYSVLVPAVELATAA

SEQ ID NO: 190382 - protein, 347 aa, unidentified
MNFYNNTHPHYCGIDLHARVLYVCIIDQEGNTCVHQEIPADPDKLRQLLEPYIGNIVVGVECMHCWYWVSDFCEDIGVDFILGHALYMKAIHGGKAKNDRIDSYKIASLMRGGNFPLAYVYPKEMRATRDLLRRRMKLVRHGANLKAHVANTTSQYNLPPNKVNLKNVCAREQLRSTSPDPVVQRNIDFDMSMLEHYAKELSKLEWFLEQQAKQHNPVHYHILRSISGIGRILALTIIYEVGDIRRFDSVQKFASYARLVKCKAESAGKSYGTQGNKIGNAHLKWAFSEAAVLYLRGNKKAQKYLQKLQKRMTKAKAISVLAHKIGRCVYFMMKNEKVFDENRFITG

SEQ ID NO: 190383 - protein, 424 aa, unidentified
MKPLEQQAGHWLANRGFGALDWASEKHSVVVVNAQGQVLEDFEIEHSASGWKKFGERIKPYGSIPFAIETSQGAAVEQLLEAGMEVYPLNPKSAQAYRARKAPSGVKDDQLDAWSFADALRVDGQNWKPLRPESPLIKELRLLCRDEVGLIEQRSAFINQLRHALAEYYPTALEAFEDWGSISAWAFLERFPSAQLLEKAGKRQWEKFLHSRHLWRNESGPKRMELFAKATEFCGGEATTRAKSMLALSLVKMLFALEKQLSEYRQRIEALFESHPDHDLFGSLPGAGPKLAPRLFAEIGDDRGRFGGEAQNLQCLAGTAPVTKRSGKHRECHQRWACNKHLRHAVHLFSEHSITRCAWAEIYYKAHRAKDHSHARTLRCLGQRWLKIIHKMWMDRTPYNPELHHLNQIKHGSWVFELKTVNCK

SEQ ID NO: 190384 - protein, 341 aa, unidentified
MSELALVGIDLGKHTFHLHGQDVSGREMFRKKLSRVQMMRFFGNCPTCTVVMEACAGSHFVARELATMGHVTKLISPQFVRPFVKSNKNDFVDAEAICEAASRPSMRFVSPKTEAQQTLSVLHRMRESLVRDRTKTINQLHGFLLEFGISLPLGRTVIKRLPSVLAEHELPIRLSTLLQRLHAHFGYLDEQITQLDKQMAGQLADDDLGSRLLSMPGVGPITASLLAVEMGDGKQFGCSRDFAASIGLVPRQYSTGGRSNLKGISKRGDKSLRCLLVQCARVYMQRLDSQKGALADWVRSLLQRRHSNVVACALANKLARIAWAISAHHTVFEVGADAMAA

SEQ ID NO: 190385 - protein, 370 aa, unidentified
MKHTRFVGLDVHKDQISVAVAESGRGGAVEYLGQIANDPAAISTLCARLARPGVTLSFCYEAGPCGYGLHRQLISLGHRCEVVAPSLIPSKPGDRVKTDRRDATMLARLHRAGELTPVWVPDEAHEAMRDLIRLRSTVRQVLTRARQHLQGFLLRHGRSQGAARAWSVAYRRWLSTLAFDHPAQQITFQDYVDAVSDAERRLQRVEEQIHALLSEWTLRPVVDALQALRGIALINAVVLVSEVGDFTRFANPRQLMAYFGMVPGERSTGRTVRRGGITKTGNSHARRALVEGAWAYRMKPRVGRHKVDRIEALPKPVREIAWKAQVRLCARYRRLMALGKTANVVTVAIAREMVGFVWAIACSVQSPKAA

SEQ ID NO: 190386 - protein, 412 aa, unidentified
MVLPECRFYVGVDWAAETHAVCVLDGAGTITAEFTIAHTAEGFAELLTRLGRLDPDRGEVPVGIERPDGRLVDALLQAGHPVVPVSPNAIKTWRDGEVLSGAKSDAGDAAVIAEYLRLRAHRLRPATPYTAQTKALRTVVRTRDDIVEMRTTATNQLSALLDAHWPGAKEIFADVESPIALAFLTCYPTAAHAQRLGEKRMRAFCTKHGYSGRRTPAELLARLRAAPAGTTDEPLVEAVRDAVLALVAVLTALGTARKDLDRSVVAHLGEHPDAKIFTSLPRSGRINAAQVLAEWGDSRQAYDGPDAIAALAGACPVTTQSGKHRAVHFRWACNKRFRKAITCFADNSRHTSPWAAKIYTDALARGHDHPHAVRVLARAWIRVIYRCWVDGVPYDPVRHGNAAELAKHQTAA

SEQ ID NO: 190387 - protein, 412 aa, unidentified
MKVVHEICCGIDVHAKMLVACLLLANGEKEVRTFSTLTDDLLRLRDWLVAARATHVAIESTGVYWKPVFNILEDALSVMLINPEHAHALRGRKTDRKDAQWLADLLRHGLLKASFIPPPEIRELRELTRYRETLVREQSAVANRVQKVIESGNIKLAQVASDALGASGRAILRALADGETDPAKLASLAQRQLKEKVPRLRRALQGRLTLNQRFVLGELLGRWEELERADERVTQQIDQYLQARPQLARAREILDGIPGIGPRVAEVVVAEIGVQMQAVFESDAHLASWAGLCPGNKASGGKRLSGRTRKGNTYLRAALVQAAWGATRKKNCYLSSQYFRLVKRLGRKKALVAVAHSLLVIIYHVLQSDQSYTELGGDYFDRHHVEQQRDYYIRRLHMLGLRVNVEELPKAA

SEQ ID NO: 190388 - protein, 343 aa, unidentified
MGELTMVGVDLAKHVFQVHGAAADGTVLFRKKLSRAQFPRFMASLPPCVVAMEACGTSHYWGRELSRMGHNVRLIPPIYVKPFVKRHKNDAADAEAVTEAAMRPTMRTVAVKTVDQQARAMLFRTRELLVGQRTQLVNALRGHLGEHGIIIAKGISKLPRLVAIIADDKVPLPELVRVMCNVYLDQIVSINEKLDAIESRIASEAKQSSAAHRLRKMPGIGPVCALAVTTFAPAMESFRRGRDFAAWLGLVPRQHSSGGKQKLGRTSKMGQRDIRRLLIIGAMSVVHWKGRGGGRPGSWLARMLTKKKPKMLVAIALANKMARMIWAMLVRDEDYRNPKGAVC

SEQ ID NO: 190389 - protein, 372 aa, unidentified
MSNLRFVGLDVHAETIAVCVAEGSGEVRPLGTIPNRVESVRKLVGKLGPVKQLRTCYEAGPTGYVLYWQLASLGVACDVVAPTLVPVKAGDRVKTDRRDAEKLARCHRAGELTAVWVPDAEHEALRDLIRAREAGKKDQLRARHRLSKFLLRHGRRPPEGMTAWTKKYLEWVKSQVHFEQAALEATLSDYFHEVEHAAARIERLEKTIDEVVEKMPPQLRAVVEGLQALRGIAQLTAVTIVSEIGSFSRFEPRKLMGYSGLVSSEHSSGDRIQRGAITKTGNSHLRRVIVEAAWAYQHRPWLGGYLLKRQRALSLSEETKQIAWKAQNRLHTRYKKLSAGGKNKNQVVTAVGRELLGFIWSIAVQIEAGYKA

SEQ ID NO: 190390 - protein, 315 aa, unidentified
MTNIAVFVGVDVSKAQLDIAVRPEGRFAAANDEKGIATTVERLRQMQPTVVVLEATGGFEVPLASALATAGVPVVVVNPRQVRDFAKASGILAKTDLLDAQILAHFAAVMRPVPRPLPDEETQALGAIVARRRQLLEMLTAEKNRLSAAAKPVRKSLRAHISWLEREVAHTNNDLTRAIHASPVWREKDDLLQSTPGVGPVLSTTLLAGLPELGRLDRKQIAALVGVAPLNRDSGTLRGKRTVWGGRAHVRAVLYMAAVVATRYNPVIRTFYQRLCAAGKAKKVALTACMRKLLTILNAMMKHRTPWHAGVIQCG

SEQ ID NO: 190391 - protein, 347 aa, unidentified
MDVHKEAIVIAVLNEGGKLVMESVIETKASSILQFLHGLRGELHVTWEEGTWAAWLYDLLQPQVQHIVVCNPRRNALLKEGSKSDKVDARKLADLLRTGMLRPVYHGENGLRTLRELGRSYQTISKDLTRVMNRLKALYRGWGIPCAGTQVYAVRSREEWLSKIPQAGVRRRAELLYQQLDGLQALRREVRPEFLAESRKHKAAKLLRQIPCIGPIRAARLIGLMQTPHRFRSKRQLWTYSGLGIETHDSAQYRFVRGQLQLSKKPQQVRGLNRNHNHEMKEIFKSAATRASCGRGPFHDFYAGLLAKGMKPEMARLTLARKIAAITLTLWKKEERFDVEQLKTQAA

SEQ ID NO: 190392 - protein, 312 aa, unidentified
MTAIICGVDVSAETLDARIGRDGAWQRFANTAEGIAALAAFCRTNDVGLVVMEATGGYERQAFAQLWADDLPGAIVNPRSVRRFAEAMGTMEKTDRIDCGMISWYAETRRIQPTRPASTTQQRLKALVVRLRQLTELRVEQLNQRRLVTDPDALATFETILAAIARETRSLEAKIAAAIGADPVWVALDRAFRTIKGVADRTVARLMAEMPEIGTLSNKAVAKLAGLAPIARDSGKFIGKRPVRGGRESVRSILFIVAEVVRRHDPDFARFHQKLCAAGKPKKVVRVALARKLLVRLNAKARDARNELANAA

SEQ ID NO: 190393 - protein, 413 aa, unidentified
MPARNGSRNLVGGRNQNRAKEQDHAPLGTPGNPTVGPARSAHHVEVDGSQRHRMCQNEFVEVLNRGKPSVEQIIRIGMDTSKSVFQLHGVNAVERPILRKKLTRREMVKFFEKTPPTTIALEACGGSHHWARLLSSFGHEVKLIAPQLAKPYVKRGKNDAADAEALCEAMSRPTMRFVPMKTADQQAALMLVGMRERLIRNRTQLANAIRGFAMEFGIVAAKGMCRIEPLLERIAADQSLPELAHDLFGLHGQEYRELLCQIKTVDEKLMKLHRADECSKRLAEIPGVGPIGASLLLMKTPDPRMFKSGRDFAAWIGLTPKDHSTAGKVRLGVITRAGDEMLRSVLVVGATSLLQQVRTGRSRHASAWLMGLLQRKRPKLVAVALANKLARIAWKLMTSGESYRQVEGQAQTS

SEQ ID NO: 190394 - protein, 348 aa, unidentified
MRFYTKTHQHYCGIDLHARSMYLCILNGDGEILLHQNMKATPEAFLAAVAPFREDLVVCVECIFTWYWLTDLCADEGIHFVLGHALYMKAIHGGKAKNDKIDAHKIAVLLRGGMLPQAYVYPKRMRATRDLLRQRNHLMRKRADLLAHIHNTASQYNLPPLGTRVDRKGERDAIPYHFPDPVVRRSVELDLSLIGHYDGLLKSLEQELALMAKGHDAFAYHLLRSIPGVGRILTLALLYEIEDVNRFPRVQEFLSYARLIKAQKSSAGKIHGHSGKKIGNAHLKWAFSEAAVLFLRQNPDGQKFVARLAKKHGKGKALSILSARLGRAVYVMLRRREPFDAEKFLAST

SEQ ID NO: 190395 - protein, 346 aa, unidentified
MSEVAVYWIGIDVAKKTFDAALVRPGQHFPQTPLRTVPVETFSRDPQGVEKFLAWMRGLLKEAPEAPTVRAVMEATGVYSIELSAWLCQQCAMLAPAVVNPERTAAFMKSMGLRNKTDRLEARALAFYAAERRPAPYEPLTPEHRQLRELSRYRDALIAEKVAESNREEQRPEAKVVRVLQARREQQRKRDIAKMEAEMKRVIQSTPHLKKDLDLLVTIPGVAFITATVILAEMGDLRRFARARQATAFAGVTPRKIDSGTSVKGKAHLCKKGNPRVRQALYLAAMAAVRSKTQLRQTYERLLQHGKVPMVALGAIMRKLITIMRAILLTETEFQPLWKTPAKIPA

SEQ ID NO: 190396 - protein, 354 aa, unidentified
MSVLTYTKKRSPWQPAEGHRDGEVHFHGTIINKLDAVRRLVEKHARRHERLQFCYEAGPCGYAIYRQITKLGHDCTVVAPSLTPTRPGDRVKTDRRDAVTLARLHRAGELAAVWVPDEQHEAMRDLVRARTAAMESQRRARQQLQGFLLRHNRIFTGGRNWTKKHRRWLTTVRFDHPAHQIVLQDHIDGVDDAGARLARLEGQIADLLPQWSMAPVVEAIQAMRGVGFIVAVTVAAETGDLRRFDTPRQLMSHLGLVPSEYSSGRRTSRGGITKAGSKNARRVLIEGAWTYRSNARIGPAHQARLEGLPKTVREIAWNAQVRLCGRYRRLAARGKPQTVVTTAIARHVQPLETA

SEQ ID NO: 190397 - protein, 361 aa, unidentified
MDQISKLMKNQLKLLNFDGQNLFVGIDCHLKSWKITIYSEEFELKTFSQEPNSAKLAQHLHKNYPGAKFSCVYEAGFSGYWMQRELSECGIDCIIAHPADIPTMDREKKMKSDVIDSRKLCRSLRNREIEGIYVPSIELQEARSLVRARVKLVNDLTRVKNRIKFFLMFYGITISTQGNSWGKNYLAKLQQVQLKTEAGQRSLEFLLQELHFLIEKEKWIRKQIEQLSLTDPYQEDVRLLRTIPSVGLITAMTIMTEIGDIKRFKSLDKLCCYFGLIPTSHSSGEKNRIGRNTSRGNKYLKHLLIESAWIIIRKDPGLLLYYKKQIGVMESNKAIIKVARKLLNRIRFILTMKVEYQCGRP

SEQ ID NO: 190398 - protein, 351 aa, unidentified
MKKTTIATIPSTTIGLDLSDRTFQFCELNAAGEIVDEGQLRLNRATVLGYLSAKPAGARVALETGGHSTWVREVIEQVGHEAVVANARELEAVTGRSHRGDHHDARQLARLARLDTALLNPVELRRTVEQADLFVIRARAALVEARTMLINFARGITKTMGHRLPASTSHCFAERVRAAVPEALYPALLPLLAVLKQMESQIEDYDDKIEKLAAEQYPETRWLRQVPGVGTLTSLTFVLTVGQPERFAHSRDVGAFLGLVPQRRQSGEQDPHLPISKCGDRYLRRLLVQCAHVLMKRDGPDCALRQWAIQHAQNSRTMKKRTVVAVARKLAVLLHRLWRQQEVFQPFRKVA

SEQ ID NO: 190399 - protein, 350 aa, unidentified
MSSASVRTTISTIGLDLGKNTFHLVGLDRRGAIVLQQKLSRGQLERRLANVPRCLIGMEACSGSHYIGRRLTELGHDVRLIPAQYVKPFLKGHKNDYRDAEAIAEAVQRPTMRFVSIKTPEQMDLLALHRVRSRLVGQRTGLINQIRGFLIERGITVRQGVLPLRKALPDILSSSTGTLSPRVVHLIADLAQDWRRLDERIETVSTEIEALAQQDDSCQRLMTVPGVGPIISSAVVAAIGNGVGFKQGRDFGAWLGLVPKQESTGDRTILGKISKRGNKYLRTLFVQAAHVVLVRRPATARRGLWPWIEPASRRLHRNLLAIALANKLARIAWAVLARGHAYEPRVSSHA

SEQ ID NO: 190400 - protein, 338 aa, unidentified
MESFAGVDLHKRVSQLAVLRKERAPSQLRFPNDPATVEGILRRLPTRTHIALEATGSWWWFVEKARSMGHEVSLSHPKQTKAIASARLKSDKVDALMLARLLKADLLPTVWIPGDKEREIRELLTHRARVVRQRTAVINELQALYAKRNVDFGMIGQRARPVVSGAQDLSGYGPSIVERDVELLGVLNGQIRALDKELERIAKEDAQARRLTTIAGVGPLTAVAVCCWVGDIGRFADAKKLASYFGLAPRVSQSGERERHGHITKEGNRMVRSLLVEAALSGIRYSKGPARKHYLGVLKRRGKKIARVAAARKLLGAIFHMMKEGIDYSEYLRRSSAQ

SEQ ID NO: 190401 - protein, 322 aa, unidentified
METVYVGIDISKASFDVALPQAAGFRHLTLSNAETGFAQLLAVSGELLKTGTCVYVMEASGPYYLRLASFLHAKGVGVSVVNPLSVRRFCQMRLTRAKTDKKDAVLIACYGQSEHPALWQPEPAFIDELRQLQMVAHGLEKTRQQHRRQLEALEQASCQSQQAVSSLKQVVEGVAKELVLLEARMQQLAATHCASQQRLLESVPGLGKKSSLLLLTLTSGFTRFASAKQVIAYLGLSPRIYESGTSVKGKGRICKMGMARARAMLFMCSWSAIRCNKACRELYLRLRQKGKAHRLALIAVVNKLIRQAFAVVTKGQMYTECV

SEQ ID NO: 190402 - protein, 312 aa, unidentified
MVKSAVHVGIDVSQEYVDVVVSGNKSVMRVTANEGALETLGQQLLELEPKLILMEASGGFERLPLAILQAAGLPVAIVNPRQVRDFARSLGYLAKTDAIDACVLARFAAVLNPEPARVSEEAEEQLRALELRRRQLIGMIVAERNRLRTAPRTAGRIEGHLRWLEDEVKAIERDLQDLVESDPDMQAKAVILRSVPGIGPVLSFILLSGLPELGRLNRKEIAALVGVAPFNWDSGKFRGKRAVWGGRAHIRSALYMAALVASRSNPVIRALYERLCAAGKPKKVALVAAMRKLLITLNSMVRTQTNWLEATP

SEQ ID NO: 190403 - protein, 341 aa, unidentified
MDGQVRWAGVDLHKRMMSVCWLQENGKKQAASYRLDGPGLEEFKKCLNPGMEVALEATGNSGHISDQIRDYVKAVRLINPRQFKVISDSVKKTDKNDAETIADYLSKGMLPEIRQMSDEQRQLRSLINTRDKLVKLRSALKNKIHGIMNAQGIITEREMFSSEKALEKIKEASVGETARFEIGVIVEQIRSLGKTIKEIDEKIKEQGKTLPGQKNLTSITGIGELSSAIILNGIGDIKDFDDSKKLCAYAGMAPRVSNSSDTVHHGHITKRGNKILRTTIVQVTLISIKYNDYLKSFYLRLKQKKGSGKAIIATSRKMLEIIYNTLKNDWVFKNFNKYELA

SEQ ID NO: 190404 - protein, 331 aa, unidentified
MRSRLYNHTVAETIVAKHVEKITLGIDVAKDACVAHVWETTESRNVPNQPESIVAYLKSFQGPVRIAIEPTSHYHRDWVELALARGFEVYLVNPRQLVHYREAVNQRNKTDPQDAWLLARFLKHEARQLRPYQPQDAQAQALWSLLKRRAKVVEARKQLQQSFREIQLSAQALFTQFKHLLARIDQRIHRTIQALGWNDDYQRCLSIPGIGPLNAVALVAAYHRGAFASSEAFVAFIGMDVRVRESGGYKGKRKLTKRGEAEIRRLLYCATQPACCYPPFRAYYLKQIEKGLSKIAAKVILARKLARIAFALMQNQMMFIKKQEKILACVP

SEQ ID NO: 190405 - protein, 341 aa, unidentified
MSAIGIDTHKATLAACRVDVLGAAAAEATFDNDPAGHRRLLAWIQEADPAVVVGIEGSASFGAAAARFLVEAGVAVREVPPQLTRRERARTRRLGKSDPDDALAIARVTAREADLPPVRTADRTLDLQLLVEAREDVVVEMTRVRNRLHADLRSLQPGYGTRAANLVAVRHQRSVGRLLRPLAGVQAELARRRLARLRALGLEERSLTTRIAALVAGHPLLGLPGVGPLVTAKLVGEVGDVRRFRSADALAALAGVAPIPASSGQTQRLRLNRGGNRQLNRVFHMIALTQAAHHPPAQAYLARKRAEGKTRREALRCLKRRLVRPVFGLLQAGAHPADLAA

SEQ ID NO: 190406 - protein, 448 aa, unidentified
MSKIKTKNEKVKRISQLPVINTSVAGIDVSDTEMMVAYPISSEELEIRTFGCFTDDLHSIAECLKGKGVTSVAMESTGVYWVALFLLLQEYGFEVYLVNAKHVKNVTGRKDDESDAEWIQKLHSCGLLRASFQPDNMTRTLRSMVRHRKNLVRTSVSYINRMQKAMELMNLKLHTIISDIDGKTGMLIIEAILSGERDPEVLADLRDKRIKASREDIIKSLKGYWTTEHLFELKQCYQLYCTHRNMIEECDKVLEKQLLEYIAWKDNGVIPEIPKSRRKVSSKHKVSFNLTSHLKKILEVDVTTVFGISEISALTIMSEVGTDMNKWKNEHHFTSWLGLAPNTKISGGKKISSRIIKKRHHAGQAFRMCASSLYGSKTALGDYFRRIKSKAGAGKATVATARKLAIIYYKMVSNKEAFNPKSLNDYQEKYRQKKINQLKRKIALLEAA

SEQ ID NO: 190407 - protein, 465 aa, unidentified
MKSKTAKTKKQSKKVTLDTTWKPLNLHAAGVDIGSREHWACVPPEATPDNVRKFGSFTADLEAMAEWFQECGVTSVAMEATGIYWLALFQILERRGFEVILANGKQTKNVAGRKSDVLDCQWIQRLHTYGLLQGSFRPEDVYCVLRTYLRYRDELVGARSTQCQHMQKALLQMNLQLPHVLSDVTGVSGLAIIEAMLKGERDPALLAKLVHRNVRASTATIQAALTADYREEHLFVLQQAYELYQAYETRIAACDEQIVRVIASLPAKVDPVLKPLPARKAGRQPSTDKMAGVDLRPQLYEKFGVDLTGIEGIGVLTGLVLLTEVGPNLSRFRTEKQFASWLGLCPDNRISGGKVLSSRTRRVVNRASDALRLAASTLERSQSALGGYARRMKARLGAAEGITATAHKLARIVYRLITHGEAYVRQGLDDYEKKFQTGRVNALKKTAKAMGFELVEKQPLPSCVS

SEQ ID NO: 190408 - protein, 433 aa, unidentified
MGLIVPPTIHPEREDQPLPYDWFVGIDWGSQQHQVSVLDRDRRRVGERVVDHDGASLARLADWLWTLSAGQPQRVAVAIEVPRGAMVEGLVERGFHVFALNPKQLDRFRDRHSVAGAKDDRRDAFVLADSVRTDQPSFRRVHLEEPQLLLLRELSRAEETLLEAFRRSANRLREQLHRLYPQMLQLCSAADEPWLWGLITLAPTPAHAMLLSEEQVQRVLKAHRIRRITATEVLACLQAPALPVAPGAAEAAQAHCQLLLPCLRVLAEQLQACSQQVSALLSTLAEEPGEGESPSDVAIVLSLPGVGRKITAWLFAEAAQSLTERDYQMLRTHSGVAPVTKQSGKRRLVVMRRGCNPRLRHALYHMARVAMQRDAHFSSVYAALRAKGQRHGQALRNIGGRLLRILMSMLRHRTCYDASRIRCEPVVQMGQKM

SEQ ID NO: 190409 - protein, 427 aa, unidentified
MAYRIAGIDVHKRMLTVVVCDVEVGSEYEFERGQYGSTPSHLRSLAAWLVEQQVEEVVMESTAQYWKPVWATLEGHWKPICQKREGAGPMSGTLHLAQAQSNRGPRGRKNDFADPERLVKRLVAGELILSFVPSAEQRLWRTLMRTKYQLRCNQVQLHNRLEALLEEAHLKLSSLVSDLLGVSGRRMLTAIAEGETEPAAVAARADHGLRATPEELRDALGACSELHPVYRRLLKTALEEWQRTETQITRLGQEMATLLAAHQEQVQRLAEVPGLGVDSGQQIIAEVGPSAATFPSPKALSSWVGACPGEEESAGVNHNRRSPKGNRHLRRILNQAANAAVKVKGSVFAILYRRYVVRFGHNKTIAVIAHRLCRLIWKILHQGVRYEEHGPAVSQKSKQQRTARMIRQLRTLGYRVELLKPAAGASA

SEQ ID NO: 190410 - protein, 416 aa, unidentified
MKIVRPICCGMDVHKNIIVATIGITNKKTRITEYIQETFSTLNPDLLNLKQWLINHKCFDACMESTGKYWIPIFNILEDEINIYLTHPKYVKAIKGKKTDKKDSKWICDLFKHDLIKFSFIPPKEIRALREISRYRYKLVGMRSSERNRYQNCMTVSNIGIGSVFSDPFGKSAQAIMKEVLESDIIEDEKILKCIHGSCKNKDKILDSIKHCNIETDQRFKMNESMTHIEELQVHIDNCEIEMMKRAAPMFDQFMHITQLPGISTLSAILIISEIGVDMKQFESDKQLTCWAGLAPANNESANKKKSVRISKAGQYLKPLLVQCALGAIKDKEGYFGIKYSRIKKRRGHKKAIIAIARMMLVSIYHMILTGETFNPSDYESFRNPNPPIKQQVLTEESAIEFLKKSGFDVSKLTKP

SEQ ID NO: 190411 - protein, 352 aa, unidentified
MTEFIGCDMHKKYSVFVSMNEAGQAQPAVRVEHAERQAFRQYLGTLTKGSAVAVETTGSWYWLVDELEAVGLRPQLTNARTAKLLMGCRYKTDKLDAKGLATLLRNGTLPTVWIATAEVRDLRELTRTRMALSGMRTKVKNRTLADFAKYGIALEGYSDVFGLGGRRLLGRSLEALPEHTRQAVEDQLMVLDALCERIKAIEPRIEEVVQETPMLGLLRSLPGIGKILATVIGLEIGTIERFASAERLCSYSGVVPCVRSSGGRTRFAHTASDVNRYLKWAFVEAANLVVANRERWHHPSLRQLYERICRRKNHPVATMAVARQLAESAFWVLKKEQPYREPFPVRGSSSPR

SEQ ID NO: 190412 - protein, 357 aa, unidentified
MTMAIGIDVHKKTSTFFAYDGDGEPLNDFNQRFKKVPSNREGYLEVLAWLGDSDCEFLIENSTKTHDVYWILQGLGYSRLYVAHSVDLKRITKSNKKTDQFDAEKLATYMRVKQQNIDQFRTCYICTPEDMQIRRLCRIAKQELFEIGRIRRRIRSHLLLTGRDWPGSLSTKWECEILMTKEEDPGLRHLGRQLNDCRLRCDAAEKAVVEAIERNERMSAIFERLKEIPGFGNITAAYLSATIVDIGRFDNPKKLAAYLGVVPRMRDSGETEDHSGLTRSGDPAARWLLIQATFRLVNSSASDSHLKAFFAKKNGGSIEELREADSSSLLKRPALVAAANKLIHIVFALLTHPDRHW

SEQ ID NO: 190413 - protein, 389 aa, unidentified
MKIFVGIDIAKLNHFAAAISSDGEILIEPFKFTNDADGFQLLVSKLESFDKNSIIIGLESTAHYGDNLVRYLVAEFYQVCVLNPIKTCQMRKNNVRKTKTDKVDTFVIAKTLMMQDNLRFVSFFDLDMMDLKALGRFRQKTIKQRTRLKIQLTTYVDQVFPEIQYFFKSGLHQNAVYALLKEAPSPKEIASMHMTHLANLLKVNSHGHFTKEQAKELRVLAQKSVGANDSAISIQITQTIQQIELLDSQLEKIEAEMTDIMKFNDSVIMTIPGIGYINGGMILGEIGDIHRFSNPNKLLAFAGLDPSVYQSGNFQAKTTRMSKRGSRVLRYALVNAAWNVVRNNATFKAYYDAKRAEGRSHYNALGHCAGKLVRVIWKMLTDEVEFNLE

SEQ ID NO: 190414 - protein, 297 aa, unidentified
MNSAAFIPMEYDIFAGLDVDKRRIAVTFTDHQGGMRSVGMPYKVDHVVNYVRKHFPDKKVAFAYEAGPTGYGLHDGLEAQAYRCVIASPAMIPQAPGQRVKTNRLDRRKLAESLRGGQLKPIHVPCGPYRELRHLTQLRDAFVSELVGMKQRIKSLLLVEGLEFPPAPAGSQWSGRVKQQLRQLPCALTVRFKLDQLLDSVEFTEKQVVKTTREIRRFCQTEPELAQCLHYLMSISGIGWIVGTQLLARIGDWRELKNVRQLAGFLGVVPTEHSTGEKTVRGSITHSGDPRLRSKLI

SEQ ID NO: 190415 - protein, 421 aa, unidentified
MVAQRDSPKAQNIIRRISLTKYHVGIDVGKYNHHVSIRDIERDTYCKTFSITNDHEGFAELISSLKRLSDDRREFLIGIEACPYGINLSYFLMGTGFSLVEVNPFRVGQFRKAQGKKAKTDTIDARSIAGILSLGDHKSLSMPDPILDNLKELTRFRTDLVDEKATMMIHLRESLGILFPEFDKVFRQLDSSASLAVLTAFPSPEHLIVAGEDEVAKTLSLASPHRMGRGMASRIIEAAKDTVGVAQKQPAIGIKISILAKKIASLQETIRELDRQITVVYNSLPNKLQGFPCGRATSLAAIISEIGDIHRFATLKKFLSHLGWCPQSFQTGGYHMEHPRMSHAGNKHVRRLIWMLSIHAIKNVPRYRLYFTTRVKEGKAKMHVLIAIGRKLLSVLYTMLKKGISYDPNWEEVGHLAAAGH

SEQ ID NO: 190416 - protein, 333 aa, unidentified
MGFEPEPSKEGSWMMAQNGLVVAGIDVAKGKVDACIRALSQRRTFESTAEGRRQLISWLRKHKATKVVMEASGGYEREWAKALREKEVEVRIVDPKRVRHFAQSAGRLAKNDTIDSDTIAWFAETFGEAPGQAYDAEREKLAQIVNARRGLLETETMLANQGEHSVPDVVRKMQARLLKKIALEVAKLDAAIAAMIKATPHFARLAEIIESVPGLGEGASAGLIAGMPELGQVSNKVAAALLGVAPYDDDSGKRRGERQIKGGRRRIRNLFYMPCMGAATRHNPVLKAFYDRLIAKGKLKKVAIVACMRKLIVILNIMIARGEKWDAKRYALS

SEQ ID NO: 190417 - protein, 474 aa, unidentified
MMARTGLNRKQRKELARRLRAQDPGLEIVHPHAAGIDVGNSSHYVAVRPDRDPDSVRRFECFTADLHHLADWLQQCGVTTIALQSTGVYWIPLYEVLDARGFEVYLVNARHTKNLPGRKTDVQESQWLLKLHTYGLLRNSFHPSAAIRIMRTYWRQRGDHVHAVSTCIQRMQKVLTQMNIQLANVISDLGGWTGQRIVRAILAGERDPDTLAALSHPGVRATRTEIAKSLEGTWQPDLVFVLQQEVTMYDAYEQRIAECDQELERHLKTFTDKAPDTPQASESPSPVPPGTRARTTRRRKAGSHTPQFDLGHELQRISGVDLTRIDGIDVGVAETVISEVGLDMTRWHTEAHFASWLGLCPDNRITGGKVHRRGTRHVINRAATALRLAATTLLRSQSYLGAQYRRLRGKLGAPKAITAMAHKLARLVYRMLKWGHEYVDKGLQFYEERHRQQQVHLLQKKAAKLGLLIVEPCA

SEQ ID NO: 190418 - protein, 366 aa, unidentified
MKKISTVAKNGNEIFKEHKLTIGLDLGDRSTHYCILNEAGEVLLEHSLPTTTKGIHQVFNGIPRSRIALETGAHSPWVSRQLTQLGHEVIVAHARNVRLIGESSRKDDQLDARTLARLARIDPSLLGPVQHRSAKAQIHLTVIRARAGLVGARTALVNAARGLTKSYGERLRKCGTQQMNREMAKGLSQELRDALEPLLREVESLNERIREYDRRIEQLAKEVYPEVSLLKQVKGVGTLIALTYVLTVDDPHRFRRSRDLGCFLGLRPGRRNSGMSEPQLHISKEGDRYLRTMLVQGAHYILGPFGQDSDLRRWGLRLAERGGKNAKKRAIVAVARKLAVLLHKLWVSGEVYEPLRNNHKVVSAVA

SEQ ID NO: 190419 - protein, 426 aa, unidentified
MNYTQNSKIAQVTESTLVVGVDIGSEMNFARAFNWRGQELSKKVFRFSNSLEGFQSFLEYLKSYQTIASTEQIIVGCEPTGHYWFNLARYLNAQHINLALVNPYHVKQIKELDDNSPKKTDLKDPKTIAKLVVDGRYSYPYLPEGIYADLREAVSSRDRIVKELNAATNRIKRWLKIYFPEYLTVYKSFSAESGLAVLEMAPLPKDVVMLGAEGVNRLWREKKLRAVGMKRAQTLVEAAHNSIGLVGGECARMELQLLLEDYRAKEVQLEKVTAVLETETLKVPYAEKLLSIKGVGLITVAGFLSEVGDVRRFDSPKQIQKLAGLELKENSSGKHRGRSSISKRGRKRLRKILFQVMLPMIKNNAEFREVYEYFTTRQKNPLKGKQAIVAAGCKLIRVFYAILKRGVDYNPQKLRTDIIRPELVAA

SEQ ID NO: 190420 - protein, 425 aa, unidentified
MNYKQNEKINQVKESTLVVGIDIGSTTQYARAFDWRGIELGKVFPFSNSREGFESFKAWMQHLQDKYKKLDAIVGIEPTGHYWFDLGAYLEDEGILLVMVNPYAVKQTKELDDNSQSKNDRKDPKVIAKLVTEGRYSAPYTPDGVYADLRIMVTNRKRLIREMTQIKNRFARWFAIYFPEYTDVFGDYEAQSSMLLLKKVCTPEAIVELGAEKINQIWRDAKLRAVGMKRATTLCETAKRSIGLKKGSSAARYEMKLLLEDYEYKKAQLDAVMEEIEKLCRKIPESEQMLAIKGIGVITVAGFLAEVGDVRRFESPRQIQKLAGLSLRENSSGKHKGQTTISKRGRSKLRAVLFNAAIPLIATNPEFKSLHEYYTTRANNPLKKKQSVIAISCKLIRVFYAILANGVTYDAQKMLSDIHRQPQAA

SEQ ID NO: 190421 - protein, 338 aa, unidentified
MSIYAGLDVSDKTTHVCIVDNDGAVLKRDVVASDPDALAKWLNKHCPDLARVVLETGPLSTFLYHGLAEREVAVACICARHAKGVLSARVNKSDVHDAEGLAQLARTGWFKRVHMKASATHIDRAALRIRAQLITTRVAMANQLRGLLKLFGLRMGKVTTSGKRSERLAALFRQRPDLADLFAPLIAGIEVMEEQLRASNRLLEGRAAADPVCVRLMSVPGVGPITALTYTASVEDPHRFARSEDVGAYAGLAPRRSQSGDRDVLGHISKAGDPMLRRSLYEAANIMLSRVKRPFALQQWGQNLAEIKGNKRAKIAVARKLAVLLHSLWLNETEFRWA

SEQ ID NO: 190422 - protein, 410 aa, unidentified
MEVVRQRCAGIDVSKRDGKVCVRVQGRGSTKTSSRVTTWSSSMPSILQLREKLVADGVELVVLESTSDYWRPFFYVLSEQLDVVLVKASDVRAMPGRKSDVSDAEWLADLAAHGLVRPSFVPPEDIRQLRDLTRSRTVLVAERTRELQRLEKELEDACIKLSAVVTKLQGVSARLMLEALVNRESDPAVMADLAQGRMRTKVDQLTEALTGRFNDHHRFMVTFRLQRIDQTTADIAQLDRRIDQLIAQHGYTATLDLLQSIPGMGKHGSEELLAEIGADMTVFPTPAHLASWVGVAPGSHESAGVKKRVKTRPGNRYAKRALGIAAMSAARSKTTFLSARFRRLRGRHGYSKALVATEHSIVTAIWHILSNGDFYNDLGSDYYTKRSPERTIRRKIKDLEAAGYAITRTA

SEQ ID NO: 190423 - protein, 367 aa, unidentified
MNQNIVHSTGVAASAVTRHHYQTPLSAIKLGLDIHQARYVVVAQEDHATPKPARRLRPGEFVPWVKSLLARGHAVFVVYEACGFGFGLWRQLTAAGATCYVIAPQKLDEQRKGVKTDALDAGVLCQRLSRYVAGNRKELAVIRVPTQEEEQLRHLHRQREALVRARTKLQAQGRALLLTHGQPALQRWWRARGWKALGALLPAWLLDRLEVFRPVLLVLDTQIAALTAELEAAASPELPSGLGRLTQVIVTREVCDWHRFKNRRQVSSYTGLCPGEYSSGGKRMPGAVTKHGNPRLRCALVELAWRLVRFQPGYPPIQKRLPVLAKGARATGAARKKAIVAVARQLAVDLWRWQTGQCSAEQLGLKS

SEQ ID NO: 190424 - protein, 351 aa, unidentified
MSQKTEAGLACTIGIDTGKNTLHLVGLDAKGAVVLREKLARGRIAARLANVPPCLIGIEAGMATHYVARELLVLGHDVRQVPPAYAKPFRQGHKNDFRDAHAIAEAVQRPSTRCVPVKTDAQLELQALHRVRSRLIGGRTAAINQIRSFLLERGITVRQGLRFLRQQLPQVLATRTDVLSPRMIRIIEDLSSDWRRLDERIEHVTEEIELLASDSEACRQLMTVPGIGPIIASAMVAAIGNGAAFAKGRDFAAWLGLVPKQMSTGDRTILGRITKRGNRYLPTLFMQGARVVLLRPTNWAKHSFGPWLAAAAKRLHHNVLATALANKLARIAWTVLAQGRSYERRAVPGIV

SEQ ID NO: 190425 - protein, 360 aa, unidentified
MDHVAIDLGGRESQICVRSSDGKIVEELRLSTASIGRYLGKRPMSRVVVETCTEAFAVADQAVALKHEVRVVPATLVKSLGVGARGIKTDQRDARILSEVSCRIDLPSVHVPSMRSRERKTLCGMREALVGSRTQLINTVRGWMRAAQIRVRSGAAESFVDRVRSHLEATKLEVPSYVQRQLTMIALLNEHLDEADKELALVAKTDELCRRLMTVPGVGPVTAVRFSAALDEVARFNNAHAVESYVGLTPGEHSSSDRKRRTSITKAGAPRLRYALIQAAWCVMRSKTKHPMAAWAVEIERRRGKRIAVTALARKLAGILYAIWRDATRYQPERGARPSPPTDPDMMTEALALVASKRTQ

SEQ ID NO: 190426 - protein, 357 aa, unidentified
MGTISLGVDLAKCTFSVCEMEGDTGRVLRRREFRRDAFAAWLAQLPAGTVVAMEACSGAHHWARRCREYGLVPRLMAAQFVRPFRKNPLAKNDPNDAEAIATAARQGNMRFVPVKDIDQQARLSWHRVREGYKAEHLAIGNRLRGLLAEFGVVVPHRDAALHRVLGDLDAYVELPGEFKELLRSLAEHWGQVRAAMAACDARIERHACQDDRCFRLRAVVGVGPLTADAMVASIGNAREFKNGRQLAAWLGLVPTQHSSGGHARLGAISCRGDGYLRTLLIQGARSSLERAKRVGVDKATPEQAWIRSLACRMAFGKVIVAIANKHARQLWAMLAHDLDYDPQVGLKHPMQQQRTAA

SEQ ID NO: 190427 - protein, 426 aa, unidentified
MSPPLLPTYERYLAIDLHKHYVVIGGLNARQEMVLPPRRIDLTDWPAWAKTHLRKTDILVVEATTNAWDFYDQVQPLVGRAVVANAGKIAGLVKTKVKTDRVDVLKLAKLLVAAMIPEVWVPPVEVRELRALLAHRRQLIKNRTMLKNRLQSILHRHQLVPPEGELFGAKNREWWKTLKVSPTERLHIQHDLTTLTTLEPQIAEVETELHRLSTTSPWMEPVTFLLQLPGFGLIIAMTILAAVGDIQRFEEAKKLVGYSGLGAGVHISGETHRTGRITKEGRRDIRWALVEAAWIAVDTHPYWKREFERLARRMDKNKAIVAIAHKLLIAVWHVLTERVADKHATPKMVAFKLMRWSWELTEEQRGGLSSRQFIRLGLMHLKLGEDLTHVVYGNLPRRIASVEELLSVRPELRTLLDNSVLPTTSS

SEQ ID NO: 190428 - protein, 403 aa, unidentified
MNSVGIDISKGRSMIAVMRPFGEVVISPFEVRHTDSELSELARRLKSLDGETRVVMEATGNYHTPVAKLLHDAGLYVSVVNAKLVHGYGNNDLRRVKTDKKDSVKLANYGLDRWLTLTRYVPEEDTRLLLKNCYRQYRQYSKVQTVLKNNLISLLDTVFPNVNRLFSSPIRGDGSEKWVDFVAEFWHCRCVSEKSQKAFTNKYQRWCRKHGYNFSEAKAHTIHAEACGHIDVIPKSETTKLLVEQAVAQLRATSAALAALKHEMQALASMLPEYPVVMDMFGVGPTLGPQLMAEIGDVRRFYSKKALVAYAGLDAPPNDSGDVIGRHKSMSKVGASSLRRTLFLVMSVYLKNAPLDESVYQFMDKKRAEGKPYRVYMMASANKFLRIYYATVKAYLESLEQTA

SEQ ID NO: 190429 - protein, 297 aa, unidentified
MKILALDLGKYKTVGCAYESESGAHQFQRTFTAPADLQRLVQEVKPDRVVIEVCSIAGWVCDLMGQLGIEVQVANTSDDAWRWRKVKQKDDRRDALKAARLSAVNQVREVYIPQTEVRQWRALITYRRHLVGRRTKIKNHIRDLLVREGQILARGSRCWTKLGQELLSSMARPLAEVGVAELWRGELWEELQQLQMVQARIASVEEKLNAIGEADKRVQLLRTIPGVGPRLAEAIVALLDQPQRFRKASQVSGYIGMVPKAFDSGESERRGHITRQGSGLVRSLLVEVAWAGLRHNT

SEQ ID NO: 190430 - protein, 347 aa, unidentified
MNYYAGIDVSLECSSVCVVDGTGKIAREAKVASEPEALIAWFGSLGLSLERIGLEAGPLSQWLYAALREAELAVELLETRHVKAALSAMPVKTDRNDARGIAQLMRLGWFRPVHCKSAEAQEIRALLTARKLVQSRLYDVEMSLRGILRGFGLKVGRTTPKRFAERIRELVVGHATLEAVGAALLSVHAVLLREFNGFEKRVRAIARSDGRVRLLMSTPGVGAIVGLTYISAIDDPARFKSSKSVGAHFGLTPTKYQSGETDVTGRISKLGDSSVRTALYEAANVILTRPIKGGGLKSWAMKLAKRAGMKKAKVALARKLAVILHRMLADASKFIAEKASGCVRVAA

SEQ ID NO: 190431 - protein, 335 aa, unidentified
MNGNTERWVGIDVAKSKLDVALLDERGKIKSHVFSNDVKGHAALIAWLRDRISALGVRVCMEATGPYGEAAATELADAGFVVSVVNPARIKGFAQSELVRNKTDQTDAALLARFGQTMQPEPWVAPPLEVRELRALVDRLQSLKEMHQQEANRLEAAMNQAGMRASIESHMQWLGVSIKELERQIDDHIDKHPSLHGDLKLITSIPGVGNTTAAKVLAYLGDVRRFKNGKALAAFIGVTPRLKLSGSSVRGRSAISRSGHAGMRHCLYMPAMVALKHNPLVSVFGVRLKATGLAPKAVIAACMHKLVLLIYGILKSGAPFNPQFGSQQLDFQDGI

SEQ ID NO: 190432 - protein, 335 aa, unidentified
MALYCGIDLHSNNHVVVIIDDDDRRLVEKRLPNELSSTLKLLEPYREQLAGVVVESTFNWYWLVDGLMDAGYSVKLANTAAIQQYQGLKHTEDRYDAFFLAHLLRLGILPTGYIYPRAQRAVRDLLRRRLQLVHTRAQQLITVQSQIWRSTGIRVPSNTIRQENFAPALPDAYEKLAAESHLAVLRTAAQEVERLEAAALQAVQLRPEFTILKTIKGVGPVLGLTIMLETGDIHRFPRVGDYSSYCRLVKTERLSNGKKKGAGNAKAGNKYLSWAFAEAAHFCVRWEPVAKRFYERKRQKTNGIVAIRATAHKLARASYYMLKDQAPFDAQRLFG

SEQ ID NO: 190433 - protein, 346 aa, unidentified
MIHVGVDLHQRFCYVTAVKTSGEVVMQRSVMNEPESLRRLMRALPEPAQVVMEACGFWPAFRQALDGQVARLVMVHPQRVKAIASARLKNDRVDSATLAHLSRCDLLPEAWMADPATQQMRMRVRLRIALGRQRARSKNLLQAALHQEGMRKPVSDLFGRRGRQWLGEIVLSPAARNVVNTQLRLIAVLDELIAEQERELCAQAAADPRARWLQTIPGVGAYSAMVILAEIGDVARFPHKKSLASYAGLVPRVRESAGKRSYGGITRAGSETLRWILLQVAQVAARSSPAARGYYQRLRGRKRAQVARVALARKLLSCIWALLCHGVCYDDQVFAAGQDAMPKAAR

SEQ ID NO: 190434 - protein, 342 aa, unidentified
MRIVYVGLDLGSSNFQQVALNHDGVSRVNRDFSTSEANLIKAFSDLKGEIHVHLEAGELAPWAAAIIAPLVTRVVCSHPKDNAWIAKDADKCDRVDAFKLAELLRLNRFKEVHYAPDQPRRNFKQLVQHYDELTGQQARLKTKIKARLRMQGVIVTGERLFSSKGRQEVLARVESRDLRTAISQLYEVLDQSVAAQEQARVLMLRAAQAFPEIRIFRTAPGVGPIGACRFSAYIHTPSRFSTTRKLWKYCRLSVSHRSSNGKPLRRPRLDRSGCGRLKDVSRKAFEVAVRSQKDNGFKRAYQRALETTHDKTHARLTVQRKIVSTLRAMWLRRTPYCDELMR

SEQ ID NO: 190435 - protein, 379 aa, unidentified
MRIVCGLDVHKDSVYLCILSSTGEIVEKVFGVLTFQLAKMRDLMLKHHVQEVGMESTSVYWIPIWRVLEPHFKLKLVNPYFIKQLPGHKSDVKDAQWIAECMLKDLVRGSFVPPERIQQLRQYDRRIYDLDDEINRKLSKLDAVMQRCNIRLSNYVSNTDSKSYKEVVARISEGITDPKVLVEEIHGRIINSHGRKTIIAALTGVITQADSDMMRQIREEIDVAEKHKQECMDKMQEICEQEYTDQLRNLQTIPGVKLRTATSLIAEIGTDMSIFETANHLASWSGLKPRNDESNKVIKSKRITHGNRYLRRTIVECSWAASRTKGCFFSRFSYHQTQVRKKGKMKVQIAIARKLLVCAWHILSKNVIYQDSCACNVAK

SEQ ID NO: 190436 - protein, 362 aa, unidentified
MDNRKYVALDVDSANIVAGVFDRKGKSLMECCVKMNAKAVREFFQMLKGTVIVAFEEGTQAAWLYEMINPLVAEVIVCNPRANKLMKAGNKSDRIDVAKLGKLLRLGELRSVYQGPAGMQGLKQLVHGYEALVQDSTRVKNRVKAIYRGRAVSSKGEAVYEQEEREKWLAKLEGGERKQRARRLYQQLDQLQQLRAEAEKEVARSARRHAAYKWISSVPGFGPIRTAQVLATMMTPHRFRGKRQFWPYCGLAVVTRSSSDYEWVGERKRRKRKPIQTWGLNQNHNRTMKAVFKAAALDALKRNRAFREYYQNLCGQGMRPEMAQLTVARKLAAIVLILWKKGERYNPEKLKQAASGTGQTVK

SEQ ID NO: 190437 - protein, 342 aa, unidentified
MNNRTVISADIAKNVFQCVQFKNDRQVGKNKTYKRDNFAKLITSNRPGKLVMETCSGAQHWARMAKAHGHEVVLIPPRVVTSYRQGQKTDANDAQAIYEASQRKHLKASPHKTVEQQALGVLESVRAHYQSRKNKLSNAIRGHLAEFGLIIPKGYKSLRTQLPLILEDAENGLPMSVRMAINIYWQDWQLAHQKVMELEKEKLVELNQIPSAKEILKIEGIGPVCASGLICTLGDGRVFQRGKEAAAFIGTSPKQHSSGGKEIMVGISKTTGHKKLRSALIQGARSVILKLKAKKEPSSEKERWLAQLIERQGENRAAVALANKNVRTAWALLVHNREYIAA

SEQ ID NO: 190438 - protein, 346 aa, unidentified
MKQIIRIGMDTSKHIFQLHGVDAAEQPVLRKRLSRKQMVEFFANLPPTVIGMEACGASQYWARELSKLGHEVKLMAPQLVKPYVSRNKNDGRDAEGQCEAMSRPSMRFVPVKTAEQQAALMLTGIRDGLIARRTQLSNTIRGYAAEFGLIAPKGLDKIEPLLTQIAQDESLPAMARELFAVPGREYARLQAELKQIEAKLVAWHRADALSRRLAQIPSIGPIIATRLVMKTPDPRAFRSGRHFAAWLGLTPRDHSTAGKTRLGKITRAGDEDLRRLLVAGATSVIQQVRRGRGHPSRWLVALLKRKPPKLAAVALANKVARIAWKLMATGESYDAARMNAIPAFAA

SEQ ID NO: 190439 - protein, 350 aa, unidentified
MTLYCGIDLHANNSVISIIDDHDAVVYEKRHANDLRAIRDILEPLRGDLLACVVESTYNWYWLVDGLMDAGFDVRLAHTGAIPQYAGIKHSNDQSDARHLAHLLRLGILPEGHIQPREQRAIRDLLRRRLLLVQRKTLRHLSLQSLIARHTGERLTANQIKGLDNEAIADKLADPIRLGGQITHLARCWHEQAIAMIEDEVAKHLKPRKDYQLLSSIPGVGRILASTIVLETGAIERFPDQGHYASYARCVDTAKLSYGKLKGRGNKRNGNKYLARAFKEAAHYAAISSPEIKRFYQKRQAKRHILVAKKTVANKLAKACYHMLTRQVPFDVKRAFGWVLPWRQAVKGMV

SEQ ID NO: 190440 - protein, 355 aa, unidentified
MEQFIGCDAHKKFSVFASMNEYGEYGPCDRVGHEREEFRAYLRKLPAGSQIAVETSGCYYWLVDEIAEAGHAPRLAHARTAKQRMKGRHKTNLRDARGLAMLLRNGTLPEVWIPPARLRDEREMLRWRMSLSRMRCGIKNRIHGILQHYNVDIRCSDLFGDSGREALFAQLGELPAWSRESIERQLSVIDALEAQMRDCEQRLETMLACSAERDLLQSAPGVGKILSAVEALEIGDVRRFPTSGHLASYAGLVPCARESSDWKRQDGCPPDCNVYLRWAYIEAANVIAAHRNREQWKERFVVQLYERVRARTRMHGKATTAVARHLAEASYWILNKQQLYREPRTMRQALSSTQG

SEQ ID NO: 190441 - protein, 343 aa, unidentified
MHIASIGIDLGKTTFHVVALDDHGKVVVRKKFSRSRLLVYTANLQTSLIGMEACAGAHFVGSRLRDQGHEVRLIPAQFVKPFRKSNKNDFIDAEAIAEAVTRHNMRFVPIKTEEQLDLQAMHRIRDRLVHRRTALINQIRGFLLERGITFAKGPSRLRNHMPFVVEDAENQLSPRMRTLLDRLWVEWRQLDYDIETASDDIERIAGEDEDCKRLRQIPGVGPLVATATVAAIGNGAAFHKGREFAAWLGLVPRQWSTGGKAKLYGISKRGNSYLRRMFIHGARAVLLRVKYDTGGLGHWVHQLEQRTARNKVVVAIANKLARIAWAVLFKEIDYKPTAVCAQA

SEQ ID NO: 190442 - protein, 359 aa, unidentified
MATSEGAGEGVVLGGVDTHKDIHAAAAMSETGRLLGAAEFPTTPAGYRRLLAWLRSFGPVERVGIEGTGSYGAGLCRYLRSKGVEVVEVNRPNRQWRRRRGKSDSVDAEAAARAVLAGEAVGAPKGQDGGVEAIRMLRLARRSAIKARTQAANQLQGVVETAPVSLREELRALSIPALVASARRFRCRVPTTPEAAARFTLKSLAGRWAALDAEVGRLDEQICQLVETAAPALLAVNGVGVEVAGALLVAAGDNPARLADEASFAALCGVSPVDASSGRRQRHRLNRGGNRDANRALWVVVMARMARDARTRRYVERRTGEGLSKKEIMRCLKRYVAREIYKILVSSTSPDTARSVPAA

SEQ ID NO: 190443 - protein, 412 aa, unidentified
MEGETVIAGVDTHKDVHVLCLLDGLGRKIWSGSFGADPEGYDRLAEAIGDPGSCMVVGVEGTASYGAGLTRRLVELGYNVVEVLRPKRDKARPGEGKSDPLDAERAARKAASGRGCSVPKSQDGWVEAVRQLYVARRLAVATSTSCVACAKSMLTTAPSALRERFRGRERPKDLMPLLARGRKAGDALEESALASLRSVAAVWKEARSQVESLDERIRALLEANAPALLGVEGCGTTTAAALVVAAGDNPGRLKGEAAFSMMCGASPIPASSGKTDRHRLNRGGNRQANWALYEIAIKRMAYDERTRRYVARRTSEGKSRREAVRCLKRYIAREVYRVLMDPNPDGAAPEGPELAKMRKAMRVTQKKAAAGLGLSAATLGHLERGKRRSTKLERRYYELLCELKGALPQTAY

SEQ ID NO: 190444 - protein, 355 aa, unidentified
MQPMKHYTGCDAHKKYSVFTTISEAGEIFPAKRVEHDRQKFRSFLETLPTGSSIAIESVGNWYWLIDEMEKAGHKPSLVHAGKAKLMMGNINKTDKLDARGLAVLARNGTLPAIWIPPGELRDQRELPRMRLVLVGIRTKLKNRIHATFAKYGIMFEEVSDIFGRKGRRLLEQAMDELPPETRHSVEEQLQLIDQVEQSIKQAEKRIRNVIKEDHAMQILKTLPGVGPILSITIALEMGNVERFPTGEKFASYSGKVPRVSSSGGKTYYGKVRPDVNRYLKWAFTEAANAIVLQQHRLGDCHVLRLYWRIRNHKGHAKAITAVGRHLAEATYWMLKNDEPYREPGIKKMVSSIRG

SEQ ID NO: 190445 - protein, 309 aa, unidentified
MTIASCIVGIDVSKQWLDCFVVPAGRHCRFTNDDKGHAALVALLADEDGFCVLEATGLYDRALCRSLHEAGRSFHRANPRKARQFARSAGFLAKTDRVDAAMLARYGAAMALPAEERCEPERERLRELVDRRDQLVEMRKGERIRLAQPHDDWLEESLVQVIAMFDGQIAALEARMEALLASVRHLAAQKAILCSAPGVGAVTAGVLLAHLPELGRRDRRAIGALAGLAPIARDSGTLRGRRCIWGGRKRVRDALYMAALAACRSGPFKAVSKAMRDKGKPAKLVVIAIARRLLVALNAAIRDNKPFHT

SEQ ID NO: 190446 - protein, 350 aa, unidentified
MLIIAFDSHKRYSQVCVEDREGRRLAEERVQHKRGNIKEFLGRWEGGSPVAVETIGNWYWIVDEIEAAGMEPRLVHAHKAKLMMGSVNKTDKLDARGLNMLQRCGTLPTVWIPPGELRDKRELARTRMVFAVQRTKLKNRIHSVLAKYGLQDEFEGISDIFGGCGRQRLSSAKELLPSETRFTLEQLMETLDHVEGQIKELEKQMHAAFRETDEVRLLQTLPGVGFILAVVIWQEIGDIDRFASSEQLASYGGTCPRIHSSGDKSRFGPLRNDVNHYLKWAFSEAGNSIAVHRHQIAGSKIAQLYNRIRARRGHAKAVGAVARQLAEASYWMLKKKEAYREPGTGASTAV

SEQ ID NO: 190447 - protein, 370 aa, unidentified
MSVRRILAKTINTDLEYEAIGIDLAKNCVSVALLTTDGEVVCIDRLDYSELEKSAQVLCPTTFAMEPCTEMNYLVQKLEAWGHRCLVIGGKNVQNYVENHYSGQKTDLNDAQALAFLAQDTQLRTIKAKDMEQQKYASLTTLREQYIKQYRQTIVSLKGICQAWGLNISKGISGKARLKDLIENHAAFPEELRESLVDMVTHAQTAQKALNKITKTLELLAKNDKVCQLIQTIPGLGPICSCRLRATIGDIRRFKNPKDFPAYYGLVPRSIATGHNEKKGKITHRGDKTMRSLMVQGAGSVINMATKGKLKSKQLTKWILKKQKEKMPWGKLVGAVAAKLLRIVRAVLISRKAYDPKLAGVAKCSLPKAT

SEQ ID NO: 190448 - protein, 406 aa, unidentified
MISVGIDVSKGKSTVCTIKPYGEVLMTPRDFKHTKDDLDSLVKQLSRFKEEIHIIMEATGNYHLPVYQYLKSKDYQISIINPLEMKRYRCQGIRNPKTDKIDSMIIAQYGIDYWYRFKPNDDMDEKRQELRLLGKQYTSYMRIRTIRCQDLCHILDRTMPGVYGLLDDFNRNNGQDKLCDFAEKYYHSDNITKYSEKVFTERYSSWLKKKGYRPNEKEAHQLYSIAKNAIPTLDSKLPSTKLLVQEAVNVLREVDSSLYDILNQLKDLSKEMPEYETVLSMKGIGTTLAPRFIAEIGDPRRFHSAKALIAYAGIDAPPYQSGQFTGTKRHISKRGSSNLRKLGFELMDSVNKHKSSYTGDPVCEYFMKKRNEGKPYRVAMIATFNKFLRIYHSRVSEVLNEYDNSH

SEQ ID NO: 190449 - protein, 342 aa, unidentified
MEFYVGLDVSLKQTSICVVDQTGSVVREGVVDSDPEAISVYVKSKAPDAVRIGLETGPTSTWLWTELKRLGLPVICIDARHAKAVLKMQINKSDRNDAIGIARIMQTGWFKEVHVKDIESHSVRALLASRALLVKIKRDLENHVRGLLKNLGLVIGRAKFNVFAVRAEELIEGRPELVAAIRPLLEARNAVGQQVSELDRKVMKLARHDAQVRRFMTAPGIGPITALAFKATIDDPARFARSRSVGAYVGLTSRRHASGEVDWSGRISKCGDAMLRSYLFEAAGVLLTRVPKWSAVKAWGVRLAKRNGLRKAKVAVARKLAVILHRMWIDGTEFNWSKEIAA

SEQ ID NO: 190450 - protein, 358 aa, unidentified
MQRNKISFKGQRIFIGIDVHKRNWDVAIAPSVGNVKRHTQKASSKELFDFLKRHYPDGDYLAVYESGFSGYSTYYALNEVGIECMVIHAADVPTTQYEEVMKTDRIDSVKLVRSLKAGLLRGIYIREKENIDDRSVVRIRKTIQKQLSGYKTRVKHLLYCNGVSFPERFEKPGSHWSMAFIKWLKEDVTLLSSTRNSLDLLIRQVETIRMTLLEATKMVRSLSQTERYKSKFDLLMTVPGIGVTVSMCILTEVYDVRRFHNEKQFAAYLGLIPTCHSSGDKVAHGEKTFRGNKLLGPMIVEAAWISVFKDAGLASLYLRYKERMKPQEAIVRIARKLSNIIFAVLKNEKEYVPYQMGK

SEQ ID NO: 190451 - protein, 407 aa, unidentified
MISVGIDVSKDKSTVCIIKPCGEILALPYEMLHTMESIHSLINRIKAYDEEVRVVLEDTGHYHLPVVTLLVENNVFTTCVNALRMKKFCSQSLRKAKTDKIDSFKIAQYGITYWNELVAVLPKDDAFSELRAFSRQYYQYVGLLTKAKINLSNMLDQVMPGINLLLKDINDNHKLTEFTKRYWHFGNILKMGESKFVSDYCTWAKKQGYHLNERKSKEIFALAKNGIPVLSCTPSTKVLVQETVRILQEIEKSRNTILSHMEQLASALPEFCILTSMHGIGETLASRVIAEIGDIKRFHSKNAVIAYAGIDAPPYQSGAFTASNCSISKRGNKYLRRTGFEIMQSFMRQKPTEDCAVYDFMLKKQAEGKALKCCKIAGLNKFLKIYYARVREVYNEIENQLIFGSKV

SEQ ID NO: 190452 - protein, 406 aa, unidentified
MLGCNGIPIVEGLLVIVIMNEVGSMSQFRRLIGNTGFVREPENQSELHCEGADTMQDNTKYVGLDTSKDTIAIAVADAGRDAPRSWGVIPNTPEAIRKLIRKLGQPEDLDVCYEAGPLGYGLQRMLTQMGVKCSVIAPSLIPSRPGDRVKTDRRDAIKLAHLHRAGELTAVYVPNEDDEALRDLVRCREDAKEDLLRARQRMSKFLLRHDLTSPAKMTKWKSKYMAWLQQLKFSNRALQQTHQEYLHAIIVIAQRIERLEKEIHELAMKSPHKPVIQALQTLRGVKELTAVTLVVEVGDFRRFTTARQFMGYTGLIPSESSSGPVRRQGKVTKTGNTHLRRVLVEAAWSYRYRPALRGTFESDRKGSPLLCKVSLGKPRTAYIVNTFDCSLEVSLVPKPSLHLPES

SEQ ID NO: 190453 - protein, 333 aa, unidentified
MKDLSAKQHFVGCDVSKDTLDFALFERGKDYRGFEHIQVPNNTEGFQAMRKWLRGLKVKLSEAVVDMEHTGSYSTALAEWCHKKGYAFVFLHPLDVKNAGARGRNKTDKIDAQFIADYVYTMREKLEASTPESPVIKKLRVLRNERRLAVNARTAFANQSKCLDDTHAAKRASKIISELNKQIAAVEAQMLDVISSDESIKSNYELLLTIKGVGMINALAAIIATGNFTRFQTARQYAKFCCVAPLSCRSGTSVMNGDHVSKAGHNDIKATLTEAARSAIQHDAQLKQYYERKRAQGKSHGCVMNAVKFKIICRMFAVIQRQTPYVNTDRYKS

SEQ ID NO: 190454 - protein, 331 aa, unidentified
MEEVKRFVGIDVAKVALDVFIGSAGGAFSVANDEVGIQELLRQMKPADFVIVEATGGLETPVASALAAAGIPVAIVNPRQVRDFARATGKLAKTDRLDAEVLARFGEAVRPEARPLADAQAQALEALVTRRRQLIEMLTAEKNRRARAPKVLHRSIDEHIRWLEKRLSGLDAELAELIRETPLWRERDELLRSVPGVGKVLSSTLLAQLPELGMLNRKQIAALAGLAPFNRDSGNMRGSRCIWGGRAQVRRVLYMATVAGVRSNPTIRTFYLRLRTNGKHAKPALIACMRKFLVILNAMLHNKTHWQTPALISPTAPPFPLLGAVSEHGCC

SEQ ID NO: 190455 - protein, 444 aa, unidentified
MAMRKRDDEVFPNAAGIDIGASSHWVAVPRHLAEAAGCEPVREVGAMTEDLNALAAWLVSLGVDTVAVESTGVYWIPVFEVLEQHGLKVWLVDARQLKYVPGRKSDVQDCQWLQKLMSLGLLRAAWRPSAEVCVLRAVARQRETLLVEQASWVQRMQKALVQMNIQLTEVLSDVMGQTGQAVIRDIVAGVRDAKQLARHRQRRVKASEAEIARALQGNWREEHLFVLKQALAMYDDIGRHLTECDARLDALLDARSQAKVDIGKLPRAGSKARVEHDIRQRLANWAGVDLTRINGLGVTVVMKLLSEIGPDVSRFASVKHFCSWLGLCPGTKISGGKVLSSGTKRSANRARQALKLAAQSLFRSESALGAFYRRLSARMDKPKANTAAAHKLARMVYFMLTRGEAFVDQGQQRYEEQQRQRSIVALKRRAAALGFQVKPLEAVA

SEQ ID NO: 190456 - protein, 345 aa, unidentified
METMYYIGLDVHKKTISYCVKDGSGRIYAAGSIPATQLTLDMWMKTLPRPWTAAMEATIFTAWIYDHLQPHAAAVKVAHPLMLRAIAVAKKKNDRIDARKIADCLRCDFLPECYMAATEIRERRRTLRYRNLLVRQTVQMKNKIAVLLMEAGVSYNKQKLHKVGYFRELLATNQDIDEGLKPLLRLCREMVVRLGKTESALVRSLERDSLLVERVERLMTIPAVGPITALTWALEVGDVKRFSSIKKAISYCGLCGAEKSSANITKRTPLSKQRNKHLQTTLIEAAKMAPRNSPELAMVYEQAKQKGNANRATLAVARKMVAYLVAVDRRQKDFLVVEKENRAAA

SEQ ID NO: 190457 - protein, 436 aa, unidentified
MASHCQFYNYKFQEVILLSFKILKFKCCGLDVHKTWIYACIGITDSNNRTEYKQARFSSFTKGLNELCDWLAKYNCTDVCMESTGKYWIPVFNILEQHNLWVTLSHPKYTKPMKGNKTDRKDAKWICDLYMCGMVKPSFIPPADIRELRDLVRYRYKLTCMITGEKNRAQNCLTVSNLKLDDVFSDVFGKSSRSITEQILQHPGEKFDVAPFVHGRCKTPIEEIQAAVDGAISKEQAVKLRQCLDHIDELNKHISELEQEILRLSDKYEAALNLIRTVPGFDKNPMTAVQILSEIGGNMSVFPTAKHLVSWAGCCPRNDQSNQKIKSTRISRAGSYFKPVLVQVANALIKSKKHLEFTNRYKRIKARRGHKKAIIAICRMILTAIWHILSDLKPYTPEGFLESHPVKEGKVLSSSQALNFFKQRGYIIKDEPLSVS

SEQ ID NO: 190458 - protein, 451 aa, unidentified
MSKQRNKAVSLPVIEPNAAGIDVGATEIFVAVPADRDPEPIRCFPTFTVDLERLADWLQQYHIRTVAMESTGVYWIPLFQILEKRKIDVRLVNAHHVKNVPGTKTDVSDCQWIQHLHSVGLLRGSFRPGDEICAIRSLWRHRDNLIQLATLHLQHMQKALDQMNLQIHHVISDLDGTTGLAIMDAILAGERDPHKLAQLRHPRIRASEETIMKSLVGDYREEHLFTLRQSLKAYRYYQELIQEVDAQVKQMMQRLPSKVAEGEEPPQGSKRRARKTPWRNEPPQLREDLYRAFGVDLTEVPAINSLTAQMLLTEIGPNLDRFPTAAAFCSWLRLCPDPKISGGQVLSSRTRPTKNRAALALRVATQALYHSDSFLGDYFRRMKARMGTPKAMTATAHKLARIIYHMVTTQQQYHSTIFQKQEERRRHQKSAKLHAQARELGFQLVPINCVP

SEQ ID NO: 190459 - protein, 370 aa, unidentified
MSVRRILAKTIDTDLEYEAIGIDLAKNCVSAALLTTDGEVVCIDRLDYSELEKSAQALSPTTFAMEPCTEMNYLVQKLEAWGHRCLVIGGKNVQNYVENHFSGQKTDLNDAQALAFLAQDTQLRTIKAKDVEQQKYASLTTLREQYIKQYRQTIVSLKGICQAWGLNISKGISGKAQLKDLIENHAAFPEELRESLVDMVTHAQTTQKVLNKITKTLEVLAKNDKVCQLIQTIPGLGTICSCRLRATIGDIKRFKNPKDFPAYYGLVPRSIATGHNEKKGKITHRGDRTMRSLMVQAAGSLVNMATKGKLKSKQLTKWILKKQKEKMPWGKLVCAVAAKLLRIVRAILISSKPYNPKIAGVAKCSLSKGS

SEQ ID NO: 190460 - protein, 350 aa, unidentified
MNVNHYIGFDVHKKSVSYCVKLADGKIVEEGKLRATHDALRQWAGKRPEPWHGAMEATLFSGWIYDTLKPFAAELQMGHPALMKAIDASKKKNDKLDARKIADLVRCNLLPACYVAPAEIRELRRMLRYRNLVVAQATRMKNKVSGLLMEVGAEYHKQQLHGKQYFTELLDTLEEVPESVKDLLRLSRGALETFETTQEQLVVRLQKEPLLAQRVMLLKSIRGVGPVTSLTWILEVGDPQRFSSVAKAVSYCGLSSALDSSADKQQRGPISKQRNAHLQTVLIEAAKLAPRWNPQLAAVHAREVELGNRNRATLAVARKLVAYLLAVDKSGKPFQISTPATVEQEVETAV

SEQ ID NO: 190461 - protein, 344 aa, unidentified
MYVGLDVHKDFCQAAFLDVDGKVVKEKRFENTVSGLKELAQATKGQEVVMESSTSSMNVYDALSGTCKVKVAHPSRVKAIASARIKTDKIDARILAHLLRADLIPESYVPSKQHRQARLLVRQRASLVELRTQIKNKIHALMIREGIKIPFKDSFGKKTILFLKSADIGEAQKASLNSLLAVLETLDTQIKETNKRVVDCASSDNYAKLLVTHTGVGWLTSLAVSSEVCDINRFESHKKLCSYFGLVPSVYQSGSTDRKGRITKQGNTLLRSLLIQCAWSASKYSPRFRRKYNKLRKKIGNQKAIVAIARMIAVDMYFMLVRNEEYKEPKNESKGGKSVSLLGP

SEQ ID NO: 190462 - protein, 398 aa, unidentified
MEVVHARCAGLDVHKKTVVACVRIQDGQGIRHDVRTFDTTTSALMELAQWLHDNGCQHAVVESTGVYWKPVWHVLASDELKLVLANAEHVRNLPGRKSDVKDAEWLSDLLAHGLVASSFVPPEPIVELRDLTRTRRQLVRQRVRHTQRVQKTLEDANIKLDSVISNVLGKSGRRMVEALIAGKTDPVQLAKLADFRLRASDAQLTEALRGRVTEHHRLMLRIHLEQVDATDRTIATLDQEIERMLEPFRAELTLLCTIPGVGALAAQTIVAEIGTNMCQFPTAPQLISWAGLCPQLRESAGKRKNTRLRRGAPWLKPLLVQAAWAAVRNKDCYFRAQFYRLKARRGPKKAIIAVAASILGAAFHILRDAVPYRDLGQAHFDRTDKHKVTSRLLRRLTD

SEQ ID NO: 190463 - protein, 325 aa, unidentified
MIDADLIYVGVDVSKANLDICVGVMGRMSTLNNTGPGHDALCRMLKPLKVGLVVLEATGGYEFACAAALQSAGLPVAIINPRQARDFARAMGRLAKTDRIDAQGLAHLAQVWAARPDAAHLVKPLPDAQQQTLAALVSRRRQLVLMRTMEGNHLGIAHLSAYKSIKAVLKSLETQLRHIEAELAAHLKLHHADVSKLLSDVKGIGPVTVATLIGELPELGTLNSRQVSALAGVAPYNHDSGRLKGKRCISGGRATLRSSLYMATLAATRFNPVIRVFYQRLLAAGKPKKVSLVACMRKLLIILNAIVKTGLPWNEKLHTLAVVSS

SEQ ID NO: 190464 - protein, 343 aa, unidentified
MQTVTTIGLDIAKSVFQVHGVDAVGQVVVRRQLKRRHVLEFFQKLQPCLVGIEACASSHHWSRELQALGHTVRLMPPAYVKPYVKRQKNDAADAEAICEAVTRPNMRFVATKTIEQQSCLVLHRTRHLLMRQQNSVINAIRAHLAEFGIVAPVGRNGVEQLLRVVADSKDRRLPEIARACVAVLGAQLQMLKAQILESDRMIRAWHRSSEVSKRLDEIPGVGPVLATALVASVVEPKVFRSGRDFSAWIGLVPKQNSSGGKERLGNISKRGDRYLRSLFTIGALAVIRYAKIHGTKHRPWLAALLARRPAKVAAIALANKLARMAWAMMAKSERYKQPVALAA

SEQ ID NO: 190465 - protein, 415 aa, unidentified
METQRNRVCGADIHKKFLVATILSRDGTKKTKRFGMTLDDLLDFKSWVMENQCEQVAVESTGVYWIPIHSVLENAVDLIVANAYKIKHIPGRKSDLIDSEWIAELCLNGMIEPSRIFPKDDRELRRLTRAREGYVNDMTREKNKIHHALESCGIKLSSVLADVFGKSGRYLLNCLLKGTELEEMIEGIPVKSVKLKADQIKEAVKGSLETTQIILIRGGLELIGSIQRRIDELEREIKNRIASRRADLKIAMSIPGIGFISASTILAEVGDFNDFDKAEQLAAWAGLVPTVYQSADKLITGSITKHGSRHIRRILVEVAQAISRSNKGKLKRFFRRVQAKKGYNVATVALARKVLCILYHLMINREMYQEDDITRTKTVDVNSSSLPTKLGFEEMIQILAKAGYEIRKTTSGTGG

SEQ ID NO: 190466 - protein, 342 aa, unidentified
MQVITIGLDLAKHVFQVHGVDQEGRVILRRRLRRAEVVRFFSSLPPCLVGIEACSTAHHWARELIGLGHEVRLMPPTYVKPYVKRGKNDAADAEAICEAVTRPNMRFVPIKSAEQQSVLVLHRARDLLIRQRTMLANSLRAHCAEFGIVVAQGMAKLAELLARIADEADTHIPSLARGCLLVLGQQLQELQLKIGEVERALHGWHRSNEVSRRLETIPGIGPITASALAVTVTDPTLFRSGRHLAAWLGLVPRQNSSGGKERLGGISKQGDRYIRRLLISGAHAVLQYAKRGRPGSSWATGLLQRRPFKLVAVALANKTARIAWALLARGETYRSMPEACAT

SEQ ID NO: 190467 - protein, 365 aa, unidentified
MHYVGVDLGDTRSSVAILNDDGKVFKQMEVKGRWNEVVARVSLLPRPMAICYEASCGYGYLYEKFSTLSKRVEVAHPGQLRLIFRSKKKHNRVDALKIAKLLFLDEVPRVHVPAAEVRSWRMLIEYRQKLVAQRVSAKNQIRTLLKSQGIEAVKSLWTAKGLAWLEALELPELETLRREMMIDELKGLGAKINRIEMRLAKVAAGRPEVRLLMTIPGVGIRTAEALVAYVDDIGRFARLKRVGSYFGLVPCQDATGNVNRLGHITREGPATVRKLLIEAAWQGIRRSPTIRAFFERIRRDDPDRKKIALVATGHWLVRVMSSMLRSGECWRERTDLPMKDSPKGWLSISPPEDTGARKPVSSDVE

SEQ ID NO: 190468 - protein, 458 aa, unidentified
MKSPVNDVEEIDGDEAERILTYAAAIDVAKASGMVCVRGPHPSIDGRRTSRVWEVDSTTNSILGLGEDLVALGVERVVLESTSDYWRPFFYLLEAAGLTVWLVNARDVKQVTGRPKTDKLDAVWLAKLNERGMLRPSFVPPREIRALRDYTRLRTELVEERSRHKQRIEKVLEDALIKLSSVAADLLGVSARAMIEALIAGERDPKVLADMARGKLNAKRAALIEALTGRFDDHHADLARLLLDQVDACTDKVDRLTTRIEALVAKLPEPSPPADRQPRPTPANDVPVEHDPHADRLTPVERLDEVPGIAERAAQIIIAEVGLDMAQFPTPAHLVSWAKLSPQTIQSGPRIKAGETGKGNRYLKGALGEVATAAAKTDTFLGERYRRLVRRRGKQRALVAVARSILVIVWHLLNDPDSRYVDLGSDYYTKRLDPDRKTRDLVRQLQALGHSVTLAPAA

SEQ ID NO: 190469 - protein, 321 aa, unidentified
MLKEARVSDKIFLGVDVSAEWIDIAFHGRGSVERIANEAESIGAWLARLKADEVGLVAFEPTGGYERSLRRELVLARLAFARVHPNELAAFRGRRGVKAKTDPIDARLLADFAALELSGRGLAPLVEGDEALREMSARRRQLVDLLHAERCRADRAESRVVREGLDEVIATLNVALRRLEQAIEAHIAAEPVLATTASHLRSLTGIGPVTVHTLMGELPELGRLSGKEIAALVGLAPRTNKSGKLTRRATIGHGRPGVRRVLFNAARSAIRWNPVMRDFYATLVHTNRRPGKVALTAVMRKMLVTLNAIAREQQPWRSAKA

SEQ ID NO: 190470 - protein, 387 aa, unidentified
MSQASDLSRSLVPFDQNTTLTVVVELSEASWLVAGLIPGVDRQPVKKQEPEPVALLRLLERWRAEAVRAGRTIGRIALAFEAGRDGFWLARWLQARDIEVHVVHSTSVAVSREHRRAKTDRLDTAMLMRVFLGWLRGERGHCRMVAIPTLEQEDAKRPSRERESLVGERTRIVNRMKAALARLGIRGFKPTLRKAPQRLDALRTPEEVSIPPNTLDEIRRDMVRLAVVREQIDVIERARLARLEQAPASGPHAMVRLLARVIGVGLETADMLVQEVLSRNLRDRRAVARYVGLTGSPDESGRRRREKGLAKAGNARVRRGLIQLAWRFLRFQRDSALAHWYRARTDGPKGARKTTMIVALARKLLIALWRMVTIGEIPAGVALRQEI

SEQ ID NO: 190471 - protein, 370 aa, unidentified
MGKHRLAFVAFDSAKNKHAVAIADSGRGAEVRYLGEIDNSPDAVRKLVAKLTRQYERLHFCYEAGPMDGLHRQLTELGHVCDVVAPTMIPKRSGDRVKTNRRDSVALVKLLRAGELRAIWVPDSVHEAVRDLTRARATAMVDLKTKRQQLLSFLLRHGRGFPDGRNWTKTYERWLAKQTFAHPAQQIVFQDQLEAITTAQARLAALEQQLREIVPTWTMAPVVAAYQALRGVSFLVAITFVAEVGDVRRFATPQQLMAFLGLVPSERTTGDTIRRGSITKTGNHRARRVLIEGAWTYRFSARVSETLRTRLKDLPSSVRAIAWKAQVRLCARYRRLIARGKKTPVVTTAIARELSAFLWAIGQQVAPQTR

SEQ ID NO: 190472 - protein, 366 aa, unidentified
MKKTSTVRVNGKMIFKGHQLTIGLDLGDRWSNYCVLDEAGEVLLEQKLATTPEAMKQTFARMPRSLMALETGTHSPWLSRLLKELGHEVLVAHAQKVELITKSNRKDDRHDARTLARLARIDPELLGPVRHRSAKAQIHLTVIRARAELVSARTALVNAARGLTKSYGERLPKCGTEQVSRELAAKLSAELREVLEPLLKEIESLNERIKEYDARMEKIARESYPQVALLKQVKGVGTQIALTYVLTLDDPHRFAKSREVGCFLGLKPGRRDSGESQPQMQISKEGDRYLRTMLVQGAHYILGPFGADSDLRRWGLRLAERGGKNAKKRAVVAVARKLAVLLHRLWVSGEVYEPLRNNRKAMRAVA

SEQ ID NO: 190473 - protein, 362 aa, unidentified
MLKSTTIIAFDQHAATTVAAVLLPGHRTPALQALTSDVPTILRFVQRLRRQGTIRCCYEAGPCGFELQRALTARSIPCDIIAPALIPRRPGDRIKTDRRDAGQLAVLYRAGALTAIHIPTEQEEAARDLWRCREDVRADLLRARHRLSKFLLRHGRRFTATKKAWSKRHDAWLRAQTWPLAALDQTHRAYLRAVDEVLARLRDVEQDLRALLDLPALRPRVQHLRCFRGIDDLTALTIAAELGDPRRFPTAPSTMAFVGLVPSEHSSGTKRAQGGITKTGNAHLRRVLVESAWHYRHHPFVSASLRARQRGAPATVIARAWTAQQRLHRRYQRLAARGKPKQHIVTAVARELTGFVWAALTQ

SEQ ID NO: 190474 - protein, 421 aa, unidentified
MRGLRAKRVKTVKEGTLIATVDIGVVSNTGYCTTLDGRDTKSFKFDNTKEGFEKFWCMAVASKNRFGCDEVLVGYESTGPYAEPLVHYLGNKEVRIVQVNPMHTKKMKEVNDNSPLKTDDKDPRVIADIIRLGHALTIVVPEGDAAYLRRLNNARERHVEEQTALLNQLQQLVFLIFPEFKTVLKNMKCKTAQYILKRYTTPERIGALSKKALGEEMRKRSMGKFGAKEAEFLIGLARETVGIQEGIAGIFMDIRHILMQLEAEVRFISEIEAEMGVTLERIPCSVRLLSIKGLGTVSVAGLIGEVGDFSKFSTQSEIMKLAGLDLYEISSGKRKGQRRISKRGRSLLRKILFYAAIQMIRKNGVMYDYYARLIGRGMERMRALIAVSRKLLRIIHAIVRDDRDYVRQYQAPERRVMEKAA

SEQ ID NO: 190475 - protein, 393 aa, unidentified
MDVAYTRACGIDVHQKSVSVSLLIGDFDTNRPKRTNRKYDTTTNSLKELACWLDDNDVQVATMESTSQYWRRVWQILSRYSHVNVKLVNPQKIKRMPGRKTDKKDAEWLVDLTRVGMIEPSYIPELSTIELRESTRLRKNLIQQLTVIKNEIYNILQRSNIKLTSYLSDIFGVTGMKLMNLLLNGEAINVDTITPLMHGRMKATAEEIVEALNGRLSKNDRYLIDIQLNLYDALVRSISEIEAHIQEQTNSFEELRIRLMAIPGVSDHTAAIIMAEIGTNVDAFENEQAIAAWAGLCPGSYESGGKKYSSKTNRGNKYIKAALAQSAMTARLSRESDLANFYYRLAGRIGAAKAVVALAHKLLRIIYVMIRDGVEYDECKLKSRPFPLEQPTF

SEQ ID NO: 190476 - protein, 403 aa, unidentified
MIGVDPHKGSHTAVVIGLAEEPLGELRVRASAGQAEKLVAWAADWPERTWAVEGAAGLGRLLAQQLVAAGERVLDVQPKLASRVRLLQAGDTNKNDPNDARSVAVAALRSKTARPVMAEDYPAVLKVWSKRHRDLARLRNQVACRLHAVLCDLVPGGHPKEISAAQAARILEQASPSGAVDRARAELAAQFLEDMRRLDAQLRGTRKKLAAAVSASGTTLTEVFGVGPVIAGTITGDIADVSRFPGRDHFASYNGTAPVEVSSGNRKVHRLSLRGNRRINHAIHMAAITQIRHRHSDGRAYYEKKLAEGKTHKEALRSLKRRISDAIFACLLADARRAGQRPARRAREGNQGATLTPARPAHTPNAGSSDKPLPDPGTTIRPGTRAATPSPSKPASKKTRPAT

SEQ ID NO: 190477 - protein, 355 aa, unidentified
MTSTKYIGMDVHKESVSIAVRNGAGKVVMECVIETKASMILQFIDGLHGDLRVTFEEGTSAAWLYDLLKPHVTKLVVCDPRKNASMREGNQNDKIDARRLAELLRLNHLSPVYHGEHGLRSLKELVRSYLTITKDLGRVMSRVKAIYRSWAIPCSGKQVYAPRHRAEWLGKITEPGVRRRAEFYYQQLDALRILRREVRRELLAEAKKHPAWKRLCQIPAIGPIRSAVLLGILQTPHRFRSKRQLWTYSGFGIETQSSADHRSVDGQLERVKKQSSIRGLNRNCNHDLKNLFKGAAIVASSKPGPLQEFYSALLSKGLRPEMARLTLARKIATIVLIVWKTGACFDAQHLKPQTA

SEQ ID NO: 190478 - protein, 338 aa, unidentified
MYYTGIDLHKFTSYLTTIDSDGCIVKQANIKNVNYNFMQYFSDLSGEHQTTVESTCTWYWLNDLLTSINIPLTLAHAKYVKAIAYAKVKTDKVDSHILAQLLRLNFIPQAHKISNENRTIRDALRARLKIVQRCTSVTNSMALLLAKYNLTEPAELQDIPKLQYEQLSVHASLLKEQMLTLEKSLYPYLIPNKDVQRLLWVPGIGKMNAFTILLEADDINRFADVKNFFSYCRLSPSARNSAGKSRQRSSKDGNKYLKIVFTDAATHAVQYYSEIRKYHNSLLRKKNKIVAKTIIAKEIAEIVFYVLKYKTNFNNKFKGVELQHKKSLQWPRVVSPYA

SEQ ID NO: 190479 - protein, 343 aa, unidentified
MVHYIGLDVSLKRTSICVVNQVGSVVREGVVESEPEAIAAFVRSKAPGAVRVGLETGPTATWLWTELKRLGLPVICIDARHAKAVLKMQINKSDRNDAAGIARIMQTGWFKEVRVKDLDSHSVRALLASRALLVKIKRDLENQIRGLLKNVGLVIGRAKFNVFTVRAEELIEDRPELMAVVRPLLKARQAIEQQTDDLDRKVLKLARYDAQVRRFMTVPGIGPITALCFKATIDDPTRFKRSRSVGAYVGLTTRRHASGEIDWTGRISKCGDAMLRSYLFEAAGVLLTRVPKWSALKAWGMRLAKRNGLRKATVAVARKLAVILHRMWIDGTEFNWSKKEVAA

SEQ ID NO: 190480 - protein, 406 aa, unidentified
MSIYIGIDWSENKHDVVFLNDELKIVAYLTIPHSPDGLDKLDATRQAMNVDAAHVAVGLETAHNLLIDFLWARGYRQVYVLPPNVVKSSRKRYRQSGARTDESDAFVIANLLRTDRTRFHAWCPDSTLTCQLRAKVSWITFLTHQQVQVSNRLRAVLLRYYPAAAEVFGHLTSQIALEFICAFPTPQTLHALTIVAFKEFAHQHKYSRPKELPAAFARLQTPRPVAAPEVVERYQDEAMHLARLLLTIVREHSAAERALTKLFQQHPDYAVFHSLPGAGDFLAPALLTKFGDDRQRFPTPGSVQALAGTCPVTDASGKKKIIRYRRACDHEFRHVAQEWARHSVTESVWAQTYFAQVRPHCNSQSHAYRCVANRWLAIAWKVWQTRQPYDEAYHLEQRAHRQTARQ

SEQ ID NO: 190481 - protein, 388 aa, unidentified
MLLDHPSDGLAAIRTQFGAIFVSLELSRSTWLVTSLSPCKGEKMSKRSMKAGDLSELLKLFAELKRKAQARTGESYPIIAIQEAGLDGFWLHRALQQEGIESHVVDPASIATPRRRRRAKTDRLDGETLLRTLLAYKRGEVRVCAMVVAPSPAEEDRRRLCRERETLIAERIEHVNRIKGLLFAQGIFDYAPLRRDRRKRLEALRTGDGRPLLAHLKAQISRELDRLELLLDQITAVEREQDALLAASKAAGEKTVSNPVAMLLELKSLGPNFTAVLWSEAFYRQFANRRQIASYAGLAATPWRSGGIEREQGVSKAGNPRLRTTMIQLAWLWVRHQPQSALTQWFKVHSQRGRKRAIVALARKLLVALWKYVTAGVVIEGAEIKAAA

SEQ ID NO: 190482 - protein, 387 aa, unidentified
MFLVGIDVAKDKHDCFICDSEGNVLKDVFTFSNDREGFNLLLSFMPTSSENVKVGLEATGHYSLNLINFLIDNGYSPVVFNPLQINLFRKAHTLRKTKTDKIDAKLIALMLSSNDAKPHLDLSYHVTELKSLTRYRSRLKDQLARLKISLARIIEIVFPELEDCVYSINQKSTMALLHEFPSKELIANAHLTRLTNVLKDNSRGKYSKDKALEIRNVAINSIGTSSDASSFELVQTIDMINFYSSKIDELDAKIKDIMIELESPILSIPGISYNLGSIILAEIVDINRFDTPAQLQAFAGLDPATHQSGKFIATGVSMVKRGSPYLRWAILNASRLIAMRDPCFKDYYQRKRKEGKHHFVALTHVAKKLIRVIFKLLKTNSQFSPQA

SEQ ID NO: 190483 - protein, 314 aa, unidentified
MSQPIFVGIDVAKDTVEVACSDASRRCFTNDEAGHLRLTRWLSRRQVTLVAMEATGGYEAGCAAALAAAGLPVSVLNPRQARDFARAMGRLAKTDRIDALVLAEFAAVLHSKGHQPRALASTEQRELAAVVARRRQLVAMLVAERQRLGVAHARAKSSIDAVIELLLRQLADLDDDLKRTLKDRHADLAELLQSVKCVGPTTASTLIAELPELGLLTRKQITSLVGLAPLNRDSGTLRGQRHIFGGRASVRRVLYVAALVGTRFNPALKTCYQRLIGAGKPKKVALVACMRKLLITLNAIARTKTPWRSDFGSA

SEQ ID NO: 190484 - protein, 338 aa, unidentified
MRIHTVGIDIAKTVFHLVAVDEKGSVVVKKKFSRPQLLVYTANLQAEVIGMEACSGAHFLTRALIAQGHNVKLMPAEYVRPYVKSNKNDFIDAEAIAEAVLRPNMRFVPLKTEEQLDLQALHRVRERWIGRKVALTNQLRGFLLERGLPIRVGSEHLRKALPSILEDAENGLTPRARTILSTLREEWTELETRIDTVTDEIGRISRSNEGCKRLMGVPGIGPIISTALVAAVGNATAFKKGRDMASWLGLVPRQHSSGGKTKLLGISKRGNFYIRKLMVEGARAAFARLNRSQHSFGPWMDNLQSGKHSNVAVVALANKMARIAWAVLTTGQQYRAAT

SEQ ID NO: 190485 - protein, 353 aa, unidentified
MKSRMESKMSSPMVIGVDIGKEVFHLVGFTADGKIAFRRRIRRLGLKDVFEKLPPCIVAMEACLSAHFVSRTLRALGHEPRIIPAIYVKPFVKGQKNDYNDAEAIAEAALRPNLRFVQEKSQDQLDLQACHRVRSRLVSRRTATINQIRAFLIEQGIAVRTGPRALRKSLFSILENRKEEISPRTAKLIRGLYDDWCCLDERIETVTGEIEILSRSEAKCRQLMSVPGVGPLISTAMVAAIGSGEAFERGRDFAAWLGLVPRQYSTGGRSILGRISKRGSKYLRTLLIQAAKVLLMRPHNWARYSFGPWLNAASERLHRNKLAVALANKLARIAWSVLRNDKAFDTHLEVAAI

SEQ ID NO: 190486 - protein, 371 aa, unidentified
MRDITTLGIDLAKDVFQLHGTDDKGNKVLSKRLNRNKLASYVANLTPCLIGMEACGGAHHWARAFRTMGHEVRLMSPQFVKPYVKTNKNDQADAEAIAEAVTRPTMRFVGIKEIAHQDIQALHRYRERLVKNRTQLTNHIRGLLHEYGVIVAKGLASLQKKLPEILADETNQELTPMNKELFSDAYEELCELNKRIDKYTQKIELLSKADERCKNLLTVPGIGPITATAMVASVGDPHVFNKGREMSAYFGLVPKHVASGHTTRTLGISKRGDRYLRSLLIHGARSVVKMAHKKTDARSLWIQQLVGRCGMNKAVVAVANKNARIAWAVMTGNTTYLAKEPAGMPLKLLVNKEHSKNNVAATHQAQSHEGC

SEQ ID NO: 190487 - protein, 353 aa, unidentified
MHTHQKSSDPVATIGLDIGKNSFHLVGLDKPGAIVMRIKVSRNQLIRRLVNLPPCLIGLEAGSGSHHIARQIKQLGHNVRLIPAQYVKPFLKGHKNDYRDAEAIAEAVQRPTMSFVAIKTPEQSDLLSLHRVRSRLVRQRTAIINQIRGFLIERGITVRQGPAPLRKVLPELLSSPPEELSPRLLRLISELDEDWRRLDARLEALSAEIESLSKNDPACQRLMTVPGIGPIISSAVVAAIATGSGFKQGRDFAAWLGLVPKQESTGDRTKLGRISKRGNKYLRTLFVQAAHVVLERRPAAAMRALWPWIEKASKRLAHRNLLAIALANKLARIAWAVLARGPDYEPRITPNAA

SEQ ID NO: 190488 - protein, 347 aa, unidentified
MDFYAGLDVSLAATNVCVVDGDGKIVREVKLDTDPDAIELFLAEWGSHLKRVGLEALSYSAWLYTALAKKGLPVICIETRHAKAALNAMLNKTDRNDAKGVAQMMRTGWFGAVHVKSERAQTLRALLVGRKALLGKVLDMENMIRGLLRPFGLKLGEISVGRFDARVREIMAGKRDLEAIVAPLLDARAAMRLQLAKLHRLALVAARSDNSVRRMMTVPGVGALVALTFRATVDDPARFKKSTNVGAHFGLTPRRYESGQTDRIGSISKCGDELTRAMLYEAAIAILTRINFKLRLWGLRLARKKGLKRAATAVARALAVLLHKIWSSGTTFRFGAGGKCGRVAAAM

SEQ ID NO: 190489 - protein, 397 aa, unidentified
MYIVGIDIAKRKHEAAVIDGEGAVIIKPFSFTNNCSGYNRLLAMLAKAKLPLTEVSFAMEATGHYWLALFTRLQKEGFRVQVINPVQTNSIRSFYIRQAKTDPRDALLIAEVIRFGHFSESTLHPENIYELRELCRGRHAIVSMQADVKRKVVALLDQVFPEYETAFTNLFGDTSMAILQTCPTPKELSEMPLEELCHLIEVSSHKRFRMAKAQELQALARNSFGFAMAGDVFSTMIRLYAKHLDFLKQQVREMDRKIAEIMDTLDTPITTITGIGPTLGAYILSEIGDISRFSSAAKLAAYAGIDPTMRQSGEYNGVRNRMSKRGSPYLRHAIWLAASSAVLHDPALKLYFQKKRDEGKPYMASVGHACRKMVSIIYAVMRDNKAYTPYIPNEISA

SEQ ID NO: 190490 - protein, 448 aa, unidentified
MFTMHYKRLLTLIDSVSSYLSVGLDVGADFTWMSIALPNGSFIGKPFKIVHSDPRSRDLAVAKIKEAQETYSLKSRCFLESTGIYHIPLLCFLRDKGFDCSVINPIITKNSTNINIRKLHNDKFDSKKAALVGLNVSLKTSILPDDSVVDLRNLVRDYYYFKDLQSAVSLKLTAELKVSFPAYAKVFSKVTTQSSLKLLTAYPLAADMLAASKDDIVKIIHSTARFGESYALRKYDAIIAAAQDAAVFGRALPSNAVRIRLYIDTYQEYQKHLDALLKALHETVERLQDTLIYDQICLLQSLRGIGFLSAVVLIAEMGDFKLFSSPKKLYAYFGLDPAVKQSGKLNGDKVHMSKRGSSLARRVLHMVALNNVKVDKGSGTPVNPVVYDYYTRKCSGKKKTVAMGAVMHKICNIIFAMLRDNKPFEVITPEEHCRRFAAEHPDNIRKAA

SEQ ID NO: 190491 - protein, 371 aa, unidentified
MGKHRLAFVAFDSAKNKHAVAIADGGRGAEVRYLGEIDNSPDAVRKLVAKLTRQYERLHFCYEAGPTGYGLHRQLTELGHVCDVVAPTMIPKRSGDRVKTNRRDSVALVKLLRAGELRAIWVPDSVHEAVRDLTRARETAMVDLKTKRQQLLSFLLRHARSFPDARNWTKTYERWLAKQTFAHPAQQIVFQDQLEAITTAQARLAALEQQLREIVPTWTMAPVVAAYQALRGVSFLVAITFVAEVGDVRRFATPQQLMAFLGLVPSERTTGDTVRRGSITKTGNHRARRVLIEGAWTYRFSARVGETLRTRLKDLPSSVRAIAWKAQVRLCARYRRLIARGKKTPVVTTAIARELSAFLWAIGQQVAPQTG

SEQ ID NO: 190492 - protein, 314 aa, unidentified
MTQISEHERFVGIDVAKKHLDVHLLPDGKSWRIDYTPAGLARLLDQLEKLGPALIAMEASGGYERACADCLAGAGLAVAVINPRLVRRFAGSLGKLAKTDQIDAAVIARYAAFAKPANHHTPDPAQAMLMALTTRRRQLVGMIVMEKQRTDPGHVHPVILAGIKRHLRVLEKEQAKLEAQIDALIASHPLWARMTAALQEVTGVGPQTATALITHLPEIGTLNRRQVAALAGLAPLNRDSGSHRGRRFVQGGRQPLKTALYLAALSAARHHPTLKLFYKSLRNNGKTPKSALIAVARKLLIILNAIARQTIITA

SEQ ID NO: 190493 - protein, 346 aa, unidentified
MTIVEPVRTVTGGVDTHLDVHVAAALDPLGGLLGSEPFEPTPAGYKALLVWLEGFGEVGKVGVEGTGSYGAGLARFLRRRRVEVVEVDRPNRQARRRQGKSDPLDAIEAARAALSGRAQGQAKTRDGAVEAIRVLVVAKRSARQARVKALTQVRHLGMTAADQLRCRMKGLSVPALVAEGAKLRPTRSTDPVTAATKASLSSLAHRIQALDREIAELDQMIDPLVAATAPDLLALFGVGPDTAAALLVAAGDNPERLRSEAAWAHLCGVSPLQASSGKVTRHRLDRGGDRQANSALWRIVMVRIAHDPDTTAYFERRVKEGRTKPEVIRILKRYVAREVYRHLPRG

SEQ ID NO: 190494 - protein, 323 aa, unidentified
MNATQQGGVRVGIDVSKRTLDVRLLPDGEPFVLPNDQEGVDELLDELLSRLEGSPPELVVLEATGRYERLAATSIAAAGIPVAVVNPRQVRDFAKAIGRLAKTDRIDAFVLARFARAVDPSPSVIPDEEASALQAILARRRQILSMLVAENNRLQMAPKALQKRIRAHIEWLEKELSRTDGDLDEAIEASTTFKENEALLKSVPGVGPILARTLLAELPELGEIPHKRLCALVGVAPFNRDSGRSRGKREVWGGGAPVRAALYMGALVASRHNPILKEFYERLLAAGKPKKVALVACMRKLLSILNAMMRDRVPWHLAHLRTP

SEQ ID NO: 190495 - protein, 450 aa, unidentified
MGNASGISRGDRNRNARLARLRALVPTENAIVGIDLADNKQMVVVCDHDSRVLARRTFCCRAWDLGRALDWAAQRATAKGFAGVTVACEPTGYRWRVLGQLAADRGMPMVCVQPMQTSWARRSEDLTFDKTDDKDAVLIARLTAQLRCYIPEPVDETWGRLRHLGARREQLITEAVSQIQQMRALLECVWPAALDTARQPFRSKTWAAAMTVILDRDCGDFGRTRRLGLTRFERAVRREISRWGGQKPTRRIARALFTALTDPSGVLAHRRGALERVQLLLEDWHDTRRKLADTEARMTGVLDELELTERVTTIKGLSPIGAAAMLAETGNPTRFATARAMVKHAGLAPRENTSGKFTGRTKLTGQGRPGLRLAAWRAVWGALKANPVYAARYRHLTGREHNKLTATQAQTVIGAAILRQLHAVTTTGRAWDPDIAIHGTRPRRQAPIAA

SEQ ID NO: 190496 - protein, 408 aa, unidentified
MRGSCPRYCRMALLGHILEPMMETVADRAKPTAIRTDLRAIFVSLELSRSRWLITSLSPGNRDRMSKHSVQAGDIAGMLARFSELRHKTQARTGQSFPIVVIQEAGLDGFWIHRVLRKEEIESHVVDPASIATSRRRRRAKTDRIDGEALIRVLLAFKRGEPRVCMMVRAPTPAEEDRRRLCRERKVLTAERVQHVNRIKGLLFAQGVSEYEPLRRDRRDRLARLVTGDGRLLPNYLKAQIGRELDRLELLLEQIKAVEAERDSLLASTEANKSALPAMLLDLKGIGPEFAAILWSEGLCRHFDNRRQVAAYAGLAPTPWQSGSVDREQGISKAGNPRLRETMIQLAWLWRRHQPRSVLTLWFEERVRHNAGRLKKRTIVALARKLLVALWKYVSAGIVIEGAASKTA

SEQ ID NO: 190497 - protein, 391 aa, unidentified
MNAVGIDVSKGKSMVAIMRPFGEIVSAPFEIKHTASGINSLVELINSVEGESRIVMEHTGRYYEVLAHQLSEANLFVSAINPKLIKDFDNDSLRKVKSDKADAVKIARYALDKWQNLKQYSVMDELRNQLKTMNRQFGFYMKHKTAMKNNLISILDQTYPGVNTYFDSPARNDGSQKWVDFASTYWHVDCVRKMSLNAFIDHYQNWCKRKKYNFSQSKAEEIYGKAKELVPVLPKDAITKLIIKQAVDQLNSASTTVESLRTLMNETASKLPEYPVVMAMKGVGTSLGSQLMAEIGDVSRFTHKSAITAFAGVDPGVNESGSYEQKSVPTSKRGSSILRKTLFQVMDVLIKTHPQDDPVYQFLDKKRAQKKPYYVYMLPVLTSFYASTMDE

SEQ ID NO: 190498 - protein, 360 aa, unidentified
MKIQRTSVGLDVHARSVVGCGLDGDTGEVFERRLTPDRGEIAAWLRDLPGPVAVTYEAGPTGFGLARALDAAGIACVVAAPSKLIRPTGDRVKTDARDAAHLARLLHLGQITEVTVPSIEQEAARDLVRAREDVRGDLMSARHRLSKLLLRQGIVYCGGRAWIREHQRWLRRQRFDSAALQLAYDTAFDAMLATLERRERLDTAIAEMAADSRFTPVVTRLGCLRGVSTLTAFGLAVEIGDWSRLTGRSIGAYLGLVPSEYSSGATRTQGAVTKTGNGHARRLLIEAAWHHRPPYRPGAVMRRRWDAASPAARARGQAGNRRLHERWMRFDERKKRSVVANAAIARELAGWCWSLAVLED

SEQ ID NO: 190499 - protein, 349 aa, unidentified
MGRNIGIDLHRNRFTSAVRAADGRTDGRTWELSELDAFVASLRPDDKVAVEMTTNTRFFYDAVRPAVADVQVVNTAKFKVVTQSVKKTDKHDAEALAFFLEKDMLPTVRLKEAGPGQLAALTSTRDILVKQRTTLKNKVNNRFAMYGRAIKREMLSSEKGLAVVEAEPFDALVQVEIRVLVGQIRSLNASIKDLEKAIKAEAEKHPGYKSLTSIKGIGSLGATVLLTVIGDVNDFADEKKLAAYFGMVPRVSNSNETLRSGRITKHGSKLGRTTLVQCGLIAKKYSPYLAQFHERVKRKKGGGKANIALARKLLGIVYRTLKNGWIFEDFPAFRLVGGGSPVKRKPRVA

SEQ ID NO: 190500 - protein, 462 aa, unidentified
MKHNRRQPKKRTSPSLLKQINVNVAGIDCGSAEHFVAVPPERDPEPVRSFRSFTADLHRLADWLATCGVTSVAMESTGVYWIPLYEILEARGFEVLLVNARHVKNVPGRKSDVSDCEWLRELHTVGLLRGSFRPEAAITALRGYLRHRETLVQSAVSHIQRMQKALVQMNLQLHLVVSDITGVTGMRILRDIVAGQTDPHQLAKHRDHRCRASEAEVAAALTGNYRPEHLFALKQNLELFDAFHLKLQSCDAAIESHLQLLAQRSTPSTPLPPPRTTSQPRVNEPRFELRPLLHQITGVDLSQIDAIGPYTALRLLAEIGSDMNRWPTEKHFTSWLTLAPNNRISGGRLLSSKTQPSANRAAAILRMAAMSLGRTQTALGAYYRRLAYRVGKAKAVTATARKLAIVVYRTLKEGLVYQDPGAAAYNAQDRSRLVRVLTNRAATFGFALLDTHTGEVIHAAVS

SEQ ID NO: 190501 - protein, 526 aa, unidentified
MALGTAQQADISVAVIHERAKQPATARRSEVVNNCAADDNCGGGRPALVRSRSQQAHPQRVRRRLPGEPVAHAQTSNRKRPREGHYISSMGGMAKRRKQHQPPQQTMNDSPQWQQYQAFGALDWGSQTHSVIVIDAAGKVMEDFAIEHSALGWKQFRQKLQVYGSIPFAIETSQGAAVEQLLEAGMIVYPLNPNRAQAYRQRKAPSGVKDDRLDAWSFADALRVDGHGWKALQPEQPLTKELRLLCRDEVSLIEQRTALIQQLRQALAEYYPAALEAFEDWTSVSAWMFLQRFPTADSLAQAGRRQWQKFLHSRRLWGSDQGPRRMEIFAHATELAGSEPTVKAKSLLALSLVQMLFAVQKQLELYRQRIEELFARHPDHDLFGSLPGAGSKLAPRLLSEIGDDRQRFEADAQALQCFGGTAPVTIRSGKDRKYWPVHQRQACNKHLRHALHLFAEQSLSRCVWAHIYYQHHRQKNQSHANALRRLAHRWLKIIHKMWLDRSPYNAELHHRNQLQHGSWIFQFQKS

SEQ ID NO: 190502 - protein, 325 aa, unidentified
MNLSVVLGVDIAKLKFDVCLVKENQKVKHKVFANTTHGFRQLIAWLDSHQVGSLHICLEATGSYGEALALHLHEAGYRVSVVNPAAVKAFAASRLTRTKTDKVDAELIARFCLAQQPQAWTPPASEVRQLQALVRRLESLVEMRVAEENRLSSGIAVDVVRHSLEEHITYLVEEIKQTEKMIREHIDNHPDLKEQSDLLDSIPGIGQTTAALLLAEIVNIKQYKSARQVAAYAGLVPRERRSGSSVRGRVQLSKIGNARLRKALYFPAMTALRCSSFFQQWASGMRERGKCKMAVIGAAMRKLIHLAFGVLKTGKPFDPNWAKTA

SEQ ID NO: 190503 - protein, 319 aa, unidentified
MGKISQATIIGIDVSRDWLDIHCLPEGKRVRLANNLEGHEQVAQLALELGALVCFEATGGQEWRLWSTLDAAGIATRQLPPAQIKAFAASRGTRAKTDRIDAELIARFMAFRPDAGRVLPNEKLRLLRALTSKRGQVVETRKRLLAQIKAHGKLGSAELFDAMDAELKGLLDRQIAELEVRIEQTMASDDNLAATAGILRSVPGIGPVASTMLIAEMPELGQLSGEQAAALAGLAPVAHDSGAMRGKRAIGGGRRQLRHVIFQAALVASHHNPILKTFADRLRAAGKPHKVVITAVARKLVTIANALCKSRLKWTNQAA

SEQ ID NO: 190504 - protein, 323 aa, unidentified
MQGKASPTSSAHAQIYIGVDVCKDGLDIYFHPLGKKLRVSNDRLGLTQLRRACKGLHIVRVAMEATGKYHRLAHRTMYAWGLTVAVVNPLRARLFAEALGALAKTDTIDARMLALLAERLAPDETPPPAEPLEALQELVRARQSAMADRTALLNQRGEARIAFLRAELARRIKAAETYIARLDEEIAARIAAEPILARRREILLSIPGVGPVAAAVLLVCLHEIGSCSAKQAALLAGLAPIACDSGDKTGQRHIRGGRAHVRSGIYMAAVAAARCNPSLATFYKRLRDAGKAAKVALTAVMRKLVVLANVLVKEDRTWRPISS

SEQ ID NO: 190505 - protein, 350 aa, unidentified
MMIIGCDYHPSFQQIAYVDIETGELQERRLEHREEAEKFYRGLAAQGMKVRLGMEASGHARWFERLLAELQFELWTGDAAAIRAKRVRKQKTDRQDAQLILRLMLKDDFPRIWVPSWENRDLRQLLWHRHRMVQARTRIMNQLQAVALNEGLRCKKRLWRDAGREQLESIRLAPWSSRRRQDLLALLDRLTPTIAELTAAIEQEMQRCPAAQRLQTHPGVGALTALAFVLIIGRAERFECGKQIAAYLGLVPLEDSSGKRRRLGHITKQGNSLLRFLLVEAAQVTVRSLPEWRSKYCHMALRRGRKIAKVAMARKLAVRLYWMMRKEWNYEQLSKFGSYAGKPGNRHGVK

SEQ ID NO: 190506 - protein, 410 aa, unidentified
MNPLYVGIDVSSKSNVVYFMLPDGSKHCNFSVANSHTGSSQLVKRILSAMTSCSLDTVLIGLEATSVYGDNLVYFLREDAALARFNSKIHVLNPKQVSKFKEAYNDLPKNDLIDSFVIADCLRFGRINKEVYIGDYRYKALQNLTRARYFAVSNLIKEKQRFMNILFKKYSTMTQEKVFSDTFSTTALAVYDEFESAEALADMDLHELTAFIMEKGKNRFPNPNAVAKAIQKAARSSYRLPKTVNDSVNQVLSISITSIKALEAQIKEFDKAIATQMELLPNVLISIPGIGPVFSAGIMAEIGDINRFHNQAQLAKYAGLAWKQHQSGDFEAQTTRLINSGNRFLKYYLCEAAFSLVRCDKEYSDFYHLKYKEVNRYQHKRALALTARKFVRLVFRLLKDNRLYLSLIHI

SEQ ID NO: 190507 - protein, 406 aa, unidentified
MQIVYECCCGIDVHKKMIVACLNKGGKQELRQFGTMTSDLRALCDWLIENACEMIAMESTASYWKPLYNMFELVGLNAMVVNAAHMKSLPGRKTDVKDSEWISNLLRHGLLKASFIPDREQRELREISRYRKSMVEERARELNRLQKMLESANIKLDSVVGNINGKSSRRLLDQIIAGNSLSVEEVSALLHGNMRKKLDQITLAIDGITTPLQRRLLAQVIDHIDDMTRRISDLDTLILDYMKQYEQAIAAIDALPGIARRSAETILAEIGIDMSRFPSAAHLCSWAGLCPGNNESAGKRYSGRITKGNKTLKTMLIECAKAARKTPDSFFSAQYQRISVRRGKNRATVAVAHSILIAIYHVLRDGVPFMDLGSDFYAKFNRDKKIAACLKKLHDLGWQPSALASV

SEQ ID NO: 190508 - protein, 411 aa, unidentified
MRRVIGMDIHRTFAEVVFWEDGKLRPAGRVSMTRAGLEAFGRSLGKEDEVVIEATGNAMAVVHVLSPYVRRVIVANPLQVKAIAHAHVKTDKIDAGVLASLRAAGFLPEIWLPDADTERRRRLVARRNQVVRHRTRIKNEVHAILHAHLVPPCPHAELFGRLGRIWLSRQLLPDDEAAAIERHLRELDRLGEDLAGLDREIAQAAVEDPAVKRLLTITGVNLIVAAGLVAAIGDVRRFADPQKLVSYVGLNPRVRQSGLGIAQHGRISKRGRSHARAMLVEAAWAAAKAPGPLRAFFLRIRARRGHQIAAVAVARKLAVLCWHLLTKSADYQWARPALVASKLRSIELQAGQPARKGNKRGAAYAYNIKELRDREIELARHAEHLYEQFVSRWQRRGNLARRTGAANEERR

SEQ ID NO: 190509 - protein, 359 aa, unidentified
MDGGREHPHMTAGLDIGDRYSYLGLIDTDSGEIMEEGRLRTSPETFKRRFASERPPMRIAIEAGTHSPWVSRVLEECGHEVLVANPRKLRLIYSNKRKTDEIDAENLARLARVDPRLLYPLKHRGEGFQAHLAIIRSRQALVDCRTQLVNHVRGAVKSFGHRLPKCPARSFHKRASEHIPEALWVALGPILEQIGSLTQRIRDYERELETISKEHYPETELLRQVVGIGPLTALTFVLTLEDPYRFERSRSVGAYLGLVPASDRSGERDPQKRISKEGDQMLRKLLVGSAHYILGPFGSDSDLRRHGQKIASRGGKNSKKRAVVAVARKLAVLLHSLWMSAEIYEPLRNAQRCCGGQAA

SEQ ID NO: 190510 - protein, 352 aa, unidentified
MIVLGADSHKRSHTIAAVAAGTGELLGDQTVQVGRRGSGVLLQWARALDSERVWALEDCRHVSGSLERFLIERGERVLRIPTHLTAKARRSARQRGKSDHIDALAVARAALQEALGSFPAAHLDGPELDLRLLVDHRERLVRHRVELNNTLQWHLHDLWPELQLPGGALFSTKWSTRIGRRLARAEQTMRVRIARDELRRLRELTQAINQFERDITELVGQIAPQLLAEPGFGPLIAAKLVGEIAGAGRFATPAKLARVAGVAPIPASSGSTQRHRLDSGGNRQINAALHRVIVTRARCHAETRDYIARRRSEGKSTREAIRCLKRYLARHVWRLLQPPHPEQRKLPLSSNS

SEQ ID NO: 190511 - protein, 414 aa, unidentified
MTEENFAWFAGVDWGSEQHQACVVDAQGRIIGEREFPHGGKGLADLCDWLLSIGGAADTVAVGIEVPHGPVADTLIDRGFVVHAINPKQLDRLRDRISVAGAKDDRRDAYVLGDGVRTDRRLFRRVHVSDPRLVELRAWSRLAEELTEERVRLSNRVHHELWRYYPQMLKIADDDVAAPWVLDLWHLAPTPDKARRLRAAPVEKLLKQHRIRRIDADTALGILREPAIKVGKGVAEAASVHLRSLFTRLRVVNRELRQAEAQLDKLCAAIGETDAESGEGLQRQDVMILRSMPGIGRINLATLLCEGSGPLSRRDYQALRTLCGAAPVTKRSGKSNIVIMRYAAHTRLRNVVYHWARVATQHDPKSRIRYAALRRRGKSHGRALRGVADRLLGLACVLLQRQTPFDPDFAKLVT

SEQ ID NO: 190512 - protein, 416 aa, unidentified
MHVVYPQCCGLDVPKRSLPACVLVSGSSGKGQQEIRRFGTMTRDLWALADWLQEHHVTQVAMESTGVYWKPVWNILEGQFEVVLVNAQHIKAVPGRKTDIKDWQWIAELLQHGLLRGSFVPPTPIRQLRDLTRMRASLRQDHTAIANRRQKILEDANIKLASVASDWLGVSGRAILTQLLAGEEEARKLAELSRGRWRSKLPAMQLALEGRMTEHHRWMLRVLQAQLEFLEAQSATLEAKIQDQLSDYQEAIALCTTIPGIEEVAAANLGAEIGVNMAQFPSAQHLASWAGICPGNHESAGKRLSGKPRKGSAWLRRSLCQAAWAASHTKETYLAARFRRLAARKGKKRAIVAVAHTLLVSLYHMLKNKQSYRELGADFLDRRRADQVKRYLLKRLERLGVVVTVQGIESTASLST

SEQ ID NO: 190513 - protein, 370 aa, unidentified
MKEPTTLFVGLDVHKDSISVAHAEAHHIAPPHFVGAIGTRHSDIDKLLRRLQSKAARLVFAYEAGPCGYVLHRYLTGKGFDCRVVAPSLIPKRPGDKVKTDRRDAVELARLLRSGDLTSVYVPSVEDEAVRDLCRARDAARVTLKAAKLRLKSFLLRLGLNYVGRADWNDAHKRYLAKVVCPTPAQQIVFQESIRAVDEQVERLRRIEKELLELAPQWRLWPVVEALQALRGVQWIVALTVVAELGDLTRFDNPRQLAAFVGLIPSEHSSGEKRRQGGITKAGNTRARRVLVEGAWGYRYPAKISPHIQKRIENLPKVAQDIGWKAQVRLCKRFRRLKARGKHANVVVTAIARELLAFMWAIAKEVPIKA

SEQ ID NO: 190514 - protein, 359 aa, unidentified
MNANPVAARMHIHCVDLAKEKFQVHSFSHSGECLKQRTLTRSQFERFFCDAQMPRGLIVMEACAGASHWSRRFEALGHQTRLLPAQFVAKNRVGNKNDGNDADAIYATHCDKRVRPVPAKTLEQQDLAALHCARQLLIKQRTQLTNHIRGLLAERGCVAGKGDKGFQLLLARAAERLDPEVSEPLLEIIGLQLKVLEALDAQLDALDKRVHQAAQQSPLAMHLTSIFGVGPVIATAFVAEHGRGVERYADARQFAASLGVSPTEQSSGSTHWLGPITKRGDAYRRHLLTQGAHTVVSNCHRHLDPLSDLARRLLDRHKHHNVVVIAVANRMARIIYALLKHPQDYRITRQGWANITGGY

SEQ ID NO: 190515 - protein, 392 aa, unidentified
MVVSVGIDVSKDKHDCFIVSSEGEVLADAFIIPNTMDGFHYLLQRIRHCTAPQDKIKVGLEATGHYSYNLLGFLLDNGLTTYVLNPLRTNLYRKSLSLRKTKTDRVDARTIASMLLSDAGLKPYTDTAYHNEELKSLTRYRFDKVKERAKLKSSIARLVCILFPELEKLVPSLHIASVYALLEEFPGAKQVANTHLTRLKALLETASNGHYKRDMALEIRNAAKNSIGSQIPAKSLELQHTIRLIRELDREIDEIEEQIQSIMDELHSPITTIPGLGFRMAAMILAEVGDFTRFDSPDKLLAYAGMSPSTYQSGQLKNCYPHMEKRGSRYLRYALYNATKYVCHWDPAFADYLAKKRAEGKHYNIAISHAAKKLVRLIFAMEKSRQPYCSAA

SEQ ID NO: 190516 - protein, 365 aa, unidentified
MSSVPSAAEMIHLGMDTSVKEIVAGVLRPGEEVPVISRVPGDQESVRRLIGRFPDRQLLAACYEAGPGGYELHRLLASMGVACDVVAPSLIPKGTSDRVKTDRRDAIRLALLHRAGLLTPIRVPSPAEEAVRDLVRARGDLLDDRKRMQQRLNAMLLRHGRIWRGSKWTYAHRNWVSGQVFDEPALAETFALYRGALDAREAELAAAEVTMAAWAARDPLAGPVARLGAYRGIAQLTGLTLAAEVVDWRRFACARAFMGFAGLTPTEYSSGGRDRRGHITKAGPEAVRTALVEAAWAYRYRPAIGATLRRRQAGQPPGTLARSWKAQQRLHAKYKKMTARGKPPGVAVVAVARELAGFVWAEMTT

SEQ ID NO: 190517 - protein, 339 aa, unidentified
MENVPVFVGLDYHRQSVQVCVMDEAGRVLSNRSCGNSVLEIAAALRPEWTVRRAAIESCCGAADLAEALIASLRWPLSLAHPGYVARMKHNPDKTDYADAKMLAELSRAGLIPPVWLPPQSVRDLRLLVRLRADLVAGVRAVKTRLLSVLRQQRIAEPRGFGRWCRKWLAWLGSEECALSEQGRFAVGVYLDELDALRTRIAKVEARLRDATVGDDLVARLLGIKGVGEVTAWTMRALIGRFDRFVSGKQLARFCAVTPRNASSGPRVADSGMIKAGDPQLKSVVIEAAQRLRRYEPRWRELSESMAQRGKPTSVIIGAIANRWLRGLYHAMKEVPMTA

SEQ ID NO: 190518 - protein, 337 aa, unidentified
MKNSSQSMEFFVGIDVSKLTLDVTAIHTASKSKKYIQVENNDSGLNVLNHWLHDMPGFAHAQTVFCFEHTGMYTRVLLDYLLSQSANVWMESSLQIKKSLGLNRGKNDKIDSCRIAAYAYRFSDRATFVENNSPEILLLKDLLSARNRLKKSLQQISVTIKELTKVDFPQGKEIEALNLHAIRGLKASIEQIEEKIHQVITSDKHLKEVYQLITSIPGVGFILSVKLLVYTKVFTCFDNVRQLACYCGVAPFEYRSGTSVKGKTGGSKFANMDLKATLHLAAISAIQHNVELKKYYERKVEEGKCKMSVINAVRNKLLARIVAVVHRGTPYVQLTNG

SEQ ID NO: 190519 - protein, 415 aa, unidentified
MRRVYPHGAGLDVHKKTVVAAYLTGYDEKGNEVFDTQTFPTMTKDLLQLGDWLSERGVTHVAMESTAEYWKPVYNILEDQFELLVVNAHHVKHVPGRKTDQNDAQWLSLLMQHGLLSKSFIPAQGQRELREMTRARAGMVRERTNLVNRLHKTLESANIKLASVATDLQGVSARAMLRALIEGNTDASVMAQLARGRMRSKKEDLEAALTGRVKAHHRFILAQLLSQIEGLEASISDFNQEIERMCVPFENAVSHLDTIPGIGVVAAQALVGEIGTDMSPFPTDGHIAAWAGVAPGNYQSGGKTLSRRTRPGNHNLKRVLIEAAHAAVKVKDTYLAAQYHRLAGRRGKKRAIVAVAHSILVIAYHLIKRDQDYQELGGNYFDMRQSVKTTQNLINRLQQLGYDVELNPRAEAIAA

SEQ ID NO: 190520 - protein, 403 aa, unidentified
MAAICGIDWAAEFHDVRIADEHGRVLVEQRCEHDEDGISALLALLAVHRVELVAIERPEGLLVGRLLAAGIAVIAIHPNKVAAARDRFRAAAGKSDRFDAMVLCELARTDSHRFPRLAPSTDETLALRTLVRTREDLVATRVALANQLRAQLDAFWAGATRIFADIDSPIALAFLERYPSPHDARGLGAKRLAGFLARHGYSGRRPVNELLGRLRSAPVAIVGDLETDARRAAVIGLIAALRPIVDQIAQLTSQIRGAIHNHPDGPIFLSFFHDPKSVVCAASLLAEIGDNRARYPTSEILAANADQAPVAIESGKRRTATFRRACDKRLRHHISTLADSTRHWHPWAHDTYQRARDRGADHPHAIRILGRARTRVLWRCWQDGTPYDITQHQAATRHLTTQG

SEQ ID NO: 190521 - protein, 356 aa, unidentified
MGEGSWVGIDLHARSAVAGVLDSRSGELRVLRVPVASGQLLAWLRSLPQPTRVAYEAGPSGFELARACTSAGLDCVVAAPGRIPRAAAERVKTDRRDAERLARLLRLGELVAVRVPEPVEEAARDLVRAREDARGDLMRARHRLSKLLLRHGLLWQGSAWTREHDRWLRSQSFTGPLAVCFDESYGAVLQAKARRDALDRAIAETAVQPPFAETVARLCCLRGVSTLTALALTVELGDWQRFDPARLGAFLGLVPSESSSGGNRRQGAITKTGNSHARRLLVEAAWHQRRPLRPSLALTGRRAGQPAAVRAQAEQAARRLHQRWWQLERRGKRRTIVAVAVARELAGHCWRLATME

SEQ ID NO: 190522 - protein, 405 aa, unidentified
MEIFVGIDWAEAHHDICVLNEMGMVLAKRRIAEGLDGVGQLHALLADHAAEPNQVVIGIETDRGLLVGALLAAGYQVFAINPLAASRYRDRHSTSGAKSDPGDAKMLADLVRTDRHNHRPVAGDSELAASLQVLARAHQNLIWSRQRLVNQLRSNLREYFPAALAAFGTDLAHPLALGVLDAAPTPALGRTLSQSKLAAILRRAGRERGVEEKAAAIQAQLRAPQLAAPALIGEAYGKSVAATVRILRELNAQLASLAAELTQSFDGHPDAELYRSLPGLGVVLGARVLSEFGDDRTRFAHPKARKNYAGNSPITKASGTRRVVLARMARNRRLADACHLWAFCALSGSAGARHYYRTLRQRGKTHHQSLRALANRLVGILHGCLDHGQVYREDIAWPQSPTVAA

SEQ ID NO: 190523 - protein, 370 aa, unidentified
MLDTTTFVGLDVHARSIKAVSLDVMTGEVRCATFGYDAGAVAAWVRSVDPRARCVYESGVTGFDLQKRLSGLGVDCVVGAVSKMIKPSADRRRKNDRNDAEFLARMLSVGNVVEVWVPDDECEAARDLTRALEDARDDLSRSKQRLSKFLLRHGLVFDERTPTGRRKGNWTRAHWSWIESIRFAEGADNEVLAYYVEAVRRAAEEKSRLEGLVGAEARKPRWRRRVDSLRCLKGVDTATAADLVFEAGEFSRFRNARSFAAWVGLTPSEHSSGENDRRGAITKAGNKHLRKTLVEAAWHYLTCSGRPKDLAKGQAPDPAARRHAAKGVRRLVERREALLARGVHGNKANVATARELACWVWAVGLMAEEA

SEQ ID NO: 190524 - protein, 333 aa, unidentified
MGFEPEPSKEGSWMMAQNGLVVAGIDVAKGKVDACIRALSQRRTFESTAEGRRQLISWLRKHKATKVVMEASGGYEREWAKALREKEMAVRIVDPKRVRHFAQSAGRLAKNDAIDADTIAWFAETFGEAPGQAYDAEREKLLQIVNARRGLLETETMLANQGEHSVPDVVRKMQARLLKKIALEVAKLDAAIAAMIKATPHFARLAEIIESVPGLGEGASAGLIAGMPELGQVSNKVAAALLGVAPYDDDSGKRRGERQIKGGRRRIRNLFYMPCMGAATRHNPVLKAFYDRLIAKGKLKKVAIVACMRKLIVILNIMIARGEKWDAKRYAVG

SEQ ID NO: 190525 - protein, 348 aa, unidentified
MLHAGLDLSRRKIDVCLLSAGGEVVEEFASPPDGDGLGGLARRVGGHGLAVRGVIESMTGSRFVHDRLEELGWDVLIADAAKVKGLAPLACKTDKIDARVLAVLSHRDLVPEIWLPDPRVRREREQARFRMHLVKHRSMLKHRIHATLISFGHPCPVTDLFGVAGRELLDRLDVPQPWRGTVDASLRLIDDLDRQIDTINKQLRASGADHPYVPLLLTVPGIGWVLAFTIAAEIGDISRFPSAKKLCGYTGLCPRVYQSGDRDSRGPLTKQGPKYLRWAMLEATMHALRHPAYRERYQRNKRRLGRQRGAKVAQIDVARKLTEAIWHMLTNHEPFAPASGGSAFRLAA

SEQ ID NO: 190526 - protein, 351 aa, unidentified
MKKIFIGIDFAKLKFDACIIESCGMKEFGERKVGTFTNDNAGFRQLMKWVKTHYKNVIPEEMLFCGEDTGSCSQSLSKWLFGKGFDIWIENAYAIKHSSGIQRVKTDKADAAMIAEYAWRHQDKARPYEPLNESLSNLREVFLYRYKLVQQKVALTVRKEDKSSQKSKAMTFINRKTDHLIKEIEDAIEECDSMIDSIIENDPELRENYEIVTSVKGVARQNGACLLIYTNNFKKFDMSSRKIACYYGVAPFGKESGTSVHSPARTSHFANKLIKSLLGQAAQSARIHNAEIKDYYQRMMAKGKKHSVAMNNIKNKLLRIIVALVRKKVKYDPKTYEAYKQQWQGNATVAS

SEQ ID NO: 190527 - protein, 370 aa, unidentified
MDVHTTNYTLCAMEPIIGEDDRVFATIKVTPDYKNILMFIENLKLKLGLNDEYDIQCGYEAGCLGYSLYNQLTAVGIKCVILAPTTMLTPQGVRIKTDMRDAYMIAQCLSYGGYHAVYIPTEDDDSVKEYLRMRNDHKLALKKIKQQINAFCIRHGFCYDGTKWTLSHLKWLKKLEITNGLYRETLDEYMASYEEQEAKIERYDKRIGEIAEQTRYHDKVKKLGCFLGIKTHTALSLIVETGDFERFAKGNQYASYLGLAPGENSSSDNIHRLGITKAGNSHLRQLLIEASGGICKGAVGHKSKELRARQNGNTAEVIAYADKANTRLRSRYYKFIRHGKKRNVAVAAIARELACFVWGMMTDNIEMKAA

SEQ ID NO: 190528 - protein, 412 aa, unidentified
MQTLIERGCGLDVHQATVVACLLMVRRDGKVQKQMRTFGTTTRELVGRREWLLSEGCTHVALESTGVYWKPIYAILEGALEIVVANAQHIKKVPGRKTDVKDAEWIADLLCHGLLRSSFVPPKPIRELRDLMRYRRKLVESQAAERNRLLKVLETANIKLANVATDVFGMSGRLMLRALIAGKATPQEMAELAKGLLRKKIPELELALEGKLEQHHRFLLELQLQRLEAAEKDLAVLEQRIRQMLEPYAAQLALLDEIPGVDWTLAAVIIAELGVDMSVFGSVSQLASWAGVCPGNNESAGKRKSSRIPSGNVYLKSGLVEAANAAARAKGTYLRDKFFRLKARRGYKRAVVAIAHKILVAIYHMLSQQVSYNDLGDLYLDKLNKNHLTRNLVHRLERLGYAVTLTLQQKAA

SEQ ID NO: 190529 - protein, 340 aa, unidentified
MDTLELLGLDIGKSTFHLIGHDGKGHEVLRKKFNRNRLLEFAAKLKPCTIVMESCGGSHWLARKLISFGHQVKLIAPQHVKPYVTGNKNDYIDAAAICEAASRPRTRYVAIKTVEQQVLSTQHRLREALVGHRTQTINRIHGFLLEFGIALPATKAAMNQIHQILDDPVAELPQQLKCDIEYLLEEIKRLTGEIKAIDRSIKEQVAADDAGTRLMSIPGIGPIIASALLADIGDASNFHSARDFAASLGLVPRQYSTGDQTVLLNISKRGDKYLRKLLVQGSRAVLVRIDKRNDALGRWCRDLLARKHPNKVACALANKLARIVWAVLARGGSYNAQLVT

SEQ ID NO: 190530 - protein, 344 aa, unidentified
MNIASIGIDLGKTTFHLVALGERNKILLRRKFSRTQLLAYTANLPASLVGLEACAGSHFIGAVLREQGHQVRLIPAQFVKPYRKSNKNDFIDAEAIAEAVTKQNMRFVQIKTQEQLDWQAMHRVRDRLMQRRTALINEIRGFLLERGLTFAARPIYLRKNLPTVIEDAEQNLTPRLRWLLDRLWQEWKQTEIDIKTITDEIEHISNEDARCRQLRQIPGFGPLVSTATVAAIGNGAAFRRGRDFAAWVGVVPRQFSTGGKQKLYGISKRGNVYLRRMLIHGARAVLLRVKYDTGGFGQWVHRLAQRAPRNKVVVAIANKLARMAWAVLSSGKDYRHQPLQPAAA

SEQ ID NO: 190531 - protein, 341 aa, unidentified
MKQSVIGMDIAKKVFQLHTVDQRSGKIERFKLRREEVLAFFAERQPYLVAMEACGSAHWWARQLQQLGHEVRLLAPRSVRPFVLRNKTDAADAQAIWTAVQQPDAHQVAIKQADQQAILSLHRIRAQLLKFRIMQSNALRGLFYEFGIVLPEGYTPLTKAVPNAFVDAENQVPHVLLESLREQWARVIRLDEEIQAIELRLKHCMRERLDCQKIAEIPGVGLLTATAAVASLGDAKTFRSGRQFAAWVGLVPRQTGTGGRVRQLGLSKRGDTYLRTLFMHGARSIIARGQKSEWVERLLARRPYNVVVAAVANKLARTVWAVLVKGSRYRAEPFTACPVGH

SEQ ID NO: 190532 - protein, 328 aa, unidentified
MIQLGIDVGKSKIDLCLRPDGSEGRQKTKTLTNGPDVAISVLEWLAKQKVGPSDVQVVMESTGTYHEYLAYGLYERSVRVVIANPARIRAFAQGMGILTKNDTVDADVLARYGAMRQPDVWQPPSPAIRELKALISRRDALVHDVGREQSRLEKLLSTRRSLLVEASVRKILQVLNNELQVVQALIDNHIDKHPELKRDMEYLTSIKGIGSAVGSTMLVVLRGNHFISAEQAASWVGVVPKEKRSGSSVRGRTRLSKNGPPEVRAKLFMAAIVAVKHNPLLKQFYDRLLAAGKAKMSALGGVMRKLVHICYGVVMKQQKYDENYATAA

SEQ ID NO: 190533 - protein, 363 aa, unidentified
MKPTTLWVGLDVHKESISVAVFEGTGAQGRPTVTIPNEPGQIRKLFSRLKKEGEVRACYEAGSCGYEVYRQLAVMGIACDVVAPGLIPVRVGDRVKTDRRDAEKLARLFRAGELTSIRVPTETEEALRDLIRCREDAREDVLRQRQHVLKFLLRRGRVFHDTGHWTLAHWKWLRSQRFDELLAQTVFTEYLGTLEKTLARVTVLDQEIAKQAEKEPYKVLVGRLRCLRGIDTLSAMALIAEICDFARFAHPRELMAYLGLVPSERSSGGKQRRGSITKTGNAHARRIFVEAAWHYRHAAACTAIMKARWKDQPPSVVDHAYKAQQRLHRRYFRLTSRGKPSQVAIVAVARELCGFVWAVACAA

SEQ ID NO: 190534 - protein, 420 aa, unidentified
MSFKIFRKNCCGLDVHKTWIYACIGITDTNGRTDYKQTRFSSFSKGLKELSDWLAKYHCTEVCMESTGKYWIPVFNVLEKADVSVILSHPKYTKPQKGNKTDRKDAKWICDLFMCDMVKPSFIPPADIRHLRDLVRYRFKLICMITGEKNRAQNCLTVSNLKLDDVFSDVFGKSSRSITEYILEHPGDLFDVTPFVDRRCKTPIEEIQAAVDGAVSPEQAVKLRQCLNHIDELEKHLEQIDQEILRLSDKYQAALDLIRTVPGFDKNPMTAIQVLSEIGGDMSVFPSAKHLVSWAGCCPRNDQSNKKIKSTRISRAGSYFKPVLVQVANGLLRSKKHPEITDRYKRIKARRGHKKAIIAICRMLLTAIWHILSDLKPYTAEGFRESCPVNESKVLTSSQALNLLKQRGYIIKNDLTPAIN

SEQ ID NO: 190535 - protein, 322 aa, unidentified
MRSSIGVDVSKKKFDAALLTEQGKYRCKVFDNDAKGFLAFRDWIKTNAADQAQVCMEATGVYHEALATFLFDQHVTVFVVNPLRVKRFVESQGLRNKTDEGDAKALARFAAKNDLEAWEAPTKGVRELQALVVRLESLQTMRQAELNRLDIAHPTICGSIEAVIAALDREIATVRTLIKQTIDDDPDLKQRKDLLETIPGLGEATIPSLLAFIGRPERFKTVKALIAYAGLTPAMRQSGTSLAKRQGLHPAGRRDLRKALFYPAMAAGRFNPIVAPFWQRLKAQHKPGKVIVVACMHKLLAIAYGVLKSQRPFDPSLASKGA

SEQ ID NO: 190536 - protein, 359 aa, unidentified
MFSRERRRSRWNSAFDAHQHYTLASVATPDGQLVREERIEHDRGALRGFLERCERGSPVAVETIGNWYWIVDEIEAAGCLPRLVHARKAKLMMGEINKTDKLDARGLNRLQRNGTLPTVWIPPGELRDQRDLPRTRMVFVRQRTQLKNRIHATLAKYALHDLEVSDLFGVQGRALLRERLELLPPHTAYASQQLLGQVEELGRQVRAFEQRIQATFQPTPAVQRLLTLPGVGLTLAVVIALEVGEVARFASAEKLAAYAGTTPRVHASGGKTRFGPSRPDVNRYLKWAFVEAANAICLHRGRAAHRHVSRLYERVARRKGHAKAIGAVARHLAEATYWMLSKQEAYREPKGVGRFVHGG

SEQ ID NO: 190537 - protein, 354 aa, unidentified
MSQTPNTAIAVIGIDIGKNSFHAVGHDARGAIVLRQKWSSGQVEARLANIPPCLIGMEACVGAHHLSRKLASLGHDARLMPAKYVRPYSKGQKNDFNDAEAAAEAVQRPTMKFVATKTAEQLDLQALHRVRERLVSQRTGITNQIRAFMLERGIAVRQGIGFLRTELPTILATRTDALSPRMLRVIEELAGDWRRLNQRIDGLSGEIEALARQDQACSRLMTVPGIGPIISSAMVAAIGTGDVFSKGRDFGAWLGLVPKQISTGDRTILGKISRRGNRYLRVLFVQAAWVVLVRIKDWERYGLKSWIEAAKRRLHHNVLAIALANKLARIAWAVLNKGRAFECVKTDEMASRPA

SEQ ID NO: 190538 - protein, 360 aa, unidentified
MTGTMTWAAMDVHARSICAASLDVISGELSRRWFDTGAVEPVVAWLAGLPGPVRACYEAGPTGFGLYRAAVAAGIDCQVIAPSLTPRPPGDRNKSDRRDTDLLLRQLMAGALTAVAVPSATLEAARDLARAREQVRVDLMRCRHRLSKLLLRHGRVWDRTAWTKVHREWLSAQTFEHQNTELAFIDNLAACDGLTARKDALDERLSSVVTDPEFWPIVRRLRAFRGIDTLSALIIVLEVADFTRFPRAVQLGSWLGLVPSREQSGESDRHGSITKTGSKYARRILVEASWHYARPPRIGKTLYERQEGLPDHVLQIARRAQSRLYRVHTRMRERHKPGNVITVACARELSCFLWAAATAP

SEQ ID NO: 190539 - protein, 372 aa, unidentified
MASIIYVGMDVHTTNFTFCCYTADSDRGFAVAQTEPDYRQVIKYMERVQKQRGEECKFVCGYEAGCLGYSLYHQLTRCGVDCVILAPSTMHQEKGKRIKTDRRDAENIARCLAFSLYSPVYVPTTEDDAVKEYIRMRDDIKADLKRVKQQIIAFTTRHGFAFDGKSYWTQKHLKWLEALVFEHPLYKETLQVYLILYYMLDEKVAVYDTRIEEMSHLEHYEENVQKLCCFRGVAAHTALSLLVEVGDFQRFRSAKHSAAYLGLVPGEHSSSDKQIRTSIAKAGNTHLRRLLVKAAQSYNRGAIGEKSAALKARQGGNPAEVIAYADKANERMQRKYYRIAFKSRHNIAKTAIARELACFVWGMMTGNISNAA

SEQ ID NO: 190540 - protein, 408 aa, unidentified
MDEIGKRYIGLDVHKHYLIALGVDANLEVVMPARRVELSNLEGWMKKNLTKQDEVVLEMTTNTWQLYDELVAHAGLAMVVHPPHVALITRSQVMNDKIAASILARLLAKGLLVGIWVPPQEVRELRGLVAQRQKMTHLATQAKNRLHAVIQRHHLKPPAGNLFAKTKNGWWQALVLGKLEKMNLQSDLETLQFAEKQEARLEEEMTGIAAENEEIGRLLHLAGFGVITAVTVYAAIGDIGRFAEPKKLAGYAGLGARVHDSGMTTRTGKITKAGRRDLRVALVEAAHVAANSHPHWKAELARLQPRLGYNKAIVAIARKLLVTVWHVLAHKVADRFAEPDKVSKKMLRFAYEVGKENRPGRQTAAQFARERLDVLGMGQDLTSIPWGAKKPIPLPPSKLKKESDVPNK

SEQ ID NO: 190541 - protein, 427 aa, unidentified
MAYRIAGVDVHKKRLAVVVSDVEVEGEYEFERRKVGTSPDQLRALAVWLAEREVEEVVMESTAQYWRPAWEALERHWQPLRRQRAAAAPTSGRLHLAQAQSNRGARGRKKDFPDAERLVKRLVAQELTLSFVPDVEQRLWRTVMRRKSQVTRNRVRLQNRLESLLEEAHIKLSSFVSDLLGPSALRMLQALAEGETDPQALAALGSCRLHATPEQLCDALGACTALHPVYRRLIKLTLEELRVIDEHLAQLDHEMAQLLSAHQPAVQRLAAVPGLGVDSAQQIIAEVGPTAATFPSPKHLASWVGTCPGEEESDEVNYSHRSPNGNRQMRRVLNQAANAAVKTKGSIFELVYRRLVPRLGHAQAIGAIAHRLCRLIWRILHQGLTYEERGPAVTLLRAQRRTAKMIRDLRRLGYRVERSPALSGSPA

SEQ ID NO: 190542 - protein, 396 aa, unidentified
MFYGLDVHKEFIQVCELTSKERTRREFRIAATNEAIEAFAQGLSHRDHVVLEATFHSWAIYRLLKPHAGKVVVANPLQVKAIAHAKIKTDKVDAHTLAELLRADFLPTVEMPDEKTWALRQLVSHRRFLVKQQTAAKNTIRGVLNRRLIVMPDGTPFSAKARRWMRKLALPVTERFLLDNALDLLEQVEARVAAADEQLLRHASVEQDAQLLMTIPGIHVTVSIGVLSAIGDVRRFPTPGQMAAYLGVVPRVSQSAGRCYHGRITKAGNSNARSLLIEAAQALARSSSPLTATYHRVRRKRGHNVAVTALARKMVTVIWHMLHNHEPYRYAPVPRTWHKLRSVVPRPPKARVSHLPRKLEEAYQEAGLPPLTDPSSGERRAAANNRRTRTRLARQG

SEQ ID NO: 190543 - protein, 338 aa, unidentified
MKLYAGIDLHSNNSMVVIIDEQDRVMFEKRLPNELEHILLALASFKQWLVGVVVESTYNWYWLVDGLMQSGYSVHLAHPAALVQYQGLKYSADEHDARWLVHLLRLGILHEGYIYPRQARAVRDLMRRRMQLVQTRSAQVICMQTQFTRSTAKSPSGNALKRMLPDEIETLLEERNVASGVRANLEVVRTLNREIARLEREVSEQVKLAAQYEPLLSIAGIGRILALAIMLETGAIERFAGVGNFSSYARCVASKRLSNDKKKGEGNSKCGNKYLAWAFVEAAHFAVRYNPRIKRFYERKAAKTNKVVATKAVAHKLARAAYHVMRERVPFDEARAFV

SEQ ID NO: 190544 - protein, 258 aa, unidentified
MTDVWVGIDVSKAWLDVDLDGDGGLRVRNDAAGHGELRARLDGAMVAGVVLEASGGYERPVQAALSAAGLAVALVNPARVRDFARATGRLAKTDRIDAKVLADYGAYLRPASSPLPGSARARLHELLAYRRQLGHEIVARASQLRLYGDPTLRERAEAALARLKAERRELEQLMRSAIAANAALATRCALLSTVPGVGLVLAATLLAELPELGTLDRRRIASLVGLAPFPRDSGTRPTGPAFGRPEDRLWPSRDPGRA

SEQ ID NO: 190545 - protein, 320 aa, unidentified
MSDSLEIGLDVDSKEFVPAVVDCKAGDRIPNTKAGIAKWLKTLPPRCQVGMEATGRHHELVARMAGQAGHRVYVINPRLIKNYAKATGARGKTDAMDAQVIARYVKKESDRLREYVPRSDEQQQMHDLLRKRQTLVETRARLEQSFEVTKSAPGELADILQAMASTLSELESQLQQLGRDGEHGALYKRLLTIPGIGPAVAAHLVYYMTRWPLANANAWIACTGLDPRPNESGGRTGRRRLSKQGAPVLRQMLYMAAMGLKRCRGGQPLYDDLSGRGHSSTAVFNILARKLARIAWGVFKSGKDFDPALLKVGQARFLQA

SEQ ID NO: 190546 - protein, 372 aa, unidentified
MSEGSEAFVGLDTSKNKISVAVADLGRGGEVRFYGDIDSSPDAVHRLVKKLSTKYQSLHFCYEAGPCGYGLHRQLTALGHRCDVVAPSMIPLRPGDRIKTNRRDALTLARLHRAGELTPVWVPDAAHEAVRDLVRAREAAMLDLRMKRQQLTAFLLRHDRIFPGRKTWSRAHIRWLCEQRFEHPAHQIVMQEYRQAIDDAETRLGRLEGQLADVVPQWSMAPVVEAFQAMRGVGLLAAVIFVAEVGDVRRFESPSQLMGYLGLVPSERSTGDRVRRGGITKAGNRRARWVLIEGAWTYRLPARVGRTLQARLEGLPKVVRDIAWKAQTRLCGRYRRLMAAGKKPCLVTTAIAREMAAFLWAIGQQVAPRLAG

SEQ ID NO: 190547 - protein, 422 aa, unidentified
MCRQTLDSEEIIPRVAALDIGKAELVCCARVPDEDRPGRRLQEVQTYSTMTRSLLGMADRLRCLGVTRVVMEATSDYWKCAFYLLEAAGFEAWLVNAKDVKHLPGRPKTDKLDAVWLCKVAERQMIRPSFVPPPEFRRLRDVTRYRADLVAVRTAEKQRAEKLLEDAQIKLSVVASDIFGVSGRQMLAAMIAGERDPKVLAQMARAAMRGKITALQEAFTGFFTDHHAFLLQRMLARVDAIDADIAALDARIEEMTAPFTAAAGRLDEIPGINVTIASVILAEIGTDMGRFPTAGHLVSWAKFAPGVKESAGKKKGTNATGHGNSYLARVLGNAAVAAGRSDTFLGERYRRIARRRGKKKAVVAIGRSLLVIIWHLLADPGARYTDLGGDYYATRISPERRKRGHIRQLEALGYKVTLEPAA

SEQ ID NO: 190548 - protein, 343 aa, unidentified
MNNITLLGIDLAKDVFQLHGVNEHGKKVLGKKISRTELPKFIAKLPTCKIVMEACGSANYWSRKFMSFGHEVSQISPQHVKPFVQGNKNDKNDARAIAIASQQDGMTTVPIKTVEQQEVQMLHRYRESLVQDRTALANRIRGFLREMGLFLPVGLTQVRKQVPLFLEDAENELTISMREILSNCHKRLLELDIEIEKYTQKIEDFCKQHEVCQRLMQLSGVGPMIASIVYATVGNPGNFKNGRHFAAFLGLVPKEHSSGGKQCLMSISKRGNAYIRSLLIHGGRSVVKVSGKKDDYLNRWVQRIHKERGYNKAAVAVANKNARHMWAIMAYDDKYVDHLKLCA

SEQ ID NO: 190549 - protein, 387 aa, unidentified
MIYYIGIDISKYKHDFCIISNTGEVIVENSSFDNNKKGFQNLLEHLKPYDKSQIHIAFEATGHYSMNLELFLINHGFSFMKINPLIIKQFFKTRSLRRTKTDKADALNICQYLMSVPYKPNSSLLYHSYSLKSLCKTREQLIKERSKFAVLLTNELDKSFPEIKPFFNNKISTTLLFILDKYKNAYHIALMKDYDSIKCISHGKFTYAKFAQLKELAKNTIGYHDNNTDLLISTYVSLYNYFNDKIIPIEKQISTIIKELNPPILTIPGIGDITAASIIAEYGDISCFSSPAKMLAFAGLEPSIIQSGTLEFNGKMVKHGSGHLRYVLMNASLTLLKFNPTFYDFYLKKRSQGKPHRVALSHVCKKFVRLIFTLETKRVYFDPSLLK

SEQ ID NO: 190550 - protein, 413 aa, unidentified
MKRSKRAKTVLAKGRAVVGIDVGKRKHAATALTPSGEIIAQLAFFPNTREGINILENRVLHKAGGPGKSLLAMEATGHYWMCLYHELTRRGYRCVVLNPVQTNAYARSQIRKNRNDRIDSEGIARLVLAGKARATRVPDEKTAEMRLWVRHRQRLLRAANSMERFAHTLVDRVFPEYAGVLSKPFLPSAQKLIREIGLAPADLLHRKRDVRRVLHAASRGRIAPQTVDTLLQAAKQSIGTRQAEDVANRQLVLIFDCLATLREQIAAVEDEIDLRMQKIDSPLFSLGITAKLAAVIHAESDPIGDFPTADQYVAYAGLDPSSYRSGDTIDRRGKISKRGSPTLRRALYLAAFVVTRKHAYFRRTYQKHRRHGKNHRNALVIVSRHLTRVIWRMMTDGREFTKRPPQNALPARK

SEQ ID NO: 190551 - protein, 347 aa, unidentified
MRFYTHQHPFYCGIDLHARSMYVCILSHNGEIVLHRNMKAAPEPFLRAVAPYREGLVVAVECIFTWYGLADLCAQQGIPFVLGHTLSMKAIQGGKAKNDKIDSQKIAALLRGGMLPQAYVYPAERRATRDLLRRRTHLMRKRAELLAHGQHTHSPYHLPDIGKKIAYQANREGVAERFEAAAVQKTIAVDLALITYYDELLKDLGLYLLKTAKKHEAHTLYLLQTIPGIGKILSLVLLYEIHDIRRFPSVQDFASYSRLVKCSKESGGKRLGTSGKKIGNAHLKWAFSEAATLCLRNNPEGQKLLARLEKKHDKGKALSILAHKLGRAVYSMLKRQTAFDMDLFLQS

SEQ ID NO: 190552 - protein, 370 aa, unidentified
MKDTVSRTVLQEGPVRSFMGCDAHRKYSVFVAMDEQGRTTAPIRVEHHLRELRMFLRHIPPGTDVAVEATGSWYWLVDEIEAAGLVPHLAQPFAAKRMIGVSGKKTDSVDARCLATLLRNGTLPETWIPDGAQRDLRNLMRTRLALRQYQTGIKNRIVAAINCYGLRDPDEDGDLFRGPGRVQLCVYKGKLPKHTQEAVIRQWSLVDELEQQMGDVEKQLKSELKPMADAQRLKTLPGVGTVLGATIYLEIGAITRFASPERLASYAGLVPVVHASGGRVFYGPTTNRSNLYLRWAFVEAANLVAGRRKVHPQRHVSRLYTRLRVLKGHQKAAVAVARHLAESAWWILTKQQNYREPQPAVAAVSSSKNG

SEQ ID NO: 190553 - protein, 414 aa, unidentified
MLKIVYPICCGLDVHKDFVYACIATTVNGVTTYKSHRFSTFTKGLRELLSWLLQNNCKDVCMESTGKYWIPVYNILESDCKIVLAHPKYVKAIRGKKTDKKDAKWIADIFKHDLVSGSFIPPADIRQLRDLVRYHIKLTNFTTGEKNRAQNCLTVSNLKLDSVFSDVFGKASSNIIGHILANPSEKLSDVSAFRTKRMKATDEEILEAVDGEFCPEQAEKLRIIREHMSNLDLCKLNLQSLILSTAEKYTPEIDLLCTVPGISTFSAISVIGEIGVDMSVFQTSKHLCSWAGLTPQNDQSAGKKKTTRISRAGVYIKPLLVQCALAAIKSKNKHPEIYNRYCALKKRRGHKKAIIAIARTLLTAIYNILKKKEPYKAELYAHSYDTPPEHRAVSVEEAIFILQRQGYIVTPCAT

SEQ ID NO: 190554 - protein, 413 aa, unidentified
MDVLHPCCAGLDVHKKTVVACVLRSDAAGVPARRVRTFGTMLDDLGQLRDWLAAADCTHVVMEATGVYWKPVYNVLEDAFTLLVANAEHVKRVPGRKTDVSDAEWLATLLRHGLVQASFIPERPQREVRELIRFRTSLIQDRARAVNRLQKTLEGANLKLASVLTDITGVSGQRILDALLRGETDPEQLAELAHWRVLQSKRGTLERALVGRLSDTLSFVVAQQLQQIRALDDQIVACDGRVGEELRPFDAEIELLDGIPGVGRRTAEVLIAEWGADLSRFPSAGHLAAWSGMCPGNKASGGKRQPVRTRKGNPWVRRSLTEAAWAAGRVKGSYLGVQFRRFAARKGRKHAVVVVGHSILTVAYYLLTHRVSYRDLGVEYLETRDREATARQAVKRLQALGWDVRLTPCPVAA

SEQ ID NO: 190555 - protein, 342 aa, unidentified
MDHFAGLDVSVKETSVCIVDDTGKIVREVKVASEPEALLAVLKNPAYHFKRIGLEAGPLSQWLFSALAEAELPVVCVETRHMQAVLKAQINKTDRNDARGIAQMMRVGLYRPVHVKTLRSQKLRMLLTHRKLLQSKAIAIENDLRGTLRNFGLKVGMVGTVKFEARIKELVENLPDLAELVEPLLVVRRVLREQFVILHRRLLALVRDDDVCRRLMTTPGVGPVVALTYRATVDVPARFRKSKAVGAVFGLTCSKYQSGEIDRSGRISRCGDEMMRVMLYEAAQSMLYSKKWSWLKAWAMQIARRRGMKKAIVALARRLAVILHRIWVDGTEFRWTREAITA

SEQ ID NO: 190556 - protein, 348 aa, unidentified
MAQSLFAGMDLHSNNLMIGIVDQDGQRLKHQQLDCDLPQVIRFLKSFKPRFKSLAVESTYNWDWLVDGLRARAYPVVLANPAQIEQYRGLKHADDKSDAYFLAELQRLGILPTGHIYDPLLRPVRDLRRRRLSLVHQRTALLLSCKSLYNRTTGPAMSLSRLKGMAVAEAKTLYEHPANGLIATVQKEHIEQLDQSIERIETAVLQSARALPCYQQLNTLPGIGRILGMTITMEVGEITRFQAQGNLASYCRTVASQRLSNGKKKGDNNQKCGNKSLAWAFVEAANFAKRYDEHCRKWFDRKAARTSTVIATKALACKLAKAAWHVMAHKTDYDPRRMFPELAPSQSK

SEQ ID NO: 190557 - protein, 463 aa, unidentified
MSQFFLGIDISKGYSDFVMIDAVKSNVGTSFQLDDTFQGHVCLFNYLSEFKEQHAGCTIFAGLESTGGYENNWYQMLLNCQELLPVRVARLNPAGVFAYKKANLNRINTDPISARAVAEYLITHSDKVSYHEAVNSNNPSCSMRSLRKHWGFIQMLTKQKTQLLNQLEMLLYEANPDLLHFCKNHTPQWVLTLLLHYPTAKRLARAHADSLAKIPYISKKRAASLIEQAQNSVASSSDAYTEQLIISTVKEIMHLKTQIRNETNVLARHCSFADVELITTFPGISVLSAVGLFIHIQSVARFATTKQIASFFGLNPVFSASGDSLKGSRMSKKGNKQVRQILFMIALSAIQSNPVIRNTYARQRSKGMSNMAAIGACMHKILRIVYGMLKNRQAFDPNIDRYNRLNQRKTVATENADNRRLQEYDETAPVSQRQIKKRWERKQTQNGFAIESGFRSPSPPHIV

SEQ ID NO: 190558 - protein, 483 aa, unidentified
MKSNPQEKNKTATNHPPQHHWQEMNRKQRRETMRKIRSEDLSLEVIHPDAAGIDIGNESHYVAVPPSRDSQPVRRFGCTTAELKAMTDWLKQCAIRTVAMQSTSVYWVAVFDILEQAGLEVYLVNARDTKNLPGRKSDVQESQWLMKLHTYGLLRNSFRPSQEIRTMRTYWRQRNDLVQSAGRHIQRMQKALTQMNLQLANVLSDLSGVTGQGIIKAILAGERNAHKLAEFRDPRVSASKEQIAHSLEGNWQPDLLFVLKQEQDGYEFCKQQMAECDRQLAQYLQKREDRSQGAPLPEEKRKERLRKKKRGNVPQFDLRQGLFRLTGTDLTRIDGIDVMTATTIISEAGWDMSKWATENHFVSWLRLCPDNRISGDRVIGKGRLPTNNRVNVALKMAATTLRLSKTYLGAQFRRLRTRLGAPIAIKAMAAKLARLVYRMLRCGMKYVDRGAAFYDAEHRQRQIKQLKSKAAKLGFQIVQAPAA

SEQ ID NO: 190559 - protein, 342 aa, unidentified
MDHFAGLDVSVKETSVCIVDDTGKIVREVKVASEPEALLAVLKNRAYHFKRIGLEAGPLSQWLFSALAEAELPVICVETRHMQAVLKAQINKTDRNDARGIAQMIRVGLYRPVHVKTLRSQKLRMLLTHRKLLQSKAIAIENDLRATLRNFGLKVGMVGTVKFEARIKELVENQPDLASLVEPLLIVRRALREQIVILHRRLLAIVRDDEVCRRLMTIPGVGPVVSLTYRATVDVPARFRKSKAVGAVFGLTCSKYQSGEIDRSGRISRCGDEMMRVMLYEAAQAMLRSKKWSWLKAWAMQIARRRGMKKAIVALARRLAVIMHRIWVDGTEFRWTREAATA

SEQ ID NO: 190560 - protein, 327 aa, unidentified
MAKRTTICAGIDTGKRKLDIALDGSSEQLQIDNTPEGYKALLDWLRRHRVKRIGIEASGGYEQAVVVELRRKRFVVVVFQPAQVRAYAKFRLQRAKNDKIDAALIAACTGAVKTIHAPPDARLLPFAEHLTMIDQIAEDITRLKNRIETCRNSRFSQTWKEDIARLEQREKIEFKALVAAIRKHRDLAERLDLINSVDGIGPPTAVAILVRLPEIGRITREQAAALAGVAPYDDDSGEHAGTRHIEGGRKRLRRALYTAALPASFRWNPQLIALYQRLIAAGKEHKRALIACARKLLIFANTVVARRTPWKHERPPVPSMTALPQPG

SEQ ID NO: 190561 - protein, 436 aa, unidentified
MTLINFVAANQKYYAFNLLSVFIMVFWSVQYLLQHFLVQTQVSHQLLQPLILILQLPQTPQFRHARPGKFFLPVNGMDYFLPLRLTVRNVLTRRITMNIVFLGIDLAKNVFQLCGLNQAGKPVYTKRTGRKELLQTLANIPACLIGIEASTGAFYWQREFEKLGHKVKVISPQYVRPFVRGQKNDGNDAQAIAVALMQPTMQFVPPKSPEQQDIQALHRARQRIVNHRTATVCQIRGLLLDRGIPIGSAVSRARRAIPLILEDAENGLSSRMRRTIAELYDLFNDLGRRIHFFDKEIETVFRQSEACPRIAKVKGIGPKTATAVVAAIGKGTEFKNGRHFAAWLGLVPRQHSSGDRQVLMNMTKKGDKHLRTLFIHGARAVVRVATNNNDGHMNQWVNQLKERRGFNKTTVAVANKNARIIWSMLRNDTGYQVVCN

SEQ ID NO: 190562 - protein, 370 aa, unidentified
MSVRRILAKTIDTDLEYEAIGIDLAKNCVSAALLTTDGEVVCIDRLDYSELEKSAQALSPTTFAMEPCTEMNYLVQKLEAWGHRCLVIGGKNVQNYVENHYSGQKTDLNDAQALAFLAQDKQLRTIKAKDIEQQKYASLTTLREQYIKQYRQTIVSLKGICQAWGLNISKGISGKAQLKDLIENHAAFPEELRESLVDMVTHAQTTQKVLNKITKTLEVLAKNDKVCQLIQTIPGLGTICSCRLRATIGDIKRFKNPKDFPAYYGLVPRSIATGHNEKKGKITHRGDRTMRSLMVQGAGCVIRLATCGKLKSKHLTKWILKKQKEKMPWGKLVCAVAAKLLRIVRAILISSKPYNPKIAGVVKCSLSKGS

SEQ ID NO: 190563 - protein, 310 aa, unidentified
MEHTTVVGIDVSKDRLDVHVLPSGEAWAVSRDADGLAELCRRLAGMSGVVALEATGGYENVVAASLSSAGLPLVVVNPAQVRAFAKALGQRAKTDPIDARVIARFAEATKPMVRPLPDQATRMLAGLLARRRQIVEMMASESQRLRRTEMPRVRKSIERLLVALKRELADIDHDIDDTVRGSPVWREKEDLLASVPGIGPIIARTMVADLPELGTLGRKQIGALAGLVPFVRQSGQWKGHAHIGGGRPTVRTALFLGAQVAKRHNPVLKAFYERLIAAGKSKMAATIAVAHKLLIILNAILRDKKPWQAA

SEQ ID NO: 190564 - protein, 448 aa, unidentified
MSKPQVIDDQEHERVFERVAAVDVAKAAGMVCTRIPHPSRPGTRQSAVWEVPATMPAVRELAGQLAAERVQKVTLESTSDYWRIWFYVLEAAGLRVQLVSASQSRQLAGRPKTDRLDAMWLARLTENGLLRPSFVPPAQIRALRRYTRARTDLTWDKTRCWQRMEKLLEDALIKVSSVASKLTTVSAQDMIAALTDGERDPVVLAGLARGSMRAKRAALTEALTGMFSDDHGELARLLLDQISFLDSRIGRLNILIAEQLAGIRAAWGIDADGSTGPGAGTGGGAPVLNAVARLDEIPGISADLATAIISETGLDMTRFPTAGHLASWAGLAGRTIQSGPRTRNAKGNGNAYLRGYLGQAAIGAAATATFPGERYRRIARRRGKARAQVAVAHSILIIIWHLLADPEARYADLGPGHYERKIDKHRKARSHIRQLEALGYTVTITSAA

SEQ ID NO: 190565 - protein, 347 aa, unidentified
MHSVGIDIGKRQHVAAICRDGQRTADKPVLRFGADRAGLRDLQRWLARSGPVERVVMESSGHYWLPLAAALHRASVPVAIVNPVSAKAFGTRRLQRVKSDPADARTLAALGMADQPRIREPLAGAELREAARFAMHLVEDQSRIDNKIHRLIELGFPELEQAYDDPTCTSALAVLRLAPTAQAVARKRVTTLADANRGAGHRAVGTKQAERIAALAKDTIAPPELAAQIGFETGLLIAQHDLLEQHIAQAEARVASLLDGELARRLQTIPGVGPAICATLIAEIGDIQRFADFDKLVAYVGVHPAEKSSGQKGGPETSWRMAKTGNAYVRAAPRRTTHASARKGSRR

SEQ ID NO: 190566 - protein, 409 aa, unidentified
MLPSLTTLGVAYDKGIRGIFKVRGRWRQINKLIIEIKMNTLNENSIVVGVDVHKYSHTAVAMNAWGRDMGKLDFTNDNLGTYTDWLNHLGIKENIVIGLEDVNSYGIHLVEKLRDESFHIRYVPAILTERERKSSTKRQKSDLVDAKRVGKVILTKYEETLPAKESIADRRELELAKSLDLLLMERRDLTRTKTILKNQLHCLLHQHYTESYRTICPRSFSKKAICWFLEDLKENRSILATSIMRRLERLLFTEKQIYAISKEITVIGETSKEAGALTTIHGCGMVTACSILAEVITAKRFKDKHHFSMYAGIAPTPHSSGRKHKMHTNPFGNRQLNRAIHTIALGQIAIKGDPRGKEYYQRKLKEGKTKLWALRCLKHQIAKRVFQVLRSALPVPASTGENDAQNCLR

SEQ ID NO: 190567 - protein, 409 aa, unidentified
MRIIGLDIHRAFAEAVAWDDGKLKRLGRVDMRRPLLEAFAKKLSKEDVVVVEATGNAASVAAVIAPHVKQVVIANPKQVRVIAHAKIKTDTIDASVLAQLYASGFLPEVWIPDEPTQALRRQVTRRNQIVRQRSRLKNIIQSILHSHLIPCCPHADLCGASGRTWLFHQVLPEDERLAVERHLREFDRLGDDLKVIERDLARSALGEEGVKRLMTIPGVDMVVALAIVAAIGDVGRFEQSQKLVSYLGLNPSVRQSGPGPAYHGRITKQGRGHARGMLVEAAWAAARAPGPLRAFFLRVRARRGQHVAAVATARKLAVLIWHLLSKGESYVWARPALHARKLRDLELKAGYKAARGQRGAAHAYNIKSHRDQERRWVEQAETAYARFVSGWNPRGPKRVRTGAATEVRR

SEQ ID NO: 190568 - protein, 359 aa, unidentified
MASKVKKSKINFKGKTVSIGIDMHKKSWRITALVEGDIVLGITLASPTYDAFEKILARFKGNNVRIVYEAGPGGFDLYDRLTDDGIKCIVTPPSLIPTESGNRVKTDKKDSLKLAQMLERNMLKAVWVFSPEERAHRQLVRTRRQILNHRSDVMRQIKSLLLFNSIEIPFKSTQHWTGVFMNWLMKLDLGHEALNRSLKAQVDLFNYLNAEKKMLTKDVLQLAKDEKYAQRVDLLKTIPGIGPLSAIEILVEIQEITRFKTADELAAFLGLTPSQYSTGEYIRMGHITHAGNARVRTTLVESSWTLIGKDPEMGRKYEKIKNKRGGKKAIVAVARNLGGRIRRILLDQVPYQLDFQKAA

SEQ ID NO: 190569 - protein, 367 aa, unidentified
MKKVSTRAGAQSTNISQPKLTIGLDLGDRNSWYCVLDESGQIQLEQRVRTNAKALRAVFGEMPHSRIALEIGTHSPWISRLLSELGHEVIVANARKVRLIGESRKKDDRLDAQTLARLARIDPELLSPVKHRSAQAQADLMMIRARAGLVRARTGLVNTARGLAKSYGERLRGCNVRNMNPEKAEGLSPELQRALEPLLAGIESVSERIAEYNERIEKLAQQSYPQVALLKQIKGVGTLIALTYMLTLEDPHRFRKSRDVGCYLGLQPGRRNSGQSEPQLHISKEGDPYLRTLLVQGAQHILGPFGVDCDLRRWGLKLAERGGRNGKKRAIVATARKLAVLLHRLWVSGEVYEPLHNSSRTTVRAAA

SEQ ID NO: 190570 - protein, 347 aa, unidentified
MKIFAGFDLASESVEYCVANERGRLLKRGTMGWSKRRWREFVKEYGRENLVVAFETGPEAHRAEKQLRALKVGTYPFHAGHFEGRRGRKTDRLDAKKMCKALRAGSLPRRIVLAEDEEALLRNWTTARELTLKQLTQCRNRIRGLGRQWGVELPRYDKDHAQRWWEQVGERFPKRLQGMIQQQVRTALTLLQNLDEQEEAIVEQLERTGLKEPARRLRSMPGIGPVVGAGGVAYLGDGTRFTSSRKSGAYAGLVPTVKQTGKRKARLGHITKEGPPVLRRLFVEAAHVAVRTRSFRSTPLYDWYERLRKRRGRKIAIVALARKMLIIATRILRDETTWEPEKLHCGG

SEQ ID NO: 190571 - protein, 430 aa, unidentified
MKSNTQNAKIKAITETTLVLGIDVGSETHYARAFDYRGIEYSKKPFKFSNDEAGFVTFKAWILDIKEKHGKDKVVPGMEPTGHYWFNLGKFLQDNEMKPVLVNPHHVKKSKELDDNNPTKNDRKDPKVIAGLVREGRYMIPYLPEGVYADLRTASNMRFQLQAELTRIQNRISCWFNIYFPEYKTVYGQPDAKSGMLILKVAPLPEDIMMLGIDGVNQIWRDAKVRAVGKARAKTLIEAAEHSVGSKEGEISARMEIRMLLEDYESRNTRLQEVVALIEELVKKIPMAEKLLEIKGVGIKTVSGFLAEVGDISRFNNPKELQKLAGLALVENSSGKHKGEITISRRGRKRLRYLLFEVAMSLVSKNPEFRELHSYYTTRKLNPLKKMQSLMAVAAKLLRVFFAMLTKGVDYDPKKLVGDIKRPAVYLQVA

SEQ ID NO: 190572 - protein, 466 aa, unidentified
MKHNRRRRPIKPRVSPSVLERINPNVAGLDCGSAEHFVAVPPDRDPTPVRSFPTFTNDLHRLADWLTTCRVTSVAMEATGVYWIPISEILEARGFDVHLVNARHVKNVPGRKSDVSDCEWLRELHSVGLLRGSCRPTDGIVALRAYLRHRQTLIESAGAHIQRMQKALVQMNLQLPLVVSDITGVTGLRILRDIVAGRRDPVQLAEHRDHRCRASKTEIIAALTGNYRPEHVFVLQQNLELFDACQAQLAACDTAIEAHIQTLTTSIATPATPLPPPRVTKKPRDNEPRFELRTPLHQLTGGVDLTQIDGITPYTALKVLSEIGTDMGRWPTEKHFTSWLTLAPKNKISGGRLLSSRTQPSANRAAAVFRMTVMSLGRTQTALGAFYRRLAARIGKPQAITATARKLAILVYRALKGELVYRDPGAETYDAQQRTRVLRRLRQRAATLGFELVSRETGELLEGVVS

SEQ ID NO: 190573 - protein, 342 aa, unidentified
MQNMMIGVDLAKNVFQVHGASQTGEVLYRKKLSRKQFSAFMALQEPSLVIFEACGSAHYWAREMEALDHEVRLIAPQYVRPFVKRQKNDAADAEAIVIAARQPEMRFVEPKTIEQQSRAAVFRGRERLVHQRTADVNALRALLYEHGHVFPAGIRHLNRMTALIEDEISGLPMLIREECKDLLAQIAEKTARIIERTAKLKTLAAQSDKARRLQTMPGVEPLTAVAVEAFGPDMAQFKTGRDFAAWLGLVPKQHSSGGKERLGRMTKAGQADIRRLLIIGAMSRLTWLGRRTIPAGSWLSRMLARKPKMLVAIALANKMARQIWAMLTKNENYRDPALAVVA

SEQ ID NO: 190574 - protein, 328 aa, unidentified
MHNYTKTFGIDIGKKTFDVVDSSGSYYQFDNNPKGFAAFLQLLDRDSHCVMEATGYYHYRLAYFLNENHIPVSVENPLSIKRFIQMKLMRVKTDKSDARMICHYGQERELSLWRGYSEHQTECLQMLGLLDTYTKQCTALKNKIKAEAVLGNPSELVVRSLNRSLRTLQLEITEIEEALMQLVELEYRDIVRSLRSIPGIGPKTATMLVVVTDGFKRFERGAQLCSFCGLTPVIRQSGSSVKGKARISKVGNAKLRNLLFLCSFTASKNNKACKELYDRLIARGKSKKLALIAVSNKLLKQAFAISKSGIEYTESYQNNLAFSHSWQK

SEQ ID NO: 190575 - protein, 379 aa, unidentified
MRTVCGLDVHKDSIFVCILNENGILFQDKIGVLTPDLERLVDVLHEHDATEVCMESTSIYWMPVWRILEPYFSLKLVNPYFIKQLPGKKSDVKDAEWIATCLLKDLIRGSYVPEDRIQQLRQYDRRIFDLNKDIVYKLTKLDAALQRCNIRISNYVSTTDGKSYQKVVEKISDGITDPKVLTGLIHGRTTNRVGKEVITASLTGVITQTDIDVIKQIREEVLLAQKHRDECLSKMEELCNKWFPKQMKNLQTVPGICLRSATSVIAELGTDMSSFEDAAHLVSWSGLKPRNDESAGKIKSRKITHGNKFLRKTLIECTWAAAKKQGCFYNTFSYHQTVVRRKNKMKVQVAIARKMLTAIWFILHDNVPYRDYTPDIVAE

SEQ ID NO: 190576 - protein, 454 aa, unidentified
MSRRKTRLESVTEAPQIRRGACGIDISPEVIYVAVGPQQDAPAVRAFGTFTAELYRIANWLGGCGVRTVAMESTGVYWIPLFQVLEERGFEVLLVNARHYRNVPGRKTDVCDAAWLQYLHAVGLLQGSFRPPQTVCSFRTILRHRAGLVQAASQHIQHMQKALDQMNVQIHRVLSDITGVTGLAIVDAILHGQRDGKQLAGLRHGGVKASEQEIIAALDGDYRVEHLFTLRQSLESYRHYQKLMGECDQQLRQALDEFDSKQDGPAAAPVAQKKLRTKQDEELRQQYYRILGVDLTTVPSISVGTVQTFVAEVGPDLSRFRSAGALASWLGLCPDNQISGGKILSSRTRKVDNRLAAALRMAAESLCRDKSYLGQYYRRMRARLGGPQAITAAAHKLVRIIYRLVTTGEGYNEGHFARMETKNAERFRLRLAQQARKLGYTLVPATITVAMGVS

SEQ ID NO: 190577 - protein, 375 aa, unidentified
MLIIGVDYHPSFQEIAFLNEETGECGERQLNHSEGEAEKFYRELKQRGVNVRVGMEATGYARWFERLLAELGFELWIGDPAVIKTKRVRKKKTDREDARLLLRLQLEKRFPIIWMPTPENRDLRQLLWHRHRLVQMRTRIMNQLQAVAMNEGKRWKKKLFSEQGRAQLEKLQLAPWASRRRKELLELLDRLNPTIAELTAAVEQEAKRRPEVLRLMTHPGVGPITALAFVLIIGTWERFHCGKQIGSYVGLVPCEDSSAGRQRLGHISKQGNTLLRFLLVEAAQAAVRWDPDWRRRYLHLAVRRDRRIAKVAMARRLGVRLYWMWRNGREYSQSVEFGSHAGQPVHVHEDYERAVVVDAENRENERKRKRKNSFR

SEQ ID NO: 190578 - protein, 410 aa, unidentified
MNTFYVGIDVSSKNNVAYIMTPDGNKHSSFSVPNNRKGATTLVENVASALSQSNTTGVVIGMESTSVYGDNLMYFLREDGRLGKYERKLHMLNPKQVRKFKESYSELPKNDFTDAFVIADHLRFGRIKSEVYMDDYRYQALKTLARARHQTVEELTREKQRFLNHLFLKFSGLTQEKVFSDNFGAASLALIDEFESIDELAYMDTGELADFIRIKGKSHFDDVEKIAKAVKTAAKVSYNLPKTVAGSVNQVISISMATIRFMQKQIKEYDRAIEKQLETIPNTLTSIKGIGQVYAAGIIAETGDIKRFSGQAALAKYAGLSWTQNQSGDFEGEDTHLIKTGNRHLRYYLCEAANSLRKCDLEFKRYYSLKFKEVNKHQHKRAIALTARKLVRLVYTLLKTNRLYIPPEEY

SEQ ID NO: 190579 - protein, 350 aa, unidentified
MLIIGCDYHPSFQQIAYVDTETGELQERRLEHPEEAEKFYRELAAQGMKVRIGMEASGHARWFERLLAELKFEVWIGDAAEIHRKRERKQKTDRQDAQHILRLLLKDDFPRIWVPSWENRDLRQLLWHRHRMVQARTRLMNQLQAVALNEGLRCKKRLWREAGRQQLEAFRLAPWASRRRQDLLELLDRLSPTIAELSQAIEREVEKCPEARRLQTHPGVGPLTALAFVLIIGRADRFRCGKQIASYLGLVPLEDSSGSRRRLGHITKQGNSLLRFLLVEAAQVTVRSDPQWRSRYHHVMMRRGRKIAKVAMARRLAVRMYWMMRKEWNYEQLKKFGSHAGQPEHRDGVQ

SEQ ID NO: 190580 - protein, 375 aa, unidentified
MFCGIDWAERHHDVALVDEAGTLLAKARIADDAAGYHKLLALLAEHGDSPDDPIPVAIETSHGLLVASLRTGSRRVFAINPLAAARYRDRHGVSRKKSDPGDALVLANILRTDMHAHRPLPADSELAQAITVLARAQQDAVWTRQQVANQVRSLLREYYPAALLAFQGKQGGLTRADARVILTLAPTPTKAAKLTLAQLRGALKRSGRLRGCDTEAERLRDVFHAEYAHQLLGVEDAFGHQLLTLLKQLDATCEAADDLAEAATAAFHQHADSEILLSFPGLEPMLGTPVLAELGDDRARFADARALKSYAGSAPSPGPPARSVSSTAGSSRTTASSTPASSGPSPPSPPHRERTRTTDADASTETGMPPPNGTC

SEQ ID NO: 190581 - protein, 370 aa, unidentified
MKEIITSFVGLDIHKDSIAIAVAEAGRGAPRFVGTTPTEMGSLCRALMRGAKRPSTLVVYEAGCCGYGWARHLSAQGWRCEVISPAHITRRAAEQRTKTDRLDAVLLARESRAGNLVKVATPDERDEAIRDLSRAREDACAARLRARLQLKAMLLRHGRAYQGKTSWTAAHERQLATTKFDHPAQQIAFDEYRQAVRDAHERLERLTQALREQCEHWRMKGLVNALMCLRGIDFIAAITFIAEIGDLSRFAHPKALMKYLGLIPSEYSSGNTRRLGPITKTGNKHARRILVESAWTYRFNPRVSRPIQVRQEGQPKAIRDIAWRAQLRLTYRFRKLRAGRKMMQNKCCVAVARELSGFIWDIARHVKIPA

SEQ ID NO: 190582 - protein, 409 aa, unidentified
MDVIYERCCGLDVHKRTVTACLLTTKPEGGRQQETRTFGTMTDDLLTLADWLAQAGCSHVAMEATGAYWKPVYNILEGQFETLVVNAYHVKAVPGRKTDVRDAEWLADLLQHGLLRGSFIPDRPQRELRELTRYRTSLVRERASEVNRLQKTLEGANIKLASVATDILGATGRAILEALAKGTGEGPELATLARGSLRQKRAELERALKAETSDHQRLMIREHLAHINYLDEAIGRLSREIEERLRPFDHTLSHLQTITGVGRRTAETILAEVGTDTSRFPTHRHLASWAGLCPGNNESAGKQRSGHTRKGSPWLRSALVESAWAAAKTKQTYLSAQYHRLAARRGGKRAALAVAHSILVIAYYIMARGQTYDDLGGNYFDERDRRQVERRLVKRLEDLGYSVTLEAVA

SEQ ID NO: 190583 - protein, 387 aa, unidentified
MAQVNDLSRSLTAFDPNSTLVVVVEMSKASWLVSGSVPGVERQPLKKLESGAAALLRLIERWRNEAVRAGRPISRIALAYEAGRDGFWLARWLIARGIEAHVIHSASVAVSRERKRAKTDRLDVAMLMRVFLGWLRGERGHCGMVAIPTMEEEDAKRPSRERESLVNERSRITNRMKSALVRLGVRGYKPHLRRAPERLAGLRTAEGTGLPANIIAEFRRDMARLALIREQISSIEKTRAERLEHAPDTGPHAMVRLLARVIGIGIETADMLVREILSRKLRDRRAVARYAGLTGSPDESGLKRRERGLAKAGNARVRRGMIQLAWRFLIFQKDSVLARWYRTRTEGPSGARKTKMIVALARKLLIALWRLVTTGEVPDGVELRPAA

SEQ ID NO: 190584 - protein, 359 aa, unidentified
MKQTTKYVGLDVHQATTVAVVGDETGRVIARSVVPTEAMALLEFMRGMRGAVHVVLEEGTQAQWLHDLLVGRVARVIVCDRRGEPRRGSKGDWHDAEWLMGRLRTGELRAVYHGSPHLATLRELGRAYRNVIEDATRVMSRLKALFRGRGIRTTGRGVYDPAERAAWLAKLDGAGVRLRAATLYAELEVLQTLRPTAKAALVAEARRDPAWGVLRTIPFLGPVRVALLLATLQTPWRFRTKRQLWTYAGLAVVTHTTSEYALDASGRPVRRRRSPMTRGLNRNHNHVVKEVLKGAATVAAVRAGEFRDFYQALLARGMREELARVTLTRKLAALTLRLWKAGERYDARKLTTSHVVPAR

SEQ ID NO: 190585 - protein, 413 aa, unidentified
MNVLHPRCCGLDVHKSSISACILLREGGRVQKHQRRFGTMTQELQELAEWLRQFGVTEVAMESSGVYWKPVWNILEGQFTIVLANAQHIKNVPGRKTDQKDAEWIAQLLQYGLLRASYVPCEIIRDLRDLTRMRASLSQEASRLSSRIQKVLEDANVKLASVATNVLGKSGRAMLQDIITGEDNPEQLASLALGHLRVKIPQLQLALEGKIRFHHRFLLRRLLDQVQFVEHEIALLDERLEDIGRQRPDLAHAVARWDTIPGIDRVAAWALLAEIGDNMGQFPTAGHLASWAALCPGNHESAGKRLRGTTRQGSPWLCRMAGQCAWAAARTKNTYLSSQFRRLAARRGKKRAIIAVAHTLIVIGYHLQKNQSNYDDLGGNYFDRIHSDGLKQYLVKRLQQLGHKVTLEPIETA

SEQ ID NO: 190586 - protein, 343 aa, unidentified
MEQISTIGLDIAKNVFQVHGIDENGQVAVRRQLKRRRVLAFFAKLPSCLVGMEACATSHYWAREIEKLGHEVRMMPPRYVKPYVKRNKNDAADAEAICEAVTRPTMRFVPIKTPEQQSVLMLHRTRQLFVRQRTTLINAIRAHMAEYGIVAGVGRNGVEVLLDVIAKGEDERIPPAARECLMALAVQLQLVKRQILEADRRVLAWHRTSKVSKRLEAIPGVGPLVASALVASIPDPSVFRSGRDMSAWIGLVPKQSSTGGKEKLGSISKAGNRYLRKLLVVGALSVIKRAKILGYTRHPWLVRFMERRSTKIAAIALTNKIARMAWAMMVRDEKYRTPLPQTT

SEQ ID NO: 190587 - protein, 338 aa, unidentified
MGQYVGLDVSLDETKVHVLDEQGKRVGACASHPAMIEATIRQHAPEAVRIGLETGPLTTWLWQALTEVGLPMACLDARQAALNMRINKTDDNDAEGLAHLVRSGWYREVRVKSRAAMITRSLLGARTQLLGIVTDLSNQIRGLLKTLVVPKGAGKIFEANVRRLLEGEPAVAAIILPLLESWRAVRVRAAELDRQLLAAAREDRACRRLMTAPGVGAVVAASFVAAIETPEAFRRSRDVGAWIGLTPRRYQSGEVDYDGHISRRGDARLRSLLYEAATSILTHVHADSTLRSWGLALKKRLGFKRAAVALARKLAVILHAMWKTGTNFDARASASAAP

SEQ ID NO: 190588 - protein, 339 aa, unidentified
MFIIGIDPHKRSHTAVAVDRSETVLDTIRVDADRHQRSRLLEWATRFEPRAWAVEGATGMGAMLAQQLVSAGEHVLDVPPKLSARVRLLERGRIDKTDPNDARSAAIVAWRTPALNVVTVNDEHRVVLRLLADRDHQITAQRTRSICRLHALLCVLIEGGTAKSLTVARAEKLLASVHADGPIILERLTMARQLIEEVRTLDAARAEIRRRHVTALEASKTTVTNVFGIGPLTAAIIVGRVGDVRRFPTAGHFARHNGTAPIEASSGPKTRHRLNPRGDRQLNHAIHMAAVTQVRNDTPGRAYYLRKQAEGKSRKEAMRALKRRISDAVYQRLITDAHR

SEQ ID NO: 190589 - protein, 350 aa, unidentified
MDRYMGLDAHASSCTVAVVGPSGRRLHSQVVETNAGALIRVLRGIPGTRHLCLEEGTHASWLYEVLSPHVEEIVVAAVRQSRGQKSDKLDAFGLAEQLRIGAIKRKVYKKRGEFRELRHRAKAYTLLVGDSVRVQNRIKSLFRSRGVAVAGKSVFRAAEREAWLKKLPATARSLAELLMLEHDGLLELREKAEKEMVVEARKHRAWRLVRSCPGLGEIRTAQLLPIVVTPYRFKNKRSFWAYCGLGIVMRSSSDWVRTQSGEWVKAPIQQTRGLNRNSNRTLKGIFKGAATTVIGQAKDEPLYGHYLRLLDGGTKPNLAKLTLARQVASIMLAVWRNQEAYDPARVGQPV

SEQ ID NO: 190590 - protein, 417 aa, unidentified
MKSIKAEKIKTINEKMLVVALDIGKKVHYGYFRTPKNQDVKPFPFYNTGQSFNKFWEKLCRFKEKHMLDEVVIGFESTGPYAEPIANYLRKKPVKLVQVNPMHTKRIKELTGNSPNKTDKKDPRVIADVISLGHSLTVVVPEGAAAQLRRITHARERAMERRTAMNNQLQDLVFVIFPEFGDIIKPSTKTGMYLIKNYPDPKRIVSIGIGTLCDIVRKISRGRFGIDQAEELYNAAKESVGITEGKESILLETSHLVSNIEAENRYIESLEGQMIVYLDQIPYSHSILSVKGIGNITVAGLIGEVGDFRKFKTISEVMKLAGLDLFEVSSGEHKGKHRISKRGRGLIRKLLFFAAINTVKSHGIMHAKYQKMLNNGMPKIKALIAISRNLFRIIFALARDNVKYVENYKSHEFKLAA

SEQ ID NO: 190591 - protein, 390 aa, unidentified
MEVIYPKACGVDVHKSFIVAVICDSTGPIPKYYKRRFSTFNNQLISFRNWLLDNDCHNVCMESTGKYYIPVYNALEGYISNLVVANPKWVAVIKGEKDDNKDAKWIADLFKLGIVRSSFIPSKDFRILREYTRYLYKLTCNKTSEKNRFTNALTVGNCKLDMVFSDIFGKSSQSIIEAILNNDVFSDEDIISCLYKNCKSSREDILSSVTGISFTHEQKLGIKFVKDHIDYLTNQINQLRDIVDTLVIPYEDYITLLMTIPGIDRNSAITILSEIGTDMTQFSNHYKFTTWAGLAPGCNESAGKKKSVKISRAGVYLKPCLVEVAHCAVKDKTNSYYANKFNKISKRRGKKRAYIAIARKILVAIYHMLLTGELGIPLILLQMKQLIKID

SEQ ID NO: 190592 - protein, 320 aa, unidentified
MDQSASTAKHVIGCDVGAKEIVIFDSLSATIARVANKRAALMAWVSGLSAAAFVVCEATGGYESELLAALAAAGVSAHRADARKVKAFIRSLGQLGKTDAIDARALARYGQERDGSLARWHPPEASRAQLQALVLTRRDLVADRTAYRNRLKAPGSAHVAQHLESIVACLDAEITALDASINTLIRNTKDLKAMAKVLNGIKGIGATTAAALIALLPELGTTDRRRIASLAGLAPHPRQSGGMDAYRRVRGGRPEIKRVLFMAALSACRAEGPLRDAYNRLIQNGKKRMVAVIAIMRKIVVIANARIKELIQKDQLNPMN

SEQ ID NO: 190593 - protein, 397 aa, unidentified
MAKVRSWAGLDVHAAKVIACVVDRESGEMTVHRLPGDTAVVMAFCAGLPGPTRVAYEAGPTGYGLARALAAAGVGCVVAAPGKIERPAQDRIKTDARDAERLVRLLMIDGLHAVRVPTPEEEALRDLVRAREDLRGDLMRARHRLSKLLLRHDVRYEDTSSRWGERHRAWLAKVDLGERGAQLTMSEYVGAIDALEIRRGTLEAAIGELIPSSPWAQDVARLRRLRGIDTLSAVGLAVEVGDFQRFEHPKLLMSYLGLVPSEHSTGDSRRQGAITKTGSRHARRLLVEAAWHYRRPPRLGTTLERRQDGQQQAVIAIAWKAQQRLHRIWRRLDGQRGKRRTVVAVAVARQLAGFCWAIVTHDPSGPILTGSADIRAGGRRPHADSPQPPKHRERQPA

SEQ ID NO: 190594 - protein, 425 aa, unidentified
MSESKVLREEPEFAALVGIDWADQKHAWCVQAAGTTQRESGEVEHTPEAVEAWIGQLCQRFGNRPIAVAVEQVKGALVFMLSKYEPLHLFPVPPAMSANLRKALYPSGVKDDPRDADLLVDLLLQHRDKLRRLSPDSEATRRVQNLVEERRHLVEEKTAQSNRLTNHLKIYFPQMLEWFDRLDTELVCALLEQWPTLEELQKVPPARLRTFFRKQRCHYPELVERRLVGIRQAMPAIRDRAVIEAKSAVVKVSAQLIRSLIRGVADLDRKIEEAAATHPDFFIFESLPGAGAVLAPRLLAAFGSQRDRYANAEEVQSYSGIAPVTERSGKRKWVHFRWACPKFLRQSFHEWAGHSIAHSQWARSYYQQQRERGKAHHAAVRGLAFKWIRIVFRCWKDGVAYDESRYLAALAKRNSPLAAVAGTIL

SEQ ID NO: 190595 - protein, 320 aa, unidentified
MSDCLVIGLDVDSKELVPAVVDCKAGDRIPNTKAGIAKWLKTLPPRCRIGMEATGKHHELVARMAGQAGHVVYVINPRLIKSYAKATGARGKTDAMDAQVIARYVKKESDRLREYVPRSDEQQQMHDLLRKRKTLVETRARLEQSFEVTKSAPGELAGILQAMASTLSELESQLQQLGRDGEHGALYKRLLTIPGIGPAVAAHLVYYMTRWPLANANAWIACTGLDPRPNESGGRTGRRRLSKQGAPVLRQMLYMAAMGLKRCRGGQPLYDDLSGRGHSSTAVFNILARKLARIAWGVFKSGKDFDPAMLKVGQARFLQA

SEQ ID NO: 190596 - protein, 398 aa, unidentified
MKMAGIDVHKKVLMVVVMDTSTPQEKPVRRRFITLPNELQRLLTWLREQGVEEAVMESTAQYWRSVWLELEPHMRLHLAQAFSNRAPRGRKHDFKDAERLVRRLIADELILSFVPSGEQRIWRSMTRMKLQLTRDRVRLQNQIECLLEEMRIKLSIVVSNLLGASGLRILHALAQGETDPRKLAQLGGERLQCTEEQLIDALTGRVQPVHGEMLALQLERLQLIDQQMERLTHMIAAAMKVHQDAVIRLAEVPGWGVDSAQQIIAEVGVQASTFASAAELTSWVGTCPGKDESAEQNHSSRSAKGNKYMRRVLNQAAHAAVCKKGSYFQALFRPLLPRLGYWAISPRSGRLLIGSVVWSGRSCMKECALSSKLPKSLPETRGNVPRCWREPYASSAMR

SEQ ID NO: 190597 - protein, 383 aa, unidentified
MQAPTIGTPTAAYSDTIFVAIELSQKTWLVTVHSPDLGRMSRYKVEGGDHAGLLALIAKIRARVAQKLGSEPRVVSCYEAGYDGFWLHRLLVTAGIENFVFDPASIAVEQRSRRAKTDRIDGELLLRTLMAHLRGEPRVVRIVRVPTVEQEDARRVSRERDRLVTEQTAHTNRIKALLRLSGLKVGNPRHCKWLTWLEQQRDWQGHPLPPHVLAEIKREHSRLILVREQLATLEKSQAAAQGSAAGEPLAKQQAQLQQLKALGPALATTLSGELFYKDFSNGRQVGSYCGLAPSPWRSGGIDREQGISKAGNARVRQKAIELAWLWRRHQPDSALSREFERRVLNAGKRARRIAIVALARKLIVALWRYLQTGLVPTGAVMKA

SEQ ID NO: 190598 - protein, 412 aa, unidentified
MKRAEDTSRQEKRYIGLDVHKHYITVGGMDEQQEMVLRPRNVEMERFKAWAEANLCQTDEVVLEATTNTWDIYDRVAPLVQRVVVAHPAEVKQIANARVKTDNQDVVRLLRLLIADMLPEVWVPSVEVRELRALISYRWRLVKMATAIQNRMHSLLHRHNIQAPEGKVDTGENREWWEHVQLSELERLRLNQELKTLRLVRDHIVEVEHELGCLSTSERWGKQATHIMQLPGVGIVVTMTILSAIGEIQRFPNAKKLVGYAGFGAGVEDSGQKHRDKGITKFGRKELRWALVEAAWQAIRSNPRLRAEYDRLCKRKHPNQAIVAIARKLLVTLWYLLSRQEAYDHFTDEDLAYKMLTWAWHMDKRAKRGMTNQQFAKYGLLQLGRGKHLTRIVKGGQPRRIAPKEEVLALKQ

SEQ ID NO: 190599 - protein, 419 aa, unidentified
MSTEKRKVCGIDIHKSFLVATILDREGNSTTRRIPQTTESLLSFRDWIESENCDSVAFESTADYWRSLYQVLEGRVQVVVANAYHIKHVPGRKTDITDSQWIAQLELNNLITPSRIFAGESYDLRSLTRNRELLVQNRTELKNKIHHLLDSCHIRLSSEFSDLFGKSGSIILKGLVQKKSFEEIVGSLPKKARGRADAISAAIPASIPPVFLVLLESNLKLVDYLDTEIKHIEGIIRKALIGKSREMQILTSIPGIGFIGASTLIAEIGNVRDFEDADKLTKWAGLTPSVYQSANVTRTGSITKQGSKHIRWILVELAHVAIRSQGRFKIFFERLLPKKGYKKAIVAVARKMLRIVWHLLVNDEVFVDEFPRSKQVKFPKMPKKIQEVGINRILELLSRASEVIFRDRDQEIYRFGLSD

SEQ ID NO: 190600 - protein, 395 aa, unidentified
MFIVGIDVAKRSHEVCMITSDGQIVQRPFSIRNNCTGYNLMLEKIRKHTNIKSQIVFAMESTAHYWLALFTRLRKDGYHVILLNPIQTSAMRDMFIRKIKTDAKDSFIIAELIRFGRYAESNVAQDRLLALKELCRNRFYLVDMAGDLKRKLIALIDRVFPEYEAQFDTIFCKSSVALLKKYPTPQKLSNAHLDKLTELLWNSSNGHFGEWKARELRELARNSFGVEDCDGAYSTLILLMLDQIQSLSEKADALEKEIFRLFQSFDTTVTTIPGVGPIIGAVILSEVGDISRFSSADKLAAYIGVDPSVNQSGEFQAAHAHMSKRGSPYLRRCIWMASQVAVQRDPMFRAYYEKKAAEGLKYMTIIGRVTRKMTAVVFAILRDHKVYEPVLPTAA

SEQ ID NO: 190601 - protein, 392 aa, unidentified
MIYIGIDVAKDKHDCFITNSDGEILFNPFTISNNREGFETLFQRIKSVAEDFSKIKVGLEATGHYSYNLLGFLLDKGLPTYVINPLHTNLYRKSLSLRKTKTDQVDSRTIATMMMSDVNLKSYSDTSYHNEELKSLTRYRFDKVKERAKLKSSVSRLVCILFPELEKLVPTLHMASVYALLSEFPSADAVANAHLTRLSNLLSESSKGRYGKDTAVMFRDAARSSIGSHMPAKSLELKHTIKLIQELTVEIDEIEAAIKRIMDEQIQSPILTIPGISYRMGAMIIAEIGDFSRFDSADKILAYAGMSPSTYQSGQLDNCYSHMEKRGSRYLRYALYNATKYVCHWDESFGAYLEKKRSEGKHYNVALSHATKKLVRLIFAMEKSGKTYLPTA

SEQ ID NO: 190602 - protein, 374 aa, unidentified
MNKSSKFVGLDTHKDTIAVAVCEANRGKPRYYGEIPNTPQALEKLLRKLSPEGEVLSFCYEAGPCGYGIYRQLTASGHECEVVAPSLIPVKAGDRVKTDRRDSESLARLHRAGELTPVWVPGPEQEAIRDLTRAREDIKALERQAKQRLGAFLLRHGVSYDEGKSKWTNAYFRWLSGVKFEIQTQQIVFQEYTDSVKYLQSRVEGLEKEMEAALNDWSLAPVVRALMALRGCKLITAMTIMAELGDITRFDSPRQLMAYLGLVPSEYSSGNTTRRGGITKTGNGHVRRVLIESAWCYRFSARKTAHLQRRAAESSEEVQEIAWKAQKRLCRRYQHLLNRGKLKVQICTAVARELVGFIWAIACEVMNKKTPALN

SEQ ID NO: 190603 - protein, 446 aa, unidentified
MDHANGVSRGDRNRNGRLTRLRELVPPANAIAAIDLAGEKQMLVVTDHDSRVLARRTFRLAAWHMGAALDWAAEHAARAGFVGVTVACEPTGHRWRVIGQLAADRSMPFVCVQPLLVARSRENENYSRDKTDDRDAVLIARLTAELRCYAPEATDETWARLRHLGARRARLLAETSSLKQQMRDLLECAWPAMLDTAAKQFKAKTWLAALAVVTDRCHGDPARLRRLGLARFSAAVRKEMVRWQAERPCRRIVEAVFAALADTTGVTVQRRGILERVGLVLDDWRDLHRRIDDTETRMVAVLDELELTELVTSIQGLSAVNAAAILAESGDLRRFATGRALVKHSGLAPAEQTSGKLVGRTRLTGRGRPGLRTAAWRAAWGAMKSNTVYQQRLLHLTTRDNGKLKPAQARCAIAAALLRQLHAVVTTGRPWDPAVAKNGTHMTLAA

SEQ ID NO: 190604 - protein, 339 aa, unidentified
MREVSTIGLDLAKNVFQVHGVDAAGETVVRRVLRRARVLAYFAQLPPCLIGMEACATAHYWARELGKLGHRVKLIPPAYAKAYVRRNKNDAADAAAICEAVSRPSMRFVEIKSEAQQAAAGIHKVREMLVKQRTMLINALRGLMAEFGIVVGAGTRHVGELTAILADPEEHRIPALLKDGLRRMAETLRGLERQLEGIDKQIVDWGRGNATCRHLITAPGYGPILSSAMAAIVVNPAVFRSGRDFSASLGLVPRQDSTGGKVKLGPISKRGNGYLRRLLVNGAMSVLNSKRAKQDPWLVKLLANKERKVAAVALANKMARIGWALMMRQEDFRATSAAA

SEQ ID NO: 190605 - protein, 421 aa, unidentified
MNQLAEIPFTAYVGIDWADAKHDICVQAAGSEEREFDRIVHKSEDIEVWAQALYRRFGGPIAVALELTKGPIVSALQKYDFFVIVPIDPIRLASYRKTFTPSGAKDDPTDAEFALDYMMRHPERLKVLKPQSVPMRKPTYLVEARDRLKGDQSRFVNRLIQALKQYYPQTLDWFSERNTVLFCDFLVQWPTLEKAKRARKKKLEAFFNNHNVRFAHVIEARIDAIKAATPLTHDEAVITAHGLQVEALVEQLRLTIRAMKRFDKEIVATAEQLPDYELLFNPLPGAGKVLAPRLLAAFGEDRERYPCAEELQRRTGIAPVTKRSGQSEWVHWRWQCSKFLRQTFVDWAGQTINKSAWAGAYYRQQRTKGSSHQAAVRALAFKWIRILFRCWQDRSPYDESKYLEALRRSGSPLLKQLAEAA

SEQ ID NO: 190606 - protein, 288 aa, unidentified
MRDHIRYVGLDVHKEGIVVAIAEDGIRGAVREYGRVANTATALDRLIRKLADGGAKLRFCYEAGPCGYGIQRHVSKRGHECVVVAPSLIPRRAGDRVKTDRRDAASLARLHRAGELTAVWVPDAGHEAIRDLVRVRLDAVHALRRARQQLSGFLLRQGCHYGRPAWTKLHRRWLSGLKFEQAVHHLVLEDYIQAVETAEARRNRLTAQIEALLPEWTLAPVVAALQTLRGMALVNAATLIAELGDLSRFTDPRQLMAYLGLVPSEHSSGATVKAEASPRPATAPPAGC

SEQ ID NO: 190607 - protein, 343 aa, unidentified
MENIGIDVHKNQSQICILTDNAELIEKRIRTDRARFAAVLGVRPPARILIEASTESEWVARCLEAQGHEVIVADPNYAPMYAQRSRRIKTDRRDARALAEACRIKAYRKAHRATDGQRHVKGRLAVRESLVRTRTKYISLVRSLLRREGLRIKPGSSSSFRERVGELEIPKHLQREIAPILTLMIPLNRQIERTTKDIEKIAHKDPAVRRLCTAPGVGPVTAASFVATIDTPERFQGAHQVEAYLGLVPRELSSGEKQRKGHITKAGNSRTRYLLVEAAWALLRTQRPGVAPLRDWTERLAGRRGKRVAVVALARKLAGILYAMMRDETEFEDKRWTTRRQGV

SEQ ID NO: 190608 - protein, 343 aa, unidentified
MYYIGLDVHKKTISYCVKDAAGHVHREGKIGSTRRELDAWIKTLPQPRTIAMEATIFTGWIYDHLLPHAEKVKVAHPLMLRAIAAAKKKNDKIDARKIADCLRCDFLPECHMASTEIRDRRRVLRYRSLVIKQMVQMKNRISGLLMETGVDYNKRRLHKVGYFEDLLKTNKEVNQSIRPLLKLSRETIDRSQRLDYALVTSLERDPLLAERLRRLRTVPGVGPITALTWALEIGDFTRFPSVKEAISYCGLCGDEKSSADKVLRMPLSKQRNKYIQRTLIEAAKLAIRYNHELAEVYEKERGRGNANRATLAVARKLVAYLLAVDRRKEDFVPAEVFRATAAA

SEQ ID NO: 190609 - protein, 417 aa, unidentified
MQIVHERCCGLDVHKKTVVACVLVTEAGGGARRRVRTFGTMTADLLALGDWLDGFAVAEIAMESTGVYWRPIFNLLEREDRRITLVNPQHMRAVPGRKTDVKDSEWLADLLRHGLVKPSFIPPVAIRDLRELTRYRKTLVQQRTQEANRLHKLLEGANVKLAAVASDILGKSGRDMLDALLGGEQDPTVLAELARGRLREKLPALRLALEGRVKPVHLTLRAQILAHIDFLDGAIGQLHEAIDQRLDPFAKSVALLQTIPGVSAKAAAVIVAEIGTDMNRCATHKHLASWAGLCPGNKQSGGKRLSGKTTHGNAWLRGLLSECAWASARSKTGYLAAQFRRLARRRGAYKALVAVAHSLLVIIYHVLRDRRPYADLGADHFDKLDAERVERHHVRRLNALGYSVTLTALPPPDLVPA

SEQ ID NO: 190610 - protein, 416 aa, unidentified
MLKIVYPICCGIDVHKTFVVACIAITDNKGITTYKRHRFSTFTQGLRELLQWLELFSCFDVCMESTGKYWISVYNILEPSVNITLAHPKYVKAIRGKKTDTKDAQWIAELFKHDLVAGSFMPPLAIRELRDLMRYRFKLTNFASSEKNRFQNSLTVSNIQIASVVSDTFGKSALKIIERILEDPEQSMLTAEELESLIHGRLIKKLPELELAVDGFITPEQKIKLKIIKEHFDALTLCKKHLEETILELAQPYQNEIQLIQTSPGFKNELSAVALISEIGVDMSEFHSSKHLCSWAGLAPTNNESAGKKKSVRISKAGCYLKPLLVQIANAVVKSTKYPEIRNKYLNIKKRRGHKKAIIAIARKLLTAIYHMLKNQELYHAQLFSDMIDIPTSREITTEQALKLSKRQGYKITSVI

SEQ ID NO: 190611 - protein, 314 aa, unidentified
MSNKVVVGIDVSKSRLDCFALPLEQAWSCDNGAGGIEQLVCRVRELGCELAVMEATGGYETQAATALAAAGLRVAVVNPRQVRHFAKAMNKLAKTDRIDARVLAEFALGINPQVRPLPDERTRELSDLLARRSQLVAMRTQEKNRMLQAAPALRTGIKTHIKWLDLEIAKLEVDLTAKLRASEAWCDKRDLMLSVPGVGSTTTLALLAELPELGQLNRQRIAALVGVAPLNDDSGKHQGRRFTWGGRASIRSVLYMAALSAMRHNPVIRVFYQRLRANGKPFKVAIVACMRKLLTILNAMVKQNKSWQPHSQPT

SEQ ID NO: 190612 - protein, 373 aa, unidentified
MPRYSTAFGMDVHLRSTTVCALDAETGEAVTRRFRGNPWGEVAEWMSGFPGPSLAAYESGYLGFAPQRELSGLGVDCVVAAVSKVPRSAADLSSKNDRNDAARMAKAILSHDISPVWVPSPEIEGLRDLAGAHDAATARLAAAKQRLLAFLARRGYAYGGTTPAGNPRRYWTYDFLRWLDKVRPADDGGIRALAALRSEVEAAAETRDDLLAEYRAAVAAGPLSAEVEALQSIKGCGFALAAAFASEVGDFSRFRSGRQVTSYFGLAPKQRSSADSVRLGGISGAGNALVRRLAVEGSWSYVQASHQPKLMPKGSGVPLEVRMHGRKGSERLLRRREEMLARGMPQAKANAATAAELVRWLWALGAMCREATE

SEQ ID NO: 190613 - protein, 343 aa, unidentified
MSYYVGLDVSVKLTAVCIIDDTGKVAAERVVASDPEDIGRCIAGIGGEIIRVGLEAGPLAPWLFGGLAERGLPVICIEVRQMKAFAKASPIKTDRRDARLIAQAMRAGLFKVAHVKTDYSQRIRLLLRHRQAMVRRNKDLINTVRGTLKAFGIRTGGGKNTLFARRVREAIDDKAILAMTEPLLVAYENGLRTLAKLDEMVLAIARRDAICRRLMTVPGVGPVVALTFRTGVDVAHRFDKSRLVAAVFGLTPRVRASGEVEQVGRITKCGDAMVRALLYEAANVMMTRCRADNWLKAWALKVARRHGARKAKVALARRLAVVMHRMWVDGTDFSMERPTPMTI

SEQ ID NO: 190614 - protein, 346 aa, unidentified
MNLLKQVLGIDVAQKELVVSLGRMNADLSIDLYAKRVFANKESGFIALIKWVGKLTDESIAVHYVMEATGVYHQKFAYFLDGKGYQLSIVLPNKISGYMRTLDNKTITDSTCADAIAQFGLERKLDPWKRPNILYKKIQQLTRERSQVVDERVIAKCQLHAENAEAQPNDNSIKRLKSRIRFLNQQEKEIKQDIEACIKEDDAITKNIKNLTSIPGIGRLTAAIVLAETNGFELIRNKKQLTSYAGLDVREKQSGTSVKGKPRISKKGNRNLRKSMYLPALTAVKHINDYKELYARLVSKSGIKMKGLVAVQRKLLELTYVLFKNNTTFQNDYKQEKSATAKADTL

SEQ ID NO: 190615 - protein, 321 aa, unidentified
MEPMVVGIDIAKRKFDVALLVGEKAKSGAFHNTPEGFAMCAHWLERNGAECIHACMEATGTYGEELALYLHRAGHVVSVVNPAKVKGFAQSELSRTKTDKADAALIARFCRAMRPEAWHPPTPEVKELQSLVRRLESLNDMLTQERNRLATTEGMARSSIERTISHLQEEIRTTRRLIREYVDQDPGLHGKRELLESIPGIGPATSAMILAEFGDVARFQDARRMASFCGLTPRQRQSGSSVRGKTMLSKTGSSRIRKALYMPALVAMKHNPLVSTFCERLRGYGKCPMVIVAAAMRKLIHIVFGVLKSGRPFNPSIADVA

SEQ ID NO: 190616 - protein, 313 aa, unidentified
MESHPFVGIDVSKERLDIGLGVDGEFWQANNDETGIEATVHRLAQMQPALVVVESTGGLEWPLVSELAARQVPVALVNPGRVREFAKSLGLLAKTDKLDAHLLARFGEAAKLSPTVLPNEAVQKLSALMARRRQLLEMLVMEKNHLLSTRLSLRSKVQEHIAWLEQEIDQLTQQIQQDLQETPDFRDKDRILRSAKGVGPITSSILLSDLPELGQLDRKKIAALVGVAPFNDDSGRHRGLRRIKGGRASVRQVLYMAAVAASRFNPVIRTFYQRLLASGKKKKVALVACMRKLLTILNAMIRDMTPWKSPLTS

SEQ ID NO: 190617 - protein, 345 aa, unidentified
MPIVGGLDIHRKQLTFDYLDTVTGEVQRGQVSPADRAHLRAWLARFAGRNDVAFAMEGCTGWRYVAEELAAAGIAAHVGEPADTAFARGRKRHAKTDKTDARHLRQLLADGRLPGCWIPPAQILECRALLEAYHDLRREHTAWVERIHAVFFHQGAPRLGEGALRTERSLAALRAAAGTHLSPAGQLQVATALDMLTAVEARMDTLRRQLRDTARRLTGARVLADRLYGVGPLAALAMTCWLGGAGRFSSSRKAVRFAGLDVTVYSSDGKRSPGHLSRQGPEILRWVAYEAGKTHGRASAPGHDYYAAVKDRTDGKIAALSQARKLIRQACHILAEPGDDALTVA

SEQ ID NO: 190618 - protein, 381 aa, unidentified
MRHGARIGDCRVQANQEEQGGEEVEMAVYVGIDVHKHYCQAALMDDKGHVVKELRFDNTSQGTSSLVTAARSIDSQVEAVVEPSANFWVRIYDKLQDEGVDVKLSNPLRTKAIAEARIKTDRIDAKTLAYLLRGDLVAESYVPTRKNRERRALIRHRASLIRMRVEIKNRIHALLDKHELTHTYTDLFGKQGLEWLRNLQLPTPDQEILQSSLHVAETLTEQIRLMDIQIAKDATSEEKSKLLMTMPGVDYYAAMVLLSEIGDVHRFSSDEKLVSWVGLAPQTHQSGDSNWTGHITRKGSKRARWILGQCAQSARQHDPRMREFYERIERKHGPQKAVVAVARKMLAIMYVMLIRNEPYRGENPELTERKHKRLDTLVNSA

SEQ ID NO: 190619 - protein, 347 aa, unidentified
MKRYVGIDVAQEECALCIVDDAGAILFEGTCATDPDEIVRTIAAEVDDVEKIVHESGPLSIWLTRELIKRAAPVVCIDARAAHKVLSARMNKSDKSDAVGLAQLARTGWYGAVHVKSEASDQLRLILTARERLIRIRMDIEGQVRGLLKAYGIRLGPVNAGYSRKSFRDQLGLAIKGVPSLEMVFASLIAVHETVCLETTAIDARVQRRAKDTPLARRLTSIPGVGPIVSLSFIATIDDVARFRKATDVGAYLGLTPRRYQSGETDWSGRISKRGDGSMRKLLYEAANILIQRVSRFSPLKAWAMRLVGRRGMKKAIVATARKLAVIMTRIWRDGTTFAWTKEGLPA

SEQ ID NO: 190620 - protein, 359 aa, unidentified
METKVNKNYFAGQPIYVGIDCHKTSWKVCILGEHYEHKTFSQNPDPELLVKYLKKNFPGGSYHAVYEAGFSGFDSCRKLLELEVDCKVIHPADVPTNQKERLQKTDKIDSRKLARALKNGELKGINIPCLELEADRSLVRQRFRIMKDLTRIKLRVKSLLMQHHINIPEHLAVQSRHWSKVYTTWLKSLTIEQESLKLAIDNYVRYGETIRKELYLVNRQVRTLSQSERYKDNFELLLSVPGIGLTTAMMLLVQIGDINRFKSFDELCSYVGLVPSMYGSGDKMVVGKMVKRGRKMLKIMLIEAAWVSIRTDPVMMAKFAELSRVMKKNKAIIRIAKKVLNRIRYILKNHQAYEIGVVV

SEQ ID NO: 190621 - protein, 361 aa, unidentified
MSSTVDRVVIDMDPHKRSATIEVMAGDETVVGAGRFGTGRDGYAAMTRYARQWRNRVWAIEGCQGIGRHIANRLLGDGEQVVDVPPKLSARARVFASGQGRKTDATDAHSVALVGTRMAGLHPVVNDEQLALLRILVDRRRSLGEDHTRMVCQLHQLLLELIPGGAKKDLSAAQAGALLATVKPRDPVGKARRRVAAELIGDLERVYQRSKEADKELKELVAASGTTLMDLHGIGPSGAARLLVEVGNIRRFPDRAHFASWNGTAPIDASSGEQVRHRLSRAGNRQINRVLHIMATVQLRNPTEGRAYFDRKKAAGKTSMEAMRSLKRRLSDIIYRQMVHDAAATERRAREDTGERLLTPA

SEQ ID NO: 190622 - protein, 338 aa, unidentified
MALYCGIDLHSRDCWLAILDGQLKVIQESKVGNDIEALLQVLEPYREDMEGVAVESTFNWYWLVDGLGDAGYQMHLVNTWAVKQWEGLKYSDDRHDARWLAHLLALGILPEGYIYPKRERSLRDLLRRRAFLVRKRTSFLLAMRGGFECRTGLRTTSNEVKEWTTEDVESYLDDPTAALGITCLLEPMKALDEQIRIIEKEAFKRARLKDEFAPLLTVWGVGKILALTMMYEVGEIARFRKVGNFASYCRLVRSARLSAGKRKGSGNPRNGNPYLSWAFSEAAHYAVRYYPPAKKYFQRKMSKTNGIIAIRALAHKLARAAYYVMKDQVDFDPDKVFR

SEQ ID NO: 190623 - protein, 412 aa, unidentified
MDEVVEFCAGLDVHRDTVVATVRFPQGRQRGSETKTFGTDTAELVALGDWLISHQVTRVGLESTGVYWKPVFYLLEDRIEQLWLLNAQHLKNVPGRKTDVVDSAWIAQLVEHGLVRPSFVPSPPIRQLRDFTRHRRVRSEECTRMVQRLEKVLQDAGIKLTSVASTVLSKSARAMLEAMLAGESDPVVLAELAKGRMRSKIPALTDALRGSFRVCHHGVLVRQILSHVDFLDAQLAEIDEQITTRVATFEPIIERVQTIPGVARKCAIGMIAEIGVDMSVFATPAHLASWAGICPGNNASGGKARSGRTRHGPVALKTVLTEAAQAAARTKNTYLGARYHAIRGRRGTFKAVGAIRHDILIAYWHIVTADVGYQDLGVDWLARRHSREHQIAQLAKQIEKLGAAVEITMPAA

SEQ ID NO: 190624 - protein, 344 aa, unidentified
MSKQIVAVLGIDLGKNSVSLAGLDASGAVIVRKRTTREGAIKFTANLPSCIVAMEACCGAHFVARIMAGQGHTIRLMSPEYVRPYVKAHKTDDRDAEAIAEAATRPTMRFVTQKSEAQLDLQTLHRVRERLVMARTALINQLRAILLERGLTFPKGRKTLMRRLDQSSAELNGLSARIQQLAADICAESAELDGRIEALNDELAEVARRDESARRLATIPGVGVINATALAAAIGDGSAFTKGRDLSAWLGLVPRQHTTGGKTKLLGISKRGNQYLRRQLIHGARSVLLRLKETQTPLGNWLNSLLGRVHRNVAVVALASKLARIAWALLRHRTDFDRRAFAGA

SEQ ID NO: 190625 - protein, 326 aa, unidentified
MKFNQLTTNYAAGIDLHKRSITIHILGKNDISLYQKTIKKNIRRGLKRILLKYKGDVTVCVETTYNWYWVADLCLELNMPFDITHAFYAKKKMIGKNKNDRIDAVGLASMLLHEELPVAYNYPPEMRATRDLLRLRCSLKKIRTGRLQHHSCVEDQYLMSELSLEEAGYNKDTIKDITRNMGVDEQCIDFLTEQIKGLEKHILKRARVHDEDALIRLKKIDGIGDILALTLLYEIHTIERFASQQKFSSYCRVVNPQCDSAGKRVGTGNKKAGNKYLSWVMQEIVTYSCRYNKRVGEYFKKLERKKGRKNARRILAHKWRLRFIPF

SEQ ID NO: 190626 - protein, 350 aa, unidentified
MIIIGCDFHSRFQQIAMLDPQTGEVIEHRLEHENGEARKFYAGLATPARVGMEATGYAQWFERMLAEQGHQLWVGDAAEIRAAMVRKQKTDSRDACHILDLLLKDKFPRIWIPSTEERDVRQLLRHRYKLVCLRTSLKNQLHAMAMGHGICRKKKLWTAVGRKELQGLSLGPWASRRRQHLLGMLDQLEPVLEELDRAVIQEVERRPAAMRLMTQPGVGPVTALAYVLTIGPVSRFQRSKQVVSYLGFNPSEESSGGRQRLGSISKQGNSMLRFLLVEAAQTASIYDPELRRDYRRLKFRRGSGVAKVAIARKLAVRLYWKLREQPSPVPPAPMQGSPAVSVVGESLSSS

SEQ ID NO: 190627 - protein, 416 aa, unidentified
MKIVRPICCGMDVHKNIIVATIGITNKKTRITEYIQETFSTLNPDLLNLKQWLINHKCFDACMESTGKYWIPIFNILEDEINIYLTHPKYVKAIKGKKTDKKDSKWICDLFKHDLIKFSFIPPKEIRALREISRYRYKLVGMRSSERNRYQNCMTVSNIGIGSVFSDPFGKSAQAIMKEVLESDIIEDEKILKCIHGSCKNKDKILDSIKHCNIETDQRFKMNESMTHMEELQVHINNCEIEIMKRAAPMFDRFMHITQLPGISTLSAILIISEIGVDMKQFESDKQLACWAGLAPANNESANKKKSVRISKAGQYLKPLLVQCALGAIKDKEGYFGIKYSRIKKRRGHKKAIIAIARMMLVSIYHMILTGETFNPSDYESFKNPKPPIKQQVLTEELAIEFLKKSGFDVSKLTKP

SEQ ID NO: 190628 - protein, 348 aa, unidentified
MVAEMVDHVVGVDTHRDEHVLAVVAAGAGALVARRRVAADGRGYRQALRFAEQYAAGSRLWAIEGSGHYGAGLARYLGERGERVLEVGRSPRGERRLRGKDDELDALGAARAALASEALAVPRSGERREALRLLLVARGSAVDVRREALVQLRSVIVTAPDRLRQQLRGLPLGKLLERCSRLRRSSSASADELATRLVLRSLARRVEAATVEAGELEREILTHVRALAPRLLDEPGVGPIVAAQLLVAWSHRGRLRSESAFARLAGVAPIPASSGQTTRQRLSRGGDRQLNRALHTVVLHRRQHDPATQAYIARRIAEGKTRRDATRLLKRYLARHLFRLLQQEPLMA

SEQ ID NO: 190629 - protein, 332 aa, unidentified
MSVYVGIDVHRKRSQVAVIDQDGGVLANRNVPNGVKPILGVIGNLPSGTPAAFEAAFGWGWLVQLLEDYGFEPHLVHPLQCKAIASARLKNDKVDAAILAQLLRADLLPEAWIAPPEVRQLRALLRHRVQLVRLRTLLRTRIHAVLADHGPGRPAGCWTGPGRAWLASLELPAASRQVIDDALAVIDALQQPIDRLDQDVHQRARSEPAVQVLTTLPGVGPFTALVLLAEIGDITRFASARKLASWAGLTPTVRGSDRMVHHGHISKQGSAWARWVLCEAAQTAKRHPDYTASYQAIARRRGKKIATTAIARKLLTRAYHLLTDAASAGAPR

SEQ ID NO: 190630 - protein, 389 aa, unidentified
MSFDHHSEEPTAIRTNLGAIFVSMELSRSIWLITSLSPGGGEKMSKHSVSAGDVAALLARFSELKQKAFARTGKSFPIIVIQEAGLDGFWIHRVLQSEGIESYVVDPASIATSRRRRRAKTDRIDGEALVRALLAHKRGEPRVCAMVRAPTPENEDSRRLSRERKTLTVERVQHVNRIKGLLFSQGVSGYEPLRRDRRQRLDEVKTGDGRPLPIHLKAQISRELDRLELLIKQVKAVETERDALLAPAAKIGQPPAPQAMLLDLKGIGAEFAAVLWSEGLYRSFANRKQVAAYAGLAPTPWQSGSVAHEQGVSKAGNPRLRTTMIQLAWLWLRHQPQSALALWFKERVKRNGGRLRKTTIVALARKLLVALWKYVTAGVVIEGAIVKSA

SEQ ID NO: 190631 - protein, 320 aa, unidentified
MDAVLGIDVAKAKFVVALLTPDGKRRRKSCPNTPAGFTELAAWLTRQHVVGVHACLEATGTYGEALATWLAEAGHVVSVVNPAIIHAYARTQLTRSKTDQIDADLIADFTATHRPPTWTPLPPAIRQLQALVRRLDALHGMRTQEANRLAAGVVIADVRASIEAVLASLDAQIVHVQQLIRDHFDQHPGLRTQRDLLTTIPGIGETTAVVLIAELFDKPYTSARQAAAFAGLVPRLMQSGTLVGRSRLSKIGPSRVRKALYWPAVAALRWNPTVRAVRARLTAAGKPTMVIVGAAMRKLIHLAYGVLKSQRPYDERYAIS

SEQ ID NO: 190632 - protein, 451 aa, unidentified
MSDLPVLDARAAFVDVGSEQMHVSVAGGPPKVFGAVTAQLHVLRDWLEAQGVRSVAMEATGVYWLPLYGVLEAAGFEVRMVNGRQTRNLPGRKTDMQDCQWGATLHSHGLLRAGFVPPAHIRRMQDYMRLRADHISMAATHVQHMQQALERMNVKLHDVIAKLTGVSGLAVVRAILGGERDPQRLLALCDTQIQRAKAERVKESLRGTWTEEHLFALSQALQSWEHYQAQIAECDRRVEALLHDIDPGPPPSARALAARPSRPGVNAPDIPDLRAILAQICGGQDLTQLPAHTEYGVLQVIAEVGTDLTKWRTEKHFTSWMGLAPGSHQSGKRKRSPKRSRNRAGRLFCVIARSLARSKDIALGGFYRRMAARRGGLVANIALARKLAALFWRVMVKGMDYVELGLQQYEAKVLETKQRSLRRLARQLGQQLVPMTTPVPTRGPSTNNATS

SEQ ID NO: 190633 - protein, 392 aa, unidentified
MNRIVYIGMDVHTSNYTLCSLDPGYGVEKDNYFAEVQFTNNFVTNVVNYVTNLKKKLKDCEFVCGYEAGCLGYSTYKDLTKVGIKCVIMAPSTMAVQKGGKKVKNDRRDARVIAQCLAYQTYKEVYVLSEHDEAVRGYLRMRDSHNKALKRIKQQIIAFCTGHGLFSPTKSNWTVAHLKWLKDLKFNDPVEQEILNEYLSSLTFLSDKIKAMDVRIEELASEKQYCENVKKLRCIKGIETNVALTLLAEIGDFNRFSKPTDFASYLGLIPGEQSSGDKVRGTGITKAGNSTLRRKLTESAKGYWRGRIGIKSATFKKLEKELPKEVTEYDLKANTRLQRKFFNMTHVKGKNMNVAASACAWEMACFVWGLITNHYEKAPAVPKTDEELLDLN

SEQ ID NO: 190634 - protein, 395 aa, unidentified
MDKEGEIIEKAYRFQNNFPCAQIFEDKIVAAMITGQFLSIKIATESTSLYHTHLIDFLAASDKLRQFEVEIIVFNPKTTTAFKKAYPDKDKTDSVDAFVIADRLRFGRLPEPYASNQNYLPLRRLTRYRCHLAESIAREKQYFLLHLFLKYSSYSSLKPFSNTFGNTSVSFILEDFFIDELAEKPLEELVKYVSKHGKNGFADPTAVAEALKQIARESYRIRPALASSVNLILTSTLANIRALEKSIKQVNNAIEEELKAFPNTLDSVPGLGPVMSAGIFAEIGNINKFPSHNALAKFAGLTWRQNSSGDFAAEITRMTKTGNQYLRYYLIEAANLLRMHNKEYSDYYSKKLLEVTKHRHKRALALTARKLVRLLFFLLKNNKLYQHSSGKVGVQ

SEQ ID NO: 190635 - protein, 334 aa, unidentified
METLYFLGIDISKKKFDAALTIDGKHFHEAQIENTSAAIQLFFRNLKKQLSSLNGLIVCLEHTGIYSMPLLDFLVKNKIKVSVEPALQIKQSQGMTRGKNDKVDAKRIAIYASKNRESLRFWQPQRHCIQRLKALLALRERLVKTKVQLEVPINESAEFVASSILKEVLTHCRGTLRALQSDIQRTEKEIEAIVWGDEHLSQQCKLATSVPGVGKITALNIIISTHEFSRIQDAKKFACYAGIAPFEHSSGSSLRGKTRVSKMANMTLKKLLHLAAMSAIQCSDELKIFYKRKVDAGKNKMSVINAVRNKLISRVFACIKNKRMYQKVYQHVLV

SEQ ID NO: 190636 - protein, 338 aa, unidentified
MRIDILGIDLAKNVFQLHGADRKGNLVLKKRVMREQLLMVLGGIEPCTIAIEACTGAFCWARQFEEMGHTVKIIAPQYVKPFVRRQKNDGNDAEAICTAARQPHIPLVLKKSLEQQDVQAIHRARQRLVNHRTAVVSQIRGLLLDRGIAFAKSITRARRMIPEILLDKSNTLTVMARETIGELWDLFCDLDRRVEIFNQKIETVFKTNQTCQRLARIKGVGPKTATAIVAAVGEGAEFKNGRHLAAWLGLVPRQHSSGDRQVMMGISKRGDQHLRSLLVHGARSVVRTATKKDDAMNRWINQLLERRGFNRTTVAVANKNARIIWAVLRTGEAYRAAA

SEQ ID NO: 190637 - protein, 399 aa, unidentified
MLAVGIDISKSKSVAAILNQDGSMHTSPFEFHHTQPELDAFIKYILNSNQSATILMENTGHYHYPVLKAFREAGLPVCMVNAYQIKKFGDMDLRKAKTDKKDAVRIARYALEKSYSLVPYTSMEQKYEDLKFLARQYNQRMLTLKTNKVFLLNLLDETMPGITNILPLTTRTPETSLSVLFINRFKSYDRIKKMGKSRFLDAFEKIARKSRNRQTKTYGLAIYEAALRNITTRGENEYTLGAQDQCLELVCESQKAADSIIPKMQTLAETLPEYAVLRSMAGVGDRLGPLILAEIGDIRRFHSGKALNAYAGNDAPPYQSGTFESHNRHISKRGNAALRKYCFEVMQALKLTRPQNDPVYLFLLKKEQEGKPYNVAKMAGVNKFLRIYYARAMETLKQQ

SEQ ID NO: 190638 - protein, 414 aa, unidentified
MSEFEFAALVGLDWGDTSHEVALWDEQRQTRTSERVEHTSAALRAWIEGLHARFGRKRIAVAIEQSRGAVFDALGGYPFVTLYPINPRSAARYREAFHPSGSKDDPTDAASLLDLLCKHRDQLRAFVPDDASTRLLRLLTEDRRELVDQRTQHIQRVTDRLKTYYPQALRWAGALTTAQACDFLDRWPTLHAIQKTRPCVIRAFYERHRHAAAWIEEKLAQIRAEVPFHDDPIIMDTAALLIGSEVAQIRALNASIVTYDEKIATAFAVHQDAPIFVSFPGAGEQLAPRLAAAFGTDRNRFDSAVAVAAFSGIAPVLHRSGKTVTVHMRWACPKFVRQTFHEFARVSIGQSAWARAFYKQQRARGHGQHEAIRTLAYRWIRILYSCWKNSTTYDEARYLQQLATRGSSLVKAAA

SEQ ID NO: 190639 - protein, 342 aa, unidentified
MERITIGLDIAKNVFQVHGVDEAGEVVIRKQLRRSQVMGFFEKQPPCLVGIEACATSHHWSRELQALDHEVRLMPAGYVKAYVKRNKNDAADAEAICEAVTRPTMRFVATKTKEQQSVLMLHKTRQLLVRQRTMLSNALRGHMAEFGITARRGRQGLEKLLAIIDSEDDEQISAFARLALITLAKQYRVVLAEITVLERSLHAWHRSNETSRRLAEIPGVGPLVATALTASVTDPAVFSSGRSMAAWIGLVPKEDSTGGKRRLGPISKQGNRYLRWLLVTGAMAVIRYAKKTGFKKRPWLARLVEHRPIKLAAVALANKIARIAWVIMARGERYKEPALTAA

SEQ ID NO: 190640 - protein, 335 aa, unidentified
MQIYGIDLAKEKFDVSFFDLTSKKVSNHPSHKVVKNNFKSIGRFLETLPSDAVLVAEHTGVYGDTLLKCCMDSNVKIAFVGGYVIHRYRATPDRAKTDVLDCALLRDFGERYPDKLKYKTFPEEALYELRQLARHREMLVEQRKQLITADRSEDCRPIRSLAVKRSMDRIKEMLDTEIAETEKEMLKVINGHESIHHNYELVKSVDGVGLITAVELLVKTENFTKITTARQYAAYAGTAPYEKSSGKMDKGTHISKIGNRRSKTLLYICAESARLHNKEIKLYYERRTLIDKKPRHYVLNAIANKLLRIIFTLVEKGEYYDANFIRQDPRVVKYN

SEQ ID NO: 190641 - protein, 385 aa, unidentified
MDNAISTQARPVFEGTCFMAIELSKANWLIGMLTPLSDKISLRSIPCGGVQQLMEIIGRTTERIMQATGQPVRIVSCYEAGYDGFWLHRVLEAHGISNHVLDAASLMVSRKARRAKTDRLDAEKLVRVLMAYWRGEPKVCSVVRPPSVAEEDAKRLHRERGFLMKERVQHIGRIKGLLAAQGIYDFRPSRKDWQKRLEGVVTGDGRSLPPRLAAEIARHCQRLSMVDSMLKEIDEERDAAADMSVGSSAPPANNIQRLVQLKGIGPQIATVLATEVFYREFKNRRSLGSYLGLTPSPFQSGGMDRDQGITKAGNPRARTITIELAWLWLRYQPQSTLACWFRERTNGLKGRIRRIVIVAIARKLAIALWRYLETGLVPEGAELKV

SEQ ID NO: 190642 - protein, 344 aa, unidentified
MEYGAIDLHLRRSQIRIIDEQEQIVVDRRVDTTRTDFERIFGDRARMRILIESSTESEWVAQHLEGLGHEVVVVDPTYAAMYGSRSRKVKTDKRDVAALAHANRHGVYRRAHRVPLGTRILRQQLRVRRQLVQQRTALVNLLRALLRQEGVRLPSGQTETVLARVDRLAVPGTLQTALTPVRTILEALNEMLAQMDGMFKARAATDAVTHRLMTAPGVGPILALTFQAVLDTPARFGGDARRVSAFVGLVPREDSSADRRHKGSITKTGPNDLRALLVQGSWAIWHSRSARAAPLRRWAQTLSARRGRRIAVVAVARRLTRVLYAMWRDGTDFRPAALVGASIA

SEQ ID NO: 190643 - protein, 343 aa, unidentified
MQSISTIGLDIAKSVFQVHGVDTAGQVVIRRQLRRRHVLAFFQKLPPCLVGIEACASSHHWSRELQALGHTVRLMPPAYVKPYVKRQKNDSTDAEAICEAVTRPNMRFVPTKTVEQQSCLMLHRARHLFIRQQTAVINSIRAYLAEFGVIAPVGRRGVEQLLEVVADPADHRLPEVARACLAALGSQLRALKAQILEFDRRIIAWHRSSATSKRLDAIPGVGPALATALVASIADPKAFRSGRDFSAWVGLVPKQNSSGGKDKLGSISKQGDRYLRSLFTAGALAVIRYAKIHGTDHRPWLTRLLARRPTKVAAIALANKLARMAWAMMARNERYKEPAALAA

SEQ ID NO: 190644 - protein, 320 aa, unidentified
MITNRTKPYAGLDVSKKVLELAVHESDYRRCYPNQANAFAELIAELISLEPARIVVEATGGLEKPVVAAMHTAGLPVVVINPRQVRHFAKALGQLAKTDRLDARVLAHYGVAIKPPLRPIKSAAEQDLDALVGRRGQLVGMLIAEKNRRASAPNDTVREEIDEHIEWLEGRIAALDRQLQQLMKTSAVWNHTNQILRSVPGIGPVASFTMLADLPELGKLNRQQISKLVGLAPLNRDSGQKHGARHIYGGRASVRSILYMATLTAIRHNPVIKAFYQRLIANHKVFKVAITACMRKLLSIVNLMVRNGTTWKLADAHVSA

SEQ ID NO: 190645 - protein, 372 aa, unidentified
MEEIIKIHVGLDVHKDSIAIGVAEPGRLPGRVVGTIAHNVPKLLKQLTKLGGPARVHVVYEAGPTGYGLQRALADKDYECEVIAPSKMPRRPGDRIKTDRRDCVQLAECSRAGQLHAIWIPEPEDEAIRDLARAREDAVNSRTRMRQQLKGFLLRHDQRFSGKSSWTKTFYRWLGTLNFGHSAAQTAFTEYWQAVQSADERVQRLDQALRDAVRGWRFEPVVAALQALRGIALISAIGLVAEIGDFSRFAHPRQLMGYIGLVPCEHSSGDRVSRGSITKTGNSHARRLLIEAAWNYRFKARIGSDAQQRQRALSEQVRTIAWKGQLRLCKRFAVLSGRGLHRNKVCVAVARELAGFVWAVAAVAPASQAPGN

SEQ ID NO: 190646 - protein, 387 aa, unidentified
MARKRTLSTLDTSIAYEAVGLDLAKEDVALAAFDSEHKEPYLIDRISYDKLYELLADMAPTLVAMEPCSGAHQIAEQIQELGHEVMMISGRHVQAWVKDHCNGQKTDLNDAFAILNLAYDRWLTPIRGKTREECRLLALQASYRQLKGQRTKTMVHVKATLHAWGFPIRAGSFNQKALHELIDANREAFGDEVVETLHLMINRVHDLDHDIATVLKLLTEATQRDPRASLLRSIPGFGVLTTSRWCAVVGDIARFDSPKQTMAFIGLVPNNRITGHHTETSSGREARGQGKMSKRGDKMLRSLCILGAGALCLMVRNDRLPDCPFVASIKERLASPRPWFKVLVYVAAKLVRIATALLKYGETFSFEKAGISKAVLKQWELEKAKAA

SEQ ID NO: 190647 - protein, 348 aa, unidentified
MSEAYDGQQVVGMDLHRRRSVLVRMTADGRKLETVRITNSPAGLRRVIARAGKRPKVVLEATYGWYWAADTLAAAGAQVHLAHPLGVKAFAYRRVKNDEKDAADLADLLRMGRLPEAWIAPAEIRELRELTRYRIKLVRLRTSCKDQVHAVLAKLGIEVTCSDIFGVAGSAWLDELPLPQPCAGKVASLRTLAGELTAEITLLEAAIADLLAHHDGYHAIRALPGIGPVLAAVLVAEIGDITRFATPARLCSWAGLTPRHRESDVKVRRGHITKQGSPLVRWALVEAIQHVPAGHPLRQRKDDILARRGDQAKNIAKIAMARQLLTWVFYAMRDGQVRALAANSRKAA

SEQ ID NO: 190648 - protein, 418 aa, unidentified
MADVMIGIDPHKNSHTAVAIGLVEERLGELRVCACPSQAGQLLAWAQEWPERAWAIEGAAGLGCLLAQQLVAAGERVLDVPPKLAARVRLLQSGNTSKNDPNDAYSVAVAALRSKAWRPVVAEDHAVVLKIWAKRHRDLARTRNQACCRLHAVLCDLVPGGIRREISAGKAAAILEQVTPSSPAARARCELAAEFLADLRRLDAQLRECNKKLAAAVRASGTCLTGLFGVGPVIAGTVIGDVRQVFRFPDRDHFAAWNGTAPVEVSSGDRKKIYRLSLRGNRRVNHAIHMAAISQIRHKHSDGRAFYDKKVAEGKTHKEALRALKRRISDAIYAALVADARQATSCPKGPGGQPGNHSASRAAGSRPAHRHFGQATPGPATTIRPDLTAGTARMQPNEVLHGRAGRSPATSKKSPTTT

SEQ ID NO: 190649 - protein, 437 aa, unidentified
MEVRVIRRLVGVDLGIASAHTVRVLTEDGREVCRRRCEPTVDSLRRVEAAALAGAPAGTVLEVVMEPTGPAWLPIAVFFKARGHRVFRVSSGKAADLRRFLSRHAKSNGIDADTLARLPLVDPAGLHPLELPGTEAAALDRRVRATDRLTVLAAQHKVRIKDLTRQLLPCSPLTGDLGVADLAVLERWADPRALLAAGPARLTALIVKASNGDLGADRAQQWRAAAAAAVELYGDHPAIAWTDLAAEVGTEVRLLRATLGELAAHARERETAYRYADLGGLARSLPGVGDVGGPVLVAGMGRPGRFPNGAAFKSYTGLAPRAAETGNTDRKGQPMSKAGSSLLRTTLIRAADTARKQDPQLARIYYTQMVERGAEHLKAVCVVAGALAERIWTVMNRQMPYVICDIDGTPVHPGTGETDHRAELHRPRRGPPPAPQQ

SEQ ID NO: 190650 - protein, 424 aa, unidentified
MDSTGLKIDYAAYVGLDWGSEKHSVALKVAGGSEIERSTLKQTPEDLHAWLLNLRDKFCGRPVAVAIEQTKGAVIHALLGYDFVHVFRINPKSLADYRKAFSPGGAKDDPTDAEYLLELIELHRSRIKPWVPDNVQTRALQRLVEFRRELVNQRGAFTNQLTQVLKEYFPQALDWGGEIDRVMICDFLSKWPTLEKIKKARPDTVRTFYRQHGCRSSERVEERLKAMSAAKALTEDLAVMAASVCMVQAIVRSLYPLIESIARLDKEIEERFKGHPDVVIFDSFPGAGAALAPRLLAAMGSDRSRFDSADEIQKYSGIAPVTERSGKHEWVHRRFACPKFLRQTFHEFAGQSIKFCAWARGYYDMMRDREIAHHAAVRALAYKWIRIIFRCWQDRVPYNEGIYIRALHKKGSPLVTFMKRVAET

SEQ ID NO: 190651 - protein, 355 aa, unidentified
MNDAKYIGMDVHQATISVAVRDSRGNLVMEAILETKADTILEFIHGLRGSLSVTFEKGTWAAWLHGLLHPHVTRVVACDPRKNALLKVGNHNDRMDARKLSELLYLNKLSPVYHGEQSIRTLKELARSYITITRDLTRVMSRLKAIYRSWGIPCAGQQVYAPRYRAEWLAKISEAGVRRRAELYYQQFDALAALRQGTRRELLAEARKHPAMRLLRQIPAIGPIRAALLIALIQTPNRFRTKRQLWAYCGLALRTYTSGEYRFVAGQLKRSKKVLAVRGLNINHNHDLKNIFKGAATRAAATAGPLQDCYQACVARGVKPHLARLTLARKIAAIPLLVWKKGVRFDAEHLKQQAA

SEQ ID NO: 190652 - protein, 338 aa, unidentified
MKTYAGIDLHSSNSFIGVINQKDERLHSRRHDNNLEKLLKVLGRYKSSLQGVVVESTYNWYWLVDGLMDNGYKVHLANPAAIQQYKGLKHRDDKWDAFWLAHLLRLGILPEGYIYPKEERPIRDMLRRRMIFVKQRTTHILSLQSMISRNRGLEFSGSSIVRFRKKFIEQLFACPHLVSIAWRQIQTIRFLGEQIKEIETEVEEKIVLKRAYRKLLTVPGIGRILALTIMTEVGDIGRFAKVGDYSSYCRCVNAKSTSNGKKKGDNNRKNGNRYLAWAYVEAANFNKRSCPKAREFVQRKTVKTNYTVAIKALGNKLSKASYFIIRDHKPYDPELLFR

SEQ ID NO: 190653 - protein, 353 aa, unidentified
MRKADFNGQDIYVGMDIGKKSWKVCIMTQELEHGLISQPPRTEVLVHYLRKNFPQAKYHCTYEAGYSGFWIYEELKQEGIECLIVNPADVPTTHKEKIRKTDTVDARKLARELRNKELIGIHVPEHSTLEDRTLVRSRHSLVKKQTRCKNQIKGLLNFYGVIIPEDLASSHWSRRYIGWLEQLIMGRPSVTHVIRTLLEELKYLRQLIAEVTKEIRKMSKQEEYNKNARNMITIPGISILSAMIFLTELERIDRFERLDELASYVGLVPGEHTSGEKKVITGITSRRNPFLRGLIIECSWVAAQKDPALTLAFNQLSKRMLRNQAIIRIARKLLNRIRYVLIHQEPYVPGVVS

SEQ ID NO: 190654 - protein, 368 aa, unidentified
MTKNITVAGKETTRTFAEKKYTVGLDLGDRWSWYCVLDERGEVVFEHKLSTTPKALREVFAAMPQSRVALETGMHSPWISRLMKELGHEVIVAQASKVRLIGESRKKDDRLDARTLARLARVDPELLGPIQHRSARAQADLIMIRARAGLVRARTALINAARGLTKSYGERLRGCSPRNMDAEKRKGLSAELQLALEPLLRAIESLSQQILAYNERIEQMAREGYPEVARLRQVKGVGTLIALTYVLTLEDPQRFTKSREAGCYVGLQPGRRNSGSSTPQLHISKEGDPYLRTLLVQGAQHILGPFGEDSDLRRWGLKLAERGGKNGKKRAVIAVARKLAVLLHRLWVSGEAYEPLRNQRAVELPAAA

SEQ ID NO: 190655 - protein, 376 aa, unidentified
MTKIIRIGVDTSKSVFVLHGVDATERVVLRKRLRRRQVLELFAQLEPTKVGLEACGAAHHWARELQGLGHEVVLLPPQYVKPYVKRNKNDAADAEAICEAMSRPTMRFVPVKTAEQQAALMLVGTRDALVRRRTQLTNAIRGYAAEFGLIAAKGLDKIEPLLARIAAHAPLPGLAQELFAAHAKEYARLQAQIREIEAKLRAWHKHNELSRRLAEVPGIGPIGATLAVMKVPNPKAFRCGRDFSAWIGLTPKDHSTAGKTRLGVITRAGDEALRSALVAGATAVIQHVKQGKGHPSPWLIELVRRKPAKLAAVALANKNARIVWKLMVSTERYNPAHSRAVAASGGRGPALRGGSAPRPPLAPHDKSREITATTRA

SEQ ID NO: 190656 - protein, 313 aa, unidentified
MTLAQTAGVDICKDRLDVHLHPHAASARFSNDAKGFRAMIAWLGGHAVERIVYEATGAYHRAFERRMAEAGFALAKVNPARARKFAEAIGAIAKTDPVDAAMLARMGALLNPRTAAPVSEHLDDMRQLLVARRALIKDLVAAQNRAQIRTLTLLKRQARERIKHVEAQLAAIDEALRERAICDPAFKARLDMLLSIPGVGETTALTLLIEMPELGRLENKCAASLAGLAPIARDSGKWKGERRIGGGRSSLRRALYMPALVAVRWNSDFKAKYKALTAAGKPKKLALTAVMRKLVILANVLLREERHWRPKPA

SEQ ID NO: 190657 - protein, 338 aa, unidentified
MSIFAGLDVSDKTTHVCVVDADGAVLKRDFVASDPDLLAKWLGKHFPGLIRIVLETGPLSTFLYHGLVERGIPIECICARHAKGVWAARVNKSDVHDAEGLAQLARTGWFKRVHMKASATHIDRAALRIRAQLITTRVAMGNQLRGLLKLFGLRLGAARTPGKRRERLIALYQQRPDLEPLFSPLIASMEVIEEQLRASNRLLESRATEDIVCRRLMTVPGVGPITALTFAASVEDPHRFTRSEDVGAYAGLVPRRSQSGERDVRGNISKAGDPMLRRTLYEAANIMLCRVQRPFALQQWGQRIAESKGNKRARIAVARKLAVLLHSLWVNETEFRWA

SEQ ID NO: 190658 - protein, 375 aa, unidentified
MNKYITKYVGMDVHKETIAVAIAKEGRGDPAYYGEIPNTSEAIRKLVRKVASNGEKVSFCYEAGPCGYDVYRQLIDLGQRCDVVAPSLIPKKSGDRVKTDRRDANTLTRLYRAGELTPVWVPDKEQEAIRDLTRAREDMKAMEGHAKQRLGAFLLRHGKRFSGKCKRTQAYFRWLEEIKFEMPAQQIVLQEYVDAVKHMKGRVEALEEEMRQAMQGWSLAPVVTGLMALRGVELITAMTVVAELGDMSRFDSARQIMAHLGLVPSEHSSGHRQKRGGITKTGNGHARRVLIEASWCYRSPARKTAQIQRRAQKTSETVQAIAWKAQKRLCRRYWYLINKGKRPVEACTAVARELSGFMWAIACEVMGKNYVCAPA

SEQ ID NO: 190659 - protein, 428 aa, unidentified
MTIDKKQRNRKERKELARRLRSEDPGLEVVHPHAAGVDVGNSAHYVAVRPDRDSQPVRRFECFTADLHRLADWLQSCGVKTVALQSTGVYWIPLYDILGERRFEVYLVNARHTKNLPGRKSDVQESQWLLKLHTHGLLNNSFQPTSEIRVLRTYWRQRAEHARGIGTCILRMQKALTQMNLQLANVISDLSGVTGQKIVRAIVAGERDPQKLAELSDPRIHASKAEIAKSLEGNWRQDLLFVLHQEVEMYDVYQRRIAECDQQLQEHMASFADTVPPQAKEGEPKKKKTKPNKNTPQFHLSGELQRISGVDLTRIDGIDVMVAQTLVSEVGLDMSRWKTEAHFASWLGLCPDNRISGDKVLSRGTRHVVNRAATALRIASTTLLRSQTYLGAQYRRLRSKLGAPKAITVMKSSALCCKSQRTGHKPRS

SEQ ID NO: 190660 - protein, 341 aa, unidentified
MAKNVYFVGLDIAADDFVASIYQSPKQSVITKEGIENTFDGFNLFIPWLKEHGLSKTNCIICMEATGVYNEAIAHYLVTRGFRVSVEPPLKVKRAFDPVGHKTDPVDSKQIAEYAYRYSDELRFWQPKDEIIEKIKHLLTAREQFTKQSTAIKNAMKAYEKHIVQVPLIVKAHRQTLREIKKHITEIDKELDRIIRQNPSISNMSNQLKSIPGFGLLLSASLITLTGAFSDISHYKTLAAFLGICPYQHQSGKSIYRQPHMRSFGPAYPRKLLTLAARSVATHNDVFKKYYARKLAEGKAKQLVLNNISNKLIKLACALIKNNSRYTVTYRSINPMFLNIS

SEQ ID NO: 190661 - protein, 417 aa, unidentified
MSYKGTRFPPYHDVVVIDESGRRLGATRVAHDVEGLEALVAFVRGTGTEEEVACFVETTNGLLVSTLLEAGVAVYPITPGTIDRKRGPARAKTDALDAYLLARTGRSDLADLRRLQPDSPLISELKTLTRDQETLVRDQTRLLNQLTACLKAYYPVALTLFSKLHQGLTWAFLETYPSPEVAAAVTAEEIHATLRALGHSPGLAKAQEIAVAVQVPQLQAPAPIARAKERFMLVLVAQLRVVCTALADYEREIARLFAQHADQALFASLPRAGKRLAPRLLAEWGDDRTRYADAAAVQALGGTSPVPHASGKFVSAHKRYACSKPLRNALFQFAWQSTLKEEWAAAYYQRKVREGKKHAVAVRALANQWVRIIFAAAAQGRDVQPGHLPGRPTRPRAPCGLRSRGGHRVPELRHGSR

SEQ ID NO: 190662 - protein, 311 aa, unidentified
MPDLYVGVDVSADALDLARSDGRAERLPHDDDGLARLAESCEGAALVVLEATGGIERTAAAEVAATGVPVAVVNPRQVRDFARATGQLAKTDAIDAAVLALFAERVRPEARPLPTDEQRALAALVARRRQVNEMLVAERLRLRTAAPAVRRGIEAHVAFLEGQKAEAERAVAEAVRSSAAWRERDDLLRSVPGVGAVLSATLIAELPGLGRLTGKQVAALVGVAPLARDSGRLVGRRSAWGGRAPVRAALYMGALTAARMNPTLRAFYAGLVGRGKAPKVALVAVMRKLLVALNAMVRDGRRWDENRPVTA

SEQ ID NO: 190663 - protein, 425 aa, unidentified
MSASDSLSSPVEVSGFAYVVGVDIGSQSAVYCVCQPDKSQVVKPTELANSRTGFEALDRRLRQLAVPPQRILIGLEATGHYSENLYQFLQEQGYCLCLLHPRQTRQFAQQRGLRAKTDRLDATTIARLLLSGEARAGYVPDELISTYRQLERLHSQLADDSARYQNEIQALLVVLFPEFVQVFADPCRPTALGVLKRYPSAQAIVAAGVEALTTTLRELAPRHSGRPTAQELVRLASQSVASPLATAGRALSLKVLCDQLEHTLANLAQVARELDQLLDRDQGVSGLKSTPEFGRKTVAVLRAELGDVTRFQHVEQVVAYVGLDLQVRQSGQWKGQVKLSKRGSGRVRRVLYLAALRCLALPASAFGAYYRRLVARGMKGRRALMAVMRKMLIVAYHLLRSHETYDPTKVCAVACTPPRTPSSGS

SEQ ID NO: 190664 - protein, 332 aa, unidentified
MNMHAQGGVVNSPTRPNAGIDVSKQHLDVCLGAQYRRVPNDGHGCKELVEQFKAEQTDLVVLEATGGYERDLVMALQDAGIAVARINPRQSRDFAKSMGQLAKTDKVDARVLRDFADVLARHKERASYITAPVDARRTELAALMTRRRQLIEMRVAENHRLEMASKRAARSIGVVIKTLDKQIAAIDADVDSHLDSHFKRQRELLDSVKGVGPVAILTLTAALPELGQLGRREISKLVGVAPLADDSGQRSGKRRVWGGRAQVRAVVYMATLTAVRFNPILKTFYERLVQAGKPKKVALVACMRKLLTILNAMLRDQAIWDPSKHESAHAKA

SEQ ID NO: 190665 - protein, 413 aa, unidentified
MDVVYRQCAGLDVHKKTVVACRIVSTLDKRRIEVRTFGTMVADLLELADWLRAVAVTHVAMESTGVFWRPVFNILESEFEVLLVNAKHIKFVPGRKTDVRAAQWIAELLEHGLLKASFIPPTPQRELRELVRYRTHLIEERTREVNRVQGVLETANLKLSSVATDVLGVSGREMLAAIIAGQEDPSVLAQLAKGRLRAKIAELERALHGRVTDSHRLLLRLHLEHIDELNAKLVALEREIADSMPPFDQADLLARLQTIPGVGEKVAQTIVAEIGTDLSRFPSAGHLAAWAGLVPGKNESAGRNRSSRTNKANRYLKACLVEAANAVGHTRDSHLAAQFHRLAARRGKKRAAVAVAHSIAVIVYHIIRRGTSYVDLGPNYFDERKADAVQHQLVKRLERLGFKVSLETLPATA

SEQ ID NO: 190666 - protein, 316 aa, unidentified
MAGGLYIGIDVSKDSLEVAFGCDGEVRRVANQDRAIAALAAELKELGPELVVMEASGGYERMVAALLWEAGLPVVVANPGQVRDFAKGMGQYAKTDRQDARIIARWGEVKQPPLRQLPDAQGRELSELLTRRRQLLEMLVAERQRLAQTVSKPIRKELSASIGSLERRLERIEAEIEQRIRKSDLWNRTRELLESVPGVGKLTSFILLAELPELGTSDRRQLASLVGVAPYPRDSGKWHRPRLIHGGRAAVRSALYMAALSAARCNPVLAPFYQRLLSRGAAKKQALVAVIRRLLGILNAIVRDRIPWRLSCVVPA

SEQ ID NO: 190667 - protein, 381 aa, unidentified
MEGAAIIGIDLAKSVFQLHGADVTGKPLFRKKLTRDQLSVFLASQSPTVVAMEACGSAHYWGREIGALGHDVRLIPPIYVKPFVKRHKNDAADAEAISEAAIRPTMRFVPVKSAEQQSRAMVFKTRDLLVRQRNQIVNALRGHLMEYGIVVPAGLTFVRKLEREIEDPDTPLPLLVVELGHLLMDQLQSCNTKIAVVERQMKEEAKRDPEALLLQTAPGIGPVSAMAIKAFGPDMNSFRRGRDFAAWLGLVPLQKSTGGKQKLGRTSKMGQRDIRRLLIIGAMTRIRWAIKNGVPEGSWLQKMLQRKPRLLIAIALANKTARAIWAMMTKGEEYRENLFRLNTETEISDYVRRTLESKGKQIGKIEIRKTRHSQRASRPRH

SEQ ID NO: 190668 - protein, 420 aa, unidentified
MARTVDIVYPVCCGMDVHKSFLVACVAVTDERSHTTHYIRRFSTFTGDLRRLADWLASFNCRDVCMESAGKYWIPVFNLLEKTCNVCLTHPKYVKAIKGKKTDRKDAKWIAELFKCDLVRSSFIPPPDIRQLRDLCRYYVKLTHFTSSEKNRAQNCLTVCNFKLDDVFSNIFGKSASRVMDALLEHGSGNFDFVPLLDPKCRATFEEVRAALNGELSPAQAEKLQLIRQHMEELQNLQRVLEILIYKLAAKFRPEIDLLLSVPGISSPLTAIRILAEIGADMSVFETSKQLCSWAGLTPQNQESAGKKKTTRIGRAGAYLKPLLVQCALAVGKSNQHPELKDKYQSLKKRRGGKKAVIAIARKLLTAIWHILSKREPFNIELYRKADKPPVARVLTKEQAFALLRSKGFLVQDEEVLLPA

SEQ ID NO: 190669 - protein, 311 aa, unidentified
MDTQVVSIIAVDVSKDTLEVLIGPNSQAVSMSNCSEALRRLLKKIKALPNLHFICEATGGYERTLVNFLHENRITVSIVSPSRVRDFARSEGVKAKTDPIDAKMLLRFAQEKELRPTTPPTPQRQEILARMDRRSHLAEQLKREKTRLKNSRSAIHSSIRQMCDFIKLQLKEIEAQIKELIRSDQNLKFAYKVLTAVTGIGQVSAWTIIAYMPELGQLTRNEVVALAGLAPYNQDSGKTQKPRRIFGGRAKVRKCLYLAALTASTHNSVIKTYVEGLKKRGKHHKSALTAAMRKLIIHCHYLLKKHEIVIA

SEQ ID NO: 190670 - protein, 399 aa, unidentified
MACVRHMANGLVRREVRTFKTTTKELLALSDWLAGEGCTDVAMEATGVYWKPVWHILSDGDVTLVLANAAHVKNVPGRKTDVNDATWLADLLAHGLIRGSFVPDEQTQEMRTLLRTRKQLVRECSRHVQRLQKTLEDANIKLDSVITDIMGLSGRRMIEALIAGESDPGRLAQLAHPRLKATPEALREALRGRVTRHHRLLLRLHLQQIAAINAAIEQIDREVDAQVEPFRAMIALLTTIPGVDELSARVILAEIGRDMSRFPTAAHLISWAGLCPRSDESAGKRRSTRMRKGAPWLKTTLVQCAKAAARKKASYLQAQFHRLRARRGAKKATSALAASILTIVYHMLTNGELYRDLGPDHFDHRAKAANTRRLVTRLQNLGYTVQITPLAAYPSFVSF

SEQ ID NO: 190671 - protein, 338 aa, unidentified
MSVYVGIDVHRKRSQVAVIDQVGEVLANRNVPNGVESVLGVIGGLPAGTPVAFEAAFGWGWLVELLEDYGFAPHLVHPLRCKAIASARLKNDKVDAAILAQLLRADLLPEAWIAPPAVRQLRALLRHRAQLVRLRTLLRNRIHAVLADHGQDRPGGCWSGPGRAWLASLELPAVSRAVIEDDLALIDALQHPIDRLDQEAHQRARTEPAVKVLTQLPGVGPFTALVILAETGDLSRFGSARKLAAWAGLTPTVRGSDRTVRHGHISKQGSAWLRWVLCQAAQTAKRHPDFAASYQAIAHRRGNKIATTAIARRLLTRAYHLLTDPEGPPGPGRARTVA

SEQ ID NO: 190672 - protein, 368 aa, unidentified
MSVVSMPRGEVKWVGLDVAKDAIAVGVLDGVSEATPRLEKIAHDEVSIRRLVSRLGGPGRLRACYEAGPTGYELHRLLGSMGVDCEVIAPSLVPVAPGDKVKTDRRDARRLVRLFRAGELVTVRVPTRQEEGCRDLSRLRAAAMVDRRRARQRLGSFLLRRHLVYRDGRAWTVKHRRWLRSLAFDDTGTQVTFAHLLASVEERELRVDAIDTDLARFFEAGLFVDEVARLGAYRGIAPLSALGLACEVCDWRRFPAPGKFMGFVGLVPSEYSTGASTSRYGITKSGNAHVRRILVEAAWAYRYPARVSPELARRHEGVAPDVIARAWNAQVRLCGRFRRLAARKDRRTIVATAVARELAGFVWAEMTA

SEQ ID NO: 190673 - protein, 335 aa, unidentified
MNDSTKYVGLDVSKEKIAVAVADGGSRESARYWGEIPHRIEDIRKLIGRLGDVGQLQVCYEAGPTGYLLERQLASMGVACMVVAPSLIPKQPGNRVKTDRRDAQRLAELLRAAELKPVWVPGKEDEALRDLVRAREDAKEDLLRAKHRLGKFLLRRGVCEPVGVRAWSTKYRAWLKGLEFDSSALQTTFDEYRLSIEEIESRIERLESEIHTQAQKSRHAPMIQALQAFRGIKEIAAATMVAEVGSFLRFGKASQVMAYSGAVPSEHSSGAEVRRGKITKTGNSHLRRIAIECAWSYRYPAAMSAIWVIRSWPLPSSTGYCITHTSSTSEVRATG

SEQ ID NO: 190674 - protein, 343 aa, unidentified
MAQQTIIGIDLAKHVFQVCMVTPTGTLKTNTAVARGKLLALIARQPPALIFMEACGGAHDWARRFCAMGHEVRLLAPQYVTPFRRGQKNDPNDALALTEAGQRPHIPTVPIKTVEQQDLQALHRVRERLIKNRTALVHQVRGVLLEYGIVIPQGIARFRKRLPRVIEEAENGLSFLMRDLLQSLQSELIALDTRITDVTCQLTRLSHEMEACQRLQEMEGIGPLSATALVAALGNGHDFQTGRQVAAWLGLVPRQHSSGGTTRLGGITKGGNSYVRRLLIHGARSVISHVRDKPDAKSAWIRQLVTRIGVNKACVAVANKMARVAWALLHTGEQYRKPVALPS

SEQ ID NO: 190675 - protein, 316 aa, unidentified
MSETANEKFVGIDVSKATLDAHIEPAGETLHVGYDEAGIGRLVERLKEVGPALIVMEATGGLEVRLASELASAGLPVAIINPRQARDFAKATGQLAKTDQVDAAMLAAFARAIRPQARPLKDADTRALDEMVSRRRQLIAMRVQETLRLGTATSKPMQKSLKVHIAWLEKQITEIDGDLNRRLRESDIWRAKDDLLRAIPGIGAVTSLTMLAKCPELGTLNRREIAALTGVAPLANDSGKHRGKRFIWGGRAEVRVVLYMAAVSAMRCNEAIKAFADRLKQAGKPPKVVIVACMRKLLTIMNAMLKNNAPWCPKHP

SEQ ID NO: 190676 - protein, 416 aa, unidentified
MEKEPAIFVGVDWASAEHQVCMIGPSGPVQRAFAHDAGGLGAMVDWLCAQTANPSDIVVAIEVPHGPVVEALMDRGLFVYAINPKQLDRFRDRFSPAGAKDDRRDALVLASSLRTDRHCFRRLEVLDPVIVELREWSRMAEELKEERNRLTNRVRQQLWRYFPQALDLSEDPGAEWFLDLWALAPTPAAVSKLTEKKVACILIAHRIRCIGAADALAILKRRALTVAPGTTDAAKAHIAAVAERLRLVNRQLKEVVHRIDLLVNRLAVSEYQPGQIAEQRDAAILRSLPGVGRIVLATLLAEAHQAVQTRDYRALRTLTGVAPVTKRSGKSRRVEMRQACSIRLRTAVYHWARVATIHDARSRARYASLRGRGHSHGRALRGVADRLLAVACAMLESRTTYDPLKVSAVTAALKTA

SEQ ID NO: 190677 - protein, 443 aa, unidentified
MARKQAKQRFELVHPHCAGIDIGSREHWVAASRDHEPCVRSFATFTHDLNQLADWLTELKIEVVAMEATGVYWIPLFELLDARGFKVYLVNSRATRQISGRKSDVLDCQWIWQLMSHGLLRGAFRPSDSICSIRALVRQRANKVRDQAQTLNRIQKALTQMNIQLANVISDISGATGMRILRAIIAGERDPQALAGMIDPRIKASRETVARSLHGNWRLEHLHALEQEVEAYDFLERQIAGNDKAIAGALEQLPVREDAPKPSRKVLRSPHRSATDQAALHQALWRVMGVDLTAIPTIGVDTALVLASEVGPDLGRFASSQHFCSWLGLAPPTRISGGRQLYGAGPKVLNRAAQALKQAASNARNDKSFIGASHRARLSRMDTSCAIKATAHQIARLIYAMLTQGQPYVEQGIEAFEARSKDRQLRALLRKARKLGLELAKAA

SEQ ID NO: 190678 - protein, 387 aa, unidentified
MGRVIIGMDPHKRSATIEIINDREQVLAEGRFDTDRDGYAAMLKTGRQHKDRIWAVEGCNGIGRHIAQRLVADGETVLDVPAKLSARARLFGTGQGRKTDPADAHCVAVAALRTTGLRQVVVDDATVALKLLVDRRDTLGRARTEALSRLHHLLLELVPGGAKQFLSAPQARALLNTVRPRDIVGRTRRQLASELITEVAVIDKKIKAANAQLTELVEATGSTLQQLNGIGPSGAARLLGDIGDVSRFASRDHFASWNGTAPIDASSGDQQRHRLSRAGNRRINRVLHIMAIVQLRRDTEGRAYYRRKLAAGKSPMEAIRCLKRRLSNVVYQQMVNDAKRVRTSPGGQAGATLQSSAAGSIPTAGTSEQPLPGPVATHSRTPVLAAS

SEQ ID NO: 190679 - protein, 422 aa, unidentified
MSRRETEVRVVGFDCAEEAHEAVLLDASGEEQLKLSVVNRREMVEEALGELLLALPKGAKLVVVVESKRSHGRLVCDVAFGLGCDVWQVNTVALNHYRNVEGQPRKTDSWDAYLAARMVFLRLKGSREVAESLPEERVLCRLTRTHARLKEDRTAITQRLRAILLELAPEVLHRSWNGPKYDSKAMVYILKRWPAFDGLERAQLRSIEKILHRCRYGQAATEVAELVREMGKRISMEPFERQAVSLEMTVLLEQLEVIDSLLVKVDREIEKQVEKHPVGIKLLEMPGIAHLTAGILIGELLPVARHASEGESATYSGVTPLARKSGKSLNRPRLARGVNKRILHGLYLSSVSAVKCSVIDRAYYQKKLNDYAGHPAKNKAAFIALSRQRHKVIFKLLTTDARYDKEKLIADHLNRVHSAKAA

SEQ ID NO: 190680 - protein, 389 aa, unidentified
MYLIGIDISKYKHDCFIATEAGEVIQDAFTFKNNHQGFQDFHNVLKHLDPSQTKRIGLEATGHYGHNLKAFLDQHGYSFMEMNPYLVSKFSERFTLRKTKTDKADSKLLSMILLSVDYKIYPVKSYHIQGIKSLTRYYKTLMKKRSKELVNLTNILDYIFPEFKPFFKGKLSKTAFYILRNYPSKERILHLNIHSFENISKISRRRFSFAKFLKLKELAKNSVGSNNHLLVLELESIIRLYDSINDELKKVKSLLTEKASLIDSPVFSIKGIGIVSALSIISEYDNFTSFVSPAKMLSFAGLEPSVIQSGTITKPGRMRKHGSGYLRETIMNVSISFMMHNPVIYTYYHKKRHEGKSHRVALNHVAKKLIRIIFHLVKNNTQFNPNLLR

SEQ ID NO: 190681 - protein, 340 aa, unidentified
MQAIRFGVDLAKKVIQVHGVDVSGAVVVQRQLRRSQVLAFFAKQPKALIGMEACGSAHFWARELAGLGHEVRLMPAAYVKAYVRRNKNDARDAEACCEAVSRPTMRFVPVKTVEQQCARAIHKARDLLVRQRSQLTNCIRGLLYEMGVISAKGAGGIKALLERVEACDESLSADLLAALQPLARQWRSLEAELRGLDGEILAQARRCEAARRLMAIPGVGPITAHAVIAAVGDGRQFASARDFAAWTGLTRKNHDTGGQHSLTGRISKAGDRSLRRLLILGASSWLRHVRTRPEKGSAWVKGVLARRPVRVAVVAQAAKTARIVWAVLASGQAYRAPAAA

SEQ ID NO: 190682 - protein, 439 aa, unidentified
MKKRKERVCGADVHKDLIVATITGDDVPPIRENFGTTKAELERFRNWLIKNKCEQVAFEATGVYWIPIYDALSSTIDTIVANPLQIKTIPNDKSDSKDSKRIASLCLNGQIKRSRVFSNEDRDLRTLTRARSGYVKTRTQFRNRIHKYLSSSGIKLSSCMDDIFCKSGAHIIKGLAEGKSIEEILKGIPSGKIRKKQDLIRAALDNALGETNRMLVTDALEILDYIESKIEKTSHEVLKKIQQRSKDLAIVMSIPGVGFVSGSVILSEIGNYRDFQTPEQLVKWCGLNPGENESAGKKKKCGITKRGSKQIRVVLVQAAQTISNMKNTRLSRFFQRLSKKKEHNVAIVAVARKLICLIHHLLINQELYQEADCRKRRSRRDKSCKEPSFQEEHLTDKVAAIVDAFYGLSDSNRKKALMRAIGDISVTEVDRKRSSDGGG

SEQ ID NO: 190683 - protein, 386 aa, unidentified
MTKQLDQTGTPATTEYATAYLVFELSKAHWLLGVMLPDSEKMSHYTIDGGDLKALSARLADIREKSGRSGKPVQVVSCFEAGLDGHWLHWWLIAQGVVSYEIDPASVEVNRHSRRAKTDRIDLEKLMRTLRAYKRGEPRVCSMVRVPTAEEEDRKRPMRERDCLITERTTHTNRIKGLLHGQGVRDVMPMKPGFIASLETMRRGDGRPLEANIKEQIVREHERVCVVNKQVEAIERASAAKLRAPAKDSHTVKIAQLISLKSLGPIGGQVLVNEVLYRTFDNRRQVGSYFGLTGTPYDSGQSRREQGISKAGNRRAREMAIELAWLWLRHQPDSELSQWFCKRVGDVKGRIRRIAIVAMARKLMIALWRFVTTGLVPKGAVFSPSK

SEQ ID NO: 190684 - protein, 338 aa, unidentified
MEFKRISIDTSKHVFTIHGFDDQERPLLRREIRRAQVEPFFVKLAPTEVVLEACAGSHHWGRVLGGMGHRVRLIPPQYVKPFVKRSKNDRNDAEAISEAASRPTMRTVPVKSVDEQAAAIIVKHRELLVNQRTQAINALRGHAAEFGIVAAKGCANVSALLVLLSAEEAIPAIAKAMFEQMGQHVTDLDAKIDALERQLLEQHKANAVSKLLAAIPGVGAITAITMALNVNPANFETGRHFAAWLGLTPREHSTGGKHRMGKISKAGNERLRQLLVVGAMAVIRFAKPGSKSATAWLLQLLERKPRKVAAIALANKMARIIWAMMARGEAYRRQPVAA

SEQ ID NO: 190685 - protein, 339 aa, unidentified
MTYIGMDVHKGTSTLECLVPASKERVSLKIYTKREDLARKLAELPQPWMVALEATYHSPAVCNWLAELGAEIHLTDPQKLSKLAKLRPAKTDRTDAELLLHALVHEYLPEAYLAPPHVVELRALSRGRQKLVERCTALRNQLRAAFAHAGLQVTVSDLRGKQAQEMIPTWLAQLPELARRMATMAWKQLCYLDHDLKQVECTVRKEVRRDPVMLRLTGLPGIGPVTALALVAEIGEIERFKQHEQLHCYAGVVPRVSASGERQATGKLVSRCSKPMRYWAVLGANNAARSRSPSLTKCTYRRVKARHGSNTAKIAASRTLLTEVFFIWRKMLPESQEAA

SEQ ID NO: 190686 - protein, 339 aa, unidentified
MRALYCGVDLHSSNAVYGVTDDQDHVLFRKRLPNRLPVILDALSPFREDLKVVAVESTYNWYWLVDGLMDHGYPVSLANPAAMEQYSGLKDANDESDALFLAQLSRLNILPTGYIYPKEERPVRDLLRRRSLLVRHRTALVLSLQNMLMREAGCSLSWRKIRQQGDDLPGLLKDQDVLPFVAQQQIELIELLNKKIELFEKKVLEKAKLKPAYERLLTMPGVGQILALTIMLETGAVERFCGVGNYTSYCRCVRAQRISNGHCKGSNNGKNGNKYLAWAFVEAAHQAIRYCPKAKAFYDRKKAKRNGALATKALAAKWAKAAYYVMKRQEPFDLKRVFG

SEQ ID NO: 190687 - protein, 324 aa, unidentified
MENIFIGCDISKSKIDYCVLSSDKDKNSSFYGQFKNSLDGYEKFLKTIAINFPFKNPIIGFEATGAYTALFQKYLSDNAIFHKMFNAKKVSKYMKSLDIQGKTDKSDSYVIAHFVSIQDLKVFSTEYSSLKEKYTQYTTSLRLIMKMKVQTNNLIKSLSRGNDSVSLVTELEKTKSDLKKREKNIKDFAIDNLKTDYPIVNLINDKYKGVSYALLLNLVPKVYDTIEDYSVNQTIAFLGFNPVSFQSGQMKLSDKLNIFGDKELKRLLYLASLSSIQFNPILKEKYQSYLKRGKPKKLALTIIARKLLMLIIKDIKKYKAVHSD

SEQ ID NO: 190688 - protein, 386 aa, unidentified
MQKLNDLSRSLTALEPDGTLIAVIEMSLSSWLVAGIVPGVERQPLKKLAVDESALLKLLHRWREEAEKAGRRIERIAVAFEAGRDGFWLARWLKARGIEAYVIHASSVAVSREHRRAKTDRLDTELLKRSFLGWLRGERDHCKMVAIPTMKDEDAKRPNREHDSLIGERSRIVNRMKAALVRLGIRGFNPKLKRATTRLDGLLTPEGEPIPPNALAELRRDMERRRLVNNQIRQIEEERLERIEQAPCDGPHVMVRLLARVMGVGIETADMLVHEVLSRNMRDRRAVARYAGLTGSPDESGRKRREKGLARSGNARVRRGMIQLAWRFLLHQKNSALTKWFRSRTENARGTRKPMIVALARKLLIALWRLVREGVVPDGVVLRPAQ

SEQ ID NO: 190689 - protein, 351 aa, unidentified
MEQISRIGMDTSKHIFQLHGVNTAEQPVLRKKLRRKEMFAFLEKLAPTVIAIEACGASHHCARLLQSFGHSVKLIAPQLVKPYIKRGKNDAADAEALCEAMSRPVLGLDPGMRFVPVKTAEQQAGLMLVGVRDRLIRNRTQLSNAIRGYAGEFGLTAAKGKAHLAPLLEGIHADESLPALARELFAAQAEEYAQLQAQIDEVDARLMAWHRADECSRRLTKIPGVGPIGAVMLTMKTPEPELFRSGRQFAAWIGLTPKDHSTAGKVRLGGITRAGDEGLRSVLVVGATTVIQHAQRGGRPSPWLTQLLKRKSPKLAAVALANKTARIAWKLMVTGENYAAKAAPAALAAAA

SEQ ID NO: 190690 - protein, 343 aa, unidentified
MEHYVGLDVSLKQTAICVVDQSGKIIREAMVPSDPEAIDEFLRSNATNVVRIGLESGATSTWLWTELDRMGLPVICIDARHAKAALKMQINKNDRNDAAGIARIMQTGWYREVRVKNLDSHAIKALLVSRALLVKIKRDLENQIRGLLKNLGLVIGRAKMNTFIARAKELTEDKPALVAVVEPMLKAREVIEQQISNLDRKVMRLARSDDQVRRFMTTPGVGPITALCYLATIDDPTRFSKSRNVGAYIGLTTRRYASGEIDWTGRISKCGDKLLRSYLFEAANVLLTRVAKWSTLKAWGMRIAKRSGIRKAKVAVARKLAVILHRMWIDGTEFQWSAKEVAA

SEQ ID NO: 190691 - protein, 318 aa, unidentified
MATAASVFVGVDVAKAELVVAVRPANDSWVVPNDDLGIAHLVERLRPVAPTLLVLEATGGYERAAVAALAAAGVPLVVANPRQVRDFARATGQLAKTDAIDAHILALFAERMRPEPRPLSDDATQALDALLTRRRQVLEMLVAERNRLTHARPAIRRDISQHVRWLERRLHDVDTDLDHMIHASPVWRAKEHLLRSTPGVGPVLSRTLIGDLPELGTLNRKQIAALVGVAPLARDSGTLKGKRMVWGGRAPVRAVLYMAALVATRCNAVIRTFYQRLLANGKPKKLALTACMRKLLTILNAMMRTQTVWRQTPSPEIP

SEQ ID NO: 190692 - protein, 421 aa, unidentified
MTQTSHDTFAAFVGIDWADAKHDVCLQPAGSAKRECFQLAHTPETIDAWVTTLRTRFHGQPVAICLELSKGPIVSALRKYDFLVLFPINPLTLARYREAFTPSRAKDDPTDAALQLELLLTHRDKLQPLTPQSPTMRALAQLVEHRRRVVGDKVRLTNRLTSTLKNYFPQVLHWFQEKDTTIFCDFLSRWPTLKAVQLARRATLETFFRAHHVRYADVIAQRIDAIKSATPLTTDEGVIAPNALLVQALVAQLRVTLQAIADFDTAIAQCAQRHPDFPFFQALPGAGPVFAPRLLVAFGEQRARYASAAELQKYAGIAPVTERSGKKAWVHWRLQCPKFLRQTFVEWAAESIRHSFWAQVYYQQQRDKGKAHQAAVRALAFKWIRILYRCWQERTPYDESLYLQALHRRGSSLIHNLAKAS

SEQ ID NO: 190693 - protein, 399 aa, unidentified
MNRIWAGIDSGKTHHHCVAIDQDGAKLLSRRVPNGEPELLQLLQDVLALGNHVTWAVDMAGGEPALLLALLTGHGQELLYIPGRVVNRASDGYRGEGKTDARDALVIADQARIRRDLKPMRPTDEATIELKILTTRRTDLVRDRTRAINRLRSTLTGMFPALERALVLTSTGPLILLDGYQTPAAIRRMGTTRLARWLRARGVRMPEELATTAVEAAAQQHTAVPGETVIAQLVRALAADVRVLNEKVAEVDRLIEDRFRAHDLAEIITSMPGIGPLLGAELLAGVGSDLAFFATPDRLAAFAGLAPAPHDSGKKSGNLHRPRHYHRGLQRVFYMSALTSVRYDPNSRAFYDRKRSEGKRHTQAVIALARRRVNVLWALIRDRRLYQVTAPPVTAPLCL

SEQ ID NO: 190694 - protein, 380 aa, unidentified
MKKFITHVGMDTDSRGFDIAIGEGFGSNNREVRSWGRIPATLAAVDKLIKQLRKQGYQELRFVYEAGPCGYGIYRHLQDKAGIVCVVVAPSKIPRQPGERVKTNRRDALKLARLDRAGDLEAIYVPSEEDEAMRDLSRGRAAAVEAATRVKQQLKSLLLRHGIKYPGKGESWSSDYRQWLRRLQLPHEAQAYVLAEGLVALDEAEARVTRLTQRIRELLPGWRMQPVVAALQALRGVALVTAVEMVAEVGDLTRFSNPRELMGYLGLVPSEASTGDKRRQGSITKTGNGHARRSLVESAWAYARPPRLTRALKQRQQGLSREVIEISWRAQVRLCGRYRRLSARGKNKKKIIVAIARELCAFMWAIAVAGSGQQRSTRAA

SEQ ID NO: 190695 - protein, 418 aa, unidentified
MSEEENARTPRRYVALDIHKYYCVVAGVNRDGQVVLQPVRVEHADLEGWLNKNVQKTDGVVIESTTNAWHVYDLLEPLAERVVVANPIKVKQIATARVKTDIRDTLILARLLAANLVPEVWVPPLHVRQMRQLLSQRRQLVETHTQILNRMHSVAHRHHLKHERGKRFNEQNTGWQKDTRLSQIEQFQLSLEMENREYIEKQIERIGVEVKKICHQKPWSDSMAYVMSLPGFGVITAMTVLAAIGESERFETPKKLASYSGLTPGLEQSGTKNRGKGITKEGRRELRWALVEAALQAVKSDPFLKHRFNELQKRMHRNQAIVSIARHLLELVWYVLTRRQPYHGFTQERIAYKYLTWAWQMKDAERDGLTRQQFARYYLMKIGIGKDLTRVALDPKHPRRLASEAEVLALRPELAQIE

SEQ ID NO: 190696 - protein, 405 aa, unidentified
MNAVGIDASKGKSMVTILRPFGEIVSTPHEVRHTSDQIDDLIREIRSLEGDTRIVMEYTGRYHEPMARWLSDAGLFVSLVNPKLIKDFDNDSLRKVKTDKADSVKIARYTLDKWHKLKQYGAMDELRNQLKTMNRQFGYYMKLKTAMKNNLISLLDQTFPGANAFFDSPARSDGSQKWVDFVDTYWHVDRIRSMSLSAFTEHYQKWCKRKGYNFQPDKPAEIYESIRNIIPVLPKDEVTKFIIRQAVNQVNTASAAVEELRIRMNDIASQLPEYPAVLAMKGVGTSLGPQLMAEIGDVTRFTHKGALTAFAGVDPGKNDSGSYSQKSVHTSKRGSAPLRKTLFQVMDGLIKTMPQGDPVYEFMNKKRSQGKPYYVYMTAGANKFLRVYYGRVKEYLTEHSEANES

SEQ ID NO: 190697 - protein, 327 aa, unidentified
MEQRVLGIDVAKDTLDIALSDGIHLNHGQFANTQKGHEQLDLWLRKRTDSRVHVCLEATGQYGDGVAEYLFAQGFQVSVVNPARIKHYGNSKLRRNKTDKADAQLIAEYCLREKPAIWTPPPASFKDLQALVRHLEDLQGVKLQESNRLQSGVHTSFVVDSLTTICEFLDEQINQTKKAIQDHINQLEELKRMQTLLVTIPGIGKLTAAKLLGEIRNILDFQSARQLAAYAGLTPRNFLSGISVHKKSRLSKTGNANLRKSLYMPAVVAIKHNPIIQSFCARLSQTGLRPMEVVGAAMRKLLHLVFGILKTGRPFDPNYLNPMQAFS

SEQ ID NO: 190698 - protein, 329 aa, unidentified
MENCNLLAIDIAKNVFQLHGVDKRSKCVMKKCLSRKQFMEMMIQFLTCQIVMEACGSVHYWGRYFQAQGHKVKLVSPQYVKPFVKGNKHDKNDTEVIAEAASRPTMRFVTMKTVKQQDVQSMHRIRERIIQQRTALCKQIRGLLSEYGIVIKQGVHSLTRLLPEVLEDARNEISDFMRAEIQLLNEELQSINKKVEFYNEKLQTLYGNSEVAQRLGKIEGVGCVIATAMLGLGDLRSFKNGRQFSAFLGLVPQECLSWHKQRRFGITKRGNNYLRQLLIHGARSVLLRVKNKQDKKSLWLKDLVARRGINRACCALANKIARVIWVLIS

SEQ ID NO: 190699 - protein, 416 aa, unidentified
MNAVGIDVSSRKSTVAVLRPLGEVVCLPFDVTHDIAGLASLVEKLKALDGETRVVMEHTGRYYEAVAKALHEAGFFVCAVNPLLIKEYGANSLRRVKTDKADAVKIARYALDNWADLRDFTPMDAIRYDLKTLNRQFQLASKQRTASANNLIALLEQSFPGIRKCFDSPVRSDGTQKWVDFAHSFWHVDCVRKQPFPAFCERYRKWCKRHAYLFKLSNAEEVYALAKRAVVLTPKSKVVKVLVQEAANQLISISRSVEVYRAEMDRLAAMLPEYPVVMAMYGVGKSYGPQLMAEIGDVRRFERKQALVAFAGIDPMPNQSGDKNVRSNKSSKRGSPYLRKTLFNVIRTYLQCAPQDEPVFQFLNRKRAEGKPFYVYMLAAANKFLRRYYAKLRDYFASPDTLQSVDPIPATLKASL

SEQ ID NO: 190700 - protein, 482 aa, unidentified
MKKRNIYQNQSQELLHLFEGAGSSEKVMCVPMDYAKKDHLVMFCNGHGDILRKPFSVKNTPEGIAYIADQVTRSCRRRGIQKKHVFFGGEDANSFAKNFVSTLRSKGFLVANVNAHDAKKQRGNVQASTDRIDLMGIATMLLNCRANCGPAQSGIYRNLRTLVRHRRKLVQMLTEVKNRVHGIVDELFPGFLNEKNSGIIPFTQSSLYLMEDRFSPKQIRRRRRQKLIEILKRFGTSKAERTAVKLQQYAAKVLHAPVEYVDTMQLSLAQHVKHIRCLKESVAQMEKEIALNLAQTQGAFLTSVRGIGLVLAAGVTAEIGDLNEQKPLNNLASYSGIIPRVKQTGGSDGKTYTGPVAKRCNRILKDYVVKSAYHLGLHGPQDLMADYKRRDASGQHADFGMGRRYLRMAISLMRTSQVYLPPNLRRDDYTLEERAGYYLTSWPYLKEKWKKVGALEAAFAKDRPLGLWRQIVQELYDIKLKL

SEQ ID NO: 190701 - protein, 362 aa, unidentified
MTSMPTLAPPRRVIIGVDTHKHFHAAAVLDERGVLLDSAVFDADRAGYQALIDWSTQFGILGRFGIEGTGSYGRGLASAVRRSGHDVVEVARPNRADRHRRGKSDPIDAENAARAVLAGQANAVPKDAEGTVEMIRHIKVAKDAAVKARTVAMQTLKAILITAPDDLGQALQPLSDTMLLRRCAVLRPGELTSVTAAAKHSLKAIAQRWVMLNEEITAHERLLGTLVDQVAPGLTAGVGIGPDNASELLLTLGDNANRLRSQAAFVKLCGACPIPASSGKTTRYRLNRGGHRHANAALHRIIIVRMKYHEPTRAYVARRTTEGKTKPEIMRCLKRYVAREIWARTQALRLSNESHQTTSCDL

SEQ ID NO: 190702 - protein, 374 aa, unidentified
MSAGKKFIGLDVHQDTIVIAVADDGLGREVRYFGTVANRPEELHAALKKIAQDGAELRVCYESGPCGFIIYRFLAKIGVDCMVISPSSMPRRPGDRVKTDRRDAQTLARLLRAGELVAVWVPDEAHEAVRDVVRARRQAKDDVSSAKSALKSFLLRHGRRFSGKAIWGKAHWGWLSDQKFDFPHQQFVFEEYKRRIHDLADRCDRLDEVLKEAVSGWVLGPLVHALQALRGVKLTAAVTLVAEIGDLRRFDSPKQLMAWLGLVPAEYSSGKRIKRGEITRSGNVAARTMLIESAWHYRFPAREGRALLNRNGEIPEHIKAIAWKAQVRLCGKYRRLAASGKQTVKVVTAVARELAGFVWDIARHTPLVAIEARG

SEQ ID NO: 190703 - protein, 291 aa, unidentified
MDKFDVAGVEVSAKILVVALKVNGQLRTPEFANTAAGHQQLIGFLLKHSRRVRVCLESTGLYGLDVALALHAEPEIEVRVANPRSVRHFAQAMMQRSKNDPLDALLLAEYAQRMPFQAWQPPSLPGRQLCALTRSIHQLTEMCTMQKNRLHAAAATATTPKFLIRELQRSLAQLQKSVQRLTQKALQLVRSHAQLRQQLELLDSLPGVGELSALYLLGELVLLSPDFSVREWVAYAGLDPRQYKSGDSVEKKIRISKVGNTHLRRSVYAGAGCSSSRSSFSCPLSAFTGQR

SEQ ID NO: 190704 - protein, 328 aa, unidentified
MCTLGIDVSKNKVDLCLLTAGPGGKKKHKVLTNEPAVARKVVDWLNAQKCVPESVTVVLEATGIYHENLAYGLHEAGVSVCMANPCRVREFAHGMDILNKNDAVDAFVLACYGELKSPAVWVPPSPEVRKLRALLRQRDALREDVQRTVNRLEKANSTSTPQEVIRSLERTKSWLNEELARIEKLITDHTDNDPGLKADLDLLKSIKGVKDQVGREMLALLKDGMFKSASQVAAYLGLTPVEKTSGSSVRGRPHMSKTGPSGVRAKLYVAALTASRWNKQAKAIYERLVAKGKAKKAALGAVMRKLVHLCFGVLKTRLPWDENYVATA

SEQ ID NO: 190705 - protein, 441 aa, unidentified
MPEEIPDADHELVMERVCAIDVAKASGVVCVRTPREHRRVSKVWDVESTTGAVSDLAGQLMELGVEKVTVESTSDYWRIWYYLLEAAGLDVQLVNARDVKNVPGRPKTDKLDAVWLAKLTEKGLLRPSFVPPAPIRQLRDYTRLRVDLTRERSRYWQRLEKLLEDALIKLSSVASTLNTLSARDMIEALIAGERDPRRLADLARGRMQTKRSALIKALDGRFDDHHAELARMLLDQIDTLSAQIGTLTARIDHLLADDDPDDADGGGSVADQVAAASTRPGAVERLTEIPGIGQTGAQIILAEIGLDMTQFPTAGHLVSWAKLCPRTVQSGPVTRGGKTGKGNPYLKGALGEAAAAAAKTDTFLGERYRRIVKRRGKLKALVAVARSILVIVWHLLTDPFARFCDLGSDYHNNLINTERRIRNHIAQLTAMGYHVTLEPAA

SEQ ID NO: 190706 - protein, 372 aa, unidentified
MYLSSAPPTQTVGIDLGDQTSRFHVVDQAGVMKKEGRTATTKKGITETFGRMPRSRIALEVGTHSAWVSRLLASLGHEVIVANARRVRAISDNNSKDDRMDAQLLARLGRVDPGLLYPIRHRGAQAQQHLAMIRARAALVDGRTALINTARGLVKAFGERLAKCDADQMGVEKLKGLEAGEQAALTGLLRSVEAMTEQIQGYDKQIAEIAREHYPETALLQQVHGVGLLIALTFILTLEDAERFERSRDVGCYVGLRPKRKDSGESQPELNITKEGDVYLRRLLVQGAHCILSVRGPDTDLKRWGLKLAGEGEKQAGEKEIRSKKQKKSKKARKRAVVAVARKLAILLHSLWVNGEVYEPLRNSQAGAAAVA

SEQ ID NO: 190707 - protein, 521 aa, unidentified
MAATRTRKRSRSALFLQKPRGTFHPRVQKVGPEHFGIVSVDCAKARSKWMLCDFYGNVIVPPTIVAHNRVALEGMVAAVRQAMTSRDLQDLLVAVERTGRYHRPVQRACVAAGWDTRIVHPFATKQFRQASDPGNKTDDTDLVAIHRAAVNGFALVDPVLDESWRTLQLVVRQRRDLVYKRSLLCCQIKEHLEAVYPGYAACFDDIWDSNIAILLVRHFASVEALRAAGSDGLSTFLRQQKIRFQQRSLQPIVEWAAQAAAGEVAATRHRLIAVSLLDDYLQKTKEIQALERESAGLLAQTPYILLMSFPGINVVSAAEFAGEAGPMGHYANSRGITGRAGLRPSRSQSDEVDHANGPLVRCANRKLRAAILRIADNLIICNKHFGNLAAGWKLAGKDPRDTHVKIGLRFCRIAYLMVAGQQVFRHPSIKDRSYIIDKLNAFHREHETPMGQTMQDLFAAIAQIPKTAHADEAKPLVDEWQRIQAGRRRGPQLLGDILPLVLARLGVGVVQSTTSGEQDPK

SEQ ID NO: 190708 - protein, 338 aa, unidentified
MELYGAIDLHSNNNVTVLIDEQDRVVYQKRMPNDLPLMIQQLSAYRESLQGNVVESTYNWYWLVDGLMDQGHRIHLANTAAIQQYEGLKYTDDPSDAHWLAHLLRLGVLPEGHIYPKQQRPVRDLLRKRGQMVRQRTANLLSIQNLFSRNSGSSMSANRIKTLDSQEVDDLVPNGDLALAIKANLAMLRCADKQIDILEKTVIERVKLKPQFKLLKTVPGIGHILALTIMLETGEITRFPTVGDYASYCRCVGSKKISNGKKKGSGNTKNGNKHLSWAFVEAANFAVRYSVKINSFYQRKKFKTNGIVAIKAVAHKLCRACYYIIKDQVAFDVSKAFA

SEQ ID NO: 190709 - protein, 362 aa, unidentified
MVQVRSWAGLDVHARSVVAAVADSETGELSVRRLAGATREVVEFCVGLRSPVRVAYEAGATGFGLARALEAAGVECVVAAPGKIERPANDRVKTDRRDAERLVRLLMIGALHPVRVPSPSEEGVRDLVRAREDVRGELMRARHRLSKLLLRHDVRFDGTAGAWTQHHRRWLATIELEHRGAQLTLCDYVGAIDALLVRRDTLEAAIGELLPDSPWAETAARLRCLRGIDTLTAVGLCAEVSDFTRFARAGQLMSFLGLVPSEHSSGQTRRQGQITKSGSRHGRRLLVEAAWHYRRRPAKGTSLARRQAGQSPHVLAISWQAQQRLHRTWQRLDTERGKRRTLVAVAVARELAGFCWAITNAD

SEQ ID NO: 190710 - protein, 339 aa, unidentified
MIIKSEKIVQEPKQLFAGIDVGAEELILVIRKNGTPYKPQKFANTPADRARLVKKLVNLPGIIVCLEATGVYHFDLSVALHDAGVVLMVVNPKSSHNFAKALMKNSKTDAADADTLAQYAGRMDFVAWTRPSDEKIALRSFARRIDALTRQKAAAKNQLHALSASKENPKAVLRDVDLSISQLEKRIDCLSKEALVLIKKHADLERAFKLLTSVKGIAQTSAIALMGELLLLPQGLSHREWVKFAGLDPRAFDSGKSVHKKTRISKAGNRHIRSALYMPALSAKQHDPHVKAYFQHLLDNGKLPLQALCAVMRKLLHAIHGMLKHDKPFDNTRFYAIPA

SEQ ID NO: 190711 - protein, 378 aa, unidentified
MGWTGRAPAPDDPQGLFGAFNEHEEHTMPHKTDVTVVRTIGIDTGKSTLHMVGLDERGAIVLREKVSRHRIAARLVNVQPCLVGIEAGMATHYVARALSALGHDVKQVPPAYAKPFRQGHKNDFRDAYAVAEAVQRPSTRCVPIKTDDQLDLQALHRVRSRLIGDRTAVINQLRGFLLEHGITVRQGHRFLRQQLPQILTTRTDVLSPRMVRIAADLVGDWGYLDERIERVTDEIEGLAQTDVGCGQLMTAPGIGPIVASATVAAIGNGAAFAKGRDFAAWLGLVPKQMSTGDRTILGRITKRGNRYLRMLFIQGARAILLHPTSWAKHSFGPWLTAAAKRLHHNVLTVALANKLARIALTVLVEGRNYETRITPAAA

SEQ ID NO: 190712 - protein, 316 aa, unidentified
MDDKRTVHGVDVAKAELVIGQAEIEALLHIANMPQGIARWLAQLPPGSWVAMEASGCYHQLLAHMAHAAGMVVYVLNPQRIKHYGRAVGNRGKTDRLDAQLIARYVLREHSKLRIWQPPAPGADALSRLLVRRQALVNARQMLEQSLSGLAELRAPPQAFMASFKCMIAQVELLIRTEIARVPEMAALYQRLISIVGIGPIVAAQLVAALTALRFTRANSFIAYTGLDPRPDDSGTRRGRRRLTKHGHGLLRRLLYNAAMAAARSKLFKPTYIQLRERGLHSTEAIVILARKLARIAFALYQSGQTFDSQRHVKTA

SEQ ID NO: 190713 - protein, 344 aa, unidentified
MKITTLGIDLAKDVFQLHGVDERGHVVLKRQIRRKEMIDFFTKIEPCLVGMEACGGAHYWARRLTGLGHTVKLMAPQFVKPYVKTNKHDMADAEAICEAVRRPNMRFVPIKTVDQQAILAIHRVRQGLVKARTAQANQIRGLLAEMGLVIPKGIKHLFCQVPLLIDEANDVLPGSFRQLIERLLSQLKELTRQVDELELEIVRWHRQNEASRNLETIPGVGPITASALVASVGDARNFKNGRQLAAWLGLVPKQHSTGGKARLQGISKRGDCYLRTLLIHGARAVARQAERMPARHAWLARLMGRRNKNVAAVALANKNARIAWALLAREEKFRSDHAAMIRPA

SEQ ID NO: 190714 - protein, 342 aa, unidentified
MHNPDVCGLDVSAKELVVMVRRDGKTEPHRSFPNTHLGHQELRRYLTHRRERVRVCMESTGLYGLDAALALQADSRIELMVANPRAVKNFSRALLQRSKTDPLDALVLLEYAARMPFQPWQPPPAEALQVTALARRIHALTQQCTMEKNRLHAVTATATTLPVIVQDLRRSVRGLEAAIARLSREAHRILAATPELERRFRLLQSTPGIGPVSALQLLGELVLIPAHGDVRQWVAYAGLDPRHHESGSSVHQKARISKVGNRHIRRALYMPALTAVRFAPHLRAFYLHLQARGKCKMVALVAVMRKLLHAIFGMFKYDAPFDGAKLCPALTLAVPPEVACAA

SEQ ID NO: 190715 - protein, 340 aa, unidentified
MNQIVTIGLDLAKNIFQVHGIDACGKVVVRKPLRRGEMMKFFANLHPCLIGIEACATAHHWGRELSKLGHTVRLMPPAYVKAYVKRGKTDAADAEAICEAVTRPTMRFVAVKSMEQQGVLMLHKTRDLLVRQRTMLINALRGHLAEFGIIAAQGAARVKAAIVAFHAEQHSLPTLARKALHGLIKQMGDVANEIDKFEKQILTWHRNNAASRRLAGIPGIGPITASAIVAAAPDATLFSSGRSFAAWLGLTPRSHSSGGKEKLVGISKRGDSYIRRLLVIGATAVIRRARQDNASKSWAAKLLMRKPARLVSVALANKTARIAWALLARNQVYIARVGAA

SEQ ID NO: 190716 - protein, 429 aa, unidentified
MSYRIAGIDVHKKMLAVVVSDVEVDAEFHFEQCMFGSSPGHLRLLSEWLIEQQAEEVVMESTAQYWKPVWEVLERYWKPLCEKREGAKRRSGKLHLAQAQSNRGRRGRKRDFADAERLVKRLVARELTLSFVPDAEQRLWRTVTRKKFQLRRARIRLQNQLESLLEEAHIKLSSFVSDLLGFSARRMLKALAEGETNPAALAALADERLRATPEQLSDALGACTELNDVYRRLLQMALEECRLIDEQIGKLDQEMASLLSQHQDAVERLAEVPGLGVDSAQQIIAEVGPSAATFPSEKCLSSWVGACPGDEESAGVNYNHRSPTGNRHMRRLLNQAANAAARTKGSIFEIVYRRSVPRLGHNQAVGVIAHRLCRLIWLILHQRIRYEERGPAVSKRSKQLRTWKMIRDLRRLGYRIELSNPQPSQAQAQ

SEQ ID NO: 190717 - protein, 322 aa, unidentified
MTYIGIDVSKDSFVAAYPTKSGYTTKTFPNTTTGVRKFVNSLPADCHCVMEATGNYSMLLLYLLQQANIIVSMENPQKIKHFARAMLSTTKTDEIDAKLIATYGEKMTPAPYKIPTESIILLKQKRTVLRQLKKQLTATINLQQSLAVLPKQDPASKVAIEQTVKFLRKQISKMEEEITNLSTKEFGRQVKLLTSIKGISVTIASALILATGGFTYFSNAKQISRFLGLCPTYQQSGTSVNFKGHINRNGDTHLRSQMYVAAFASIRCNAACKETYERLRARGKSGKLAVVAVANKLIRQAFAIVTNNQPYIEGFVSSYAKN

SEQ ID NO: 190718 - protein, 387 aa, unidentified
MIYYVGIDISKYKHDFCIISNTGEVIVENDSFENNKKGFQLLLDHLKPYNKSDVHICFEATGHYSLNLELFLTNQGYSFMKMNPLVVHQFLKARSLRRTKTDKADSITIAHYLISVPYKPNSDLLYHIYTLKSLCRSREQLIKERSKFQVLLTNELDKVFPELKPFFNNKVSETLLYILNKYKNPKHISLMKDYDSLRKLSHGRFTYAKFAKLKELAKNTVGHYDDNTDLLISTYVSLIQTFNDKIDPIDKQISTIIKELNPRMLSIPGMGEISAATILSEYGDIKNFSSPSKMLAFAGLEPSVIESGTLQSNGKMVKHGSGHLRYSIMNIAMIILRYSPTFYDYYLKKRSEGKCHRVALSHVCKKLIRVIYCLEKNNIDFNPSLLK

SEQ ID NO: 190719 - protein, 372 aa, unidentified
MRRPAVTQSPKVLQKGDRPAMKNDTTELRTMGLDLGDKESTYVVLDRDGVVEAEGKVATTAPALRKLLGKRERTVVALEVGTHSPWVSVLLKEMKHHVIVANPRQIPLITRSQRKTDRTDAETLARLARVDAALLAPITHRGQRAQEGRALILARAHVVAARTALVNHIRGTVKAHGGRLPQCDADAFAMRMWERIPERLQASLGPLLELVRQHTLLIKAYDGEVNRLAEKEYPESGVLRQVHGVGALTAVTYILTLEEKGRFKKSRQAGAYLGLAPRQQASGEQNPQLGITHAGDRYLRTLLVECAHRVMRGTDCDLRRFGERLTARGGKNQKKRAIIAVARKLAVLLHHLWVSGEVYEPLRSESSAPMAA

SEQ ID NO: 190720 - protein, 346 aa, unidentified
MVIVGCDFHPGWQQVEVLDAETGEISKFQISNGDGEAERFYRRLEAPVLVGMEASGNTQWFEDLLEKLGHEVWVGDAAEIRASFVRKQKTDKRDAGHILKLLMEDRFPRIWRPGAGDRDLRQLLIHRHRLVAIRTRVKNGLHHLMLNQGVQLKYKLWTEAGQKKLQEIELAGWAAQRRKDLLQLLHMLNPQVDELDQAVELAAGKDERARLLMTQPGVGPITSLAFVITMGDVSRFANGKKVASYLGLIPSENSSSSRRRLGSITKQGNPFLRMLLVESAQTVCRLDEGFRKQYKHRCHYKKKAIAKVAAARKLAVRLYWMLRTNTAYPEIAHIESSPRYGVVSES

SEQ ID NO: 190721 - protein, 358 aa, unidentified
MNRNTGMNAGQIIGTMGGKQVIGLDIAKHVFQLHTVNMGTGEIVNVQIKRAKVLEHFVNMPQCLIAIEACGGAHHWARELTAQGHSVRLLHAKIVRPFVSGNKTDATDARAIWLAVQQPGVKLVGVKTAAQQATLTLHRQRELMMKMRTMQTNALRGLLYEFGATFAKGRKALFQDVEQTLEDLSTQLPQMVRDSLREQVARIKAISEDMLAIEKRLGLQLKADPQMQRIAQVPGVGLLTATAAIATMGEPSAFKSGREFCAWLGLVPKQTGTGGKDRLGGISKRGDSYLRTLLIHGARSVLAHAKEPGPWLEQIKTRRPVNVVIVAQAAKMARTIWAVTAKEQSYQRGFKSVRPQTV

SEQ ID NO: 190722 - protein, 350 aa, unidentified
MSITIAIDLAKSVFELAVADENSTVIERKRLSRAQFMRFFDNRHVDRVVMEACGTAHYWGRWFASRGVAVSLLPAQYVKAYVRRNKTDRADATALLEAAKAPDILPVQVKSVEQQALQSLHRVRQAWVSTRVARINTLRGLCREFGINAPLGAKRGMEELAARISDPDSGIPELIRCALERMMADIRLIEENIRTVERELARSVSESEVCERLRRIPGVGLVTATALLGSVADIHRFRNSRRFASWLGLTPKEFSSGSIRRLGSISKRGDKYIRMLLVHGARAIVFTANAAKRGGRPLDAFRHWAAEQRQRLGHNKAVVAVANKLARIIWASWSRERDYDFRGVHGEVAA

SEQ ID NO: 190723 - protein, 371 aa, unidentified
MTVLAESVDAVIGVDTHRDTLSAAVVTPIGAVVADHQVAASAAGYRTLLEFGRVHVPGMRCWALEGAGSYGAGLGAFLTEQGEQVVEVARPKRPARAAGRKSDGIDAVRAAREALSCNHPVVPRSRGEREALRVLISTRASAVTARTRAINHLKALIVSAPEELRAELRGKTSDTQISYCAALRPRPSRDIEHRMTARALQSTAQRILTLRREVDELEAEIQPLVTAIRPDLLGLPGVGPISAAQILISWSHPGRFRSEAAFATFSGAAPIPASSGLTNRHRLNRSGDRQLNRALHTIVLTRARIDPDTRAYIARRTSEGKTSREAKRCLKRIIARQIYKLLEPPVSTRSHAQLTALGQSPGTVETPLSGI

SEQ ID NO: 190724 - protein, 412 aa, unidentified
MQVIHARCAGLDVHKKTVVASVMITALDGTLQQETKTFATTTADLLALSDWLRSYGVTHVAMESTGVYWKPVYNLLEGLFELLVVNAQHIKAVPGRKTDVKDAEWIADLLRHGLLRGSYIPARPQRELRELTRHRSNLVERRARSVNELQKCLESTNIKLGDVVADLTGVSAREMLQQLLAGETNPELLAELARGRMRQKKPLLQKALQGKVERHHRLILSQLLAEIDWCDEQIAEVGLEIGARLAAHEELLQRLDEIPGVNRRIAQVIVAEVGTDVKPFPSDKHLVAWAGMCPGNNQSGGKRRYSRTRPGNRYLKTVLVEAAHAASRKKKSYLQAKYHRLAGRRGKKRAKVAVARTILQSIYFIIHRGTRFQDLGDNYYDRRNPDKLARRLALRIEKLGFRVNVAPLEKAA

SEQ ID NO: 190725 - protein, 328 aa, unidentified
MSEHFAGVDTHADFHVVAVIDDVGRHLDHHQFDNTVEGLAAATAYLAAAGVVRVGVEGTSSYGAGLARTLVAAGISVCEVTRPNRAERRRLGKSDTIDAFQAAQAALTGNRTSPAKVSERLLELRIHYVLRESALKARTQVGNELHHLHAMLNPGTRLGKLTITHVRRLADTNSPLAIAAQRWLTLNTEADHHHKAIRTWLTTHYPAVLAPLGVGPVSAAALILAAGDNPDRMTSEATFARLCGAAPINASSGKHQHNRLNRGGDRQANRALWTIAHHRARHDQRTKDYITRRRDNDHLKPRAIQRCLKRYICRELFPLLTPQPLDNQ

SEQ ID NO: 190726 - protein, 355 aa, unidentified
MYGLKHQKEKRSMDHFAGLDVSVKETSICIVDDTGRIVREVKVASEPEALLAVLANPTYHFKRIGLEAGPLSQWLFSALAEAGLPVICVETRHMRAVLQAQINKTDRNDARGMAQMMRAGLYRPVHVKTLRSQKLRMLLTHRKLLQSKAVAIENDLRGTLRNFGLKVGVVGKVRFEARIRELVENLPDLAVLVEPMLIVRRVLREQIGILHRRLLAIVRDDDVCRRLMTIPGVGPVVALTYRATVDVPARFKNSKAVGAVLGLTPSKYQSGEINRSGAISKCGDEMMRVMLYEAAQVMLTRTNKWSWLKAWAMKIARHRGMKKAIVALARRLAVIMHRIWVDGTEFQWTREAAAA

SEQ ID NO: 190727 - protein, 354 aa, unidentified
MSEHYAGRQIVGMDLHRRRSVLVRMTDTGERLETVRISNDPEYLKAVMARAGEAPEVVLEAAYGWYWAADTLAELGATVHLAHPLGVKMFSYRRVKNDQRDAADLADLLRMGRLPEAWIAPPATRELRGWVRHRAKLVGLRSSLKCQVHGVLAHAGVWVPMSDLFGVAGQQLLAELSAGDRLSIESRSRLDSALRVIGALEFEIELFAKLVNGRLRTDPGYRALQAIPGVGPVLAAVFVAEIGDIGRFHRPEQLASWAGLTPKHHESDTTVHRGRITKQGSRLVRWAAVEAIQRVSGHTRLGQHRDRVAARRGRNIGVVAAARELLTLVFYGLRDHHIRALDTPAAPVASTPAA

SEQ ID NO: 190728 - protein, 415 aa, unidentified
MNRLIERCAMLDIHKSQITACVRVPDDRAGRRQEICEFRTTTAGLITLADWLRSWSVTVVGMESTGVYWRAVFYLLEDEFECQLFNAKHLRHVPGRKSDVQDAEWGCQLLEHGLVRPSFVPPRPLRELRDLVRYRKAKIQERTREVQRVEKTLQDAGIKLSSVASEVLGVSARNMLDALISGTNDPEVLAELAKGTLRKKIPALREALAGRFTGHHALLGGQMLAQIDFLDETIATLSERIEELTRPFSHELELLDTIPGVDKRAAEMILAEIGPDMTRFPTEHHLASWAGVCPGQRESAGKKHSAATRKGSKWLRGTLTECAKGIVRTKGTYLSARYHRIKSRRGHAKATIATGHKILTAAYHVLNRGVPYHELGEEFFYRRDTEATERYRRRLVRQLERLGHQVTLEPLPEAA

SEQ ID NO: 190729 - protein, 354 aa, unidentified
MSQTQNAAIAVVGIDIGKNSFHIVGHDERGAIVLRQKWSRGQVEARFANMPPCLVGMEACVGAHHLSRKLNSLGHNARLMPAKYVRPYSRGQKNDFRDAEAIAEAVQRPTMKFVATKTAEQLDLQALHRVRERLVSQRTGIINQIRAFLLERGIAVRQGQRFLRAELPRILATPPDVLSPRMVRIIEDLAGDWRRLDERAESLSNEIETIARQDAGCERLMSVPGIGPIISSAMVAAIGAGDVFTKGRDFAAWLGLVPKQISTGDRTILGKLSRRGNRYLRVLFVQAAWVVLIKPKIWERHGLKPWIEAARKRLHHNVLAIALANKLARIAWSVLARGRAFEARKIDQAANQSA

SEQ ID NO: 190730 - protein, 312 aa, unidentified
MTQPERFIGIDVAKASLEVAFGHDAQAPVERIPYTSEHVARLVERLQQLQPTLIVLEATGGLERPLMEALRQADLPVVRVQPQRVRALAKAERLDARLLARFGERIRPLATAAPDAPQQAMRDLLARRTQLLQMRTAERNRLQTAGPAVRQCIQAHLDWLDQALAEIERDIEERFNSMDDLPPQQKLLQSVPGIGKITAQTLLIRLPELQSQDRKAIAAFVGVAPMANQSGSKDRKRRIYGGRRDVRNVLYMATLSAIRCNPVIRAFYERLRQAGKPAKVALVAAMHKLLTILNAILRHKCPWNPALYASKT

SEQ ID NO: 190731 - protein, 403 aa, unidentified
MNMNAVGIDVSKGKSMVAILRPYGEIISKPFEVKHTVSGIRSLIEQIQSIDGESRIVMEHTGRYYEPLVRELSKADLFVSAINPKLIKDFGDNSLRKVKSDKADAVKIARYTLESWTELRQYSLMDEIRNQLKTMNRQFDFYMKHKTAMKNNLISILDQTYPGANTYFDSPAREDGSQKWVDFSATYWHVDCVRKLSLNAFIDHYQKWCKRRKYNFSRSKAVEIYEASKELVSILPKDDLTKLIIKQAVEQLNTASQTVEQLRTMMNEAASKLPEYPVVMAMKGVGKSLGPQLMAEIGDVSRFTHKGAITAFAGVDPGVNESGSYEQKSVPASKRGSSTLRKTLFQVMDVLIKTKPQDDPVYLFMDKKRAQGKPYYVYMTAGANKFLRIYYGRVKEYLSSLPE

SEQ ID NO: 190732 - protein, 386 aa, unidentified
MRKPNDMSRCLAALEQDSTLVAVIEMGKSSWLVAGVVPGIERHPLKKLAVNEGALLALLYRWRDEAKKAGHPIKRICVAYEAGRDGFWLARWLRRHKIEAYVIHPTSVCVSREHRRAKTDRLDTEHLMRAFIGWLRGETDHCRMCAIPTLEEEDDKRPSREREHLVGDRTRIINRLTSCLARLGIRDFNPASRKAPERIAKVRTPEGTLIPPNTLDELKHDMAHLRFISDQIDEVEKARLARLQKAPKKGPHAMVRLLASIYGLGIETADMLVHEVFFRNYRDRRAVPRYAGLTGAPDESGQRRREKGLARAGNARVRHGMIQLAWRFLQFQKESALVQWYYKRTADGRKDTRKTMIVALARKLLIALWRFVTTGEIPAGVQLRAA

SEQ ID NO: 190733 - protein, 348 aa, unidentified
MLHAGLDLSRKRLDYCLLDERGRRVEVAAAPPDLDGLAGLARRVEQRHGRVPVRAAIESMNGARFVHDTLERLGWEVEVADAQKVKGLAPLACKTDKIDAWVLAELSRRELVPAIWLPDFELRAERERARFRLFLVRKRSALKHRVHAQLLAFGHACPVSDLFGRQGRELLERLEFPEPWRSGVLAAVAMIDDLERQIAAIDRELRELGADHRYVPLLQSVPGVAWVLGYTIAAEIGDIRRFDSPAKLCGYTGLCPRVYQSGAKDRRGQLTHAGPRYLRWALVEAATHACRHPAYRERYQRNKRRLGRQRGAKVAQVDIARKLAEAIWHMLTRNRPFAPAGATPPLTA

SEQ ID NO: 190734 - protein, 340 aa, unidentified
MNEITRVAIDTSKSVFTLHAVDARDQPVLRRNLRRQDLVPFFAKLPPVTVSMEACGGSHYWGRTLQALGHRVRLIPAQYVKPFVKRSKNDRNDAQAISEAAALPGMQEVAVKSADVQARAMLLTVRELLVRQRTQLVNALRGHATEMGLVAPVGGKGLAMLRSEIEADATLPEAATEALRLLGREVDQLEARLAAIDKNLLAQHKADPDSRRLSAIPGVGPMSALSFSRMVDATQFESGRHFAAWLGLVPREISTGGKQRLGGISRAGNERLRQLLVLGATAVIRFARPGRPGVSAWLLALLERKPRKLAAVALANKMARIIWAMLTRGEDYRLAKPVVA

SEQ ID NO: 190735 - protein, 281 aa, unidentified
MKATAPTAAGPILAIDLGRYKSVACAYDRATATARFHTLATGRADFERLFDRHPGALVVVEACANAGWAADLAAAHGLAVKVASTSGEAWRFTHLKRKTDRDDARRLAELEALGQLPTVALPGPAARQRRGLIAHRQALVGRRTAAQSRIRALFAGQGLPSPRGHRAWTATGLAGLDLQAKPLADCGPAELWRGMLHLALADYRSLLALIAAAEAALDRLAAADPATQLLGTAPGVGPRTAEAVAAHLHDPRRFASGKQVSAYAGLVPRQYQSGESDRRGG

SEQ ID NO: 190736 - protein, 409 aa, unidentified
MQVVHEVCCGLDVHKKSVTACVLWASGRRKQIRAFGTFTRELLELGDWLRACGVTHVAMESTGVYWKPVWNLLEGQFEVLLVNAQHIKAVPGRKTDQKDSEWIADLLQHGLLRASFVPPTPIRELRDLTRYRASLAQEINRIANRIQKVLEDANIKLASVATDTLGASGRAMLEAIIHGEQDSQRLAEMSRGLLRNKIPELRQALEGRVTAHHRFLLRELLDHHYFVESKMQRIEQEVAERLGPFQSEVARLCTIPGVDRVTAWGLLAEIGLNMNQFPDAQHLASWAGLCPGSHESGGKRKSGKIRKGSLWLRRCLCQGAWAVSTKKNNYLSALYRRLAARRGTKRATIAVAHNLLVIAYYILRDGTCYRDLGPDYFDRLNPEGLRRRLTKRLEGLGFKVTLEPLARVA

SEQ ID NO: 190737 - protein, 421 aa, unidentified
MSRSQRIVGFDCGEDTHSAVLLDTAGKYGKKFEVTNERGQIQELLAELMLVIGPEAELVVSVESKRSHGRIVSDVAVELGCDLRQVNTVALNHFRDLEGQPRKDDDWDAYLAARMVFLEMGGCRKAIVTTEEERTLSRLTRTHSRLVEDRKRHVARLRAVLLELVPEMLHTSWKGPKPGSKAMQYMLERWPGFEGLEKAHLRSIVKILRQCRYGSRAADVAKLIRKAARGISVAEDERRAITFELDLLVQQIRFCNESVDRVYTKITHRVERDPVGKKLLEMHGFGPIITGVLVSELVPVACTSTEPKCATYAGVTPLSRKSGKSLDNDKLTQGVNQRVLHALYTSSVVAIKNSAIDRTYYEKKLRDYAGHPKPHVAAFIALSRQRHKLVYKLITTEARYDKEILIASHLARLEQDRIAAA

SEQ ID NO: 190738 - protein, 366 aa, unidentified
MEAIYIGVDFHARQQTICYLKTETGELVISELKHQDKEQVRAFYQQFQDQVIVGLEASGYSPWFEALLEQLGCEVWLGDATEIRRRARWRQKNDRRDAELIWDLMVHHEFPRLHQASAASREVLRMLRYRQKLIKLRTMSKNSLQAIALQAGLAKGKQLFSAAGQAQFQAAEMSAALQWQRDHWFELLKPLNQQVLETMVWFKAHSKDDRSVKRLRTHPGIGLLTALCLVHTLQPVSRFRNQRKVVAYAGLDPVVRSSAERALHLGISKGGSRMLRYLLVEAAHTAIRYDEDLKRFYQRLVERRGRPKAKVATARKLLIRAYIMMRDEIDYAEFRRRAVAARLARTGQGPTTVPVVLIGQSASPGA

SEQ ID NO: 190739 - protein, 343 aa, unidentified
MKDTTISVDVAKSVFEIAVSLHPGHVAETHRLPRPRFAPFFASRTPTTVVMEACGMAHHWGRELQKQGHRVVLLPPHAVRPYVPRNKTDRTDAKGILEAFRNQAIHPVPVKTVAQQALAALHRLRSRWMATRTSRINTVRGVLREFGVPIPIGSRQVVPAVRTALADADSGLPDVLRPTLAEACEEIHGLEAHISAVEHQIEAVARETPVVASLRSIPGIGLLTATALVAVVGEASRFPSGRHFASFVGLTPRESSTGLRRRLGAISKRGDSYLRMLLIHGARSVLCHAKKTDTHDRLRTWALDREQRRGHNKAAVALANKLARIVWAVWTKGSPYQDSVTAE

SEQ ID NO: 190740 - protein, 353 aa, unidentified
MTQATTQTIGMDVSDKKSRICVLSASGEIVDERWIDTTQHGVRRFFAQQPPSRVVFEAGPHALWMTWRLAELGHEVLVANPRNLGLIYASRKKSDPQDARRLAQLGRVDPDLLSPVTLRGRDTQWHLAQIRSRAMLVEARTKRVNHVRGRVKTLGHRVRSCDADPFAAAAMDSLPPELVTVVMPVLKAIVELTEQLDALDRAIEAIAATRYAETVRRLTQVHGVGALTALTFLLTLDDPSRFPHSRRVGAYLGLVPRLDPSGEVNRQLGITHAGETDLRTLLVGCAHTIVRQGSPDTDLKRYGLRVMERGGKNAKKRAVVAVARKLAVVLHRLWVSGEAYVPVGYGQVHAQAA

SEQ ID NO: 190741 - protein, 329 aa, unidentified
MSALVCGLDVHKDSTYATILNSEGRIVDQTRMENEKVAAYLSQYKVGRVAMESSTAVAPLYRQLKKEGFNAVVSHPKKTKLIAEAKIKSDRVDSKAIAQLLRMDWLPLSYVPDDAVGALREKVRRRAFLVRERVKLRVKIKSYLTYQGLKWPEDHGLWTKVGVVWLHDLNLGSVESYLRLIDVLSEEIKLLSKELKSEAEGDEDVNLLMTVPGIGYYSALLVKSEVGDIGRFPFAEKLCSYAGLVPSTYQSGGMVRHGNITKEGSRWLRWIMMECASTHVSKYDTWISRSYRCLAGRRGRKTARVAAARKLLVVCFSVLKHKKPFYDQP

SEQ ID NO: 190742 - protein, 368 aa, unidentified
MNTVPMVVGLDVHKKSIAVAVLKPEEGSRMEAWTIANEPPEITKLVEGLAVKGMPHFCYEAGPCGYPVHRQITGMGWPCAVIAPGLTPIRPGDRVKTDRRDAEKLARLFRAGELTVIHVPTQAEEAVRDLIRAREDALIDKLRARHRLMKFLLRQGRVYRETKSWGVAHRAWINTQTFELPASQMTLETYRQTLSEMENRLEGLHKRIETLAGAEPYKTPVRYLRCLKGVDTLSAMTLVAEIQDFDRFKRPTGFMSFTGLVSSEHSSGNRIFRGSITKVGNAHVRRILIESAWHYRRPYTMCQVLVERRRNCPREVVAIAQRAEDRLRRKYWHLVQRGKPTQTAVVACARELAGFVWAIAQHFPKRSV

SEQ ID NO: 190743 - protein, 354 aa, unidentified
MRFYSKQHQYYCGVDIHAKTIYVCIIDQEARIIKQKNIKSNPASFMKAIDKYRDDIAVSAECMFTWYWLADLCAKERITFILGHALYMKAIHGGKAKNDRIDAYKIAYLLRGGNIPMAYVYPPEMRATRDLMRRRNHLVRKRAELLGHIQNTNHQYNLPPLPKNIRFKGNREGLIEHFRDECVQKSIETNLSLIDHYNSILLKLERYIGKKAKVHDHEALLRLLSVPGIGQILALVILYEIHDIRRFPRVQDFVSYSRLVTPSKESAGKIYGHSGRKIGNVHLKWAFSEAAVAMLRGIPDVKKYKEKLQRKHGKAKALSILAHKIGRATYYILKRKEVFDIEKFLTKKYQIQAG

SEQ ID NO: 190744 - protein, 405 aa, unidentified
MEILVDRGCGIDVHKATVVACIMGTGIKKEIRTYTTMTNDLLRLKEWLKGHGITHVAMESTGVYWKPVFNILEDSFEVILVNARHVKNVPGRKTDVKDSEWLCKLLRSGLVRASFIPPKEVRELRDLTRYKRKLIHTITSEKQRVEKILEDANIKLSSIASDTFGASGKRIIQELMKGELRPDEMADLSKGKLRNRKAELKEALVGNMEDHHKFMVQASLSHIAMMEELLCTIEQKIQKKIERHFKEEYELLKTIPPVKDSASVLIAEMGVNMDLFPTEGHLSSWSGMSPGNNESAGKKKPGVTTHGNKHLKTILTEFGWIASKMKGTYLWSKYHSLVGRRGKKKALVAVGHKILIMCYHILKYKVPYKELGPRYLDERRKDRIAKSYIKRLTSLGYAVTVKEAA

SEQ ID NO: 190745 - protein, 348 aa, unidentified
MTVYIGVDFHARQQTISYLTTEDGAIQHLTLLHESSEPVRAFYEQFAGQRVVVGFESSGYAAWFEELLEELGCEIWLGHATYIRQYAKRRQKNDRRDAALILELLLAGDFPRIHRYSRGTRQVLQQLRYRQRLVKLRTMVVNMLLFMASSRGVTFRTQLQSKRGQARLAQLPLPQPLAQQRDELLQLLQEFDQKLATVEKELEQVAAQDVAVQRLRTHPGIGLLTSICVRYTLESVERFATTRKVSAFAGFDPMEDRSDERRQMGAISKQGSRWLRFFLVEAGQVAMRKDTDLARVYQRICRRGGHAKAKVAVGRRLLVRAFIMLRDEIDYAEFQRRGVAARSSRGTA

SEQ ID NO: 190746 - protein, 343 aa, unidentified
MYYIGLDVHKKTISYCVKDAAGCVHSEGKIGSTRRELDAWVMTLPQPRMIAMEATIFTGWIYDHLLPHAEKVKVAHPLMLRAIAAAKRKNDKIDAGKIADCLRCDFLPECHMASTEIRDRRRILRYRNLVLRQAVQMKNRVSGLLMETGVSYNKLRLHRMGYFAELMSTNEEVSQSIRPLLRLCREHIDRSIRLDTALLRSLERDPLLSDRLRRLRTIPGVGPITALTWALEVGDTSRFRSIKQAVSYCGLCSAEKSSADKVMRTPISKQRNKHIQQVLVEAARLAPRYSEELALLYEKERQRGNGNRATLAVARKMVALMLAVERRNTDFVPAGEFRRTAAA

SEQ ID NO: 190747 - protein, 340 aa, unidentified
MKKDMKCYLGMDVSKLWVDITLLRLADHQKQPATSERFDNSEAGMKALDKWLRKQQVPFDDNSLLVVENTGVYHRLIWAYCSSHGLPLHIGNATHIKYSFGIARGKNDKLDSQRLCSYAYKNAEELKATPVLNPALLQLKDLMTARSRLLSQYNSIRQYLGELKLSNTKAVHQALEEVHAAALKGIRASLKTVEEQIHQLVQQQQAIKNNYDLLVSVPGIGHLTAVYIICCTNNFICKITGKQLASYAGVAPFGNSSGTSIKGRDKVHHMANKELKKLLHMGALSAIQHYEEFRAYNERKVKEGKHQLLVLNAIRSKIVLRAVAVINNQHKYVDNHKKAA

SEQ ID NO: 190748 - protein, 463 aa, unidentified
MQEKRNKEVERHRGQLQGLPVIRCLVAGIDLGSEQHWVCAPTSDGSGREIADFGATTPELIRMAEWLKQRQVESVAMESTGVYWIAPHEVLEAQGLEVLLVDTRQLARVPGRDKKTDPTDCEWIQRLHSCGLLRGSFRPQEQICMLQTLVRDKASLVAESADWLRRMQKSLDQMNVRVHRAVSDLEGATGMAILRAIAAGERDARKLAQLRDRRCRQSEEQIAEQLSGHWREDHLFSLQQALKMYDAIHERIAAYEKEILGRLHQMERPDQPGQTAPPLGNANKAQKIKKHGQEAKRQALYRMSGVDATQIDAIGVDTVEVVISEYGLDLSRFPTEKQFVSHATLAPHVPKSGGKPLKKRKHNSASTRVAAALRMAALSLRHSDTALGAYYRNIAKRIGGDVAVFATARKLATLIYRLLRWGQPYVDEGAQAYENRYRQLRLQNLTARVNALGYQLTPINAGA

SEQ ID NO: 190749 - protein, 351 aa, unidentified
MTEHSREPIVTLGIDLAKRSFHLFGVDAHGREVLSKKLSRARLSEFMANLPPCTVAMEACGSAHHWARLFRTFGHTVRLIAPQFVKPFVKSNKNDAADAEAICEAAQRPNMRFVSVKSVEQQDIQAMHRMRSLVVERRTAQVNQIRGLLLEYGMEIPKGRAAVSRRLPEILEDAENGLSARLRAELSELAEELRHLDERVRHYDAQLQAIAQSDPRARDLMTIPGLGAQGATALLAAVGEDAHVFTNGRGLAAWLGLVPRQHSTGGRPRLLGISKRGDVYLRNLLIHGARAVLRWVERKEDPLSRWATTLKGRRHTNIAIVAMANKIARIAYAVMTSGKPYDAAKGALANG

SEQ ID NO: 190750 - protein, 343 aa, unidentified
MDKLDTAGVEVSVEVLVIALKSNGQMRASEFPNTPSGHKQLIGYLRRHSQRLRICLESTGLYGLDLALALQTQKGMEIMVANPRSVRHFAEAMMQRSKTDPLDAKLLAEYAERMPFLAWQPPSLPARRLCAMARAIHQLTEMNTMQKNRLHAAASTETTPKIVMTELRRSLAQQQRSIARLLREAIQLIQSDPVLQKRFQLLLGIRGIREMSALQLLGELVLVPADCDVRQWVAYAGLDPRQYKSGNSVEKKVRISKVGNRHLRRALYMPALVAVRHQPHFRAYYQHLRAKGKLKMVALVAVMRKLLHGIYGVFKSLEPFDATKLFSSIAPAFEPKITKEIAC

SEQ ID NO: 190751 - protein, 362 aa, unidentified
MVKSTTAKKSLIAEVKKSAAVKPAVAGLDYHKKFTQICIGDAQGIVIATRRVVNDKEEMRKFFTEFPHVRCAIESCRGYEWLINFLKEELNLDVALVNAHRLKLIAQSRCKTDKIDARIIMQMLAIGYLPTCYLPTAEERRLRERLRWRAHVVRYATRMKMRIHAMLDKENLSQVIEDPFTKSGRTLLRQVQLLPGRQELLDEHIDLLEKFEKLVKSENSWVDRELRQNPDAQLLLSVPGIGNLTALLIWCELGNIARFRDASQVAAYFGLVPSVRSSADHWSYGPITKEGSKFVRWMLIQCAWQAVRSSLVLRTHFNAVSKRAGNNGAIVSVARKLIKIAYRVLRDKRAFNPELVGRQVTG

SEQ ID NO: 190752 - protein, 412 aa, unidentified
MNQKVDDCVLDKEKVAANTRDSAYFVGVDISMKSFHVALIQEKKKVLWDESFSMNQKGFKAFYQKLQSYSNCIVGMESTSTYHLNLLLYLMEKEVFVVLLNPMLVKRYISSQTLRNCKTDKADASVIASFVKDTQGSLPRYTETQTHHLFRLARCKEDMTHQITALKTKLKQLLRLTFPELVDSYEIYTTTMLQLVTFYPSAQAFCTAGEKKIDKRLLVLSKGKGKPVSYTGHSICHLAHHSIGRTDPSVEFVIQQTIQTLQFYETKKKEVKAKLEKEVKKFAVEDVKILSSIPGIGKDSAVHFMAEIGNMDRFRNYKALTAYIGTDPGIEQSGQSLHRKKISKRGNASLRRLGYIIAQKVIQYCPRFQEYYQKKRNEGMAYKKALIAVWNKLLRTIFSMLQRRTYFLLSDS

SEQ ID NO: 190753 - protein, 370 aa, unidentified
MSVRRILAKTIDTDLEYEAIGIDLAKNCVSAALLTTDGEVVCIDRLDYSELEKSAQALSPTTFAMEPCTEMNYLVQKLEAWGHRCLVIGGKNVQNYVENHYSGQKTDLNDAQALAFLAQDTQLRTIKAKDVEQQKYASLTTLREQYIKQYRQTIVSLKGICQAWGLNISKGISGKARLKDLIENHAAFPEELRESLVDMVTHAQTTQKVLNKITKTLEVLAKNDKVCQLIQTIPGLGTICSCRLRATIGDIKRFKNPKDFPAYYGLVPRSIATGHNEKKGKITHRGDRTMRSLMVQGAGCVIRLATCGKLKSKQLTKWILKKQKEKMPWGKLVCAVAAKLLRIVRAILISSKPYNPKIAGVAKCSLSKGS

SEQ ID NO: 190754 - protein, 468 aa, unidentified
MTDDARWFVGIDWASETHQVCLVDAGGKIVGERGFPHGGAGLAEMCIWLLVTTRAEPTVIAVAIEVPHGPIVETLLERGFLVYAINPKQLDRFRDRFTVAGAKDDRRDAHVLGDSLRTDRHCFRHLAAEDAVTVELREWSRMAEDLQQERNRLANRVREQLWRYYPQALKISDDLGADWFLELWAAVPTPAKAARVHESSIDRVLKTHRIRRIAAAEAAQVLRQQPLTVAGGTVEAASAHIRAVAARLKLVNRQIKEAHRRLDALCGKLAAGEEKTASGQAPEQRDVTILRSLPGVGRIVLTTLLAEAAEPVRRRDYHALRTLSGVAPVTKRSGKRCIVIMRQACHMRLRGAVYHWARVAIQHDPLSRCRYAELRKRVTATGVPCAALPTGCSQWLARCSTSRPCSIPGVPTSRPPKLQNIPVFDRGDHPCVPTWRCQSAARSPRRGCRACGTGEAGANRPQRCRARR

SEQ ID NO: 190755 - protein, 392 aa, unidentified
MIIVGIDIASQKHDYFMLQKETGVVFSSSSITIPNTLNGYKKLHKDIQSFCGATSDYAVRIGLESTGIYSTNITTFLVSEGYEVMMINPILTNMVRKASKVHCPKNDNLDSQTICKYLIDNEDKFSPYTSSLYHTFALKSLSRKRFYVAEDLRKAKLNVYNLVQLVFPEFKSFFSNIYGDSALSILKEYPSPQKLAKAHVNKVSSLIHGRCKCSALELIDAAKNTAGITSDYDSFQLIDAIEELEHIQKRVEKYDVQIENYVKQHFPNLLTIPGVGYITAGLIAGEIGDINRFHSPDSLVSFAGIDCTVYESGKYKSKHNIISKKGSKYLRYALFQVARIAWQWDPVFKEYYIKKQSEGKHFYVILGHIQKKLVRLIYSLMKSGLNYKIISA

SEQ ID NO: 190756 - protein, 379 aa, unidentified
MSAIYNVQDVCCVSLELSKSTWVCAFQAPGEDKASVHNLPARDIAGLEKVLRRLLHATEVRLARPLQMVVCHEAGYDGFWISRSLVARDFNVIVFDPASFLRPRRGRVAKTDRLDATGMCRTLRCWLGGDRSVASSVRIQSVEEEDAKRIGRERKYLIQQRSRVVSRIKGLLALHGIYVDVKGIGKRLTSVLTSLKTAEGVELPKFIRRDIERMVQHWKLLAEQIATVDKERAEAIRSEATFPHADKVSRLSKMGGVGEISATVLVAEVYHRKFGSRRHLASFIGLAPSPYSSGETSRDRGINKAGTKLARCTLVELAWFWLRYQPQSELSQWWHQRFGKAGMRGRKVGIVALARKIAIALWRYVEFGVIPAGATLKAE

SEQ ID NO: 190757 - protein, 395 aa, unidentified
MRFAGIDIASETHVLAMVNGDGDVEVKATPFGEDAAGYDKALGLLGTPGEVLVAMEATGHYWKNVFAALAAVGHRVALLNPLRTRRFADEDLERTKTDAIDALGIARFAAQKRPTPTHLPDSAAEELRELVRLRERLLQDFGDRVRQLHRLVDLGFPEFTRYVRGLDSELASAILHDYPTAAAFHGASVKRLAALRYDGRHPVGLDLARTLIAAARRSVGHHHGPAYRVQVRYACQDLDILRRRLRELDHDIDGKLREHEVGRLLTTIDGIGNNTAAFVIAEVGDPAAHFRSASALAAYVGAIPGLKQSGKRTTSRAALTPIGNARLRKALWMPTLTAVRYNAWLRSHYHRLRARGKLPKVALIACMHKLLLAIYSVAKHRKPFVPQLAAAETAR

SEQ ID NO: 190758 - protein, 347 aa, unidentified
MFVGIDVHKDTHTAVGISPYGEKLFEITVGNYQNDFEKLEDKVKEHSGVLSPFFGLEDVRGYGERLAGYLYEKYPVYHVPSILVDRLRQNATHPEKSDSLDALGVAKVMIQSIDTLLPYTISQEGEKAKQLKEISIDREDLVLEQTRLKNQVHTLLYRIYNTEYANKFKDSFSLKALRYWRNAKLKCDPFLLKTMKRKVRRLLDIHVEISELEKDMQILLDENYTIQTASGCGVVLASTIVGEIGDIQKFKSPASLAKYAGCAPRERSSGKKTRHVKSRSGNRRLNCAFHRMALSQISRMGNDKAREYFKRKISEGKNKSQALVCLRRQMVNIVWMMLKHKTVYRNA

SEQ ID NO: 190759 - protein, 347 aa, unidentified
MEHIAIDLGGKKSRICVRDDKGTILEERNYPTERLSSYLKKRPGSQVVLETCSEAFAIADQAKQLGHKVTVVPATLVKELGVGSRGVKTDKKDAQVLSQVSSRVDLPSVHIPSGQAREWKALCSSRDCLVASRTKLINHVRGWLRTQLVHVRSGGVQTFSQRVEEELLNRPDGMPMYIHRELQSIKMLNEQIAEADKELDQITAQETRCRNLMTVPGVGPVTALRFVATVDDVGRFRRAHALQSYLGLTPGENSSSMRERKTSITKAGAPEVRWLLVQAAWCAWRTRPGDPMVKWANQVASRRGIQIAIVALSRKLSGILYAILRDGSQYQSKRAADSLPLPANSPV

SEQ ID NO: 190760 - protein, 358 aa, unidentified
MVDKVTKAAVVGGVDTHKDLHVAAVVDQNNKVLGTQYFSTTRQGYRQMLAWMTSFGTLKRIGVECTGTYGSGLLRYFQNAGLEVLEVTAPDRMERRKRGKSDTIDAECAAHAAFSGIRTVTPKTRDGMIKSLRVLKTCRKTAISARRVALQIIHSNIISAPDELREQLRNMTRMQLIRTLGSWRPDASEYRNVTNVYRISLKSLARRYLELHDEIADLDVMIAAIVDELAPELIKRNAIGYESASQLLITAGDNPQRLRSESGFAALCGVSPVPVSSGKTNRYRLNRGGERAANSALHIIAIGRLRTDAKTKEYVARRVAEGHTKMEAIRCLKRYISREVYTLLRNQNRRINSIPITA

SEQ ID NO: 190761 - protein, 346 aa, unidentified
MDQQQHYVGLDVSLETTSICVVDDKGTVVWRGKCATTPEAITEAVRTYAPAAVRVGLETGQLSNWLTLNLRRRGLPVVCLDARHAKAALSLQINKTDANDALGLAQIVRTGWYREVAVKSMDANTLRMLLVARAQLVSQRQTIANTIRGLLKTFGLVIARGSGGLFGVRVREQIAGNDVLVAIVEPLLVVWHAIREQVQILDRQTLARARADAAARQLMTIPGVGVVVALAYTAVIDDPARFRRSASVGAYLGLTPRRYQSGEADTSGHISKCGDGLLRAYLFEAATVLLQRHSRASTLKTWGLALAKRIGMRRAKVAVARKLSVIMHRVWSDRSEFRCGDVPVAA

SEQ ID NO: 190762 - protein, 411 aa, unidentified
MERFVERCAGLDVHKDSVAATVHVPGPEVSRLQETRTFATTTRGLLALADWLASYGVTLVGMESTGCYWKPVYYLLEERFECWLLNPRHLRNVPGRKTDVADSAWICRLLEHGLVRASFVPPRPIRELRDLTRYRKTQIEERSREVQRLDKVLQDAGIKLSSVASKTLGVSARRMLDALVAGTHDPELLAELARGRLRRKLPALKEALSGRFRSDHHGLLVAQILAHIDYLDETIATLSERIEQAIAPFSRERELLQTIPGVGRTGAEVLIAELGVDMSVFPTDAHLASWAGQCPGNHESAGKRRSGRPRHGSKWLQTTLTESAKAASRSKGTYLGAQYTRLRGRRGPRKATGALRHSILIAAYHILDQNTANRELGADYFDRRSTDQRTKRLVRQLEKLGHTVTLEPLAA

SEQ ID NO: 190763 - protein, 276 aa, unidentified
MAQFITAAGIDVSKSWLDVALWPDDAAVLHIERSEAGCFDRLAAWLREQGVSRVGLEASGGYETEVMDALQARGFEVVRYNAYRIRMFAKANGRLAKNDRADAVVLAHAAAVLPVRHATARQAELDPLVELLNYRRRLHDWIGDCTNQLEHLRDKVLRRQTTARRARLHREVIAIDKKLAAALASSGASGVGVAPFDNDSGNRRGERHIQGGRARLRRILYMATLSATRHNPVITAFAKRLAGKEPKVIITACMRKLLVILNAMVRDATDWSPKAA

SEQ ID NO: 190764 - protein, 351 aa, unidentified
MMLLGVDYHPSFQTIAFFVEETGECGEQELNHSGGEAERFYRDLQQRGVSVRVGMEATGYSRWFERLLAELGFELWIGDPAQIKAKRVKKQKTDRKDAQLLLRLMQEDNFPRIWVPSPENRDLRQLLWHRHRLVQMRTRIMNQLQALAMNENKCWKGKLWSAVGRAAFEKLPLAFWASRRRQELLELLDRMNPAIDELTAAVEKEAGKRPEALRLMTHPGVGALTALAYVLIIGTPERFAYGKQISNYVGLIPSEDSSGGRQRLGHITKQGNSLLRFLLVEAAQAAARCNPHWRRRYRHLAMRRRRNIAKVAMGRRLAVRLYWMWRNGCEYSPSFEFGSHAGKLEIGNGVH

SEQ ID NO: 190765 - protein, 330 aa, unidentified
MKNYSDVIGIDVSKLTIDAHIHNQCVHRVFSNTPKGYKALLFWTESYLEDQVYFFCFENTGHYSTNLSIYLSEKAIDYVEESPLAINRSSGVVRGKTDKLDSAMIARYAWIYREELILSSPKAKDIQELGRLLSFRDQLVRNRTGKVSSLKEMENLLSSPSTDDCCKIIKKTIHYLTKQIISLENHIKNLMVRDESLQKNYELLNTLKGVGLVLSCQLLYHTSNFKRFDSWRQFSSYCGIAPFEHSSGTSIHRKNSIHHIGDRKMKTLLTLASVSAIQCDKELKQYYNRKVAEGKPKMVAINNVRNKILSRAFAVVKRGTPYVELQKFVA

SEQ ID NO: 190766 - protein, 348 aa, unidentified
MKQVITIGLDLAKHVFQVHGAAAEGLPVFNRKLRRSEVMRFFEKLPPCVVGMEACGSAHYWAREITALGHEVRLIPPAYVKPFVKRGKTDAADAEAISEAVVRKTMRFVPIKTAEQQAAAMVLKTRALLVRQRTEAVNALRAHLAELGIISTTGVAKVEALLSIVRDETDTRLPAAARFALMAIADVIEASADQIGRLERAILVEAKRDEDMRRLTTIPGVGAITAATIKALVPDPGGFKSARHFAAWLGLTPRPHSSGGKERLGRISKMGNPELRALLVVGATAVLRVARNDSRTRPWLRALLARRPFKVAAVAQANKTARIIWALLNRGGTYRRADPLAITAVAVG

SEQ ID NO: 190767 - protein, 483 aa, unidentified
MKPKRVTKNKEGSCRPTPNHWHKMNHKQRREVMRKIQSEDLSLEVVHPDAAGIDIGNESHYVAVPPTRDSQTVRRFGCTTAELKAMADWLKQCKIRTIALQSTGVYWVSVYDILEEAGFEVYLVNARETKNLPGRKTDVQESQWLMKLHTYGLLRNSFRPSQEIRTMRTYWRQRHDLVRTAGRHIQRMQKALTQMNIQLANVLSDVSGMTGQAIVKAILAGERDAYELAALRNWRVKASEEEIALSLEGNWQEEQLFVLQQEQDGYEFCLKQMAECDQRLQQYLQQQQDRSQGASLPEEKRKERLRKKKKGNTPQFDLRPELFRMSGTDLTQIDGIDVTTAMTILSEAGWDMSKWRTEHHFVSWLRLCPDNRISGGKIIGKGRLPTNNRVTNALRMAASTLRLSNTYLGAQFRRLRTKLGPPVAIKAMAAKLARLIYRMLRYGMPFIDRGADFYETQHRKLQINYLKRKAANLGFQIIEAPAA

SEQ ID NO: 190768 - protein, 330 aa, unidentified
MLENVVVGLDLHLKNTQGTIMGMNGMVLSQERFRTDKESLRRFLCGVPRGSKVALESVGFCWPWIDFLEELGYAPLLANPVKVKMRAEDVKTDKVDSELLANLTRMDWLPTCYVPSAELRWLRSLLRHRAFRRKMSTAVKNRSWSELRKRDVKLGVNLGTCKGRDLAASLGVFEVDQDMELLEVVEGQIKKIEALLRRRYGDLKPVNLLMSVPGIGFLTALTVYAEICDVGRFSSPEKLAHYAGLVPRVRSSGEHTRLGKEVKANKWLKWILIETAWSHVNWCREGKLARVYEDACRRKRDKRKAIKIVARKLVNVIWAVWTHEKEFTLE

SEQ ID NO: 190769 - protein, 384 aa, unidentified
MKTNSDAPQTLYLGLDVHKAETVISILEPDRDAEPRHHGAVATTVHALERAMRRIAKNQNRELSDLHVCYEASGCGFWIARRLIQMGIRCDVIAPSLIPTKSGDRIKTDKRDAAKLAKNLRSNDLVPVNIPDSVDEAIRDLCRARTDAVDDLRRAKSRLLAMLRRLGYNYEGKTRWTEAHMRYLRHLTLPDAAHNRVLEDNMTTIDFHYERVAKLETEMLQLLKDWQRKPLVDALMAFKGFKLVAAMVTVSEIGTFTRFEHPKKLMAFLGLVPSENSSGNKQSRGGISKCGNPHARWLLIEQATHYRVPPKVSAQLSARQEGVTRWIRELSWKTQTRLNHRFSTLKKRKLHHNKIKVSVARELCAFIWELGTRIEAKQGTPAQN

SEQ ID NO: 190770 - protein, 416 aa, unidentified
MYFVGIDIAKSFHITSVIDENEKKVINKPFKIKNDAKGFDKLLTILDSISLDKKEFTIGLEATGIYGENLLEFLISKGYSVKLLNPFQTSRYREQITLKKVKNDEIDSLVIALLLKDGKFSSGYVTDDEYQSLRTLYRNRASIQADMKDVKKRILTQITVTFPEFEGFIKPFTVSGLALLDKYPTAQHYKHSSVDRIMKLFRHIQGNNFTQDKALKLLELSKESIYSGKAKDARAIAIRSTIRLLRMYLSELDIIEAEILSLLDSSSTTTTIVNEVGEEVKKADNLIANLKTIPGVADKTIAALISECGDLTRFPTIPKFIGYLGLFPTENSSGNSKSIGHLSKRGSSLAKHALYMSAVSCLIHNTQLKQLYDTKRSQGKSKKEALVAVSRKIAVIIYSIVKYNVPYNPDRVFAKS

SEQ ID NO: 190771 - protein, 273 aa, unidentified
MEHFAGLDVSVNETSICIVDDAGRIVRETKVASEPDALLAVLKNTAYHFKRIGLEAGPLSQWLYSALAEVNLPVICVETRHMRAVLKAQINKTDRNDARGIAQMMRAGLYRPVHVKTLRSQKLRMLLTHRKLLQSKAIAIENDLRGTLRNFGLKVGVVGAAKFGARIRELVEKLPDLAVLVEPLLIVRRTLREQLGILHRHLLDLARDDEVCRRLMTVPGIGPVVALTFRASIDVPARFRNSKAVGALLGLTPCKYQSGESDHTGAYRSAGTR

SEQ ID NO: 190772 - protein, 373 aa, unidentified
MITIGMDVHVRNSYLHVMDDAGDLLRHGRCRNTILDLATFLGPLEREARQRGEPIHAVLESTTNSRAIQRMLTQYGEAAGIDLTAEVLDARKIRIIAESVCKCDRLDAKVLGELARSNLKLPACYMPDDEEFALREHLRARSDLVRMRTMLKNRVHAALHRRGILAPTASLFTKTGRKYLAQLELEAAGREILDRYLGMMDDIDRTIVASTASLRELMRRPRWAKPAALLQSMPGIGLLTAMTILAELGDLDRFRSRAAVANYAGLVPVCRSSNDKRYSGGITHRDSKHLRAMLAEAAWMAVARVPVYHAMFDRIARKKNKLVAITAVARRMLEDAFTMLRRDEAFRYVEPPAASLPASTPSSDHKVASSVAG

SEQ ID NO: 190773 - protein, 383 aa, unidentified
MQAVGGGNLGVITRPRSHSPPQELATGTTSTASTAAAGLILALDLGEYKTAACLYDGDPAAARFRTRDATRADLRRLVEGRRPAVVVVEACALAGWVHGLCAEVGLPCRVANTASEAGKFKHAKRKTDRDDALRLAQLQALGQLPAVAVPPPATRPWRALIAARQDLLGRRVAVQNRIRAPFVGRGPPAPRGHRAWTAAGVAGLAARAQPLADCGAEELGRGLLGLALAEYRQLRGLLAEAEAKLDALARHDAGVRLLETVPGVGTRAAEVVAHLGDARRFASGKQVSAYAGLVPRQFQSGESDRRGRITRRGPGVLRKALVECAWMALRYHAWARAGYDRLSRGRARTKPAVVALARKPLLRCWALLRDRAPWRAGPARAPA

SEQ ID NO: 190774 - protein, 427 aa, unidentified
MNTQNNDTLQTATEFVAYVGLDWGDQTHAFAWGPGSSKTPTQTGSLVNSPEVLHTWLQDLGQRFEGRPVALAVETSRGPLIHLFGAYPWLTVYPIHPATSARYRAAFKPSGAKDDLPDALLLLELVRDLRHKLRPLQLADAATRQLAALVELRRDLVDRRTQVLLQLMALLKSYFPQALQLVGHDLTTGLALAFLRRWPDPVALKAARPSTLKSFYYQHSVRSETLVTQRLALVQQLRTLTTDEAVLMPARLHLAALLEQVGTLAKHIERVEQQSQALFREHSEAYLFRDLPGAGKALQPRLLVAFGEDRSLYPDPASLQKYGGLAPVIEKSGCQSWVHWRWHASRFLRQTFVEWAGQTVVYSAWAKAYYQHMKAKGKSHHVILRALAFKWIRILWKCWHSRTAYDEARYLKQLLARKSPHAIKIEA

SEQ ID NO: 190775 - protein, 414 aa, unidentified
MNRARQWYAGVDWARDSHLVRLIDEQGRDIGEKIFEHSGQALAAMADWLIAQSGADDPGQLHIAIEVPHGPVVEALMERQFNIWAINPKQMDRFRDRYSPAGAKDDRRDGLVMASALRTDPHCFRRLGATDPVIIELREWSRIAEELGAERTRLTNRMREQLWRYFPAFLDLGADMEAPWLLELWQLVPTPDRAKRVRQGSIAAILKRNRIRRLDAAQALDILRQKPITVADGTTKAACAHITTLIDRIRLINRQISDAHQTLDSLTAKLGDEQEAQPGQPKQRDVDILASSPGIGTTVLATLLADATDALQRRDYHALRCLTGVAPVTKRSGKSCFVVRRYACHRRLANAVFHWARVAVQHDPASRTKYAALRARGHGHARALRSVADRLLRVICAMLRNGTNFSQTLALNAA

SEQ ID NO: 190776 - protein, 415 aa, unidentified
MALKIVYKICCGIDVHKTFVVACIASTDSKGVTTYEHHRFSTYTKGLKDLLQWLLKHNCKDVCMESTGKYWIPVYNVLENDCSIVLAHPKYVKAIRGKKTDKKDAKWIADLFKHDLVAGSFMPPADIRQLRDLMRYRFKLTCFMSSEKNRLQNCLTVSNIQLGNVVSDTFGKSAQAILDTLLENPADTSFDLEPLVYKSLKKKLPELRDAIDGYITPEQAGKLKVIKAHYENLESRKAELEELILALAAPYQQELAILQTAPGIRSDFTAIGIISEIGTNMEAFPSAKHLCSWAGLTPTNNESAGKKKSVRVSKAGCYIKPLLVQCANAVITSKKHPEIRNRYLRLKKRRGHKKAIIAIARMLLTALYHMLKNGENYNAELYRKSDLLSVDREITVEQAIIIARKQGYKIKSATA

SEQ ID NO: 190777 - protein, 424 aa, unidentified
MYRIAGIDVHKRLLVVVIAELRADGVVILERRKFLATPEQMRKLAECLLEWEVEEVVMESTAQYWQPIWGMLEEVWQPARRQRTGAGPKAGKLYLAQAQSNKGRRGRKNDYEDAERLVKRLEANELVLSYVPEPEQRLWRAVSRRKIQLSRDRSRVQNQLECVLEQAHIKLSSVISDLLGVSAQRILRAITEGGSDPVVLAGMVEKNVKATPEELADALSAVRRCRTEYRKLIQMMLDHVKLLDEQMEQLILQAAKLMKPYEDAVQRLAETPGLGVDSGLQIVAEVGPRAEVFPRPGNLCSWVGSIPGEQISAERNASSKSPKGNRQMRRILTEAVQAAVKQKGNIFEVKFRKFITHMDYQEAIWCVVHFMCKIVWKILHDGVRYQERGPAVDAKNAHRRNQKMARHLKAVGYNVLPPVAPMPS

SEQ ID NO: 190778 - protein, 374 aa, unidentified
MAVRPRIWIGIDVGKAAHHACAVDELGTVCWSNRVKNDQRAIESIIDRARAASAERVWAIDLISPLAALLITALLAAGERVVYLPGRTVATMTGVFRGEGKTDAKDARVIADTARMKTDLQPVTAPDELIAELTVLSACRADLMDDWVAGVNRLRAMLASIFPVLEAAFDYSSRSPLILVSGLCAPAEIRAAGIGGVATFLAENGAWAKSIDKIAAAAVSAAGAQDLAVPAEAATAALIKRSAAKLLDLDREIKDLDKQIATVFRQHPYASIIESMPGMGPHLGTEFLVSIGGDLTTFSTSGRLASYAGLVPVPRDSAKGMSGRFIPRLCWRCLGAWSMCCGRSCVTDGTSPTSLRGHSGRPLRLDILIETPPH

SEQ ID NO: 190779 - protein, 373 aa, unidentified
MPRYSTAFGMDVHLRSTTVCALDAETGEAVTRRFRGNPWGEVAEWMSGFPGPSLAAYESGYLGFAPQRELSGLGVDCVVAAVSKVPRSAADLSSKNDRNDAARMAKAILSHDVTPVWVPSPEIEGLRDLAAAHDAATARLAAAKQRLLAFLARRGYVYGGTTPAGNPRKYWTYGFLRWLDGIHPADDGGIRALAALRNEVEAADETRGALLAEYRAAVAAGPLSAEVEALQSIKGCGFALAAAFASEVGDFSRFRSGRQVTAYFGLAPKQRSSADSVRLGGISGAGNALVRKLAVEGSWCYAQAGHQPKLMPKGSGVPLEIRMHGRKGSERLLRRREEMIARGMPQAKANAATAAELVRWLWALGTMCREGAE

SEQ ID NO: 190780 - protein, 416 aa, unidentified
MNPSDPPSCVVDASSFQYVVGVDIGMESCSFCVCSPEKSLLIKPTTMTNAAQGFAQLHEQLQQLGVAPDRILIGLEATSRYGENLYHFLEGHGYELCLLHPRQTHEFAQRRGLRAKTDKLDAQTIACVLLSGEARRGYVPSELIASYRELVRLHTQLNDEVARYRNEIHAELSVLFPEFTQVFADPSRPTALALLQLYPSARAMAAAPVESLTTKLRELAPRKYGERTAKLLVALAQHSVSSGRATAARATSLKILCNQLQQTQKNLALLEAEIDRVLVGDSGATELGSVPEFGPKTVVVLRAELGDVSRFQRMDQAVAYAGLDIQVKESGKWKGQAKLSKRGSGRLRRILYLAALRCTRLEGSAFGAYYHRLIARGMRKREALMAVMRKMLIVAVHLLKTEEEYDPGKVAVAGAG

SEQ ID NO: 190781 - protein, 267 aa, unidentified
MNQEKYIGMDVHAATISVAVKNAQGKVLTECVLETKASTILEFIQAQRGTLAVTFEEGTMAAWLYDLLKPHVSRLVVCDPRKNALMRDGNQNDRVDALNLAELLRVNRVHAVYHGKHGIRALRELGRSYSTLTQDSTRVMNRIKSVYRSWAIPCAGTSVYSRRHRSEWLAKLVEPGVRIRAEHLYQQLDSLEPLRQAARRELLRESRKHAAVKLLRQIPTIGPIRSALLVALLQTPHRFRTKRQLWAYSGFAVQTYDSGEFRLSAGN

SEQ ID NO: 190782 - protein, 340 aa, unidentified
MSEITTIGLDLAKHVFQVHGVDAHGTTVLRKRLRRGQVLAFFSRIPRCLVGLEACATAHYWARELGALGHEVRLMPAQYVKAYIKRNKHDAADAEAICEAVQRPTMRFVPVKTAEQQGSQLLHRGREQLVRQRTMLVNALRAHLAEFGMVAAQGLRNVGELIAIVRDDADRRLPALARQVLQVLANQIEQIEAAVRTLERQLLAWHKTNPVSQRLASIPGIGPIIATAIATTVADPTVFRSGREFAAWLGLVPRQNSTGGKTRLGGITKRGNRYLRRLLINGASANLLRSKATKADPWVIGLRRRRPPLVVAVALANKTARIAWAVMLHQREYQPRAVAA

SEQ ID NO: 190783 - protein, 376 aa, unidentified
MSIVTHPNPIDNPVAGGVDTHADFHVAAVIDHVGRELGHASFPTTTAGYLELHSWLAEHGTVTVVGVEGTGVYGAGLTRSLTVGGVHVVEVDRPDRKARRFDGKSDPLDAYAAARAALSGRASGTPKSRDGNVELIRVLRVARSSAVKGRAVAITQLKAVIKTAPDDLRDQLRTLDGATLVTCCAGLRPVRSDAPTPPPHAKRKPRPGRLTDITAATKCTLATLARRIHRFTEEIADLEVDLDGLVAETAPTLVAMFGVGTDIAGQLLATVGDNPDRIATSAAFAHLCGAAPIPATSGRTQNRHRLNQGGDRHANCALYRIAMSRLRYDQRTQDRRDELHALGKTNKDIMRILKRAIAREVYQAIKIDLVNPEIGT

SEQ ID NO: 190784 - protein, 421 aa, unidentified
MKGLRTIRVKTVKEGTLISTVDIGITNNTGYCTTLDGRSTKSFRFDNTKEGFEKFWCMTIASKNRFGCDEVLVGYESTGPYAEPLVHYLARKQVKIVQVNPLHTKKMKEVNDNSPLKTDDKDPRVIADIIRLGRALSIVVPEGDAASLRRLNHARERHVGEQTALLNQLQQLVFLIFPEFKTVLKDMKGKTARYILKRYTTPERIGSLFKEVLGEEMRKRSMGKFGVKDAEVLIGLARETVGIKEGIVGILMDIRHILMQLEAEVRFISEIEVEMRATLERIPCSVRLLSIKGLGTVSVAGLIGEVGDFSKFGTQSEIMKLAGLDLYEISSGKRKGQRRISKRGRSLLRKILFYAAIQMIRKNGIMYDYYAKLTGRGMERMRALIAVSRKLLRIIHAIVRDNRDYVGQYQPPERRVIKKAA

SEQ ID NO: 190785 - protein, 298 aa, unidentified
MKSLVTERRSAKTVRDMRRAACSIVGLNACGAVVLRRRVKRETLIGLAAKLPSCIAAMEACCGAHHLGRIFAAHGHEVRLMPPEYVRPYVKAQKNDDRDAEGVAEAATRPTMRFVELKSQDQLDMQTLHRSRDRLVAERTALINQLRAILLERGIVVPKGKRNLEQNLVTLEDEPEGRGLSGRMRSSVADARAQWQDLDRRIAAFDAEFVAFAKQDEDARRLATIPGIGALNATALTAAIGKGQAFEHGRDLSAWLGLVPRQSTTGGKPMLLEISKRGNKYLRKLLILGARAALPHIA

SEQ ID NO: 190786 - protein, 358 aa, unidentified
MVDKVTEAAVVGGVDTHKDLHVAAVVDQNNKVLGTQYFSTTRQGYRQMLAWMTSFGTLKRIGVECTGTYGSGLLRYFQNAGLEVLEVTAPDRMERRKRGKSDTIDAECAAHAAFSGIRTVTPKTRNGMIESLRVLKTCRKTAISARRVALQIIHSNIISAPDELREQLRNMTRMQLIRTLGSWRPDASEYRNVTNVYRISLKSLARRYLELHDEIADLDVMIAAIVDELAPELIKRNAIGYESASQLLITAGDNPQRLRSESGFAALCGVSPVPVSSGKTNRYRLNRGGDRAANSALHIIAIGRLRTDAKTKEYVARRVAEGHTKMEAIRCLKRYISREVYTLLRNQNRRINSIPITA

SEQ ID NO: 190787 - protein, 355 aa, unidentified
MNSSKYIAMDVHTATISVAVRDAAGKLIIESVIETKTSTILQFIQGLRGDLHVTFEEGTWAAWLYDLLKPYVTNVVVCNPRRNALLKEGSRNDRIDARKLAELLRTNLLRPVYHGEKGLRTLKELARAYLTISKDLTRVMNRVKAIYRSWGIPCGGQSVYNPRHRKEWLSKITQASVRRRAELYYEQLDALVLLRKQARQELLAEGKKHQAWKLLRSIPALGPIRAAVLMAIVQTPHRFRTKRLLWKYSGFGVVTHSSADHRYVKGQLERSKKPVSVRGLDRDHNHQLKDLFKGAAIQASTRKGPFREFYEALVAKGMRPEMARLTLARKIAVIALTVWKKGGAFDAKYLKPQTA

SEQ ID NO: 190788 - protein, 375 aa, unidentified
MIAPTRPEMSVSEPTLYVAFELGKKDWKLAMTCGFGIQPWLRTVASREWGAVERAIAQGRAHFGLSTAARVVSCYEAGRDGFWIHRALTARGIVNRVVDSASIEVNRRARRAKTDRLDALKLVTMLVRVWAGERRVWSEVRVPTVAAEAARQVSRERTALTQDQTRLVNQMRGWLATWGATLPVRRRGEWWTTLRDWAGAALPVEMQARLARAEARRQSLAAQIAELDAQQQAAVMAAPAPAALRRLVQLKGVATTSASVLLDEGLVWRAFRNRRQIGGLLGFAPTPYDSGESTREQGISRAGNARLQAISIQLAWNWVRWQPLSALTHWYQANFGKGKRARRIGIVAVARKLMIALWRYVTTGVVPEGAIVKVA

SEQ ID NO: 190789 - protein, 344 aa, unidentified
MLYVGLDLSRKRLDWQALLSDGERAAIGAVPPDRDGLSKLARGLGDVPVLGVIESMSGARFVHDELELHGWDVRIADAVKARGIAPLACKTDTIDTWVLAELARLELVPEIWLPDPQVRAERERARFRLHLVKHRSALKNRIHAILFQHGVPSPGSDLFGAGGRALLEGLQLPEPWTSTVAASLELIDLLDERIWSCESELRALGAEHRYIPLLMTCPGIGWVLAFTIASEIGEIGRFQSPAKLVGYTGLCPRVEQSGERDRRGALRKNGPTYLRWALVEAAHSAARHPAYQPVRERMRARHGRKRGTKIAAIEIGRRLSEAIWHMLTTNQPFAPAGAPASLAA

SEQ ID NO: 190790 - protein, 424 aa, unidentified
MNHLTDNSFTAYVGIDWADLKHDICVQAAGDQQREFDCIPHQVVKIEQWAQSIHKRFGGVIAIALELSKGPIVSALQKYDFFVIFPINPSTLAKYREAFKPSRAKDDPTDAELALDLLLRHPDRFNPLKPQSVEMRTLISLVEQRRGLVNDRIRITNRLRNTLKQYYPQTLEWFDHIDTPIFCDFILRWPTLIQVKRARKTTLETFFHEHNVRFEHVLQARIKSIKAATALTLDEAVVTPHRLQALVLVDLLRVTLQAIQRFDDAIVELAPRHADYTLFSSLPGAGPHLAPRLLVAFGEQRERFKNAAEMQKYSGVAPVTERSGKKHWVHWRWQCPTFLRQTFVEWAAQTINKSFWAGAYYRQQRAKGCSYQAALRALAFKWIRILYRCWETRTPYNEAVYLRALERRGSTLLKQFAAPKDLTE

SEQ ID NO: 190791 - protein, 337 aa, unidentified
MSVYVGIDVHRKRSQVAVVTGDGTVELNKNVVNGSEPMLRLIGGLPPGTPVAFEAAFGWGWLAALLEDYGFEAHLVHPLRCKAIASARLKNDKVDAATLAQLLRADLLPEAWIAPPEVRQLRALLRHRAGLVRLGTQQRNRIHAVVADFGYDRSGSYLSGPGRGWLAGLELPAVSRELVTDALAVIDGLVPLIERIDGELRQHAKADPRVKVLTELPGVGQFTALVMLAEIGDITRFPSARKLASWAGLTPTVRGSDLHVRHGHISKQGSAWLRWVMNQAAQTAKRSPEFAATYSGIAKRRGKKIATIAISRKLLTRAWHLLSEMQAAGADEPPRRS

SEQ ID NO: 190792 - protein, 432 aa, unidentified
MSIFISPSFAVWPKGNTTLEKKNERRCCGMDVHKETVVVCVLPPDGQEGKPVKKVYGTFHADLGRMRGWLKQLKVTSIAMESTGVYWRPVWNVLEGHGFELLLANPKQVKALHGRKSDKRDSERIAQFLQDRRLDPSFVPPPEIQRLRDLLRYRLYLLEQRNETHNKIRDLFETANIKLSSVASDLLGVTGQNIIEAMIAGEASAERLSWKVKGTLRKKEKEVKRSLAGCFDEFHRGLLEWLWKQYSFLSAQIAEVETCTRRLMEPHRELVELLDQVPGVNETVAWTVIAELGIDMGVFPTAAHVASWAGMCPGTNESAWKQKSGQTRKGNRYLRRVLLQAAWAATRQKDSYLRAFFYRLQHRRGWGKAIIALGHKLLRIIYEIIKTRTPYYELGANYYDQLNPEKTIGRLVARLERLGVAVEVRPQAQANV

SEQ ID NO: 190793 - protein, 410 aa, unidentified
MDVVYSRCAGLDIHKKTIMACVIVPGPKGKPQKTIQAFGTMTDDIVALGDWLAAQQVTHVAMESTGVYWQPLWNLLEERFALLLVNAHHIKQVPGRKTDVGDSEWIADLLRHGLLRASFVPDRAQRELRELTRYRTALLQDRAAEVNRLQKTLEGANIKLAAVASDVLGKSGRQILDALVAGGTEAGDLAQFAKGRLREKIPQLERALVGSFRPHQQFMVARHLAFIDAIDETVAQVSAEVAERLRPVEADVELLDAITGIGRRTAEVWLAEVGTDLERFPTHSHLASWAGMCPGNNESAGKRKSGKTRKGNPNLRTALVEAAQAAARKRDSYLSAQYRRLAARRGKKKAIIALGHSLLIIAHHVLKRRVDFQDLGPTYFDERDRTNVERRLVRRLERLGYKVALERVAA

SEQ ID NO: 190794 - protein, 338 aa, unidentified
MSEASSPQEPRFTAIVGIDWGDRKHAWSLQAAGSERRERGEIEHSPEAVGSWVSMLSARFDGQPVAVAVEQSRGALVFMLAKYANLHVYPIHPRAAAQFRAALYPSGAKDDPVDADLLLDLLAHHRAHLRPLRPDTEQTRLVQHLVEARRKLVNEKTRQVLRLTDKLKIYFPQVLDWFGKVDSPLVGDLLQRWPTLEDLQKARPATLRSFWTRHNCRSQEAMDERLKKIPQAVPAIRDAAVIQSAVEMTQTLVELIATLRQGISKIEGRIEQVSRAHPDFAIFDSFPGAGPALAPRLLAAFGSLRERYATAADMQKFSGIAPVLERSGIVVPRIQTRQ

SEQ ID NO: 190795 - protein, 314 aa, unidentified
MEQKQPITRIAGIDAAKSKLDVAVHGLGDELCVSNDQAGFAPLLAWLTERNVGRVGIEASGGYERAAVVFLRQHGLEVIVHQPAEVRAFARFKRIKAKNDRIDAAVIAAATAQVDTVRAANDPELLDLCERLTAYEQAAEVAVQFKTFLEHVTLADLKLQYREHLRSQQAWKKSLAQDLVRRIRASPSLCPRFELLTSLDGVGDIVAASLVLRMPELGAMERGQAASLLGVAPFDRDSGKTSGQRHIFGGRSRVRRMVYLAALVAKRIDPGLKAFAERLKAEGKKPKVIIVAVMRKLIEAANLILKRGTPWVAA

SEQ ID NO: 190796 - protein, 317 aa, unidentified
MRASAAFFVGIDVSKQQLDIAVRPSGESWTVAHEEAGLSALVARLRGLAPTLIVLEATGGWEVPVTGALAAAALPVAVVNPRQVRDFARSTGLLAKTDRLDAQLLAQFAEVLRPAPRPLPDAQAQELTALLQRRRQLVEMLTAEKNRLPLAARRIRPQLQAHIAWLHQQIAQFDEDLRQRIRSSPLWREKDDLLRSTPGVGPVLATTLVAALPELGTLSRRQIAALVGGAPLNRDSGTLRGRRTVWGGRAQVRAVLYMSTVVAVRHNPVLIAFYQRLRAAGKAPKLALTACMRKLLTILNAMLKHHRRWAPVRAQHA

SEQ ID NO: 190797 - protein, 347 aa, unidentified
MHQQQTDVIYIGADVHEKETQLAIFEPGGTLLQENRIPTNDLASFVHSLPAKEKHLALESVGFIYPLYDKLKQIPRCDVAVANPKRIRQVSDSKQKHDRADAKVLGNLIRTNYLSRSYMPDEETREKRFLINDRVKYGLRRAELRGTIRWLLKRRGIVVESPFSEEGRKKLREEISLQEIDIRLEELELVESITEKLDKQIASVVSRDEKAKLMDTLPGVAPYTALFLSSALDNIDRFPDSKHACAYLGLVPSLHQSGDASFTGHITKDGNKFLRRNLIECARVAVRKDPHLREFYTKLRHKRGERKALIAVARKMVSYAYWMLKRNQTYEELAPWTNLWRQSPSSD

SEQ ID NO: 190798 - protein, 407 aa, unidentified
MEVLYPICCGLDVHKASVTACLRRGREEEVRTFRTVTKELLALGDWLAQADCTHVAMESTGVYWKPIYNLLEDRFCVILVNARHIKAVPGRKTDVLDAEWIAQLLQHGLLKASFVPDRPIRELRDLTRHRTKLVQRRAAVVNRVQKVLEDANIKLASVATDVMGVSGRAMLEALVRGETEAGTLAQLAKGRLREKLSELAEALEGRVREHHRFLLERHLREVAFYEEEIAIFDARLEEQMRPFAEALERLDAIPGVNERIAQCLLAEVGPTLGTFPDAAHLAAWACVCPGANESAGKHKSGKTGKGNNWLRGTLAEAAWAASKSKDSYLASIYQRLARRRGKKRAIVALSRVILEIVYYLLKEARNYRELGANFYDRQHAQERRRYLVKQLEALGLEVNVRPLAAAA

SEQ ID NO: 190799 - protein, 354 aa, unidentified
MRSYPTCFNHYAKEEPHMRFYTKQHQYYCGIDLHARTMYLCILNQAGDILLQAIAPYRDDLVIAVECLFTWYWLADVCAGEDIAFVLGHALYMKAIHGGKAKNDKIDAHKIALLLKGGMFPQAYVYPAHMRATRDLLRRRMHLARQRAHLIAHIQNTIHQYNLPALGVRLGKPTERGEVDRHFPDPVVRQMVQFDLGLIDYYDTQLGKLERDLTQQTKGHDAQMFHLLASIRGIGRILTLLLLYEIQDIHRFPTQGQFLSYARLVRCPKESAGKVVGKSNKKIGNSYLRWAFGEAAVLFLKGNPPAQRWLQKMAGKHGKGKALAILAKKLGVMVYAMLTKNQCFDELRFMAYLK

SEQ ID NO: 190800 - protein, 423 aa, unidentified
MPYRIAGIDVHKKKLAVVVADVEVEDEYQFERRWYGSNPEQLQVLAEWLIQQQVEEVVMESTAQYWKPVWGALEQYWKPSCEKREGAGRMSGTLHLAQALSNRGRRGRKRDFRDAERLLKRLVSQELTLSFVPNVEQRLWRTVTRTKYQLRRNKVRLHNQLEALLEEAHIKLSSLVSDLLGASARRMLQALADGETDPAALAALADQRLRATSAQLRDALGACTELNPVYRRLVKMALEELQLIEQQIGQLDQEIASLLRQHQDAVQRLAEVPGLGVDSAQQIIAEVGAKATTFASAKNLSSWMGACPGEEESAGVNYSPRSPKGNRHMRRLLNQAANAAAKHKGSIFEIVYRRLVPRLGHNKTIGAIAHRLCQLIWMILNKGVRYEERGPAVSENSRRARTSRMIRTLRKLGYRVELLGDPA

SEQ ID NO: 190801 - protein, 314 aa, unidentified
MGQTVGIDVSKATLDVATWPDGETWQVAYDADGVDGLVRRLQRLQPERVVVEATGRLEVALLAALGSAGLPAVRVHPRHVRDFARASGALAKTDRLDALVLARFGAQLQPELRPLPEAERDGLRAFLVRRRQLLEMLVAEEHRLGTPGLPAEVREQIGVHVRWLREQVGGVDRDLRHTVLASALWRRDDQLLRSVPGVGPVLSATVLAELPELTSLGRQALAALVGVAPLNHDSGTFHGRRWTAGGRGAVRHVLYMAAVSAIRCNPAVRRLYRRLVDAGKPSKVALIACMRKLLLILRAVVRSGRPWSKEIAGV

SEQ ID NO: 190802 - protein, 380 aa, unidentified
MTTTTMPQGHDNKTPVLLVAIEMGLKSWRLAMMAQGGAKQRHKTVNGGDYAALSEALLEAKRKLGVAEDAPVILCYEAGRDGFYPYRRLTEMGYRVHVIDSASIEVSRRKRRAKSDGIDAAKLLELLHRSEGGENKALRIVNVPSEKTEDCRQLPREREELLAERQQVWNRMSSLLFLQGYREIPGSARELKPWLTERQDVGPYLRVRLERELSRLELLESQIREVERKEATWLKEQGDEALIAKVALLAQLGGFGIISAWVLVTEVFGWRDFQNRRQVGGALGLTPTPYSSGEDEREQGISKAGNWRARKMLIEIAWCWLRYQPDSTLSQWYEKRFGKGSKRQKRVGIVALARRLAVAIWHYLDHGVVPEGARLKGAAA

SEQ ID NO: 190803 - protein, 370 aa, unidentified
MAPASTLFVGLDVHKETIAVAYVGEEREAEVVSLGTIGTRQKDIDALVRKLQGKGKRLHFVYEAGPCGYWLYRYLTKQNLKCWVVAPSQIPKKAGDRVKTDRRDAVQLARLLRSGDLSPVYIPSVEDEAIRDVVRAREDVLKDLKAAKVRLKAFLLRQDIRYEGRANWTAAHLRWLANVVCPTPAQQIVFQEYVRAVSEQTERLQRLEAELLPLVQTWRGAPVVAALQALRGVQFLAAVTLIAELGDLTRFETPRQLMSYLGLVPSEHSSGERRRQGSITKTGNSHARRVLVEGAWAYRYPAKVSRHLQLRLAKVPKAIQDISWKAQVRLCKRYRRLVARGKNVNQVVVAIAREMAAFVWALAREVQVAH

SEQ ID NO: 190804 - protein, 376 aa, unidentified
MHEGKDIILVVDYHAENIEFRWFNEATGEERTGKYATTRDGILRQVEQARREVSPGGEVVWIMESTTGWARVKDLIGSKTRFLLANVLQMPLPPKARRRKTDKIDTGRLLREYLHGDLPLSFQPTAWWRQVRRVVDCRQDLAERQTAVKNWINSLLQHETWEDRENLWSGKGRRRLDRLGLGASDRALVELRLQQLDQLAAQEVEVEKRMQAIYDGWPEAQWVDQVRGVGMVTAVSVLAHVGPIERFATAEDLISYAGLAPGVHQSDGTRRDGRIGGGGTDSHLRYLVIEASVWLRDIPRYRPTYERVMKKRGKKIARIVVGRLFLRSLYKMLKDHVRFNPAGLRRTPAGATTIMTHALEPEATTARLSHGAAGIM

SEQ ID NO: 190805 - protein, 367 aa, unidentified
MTYYLGLDVSQKQTALCLVDSKGTIVAEGKTMTNPMDILAWIKTKGFALTSIVRAGLEAGAMSSWLCTELVKSGLNVMCLEAFQAYQFLKTQRNKTDKNDARGLAQLVRMGETFLKEIVIRSQCRQELRTLLTLRQQIVTQKVALENNITGALKPFGLVTPRGRACQKTFHARVLETLRRAEERNIHVRESMMLSLAVHETQCQQLVNFNKRIMEAVRNDPVCRRLMTAPGVGPIVACSFMTAVDDPKRFRGADDIGAYFGLTPRQYQSGETDIRGPSSRRGNTMTRTHLVQAATTLLTGKKSSTLKAWGMKLARKKGFCKARIAVARKLAVILHKMWINETDFCWTTSQEDKISPAAPASAILQVS

SEQ ID NO: 190806 - protein, 369 aa, unidentified
MATKLRYVGLDVHKNSIVVAVADSGRQPAEVFKKLANDFHLLKKALTKLGPPERLRICYEAGPTGFDLARRLTEAGYHCEVIAPSLVPQHSGKKRIKTDRRDARNLAQFYRSGSLTPICIPERQTEAMRDLERARDDAKHAERAAKHQLDKFLLRHGRNYTDGKKWTKRHWEWIARQAFPEGAQQYVLEDYVAAVKAATQRVQQLTDEIGRQVETWTLLPLVQALTALRGFQQLSAVIVAAEIGDFARFAHPSSLMDFVGLVPSESSSGEKRWQGRITGAGNGHVRRILVEAAWAYQFAPRPGREIRQRREAVAPQFKVIAEKAEQRLCRRFRALRARGKPSQKVVTAIARELAGFVWAIAQEQRRLAS

SEQ ID NO: 190807 - protein, 375 aa, unidentified
MKYITKFVGLDVFRDRIAVAVAERGAGAARYLGVYPNTLEAVRKLLNRLGRPEELHVCYEAGVTGYGLARFLRGLKIECMVVAPSKIPLVPGPRVKTDRKDAVMLAERLRTGDLVSVWVPDEADEALRDLVRARKARMEDLKRAKQRVNMLLLRHGITKPEKTTPWSERYRAWLRGLELPQKNSQAVLQEYIIAVEEVEQGVRRLELLIKDTAANSPHAPVIQALQALRGVQVIAAATIVAEVGDFTRFAHPEQLMAYAGMTPRESSSGDRVSRGGITKTGSPELRWICNQIAHSYRYSPKVAGDLARRLEGLSPEIQAIAWKAQIRLHKKLVRLMAKGKCRQVAVTAVAREFLGFAWAIGQKVCFETALGKRSA

SEQ ID NO: 190808 - protein, 398 aa, unidentified
MKTSGLDVHKEKIFCAIYDGKSYSEVKEFSTTTNSIRSMGDYLKSEGVKRVAMESTSSYWVPIWDILLELGFEQKLVNPLHIKQMPGRKSDVKDAQWIAKLLYQGMLSGSLVPSPLIQELRSYTREYRKLVEQRTKVLTQMDRVLVMCGIRLSSCVSNMSSKSAIQIIKALIDGESDADKLVSLVYGNRKNKESGKLKECLTGNMKEHHRIKLMIQKEQYDLFEKQIKFYLKKMDEFCTAHFEEDVCNLKSIPGVSAISAMIIIAETGGDMSVFENSGKFSGWAGLRPRNDESAGKFKSTATTKGNKHLRAIMIQVGWGAARNKGSYFMDKFQKLAIRKSRKKALVAIGRKILVIIWHVLNDKVLYNPKLAHIYDPVKVENKIKYHEREIEKAKKLIN

SEQ ID NO: 190809 - protein, 389 aa, unidentified
MTSVVIGMDPHKRTATIEVLDRTESVVGQGRFATDTAGYRDMLAYGRRHRERVWAVEGCHGIGKHLAQRLVADGESVVDVPPKLSARVRLLSTGQGRKTDATDAHSIAIAALHAQGLAQVRPDDHVVALRMLADRRDELGAARTGTVSRLHRLLLELIPGGAKQFLSVTQARALLASVRPRDIVGKTRRRLASELIGELAALDKKIKAADRELTALLAATGTNLTSLHGIGPSAASRLLGDIGDIHRFASAARFASWNGTAPIDASSGDHRRHRLSRKGNRRINRVLHIMAIVQLRHDTTGRAYYRRKLAEGKPPMEALRSLKRRLSDVVYKQMIHDTQRNSEASPEGQTGATLTSSAADQSPAIDTSDKPLPGPATSDTTPSPATLLT

SEQ ID NO: 190810 - protein, 404 aa, unidentified
MDTILERCAGIDVGKKIAVGCLITDQGRKAPTVQIRTYGTAVTQLDQLRDWLKQAGCTHVVMESTGSYWKPIFNVLEATMTVVLANPAHLKNVPGRKTDVKDCQWLAELLRHGLIRGSFIPPRPIRELRDLTRRRRRLIATGTSERNRIQKVLEDANVKLGCVLSDLFGVSGQDMLEALLEGNPTAEQVAQFARGTLKRKIPEIIASLEGHRLSDHHRFLIRQCLAHMDFLESQICDLDAEILRKLQPYQQQFELLQTIPGIKADAAASILAEIGSDMSQFPTAAHLASWAGVCPGNNESAGKQRSGKARKGNAWLRGTLSQSAWAAANTKNCSYKSRYRRLAARRGKKRAVVALVHALLRTSYYVLRRASPYQELGSDYLDERRREALIRYHTKRLHELNVSA

SEQ ID NO: 190811 - protein, 347 aa, unidentified
MHSVGIDLHRKRSHVAVIDDQGRELRSRRIINDGQTILALLAEIDGDCRVALEATYGWEWLADVLQDAGYELHLAHPMRTKAIASARVKTDAVDARTLAQLLRADLLPEAYIAPPELRDLRDLLRHRVALTRMRSALKNRVSAILAKNGIQRPYSDLFGPAGSQFLAELELREGPRRRLDSTLALIADFTREIDATSREIDARAKQDPYVDVLCQIRGVGRYIAMLIIAEVGDIDRFATARRLCSWAGLTPTVRSSDGKARLGHISAQGSRALRWALVEAAQHAGTGGGPLRDSYERIAKRRGKQIAKVALARQILTLCYYGLRDGEIRCLAPRAKARPSRPPAVNA

SEQ ID NO: 190812 - protein, 333 aa, unidentified
MKNELIKEFVGIDVSKLTLDVHLHVKNLHCVFSNDSKGLLSMFSWIHKQCRKNEELRFCFEHTGIYSLELAVFLRKHDQVIYIVSGLAIKRSMGLKRGKSDKTDAKEIAKYIFQNHYALKPTELASDAIQELQMHISFRSNLVKKLASFKMHRKEFGKINESKGYDQIEQVTAEIMETLKKGIKEIEKQIQEIIYSDEGLKNTFENISSIKGVGPILAATMIVITRNFTAFETSRQLACYAGIVPFEHSSGTSYRGKNRISNLGNRDLKSLLTMAAISSITHNPELKIYYQRRISEGKSKMSTINVVRNKLVSRIFACANRNSKYVEIYKFAA

SEQ ID NO: 190813 - protein, 339 aa, unidentified
MVLYGGMDLHGDNVFCTVMDQEYRPVFERRLPNELAVVLAALEPYRERLKGIAVESTYNWYWLVDGLQAHQYPARLANPARMQENIGLKNANDKTDARFLAKQMVMGVLPEGYIYPKEERAVRDLLRRRMRLVQMRTGEWLSLEGQVARHSGQDLGIQALNGLADGELGRLLGNDPLVLEAAQISYRHIAFLDREIRQIERAVEPRVKLTDGYARLLDVPGIGRILGLTIKLETGPIDRFPGPGNYASYCRAVKTEHTSNERKKGEGNGKSGNRYLAWAYIEAANFAVRYSPELRAWYQRKAARTKRVVALKALANKLAKACYFILRDGVEFDVRKLVG

SEQ ID NO: 190814 - protein, 343 aa, unidentified
MDHFAGLDVSVKETSVCIVDDTGKLVREVKVTSEPEALLAVLKNPAYHFKRIGLEAGPLSQWLFGALAEAELPVVCVETRHMQAVLKAQINKTDRNDARGIAQMMRVGLYRPVHVKTLRSQKLRMLLTHRKLLQSKAIAIENDLRGTLRNFGLKVGMVGKVKFEARIKELVENFPDLAELVEPLLIVRRVLREQIVILHRRLLAIVRDDEVCRRLMTVPGVGPVVALTYRATVDVPARFRKSKAVGAVFGLTCSKYQSGEIDWSGRISRCGDDMMRVMLYEAAQSMLRSKKWSWLKAWAMQIARRRGIKKAIVALARRLAVIMHRIWVDGTEFRWTREQAVAT

SEQ ID NO: 190815 - protein, 338 aa, unidentified
MTSFVGVDLHRNNFTYCIRENGEEKKIGKCEISELKGFASLLGKDTAMAVEATGNTFMFCRFLKAHVGRLVVVNPSQFKVISTSTKKTDKHDAKILAEFLEKDMLPEVRMKDDLQAKISSLTQTREKLVQLRTVLKNKVNNLLAANFIVLKREELSTETGLRKALSFHFDPITDTELFVVVEQIRSLNQSIEKLDKTIEDHGSKMDGFKNLKSIKGIGSKGAATLLSTIGNIHDFRSSKQLAAYIGIVPRVSNSNDTVCHGRITKNGSKIARTTLVQCALIAKRYSPYLNAFHESVKSRRGGAKANIALARKFLDIVYRTLKNNWMFEDFTQFKLVKN

SEQ ID NO: 190816 - protein, 460 aa, unidentified
MKLYLGGDASKGYTDWVIISETKKKLLDNFQLDDTFEGHNQLYNAIKCCVDKYPNVEIYAALESTGGYENNWLNTLKGYQKVFNIQVARVNPLAVFHDSKANMTRTITDAVSAISIAEYQINHPDNIRYEQDTTWKSLRRHWNFVELQKKQRVQTINQLDALLYSANPMLLTYKTDKLSNWLLEVIIQYPTANLLAKANAEELSKIPYVSLSKAEEIIASVQKSIASSTDENTGVLIKQIALQIKMFDQTIESQMSLIKKEMVCPEIHILKTFKGIDTTSAIGLILEIGVVERFYSVKTICSFFGLNPKFKQSGDKIIGVRMSKLGSKNMRKILFNIAIGAIVHNPLIYEVYQRKLSEGMSKMAAIGVCMHKILRIIYGMLKNMKAFDAQIDKQNASRSSSKQDEKNQQKVAYIVKTRRFQEYDQNAPISIRQTKKRKEQTLSQCEITSQSAGSANSSQM

SEQ ID NO: 190817 - protein, 353 aa, unidentified
MQIVSALDVHRRQITYKTVELASGESWRGRISPAAREPVRVWLERFAGQDAHFALEGTTGWRFVVEEIERAGHTAHLADPAETASKRGRKRRAKTDDADCDLQVRLLLAGELPQAWIPPAQILELRTRVRLRKTLIDQRTAWLQRLQAQLFHQGAPLGLKPRTQTGRRALAAVELSASGRELVELALRMLDMIDRELEPLDRALQAYARRQPGCRALITRLYGVGAVTATAILAELGDTRRFTSSDDVVRHSGLDVTVWQSDRKRAPGHLSHQGPALLRWALFEAAQCAARRSSPDHTYYLKVAKRLDHNRACLSVARKLCRRAHHILRELGDDALATVDDAPPSKELVTVAA

SEQ ID NO: 190818 - protein, 409 aa, unidentified
MSRASRHRKSTIYGPTGSCRTNLKLCSLRPRVLDQDSTLVAVIEMSLSGWLVAGVVPGLKRQPKKKLDPDPDALLALLRRWRNEAMKAGRQVERMTVAYEAGRDGFWLARWLNGRGIEAYVIHPSSIPVPREHRRAKTDRLDTELLMRAFLGWLRGEVKHCTMAAIPTLEEEDAKRPNREHQMLTGERTRLINRLKSALIRLGIRNFKPTLGKAAERLAELRTPEDVPLPENRLAELKRDMARLSLVKDQIKAIERDPPVRIAKAANHGPNVMVQLIAQVIGIGLETADMLVQEILSRNLRDRRAVARYGGLTGSPDESGSRRREKGLPRSGNSRVRRGMIEFAWRFLQFQSDSPLAEWYRNQTQSGRKDVRKRTIVALARKLLIALWRLATQGVVPEGIALRKASATH

SEQ ID NO: 190819 - protein, 334 aa, unidentified
MSNVTTCGIDLAKNVFSLHAVDGCGVVVLRKTVSRARLAAVVAQLPPCLIGLEACSGAHEWARRFAQHGHTVKLMAPKFVAPYRKSGKNDGNDAEAICEAVSRPSMRFVPVKSLEQQALLTLHRVRLGFVEERTATINRIRGLLAEFGVVLAQRVVEVRRGAAASLDQLPALAQRALSDLLAHVRVLDERIGEYERQLEQHARCDERAKRIQKLSGVGPISASAIVASVADAHEFKNGRQFAAWLGLTPKQYSTGGKTRLGRITAHGDAYLRTLLIMGARSMLQTALRRTDRLARWALGVRARRGYHRACVAIAAKHARIIWAMLAKNEPLQLA

SEQ ID NO: 190820 - protein, 408 aa, unidentified
MKTLHKRCAGLDVHKAEVVACLRVVNKQNVGHEVRRFPTTTHGLLELAEWLEHAGCTHVAMEATGVYWKPVWHILEGRFALILANAAHVKNVPGRKSDVNDATWIADLLAHGLIRSSFVPPPAIQELRDLTRTRKQLRREIVQHTQRIQAVLEEANVKLCSVITDILGASGRRILTAMIAGETDAQKLAALGSERLGCTRTALVEALTGRVREHHRFLLDQHVRTIEQLEASVAAFDARIEAALAPFRDAVERLKEVPGLATIATEVVIAEIGPDMSPFPTAGHLLSWAGFVPRLDESAGKRRSTRIKKGAPWLKPVLLQAAWAAARKKDSYFQAQFLRLKARHGAKKAAIAVAASILTTVYHMLRDGTCYQDLGPEYFARRNPAKAAARLANRIRNLGFHVEIKAAA

SEQ ID NO: 190821 - protein, 389 aa, unidentified
MYLIGIDISKYKHDCFIATETGEVIKDSFSFDNDAKGFGQLLDVLQALDPSQTKRIGLEATGHYGYNLKVFLDRHGFGYMEFNPFLVKKLSTGLSLRKTKTDKADARLLSMILLSVDYRVYPVKSYHIQELKSLTRYYKGLVKKRSRELVVLTNTLDLMFPEFKPFFKNRFSQTAFFILEHFRTPERIARMSYQNYEKLHKLSRARLSYARFIRIKDLAKNTIGSSSDLLVFQMDSCLCLIRSLNSEIMSLESLLKTWTEKIDSPLFSIKGVGFISALSLIAEYGNFESFDSPAKMLSFAGMEPSVNQSGTSNNRGHMVKRGSGYLRDTLMNLSICFMMNNPVIYEYYRKKRLEGKPHRVALSHVAKKLIRIVFFLVKTNQPFDNSKLA

SEQ ID NO: 190822 - protein, 377 aa, unidentified
MKAPSTRPADVLGLDVGKSSHWACLVDRDGEVLASAPVRNREAELDALFASAPAGTLVVVDQFRNIGSLAVRRARAAGLGVAHLPGLAASRAAGLFAGEAKTDERDAAVIARTALGVPDSLSGVPGRGEALEAARALSSQRDHVVACATRDKNRLRAVLLESCPALEAAVDLPDRRWLELLAGFGGAWGIARSGAEGPLAEAAGEAAAASTAPPPALIEAENRQVRFLAARISEALDEAGALEAETAALLEGDETYACLFTVPGIGPRTAAQLAVSVDIGRFPDHDHPASYCGIAPRVRSSGTSVRSVRASRRGDARLKSLLIFSCNSLVRSSGRYGEYYRACRARGMGHGRALKAVARKRLRAIYAVMRDRVPYRE

SEQ ID NO: 190823 - protein, 436 aa, unidentified
MRGCRCSMIMGFTKPIEHFNLQRKKVITMNTLYVGIDVSSKSNVIYLMLPNGDKHSNFSVANSHEGSTQLVKRILSALTSHSLDTVLIGLEATSVYGDNLVYFLREDATLAPFNRKIHVLNPKQVKKFHDAYNDLPKNDYVDSFVIADCLRFGRINKEVYMGDYRYKALQNLTRARFFAVQNLVKEKQRFMNVLFKKYSTMTQEKVFSDTFSTTALAVYDEFESAEALANMDLHELTDFIIEKGKNRFPDPDAVAKAIQKAARSSYRLPKTVNDSVNQVLSISITSMKALESQIKEFDKAIKAQMELLPNVLISIPGIGPVYSAGIMAEIGDINRFNSQAALAKYAGLAWKQHQSGGFESEVTRLIPSGNRFLKYYLCEAAFSLVRCDKEYSDFYHLKYKEVNRCQHKRALALTARKFVRLVFRLLKDNRLYCPAK

SEQ ID NO: 190824 - protein, 294 aa, unidentified
MQNKNTEVDFSNQKFFSGIDTHKKNWKITIRANQMELKTFSMNPQPEELARYLRRNYPNGEYFSVYEAGFCGYWIDKRLREQGIKNIVVNPADVPSRGKERVNKDDIIDSRKLARELENGTLNGIYIPNDWHEGIRSLCRLRYSVTKEQTRIKTRIRSLLSYYGKDFPENYECKNWSGRFINFLEGLEFNHATAKKTLNHLLKELKDKKQRLAEIIRELRDSTQEAGIGEKIKQLMSIPGISFITAITFYTEIMDMRRFKGLSELCSFVGLVPSTYSSGDKERVLGLATDRVNT

SEQ ID NO: 190825 - protein, 392 aa, unidentified
MFYVGIDIAKRKHEAVVTDDKGDIVVKAFSFTNDLTGYNYLLGKIKLVTISREQIVIGMESTSHYWLTLYTRLIKDGYNVHIFNPIQSDALRGMYIRQSKTDARDSFIIAEVIRFGKYSESNVPQEKLFALRELTRNRYFMVDSVSDLKRKTTALIDQVFPEYEKLFSNNFGVSSMALLLKYPTPEKLKNVSLQSLAKLLSKASNGYFGLGKAKEVKETAKSTFGVIDNCGIYATLISTYIKQILFIQDQVKEIDSQIAEIMSELDSKITTINGIGQALGAVIISEIGDISRFQNSDKLAAYAGVDPTVKQSGDYCAVRNHMSKRGSPYLRRAIWQASVIAVGCDPMFKAYYDKKAAEGKRYMNIIGHCTRKMISVIFAVLRDDKEYIPMAA

SEQ ID NO: 190826 - protein, 409 aa, unidentified
MPLFCGIDWATEHHDVAVIDGDGHVVARGRVGNDAPGFAALLTLLAEAGDSAADPIPIGIETDHGLWVAALRETGRTIYPINPLAASRYRARYAVSGAKSDATDAVLLANIVRTDRGAHRPLPADTEAAQAIRVLARAQQDAVWSRQQIGNQVRDLLKDFYPAATVAFADLDGGLTRPDARTILAAAPTPAQAAKLTPARLRRLLIKAGRKRYLDRDIARLREVFTDTYLHQPPAVENAMGIHLTALLGQFEAACTAADELAEAAIAHFEQHPDTEINPSFPGLGMLAGARVLAEIGDDRSRFADARGLKAFAGSVPITRASGKKTVVLHRHIKNRRLAAVGSIWALGSLRASPGARRHYNARRTVGDWNQQAQRHLFNKFLGQLHHCLHTGLLYDEHVAFPPPLQLAA

SEQ ID NO: 190827 - protein, 381 aa, unidentified
MTTPATCQVPESTTAGTLFVAFELSEKTWKLGFTTGHGQKPRERTVPARQQERVLDEIAHAKRRLGLPNTAPVVSCYEAGREGFWLHRCLQGHGITNHVVDSSAIEVNRRRRRAKSDGLDVRKLLSMLMRYHHGERHVWQVVKVPSIEAEDHRHLHRDLETLKQERARTTTRIQGLLSSQGLRVSSLTKLPEQLDALRLWDGSPIPQGLRRRVLRVYAHHTFLSEQIAAVEAERRAQLQASTDARIDQVRQLMQLKGIGINGAWLLVMEFFGWRAFKNRREVGGLAGFTPTPYQSGESAREQGITKSGNRHVRWMTTELAWSWLRFQPDSALSVWFRERFGHGGKRLRRIGIIAVARKLLIALWRFLETGEVPEGAALKVG

SEQ ID NO: 190828 - protein, 322 aa, unidentified
MSKFKGIDISKASFDVSWKEDGKNKPAVFSNDKKGFEQFYKLLKVGDHCVMEASGPYYLQLAVFLQKKNVLVSVVNPLSVKRFCQMHLVRTKTDKKDAAMIAAYGEMVQPEIWKPGEDHIMEMRDLLTTLENYEKQASQLHNQLEAEKYLPVMSKKAKQSKERVLRMVEREVEKLNDELHSLTKEHCKESFEKLQTIPGIGPKTSIMLIVITNNFEHFEDARKLSAYIGMCPRVFQSGSSVKGRGRICKMGNPRARKLLYLCTWTAQKTNAQCRELKERLEQKGKPMRVIKVAMANKLLRMAFAVAKKNIPYDKNSGLKTCF

SEQ ID NO: 190829 - protein, 374 aa, unidentified
MANIIEAFVAFDTSKLRNAVAIAEAGRAGEVRFLGEIENTEAAVAKLVRKLAAKYGRLTFCYEAGPTGYGLYRQIKSLGHECMVVAPSLILKKPGERVKTNRRDAVNLVKQLRGGDLTAVWVPDPRHEAMRDLTRAREVAVEDLRRKRQQVSAFLLRQGLHYPGERAWTKAHRDWLASQKLEYAEHRIAFEEMLLAMRQAQERIERLEQAIRVAVPDWSLAEVVTALMALRGIDFISATAFLAEVGDLSRFRTPRELMAYLGLVPSEASTGDTVKRGPITKAGNRRARRVLVECSWSYQHPPRVGKEKQERVAAAPRAVREIAWKAQCRLSARYRALTRKGKLKTVAVTAVARELSAFIWAINRQIANPGAAAR

SEQ ID NO: 190830 - protein, 347 aa, unidentified
MAHFVGLDVSVRETSVCVVDDAGKVILEQKVTTEPAAIIALLSSLGVTYGRIGIEAGPLSQWLVNALTAAELPVICVETRHMKALLTAQQINKTDRNDARGIAQMMRVGLFKPVHVKTLLAQEQRMLLTSRKLLQRKLLDVESDLRGTLRNFGLKVGVVSGSRYEARVRELVEGFPRLTAIVEPLLKVRRVMRQQLAVLHKMLLDTVRDDPVCRRLMTVPGVGAVVALTYRATVDQPQRFVRSRAVGAHVGLTPKHYQSGEIDYDGGVSKCGDALLRTMLYEAAQVLLTHSGKWSWLKAWGMRVAQRRGIRRAIVAVARRLAVVLHRMWVDGSEFRWSRDGAVPAVA

SEQ ID NO: 190831 - protein, 406 aa, unidentified
MDKPSVETAVLKTDRGGKRLYFVGIDISKFKHDCAIVDELGDVITPSWSFQNDYEGFSLLRELLGALDGEKKIGLESTGHYGQNLKLFLENNGFSFMEFNPLLINRFVRSKSLRKTKTDSIDALMIAQYMMTVEYKPYPPSFYTLEKLKSLTRFRDSLIRQRSRQMVELTNILDKVFPEFKPFFKGRFSATALYILSHYASPEKISNMNSKSYEPLRRLSRGRFSMVDFVELKTLARNTVGSAHDYLLQEMEITIDIYDQLQSKVEEIELQINDCVLGLAPPMLTIPGIGVASAAVILAEFGDLSKFSSPSKLLSFAGLEPGYFQSRISESTGKMVKHGSSHLRYAIMNCAQTVINNEPTFAAYYAKKRAEGKEHRVALTHVAKKLLRVIYTLQTKDLSYNPDLVR

SEQ ID NO: 190832 - protein, 345 aa, unidentified
MKIIGCDFHPSFQQIAMLDLATGEYTRKKLLHASGEAAEFYRRMRGEPVRVGVEATGSTRWFERLLEELGQELVMGDATRIRGLAPRKQKTDVRDADHLLDLLQRGQFPAIWVPSGEERDLRELVRHRHKLVQMRTRVKNQLQHVALNEGLQKKRQLWTQAGRQWLQQLQLPRWTQRRREDLLQLLEELGSKIGELDQAVAEAADQDGRVRLLQTHPGVGPVTALAFVLVVGDVARFRRSKHLTSYLGLIPSEDSSGSRRRLGAISKQGNTLVRTLLVEAGQSAARYDPELRRAYQRLCRTKQHTGTAKVMVARKLAVRLYWMLKTQRPYRPARRQDSPSHSVSA

SEQ ID NO: 190833 - protein, 344 aa, unidentified
MLHAGLDLSRRRLDVCLLDEAGELVVQTAAPPDGDGLSHLAERLRGQPVRAVIESMTGARFVHDTLEEHGWEVLVADAQKVKGLAPLACKTDKIDARVLAELSWRDLVPAIWLPDPAIRRERELARYRLHLVRHRTTLKNRIHATLMTFGHPCPVSDLFGHAGRLLLDRLQIPDPWRRNVNASLELIDDLEVQIAQLTVELRRQGADHRYIPLLVTAPGFGWINAYTVASEIGDIKRFASPTKLCGYTGLCPRVYQSGNTDRRGPISKQGSRYLRWALFEAALHACNHPVYAERYQRTKQRLGRQRGPKVAQIDLSRKLTEAIWHMLTRNEPFAPAGARFRLAA

SEQ ID NO: 190834 - protein, 361 aa, unidentified
MPQEGQTETGDHEVVLGVDTHKDVHVAVVLTTLGVLLAGRDFPTTKSGYRDMVMWARSYGPLRLAGVEGTGSYGAGLTRLLRAAGVHVIEVNRPDRSVRRRRGKSDAVDAEAAARAVLAGDATALPKTADGLVEAMRIFKTAKDSAVKARVQAINQLKAIVVTAEPALREALALLNTSRLVARCCQLDVDAQDAVTAASLYTLRQLARRIQHLETEIRDLQHRIAGAVQSTAPELLRISGVGPDTAATLLIAAGDNPGRLASEASFAALCGVSPVEASSGKTQRRRLNRGGHRQANAALYRAVLIGLRWNPRTRDYMQRRTAEGLSKREIIRCLKRYLARAIYRIIIASMTPTTPPQPSTA

SEQ ID NO: 190835 - protein, 317 aa, unidentified
MKCIGIDVSSKKLNIYRNDTKESFEIENTQNALEKFEKQKKLESDEYVIGVESTGRYHFVCQEYFVMKGYEFRCLNPLLTNKVIFATVRKKKTDKSDAEVIAFLLNLGEGQKVTKEQLRTTKRTILRTRKKLVHQKTVLKLLLQELGKEHQNKGITETKASLQRVLITIEDEIKVLEKEAMGVSETKAEKLIRSIPGFATQLAGVVATEVGDFTRFSAATQFKAYVGIDPKVSQSGATHYTGKITKRGNPYLRCAFYLAAQVARQHDPELKAFYEKKIGEGKNFRVAICAVARKLCERVYAVVMRGVPYQIRELSFS

SEQ ID NO: 190836 - protein, 360 aa, unidentified
MTTTMTCVGLDVHARSIHAAAVELVSGELQRARFGGGSEEVVAWLAGLPRPLRVCYEAGPTGFALYRAARAAGIDVCVVAPSKTPRASGDRIKSDRKDAELLARLLLAGQLKPIAVPSPALEAARHLCRAREQVRADLMRCRHRVSKLLLLHGRVYPEPTTWNERHRRWLGGQRFDEAVAELAYLDTLAAVDGLVARKRALDERLSRIALEGEWAETVARLRCFRGIDTLSALVLALEIGDFVRFGRPAQLASWLGLVPSLDQSGESRHQGAITKTGSSHARRLLVEAAWQYLREPRIGVSLRNRQQDQPAQVLQIAWRAQHRLYRLQQRLRGRGKPGNLTTVAVARELACFLWAAAVAD

SEQ ID NO: 190837 - protein, 349 aa, unidentified
MQHYVGLDVSVKETSVCIVDKAGKVIREVRVATEPVAIFAVLTEEPLAIERIGLEAGPLSQWLYSALAEAGLPVICVETRHMKAALSAQINKSDRNDARGIAHMMRVGLYRPVHVKTLASQKRRMLLTSRQLLQAKALDIENDLRGTLRNFGLKVGMVGTVKFEARIRELVADHPDLATIVEPLLIARRVLREQLGVLHRQLLEIVRHDEVCRRLMTTPGVGPVVALTFRATVDVPSRFTSSKAVGAAFGLTPRRQQSGEIDRMGGISKCGDALMRETLFEAALVLMTHSRKWSWLKAWGMKIARHRGMKRAIVAVARRLAVIMHRMWVDGTEFRWSRKEASGGVTVSV

SEQ ID NO: 190838 - protein, 343 aa, unidentified
MAIVILGIDLGKNVCSLVGVDEDGAVVLRRRMRRQTVLTFAAKLPSCVVAMEACCGAHHLGRLLTAQGHTVKLMSPEYVRPYVKAQKNDDRDAEGIAEAASRPTMRFVDLKSQEQLDLQSLHRVRSRLVGVRRTLLNQLRAILLERGHIFPQGRRKFEAAIDTLVADPACEISSRIRQLVIDIRSEWQALDSRIEALNGEFVAIARDDETARRLVTIPGVGVLNATALVAAVGDGAAFRRGRDLGAWLGLVPKQHTTGGKPKLLGISKRGNKYLRMLFIHGARAAMPSRTASQSPLGEWLRGLLARTHRNIAIVALANKLARIAWATLQRKTSFDLRHLAVAG

SEQ ID NO: 190839 - protein, 275 aa, unidentified
MNFYNSSHPYYCGIDLHARLLYVCIIDLQGEIIVHTKIKADKSQLLSLLEPYIGNIVVGVECMHCWYWVCDWCLQQGIDFVLGHALYMKAIHGGKAKNDKIDSFKFAALLRGGNFPLAYAYPHEMRATRDLLRRRTKIVRHGAMLKGHVVNTNSQYNLPATELNLKNISARQQLRSQFKDPIVQRNIDLDMALLDCYAKELAQVEWFIEQKAKHHNPVFYDLLKTVSGIGRILALTILYEIGDIKRFETVQNFASYARLVKCKAESAGKKLRYSG

SEQ ID NO: 190840 - protein, 427 aa, unidentified
MHYTQNDKIRQATEGTIVLGVDIGSEKNYLRAFEPNGIEITKKAISFLNTLEGFKSFEEIVTNMTVPLAGKKIIVGVEPTGHYWFNFADYCQSKNMTVVTVAPQHVKHSKEMDDNTQRKDDRKDPRVIAKLVIEGRYCIPYRPKGVYAELRVDYNRRCEIVEAETRAKNRIRRWFDLYFPEYRKVYGSVAAITGMVILKQAPLPQDIVSLGVDGILQIWRANKLRAAGLKRAKTLFEAAQRSICPPDAGRAVRMELWQLLEEYEYIKKQLHEADIMIGIVTAEIPEVNELMKIPGIGLITAAGMISEIGDIRRFDDPRQIQKLAGLAIVVNESGKHKGQSEISRRGRKRLRKILFQAALVLVRSNKEFKTIHEYFTTREKNPLKKKQSLMAVAAKLIRVCFGMVKNGTPYDPAKVLKDIRRAEPKVA

SEQ ID NO: 190841 - protein, 361 aa, unidentified
MTNTSREQQLTAGLDLGDKYSYLCVLDTDSGELVEDGRLRTTPEDLRRRFDFEKKLRIAIEVGTHSPWVSRLLEACGHEVVVANPRKTRLIYGDKRKTDELDAQKLARLARADPELLYPIEHRGEDSQAHLALIHSRDALVRSRTQLINHVRGMVKSFGARLPKCSAESFHKKVADALPSELAEALGGVVETITSLTERIRDYERRIERVCKESYPQETGLLRQVPGVGAITSLTFVLTLEDPDRFEKSRAVGAYLGLVPGKDQSGESDPGRPISGEGDKMLRRLLVSSAHYILGPFAPDCDLRRHGEKIAERGGKNAKKRAVVAVARKLSVLLHRLWITGEAYEPLRNARLSRALGEEVA

SEQ ID NO: 190842 - protein, 472 aa, unidentified
MRVSKTRRGQTPRWRNERRREDWTRAVIGTTVCCGPEVFSRSSTQSSISLGTAAYAFWALNRKEGVMEVVVEIGAGLDVHKKRIVACCLDGRSTPPKRIRRTFGTFFNQLQSLRDWLVTAGVTDVAMESTGVYWMPVYRVLEGHVRIILGNARLMANVPGRKTDESDAEWIAVLLRHGLIRPSFVPPKAIRELRQLTRCRRKLVQMRTTAQLRVDKLLQMANIKLSSVASDLFGVSCRKMLRALTDGITDPVVLSELSYSTLRNKRPQLIQALTGTLSVEDRQLLKIQLDLVDDLKRELGRVDELIQQKVIPYEAIVQLLDTVPGINRTIAQEILGEIGTDISIWPSQRHFSAWAGVCPGNRESGGVRRRARSREGDRYLKSILAQAATSAAHVRGSYCAARFRSLKFRLGERRAILALAHELALSIYFILLRQQPYREPLAADPRLVRDQRRRSLIKQLQKLGYEVTCSDL

SEQ ID NO: 190843 - protein, 344 aa, unidentified
MDYFVGLDVSLRSVAICVIDAEGNSVLERSAACEIEDIVHCLERFNASKLRIGFEAGAMSQHLFFGLQAAGLNVVCMEARQVNAALSAMRNKTDKTDARGIANVLRSGWFNPVHMKSREAHAVRALLSSRKAVQRKCIDLANEIRGLFRIFGLRLPSRIDQASFDERVRPIIEADPDLSHALLPLLDARAVLFATYRELDRRVKQAASHDETCLRFMAIPGVGPIAALTFKAAVDDPKRFTSSRTVAAHFGLTPRRYQSGEMDNPGRISKAGDADVRSALYAAANAMMMRSVASSEIKSWGLRLMRRKGRRRAVVAVARKLAVIMHRMWADNTEFRQRPLEGAV

SEQ ID NO: 190844 - protein, 356 aa, unidentified
MSVYLGVDFHARTQTVCWCDTANGLIHQRTLDHEHDDVRGFYTQFAVPAVVGLEATGYARWFHRLLEALGHRLLVGDAYVIRKCALRRQKNDRRDAELLLDLLLHGDFPAVHIPPIASQAVLRLLRYRQRLVEIQTKLRNGIQALALNHQLRLGPKLWSKQGQQQLLAIELDDTDVMQRENSLELLVQIRTRIRTLEKELTSRADQDARVRLLRTHPGVGLLTSLAVVHTLEPVTRFDRARRIAAYCGLDPRETSSGETVRMGHISKQGNRLLRHLLVEAAHRAVHSKADADLRNFYFRLMERKKNAAVAITAVARKLVLRLYRMLREDIDYTEFRRRGREARRARKTPSPAAGGC

SEQ ID NO: 190845 - protein, 347 aa, unidentified
MLIIGCDFHPGFQQVAIFDNTSGEIQERRLGHRAEAEQFYRGLAGQPVCVGMEACGHYPWFERLLAELGFELWLGDAGRIRAQEVRQQKTDRRDAAHLLQLLLEHRFPRIWVPSLEERDVRQLLVHRHKQVQTRTQVKNQLHALALSQGVQRKRKLWTQAGRAELEQLEWLPYAAERRKQLLRSLDRLEQEIAELNQRVEAEVAQRPAAGKLQTHPGVGPVTALAMVLTLGPAQRFASGKQVGSYFGLIPSEHSSGGRQKLGRISKQGSSFLRFLLVEAGQSAVRQDAELGRFYRRLAARKHRALAKVAVARKLATRLYLMLREDWTYVQLCRAMVSASPSHSVVER

SEQ ID NO: 190846 - protein, 354 aa, unidentified
MIIIGVDFHPEFQQIALLNTTTGEVEEKRLAHPDEAEKFYRALASANETVRIGMEASGHARWFERLVAELQFDLWIGDAAVIRAKRGRKQKTDRQDAQHILELMLKDDFPKIWVPSWENRDLRQLLWHRHRMVQARTRIMNQLQAVALNEGLHCKKKLWRERGRQQLESFALAPWASRRRHDLLELLDRLNPVIAELTQAIEGEVENYPAAQRLRTHPGVGVLTALAFVLILGDAERFHCGKQVASYLGLVPLEDSSGKRRRLGHITKQGSSIVRFLLVEAAQVTVRSLPEWRSKYFHLVLRRGRKIAKVAMARRLAVQLFWMMRKQWDYEQLKKFGSHAGQPGNRHGVQSNTE

SEQ ID NO: 190847 - protein, 356 aa, unidentified
MGPKKKEIKIEALMSVGIDIGKDVFHLVGFDPDGNVVVRKKIKRLALEKTFKELPSCIVGMEACLSAHFVSRSLRKLGFEPRIIPAIYVKPFNKGQKNDYNDAEAIAEAALRPNLKIVPEKSQEQLDLQALHRVRSRLVSRRTGTINQIRAFLIEQGITVRKGLRALKNSFLTILEERKDEISPRMRKILIGLYGDWLWMDDRIDAVSSEIERISRTEENCVNVMTIPGIGPMISTAMVAAIGTGDAFDRGRDFAAWVGLVPRQYSTGGRTVLGRITKRGSRYLRMLFVQAAKVILMRPHRWPDFSFGEWLIRAEPRMHRNKLAVALANKLARTAWSVLHHGTTFDAPRDEVVAGV

SEQ ID NO: 190848 - protein, 336 aa, unidentified
MRAIGVDLHKTMFQICALTGKKKEFKRYHMSEIESFKRTLRRDDSVAVEATGNSRYFAKQITGLVKEIKIVNPRKFKIISESVKKTDKIDAELLAFFLSKGMLPEVRMNAEKYSQVKSLCNTRDKLVKLRTTLKNKIHNILNSHGILSKREDFSSIKGLERVKEYNVNEMSRIELEVIIEQIKHLNEGIKKLEEEMIDKGKKLKGFENITSIKGIGAKGGTTLLSIIGNIEDFTDAKKLAAYFGLVPKVEDSNEKIRHGRITKRGSSLGRSTLVQCTLIAIRYSDYLRNYYDRLKTKKGSGKAIIATSRKLLGIIYQTLKEDWIFEDFPNFVIKKA

SEQ ID NO: 190849 - protein, 391 aa, unidentified
MIFIGIDAAKDKHDCFIVSSDGEVLCDVFTISNTLDGFNDLLSKIKSFSKDLSKTKVGLEATGHYSYNLLGFLLDNGLPTYVLNPLHTNLYRKSLSLRKTKTDKVDARTIASMLMSCQSLKPYTRALYHNEELKSLTRYRFNKVSERAKLKTSVSRLITILFPELEKLVSQVHCVSVYALLSEFPSAKHIANANLTRLTNLLYSASKGHYNRDTAIRLREAARNSIGSVMPAKSLELKHTIKLIGELDDEISEIEAAIKQIVDSLGTTILTIPGIGYATAASILAEVGDFSNFETPDKILAFAGMSPSTYQSGQLTNCYAHMEKRGSKYLRFALYNATKYVCKWDSNFAAYLAKKRSEGKHYNVVISHAAKKLVRLIFALEKSRLTYMPVA

SEQ ID NO: 190850 - protein, 409 aa, unidentified
MDKDRIVAGLDVHKDTIYLCVMDNTEAVIFAKVYGTLTPDLELMCSEMVSHGVTEAAMESTSTYWVPVWNALCESMSLKLVNPYFIKQLPGRKSDVKDAQWIAECLLKNLIRGSFVPDKRVQDMRKYNRRIFDLNEDLTYNSNKQDAALQRCGFRLSNYVSRVNGKSYQKCVRAIITGITDPEKLVKLIHGKTLRKYGRNIIKDAVTGDFHQADICLLKQYAELIEVIERQIEECRNALIAMCQEHFPKQFKRLQSIPGVKERAASAIIAETGADMKPFEKATNLVGWCGLKPRNDISNNKVKSNRTTHGNRFLRQILIEISWVASRTRNCFFSNFSYVQCTQRHKNKMKIQVAIARKLLVAVWHMLTKDEDFIDVYLKRLEKQAEWQNDSIRIVIGRIDLSDIPLSTT

SEQ ID NO: 190851 - protein, 443 aa, unidentified
MKVRYERVAGIDVHKEMVKVAIRSPGEGGERKTEVLEFRAFYGVLQEMARFLRERGVTHVAMEASGVYTEPVYHALCEQDFTEVLVVNPQHVKALKGHKTDARDCRRIAELLECGLLRGSYVPSAEQKEMRDLTRYRKKAVQARTSEIQRLQKVLESAGIKLGSVVSDVTGKSATAMIQALIDGERRTEVMADLALRSLRAAGKQADLKMALAGRFTEHHAMLCRMHRDQIKLADQAVGKLDQQIAAMASRWQRELDLLLSIPGVGVVVAAIWLAEIGPAPHLWFDSHGKLASWVTLCPGNHISARKRKHGKTGDAGTYIKPALIEAAWGAIRVKGRLQSRYNRLLRRFGGPKNPGAKKKAITAIAHTLLKIAYQVLKSGQPYTDPGADFYTRRESPARQQAWLERRLQQLYPGRTVTVTIGPAPGSYPPPGAPVQAALPGHH

SEQ ID NO: 190852 - protein, 360 aa, unidentified
MNQQTRNTRKARKSSKNQMTVGIDLGDKWSHYCILDEEANVVEEGRFRTAARSVEKHFQGLPHARIALEAGTHSIWISQQLQAYGHEVLVANVTELHAIVRNISKSDQVDAEKLARYARLDPKILRPITHRSVAAQQALTMVRARDVLVRMRVVAVNAVRGLVKPCGCRLPPCSTPTFAQRSLEVLPPELLSILRPLLEQIQGMSEQIKIYDRQILDLSRDRYPEAKILESVPGVGTLTAITYVLTIHDPHRFSRSRDVGCYLGLRPRRDQSGDHDPQLGITKAGNGYLRKLLTEAANYILGPFGKDSALRRWGQRLAARGGKNARKRAVVAIARKLAVLLHHLWVTQQPYQPFYGAAAA

SEQ ID NO: 190853 - protein, 369 aa, unidentified
MNTVKFIGLDVHKKTITIAIADSGRQNKPRVYGAIANDLDAVDKFCRKMVSTASRLYFVYEAGPCGYGLYRHLTAKGFDCMVAAPSLIPKKSGDRVKTDRRDAAKLAQLHRAGELTAVYVPDPQDEAMRDLSRARHDAVSATQKAKQRLKAFLLRNRIVYSGRCAWSKAYFRWLADIAMAYPAQQVTLQEYIDAVHEGLQRVDRLTDQIRQLVPGWRLAPVVSALQAARGVSVVVAVTLLSELGDLSRFQRPSQLMAHLGLVPSEHSSGESTKRGGITKTGNRHARRVLVEAAWAYRMPARVSGLLLKRQQGVPEQVCRIAWKAQLRLCTRYRRLAARGKLKKKVVTAIARELSAFLWAMAKQVQPTVL

SEQ ID NO: 190854 - protein, 418 aa, unidentified
MDVLVERCAGLDVHRDTVVATVRTPGQGRRRRQQQTKTFRATMAGLAELREWLAGLGVTLVGMEATGVYWKPVFQALEERLECWLLNAQHLRNVPGRKTDVKDSEWICQLVEHGLVRPSFVPPPEIRRLRDLTRLRKAQINERIRAIQRLEKVLQDAGIKLTSVASQTYSKSARAMLEALLAGVTDPEKLAALAKARMRSKIPQLREALANRFDVAHHGLLTAQLLGHIDALEASIATLDERIGLSLAPHARVVELLCTIPGVAVRTAQVLIAECGLDMTRFPTVAHLASWAGICPGHHESAGRRGSGRTRPGPRWLTEALTEAAKAAARTKGTYLAAHHAQLRGRRGEAKAIGATRHDILVAYYHIVRDQVPFRELGPDWHRKRSSPEHRARRLQRQLQALGYTVTLEHDEQVEPAV

SEQ ID NO: 190855 - protein, 389 aa, unidentified
MFYLGIDIGKNTHVASLVDDKKKVIFKAFSFSNSIDGAESLILKLEAFKNELEVGMEATGHYWLSLYSYLVEKNFTVRVINPIQTDGWRCGVEIRKRKTDIIDSLLIADLLRYGDFVETSLSNEDYLSLRNLSRFRSYLISSIGDLKRKTIALLDQVFPEYASSFSNIFGKTSKEILSNFSTPSDFEDINSDDLNTFLESVTRKNYASKKIDELSKKASSSFGINFCLDSFSLQIKMLIEQISFIQNQVSDVENEIEVLLEKLNSPITTIPGIGSVNAATILGEIGDIKRFSNPSKLVAYAGLDASVSQSGEYESTLQSYEQRGSPYLRRALFQSALRAEFCDPVFSAYYQKKITEGKHHLVATNAVARKLCHTIFAVLTKNEPYQVQS

SEQ ID NO: 190856 - protein, 387 aa, unidentified
MSEMFNPHAPVTAYDHNTTIVAVLELSGKNWLLGAVAPGLSRRMKRSFEARNVEAVVRALEQAKGASAKAGFEVSRIVVGFESGRDGFWIARALQQRGLEVYVMHAASIAVDRRGKRAKTDRLDVDLLLMTLMGWLRGEPGRCAMAPVPSEEEEDLREAGRRRETLVHARLKVENQIASLLIRHGIEGFKPRLKNAETKLCELRTFDGRSLPANTMNSLRLLLAQHRLLSAQLKEIEEARQRVVNVAEPDRLQRMIQALARVVGVGVETATVLVHEVFSRSFKDRRALGAFVGLTGTPYNSGSSKTEQGISKNGNARVRRMLSQLAWRWLGHQPESALAQWFNARLGGAKGRMKKVLIVALMRKLVIALWRLAETGEIPIGARLAAR

SEQ ID NO: 190857 - protein, 412 aa, unidentified
MQVIHATCAGIDVHKREVKVCLVTGDAQGKRTQEVRTFGTMTKELLMMRDWLQDHNCRVVAMESTGVYWKPIFNLLEGDFEVLLVNPTHIKHVPGRKTDIKDCEWIAQLLEHGLLRGSFIPPMAIRDLRDLTRYRRQLVNDRTSEVNRLQKVLETANIKLASVATDVMGKSGRAILKALLAGVDDPKQLAELSRGRLRNKKDELELALQGLFRPHHALLLTRILAHIEFLEESITECEAEIKVMCCPFAKEIELLDTEPGVDKRSAQDMVAEIGVEMGQFPSHKHLCSWGGISPGNNESGGKRRNGRTTKGNKWLKAILVECGHAAGRTKDTYLGWQYARLASRKGKKRAAVAVGHSILEGAYFIIRDKVPHRELGVNYLNEINKKHIIRHHVRRLESLGLKVDIQGLPLVA

SEQ ID NO: 190858 - protein, 331 aa, unidentified
MSTQNYAGIDIAKRHFVIGIHGRDKTKTETNNPKGFTHTIDYLHKHNVGLVVMESTGGLEIPLAKTLHRAGFQVVIANPRCTKNYANGFSLAKTDHLDAKMLADYAQALEIKGLVANMLYIPPSEAEEKLEALVKRRSQLVDIRAAEKNRLEQIHESQQQSVKDLIAHLDKLIAELDKDIDSNADAFGGKSQVLTAIKGIGSTTSATLLSMLPELGTVPHKRIAMLAGVVPPPNQSGDTDKKTGCIGGRMAVRNILYMAALTASRFEPKIKAFYERLRAKGKPFKVAINACMHKLLRILNARMRDYLASLQTKSERQSEQQSEQQPAPQCA

SEQ ID NO: 190859 - protein, 304 aa, unidentified
MYVGIDVSTGTLDIAMLGGRVWQVDNTPDGIAQLVQQMAEMQPELIVVEATGGYQCNVVDALFQAGLAVAVVNPVRVRQFARASGLLAKTDKLDAFVLAEFGRKMQPRRYEGKTEAEKQLSALLVRRKQLEEMLKAEQNRLRTISPSLRGSVERIIAILKEEKQRLDEQIQQFLKEQKAWQEQTEILGSAPGVGMVTTATLLAELPELGKMDRKKIAALVGVAPMNYDSGKKRGYRKTKGGRANVRSVLSMSTLVATRHNPLIRSQYQQLLKRGKEKKVALTACMRKFLTILNAMQRDQQPFRM

SEQ ID NO: 190860 - protein, 399 aa, unidentified
MSNPQSLQLRVGVDVGSRCHSVAIGLADGRLLEEFEIPHTAAGFQDFFSRIEGQAKRHPYPIAVAMEGYNGHVRPLDSLVRARGWQLFNVNNLKLARFKEIFPAAAKSDRIDTRKTLELFQLRDHLPMAGDVLQEVLATPEENDILKRLSRRRRRLVNERGRVANALQADLQAVCPGLLEMTRDIGNLWFLNFLTCRKGLLKLARVRRASLLKVPGIGANYADAIQVWQSRAYFAPDARLVGDMIQQDAARILELKQQIKALEEQMAHVAESSSIAGQLASIPGYGSVCSAELAGEIGTIERFRSEASLALYLGMATLDNSSGKYRGSKTPRHVNTRAKAAMMIAIDHHRKRVPQSQRYYEKKRADGKRHNQAIRALGRHLCRVIFKMLTQDRPYWIDP

SEQ ID NO: 190861 - protein, 374 aa, unidentified
MGDYSEAFVGIDTSKLRNAVAVADGGRGGEVRFLGEIDNTPAATAKLVRKLAAKFGRLTFCYEAGPTGYGLHRQIKGLGFECTVVAPSLIPKRRGDKVKTNRRDALGLAKLLRADELTAVWVPDGRHEAMRDLTRARETAMLDLRTKRQHVSAFLLRLGRPYPESKKTWTKAHVTWIAGQTLEHPQQRLVLEEMMLAIRQAQDRLARLEQAIAAAVPEWSLAPLVTALMAMRGMDLVSATTLLAEIGDLSRFRTPTELMAYLGLVPSEDSTGDTVKRGPITKAGNRRARRMLVECSWSYQHPPRVGQAKQSKVDAAPPAVREIAWKAQCRLYRRYRALVRKGKLKTVAIVAIARELAGFIWALARAASFAATTA

SEQ ID NO: 190862 - protein, 406 aa, unidentified
MIFVGIEIAKRSHVASAVDEDGGTVVESFKFNNTASGFAKMLKRLRKADATPENSLVGMEATGRYWVALFDFLISHGYEAAVINPIQTDAFRGVWTVRKVKTDALDAAMIADLVRYKRYEPSALGDEATEELRNLARYRLSLVERSTALKNRATAILDRTFPELAGLFSNAYCPTHRELLQHCATPDQVLGTDVGTLERILREASRGRCGRAKAERLKALAKESVGVGFGSKTLAFEARLLMEELDFVQDQVKEVERELARLLERTQGKWLVTIPGIDVALASVIAGEIGDPNAFDDPHRLMGYAGMDPTRSESGETVRSDGHMSKRGPGALRWAFMQAADCARKNDPYFGDYYDRKKGEDKKHHYVALSGVARKLMGVALAVMKEGRPYEPAPPRNHRPGHLKEA

SEQ ID NO: 190863 - protein, 391 aa, unidentified
MSMYFVGIDISKYKHDCCIISAADQQIISKFTITNDKDGFEQLLTALNSLSNPEDIKIGFESTAHYALNLELFLENAHHSFMEVNPVLIKEYKKSTTLRRTKTDSVDCESIARWLITVEYKPHSKGFYHAYSLKSLTRLRDRLIRQRSFYLVKITNVLDHTFPEFKPFFNERLSKTALYLLENYGSAEKMARMNSASYDKLRCISRGKFSIQQFLRLKELAANTVGVNNSIFDLELNTLLTLYKSLSDEINTLETEIIKLIEEVHPHYMSIPGIGPISAAVIYAEYGDISNFSNPGQMLAFAGIEPGINDSGTESHGGRMVKHGSSQLRYVLLNACLPLIRFDLTFATYYEKKRAEGKKHRVAITHVAKKLIRVIYALERQDVDFNAQKLR

SEQ ID NO: 190864 - protein, 343 aa, unidentified
MQAITTIGLDIAKSVFQVHGVDAEGNVILRRQLKRRYVLAFFQKLPPCLVGIEACASSHHWSRELQTLGHTVRLMPPAYVKPYVKRHKNDAIDAEAICEAVTRPNMRFVATKTREQQSCLTLHRTRHLCIRQQTSVINAIRAHMAEFGIVAPVGRNGVEELLTVAADASDKRLPDVARACIVALGAQLRTLKAQILQFDRLIMAWHRSNQASRRLDDIPGVGPVLATALVATVADPIAFRSGRNFSAWIGIVPRQHSSGGKDRLGSISKRGDRYLRGLFVAGALAVIRYAKIHGTKHRPWLTALLARRPTKVAAIALANKIAMAAWAMMAKGECYKEPVALAA

SEQ ID NO: 190865 - protein, 359 aa, unidentified
MLKNIMFFIGLDLGDKLSHIAALDQDGNLIEESRLPTTRTSFERKFTSLPASRVAMEVGAHSRWVSHLLKDLGHQVLVANARKLRAIYHNPRKDDRADAETLARLARLDPSLLYPIHHRSPQAQANLAVIRSRDALVRSRTLLINHVRGIAKSSGFRLPSCSAAYFANKVTDTIPDPLQPALLPILNTIASLTQQIRTYDRQIELLCQERYPETLQLQRISGVGPLTALAFVLTLEDPKRFPRSRDVGPALGLVPRRDQSGDRDPQLRITKTGNVYLRQLLVNCSHYVLGPFGPDCDLRHWGLQLADRGGKNARKRAVVAVARKLAVLLHRLWKTGEVYDPCYQSNRNTEKPAPVCVTV

SEQ ID NO: 190866 - protein, 457 aa, unidentified
MSQTKRSRKSRGLFPVHPAAAAIDVGAALHVAAVGPDRDKEPVRTFRTFTDDLHRLADWFAQCGIRTIVMESTGVYWIPVFEILEQRGFEVMVVNARDAKHVPGRKTDVSDAQWLQRLHEYGLLRASFRPEAEIAGLRTYLRQRERLLDYAAAHIQHMQKALMQMNLQLHHVVSDITGVTGMTIIRAIVAGERDPNVLASHRDRRCHASVETVCQALVGNYREEHVFALTQALELYEVYQTKVTACDEQIEAILKRLKKNAPPPASKLLPVRQRTHQPNAPAFDARGALHAILGVDLTQINGLGPYLALKLVGECGTNLAAWPTAKHFTSWLGLAPHNKISGGKVLSSKTRRTSNRAASLLRLAAGTVGRTDTALGAFYRRLSARVGKAKAITATARKIAVLFYNTLRHGMAYADPGATYYEDRHRQRVLNNLQRRAKSLGFVLREAGLDTARADVS

SEQ ID NO: 190867 - protein, 359 aa, unidentified
MSTQRKEFSFKGQKIFVGLDVHLKSWTVTVLSEQSVLKKFTQDPSPAALYKFLSNTYPGAEYYSVYEAGFCGFWIHWELHNLGINNIVVNPADVPTMGGERLRKTDAVDSGKLARSLRAGELRGIYVPDSITTEIRSLIRLRDSLTKDQTRHKNRIKSHLRYLGIDIPAEFCNSGRRWTNRFVLWLKDLKLETDYGKKTLDLLIAQYEDLRAQQLNMMKELRALSKNERFEQPLRLLMTIPGIAQVSGLTILSEIDNIARFKDSSHLASFVGLIPMCYSSGEHDGTGNLTVRRHAQLRWLIVESAWIAARKDPVLAAAYVEYCRRMKPSKAIVKIARRLVNRIYFVLKHQHPYVNCYVS

SEQ ID NO: 190868 - protein, 360 aa, unidentified
MKVQRTSVGLDVHARSVVACGLDGDTGEVFQRRLTPDYRDIVEWLWSLPQPVAVTYEAGPTGFGLARFLLAAGVMCLVAAPSKLQRPSGDRVKTDARDAAHLARLLHLGQIVEVTIPSAEQEAARDLVRAREDCRGDLMSARHRLSKLLLRQGIIYCGGRTWTGRHQAWLTAQRFDAAPLQLAYDTALDTMLATVDRRDRLDAAIAKLAADSAYTPVVIRLGCLRGVSTLTAFGLAVEIGDWQRLTGRSIGAYLGLVPCEYTSGTSRSQGSITKTGNGHARRLLIEAAWHHRQPYRPGVDLRRRWDAASPAARARGQQANRRLHARWCRFDARAKRPVVANTAIARELAGWCWSLAVLDT

SEQ ID NO: 190869 - protein, 351 aa, unidentified
MEYVGIDWATRRAAWCALNAAGEVIGEGFVPADLDGVLRLAASRTGEVGATIEMMSGAAWVAETLEAAGWQVKVADSRRTRALAPLAAKTDKIDARVLAELARRDLVPAVWVPPVADRALLEQLLRRMHLVRLRTSCKNRVFGILTQWGVRISIRRLRKADGLVLLEQHGVPEVWRQSVREALQAIDYLDERVAELDAVLRPLAREDERARLLATIPGVGPLLALTIACTVGDVSRFGSASRLVGYSGLVPRVYQSGESSRTGRLSKAGSPLLRWAAVEAAQHAWRPQNPWHRLYVDVRRRHGHGNAAKAAVARKVLIAAWHVLSRNEPFKPAARVAAPIVPASSSQPMAA

SEQ ID NO: 190870 - protein, 353 aa, unidentified
MLDTTTFIGLDVHARSIKAVSLDVMTGEVRAATFGYDAGAVAEWVRSVDPRARCVYESGVTGFDLQKRLSGLGVDCVVGAVSKMIKPSADRRRKNDRNDAEFLARMLSVGNVVEVWVPDDECEAARDLTRALEDARDDLSRAKQRLSKFLLRHGLAFDERTPTGRRKGNWTRAHWSWIESIRFAEGADNDVLAYYVDAEARKPRWRRRVDSLRCLKGVDTATAADLVFEAGEFSRFRNARSFAAWVGLTPSEHSSGESDRRGAITKAGNKHLRKALVEAAWHYLTCSGRPKDLARGQAPDRVARRHAAKGVRRLVERREALLARGVHNNKANVATARELACWVWAVGLMAEEA

SEQ ID NO: 190871 - protein, 355 aa, unidentified
MTSTTSKYYLGIDLHKQTAYWTVLDEDRTVVWQKNTQTTKEGIEKAVESIPGSPDLYKAAIESITNAPWYAGMLEKLGMEVKIVNPLAVGLIARNRLKTDKADSKILAELLRNGFLPECYKAPAKVRNMRETVRFRQKLVRIRTILKNRIHSLLAKEGIQPHFSDLFGKEGLLWLKEESKTFPTYNQIESILKLFDDVSTEIDKFEQTIKTHNKHSSEIQILKTIPGIGDVTACTIFAEVGDFKRFPTASKLASYAGLVPSSRSSGPKERLGHVTKKGSRILRFAMVQAAQRVSPKYGPLYTLYRKVSKKKGTKVARVAVARKLLVIAYHLIKKKEPFQILPFEHSSSVKYGSCS

SEQ ID NO: 190872 - protein, 348 aa, unidentified
MNFYTQQHRHYCGIDLHARAMYVCILDSAGTVLVHRNLTTTPDAFLRVVAPYRDDLVVAVECMFTWYWLADLCAQEGIAFVLGHALYMKAIHGGKAKNDRIDAHKIAVLLRGGMLPQAYVYPAAMRATRDLLRRRCHLMRKRGELLAHIQNTTSQYNLPAFGKKIAYKANRAGVAARFVDPSVRTSIEMDLALIDHYDALLTKVELSIVHTAKTHDAQAFQRLRSVPGIGKILALVILYEIHDIARFPRVQDFASYCRLVKCAKESAGKRLGSSGKKIGNAHLKWAFSEAAVLFLRQNLAGQRYFARLTRKHGKGKALTVLAHKLARAVYYMLTRARAFELERFVTAH

SEQ ID NO: 190873 - protein, 342 aa, unidentified
MSAVSVIGLDLAKPVFQVHGADAAGRVVLRRKLRRAPVLEFIGHQPRCVVAMEACGGAHVWGREIGRLGHEVRLIPPTYVKPFVKRQKSDMADAETIAEAAQRPTMRFVTVKSEENQAAAVIFRTRDLLVRQRTQLINALRGHMGEFGLIVPQGAARVKELIAAATDPDTLVPGAARPALQVLVSTLERLDAEICGLEVESVRRAKEDATARRLMTIPGVGPLIATALVALAPPPQTFRRGRDFAAWLGLTPRQHSTGGKQRLGATTRMGERSLRRLLIIGANSVVIKRHVHKEAQPGTWLGSLLSCKPPMLVRVALANKMARIVWALMSKGEVYRAPAVAA

SEQ ID NO: 190874 - protein, 360 aa, unidentified
MNATTVAVDLAKSVFQIAVADEHWRIVETQRLTRTQFERWFANRAVSLVVMEACGSAHHWARWLNGLSIEVRLLPAQYVRAYVKRNKTDATDAAALLEAARASDMRPVRVKSVEQQALQGLHRVRSLWMGTRTSRINALRGFLREFGIAVPVGARTGLEAISRVLADPSSAVPELIRGTARLLVEEVRLLEARIAQLERELAASARLSPACTTLLSIPGIGLLTATALVAATSGDVTHFKDARHFASWFGLTPREHSSGGSRFLGSISKRGDRYLRMLLTHGARSVLRAAKVAEAAEREVCGVRRWALDVQRRSNHNKAACALANKLARICYATLRDKVPFGETERLSRKINRESFVMPA

SEQ ID NO: 190875 - protein, 345 aa, unidentified
MPIVGGLDIHRKQITFDYLDTVTGEVKRGQIAPADREHVRAWLARFAGGDEVAFAVEGCAGWRYVAEELAAAGIGAHLGEPADTAALRGRKRHAKTDKTDAAHLRALLAEGRLPECWIPPPPILEYRALLETYHDLRRAHTAWVQRIHAVFFHQGAPPLGEGALRTEPGLAGLRAATAAHLSAAGQQQVATALDMLAATEAQLGPLRHQLRDAARHLTGAKVLAERLYGVGPVTGLALTCWLGGKDRFSSSRKAVRFTGLDITVHSSDRKGPPGRLSRQGPPVLRWAVYEAGKTHARTSAPDHGYYAAVADRKNTKRAALSEARKIVRQACHILTELGDDALTAT

SEQ ID NO: 190876 - protein, 378 aa, unidentified
MIATTRPEMSVSEPTLYVAFEVGKKEWQLAMTSGFGVDPWVRTVVSGDLPAVAGALRQGRMRFALPAQARVVSGYEAGRDGFWIHRALTQLGLDNRVVDSASIEVNRRARRAKTDRLDALNLVRMLVRVCAGERKVWSEVRVPTVAVEAARHVSRERTALRQEQTRLSNQLRGWLATWGCRLPRYRKPGWWTAVRDWAGAPLPLEVQTRLARAEARWAVLERQLTELEAQQQAAVTAAAPASALRQLVQLKGVATTSASVLLDEGLVWRGFRNRRQIGGLLGFAPTPFDSGESEREQGISRAGNGHLQSISIQLAWNWVRWQPLSALTQWYRARFGTGKRARRRGIVAVARKLLIALWRYVTTGVVPAGATLKVAAIA

SEQ ID NO: 190877 - protein, 341 aa, unidentified
MDKKLYFGVDVSKKTLDLAYYDGETIDWKNAHIKVSNDDAGFKKIGSWVAKVGKDFDTFLFCMEYTGLYNQNFRLWLESKEYIYGMVEPRKMHRFEPDLDDDQRSLDRIKTDELDAFRIAIYCEQNHKKILRNPSKLPSPVYFKLKRLLAERKQNTKQSTLYKQQLHDICAYDTDLSVERKKLLLKNMQENQKAIDKEIDSYMNEDTSIRKNYNLLTSIPGIGRIIALETIVLTENFTAISNPRKYACYIGIAPFKKESGTSVRKKTGVSKKGFSEAKADLSIAVLSAIRNNPSIRDYWIRKRKEKCGGIVLNAVKFKLVLRMFAVIKRGTPYVETDAYKN

SEQ ID NO: 190878 - protein, 382 aa, unidentified
MDIIHACCAGLDVHKKTVVACIRSIGPDGTINSEVRTFGTMTAELLALSDWLAAHGVGPVAMESTGVYWKPIFNLLEGPFQVKLVNAHHIKQVPGRKTDVKDAEWIAQLLQYGLLSASFIPPPEIRNLRDLTRQRTQIVRDRATVANRIQKVLEDANIKLSSVASDVLGVSGRAMIRSIIDGQDDPDELAGMAKRRLRGKIPELKQALHGRVTEHHRFLLRALLEQIEFLEGMIARFDAQIEEAMAPFDEAAGRLRAIPGIGEKAAAVIMAEVGPDMTPFPTAGHLSSWAGLCPGNDLTAGKRRSGKTTKGSQWLRTTLVQVAWAASRTKDTIFSACYHRWAKRMGKKKALVAVAHKVLVVVYHLLKNRTDYRENWKPANVA

SEQ ID NO: 190879 - protein, 343 aa, unidentified
MTNTIVGVDLAKEVIQVCIHANQKVLSNTEMTPQEFLEWLATSKPLRVVFEACGTSNYWKQKASEFGHDSRLISAKLVDTVRQNQKNDKNDALAIVQASMLPEIKFIAGKSKEQQQMQSIMRLRELCVKQKTASKNQLTALLLEFNIRVSIRDGGLGGVIESALEDAENGLSPGFRKALHRAWLQYLEIIQSISVYDSCLEESIKETPDCAKLMKIEGVGVINAVNLYNILACQDSGIFRNGKDAAACIGLTPVQHSSGGKTKLGSIGKHVRNSALRSQLVTGAFAYVNHVARRPPKTKKEVWLKALIERRGKKCASVALANKTVRTAFSILENNTLYRAELI

SEQ ID NO: 190880 - protein, 451 aa, unidentified
MTKKKMELDIINPNCSGIDVGSKSHFVAVGQALEDVKEFGVYADDLTAICLHLKEYGITSVAMESTGNYWQNLYVELEKHGMEVTLCNGKFTKHAKGKKTDVKDCRWIQKLHALGLLTGSFLPDETTEQLRTYCRQRTNWIDLAAEASHKMQKYLRLLNFRLDVVVKDICGLTGLAIIADICKGNLDPEKLSLHRHGNCRKSQEEIAKALKGNNRTDFLFGLKQEYESYLFFQKKIEACDVQINSFLKMQINTHPDKKKLQTDNKSHKRVNKNSIKGIDLNQASYQYFNGVDLMKIEGLSHSTILTIMSEVGPEGFIKFESSKQFTSWLRLAPNNKISGGKILSNKIPKGSNRLKIALRHAANAIGNLKDTHLSDFFRRVAYRKGRATAVSATARKLAVILWNMITKGIAYNPPIEYLFLDQKRKLRLVQNIKRNIAKFEIKPEDVGFASV

SEQ ID NO: 190881 - protein, 436 aa, unidentified
MRGCRCSMIMGFTKPIEHFNLQRKKVITMNTLYVGIDVSSKSNVVYLMLPNGDKHSNFSVANSHEGSTQLVKRILSALTSHSLDTVLIGLEATSVYGDNLVYFLREDATLAPFNRKIHVLNPKQVKKFHDAYNDLPKNDYVDSFVIADCLRFGRINKEVYMGDYRYKALQNLTRARFFAVQNLVKEKQRFMNVLFKKYSTMTQEKVFSDTFSTTALAVYDEFESAEALANMDLHELTDFIIEKGKNRFPDPDAVAKAIQKAARNSYRLPKTVNDSVNQVLSISITSMKALESQIKEFDKAIKAQMELLPNVLISIPGIGPVYSAGIMAEIGDINRFNSQAALAKYAGLAWKQHQSGDFESEVTRLIPSGNRFLKYYLCEAAFSLVRCDKEYSDFYHLKYKEVNRCQHKRALTLTARKFMRLVFRLLKDNRLYCPAK

SEQ ID NO: 190882 - protein, 397 aa, unidentified
MLGHEEPLYFTARRLSLLNVKNKHRKGNIMYQQENRLFNSIELSKKTWRLCFGDGKQERQRSIPAIAIKELLEEIAKAKAKFGMSPDTPVLCCYEAGRDGFWIARMLHQNGIACVIMDPASIEVSRRARHRKTDRLDASRLLKLLLRAELWGETKVFSRVEIPSEEQEARMRIGRERERLIKERTGHCARMRSLCALHGINIGNPSRINVDELRDWAGQALPAEVASELRHEQERLRTVGEQLRDIEHEQTTALKQAVRVTDAKAHKLYRLKAVGLQSSWLISHEAFGWRHFRNCKAIGSFAGLTGTPFDSGETLREQGISKAGSRRVRTAMIELAWLWVRHQPRSALTQWFVNNYVIAGTSRAKRKGIVALARKLLVALWKYVEQDVIPEGALFKA

SEQ ID NO: 190883 - protein, 414 aa, unidentified
MFYVGIDIAKRNHVACVMREDNLLEIEPFVFTSTQNGFKKLLMQLQSLSCDCSDIIVGMEATGLLFENLYRYLKEFSYRVVLLNPYQSAKFREMDTMKRVKNDNIDSVMIAALIKSGRFSEGYVNQEQLQTLRALYRHRASLYDQLKSIKRQIGSLLAVVFPEFEEVVRDPFSVTSLALLEKYPTAKHYEYASVDRILKTFRSIKGNNFNASKAKRLLNLAKESIYYGAAKEGRALMIRSNIALIRTLRRQIEESEEAMVSLFEHTDNLSSKEEQEKMGDIIDNLRTIPGVSDKTILALLAECGNLDRFHSHKALTGYIGLYPTLDQSGNTTRHGRLAKRGANLAKRAVYLAAVAAVRHNPELRQVYKNYRSKGRAKKECIIIVARKLLQIIYAIYTRNVPYDPNRVFVARPNR

SEQ ID NO: 190884 - protein, 370 aa, unidentified
MAQPPPLFVGLDVHKDSIAVAHAQGQSADPPVFVGAIGPRQSDLAKLVRRLQAKTPDLVFAYEAGPCGSGLHRYLTGQGFTCQVVAPSLIPKKPGDKVKTDRRDAIDLARLLRSGDLTHVYVPTVEDEALRDLCRARDAARLTLKNAKLRLKAFLLRLGRHYVGRADWTEAHRRYLAKVVCPTPTQPIVFQESVRAVDEQVDRVHRLEAELLERAPAWRLDPVVQALQALRGVQFLVAITVVAELGDLTRFDSPRQLGAFVGLIPSEDSSGPRRRLGAITTTGNGRARRALIEGAWAYRHPAKVSEHIQRRIDGLPKPIQDIGWKAQGRLGKRFRRLTARGKHPNVAVTAIARELIAFMWAIAKEVPIPT

SEQ ID NO: 190885 - protein, 334 aa, unidentified
MRQVSQVGVDVDSEKLVCMMQRVGQRMPLTTFANTAAGHKKFIRWATKRARAARVCLEATGIYSLQFALALHDAKSVEVMVVNPRAIKDFARACMQRAKTDAVDAGGILEYLERMPFTAWQPPAPEILQLQAINRRIVQLQTELTREKNRCHASKFAGASGDAVANDIEVNIRHLERRIERMHDSGLQLVHGVPALATKLAHLVSAKAIGEASAMRILAEVLVLPVDLAAPQWVAHAGLDPRPYESGTSIHRPRRITKVGNRHLRAALYMPALVAIQHEPNVKAFYNKLVAAGKKPMQAVVAVMRKLLHAIWGMLKHDQDFDGNKFFRLAEKTA

SEQ ID NO: 190886 - protein, 473 aa, unidentified
MGKGSGISRSDRRRNARRERLRGLVPRDGVVLGIDLGDQKQALALVDHDMRVLWRRSPRCAAHQLGALLADAVTAAAAAGYSRVTVACEPTGARWMQVQRLCAEAGIGLVCVQPLVSHIAREQEDYTGSKRDEPDAVLIARLAAELHCYVPEELGEEWACLRQLGRRRGQLITMATAAAQRIRDWLSVAWPSAVTAAADPFGSMTWLAALEVVTSRYGADPARLAGGLGEEEFLALVRAASPGWGTARPDRRIARKVLALAGDPDAVPAMRRALFRRIRDELGDLQRFRRQLKEAEADMCALVTELGLARLGDIPGLTLTGAASILAEAGDPRRYETSSSLVKHAGLSPSDNASGAFEGASRISRRGRPSLRLAAWRAIFPLVSHNPVMKAKYDALAAAAEEPARAAAGSARPGSARAAQAARAARAARARARVACAASLLRWIYYMTVHDAGWDPVAASGGRLAPQEAPRAA

SEQ ID NO: 190887 - protein, 376 aa, unidentified
MTRETRLENGPLRHRLCQNEVATDLRQWRPSVEQISRIGMDTSKHFFQLHGVDAAEKVVLRKKLRRKEMIAFFKALAPTVIGIEACGASHHWARLLRSFGHEVKLIAPQLVKPYVKRGKNDAADAEALCEAMSRPTMRFVPVKSIEEQAALMLIGVRDRLIRNRTQLSNAIRGYAAEFGLTAAKGIAHLTPLFERVQVDESVPALARELFAAQAEEYAELQAKINDVEAKLKAWHKADECSQRLAKIPGVGPVGAALLKMKTPAPQLFKSGRLFAAWIGLTPKDHSTGGKVRLGVITRAGDETLRSVLVAGATAVIQQVQRSGRGSPWLVELLKRKPPKLAAVALANKIARIAWKLMVTGKSYNPKLAPAAQAVTG

SEQ ID NO: 190888 - protein, 370 aa, unidentified
MQIVHPRCCGLDVHKKSVVACVLITAEDGAVQREIRTYATMTADLLMLRDWLESLDIRAVAMESTGVFWHPLYNVLEDDAWTIILVNAQHIKAVPGRKTDVRDAEWLADLLRHGLLKASFIPPAPIRELRELTRYRKTLVQERATQINRLQKVLESANLKLAAVATDILGKSGRAMLEALVDGQEDPETLSALARGRLRPKIPQVQQALHGRVKDHHRFLIQQMLAHIDFLDQAIATVYQQVEACLAPFAEAVTLLQTIPCVNAIAAAILVAEIGTDMTRFPSAKHLASWAGVCPGNRQSGGKRLSGTATKGDVWLRAVLGEVAVSVARSRGTYLHAHYHRIARRRGKQKAVWAVAHSLIVIIYHNVSFG

SEQ ID NO: 190889 - protein, 340 aa, unidentified
MIVCTKFFIGIDVSKPYFDVSLMAVVNHVRQGIETSRFDNTAGGMKLFEKWLKSHKTAFNENTLVVIENTGIYHRLIWAFCSRKHLPIHIGNAARIKWSFGIARGKNDKIDSLRLCNYAFKEAEDLKATPVLNPQLLHLKDFVSARTKLLKQKSSLGVSIKELGNVNDKSHQKLIEKAMKNALDGIAKSIKNIEDQIKKIISENQDFKGNYKLLISIPGIGHVTAVYLIGCTANFAGQPSGKELACYAGLAPFEHSSGISIKGKTRVHRMANKELKRLLHMCALSLIQHNQEFKTYYNRKKDEGKHSMSIINAVRNKIALRVAAVIKNQVSYKNNYNIAA

SEQ ID NO: 190890 - protein, 426 aa, unidentified
MSAINQIRQEPIAAFVGIDWADEKHDIALRATEAQAKVERSKIANQPEALSDWVLALRERFKQGKILICLEQSRGALIHFLMGYDCFELYPINPKQLDNYRKAFRPSGAKDDPTDGELLCKYVSLHHQELRPWRPDDEQTRKLALLCEKRRQAVDARSALSNQLKSELKQYYPLALAVLDNDLTTVLAADFLLKWPNFASLKKASAPKLRSFFFGHQCRSEKKIETRLQLIQSAQPLTRDSAIIEAGTLTTQMLARQLQALAPFIRQYDQQIAQLFSQHPDRALFDNLPGAGDALGPRLLSAFGSDRDRFDNVLEPLSFFGIAPVTERSGKSTFVHFRWACSKFLRQTFHEFARCSVFFCDWAAAYYDQQRARGKDHHAAVRALAYKWIRILFRCWKTRQPYDPQHYLASLAQRGSPLAGAVKNSL

SEQ ID NO: 190891 - protein, 392 aa, unidentified
MEAVTSQAQTPTAIRTDLGAIFISLELSRSTWLITSLSPGNGEKMSKYPVSGGDVPALLDRFAQLQEKVRSRTGSQFPIVTIQEAGLDGFWIDRVLKANGIESYVVDPASIATSRRRRRAKTDKLDGEALVRALLAFKRGEPRVCAMVKAPSPEEEDRRRICRERKVLIAERIEHVNRIKGLLFAQGISDYEPLRKDRRKRLDELQTGDGRPLPAHLKAQVNRELERLELLLEQITTVENERNTLLAAQKDSAVATLTPAAAMLCDIKGIGLEFAAILWTEGLFRHFDNRRQVAAYAGLAPTPWQSGTIDREQGVSKAGNPRLRTTMVQLSWLWLRHQPKSALSLWFTARVQSNGGRMKKSAIVALARKLLVALWKYVTAGVVIEGAVMKTI

SEQ ID NO: 190892 - protein, 389 aa, unidentified
MKRVCGLDVHKDNAFVCILGENGEKIEFKTGVLTVELDSFRDRLVELGVGEVAMESTAVYWMPIWRILESDFRLYLVNPLSIKQLPGRKSDVKDAEWIATCLQKDLIRGSFVPPLAVQQLRQYNRRLFDLNKQAVYVQNKMDAALQRCNIRISNYVSNIDTKGYREVVELLSEGTTDPELLTGKIHKRTINKHGRDTIKAALTGVVTDVDSDLIRQYREELDLIKQHKQKCQSRMREMCEELYPDELKRIEEIPGVSAQSATQIIAEIGTDMKMFLTARTLVAWAGLKPRNDGSNGKIKSRRITHGNKYLRKLLIECSWAASRTKDCFFSSFSYRMVTVRKKGRLKVQVAIARKLLVVIWNLLAKGVCYSDRLAQAEETKEESSDAPQG

SEQ ID NO: 190893 - protein, 319 aa, unidentified
MAQNDLVVVGIDVSKDKVDACIRTLALRQNCPSSAQGHRRLVAWLRKHQVNKAVMEASGGYERNWAKVLRASGIEVRIVDPKRVRSFAQSAGRLAKNDAIDAEMIAWFAETFSEAPGQTHDAAHEELVALAKARISLVDLKARLQSQNEHAAPRPVQKTRERLLKNLACEIAKLEAAISAQIKATPHLAERAEIIESVPGLAETTSANLVAGMPELGQVSDEIAVALLGAAPYDDDSGNRRGERHVKGGRRWVRNAVYMPCVGAATLNNPVLKAYYDRLIAKGKKPKVALIACMRKLIVILNTMIARRQKWDPSRYALN

SEQ ID NO: 190894 - protein, 283 aa, unidentified
MDVHASKVVACVVDAESGEMTVRHLPGETAEVVAFCAVLPVPACAAYVAGPTGFGLARSLNTAVVACVVAAPGKIERPAQDRVKTERRDAERLVRLLMIGGLVAVRVPSDEEEALRDLVRAREDVRGDLMSARHRLGKMLLRHDICFEDTTSRWGQRHRAWLAKLDLGQPGAQSTLGDYVGAIDALVLRRDTLEAAIAELVPSSPVAHTVARLRCLRGIDTLSAVGLAVEIGDFARFQRAGQLMSYVGLVPAEYSTGTTRRQGHITKTGSSHARRLLVEAAWH

SEQ ID NO: 190895 - protein, 342 aa, unidentified
MDNYAGIDVSLECSSVCVVDATGKIVREDKVASEPEALIGWFRQLGFELTRVGLEAGPLSQWLYAGMKAAGLAVELLETRHVRDAFKAMPVKTDRKDARGIAQLMRMGWFRPVHCKSMGAQEARAMLTARKLVQSKLFDVENSLRGILRGFGLKVGKTTELRFAGRIRELVSGHPSLEAIAEALLSVHAVLLCEFKAFEKRVRSMARSDTKAKLLMTTPSIGPVVALTYAAAIDDPKRFKSSKAAGPHFGLTPRKYKSGETDVSGRISKIGDASVRTALYQAAHIMLTGPIKGCSQLKGWAMRIARRAGMKKAKVALARKLAVILHRMLVTGTPFNVSSGVA

SEQ ID NO: 190896 - protein, 323 aa, unidentified
MSQPLFVGVDVSKAELLVAYRSSAPEGLPPAPRRRGVPNDPRGRAALARSLRRVRPTLVVLEATGGWEVRVAEALAAAGLPVAILNPRHVRRFAQANGRLAKTDRIDAGVLAHFAEAIRPAPRPLPDAPLRALQSHVLRRQQLTQMITAERNRHALAPKDLRRGLSAHIRWLTRQREALDEKIAQAIRAHPAWCAQDRLLQSVPGVGKLLSATLTARLPELGTLSHKQIAALMGVAPFNRDSGTFRGERTCWGGRADVRAVLYMGALTATRCNPVIRAFYQRLLAAGKPKKVALVACMHKLLTILNAMVRDRRSWNPNPTRTS

SEQ ID NO: 190897 - protein, 351 aa, unidentified
MRFYTKQHEYYCGIDLHARSMYVCIIDKEGNKLVHRNSRAEAGQLLKLIAPYRHDIVIAVECMFCWYWIADLCAKESIPFVLGHALYMKAIHGGKAKNDRIDAHKIAALLRGGMIPMAYVYPRKMRSTRDLFRRRMHFMRKRAELIAHIQNTNSQYNLPEFGQRIARRCDRQKLGESLLNRFDDTSVRKSMEINVGLIDHYDKMLAKLECYISKNARVDNPVAFHLLQSVPGIGKTLALSILYEVHDIHRFKRVQDFLSYSRLVRCQKESAGKKYGTGGKKIGNAYLKWAFSEAAVLFLKGDRRRQAFLAKLEKKHGKAKALSVLAAKLGRAVYFMLLRNHPFDEEKFLAR

SEQ ID NO: 190898 - protein, 305 aa, unidentified
MQITTIGFDLAKNVFQVHGIDVKEKVVARKQLRRGQVIAFFKALPPCLVGMEACATAHYWARELTKLGHEVRLMPAKDVKAYLKRNKNDAADAEAICEAVRRPTMRFVQIKSAEQQGQLMQHRTRDVLIRQRTQLINALRAHLAELGIVAAQGDAGVNELREIVADDRDERLPIDARASVIVLAAQLEALQTLIGSIEKRIKMQHRSNETSQRVETIPGIGVLGASAIVATVADPTIFRSGRDFAAWIGLVPRQDSTGGKQKLGPISKQGDRSARSCRRTRWLRSMGLRSTPTSGRCSDPTSPSM

SEQ ID NO: 190899 - protein, 402 aa, unidentified
MNAVGIDVSKGKSMVSVLRPFGEVVAKPFSIGHTGSELKELADYLKSLDGETRVVMEHTGRYYEPVARFLHEEGIFVSAVNPKLIKDYGNNTLRKVKTDKADSRKIARYGIDNWAELRQHTPMDTIRMQLKTLNRQQSLYTKTKTMMKNNLIALLDQTYPGVNALFDSPVREDGSQKWVDFATTFWHVDCVRNMSLTAFAERYRKWCKRHGYNFSQSKAVEVHAGAQDLIAMLPRDALTKTMVRQAIDALNAISASMERLKAEMQALAAQLPEYPVVMAMHGVGDSLGPQLMAELGDVTRFTHRNAITAFAGVDPGADQSGTHEAKSTRVSKSGAPELRRALFLVMDCLLKTQPQDDPVYRFMDKKRAEGKPYLVYMTAGANKFLRIYYGRVKEYLASLEGN

SEQ ID NO: 190900 - protein, 348 aa, unidentified
MLHVGLDLSRRRLDYCLLDEGGVIVERGAVAPDADALAGLVRLVELRHGRQPVRAVIESMNGARFVHDTLERCGWEVLIADAQRVKGLAPLACKTDRIDAWVLAELSRRDLVPAIWLPGFGQRQERERARWRLYLVKHRSSLKQRVHSELMAFGHACPVTDLFGVRGRELLERLALPDPWHANVLACVALIDDLDRRIDQLERELKALGADHPYVPLLVTVPGISWVLAYTIAAEIGDITRFASPKKLCGYSGLCPRVYQSGDSDRRGPLTKNGPRYLRWALIVAATNASRHPLYHDRYQQTKRRLGKQRGAKVAQVQLARTLTEAIWQMLTRNQSFAPAGAAFPLAA

SEQ ID NO: 190901 - protein, 415 aa, unidentified
MANPLFVGLDVHSRTNRVCLMDQAGEPWGRRFSVANNRPGSQLLAVRLLEALRQGEFDSLRLAAEATNWYWFPLFQTLQQDPLLNQWPVALFALNPRLIAKYKETFSDRDKTDDSDAFLVADRLRLGRDLPAPFQLEAQHLALRFLTRYRYHLVKDLVREKNHCLSILYLKASEYRQGHPFSDVFGATSQALLQEFATLEEIAAMPLEELVIWLDAKGKGRFPDPAQVARELQQVSQDSYPLDSQLQQPINYVLNWNFQLVNFLERQLQRVNTAIAEAMGQIPHTLDTIPGFGPVYSAGIIAEIGDVARFDHDEAKVAQFAGLHWRKTASAKFQAEDTRLTKRGNAYLRYYLCEAANAVRMRDAEYAAFYQRKHDEVPKHQHRRAVVLSARKLVRLVVRLLTTNQPYRPRSVPGG

SEQ ID NO: 190902 - protein, 349 aa, unidentified
MPKSNTAVVTIGIDPGKNTLHLVGLDARGAIVLRERVARARIVSRLANVPPCLIGIEVGMGTHYVTRELLALGHDVRQVPPVYAKPFRQTHKNDFRDAHAIAEAVQRPTTRCVPPKTDEQLDLQALHRVRYRLVGQRTAIINQIRCFLLEHGIAVRQRLHWLRQALPDILAQRADVLSPRMVRILEDLAQDWRRLDDRIQAVSGEIEALSKTTEPCRHLMTIPGIGPIISSAVVAAIGDGTAFTRGRDFAAWLGLVPKQISTGDRTILGRITKRGNRYLRMLFMQAARVVLLRPRNWMKHSYGPWLAAAAQRLHHNVLATALANKLARIAWSVLAQHRVYEARLSLAAV

SEQ ID NO: 190903 - protein, 349 aa, unidentified
MLADQLDYIVGVDTHLDEHVLAVVASPSGAVVAKRSVRASARGYASALQFALEAGNGARVWAIEGTGSYGAGLARYLVGRGETMLETSRLPQSERRLRGKDDALDAVRTARAILASDTLALPRAGERREALRLLLVARRSAVDVRREALGQLRGVIVTAPDSLREQLRTLPVGKLLQRCSRLRRSSAMSTDEVAVRLVLRSLARRIEAATVEAAELERELLVHVHALAPQLLDEPGIGPIVAAQLLVAWSHRGRLRSEACFARLAGVAPVPASSGKTARHRLSRGGDRQLNRAIHTIVLHRRQHDPATRDYIERRIAEGKTRRDATRLLKRYLARHLYRLLEQQQPLMT

SEQ ID NO: 190904 - protein, 338 aa, unidentified
MSKFNTIGIDLAKQIFQVHINDANGKKLISKKLKRSQLLDYIRQQPNALVAIEACSGAHWWARQFQSLGHAVKVIHPAYVKPFVQMHKNDQRDAQAIAEAAVRPNIPAVSVKSQEQLDLQAIHRVRERLVKEKTAISNELRGILAECGIVLAQGHSALKTGVPLILEDAENGLSDPLRCLVSDLMQQWYEQVERIARYERQLQQISRQNEDCQRLMSIPGIGPVNATLLLSHAGSARQFKTARHFAAYLGLVPRQHASGGKEKLLGITKRGNKQVRKQLVHGARSAYRALLAKTDPSRLKTWLIRCEGKHPNKVIVALANKLARIIWVVLTRQTAYEA

SEQ ID NO: 190905 - protein, 352 aa, unidentified
MAKGNKLDFTGQHIYVGMDIHKKSWSVSIYTEHFEHKTFTQPPEVKKLTNYLQRNFPGATYHCVYEAGFSGFWIHDRLTEEGIHSMVVNPADVPTKHKEKAGKADKVDCRKLARNLRSGDIKGIYIPSRVQAEDRHLIRTRQSMVRKQTRCKNQIKAILFFYGILIPEEGHWSRNFINWIETIRMERASGDIALKVHLEELKHLRQIIAGLNKAILALSRTDTYRDKVVLLRSVPGISTLTAMTLLTELCDISRFSSLDKLASYAGLVPDIKSSGETEHTSGITHRRNPALRAVLIEASWVAARKDPALIMAFNKFSLRMKKTAAIVHIARKLLNRVRFVLMNQERYVPAVV

SEQ ID NO: 190906 - protein, 346 aa, unidentified
MIPVASDVHKGRCLMAIIPPGEELKMLEPIECTREAWRERLVELPPETEIALEVSTSGYFVMSVLEEAGWRERAHWVHTAGIDSLRKQKSDRLDTRRLVKKLAVHDVEPLPEAWFPPPPIRALRLLARQRCGIARLRAQTKNRVNSLLEMHGLRPQRCVFTAKGRVWIQQQVLSPAAQLCFERFFRLYDFLSAERETSEAELLAAAAAFPQVALLQTIPGLGHMLAAVVWSEIGDLARFASADALLNYTGLVPSSYDSGEVSIHGPITRQGPVWLRWALITAANAVTRSKSPLGQRYWRLRRCHKQPNVAKTAVAGSVARCVYGVLKHGAPFQAERWGRRAGKLGQ

SEQ ID NO: 190907 - protein, 359 aa, unidentified
MAIIEGRERHIVGGVDTHKDLHVAAVVDEQDRVIETRCFATTRQGYRQMLAWMRSLGELQRIGIESSGSYGAGLLRFMQQAGIAVLEVTTPDKQDRRRRGKNDDLDAQNAAHAAFAGQRTVTPRSRDGMIESLRVLMACRKTAVSARRVSLQMIHNTIVCAPDGLRDQLRSLTRMQLVRTLAAWRPDLTAYRDLDSAYRIGLKSLARRFLELHDEIADLDVMIAAIVEELAPNLVARNSIGHIGAAQLLLTAGDNPERLRSEASFASLCGVSPVPASSGKTVRHRLNRGGDRAANSALHIIAIGRLRTDQRTKDYVARRIAEGHSKLDAIRALKRYLAREVYTLISQRRREINATRIAA

SEQ ID NO: 190908 - protein, 423 aa, unidentified
MYNQTKEIPNGYNVIVAIDWADRKHDLRIRCGYEEKTLTLTNNLPKLNEFFLDLLAENRWQKIAVVIETTQSALMHLLNSISQFDLFAVHPTTASSYAKTFSPSGAKNDTSDTASLMDLFIKHPEKIRKYNVEKDSSILDFYNEKRRYAVDDRTKFGNQLTALLKKYYPIALQVNGNHIYSPISMGFLEKWSSPQKLLLANKQQLSRFFNTRTSKKCTTPIKLEILQSAMVVVEDEHVTEMYETELFDLLRRIKALNESIKIYESKITRCYQESDDYEVFNSLPGSGKVLGPRVMAFFSQNRERFSDVQEALTYSEIAPVLQESGRMSITRRRYRCDKFRQQTFVEFADGSRKKSLWAQEFYIQKKAQGKSHYTILRALAYKWIRIIYKCWLDKVPYDESKYLKALKNFGSPLVNNSTKTSTI

SEQ ID NO: 190909 - protein, 492 aa, unidentified
MSLRSELRGRLWSNHFGWQSLFDVGHAPSWEHWTKSRPADQSLTGHPMSFDRLKRPQSRKRLPGHKLKPSRATLLVQNSKPHLSMKQTYILAIDVAKHKVRAALSGADERLLFEKDLPVSAGGLRELLVRLREHVAEPEGLLVLIEATGMLHLNWSVALIRAGYAVVVINPLIARRLYTLGNSIRDNKSDPIDARQLCGIGRLHGEKLLSLYRFALKPEQLCLQRLQSVRKAVRKSLSNLKKSYGSLLDVSFPELGRLLEIDGVGIRQLLSQAPTPCAIARMRRSSLEKNWMLRPKAAQLKKLAAESMADPELAQASRPALLAMLQSIEAMETRLRELDRQIEALTSQSVDPQTKALVESIPGFGALNAAKLLAFLPGEILHAGSNRQAAARLQAYMGNDPRVRQSGQWQGQTKMSKRGVEMLRTALFQCAFSASQHDPELRSFYQRKRAQGKHHEVALSHLMRILTRRLVAVLRSGQPYQPNDNSELKNAA

SEQ ID NO: 190910 - protein, 452 aa, unidentified
MARKRINKTKKVTLPVMNPDAAGVDIGATEVYVAIPPDRDTESVRVFATFTRDLNALADWLQQRAIRTVAMESTGVYWIPLMQILEARGLEVYLVNAKHVRHVPGRKTDVSDCQWLQYLHSVGLLRPSFRPAQEICAVRSLWRHRETLVELATCHVQHMQKALDQMNLQIHHVISDITGLTGLAIIGAILDGERDTQKLALLRDPRIRASHEIIAKSLEGDYQPAHLFTLRQSVEMYQQYRKKILECEAEIQCLMEKLEGQADPSNLPPAKDSVKKCKVMNPAKALTLRNEGYRILGVDLTTIPGISVLHVQTILAELGPDHSKFRNAAAFSSWMGLCPDNDISGGRVLWSGTRKVKNRIALALRMAAQSLQQSQSSLGEFYRRMRTRLGAPKAITATAHKLARIVFRLLTTKEPYDDSVFARSEQRSRERAKKRLSAQARELGFNLVPVFC

SEQ ID NO: 190911 - protein, 344 aa, unidentified
MEQYAGIDVSLELSSVCIVDAQGKIVKEAKVASEPEALTGFFEALGFAVKRIGLEAGPLSQWLHAGFKRAGFDAVLLETRHVKAALSAMTVKTDRKDARGIAQLIRMGWFRPVHAKSIGAQEIRALLVARKQLLGRLIDVELSIRGILRGFGLKVGPVTRKNFEARIRELVTGQATLECIVAAMLSARAALKAEYAKLHKAVLTIVRDDAVCRRLMTVPSVGPLVAITYKSAIDDPHRIAKSKAAGALFGLTPKKYQSGEKDVTSGITLAGDEMVRTALYEAANVLLSRITRFSKLKRWGIDVAKRRGSKRAKVALARKLAVILHRIWVDGTTYRWAEVEPIAA

SEQ ID NO: 190912 - protein, 343 aa, unidentified
MEQYIGLDVSMKETAISIRQDGKRMWRGKCASDPQLLAALIRKRAPDVRRVVFETGPLSVWFYHALMAEGLPVICIDARHAKAALDMAANKTDANDADGLAHLAEVGFYREVRVKGFDSMLIRTLITARRQLLKMRLQISNQIRGLMKTFGLVVPKGAGSVFERNVHDLLQGEAKLARIVVPMLRAWSDIRYQIAELSKQLAAMAREDQHCRLLMSVPGVGTVTATAFAAAVEDPANFRNSRAVGAWVGLTPRRYQSGEVDNDGHISRRGDNQLRGLLYEAAAVILNRSTDTSTLRTWALELKERLGFKRAAVALARKLAVIMHAMLRTGELFDPHGGTPAAA

SEQ ID NO: 190913 - protein, 451 aa, unidentified
MNTPGFNEVRRNVAGIDLAGHADHYVCGPRRDDGTHEVVAFGTTTGDLLALVQWLKKRNVVSVAMESTSVYWIPLYDLLESNGIEAVLVDTRQVRMVPGKKSDVKDCQWLQRLHSCGLLHGAFRPDERYNAIRVVLRERQNVLAMQTQAIQSIQKSMDQMNIRLHHAVSNVAGKTGMDILRAIVEGERDPAKLAKLRHYTCKKTEEEIAKELTGTWREEHLFNLGIAFRHLEFLQEQLARYEEKVNSMYAALARDSDRPAPPPDDSSEKKEKDRRNREIKRDLTRLTGFDLTRIDGIDAGLACQLVSEIGPNVDRFPTEKKFVSYIGLAPPLGKSAGKNVRTRGKTKNTCRIGQLLRQAASTLSRSKSALGARYRATRSRTSSKIAITDTARAMAKLIYRGMKFGAAYVDEGEAAYEQRRRNKTLRFIQRAIRTLDISFAELGLQAAPCQL

SEQ ID NO: 190914 - protein, 372 aa, unidentified
MNYNTVYVGMDVHKESFTLCSCKYEDEKASHYQRTPASYKNVLRYLAFLRTIYGEYTRFVCGYEAGCLGYSLYHQLENFNVECVILAPTTMLEQRSKRRIKTDKRDAEIIARSLAQHNYSPVHIPTETDNQTKEFIRMRDDHKAELKKIKQQILSFCLRQGYQYDGSGNWTAKHVKWLRSLKPAGLYKEILDEYLLTYTILIDKLNRLDQRIEELASKEEYKESVSKLTCSLGIETHTALSVIVEVGDFQRFVSARKFAGYLGLVPGQHSSGDDRNGLGITKAGNTHVRRLLVESAQSYTRGKIGYKSRVLRSRQAGNSPQVINYADRANERLRRRYYKMVLKDGKKYNIAKTAIARELACFIWGMMTDNIY

SEQ ID NO: 190915 - protein, 372 aa, unidentified
MKEDSVIFIGLDTSKLKISVAIADGSRNGEVRFFGDISSEPASVASMVSKLSKRGAKLHFCYEAGPTGYGLYRQIVELGHDCVVVAPSLVPKRAGDRVKTNRRDAMSLARLHRAGELTAVWVPDEGHEAIRDLVRAREAASDALKQARQQLQSFLLRHGRIYAGREPWTRAHRRWLTCQAFDHPAHQILLAEYCQAVADASVRLDRLTKLVVETAASWSMAPVLAAYQAMRGVAFMTAVTFVVEIGDVRRFDNPRQLMAYLGLVPSESSTGERVKRGGITKAGNTRARRVLIEGAWTYRFPARVSPKIQARLDDLPRTVREIAWKAQVRLCARYRKLLAAGKPKVVAVTAIAREMAAFLWAIGQEIAPTAKA

SEQ ID NO: 190916 - protein, 307 aa, unidentified
MRFYTQQHQFYCGIDLHARTMYLCILNQDGEILVHRNMPAGPEPFLKAVAPYREDLVVCVECIFTWYWLADLCAREGIPFVLGHALYMKAIHGGKAKNDKIDSQKIAVLLRGGMLPQAYVYPAAMRATRDLLRRRMHLMRKRAELLAHVQNTNSQYNLPGIGKNIAYKANRDGIAERFPDPAVQKSIEVDLALIGHYDHLLNDVELSIVHTAKQHDPQTLSRLQSVPGIGKILSLVLLYEIHTIDRFPRVQDFVSYCRLVKCAKESAGKRYGTSGAKIGNAYLKWAFSEAAVLFLRTNPAGQKYRAR

SEQ ID NO: 190917 - protein, 422 aa, unidentified
MNTDWTKHTHFAALDWASDHHDVVVVDRSGALVAEFRFAHTADGWAEFTQTMQPFAGCPLALETSSGPAVDQLLQRGWTLYPVNPKAAERYRERKAPSGTKTDRHDAWSLADALRTDGHGWRPLRAQDEATATLRALCRDELSLIEQRTALVNQLQAALHEYYPAALAAFDDWTMPAAWALVQQFPTPLALQSAGKRKWEKFLHTHRLWRQDTAPARLARFAQANALPASAAVLTAKSLLATSLVKVLQALQSQLDEYRRRISAAFAQHPDHDVFGSLPGAGEKLAPRLLGELGAVREVYPDADALCCQAGVSPVSFQSGKLDKARIRWACDVVLRHTVHLWADCSRKKSPWAQAYYARKREQGQDHASALRGLGKRWLKILWRLWTDRLTYDEARHQQDQKQHGSWVSELLNPTPNQPAPR

SEQ ID NO: 190918 - protein, 347 aa, unidentified
MRSYVGLDVSQATTAICVVDEDGRTLAESKVPTCPRAIAAFVRTQAPELIRIGLETGPLAVWLFGALRQDGLPVICLDARHANAGLALMANKTDRNDAAGIAQIVRTGWFRQVHVRSEASYIVRARLAARTTLVRQRCEVDNQIRGLLKTFGILVGKAPGGLRKRAAEIAGDELANQPELAQLVRMLLALRETLCDQIAELDRQLTRQAKSIPVCRRFMTVPGVGVVVALSVWAAIDDPGRFAKSASVGAYLGLTPRRYASGEIDRQGRVTKRGDPVVRTHLYEAANVLLTRIEGFSVLKAWGLRIAKRSGFKKAKVAVARKLAIILHRIWRDGTEFRWGKEVPLAA

SEQ ID NO: 190919 - protein, 333 aa, unidentified
MSQPNDLSRSLVPFYQETTLVAVIELSQSSWLIAGTIPGIERQPLKKIMPDETALLRLLHRWRDEASQGGRAIARMVVAFEAGRDGFWLARWLARHGVEVHVVHATSVAISREHRRAKTDRLDTAMLMRVFLGWVRGERGHCGMVAVPTIEEEDAKRPSRERESLVGERTRVVNRMKAALARLGIRGFKPELRKSLQRLDALRTPEALPIPPNMLDEMRRDLARLSVLREQIAAIEQARLQRLEQAPPSGPNAMVRLLASVVGVGVETADMLVQEVLSRNLRDRRAVARYAGLTGSPDESGSKRREKGLAKSGNARVRRGLVQLAWRVSAQPG

SEQ ID NO: 190920 - protein, 340 aa, unidentified
MEKRYIGIDLHRNRFTCCIQLENERTYLTEWELADLGKFVKKLRPTDEVAVEITGNTRLFHDAVAGHVARIVVVNTSQFRVIRQSVKKTDPHDARTLALYLSKDMLPEVRMKDKQRGQLASLTQTRDTLVKLRTALKNKINNILSARGLNLPKEALSSEKKLTEVLELPFDEIVQIELRVLVGQIRSLNQSIAELEKTIGEEGSKLDGHRNLASIKGIGKTTGAILLSVIGDVKDFADEGHLASYFGIVPRVSNSNETEHSGRIHKRGTKLGRTALVQSSLIAARYSPYLKRFYEQVKARRGAGKAIIALARKFLGVIYRTLKNGWVFEDFPNFVLAEAS

SEQ ID NO: 190921 - protein, 367 aa, unidentified
MFNERTAIGLDVHARSVRAAAIDTSTGEVIEVKLPADNAEIVAWVAGIAQRHGPVHAAYEAGPTGFGLARKLDAAAIAVTVAAPSKILRPVGDRVKTDARDAVLLARLLKMDELVAVRVPTEAEESARDLVRARDDARVELMAARHRLSKLLLRRGFVYAGTNTWSRDHDAWLRAARRDGLDGAGVGTLAAFDASYDAVTQIIARKDRLDRDITAMAADSEFTPVTTRLGCLRGISTLTGFALAVEIGDWHRLTGASIAAYLGLVPSEHSSGGSRSLGPITKTGNTHARRLLIESAWYHKHQYRPGKVMRDRWAHAPATAAARGDAGNRRLHHRWMVLAAKHKKHTVANTAIARELAGWCWSLAVMD

SEQ ID NO: 190922 - protein, 366 aa, unidentified
MKKIAYVGIDYHLNSLSIAVIIEGQKKLHETIRLANNDKVIGKYMKKLSEQFDIKACYEASSSGYSFQRKMAAWGYHCDVIAPSLVPKKPGNRRKNDFRDARDLAQNYAGGMLTMVRLPTEKEESLRSLIRCRLAFKESVKRVKHQINSLLESQAVRWSKKSKWTQQHRHWLSTLQMPNERFQQVLEEYMGHLQFLESRVEHLDTQIQHIAESAMYAASVKKLRTFKGISTLTAMVLIAEITDFRRFPNARSLMAFLGLIPSEHSSGDKYQGGAITKTGNKRCRKLLIEAVQHYSKTPRISTNMRQDLAQVDGSSAAIAVKCLKRLHQRYWSLSMKGKIRPVVITAIARELVGFIWATMQPIATPA

SEQ ID NO: 190923 - protein, 369 aa, unidentified
MNAREGFVALDVAKLKNAAAIAEGGRSGEVRYLGEIASTEAATRKLVAMLSEKYERLTFCYEAGPTGYGLYRLIRSLGHDCLLVAPSLIPTRPGDRVKTNRRDAEIMAKLLRAGELTAVWVPDERHEAMRELARARDVAQKDLRVKRQQISGFLLRGGLHYPGKKTWGKAHLNWLASQKLEHVEQRFAFEELLLGMRQASERSERVEQAIRDALPDWSLAPGVTALQAMRGIGLITAVGFLAETGDLARFEHPRQLMAYLGLVPSENSTGERVRRGNITKAGNSRARRFLIESAWSYRFPARVSKEKQTKVEAAPRSVREIAWKAQTRLCGRFRNLTRKGKRSTVVATAIARELAAFIWAINQEVAPQN

SEQ ID NO: 190924 - protein, 340 aa, unidentified
MVHVGVDLDKRSSQIAVLSEDGEIVQHRLANDAARLEKFFADLPPHTPIAIEASGTWWWLVDLLEELGHQPVLSNPKQTKAIAAARLKNDRVDAERLALLLRGDLLPRVWIPPTALREARELIRHRIQLVWLRGVIRNRLQAMLARRNLQPTSGQSWLTQRGQRELQRLPLGETPSRIREDCGALLPTLDAQIRRLDADLVTRWGADARVRRLTTIPGIGPFIAIVLVLELGDIARFASAKRVASYVGLTPRIRGSAGRVRAGHITKEGNRLLRWVLVLAATQAVRRPGPLRAWFHAVKKRRGKKVARVALARRLAEIVFHVWKQECDYFTVVRHGVVRG

SEQ ID NO: 190925 - protein, 340 aa, unidentified
MTLYAGIDLHSTNNFLAIRDLDGKRIFQKKLKNYPEVILSTLEPYKNDLDQIAVESTYNWYWLVDLLMDEHYDVKLANPSAIQQYEGLKHTDDKHDAFWLAEMLRLRILPTGYIYPKETRPIRDLLRKRSHLVRLRTSLILSLQNIMTRNQGKSMNVKQIKQRTQNNVAQALLDENEDLALAGQVSKDSIDFLSQQINQIELTIKKKLKSDMAYKFLHTIPGIGPILALTITLETGPVSRFPKVGDFTSYCRKAPSKWTSNDKKKGKGNTKNGNKYLSWAFAEAVQRARQYDKPARDFFNKKASKCEYPVAYASLANKLARAAYFIMRDEVPFDHKKLFA

SEQ ID NO: 190926 - protein, 369 aa, unidentified
MADRITYIGLDVHKDSIVVAVAAGGLRGEVREYGRIANTSAALDRLLRKLGGDGMTLRFCYEAGPCGYGIQRRLSTGGHECVVVAPSLIPKRAGDRVKTDRRDAASLAKLHRAGELTAVWVPDARHEAMRDLVRARLDAVHSLRRARQQLSGFLLRQGCHYGRPAWTRLHRRWLAGLKFEQAVHHIVLEDYIAAVEAAEARRNRLTAQIEPMLPDWTLAPVVAALQTMRGMALVNAASLIAELGDLSRFANPRQLMAYLGLVPSEHSSGASVKRGGITKAGNAAARRLLIEAAWSYRFPARLSRALLLRQERQPRLIRDIAWKGQLRLCARYRRLARTGKPANIVTTAIARELSGFVWAIARQVAVTTD

SEQ ID NO: 190927 - protein, 345 aa, unidentified
MKITTVGVDLAKIVFQIHGVDARGNAVLRKQLKRTEMLSFFANLPPCLIGMEACASAHHWARKLIALGHEVKLMAPQFVKPYVKSNKNDRNDAEAICEAVARPNMRFVPVKTVQQQAVLALHRARAGVMKARNAQGNQIRGLLGEFGIVLPQGIGHLRRRGPELLEDGDNGLPGLMRTLLSRLLTQLQQLDQQVAALEREIVLWHRQNDDSRRVERIVGIGPLTASAYVASLGDAKAFTNGRQVAAWLGIVPRQDSSGGKPKLLGISKHGDVYLRTLLIHGARAVLRHVEHRPDPTDSWLKRLMARRGKNVAAVALANKNARIAWALLAHQREFEPEYVSKAPSR

SEQ ID NO: 190928 - protein, 365 aa, unidentified
MGKVIKAETGMTIGVDLGDKWSQLCVLDEHGEVCEEGRIATTAQAMRKRFSTEAPCRIVIEVGTHSPWVQRLLQELGHEVITAHTQSVRLIYGATNKNDRLDAERLARLARVDPKLLHPIQHREGTAQADRAVIRSRYVLVGCRTKLINHARGMVKSMGERLPTCTADCFPKRVREALPKELKPALGPVLETIAALTTKIRRYDRLIEKLASERYPETAVLRQVSGVGPVTSLSFVLTVENPARFRRSRKLGAYLGLSPRSSQSGDVDPELRITKAGDDDLRRLLVGSAQYILGPFGPDTDLRRWGLALAARGRKNAKKRAVVAVARKLAVLLHRLWVTAEVYEPLRNSQRQANKLDSVAQAIPA

SEQ ID NO: 190929 - protein, 367 aa, unidentified
MEKSSKVFVGMDVHKESIDITVAEQGGEVRRLGQIGGDRGSLLKMVRKQQSRGGERVFVYEAGPCGFWIYRELAALGERCMVVSPALIPKRAGDHVKTDRRDSERLASLARAGELAAIHVPDIRDEAIRDLVRGRDDAVIAQRRVRQQLKALLLRNDIRYAGRTSWTGAHRRWLSELKLPEPAQQIVFEEYVDAIAVATARIERLTRAIETEVLTWRFAPVVAGLQAMRGIQFVHAVTLVAELGDLTRFGSARQLMGYLGLVPRENSSGEHRHQGSITKAGNSYARRALIEAAWAYRHPARVTRIIAARQTGLPKAACDIAWRAQLRLSAKYRRLNARHLNHNKIVVALARELSGFVWAIGQSVRPQ

SEQ ID NO: 190930 - protein, 348 aa, unidentified
MLIIGCDYHPGFQQIAFVDTETGECGERRLTHRKEAEDFYDTLRERKVRVGMEASGHARWFERWLDGLQFELWIGDAAEIRTKRVRKQKTDRQDAQLLLRLMVEDRFPRIWVADAANRDLRQLLWHRHRLVQMRTRIMNQLHVVALNEGVRRKKALWRPAGRNELESLNLAPWASRRRQDLLDLVDQLTPKIQESTRALEEEAEKRPVARQLMTHPGVGVLTALAFELVIGTPDRFHCGKQIASYVGLVPSEESSGDRRRLGHISKQGNSLLRFLLVEAAQVTVRSQVQWRSKFFHLAMRRGRKIAKVAMARKLAVHLYWMWRQGWDYGQFEKLGSHAGEPGNRHGVQ

SEQ ID NO: 190931 - protein, 411 aa, unidentified
MHYKQKHIYIGVDLHKKTHTAVVINCWNEKLGEVTFENKPSAFEELTTYVKQLKKRGMTPVYGLEDVGGYGRALAVYLLENKQKVKEVNSALSYAERQSYPTTQKSDSWDAECVARILLNKLDILPAANPQDVYWTIGQLVTRRNGLVKGLISLKNQLHTQLSYHYPSYKKFFSDIDGKCALAFWEKYPAPHVLNGVSVEEFAESLRKSSNNACSTRKAEEILALVHADGDTTRSYQEQRDFLIKSHVRDIQFNKKEIEYVEGELQGMMKRLDYQLETMPGIDLVTASSLVAEIGDISRFASADKLARFAGIAPVNFSSGGKGTNQKSRQGNRILHGLFYNLAVQQVQVSKGSKKPRNPLFYEYFNRKKEEGKTPTQALVCVMRRLVNIIYGMMKHKTAFRLPEQVEKQAS

SEQ ID NO: 190932 - protein, 348 aa, unidentified
MLADQLDYIVGVDPHRDSHAIAVVHVISGAVVFESTVIANNDGYAQALALVEEHTRGRRAFAIEGTGSFGAGLTRFLTVRGERVLEVSRLRRERRTGGKTDALDAIRAARSVLGQQRPSTPRAGGERQALQALVAAREGAVNAKRAGLCQLRDLLITTPEPLRSELKPPTRARLLQRLAAIRPHNRPDAELRGSLLALRSIARRVLALTAEERELAREIETITRTLAPQLLDQPGVGPHAAAQLVLSWSHRGRIESEAAFARLAGAAPIPASSGKTIRYRLDRSGDRKLNPALHMILVTRKRTHPATIAYIERRLQEGKTRREANRCLKRYLARSLYRVLEHGPPMTA

SEQ ID NO: 190933 - protein, 343 aa, unidentified
MTKISTIGLDLAKNVFQLHGVDASGEVVLRRQLRRGAVEKFFAQLPPCLVGIEACGSAHHWARVISRHGHEVRLMPPAYVKPYVKRNKNDGRDAEGICEAVTRPTMRFVAVKSIEQQATLAVHGTRALLVRQRTMAANALRAALSEIGIVAAQGIEGLRALMARLEAPSEEIPDMMRGALLALARQWQALDAEERVLERQITKTARCDREARRLMEVPSVGPIIASTVLAKVPDAKVFRSGRDFAAWIGLTGKDHGTGGKHRPGRISKQGDRMLRTLLINGASSHLRQQKRRGISDPWLRELLARRPYKVAMVAFAAKTARILWAMLVKAEHYRDRAIAPAAV

SEQ ID NO: 190934 - protein, 345 aa, unidentified
METMYYIGLDVHKKTISYCVKDGSGRIYGEGSIPATRLTLDMWMKTLPQPWTVAMEATIFTAWIYDHLQPHAAAVKVAHPLMLRAIAVAKKKNDRIDAKKIADCLRCDFLPECYMASTEIRERRRTLRYRNLLVRQAVQMKNKIAVLLMEAGVSYNKQKLHKVGYFRELLATNQDIDEGLKPLLRLCRETVVRLGKTESALVRSLQRDSLLMERVERLMTIPAVGPITALTWALEVGDVQRFSSIKKAISYCGLCGAERSSANITMRTPLSKQRNKHLQTVLIEAAKMAPRNSPELAMVYEQEKQKGNANRATLAVARKLVAYLVAVDRRQKEFLTVERENRTAA

SEQ ID NO: 190935 - protein, 356 aa, unidentified
MRVVFGIDVSKASSEVAILVNGEKVHGYTISNDAIGFARLLGDLRTVHKPEIIFEATGVYSRRLQTFLDDNGYAYTRLNPLEAKKQLDSLRVRKTDQIDAEKLAQSQFVLNRKPTYVQEEVYQNLRDLSRFYQNLTEDIVRAKNRLHKVLQVTFPELENILSTPSGEQYWNLVIAFPCKDCVLELSNDELSKSIRLSTSKRISDKRVAYLAEKLIALANQSYCAVKKTSPILEEVRYYTKELLRLSEQRQAVLDEMVELAQPLPEYDILLSIPGIAETTATSIIGELGDIRRFQSANQINAFIGIDPPAQLKLSGRQFEVGDEANSVRISRIGRIWSVKHEQICQSTTAMRCRHEL

SEQ ID NO: 190936 - protein, 425 aa, unidentified
MSERDYNRQVVKRQRIGRATLVVGVDVGNACNAVGFMDKEGNVLGSCAKLYNSREGFEQFVKMTEGFKKRQGMKDVLIGLEPTGHYWRKLAYFAKDQGYEVRFIRTTALKHHRELDESSSAKSDKRDALTIANITREGKYIDTVIEDGVVRQLRTLSKLRERLLRYSVGAKNALHAALDDYFPELHEIFWSMNSRSLWAVLDRCPFPEDVVSMKRSILRELIARSSRKKAGAAQKAKALCQSAKKSIGVKRIGSADRYRVKICLQEVKRTVLMLKDIDRQLKSVLKELPSSEYLLSIPGIGPLSAAIFLGELGDPACFQNARQIVKYAGYDPQESDSGYRISRKFISKKGRWLFRKCLFFMSMRVVVLSNYFQEYYQRKLQTKNRFGQLPRRKEILCAVVIKLIKVIFALLRDKRRFQDTVNIAA

SEQ ID NO: 190937 - protein, 417 aa, unidentified
MSRTLTKKMAQVKAGSLHVGVDLGLDRNYAVILTERAQKVDRFSFSNDRQGYDYFLTRLGQMKGQEQSQNVLVGMEPTNYLWKLLASELEQKQQPYYLVNAFTVKKHREGDQLDRSKDDPRDAYTIADLLRTGKFTQTHLLHSNYAELRGYAKASERLQVEVSRLKNLVWAAAGQAFPELQQVFKDLSGQTVRAMLGHHACAVEITHLSQEEFIQGVRHDFGGQRIELGKLRRIYQLAPASVGLREGLESLQLSLQMYLEVLETLEQQLQEVHQTLLKRFRAMPEAQWMLSIPGLGALTAALILAELGDPHTFSGSQEWIKLAGTQPTPDSSGRHTASKTPMSHKGRNALRLHLFMACLRLVRYNPTFSDWYRAYQQRPKNPLRKMQALGAVMNRLLKILWALIRRQERFDPAHFAG

SEQ ID NO: 190938 - protein, 377 aa, unidentified
MNYIGVDLHKDNMTIVGVNEKGEIFIKERIAPKCIGKIDQFFSQDFIHPCKVVCESIGFYHWFYDLICEKVEQFILANPIETKKYSWNNPKTDFKDATKLAFLLAGGEFERNSSLSCYIPDKIERTFRETTRTRFNLVRRKTSIINSARRIFLKNNLAGPTILNYSTLSQFVNKYGYRFNETHRKFLYMFAENLFYLEKQISDIERDIYNFLSMDRFKNIHQILITIPGVGDMVSAVLISEIGNFKRFPDPKFLASYAGVVPRVFQSDTKLRYGKITKQGSVYIRYALINASWVAVREDRKIREIFIRIAKRAGRKKAIVAIGRKILVWSWHLVINNESWQSFNDKFATENRSGMTLKRVLNEIEKRDEIIKKSSIK

SEQ ID NO: 190939 - protein, 420 aa, unidentified
MRNAGIHANSLLEVRRMYNAVGIDVSKGKSTVAVLQPGGTVIRKPFDVSHTSQNLNELADYLSSLDGTTKIVMECTGRYHEPMIKALSEAGLFISIVNPHLIKNFGNNSLRKVKSDPADARKIARYTLDNWTELRQYSGMDNTRTQLKTLNSQFSFFMKQKVAAKANLIALLDNTYPGVNKLFDSPTREDGSEKWVDYAYSFWHADCVRKIGLKAFTERYMSFCKKHHYIFQQDKPEKLFNASKELVAVFPKEKTYKLLIQQSIQQLNLASEHVERLRREMNELASTLPESSTVMGIYGVGKTYGPQLIAEIGDVSRFTHREALTAFAGVDPGVDESGQHKSKSNRASKVGSARLRKTLFQIMTTLLQNAPEADPVYRFLDKKRSQGKPYYVYMTAGANKFLRIYYGKVKECLRNLEQTE

SEQ ID NO: 190940 - protein, 400 aa, unidentified
MSGSRRAFQGFVGIDVSKDKFDACGIREDGAKLFQFSAAMDRNGFEKLKSHLSSVPMGAVLIGMESTASYHVNLFSYLVSEGYAAVVLNPLLISNYVKMQLRKTKTDKKDAWVIAQFLLANRDSLIRRATSPLISDLRELARQRESLVDQMSSLKNDIKRILNITFPELEHMAGIFTKSILKLLQRYPSAYALQEVDPDQLTRMLIEDSYGRKRGAFAEALLKAARSSIGTPSPMKDVILKQKISLHFHLEEALQEITEMLLQTSRGMMGDDMDILNSIKGIGEKSAAGFLIEMGGDIQQFDDPNKIIAMAGIDPAVRQSGKHEGSSRITKRGNRHLRRIIWLMTTQVIHFCDVFRVYYRKRRKDGLPYKKAVLATAHKLIRVIYAMLTQRTVFRPAVNS

SEQ ID NO: 190941 - protein, 433 aa, unidentified
MPTTHPYDLVIGLDRSDRKADLHLIDTRTGNVQKQTVATSPEALHDWLVQLRRDHPQARVALCLEQPAANLIVFLETYSWITLYPINPISLQKFREAFVTSRAKDDGKDAQYLAELLLSHPDKLKAWQPDDSQTRQLQQLVLHRRAVVDQRTGLTNRLKALLKQYFPQALDLCGEDLWRPLATAFLLKWPTLQSLKKARKESLKQFYYLQGSRSQTLIEQRLERIDKAVPLTDELALLQSYTLRVQLLCKELQLLLKTLQQFDQQIAKVFQQHTDRPIFEAFPGAGPVLAPRLLASMGSERERFAQPENLQSFSGVAPVTKQSGGTCSIHRRYLCPKFLKQSFHEYAKESILHSRWAAAYYGQQRNKGCGHHTAVRALAYKWQRIIWKCWQTRTIYKEAIYEAALKKNKSPLIGLLDQIELGKSPVKSRAKKS

SEQ ID NO: 190942 - protein, 393 aa, unidentified
MRRWPRIEAVFRFLPLIRLPAPCNLDFAVSVSAIDADAVADRRSIHLRDTKPVEKLGRLSAVPSNPNSRQGRRRSPIRQGWDRMDAVHVGIDVSKDWLDVHVLPSGEAFRVDNDAGGFDRLKARLCGLKPERVAFEATGGLETPGVAELSAAGLAVVVINPAQVRSFAQALGKRAKTDPIDAGVIAAFAAAMQPELRPLPDSATRLLGDLVARRRQIMTMIVAEQNRLRSATAKQTQKSIKRLLAALRRELESIGADMDGHIRKSPLWMVRQDLLTSMPGVGRTVARTLLAELPELGSLDRRQIAALAGLAPYTRQSGQWRGRSFIQGGRASVRAALFMAGLVAIRHNPTLKAFRDRLIAAGKKKIVAIVATMRKLLTILNAMIRDQKPWSPT

SEQ ID NO: 190943 - protein, 337 aa, unidentified
MNEQATCVVGIDVSKRKLDIALLANSKTKSKVFDNMPAGHRELAQWLLERGTGQERTHICMEATGPYSEAVAIALVESGWRVSVVNPARIKGFAQGELARNKTDRADASLLARFCAAMRPSLWTPPSAEWRELCGWVDRLQALKDMHQQESNRLEAHMATGQASLVESVRTHLDWLMQQIGTLERDIDDHINRHPELKRDAELLRSIPGIGNTTVAKVLAYAGDVRRFANAKALAAFIGVTPRQRLSGSSVRGRTMMSRTGHADLRRALYMPGLVARRHNPVLRVFGDRLRATGLAPKAVVGAVMRKMAHLIYGVIKSGQPFDANFPGLKIDLQDGI

SEQ ID NO: 190944 - protein, 354 aa, unidentified
MSQQLNTKIAVIGIDIGKNSFHIVGLDKPGAIALRQKWSRGQVEAHLANMPPCLIGMEACVGAHHLSRKLKALGHDARLMPAKYVRPYSKGQKNDFRDAEAIAEAVQRPTMKFVATKTTDQLDLQALHRVRERLVSQRTGIINQIRAFLLERGIAARQGQRFLRAGLPTILTTPPDVLSPRMVRIIEGLASNWRRLDERIEGLSSEIKAIACQDSSCERLMSVPGIGPIISSAMVAAIGTGDTFSKGRDYAAWLGLVPKQMSTGDRTILGKISKRGNRYLRVLFVQAAWVVLIKPKSWQRHGLKPWIEAAKKRLHRNVLAIALANKLARIAWSVLAHGRGFEASTINDTATQPA

SEQ ID NO: 190945 - protein, 455 aa, unidentified
MAGQPAKTDERSSVMQIKHERCAGIDVHKKTVVVCCLWVDEQGKDQRETRTYGTTTRELLNLCEWLASLEITHVAMESTGEYWKPVYNILESSFEVMVVNSHHFKQVPGRKTDVKDAEWLAELLCYGLVRGSFIPPLPQRDLRDLTRQRTNLIRERAGVINRVQKVLEWANLKLASVVSDISGVSARAMLRALVNGTEDPAALAELAKGRMRTKHDELVAALSGQVRDHHRFLIRMHLDHLEFLDHQLQPFDQRIEQLIQQHTSLPEAPTPELEETSDSVAVKLPLTWAQALPLLDSIPGIAGQSAELLLAEIGSDMRRFPSAAHLCKWAGVCPGNHESAGKQYSGKTPPANRWLRSILVQMANAAVRCKASYFATVYRRLAPRRGHKRAIVAVAHRLLIAVYHILKQHHPYRDHRTTESGQQRQQQLVQTLQQRIERLGYQVQLTPIATAQSFN

SEQ ID NO: 190946 - protein, 370 aa, unidentified
MSESSTIFVGLDQHKESITVSYVGADRSLEPICLGPIGPRTSDVDAMVRKLQSKGKKLVFAYEAGPCGYGLYRHLTRKGHTCLVVAPAKIPRKPGDRVKNDKRDATNLCRLLRSNDLKCVYVPQIADEAIRDLCRAREDAVSDLKAAKHRIKSFLLRHDIRFNGKADWKTPHLRWLGVVKCETSAQQVVFQEYVRAMAQGFERVERLEIELTQHVQSWRLSPVVESLQALRGVRFTVAVTAIAELGDLTRFEKPRQLMAFLGLHPSEHSTGERRRLGGITKTGNTHARRALVEGAWAYRFPARVSKQIQARQEKLPEAVRDIAWRAQVRLCKRFQKMIARGKNANIVVTAIARELAAFMWSIAKQVPVSA

SEQ ID NO: 190947 - protein, 361 aa, unidentified
MRIIGCDLHARQQSLAMLETTTGEVGNLTLMHEGNEVREFYSELPRPVLVGIEATGSMQWFLNLMEELGIECRVGHPATIRAAAPRKQKNDRLDADLILKLLVENRFPAIWLPTKELLDLRALLLHRHQWVKIRTRIQNALQAIALANGLRRGPGLWSYDGQAKIAFLPLQPHASYRRSALQALYRKMEEEIENLTKQVAEQADQRTRARRLMTHPGVGPVTALATDVFLGDPGRFVDGKALASYVGIIPREYSSGGNQRLGGITKQGSPLLRFLWCEAGAHAVRKDPELKRFYRRKLVQKGLGRARVAVARKLGIRLWIMLRDEIDYEEFCRRGQKHQSGAACAGMLEVAYGANSHRPID

SEQ ID NO: 190948 - protein, 424 aa, unidentified
MNCNQNFKISQVTEGTLVLGIDIGSNTHYVRAFDWRGLELSKVFKFKNSFEGFQSFVLWVNDLCCKYNKSKVIAGLEPTGHYWFSLGELLKENNITIAIVNPYHVKQSKELDDNLQTKNDSKDPKVIAKLVIDGRYSFPYIPEEIYGELRVADKLKNDITQQIISIKNKIHRWLSIYFPEYEKIYSSIDSKSGFLLLKETPLPKDIVELGSEGIVERWKQTKLRAVGLDKAKKLEEAAKKSIGCKNITSSARFEIKLLIEDYEYKQNQLNSITEELNKLCEKIPMIKEIAEIKGIGIATAISFVAEVGDIRRFKSAKQVQKYAGLALKENSSGKHKGLTRISKRGRKKLRTILFRATIPLIGFNKEFSSIYNYYIERKDNPLKKKQALTAICCKMIRIFFTILSKGIKYDETKMLHDIKRPVAA

SEQ ID NO: 190949 - protein, 419 aa, unidentified
MKKSKTKKFKVVNGRTLIVTADMGKDRHFGYWRCPDGTYVKPFAFWNNGRGFQELWDRISHAEKFHNLDDIFFGYESTGPYAEPLVHFMRARGVHMVQVSPMHTKRLKELQGNSPNKTDQKDPKVIADIMALCHALTVVIPEGPAAELRRLTQARERSNERYVSLVNQLHGLVAIIFPEFLQVMKDMKILTSRYLLAQCPAPKDIVEYGLDSLSAMIRQVSRGKLKEDRAKALYEAARASVGVTEGITSILREIGELLVAMDAAEFFTGSLEEMAHYLKQIPYSASILSIKGIKEVTAAGLIGKVGDFRKFQTLSEILKLAGLDLYEISSGKHHGKRRISKRGRHLLRKLLYFAALNTVRKGGIMHHKYQQYLERGMPKTKALIAVARKLLGIIFAIVRDQSIYEKDFSRALTQIKEAA

SEQ ID NO: 190950 - protein, 338 aa, unidentified
MKLYGAIDLHSNNNVTVLSDEQDRVVYEKRLPNDLSLIAEQLATYRDSIQGIVVESTYNWYWLVDGLMDEGHKVHLANTAAIQQYEGLKYTDDQYDARWLAHLLRLGVLPQGHIYPKQHRPVRDLLRKRGQMVRQRTVNLLSIQNLFSRNTGSSMNANRVKRLDSKEIEELIPNADLALAIKANLAMLECADGQVDILEKAVIGRVKLKSEFELLKTVPGIGLILALTIMLETGDIGRFATVGDYASYCRCVGSKKISNGRKKGQGNTKNGNKYLAWSYVEAANFAIRFSAKIKSFYQRKKSKTNGIVAIKAVAHKLCRACYYIMKDQVAFDVTKAFA

SEQ ID NO: 190951 - protein, 420 aa, unidentified
MSFKIIRKNCCGLDVHKTWIYACIGIADSHDRVEYKQARFSSFTKGLNELCDWLAKYNCNDVCMESTGKYWIPVFNILEKHNLWVTLSHPKYTKPQTGNKTDRKDAKWICDLYMCGMVKPSFIPPADIRQLRDLVRYRFKLTCMITGEKNRAHNCLTVSNLKLDDVFSDIFGKSSRSITEQILQHPGEFFDVTPFVDDRCKTPIEEIQAAVDGAISPEQAVKLRQCLEHIDELEKHKSEIEREIFRLSDKYEVALNLIRTVPGFDKNPLTAIQVLSEIGSDMSVFPTAKNLVSWAGCCPRNDKSDRKIKSTRISRAGTYFKPVLVQIANALIKSKKHPEFTNRYRRIKARRGHKKAIIAICRMILTAIWHILTDLKPYTPEGFLESRPVNEAKVLTASQALNLMRQRGYIIKDDMSPVMN

SEQ ID NO: 190952 - protein, 386 aa, unidentified
MQKLNDLSRSLTALEPNGTLIAVIEMSLSSWRVAGIVPGVERQPLKKLAVDESALLKLLHRWREEAEKAGRRIERIAVAFEAGRDGFWLARWLKARGIEAYVIHASSVAVSREHRRAKTDRLDTELLKRSFLGWLRGERDHCKMVEIPTMQDEDAKRPNREHDSLIGERSRIVNRMKAALVRLGIRGFNPKLKRATTRLDGLHTPEGEPIPPNALAELRRDMERRRLVNNQIRQIEEERLERIEQAPCDGAHVMVRLLARVMGVGIETADMLVHEVLSRNMRDRRAVARYAGLTGSPDESGRKRREKGLARSGNARVRRGMIQLAWRFLLHQKNSALTKWFRSRTENARGTRKPMIVALARKLLIALWRLMREGIVPDGVVLRPAQ

SEQ ID NO: 190953 - protein, 326 aa, unidentified
MHNNISRPSYQHFVGVDVGKFSLVFCRHGERQCVEYPNSPEGIRDFFSSHSAWLQNGFFIVDTTGNWERSLIESLLAEGIPVHRTDGRRVKSFARSLGKLAKTDSIDAGILARYGHDRHQDLFLCELADEKVSILQTLVTRRSQLVIYAKEEKQRLSGKVDDRMHELICYNLDQLNAQIEKLNLEIEECIDSDVKMKLKSQIMQESAGIGSKTSAFLLAQLPELGYLNCKEIAALSGLAPHARDSGQMNARRTTYGGRQDVKSVMFLAAINAVRCKDSTLREFYMQLISKGKTKRCALIAVARKMITILNAKIRDTLYPKIKLLSR

SEQ ID NO: 190954 - protein, 401 aa, unidentified
MDAIEHYDAVDVFIGVDVGKGEHHAVALSRTGKRLFDKALPNDETRLRALISSLKEHGKLLLVVDQPTTIGALPVTVARAEGILVAYLPGLAMRRIADLHAGEAKTDARDAAIIAEAARSMPHALRSLRLDDEQLAELTMLCGFDDDLADQITQTSNRIRGLLTQIHPALERVLGPRLDHPAVLDLLQRHPSPASLAAAGEKNLANKLSKLAPRMGKGLAHEICMALSEQTVIVPGTNAATIVLPRLAYQLAALRSQREEVAQEVERLVQAHPLYSVLTSMPGVGVRTAARLLTEVAAKAFTSAAHLAAYAGLAPVTRRSGSSIRGEHPSRRGNKVLKRALFLSAFAALRDPVSRDYYARKIGQGKRHNQALIALARRRCDVMYAMMRDGTLYCPSPLTTA

SEQ ID NO: 190955 - protein, 354 aa, unidentified
MNTTKYIGIDVHQATSVFAIRDHQGKLIGEAVLETKPAAIIDFLKGQRGTVWVTFEEGTCANWLYDIIHPHVAKLLVCDPRKNKLDGNKTDRIDAGRLAELLRLNALTAVYHGQDSTRPLKELARSYVSLQQDSTRVMNRVKAIYRGRGIPCRGTSIYEHKNRKEWLEKLNDKGAQIRAKRLLEQLESLEPLCVNAQKDLVREGRKHQSYKILRRIPGLGPIRVSLILAFVMTPHRFRNKRQFWTYAGFSVVRRGSAEYEITQGELKRSKRKPLPKGLNHNYNHVLKNVFKGAALSAAYRGPFKQLFDKRVANGKAPNLVLLTLARKIASITLALWKKGERFDIKRHRLSEQTT

SEQ ID NO: 190956 - protein, 339 aa, unidentified
MARYVGVDLHRNQFTVCVIAENGREYLSEYRLEQLPRFVARLRATDEVAVEVTGNTRLFYDAVAPHVAKVVVVNPTQFRVIRDSVKKTDPHDARTLAFYLSKEMLPEVRMKDKLHAQLASLTQTRDTLVKQRTALKNKVNNILSAHGINLRKEALTGDSGLDEVLGMKFDPIVMTELRVIVGQIRACNASIAELEKTIKVEGPKLPGHENLRSIKGIGNLGATVLLSVIGDIEDFAHPGKLAAYFGIVPRVRNSNETERSGRITKRGAKLARTTLVQCSLIAMRYSPYLAKFYHKIQARRGTGKAIIALAKKFLGVIYNTLKNNWIFADFPNFVLAEAS

SEQ ID NO: 190957 - protein, 386 aa, unidentified
MKTRNPPIPTRDAENAAVIFVSIELSKKAWLTAVHTPLADKVGLHKLKAGDSASLLALIHRITKKAERTRGGPVTVLSCYEAGYDGFWLHRVLAEAGIINHVIDPASLQVNRRARRAKTDRIDAMGMLRALMAFHRGEDQVFSVVQVPSIEREDARRVHRERQRLIKERIQHVNRIKGLLATQGSYDYEPLRRHRLERFEALTTAMGRPIPHHLRGEIVRHLQRLELVLEMIRAVEAQRDAVVEAGPAANESGRKIQQLVRLRAIGPQFATVLVGEVFYKHFDNRRQVASYAGLSPSPFNSGSLIREQGISKAGNPRARTTMIEMAWLWLRYQPHSALSCWFHERVGTGTGRVRRITIVALARKLLIALWRFLETGLVPDGAELKA

SEQ ID NO: 190958 - protein, 347 aa, unidentified
MKKVTVIGMDMGDKNHKAVGLSEDGEIICRDEVPCTPEDVRAYLKRHPGALLAIETGTHCRWVSKLGLELGHEVLVGNARKLRMIWDSSRKNDWRDAEMLAKVARADRSLLHPVALRGDGDQGLMRLVKSRDLLVKGRTGIVNQIRGFCKSEGVRLPKCSPESFARREHEMPSAVRAVVKPLFAVLKELGKKIALYDKMLADTVRKLHKEEAALLEPVAGVGPVTVAAYLAAIGDVATFGSARDAGPYFGLIPRQDQSGQTDKQLRISKEGNEIVRRLLVTAANYIMGPFGKDCDLRRHGIKIAERGGKNAKKRAKVAVARKLAVLMLAILRTKSAYRPLTEVEAMA

SEQ ID NO: 190959 - protein, 343 aa, unidentified
MRKISTIGLDLAKNVFQLHGVDASGSVVLRRQLRRGAVEKFFAQLSPCTVGVEACGSAHHWARVIGRYGHQVRLMPPAYVKPYVKRNKNDGRDAEAICEAVSRPTMRFVPVKSVEQQATLAVHTARALLVRQRTMVANSLRAALSEVGIVAAQGLKGLRELMARLEAPNEEVPEIMRGALLLLARHWQALDADERALERQIAKAARADREARRLMEVPCVGPIIASTVLAKVPDAKVFRSGRNFAAWIGLTGRDHGTGGKHRPGRISKQGDRMLRALLISGASAHLRHQKARGVSDPWLRDLLARRPYKVVMVALAAKTARIIWAMLVKGEPYRDRASASAAA

SEQ ID NO: 190960 - protein, 354 aa, unidentified
MSKDIMLTVDYHDRACVVRRLDRATGREQVLTEIPTTAASLRRVVDQAWCDVRRQGRVLWIQESTTGWARVQELLADRVDFHLANVLQMPLPPKARRRKTDKVDTARMQREYLAGTLPLAYQPPAAWRRLRRLVAYRESLVSRRTAVRNWIDRFLAHETWFDRTGLWSPKGQKRLRTLLKGLPRTDRVILEQKIEELARLEGQLEVALKELLSAYHDSPDAQRLDAILGIDVVSAVSIVARIGPVARFANAEVLIAFAGLAPGIQESDRTRRDGRIGGGGTDRHLRHYLIEATVWARKLPRYRATYERIKKRRGSKVGRLVVARMLVRSIYKILKDGVAFDPGVSPRVTEAAAC

SEQ ID NO: 190961 - protein, 370 aa, unidentified
MEIIIYVGMDVHKESYSLCCYDPRTDRYLYEHKMKSTTANVLKYLDNVKKQLGDVIFICGYEAGPTGFGLCRDLLRKDIICEVMAPTSLKRNANYRVKNDKIDARLLAKDLFTHDYSPVHLSSQKEEAIKEFCRMRRSLMTELKTAKQVLLAFLLRQGKHFDGKTHWSKEHRKWLKEISFEQPYLQEAFDEYLININELEARLKRVENRLEEISKDEEVESKVKKLICFCGIDTLTAVSIVSEVGDFMRFARAWDFANFVGLSVGEHSSGGKERHLGITKSGNCYLRRLFTESAKSIKKTSMKAKKSKRLIARQEGNDPKVIAYADKCRYRLKYKMINLENRGKAANVASTAAARELACFVWGMMTDHIA

SEQ ID NO: 190962 - protein, 264 aa, unidentified
MTYVGIDVSKVTFVVAYSSVKTNKTRTFKNTVNGVHEFVQTISASEHNCVLEATGNYSALLVYLLSEAGITISLENPLKIKNFARVMLTVTKTDEIDARLIALYGEKMQPAPYKLRSDAILVLKQKRTVLRQLKKQLVATRNLKGSMEVLPFFDPKCKKTIEKTITFLEKQIKEMEEELASLAQGEYKKQMDLLTSIKGIGVTLAAALIVATGRFSYFDNAKQLTRYLGLSPTYQQSGTSVNVKGHINRNGGSSLRSQLYVAAF

SEQ ID NO: 190963 - protein, 337 aa, unidentified
MSDVHILAIDLAKRSFQVCGSDRGGAVLFNRTLSRAKLMQMLGSQARCIVAMEACATSHYWGRVAQRSGHDVRLVPPIYVKPFVKRQKNDAADAAAIAEAALRPNMHCVAVKSAEHQARAVTFRTHQCFVRQRTQLINPLRGHLAEFGLVFPQGPNHLKQAAALLEDGTTEVPETVREIAQLYLDQIDLLTVKIDDLTLRLRDATRDNVEMRRLCTVPGVGPVTAGAVMAFAPDLRTFSSGRNFAAWLGLVPRQRSTGGKTRLGGVSKMGQTDIRKLLIVGAMGRIRWIIRKGVLPDNWLGKLVGRKPRMVAAVALANKMARIIWAIMTREQNYRMA

SEQ ID NO: 190964 - protein, 356 aa, unidentified
MNLPMEEHEVILGVDTHLDMHVAVLIDEVGHVVATHSFPTTTNGYEQLIEWAGSFGRLGRAGVEGTGAYGAGLARHMQERGVKVLEINRPNRSRRRLRGKSDPTDAENAARAVLAGDANAIPKAQSGVVEAMRAVSMARRSAVKAKTQAINQLRALLVTAPAATRAALWKAKPEECVARCARLAPIGDTPLLKALTKTLRLLARRWMSLAKELRQLDAALDELTKRAGHRLLAQFGVGPQTAATLLVTAGDNPDRLRSEAALAALCGVSPLEASSGKTTRHRLNRDGDRAANNALWTISMVRMRSDPRTRAYVARRTAEGLSTKEIQRCLKRYIVRELYPLILADLAVTVRRPSLT

SEQ ID NO: 190965 - protein, 342 aa, unidentified
MSEVTIIGIDLAKRAFQFHGAGSNGSVLFRKKLSRGQVLAFIAGQPRCVVAMEACATAHGWGREFEKLGHEVRLIPPVYVKPFLKRQKNDVADAEAIVEAALRPTMRFVAVKTETQQARAMLFRTRQMFVGQRTQMINALRGHLAEHGLVAARGPAHLKRFADAIADYDSALPKEVRELGQVYLEQIDGLTARVSDLDEKMKRAAKEADLARRAQTMPGVGPVTALAIETFAPDLATFRCGRDFAAWLGLVPKQHSTGGKARLGKTSKMGQRDIRTLLVSGAMAVLQAVERFDTPHNGWLKRLLARKPRMVAAIALANKMARGLWAMMTKVEDYRNPVAAMA

SEQ ID NO: 190966 - protein, 405 aa, unidentified
MLNAVGIDVSKGKSTIAVLRPAGEIVRKPFDVRHTPKELSILSSYIQHLEGDTRIVMECTGHYHEPILKVLSDSGFFVSAVNPHLIKEYDGDNSLRKVKSDSADAKKIAGYTLDKWHLLRQYSAMDNTCTQLKTLNTQFQFLMRQKTALKNNLISLLDLTYPGVNAFFDSPVRKNGSQKWLDYAYSFWHADCVRTIGLKTFTERYKKFCKRHGYIFQPDKPKSLFESSKELIAVAPKDHIYKDMVLSAIVQVNLISAQIESMRLKMDELASTLPEYEVVMNMFGVGHTFGPQLMAEIGDISRFNHRSALTAFAGVDPGVNQSGKMKIDSNRASKRGAPRLRKTLFQIIQTLMQNAPADNRVYLFMMKKKAEGKPYHVYMTAGANKFLRIYYGTVKAHLASQSQTE

SEQ ID NO: 190967 - protein, 410 aa, unidentified
MLFVGNDWAEAHHDVELVDAEGRVLVRRRLTEGVSGLAGLHALIADHLGDDDEPDQVLVGIETDRGPWVQALIAAGYTVYPINPLQVARYRERHGVAGTKSDPGDAHVLAEIVRLDRTHHRPAAGDSMVAEGLRLATRAHQTMIWTRQRSANTLRSLLREFYPAALVAFGDDLAGRDALAVLAAAPDPRRARNLSSRQLVSLLRKAGRQRNLDRRAGEIVAALRTEQLAARPGLEPIYAASVSALVAVITEMVTQTVVLEEQVRLGFGQHPDAEIYASQPGLGPILAARVLAEFGDDPDRYLDARGRKNYAGMAPITKASGTRRVVLARYVRNRRLADALYQQALSALTGSPGARAHYDRHRARGATHHQALRALANRLVGILHGCLSHHTLYNEETAWPTALNIDHVAA

SEQ ID NO: 190968 - protein, 424 aa, unidentified
MKNNSAKKLKQVPEGYLIVGVDPHKKKHAAVAITQDFTLRDRFKFDNTMEGLEFLLRRVRAEMVKSGCRGVMFAIETGGHYWRNIAYYLDERGIPFRFINQFTLKRRREGKDLNRRKNDYRDGEVAAQLLCTGEFTESKLPQGVYAELRTSHNAYQRLVKERTRITNLVKGLLDALFPEFTQVFKDPSGVTALSVLSTCPIPRVMAGMTEDEFVAAIEARHKGRRLMRKKLRALHYSAKTSIGIDAGARSVSSEIVFLVDKLELIRKHICIMDGTLVRLVDETEEGKYLLSIRGLNYIAVAGLLAELGCFKAYRSAKQMIKMAGSNPTESESAGKKRSRTPMSKQGRPLLRYCAWTSVIPMLRFNTDFRAWAKQRRERPAHANPLSGREVVGAALNRLLRLAFALVKNQSYYHDIKPALTPVAV

SEQ ID NO: 190969 - protein, 355 aa, unidentified
MQKYKVSFKGQNIYVGIDVHLKTWHVTTLTESGCKYSFAQHADAKELFDRLNKKFPEAHFKSAYEAGFCGFSAHYALTDLGIENIVVHAADIPTTGKEKAMKTDAVDSEKIAWALKRGELRGIYVKDKRYMDDTNLMRLRQRFIMDLSRQKNRTKHLLYTQGVTYPERFRNCRTHWSRNFMKWLREEVELLSDQKMSLLLLCEQVENTRKAILKVTREIRRLSTTDRYKENYDLLTSVPGFGLTTSMMILTEFDNDIMRFPNERRFVSMLGLIPTCHDSGEKKVSGEKINRGNKRLGPLIVEASWVAIQRDLELGAYYSNCCQIMKPHKAIIKVARKLACKAYAVLKTKTRYVLP

SEQ ID NO: 190970 - protein, 339 aa, unidentified
MIGLDTSKSVFQIHGVNEAGKAELKRKVRRSDLIAFFEKQPRCMVVMEACGAAHHWARILSGLGHTVKLIAPEAVKPFVKKGKKNDAADAAAICEAASRPDVKFVPVKTVAQQGILALHTTRALLVKQQTMLANAIRGLASEFGHVVPKGLHNLEPLVEIVDADDNMPAQARQAIAELQKRFGELANGIQSCEAEIVKHARTDPTAQRLATIPGIGPITASLIAATVVDISRFKTARQFAAWLGLVPRQHSTAGKTRLGRITKAGNKEIRKLLVLGATSMVGRAEGWHSALGAWLRDILQRRPVRLVTVALANKMARIAWSVMTRNEVYRPTGGVAAKA

SEQ ID NO: 190971 - protein, 349 aa, unidentified
MQFYTGQHQYYCGIDLHARTMYVCILDSNGAIIAHRNMASAPEPFLTFIAPYRSSIVIGVECIFTWYWLADLCAREQLAFVLGHALYMKAIHGGKAKNDKIDSHKIAALLRGGMFPQAYVYPAEMRATRDLMRRRNHLMRKRAELLSHLQNTNSQYNLPEFGSRISRRPDRQRMDILERFADPQVRKTVEIDCELLDFYDDMLPKLEWHIQTCAREHDPKTLALLKTIPGIGNTLALILLYEIHDIGRFPTVQDFMSYCRLVKCSRESAGKLYGHAGSKIGNVHLKWAFSEAAVTFLRGNQEGQKLHQRLVKKHGKGKALSILAARIGRAVYFMLSREKVFDRDKFFAG

SEQ ID NO: 190972 - protein, 392 aa, unidentified
MVVSVGIDVSKDKHDCFIVSSDGEVLADVFTISNTLDGFHYLLQRIQDCTTPKDKIKVGLEATGHYSYNLLGFLLDNGLTTYVLNPLRTNLYRKSFSLRKTKTDRVDARTIASMLLSDVGLKPYTDTAYHNEELKSLTRYRFDKVKERAKLKSSIARLVCILFPELEKLVPSLHIASVYALLEEFPGAKQIAAAHLTRLKALLETVSKGRYKRDVTLEIRNAARNSVGSWMPAKSLELQHTIRLVHELDSEIAEIEKQIQSLMDELDSPITTIPGLGFRMAAMILAEVGDFTRFDSPDKLLAYTGMSPSTYQSGQLKNCYPHMEKRGSRYLRYALYNATKYVCHWDPTFAAYLSKKRAEGKHYNIALSHAAKKLVRLIFAMEKSKQPYCPAA

SEQ ID NO: 190973 - protein, 347 aa, unidentified
MRFYTKTHKHYCGIDLHARTMYVCILDQEGQVLLHRNLPCDPERFLRTIAPYRDDLVVAVECIFTWYWLADLCAQEGIAFVLGHALYMKAIHGAKAKNDKIDSKKTAALLRGGLIPQAYVYPPEMRATRDLLRRRLHFVRHRGQLLAHIQNTHHQYNLPAPGKRIAYRSNREGIGEGFEDVSVMKSLEADVALIDHYDLVIRDLELTALRQARGHDLDSYERLKTIPGIGKVLALTILYEIHDIDRFPRVQEFASYSRLVKCQKSSVGKVLGTSGSKIGNAHLKWAFSEAAVLLLGKCPEGKKVLARIERKHSKGKALSILAHRIGRAAYFMLARKRAFDLERFVRS

SEQ ID NO: 190974 - protein, 405 aa, unidentified
MIFVGIDWSEEQHEVELMAAAGQRLRSLRIGHGVEGLAKLQETISEFASDPSEVVVGVESDHGLLVNALVGSGYQVYPINPLTAARYRDRHSLAGNKSDRRDAQMLANVVRTDRHQLRPLAGDSEPALEIRARARAHLRAIRLQGQLRNQLRSLLLEFYPAVVPLLAEDDIRDALAVLAVAPTPALGRGLSLSKLAATLRRHGRQRNLAPRAQEIQGRLRAPQLDLQRPRLIAAHGDEVASLTRVLLQVRQELAQLEAQMAAAFRGHPDAQILLSFTGLADILGARVLGESGDDPTRYADATARRNYSGPAPVTRASGKKREVTRRVARNRRLADATFCWAESAVRHSPGAREFYRRLRRRGQPHNQAIRVIAYKLVGKLHACLRDRTLYDEHRAWSTDLTQCAA

SEQ ID NO: 190975 - protein, 326 aa, unidentified
MKAAVTVGLDIAKNVFQAHGVDADGAVVFRKRLSRLKVSEFFSELPPCLVGIEACATAHHWARTLRTLGHNVKLMPPAYVKPYVKSQKNDAADAEAICEAVTGPTMRFSEVKSVEHQSVLSMHRLRAMLIRHRTRLANTIRAHMAEFGVVAPIGRMGLERLIHIICDEADDRISPRVRRALGHLVNQHDQQVMQILDLDRQIVAWHRSNEVSRRLATIPGIGPLAASALTATIGDAKIFRSGRALSAWLGLVPRQNSSGGKERLGAISKRGDGYIRGLLVVGSMAVIRYAQRHGSKRPWLVKLLERRTAKMPRSRWRTRLREWSGR

SEQ ID NO: 190976 - protein, 344 aa, unidentified
MFYAGIDAHMKSSTIWIVDRKGRKVSSSTVLTSAEGFAAGLGRWVRRGLKAAIEASGITPWVCQLLKDLGVRVVVVNPNRVRLIAESRKKADRVDAETLAELLRLGGLPEVHQPSLEARRLRTELSVRRQLVRQRTGLINQARGLLRGWGVMLPVRFFQSRGGWKDLQAKRLPEYLRSLLETMKGVYEQLTQAIRQVEMTLKQREHSDERVARLETIPGVGRVSALTLVAAVDKIARFGRAKQLTAYNGIVPTVRSSGEREQQGSITRQGRSEVRAVWIQAAHSLVRSRAPGARPLQKWFWKVARRRGVRTAIVALARKMLSLAFYLLRDGTRYEPLRLRQAAA

SEQ ID NO: 190977 - protein, 327 aa, unidentified
MQHDSAQRDPNLSAVIGVDVAKATLDCFFDLSGQHFQLANDDNGIAQLLSHLRPLQVQLVVIEATGRLHRQVAAELLQAGIPVALVNPQRAREYAHSIGKLEKTDRVDAKVLAGFGRAAQHHILQKPSEKQVELNDLISRRRALVQMRVAEKNRLAESQQPKLAKTQAKQLLRLIDQQVQDIDRAIAKLIDSDDHWKRKSEIITSIPGVSTGTANQLLADLPELGELNRQQIAKLSGVAPLANDSGPRRGQRSIKGGRQPVRNALYMAAFNAIRYCDRFKQFAKRLTDAGKPFKVVVTATMRKLLITLNQMVKTNSVYTPKLIASLP

SEQ ID NO: 190978 - protein, 342 aa, unidentified
MSGDYDGRQYVGIDLHRRRSVIVRTTEQGEQLGWVRIDNDPVALGLELAKAGPDPEVVLEATYGWYWAVDALQTAGAHVHLAHPLGVKGFAYRRVKNDVRDAADLADLLRMHRLPEAYIATPQERELRELVRHRAKLVALRSGLKAQVHATLAKQGQLPAASDVFGRAGTAWLRSAPLELVYRQRIDSLLELIDAYDGEIETFRTMIANRFTGHRGYRAIQQISGIGPTFAAVFVAEIGDVTRFSRPEKLCCWAGLTPRHRESDTTVHRGPITKQGSKLVRWAAIEACQHTRAGTKLSADRSRIIAARGRNVGIVAAARRLLTLVFYGLRDGEIRALAARAG

SEQ ID NO: 190979 - protein, 411 aa, unidentified
MDIVVERCCGLDVHKDTVVACVRTPGKGGKRAQQTRTFGTMTTDLLALRDWLVEMEVTLVGMESTGVYWKCVFYVLEDAMECWVLNARHLRNVPGRKTDVADAEWVCQLVEHGLVRPSFVPPKEIRELRDLTRYRKAQIDERSREAQRLDKVLQDAGVKLSSVATDILGKSSRDMLEALVSGTRDPEILAELARGVLRKKIPQLRLALEGRFSTHHALIVGQILAKLDFLDEAIGTLSGEIDRVIAPFGAEVELLDTIPGVDRRIAECLIAEIGTDMGRFETSARLASWAGMCPGNHESGGKRKSGKTRKGSKWLAANLAQAAEAAGRSKDTYLGAQFTRLRGRIGHAKARKAVEHSILVAAFHILAGGVPYADLGADWFQRRRPEAHARRLAHQIEALGYRVTIEAAEAA

SEQ ID NO: 190980 - protein, 353 aa, unidentified
MNDSHSIAWLGLDAHSKNCVLGQLDDHGTEIKWWGFPTKPEQLVQHIKAIPATEKHLMLEESNLARWLSQLLKPHVQQLVVCDARRNRLISQDHHKHDKRDAFALARLLRLNEFKPVWQPTEDQRVLFKRVAKSYENAVQRQTRLKLQLKSLFQHWGLFPTGATIYSKPGRVAWLKQLPYDTLRAQALLLYELLDQALAGQTQFRRLMCQTGRQFPEIQRLSTTPGVGLVGSHLFVAYVQDPKRFPKFGRLTRYCRLGIRDRTSDDKPLGYQQLDREGIGTLKAISYRAYLQAAKRRTGPVWEFYQLSLRQTGSTTHARLNTQRKILLTLWTLWLTGREFDPDQFSRAQPLDV

SEQ ID NO: 190981 - protein, 325 aa, unidentified
MVLIGCDFHPSWQQVSWLDRSTGETGDQKLVHAPGEVEKFYRQFPAGTVIGMEATGNCQWFLELMASLGHEVRIGDAAKIRASDSRQQKHDKRDAQLLLKLLHEGRFPQIWTASIEQKDLRQLLIHRHKLVGVRTQVKNGLQHLAMNQGVLRKRKLWSKAGEKVLRELPLRPWASRRREDLFKVREMLNRQIDRLDGAVVEAAEKNEKARLLMTQPGVGPITALAFVLTMGDVSRFQRGKQVASYLGLIPREYSSGGHQRLGSISKQGNTFLRMLLVEAAQIAVRYDPGLRNEYLHRCHTKAKGVAKVAAARKLAILSAPMQKSP

SEQ ID NO: 190982 - protein, 422 aa, unidentified
MLAESVDDEEIIARVAALDIGKAELVCCVRVPAEGGAKRRLQEVSTHSTMTRSLGDLANRLVDLRVERVVMEATSDYWRPVFYMLEAHGLQPWLVNARDVRHLPGRPKTDVLDAVWLCKVAERQMLRSSFVPPRPIRRLRDLTRYRIDLVGTRTAEKNRVEKLLEDACIKLSVVASDIFGVSGRAMMAALIAGERDPKVLAEMARTRMRVKIPQLVEAFTGHFDDHHRFLLAQMLARIDGIDADIAVLDAEIEAHLVPFKVAVERLDEIPGIGSVAAAVIIAEIGVDMTRFPTAGHLCSWAKFSPGIKSSAGKNKSNGSTGHGDRYLARVLGEAAPIAGRTDTFLGERYRRIARRRGKKKAIVAVGRSMLVIIWHLLADPETRFNDLGADYFTRHVNTETKKRQHVRQLEALGYRVTLEPAA

SEQ ID NO: 190983 - protein, 451 aa, unidentified
MSDLPVLDARAAFVDVGSEQMHVSVAGGPPQVFGAVTAQLHALRDWLKAQGVRSVAMEATGVYWLPLYGVLEAAGFEVRMVNGRQTRNLPGRKTDMQDCQWGATLHSHGLLRAGFVPPAHIRRMQDYMRLRADHISMAATHVQHMQQALERMNVKLHDVIAKLTGVSGLAVVRAILGGERDPQRLLARCDTQIQRAKAERVKESLRGTWTEEHLFALSQALQSWEHYQAQIAECDRRVEALLHDIDPGQPPNACALATRPSRPGVNAPNIPDLRAILAQICGGQDLTQLPAHTEYGVLQVIAEVGTDLTPWRTEKHFTSWMGLAPGSHQSGKRKRSAKRSRNRAGRLFCVIARSLARSKDIALGGFYRRMAARRGGLVANIALARKLAALFWRVMVKGMDYVELGLQQYEAKVLETKQRSLRRLARQLGQQLVPMTTPAPTKGPSANNATL

SEQ ID NO: 190984 - protein, 329 aa, unidentified
MLFIGDDWAEAHHDIEIEDEAGRLLVRKRLAEGLAGVTLLHELIAEHLDPSGEPDQVLVGIETDRGPWVQALLATGYLVYAINPLQVARYRERHSTSGAKSDPGDAHLLAEIVRLDRAHHRRIAGDSEIAEHVKVAARAHQTMIWSRVRQVNTLRSLLREYYPAALAVFGTDLASPDALAVLAAAPTPELGRRLSQARIETLLRKAGRQRNIAATAARIKTALGSDQLTARPGVVPAYAASASALVAVLTTMVTQTEVLAGQVEQGFGRHPDVEIYRSQPGLGVILGARVLAEFGDDSDRYADAKARKNYSGMSPITRASGTKRVVLAR

SEQ ID NO: 190985 - protein, 352 aa, unidentified
MERYTKRIHEGMKIFIGIDMHKTSWHITIFSEAVEMWHGSVPGKWEALKDILNRYRGCQICAVYEAGCFGFWLYDRLTDHGVKCIVTPPSLVPSEYGNKVKTDRRDSRKLAQFLQKDLLKEVHVPTEEERYHRQVFRRRRQLVEDRVRTQHRIKSELRFFGIEIPNMRGPFSRTYINNLRGLRLGDRFLEESFHHLLDEYEFLGELIERQTRLIHEIAALELYKNRVAILTRIPRIGVLTAIEILVELMDVSRFQRPEQLAAYVGLTPSQYSTGEKVRMGHITGVGKSHLRATLIEASWRLVSRDENVRSFYEQLRARAGAKRAIVAVARRLIINIRNMLLTQTMYSKKAVA

SEQ ID NO: 190986 - protein, 410 aa, unidentified
MNAVGIDISKGKSMISIIRPFGEVVAKPFEISHTIDDLDSLANYLQSLDGETRVILEHTGRYYEPVVRKLHEAGIFVSAVNPKLIKDYGNNSLRKVKTDKADSRKIARYGLDNWVELRQYTDMDTIRYQLKTMNRQFGLYTKNKAALKNNLIALLDQSYPGVNTLFTSPVREDGRQKWVDFAASFYHVDCVRSGNLNAFTERYRKWCKRHDYNFSQTKAEEIYTASKKLIPMLPKDAMTKVLISQAVDILNAVSETVESLRQEMNKLASQLPEYLVVMAMRGVGTSLGPQLMAEIGDVTRFAHKGSLVAFAGIEPGANQSGTHEAKSVPTSKHGSPELRRTLFLVMEALLQTKPIDDPVYLFLDKKRAEGKPYYVYMTAAANKFLRVYYGRVKEYLTGLKELADSTTSAT

SEQ ID NO: 190987 - protein, 447 aa, unidentified
MDNERTDLHDGGRLQLPNLKLPQQPEVTLGRYAQMRRETICNDPQVCRIVDLPVYYELETNNGNRDYRIQIGGHYMNYNTVYVGMDVHKESFTLCSCKYEDEKASHYQRTPASYKNVLRYLAFLRTIYGEDTRFVCGYEAGCLGYSLYHQLENFNVECVILAPTTMLEQRSKRRIKTDKRDAEIIARSLAQHNYSPVHIPTETDNQTKEFIRMRDDHKAELKKIKQQILSFCLRQGYQYDGSGNWTAKHVKWLRSLKPAGLYKEILDEYLLTYTILTDKLNRLDQRIEELASKEEYKESVSKLTCFLGIKTHTALSVIVEVGDFQRFVSARKFAGYLGLVPGQHSSGDDRNGLGITKAGNTHVRRLLVESAQSYTRGKIGYKSRVLRSRQAGNSPQVINYADRANERLRRRYYKMVLKDGKKYNIAKTAIARELACFIWGMMTDNIY

SEQ ID NO: 190988 - protein, 407 aa, unidentified
MLNAVGIDVSKGRSTVAVLQPGGVVVRKPFDVYHKQSELQELSSFIKSLDGETKAVMECTGSYHRPIVEVLHRAGIFVAAVNPHLIKNFGNNTIRKVKTDPADSKKIARYTLDNWDRLQEYSGMDAKREQLKTMNAQFDFFMKQKTAVKTNLISLLDNTYPGVNDLFDSPVRSDGSEKWVDFAYSFWHVDCVRKLTLNAFRDRYMAFCKRHGYQYSESKADEIYNASKELVAVFPKEEGYKQLIQFSIKQLDLESEHVEKLRADMNELASQLPEYSVVMSMYGVGPTFGPQLIAEIGDIMRFTHREALTAFAGVDPGKDDSGQHNSKSVSASKCGPARLRKTLFQIMSTLIQKMPPDDPVYKFLDKKRSEGKPYYVYMTAGANKFLRIYYGKVKEYMRSLETDQSQS

SEQ ID NO: 190989 - protein, 392 aa, unidentified
MNRIVYIGMDVHTSNYTLCSLDPGYGVEKDNYFAEVQFTNDFIKNVVNYVTNLKKKLKDCEFVCGYEAGCLGYSTYKDLTKVGIKCVLMAPSTMAVQKGGKKVKNDRRDARVIAQCLAYQTYKEVYVLSEHDEAVRGYLRMRDSHNKALKRIKQQIIAFCTGHGLFSPTKSNWTVAHLKWLKDLKFNDPVEQEILNEYLSSLTFLSDKIKAMDVRIEELASEKQYCENVKKLRCIKGIETNVALTLLAEIGDFNRFSKPTNFASYLGLIPGEQSSGDKVRGTGITKAGNSTLRRKLTESAKGYWRGRIGIKSATFKKLEKELPKEVTEYALKANTRLQRKFFNMTHVKGKNMNVAESACAREMACFVWGLITNHYDKAPAVPKTDEELLDLN

SEQ ID NO: 190990 - protein, 370 aa, unidentified
MLDTTTFIGLDVHARSIKAVSLDVMTGEVRAATFGYDAGAVAGWVRSVDPRARCVYESGVTGFDLQKRLSGLGVDCVVGAVSKMIKPSADRRRKNDRNDAEFLARMLSVGNVVEVWVPDDECEAARDLTRALEDARDDLSRSKQRLSKFLLRHGLVFDERTPTGRRKGNWTRAHWSWIESIRFAERADNDVLAYYVDAVRRAAEEKARLEGLVEAEARKPRWRKRVDSLRCLRGVDTASAADLVFEAGEFSRFRNARSFAAWVGLTPSEHSSGESDRRGAITKAGNKHLRKTLVEAAWHYLTCSGRPKGLAKGQAPDRGARRHAAKGVRRLVERREALLARGVHGNKANVATARELACWVWAVGLMAEEA

SEQ ID NO: 190991 - protein, 348 aa, unidentified
MVLIGSDFHPSWQQVSWLNQETGETGDVRLVHEPGAVEKFYRQFPAGSQIGMEATGNCQWFVERMARLGHEVLVGDAAKIRASDARQQKHDKRDARLLVQLLVENRFPQIWVPSREQKDLRQLLIHRYKLVRIRAQVKNGLQHLAMNQGVLKKHKLWSVAGQKVLRELPLASWASRRREDLLKMMSELDAKVDLLDQAVSEAAEKNEKARLLMTQPGVGPITSLAFVLTMGDVSRFPRGKQVASYLGLIPREYSSGGHQRLGSISKQGNSFLRMLLVEAAQGAVRCDPEFRNAYMHRCHSKPKGVAKVAAARKLAIRLYWMLRTNTGYPEIVRIGSSSRVALVVRHGG

SEQ ID NO: 190992 - protein, 357 aa, unidentified
MKVTTIGIDLAKDVFGLHGVDGQGRVAFKKRLVRSRLLEFMSQLPPCLVGLEACSSAHYWARKIERLGHRVRLMSPRFVKPYRKSDKNDANDAEAICEAVTRASMRFVPIKSEAQHEVQALHRVREQLLKSRTALVNQVRGLLAEHGIVAPQGIARARRLRLEILADPERHGLSGLFRETLQEIAERLRFFDERVGAYDDRIERVFKEDERCRRLAKIEGVGPLVATAVVAAVGNASEFKSGRELSAWVGLVPRQHSSGNRSQLLGISKRGDRYLRTILIHGARAALRRADHKRDQRSRWAMRIKLARGYNKAAVALANKNARIIWALLTRGENYRPPAISVASPTADRISLTQVQA

SEQ ID NO: 190993 - protein, 364 aa, unidentified
MDPALPAESNVGRELQRGRIIMQVVRIGLDLAKYVFEVHGVDGGGNVVMRKTLRRGSVSTFFANLPHCLIGMEASNGAHYWARVLTDLGHEVRLISPQFVAPYVKSNKNDRNDAEAICEAVGRPTMRFVPPKSPEQLAIQALHRIRQRLVRSRTRLVNQIRGILAEHGIVIARDIWRLRRALAEITGNASDGLDALVRMLIVEVQVELLELDRRIASCDRRIQELYRTSELCQKLGEIEGIGPVTATALVAAVGDRSCFKNGRQFAAWLGLVPKQRSSGGRNRLFGISKRGDRYLRTLMIHGARAALGKAGGKQDPRSRWLASLRQRRHPNVAAVALANKNARIAWAVLAGNVSYEPALSVLAA

SEQ ID NO: 190994 - protein, 343 aa, unidentified
MQLVTTIGLDIAKSVFQVHGVDAAGQVVIRRQLKRRYVLMFFQKLPPCLVGIEACASAHHWSRELKALGHRTRLIPPAYVKPYVKRHKNDAADAEAICEAVSRPNMRFVATKTPEQQGCLTLHRTRHLFVRQLTSVINAIRAHLAEFGIVAPVGRNGIEELLYVVSDASDRRLPEVARACVAALGTQLRMLKAQILQFNRMIMAWHKSNEASRRLDDIPGIGPVLATALVASVADPKMFRSGRDFSAWIGLVPTQNSSGGKDRLGSISKRGDRYLRNLFTTGALAVIRYAKIHGTRRRPWLTALLARRPTKVAAIALANKIARMAWAIMAKDERYKEPAALAA

SEQ ID NO: 190995 - protein, 416 aa, unidentified
MFKIIKFNCCGLDVHKTWIFACIGITDPNFRTEYFEARFSSFPKDLRRLAAWLQEHKCEEVCMESSGKYWIPVFNVLEKTCKVTLAHPKYTKPQKGNKTDRKDARWICDLFMCGMIKPSFIPPPAIRHLRDLIRYRFKLTNMLTSEKNRAQNCLTVSNLKLDDVFTDVFGKSARSITEYILSHPGEKFDVTPFVDKRCKTPIDQIQAAVDGAISPEQAVKLRECLNHIDELIAHRDRIESEILHLVEPFSVQLDLIRTVPGMDKDPMTAILILSEIGSDMSVFPTAKNLVSWAGCCPRNDKSAKHVKSTRIAQSGCYLKPLLVQVANALLHSNKHPEFTERYRRIKSHRGHKKAMIAICKMLLTAIWNILSTGEVYNPSGYLIQTPRPTNETKVLTQKQALELLRLRGYVIKEEPA

SEQ ID NO: 190996 - protein, 344 aa, unidentified
MQKQSYVGLDVSLAETSICVIDETGARLFEGKVITDSAAIAATVRRHVVGQVVRVGLETGTAAGWLWRELIALGLPAVCLDTRHAHRALSLRVQKTDKNDARGLAELVRLGWYREAKVRSVDAQFVRSLLMARRQLLAIKRNLANQLRNVLKTFGLTRTSTAGRGWLAKVRAITAENRWVAPVVEPLLKICAELDVQLAALNKQLLILAKEDPDVRRMMTVPGIGSLTGLAYKAAIDDPSRFTSSSSAGPYLGLVPKVHQSGETEWTGRISKTGDELARTYLYEAAGVLLFKVSRWSALRAWGMRLVQRIGLKRAKIAVARKLAVLLHALWTDGAEFEWRAAQP

SEQ ID NO: 190997 - protein, 342 aa, unidentified
MSEIITVGLDLAKNVFQAHGADGSGRAVLRKKLRREQVLEFFGRLPCCVVAMEACGGAHFWGREIGKLGHEVRLIPPAYVKPFVKRQKNDAADAEAICEAALRPTMRFVPVKSEETQGAAMVFRVRELLIRQRTQAINALRGHLSEFGQVVPQGAANATKLIAIIEDPECDLPADAVPTLKVLVVALAQLEAEIGKLDAEITRRAKENDVARRLMTVPGIGPLIATAIATLAPPPETFRKARDFAAWLGLTPRQYSTGGKQRLGATTKMGERSLRRLLVIGANSVIIKRHVHAEARPGTWLAGMLSRKPPMLVRVALANKMARIVWALMARGGVYQPPAAAA

SEQ ID NO: 190998 - protein, 421 aa, unidentified
MKQKDNADRDDRYAAWVGFDWGDQEHVWALQWTDTGERERGRLEQTPEALDVWLGQLMSRLNGRRIGVAIEQKHGAVVWMLLKYECVEIYPVHPQAAGQFRQALYPSGSKSDPADGELLLELLVHHRDRLRPLEQDDEPTRRLLMLVEQRRHWVEEKKRHGDRLSARLKVYFPQVLNWFDDIGAAPVLDLLARWPRLEQLQKAQRKTLETFLRQHRRTPEEAAAWAKQVSAAIPAVQDSVLLDSYVLEAAALVALLKQMQTSIKKFDTAIAETSRQHPCWAIAQSLPGAGPVMAPRLLAAMGNGTRYQTAHEMHCATGIAPVTVASGRTRIIQFRRACPKFLRQTFHEWAQHSMKSCLWARVYYDQLRTVGKRHHAALRALAFKWQRILFRCWKDGVAYDESKYIASLKKRNSPLSAGLPE

SEQ ID NO: 190999 - protein, 412 aa, unidentified
MQTLIERGCGLDVHQATVVACLLMVRRDGKVQKQMRTFGTTTRELVGLREWLLSEGCTHAAMESTGVYWKPIYAILEGALEIVVANAQHIKKVPGRKTDVKDAEWIADLLCHGLLRSSFVPPKPIRELRDLMRYRRKLVESQAAERNRLLKVLETANIKLANVATDVFGMSGRLMLRALIAGKATPQEMAELAKGLLRKKIPELQLALEGKLEQHHRFLLELQLQRLEAAEKDLAVLEQHIRQMLEPYAAQLALLDEIPGVDWTLAAVIIAELGVDMSVFGNVSQLASWAGVCPGNNESAGKRKSSRIPSGNVYLKSGLVEAANAAARAKGTYLRDKFFRLKARRGYKRAVVAIAHKILVAIYHMLSQQVSYNDLGDLYLDKLNKNHLTRNLVHRLERLGYAVTLTLQQKAA

SEQ ID NO: 191000 - protein, 345 aa, unidentified
MQTMYYIGLDVHKRTISYCVKDGSGVIHAEGTIPATRLNLDLWMKTLPQPWTAAMEATVFTGWIYDHLQPHAAALKVAHPLMLRAIAAAKKKNDRIDAKKICDCLRCDFLPECYMASTAIRERRRTLRYRHLLVRQMVQMKNKIGMLLMEAGVNYNKQRLHKAGYFRELLATNPDIPEGLRSLLRLCREMVVRLQKTESALVCSLEQDSLLMDRVERLMTIPAVGPITALTWALEVGDAKRFSSIKKAISYCGLCGAEKSSGNTMQRTPLSKQRNKHLQTTLIEAAKMAPRNSPALALLYDREKQKGNANRATLAVARKLVAYLMAVDRGQRNFQVVERSNSIAA

SEQ ID NO: 191001 - protein, 356 aa, unidentified
MTKVTARFENQKVYVGLDVHKRSWNAAIYLNDQFIRNIHQPPQPQALHHYLTHTYPGARYSCAYECGKFGYWIQREFDQLGIECLVVNPADIPSTHKDEVYKTDSRDARGIGEALSKGQLRGVYIPYEEQEADRHLVRQRKKIWRDLVRCKNRIKGFLDYKGIEVPPQYDNANWSRNFITWLSKLEFAHSSNRVTLDYQLTEMELLRKELLSISNAIRKLMRSKKYNRLYYLLRSVTGIGPLTAASLLTEIGDMHRFKNFYHLNSFIGLLPMEHSSGERELKGRITVRKHRQLRSDLVECAWTAKRTDPALALYYSEQIKRGKNGKAAIVKVARKLLSRIRYVWVSGEPYQPAVVK

SEQ ID NO: 191002 - protein, 329 aa, unidentified
MDNYKIYIGIDVSKEYFTSTVLFGDKKETFKIISKPEEFEKKVKNYLKDLEKSDILILMEHTGVYHLPLAEYLAQRGYSVGIINPYSMKNFIEAKMSRVKTDKVDSTYIAEYGKRFFEGKLFKPKTEAQKQIEAKLRILEDFQKQLNMLKNQREALKWVPMKRPDKNLAYYDEVIKLLKKKIKEIEEEIEKLCKDNYPREYELLSSIPGIKNRAISMILSMLRGFEGFDSAKKVGSFIGICPAPLESGSSVRGLGGIKKRGSGYVRRVLYLCGLSAIRANKYCREFYQRLISKGKAKKLALIAVGYKLIKQAFGVLKSGQPFREDLLTT

SEQ ID NO: 191003 - protein, 338 aa, unidentified
MELYAGIDLHGNNSVVTVLDEQDRTIYAKRLANDLDLIVAALRSCVGTLHGVAVESTFNWYWLVDGLQAAGFSVHLVNTAAVKQYDGLKHGGDFSDARHLAHLLRLGILPEGYIYPREERAVRDLLRKRSQLVRQRTSQVLSIENLVARNLGARVGGNEVKRWTAQHVDTMELLDEQKQALKANVAVMHCIDDQIEQLERSILVKAKLRADYKALKTVSGIGQVLALTIALETGDVGRFAGPGNFASYARMVDSRRESNGKKKGVGNTKCGNKYLAWAFIEAAHFAVRYDAAIKRWYQKKSANSLSVVAIKAVAHKLARASYHVLKDGTPFDAAKAFG

SEQ ID NO: 191004 - protein, 474 aa, unidentified
MELLYRCVAGLDVHKRIIWVCIRWLGRGGRVIEEIREFGTMTQDLRALADWLAQHSVTHVAMESTGVYWKPVYNLLEGRFEVLLCNARHLKNVPGRKTDIKDCQWIAQCLHCGLLRASFIPPRPVRELRDLTRARACLQDDKARVANRIHKVLEDANIKLASVATDVLGASGRAMLQALIAGETDPQKMAGLALKGLKRKRAQLCEALDGRVTKHHRFMLSLLMGQLRDLEARVAEVESRIEMLVASPALNPKPEAATLVPKAAPVTTVPSKRHRAPAAQESPAAASQAQPRHVPGATPAQATPPKTPLGFAAAIALLVEMWGVDRRSAEAILAEIGTNMALFPTHGHLTSWAGICPGNHESAGKQHAGTTRKGNRWLRRVLVQAAWAATHAKDSYMSARYRRLARRRGKQRALMAVADTMLKAIYHILKEQVPYRDLGPGHFDVLHGARTRNILVGRLEAMGYQVTLRLRPAA

SEQ ID NO: 191005 - protein, 349 aa, unidentified
MVAGIDVHKHTHTAALLDPTSGEVATLTFANSPEGFARLRSWLTGHGGAEAVIGIENAAGYGRPLVAALLAAGHEVLTVPSWRTHRDRDLVGPGKSDAGDATAIAEVVLRKRSELGSAAEPDLVRAMALLEALRRQSVAQRTQAIQRLRAIWTQVDPEAEREVRHLHRQRPLRGLRRISFGTGLAERTAARCVRELAREIATLNDRIGELEGEMAELLADRGSPLGDLAGAGPQVAAAVVAHAGDVRRFRSQAAFARFCGVAPIPCGSGQSDGRHRLHRGGNRQLNAALHRIAIVQARVSPQARAFLARKRDEGKTAREARRALKRHLANVVFKRLLTWAPDALEPAVT

SEQ ID NO: 191006 - protein, 393 aa, unidentified
MYLVGIDIGKLKHSFCLLEKETGEILVEPVFFENNRDGFNVLLSSFKHLPQKDILIGMEDTGHYNLALLKFLLDRNYQVALINPVATNLTRKMQGGISKNDKLDTLTICDVLSSSQRVKSYRISKYSSFDLYEQKLLTREHHNLKEEENQLTNRLQKCIDVVFPEFNSLFKSKYGIVYMNILKEFGSADAIAHADIRTIRKCFDTGRGKHISLTAEELKEAARNSIGFPSSSEATQIKHLVARIELIKEQIAEIDKKIEEFSLQNNSPILSIPGISHFSGTSILAELGDIHNYSKPSQIIKFAGVAPLTYESSQFTAQHTAITKKGCKYLRKTLYQIITPVIQYNPVFRKFYLLKIAQGKGHRCAQGHCVRKLMRVIYHLLSTGTQFDPALLR

SEQ ID NO: 191007 - protein, 272 aa, unidentified
MYLGIDVHKRDAQVAVMDEAGEVVEEVRVANANLDDLAQRYAGAEAVIEATTNYYHIHDTLSEYLDVTVAHPGKLTLIANADKKTDRVDAKELARMGRLDSVPESYVPTDEIREARARVRGRQRLVENRTDYANKIHGLLSDHGITRDIKPLSVSGRESLRDLSLPTPWDELLASYLAMIETLTEEIERLEATIEERAGSLEETQLLMTIRGVSYYSALMIYSEVGEIARFDRDKEVVSYAGLNPVIRESGDSRIEGSISTSQSWLVETSAC

SEQ ID NO: 191008 - protein, 345 aa, unidentified
MQPMYYIGLDVHKRKISYCVKDSSGKIHIEGSIAATRVDLDHWMKKLPQPWSAAMEATMFTGWIYDHLKPHAAALKVAHPLMLRAIAAAKKKNDRIDAGKICDCLRCDFLPESYMASTAIRERRRTLRYRNLVVRQMVQMKIKISALLMEAGVSYNKQRLHKAGYFRELLATNPDIDEGLCSLLRLCRETVVRLGKTESALVRSLEHDSLLVERVERLMTIPAVGPITALTWALEVGDVQRFSSIKKAVSYCGLCGAEKSSGNTVQRTPLSKQRNKHLQTMLIEAAKMAPRYSPNLAMLYDQEKQKDNANRATLAVARKLVAYLMAVDRGQRNFQIAETRSNIAA

SEQ ID NO: 191009 - protein, 323 aa, unidentified
MQTNSTVAGWAGIDVSKEWVDVAVWRGERRIDVGRFARDKKGLGKMAKQLVQYAPEAVALEATGGYEVAVMAALTEACIAVVRLNPRRVRDFARAQGLLAKTDKIDAYVLALFGVRMRPAIRALPEPERVQLANWETRRQQVVEMRATERTRLQQVKHPELRKSLERTIAFLGKELARLDAQIDKCLQESQQLVEQAALLDTAPGVGPRTACVLTAGVPELGAANRREIAALAGLAPIAQDSGKYQGKRRIQGGRAPVRAALYIAAWSATRVAGKLRDYYHHLIAQGKPRQLALIAVARKLLIALNEMMRKRQPWTENAVFSA

SEQ ID NO: 191010 - protein, 337 aa, unidentified
METYVGLDVSQKATAVCVVDRDGGVVWRGTVASNPDAIADTIKQQAPEPKRVGMETGPLAVWFYHGLRERNVPVDCIHARHVHAALATQLNKTDSNDAHGIAQLTRSGWYRAVEIKSIASHEVRLLLGARSQLISMRTSLYNQIRGVLKTFGVVLPPGTRSTFERLVEERTPSTSLIRGVIGILLDSWRHIDGQVRETDRALQRIARASDVCRRLMTVPGVGVTTAVAFAAAVDNPERFRRVGDIGPYLGLTPKKYQSGEVDHNGGISKTGCRLTRHMLFEAASALILRHKRDCALRRWAQSLIPRIGLRKALVATARKLATLLLSMWRSGKEFNPG

SEQ ID NO: 191011 - protein, 342 aa, unidentified
MEEVTIIGVDLAKNVFQLHGAASNGSVMFRKKLSRPQFARFMAEQSPCLVAMEACAGAHHWAREISRHGHEVRLIAPIYVKPFIKRQKNDAADAEAIVEAALRPTMRFVEPKSADQQARAVAFRTREQLVKQRTEAVNALRSHLYEFGHIAPVGIGYVPRLERVIADPDADIPDLAREICRMLLEQINQLTDRIDALKAKIAALSNEAKMPRQLQTMPGVGPITALAVETFAPPMEQFRRGRDFAAWLGLVPRQHSTGGKQKLGKTSKMGQRDIRRLLVIGATAVIRWASRRGAPKGSWLARMLERKPIPVVAVALANKMARGIWAMLTRGESYRGPVLIGA

SEQ ID NO: 191012 - protein, 365 aa, unidentified
MLLRSVLFFLAPNMEELIMASSLNHHWCVGVDLHKDTLTACVFCGCCGEYSFQKIPCKCRKQIAAYFAALPRPHTVAIESVGFYRWLWEMLEPIVEKLALADATQARALAGRRLKTDREDAFNIAELLSAGRLPISYAPPMEVQILRDLTRHRNGFSRQHARVLCRVKSIMNANNRPGPARLASDGLIRYLKAQGEKLPARHVAMLWQCVDQLALTERQIDEAERTIGEMVRRETFREVGEILLSFPGVAQLTAATVIAEIGDFRRFQHPKAISRFAGLNPRVYASGGKQRIGHIAKTGSSDLRWILQQAAWTAIRTDEHVRRVFLRIAKRSGRKAAAVAVARKLLTWMWSAVNKGEPYRTRVAA

SEQ ID NO: 191013 - protein, 338 aa, unidentified
MKITTIGLDIAKSIFHLCGVNKMGRLLKKKQLKRKQVLPYLATLEPCLVVMEACGGANYWAREIKALGHEVKLIAPQYVKPYVKGNKNDYNDAEGIAEAAQRANMRFVPIKSVEQQDIQNLHRQRERIKKARTALVNQVRGLLAEYGIVINKGIAAVRKGLPGILEDAENGLTMRSRELFADLLEELRLLDERLKHSEKQIEASNRENEVCQRLDEILGVGPITASAAYAAAGDGKDFVNGRHFSAWIGLVPGQHSTGGKPTLLGISKRGNAYLRTLFIHGARAVLRHSANKTDRFSLWAQALLERRGHNKACVAVANKMARMAWVIMAKGETYRAAT

SEQ ID NO: 191014 - protein, 428 aa, unidentified
MNCNTQNAKIASITEKTLIVGIDVGSETHYARAFDWRNYEYTRKPLEFSNTEAGFQTFKAWMEDIAAKHGKTAVIPGMEPTGHYWFALGKFLQDSGMRPVHVNPHHVKKSKELDDNNPNKNDRKDPKTIAALVNEGRFSYPYIPTGIYAEIRSLSNLRFQTQEELTRIKNRIARWFAIYFPEYKDVYGDYKAVSGRMVLKEAPLPEDIQKLGVEGVNKIWRDAKLRGAGMKRAKTLVSAAEHSVGSKEAPGAARMELKNLLNDMDVYTSRLEELLLKIEEKLKEIPYVDKLMGIKGIGLVTVSGFIAEVGDIGRFDNPKQLQKLAGYAIVANDSGKHNGESRISYRGRKRLRYVLYEAAISLIGKNAGFRAIHEYYRTRKENPLKKMQSVVAVACKVLRIFYTILTKGVDYDAGKLMGDIRRPQIQAA

SEQ ID NO: 191015 - protein, 423 aa, unidentified
MQVMHQRTAGLDVHKAMIVACVRIMVGTKFTRECRTFDTSTSGLQALLAWLVASGCTHVAMEATGVYWKPVWNILSDGAFELIVANAAHIKNVPGRKTDVNDAMWIADLVAFGLIRASFVPEQELQELRSYMRARKQLVREQTSHIQRIQKTLEEANIKLDSLISDVMGLSGRRMIEAIIAGEGDPIRLAELADRRIKAPRDQLVEALRGRVTDYHRFMLQLHLEQCDALEAAITKIDQVVDAAIARMDEEVEAGQATFRSLIWLLCTIPGVSTLSATTILAEIGRDMSRFPSAGHLVAWAGLCPGHNESAGKRKSSRLRKGAPWLKTMLVQCAWAARRKKDSYYKAQFYRLRAKRGEKKAICAVAASILTAIYHMLKDGTQHRDLGADHFDGRSTEFKAKRLVAQLKKLGFQVQLQPFAEAA

SEQ ID NO: 191016 - protein, 332 aa, unidentified
MKTADGTIIEQQTLPARRPALLAWAQSRTAPWAGAMEATIFTGWVYDLLKPMAVELKAAHPLMLRAITASKKKNDRVDARKLADALRCNLLPECYIAPGPIRELRRMLRYRNLVLRQAVRMKNKIAGLMMESGVEYDAHRLHGNAYFAALMDALEDVPQSVVDLLRLSRSLMLMFNKLQRRLLRALAEHRDIEERVQQLMTIPGVGEVTALTWAIEVGEVERLGSVSKACSYCGLTSAQSESGGKSARGPISKQRNKHLQSVLIEAAKLAPQRNAQLKDIYEMEITRGHRNRATLILARKLVAYLLAVDRSGQPFEQRPPASHREAETLPGA

SEQ ID NO: 191017 - protein, 364 aa, unidentified
MAVFGLSLTEPTKEALNIMLHIGLDLSRRRLDYDLLCEDGSRIERGAVPPDADGLRGLVGRVEVYREPVCAAIESMNGARFVHDRLEELGWRVEIADAQRVKGLAPLACKTDRIDAWVLAELSRRDLVPAIWLPDPEVRGERERARWRLHLVRHRTALKNRIHQTLVAFGVPCPVSDLFGAKGRELLERLELPDPWAQTVNASVALIDDLDGQITGCERELRSLGAEHEYVPLLMSAPGIAWVLGYTIAAEIGDIHRFASPSKLCGYTGLCPRVYQSGERDHRGSLAKNGPTYLRWALIEAAPHAGRSPVYRERYQRTATRLGRQRGKKVARVDIARKLAEAIWYMLTRNQPFAPAGATPPLAA

SEQ ID NO: 191018 - protein, 353 aa, unidentified
MNSLTDLREVVDVVIGVDTHVHTHSAAVVDAATGGVLDEITVEATAKGYAELVEFANNHPMLRAWAIEGTGGHGAGLSRHLLEMSELVIELDRPKRAARRNGAKSDPLDAIRAAREAMARPRLGTPRTGGERQALSVLLAARRSAINASTEAQQQVFGLVIAAPEPIRVRFRGQKLAMMLNTAANLRMHASWDIETTSTVVALRTLARRAHAMLKEARELQKAIVAIIRSWRPDLLEEFGVGPIVAATVLCAWSHHGRIHSEAAFAMLAGVAPIPANSGQVTTRYRLNRYGDRQLNNALHTVVQSRIQYQPATRDYVARRTAEGKTGREIKRCLARYVARDLYRLLENTTTGA

SEQ ID NO: 191019 - protein, 418 aa, unidentified
MSFKILKFNCCGLDVHKTWIYACIGITDSNNRTEYKQARFSSFTKGLNELCDWLARYNCKDVCMESTGKYWIPVFNILEQHQIWVTLSHPKYTKPMKGNKSDRKDAKWICDLYMCGMVKPSFIPPADIRELRDLVRYRFKLTCMITGEKNRAQNCLTVSNLKLDDVFSDVFGKSARSITEHILQHPGENFDVAPFIDKRCKTPIEEIQAAVAGAISKEQAVKLRQCLDHIDELQKHISEVEREILRLSDKYEAALNLMRTVPGFDKNPLTAIQVLSEIGGDMSVFPTAKHLVSWAGCCPRNDKSDRKIKSTRISRAGSYFKPVLVQVANALIKSKKHPEFTTRYKRIKTRRGHKKAIIAICRMILTAIWHILSDLKPYTPEGFLEQRPVKESKVLTTSQALNLLRQRGYTIRDNSLPA

SEQ ID NO: 191020 - protein, 337 aa, unidentified
MMYSGIDLHSNNCVIAIIDDGDRVVAQKRLPNDVTKIVGFLARWQEQLAGVVVESTYNWYWLVDGLQDAGFHMHLANTAAIKQYEGLKHSGDETDAQYLAHLLRLGILPTGTILPREHRAVRDLARKRMQLVQSCTAHVLAVENIMARQLGGRMTSNQIKRLTNDAIDNLPVAADVGLAIKANVAVIATLQSQIELLEKRLQERVKPRPQYGLLTSVPGIGQTLATVILLETGPIDRFAEVGNFASYARCVDSVLTSNRKKKGEGNVKNGNKYLAWAFVEAANFARRFCPEAERFHERKKAKTNNIVATKALAHKLARACYHILKEGKPFDVTRCFA

SEQ ID NO: 191021 - protein, 338 aa, unidentified
MKISLVGLDIAKSIFHLSAVNQAGKQVKKKVLKRPQLLSFFSQLEPCIIAMEACGSAHHWARQFQALGHQVKLIAPQYVKPFVKGNKNDYNDALGIAEAAQRPNMRFVPIKSLEQHDIQMVHRLRERLVKNRTALVNQIRGLLAEYGLVINKGVAAVRTELPFILEDAENGLTVMARESFFTLHEELKELDENLQTCEKKIIAINRSHEACQRLDEIIGIGPVTATAIYAAIGHGHDFENGRHFSAWTGLVPKQHSSGGKANLMGISKRGNAYLRTLFIHGARAVLRYAEGKEDSFSRWATSLKERRGSNKACVAVANKLARMAWVILAKNERYRPAR

SEQ ID NO: 191022 - protein, 337 aa, unidentified
MKYCGIDLRSNNSVIVVIDEEDRVVGQKRLPNELARIVVFIVQWRDELAGVVIESTYNWYWLVDGLQAAGFQAHLANTAAIKQYDGLKHGGDEADARHLAQLLRLGILPTGTILPRDERAVRDLARKRIQLVRGRTTHILAIENIMARQFGARMTSNQIKRLSADDIDQMPIEADVRLAMNANLAVIGALDAQIEVLERRLRERAKPRPEYAFLTSVPGIGQALSTTILLETGPIDRFASVGNYASYARCVDSAHTSNRKKKGEGNVKNGNKYLAWAFVEAANFARRYCPEAKRFYERKKAKTNTIVATKALAHKLARACYHILREGRPFDVTRCFA

SEQ ID NO: 191023 - protein, 358 aa, unidentified
MVDKVTEAAVVGGVDTHKDLHVAAVVDQNNKVLGTQYFSTTRQGYRQMLAWMTSFGTLKRIGVECTGTYGSGLLRYFQNAGLEVLEVTAPDRMERRKRGKSDTIDAECAAHAAFSGIRTVTPKTRDGMIESLRVLKTCRKTAISARRVALQIIHSNIISAPDELREQLRNMTRMQLIRTLGSWRPDASEYRNVTNVYRISLKSLARRYLELHDEIADLDVMIAAIVDELAPELIKRNAIGYESASQLLITAGDNPQRLRSESGFAALCGVSPVPASSGKTNRYRLNRGGDRAANSALHIIAIGRLRTDAKTKEYVARRVAEGHTKMEAIRCLKRYISREVYTLLLNQNRRINSIPITA

SEQ ID NO: 191024 - protein, 355 aa, unidentified
MSSEKYIGLDVHQATISVAVMDSQGKVVMESILETKACTLLEFFAGLRGSLLVTFEEGTWAAWLYDLLKPHVTEVLVCNPRKIPLLKQGNKSDKIDARKLAERLRLHDLKPVYHGETGVRMLRELARSYLTVVKDLSRVMNRLKALYRSWAIPCAGRDVYYTRHRSQWLEKIPEAGTLRRAEQLYQQLDMLQHLRQQARRELLAESRKHAITAKLRQIPALGPIRSALAVALIQTPHRFRSKRQLWAYSGLGLETRDSGEYHYVHGQVRRRKKQPTIRGLNKDYNHDLKSLFKGAATRASVQPGPFQEFYQRSLGKGIKPTMVRLTLARKIAAITLTLWKKGEDFDIDKLNSQAA

SEQ ID NO: 191025 - protein, 386 aa, unidentified
MPQLNDLSRSLVILEQDATLIAVIEMGQSSWLVAGIVPGVERSPLKKLAVDESALLKLLNRWREEAGKAGHRIERIAIAFEAGRDGFWLARWLRARDIEAHVIHASSVAVSREHRRAKTDRLDTELLKRAFLGWLRGERDHCKMVAIPTIGDEDAKRPNRERESLVGEQTRIVNRMKAALSRLGIRGFNPKLKKAAERLEDLRTPEEEPIPPNTLAELRRDMERRRLVRSQIRDIEDARLERIEQARGDGPHAMVRLLARVIGVGIETADMLVQEVLSRNLRDRRAVARYGGLTGSPDESGKKRREKGLARSGNARVRRGMIQLAWRFLMFQKDSALAHWFYARTKHAPQTRKTMIVALARKLLIALWRFVREGAIPEGIVLRPAL

SEQ ID NO: 191026 - protein, 424 aa, unidentified
MNLTQNDRLKQVTFDTLIVGVDVGSKTHFCRAFDWRGFELSHRVFKFSNTGLGFLTFLRWTEELMDKTEMKKVIVGCEPTGCYWLTFQKFLQEHDIHLVTVNPFTVNRSMELDDNSPEKSDLKDPKTIAHLVKDGRYSTSYLPSGVYAEIREASVCRDQIMKQHVRLSNQIQGWIQKFFPEYFECYADWDSTSGLMLLKEAPLPQDILKIGAGGINQIWRDAKVRAAGIKRAKTLVEAAQNSVGLEGGEAARLEIWVLVNDYILKAEQLKRLDEYLEEKVKEVPNVEKLLAIKGVGISTVIGFIAEVGDIGRFTDAKQIQKLAGLEIVKKSSGKKKGQPRISKRGRRKLRRTMYESARALMNWNPAFQDVFLYYRNRQRNPLGGMQAKIAVACKAIRIFYVILQTGCDFDEEKFRKDIIRPEAA

SEQ ID NO: 191027 - protein, 343 aa, unidentified
MAAVTVGIDLAKSVFQVHGVDADGRPVLRRRLSRGRVLSFFADLPPCRIGMEACSSAHHWARQLVGLGHDVRLIAPQYAKPYVKRNKTDAADAEAICEAVARPNMRFVPIKTVNQQAVLALHRARALLVRQRTQLANAIRGLLGEFGIVAPKGIRRLTELRARAAGTEEDALPNEARAAVSLLFRQLDETQDRIGVVEADILTWHAHSETSQRLATAPGIGPITATALVAAVGDARQFDSARRFAAWLGLTPRVTASGGREKLGKITKAGDRYLRTLLIHGARALIGALRRRSALPRPWLLELIGRRPVNVAATALAHKTARAVWAMLTRQEPWRAPVRTAAA

SEQ ID NO: 191028 - protein, 426 aa, unidentified
MGNCAGVDWASEKHDLLIENPAGEELLAATFSHTEAGIAGLCRALVRHEVGLVAIERPDGLLVDRILDAGVRILPLHPNQVAASRDRFRASGGKSDRFDRFVLCELARTDAHRFRVLEPESDETKALRALTRAREDLVTARVAMSNQLRAELDRFWPGPVRMFSAIDTPVSLAFLAKYPSPSDAKALGVKRLTAFLKAHGSSKATAAAELLGRLRDAPSGRVGQAEAARRRTIVLSLVSALSVMVEQINRLETEIADALDAHPDGPVFRSFFVSQSAVLCPATLLAEIGDSRGRYPHRDAIAAQAGHAPVADESGKRKNAKFRWACNHRLRNALSTLAQSIRRWNPWAADLYNAARARGHNHRRALRTLGRSLARIIWKCWQTRTPYNPDRHPALQRHITVTIPDPSGPRPDADATTRMAGLTAPV

SEQ ID NO: 191029 - protein, 317 aa, unidentified
MAMPARELDFGVDVAKASVQIDGDGLSLELSNTTRDLRMWLKRLPSRACFALEATSTFHLTFANLAHELGHAVYLIDGFRLSRYREGIGGRAKTDVLDAQLLRRYLSHEKQALRLWTPPPAGYSEMLKLLNLRERCVSARVMIEQSMAGVGVCKRELSETVRKMRALEALLGQRIEACARRYWAEQVTRCRQIEGVGPITSAALAAIYQRGSFRSSDAFIAFIGLDVQARDSGTQRGRRKLSKRGNAELRRLLYTAAMTACRSGTWKPYYQKLLARGLKKIQALVALSRKLARVAFTLMKNECDYQPEIRSGGCLAT

SEQ ID NO: 191030 - protein, 335 aa, unidentified
MKNYLFHVGIDISKLKLDVVVVKADSINSVEHFVVDNTSKGVKTIVDLLLKRKIDLETTLFCCENTGVYTFPLSSYLSEKKYNYWIVPAIEIKRSKGISRGKNDKIDAKDIALYSIRNIDKLNLSSIAEKEIQQLKLLYSEREKVVKSLLLFGTSKENEAFTTKEIYKTVSLVNAKTIKALKSSLKTIETKMKEIIKNDTDLNQQMNLIKSVPGVGEQTAIYLIIATKGFKAFNSSRKFACYAGVAPFEYTSGSSVRGRTKVNHMADKKMKSLLQMCALTAIKYDPQLKEYYNNKKEEGKNGMLVLNNIRCKIISRVFSVVNRQTPFINTYKFAS

SEQ ID NO: 191031 - protein, 343 aa, unidentified
MQTVTTIGLDIAKSVFQVHGIDAAGRVVIRRQLKRRFVLSFFEKLPPCLVGIEACASSHHWSRELQALGHRVRLMPPAYVKPYVKRQKNDSTDAEAICEAVTRPNMRFVPTKTVEQQSCLMLHRARHLFIRQQTAVINSIRAYLVEFGIVAPVGRRGVEHLLEVVADADDHQLPEVARMCLVALGSQLRALKAQILEFDRRIMAWHRSNATSKQLDAIPGVGPALATALVASIADPKAFRSGRDFSAWVGLVPKQNSSGGKDKLGSISKQGDRYLRSLFTAGALAVIRYAKIHGTRHRPWLTALLARRPTKVAAIALANKLARMAWAMMARNEHYREPAALAA

SEQ ID NO: 191032 - protein, 365 aa, unidentified
MKQLRAVAGIQTIGLDLGDRFSQFCAVGWKGEILQEGRVPTTVVGMQRFFGGMEPVTVAVETGTHSPWVSRLLFSFGHKVLVAHARKLRLIYENRNKRDEVDARYLARIARLDPELLYPVRHRGESAQKDLAVLRSREALVAARTQMVNHVRGSVKSFGARLPSCSTPAFPKRVGEQVPESLKAALLPVLDCVAQLTEQIKEFDCRIHALIEESYPEAKRLMQVHGVGEITSLAYVLTLEDAGRFERSRTVGAYLGLVPAKDRSGESDPQLRITKEGNALLRRLLVQCAHYILGAFGSDSDLRGHGLRIAERGGKNAKKRAVVAVARKLAVVLHRLWRTGEIYQPLYNTERKSKRVGSGEKAMAG

SEQ ID NO: 191033 - protein, 419 aa, unidentified
MEGSRSKVCGIDVHKRFLVATILERNGSKKTEKFQNNLEHLLKIREWIITEQCQAVAFESTGEYWISLYDALQGCVEIIVANSYHIKWIPGKKTDTIDSEWIAELALNDLISPSRILSKEKRDIRALTRLREKLVNERTNHKNRVHKVLDSACIRLSAYFTDLFGKAGLKILKCILSGVPPEEVVQKLPKRLQPQSDAILDAIRTQLSTHQLIQLQTSVTMIDLLNDKIKALEQTILNDLQKERRKLQILMSVPGIGTIGATTLLAEIGDVNDFSSPDKLTKWVGITPRVYQSADKLHTGSITKQGSKHIRWILVEIAHSCIRTKNTALRIFFDRIFNRSGYKKAIVALARKILKLVWHLLTNNELYKEKNTLLSKSSRLPNPRESGSFSVSAAIELLVNAGFQIVGGDKHPTKRDLGT

SEQ ID NO: 191034 - protein, 355 aa, unidentified
MVVLGVDPHKQTHTVVAVDENGRQLGQITLEARREGHLKLVKWAQRFAGHDQRRWGVEDCRHVAGRLIDDLVAAGELVVMVPPKLMAGCRSSARTRGKSDPIDALAVARAVLREPDLPRAWLDEASLHVRLLLDHREDLVAERTRSINRLRWHLVELDPDLEPGPKTLNRLVTLHRLASQLVELPASVRRDLAIELIERILTDTQRINALEREIAARVVPLATALLAVPGVGPLTAAKLIGEVAGIDRFRSSAQLANLAGTACIPVWTGNREKHRLNRGGNRQLNAALHRIAVTQLRIHPPAKALFDRRREQHSDTTAGALRVLKRHLADVVFHAMNEDHRQPERLPPTGPRVAA

SEQ ID NO: 191035 - protein, 393 aa, unidentified
MRKPEQQHKPLNDLSRSLTPFDPNRTLIGVIELSKKSWLVAGMIPGVERQPLKKLAADENELLKLLERWRAEAEKAGHKINRIAVAFETGRDGFWLARWLRARGIEAHVIHAASVAVSREHRRAKTDRLDTQQLMRAFLGWLRGERQHCKMAAIPTLEDEDAKRPHRERETLVGERTTIINRLKATLTRLGIRNFNPKLVKAPERLEHVRTPEGEPIPPNTQAELLRDMQRLRLVREQIGQIEKARLEHLKRNPNTGPNLMVSILARVIGVGIETADMLVQEVLSRNLRDRRAVARYGGVTGSPDESGSRSREKGLARSGNARVRRGMIQLAWRFLEFQKDSALAKWFRARTENAPRSRKKMIVALARKLLIALWHLVRDGVVPEGVVLRPAH

SEQ ID NO: 191036 - protein, 342 aa, unidentified
MYPFYLGIDLHLKRTYVVLMNREGQVVDERRLANEDMAAYLEKEVPRETYAVLEATRNWPFMYDLLSEHVERVELTHPKEVKAISAAAVKTDRVDGQTLAHLARLNYLPIAYAAPPEIRDLRLEVRHRDSLVRQRTQAKNRIHAVLASFNLVSPVADLFGVSGREYLEEKIQDVLRPAAARSIQRDLKLIDHLNQQITEIEGSLKLKPEQEQQVKLLCSMPGVGRLGAITLLAEIGDVKRFHSAKALCNWAGLTPRVRSSDTHTHHGRISKQGPALVRATMTRAATTASRYSKRWYHVHEKTLQRSCRKVAKVAVARRLLTVIYYMLKHQEPYQEDYSSQDR

SEQ ID NO: 191037 - protein, 430 aa, unidentified
MKSNTQNAKIETITEKTLVLGIDVGSETHYARAFDYRGIEYSKKPFKFSNTEVGFATFKEWILDLKERHEKDKVVPGMEPTGHYWFNLGKFLQDNEMKPMLVNPHHVKKSKELDDNNPTKNDRKDPKVIAGLVREGRYMIPYLPDGVYADLRTASNIRFQLQAELTRIQNRISRWFNIYFPEYKTVYGKPDAKSGMLILKAAPLPEDILTLGIDGVNQIWRDAKLRAVGKARAKTLIEAAEHSIGSKEGTMSARMEIRMLLEDYESKNMRLQEVMVLIEELVKEIPMAEKLLEIKGVGIRTVSGFLAEVGDISRFNNPKELQKLAGLALVENSSGKHKGKTTISRRGRKRLRYLLFEVAMSLVAKNPEFRELHNYYTTRRLNPLKKMQSLMAIAAKLIRVFYAMLTKGVDYDPKKMISDIKRPTVYLQAA

SEQ ID NO: 191038 - protein, 330 aa, unidentified
MTVTAGLDISAKTLDLVVRHHGVACRPETFRQTSAGHQALIRRLKALKPAIVVMEATGVYYLDAAVALYHAGIAISVINPGSFRHFAQLKLQNSKTDAIDAALLAEYAECIPTRRWVAPDPARLALRDLARQINRLTHARTQAKNRLHALRAQRGRLPLLIEDELHGIEQLDQRIERLRQAALTLIEDSDELSAQLQLMQTARGIGTTSAIAILGELCVLPRDMKARQVSCHAGLDVRQHQSGTSVNRPGRLSKAGNTYLRAALYMPALTAVRHDPLARAFYERLIARGKKKLQALCAVMRKYLTGLWACLRDLQPFTSSRLFNDTVQTT

SEQ ID NO: 191039 - protein, 331 aa, unidentified
MSHIIGIDVSKATLDCAYLRDPDQDKAKRKSCQNEVGCFESLITWSEALSGLPRQSLAFVIEPTNIYHEQLVQFLHSTGTTVYLVNPGRVRKFAEGIGILSKNDVIDADLLARYGLMAKKLIVFEPAPQEANDLRSLLNRLDVLEKNLRRELNRQEKAGKSLTFHRLEQQSITRSIKRHEAEIVFFKNAARDCVNASPWLQRGVELLSTVPGVGERTAWIMMVVLSSRQFHCAAEVASFLGLNPIEKRSGKSEYRKPRLSKSGSVHYRQALYFPAMVATRRNPDVQALYERLVDAGKPKMCALGAAMRKLVHICYGVYKSQQPYQPQVSLR

SEQ ID NO: 191040 - protein, 346 aa, unidentified
MAHFVGLDVSVKETSVCVVDDTGKVILEQKVPTEPADILTLLSSLGVSYGRIGIEAGPLSQWLVNALTVAELPVICVETRHMKALLTAQQINKTDRNDARGIAQMMRVGLYKPVHVKTLASQQKRMLLTSRQLLRDKLQDMENELRGTLRNFGLKVGVVSAGHFEARIKELVAGQPPLEMIVVPLLTVRRVVREQLAKLDKMVLDQVRDDKLCRRLMTVPGVGPIVALTFRATVDQAQRFARSKTVGAHFGLAPRHFQSGERDYDGRVSKCGDAMMRTALYEAAQVLLTRTRTWSWLKAWGMQVARRRGAKKAIVALARRLAIVMHRMWVDGTEFLWRKEADTAAT

SEQ ID NO: 191041 - protein, 375 aa, unidentified
MNNNNTLYVGLDVHKESITVAYAINSEPVELMGKIGTSPTDIQNLCKRLRSKSSQVSIVYEAGPCGYGLYRRLVKSGFDCMLCAPSLIPKKPGERVKTDRRDAIRLVRSLRAGDLSAVYVPGVEDEAFRDLSRAWASARDDLRHTRQRLKSFLLVHGVHYVGRADWGPAHRRWLSKYSFESPWRQLAFDEHRRTIEDRQAQCERLESALKEAVTEWRLYPVVEALQAMRGIQFITAVGLISELGDLTRFEHPRQLMSWFGITPSEYSSGGSRHQGSITKAGNSYARKLLVEAAWSYRHPARISPAIQKRQENLPRPVIDRAWDAQLRLCKRYRKLQAKEKNVNITIVAVARELAGFIWDMGRIAMSVAQQPQCHK

SEQ ID NO: 191042 - protein, 339 aa, unidentified
MYYTGIDQHKHTSYLTTVDNKGVIIKQANLKNNDYDILNYFHQFGDQNIATVETTGGWYWISDLLKENNIDLKLAHAKYVKAIAYAKVKTDKVDSHILAQLLRMDFIPEANKIDEDLRPFRDTLRARLRLTQKRTSALNFMHRMLEKFNIQNPSELSAQYQFQYEQFSDQAEFLKQQILALEKSLYPTLAPNQDVQHLLAIPGIGKMNAFTSFLEIYDINRFETVKNFLSYCRLAPRASNSGGKTKQSRTPKDGNKYLKIVFSDAAIHAIQYYPVIKKHHNSLLRKKNKQIAKYIISKEIASIVYHVLKTKKSFNNKFKNIDLEHIKSIQWPRITSPIV

SEQ ID NO: 191043 - protein, 347 aa, unidentified
MNFYKVPHKYYCGVDLHSRTLYLCVVGRDGAVLLHRSLPCDPNRFLLAIAPFREDLVVAVECVYSWYWLADLCAREGISFVLGHALYMKAIHGAKAKSDRIDSEKIAVLVRGGLMPVAYAYPADMRATRDLMRRRLLFVRQRGSLLGHIQITHHQYNLEAPGKRITYRSNREGLGEGFADPSVRHTIAADLALADHYEVIIGELELAVLRKARVHDPNALVLLTSVPGIGKVLALTILYEIHDISRFPSVRDFASYSRLVKCEHRSAGKSLGTGGNKIGNAYLKWAFSEAAVLFVAKSEQGRTVLKRLERKYGKPKALSVLAHKLGRAVYYMLARKQAFDPQRFTAA

SEQ ID NO: 191044 - protein, 448 aa, unidentified
MNEPEEISDADHEQLIERVAAIDVGKEFGKVCVRLPDPARPGRRISRVWDTAATTNAVLVLACRLIELGVEKVTVESTSDYWRIWFYLLESQGLDVQLVNARDVKNVPGRPKTDKLDAVWLAKLTEKGLLRPSFVPPAPIRTLRDYTRMRTDFVREATRHWQRLEKLLEDALIKVSAVACKLDTLSTRDMIEALIRGERDPEVLADLARGRMRGRRAALVEALTGQFDDHHAELARMLLDQIDALGRQIDTLTTRIEAVIAAIPAAGTTEGTPHDPDHGHTTSPAELAAIERLDEIPGISRLGAQIILAEVGLDMTRFPTAAHLTSWAKLTPRTIQSGATHRAGKTGKGNPYLKGLLGEAAAAAAKTDTFLGERYRRIVKRRGKLKALVAVARSILVIVWHLLADPTKRFQDLGADYHTTRIDKGRKIHNLVRQLQALGQTVTLQPAA

SEQ ID NO: 191045 - protein, 392 aa, unidentified
MYIVGIDIGKNHHEASIVSPEGKQIGRSLRFATTHKGADSLMSFIFKNIGNSPCVFGMEATGHYWYPIYSFLKAKGYTIYVINPIQSDSLRKMYIRQTKNDSIDSFLIAEVIRFGQFGTTSMADENILAMRQLCRYRDSVISSRTEIKLRIGTIMEQIFPEYEKQFSSLWVSTSMGILEKYLTPENIENAPIDELFEIIKDKSHNKLTMKKAISIREAAADTFGIKIAQDAFSFQLKQLIDRMNFLDKQIEALDCQILEYYEKFDCYLHTIPGIGMIAAATILAEIGDINRFKSSSALVAFAGIDPTVRQSGEFSSTHNHMSKRGSPYLRHAIFLVATTCSFHNSPLNAYYKKKREQGKHHLTATGAVARKLTTVIYAVLRDGKPYEPKSFC

SEQ ID NO: 191046 - protein, 413 aa, unidentified
MDVLHPRCCGLDVHKSSISACILLWEAGRVQKHHRRFTAMTQDLRELAEWLRQFGVSQVAMESSGVYWKPVWNILEGQFTVVLANAQHIKNVPGRKTDQKDAEWIAQLLQYGLLRPSYVPCEIIRDLRDLTRMRASLSQEASRISSRIQKVLEDANVKLASVATNVLGKSGRAMLEDIISGEDDPEHLASLALGHLRVKIPQLRLALEGKIRSHHRFLLRRLVDQIQFVEHEIALLDERLEEIAQQRPELSQAVARWDTIPGIDRVAAWALLAEIGDNMAQFPTAEHLASWAALCPGNHESAGKRLRGTTRQGSPWLCRMACQCAWAAARTKNTYLSSQFRRLAARRGQKRAIIAVAHTIIVMGYHLQKNQSNYEDLGGNYFDRIHSDGLKRYLVKRLQQLGHKVTLEPMEAA

SEQ ID NO: 191047 - protein, 354 aa, unidentified
MPETAHTGVAAIGVDIGKNSFHVVGLDQRGAIVLRQKWSRGQVEARFANLPPCLVGMEACVGAHHLSRRLKALGHDTRLMPAKYVRPYSKGQKNDFRDAEAIAEAVQRPTMKFVATKTADQLDLQALHRVRERLVSQRTGIINQIRAFLLERGVAVRQGLRFLRAELPRILATPPEVLSPRMVHVIEDLAADWRRLDERIEGLSAEIKILACEDSGCERLMTVPGIGPIISSAMVAAIGTGDAFSKGRDFAAWLGLVPKQISTGDRTILGKISKRGNRYLRVLFVQAAWVVLIKPKSWERHGLKPWIEAAKKRLHHNVLAIALANKLARIAWSVLARGRNFETRTINEATAQPV

SEQ ID NO: 191048 - protein, 372 aa, unidentified
MKEDSVIFIGLDTSKLKISVAIADGSRNGEVRFFGDISSEPTSVASMVSKLSKRGAKLHFCYEAGPTGYGLYRQIVELGHDCVVVAPSLVPKRAGDRVKTNRRDAMSLARLHRAGELTAVWVPDEGHEAIRDLVRAREAASDALKQARQQLQSFLLRHGRIYAGREPWTRAHRKWLTCQAFDHPAHQILLAEYSQAVADASVRLDRLTKLVVETAASWSMAPVVAAYQAMRGVAFMTAVTFVVEIGDVRRFDNPRQLMAYLGLVPSESSTGERVKRGGITKAGNTRARRVLIEGAWTYRFPARVSPKIQARLDDLPRTVREIAWKAQVRLCTRYRKLIAAGKPKVVAVTAIAREMAAFLWAIGQEVAPTAKG

SEQ ID NO: 191049 - protein, 357 aa, unidentified
MCILNENNEKYEEVFGTLTPELERLRDALVDHGVGQVAMESTSIYWYPVWRVLETDFDVKLVNPLFIKQLPGRKSDVKDAEWIATVLMKGLVRGSFVPPGIIQQLRMYNRKIINLSKDLRRSEQGMDLVLQRCNMRLSNYLSDIGSKSMRKVAQSIAQGDFRPEHLLGLVHKRIITKHSAATIHAALCGHFTPGDLDMLKLTMQEIDFLENQISFCKARLLENCRDYFGLQMELMVTIPGVQEHTAASIISEIGTNMNFFPSASALVGWAGLRPRNDQSAGKIKGRKTLHGNKYLRLMLVQSAWGASRTKGSPFMARYQRLRKRMHHNKALIANARKLLVVAWHILAKKEPYFAKAT

SEQ ID NO: 191050 - protein, 450 aa, unidentified
MTNGSGVSRGDRNRNARLGRLRGLVPLTNAIVAVDLADRKQMVVVTDHDSKVLARKTFRCRAWDLGVALDWAAGRAAAKGWAGVTVACEPTGHRWRVLGQLAADRGMPFVCVQPMVTSWARRAEDLTFDKTDDKDAVLIARLTAQLRCYVPEPVEESWGRLRHLGARRERLIVEAGSQVRQIRDLLECVWPAALDTANWPFRSKTWPAALWVILDRDGGEFTRTRRLGAARFEQQVRREITRRGGQKPCLRIVRKLFGALADNTGVLAHRRGALERVQLLLEDWADTQRKLAETENRMTAVLDELELTKLATSIHGLSPVGAAAILAETGDPTRFATARALVKHAGLAPREKLSGTFTGRTKLTGQGRPKLRLAAWRAVWGALQTNTVYAARYRHLTTRETNKLTPTQAQTVIAAAILRHLHAVITTGTAWHPAIATHGTRGKEANTLAA

SEQ ID NO: 191051 - protein, 336 aa, unidentified
MVQIYGIDLGMSSFDVSFLSESGSVRHLSGVKNTVHGISKFLLSLPSSAVLCAEHTGVYGDLLLRLCTLNRTCLCFVPGYQIKHSLGLQRGKSDPLDACRIREYAERFYDLLRPCFYPGEEMSELQELYRTRSLLVESRKRLDTLNIGDNCKSSVSLAADHARRAVLAELNTQLSALDHEIEALIQNSSEFSRNYQILTSIVGVGPVTSCELIIKTENFRKLDTAKKCAAYAGIAPYPKESGKMKCGHKISPMGDKQLKTLLFLCARSAKEHNKEIRLYFLKKHKVEKKHFFVAMNNIANKLLRLIYSLIQKQQTYDRDYIQRDPRCVVISDTNKC

SEQ ID NO: 191052 - protein, 353 aa, unidentified
MRAVFGIDVSKASSEVVILVNGEKGHGYPITKDVIGFNQLLGDLKTVHHPKTTGVYSRRPQAFLDDHGYAYTRLNPLEAKKQLDSLRVRKTDKIDAEKLAQPQFVLNRKTTYVQEEVYQNLRDLSRFYQNLTEDIVCTKNRLHKVLQVTFPELENILSASTGEQYWSLVMAFLFKELVLRLTQSELMAIIFRFTSKRISDKRATYLADKLRELAKQSYCAVKKTSPILEEVRYYAQELLRLSERRQAVLNEMVFLAQPLPEYNILLSIPGIAETTATSLIGELGDIRRFQSANQINAFIGIDLRHYESGNFLAKERISKRGNPYARKILFKCIHNIASASHTKPCHIADFYEK

SEQ ID NO: 191053 - protein, 380 aa, unidentified
MTRATRGGEYTGPTEKILHLAFELGLKDWKLGFTTDLGTKAGLRVMPARDLGRLEREIAEAKKSFGLAATARVRSCYEAGRDGFWLHRYLVSRGIDNGVVDSSSIEVNRRQRRAKSDGLDARKLLTMLVRYHAGERKVWSVVRVPTVEEEDRRQLHRELRTLKKERTRTTNRIKGLLANQGIRLIKSGDLSRRLERLRLWDGSPLPAGLLARLQREREHAEFLHGKILELERERRQAILEGRSPALEKVRQLMLLKAIGASGSWVYVHEFFGWRRFRNRKEVGAAAGLTPTPYQSGDGSREQGISKAGSRHIRAVAIEMAWCWLRYQPRSKLSLWYQERFGRGGQRARKVGIVAVARKLLIDLWRFLEQGVIPEGATLKA

SEQ ID NO: 191054 - protein, 364 aa, unidentified
MTIVAHAYPFVIGVDAHARSHALAVLASPTGELLDETQFPATVAGLQRAVSWVARRTGGDLAVLWVIEGVGTYGARLARAANDAGYAVAEAGRMSARANRGVGKSDPLDARRIAQSVLAVDVAMLRRPRADDGVRAAVRVLIASRDHISTERTSAANALTALIRVADLGIDARRPLTAAQITAMAAWRARDEDLATTVARKEAGRLAKRVIAADRELAANTKQMTDLLNASPARVLLDQPGIGPVTAAVALAAWSHPGRVRSEAAFASLAGVNPIPASSGNTVRHRINRGGDRRLNRALHMAAVTRIRMDPRTRAYVERRTAEGRTPREIRRCLIGEVSVMRPGIGLDRGFSVVSGDGLVAEPL

SEQ ID NO: 191055 - protein, 311 aa, unidentified
MNLGIDVAKAHLDICVRPSGEEWRTEHTAAGITALTARVVALQPARVVVEATGGLERPLARALQTAGVAVAVVNPRQVRHFARAVGQLAKTDRLDAQLLARFAEQVQPEPRALPSVETAAAAELTARRQQVREMLTAEQQRLKQAASAAARAWVAKHIAWLEAELAEVEAALEKALTATPEGAQQAAVLRSVPGIGPVVTATLLADLPELGTLGRKPLAALVGVAPLACESGRLRGRRLIWGGRGRVRAHLYMAVLAGLRANPVLKTFYQRLHAAGKPAKVCLTACMHKLLTILNAMVRDGRHWAPKTPEA

SEQ ID NO: 191056 - protein, 372 aa, unidentified
MTKNKGRVVGLDVHPDSFAGAVVEGSDPAQARVLSTSTRVELERLERWALRHTSTEDRLVLEASGNAFAVAARLRTIGRKVEILDSHRAGKVGKVYCANDRVDAVKIARIYLSALSPIVWQPDEKTLERREVFSAYQAVVKESTRAKQQLRSMLNEHCVRLEKGFRLCHPNAIRRLVALREWTPARTMLLQQLHGTLVAARARRTLLRLTRLCGINLVTLYGVVAAVGDVRRFSHSKKLVAYLGLNPSVSQSGNFEGSGALKRHGRGALRALLIQSGKKLLEVNNPLQKWGLAVAARRGRNKAAVAVARKLCVALWHVLMGHTIGVLERLDTLETKLSKFATELGPVALAAFGYNNKAEFVEKKLYVLRSYP

SEQ ID NO: 191057 - protein, 344 aa, unidentified
MIYVGMDISSKSFMVHAIDSGNKVVLRGEIKPTRQGLRRMIHQLGRQTKLIVFEAGNQLKWVALELKKIKGVHVHVVHPNEIKWINQSSAKTDKIDARKLARLARGDMLPRKVHIVDGTVRQLRELLSARHTLQSKRVALINSIRGCLKQEGYRLPEKFFSRADWRGHLERMRVADTQKLILTSYMTSIESLVAAEAELTGKILAIEHEDIARLQSIPGIGGLTSRVIVSAVDDVRRFDSKKELSKYGALTPRIYQSGGLTHLGRINRDGRHEVRRVLLQCAHTVARMKSYEARPLRMFFERVRQRRGKKIAIVALARKLLTIAYGVLRTQTMYDPKALTPNVI

SEQ ID NO: 191058 - protein, 339 aa, unidentified
MTHLPVGIDIAKSVFQVHYVDEATGEIVNRPLKRAQLLVHFANRAPCVIGMEACGGAHHWARQLMSLGHQVRLLPAEYVKAFNIRNKNDAADARAIWLAVQQPSKAVAVKSETQQAMLALHRLRQQLVKYRTMQMNGLRGLLAEYGEVMARGRASLDKGMPAILARVSQRLPAFLVDTLREQWNGLAKVDEQIEAIERRIREWVKSDAAVAAIIAIPGVGLLTATAAVATMGSAKTFRSGREFAAWAGLVPRQKGTGGKVDLSGISKRGDTYLRTLLVHGARSVVMRSKDSRPWVEQLRLRRPLNVVIVAMANTIARTIWEVLAHQQPYDKNHVSAKPA

SEQ ID NO: 191059 - protein, 342 aa, unidentified
MSKINVIGLDLAKNVFQVHGINEDGDVAVRKQLKRIEVLRYVAKLPQSMVGMEACMSAHYWWREISKFGHVVRLMAPAFVKPYVRGNKNDRNDAAGICEAVQRPNMRFVAAKTPEQQAVLHLHHARQLLVQQRVALNNHLRAVLLEYGISLPVGVKILTQALPGLLEDGDNALPMLTRHLLAELKTAHDALNARIQMIENQLRAWHESNPMSLRLAQIPGIGLLTATALAATIGDIKAFKNARHLAAFLGLVPKQHSSGGKDKLLGISKRGDGYVRGLLIHGARAVMRHIQRRIKIGQASGNAWVEQCLQRMHVNKVIVALANKMARMAWAVLAHQQDYRAA

SEQ ID NO: 191060 - protein, 431 aa, unidentified
MPTNDTLNVVHPRAAGLDVHKMQITASVCLARPRARAEILTETFSALPRGLSRLVAWLLRHGVTDAVMEGTGIYWQAPFEALEAAGIQPHLMNAQMVKQIKGRKTDVKDSVWLATIGQFGLGTPSMIPPTRFRRLRQISRLRRALIQDGARLRNRIHKVLDAAGIRIQGVISDLFGVNGLRILDGIVAGKPPEAILGSLSPHVRPHLKELHDALSARLDEESLFLLTDLLEAWHQTRRRLVGYDAAIERGLSEFPETIELLITIPGIDRESAAAILIELGPDIRVFRSRRHCAAWAGLCPGNNESAGKQRRSQTRRGNTTLREVLIECAHGAARTQDTQFEGYRKALSIRRGQKRATVATAHKMLRVIHSMLRSGRSYRDLVVSHEKLMLRRNAPRWIRKLREYGHMPPPPAEFVTAPRPETAHWLAEHAS

SEQ ID NO: 191061 - protein, 315 aa, unidentified
MTQTNMTTAGIDTSKLKLDIAVHGRTERWQVANALPGWRALAASLAQAGVTRVGIEATGGYECGVVKYLRAAGLTVLVLQPMQVKAFGRVHLRRAKNDVLDAVLIAACAATLDQPRIIPDPRLAELARYLTFLEQIEEDIARFKTRLEHIDEPDLRRIVSSDIRRLKARRTAQIRTIAKHLRGHADLAGRLELVLSIPGIGERTALALIIRMPELGQISREEAAALAGLAPFDDDSGKYKGQRHIAGGRGRLRRSMFAAALPAAFRWNRALIALYARLRASGKTHKVALIACARKLLIYANTVVQRGTPWTENAA

SEQ ID NO: 191062 - protein, 347 aa, unidentified
METILAIDLGKNKSVFCQMDRASLKTKYRTVRTRPELFHDIFAELNANSSIVLFESGNQAGWLADMLRAMQLPFKVAAWKWTNNPVKSDKKDAKRLAVMYHHGFFPEVHVPVKKVRQKRSLINYRQKLVTRMTQIKNSIRAIMCSMAIDLPAGRNCWTKKHLETISQHASPLKQIDDPCQLWRGQLHAELQQYKIVQQQLDRVTAKLDALGKKDPATILISNAPGIGPRTAEAVSAVIDDPHRFKNARHVSSYVGFTPRRYQSGEMDRTGRISKHGNPLLRMLLVQASWASLQYAWAREIYDRVCRGSAKRRKIAIIAVARHMLIRCWAMLRDNKPWRHDRCKVARV

SEQ ID NO: 191063 - protein, 410 aa, unidentified
MTKIIVALDAPVLVAIDIAKARHEVLIAIPDKKRRRRLTVLNELADFNRLATALKEYGRPVRVAFEATGNYHRALAYHLATAGFEVKLVSSVALARTREALNNSWDKNDPKDAQVILHMMEIGNEQYYHDPLVCGTNDIQELSKTHDIVSKSKTELWHRVLPHYLPLYFPEAGRFYRSSRSDWFFAFLERYPSPHLITAMGKAAFTADAWDVIGRKVAKERLLADIYETAKSSVGLPVAPDSDAIRMFRLVLGEGRSLIAQRNQIEDRAVALLKDLPDYQLLTSIPGIGPINALTILAEAGDLRRFGHHRQFLKFCGMDLATIQSGTFRGQTKLSKYGNARLRRTLWMAGQVAILQRTNSFRDKFERYIAKDRQNTHLRRKAYTAIAAKMARTVHGIIKHGEPYRPFFEG

SEQ ID NO: 191064 - protein, 366 aa, unidentified
MLIHVPPDVDVLAMDVHKNTISAGLLEAGSTRPVVDKISTDDESIRRLVARFEDPRRVWACYEAGPTGYELSRTLRRAGMVCEVIAPSLIPARPGDRVKTDRRDAGRLAMLFRAGQLSSVRVPTVAEEAVRDLCRARADMVIDQTRARHRLGKFLLRHGRVWRDGTNWTLKHEAWIAAQRFDDAALTATFCHYRATLTARQAAVAAIDADLATWCAKAPFADPVARLGAYRGITELGALTLASEVCDWRRFPTASMFMGFCGLVPCEHSSGERTCRGGITHAGNTHLRTQLVESAWAYKARPAAGVTLTKRQEGLDPAVVARAWAAQLRLCGKFGRLDARKTNRKTVVTAIARELAGFVWAEMTAA

SEQ ID NO: 191065 - protein, 478 aa, unidentified
MPQHAAGRSARHSTINERHIMSVLRKVKIKSATTKANVQLPTLHPHAAGIDIGATQLQVAVPCDADPKPVRTFTTFTDDLLKLRAWLQHCGVRTVAMESTGVYWIPLYQILEAAGIEVCLVNARHCKNLPGRKTDVSDCQWLQYLHSVGLLRASFRPPEQICVVRSFLRQRANLVRYASQQVMQLHKALTQMNVQIHNVISDIVGVTGLAILDAVLAGERDGHKLAQLKDHRIKASGDVIARSLVGDWRAEHLFALRQALMTWRHYQTLLTECDAATARALAGFESRVDLSANPPPPSTLRHKKPHANEPRFEARTELYRITGVELTQVPGLQVSTALVLFGELGPDFVQRFPTAKCFASWLGLCPDNRITGGRVLSVKTRDVKSRSAEALRLAAQALWQSKTYLGDCFRRWKARLGTPKAITAMAHKLARILWHLLKYREAYDPRVWAAAEEKMRAKKLKRLHQNATALGYKLITAT

SEQ ID NO: 191066 - protein, 405 aa, unidentified
MRYYVGVDWADQTHAVWVVDESGTKIAARAVSHTAEGLGEWGRELDEWRAQGIDLWAAIERPDGRVVDVLLDHGVVVYPVNPKALDRARDRFRQSGAKSDPFDARVLADFLRTDHAHLRALPPSSEAAQELKLLTEDCQRHIRQQTRLVNQLTATLKAYYPRALEVAEVTSALAREFLPAYPTPEALTALTERQWQRWARAHRLPEARAGELWAVLRPPQLPVPAHVVRAKARLMQTLMEQLRPVVAAVAQYRKAIDDFFARMPAAQWARTLPIGKHGIPAPTLWARLGDAPRRWESFRHLQAHAGTVPVTKRSGKQQRVVQFRFACDKALRYVVDQVAYLSLLSSAWARPYYDPQRARGHSHRQALRALGAKWLKIIFIMWQRQVPYDEQYHLATMTRQQLGRR

SEQ ID NO: 191067 - protein, 403 aa, unidentified
MVYVGVDWAEAHHDICVVDEEGLVLAKRRVPEGLEGVGKLHALVAEHAEDPAMVVVGIETDRGLLVGSLVAAGYQVYAINPFASSRYRDRHATSGAKSDAGDARVLADLVRTDRHKHRPLAGDSNLAEAVQILARAHQGLVWTRQRQVNQLRNALREFYPGALTAFDDLDAGDAMAVLERAPTPSLGRTLSQAKIISALRHGGRTRNLEAKAAQIQAKLRLPQLEVPALLAQAYGHSVVATVAVIKQLNLQIAVLEQELASNFEMHPDAEIYLSLPGLGLVLGARAMAEFGDDRTRFLNPKARKSYAGTAPITKASGTRKVVLARVARNRRLADACYLWAFSALTRSEGARHRYDLLRARGQTHHQALRALANRLVGILHGCLTNREAYSEHIAWSAHVPVAA

SEQ ID NO: 191068 - protein, 400 aa, unidentified
MNPELRVAVDVGCTRHRVAVGLSEGKLLEEFDINHDAAGLSEFFARVGRHERQWGLPVAVAMEGYNGYARPLDERVLLHGYRLFNVNNMKLARFKEIFPGPAKSDPVDARKMLEMFSLKDKLPLAREALQEVAPVAEVNLQLKALTRRRKQLVNERMRVSSRLQTDLQAVCPGLLDITGEADNLWFLNFLTCRADLTKLKTVREASLLALRSVGKGYAGKIRHWQKQATFSETVAWVGPMIIEDAKRMLELRKSIGALQTQIDALAEHSEIAQRIDTIPGYGRVCATELAGEIGSLQRFRGESSLALYVGMAPLDDKSGARSGSKPPRHVNVRAKAAMMIAAAKNAASVPESKAFYDRKRSQGKTHNQALRALGRNLVRVMWSMFKHGRDYQLESSSKKA

SEQ ID NO: 191069 - protein, 377 aa, unidentified
MTQVPVSTSSEQSIYAALELSKNSWLLAIQFPGRDKPSLYPIGGGNAEGLMTKLDAARDRVAKVTGQVPKVTLCYEAGYDGFWLSRLLEQRGIECLVMEPASLQVNRRARRVKTDRIDVEKLLHTLIAWCRGERHVCSMVVIPSVEEEDLRRSHRERGRLVRERTAHINRIKGLLFGQGIRGINVMKNYKTLAPAELVTGDGRPLPKRLGREITREIERLAQVQAQLVEVERERDLAPTPCEATERKRHELLRLKGIGPTFSAVLSREVYYRRFANRRQVASYIGLAPSPYDSGDGRRSQGISKAGNSLVRYTMIQAAWLWIRHQPNSALTQWFRRRTEGESKRMRCIMIVALARKLAIALWRYVETGLIPEGAVVK

SEQ ID NO: 191070 - protein, 405 aa, unidentified
MQAIIERCCGLDVHQETVVACVLVGAPGAQPKKEVRTFRTLTRDLEALRDWLLEAGVTHVGMESTGVYWRPVYSVLEGCFELIVGNARHIRNVPGRKTDVKDSEWIADLVRHGLIAKSYVPPRPLRELRELLRYRRKLVESQAAERNRLLKLLETANIKLASVASDVFGVSGRAMLRELIAGEASPEAMADLARGRLRHKRGDLILALDGRLEEHHRFLLAMQLRRLEAIEADIAALDLRIGKRLEPYCAQHALLMQIPGVDWVVAAVLIAEIGVDMSVFVSVYHLAAWAGVCPGNHESAGKQKSGRARKGNIHLRAILVGAAISASKTMYHRLKARRGALRAALAIAHKILVSTYYMLAKNSPYRDLGEAYLDQIGQSRTVTNLKRRLERLGYRVTLEPNAQAT

SEQ ID NO: 191071 - protein, 412 aa, unidentified
MQVVYERCAGLDVHKRTVVACANTPDASGHPHKQRRTFSTMTTDVCQMRDWLKSLGVTHVAMESTGVFWKPIYNVLEGHFELLVVNAQHIKAVPGRKTDMNDAEWIADLLRHGLLRPSFVPSVQERELRELTRHRTRLIEERSRVVNRLQKVLEDANIKLAVVASDLMGKSARAMLSALLQDEVDPAALSDLALGKMRVKRGALEQALTGRLKAHHRFLISEHLVHIDTLDEAITRVSNEIAERMHPFEPLLRRLETIIGIKRRLAEVILAELGTDMGRFPSARHLASWAGMCPGNRQSAGKRLSGRTRKGSPWLRTALIEAAHAAAHSKNSYLSARYHRLAVRRGVKKAAVALGHTLLVIIYHVLTQERDYEELGGNYFDERDRQAVEKRLVRRLEHLGYQVSLTPTAPAA

SEQ ID NO: 191072 - protein, 343 aa, unidentified
MDQFAGLDVSVKDTSVCIVDETGKIVREVKVASEPDALLTVLKNRTYHFKRIGLEAGPLSQWLYSALAEAELPVVCVETRHMQAVLKAQINKTDRNDARGIAQMMRVGLYRPVHVKTLRSQKLRMLLTHRKLMLSKAIAIENDLRGTLRNFGLKVGMVGTVKFEARIKELIENLPDLAVLVEPLLVVRRVLREQIGILHRRLLVIVRDDAVCRRLMTVPGVGPVVALTYRATVDVPARFRNSKAVGAVFGLTPSKYQSGEINRTGAISKCGDEMMRVMLYEAAQVMLTRTNKWSWLKAWAMQIARRRGMRKAIVALARRLAVILHRIWVDGTDFRWTREVAAA

SEQ ID NO: 191073 - protein, 342 aa, unidentified
MKKASIIGLDLAKRSFQAHGALADGSVAFRKKLTREKVLGFLAEQPRCVVAMEACGSAHHWGRAIRDAGHEVRLIPPAYVKPFVKRQKNDAADAEAIAEAASRPTMRFVAVKTEEQQARAMLFRTRDLLVRQRTQLINALRGQLSEHGVVAPQGPANVAILAQAIDDMTPSLPLLVVELARVYLDQIDGLSEKVAGLEKAIACEAKRGAMTRRLQTMPGVGPITATAIETFAPPMEVFRRGRDFAAWLGLVPVQHSTGGKQVLGKTSKMGQRDIRRLLITGAMVIVRWACRKAAQEGTWLHRMLRRKPRMLVAIALANKMARSIWAMLTKGEDYRAPGAATP

SEQ ID NO: 191074 - protein, 347 aa, unidentified
MVMIGTDSHKRTHTFVAVDDVGRRLGGCTLRANTDGHLQLLTWAAQFQEVTFALEDCRHLTRRLEGDLLRAGQRVVRVPTRLMAGARRGARTPGKSDPIDAEAVAVAALRHPGLPVAELDGPARQVKLLSDYRRDLVMQRTRACCQLRWHLHELDPDLALPSRSLRQANTRARVEAFLDTQDGIVVRLARKLLVRIADLSEEIKDIEKELKTLVADQAPTLLSLPGCGVFSAAVIIGETAGVHRFRDKDAFARFTGTAPVPVWSGASAGKVRLNRGGNRQMNYALHMIALTQARGVGPGQAYLAKAGARGKDRVAAMRLLRRRLSDAIYSALRADQIPASTHIQQAA

SEQ ID NO: 191075 - protein, 431 aa, unidentified
MEIIHPYACGIDIGSKNFYVDAGEETIKVFPTFTADCNALRNYLKSLGITTVAMESTGVYWVILYSVLEEAGIDVYLVNGRDVKNVPGRKSDIKDCQWLRQLHSYGLLRKSFIPGSEIRKVRSYLRLRQDHIRASATQVNLMQKALIQMNLRLAEVINDVSGTSGLRIITAILNGERDPHVLTNLCVSRILKTKKEQVIKSLEGYYSEEHLFSLKHAYNTWEYYNTLIKECDSEIEKQLTMMTKDKDEIDIRSKRKPIRYHKPEIKDLHQPLLKLSEGRDPIGIAGITDYSFLQIVSEVGTDMSPWPSEKHFTSWLKLAPLSSSSGKMKKRVSMKRHNNAGLIFRNLAQGILSSKHIALGSFGRTIRARRGSSVAIKAIARKIACYYYRVMTKGEDFVEKGLLAYEEHLKDKKRRYLEKMALQLNLQLVPG

SEQ ID NO: 191076 - protein, 345 aa, unidentified
MKYYAGLDVSIKETSICILDETGKVCRETKVMSHPEDIIQALNCPALRLERIGLEAGPLSQWLFSCLAEAGLPVVCIETRQAKAFLKAQVNKSDRNDARGIAQMMRVNLFRPVHVKTLTSQKRRALLTARKLLQEKAIALENDIRGVLRNFGLKVGVVGAVKFEERISELVEGARELAEIMTCLLAARRTLREQAAKLHRMLLSIVRDDDVCRRLMTIPGIGPVVSLAFVATIDIPARFKNSRSVGPALGLTPILNQSGESSRIGRISQCGDAMMRALLYEAAHVMLTRTIKWSWLKAWAMNVAKRRGKQKAVVALARRLAVVMHRMWSDGTTFRWTRQQEQHTA

SEQ ID NO: 191077 - protein, 456 aa, unidentified
MKIPQSTIRLLTGRLVKILLNKEVSIMKSNTQNAKIEAITENTLVLGIDIGSETHYARAFDYRGIEYSKKPFKFSNTEAGFMSFKAWIQDMKEMHEKDKVVPGMEPTGHYWFNLGKFLQDNEMRPVLVNPHHVKKSKELDDNHPTKNDRKDPKVIAGLVREGRYMIPYLPEGVYADLRTASNIRFQLQAELTRIQNRISRWFNIYFPEYKTVYGKPDAKSGMMILKVAPLPEDILTLGIDGVNQIWRDAKMRAVGKARAKTLMEAAEHSVGSKEGAVSARMEIRMLLEDYESRNVRLQEVMALIEDLVKQIPMAEKLLEIKGVGIKTVSGFLAEVGDISRFNNPKELQKLAGLALVENSSGKHKGETRISRRGRKRLRYLLFEVAMSLVSKNAEFKELHIYYTTRRINPLKKMQSLMAVAAKALRIFYAILTKGVAYDPKKMINDIKRPKIYLQAA

SEQ ID NO: 191078 - protein, 369 aa, unidentified
MVEDSEAFVGIDAAKSRNAIAIAEAGRAGEIRYLGEIDATPQSMRKVVARLAAKYQRLYFCYEAGPTGYGLYRQLTALGHDCIVVAPSLIPRKPGVRVKTNRRDAIALARLLRAGELTPVWVPDEPHEALRDLVRARDAAVADLRRKRQSVTSLMLRHGRIFPGKTTWGARHARWLQEQHFEHPAHQIVLQELVLAIQHAHERLERIEAAIAEFVPGWSLAPAVEALQALRGVNLISAVTFLVEVGDLRRFETPRQLMGYLGLVPGERSTGDTVRKEGITKAGNSRARRTLVESAWTYRYPPRIGKVKLYHLQRVTPAIRDIAWKAQSRLCARFRALAARGKKSTVAVTAVARELAAFMWAIVRAVPAT

SEQ ID NO: 191079 - protein, 319 aa, unidentified
MAQNGLIVAGIDIAKDKADVCIRALSQRQTFPGTSEGRRQLISWLRKHKVTKAVMEASGGYEREWTRTLREKDIEVRIVDPKRVRHFAQSAGRLAKNDVIDSDTIGWFAEIFGEAPSQAHDAAREKLQQMVNARQGLLDMKTMLSNKGEHDVPEPVQKSHARLLKTIAVELAKLEAAITATIKATPHFAARAEIIESVPGLAGTTSAGLIAAMPELGQVSNEAISALLGVAPYDDDSGKRQGGRQIKGGRRKVRNLFYMACLGAATRHNPALKAFYRHLIAKGKKAKVALVACMRKLIVILNIMIARGEKWDASRYAVG

SEQ ID NO: 191080 - protein, 325 aa, unidentified
MAGGVFVGVDVSKDRLDVAFRPSGEKLTVPNDRRGVTRLVRTISRLKPECVVLEPSGGYERKLLEQLSEEGSPVAMVNARNVREFARASGRLAKTDAIDAAVLAHFAEVMKPELRRLPDPETRKLRALITRRNQLVRMMTAEQNRRLQALESVRAGLSAIIRCLKKQIGVLDKQLAALIRATPAFRQKAELLRSAPGVGHVVSATLIAHLSELGTLNRKKIAALVGVAFSFNRDSGKLKGKRAIWGGRGDVRSMLYMSTLVAVRLNPSLRVFHERLRRAGKPPKMALTACMRKLVVMLNAMLKAGGRCTEEGIRPVKIIPARVST

SEQ ID NO: 191081 - protein, 371 aa, unidentified
MSQYTTDTIWVGMDVHQDSITAAILFGNDPEPKIERLPGDLNAVRRMFRRLSKHGTPRSCYEASGAGYVLQRCLEHDGFHCEVIAPSLVPKKPGDRRKTDRLDAIHLAHHYRAGNLVPVTVPSAEQEEVRQLVRSRLAVQSHVVRLKHRIVRVLATHGHRFTGGKSNWTQKHRVWLRKLHRELSGPLGIVLAHHLEHLEYLEAQKNSLEMEIDRYACSEPYRKKVEALCCFRGVKTLTAMTILTELGDIRRFKKATGLMAFAGLVPSERSSGNVRRRGRITKAGSQELRRILVEASWHYRKQACSDLILKRRRMGQNPEVVSIAVKAQHRLQKTYWKIASRKHPCTAVTAVARELCGFIWSALWALESQED

SEQ ID NO: 191082 - protein, 346 aa, unidentified
MICLGVDQSKHFSQYTIGDEKGKIFKRIKIANTSEEIQQLMESLPEGPKRAALEASRHWGWLHDELEKHVDEVLLGNPLEMKAIAHAKIKTDAIDSETIYHLLRADLLPTCFVPPKEIREVKDQIRFRRFLIMLRTMIKCQIHTLVDRNHVLQPGQRPYQDLFSKKCLPALKKVELPEREKKILDELLKLYEQISEQIETGNEWIKELHEQSPESRLIDTIPGLGEFFSVLVCYEIGDIQRFSEAKKLCAYAGLVPSIYASGRKMFYGRITKRGNSHLRWAAVEAVTPAIQSNAFLRGEYEKIKQRKGVNIARVAIARKLLEWVYRVWKTGKTFQELVSQITLVAA

SEQ ID NO: 191083 - protein, 342 aa, unidentified
MKDTTISVDVAKSVFEIAVSLRPGHVAETHRLPRPRLGPFFAARQPTTIVMEACGMAHHWGRELQSQGHRVVLLPPHAVRPYVPRNKTDRTDAKGILEAFRNEAILPVPVKSVAQQALAALHRLRSRWMATRTSRINTVRGVLREFGLPIPVGSRRVVPGVRMFLEDADSGLPDAIRPALATACDEIRDLEMRIASVERQLEALARETPVVPTLRSVPGIGLLTATALVAIVGDAHRFPSGRHLASFIGLTPRESSTGLRRRLGTISKRGDSYLRMLLIHGARSVICHAKKAGTHDRLRSWALDREQRRGHNKAAVALANKLARIVWAVWTKGVPYQETPAA

SEQ ID NO: 191084 - protein, 342 aa, unidentified
MEHYAGIDVSLECSSVCVVDCNGKIVREAKVASEPQALIAWFGALGFGLERIGLEAGPLSQWLFAAMKAAGLAVELLETRHVRKAFEAMPVKSDRNDARGLAQLMRLGWFRPVHCKSMSAQEIRSLLTARKLVQSKLLDVENSLRGILRGFGLKVGKTTKQTFAGRIEELVAGHPHLQMIAKALLAVRAVLRTEFAAFEKQTRRMVRSDMQARLLTSVPAVGPIVALTYASAIDDPARFKSSKQAGAHFGLTPKKHQSGETDYTGRISKIGDASVRTALYEAANVMLTKPVKGCSQLKSWAMRIKRRAGTNKAKVALARRLAVIMHRMLADGTPFNAAAAAA

SEQ ID NO: 191085 - protein, 354 aa, unidentified
MKRTTKYVALDVHQAMTVASVREESGRIIARSILPTEKSAIIEFFQGMRGALHVTFEEGTQAQWLYDLLVPVVDRVLVCDRRGEKRHGRKDDQADADELSELLRRGGLRAVYHGSPYRSTLRELTRTYQNVVEDSTRVMLRLKALFRARGIKAPGRRVYHPRDRQEWLAKLPDDGARFRAQALYAQLDVLRELRPKVKTAMVAEARRDPAWAVLGSIPFLGPVRIALILAIMRTPWRFRTKRNLWAYCGLAVVTHSSSDYELVDGRVVRKRRAPMTRGLNRNYNRELKDVFKGAATAATGRPGPLLDYYEGMIARGMREELARVTLTRKLTALTLRLWKKGEHYDPAQLTKQAR

SEQ ID NO: 191086 - protein, 443 aa, unidentified
MARKNQKRFEIIHRDCAGIDVGSREHFAAVDPERCDNPVRKFSTFTDDLIALADWLTSVGINVVAMEATGVYWIPLFEVLDARGFDVYLVNSRATRQTSGRKSDVLDCQWIWQLMTHGLLSGAFRPSDAICSMRSLVRQRSNKVRDQAQTLNRIQKALSQMNIQLANVISNIAGVTGMKILRAIIEGERDPQKLATFRDRRIKSDQETIARSLHGNWRMEHLHALAQEVECYDFFEQQIAACDNAISEALKRLPALNNAPQPSAKVLRSPHRSSSEQAALHQALWRMMGVDLTAIPTIGIDTALVLASEVGPDLSRFPTSDDFCSWLGVAPPTRISGGRQLPGRPPKVINRAAQALKQAASNARNDKSFIGASHRARLARMDTSCAIKATAHQLARLIYSMLTKGQPYVEQGMEAYEAKSKERQLRALLRKAHKLGMELVKAA

SEQ ID NO: 191087 - protein, 288 aa, unidentified
MEHFAGLDVSVKETSLCIVDETGRIVREVKVASEPVAPLRVLGNPIYRFKRIGLEAGPLSQWLFSALAEAGLPVICVETRHMRAVLQAQINKTDRNDARGMALMMRAGLYRAVHVKTLRSQKLRMLLTHRKLRTLREQIGTLHRRLLAIVRDDEVCRRLMTVPGVGPVVALTYRATVDVPARFRNSKAVGAVFGLTPSKYQSGEINRTGAISKCGGEMMRMMLYEAAQIMLVRLAKWSWLKAWAMKIARHRGMKKAIVALARRLAVIMHCIWVDGTEFRLTREVTAAA

SEQ ID NO: 191088 - protein, 375 aa, unidentified
MREKVRFLGLDVHAETIAVAIAEPEGEVRSLGTIPNREDSLRKMIKKLGPTDKLRVCYEAGPTGYVIYWQLAELGVKCEVIAPTLVPVKSGDRVKTDRRDAEKLARCYRAGDLTAVWVPDEGSEALRDLVRAREAAKQDQLRARHRLSKFLLRSGQRPPSGVRSWTRPYLIWVAQLRFTQMAQEATRLDYLHEVEHMRERVERLEQAITEAVKLASPALQQVINDLQALRGIADISAVTIAAELGQVSRFDSARQLMGYCGAVPSESSSGKRTRRGSITKTGNAHLRRIVVEAAWSYHRPPGIWYGLRKRQESISEEAKEIAWKAQHRLHKRYLRLAAAGKDKRKITTAVARELLGFIWAIGTRAETEVRQRIAA

SEQ ID NO: 191089 - protein, 344 aa, unidentified
MQITTVGIDLAKNVFQVHGVNDRGMAVLRKQLRRDQVAAFFANLPPCLVGMEACGGAHHWARKLQGLGHTVKLMAPQFIKPYVKSNKNDAADAEAICEAVSRPTMRFVPIKNIEQQSVLALHRVRQGFVRARTAQANQIRGLLGEYGLIVPQGIGHIAIRVPGLIEDASNELPGTFRLLIHRLLEHLKQLQRQVAEIEGQIKAWHRSSEASRRLEKVPGIGLLTATALVATVGDAKNFDNGRQLAAWLGLVPRQHSSGGKSTLLGMSKRGDAYLRTLLIHGARSVIYRAGQRAHADTWLVKLIRRRNANVAAVALANKTARITWALLARDREFQFDYTTVAATA

SEQ ID NO: 191090 - protein, 410 aa, unidentified
MEPILISCAGMDVHEKKVDVCIAHGPLDKPPIFEIRTFSTMTSDLEVLKLWLKKYEVTTIAMESTGIYWKPIFNILEDEFDVVLANPQHIKALRMNKTDIKDCKRIANLLRHGLVPRSFIPPREIRELRELNRTRRKLVGIMASEKNRVVKILEDANIKLSSVVTKIYGVSSLSMIHALLEKDKLSRDEICEMAKGKLKKKVDLLEKALDGKLTDHHRFLLRMHLENIQYLAGQIKKLDDEIKQKMVPFHQESKLIQTLPGINEVSASAILAEVGIDMSQFPDESHLCSWAGVCPGNNESAGKRKSGRTKKGNSFLKGTLTEVAWAASRTKSSAYHAIYNNLAKRIGKRKALVAVAHRMLIDIYRVLKMGEPYHEIGAEAAHERAVERREQSMIRLLERAGYSVSRAAIA

SEQ ID NO: 191091 - protein, 391 aa, unidentified
MYYCGIDVAKRKHAVAVVDEHGHPQVAVFTTENTQAGMNVLLEQLKPLGTEVSIGLEATGHYWLSLYDVLTRHGYPVSVINPMQVAAYRKSGIRKVKNDRTDAVWIADFLRISNLPASKQDIPTLMQLRELTRFRFWLSDQIGDCKRKLLTILDRVFPEYEKLFSDVFVSSSRALLQEAVSAQEFADFDLQELTDLLSKTSRKRFGAEKAKQIQEQAQKSIGVGFLADAVHVEMRCLLAQIDLLEEQREEVEKSVERLMAELPQYIASIPGVGPVSGAAILAEIGDIARFESPEKLIAYAGIDATVHQSGQFQAQQMHMSKRGSAYLRLALWQAASMSLLHNEELKKYYDKKRKEGKAHRVALGAVCRKLLIRVYVILKENRPYVLHPLLS

SEQ ID NO: 191092 - protein, 379 aa, unidentified
MTCKGRGRVAKLTRAMEYLSNIELSSPEGTRSEFNPGKRVIKLGIDVHQEFYVVAMQEGGGNPKPAQRFKKAAFLCWASKLKHSGGAQIHAVYEACGYGFDLQRSLTSLGIECHVVCPQKLDEGNKRVKTDGLDAKALCLRLDRFVEGNREALAVIHVPTEAEEQLRAIHRQREQLVKARKQLEAQGRSLMVNHGIEPVKSWWKRRSFAALCVPEWMKELLTNSQPILLALEEKIRTLTVQLQAAAAPGQPRGLGAMTSVIIDREVGNWSRCRNRRQVGSYTGLCPGEYSSGKTRLQSCVTKHGNPRLRAALVELAWRLVRFQPNYQPVVKWRKILCTGALATGAARKKAIVAVARQLAVDLWRVRTGRLSAEALGLII

SEQ ID NO: 191093 - protein, 402 aa, unidentified
MNCVGIDVSKGKSMIAVMRPFGEVVVSPFEVRHTANELSELAGLLKSLDGETRVVMESTGNYHAPVAWLLHDAGLYVSVVNAMLVHDYGNNSLRRAKTDKKDAIKLANYGLDHWLTLPRYVPEEDTRLMLKACYRQYQQYSKVQTMLKNNLISLLDTTFPDANRLFTSPPRDDGREKWIDFVATFWHRECVCDLSEKAFAAKYQKWCKKYGYNFSEGKALDIYAAARGHFGVMPKTDTAKLLVEQAISQLRATSSALAALKQEMLSLTSQLPEYPIVMKMFGVGPTLGPQLIAEIGDVRRFYSKKALVAYAGLDAPPNDSGDVSGRHKSMSKIGASSLRRTLFLVMTVYLQNKPLDEPVYQFMDRKRAEGKPYRVYMMASANKFLRIYYASVKAYLETLERF

SEQ ID NO: 191094 - protein, 341 aa, unidentified
MKKFIRIGVDLAKNYFQIHALESEGGAAVTRKLTRTKMREFFSRIEPCLVGMEACGSAHYWARELKAMGHEVFLMPPSYTKPYVKRGKNDAVDAAACCEAMSRSGMRFVPVKSAEQQATLMLHKTRELLVKQRTMSVNALRAHLSEFGIIAAKGIGRVDELLDLAESDATLPNAANAVVKVLALQLEGLDSSIDDMENAISRAHAKSEISRLLDAVPGIGKIIASVISASVPDPNVFKTGRDFAAWLGLTPRQNSSGGKQTLGAITKQGNRYIRKLLVLGATSLLHIVGKRKGALRDWIVAMLAKKPARLVTVALANKLARILWAIMKTGEAFRTEIFAKA

SEQ ID NO: 191095 - protein, 291 aa, unidentified
MEQKYFIGIDISKQKIDVAIILSNYQVVFEKIVVNQDKNITSFFKGLMRKLKCSSSEILVCCETTGIYNKPLARVCIELNIDLWIEHALKIKFASSDLRGKSDRKDAMRIAEYCVRYQDRKHLYECPSVAIEELDTLCKVRETLLANKVGIENQLREAKSHDTRKFQQLKQLFNRQLKSLEKDLRELELKIEEKLLENNEMRSNVELIKSVPGVGKRTAIQLVILTNNFKDFTSAKHLACYAGVVPFTNESGTIKKKPRISKKANLKLKTLLHLSAMAATRSKTELKQYFI

SEQ ID NO: 191096 - protein, 428 aa, unidentified
MKYNTQNAKIASITEKTLIVGIDVGSETYFARAFDWRNYEFTKKPFEFSNNEAGFLSFKAWVEDLLEKNGKSVVIPGMEPTGHYWFALGKFLQDNGMRPVHVNPHHVKKSKELDDNNPNKNDRKDPKTIASLVNEGRFSYPYIPTGVYAEIRSLSNMRFQAQEELTRAKNRIARWFSIYFPEYKDVYRDFKAVSGRIVLQAAPLPEDIRKLGVEGVNRIWRGAKLRGAGMKRAKTLVSAAEHSIGSKEAPEAARIELRNLLNDMDVYASRVEELLGMIEEKLKEIPYIDKLMAIKGVGLLTVSGFIAEAGDIRRFEDPKQLQKLAGYAIVANESGKHKGESRISYRGRKRLRYVLYEAALSLIGKNAEFKEIHEYYRTRKENPLKKMQSVVAVACKVIRIFYVILTKGVDYDPEKMMGDIRRPQIQAA

SEQ ID NO: 191097 - protein, 347 aa, unidentified
MQVTTVGIDLAKNVFRLHGCDAQGRPVLRKQLARRQLLSFVANLPRCLVAMEACASAHYWAREIEKLGHQVRLISPRFVKPYVKANKNDASDAEAICEAASRPSMRFVAVKSTAQQEVQAVHRVRQQLVKTRTALVNQARGRLAEFGIVVAQGVGRLRRALPTILEDRENGLSGVMRELLGEIGERLRFIDDRLHKYDLTIQRLFRQDERCQRVAAVEGVGPLVATALVAAVGNATDFRSGRELAAYLGLVPRHRASGGRTVLLGISKRGDRYLRTLLIHGARSALLRIERQRSARAIWAARLKLRRGSNVAAVALANKNARVLWALLNRHQSYQPAPFPARVPQSG

SEQ ID NO: 191098 - protein, 338 aa, unidentified
MNIVFLGIDLAKNVFQICGLNQAGKPVYTKRTGRKELLQMLANIPACLIGIEASTGAFYWQREFEKLGHNVKVISPQYVKPFVRGQKNDGNDAQAIAVALMQPTMHFVPPKSPEQQDIQALHRARQRIVNHRTATVCQIRELLLDRGITIGAAVSRVRRAVPLILEDAENGLSVRMRSTIAELYDLFNDLERRIHFFDKEIETVFRQSEACQRIAKVKGIGPKTATAVVAAIGKGTEFKNGRHFAAWLGLVPRQHSSGDRQVLMNMTKKGDKHLRTLFIHGARAVVRVAANNNDSHMNQWVNQLKERRGFNKTTVAVANKNARIIWSMLRNETEYQVV

SEQ ID NO: 191099 - protein, 388 aa, unidentified
MSKVTMIGCDVHDASLVLKVAVGQEAAVKKTFGGSEVGEMIQWLQEFAQRHEAPRIVLVYEASSRGFGLYDQLRDAGIECHVLAPTHLPHTAHRRKNKTDDKDADMLLDEVRAYVLAGRKLPDVWVPDLRTRDDREAVRMRLQFGEQRTAVKNQIRQLAKRNSLAFPVWFTKSGEWSRRSLQWLREMAGGTSGCLAEGARAALLSLIDLYAALSCELKELDRAILKLARSPRYAQSFRKLKLMPGVGTLTAMVFLTELGELARFANRRQLAAYLGLAPAAYESGTHDDRKGHITRQGSARVRHVLCQAAWAAVRCCPESKAAYEKIRRGTSQRTKIAIVALMRKLAIAMWHTALSPEVTTLLDEIDRGKDSGEAPAENATGGAAALAG

SEQ ID NO: 191100 - protein, 427 aa, unidentified
MSSNEATRYGQFCQFKTEIRGSREYLIVGIDAAKDKHQAFFGTATGKTVLRRLIFENSRAGFQQLVDRARQLQAVHQLPKLVFGLEPTGNYHKPLANWLLENDQPLVLVSNKAIRENRELLDGRWDKNDTKDSANVADLISQGKCQFFEQPGADLSELRSLLGYRKRLKKQEHALRMQIRNGLLAKYFPELDRLWGNRLQENLAILRWCLDPREIAAMEFEAFMQRVAHRNTGAKQVRRLRAIWKVAAVSIGCPVTGAAVFEARQLADRLEDVRERIKQTEALMAEVAQRFGSYKLLLTIPGVGPYIASIVLAAIGDADRFDNRKQVIRLAGLDLNAKRSGKRSQAAPSHISKRGNADLRYAIYQAALIASYHDERLRALFVRYLQGREKEQGIKTKMRVKLAAKLLVIAWTMMKNQTAFNPALIQV

SEQ ID NO: 191101 - protein, 345 aa, unidentified
MEIHTIGIDLAKTVFHLVGVNARGEVVVRKKCSRNQLLRFTSNLRVSLIGMEACGGSHFLGRALREQGHDVRLMPAQYVKPYVKTNKNDYIDAEAIAEAVTRPSMRFVPIKTEDQLDLQSLHRVRERWVGRRTAVINQIRGMLLERGITVTKGRRHIEASLPGILEDSDNKLSGALRVLLTELQLEMQYLSRQIEESDQLILRIASELEPCRRLVAIPGIGPVIATATIAAIGNGAAFKKGRGFAAWLGVVPGEHSTGGKQTLTKTSRRGNRYLRKLFVQGAHAVLQKRRTQSTGLNTWLAQLTTRKRIQVAAVALANKLARMVWAVLYKGEAYRPPLLPQPVVA

SEQ ID NO: 191102 - protein, 341 aa, unidentified
MNTIYYIGLDIHKKTISYCIKKIDGALVQQGTVFAERKALLQWMQGLPGPWCGALEATIFTGWVYDFLKPHAVDLKVAHPEMLKAITAAKKKNDRADAEKIVDLLRVNLLPECHMLSEELRELRRILRYRNMIVRTAVKMKNKISGLLMETGTIYAKRRLHGRKYFESLLERIEDVPESVKDLLRLSRSSLEMFEAVQKKLVKILREDKQIHDRVQRLMTIRGVGEVMALTWVLEIGEPSRFTSARKAVSYCGLCSAQRESAGKEQRGPISKKRNKHLQTMLIETAKLAPHWNPELALLHEKELARGNRNRATLAVARKLVEYMLAVERQEKDFQSPKLAA

SEQ ID NO: 191103 - protein, 341 aa, unidentified
MSLYAGLDISVKTTAVCVVNGNGQVLLETVVESSPDAIADRLRELGQPPERIGLEAGPLSQWIYAGLIDIGLAPVCVETRHMHAVLSARINKTDRNDARGIAQMMRVGLFKAVHVKTPASQHRRLLLTSRKLLQRKIYDIENDLRGSLRNFGLKVGVVGAVKFEDRIRELVADHPVVAAIVGPLLEARAVLRIQFAKLHRMLLELVRTDPICRRLMSAPGVGPIVALTFRTCVDNPARFSRSKCVGAHYGLTPRLYQSGEIARTGRISRCGDLMLRSSLYEAALVVLTGTGRWNSLKAWGIAVARRRGMQKAIVAVARKLAIILHRMWRDNTDFRWTAPSV

SEQ ID NO: 191104 - protein, 341 aa, unidentified
MSPTHVAFNHIVAFEVAKETLVIHVLPGDGQHTIANKPKAIRKLLLRELRRNALADLGSLLVVCEATGGYESHVLEICVELGLAAHKAHGARVRHFAKYLGLLAKTDPIDARVLALYGLKTQGLRLYVPLTPEVVALKDLKTRRDQVQQMLIAETNRLEHARHASVTRSLKAHIASLRKALATLEADIAAHLKANDELARKACLMRSLKGVGPMTAATLLAYMPELGTFRKGEVTCLAGLAPIANDSGKSHAPRHIAAGRSTIRTALYMAALVALRHNAVVRRFAASLRQNGKPFKVVITAVMRKLIVTLNAILRSGEPWSHADSLKATRQVERADGIPGR

SEQ ID NO: 191105 - protein, 412 aa, unidentified
MLKIVYPICCGMDVHKSFVVACIATTNDHGVTNYKSKRFSTFTGDLRRCADWLSENNCKDVCMESTGKYWIPIYNILEHTCNIVLAHPKYVKAILGKKTDKRDAKWIADIFKHDLVSGSFIPPADIRQLRDLVRYHWKLTNFNVGEKNRAQNCLTVSNIKLDDVFSDVFGKAASAITTRLLESNEPFDVKPYLTKNIKKPIEQIQAAVDGEMCAEQAEKLRIIRSHMDSLELCKLNLESLILSTAEKYIPQLNLVMTAPGIQSFAAIGIISEIGVDMSVFPTSKHLCSWAGLTPQNNESAGKKKTTRISRAGAYIKPLLVQCALCAIRTKQFPEVRNRYLALKKRRGHKKAIIAIARMLLTAIYNILKWNEVYNSELYRKADRPPAHREVSVEEAVFILQRQGYLVTAPAVT

SEQ ID NO: 191106 - protein, 338 aa, unidentified
MKLYGAIDLHSTNSVTVVINEQDQVVYQKRLPNDLAQIAQQLSSYRRSLQGIVVESTYNWYWLVDGLMEKGYRVHLANTAAIQQYNGLKYTDDDSDARWLAHLLRLGILPEGYIYPKQERAVRDLLRKRGQLVHQRTANLLSIQSLISRTTGNSISAKYIKALNIERVDGVLPNPDHVLALKANLAVMNSADAQIEILEKAVQDRVKLRPQFRFLKTVPGIGPILALTIMLETGEIERFASVGNYASYCRCVGSKKISNGKRKGSGNTKNGNKYLAWAFVEAANFAIRFNSRIKSFYQKKKSKSNAIVAIKAVAHKLCRACYYIIKDQVAFDITKAFA

SEQ ID NO: 191107 - protein, 313 aa, unidentified
MKARSSEVFIGVDVSKERLDVAVAPSGETISFANSEDGIALLSEFIKPQAPVLVLFEATGGWEMNAVHHLAAQRLPLVVLNPRQVRDFAKATGQLAKTDAIDARILARFGQAVRPEVRPLKPEELRKLDALITRRRQISGMITAEQNRRVSAPEWIRPDIEKLIKILQKRLAAINRQLSKLIRKSPLWREKDKLLQSFPGVGPVTAASLIAELSELGSLNRRQIAALVGLAPLNCDSGTHKGKRKIWEGRAALRSALYMCALTASQHNPVIQAFYQKLLRAGKPQKVALRACMRKVLVILNAMMRRNTCWQPT

SEQ ID NO: 191108 - protein, 345 aa, unidentified
MENMYYIGLDVHKKTISYCVKDGSGRIYAEAEIPATRLDLDMWMKTLPQPWTAAMEATIFTAWIYDHLKPHAAAVKVAHPLMLRAIAAAKKKNDRIDAHKIADCLRCDFLPECYMASTEIRERRRTLRYRNLLVRQAVQMKNKIAVLLMEAGVSYNKQKLHKVGYFRELLATNQDIDEGLKPLLRLCRETVVRLGKTEGALVRSLQRDSLLRERVERLMTIPAVGPITALTWALEVGDVQRFSSIKKAISYCGLCGAENSSANIIKRTPLSKQRNKHLQTTLIEAAKMAPRNSVDLAMIYDREKQKGNANRATLAVARKLVAYLVAVDRRQKDFLVVETENRTAA

SEQ ID NO: 191109 - protein, 393 aa, unidentified
MAQAYAVFCGIDVGKGEHHAVGLDASGKRLFDKALPNDESRLRAVFDQLAARGPLLIVVDQPNTIGALPVTVARACGHDVAYLPGLSMRRIADLYPGQAKTDARDAHIIADAARTMPHTLRRVDLGDETLTELGVLVGFDDDLAGEATRTSNRIRGLLTSIHPALERVLGPRIAHPAVLEILSRCGGPEGIRTVGRRKLTAIATKYAPRMGGRLVEEILAALPAQTVTVPGTKAAETVLPKLADSLKAILLQRKQIAEDIERMFDDHPLAEVLTSMPGIGVRTGARILLEVGDGSAFASAGHLASYAGIAPITHRSGSSIRGEHPARSGNHKLKRALFLSAFAALHDPASRSYYDRKRAEGKKHNAALICLARRRCDVLYAMLNSKQPYRAAA

SEQ ID NO: 191110 - protein, 359 aa, unidentified
MSSISPPGTLSKIIIGVDTHKHVHVAVVLDDDGQRLGDLRVPVDSLGYQELDRWAQSFGHIIAYGIEGTGSYGANLTSYLRRQGRKVVEVNRGDRRARRANGKSDTLDAELAARSIIAGTSTAVPKSADGTVEMIRKIKVARDIACKNRTSAIISLKTVIVNTPQELKEQLDSLGDKALIQKCSGFRPGTVDDPISAAKHTLRALARRWEFLNAEVKDHDAVIAKLTTSLSPTLCDGFGIGPDTAAEILIVFGDNPDRVRSEAAFAKLCGVAPIPASSGMTTRHRLAWNGHRQANAALYRTAIVRMQHHQPTKDYVAKRTAEGLSKRDIIRCLKRFIAREVYGRVMADFRARTALSAAA

SEQ ID NO: 191111 - protein, 338 aa, unidentified
MAIVMGLDQHRAQITAEWIDTDTGELGRARISPALRGDVRRFVKRFAGQPLEVALEATTGWRFVVEELHAVGAEVHLAEPAETAARRGNKKRAKTDRADARHLCELLMIGRLPESWIPPEHLLDLRARVRLRHTLVDQRGEWQQRIQAVLYHHGFPQRNGLLTGENRAWLEALALSPSAREQVRIALQIIDSLDAQSAPITRELRLYARRQLGCRALMKHYGIGELTAVTILAELGDARRFSSSRHAVRYAGLDITVHQSDQRRAAGHLSRQGPPALRWALFEAAQAARRPGSPDRGYYDQAAERLGGNRACLALARKLLKRSFHTLRELGDEGLQPA

SEQ ID NO: 191112 - protein, 375 aa, unidentified
MKNKVRFLGLDVHAETIAVAIAEPDGEVRSLGMIANRAESIRKLVKKLGPVEQLKACYEAGPTGYVLYWQLAEMGVACEVIAPTLVPMKAGDRVKTDRRDAERLARSYRSGDLTAVWVPDAGSESLRDLVRAREAAKQDQLRARHRLSKFLLRLGLRPAAGVKAWTAPYMVWVRQVHFAQVAREATMLDYLHEVDHMGERVKRLEQAITEAVKLASPQVREVVKGLQALRGIAEISAVTIVAELGSITRFNTARQLMGYSGAVPTEDSSGQRTQRGSITKTGNAHLRRIVVEAAWSYRYRPAIGPRLRKRQEGVPEPIKEIAWKAQVRLHNRSMKLAAAGKDQRKIITAVGRELLGFIWAIGVKAEAASQLQMAA

SEQ ID NO: 191113 - protein, 313 aa, unidentified
MSDATCFVGIDVSKDTLDICIIPSGELWSIEYRDDELSKLNDRLEACGADLIVVEATGGYEIAVVAALAAQGLPVTVVNPRQVRDFAKATGTLAKTDRIDAQVLAQFAEAVQPEVRELKDDQARELDALILRRRQLIDMLVAEKNRLKRSTPSVRKDIREHITWLKKRLKDTDDHIDRLIKSSPLWRVTDELIQSIPGVGRVLSFTLLARLPELGQLDRRQIAMLVGVAPLNRDSGTYRGRRCVWGGRKDVRNVLHMTTLAAIQYNPVLTAYYRRLCTAGKPKKVALTATMRKLLVIINAMVKNQTQWGLASA

SEQ ID NO: 191114 - protein, 385 aa, unidentified
MVHAHYSLGLDVDKASFKACLKVKEDSNKSLVKATKTFSNTIQGFKELDQWIKKHKKLQDDQLKIIMEATGVYHEHLAWYFHQLNYLVHIILPLRAKRYMQSLGLKSKTDKIDAQGLADMGMQQELEQWKPCSKNLLLLRSLTRQVEMLQESRTAFRNQLESATHLANCDKMVIQNLKSLITKIEKDIKKLKARIEQFIKEDPALQSKYKLVEPIKGLGILTFTTIAAETGGFELFENQKQLVSYAGYDVVENQSGKRVGKTRISKKGNTHIRRIMHMASFNMVTYKVNPFHQLYDRVYDRTKIKMKGYVAIQRKLLCMIYALWKSDTVFDPGYVTKTTSGNHDPKTLFSVGPSGPEIKVATDIAMATLDELPCNQSPEALFSVS

SEQ ID NO: 191115 - protein, 382 aa, unidentified
MGKPIRFVGLDVHAATIAVAVAESGRDGEVRSIGTIPNRPESMRKLVRKLGPPETLRVCYEAGPCGYVLYWQLVGLGVPCEVIAPTLIPTKAGDRVKTDRRDAEKLARCYRSGDLTAVWVPDADHEALRDLVRAREAAKQDQLRARNRLGKFLLRHDRRRPGESKAWGAKHMQWLKTVKFEHPAQESTLRDYLGEVEHARERVTRLELAITDAVARAPAAMRAMVSALEALRGVRTLTAVTIVAEVGQLSRFAAAPQLMGYSGLVPSEHSTGGPGHARRGGISKTGNAHLRRVLVEAAWAYRFRPSVSADLRKRQKGLSDEVKAIAWKAQHRLHARYWKLTSGGKPAPKAATAVARELLGFMWAIGNQVERAQLGGSEHVAA

SEQ ID NO: 191116 - protein, 429 aa, unidentified
MAMVMIGVDPHKGSHTAVAIGPSEELLGRLQVRACASQAGQLLEWARAWPERTWAVEGAAGLGHLLAQQLVAAGERVLDVPPKLASRVRLLQSGNVNKNDPNDAFSVAVAALRSRGPRQVSADDHAAVLKMWAKRHRDLGRSRTQAACRLHAVLCDLVPGGTTRDITAARAAKILQQLTPANPVAAARCELAAQFLEDLRGIDAKIADARRRLAAAVKAHGTSVTSVFGVCPAGAATVIGDVVHIWRFTSRNHFASYDGTAPIEVSSGNRKIHRLSLRGNRRLNHVIHMAAITQIRHKHSDGRAYYERKLAEGKTHKEALRCLKRRISDAIYACLQADARAAATASPGGPGGQPGNDSCSSAAGSHPGHRLFGSATPGPAASLRPGPGPQHRKNPTAAAGKASHSAGPARARRAAPLAAVTVPPGTAAS

SEQ ID NO: 191117 - protein, 426 aa, unidentified
MGISKPAGLKSPCGEVKIVNPLFVGIDVSSKNNVAYLMKPDGSKHSSFSVQNNLGGAKLLSERIVSALGSMQLERVVIGLEATSIYGDSLVYALREDGRLGRFQRKIHVLNPKQVRKFKEAYSDLPKNDWVDAFVIADHLRFGRINREVYMDDYRYKALQTLTRARFDVIQNLTREKQRFANYLFLKCSGMAQDKDIQNTSATTIALMEHFETVDDLANADLEELTAFITETGRGKFADPDATAKAVRAAAKGSYRLPKTVNDTVNQAMAVSIASMRALKGQVKVLDKAIEQQFEIIPNTLTSIPGIGKVYSAGIIAEIGDIRRFDSQASVAKYAGLVWNRSQSGDFEAEHSRMIKSGNRYLRYYLLEAANSVRRCDSEFRRYYDLKFKEVNKYQHKRALALTARKLVRLVFRLLKDNRLYIPPEG

SEQ ID NO: 191118 - protein, 417 aa, unidentified
MITTKNAKRINEKTLLVTVDVGKKVNVGYGRRPDRSEIKAFEFSNDRSGFEKFWKRLQESQHKHPLERVVVGFESTSVYGEPLVNFLKDRPVELVQVNPMHTKKMKELEGNSPNKTDRKDPCVIADVIELGHFLTVVVPEGPAAELRRLSQARERAIERQGRLENQLHGLIFLLFPEFWGIMKGIKSKSARYLARRYPLPRDILGLGLESLTVELKKVSQGKLGRTRAQALSAAAEYSVGLQEGQQSLLWEVQGLVREWETTQELIEQTEQAMGRQLDQVPYSHSLLSIKGIGEVTAAGLIGEVGDFRKFRTIAEVLKLAGLDLYEISSGQHQGQRHISKRGRAFLRKLLYFAAMSMVRQGGILHTPYQRHLAAGMAKPKALVAMARKLLGIIVALVRDHSQYQIEYVRTAALPLAA

SEQ ID NO: 191119 - protein, 342 aa, unidentified
MQITTIGLDIAKNVFQVHGIDTAEKVVVRKRLRRSQVLAFFKTLPPCLVGMEACATAHYWARELTKLGHSVRLMPAKDVKAYVKRNKNDAADAEAICEAVRRPTMRFVQIKSPEQQSRLMQHRARDLLMRQRTQVINALRAHLAELGITAAQGNAGLKELLAIIAGDEDERLPADAHAILIVLAAELQAMQTLIGSIEKRIMAQHRVCEESQRVETIPGIGVVGATAITATVTDPKVFRSGRDFAAWIGLVPRQDSTGGKQKLGPISKQGDRYLRRILVVGAIAVLQRARQQPEKYPWLTQLLARKPFKVVAVALANKMARIAWALLAKGGTYRAPELAAAA

SEQ ID NO: 191120 - protein, 343 aa, unidentified
MNAVTLVGIDLGKHCFHLHGQDASGRMVFRKKLSRNQMLATLANLPVCRIVMEACAGAHWIARRLSAMGHDARLISPQFVKPFVQGNKNDFADAQAICEAASRPSMRFVSPRNESQQTISATHRVREALVRERTSATNQIHAFLLEFGLSLPKGPAIIKRLPAVLAEHEANLSPRLVALIERLREHYKYLDEQIKAVEKELSQQLAEDERSQRLLEIPGIGPITASVLAVELGDAHQFANARQFAASIGLVPRQYSTGGKPTLLGISKRGDKNLRRLLVQGARVIMQRVTTRTDALGEWTRNMMCRRHSNVVACALANKMARIAWAILAKGTHYQPRPVVVPA

SEQ ID NO: 191121 - protein, 351 aa, unidentified
MIIIGVDYHPSFQAIAFLIEETGECGEQELSHSDGEAESFYRDLQQRGLSVRVGMEATGYSRWLERLLTELGFELWIGDPAEIKAKRVKKQKTDRHDARLLRRLMLENNFPQIWIPSPENRDLRQLLWHRHRLVQMRTRIMNQLQALAMNEGYRWKKKLFSEQGRAQLEKLVLAPWASRRRQELLELLDRLHPTIEELTAAVEREARTRPAALRLMTHPGVGPLTALAFVLIIGTPARFQRGKQIGTYVGMTPSEDSSAGKQRLGHISKQGSSLLRFLLVEAAQAAARINPEWRRHYIHLAMRRHKNIARVAMGRRLAVRLYWMWRNGCEYSQSLEFGSHAGQLGTGHGVN

SEQ ID NO: 191122 - protein, 337 aa, unidentified
MRALTIGLDIAKHVFQVHGVDCSGKTVLQRKLRRADILKFFSKLESSLVGIEACHGSHFWARELTSLGHTVRLLPTQYVKPFLVGGKNDANDAAAICAAVSRPSIHPVPIKSAEQQSLQSVHRMRERLIHERTAKSNQIRSMFAEEGFIFPVGLPQLRQGIVTLVNDTDARITLLLRRLGSMYLEQLTALQQWVNELGVEIAEIFKRNEGCQRLATVPGIGPLVATALFSSVGDPSQFKNGRQFAAWLGLTPKQNSSGGKTKLGSITKHGDTYLRTLLVQGARAVMRFVNRHDDRHSRWIKAVMQRRHVSIAAIALANKTARIAWAILTSNDSFKVV

SEQ ID NO: 191123 - protein, 430 aa, unidentified
MNYTQNDKIMQVTNETLVVGMDIGSEYHYARAFDNRGIEYSKAPLKVRNDQDGFTSLREWIEALKAEAEKTHVIVGMEPTGHYWFNLGDYLKESGIKLVLVNPHHVKKSKELDDGIQSKNDLKDPKVIAGLVSAGRYSSPCIPEGVYSELRILSNTRLTNTDNLNRVKHRISRWLSIYFPEWKDVYCKTDTVSGFMLLSVAQMPKEIEALGIEGIQAVWRAAKLRGVGKQKAVKIYEAAKRSIGKKVVGDGASCELKYLLEDYYTLKAREAALLEKIEQLLPEIPYAENLLLIKGVGVKTVAGFIAEVGDIRRFSSPKQLQKLAGLAIVDNSSGKHKGKTKISKRGRKRLRHLLFEVALSLVGKNEAFKSLHQYYLTRKNNPLKKMQSLMAIACKVIRLFFVMLKKGIQFDEEKMLSDIKRPANELAVAA

SEQ ID NO: 191124 - protein, 420 aa, unidentified
MRNAGIHADSLLEVRRMYNAVGIDVSKGKSTIAVLQPGGTVIRKPFDVSHTSQSLIELAYYLGSLEGSTKIVMECTGRYHEPMLKALYEAGLFVSVVNPHLIKNFGNNSLRRVKSDPADARRIARYTLDNWAELRQYSGMDNTRTQLKTLNSQFSFFMKQKVAAKANLIALLDNTYPGVNKLFDSPPREDGSEKWVDYAYSFWHVDCVRRIGLKTFTERYRAFCRKHHYIFQPDKPEKLFHASKELVAVFPKEKTYKLLIQQSIQQLNLASGHVERLRQEMNALASTLPEYSTVMGIYGVGKTYGPQLIAEIGDVSRFTHREALTAFAGVDPGVDESGQHKSKSNRASKVGSARLRKTLFQIMTTLLQNAPEDDPVYRFLDKKRAQGKPYYVYMTAGANKFLRIYYGKVKECLRNLEQAE

SEQ ID NO: 191125 - protein, 407 aa, unidentified
MKTLYSRCAGLDVHKEEVVACVRLVGRRKVGREVRRFPTTTRGLLELGDWLERGGCTHVAMEATGYWKPVWHILEDWFALVLANAAHVKNVPGRKSDVNDATWLADLLAYGLIRASFVPPPAIQELRDLTRTRKQLTREIVQHAQRIQAVLEEANVKLASVISNVLGPSGRRILQAMIAGETDAAKLAALGSERLGCPRAALAEALTGRVREHHRFLLAQHLRTIEQLEESIAAFDARIEAALAPFQDAVERLTAVPGIGATAAQVIIAEIGNDMSRFSTAGHLLSWAGLVPRLDESAGKRRSTRIKKGAPWLKPILVQCAWAAARKKSSYFQAQFLRLKARHGAKKAAVAVAASILTTVYHMLGDGTCYHDLGAQHFARRDPNKTAARLANRIRNLGYNVEIRPAA

SEQ ID NO: 191126 - protein, 316 aa, unidentified
MSEPVYVGIDVAKASFEVAVSGEAQTLTLGNDEAGHAELCQVLVPLAPRLVLLEATGGHERLLALALAAAGLRVSVINPRQARDFARCMGKLAKTDRIDAQVLRGFAALLDAQGHEPRALLDEQQRELTALVTRRRQLVAMLVAERQRLALAHPKAKASILAIMDAIAAQLHDVDGQLREHVQAHHADLAKLLTSVKGVGPTTASTLLAQLPELGHLNRKQITSLVGLAPMNRDSGTLRGQRHIFGGRADVRRVLYVAALVGTRFNPVLKAFYAKLLAAGKPKKVALVACMHKLLIILNAIARSKSPWSQEIAGIA

SEQ ID NO: 191127 - protein, 360 aa, unidentified
MEFQRTSVGLDVHARSVLGCGLDRDTGEIFERRLCPDHREILDWIGGLPAPVAVTYEAGPTGFGLARALQVAGFSCLVAAPSKLIRPPGDRVKTDARDARHLARLLHLGQIVQVAVPGVAQEAARDLVRAREDCRADLMRVRHRLSKLLLRQGVVYYGGKAWTRDHERWLGRQHFDQLGLTVAYREAFDAMLVTRDRRDRLDTAITAMAADSEFTPIVQRLGCLRGVATLTAFGLAVEIGDWHRFTGRSIGAYLGLVPVEYSSGATRSQGGLTKTGNGHARRLLVEAAWHHRKPYRPVKALRQRWDAATPAARARGQAANRRLHQRWQHFDERDKRPVIANAAIARELAGWCWSLATLDE

SEQ ID NO: 191128 - protein, 418 aa, unidentified
MKVGFGGLDASKGYCDFSLISKGNEFTNRRMNFIDNQSGLDELKKVLSQALLSIDKIYLAIESTGGYENNWYNQLVSFDKRIIMFRINPLRTHHESKKNMHRNINDAISSEIIARHVSENYEELEKAKPRSLHFYTAKQMHKTIQGFIKQKTRNINQLEKVVYSCIPGLLTFSKNGMPKYMYKLLQKYPSKAKILNAKTASLAKIKGLTMEKAEAIQKAVKLDSGSGNTILTELNIKTLAQTINLFSTQIKELQSELAKHGANDLADFLVTIPGCGIESAVSLSIEIEDINRFNSAASLCCYFGVHPENHTSGDISKKPKMSKKGSSSYRGTIYMVAKNAIMYDPYFKEVYSNQRAKGKTYNDALGVIMNKLTRVIYGMLTNKEAYDSSKPKTQKNKPVDADQQIEKLEKKPQIIRQS

SEQ ID NO: 191129 - protein, 366 aa, unidentified
MDEITYVGLDAHAETTAIAVAESGGAAPRFIGTAGAKLAELAKVLGKLGKPSQLKVVYEAGPCGFAMVRRLRQAGYHCEVVAPSKIPRKPGDRVKTDRRDALSLAGLARAALLTYVTVPDERDEAMRDLSRARIDAVRARLKARQQLKALLLRHDRRYTGKSSWTAAHERYLAHVSFAHRAQEIAFVEYRRGIAEAQARVELLTQALSQELVGWRMRPLVQALMTLRGVDELSATSLVAELGEMKRFPHPRELMGYLGLVPSEYSSGQKRALGAITKTGNTHARRLLIEAAWNYRFPARISLPLQKRQEGQSAAIRDIAWRAQLRLTQRYRRLTARGLQHNKVCVAIARELAGFVWSIGQQVTVGC

SEQ ID NO: 191130 - protein, 416 aa, unidentified
MNAAGIDVSSRKSTVAVLRPFGEVVRLPFDVAHNTEGLASLAEQLKALDGETRVVLEHTGRYYEPVAKALHEAGLYVSAVNPLLIKEYGANSLRRVKTDKADAVKIARYALDNWADLRDYTPMDTIRYDLKTLNRQFQLASKQRTASANNLIALLEQSFPGIRKCFDSPVRSDGTQKWVDFVHTFWHVECVRKQSLNAFSERYRKWCKRHGYIFKQGNAVEVYSLAKNAVVLVPKSEVTKVLVQEAANQLASISRSVETYRAEMERLASTLPEYPVVMAMYGVGKSFGPQLMAEIGDVRRFERKQSLVAFAGIDPMPNQSGDKNVRSNKSSKRGSPYLRKTLFNIMGIYLKCSPQDEPVYQFLDHKRSEGKPFYVYMTAASNKFLRRYYAQVRDYLSTLDDLPPVDMDSTGLKTSD

SEQ ID NO: 191131 - protein, 413 aa, unidentified
MQVVYERCCGLDVHKKTVVACRLLSQQKGTVEKSIRTFATTTNGLRELDHWLAEGQVKQVALESTGIYWRPIFNLLEGRYEIVLVNAQHMHAIPGHKTDIKDSEWIADLLRHGLLKASFIPPKPIRELRDLVRTHTHLMQERNRHMNRIHKILETANIKLSSVVTDIVGKSARQMLEALIAGESDPAQLAKLARGRMRPKIAQLQQALQGHLEPHHRFLLRETLAHLDFLQLRVGQLEQEVAERLSPFEKSLALLMTIPGISRRSATILISELGTDMTAFPSAAHLASWVGLCPGSHLSAGKRRNGKPTKGNRYLRSVLVQIAWVLTRMRDNYLSAQYRHLRPRLGEKKAVVAVAHSVLVIVYHVLAKEEPYQDLGPDYFRRQEKEQQARRFVRQLETLGYRVELAPQEEVTA

SEQ ID NO: 191132 - protein, 424 aa, unidentified
MTTHSLSSGGSRPRSRQKKEADKEMTNGTPRTALTPNASYFAGADVHNKTCDIALVDPEGRVARRWHLKTCPAALDLFARELRKECGTSPVALGLEASTAGKAVFLHLRKLGLALHMAHPRKLESIRSSESKTDRNDAEELARLLQSRHFPESYVPTDEMDQLRGWVRVREEQVEKLRRVKTQVRSLLVKHHLQHDAAKYSDIFGVQALHWLKDLELPNPSDRRQLEVLLEEGALLAQQVDRLTKDLARQAVDRKEVELLQSIPGIDYVLALTILAEVGDVKRFPNRKKFAAYCGVVPKNRDSGGRVAMHASVRHGNPRLKWALDIAVQAHALRIRKGRLFTMFEALKARVGVPKALTAVAHRLAFVIYGIWKSGKSYDEGNPASFDRKREKMKEKAKAKIEQPAIATSIGKLLSGMGASGVAG

SEQ ID NO: 191133 - protein, 403 aa, unidentified
MYYVGIDVAKEKHYVCILDTSKELAVKPFWIYSDILGLRDLVKRFAELSLNNDDFIIGVESTGAFSENLYEYISDADYKVILLNSYQTAKYRDFSTMKKIKNDSIDAYVIAELLASGKYKESHISNDDYQSLKVLGRLKRSLDDKIKTIKREISTVMATVNPEITKVFPNIFSKTALSIIKAYPTAVDIAQSTPKKLTKIFRHIKGNNFNEEKAKFLIELASSSIYAGRAHEARALMIKTNIKILELLSQEKAEIEQQIESLVYGKIETIDSSIDNLKSIPGVADKTISAILGECGDIKRFDSAKAFIGYLGLYPTQYQSGNSMSVGRLAKRGIPIAKHALYMAAVSSVMHNTELNKLFRDKVSIGKSKKEALIIISKKLATIIYSVFKYNKPYEPKRVFIPR

SEQ ID NO: 191134 - protein, 350 aa, unidentified
MQLHTIGIDLGKTVFHLVGLNLRGEVVVRKKFSRKQLLHFTANLQVELIGMEACGGSHFLGRALREQGHEVRLMPAQYVKPYVKTNKSDYIDAEAIAEAVGRPKMRFVPIKSDDQLDLQSLHRVRERWVMRRTAVINQIRSLLLERGITLRQGRRHIDAALPGILEDASAQLSGALRVLLAQLKLELDHLQMRIDEADATINKAAGENEACRRLVAIPGIGPVTATAIIAAIGTGAAFKKGRGFSAWLGIVPGEYTTGGKQKLLGISKRGNSYLRRLFVQGARAVLQQSAKQSYGLRAWLAQLTARTHSNVAAVALANKLARMAWAVLAKNEHYRPPMLVGAATAGLACR

SEQ ID NO: 191135 - protein, 320 aa, unidentified
MLSFCGIDVSKDRLDVMVLPDEYSSSVPNDPAGWAILVEQLRGFSITAIGIEASGGYERGAVRSLQAAGMPVRQVNPFKLRQFAKASGVLAKNDPLDARMIASFVGIMPTRPAQPTTPAAEQLVEMLAVRRQLSAEKTAAENASRLLEDLMLQRLSRRRIARLAADIELLDKRLVEIVATDATLAHRYRLLTSMPGVGPVLACTLIALLPELGGMSRKQVAALVGVAPYAFESGTLKGRRCIWGGRANVRQVLYMAAMSASNWNPALKLFHDRLKRAGKLPKVVIVAVMRKMITTLNAMVRDDIAWADRLSGRHSVTTAR

SEQ ID NO: 191136 - protein, 443 aa, unidentified
MAERTRARSLTIAHPNAAGIDVAAGSHFVAVPAERDDAPVREFASFTEDLERLAAWLTQCGVDVVAMESTGIYWIPLYALLESKGFTVHLVNARHVKNVSGRKSDVLDCQWLQQLMSFGLLSGAFRPAEQVCQLRALSRQREMLVQGQTRHVQHVQKALAQMNVQLDQVISDVMGLTGQRIVRAILAGERDPAVLAKLRHVRIHADEATIAKSLVGTWRAEHLFVLAQAVALYDAYQAQLEACDAELARVLATLAITAAKPPEGARRRRGTRADLDLRTALYRACGVDLTRIDGIDVGTAMKVLAEVGPDLSRFRSAKHFASWLGLCPGTKISGGKVLSGASKRIPNRLAQALRQAATTLKNSRSSLGAYYRRLCARLDKAKAIRATAHKLARLIYALLTRGHDYVDHGEAYYEERYRERVLFHLKRKAQAMGFALTPVETPA

SEQ ID NO: 191137 - protein, 345 aa, unidentified
MNITRVGVDIAKSVFHVHAVDRHEKTQWQAKLKRNQWLDALCERLAPGAEVGMEACASAHYWGRELQKRGYRVKLIAAQFVKPYVKSNKNDRADAEAICEAMSRPGMRFVAVKSVEQQDTQAAHRIREELVGQRTAKANQIRGLVGEYGIVAPVGIQKLRLALPQWLEDAENGLTDEFRVLLAELAEDMRHLDRRISSLDGRIEQCVKNDPVARRLLELRGVGPLTASALAGALGDGKGFRKGREFAASLGLTPRQHSTGGKDRLLGISKRGDSYLRKLLVHGARAVLRYSKNRDDGLSQWLNELAARKHVNVATVALANKTARIAWAIVHNETAYDPLLAASRQ

SEQ ID NO: 191138 - protein, 438 aa, unidentified
MLNVNQNKPMPNLNSTTNFAATIGLDWADQKHDLWIHPTEGAKAQHLQLEHTPQALHAWVAQLRKRYDHRPVAIAVETSRGPVISALLAYDFIVIFPVNPKALKDYRAAFTVSGAKDDRTDAQLLEEFVRLHRPKLRALEPDTELTRKLSGLVENRRHLVDERTRLINQLHSTLKTYYPLAEMLLKNQFNTPMAVEFLTRWPELSSLQGATAKTLRAFFHKHNSRSAKTIQTRLTTIAAAKALTTDQAIIAPARMLVGALASLLRPLLQAITQIEQAIEQTLNQHPDAALFRSFPGAGPALAPRLLVAFGTRRDRFHSAQEVAQFYGLAPVVVQSGNSKITQIRRRCPKFGRQTFHENANCALREEPWARSYYEQQRQRHQDKHHQACRALAYKLIRIYFVCWRDRKTYDAQTYVQALQTQGSPLYKKLNPNTNTNCE

SEQ ID NO: 191139 - protein, 360 aa, unidentified
MAQVRTWVGLDVHAAKVVAAIADSDSGELQVRRMGGETSGVVKFCAELPAPVKVAYEAGPTGFGLARALGERGIDCTVAAPGKIERPAQDRVKTDRRDAERLVRLLMIGGLHPVRVPTPAEEAMRDLVRAREDVRGDLMRARHRVGKLLLRHDLRFDGRNWTQRHLDWLGRVELPEPVAQSVLLDGIGAIEALLVRRDALETRMAALVEGTPWAQTVSRLRCLRGIDTLSALGLCAEVGDFARFDRPARLMSYLGLVPSESTTGEKRRQGSITKSGSGHARRLLVEAAWHYRRAPRKGIELRRRQEGQPQVVCAISWKAQQRLHRSWVRLDAERGKRRTLCAVAVARELAGFCWAVSTAD

SEQ ID NO: 191140 - protein, 338 aa, unidentified
MNVTTIGIDLAKTTFSLHGINSHGQACLRKTISRKKLLSALANLPPSLVGMEACSGAHYWAREILKLGHDVRIIAPKFVIPYRKGGKNDNNDAAAICEAVGRPDMRFVPVKSAEQQAVLSLHRVRQGLIRQRTGLVNQLRGLLAEFGLIVPKGRYQTHQQIPAILEDADNGLPELARALIYGVWQRYQATCEQVLESDRALSALARKSEQARRLMTIPGVGEQVSTAMVASIEPQQFNNRRQLAAWIGLTPRQYTTGGHVRLGRITKQGDKYLRMCLIHGARAVIANLRDKQDKTSRWIRELIARRGYKRAIVALAARNARLIWTLMVKQEDYRVMPA

SEQ ID NO: 191141 - protein, 406 aa, unidentified
MLFVGDDWAEDHHDVEVQDEAGRRLAKARLPEGISGIARLHALVGRFLTEDSDAAEVKIGIETDRGPWVAALVASGYQVYAINPLQSARARQGNGVSGAKSDAGDAHVLADLVRTHSHQLRTVAGDSKEAGAVKVLTRMHQTLIWDRTRQVLRLRSSLREFFPAALEAYEDLDSPDVLELLTKAPEPSSAARLTRAQIAAVLKRAHRRDRDAKTTAIMAALRTEHLTQPPVIAAAYGATVRALAALISTSNEQITALEGPVEACFGQHPDAEIYLSQPGLGPILGARVLAEFGDDPTRYEGARSRKNYAGTSPITRASGKKKVVLARYVRNKRLADALHHQAFCALSGSPGARAYYDALRGRDIGHNAALRQLGNRLVGILHGCLKTRTPYDEWVAWSQHTQRVAA

SEQ ID NO: 191142 - protein, 395 aa, unidentified
MYSLFVGIDVSKDSFSVAGLNDKTKLLFSLSPLMNAQGFSELLKALRSHQKDFSSVIVALESTGPYHLNLFSFLVSQGITTIVVNPLIIANFAKLSLRKTKTDKKDAVTIARFLFLNRDSINQLPSSQQTTDLRDLARERESILKMIASMKNDVRRILQSTFPELEHLVDILGDTMLCFLKVFPSARLIAQATPEAIAQGFNQGDWRRRISVHYTNIIDLAKTSVGATSPSKELILPGKIETLLYLKKRVDEITKMLVRLCTSMKKEDFALLTSIRGVNVKTAAPFLAELGDYQNFQSYKKILAFAGLDPTTHQSGKYEGMSMISRRGNRHLRKIIYNMTFCVVRYAGPLRDYFFRRKAEGLPFRKALLATSHKLVRTIFAMLNGRTFYKFAEVV

SEQ ID NO: 191143 - protein, 369 aa, unidentified
MTVYIGVDLHKTQFTVHVRVGDRIESLSEIKQYPTTAAGYTKFLERIAGYKTADFAVKIGVESTGNTRFFKNQVEKAGAEVTVINTLKFKVINESTKKTDKHDASTISWFLSKDMLPESHICSKETENLRRLLKSRERLVRSIVGQKNEVHALLVSMGLDDELRSLQSKKGRQKVLDTLLSHSDLVLEAQSVKLIFQIIEQMIESVKIIEKHLSELTEDDAMVNRLMTIRGCGKITAWIIRAYTEDIGRFTNAKKYAAFCGLVPWVQDSNESVRHGKITKRGPQELRTAYVQLVLGIRRCKDTWGWRIMQRLDYMKKNKGSGKSIVAAARKMAEIVWALLTEGQDFDSKKMMGTYKPLTLTEQALAAMN

SEQ ID NO: 191144 - protein, 416 aa, unidentified
MRPKSVLLVIFMLNQKSYMKTAGLDVHKDSIFCAVFNGKHYSDVEVFETFSTSIRKLGDYLKEAEVKRVAMESTSIYWVPVWNILYEMGFELMLVNPFLIKQLPGRKSDVKDAQWIAQLLYKDMLRGSFVPGERIQELRSYTRSYRKLQQRIVRMLTKMDNILVQAGIRLGSLVSDIGGKSMLGVIDALITGERDAVRLSKLVYANKKNKENGKLAAALTGCMKEHHRFNLQMAKAEYDLLIKQSAEYIEKIEAICLRDFPRQSALLKTIPGVSRISSAVIIAETGADMKVFENSGKLSGWVGLRPKNDESAGKYKSTAITKGNRYLKPILVQIAWAASRSKGSYFKDKFNRLSMRKSSKKALIAMARKISVVVWNVLKDLTPYNPALQVVYEPAKLEAKIRYHQREMERIEKLKP

SEQ ID NO: 191145 - protein, 359 aa, unidentified
MTQHTFIGLDVHARSVAAGLLDAATGEVKSCSAPSRSAELVPWLRAQGESISVAYEAGPTGFGLARACAAAQIPCLVAAPSRIARAPGERVKTDRRDAMRLAKLLRLEELTAVRVPSLMEEGARDLVRAREDARGDLMRARHRLSKLLLRQGLVWEASAWTQAHERWLATQSFEERGLQIAYGEAVAAVASVRGRRDALDAAILEEAAKEPWARTVGRLSCLRGVSTLTAFGLAAEIGDWERFDGRSIGAYLGLVPSESSSGERRRQGAITKTGNGHARRLLVEAAWHQRRPSSHPSRELVRRREGQPALVRVRAEAAGRRLHQRWRRFDARGKRSTVAAVAVARELAGWCWSLATMDA

SEQ ID NO: 191146 - protein, 350 aa, unidentified
MFIIGCDFHSRFQQIAMLDPSTGEVLERRLEHENGEAQKFYASLPGPARVGMEATFNAQWFERILQEHNHELWIGDAAEIRAAMVRKQKTDSRDALHILDLLLTNRFPRIWVPSPAERDLRQMLRHRHKLVRIRTSVKNQLHALAIGQGLCRRKKLWAKVGRKELESLVLAPWASRRREELLQLLDQLDPWIGKLDEAVIQTAESCPQAVCLMKQAGVGPVTALAFVLTIGPVSRFANSKKVVSYLGLNPSEASSAGRQRLGAISKQGNSMMRYLLIEAAQTASRLDPELRRDYQRLKFRRGSGVAKVAIARKLTVRLYWKLREAARPLPSARMQGSPVSPVVGESLSPN

SEQ ID NO: 191147 - protein, 348 aa, unidentified
MKIIGCDFHPSYQQIAMVDTETGELWEVRLEHEQGQARRFYEALRGQAVRVGMEAVGNSQWFEQLLAELGHELWIGDAAQIRRLVVRTQKTDRRDAEHILTLLRDGRFPRLWVPSPELRDLRQLLRHRHKLVQIRTQVKNQLQHLALNQGVRRKSRLWSLAGRAVLEQLPLRGWTARRRDELLAMLDQLEKQVGELDLAVRTEAARRPEVRLLMTHPGVGPVVGLAYALTIGPVARFPRGKQVASYLGLIPREHSSGGRQKLGSISKQGNVMMRTLLVEAAQTAARFDEELRRDYCRLAARKHSALAKVMVARKLAVRMYWMLRENKPYWQCSVARRQGSPSHSVVAR

SEQ ID NO: 191148 - protein, 313 aa, unidentified
MAKSERFIGVDVSKDTLDVHVLPEGKDFVFSNDVDGIAALCRKFGKLRPQLIVLEATGGLQIPVASALGVKKHPVAVINPRQARDFARATGRLAKTDKIDAQVLAFFGQQVRPGARPLKDEQTQELSALLSRRKHLIGMLVMEKNRLALSFGSVRNDIEQHIEWLEERLGEINTRLGKAVRSSPLWREQDNLLRSVPGVGEVLSTSLLANLPELGKLDRRSIAALVGVAPMNCDSGKYRGKRRTWGGRSDVRAVLYMAIMTAIRFNPVISKFYKRLIDAGKPHKVAATASMRKLLTILNSMVRTGQPWAYSPS

SEQ ID NO: 191149 - protein, 323 aa, unidentified
MPHVTSIGLDVHARSVAAAAFNPFTGEVVHRDFGTDAAEIAEWALGFEEPRACYESGPTGFHMARELRALGLDCAVAAVSKMQRPAADARRKNDRRDAEFIARMLATHNIVEVPLPDAAVEAARDLDRALDDATVEYRRARQRLNMFLIRLGHVWDERNADGTRKGSWTRAHWRWISGIRLEGPQRDVLEYYVTAARCAESDRRQLEKKVLALARTDRWRPAVEALSCIKGIDTLTAFRLAAEAGSFTRFRTAPAFASWCGLVPSERSSGETERRGGITKTGNRLASVSVNLFFTSFAKQARRSRKGGFTGCANVISPIPVTT

SEQ ID NO: 191150 - protein, 336 aa, unidentified
MKNSIWYFIGLDVHKKSTYYAVRDRHGVIVKEGEVSSIYSELFRRLEPYLFSSKIGLEATTTYYPLYQGFKQAGYDIHVGNTIHMRQVLGKNDKLDAARLAEMLRLESFPESYVPPQEIQKLRTLVRLRHSLMEERNKSNIRLQAFLSKAGLRMRANPFTKNWAAQLTDCINTGKAGPEIKHEYDHYQYLANKVQDLNREMIETARKNYAKELELIKSIKGFGEVLSCYIAAEVLPIERFKSEKKLRRYAGVTPVFKESGGKTSRGHIPKGSSRPLLRWALVQAASTTANTKTKLGSYYHKKKKQKKSSKLAKIAVASTLTNIIYKVLTTQKPYTA

SEQ ID NO: 191151 - protein, 355 aa, unidentified
MTSTKYIGLDVHKESISIVVMNSVGKVVMECVIETKASTILQFIDGLRGDVRVTLEEGTWAAWLYDLLKPRVTEVVVCNPRKAALLKDGSKGDRIDAHKLAELLYMNKIKSVYHGEHGLRTMKELARSYLTINKDLTRVMNRLQALYRSWAIPCGSKEVYAQRYRAEWLGKISEVGVRRRAEHYYQQLDVMHLLRQKVRKDLLAESRKQKAWKLLRQIPGIGPIRAAVLIAVMQTPHRFRTKRQLWKYSGLGLETHDSAQYHAVEGELRRSKRPATVRGLNKDHNHDLKDIFKGAAMRASAAAGPLHDFYENLLAKGRKPTMARLTLARKIAAITLIVWKKEVRFDANYLKQQAA

SEQ ID NO: 191152 - protein, 396 aa, unidentified
MPKIWAGVDIGKEHHHCVVIDCEGKRLLSRRVFNDEKELLRLVSDVRTLSQDVVWAVDVNRGGATLLIGLLLAAQQPMVYLTGLAVHRASASYRGQGKTDAKDAYVIADQARMRRDLGVIRPGDEVTVDLRILITRRTDLVCDRTRQINRLRAQLLEIFPALERALTLTNQGPVILLSGYQTPGAIRRMGVRRLQAWLAGRHVRAAADLARVAVEAAQAQHTALPGKELAATIVARLAAGVLALNAEIAQVDALIEARFAQHPSAEVIESLPGMGPRLGAELLAATGGNLTAFGSADRLATFAGLAPVPRDSGRVNGNMRRPTRFHRGLLRAFYLSALASLRTCTASRSYYDRKRQEGRNHQQALLCLTRRRANVLWAMVPDGSLYRTQEAVSAPV

SEQ ID NO: 191153 - protein, 341 aa, unidentified
MSIVGGLDIHRKQLTFDYLDTATGEVKRGQIAPADRAHLRAWLARFASRDDVAFAVEGCTGWRYVAEELAAAGVAAHLGEPADTAAARGRKRHAKTDKTDSRHLRTLLAEGRLPECWVPPAQILECRALLETYHDLRREHTAWVQRIHAVFFHQGAPALGDGALRTGRDLQALRAAAARAPVPAGRLQVDTALGVLAALQARLDVRRHRLLAAARGLTGARVLASRLYGVGPVTGLAMTCWLGGAGRFSSARKAVRFAGLDVTVWSSDRTGPPGRLSRQGPPVLRWAVYEARKTHARASAPDYRYDAQVKDRQDGKRAALSEARKILRQACASWPSSATTR

SEQ ID NO: 191154 - protein, 410 aa, unidentified
MERTFDLFCGIDWGSEQHRVCLMDREGQVVGERWTQHNGASITELIAWLCDHCGATPSRFAIGIEIPRGAIVEALTEHGFAVFSINPKQLDRFRDRYSPAGAKDDRRDAFVLADSLRTDPHCFHAVRLDEPAVIRLRDLSRLEDDIRDEQRRLNNQLREQWHRFFPQLLALCPSTDEPWVWDLFEAAPTPALAARLSEKKISKILARHRIRRIGVCEVRAVLATPPLQLAPGTAEAASEHALLLLPRLRLLRQQRTRIATRLRKLLEELATPDTEGETKEHRDAEVLLSLPGVGRIVAATMLSEASQAIADRDYHGLRCYAGTAPITRQSGKKTVVLMRHGCNERLRNVLYHWARVSIICDPRSRTHYAQLRAKGHSHGRSLRGIADRWLRVLVAMLKQRTLYDPNLQNA

SEQ ID NO: 191155 - protein, 318 aa, unidentified
MSDTIVIGVDIAKLHIDVAASDNSLVERFSNDEAGHKKLLSRLSRMHVHHVLMEATGGFEDLLACTLQAAGLPVVVINPKRARDFAKAMGLLAKTDAIDARALAQYGVMLSQREGFDRFLKAPENAERKRLSAVVARRRQLIAMLDAERKRLDQADAIVRPSIEAMVESIRRQLKDIDRQLRGEVDEHHRELDALLQTVAGIGPVASATIIAELPELGRLNRRELAALVGVAPFANDSGKKTGRRCIRGGRSTLRHTLYMATLTAVRYNPPLKAFYERLREAGKLPKVALVACMRKLVGILNTMARTGEPWDPNYAKA

SEQ ID NO: 191156 - protein, 340 aa, unidentified
MRQLYAGCDLHGNNNFIGIVDGEGKRVFKEKLSNDLSVVRDTLKPFQGDLVGIAVESTYNWYWIVDGLMEKGYKVHLANPSAIQQYSGLKHSDDKHDAFWLAEMLRLGILPEGYIYPREERPLRDLLRKRGHLVRLRTSLVNSLQNILSRNLGKRVNANDVKALREDRVSLLLEMNEDLALAGRVSKEAIDHLTRQIRKIEGVVEKRIKLKEEYRYLLTLHGVGKILSLTIMLETGPISRFPTVGNYVSYCRKVPSQWMSNGKRKGSGNRKNGNKYLAWAYSEASEFARRLYPEPRAYYQRKMQKTNAAVAHSALANKLSRAGYYVMRDQVAFRPEKLFG

SEQ ID NO: 191157 - protein, 352 aa, unidentified
MSKKVTTSSPKLFIGIDIHKKSWKVHFCTDISEGSTSTFAPTASKLRKYVSKYYSKHEVTVAYEAGCCGFEHARQFIGFSWATLVVNAADIPRPAKQSIVKTDKIDAKNIAKQLRAGLLKSITIPDTDRECLRSLTRQRTCLLKDLKRTKTRIKSLLLYYNVHVPEEFDNASWTRAFRQWLKDIEWNYVNIDSTLKSLLKQLDFLDEMVRDTANQMRAYCKKYLKHDYLLLRSVPGIAGLTASYILAEVGDLRRFHSFKKFAGYIGILPGIYSSGENESVRGVTPRANYVVRSLIVEASWVAIRKDPVMQEYYRKHAGKNSKAAIFKVSRKLLSRVHAVIKTDTPYQLGLVS

SEQ ID NO: 191158 - protein, 368 aa, unidentified
MNEYKLKAAPTAVSKEQNSQKNPKANRILIGVDAHLKSYEAARKIDNGAVGVAQSFRSKEAFLLYVEKQREQAEEVVVLYEAGPLGYTLYRELKASDIECLVCAPRSGEQKRKRRKNNSIDARTLSSDLFNYLNGNEQALQAVRVPSEAQEQARVESRQHDALVEERKRIGAMGNSLLLSQGYGSWSNWWRPKAFERLSKGVAPWIVKHLGRWVGILRELDQQIQQAKAELTQHYQGPRPKGMGAPSLAQLNAEVLDWNLYSSRRKIGCLAGMVPSEWSTGEGQRLGAITKVGVPAIRRIITEMVWRMILFQPEYKAVQKWREVLEGPNRGLKKKAVVAIGRQLIVDIWRLQTGRISAQELNLIMVEG

SEQ ID NO: 191159 - protein, 399 aa, unidentified
MKKHVSLELRVSVDVGCRSHNVAIGLSSGEILDEFSIAHEPEGFRHFFSRIEKQERKLGCPVAVAMEGFNGYARLLDTLVRARDYRLFNINNLKLARFKEIFPGAAKTDEIDARKGLELFQLRDHLPVAKDVLQEVYKTPQENDILKRLSRCRRRLVNERVRVLNNLQSDLQAVCPGLLEITGEADNLWFLRFLTSTDDLRKLARMREATIRKIPGTGVKYASVILQWQKRVQFSHDVEWVGEMIQEDAVRVMELHDKIQSLEAKIEDVAQGSDMAQTLATIPGFGAVCTAELAGEMGTIERFSNEGSLALYLGMANLDNSSGKQKGSKPPRQVNTRAKAAMMIAVDRHRKKALESQRYYEKKRAEGKKHNQAVRALGRHLCRVIFKMLKMNRRYILSQ

SEQ ID NO: 191160 - protein, 384 aa, unidentified
MCQRQKRPILRLNPLIRVLGRSQIEIKVRPIINGLSMPKTRLLLTFKITKMEFRNFIGIDISKGTFDFALIKDNQVASCVSDAVTNDSAGIVKLEEFLKKQGLNMKETLFCMEHTGIYCRLLSHYLTEREYHVWLEMPVQILRSLGIQRGKNDRLDAKRIAEYACLKKDKAVLWQPPREIVIQINDLLTLRDRLIASRKSLKQPIKEFKDAGFKETAKLIESRCIHTLKAIDKEIQQIEKELDNLINKDSNLKSLYKLSTSVPGIGKITAITLLYFTNEFKLYSNAKQLACYCGVAPFENTSGTSVRGKPRVSHFANKRLKKLLHLVAMSTISSNKELSNYYVRKVGEGKNKMLVINAIRNKVLHRLCAVIKRGTPYQLEYQLA

SEQ ID NO: 191161 - protein, 369 aa, unidentified
MSKIAKFVGLDVHKATIAIAVCEGGALGEVRSLGTIAHDLTRLVRRLEPLGQPQDVYVAYEAGPTGYGLCRALRERGHPCIVVAPSKTPVRTGDRVKTDRRDAEKLARYLRSGELVAIDLPDVQQEALRDLVRAREDAMRAQHRARQQLMGFLLRHGRHWSGKSHWTQAHVTWIRSQRFEIEAQRQVLEDYFQEVTRLDARLKHLRDLLEEAASQEAHRAMFRALQGLRGVSTIVAATLVAELGDLRRFSSPSKLMSYVGLTPSEHSSGARVQRGAITKAGNPHVRRVLIEAAWSCRLRPAMSLHMKRRSQGLPTPVLDIASKARGRLYRRYNMMRARGKSQQTTIVACARELVGFVWAIGQQVSPETK

SEQ ID NO: 191162 - protein, 358 aa, unidentified
MEKLIRVGMDTSKSVFVLHGVDAAEKVVLRKKLRRQQVIEFFGKLKPTKIGLEACGAAHYWARELEALAHEVVLLPPQYVKPYVKRGKNDAADAEAICEAMSRPTMRFVPVKTAEQQAALMLAGTRDRLIRMRTQLTNAIRGYAAEFGLTAAKGLDKIEPLLARLTAATELPKLAKELFAAHAREYAQLKVEIQKIEAKLMAWHKHNELSRRLVEVPAIGPIGASLVVMKVPDPHAFRSGRDFSAWIGLTPKDHSTAGKTRLGVITRAGDETLRRTLILGATAVIQQVRRGRGHPSPWLIDLLKRKPPKLAAVALANKTARIVWKLMISGERYNSTRLRDTRSPSARYGSEATAITQA

SEQ ID NO: 191163 - protein, 409 aa, unidentified
MVVHAAPVTRSTVVVAIDVGKNEFAVSVTDAARGKLLKPRLACPMTGSSLRSVVDTIQRLLPPDAQVKVGIEAAGHYHRPLLAAGSWPAGWELLELNPGHVTEQRRVLGKRTIKTDAVDLEAMTELLLAGRGLPVRSRATVLAELTAWSAHRTNRIEIRTATKNQLLGQLDRSFPGLTRALPDVLGTKVGRLLATEFADPARLAALGSSRFIRFGATRGLQIRKPIADKLIAAAKDALPTPDAAIARAVLAADLALLSDLDAQIDAATAELVRLVPLSPFRTLLTVKGWGAVRASNYGGALGDPARFTSSRQVYRTAGLNPIQYESAGKRRDSVISREGSVELRRALIDLGLGLWLNDPAAKQYAAALKARGKKGLVIACAMAHRANRIAFALVRDQADYDSTRWMRED

SEQ ID NO: 191164 - protein, 347 aa, unidentified
MTIVEAPPGITGGVDTHLDTHVAAALDPLGRLVGTESFDADAAGYKALLSWLEGFGQVTKIGVEGTGSYGTGLARFLRRKGVEVVEVDRQNRQARRSQGKSDPLDAVEAARAAISGRASGKAKTKDGAVEAIRVLVVAKRSARQARVKAIVQMRHLGFTAPDQLHSRLKGLTVTALVAESARLHPTRSPDPVTAATKASLSSLAHRIQSLEAEIAELDEKLEPLLIATAPDLLALFGVGPDTAAALLMAAGDNPERLRSEAAWAHLCGVSPIPAGSGKTSGHLRHHQGGDRQANSALWRIVMVRIAHDPKTTHYFERRVKEGRTKRDVIRILKRYVAREVYRNLPRG

SEQ ID NO: 191165 - protein, 382 aa, unidentified
MEESSKTLYVGLDVHKDSIAVAYAPEERGTEVVSLGSIGTRQCDIDKLIRKLQSKGATLVFVYEAGPCGYWLYRYLTRKGLACQVVAPSLIPRKPGDRVKTDRRDAMALARLMRTGDLTAVYVPQVEDEAIRDLSRGREDAMGNLKAAKYRLKAFLLRQDLRYEGRASWSAAHLRWLAEVVCPTPAQQIVFQEYVRAVTEQHERLQRLETELHEQVKPWRLSPVVTAIQALRGVQFIAAVTVIAELGDLTRFHNPRQLMSYLGLIPSEYSSGERRRQGGITKAGNSHARRALVEGAWAYRYPAKISRHLQLRLEHLSPDIQAIAWKAQVRLCKRYRQLTARGKHVNQVVVAIAREMAAFAWAIARTVPITSERRESTRVPSP

SEQ ID NO: 191166 - protein, 410 aa, unidentified
MDVLYARCAGLDIHRDTIVACVRLAKAGGVIRFVETFATTTTELERLSEWLTGHGVTAVAMEATGVYWKPVWAVLAGDFELVLANAHHVKAVPGRKTDVNDATWLADLLAYGLIRPSFVPSLSEQALRDLTRARKQLTREKASHVQRIDKTLQAANIKLGSVLSNIMGQSGRALLEALAAGESNPEQLAGLVRTKIRASHARVVEAVRGRLAAHQRLLLRLYLAQVDALDAAIAAIDHELGERLEPVQETVRRLTTMPGLSPLSAAVVISEIGLDMSRFPSAAHLISWAGLCPKNDESAGKRRSTRLRPGAPWLKAVLVQSAWCAVRVKASYLHALFQRLKARRGPRKAIVAVAAAMLTAIYHMLKRGAAYHDLGPDHFQRTERSRLAARLARKLGELGFDVTLTQRAAA

SEQ ID NO: 191167 - protein, 412 aa, unidentified
MMNFASYRGKPGKKPAILANMGYVRRQFTNPNTEPKPRRQVMTKNSTFIGMDVHKNSIDIAIADQGRNGQVRYYGKIDGTLSALDKILRKLVSKGEQLHFAYEAGPCGYQIYRHLTSKGFDCAVVAPSKIPKPSGSQIKNDRRDALMLARLHRSGELTPVYVPLAEDEAIRDLVRAREDAKGDEKKSKQRLQAFLLRHGHRFTGRTPWSKAHIRWISDIKMPHRSQQIVLQESIDTMNQCKSRVQRLTEQIQKLLPNWHLFPVVQALQSLRGVSMLVAATTVAELGDLKRFQHPSELMSYLGLVPSEYSTGTRIRRGPITKTGNGHVRRVLVEAAWAYRLNARVSRVLLKRQEGLPQHICDISWKAQLRLCSRYRHLWNKGKSKQVVVTAIARELCAFMWAIANETKVPATV

SEQ ID NO: 191168 - protein, 354 aa, unidentified
MKRTRKELQPGDRVFVGIDLHKNKWHVTARTSELELFSGSIPGRWETLRGILDRYKGHEIETVYEAGYFGFWLYDELIEYGAECIVTPPSLIPQEYGNKIKTDRRDSRKLAHFLAKGMLKRVWVPTEKERYHRQVIRRRRQLIGDRIRSQSRIKAELQLHGINLSAPHGKWTKIYLGNLGRIRFNNRWMQESFKRLLEQYYFLDEQINKQTDLLKKLSETELYKKRVEILMTIPGIGMVAAMELLLELQDIKRFQRADQLAAYVGLTPSQYTSADKVRMGRITCVGKNSLRAMLVQASWALIRKDGVMREKYDRLKSRSGGKRAIVAVARTLLIRMRRLLLDNNPYVIGLVATN

SEQ ID NO: 191169 - protein, 425 aa, unidentified
MRSIALDVHRDFCEVAIKDQSGLRLAGRIKTSLAELERFAHSLAPDDQVALEASGPARAIARVLEPHVGRVVIANTRKLSAIAESKVKTDKVDAQTLCELLAAGFLPAVFSPDEFTRALRRRLQRRSKLVRSRTRAKNECHAVLARNLKGRPPMTDVFGKAGREWLAALALPADERETVEGCLREVDFLDSEVGLIERELAAQGLSSQQIRRLMTVPGVSLVSAAAFVAAIGEIQRFSSPKKLVSYVGLDPRVRQSGAAPARHGRISKQGPAEARHMLCEAAWVLIRTPGPLRAFHERVRARRGAQIALVATARKLSVLFWHLLTKEEDYAFQRPTLTRRKLRGLELKAKDGRRSWPSGHALSTKQDRAREAEFALQVETAYRRLVADWQPSGPRSGAGATRGRASSRPSSCKQRGKASVPNPAL

SEQ ID NO: 191170 - protein, 411 aa, unidentified
MQVVHERCCGLDVHKKTVVACILITLANGEVQRHIRTFSTMTAGLLALSDWLESLAVTVIAMESTGMYWRPVFTLLEEGRSVILVNAQHMKAIPGRKTDMKDSEWLADLLRHGLLKASFIPPAPVRELRDLTRYRKTLVQERAQEVNRLHKVLETANVKLTAVATDVLGKSGRAMLEALVKGATDPEILAELARGRLRQKLPQLQEALDGRVEPHHRLLLKHILAHIAFLEETLEQLQRDIEERLHPFEEAMTLLMSIPGIQALAAATIVGEIGDDMTRFPSAKHLVSWAGVCPGNKQSGGKRLSGKTTRGNATLRAILAEVVWVLSHMKDNYLSAQYHRLARRLGKKKAVMAVSHSLLVIIYQILSTKQPYSDLGADYFEQRDSARLTQRSVRQLEALGYAVTLVPKEVA

SEQ ID NO: 191171 - protein, 343 aa, unidentified
MQAITVVGLDIAKSVFQVHGVDAQGSVVVRRQLKRRYVLAFFKKLPPCLVGIEACATSHHWSRELQAIGHTVRLIPPAYVKPYVKRQKNDAADAEAICEAVQRPSMRFVATKTPEQQSCLMLHRTRHLFIRQQTAVINTIRAHLAEFGIVAPVGRNGVEELLYVVADQRDERIPEVARACLEALGALLGKLKAQILEFDRQINAWHRSNETSRRLDELPGVGPALATALVASIADPKAFRSGRDFSAWVGLVPKQSSSGGKEKLGSITKQGDRYLRSLFCAGALAVIRYAKIHGTKHRPWLAKLLERRPTKVAAIALANKIARMAWAMMAKGECYKEPLALAR

SEQ ID NO: 191172 - protein, 414 aa, unidentified
MADEETISWFAGVDWGSERHQVCLLDARGTTAGEREFPHSGEGLTELGDWLLSMASVASTVAVAIEVPHGPVVDALIDRGFVVYAINPKQLDRLRDRFSVAGAKDDRRDAYVQADGLRTDRRLFRRLQVADPRLIELRAWSRLAEELRAERVRLSNRVRHQLWRYYPQMQKLTDDLAAPWFLELWAIASTPTKAVRLRKSTVERLLKQHRIRRIDAETALGILREPAIKVAEGVAEAACIHMRSLVARLRIVNRELRKAERKLDELCTAISEIEQTSGQGLQRRDVAILRSMPGIGRINLGTLLSEASGPLSRRDYEGLRTLSGAAPVTKRSGKSLIVVRRYAAHVRLRDTVYHWARVATQRDPKCRARYTAMRKRGHSHGRALRGVADRLLALACVLLQRQTLFDPYIGQPTA

SEQ ID NO: 191173 - protein, 386 aa, unidentified
MPKFDDLSRSLVALDQDSTLIVVIEMSQSQWLVGGIAPGLEREPQKKLTPDAPALLALLHRWREEAAKAGRGVKRVCVAYEAGRDGFWLARWLHEQGIECHVIHPTSIAVSREHRRAKSDRLDLELLKRAFLGWLRGEKKHCSMAAIPSLAEEDARRLNRERQSLTGEASRIVNRMKASLARLGIRDVNVKLPGAAVRLDELRTGEGAALPPLTRAELRRELARLALIRAQLKEIEAARQQQRQQAPAAYRRKVGAVSQVHGLGAANADMLTVEVFSRALRDRRAVARYAGLTGAPDESGKKRREKGLARAGNARVRHGMIQLAWRFLKFQPDSALAQWYRAQTASGRSDIRKTMIVALARKLLIALWRLATTGEVPHGIRLRPAV

SEQ ID NO: 191174 - protein, 370 aa, unidentified
MKKNSKVKQSPKRAAARKQEPITIGMDLGDKTSRYCVLGAQGEVVREGSVATTRKAMQEKFGPMQRCRIAIEVGTHSPWLSRMLSGLGFEVIVANARQVQLISASSRKNDRIDAQKLARLARVDPQLLRPIRHRSEQGQTDLLTIRMRAALVELRTSAVNSARGFVKAMGERLPACDADQIGVDKMDALPQPLREQLKPLLETVESLTEKIHQLDTTIEQIARTQYPETELLRQVSGVGTLIALTFVLTLEDGRRFQKSRDVGCYVGLRPRQSESGQSQPQLRISKEGDRYLRSLLVQAAQCILRRRGPDTDLKRWGLKLAERGGKNAKKRAIVAVARKLAVLLHRLWVGAEVYEPLRNSQAAALSRKAA

SEQ ID NO: 191175 - protein, 344 aa, unidentified
MVETRAITGGVDTHADVHVAAALDPVGGLLGVREFSAAQAGYARLLAWLGEFGTVCLAGIEGTGSYGAGLARHVTAAGVRVVEVDRSDRQDRRRQGTSDPLDAVSAARAAQSGRARGAPKGRDGSVEAIRALMVAKRSAAGERTQTNGQARALVLTGPEDLRARFARHTPAALVAGLASLRPRPGDVVGYATRIALRELGRRAQFLGGQLRRLDQLIVPLVTARAPGLLALYGTGPNTAALLLIAAGDHPGRLRSEAAWAHLCGAAPIPASSGKTVRHRPGPGGDRQANHALRRIVFTRLGSHPATRAHAERRTQEGKSKAEIIRCLKRYAARQVCPHLRPPAG

SEQ ID NO: 191176 - protein, 374 aa, unidentified
MENTITYVAMDTHKKQHKIALHYPCQEEIVEFTINNTVRDIKKMVNKIKKQAPGKVKFCYEAGVCGFTLKRRIEQFDCRCIVIAPSLVPRKPGDRVKTDRRDARKLLMMFKAGLLTEVHAPNEHQEAARELTRLRETARDNLKRIRHQLLKLLTRHGYVYTDGRHWTQKHITWLRTVEFAESTLTNVFENYFNEMIYCIGRLENLDKEVALLAGSPEYKEIVGLLCCYHGIDTLTAITIITEIFEFGRFESPRHLMSYLGLTPSEDSSGEKQKKGAITKAGNKRIRRLLNETSWHYRHRYVPSAALKKRRKGQPQWAIEIADTAGRRLSTRHRYLTNKGKMPCKANIAVARELAGFIWFTVTQYQARKNTNDAA

SEQ ID NO: 191177 - protein, 285 aa, unidentified
MEEYVGLDVSMKETSVSIRRAGERIWRGKCASDPRIIAELIRKRAPAVRRVVFETGPLSIWFYHSLRTEGLPAICIDARHAKAALDMATNKTDANDADGLAQLAEVGFFREVRVKGFDSMLTRTLVGARTRLVRITTELSNQIRGVMKTFGLLVPAGKGSIFEKNVRSLLTDQDGLASIVLPMLEAWRGIRIRAAELGRQLVRDARQNQACRILMSIPGIGAITATAFTTAIERPDNFKKSRSVGAWIGLTTRRYQSGEVDYDGHISDVATPICEDFSTKRRRSF

SEQ ID NO: 191178 - protein, 415 aa, unidentified
MALKIVYKICCGIDVHKTFVVACIASTNDKGVTSYESHRFSTYTSGLKTLLQWLLDRNCKDVCMESTGKYWIPVYNILEKDCSIVLAHPKYVKAIRGKKTDKKDAKWIADLFKHDLVAGSFMPPAGIRQLRDLMRYRFKLTCFKSSEKNRLQNCLTVSNIQLGNVVSDTFGKSAQAILDKILENPADTSFDLEPLVFKSLKKKLPELRDAIDGYITPEQAGKLKVIKAHYENLESRKAELEELILALAAPYQQELTILQTAPGISSPFTAIGIISEIGTNMEAFPSAKHLCSWAGLTPTNNESAGKKKSVRVSKAGCYIKPLLVQCANAVVKSTKHPEMRNRYLRLKKRRGHKKAIIAIARMLLTALYHMLKNGENYNAELYQKSDLLPVDREITVEQALMIARNQGYKIKSATA

SEQ ID NO: 191179 - protein, 343 aa, unidentified
MKLSRVGVDLAKNVYQLHGVDRHGKTVWKRRLRRGQWLQALLDKTDPDCEIGMEACTGAHHWARELQSCGYTVRLIAPQFVKPYVKSNKNDANDAEAICEAMSRPHMRFVTVKSVAQQDIQATHRVRTELKDHRNAKANQIRGLVAEYGLVAPQTLLAIRRAIPEWLEDAENGLTDYFRSVLHGLWDDLLALEDRLKELDKQIETLARNNEVTKRLQQLRGVGPIVATALVATVGTGEQFKNGRQMAAALGLTPRQNSSGDKRRLLGISKRGDTYMRTQLIHGARSVVSHAKNRDDPLSRWATDIATRRHPNVAAVALANKTARIAWAMLRNETDYDPNLAVG

SEQ ID NO: 191180 - protein, 314 aa, unidentified
MSSLVFVGIDVSQAHLDIAVRPGASFSIAHHESAIATLVEQLRSLSPTLILLEATGGMEIPLTSALATAGLPVVVVNPRQVRDFAKASGRLAKTDALDAQMLAQFAEVMRPQPRPLPDAEARALTALVARRRQLVEMLTAEKNRLLSASSPIRKRVRAHIAWLERELAHTNTELSEAIRQSPVWREKDDLLQSVPGVGPVLTSTLLASLPELGTLTHKQIAALVGVAPLNRDSGTLRGRRTVWGGRAQVRAVLYMGAIVAARFNPVIRVFYQRLQRAGKAKKVTLTACMRKLLTILNAMLKHRIPWRVVEAHHA

SEQ ID NO: 191181 - protein, 465 aa, unidentified
MARKSKDVKSKEHKRVPRSLKTIRPNAAGIDLGSREHWVCGPPQEDGSPNVERFGTTTPELFRLANWLKEQGVNTVAMESTGVYWIPLFELLDSRGFEVLLVNARHISNVPGRKTDMLDCQWIQLLQACGLLRGSFRPSDDICRLRALIRERNTMVEQRSDWVRRMQKALDQMNVCVHHAVSDITGVTGMAIIRAIVDGERDPQALARLRDARCRKSEAQIAEELTGNWRPEHLFNLRQALKMYDQLCAVIEDYHVEILTYITKHQPEEAGSALAPAHCSKSKARSLAKRGQEPLRQALYGFSGFDLTTIDGIGVDTASVILSELGLDFAMFPDESHFVSYLRLAPNLSISAGKKVPSKFKPTTCTRVSTALRMAALTLRNSRSALGGLYRRMAWRKGASVAIFATARKLAQLIYRLVRYGQAYVDTGTEAYDARFNQRRMKFYTKALKVMGYTVQPLTENTLAP

SEQ ID NO: 191182 - protein, 328 aa, unidentified
METKFFVALDVHVESTEYVVRTWRGDVVLEGSCATSYPDLKSILEPYMHSCVVGIEASTCFYPLRAGFMHDNITVKVANVLQIRQLIAKTDKLDARRLSDMLRLGTFPESFIPPKEIQELRELVAIRHSFLQESNKVESKIWASLARDGIKIPTRSLFTKEGFKHVNAISSSKRGSWNLKCLVSHYEYLTNQLENTTQALTKKVEQYFPKEFEKLQEIDGIGKIIASYVIAEVCPISRFSSEKKLRRYAGVIPCLRESAGKPHGSLLPKASSRALLRWALVMAAHASKRKKGSRLQAYYNSKKKAAKQKKIMSVARCISDLVYKKLNE

SEQ ID NO: 191183 - protein, 348 aa, unidentified
MNTTHYIGLDVHKKSVSYCTKLADGTIVAEGKVASRREDLRQWAKQLPQPWEGAMEATLFSGWIYDTLKPYAAKLEMAHPRMLEAITAAKKKSDGIDAGKLSDLLRVNLLPSCYVATPQIRELRRMLRYRNLVISEAVRMKNRISGLLMETGVEYNQQRLHGKAYFAELMKNLVEVPDSVRQLLRLSRSALEMFEVTQMGLLKGLRTNALLAKRVERLASIPGVGEVTALTWALEIADPSRFPSIGQAQSYCGLTTALNVSADKQKRGPISKQRNPHLQTVLIEAAKLAPRWNSALAVVHEKELACGNPNRATLEVARKLVAYLLAVDRSGRPFQMPTVATTASAAQG

SEQ ID NO: 191184 - protein, 348 aa, unidentified
MTQKHYAGLDISARSVNLCVVDDEGRVTCERKMSVDPEAISAHLLGLELNLVRIGIEAGMLSQHLYAGLAAAGLPVICVETRHMKAALSAQLNKTDRHDARGIAQMMRVGLFKPVHVKTPASQRLRTILTARQLLRNKLQDIENEIRGLIRNFGYHLGKVTARDFEPRVRELLGDSDLNLIAGPLLVARRVLRQEFGRLDDLLVRLAREDAISRRLMTVPGVGPVVALTFRATVDVPARFTSSRKVGAHFGLTPRKHQSGEVDRSGRISKWGDAMMRSALYEAAQVLLTRVKRWSALKAWAAQVSRRRGHKKAIVALARRIGVILHRMWIDGTEFHWGSPPATTTAAS

SEQ ID NO: 191185 - protein, 338 aa, unidentified
MLYVGIDWADDHHDVCFTADTATTLAQFQIAPSTEGFTALHAQIAQHQADPAAVLVALETTRGLLIYDLLCQGYQSYAINPKAVNRYKDRHGLSAAKDDRLDALALAHLLRTDRHRFKPLGPPPEHYRLLDRVCVDLRKLIDDKPRLSNQITSCLTEYYPQAVGLFRDVARPSSVAFLQTFPDPDAVRQTEQSALAAFFRAQCYTHPQRVDILYARTPAPAPAADPVVVRAAKMRLAALVGQLVVVRTPQGTYAHTLQTLLEEVPAVQPLATLPGIDKRLIPELVAALGPNRPEQPKRFAAASALAKLSGCAPITRASGNRRTVLRRRACDKRLRRTC

SEQ ID NO: 191186 - protein, 311 aa, unidentified
MNKAVVYVYVYVGVDVSKAYLDVAWAGRSRRFANNKSGLSALMKWIKQSPVHLICEASGGYERGLLDAAEQNAIKLSLVQANRVRQYARAAGILAKTDEVDARVLCAFGSAMQPKPLAPLSAQQKQLRELETQRRHLSRILVAEQNRLAQLNDKELQRLTGRLLAALKKQMAAIDARIAALIAQDQTLNEKVQKLTTIVGVGTRTAVLLLAQMPELGTLNRAQAAALAGLAPFNRDSGTLRGKRTIFGGRRALRCGLYMAALVATRHNRLLRDFYQRLRTKGKPHKVALTAVMRKLLLALNHTVKPSACCA

SEQ ID NO: 191187 - protein, 409 aa, unidentified
MERVVERGCGLDVHKKSIAACVRIPDERGQRRQQVRTFGTVAAELLALRDWLEAHGVTHVAMESTGVYWKPIFYVLEEAFTCVLVNPVHMAQVPGRKTDVQDCVWIAQLLEHGLLRGSFVPPAPIRELRDLTRYRKTITQERSRAINRLHKTLEDADIKLASVATDVLGVSGRAMLEALVRGNTDPDVLADLARGALRKKLPALRQALSGRFYPHHAFLVSQILAHVDYVEEAIEAVSQQIDVVIAPFISAFERFSTIPGVKKRTAEVILAEIGPDMSAFPSAAHLASWAGLCPGNNESAGKHRSGRTRKGTPWLRTALTEAALGAIRHGRGALATRYRRIMRHRGHKKAVIAVAHAILVVVYHLLTRQTTYHELGEGYYDRRHAERSKRRALETLERQGYRVVLEPAA

SEQ ID NO: 191188 - protein, 319 aa, unidentified
MNTTTAAHIDRRERNVGIDIGKSMLDTCIFELDLYLQYPNTPEGIRELLKKLARYNLTRILVEATGGYERALVEACAEKELPVIIVQPTQVRQFGKAQGILAKTDKMDSHLIAQFGAVMKPEVRPLNSKKVRHIKDLLSRKRQLNEMRTQELNRQHKAPTVLAATHKRLLKVLDKEIEAINKLLAKAVNEVTEWQRTYDILNSVPGVGDGVTFTLLGELPELGQLSPRKIAALCGLAPFNRDSGSMKGRRRIKGGRAPIRTVLYMAMLSAIQCNPVMKKFYKKLVDQGKHKKVALTACMRKMVTILNAMVRDDCEWQAN

SEQ ID NO: 191189 - protein, 408 aa, unidentified
MEVLHERCCGLDVHKRTVVACLLTPGPRGQPNKETRTFTTMTADLLAMADWLAAAECTHVAMESTGSYWKPVYNLLEDRFQLLLVNAQHLKAVPGRKTDVKDAEWIAQLLRHGLVQGSFVPPRRDRELRELTRYRTSLTRERAAEINRLQKTLEGANIKLAAVATNVVGVSGRAMLEAMIAGEDEPTALAALARGRMREKQPALEAALEGRMSSHQRFLLRQQLRHIDDLDAAIARVSAEIEERLRPFQDAAARLTTIPGIGRRTAELILAEVGPDMSMFPTAGHLASWAGLCPGQDESAGKRRSGRTRKGNPWLRSGLVEAAQAAGRTKTYLGEQYHRIAARRGKRRAAVAVAHSLIVIVYHVLATERSFEDLGYRYLDERHRRRTTQRLVHRLSALGYTVTLETAA

SEQ ID NO: 191190 - protein, 349 aa, unidentified
MDAMTIAVDLAKTSFDIAMRPDVSTPTTHRRLTRPQFERFLRSTAPAHVVMEACGTAHYWARVAQAAGHRVSLLPPHHVRPYVLRHHKTDRTDAAGLLEAARRPDLHPVIPKTVAQQEMLAIHRLRQQWMKSRVARINAMRGVLQEFGISIAQGPRHARRIVRQILEDTGSPLPVALRRALAHQLEDLDSLEMRIAAMERELRGLSADDAVVHRLMEIPGVGLLTSTAMVAAIGHIHAFANGRRLAAWLGLTPREHSSGGRRRLGGISKAGDTYLRMLLIHGARAALRAAQHHRRIGRAVARVQHWALQVAERAGYNKATVALANKLARTIWVVWSRDVPFSPEACVAA

SEQ ID NO: 191191 - protein, 353 aa, unidentified
MKLDKYMGIDVHQATSVVVVLDANGKVVLETIVATEAAPIIRLMQSLNGPLHVTFEETTQAAWLYDVIRAYVLEVVVCDPRRNKLLSEGSKGDRPDARKLAELLRAGLLRSVYHGHEATRRLKELVRAYETLSIDTMRTMFRIKAIYRGRGIRTPGSGVYQLKQREQWLKRLTEPGVRQRVEWLYEELDHLRSLRKRAKQAMLTESRKHRAFTLLRTIPQLGPIRCALIVATLDTPHRFRTKHQLWAYSGLAVITHTSSEYEIRAGRVVRSRKPIATRGLNRNGNRRLKDVFVAAATGGTQAEPYRTYLRGLEQKGMRAEMARLTLARKIAAIALSIWKKGETFDPKKLNWTT

SEQ ID NO: 191192 - protein, 352 aa, unidentified
MSDGICFAGLDVHARKTAAAAVLLGSGEVFRARLAGPQETIGWLRSLSGEVRAVYEAGPTGFGLARAARAAGLEVMVCSPGAIPRQPGDRVKTDARDALKLARLHAAGQLRPVVVPAPELEALRDLVRAREDLRGDLMAARHRISKLLLRRGLVWPGPGETWRDGHLRWLSGVRFDEPLADTVLGEYLGCHEVLLARRDRLDSLIAEQATCEPWAQTVGRLRCLRGVDTLTALGLVAEIGDFAAFAHPKPLASFVGLVPSEQSSGERRRQGAITKAGSGHARRLLIEAAWHYRRRPAISLALRRRQAGQPPAAIDAAWRAQLRLHRRWQHLDASRGKKRTTVATAVARELSC

SEQ ID NO: 191193 - protein, 416 aa, unidentified
MSLALPEALFFTGIDWAAETHAVCVLDAAGKISAEFTIEHSADGIATLIHRLARCGAPGNLPVALERPDGRLVDLLLEAGHPVVPVKPNAIKTWRDGEVLSGAKSDAGDAVVIAEYLRLRAHRLRIVAPYSDETRALRTVVRARGDLVEMRVVATNQLSALLETHWPGAKAIFADVESPVSLEFLARYPTPAAAAHLGEKRMAAFCVKHGYCGRRTAAELLARLRSAPAGTTLESLTEALRDAVLAAVGVLTALNAAVKNLDRSIAAHLGEHPDGAIFTSLPRSGQVNAAQVLAEWGDARQAYEHPDSVAALAGVTPVTSQSGKHRSVHFRWACNKRFRVAVTTFADNSRHASPWAAKIYNDARASGKDHPHATRILARAWIRVIYRCWIDGTPYDPARHGAATALARQTTEQIAA

SEQ ID NO: 191194 - protein, 345 aa, unidentified
MNNVSILSIDLAKNVFQLLGIDEHGKPCFSKRISRVKLHEIILNLPPCEVVMEACSSSHYWGRVCLNSGHQVNLIPAQHVTPFVRGNKNDKNDCLAIYEASRRPSIRFVPVKSEQQQAVLCLHRIRERLLGTRTACINQTRSLLLEFGFHIPKAYSVFKKHIHELLSQDVQPVIRLMLLEVQQELESYDKKIKLMDTLFQQTNTHNTSAEIMQSIPGIGPIIASAFSASIDKGQAFKSAKDFSVWLGLTPRQYASGETNRLGTITKRGDKYLRKQLIHGARTVVNHAHKKDDDLNLWVTAIKQRRGVNKAAVAMAHRMARLMWILLQKNEYYRPICSCNQVQGNA

SEQ ID NO: 191195 - protein, 373 aa, unidentified
METTAMKERVAQERNAVKVVGLDRGELVFVGVDVHKRTHHVAVLSSQRGLLSYWVQPAKPELLIEKLSPFRKHVAQVVYEAGPTGYGLVRALRSARIKADVIAPGSIPQPPVAQGKSDRLDCRKLAEYACKGMLKAVCVPDEEEEADRQVVRLRWRLVDKCRQIKQQIKGLLLQHGIAEPEGLENWTKRAVVELRGLPLRPELRFSLDVMLDEMEHAQGQVARVTEKLKELEASERHSADVAVLRSAPGVWLITAMTFKTELVAPERFENPREVSLMQGLSPQVYESGETRREGRLMSSGNRYLRTILVEAAWRWVQHDPGAARKYRQLVANTGSAKKAIVGMARKLGIILWRMLTRGEKYRGFVAEKPARAG

SEQ ID NO: 191196 - protein, 456 aa, unidentified
MSQPKRPGSRTGLSAVHPAAAAIDIGATMHVAAVGPDRDTEPVRTFQTFTDDLHRLADWFARCGIKTVAMESTGVYWIPVFEILEQRGFEVMVVNARDAKHVPGRKTDVSDAEWLQRLHEYGLLRPSFRPQAEIAGLRAYLRQRERLLDYAAVHIQHMQKALMQMNLQLHHVVSDITGVTGMTIIRAIVAGERDPNVLASHRERGCQASVETICQALAGNYREEHVFALSQAIELYDVYQTKVAACDKQIEIILKRLKKSATPPASKLLPPKHRSRPPNAPSFDARAALHAILGVDLTQIHGLGPYLALKLVGECGINLSAWPTAKHFTSWLGLAPHNKISGGKVLSSKTRRTSNRAASLLRLAAVSVGRTDTALGAFYRRLAARAGKAKAVTATARKIAVLFYNTLRHGRSYADPGATYYEERHRRRVLANLQRRAKSLGYVLHQADRDPIQAVS

SEQ ID NO: 191197 - protein, 342 aa, unidentified
MSIVYVGLDLGSSNFQQVALNHDGVSRVNRDFTTSEANLVKAFSDLKGEIHVHLEAGELAPWAASIIAPLVTRVVCSHPQSNAWIAKDADKCDRIDAYKLAELLRLNRFKEVHYAPDQPRRNFKQLVQHYDELTAQQARLKTKLKARLRMQGVIVSGERLFSATGRKEVLARVESRDLRTAIKQLYEVLDQSVAAQEQARLLMLRAAQAFREIKLMRTVPGVGPIGACRFSAYIHTPNRFSSKRKLWKYCRLSVSHRSSNGKPLRRPRLDRSGCGRLKDVSRKAFEVSVHSRQDNGFKRAYQRALETTHDATHARLTVQRKIISTLRAMWLNQTPYCDELMR

SEQ ID NO: 191198 - protein, 435 aa, unidentified
MEIVHSAVAGIDVHKKQVTVTVLTPGPSAAEPVVTVRVFRTFWKPLQQLAAWLVGLGVRDAAMEATGVYWWPVYHALVATGVIEVCVCNAAHMRNLPDRKTDVRDSRWTAELHQCGLLRPSFIPTQAVAGLRQRTRYRKTLIQARTAEGQRLAKVLEDAGIKIDAVASQLLGASGRAMIEALIAGERAPQALAGLAKGLLRHKLDELAMACDGCFTDAHAQMCRLHLAAYDRLTAQITQLDVLVEAAAEPFGQLVVRLQTIPGIGPRTAQVIIAETGGDMARFPTPGQLAAWAGLAPGNRESAGKRRKIGTRKGNTHLKTALTEAAWATARTHTRPGARFRRLIHRFGRGNEKRAAIAIAHTLLRIVWAVLTHEQDYREDGDDFYDRRARRNREHLAARHQQALQRLGYQVTLELIQAEHSDTEPPPPPLTPATA

SEQ ID NO: 191199 - protein, 346 aa, unidentified
MENIALDVHKHYTWARVESPEGHRLYESRLAHARGTIKNFVGRWTPGSAVALETVGNWYWVVDEIEAGGGKPQLVNARLAKLMMGQVNKSDKLDAKGMNRLQRTGTLPTVWIPSSAVRDARELPRTRMVFSEQRTKLKNRVHATLGKYGYVVDEVSDAFGKRGREIINERITKLPPHTQYGLQRLLDQLDHVGENLKAIEAAMIKAFAPCPETSWLKTLPGVGEILAVVIWTEIGTIERFARAEQLASYCGLVPRENSSGGKIRFGAVRRDVNVYLKWAFVEAANSAILNCQRCGYGHISRLYQRIKPRRGHGKAKVAVARHLSEASFWMLKKGEPYRQPMSSTQR

SEQ ID NO: 191200 - protein, 343 aa, unidentified
MKLTRVGVDLAKQVFQVHGVDRGERPVWCKRLKRSRWIADLEREAEPGAEIGMEACGGAHHWARVLQAKGYRVKLIAPQFVKPYVKTNKTDANDAEAICEAMSRPSMRFVAVKTVDQQDLQAVHRVRSSLIRERTAKANQLRGLVYEYGLVAPQQISSLRRAVPQWLEDAENGLTVRFRSLLAGLYRDLKQLDERVRELDKEVAAITREHEPVRRLMQINGVGPLIASALYALVGDARQYRNGRDLAVALGLTPRQHSSGGKEKLLGISKRGDKYMRTLLIHGARSALRTAPGRTDRISRWALALAERSHPNVAVTALANKTARVAWAMLRHGANYEPERVAA

SEQ ID NO: 191201 - protein, 370 aa, unidentified
MKPNFEPGKWFMQCVGIDIAKGTFTACLCMYEFDQGCSTAPVVFNNDKTGFNQFVKWSRKEALKGYPLRYVMEPTGVYYEQLASHLNKLSLNVCVVLPNKAREFAKYEGILTKTDNMDAYTLGMLGCLDKRLKPWTPPSPIYRELRQMTRFVADINKVKTELRNHLEALTHSETAEKSIVKHYNKLIDEIDKQLVSNQKAIREKIKQEPGLSERIDRITTINGVGFMTVATVVAETNGFALITNRKQLTRYAGLDVPAHQSGPVDPKRHISKQGNVHIRTALYFPAIVSTQCNPQMKDFYGRLCARNTQSKMIGVTATMRKLLLLIYSLWKSGEKYDPTCDKPACNRQKKEAETTGGQPHGIDVGTLAEE

SEQ ID NO: 191202 - protein, 462 aa, unidentified
MSKLSKSNTALEEARPFQAMSKVNDNTAGVDIGAHEIMVCIPGPENTQLVRSFGNYSVDLYAIAKWLGEHAIHTIAMESTGVYWIPLFEELEQHGFQCLLISSRSLRRVPGRKTDVIDCQWIQTLHTYGLLSGSFRPEADLVALRTLLRHRARLLEHRAPHILHMQKALLQMNLQLSQVLTDITGETGMHIIRAIVGGERDPYKLAAMRNHRCKKDEEEIAKALTGTWRAEHLFVLEQSLALYDFYTQKITECDTEIEKNYSVIRPGLQSNESPERIADRRFLSKHRSKNAPKSEQELRAHLKRICGVDLAAVDGISVSLAQTIASEIGTDMSKFPNEKHFCSWLSLAPKNEISGGKVLISRTLKSKNRAGQAFRLAVVSVMRADCMFGVFYRRLKSRLGPAQATVATAHLIARVVYRMLKYQVEYEPLSVAEYEKRYRNQQIKYLERRANKLGLQLMPVAV

SEQ ID NO: 191203 - protein, 488 aa, unidentified
MSAKQSNQSEARPATASGPSPKATKLRKSVADPGLRIANPHAAGIDVHAREHWVCVPARSAPSRPKDHPANLPAHVRAFGTCTPDLEQLADWLFACDITTIAMEATGVYWIALFELLERRGFQVILVDPRQTRQVSGRPQSDVLSCQWIQRLHSYGLLSASFRPDDATCVLRGYLRQRQLLIADAGRATQHMQKALEQMNVKLTETINDITGVTGMLILKAILRGQRDAQELAKYRNEHCKCTPEQMARALQGNWREEHLFALRQAFKTYEHLRRQLAECDGCIKTYLKTLADKSGGAVLPPKATPRSHKATEPQFNARALLFRWSGQDLTVIEGIDQSTALNVLAEIGIDMSKWATQKHFVSWLGLCPQHRGSAGRIKKRRLRGGASRAARAFRLAGQGCHHAKNALGAFYRRVQARAGGGKAVIATARKIACRVYRLLKYGEKYVRQEMAAYETQFRIKTTKGLAKKAASLGYKLVPVAPGEAQPT

SEQ ID NO: 191204 - protein, 532 aa, unidentified
MLSIPVVTERCAGIDVGKRGLAVAVAVGPADKEAEIQTRWYGTTVPALEELALWLRQQGCTAVGMESTGSYWIPVKNILEPAFPITLACARKHRPKKGDKTDFRDAVDLVVHLRHGMLTGSYLPERGIVELRDLTRRRKKLIGNLQSEKNRIQKVLETANVKIGNVVSDVFGVSGQEILQALLEDKPITAEEMAEMAKMRLRKKIPQLTETLQSHQMKEHHRWLIQQSIAHAQFLDEQIEELEKKIEEHLEPYRRQYELLMTIPGIKEAGAANILAEIGADIGKFPTSGQICKWAGICPGNNRSMGKQKSSHIKKANKFLLAALVEAAWGASRKKDSAFQRSFQRWLRKKGKDETCVAIAHKQLRVIWSVLTHNRPYVEPDAAVWAAIDRNKQVRHHMSQLRRLGADEQTIQQLMEQLLEPAASSQNGEAAARPIAESAEELPPEQTPPARPARPQLDDSTIIPAAHDTPAETLAPTKRPPRGVLGFRIKPGGSRNVKIFKEQMGSPPNGIKPKRSDARSRHVRACSHVSES

SEQ ID NO: 191205 - protein, 341 aa, unidentified
MDKVTTIGVDSAKRVFSLYWVDAHTGEIGAKTMSRAKFEEFMRLREPSRVVLEVGGSAHHWGRWLAREGHEVRLIAAQHVRPFVRTNKTDGTDARAIWEAARRPEVNWVRVKSEASQAVLSLHRMRTQLKDMRRMQGNQLKALLYEFGIVAPAKIGAAKLQEWVAAGRVPQLLQASLGEQIERIGDLKRQELELTRRIERHNSEDALATQLLAVPGIGTLTASALAAELGEGAAAGYANGRQYAVCKGMTPRLSGTGGKVRPGAISKRGDPYVRTLLIHGARSVITHQRRAQRLSPWLKGLLERRPLNVAVVALANKMARTAWALAAHGRSYQEHYAAQAA

SEQ ID NO: 191206 - protein, 427 aa, unidentified
MEEVTDEPLYRDRVCGIDIGKAGMAATIRVPSDKDPARRMQETRMFGTTRKEVLALADWLRCWQVPAVVMEATGDYWKGPFYRLEAEGFEMVLADAKQVRHLPGRPKRDPSDSRWLATCFERGAVTACFVATPEFRVIREHTRYRRDLTGERTREKQRAEKLLEAAAIKLSSVLTDLHGVTGRDIMDHLIAGERNPKVLAQLARARARRKISELEAALEGAEFLTPELAVLLKAMLSRIDQLNASISELTAVIEILLEPYEEQLQQAESMPGWGRRSAQDAIAETGADMTRFRTGSHLASWAGRTPLDNQSGKRAGRSKSKKGNRYLAAITGETAVAAGKTQTREGARYRRLSRRRGKAKAGVAIGNTQMKVYHALLSSPGTRYEDLGADYYDNRASTRRQVSALEKRARELGYTLVPDLTGCPEIA

SEQ ID NO: 191207 - protein, 342 aa, unidentified
MKEVTIIGVDLAKNVFQVHGAAADGSVVFRKKLSRPQFAKFMSETPACIVAMEACATAHYWGREMTRLGHEVRLIAPIYVKPFVKRQKNDTADAEAIVEAALRPTMRFVEIKTAEQQSRAMLFRTRELLVGQRTKMINALRAHLAEHGFVVAKGVGSVQRLATILEGSEHDLPDLVRQMGVIYLDEITRTSDRIDELKLTIKAVGEESGAVRRLQTMPGLGPITAMAIETFAPPMEVFKRGRDFAAWLGLVPRQHSTGGKPRLGHVSKMGQRDIRRLLIIGAMSVIRAAVRKSPPEGSWLERMLARKPRMLVAIALANKMARLVWAMLVRKENYKVPAEIAA

SEQ ID NO: 191208 - protein, 371 aa, unidentified
MKQQTKSSNITVGLDLGDRRHRFCALDERGEVVEQDSICNDRVSLRKLAGRYHGALGVMEAGTHSPWISRFLEALGWRVVVSNPRKVRAIYQHERKSDQRDALMLARIGRMDLALLYPVRHGTAEAQQDLLRIKLRDSLVRARVAVINSVRFTLKSLGYTVRNPSSERFHKVVMEEVPESVREMITPSVQALAELTARIKMLELEINTLAQMKYPQSAQLQQIPGVGPITALYFVLKIEDPNRFAHVRDVGAYAGLCPRRDQSGESDPQLRISKRGDAYLRRLLVSAAHYILGPFGPQSALRAYGLMLAADGTARAKKRATVAVARKLAVLLLSLWKSQQPYQPFPGACLNGEQEDRRSGTIALHRMEATD

SEQ ID NO: 191209 - protein, 427 aa, unidentified
MWDVQRRVLKTKSLKQTWNHSRQRGNTMRTVFGIDVSKTTSEVAILVNSEKVHGYTMSNDAIGFTRLLSDLTTVQHPEIIFEATGVYSRRLQAFLEENGYDYTRLNPLEAKKQLDSLRVRKTDKIDAEKLAESQFVLNRKPTYVQKEVYQNLRDLSRFYQNLTEDIVRTKNRLHKLLQTTFPELETLLSTPTGEQYWNIVMAFPSKDFVLNLGKEKLADIIHHSTSKRISDKRIAYLTDKLAQLAKQSYCAVKKNSPMMEEVRYDAQELLRLTERRQVVLDEMVSLAQPLPEYKSLLSIPGIAETTATSIIGELGDIRRFQSANQINAFIGIDLKHYESGNFLAKEHITKRGNPYARKILFKCIHNIASASHTNPCHIADFYEKRKRQSQTASTKPHTIASIHRLIRTMYYLITHNKLYDYNSAKSQ

SEQ ID NO: 191210 - protein, 359 aa, unidentified
MWRWTRSLIVLGADTHKRSHTIAAVVAATGEVLGEQTVLSGAKGAATLLAWARGLGNDRVWAIEDCRHVSGSLERFLIERGERVLRVHSTLMSASRREARGRGKSDSIDALAVARAALREGLDTLPAAHLDGPELDLRLLVDHRERLVRQRVAINNTLQWHLHDLWPDLQFPGSALFHGTWGPRVARRLARAEQTMRVRIARDELRRIRELTQTIKRLEAEIADLVTQIAPHLLTEPGFGPLTAAKLVGEIAGAQRFSSDAKLARAAGIAPIPVSSGNTSRHRLDRGGNRQINATIHRIAVTRLRCHPETQDYIARKRAEGKSTKDAIRCLKRHLTRRIWHLLQAPAPIPDQTLTHSIS

SEQ ID NO: 191211 - protein, 476 aa, unidentified
MPLLGRRHTIQMKKKPQNHKNKRTKIKLDSGLPMINPDAAGIDIGHREHWCAVPVERSAKPVQRFGTFTEDLEKLADWLKECGIKTVAMESTGVYWIPAFQILERRGFEVRLVNARQVKNVSGRKTDVLDCQWLQRLHSYGLLNASFRPADEMCVLRSYLRYRDELVCARSVQCQHMQKALQQMNVQLHQVLSDITGLSGLRIIEAILAGERDAEKLANLADRRVHASKATIQRALKGDYRSEHMFLLKVAFELHGTYEKKIHECDEQVIAEMAKLPARVDPKQKPLAPRKPGRAPIRDMVAGKDLREELYRWTGVDLTAIEGIGVLSAQVILSEIGTDMSRWRTEKHFTSWLGLCPDNRISGGKILSSHTRHVINPVADALRIAATTLERNKSALGAFYRRMKGRLGPASAITATAHKLARLIYRLLKHGDAYVRQGIEVYEQKYRERLIHNLKKTAASFGFQLTETKELAQGVS

SEQ ID NO: 191212 - protein, 375 aa, unidentified
MSQSSTLVIGIDVHKNSMAVADVAQEHGAEVTYRGTMGTHQGDLDQLIRQMPSKATHLICVYEAGPGGYWLYRDLTQKGDACWVVTPSLMPKKPGDRVTTDRRDAMPRARLARSGALTAVDVPKVEDAASRDLTRAREDTIRALQSAKFRLKAFWLRHDIRYTGRATWDPAHLRWLSAVVCPTPTPPIVFQAYVRAVHEPTARLQRLEQALQDQLKSWRLHPVVEALQALRGVQFTVAVTMVAEISDLTRVDPPRELMKCLGLIPADYASGEPRRQGSLTKAGHAQARRALVEGAWAYRYPTTVSRHRQLRRETPPKVIHDIRGKAQVRRCQRSRRLVSRGQHPTVVTVAMARELAGCMWAMAKQVPVTPYSQDA

SEQ ID NO: 191213 - protein, 355 aa, unidentified
MVGSISEAKSSVSGVTDPYCRTEHCEKIHPYRCDKEVGVLGIDVSKDNLITSRGGKYENNLKGYEKILDMKPCTIVLEPTGVYSIKPSQYFKEKGIRVLQVSPNVLSREKDFREKKTDFYDAEKLENMVDKAKEYEYNVLRELVTLYLFLKDMEVKQKNRLKRALFLVSDNDKINKERLERLASGDFAQEVLYQLEYTPIVLEEVKILAKALFETQEKLKEVKEMIESQVPEDHVLLTIPGVGKLAAGIIIGVVGDIRRFPKPESFVAYCGLDPVVERSGKAVVSKGISRRGNKYLRSLFYFLAQMNCSKNPTLLRFYESHRNRLHGRKLYTALARKLAKVVWSVWYNNKPYEPK

SEQ ID NO: 191214 - protein, 416 aa, unidentified
MKLFVGIDVSSEKLDVCFLTDDNQLSILSEISVANDIEGASFIRETILEFNDSYQCDQVVIGMESTSMYSFHPSMFFHEDEKLKKLNTLVTIENPFRVKQFSRMFDENKTDRNDALRIADFLRIQRFTTCPIKEEKYMALQRLTRTRYQLIKQLIRTKQHFLENLTYKCNTLAREMRDESTSLFSATLISLMTEDFTLDELAELPLEAFCDLLQEKGKGRFKQPEKIAKAIQRAITMSYRLGALAQESINVVLSVLVREIRALEKNIKELDKAIEQVIVVIPEYQCLTSIPGVGKVYAAGLIAEIGQIERFEDQTKLAKYAGLSWKVNQSGNYQSQNTPLTKQGNRYFRYYLVEAANSVKNYLPEYKAFYQSKYKEVPKHQHKRALVLTARKFTRLVDTLLRKHQLYTPPRSVIEK

SEQ ID NO: 191215 - protein, 392 aa, unidentified
MYIVGIDIGKNHHEASIVSPEGKQIGRSLRFATTHKGADSLMSFIFKNIGNSPCVFGMEATGHYWYPIYSFLKAKGYTIYVINPIQSDSLRKMYIRQTKNDSIDSFLIAEVIRFGQFGTTSMADENILAMRQLCRYRDSVISSRTEIKLRIGTIMEQIFPEYEKQFSSLWVSTSMGILEKYLTPENIENAPIDELFEIIKDKSHNKLTMKKAISIREAAADTFGIKIAQDAFSFQLKQLIDRMNFLDKQIEALDCQILEYYEKFDCYLHTIPGIGMIAAATILAEIGDINRFKSSSALVAFAGIDPTVRQSGEFSSTHNHMSKRGSPYLRHAIFLAATTCSFHNSPLNAYYKKKREQGKHHLTATGAVARKLTTVIYAVLRDGKPYEPKSFC

SEQ ID NO: 191216 - protein, 275 aa, unidentified
MSAVSVGIDVSKAKLDIALRQDGKQGEHWVVANDSAGIAQLVARVREIAPARIVLESTGGLEVPVAAELAVAQLPVVVINPRQSRNFARSTGRLAKTDSIDAHVLAHFAEAVQPDIRSLPDEQTQALSALIARRRQVVEMMTAEKNRLGSATKTVRPRIQTHLDWLSRELAELDHDLDEQIRQTPVWREKDQVLRSAPGVGPVLSRTILADLPEIGQLDRRKIAALVGVAPLNADSGKMRGKRRVWGGRASPRESRVVYGYHQCVNAQPGHPPSL

SEQ ID NO: 191217 - protein, 431 aa, unidentified
MPENEVHQPLQEPEFAAFVGIDWADQKHVWCLQAAGSTQREQGELAHKVETVEAWVAQLCQRFGERPIAIAVEQTKGALVYMLAKYQSLHLFPVPTTMAAGMRKALYPSGAKDDPRDSDLLLDLLLLHRDKLHRLAPDSEATRRVQNLVEERRKLVDEKTAQSNRLTSALKIYFPQILDWFKNPDTELVGELLERWPTLEELQQATPEELRTFFHQHHCRKGELLERRMEEIGQAKPAIHDRAVIEAKRAVVKVMVQLIRSLLAGIAELDEKIAEASTAHPDFFIFASLPGAGEVMAPRLLAAFGSQRDRYGSANEVQVYSGIAPIIEKSGKTKWVHFRRACPKFLRQSFQEWAGHSMAKSAWAKAYYQQQRKQGQDHHAAVRALAFKWIRILFRCWKDRVTYDERKYLAALVKRGSPLSALLVVPKGATL

SEQ ID NO: 191218 - protein, 400 aa, unidentified
MLSIGIDVSKGKSTVCGMKPGGEIVYAPFEVQHTREGMSELVSLLRSSGEEVRAVLESTGSYHCPVVAALLENGIFVSVVNSLRMKRFCSQSIRKVKTDRIDAMQIALYGLAYWQELQPTKLPEDTYRELQLLARQYYQMTSMLIKAKVDFNALCDQVLPGMQELMNDHAGRHKLSDFVLRYRHTTHILEMGETRFRKDYCKWAEKKGYRNCERMAVLIFATAQNGIPVLPNAPSTQIVITEAIRVLHTVEASRDAILTQMQALAKTLPEYSLVREMPCIGDTLAPRLIAEIGDVRRFHSKRALIAYAGIDAPPYQSGKFCANNRHISKRGNRYLRKTGYEVMQSYVMHKPANDPIFTFIEKKRGEGKSGKLAMVAGLNKFLRVYYGKVTELYRSLPTIE

SEQ ID NO: 191219 - protein, 355 aa, unidentified
MNTIKYIGMDVHVATISIAVLDANGKLIMEVTIATQTGALLDFIRGLSGTLNVSFEEGTSAHWLYTLLEPQVAKVVVCDPRQNPRRLGEKKSDRLDARKLAEWLRLGTLKPVYHGNSLGPALKELARSYRTLVSDTARVMNRLKALYRARGIGCAGTRVYSPRFRDQWLEQLREPGARARAERLYRQLDLLLPLRQEARAAMVAESRKHPAHKILCSIPALGPVRVALLLALLQTPYRFRGKRQLWTYAGLALVTRTSADYQMVDGQVTRARKPALVLGLNANHNHTLKGLFKDAAASTLAHPGPFKDFYTTRVAQGMKPELARLTLARKIAAIVLTLWKKGECFNVEHVKAQAA

SEQ ID NO: 191220 - protein, 370 aa, unidentified
MIYIGIDVAKDKHDCFITNSDSEVLFKAFTIFNNLDGFNDLYQKIESVMDDVTKVKVGLEATGHYSYNLLGYLIDKGLPTYVINPLHTNLYRKSLSLRQTKTDKVDARTIASMLMSDVNLKSYSDTSYHNEELKSLTRYRFDKVKERAKLKTSVSRLVCILFPELEKLVPTLHMASVYALLSEFPSAKHVATAHLTRLTNLLSKSSKGRYGKDTAITFRDSARASIGSNMPAKSLELKHTIKLIQELDSEIDEIENEIKIIMDEINSPILSIPGINYRMGAMIIAEIGDFNRFDSPDKILAYAGFSPSTYQSGQLDGVPTHIWKNVAPDTCDTLCIMPPNMSATGIQHLQPILLKNERKVNITMLPYHTL

SEQ ID NO: 191221 - protein, 415 aa, unidentified
MLVQSNQRSYCPAEFDIFLGMDVDKKSIDFTCSDCKRVLRSVHIPNNSEHLVRYVRKHFPDHKVLFAYEAGPTGYGLYDGLTAAGFACLISPPSMIPTAPGQRVKTNRLDSKKITEALRAGQLKSIHVPSPTYRHLRHLTKVRDLVVRQIAGNKCRIKALLLFEGIPFPEAPQKSHQWSRSVIAQLQKLPCSGAVRFRLDRLLEALEFQRQQFLRITREIRNFCRQDPELSRCLSYLTSIPGIGQIVAPHLLARIGSWQNLQEHRVDELAGLLGLVPTEHSTGDRVHRGSITHGGDGRLRSKLIQSAWAAIRQDPELREFYRSVYRRHPQHLAARKAIVAVARKLTTRIFAVLKEQRPFTFRSQVHSRPLLPGEIGPRERLDASQKEEDRNLPSFVPKTETLPGPPPKWGASKQV

SEQ ID NO: 191222 - protein, 342 aa, unidentified
MKIIGCDFHPGFQQVAMVDTETGEHTEKRLTPEEAAQFYKQLQGPVVVGMEACGNTLWLERLLAQFGHTLWLGDAGKIRAMEVRKQKTDRRDAELLLQLLIEGRFPRLWVPNLEQRDLRQLLLHRHKLVGMRSQVKNQLQHLALNQGIQRKWKLWSRAGRKLLEELPLSGWTARRREELLILLDDLEPKIGELDVAVEQAAKKDAVAQLLQTHPGVGPITALAFSLTLGQIERFAHSRKVVSYLGLNPSEHSSGGRQRLGSISKQGNAMSRSLLVEAAQSAARLVPELKRAYQRLKHRKHSAVAKVMVARKLAVRLYWMWKMQQPYAATRMQGSPTGPVAER

SEQ ID NO: 191223 - protein, 333 aa, unidentified
MPTSMILSQPLDCCLGLDIAKAKLDACLLSGTQAFHAQFDNSKPGLQALRVWCRKHGALAPWTVLEATGRYGELAATELHAAGHRVHLANPRRIKDYARSLGRRNKTDRIDAALIASFGATRDLPAWQPPSDAQQILRALMRRSADLATMLQAERNRTESSTDLLVAKSLARIVRVLEKESASLQSQIKAHIQACPELREDLAHLCQIQGIGERTAAWLLAEVPRHLPNGRAAAAWLAVTPRVRQSGTCLRSTAPIGSEGNRHLRRVLFMAALTARHRNPRLKAFADRLAATGKSKMSVLFAVLHKLIKISFLLLKNHTAYDPLHNPLLITKN

SEQ ID NO: 191224 - protein, 333 aa, unidentified
MNYVGIDVGCKELVMAISVKGQFKKTKTFENTGSGHKLIIKQLSKLKEHSQICIEATGIYHFDLAVALSRAKDIDVMVINPKVSHSFSNVLMKRSKTDAIDAEILATYCERMPFASWQCPADELISLRAISRRIAALSKLKSQTKNQRHALNATEGTPDIVIEHTDDLIIVLDSQILALRDSALRLILQYDELAEAFRLITSIKGIAEASGIQILSELMLLPRDMNQKQWVAHAGLDPRHFESGNSVSKKPRISKAGNKYIRQALYMPALVATRHEPHIKAYYTHLIDDNRLKKVQAICAVMRKLLHAIHGMFKTGQVFDGRRFYTMKNKVEA

SEQ ID NO: 191225 - protein, 417 aa, unidentified
MTEVSRIGLDLAKKVFEVHGVDAQEAVTLRRSLRRSKVLEFFGRLPACLVGMEACATAHYWARELRRLGHDVRLIAPHYAKAYVRRHSNDAADAAAICEAAGRPAMRFVDVKTEAQQAAMCMHKLREMLVKQRTMWINQLRGLMAEFGIVVAAGPRHVGELLAILADPEDQRLPPLAREMLLQAAAALRDTELRVEAVEKRIVAWGRDSETCRHLITAPGYGPILASAMAAIVVNPAAFASGRHFAASLGLTPRLEGTGGKVRLGPISKRGNGYLRRLLVNGAMSVLRSRRAKQDPWLAQLLASKPRLVAAVAVANKMARIGWAMMMRQEDFRQAGGGMRRRAPTGPSLAPGSPRSRTLRAACGGRRRRSLSAAARGALGTPGRDEETVPAVEQRNIAAARRTAGDDRSKACEGEGA

SEQ ID NO: 191226 - protein, 350 aa, unidentified
MSKQTNAIAVHTIGIDTGKNTLHMIGLDENGVIVVREKVSRSRIAARLVNVRPCLVGIEAGMATHYMARELVALGHVVKQVPPAFAKPFRQGHKNDFRDAYAIAEAVQRPSTRCVPIKTDDQLDLQALHRVRSRLIGDRTAVINQLRGFLLEHGITVRQGHRFLRQQLPQIVATRTDMLSPRMIRIIGDLVEDWAHLDERVERVTDEIESLARTDVSCGRLMTVPGVGPIIASAMVAAIGDGASFSKGRDFAAWLGLVPRQMSTGDRTILGRITKRGNRYLRMLFIQGARAIQLHPASWAKHSFGRWLTAAARRLHCNVLTVALANKLARIALTVLLEGRNYETRIKPVA

SEQ ID NO: 191227 - protein, 352 aa, unidentified
MSQKPESTIAVVGIDIGKNSFHVVGLDKRGAIVLRQKWSRGQVEARFANMPPCLVGMEACVGAHHLSRGLKALGHDARLMPAKYVRPYSKGQKNDFRDAEAIAEAVQRPTMKFVATKTADQLDLQALHRVRERLVSQRTGIINQIRAFLLERGIAVRQGLRFLRAELPRILTTPPDVLSPRMVRIVEDLAGDWRRLDERVEILSDEIEATARQDACCERLMSVPGIGPIISSAMVAAIGTGDVFTKGRDFAAWLGLVPKQISTGDRTILGKISRRGNRYLRVLFVQAAWVVLIKPKSWERHGLKSWIEAAKKRLHRNVLAIALANKLARIAWSVLARGRDFEAGSIATVQPV

SEQ ID NO: 191228 - protein, 417 aa, unidentified
MDRTSWKVATVIFVGVDWAEAHHDVHLADEDGMRLVKARLPEGVEGIARFHELVGAHVEDPADVVIGIETDRGLFVAALVAAGYGVYAVNPMSTSRYRDRHSSSGAKSDAGDAQVLSDMVRTDRHNHRLIAGDSEEVEAIKILARAHQSMVWSRSRQTNLLRSTLREFYPAALIAFDNLASADALEVLRIAPTPTLGRGLSRSKIASALRRGGRQRRIDERAAEIQSALRSEQLEAPAVVADAMGASVRASVAVIAEMVAQSTALAEELSSDFEQHPDAEVVRSLPGLGTILGARVLGEFGDEPNRYATAKCRKNYAGTSPITRASGTKKAVLARHVRNRRLADAIYLWAFASLSASPGARAYYDTRRAAGEGHHQALRALGNRLVGILHGCLTHHAAYDEMIAWAHRPENELALAA

SEQ ID NO: 191229 - protein, 394 aa, unidentified
MTATYADCITRSRPVLYLAFELGAKDWKLGFSIGLGVAVRLRAIGAGNLAMLRREIELAKKKFKLTDDVLVCSCYEAGRDGFWMHRWLVEQGIDNVIVDAASIEVNRRYRRQKTDSLDAAKLVAMLIRHHAGEKLWSVVRVPAREEEERRHLHRDLEEMKAEVTQHRNRIRGLLAGVGARVAEINAGFVELLPTAKTADGREVPGALRERLVREFERLRFVQQQIGSLEQERKRKLRDDGHEEHVVKARKLMQLRAIGPHSAWVCVLELFGWRRVHNRRQLASLVGLTPTPYSSGEDEREQGISKAGNRRLRTLLVEIGWCWLQYQESSALSQWYRRRFAGGGKRQKKIGIVALARKLLIALWKYLERDEIPEGATLVDWRAKLAGFSARPLPA

SEQ ID NO: 191230 - protein, 368 aa, unidentified
MVESFEFVVNRIVRFNPCFHKRRTTVNYVGIDLHKKTISICVVNQERQKIDYKRFACSAPQTIVDYFRRLGRFHAVVEATASYEWLVRLLEPLAERIVLAHPKKLRVIAESTRKSDKIDARVLAEFLALDMIPQAYRPTPRQREHRVLVRHRCFLQRRVTSIRTKMRRILSDYNADRRDLFTAEGMAYLAKVKLSAADRFAVTQLVAEFEFQHTQLRALAAELKKFVAQAPIAEAEARELLHSIPGVGPVTTEVVLSELAEPKRFRNAKCAVAYAGMAPGQRESAGKTKELHIERTGSKLLRWVLVEAAWQVVRRTGRWRVIFERLSGRIGRKKAIVAIARRLLGVMMALLKSGQPYRHAYEPAAAPG

SEQ ID NO: 191231 - protein, 336 aa, unidentified
MGTLPVIVGLDYSDRPVQVCVLNEQGRTLGNRVCANDWQAIREFAESYGRVVRAAIESCSGAANLADELVTRAGWHVDLAHPGYVARMKQSPDKTDYQDARLLADLERVGYLPRVWLAPEPIRELRHLVRYRQQLVEQRKAVKLRIRALLRERRCRPPATVNPWTRAWLMWVAQDASLGEQSRWIMERHLEELRRIADAVKQAEKRLHAATAEDPEVAKLQKQPGIGPVTSWALRAEIGRFDRFRTGKQLARFCGTSPRNASSGERMADAGLIRAASPTLRATIIEAAQRLIRTQATWAQLAARLRARGKPKCVAVAAVANRWVRKLYHQMVHQAA

SEQ ID NO: 191232 - protein, 458 aa, unidentified
MVQTKRPRSRREMPAVHPDAAAIDVGATMHVVAVPPDRDPEPVRTFGTFTADLHRLADWLRACRIKSVVMESTGVYWIPIFEILEQKGFDVQLVNARDAKHVPGRKTDVSDAEWLQRLHEHGLLRGSFQPKGEVKALRSYLRQRERLLDSAATYIQHMQKALTQMNVQLHHVVSDITGVTGMRIVRAIVAGERDAATLAAFRDSRCKEPVETIREALIGNYREEHVFALTQALELYDIHQKKVAECDKRIETVLEQLKATRPTPAKPLPAPRHKTKQSNAPNFAARDALYAVLGIDLTQIHGLGPYLALKLVGECGTDLSAWPSAKHFTSWLSLAPRNKISGGKILSSATRRSNNRAASLLRLAAVAVGRTETALGAFFRRLSARIGKAKAITATARKIAVLFYNALRHGMKYTDPGAAYYEERYRQRVLSNLQRRAKAFGYILQAAAPQAPQAVGVS

SEQ ID NO: 191233 - protein, 352 aa, unidentified
MQTPQLFIGIDVHKKNWSVSIRTDLFDHKTFNMTSDPGILIDYVNQHFQGYPVECCYEASCCGFFPYRQLSLAGWHVKVLNPSDIPQSAKNRDQKSDRVDCRHLAKQLQSGHLTGIYVPDEQQEQLRSLFRQKDNLTKVIRKLKSQIKGELLYYGIKIPLQYDTPRWTMELTAWLNNIEWKHASGHSSMHSKLRHLDFVRQEWLALNTELRKYACNNYAEDYRLLMTIPGIGPTIAIGILAELGNIRRFKKFDQLASYVGLIPSIYSSGETVQVRGLTYRSKSLLRSYLVESAWVAVRRDPTMQDYYRSHKGKQPNKIIIKVAHKLLRRVWHVIKTGEEYKIGFKENPAEAS

SEQ ID NO: 191234 - protein, 313 aa, unidentified
MTKTTNTNLIDYIAIDVSKATLQIQDDQRTFAVDNDSEGHRKLLKHIKTRQNPLVVFEATGGYERGLCEFLHIKAIPLTMVNPARVRDFARSEGVRAKTDPIDTKMILAFAKSKALRAMEAPSETCTKLAALLDRRGHLVEQLAREKNRLQNSEKLILRSIQRMIKILEKEISALDKAIDELVRSEPTLQSRSKLIQSIQGVGKITAWTLLAYLTEIEHLNRNRLVALAGIAPFNPDSGKFSGKRSIIGGRAKVRRCLYMAAQSAANCNPIISAYVQRLRERGKPYKCAIVAAMRKLLLHIQSLIKNPKLSPC

SEQ ID NO: 191235 - protein, 406 aa, unidentified
MSERKSLELRVSVDVGCRRHSVAIGWPDGQVLEEFEIAHRPEGFEEFFSRIEKHQKANGCGVAVAMEGYNGYARPLDSLVRSRGYRLYNINNLKLARFKEIFPGAAKKDRIDARKGLELFQLRDHLPLAKEVLQEVTGTPQENEILKRLTRRRRRLVNERVRVVNNLQADLQAVCPGLLEITTEASNRWFLNFLLSADTLPQLARLRKSTLLKIPAVGRKYANLIQEWQKRAHFSEEAQWVGEMIHEDAQRCLELEEKIKALETKIKEVAKNSKIAKILLSIPGFGTVCTSELAGEIGTVERFGKEGGLALYLGLSTLDNSSGNYQGTKQPKHVNTRAKAAMMTALDRHRKYVPESQRYYEKKRSQGKKHNQAIRALGRHLCRIIYKMLKEERPYQIRSKKGGYPS

SEQ ID NO: 191236 - protein, 323 aa, unidentified
MQGKVLPEPNTMAPVYAGIDVCKEWLDVDVPARAARLRVSNDRYGRRRLNRELAKFAVRQVVMEATGKYHRAAQRSLHAAGFAVALVDPLRARLFAKACGYLAKTDRIDARLLALMGEALEPTALPPPSEALLELQELVNARTAATAERTALTNRRGAAQTGFLKAELGRRLAAIKSHLERLDAEIERRIQAEPALARRYVILMSIPGVGPVTAAVLIANFAELGACSSKQAAMLAGVAPIACESGERIGHRAIKGGRSSVRNAVYMAALSAASHNDGLAAFAKRLRQAGKPAKVVLVAVMRKLIILANTLINQNRLWSPIAP

SEQ ID NO: 191237 - protein, 310 aa, unidentified
MGQTFIGIDVAKDRLDVHVRPSDEAFTVARDSEGLAKLMERLRPLDAYLVVVEATGGFEQTLAAALVSEGLPLAVVNPRQIRDFARATGQLAKTDALDAKAIARFAEAIKPEPRPVPDDQARALGELVARRRQIIDMMTAERNRRRQLSSRRLIKSVDRLLAVLQKELTELEGDIGESIRGTPAWRERDELLRSVPGIGDVVARTLIADLPELGRLDRKQIAALVGVAPLNRDSGRMRGRRTSWGGRAKVRNALYMAALVASQRNPVLKAFYQRLISFGKPKKLALTAVMRKLLTILNAMVRDNKRWQNA

SEQ ID NO: 191238 - protein, 419 aa, unidentified
MSFKIFKFNCCGLDVHKTWIYACIGITDSNNRTEYKQARFSSFTKGLNELCDWLAKYNCKDVCMESTGKYWIPVFNILEQHSFWVTLSHPKYTKPMKGNKTDRKDAKWICDLYMCGMVKPSFIPPADIRELRDLVRYRFKLTCMITGEKNRAQNCLTVSNLKLDDVFSDVFGKSSRSITEHILQHPGEKFDIAPFVDSRCKTPITEIQAAVDGAISKEQVVKLRQCLDHIDELNKHISEVEQEILRLSDKYEAALNLIRTVPGFNKNPLTAIQVLSEIGGDMSVFPTAKHLVSWAGCCPRNDQSNQKIKSTRISRAGSYFKPVLVQVANALIKSKKHSEFTSRYKRIKARRGHKKAIIAICRMILTAIWHILTDLKPYTPEGFLESRPVKEGKVLSTSQALNLLKQRGYIIKGEPLAVS

SEQ ID NO: 191239 - protein, 392 aa, unidentified
MYIVGIDIGKNHHEASIVSPEGKQIGRSLRFATTHKGADSLMSFIFKNIGNSPCVFGMEATGHYWYPIYSFLKAKGYTIYVINPIQSDSLRKMYIRQTQNDSIDSFLIAEVIRFGQFGTTSMADENILAMRQLCRYRDSLISSRTEIKLRIGTIMEQIFPEYEKQFSSLWVSTSMGILEKYLTPENIENAPIDELFEIIKDKSHNRLTRAKAISIKEAAADTFGIKIAQDAFSFQLKQLIDRMNFLDKQIEALDCQILEYYEKFDCYLHTIPGIGMIGAATILAEIGDISRFKNSSSLIAFAGIDPTVRQSGEFNSTHNHMSKRGSPYLRHAIFLAATTCSFHNSPLNAYYKKKRDQGKHHLTATGAVARKLTTVIYAVLRDSKPYEPKKFC

SEQ ID NO: 191240 - protein, 455 aa, unidentified
MARTKRSRKARDMAPIHPHAAAIDIGATMHMAAVPPDCDPEPVRSFGTFTGDLHRLADWFERCGVRTVAMESTSVYWIPVFEILEQRGFKVVLVNARDAKHVPGRKTDVSDAQWLRRLHEYGLLRGSFRPTGEIAALRAFLRHRERLLDYAAAHIQHMQKALTQMNLQLHHVVADVTGVTGMRIIRAIVAGERDPDVLAGYRDPRCRASEGTIRAALVGNDREEHVFALAQSLELYDLYQDKVAACDTRIEAVLKRLRAAAAKPVGKLPPARHATKQPNAPAFDARVALHAILGVDLTQIHGLGPSLALKLVGECGTDLSAWPSAKHFTSWLCLAPSNKISGGKVLSARTRRSGSRAAALLRLAATTVGRTETALGAFYRRLSARAGKAKAVTATARKIAVLFYNALRHGMDYVDPGAAYYEERYRNRVLTNLQRRAKSLGYVLQEAGAESVGVS

SEQ ID NO: 191241 - protein, 340 aa, unidentified
MRLIGCDLHASQQSIAMLDRDTGVVVEKTLAHEGGAVRAFYAAIPPPVVVGIEATGSMGWFLRLMEELAIECRVGHPTAIRKAETRRQKHDRRDAALLLRLLAEDRFPAIWMPSTEYRDLRSLLLHRHQWVRMRTRVQNALHAIVLAHGVRRGHTLWNRDGQALLASLPLPPHTADRRSELQALYQHLEAHINRLDDRVEHVANERARATLLMTHPGVGPVTALATEVFVGDPARFPDGKALASYVGMIPREYSSGKRQRLGALSKQGNPFLRFLWCEAAAHAVRRDPDLQRFYRRKVVQKGFAKARVAAARKLGIRLWIMLRDQIDYAEFCRRGLARQS

SEQ ID NO: 191242 - protein, 410 aa, unidentified
MEALVECCAGLDVHQATVVACLNRGPPGKQSGKEVRSFGTMRGELEEMRDWLKGCGCTLVAMESTGVYWKPVHAALEGEFEVVVGNAQHIKNVPGRKTDVKDCEWLSDLARHGLIAGSFVPPRPIRDLRDLTRYRRKLTAAQAAERNRLIKLLESANIKLAGVASDVFGVSGRAMLEALIEGQTSAAEMARLARGRMRRKQPKLERALHGNIDEHHRFLLRIQLQRIKAAEADLEQLDERLRSKLADYAEPLRRLMRIPGVDWVTAATIIAEIGIDMSMFVSASHLASWAGICPGNHESAGRQRGGRTRKGNVYLKTALIIAAITGARKRGSYLAEKYRRLRSRRGNMRAAVAIAHKILIAAYHMLADGTEYQDLGAAYLDNLDQRRHANQLVRRLNNMGFNVQITPKAA

SEQ ID NO: 191243 - protein, 345 aa, unidentified
MKIVGCDLHTRYQQIAMLDDETGELVERRLEHESGEARAFYAALAGPVRVGIEATGHTRWFERMLRELGHELWIGDAAQIRAAMVRKQKTDARDAAHILDLLMSGRFPRIWRPTMAERDLRQLVWHRQKLVWMRVAVSNQLHALAMGEGVCRKKKLFTKKGRAELESLALDPWASRRRQELLQMLDQFDAALEELDRSVAEQAELSPAAVLLMTHPGVGPVTSLAFALTIGPVERFERSKQVASYLGLNPREHSSGGKQRLGAISKQGNPMMRSLLVEAGHSAARSDGELRQEYQRLKLRRGSGVAKVAIARKLAVRMYWMLRSQASYAQLVRMQGSPWATLVKQ

SEQ ID NO: 191244 - protein, 403 aa, unidentified
MIFVGDDWAEDHHDVYVMSADGARLASRRLPEGLAGIRSLHEVIADHAGEPGEVVIGIETDRGVWVQAMGVAGYQVFAINPLAVARYRDRHHVSGAKSDASDAKVLADLVRTDRHNHRALAGDSLEAEAIKVLARAHQNLIWTRTRHTNALRSALREYYPAALEAFQDLHDRDALAVLGRAPTPADAARLSLSKIRSALKHAGRQRNIDVRAQEIAAVLRTEQLAAPAPLTAAFAATTRAAVGIIIELNHQIAELETELTTHFEAHPDADIYRSLPGLGVILGARVLGEFGDDPNRYTSAKSRKNYAGTSPLTVASGKKHAVLARRVRNRRLYDAIDQWALGAINNSPGARAFYDQHRAVGDLHHQALRALGNRLVGILHGCLRHHTYYSEHTAWAHRTTTAA

SEQ ID NO: 191245 - protein, 393 aa, unidentified
MRFVGIDIAAEKHFVAIVDAGGAVRRKPTAFAEDADGYAKLFDLLGDPGDLLVAMEATGHYWKNLFAALVTRGIAVALLNPLRTHRFAGEDLQRAHTDRIDALGIARFAAQKRPPVTPLTASTTEELRELVRFRDRVVQDHGDRLRQLHRLVDLGFPEFTRHVDLDSAMALAILRDYPTAAAFHGLSAHALAAVRYDGRHTIGVHLAQALIDAAARSVGQHHGEVYRLQIRYACEDLELLGRRRRALERDIERRLDNHDLGPLLTSIDGIGAQTAARLIAELGDPAQFRSAGALAAHVGVVPATRHSGKSAPVHASLSPIGHRRVRAKLWMPALSAIQHNPWIRAYYTGLVARGKLKKVAIVAAMRKLLIAVYAVAKTRRPFEPRVAAVETQA

SEQ ID NO: 191246 - protein, 491 aa, unidentified
MESLTDVAGGTATMKGERVQRRIVGLDLGIATDHTAVIIDETGTQLARRRVQPTRASLEALRETALDGAAEGTVVEVVIEPTGPAWLPVAVFFGARGDTVYRVSSQRAADLRRYFRKHHKTNRIDATTLARMALLDGASLRGVELARGEAAALDREVRVTERLTEELATRKRRIRDLARQLMPTVGSAMSAQLGRADLEVLRAFGDPRSLVAQGIETLTALVAEVSRNMHGRAKAEAYLRAAEEALALYGDTDAVPYQALAADLATEIALLEALETARAPHERRREALYVRVDPEGLARSLPGIGEKGAPLAVAAMGRPARFANGDRFAAFTGLVPRASETGETDRKGQAITKAGNRKLRRMLYRAADTARKEDPQLARLYYVQMVERGAVHTKALAVVAAHLARRLWRVMVDKRVYVVRDVDDTPVTKAQATAIIAERFTVPEEIRRRRRSKKKAGKAPHQVLEGHADKRARSAITRRPSPHTIVAAGVG

SEQ ID NO: 191247 - protein, 337 aa, unidentified
MSEVKTIGLDLAKRVFPVHGVDAAGAVVLRRQLKRRQVAPFFAKLPCCLIGIEACGTAHHWGRTLQGFGHRVRLIPPAYAKAYVRRNKTDPADAAAICEAVGRPSMRFVPLKSEADPAMAAVHRVRERLIAQRTMLINALRGHMAEFGIAAAAGPQHVKELAAKLVEPDSVPEPLRQALLGLVRLLAALKEQIAALDKQIVDWHRDNPCSRRLAGIDGFGPVLSTALSLRVQQPERFRSGRDRSAWIGLVPKQNSSGGKIRLGAISKPGDVYLRRLLVNGAMAVLNGKRAKTDRWIMRLLETKPRPVAAVALANKMARIAWAVMVRETDFRRAPATA

SEQ ID NO: 191248 - protein, 350 aa, unidentified
MDSLSEIVDVVIGVDTHVRTHSAAAVNAHTGGVLGEITVEATPEGYEELVAFAGEHSGLRAWAIEGTGSHGAGLARRLAKVEELVVELDRPERQKRRNGAKSDPLDAIRAAREALSRAKLGTPRTTGERQALSVLLAARRSAVAAAVEAQQQLFGLVIAAPEQLRSKLRGKRTLAMARIAARFRVQAEWDLETRTTAGVLRDLARRALELSAEADRHEKEILGIVRAWRPELLERKGVGPIVAATVLCAWSHPGRIHSEAAFAKLGGVAPIPANSGEVTTHYRLSHFGDRQLNLAFYTVVLSRLRWDEETRAYVKRRTAEGKTPREIKRCLKRYVARELFRLLESVPSST

SEQ ID NO: 191249 - protein, 402 aa, unidentified
MTYDYVIGMDVGKYFHHACVLDIDGTQVLSKRINQNEKSLRALFSTFSAHDHKVLVVVDQPNNIGRLTVAVAQDLGIDVRYLPGLAMRQLSRIHAGNAKTDIRDAYIIAHAAKNLPESLRSVDRAEEAFLQLKVLNGIDEDLARSYTRLINQIRSALVGCYPQFEQALRGQIIHRKWVLHLLARYGGPTKIKRLGKAKAAAFARRYKARNPEPVLDAIFAAISEQTVDIAGAHYAEMGVAMSAKDALLKLEHRKQIEQEVIELINDIPHTQILLSMPGIGPKTAGQILMAAGDMSDFPTAGHLASYAGLSPRTNQSGTSIMSNALNRAGNKKLKNALWQSSFASIRFHERSRQFYERKRREGKRHNAAVVALARRRLNVLYAMMSNHEHYRDPDQSQEVKAA

SEQ ID NO: 191250 - protein, 352 aa, unidentified
MTADQDPTSEVVVGVDTHSDQHTAAALDGLGRILGILEIPTTPAGYRRLVAWARGWGRFKRAGVEGCGAYGAGLTRHLQDAGIAVIEVDRPNRQHRRRRGKSDPSDAEAAARAVLAGDATGVPKDTTGKVEAVRVLHLCRRSAVKARTQAGNQIKDLVLTAPDPVRAKLRDKTTPQRVRTAANWRPGEVIDPTSATRRALRDLARRWLALTAEIKALEADLVRLLNDLAPRLLAEHGVGIDVAAKLVIAAGENPDRLRTQAAFAALCGTSPVETSSGKHHGHRLNQGGNRQANNALHTVVMHRWRTCPETAAYIQKRRAQGRNDRHIRRCLKRALARRFHKILLQDLAAALT

SEQ ID NO: 191251 - protein, 319 aa, unidentified
MAQNGLVVAGIDIAKDKADVCIRAVSQRQTFPSTAEGRRQLVSWLRKYKVTKAVMEASGGYEREWAKALRVKDIEVRIVDPKRVRHFAKSAGRLAKNDVIDADTIAWFAEIFGEAPGQAHDAARETLQQMVNARLQLLEMRTMVSNKGEHDLPEPVKKGHARLLKAIAVELAKLEAVIAAMIKATPHFAARAEIIESVPGLAGTTSAGLIAAMPELGEASNEAVSALLGVAPYDDDSGKRQGGRQIEGGRRKVRNMFYMACMGAATRHNPALKAFYRRLIAKGKLAKVALVACMRKLIVMLNIMIARGEKWDASRYAVS

SEQ ID NO: 191252 - protein, 349 aa, unidentified
MTSTMIAVDVAKSVFEVAVATHPGRVAQRHRHTRQQFSRFVAAQPPATVLMEACGTAHFWGRHAQAHGHRVLLLPPQAVRPYVPRNKTDRADAKGLLEAVRNESIHPVPVKSEAQQALTALHRLRSTWMATRTARLNTVRGLLREFGITIPLGARHVVPRVAALLADPETPLPVALHPALQSTVEEIRALEKRLREVERQIAALAASTPVVAQLQTIPGIGLLSATALVAFIGAAHRFPTGRHFASYLGLTPRESSSGLRRHLGAISKRGDPYLRMLLIHGARSVLCHAKRATPRGRLQQWALELEHARGHNKAAVGLANKLARITWAVWTTGTAFREEPSPTPVTPTL

SEQ ID NO: 191253 - protein, 424 aa, unidentified
MNDTQNKKIAQVTDKTLVVGVDVGSDKHFARAILARGYEVSKKPFEFANTRDGFEKFVNWSYHLATENQLTKIFVALEPTGHYWFNLADYLKAYDVKLVLVAPQHVKHSKEMDDNTQMKNDRKDPLVIAKLVTEGRYMFPYIPEDIYAELRAAFNRRCDLVEALTRNTNRMIRWFDIHFPEYREVYGKANAISGLMILMRAPLPSDILDLGVEGICRIWREAKVRAAGINRAKKLVAAAERSIGRKGCEAVRQELWQLMEEHDLLSRQLSDMMQIITDLLGRIPGADRLLNVPGAGVITVAGFLSEVGDISRFTDPKQIQKLAGLAVVENSSGKRKGLPGISRRGRKRLRWVLFQLARIMVKSNKEMKAYHQYYTTRKDNPLKKMQSLMAIAGKITRIFFGMLKNGTEYDPAIVMKDLNKAAAA

SEQ ID NO: 191254 - protein, 483 aa, unidentified
MAKRKQSTFERLRSGRKLNRKQRKEVQQRLNASDPGLEIVNRDAAGIDVGNESHYVAVPPGRDAQPVREFGSWTAALEEMAGWLKSCGVRTVVLQSTGVYWIAVYDILQSRGLEVNLVDARGTKNVPGRKTDVQECQWLLKLHTYGLLRSCFLPSPKIHGVRTMWRLRDQHVRDAGREIQHMQKALIEMNVHLHNAISDLSGVSGQAMIRAIVSGQRDPRALAALRDPRIQASEEEIIHSLQGNWKEDVLFELQQAVEAYDFHRQQMAKCDRQLEQYMTALPTRETVPATPAPTPQPTTTDRRKRPRSSKPKGNQPAFDLAAELERILGVSAQRIDGIDVMTIQTVVAEVGTDLRAWKTEAHWTSWLNLAPKRDISGGRVIRHTREHHTNRVGNAFRIAAQSLVRSVSYLGARYRYLRAKLGGLKAVKAMARVLACLFYRLVTKGQLWIDQGAEEFERRRQQRDLASLQRRARNLGMQLVPAA

SEQ ID NO: 191255 - protein, 430 aa, unidentified
MEPSTKPDIIIGLDVGKTDHHACALTNTGERIYDKPLPQDEAARREIFASMQAHGSVLMVVDQPNTIGALPIAVARDCGCTVGDLPDLAMRKAADLYPGRSKTVRRAAFIIADTARTMPHTLRAVDRDDEILAALKTLAGFHDDITKDATRTKNRLRSVLTQIHPALERVFAGEILSRTLVLDSLIHYEGPTKLAAAGRGRVLKWIRNRAKKDPAALVDAIFAALAEQTVTVPDTAAAELVIPQLAANIKALQAQRDTIAGQVEEMLESFPLAQVLMSMPGVGITTASNILLSIGDCQDFADAAHLAAYAGITPTTRQSGTSVRGEFPTRTGNKQLKNAMFRSAWIASHCHPASRDYYLRKRAEGQKHNAAVMWLARSHCNVIYPLPPRPMHPRRSRAEPRPPAVGDSGLPHRKLRPPSPALPIASTPVV

SEQ ID NO: 191256 - protein, 343 aa, unidentified
MTIARIGIDLAKTVFEIHGVDARDKAVIRKTLRRDEVSRFFANLPPCLIAMEACSGAHYWARSLMEFGHEVRLISPQFVKPDVKTNKSDLNDAEAICEAASRPSMRFVPIKSGEQLSIQASHRIRSRLVGNRTALANQIRGLLAEFGIVVARSLATLRRRLPEILGSDKVALDPLIRSLILDLRDELVVADDRVRAYDRQIKQLCKESEACRRLERIEGIGPLTATALVAAAGNAASFRNGRQFAAWLGLVPRHQSSGGRTRLLGISKRGDRYIRTLLIHGARSALGRIGHKNDPRSRWLQKLCGRRPYNTAAVALANKNARIAWALLRHGEAYDQRRTVAAA

SEQ ID NO: 191257 - protein, 419 aa, unidentified
MSQSNIDKQLAQDPSGTLHAGVDLALEKNVVVVVNEKGERLDHFSFPQDRGGYDYFLRRLEGLRQKHQAAKVVVAMEPTNYFWKLLARELEEKQLSYRLVNAYTVKKHREGDQLDRSKDDRRDAVQIAELSRNGKTTHTQLQKGAYEDLRQYATLYHQLMQSIRREKTILWGLVGQVFPEMVRAFKDLDGETYQALLMTSAAAVTIRQMSIDAFLAQVRAAYSGKRLCVSKLKRVYQLAASSISVTEGIQAIQLAIQVHLTQLQVFETQLEQVTGAMTARLFSLPDALYLLSCPCLKPTSAALFLAEVGDPQRYQKAAQWVKLAGIQPTLKASGKKQRSRTPMSHQGRPRLRTLLYFSCLRMIQFDTHFAQLYANLQSRQDNPLTKMQALGVLMNKLLHIWWALIHNQTFYNPSFGQSV

SEQ ID NO: 191258 - protein, 416 aa, unidentified
MNSPAKSTSQRFLALDLHKHYLVVGGVNFRQQVVLNPRRISLEKWPAWAKANLLPCDAVVLEATTNAWDIYDQIVSLVARVVVAHPPKVKWIAEARVKTDRLDALRLAHLLAADLIPEVWVPPVEVRELRALMAHRRRLVQMGTRARNRLHSLLHRHNLKPPAGKIFAQKHREWWQKLDLSPTQLMRIRHDLATLDHVQGQLAEIEQELSRLSTAEPWADQVPFLLQLPGFGLIVSLTVLAAIGDISRFSHPKKLVGYAGLGASIHDSGEKHRTGRITKRGRKELRWVLVEAAWRAADTHPYWKAQYERLERRIGPTKAAVALARKLLVAVWYVLTQRTSDRHADPDKVAFKYIMWSWKLDDVKRNGLNTRQWTRYHLMRLQLGEDLTHILRGGHRYPIAPGEELRALLPELQAAD

SEQ ID NO: 191259 - protein, 352 aa, unidentified
MEFIALDVHKRYSTVCVQGRSGKIRKECRIEHERGAIKGFLAGREKGSPVAVETVGNWYWVVNEIEEAGFEPRLVHAGKAKVMMGMINKTDKLDSRGLNQLQRTGTLPTVWIASREVRDKRELPRTRMALTRQRTQLKNRIHATLAKHGLSVSGVSDIFGIKGREKMSKELEKLPSHTRFSVEEVLAQLDEVQVRIKGFERKIREVFSHSETRSRLETIPGVGAILSVAIETEMGDIDRFPDASRYASYCGTTPRVHSSGGKTRIGKLRSDVNRYLKWAYVEAASVAARFSKVHPERHVSKLYRRLRKRRGHHKAVGAVARHLAEATYWMIKKGEPYLEPSCRDEGISSTGR

SEQ ID NO: 191260 - protein, 336 aa, unidentified
MSKKVTLKQCLGIDVSMKKIDCCLSFYTEDLKIKVVATSGYENNPDGFVKLREWLNRKQDNSLALHVNMEATGTYHEEAAYFLAGVGYRLSVIQPTKGKQYAKSLDEKNKTDKIDAGMLARMGLERDLMPWSRPNEQLRRLKRMSRERIGLIRDRNALTNQLHALNHSFDAFRDSVERLKERIALATKQLGEIETQMRELTDSDPELSKRTKHVITIPGVNFVTAITVIAETDGFANVGNRRQLVSYVGLDVVMKESGTLSWRPHISKRGNAYIRAGLYMAAVSSIIHNKTLKTYFNRLKDNGKPGKTGIVALERKLLVLIYTLYKNGQDYSPDHR

SEQ ID NO: 191261 - protein, 344 aa, unidentified
MANLNQFCDFMNLIGIDIAKSVFQIYSCDTQTGEITNVQVKRDKVLESFANCGKCLIGMEACGSSQYWAHQLQALGHTVRLMDPKLVKPFVRHNKSDKADAERIYHALVSGVRAVAVKTETERDIQTLLTMRALLVKQRTARINHVRGLLAEYGHVMPKSVDQFDKKVDECINSLEGDAVQLVIDMLRDTIKSIRDEHDRIKTLQREISRLANQTRNAKHFLTVPGIGETIMAYMCVLLADPTQFSSGRQFAAYLGLVPMHTGSDGKTVTTKIPGRGDKALRALLVQGAHAVARSKYRTDWVKNILAKKPKKVAMVAIANRMAHQCWAVASKGQDWRRMPVTAA

SEQ ID NO: 191262 - protein, 413 aa, unidentified
MEVVHPRCAGIDISKKDAKVCVRIQGRGSRATSATVSTWGAMTNQILALREHLLAEKVTCVVMEATSDYWKPFFYLLEDVLPVMLVNAHHAKNMPGRKSDVSDAAWLADLGAHGLLRGSLVPPPPIRRLRDLTRVRTALTRDRGRQVQRIEKILEDSGIKLSSVAADIMGVSGRAMLAALIDGQDDPAAIAELAQRRMRSKIPILTEALTGRFTAHHAFLIRMHLALIDQYSQALTELDARIGQAMEPFAAARELLVSIPGISATVAEVFIAETGADMSVFPTAGHLASWAGSAPGSNESAGRVKSTKTRPGNRYLKGALGTAALAATRSKDTYYSAKYRRIAPRRGPMRALVAVQHSMLTAAWHMLTNGDLYQDPGADYFSARHPAKTKARAISQLEALGFRVSLQPLTHTG

SEQ ID NO: 191263 - protein, 321 aa, unidentified
MTPPTTFVGIDVSKSRLDVAQVPERRSWSVNNDADGIGSLVRDLAELVPTLVVLEATGGYESPVFAGLVTAKLPAVVINPRQVRAFARAKNQLAKTDKIDAQMLAEFAEAVRPEVRPVPDEALQELSGLLRRRQQLVEMLTAERNRAPMATPAVRKDIRDHVHWLQRRLQDIERDLDQAIRSTPAWQERDKLVQSEKGVGPVLSLTLLADLPELGRLNRKEISALVGVAPFNQDSGRFRGKRKVWGGRRSVRAVLYMAALSASRHNPEIKPFYQRLRAAGKPKKVSLTACMRKLLIRLNAIVREGQSLEIMPSSLASQHSC

SEQ ID NO: 191264 - protein, 386 aa, unidentified
MQASTVSTPITGHISTIFVAIELSQKTWLVTLHSPDRDKISRHKVQGGDHASLLALINRVRDRAVQRLGSVPAVVSCYEAGYDGFWLHRLLIAAGITNYVFDPSSIAVDQRARSVKTDRIDGEKMLRTLMAYLRGEPRVVRIVRVPTPEQEDARRDTRERGRLTKEQTAHTNRIKALLRLHGFAVGQPRRRDWLTWLAAQRDWQGQRVPPRVLSEIENEHARLMLVRKQLDALARTPAAADPAPAVAEMVRRSELLQRLKSLGPAFATTLTQEAFYKDFRNRREVGSYFGLAPSPWQSGGTDRDQGISKAGNPRARCSAVELSWLWLRHQPDSELSRWFRQRTLNAGKRTKRIAIVALARKLMVALWRYLTTGLVPAGAVLKSAKA

SEQ ID NO: 191265 - protein, 345 aa, unidentified
MNKINVIGLDLAKNVFQVHGVDSAGEVVVRKQLKRSQVRRFFTNVEPCLVGMEACGGAHYWTRELAGLGHTVRMMAPVFVKPYLKTNKNDRNDAEAICEAVQRPSMRFVQPKTPEQQCVLHLHRARRLLVRQRVALSNHLRGILSEYGIVLPQGAKAIMQRLPELLEDAENDLPMLTRDLLAECKEEYDQLMKRIERLEGRIKDWHVTHDVSQRLASIPGIGVLTASALAATVGEGQDFRNGRQLAAYLGLVPRQASSGGKVRLLGISKRGDGYLRGLLIHGARNVIYHIRRRLRAGQPGGNAWVEQLLQRTHPNAVAVALANKMARIAWVLLVRNQTWCPARPV

SEQ ID NO: 191266 - protein, 431 aa, unidentified
MSERKSLEIRVSVDVGSRSHQVAIGLSSGEVLEEFEIAHRVEGFEDLFSRIERHRKGNSYRVAVAMEGFNGWARPLDSMVRGRGYRLYNINNLKLARFKEIFPGAAKSDRIDARKGLELFQLRDHLPLAKEVLQEVVGTPHENEVLKRLSRRRRRLVDERVRVVNNLQADLQAVCPGLLEITKEAGNQWFLNFLISADTLPQLARLRRTTLLKIPSVGVKYARLIQDWQERAHFSEEVEWVSAMIQEDARRILELDETIKALEVKTAEVAETSTIAKLLRSIPGYGAICTSELAGEIGTIERFNKEGSLALYLGMATLDNSSGKYQGTKRPKHINTRAKAAMMTALDRHRKYVPQSQKYYEKKRAQGKSHNQAIRALGRHLCRIIYKMLKEKREYEVRPLKRDTQAKVTSRSSRIGQIGKKQSRRKDKITI

SEQ ID NO: 191267 - protein, 430 aa, unidentified
MEASIATTEAVTAYIGIDWADQKHAIALGSAAEPNKIEHQLIDQKPEALMEWIGGLEQRFGCQGKILVCLEQSRGALIYHLMGYDFFELYPVNPLQLARYRETFSPGGAKDDRPDSELLCELLYCHRERLRALKPDSVLGRKLNFFNQGRREAVDQRNRLSNAIKSQLKVYFPLALELLDQDTSTALAADLLLGWPTLEAIQKQPAHRLRKFFYGHNCRGEQRMLKRLELVQKAKPLTQDSAVIEPAALRVQMLARQLKNLLPDIARYEDKIAQLFEAHPDRFLFENLPGAGEALAPRLASAFGSDPQRWESALEIATLSGIAPVRRASGMKSGKKGQRKASVHFRQACPKFLRQSFHEFAGCSIRYCSWAKAHYDALRARGKGHHAAVRAVAFKWIRILFACWKQRTPYDPQRYLQALQRRGSPLAIAC

SEQ ID NO: 191268 - protein, 342 aa, unidentified
MNIAFDSHKRYTFCTVSDESGEVVWEGRIEHERGAIRSFLSSYPSGLAVAVETIGNWYWIVDEIESAGMKAQLVHARKAKLMMGNINKTDRLDARGLNRLQQTGALPTVWIPTGELRDKRDLPRTRMFLVNHRSRLKNRLHATLAKYALTISGVSDLFGVKGRRLLAECLAQLPPYSRYAVEHQLLQIDQLTASIADLDERMRLVFSPTPAIRLLQTIPGIGFVFSIVVATEVGEVNRFSRPECLAAYAGTTPRVHASGGKIRYGSLRSDVNRYLKWAYTEAANCICLNRRYWPERHVSQLYTRIRSRKGHSVAIGAVARHLAEATYWVLTKNESYREPAQN

SEQ ID NO: 191269 - protein, 401 aa, unidentified
MKTVLSVDVAKNKSMIMLMNSEGEIFIDTKEINHNLEDFEKVKEEIKKINPQNLTVFMESTGTYHLPVERYFKENGFNTLVINSLTTKNNYDTIRKTKTDKKDCYRLAKLFFVNEVEYHDLSKKDLYANLKAMTRQYFYLLQNNVSCKNRYKRLINICFPELEKIFKSTRIYDDTALNFIKEFPHAEIVKEKRIDALYNNLYKTNGRNLNFYKKLATTIKTASINSYPGVDKEHEDVKNLSYMAKIVQNNNNIINELREKMIETAKQSPYYKIINSFYGIGDTLTAEILGELGDITRFDSPKEIIAFCGLDPTIKQSGKSINVKGAISKRGNKYARYILFNCSQMVVKLGASNYPEHPVYIYYQNKKAEGKHYYESLTACSTKILRMLYSMCKNNKQFLEN

SEQ ID NO: 191270 - protein, 355 aa, unidentified
METIKQNLGTDVDSKELKVCLNFMMADLSIKTKASRTFKNTAKGFQALQEWVDKKKIKDLPLSITMEATGVYYENVAYYFQEKKSYLVHVVLPNASNAYFKSLKLKSKTDKIDARALAQMGLERKLMPWTPVSQQMRDIKKVVRERLRLMKEKNMVTNQLHAELASYRPSSIVRKRYEKRVAFLSKQILACEKDLKKFVDKDPDLKEKIDNVCTIKGVAFITAIGVVAEYNGFILFKNRNQVVSFAGYDVVQKERGTSIKGNERMSKKGNSFVRQMMYMGAMSAANCDPHHRAYYLRIVNKTNINMKGNVAIQRKLLLLIYTLFTRNEQYDPLHFLKVQNRLKSVETKQRESITA

SEQ ID NO: 191271 - protein, 417 aa, unidentified
MANPWLVGVDVHLTQNRICLMDRQGHELGRRFTVANNGPGTQSFVTRLVQVLQPGPFDSLALAAEATGWYWFHLFQALSTEAALQPWPHRLYALNPRLPAKYKEVYSDLDKTDDSDAFVIADRLRMGRDLPPPFQLQPTHLALRFLTRYRYHLVQDLVREKNYCTNLVYLKASEYRTEHPFTDVFGASSQLVLHDFVSPEQIVTMPLEELAALLDTAGRGQFADPTQTARELQHVATTSYRLPDSLLPPVNTVLAWNLEHIRFLTRQEKRINHAIAEQLTALPNTLQTIPGFGLVFAAGIIAEIGDLARYQYDEAKVAKAAGLKWSKQQSGSFEAEDTHLSKAGNRYLRYYFCEAANTVRMHDAEYQAYYQRKHDEVRKHQHKRAIALTARKLVRLVVRLLTTNQPYQPRKPDRTAS

SEQ ID NO: 191272 - protein, 437 aa, unidentified
MDEVTDEPLYRDRVCGIDIGKAGMVATIRVPSEKNPARRAAETRSFGTTRREVLALADWLRSWQVPAVVMEATGDYWKGPFYRLEAEGFDCVLADARQVRHLPGRPKHDPGDSRWLAACFERGAVTPCFVATPEFRVIRLHTRYRRDLTEERTREKQRAEKLLESAAVKLSSVVTDLHGVTGRDIMDHLIAGERSPKVLAQLARARARRKIAELEAALEGAEFFTDDHAALLAAMLERIDRVNAEIARLTEVTDRLLAPHEEQLQQAESMPGWGRRAAQDALAETGTDMSRFPSGAHLASWAGRTPLDNSSGKRKGKAKSKKGNRYLGGLLGETAVAAGKTQTREGARYRRIARRRGKAKACVAVGNTQLKVYHKLLSTPGTRYTDLGPDYYDAQASTRRQIAHHVGKLGALGFEVTLCRLPEPDPDPRPAASTQAA

SEQ ID NO: 191273 - protein, 268 aa, unidentified
MAIVTVGIDLAKNVFAVHGVDEAGKPMLVRPEVARAKLIELITQLPPCLIGMEACSGAHHWAREFAKFGHTVRMMAPKFVVPYRMSGKRGKNDAADAAAICEAVTRPNMRFVPVKSIEQQSRLFVHRARQGYVEQRTALINRIRGLLSELGIVLPLKTATVRREAHNHLEDLPGWCNTVVGDALNELTRLDDRVAQHDKYIAQSAKEDEQARQLMRLDGVGPITASAIVATVGKGHDFTCGRQFCAWLGLVPGQYSSGGKQRLGDQCA

SEQ ID NO: 191274 - protein, 325 aa, unidentified
MEAKKLSCGIDVSHTKLDVCYQNNQGELFHLEVGNNNKGFEKILEHTGRDYHFVMEATGVYYIRLAFYLHGQGCKLSVVNAISIKRYIQMHLERNKSDKKDAGWICRYAIEQHPPYWEMPDSAYFESKQLYNTIREYAEQIKRFNNQLHSLRLLPIPSKDTIRSLEKINQHLAKEMGSLEKKLEALLEQWQPAQLKSVGSIKGIGKRATAMLIVFTQGFKYTHNHRQLISFAGLSPTQYSSGSSIQGKPRIYKRGGKNLRDVLYMCSMNAMKTNPACKALYERLRANGKTGKQALIAVCNKLLKQVFAVVKNNTLYQPNYRSAKP

SEQ ID NO: 191275 - protein, 370 aa, unidentified
MSQSSTLFIGMDVHKDSIAVAYVAQDHGAEVTYLGTIGTRQSDIDQMIRKMQSKAKYLIFVYEAGPCGYWLYRYLTKKGYDCWVVAPSLIPKKPGDRVKTDRRDAVQLARLARSGDLTAVYVPKVEDEAMRDLTRAREDTISDLKDAKLRLKAFLLRHDIRYVGRANWGPAHLRWLSEVVCPTPAQQIVLQEYVRAVSEHHDRLQRLEHELHEQVNAWRLSPVVEALHALRGVQFTVAVTLVAEMGDLTRFESPRELMKFLGLIPSEYSSGEQRRQGSITKAGNTHARRILVEGAWAYRYPAKVSRHLQLRLEKQPKVIQDISWKAQVRLCKRYRRLVARGKHANVVTVAIARELTGFMWAIAKEVPLTP

SEQ ID NO: 191276 - protein, 367 aa, unidentified
MREHNIYWAGMDVHADKINVAIYRSNEILPYEQYESHTDKRAKGRFLKRLQELPGEVRCVYEAGPCGYDLQRYLTDNGIHCDIAAPALIPKKAGDRVKTDRRDARNLGRLYRSGDLTMIHIPDEEREAVRDLTRAREGAVQDVTRKRHQLSKFLLRHGHRYYDGKQWTQGHMKWMQAIKFASATLNAVFEEYLLSLSQAEECVGRLTRTIEELAQTPEYQKPVEALMTLRGVKTITAMTIVSEIGDMRRFGKAKEFMAALGLVPSEYSSGKSICRGSITKTGNAHVRRVLVESAWHYRHRPTVGKAIKARRVGQPPEVLNIAQKADTRLNRKFRKIVDRGKRATVAAVATARELAGFIWAIGQNITK

SEQ ID NO: 191277 - protein, 406 aa, unidentified
MATPEQVNVWIGLDVGKEEHFAEVLDDDGERIFARSVVNDQAALEGLLDRAGGHGTAGLVIDQPGSIAQLVLAVARSRQIPVAYVPGLVMRRAADLYPGEAKTDKRDAFIIADTGRTRRKRAHWLDVGSDELLDRLRILNGFDIDLAADQNRLANRCRDALTSVSPGLERAVGARLNQAGVRDLLASYPTLTALKAARRARLTKTVGARSPRLAAAKIVDAVLAALDAQSVTVPAEATIGRVIAELVTELDRVFARRDALAGEIEEVFLAHPFGELLSSMPGIGPRTGSRILAEIGDGSRFADGDKLASYAGLAPVTRQSGKSINGESKSRRGNHRLKNAMFLAAFASLRSPDSKAFYDRKRAEGKRHNAALICLARRRCNVILAMLRNRQPYTPGHGTAPPAKVA

SEQ ID NO: 191278 - protein, 343 aa, unidentified
MQVIIGIDPHKASHTAVAISAGEDELDHKKVRACRTQVDQLLAWAEPFPTRTWAIEGADGMGYLLAQQLVATGEHVLNVPATLAARTRLLGSGRTSKSDPNDALSVAVTALRSTGLRQVQPVGHSEVLRLLAKRNKDLGDHRTRLVCRMHALLLELDPGGISKEINASDVDRFLAEVDPTTPAAQLRFDLAIELLADIRRLDEQLKASHKRIRAAVAASGTSVTDVFGIGPIIAAMLIGFTGNIDRFVNRDRYAAYNGTAPVEFSSGGRTVHRLSTRGNRNLNNALHMAAICQLRQPHSDGRAYFDRRVAEGKTKKEALRALKRQISNTVYRHLIADAANTRG

SEQ ID NO: 191279 - protein, 443 aa, unidentified
MSESLPVGASEPVWAAFAAIDWADQKNFWRLALAGSQEHEQGQLENTPEAVEAWAANLQQRFGGRPIAICLEQSRGALVYMLTKYPHLVLFPVHPTTAARYRETFCPSGAKDDPSDTASLLDLLLRHRERLRQLQPDTVETRLLHFLVEERRRTVDEKTRQSNRLTDCLKLYFPQILHWFDDVTSPLVGALLERWPSLDQLQRAHPGTLRKFFADHNCRSAECIQERIDAIYAAVPATNDAAVREAGAMTARALLALLTTLRSSITAFDRRIAELVAAHPDGALFASLPGAGPVLVPRLIVAFGTRRERYDSALQMQCYSGIAPVKEASGKTKWVHFRLACPKFLRQTFHEFAGHSIGLSEWARAYYQHLRDDEKKSHHAAVRALAYKWIRIIFRCWKDGKPYDESVYLQSLRRRGSLLGTTLAPATCVGWKPVAGFQKLSGK

SEQ ID NO: 191280 - protein, 354 aa, unidentified
MACHGPQRRGRPPVDEYGGRQYVGVDLHRRRSVIVRMTPEGERLGPPVRIDNDPFVLAAQVASWGESPEVVLEATYGWYWAADVLAEAGAVVHLAHPLGVKGFAYRRVKNDERDAADLADLLRMGRLPEAWIAPPAVCGLREAIRHRCKLVAIRSGLKAQVHSVLAKQGVRVPVSDLFGVGGQQLLDRLRLDAAYAARVGSLRRLIDTFTFEIDVLAARTAADLRGHEGWQAIQTIPGVGPVLAAVFVAEIGDVHRFRRPEQLCSWAGMTPRHRESDTKVHRGRITKQGNHLLRWAAVEAVQRLRGGPLGSARARIAERRGTNIAKVAAARKLLTLVYYGLRDGHIRCLQPHPA

SEQ ID NO: 191281 - protein, 393 aa, unidentified
MAQVDDLSRSLVALDQDSTLIAVIEMGLNAWLIAGLVPGVRRQPLKKIEPEPAALLRVLKRWGEEAAKAGGAIRRIAVAFEAGRDGFWLARFLRRAGIEAHVIHPTSVAVSREHRRAKTDRLDTQHLMRAFLGWLRGERKHCQMAALPSLEEEDARLPGRERETLVKERTRTVNRIKSVLIRFGLRGFKPLLRNAEARLAELRLPEGGPLPANTLSLLKRELERLRLTHGQIRAIEAQRAAEVAAAKKDAVSAEQGRREAAMLYLLTRIVGLAVETAQTLTREIFARRLRDRRALARYAGLSGAPDESGKRRREKGLARAGNLRVRKCMIQLAWRFTRLQKQSALAQWFFTRAAGAKGLRKTFIIALARKLLIALWRYVELGVLPEGVALRAA

SEQ ID NO: 191282 - protein, 356 aa, unidentified
MSRDIKYIGMDVHKEAIVIAVLNGSGKLVMETIVETKASSILQFIHGLRGELHVTWEEGTWAAWLYDLLQPQVEQVLVCNPRRNALLKEGSKSDKVDAQKLADLLRTGMLRPVYHGENGLRTLRELGRSYQTISKDLTRVMNRLKALYRGWGIACAGTQVYGPRYREEWLNKIPQAGVRRRAELLYQQLDGLQGLRRHLRPEFLAESRKHKAAKLLRQIPCIGPIRAARLIALIQTPHRFRSKRQLWTYSGLGIETHDSAQFRFVRGQLQRSRKPQQIRGLNRNHNHEMKEIFKSAATRASCGRGPFHDFYASLLAKGMKPEMARLTLARKIAAITLTLWKKEERFDVEQLKTQAA

SEQ ID NO: 191283 - protein, 388 aa, unidentified
MKAQIVDTLPPVAADHDPVRCLLAIELSKKSWIVAITTALSDKISRYTLDGCDWKGLLELMERVRTRVAREVGRPVEMISCYEAGYDGFWLHRLLERQGVRSHVIDPASVQVDRRARRAKTDHIDAARLLRSLMAYLRGEPKVWSVLRVPSVAEEDDRRLHRERDRLIAERGQHVNRIKGLCAIHGIYAYEPMRRDRMLRLEQLHTGDGRELPPRLKAEIARELQRLELILGMLKEIEAERDAIALTENVSAHTNAKKIQNLVKLKAIGAEIATVLTGEVFYRPFNNRHQVASYVGLTPSPFQSGSKCRDQGISKAGNPKARSTMIELAWLWLRHQPDSPLSVWFRERVGILKGRIRRITIVAVARKLLIALWRYLETGMVPTGAVLN

SEQ ID NO: 191284 - protein, 340 aa, unidentified
MTITVLGIDLAKNVFQLPGVDEQGHVVVRKTLPRPKLLPFVAQLAPCCRGMEACQGAHYWAREMRKLGHDVRLLSPQFVTPYRKSHKTDPNDAAAIGEAVSRPPMRFVPIKEVEHQDVQALHRARQLLIKQRPALCNQVRGLLREYGIVVAKGGQRLRTSLPSLLEEAENGLTFTRRELFQELYQQLGWLDERIDGMDVKMYQVGTSPEACQRLAAIEGVGPMIATALYAAVPQPHLFHHGRHLAAWLGLVPRQHSTGGKALLLGISKRGDRSLRALLIHGARAVVYRWKDKLNPSPRARWLQQLRASRGLKCATVALANKIARVAWVLLSQDVQYQPAR

SEQ ID NO: 191285 - protein, 344 aa, unidentified
MQIHSVGIDLGKTTFHLVALGAAAKIVVRKKFTRKQLLAFTANMPISLIGLEACSGAHFLGRALREQGHDVRLIAGQFVKPFVKSNKNDFVDAEAIAEAVERKNMRFVPIKTDDQLDLQGIHRVRDRLISRRTAVINQLRAFLLERGMAIAQRPAKLKAAMGNILGNAEVDLTPRMRSLIAILWSEWKLVQKQIEDLDLELERISSSDAGCTRIRQIPGIGPVTATAIVAAIGNGAAFRKGRDFAAWLGIVPRQYSTGGKAKLLGISKRGNVYLRKVLIHGARAAVLRIKRDRAPIGAWLDALDARAPKNVVVVAMANKLARIAWRCCRAEKSIDRSRRRSPSK

SEQ ID NO: 191286 - protein, 355 aa, unidentified
MKRAHFIGMDTHCQFCEIAVVDACGDVVLRDRCDTGIPTLLAVIEKVPQPRMLVIEEGPLAGWLWRNLHEAVMRMVVSEPRRNRLIAEEGDKDDDLDAEKLAQLLRGNFVKPVHQVETLDRAVFKQHVSWYHHRVRQRVREALRISSLFRQHGVMIRENAFVAEAERPALRARLPEASCLRDMVPLLWTSYDAGVEQEEQWRQRLVALAKQEEVVRRFEALPGVGWIRAATLYAYLDTPWRFRSKAALWKYLGIGLARHRSGNGPEHLGVPMQAHRLLKGTILGAALSAVASGNNPFADLYGRWIKQGLSAKLARRNVARAQAATLWGLWKNGSAYRPEWVGVAAAAAAAVPVSG

SEQ ID NO: 191287 - protein, 375 aa, unidentified
MKNFSTFIGMDVHKETIAVATAGKHGAPRYYGEIANTAEALTKLIKKVVPTGGRAVFCYEAGPCGYGVHRQITDMGHRCDVVAPSLIPKKPGDRVKTDRRDALTLVRLLRANELTAGWVPDNQQEAMRDLSRIREDLKSMERCARQRLSGFLLRNKKVYAGQSNWTQAHFRWLERIIFESPIQQIVFQEYVDVVKHLQGRVASVQQEMVKALAGWSLGVVVEALMALRGVNLVTAMTIVAEIGDMSRFESPRQLMAYLGLVPSEDSSGKQQKRGGITKTGNGHVRRVLVESSWSYRMPARKTAHLRRKAGKASEAVQAIAWKAQRRLCSRYWHLTQKGKLKVQACTAVARELAGFIWAISREVMGNNNTPVVKVA

SEQ ID NO: 191288 - protein, 400 aa, unidentified
MLSIGIDVSKGKSTVCGMKPGGEIVYTPFEVQHTREGMSELVSLLRGSGEEVRVVLESTGSYHCPVVAALLENGIFVSVINSLRMKRFCSQSIRRVKTDQIDAMQIALYGLAYWQELQPTRLPENTYRELQLLARQYYQMTSLLIKAKVDFNALCDQVLPGMQELMNDHAGRHKLSDFVLRYRHTTHILEMGETRFRKDYCKWAEKKGYRNCERMAVLIFATAQNGIPVLPNAPSTQIVITEAIRVLHTVEASRDAILTQMQALAKTLPEYSLVREMPCIGDTLAPRLIAEIGDVRRFHSKRALIAYAGIDAPPYQSGKFCANNRHISKRGNRYLRKTGYEVMQSYVMHKPANDPIFTFIEKKRGEGKSGKLAMVAGLNKFLRVYYGKVTELYRSLPAIE

SEQ ID NO: 191289 - protein, 431 aa, unidentified
MKYKQSKKQNQRITRISENTLVVGADIAKDTHVARAIDFRGIELGKDCVFSNTRAGLEQLVQWMKELQQEHAKSDVLFGIEPTGHYWFTLAEYLGRQGIPLVIVNPHHVHKSKELEDNSPTKNDYKDAKVIADLVRNGKYSEPKLPTSVYADLRILMNLREKIMVNFGQVQRRVQNWLDRFFPEYTQVFKDWEGKASRITLSEFPTPGEIVEMGTEAIVQRWKKDVKRAVGAKRALHLMETARRSIGLTEGLPGAKVEIKTLLEQYEMFARQLEEILAEVERLLAQIPGTKEMLTVPGVAVVTLAGFLAEVGDLSGYEHGQQIIRLAGLNLKENSSGKKKGKSSITKRGRARLRALLFRAVMPMVAKNAEFKALHQYFTKRSQNPLKKKQSLVALCGKLIRVLHTLGTKQVPYNANDVLGPVRQAQLQMAA

SEQ ID NO: 191290 - protein, 381 aa, unidentified
MLYVGIDVAKNKHDVTALNVQGKTVLKPLTFSNTRAGFELLDHSLRQLNQDCLIALEDTGHYAFNLLKFLHEQGYKVYTYNPLLIKEFAKSLSLRKTKTDKKDARIIALKLLSDPNREQFQHDNRKEELKILTRHIHRLKKKQSDWKVQYTRCLDIIFPELDKIVGKHSEYTHQLLTRYPSPQKMLEAGFDNLIEIKRLTASKIQDILSVAPLSIGTTSPAREFELIEIIENIKHYNRLIDKAEKQANELMAEINSVITTVTGIGNRLGAVILAEIRNIHAFDNPAQLQAFAGLDPSIYQSGKIDLAGKMVKRGSPHLRWALIQAAKACARFSPAFKAYLRTKLDQGKHYNVAIIHLAKKLIRTLFYLLKNKLPFDEQKVI

SEQ ID NO: 191291 - protein, 405 aa, unidentified
MDIVVERGAGLDVHKHSVVACIMGTGIKKEIRTYSTMTNDLIRLKAWLKEHGITHVAMESTGVYWKPVFNILEDAFEVILVNARHVKHVPGRKTDVQDSEWLCRLLRSGLVRGSFIPPKEVRELRDLTRYKRKLIQTITAEKQRVEKVLEDANIKLSSIASNTFGMSGSLIIQELLKGDLDAEAMAELSKGRLRNRKEELKEALVGKVEEHHKRMIRTSLEHIKAMEGILITVEQKIQQQIDLHFKEEFKLLKTVPPVKDSASVVIAEMGVNMDLFPTEDHLSSWAGMSPGNNESAGKKKSGATTHGNLYLKTILTEFAWIASKMKGTYLHSKYQSLIGRKGKKKTLVAVGHKILISCYQILKYKVPYKELGATYLDERKKERIARSYIKRLTSLGYAVTVKEAT

SEQ ID NO: 191292 - protein, 323 aa, unidentified
MNKDIKYFGIDISHLVFDVTDSDGNYHQFKNNLSGFKKFAKFLNTESHCVMEATGYYHYQLAYYLLESGFKLSVENPLSVKRFIQMKLSKIKTDKSDSKLICEYAKQIELKLWQGNSKHQTECLQMTRLLSVYTKQSTMLKNKLHGEAVLGNPSKAVVGSLKRSLKQVQKEMKTLEEKLLILVKQVHQDVLTRLKTIPGIGNKTALMLVVLTDGFERFTSGSELCSYAGLTPVIRKSGSSVNGRSRISKIGNQKLRNLLFMCSFNACKYNKACREIYERIVAKGKSKKLALIAVCNKLLKQAFAIAKSGLIYDDTYRSTLVKN

SEQ ID NO: 191293 - protein, 412 aa, unidentified
MRRVIGMDIHRTFAEVVVWEDGRLRHAGRVDMTRTALEGFGKSLKATDEIVVEATGNTMALVRVLSPFVARVVIANPLQVKAIAHAHVKTDKIDAGVLASLHAAGFLPEVWTPPAETERMRRLVARRNQVVRHRTRIKNEVHAILHAHLIPCCPHADMFSQIGRAWLKRQPFPDDEMMAIERHLRELDRLGEDLELLDREVAKNALDNPAVKRLLTITGVNVTVAAGLLAAIGDIRRFPSPQKLVSYVGLNPRVRQSGLGFAQHGRISKIGRSHARAMLVEAAWAAAKAPGPLHAFFVRIRARKGHQVAAVAVARKLAVLCWHLLTKDVDYLWARPALVAKKVRGMEIKSGQPVKKGNKPGRAHDYYVKTLRDREKTIAENAERAYEHFVRQWQPRRPEDAVRGRLKTARRE

SEQ ID NO: 191294 - protein, 349 aa, unidentified
MKIIGCDFHPSFQQIAICDLETGEFQDRKLSHGDGQAERFYRELGEPALIGIEATGNSQWFLDLVERLGHEIWVGDAAKIRASYVRRQSTDKRDAGHILKLLLEKRFPQLWRPSAAMRDQRQLLRHRDKLVEIRTKVKNSLQHLAMNRGMQKKSRLWTRQGMEQFQQLAMPGWAGTRREDLLQLFKELNGQIELLDQAVKQAAEQHPQAQLLMTQPGVGPVTALAFVLTIGDVARFAGSKQLTSYLGLVPSEHSSGSKRRLGAITKQGNCFLRKLLVEAAQTTVRKDEDFRKEYQHRCHHCPKAVAKVAAARKLAVRLYWMLRSNVGYPEIVHIESNPRVPLGESSPKH

SEQ ID NO: 191295 - protein, 369 aa, unidentified
MGEYSEIFVAFDVAKRKHAVAVAESGRRGEVRFLGEIENSGTAIERTLKKLSGRHGRLHVCFEAGPTGYGLYRQVQALGHACTVVAPALIPRRAGERVKTNRRDAVTLARLHRAGELTGVWVPDAVHEAVRDLVRARQAAADDLRRKRQQLLSFLLRQGRIYGAGGHWTLAHRRWLARQSFEHPAQQIVFQEGVDAIEDAAQRLHRLEKQLAIIVPSWSMAPVVAAFQAMRGASFLVAVTFAAEIGDVRRFDTPRQLMSFLGLVPAESSTGDTIRRKGLTLAGNRRARRALVEAAWTYRFPARVSEALRARLDGLPKGIRDIAWKAQIRLCARYRRLSAAGKKLPVVVAAIAREIAAFLWAIGREVAPV

SEQ ID NO: 191296 - protein, 417 aa, unidentified
MKSARNTLPEEPAGGVTAGIDWARDDHAVSIVDARGREISRHTVEHSAAGLRELISVLARAGAGETAIERPDGPVIDALLSAGITVVVISPNQVKNLRGRYGSAGNKDDRFDAFVLADTLRTDRARLAPLTPDSPATIALRRACRARKDLVGHRVAVANQLRAHLRNVLPGAAGLFSQIDSPVSLAFLARFDTQDRADWLTPARLGKWLASIGYSGRTDPAILHARLTAAPRGITGPDATAQACITRALHAVLITVTDQIRVLSAQIGAQLAAHTDSHIFTSLPRSGTVRAARLLAEIGDCRARFPTPEALACLAGAAPSTRQSGKMRAVTFRWACDKQLRDAVTDFAADTRHASPWAADLYAKARSRGHDHPHAVRILARGWLFIIWHCWQDGTAYDPARHRALQTLLNQDQQSKA

SEQ ID NO: 191297 - protein, 419 aa, unidentified
MFKIHRNNCCGLDVHKTWIYACIGVTDVEGRTEYKEKRFSSFSRGLRDLAAWLSQHSCVEVCMESAGKYWIPVYNILEKTCLVTLSHPKYTKPQKGNKTDRKDAKWICNLFICDMIKPSFIPPCDIRQLRDLMRYRGKLTNCLTGEKNRAQNCLTVSNLKLDDVFSDVFGKSARSITEYILSHPGEPFDVAPFVDRRCKHPLEEIQAAVDGAISHEQAVKLRECLNHIDELETHRTKIESEILSVTKRYSLVLDLLHSVPGFSANPMTAIATIAEIGADMSVFPTAKHLCSWAGCCPRNDQSGGKVKSTRISRAGSYIKPLLVQVANGIVRSKAHPEFAERYRRIKARRGHKKAIIAVCRMLLTAIWNILSKLVPYSPDGFLSPPPVDKAKILTKSQALQLLRLRGYVLLDDTPPLTPV

SEQ ID NO: 191298 - protein, 332 aa, unidentified
MTIVAHAYDFVVGVDTHASKHAFSIVESRTQTEVDCGEFPVTPAGFARSISWLRRRTNHSCRVLVSMEGVSSFGQSLRLDLQREGILVTEAPKPPHRAGRIAKNDFIDARRAATSVMGWDVTSLQIPRSGGVREALRILVQARHGLTVENTAQINRLTALVRTNALGIDARRALGRIQIKAIAKWRVRAETIDLQVARSEAVRLAKLIIANREALTDNKNAIETLVQQVAPALLTMRGIGPVTAAQFYLAWSHHDRIRSAAAFVALAGANPIPASSGNNQRYRLNRGGDRSLNNALHTVVLVRMRYDQETQEYVQKRTAEGKSKQEMGLLHE

SEQ ID NO: 191299 - protein, 375 aa, unidentified
MNQFIKYVGLDTHKDTIAVSIADSAGGKPRFYGEIANTMTAISKLLKDVSPNGEVVSYCYEAGPCGYGIYRQISDSGHDCSVVAPSLIPTKPGDRVKTDRRDSENLARLHRAGELTPVWVPDLEQEAMRDLSRAREDMKHLERQARQRLCAFLLRHGQKYDSGKSKWTQSYWRWLERIKFSHRVQQTVFQEYIDSVKQQQQRVADLEQAMHEALADWALAPVVEGLMALRGCRLITAMTVVAELGDITRFDSPRQLMSYLGLVPSESSSGPKTRRGGITKTGNGHVRRVLVEAAWCYRFPARKTAPLQRRAEKTSDAVQAIAWKAQKRLCGRYQALSQRGLLPQKISIAIARELTGFIWAIACEVMPMNATEANG

SEQ ID NO: 191300 - protein, 334 aa, unidentified
MKNYCFHIGIDVSKLKLDVNLLNIQTLDSEHFVLENSVKAIKLFIKTLVKRKIDIGSVLFCCEHTGIYTNHLIHTSADLKLDLWVVPAIEIKRAKGISRGKNDKTDAKDISYYSLRNIDKLALYTLADLDVQKLKLLYTEREKALKSLMIIQTSKENADFVSREVFKEVSKINKGLVAAIRKSIKAIEDKMKQIIQSNPELQQQTALIKTVPGIGEQTSLYLIIATKAFKAFPNWRKFACYSGVAPFEYSSGSSIKGRTKVNHLADKKMKSLLQMCAMTTMKYDVQLKQYYHKKKAEGKNPMLILNNIRCKLISRVFAVISRGTPYIDTYKFAS

SEQ ID NO: 191301 - protein, 403 aa, unidentified
MNNVAGIDVSKGKSMVSVLRPFGEVVAKPFSIGHTGSELKELADYLKSLDGETRVVMEHTGRYYEPVARFLHDEGVFVSAVNPKLIKDYGNNTLRKVKTDKADSRKIARYGIDNWAELRQHTPMDTIRMQLKTLNRQQSLYTKTKTMMKNNLIALLDQTYPGVNALFDSPVREDGSQKWVDFATAFWHVDCVRNMSLTAFAERYRKWCKRHGYNFSQSKAVEVHAGAQDLIAMLPRDALTKTMVRQAIDALNAISASMERLKAEMQALAAQLPEYPVVMAMHGVGDSLGPQLMAELGDVTRFTHRNAITAFAGVDPGADQSGTHEAKSTRVSKSGAPELRRALFLVMDCLLKTQPQDDPVYRFMDKKRAEGKPYLVYMTAGANKFLRIYYGRVKEYLASLEEN

SEQ ID NO: 191302 - protein, 417 aa, unidentified
MGHARARKVSAQLVEDEGYRLRYERVAGIDVAKAKAGVRSRLPPAREGGRRVWRAEEVPATVREVLALAGRLLADGVELVVMEATPDYWRIWYYLLEGAGLRVQLVNSRHARQLAGRPKADQKDAQWIARLAEMGLLRPSLVPPPEIRALRDLTRMRLMLVRDRARERQRLEKLLEGALVKLSSVVHSMSGTKTARDILEAIVIRVHLDHVTLLDRSVAAIEDEIEAALDAIEGAWGISAGGVPSPAPGPDAAALAAVERLAEIPGVSPDLARAVIAEVGLDMTRFPTPGHLAAWAGLAPVARQSGPRARKPARGRGDAYLKGYCTQAALGASRTETFLGERFRRLARRIGGIRAQCAVGRSILVIVWHLLSDPGARFRDLGPGWHERKTDRDRKIRSHLRQLQALGLDVTLTEATA

SEQ ID NO: 191303 - protein, 320 aa, unidentified
MSQIVIGVDIAKKKFDVASLSDGKYKHKTFTNDEQGFANFVSWLLTLFINDKPLICMEATGAYSIPLADFMVSQGYPVSVVNPAKIKAFAKSELSRAKTDKADAKLIARYAFTMRPPLWTPPPQNIRMLQALVRRVEHLLEMIQMERNRLDTANANITDSITTVLATLEAELEATRKAIHDHIDNDPELKCRRDLLITIPGIGETSIAHLLVVLSDHHGFLTAKQAVAYAGLAPALRQSGQWTGKTHLAKSGDPALRKALYMPALVAWRHNPLLRIFCQRLKANGKNGKAIACAAMRKLIHLSFAILKSGEPFDPLFAAK

SEQ ID NO: 191304 - protein, 347 aa, unidentified
MVTLGGDCHKRTHTLVAVDDNGQQVGAKTVSAVPAGHLEALDWARQWPERRWALENCRHLSRGLETDLLLAGELVLQVSPKLMAGARRSARESGKSDPIDALAVARGALRESGLPVARLEGASREVKLLLDHRDDLVGERTRIQNRLRWHLHEVEPGFDVPERSLDRKVVLKRVAKVLAVHRGIAAGIAVELLESVRQLTERINELEAQIRVLVSHLAPKLLELDGCAALSAAKLIGETADITRFKTPARFAMYNGSAPIPVWSGNAERHRLNRGGNRQLNAVLHRIALTQMRLGGRGHDYIQHRKACGDTKREAIRALRRRISDEVYRRMWQDATRVTRDHMPAAA

SEQ ID NO: 191305 - protein, 358 aa, unidentified
MTHNTPQITGGVDTHGQTHHAAVIDSVGRHLADQEFPATIRGYRDLLDWIRSHGTLVAVGVEGTGAYGAELARVLTAAGITVIDVDRPDRKTRRMKGKSDPIDAYAAATAVLSGRATGVPKSRDGGVEAVRVLRIARRSAVKARTQAMNQIRGLLVSAPAMLREQVAGLDRAALIRTLARLRPGHDLSRPLAATRAALRRLARRHQAMDAEITELDAEIGPLVEQAAPALLELFGIGPETAGQLLVSAGDNPERMRSEGAFAHLAGVAPIPASSGRTHRHRLNRGGDRAANNALHTIVLTRMRFDDRTRAYVERRTKEGLSKKDIMRCLKRFVAREVYRALTTTPTERTTQTDLVPAA

SEQ ID NO: 191306 - protein, 408 aa, unidentified
MGRSIGLDVHRDFCQVAIADGGRARSAGRIAASPDVLELFAQSLAPTDRVVMEATGNALAIARILAPHVAEVVLAHAKQVRAISHARIKTDKVDAKVLADLLAGDLIPAVWIGDERCRMLRRLVSRRRGLVKRRTQIKNEISAALHRNLKGRNPASDPFGKAGRPWIKAQQLPIDERLTVDGCLRQLDFFGDELAEIDRLIAQQVLGDADVRRLMTIPGIDVVTAATLVAVIGDVGRFPTSRHLVGYLGLHPTIRQSGNGPARHGRLSKEGSAAARHVLVEAAWSAAKAPGPLRAFAQRTAVRRGRHVATVAVARKLAVLAWQLLTRGEDYALARPGLVRRKLRALELTAGAPRTKPEKRLAEQAEAAYRRLVADWQANGPKVGAGATPERASQGPSKGKAARQASCS

SEQ ID NO: 191307 - protein, 310 aa, unidentified
MGQVNAAIEVGKHKLEVAVGSDGELFSEPNQSRAVTRLAKRLIEIGCERVLIEGGSYQNVLVGALRAVKLPVVIINPRRVRAFARSIGRLAKTDHIDAKVLALYGERIQPPLRELPDEQNQQLRALWIRREQLIEMLVMEENRLEHTPKALHRRLGSHINYLRKQIKHADKDLDRAVRNSALWDKYELLSSVPGVGPVLSFALLADLPELGRLNRCEIAALVGVAPFNYDSGTLRGQRKIQGGRKRLRRVLYSATVASVRCNPILRPYYQRLRTNGKPTKVALVAAMRKMILILNAMLKTQTTWRPPCPT

SEQ ID NO: 191308 - protein, 406 aa, unidentified
MEVVHPRCAGLDVHKKTVVACVMVPGRREVRTFGTMTDDLLRLADWLQQEQVSHVAMESTGVYWKPIYNVLEGTGLELLVVNAQHIKAVPGRKTDVKDAEWIADLLKHGLVRASFIPSRPERELRELVRYRTGLVEQRGHVVQRIQKLLEGANIKLSDVASDVVGVSGPAMLRALAAGEQDTHRLSEMGKSQLRNKREELKRALQGSFGEHQRFMLNNQLGLLEFLDRQIAELNQEVERRLRPFETLLERLQAIPGIGPRNSEQILVEVGTDMSRFPSDSYFASWAKLCPGNDESAGKRKSGRTGQGSRWLRASLVEAAWSAARVKNSYFAAQYHRLVPRRGKRRAAVAVAHSMLIVIYHLIKDGTVYQDLGPTHFDELDRRRVTRRAVHRLESLGFEVSLREVGA

SEQ ID NO: 191309 - protein, 410 aa, unidentified
MSMLAVALDPATVIVAVDPGKVLNRVWVSNGAGLLAEPVSLPVSREGVQVLERLLAGRDAAEPVIAVEATGDLHRSWVSELERRHPGSVRMFAPSETRAARTQLGSARFKTDDRDCAALTYLARQGRGRRYDQESAVDALRAAVRHRRGLVSDRKVAQQRLHAQLNALCPGLSAPTGHGRALPLASPTGLAVLGCAAAFAGRPPRLRSLMVRAPGRITQATAEYWVHRWRGCLSPPADAQQRARRLDRDLHRYRALQADITSLDAELTELLAATQGQVLTTLPGVAVTRAAAFAAFSLPIARFPDAEHLYSATGLAPALYQSASLHRRGRISRQGLAEHRDALMGMAWGLSISSPSFAKRNAELHTRGMAPIQARVALARHVCRLAYRLLQTQQPFDEERYRQGRLSRGR

SEQ ID NO: 191310 - protein, 443 aa, unidentified
MSELAVLDPRAAFVDVGSEKMHVSIAGGPPALFGTVTSQLHALRDYLAEHQVRSVAMEATGVYWLPLYGVLEAAGMEVVMVDGRQTRNLPGRKTDMKDCQWGATLHAHGLLRAGFVPPAHIRRLQDYLRLRGDHIAAAAGHVQHMQKALERMNIKLHEVISSLTGASGLTVIRAILAGERDPQVLLGLCDIRIRNVKAERVVESLRGDWAEEHLFALAQAVQSWDHYQGLIAACDRQIAVVLRQMPDAKVPPPAASTKTGKPRTRPGVNAPDIADLREILAQICGAKDLTTLPAHSEYSVLQLIGEVGTDLTKWRTEKHFTSWLGLAPGSAQSGKRKASVKRRRNRAGQIFCVMARALARSKYVALGGFYRRMAARRGGLVANKALARKLATLFWRVMVKGLDFIETGVAQYETRVLETKHRILHRLARQLGQQIVPNPAAVV

SEQ ID NO: 191311 - protein, 403 aa, unidentified
MNNVAGIDVSKGKSMVSVLRPFGEVVAKPFSIGHTGSELKELADYLKSLDGETRVVMEHTGRYYEPVARFLHEEGVFVSAVNPKLIKDYGNNTLRKVKTDKADSRKIARYGIDNWAELRQHTPMDTIRMHLKTLNRQQSLYAKTKTMMKNNLIALLDQTYPGVNALFDSPVREDGSQKWVDFATAFWHVDCVRNMSLTAFAERYRKWCKRHGYNFSQSKAVEVHTGAQDLIAMLPKDALTKTMVRQAIDALNAVSASLERLKAEMRTLAAQLPEYPVVMAMHGVGDSLGPQLMAELGDVARFTHRNAITAFAGVDPGADQSGTHEAKSTRVSKSGPPELRRALFLVMDCLLKTQPQDDPVYRFMDKKRAEGKPYLVYMTAGANKFLRIYYGRVKEYLASLEEN

SEQ ID NO: 191312 - protein, 358 aa, unidentified
MKGVTGMKITTIGLDVAKDVLQLHGVDERGHVVVSKQIKRSKVLEYFANLEQCLVGMEACGGAHDWARRLIGYGHQVKLMAPQFVKPYVKGNKNDMRDAEAICEAVTRPSMRFVPVKTAEQQALLALHRGRQGYVKTRTGFANQMRGLLAEYGIVVTKGITHLYTRIPEILEDGENGLPGMFRGLLARLLKSLKETDQQVKEMEGEIKAWHQENAASMQLATIPGIGPLTASALTATVGDARDFKSGRQLAAWLGLVPRQHSSGGKTNLLGISKRGDTYLRTLLIHGARAVIRVAPAKRKPDDWINRLIGRRNKNIAAVAVANRNARIAWALLTRKEDYKPPEIRHLPASPAAAPCPA

SEQ ID NO: 191313 - protein, 494 aa, unidentified
MVKSKRKSYKRRQHIQKVKGRRFTDEIRDLDLEKVLVIPIDGGKNSHKALVANYFGDILHDPFEFTNSTTGVKMFNNIIKSISSSIKAQKIIIGLEFTGHYYENLYRSLIRLGYDVAMINPSSVYSQRSGQLNWCKTDEIDLCAIGQVLIDNQATETSLPEGLYYNLRQLGRLHTDEIRKRARLKVQIRVLCDHIFPGLQKSEIFSDFWGKSSILLLENYPTPTSIIRLGANRLGKFFKRYNTKLGLYTAERLVNLAKNSLSVKVKKVNLEAHLLNLKFKIADLKMANEKIRRLNIELARYLVQTPGILLLSIKGINVPSAAKFLAEVGPLKQAGNAKKVIARAGLNPSRFQSSEYERADSPITKHGSNHLRSISLTISQDLIGLNPHSSLPYNSYFRGFFDHLIEEGKDKMLAKVACANKFIRVSWAMMVGRKFFSPPTWKKNKASDDPLAKLKKFLSLNKAKELFKDLANIAKEQMPSNYHSHLYEEQNSLN

SEQ ID NO: 191314 - protein, 378 aa, unidentified
MKNDSRYVGLDVHAETIAVAVVETNGEVEFLGTIPNRPEAVRRLVKRLGPANRLRFCYEAGPTGYVLYWQLTGLGTHCDVVAPTLVPVKPGDRVKTDRRDAEKLAVLYRGGHLTPVWVPDQAHEALRDVVRAREAAKSDQLRARHRLQKFLLRHGRRPPQGIKAWTQKHLDWVRREVHFEALAQEAVLVDHLAEVEHARERIRRLEGAIDTAVEAAPACLRAVIEALQGLRGIAKVSAATIVSEVGSLSRFRKPRQLMGYSGGVPREDSSGDRVRRGSITKTGNAHLRRIVGEAAWSYRHRPTVRGELLKRQAGLSEEVKAISWKAQHRLYSRYRRLIGKGKAKQQVVTAIARELLDFIWAIGVHVEQQHGTAARRAA

SEQ ID NO: 191315 - protein, 323 aa, unidentified
MRTSVGLDISKKTIDAAYMPAERQITSAVFTNDADGIQSLKQWLDAFGQSDLHICMEATGNYYEAAADALSNDYAVYVVNPLKIKCYAKKRFSRTKTDKQDAKIIAEYCFTALDAELEQRHTPSADQYRLKRFMALHGQLKQQMTAQKNRLKAAKDKFVQSIHKEQIAQLQRHIDAVEQEINDAAGGDSGTKATTDKLQSIPGIGGITSAKLAYYLTALKFKGAKQFAAFAGLVPQKKESGTSVKGKEQMTNYGNRQLRGALFMPAMVAYRNGYFPELIKRLTKKKKHKKVIIGAIMRKLATIAYYVHTTGKPYEPHRYRPQS

SEQ ID NO: 191316 - protein, 400 aa, unidentified
MRAVFGIDVSKASSEVAILVNGEKVHGYTISNDAIGFSQLLGDLKTVHKPEIIFEATGVYSRRLQSFLDEHGYAYTRLNPLEAKKQLDSLRVRKTDQIDAEKLAQSQFVLNRKTTYVQEEVYQNLRDLSRFYQNLTEDIVRAKNRLHKALQVTFPELENILSTPTGEQYWNLVIAFPCKDFVLELSKDKLSESIRQSTSKQISDKRVAYLAEKLIALANQSYCAVKKNSPMLEEVRYYTKELLRLSEQRQAVLDEMVELAQPLPEYDILLSIPGIAETTATSIIGELGDIRRFQSANQINAFIGIDLRHYESGNFIAKEHITKRGNPYARKILFKCIHNITSASHTNPCHIADFYEKRKRQSQTTSTKPHTIASIHRLIRTMYYLIMHNKLYDYASTQNR

SEQ ID NO: 191317 - protein, 391 aa, unidentified
MICVGIDVAKDKHDCCILDSEGTTLADCFTIPNNLDGFKRLLQTIKDCTQKSDKIKVGLEATGHYSCNILGFLLDNDLPVYVMNPLHTNLYRKSLSLRKTKTDRVDAKTIATMLLSDVDLKSYTDTAYHNEELKSLTRYRFDKVQERAKLKQSVSRLVTILFPELEQLVSSIHGTSIYALLSEYPGAKQISEAHLTRLANILVTTSRGHYRKDKATHIRDAARTSIGSVMPAKSLELKHTIKLIQELTSEINEIEDAIRKIMDELKPPILSIPGMGFHSAAMILAEVGDFSNFNSPDKVLAYAGCSPSTYQSGKLTNCYAHMEKRGSRYLRYALYTATKYVCYWNPVFTEYLTKKQAEGKHYNVALSHATKKLVRLIYALQKSGKAYLAVT

SEQ ID NO: 191318 - protein, 395 aa, unidentified
MFIVGIDIAKRSHEAIIIAEDGQVVRKAFSFRNNCTGYNLLLEQVRRLTLVKSQIVFAMESTAHYWLALYARLLKDGYTVMVLNPIQSHSLRELYIRKAKTDARDSLIIADLVRFDRCKASNVPQDKILALRELCRSRAYLVDMAADLKRKLIALLDRIFPEYESLFDSVFSKASIAVLRKYSTPQKVKNAHLGKLTDILMESSNGHFGEWKAHQLKEAACSSFGIDDSGGVYSTLLGMFLEQILSLTVQADSLEKQISVFFQEFNNPLTSIPGVGTVLAATILSEIGDITRFSSADKLLAYAGLDPSVKQSGEFKSNQNRMSKRGSPYLRRAIWLASTVAVHRDPMFQTYYEKKISEGLHYMNVIGHVSRKMTAVIFAVLRDGQPYQPILQSAG

SEQ ID NO: 191319 - protein, 403 aa, unidentified
MNAVGIDVSKGKSMVAIIRPFGEIVSSPFEIKHTSSDIKSLIKLINSVEGESRIVMEHTGRYYEPLAHELAAANLFVSAINPKLIKDFDNDSLRKVKSDKADSVKIARYALDKWQNLKQYSVMDELRIQLKTMNRQFGFYMKHKTAMKNNLISILDQTYPGANAYFDSPARSDGSQKWVDFASTYWHVDCVRKMSLNAFIDHYQKWCKRKKYNFSQEKAKEIYGKAKELVPVLPKDEITKLIIKQAVDQLNSASTTVEELRTLMNETASKLPEYSIVMNMKGVGPSLGPQLMAEIGDVSRFTHKGAITAFAGVDPGVNESGIYEQRSVPTTKRGSAELRKTLFQVMDVLIKTMPQDDPVYQFMDKKRTQGKPYYVYMTAGANKFLRIYYGRVKEYLATLSESN

SEQ ID NO: 191320 - protein, 318 aa, unidentified
MNIIGPDISKDTIDATLHKTNGSIHYIKFKNNDDGLKQFRLWIKGNRIRKVYIGMEATGIYYEKAADMLSSYYTVYVINPLKINDYGKSRFNRTKTDKADSNLIADYIKRHQDTLIPYQIPKNKALQKLINLKNQLQQQQKQIKNRLHSTEEDFIRNIHQDLIDTIQDKMEQVKIAISEQIKKQTDNNHYRNLQTIPSIGKDTASVLYAQLTEKHFKTANQFVSYAGLSPAIIQSGTSVRGRGRLSRYGNRRLKSTLYMPALCAYRFNAFPKLINNLKKAGKPKMVIIVAIMRKLAKPAYYIVKTGQPYDAERHRLNQ

SEQ ID NO: 191321 - protein, 381 aa, unidentified
MVIDADGKRLLSRRVANDEAALLELINAITALADGGELTWAIDLNAGGAALLIALLIGAEQRLLYIPGRTVHHASGGYRGEGKTDAKDAAVIADQARMRRDLQPLRPGDDIVAELRILTSRRTDLVTDRTRAINRLRAQLLEYFPALERAFDYSASKAALILLSGYQTPDGLRHAGAARLAAWLRKRKARNADAVAAAAIEAAKSQHTVVPGQQVAAAMVARLAEEVMTLDTEIGDTDAMIEERFRRHRHAEIILSMPGFGVILGAEFLAATGGDIAAFGNTDRLAAVAGLAPVPRDSGRISGNLKRPRRYNRRLLRACYLASHIAIRTDTASRIYYDRKRAQGKRHTQAVLALARRLNVMWAMLRDHKPYQPTAPNTAAA

SEQ ID NO: 191322 - protein, 457 aa, unidentified
MPQRKRKGRKSKLNVNNLPQHLRHINLNAAGIDIGSDRHLVAVPEGSDEVSVRQFGTFTSDLHDIADWLKKCGVTTVAMESTGVYWIPLFELLEQLGFEVKLVDARHVKNVSGRKSDVLDCQWLQQLHTYGLLQGAFRPPDEICVLRSYARQKEMLTQASSMHIQHMQKALQQMNLLLHNVVSDITGVTGMKIIKAILAGERDPNVLSLNRQEGCRNSKETIAKSLVGNFRDEHMFALKQAVQLYETYQNMIAECEQALIKHLGTRPDLTDDPPPESGKSVRARERIRAGVDVREKLFKMTGVDMFAIPGLAADTLLTLASEVGFDMSPWKSDKHFTSWLGLCPGTKRSGGKTLDRKTKRNANRGAQAFRMAAASLAKSQTALGAFYRRIRSRTDGRRAITATAHKIARVFYSMLTKGTAYVEAGQQAYEQMFKERRIKSLRKQAQSLGFQLHPCAR

SEQ ID NO: 191323 - protein, 356 aa, unidentified
MSLPTDEREVILGVDTHLDVHVAVLIDVIGRVVATHSVETTSSGYDELIEWAHSFGRLIRAGVEGTGTYGAALARRLRERDVMVLEINRPDRSRRRLRGKSDPTDAENAARAVLAGDASAIAKAQCGVVEAMRAVTMARRSAVKAKTQAINQLRALLVTAPEAIRTTLWKVKPEHCVARCARLQSLGDTPLLKALTNTLRLLARRWLNLATELRELDAALAQLTKQAGHRLLTQFGVGPQTAATLLVTAGDNPDRLRSEAALAALCGVSPLEASSGKTTRHRLNRGGDRAANNALWTISMVRMRSDPRTRAYVARRTAEGRSTKEIQRCLKRYIVRELYPLILADLADTVRRPNLT

SEQ ID NO: 191324 - protein, 359 aa, unidentified
MDGSKEHPHMTAGLDIGEKYSHLCLIDTGSGEVMEEGRLRTTPETFLRRFSSERPIRIAIEAGTHSPWASRVLEECGHEVLMANARKLRLIYSNKQKTDEIDAENLARLARLDPKLLYPLKHRGEESQAHMAVIRSRQALIGCRTQLVNHVRGTVKSFGGRLPKCPAVSFHNKAPEHIPDALWPALGPLLEQIGSLTQRIRDYDRKLETISKEHYPETELLRQVEGVGALTALTFVLTLEDPYRFEKSRSVGAYLGLVPARDQSGDRDPQKRISKEGDETLRKLLVGSAHYVLGPFGQDSDLRRHGEKMASRGGKNAKKRAVVAVARKLSVLLHRLWVTAEVYDPLYNARRRTKQEEAA

SEQ ID NO: 191325 - protein, 371 aa, unidentified
MKKPITVVGMDTSKAKIQPALLLPDEGRATVWEIRNEASAVRRLVRQVSRKAKGEVVFVYEAGPCGYALQRQLEGMGYQCVVVAPSMVPVRPGERIKTNRRDARKLAEMYRAGILVEVRPPSPEEESLRDLCRAREDVLEDRLRCRHRLSKLLLRRGYVYTAGRQWTQGYGRWLRTLKLGNEADAVVLADYLLAVEQADARLKELDAQLQRFAQKEPYREKVGWLRCFRGIDTLTAMTVVAELHGIERFRSARELMAYVGLVPRESSTGDKHHRGPITGVGNAHVRRVLTEACHPYRHRPTVSGALAKRRQGQPGWVIAIADKAQQRLHRRYWTLASRGLIKGKIIIALERELVGFLWAVLKGPLAQQAAA

SEQ ID NO: 191326 - protein, 339 aa, unidentified
MKRQYVAIDLHRRHSLIVRDDDQGNQLGVTKIENDPLTLAKVVAEAGEAPEVAIEATNGWYWAVDVLQELGAKVHLVHPKGLNWEDRRVKNDYLDCRELLDRMRIGKLPEAWIAPVEIRELRELVRYRHSLGRHRTSAKAQIHGVMAKNGILPVVAELWGPIGQAQLDGLELPEAYALRMRSLRELLAHIEREITKIDAQLHHRLKSDPGYQALVRLPGVGKVLGAVFVAEIGDISRFDSAKKLCSWAGLTPKHKESDEVVRRGAITKQGSRLVRWAAIEAVGNYRAKGNEKLRADYRRIAERRGKYKARVAVARKMVTLVFYALRDGEVRCLETATAA

SEQ ID NO: 191327 - protein, 385 aa, unidentified
MSKARKRGPGPSHLLMTPDHAGNVVGIDPHKRTLTATVADARGGVLGSAHFRVSGEGHRELEAWARQFGQIARWGVEGSASWGRHTAMFLTGRGHDVRDVCPNRTPRQDRARQRGKSDMLDSERIAREVLAHPLLPKAFKRAGQERGPDEQHQLLALWHNRRRSILTSRQHLVGEAEYLLCELPLELSEQLPDTKTVKPRLAALARRNRRRRYDAPTRLRLQLLDGYRTQIKALDLEEKQVVAQLEALVDQSGSTLGELCGLSTRSVAELLVEVGDPRRFTEGGFARFNGSAPLPASTAEGPGEPVRHRYNPGGNRRINAILYRMAITQLRCEPRAQRIYTNARAGGHTKREARRILKRHLSDVIYRRMIRDLEAQLTDQHLLAA

SEQ ID NO: 191328 - protein, 361 aa, unidentified
MSTIADDDARVIAGVDTHKDFHVVVVLDELGRKLDTATFAATPHGYRDLTGWVCGFGEVLAIGVEGTGSWGAGLCRHLRERGLNVIEVNQPDRHKRRRRGKSDRLDAEMAARAVLSGDATALPKAGNGPVEALRQLRVARTGAMKARTAAANQLHSVCDTAPDHIRSQLRGLTTRRKIAVAARYRPGDALTPIGGAKRALVTIARRWTALDAEVAELDRAIKTILDTIAAPLLARHGVGYETAGALLCTAGDNPDRLATEASFASLCGTAPVPISTGNSKRRRLNRAGDRRGNSALWTIVMSRLRSQHAPTVAYLQRRVAEGHSKRDAIRCLKRFVAREVYGDIQTITAAQTTKSSLEIAA

SEQ ID NO: 191329 - protein, 392 aa, unidentified
MKRNDLSRSLVAFEQNSTLVAVVELSLKSWLVAGLVPGVKGDRLKKIGADETVLLGLLHRWRTEAVKAGSKITRIVVAFEAGRDGFWLARWLRAQGIEAYVIHPNSIPVSREHRRPKSDRLDAGLLMRSFLGWLRGEPKHCSMAAIPSLAEEDARRPNREHEHLVGDRTSIVSRLKATLVRLGIRGFNIKLRKAAEKLEKLRTPEGEPVPPNTLAELRRDLARLQLVQVQIAAIEKDRVERLKRAPQAGAHPMVLLLARLLGVGVETADMLVHEILSRKLRDQRAVGRYAGITGSPDESGSKRREKGLARAGNARVRRGMLQLAWRWLMFQKDSALAQWFEARTAGARSVKARKDIRKIMIVALARKLLIALWRYVTTGEVPAGAKLKPAAI

SEQ ID NO: 191330 - protein, 344 aa, unidentified
MTQISTIGLDIAKNVFQVHGEDGEGRIILQKKLRRGQLLGFFTKLAPCLVALEACGTSHYWGRTLRSLGHEVRLIPAGYVKPFVKRNKTDARDAAAICVAARRPDMRPVPIKSQEQQAARALERSRELLIKQRTQLMNCVRAMLAEFGIVAAQGLNGFAELRERLAKEEAGSNTLAPTALIEALRRLVAQIDSLSPAIAALEDEIVMAAKENADMRRLMKIPGVGFLTAHAIVTAIGEGRQFGSARDFAAWAGLTPREASTAGKRRIKGLSRQGESRLRKLFALGAVTLMRNARSRDDRATKWRRDILARRPMKVAVMAQAAKTARIAWAVLVSGKEYVRPAAA

SEQ ID NO: 191331 - protein, 349 aa, unidentified
MKKDSVTIGMDLGDQNHIVVVLDETGEEIALESIPNTEYSLKKFFSRYQNPTVALEAGTHSPWISRLLQELGCTVYVGNPRKLRIIWDSYEKSDKRDARILAMVCRVEPRLLWPIKHRDRQAYADLGVIKARDALVKNRVRLISHIRSVIKTCGCRIPKCSTNSFSQKAPAYIPNELKESIEPLIGTVDQLTERIKELNHQIKKLCGKYPETEKLLQVTGIGPVTALAYVLTIDDPYRFRKSRQLGAYLGLTPRLDQSGKCDKQLRISKAGNSYLRALLVSCGHYIIGPFGPDSDLKKYGVSIVARGGKNAKKRAAVAVARKVAVLLHQLWVNGKPYDPFYQNAGNCKA

SEQ ID NO: 191332 - protein, 365 aa, unidentified
MQKISTMRTSGKNIFEGQITVGLDLGDRSSAYCVLNEAGEIGLEHNLATTPEAMKQVFASMPRCRIAMETGTHSPWVSQLLTALGHEVIVGHAQKVRLITKSRRKDDRLDARTLARLARIDPELLSPVKHRSAQAQLHLTEIRARAVLVSARTALVNAARGLVKSYGERLRKCGTQQFSRETTKGLSTGLREALDPLLQEIESLNDRIKEYDRRIEKMAKQTYPETALLKQVKGVGDIIATAYVLTIEDPQRFRKSRDAGCFVGLQPGRRNSGESEPQMRISKEGDEYLRTLLVQGAHYILGPFGEDSDLRRWGQKLSGRGGKNAKKRAVVAVARKLAVLLHRLWVSGEVYEPLRNSQKAMSAAA

SEQ ID NO: 191333 - protein, 321 aa, unidentified
MFVGIDVSKDFLDVATREGELDPFRVSRDEAGLDELVQRLLSARTKVKLVVVEATGGFERDVAAVLASAKIPVAVVNPKRVRDFAKGTGELAKTDRIDAAILAHYAESVAPAVQPLPDALSREVEALLTRRRQVIQALVSERNRRAGLLQQRVTGPGKRVMQSLTRSIKWLENELSSLDDDLDDTIKKSPVWREKDDLLQSVKGVGPTLSRTLLGYLPELGLLNRKQIAALAGLAPFNRDSGKHVGKRKISGGRTEVRCVLYMGAVTAARCNDELGDFYRRLVAAGKPKKVALTAVMRKLLIHLNALMRCHLQNTAPALTA

SEQ ID NO: 191334 - protein, 340 aa, unidentified
MEKKWFIGIDVSKDTLDVSMHGLESRGKFNDKKIENNPRGYGFMLSWIKKKNIALDECVFCFEHTGVYSLVLAAYLNEMNLFVCVEPALQIKRSIGMVRGKNDKIDARRIATYAMDNKEKLQCYKIPGKSILKIKQLLTYRDQLVRSSASFKTSLKSHERFQLTTEPDFVTKDILNQLNDLDARIEKLNEQIEEIIKQDDALKNNYELIRTVKGIGLVIGAFMLVTTANFSRFENGRKYTCYAGIAPFEHSSGISIRGKTAVSHLANKRMKTLLYNAANSAAQWDPELKNYYLRKRKEGKDHQLVMNAVCCKLVYRMFAVVKRQTPFVSSYKEKFEKCIV

SEQ ID NO: 191335 - protein, 443 aa, unidentified
MSKKHSSHLRGERGQAFAELIRGVPAEQILCVSIDISKYFHVAMIHNGLGEIVMRPFEVDIYQSGFDQLCQAMDQAQAQTQAQVVLVGMEPTSHYFENLARHLTAHSQPVKLINSFSVKQNREQQLMRREKSDEIDVAAIGDLLRRGEGTPYQPVSGIYLRLQQFDRARLSKLKIDTMLKNQIIGHLDRIFPGLLLLDETARKRYTTLFRTDFWQCQTLQDLIRVCPNPNELVKMEPTELVQSFHAQGRRLGPVVAAKIIARAHATLLPDPELAGIRCELLKHDLTLLENTQAYLSQLEGYLVELVAQTPYQIWTKLKGLSAIQVASLAAAIGDPTHYTTAAQVFRRSGLVSGRNDSGKHQRKGKGNHILKTGDVYLRRALMNAVATLFLHQPSLMRYNKHLQITKHPGVARVATARKTIGILWAVLRDQSSHTLIPCKGAEM

SEQ ID NO: 191336 - protein, 332 aa, unidentified
MKTLPLYAGLDVAQEFTVATVVDEMGNPVRELKVPTNEEGYKRLFFDLQNVTAVFEASRNWSYIASLLKPYCQFKMAHPLKVRLIASARIKTDAIDSRALVHLLRTNLIPESYMPPDNIVELRNLVRYRVRLGRMSAHLKNRTYAILAREGHRSDFKPYERKAKLWIQSLKMNPINRDELEYSLKLLEEHKRKIEQLDELLEKERVKYPEADLLTTIPGISTYSALLILAEVGDFSRFPSADKLAAYSGLVSSTYQSGNTCYQGRITKQGNTWLRWILVQCAHVTVKKQHRIQKFYLRVKHRRGGQKAITATARKMVPEVWHMLQKNEAYRG

SEQ ID NO: 191337 - protein, 446 aa, unidentified
MPAPKKRSPAPPPKVVHPNAAGIDVGSEAHVVAVPGDRDPEPVRTFGVFTADLRTLADWLKHCGVTSVVLESTGVYWMSLCDFLEGQGFEVLVIDPRSLARNLKKKTDVSDAAWLQELHAFGLLKSCFRPDQEVRALRTLWRHRDHLVTEAAKLLQMMQKVLVQMNVYLHLAVADLAGVTGMRILRAIAQGQHDPQTLAGMRDPNCKKSKEEIAKALEGTWDAAHLFELKQLLKAWDFYQNQLHVCDKEYAKAAGKMPDQTQGRPLPEPEKRANRHRNSPTTFDSDALIFKMTGVRLTEVDGLGASTVLTVLSETGPDLGAKFASDKHFAAWTTLAPRKHQSGKRTKFPAQTASRVAKAFRLAARALLNCKSVLGNFLRRLRARLGIGTAIRATACKLAKLFYRLITKGEAYRRDSTEAEEAKQRERQLQALERKARELGMQVIPV

SEQ ID NO: 191338 - protein, 411 aa, unidentified
MTKQQKYLYVGVDLHKAHHTAVMVDHWNTKVGEIQFNNKPSAFPELLQEVKKHTKRGTKVVYGLEDVGGFGRALAMYLTENQWWVKEVNPKLSTARRKSHVTVQKSDSWDAECVARVLRDELERLPDAKPVDLYWAISQLVMQRKWVAKNQTALNQKIHQQLSYHYPSYKQFFSEVDGKTALAFWWKYPSPNHLQRVTEDDLAYFLRKLSNNGLSNKKAAQILTIVQQDGDTTRDYQEKRDFIVKSLVRTIRFNQMEMKRIEEETRGLMKELGFQLETMTGIDLVTAAELVAEIGDIHRFATPDKLARFAGIAPIFAGSGGKSRNYKSKQGNRVLHEIIKGIAIRQIAVTRGKKEPRNPYFYTYYEEKMAAGKTKQQAIVCIMRKLVNVIHYLMRTKAVYVMPEVPVKQAG

SEQ ID NO: 191339 - protein, 323 aa, unidentified
MTHYVGIDVSKATLEVAEECSGKSKQYSNSPDGRSELARTLRAHDGQLHVVVEPTSTYHQHVVDALMDEGISFSLINPSRSKAFSRLVGRRAKTDKVDARLLMELGKSQHLMSSHVPDRDQERLKSLRRYLGQLEEDRTALNNRLEAFGDSPWTSPAVIESLRRRLNDLEREIDHLRDDLDKMVSDTPNWRRSVELLETIPGIGRSSAVLIVSELPAVQHCASAKVWVAYCGVNPEPRESGNTHYSKLSRMGMARVRASLYMPAVSALRWNAPIKALGERLQAKGKTGKLRVMAAMNKLLRQCFGVLRTGTPFDPVLNQRTSP

SEQ ID NO: 191340 - protein, 401 aa, unidentified
MNNTTMFYVGIDVSKDKSDICIKNENGNDLIHRFKITNKKADLEMFYEIIESIKSKTPGNSDVVIGMEATGIYSLPLYSALIRDGHKVKLYNPIQTNGFRKMNIRKTKTDPIDSAIIADMLRHSEPPQVSEIQDFHLFQLRELVRIRHRLIEKQSLCKVQLVRNIDAIWPDYESVMKRVFGATSLAILKKYSVPSKLRNESFEQFYELVQKKSRSKISRSKAEKLYTHAGNVLTIPELDSVISIEIKTLITQLELHDEQIRSVESNINQMMKQIDTKIMSIPGIANILGPTILGEIGNVNRFSNAKKLIAFAGLDPVVCQSGRFESKGGRISKRGSPLLRHALFLAANTAIQNDDNLKRFYVKKRREGKHHFSALNAVAAKLLRIVYWVLKNKKEYQIQLS

SEQ ID NO: 191341 - protein, 416 aa, unidentified
MNKQQEFAAYVGVDWGDRRHSVHLQVVGQRETESFELEQKPEALHEWVALLLERFRGRLIAIAIEQRKGAVIHALMMYAFLVLFPINPKALARYREAFHTSGAKDDPTDSELLLDFLSKHSDRLRAWIPDSELTRKLLTLCEQRRKLVNRRVALNNRITSLLKQYFPQALDWIGDVASLQACDFLESWSTLDVVQRVSPEKLQSFYRRHNCRKASVISERLDQIALARPLTTDSAIVEPYSFIVETSAVQLRTLIRAIQRLDKRTAELFAQHPEHDLFDSFPGAGAVCGPRLLAVFGTDRSRWTSAVELQSHSGIAPVTEKSGNSCWIHHRLACAKFVKQTFHEFADQSIRYSAWARAYYDLQRSRGKDHHAALRALAYKWIRIIFRCWKDGKPYDEATYIQSLRRRGSPTVEKLP

SEQ ID NO: 191342 - protein, 365 aa, unidentified
MEGDDKKGMISVGIDVHKKRCQACLKDEDGHLIEELSFQNNQDGIAQLRTLLATYPETKIALESTGNLWTRIYDELHKENKVILTNPYKTRIIAEAKIKNDRMDARVLADLVRADLVAESYVPDPEIREQRAILRQRRAFVEDTVTIKNRIHNQLDKYGLKPEFSDIFGKQGREWLRNLQLSPTEKTILNVNLQQLESVEHAIDQLTTQIAKEAVDRSDVRLLMGFTGIDYYSAMLLINEIGDVNRFPTADKLVSYAGLAPSQRQSADHTFHGHITRQGNRYIRWILIEAAQHAARYDPQLKPFYDRIAARRGRQRAIVGVARKLLIYIYQVLKKQEPYRAQRSDLLEKKLKRLTQKASTSLQAN

SEQ ID NO: 191343 - protein, 343 aa, unidentified
MQAITTIGLDIAKSVFQVHGVDAAGNVILRRQLKRRYVLAFFQKLPPCLVGIEACASSHHWSRELQALGHTVRLMPPAYVKPYVKRHKNDVADAEAICEAVTRANMRFVATKTPEQQSGLMLHRTRHLFIRQQTAVINAIRAHLAEFGIVAPVGRNGVEQLLGVVANANDKRVPDVARACVAALGAQLRMLKSQILEFDRMISAWHRSSEASRRLDAIPGVGPALATALVASVADPKAFRSGRDFSAWIGLVPKQNSSGGKDRLGNISKRGDRYLRSLFTAGALAVIRYAKIHGTTHRPWLTALLARRPTKVAAIALANKIARMAWAMMARGERYKEPVALAA

SEQ ID NO: 191344 - protein, 416 aa, unidentified
MNAVGIDVSSRKSTVAVLRPLGEVVCLPFDVTHDIAGLASLVEKLKALDGETRVVMEHTGRYYEAVAKALHEAGLFVCAVNPLLIKEYGANSLRRVKTDKADAVKIARYALDNWADLRDFTPMDAIRYDLKTLNRQFQLASKQRTASANNLIALLEQSFPGIRKCFDSPVRSDGTQKWVDFAHSFWHVDCVRKQPFAAFCERYRKWCKRHAYLFKLSNAEEVYALAKRAVVLTPKSKVVKVLVQEAANQLISISRSVEVYRAEMDRLAAMLPEYPVVMAMYGVGKSYGPQLMAEIGDVRRFERKQALIAFAGIDPMPNQSGDKNVRSNKSSKRGSPYLRKTLFNVIRTYLQCAPQDEPVFQFLNRKRAEGKPFYVYMLAAANKFLRRYYAKLRDYFASLDTLQPVAPIPTILKATL

SEQ ID NO: 191345 - protein, 361 aa, unidentified
MHATTVAVDLAKSVFQLAVADSSWRVIENHRLTRTQFERWFANRNVSLVIMEACGSAHHWARWLNSLGIEVRLLPAAYIRAYVRRNKTDAADARALLEAARAADIDPVRVKSVEQQALQGLHRIRSLWMSTRTSRINALRGFCREFGLSIPQGARTGVEAISRVLADPRSPVPALIREPMRLLIEEIRLLEQRIAQLEREFTELARHSAACTQLMSVPGIGLLTATAMVAATGGDVTHFKDARHFASWFGLTPKEYSSGSTRKLGRISKRGDRYLRMLLTHGARAVLRAAALARNASRPLDGLRAWATEVQQRTNHNKAACALANKLARICYAVLRDHTAYGNPQPRPNKKFERTAFAIAA

SEQ ID NO: 191346 - protein, 346 aa, unidentified
MENNTLVAVDIAKEIFEVGVSDRPGRVVLRKRLPRATFLEFFAQLPRATVVMEACGSAHHWARRIEELGHVVVLLPPQYVRPYVMRNKTDRTDVDALLEAFRNEQIRPVPIKTVTQQVIATLHRLRSGWLADRVRSINALRGLLRELGFFIPEGRRHVLPEAWEIIQDHRRGLPDALKPSLAALCEEIAALSTRIEDVEAQLEALARQIPLIARLRSVPGIGLLSATALYAFIGDPSRFPSGRHMASFVGLTPREYSSGLRRFLGRISKRGDAYLRMLLIHGARSVLWHAKRMKHRDRLRSWALNLERKVGHNKAAAALANKLARITWAVWKNDRDFEIAPEPQAA

SEQ ID NO: 191347 - protein, 353 aa, unidentified
MSTKGRVVDKLSCVLPLPRRYKVAGIDIHKKALMVVVATAADEVAEAAGEALEFECRRFGAAASERVHVAGWLRQRQVREVVMESTAQYWKPVWLDLEPHFGKLHLAQAHSNRAPKGRRNDFADARRLTRRLLSGELILSFVPDREQRTWRTLTRGKQQRVRDRVRLQSQLEALLEEARIKLSSVISDLLRASGRRILRAMADGETDPRRLAGLGDDRLRCSKQELMDALNGSLEPIHRELLRLDLQRPELLDEQIDGLDRMVASALRQHQDAVIRLAEVPGFGVDSAQQLIAERGVDAKAFASAGQFASWSGLCPGTEESAEQNHSSRSAKENRFVRRILTQAAQAAVNRRL

SEQ ID NO: 191348 - protein, 338 aa, unidentified
MSLYAAIDLHSTNSVLAVLDETDRPLRQCRLPNNLPAILKALEPFRDELTGVAVESTYNWYWLVDGLADHGYPMHLVNTAAVPQYDGLKYSGDDTDARHLAHLLRLGILPEGYIYPRAERAVRDLLRRRFYFVRQNVGLLQSVQSAWARHTGQCLSANAFRQLTGEAIEQAFPDPCVRLAVLAQLRVWRGIEEQVQQVEKWVLAAHSRQGEREALCSTPGIGRILSLTIALETGDIARFAHVGDYVSYCRLVKSERVSNGKTKGQGNRKCGNKYLAWAWIEAANFALRYSPPIKRWYDRKAAKRHKVIAIKAVAHKLARAGYYLMRDGGTFDVARAFG

SEQ ID NO: 191349 - protein, 428 aa, unidentified
MKKHSKSSQRSEPSLKRTKARGPVQRDAKEVLAEVLGKLTGKLDTPAVSTSAKGNRRGNTVDPNRDRLTVGVDLGDRWSQYCILGLEGETLAEGQLRTTQEDVREFFQALTVARVVIEVGTHSAWVQDVITEWGHEVLVANPRLMEGSKRRKRKSDRIDANKLARLGRVDPQSLYPIRHRSREVRQDLVVLRARDALVSVRTELINTARGLVKSMGTRLPRCSSPSFAEKVKDAIPVEVREALLPLVQLVETVSDCIARYDQKIEQLGREKYGHTTLLRQVKGVGPITSLAYVLTLEDPQRFSSSREVGPYLGLVPKQEDSGDSQPQLGISKAGDRMLRRLLVGSSQYMLGAFGPDTDLRRYGLRLCERGGKNAKKRAVVAVARKLAVLLHHLWVTGDEYEPLHHTGQKPGQHKQRRHKPEPTMFHKS

SEQ ID NO: 191350 - protein, 360 aa, unidentified
MCQTCSVITIKLNGEETNMNITVSGLDLAKNVFHFVGCNKAGKIIRKKMLRRNEVLSFFAKLPPCLVGMEACSSAHYWAREIEILGHTVKQIAPQHVKAFLRGNKNDYNDALAISEAVVRPQMRFVVTKTQTQQDIQSIHIFRKKCERDRTANSNEVRGLLSEYGIAIPQGIHNVFKTLPKLFDKTEDNGLSDLFKTLLAQHYEKLVELNKHLDFYTKKIKVLSKSDECQRLQSIPGFGPIVASAFYQHVGNGSGFKNGRCVSASLGVVPKQYSSGGKDKLLGISKRGDKYLRTLLVHGARAVINTLKDKKTPLANWLNRLIVTRGKNKATLALANKLARIGWAILRSGGCYSAEHAAAN

SEQ ID NO: 191351 - protein, 314 aa, unidentified
MTSNAEFVGVDVSKDNLDVASWTSNEYKRFQNDPTGIRELIDWLKILQAELIVLEATGGLELPFVAELAFEKMPVAVVNPRRIREFARSIGQLAKTDKLDARVIAHFGAATHPEARKLPTNDEEKLTALITRRRQIIEMLTAEKNRLHSARFSMKERIETHLSWLESELRDLDNEITKFIHQSPIWKEKDKLLRSVPGVGPVTSATILAMLPELGTLNRKKIAALVGVAPVNKDSGRRQKKRRVYGGRANVRSVLYMAALSASKHNPRIKAFYDHLIRLGKEKKVALTACMRKLLVILNAIIRVNQNFTLTPDF

SEQ ID NO: 191352 - protein, 377 aa, unidentified
MTQFPVSTSNEQSIYAALELSKNSWLLAIQVPGRDNPSLYPIGGGNAEGLMAKLDAARNRLAKVSGQTPKVTLCYEAGYDGFWLTRFLEQRGIECLVMEPASLQVNRRARRVKTDRIDVENILHTLIAWCRGERHVCSMVVIPSVEEEDLRRTHRERNRLVRERTAHINRIKGLLFAQGIRGINVMKDYKTLAPAELITGNGRPLPKRLGREITREIERLALVQEQLVEIEHERDQAPTPCAATERKRHDLLRLNGIGPTVSAILAREVYYRRFTNRRQVASYIGLAPSPYDSGDGRRSQGISKAGNSLARYSLIQAAWLWLRHQPNSALTQWFHHRTEGQSKRVRCIMIVALARKLAIALWRYVELGLIPEGAVVK

SEQ ID NO: 191353 - protein, 343 aa, unidentified
MGEVSTIGLDIAKSVFQMHGVDGTGAVVIRKRVGRSKVLEFFAGLSPCLVGIEACPSAHYWSRELQALGHTVKLMPPSYVKAYLKRSKNDANDAAAICEAVTRPSMRFVPIKTQDQQTGLMLHRSRQLLVRQRTTLSNAIRGHMAELGIISAKGRNGTAELLRMIGDVADDRIPPVARFCLDLLARQYLALNAEVSSIDKRIHAWHRSCEESRRLEEIPGIGPIVATALVAEIGDWGAFRSGRNLAAWIGLVPKQHSTGGKERLGSITKQGNRYLRWLLVTGAMAVIRYARAHGTKRPWLTRIMDRRPAKVAAVALANKIARMAWAIMVRGERYREPKLLLAA

SEQ ID NO: 191354 - protein, 350 aa, unidentified
MDTTVAPLASIGVDIGKEVFHLVGFGSDGKIAFRRKIKRLALIETFKKLPPCIVGMEACLSAHFVSRALRKLGHEPRIIPAIYVKPFVKGQKNDYNDAEAIAEAALRPNLRTVREKSQEQLDLQACHRVRSRLVSRRTATINQIRAFLIEQGIAVRAGVAALRNSLFDILKDREDEISPRMSELIVGLYEDWLWLDERIETITKEIEEISQREGNCLRLMSVPGVGPLISTAVVAAIGTGEAFDRGRDFGAWLGLVPRQYSTGGRSILGSISKRGSRYLRTLFIQAAKVLLMRPQNWPKFSFGAWLANAAPRMHRNKLAAALANKLARIAWSVLSNGKAFDTHKLEIEAV

SEQ ID NO: 191355 - protein, 315 aa, unidentified
MGQSVSFPVHFVGCDVGKAEIVVFDQSTGKTTTLANQPDILAGFADSLDETSLVVCEATGGYEAALLSALATAGRAVHRADARKVKAFIRSFGTLGKTDRLDAQALARYGCERHQDLARWTPPAVAQSRLQALVLLRRDLVADHTAWNNRSQAPNAEHAQHVHAAMIAALQTQIQTVDQQIKAVINASSTLKTLEKTLRLVAGIGPAVSAGLIALMPELGTLNRREVASLAGLAPHPQQSGQSHGYRSTRGGRPEVRRLLFMAAMAASRSKSELAAFYKRLVANGKKPVVALTALMRKIIVIANAKIRDQRTQLS

SEQ ID NO: 191356 - protein, 412 aa, unidentified
MFVGWDWGGSAHDVAVMDDDGRLVDKWKITHTEEGLTAALRRLVKYDDPAKLPVAIEASRGLVVDRLLAAGHPVVPVDTRAFNAMRPRWGASRAKNDAGDAFKLADYLRTDRHTLRVLPPTRPETMELQALSRLRSDHVAAKVTVINQLHALLGAHFPGARRLFKQLDSDIAMAFLDRFPTPQQLDGVDPGEVHAFLRQHRYRSRTGEQVLHRVATAPAAASRTSSRVVAELVRSQVRILRAIVGQIRHLDEVIADALTRHPYAHLFAKLPRIGAANFGQVLAEVGPMLERGATAEQLACEVGMAPVTRESGTIRNVSFRRAVNLNARQAFVVFVNNSRFDNPWAAQLYRAARDRGKRHPHAARILGRAWLRVIHTCWRHQTPYDPNRHASPAPAGPPQPPITDTANQPPSS

SEQ ID NO: 191357 - protein, 385 aa, unidentified
MSSAAASSPRPIIYLGLDVHKESITIAVLPEAASAPTRVERLPNDAVKLRRFCDRLAAQGELHACYEASGAGYVVHRALREWGYACDVIAPSLIPIRPGVQRKHDKYDAAQLARLYRAGELTAVRIPTAAEERVRDVVRCRETFQREILKSRHYILKFLARRGFVYRDSTAWGAKHLQWLRALAAVRSPLATEDALVFREYFALLEYKITRREELDRQIAVIALAPPWATAVGWLQCFRGLQLHSAMVLATEIVDWRRFARPTQLMAYLGLVPREASSGERERKGSITKAGNHQCRHVLVQAAWSYRHPAQVSPHLKNRQAGQPPSIIAHAWKAQHRLHKLYQHLAYRKRPQIAAVAVARELVGFLWAVMQELPVTPAATVGAAA

SEQ ID NO: 191358 - protein, 343 aa, unidentified
MQIHSVGIDLGKTTFHLVALSAAGKVLLRKKFTQKQLIAITANMQTNLIGMEACSGAHFLGRVLRDQGHDVKLIPAQFVKPFVKSNKNDFLDAEAIAEAVDRQNMRFVPIKTDDQLDLQGMHRVRDRLVARRTSVINQLRAFLLERGMVFAKTPFKLKQAMPEILENADANLTPRMRNLVSMLWSEWKDLEQQIVAMNGEVEQIASSDPACQRLRQIPGIGPLVATAIVAAIGNGAAFKKGREFSSWLGLVPRQHSTGGKARLFGISKRGNSYLRKLLVHGARSAVLIVKRERSPFGPWLDSLEQRAPVKVVITAAANKLARVAWAVLSSGEEYRAPTTATAA

SEQ ID NO: 191359 - protein, 480 aa, unidentified
MKEAAMAHKQADEAKRREPRKQPRRPQPSLLERIQPDAAGVDCGERSHFVAVPVERDPEPVREFPTFTAELIRLADWLAQCRVKTVAMESTGVYWIPLYEILEERGFEVVLVNARDVHNVPGRKSDVQDCVWLRELHSVGLLRASFRPSADMVPLRSYLRQRETLVEEASARVLRMQKALTQMNLMLHVVVTDITGATGLAIISAILAGQRDPDLLAAHRDYRCHASRAEIAAALTGNYRAEHLFALRQNFEAYQFLLKQIEECDAAIEALLATLAEKQPPPQAALPAARRPPQLNNHAPRFEIRTPLHRLTGGADLSQIHSIGPHAALQLIAEIGTDMSRWKTEQHFSSWLALAPHNKVSGGRLLSSRTAPSANRAALVLRRCAMSLSRTATALGAFYRRLAARVGKAKAITATARKLAVLVYRALSGRLVYQDPGAIRYHLINRAREIKSLRKRAKLLGLELIDLSTGEVLLSANPVS

SEQ ID NO: 191360 - protein, 358 aa, unidentified
MKIIGSDFHPSYQQIAMLDTETGELWEGRLEHEQGEALRFYQALQGQTVRVGMEAVGNSQWFEHLLAELGHELWIGDAAQIRRLVVRQQKTDRRDAKHILDLLLDGRFPRLWVPSTAMRDVRQLLRPRQKLVEIRTQVKNQLQHLALNQGVRRKSRLWSLEGRAVLEKLPLQGWTARRRHDLLAMLDRLQEQVGELDRAVRAEAQQRPEVRLLMTHPGVGPVVGLAYALTIGPVARFPRGKQVASYLGLIPKEHSSGGRQRLGSISKQGNTMMRTLLVEAAQTAARLDEELRRDYGRLKAKKHSALAKVMVARKLAVRMYWMLRENKSYTQLYAQPPVARMQGSSGHSVVASGDRSLE

SEQ ID NO: 191361 - protein, 339 aa, unidentified
MSWLISNSSESPKLAAGELICKQEKAMENQKHNWVAVDIAKDELDLLDDRRGWKGRNESGAINRLVAGFKKRSDVWVICEATGGYEREFVAALHAAQIKVCVVSPNRVRAFARSEGVLAKTDKIDAAMILKFAKNKNLRPTQPPPKEQVEVAALMDRRTQLNDFLTQEKNRVQNSPSAIHGLIKKMIRTIERQIETVEKQIRAIVESTQTMRERHKLFCSVSGIGEVTSWSLIAYLDELGKLKRSEVVALVGLAPFNRDSGKKKGKRYIQGGRAKLRSSLYMAAKTAARFNPVIKPYVQRLLEKEKPYNCVMVAAMRKLIIHLHCLTKNNQLILASTTQ

SEQ ID NO: 191362 - protein, 367 aa, unidentified
MKKVSTAVARQGRNISRQQLTIGLDLGDRNSWYCVLNEAGQIQLEQRVRTQAKALQEVFGAMPRSRIALEIGTHSPWISRLLRELGHEVIVANARKVRLIGESRKKDDRLDAQTLARLARIDPELLYPVKHRSAQAQAALTMIRARAGLVRARTSLVNTARSLAKSYGERLRGCNVRNMNPEKAEDLSPELQSALEPLLAEIETVSERIAEYNDRIAALAQRSYPQVELLKQIKGVGTLIALTFVLTLEDPHRFSRSRDVGCYVGLQPGRRNSGQSEPQMHISKEGDPYLRTLLVQGAQHILGPFGDDCDLRRWGLKLAQRGGKSGKKRAIIATARKLAVLLHHLWVSGEVYEPLHNSKRVAVAAAA

SEQ ID NO: 191363 - protein, 397 aa, unidentified
MRSGWWNEQGAKVARRAVPYTAAGLSEWGRELDEWRAQGIELWAAIERPEGRVVDFLLYHGVVVYPVNPKALDRARDRFRPSAAKSDPFDARVLAEFLRTDHRHLQALQPSSEAAQELKYLTEDYRRHVRQQTRLVNQLTATLKAYYPRALEVSELTTALARQFLQAYPTPVAVTALTAKRWQRWASAHRLSDVRTHELWGILQRPQLPVPDHVVRAKARLMLTLVEELTAVVAAVGQYREAIDAFFAGLPEAQWIRTLPIGNHGVTAPTLWALLGDAPRRWESWQHLQGHAGTVPVTIRSGQQRVVRFRFACDKALRYVVDQVAFLSLGKSEWARAYYDQQRARGHDHHPALRALGAKWLKIIFVMWDRQIPYDEEHHLATMTRQQLRQRGQKKVA

SEQ ID NO: 191364 - protein, 344 aa, unidentified
MTMNYIGADVDSKMTELAVRRKGRIVARRRVPTSIKDIRQYLAAVSGQTALAFEEGPMAHWMWRNLKDHVDRIVVCDPRRNKLITHDGDKSDPVDAGKLAELLDGGYLREVYHSDDDGRVLLKEWVSLYHDRVRDAVRQANKIRARCRMYGVRMPGCVLRNPVRRPEWLALVQCPGLVGQLELLWLGFDAVARQTSKARWQLELQSRRYEIIKLWRDIPGIGLIRAATFFAYVDTPWRFKTPKKLWKYCGVGLQRTTSGTGKDGKPRPGYLRLPWAVNRRLKDVAYGAAMSAINGNSNVFRSYYARLLRDGVSLSNARHSVSRKMITVMWGMWKTTRRFDPQLV

SEQ ID NO: 191365 - protein, 376 aa, unidentified
MSPSILYLGLDVHKESVTIAVLPADAPAPTRVEQLPYDLKKLQRCFARLAPDGTTLRACYEASGAGYVLQRAMTSWGYACEIVASALIPQKPGDRRKFDKKDAANLARLYRAGELTPIRIPTAAEERVREIGRCRETLQREMLRSRHYLLKLLLRRGLIYHTGAHWTHRHRAWLDDQRRSGVLTAGDAVAFDEYLALLDYKLGRRAELDRQIEALALTPLYRPMVARLTCFRGISTLGAMVLATELGDWQRFAKPTQLMAYLGLVPTEHSSGSREWRGAITKAGNSRCRHILVQAAWNARRPPSRSRLLTRRQDGQPPALVAQAWKAQRRLYTLFHRLAARRPAQIAAVAVARELGGFLWAAMREVEAVGHSSMVA

SEQ ID NO: 191366 - protein, 374 aa, unidentified
MKEFTKYVGMDVHKETIAVAVAEARGGEVRYLGEIGNSAEAMQKLVKQLRKGDAELSFCYEAGPCGYGIHRQLTELGWACQVVAPSLIPKKAGDRVKTDRRDSLSLARLHRAGELTEVWVPDGAQEALRDLTRAREDMKHLQRQAKQRLLAFLLRHGQRYDGKSNWTQAHYRWLEGVKFSQPVQQIVFQEYVDTVKMLSQRVAALDQQMADAAGKSVWWPVIEALMALRGVSLLTATTIVAEIGDLKRFASAPQLMAYLGLVPSEHSSGGSKSRGGITKTGNGHVRRVLVEAAWTYRHPARKTACLQRRAERTPEAVQDIAWNAQKRLCARYRRLEGRGKLKVQACTAVARELAGFIWAIGQALPQPAAQAKGQ

SEQ ID NO: 191367 - protein, 425 aa, unidentified
MAIPKEYQEKLSQVYIGLDLHKYTHTAVTMDCFSTVIDTYEFENKPSEFIKLVDRIKSKADGRTLIFGLEDVGGNGRSLAVFLRQMGFITKEVNAALAAGYRKGDAQYKKNDAHDAKCVAEVLLHKLDRLPDANPQDLHWTLSQLVNRRNLLIKDQTKATNQLQEQLKHHYPSYNKFFSKVRGQTALYFWETYPSPMHLKDFTVEGLAEVLREASGNRLSTKKATAIMDIIRTDGNTTTDYQEERDEIVRSLVRQLLYLKREIEAVESIMEKTEAKLGYRLKSMPGVNTVTSCDLIAEIGDIHRFKNPNKLAKFAGISPVNFSSAGKGKDKVSKQGNRKLHGIFYFLAVQQVQISRGSRIPRNQAFYNYYQKKMKEGKSKGQALVCVMRRLVNIIFGMMRTKTEYRMPLVEVANIHQKETKEKVA

SEQ ID NO: 191368 - protein, 358 aa, unidentified
MMYVGVDVHKKVCRAAMVNDEGELVEEFSFTNSKKGIEDFMMKIEAFGDRVLVAVESTANLWIRLYDSLEDHGVQVVLSNPSKTRLIAEAKVKSDKVDARILAQLLRSGMLPLCWVPSREQRDKREFIRHRMGLVKTRTEVKNRIHALLEKHGLRCPCSTLFSQKGMKWLQGLNVGFMDDAVLKSDLALLETLDGQIALMEAKIAAVAVDDERVKLLMTMPGLSYFAASLLVAEICDVNRFSSDRKLVAWAGLAPSIRQSGEKVRAGGITRQGNKRVRWVMVQAAQTARLHDERFKEFYERYSERKGPQKAVVAVAHEMLRIVWFMLKKNESYRGEKRDLSWRKLKSLKRYASVGLQV

SEQ ID NO: 191369 - protein, 261 aa, unidentified
MSEITAIGLDLAKHVFQAHGVDEAGTVVVRKRLRRSQVLTFFAGLSPCLIGMEACATAHHWARELSALGHEVRLMPAQYVKAYVKRNKNDAADAEAICEAVMRPSMRFVAVKTTEQQSALMMHRARDLLIRQRTMLVNALRGHLAEFGLVEARGLHKVAGLIAIVMDDADERVPDLARQVLKVMAEEIDELQRRIAAIDAVVLAWHKSSPVSQRLASVPGIGPIIATAIAATAPDPSVFRSGREFAAWLGLVPRQSATGGA

SEQ ID NO: 191370 - protein, 361 aa, unidentified
MKYYTLMKYYTSTTQFNCGIDLHARQMYVCLMDHQGKKLVHTNVKDNDFSYFLKLVEPYKHSLTVCCECMFGWYWLADACQAAGLTFVLAHALYVRAIHGGKNKNDRIDSEKLTHLLRANLIPPAYVYPTQQRPLRALLRQRIFYVWRRSELLARIHSHQLAHNRIPAKQSRWTRDDWEERLLKAEIHPLRQLALSNDLAMIGHFDRQIYEVEKELYRQTKQVAAREYALLQTVPGIGENLGLTILYEIGDIQRFPTVKDFLSYCRLVKGTVASAGKIKGLRGAKLGNPYLRWAFGEAAVIAKRDHFRIRPLAQRLEARMEGNKFKANTVLAIKLARSVYFMLKNKTVFDPDRLVAVLAKN

SEQ ID NO: 191371 - protein, 339 aa, unidentified
MKNTKYYIGLDVHKERTTYVVRDKIGNILLEGETATLYQELFPRLKTYLKSSMIGLEASTSYYTLYQEFLKHGHIVKVANTIQLRQLITKNDKLDARRLSEMLRLGTFPSSYIPDEKIQRIRSLIQTRHSLMEEKVRCNNRIQAYLDRNGVMMPSYKAFTKKWRYALMQHMGSGRVSIELRHEYDHYMFLEKKQEQVEQEIQGYAQKNWTTEYNLLQSITGIGPTVACYTIAHILPIERFSSCKKLRRYAGVVPTCKESGNKRSHGHIPKTSSRRQLRWALIQAANTIGKTNTNLGRYYRRKKQQKKNNGIAKVAVASSLIDIIYKVLTTKKPYTTNTC

SEQ ID NO: 191372 - protein, 462 aa, unidentified
MPRPSRTPATYRIEGLPTIFANAAGMDIGADEIVVAVPPDRDPQPIRAFRTFTPDLEALVIWLLECGIDTVAMESTGVYWIPIYELLEQHEIVPYLVNGRHVKSVPGRKSDWNDAQWLQKLHALGLLRASFRPDTEISALRTLVRYRAELIAHRAPHILHMQRALQQMNLQLERVLSDIMGTTGQEIIRAIVAGERDPVVLAQLRNPACKSSEEMIAKALRGTWKPELLFVLQQALTLYDVYTAQVAVCDGELERYLGQLEARSGDPQACLPELPATKTDSHSKNAPGFNARAHYARLLGVDLVAVMGLSSSSVQTIISEIGTDMSRFPTEKHFCAWLGLAPRNDISGGKVLRSRTRKVTNRATQAFRQAAQSVSRSESAVGAYYRSMRARKGPEQANLATAHKIARIVYHLLKYGEAYEAESAAAYEQQRQERELRVLTRRAAKLGYTLTVVQEPSPDPFP

SEQ ID NO: 191373 - protein, 422 aa, unidentified
MANQADRTPTCVLVAIDIAKQWNAALIEYPDGKRQRFQFKHVHEDYDRLVRLLQSTGSSCRIAFEPTGVYHRTLAYRLLQEGFHVCQVSSVAGARYRDAMFNSWDKNDPKDAQVILELLKQGVTQQYHDPLVKGTHDLEEISKTYELISRTRTKLRHGIITHYLPLHFPEIERFWYSSRNDWFVRFLMQFPTAAAVSALRREEFVAAAWEVVGRKVEKRRQLEEIHDLAQKSIALPLATDSIAVETFRLQLSRYDALNQQRNALEARAHALLKDRRDYQRLCEIPGIGPIIALVILAEAGDLRRFAHHKQFLKYCGLDLAKAQSGVSRGHERLSKRGNARLRCALWQASISAIRMRENAFRDKYARYIAADPEDRDRRRKARTAVTAKLARVAYSLVKFDRPYRGRFEVGLPSGSISLKDYR

SEQ ID NO: 191374 - protein, 366 aa, unidentified
MNADPIDPAQRPAAWSGLDVAKDSFEAALYLPQGAAQPPRPVASLPTRAFARTPQGVARWLDWCDRQLAEHARRQGLDQPPPLRACMEATGRYSLELAAWIGQARAATAPAIIDPLAASHYAKSLRQRNKTDRIDAAVLSRMGYERRFAPSQPLPPAYERLRQLTRQRDFVMGQLQAARLRAQEMEACPDLLAIQRTLIGEMKKAVRKLDRLINKHVDGQGELAQAVRRLKTIPGVGRLTAVIVLAELGDLTRFATARQAASFAGLNPKLFESGTSVQYEAHLSKQGPARARKVLYMSAMSVLRTQSPMHQYYERLLAQGKCKMSALGALMRKQLVLMRALLVHGRDYDPLFVKTAPATLAVAACG

SEQ ID NO: 191375 - protein, 427 aa, unidentified
MPYRIAGIDVHKRMLAVVVSEVEVDGEYEFARRQFGSNPAQLRLLAAWLLEQQVEEAVMESTAQYWKPVWAALERYWKPLCQKREGARPTSGALHLAQAQSNRARRGRKDDFADAERLVKRLVAHELVLSLVPDAEQRLWRTVTRTKNQLTRNRVQLQNRLEALLEEAHLKLSSLVSDLLGVSARRILQALAEGETDPAALAALADHRLRATREELCDALGACQDIPPVYRRLVKMALEDGQRLDTQIHQLEQEMATLLGPYQDQVQRLAEVPGLGVDSAQQVIAEVGATAATFPSAGNLSSWVGACPGKEETAGVNHSRRSPKGNRPMRRILNQAAHAAVKLQGSIFAILYRRYVPRWGHNQTIAVIAHRLCRLVWKVLHQGVRYQERGPAVSQRSKQKRTVRMIRQLRSLGYRVEFLNSPPVLPA

SEQ ID NO: 191376 - protein, 375 aa, unidentified
MNNNNTLYVGLDVHKESITVAYAINSEPVELMGKIGTSPTDIQNLCKRLRSKSSQVSIVYEAGPCGYGLYRRLVKSGFDCMVCAPSLIPKKPGERVKTDRRDAIRLVRSLRAGDLSAVYVPGIEDEAFRDLARAWASARDDLRHARQRLKSFLLVHGVHYVGRADWGPAHRRWLSKYSFESPWRQLAFDEHRRTIEDRQAQCERLESALKEAVTEWRLYPVVEALQAMRGIQFITAVGLISELGDLTRFEHPRQLMSWFGITPSEYSSGGSRHQGSITKGRKQLCQKAIGRGSVELPSSGTHQSGNTKRQENLPRPVIDRAWDAQLRLCKRYRKLQAKGKNVNITIVAVARELAGFIWDMGRIAMSVAQQPQCHK

SEQ ID NO: 191377 - protein, 426 aa, unidentified
MNYSQNEKLNQVTENTLVIGIDIAHETQWARAFDWRGVELGKVFRFANSKEGFEAFYKWVEKLKRSAAKSAVIVGAEPTGHYWFNLASYLKESEMKLILVNPHHVKKSKEMDDNHPSKSDRKDPKTIAKLVCEGRYNEPYIPEGMYADLRSVMECRRRVCKELNRIKNRIQRWLSIYFPEFMKVYCKIDTVSGLIVLENAPLPEDILTLGATGLNELWRKSKVKAVGMKRAESLNEAAKNSVGCSGGNGARLELRFLLADYRIKMEQYAQIMEEVEKLVAQVPNADKLMGINGVGLVTIAGFVAEVGDIRRFQSPKQVQKLAGLALRENSSGQNKGQTSISRRGRARLRAILFQAVMPLVSKNQEFMEIHRYYTTRNKNPLKKKQSLIALSCKLIRVFYALLKKGSTYDPVKMVTDIHRPACLPAA

SEQ ID NO: 191378 - protein, 352 aa, unidentified
MQEITRVGVDLAKNVIQVHAVDAQGNVVTKRQLSRSKFKPWCLQLPPGCLVAMEACGGAHHWARSLLDAGLNVRLIAPHLVSPYRQQGKTGKNDANDAAAVCEAASRPCMHFVAVKTVDQQGVLSIHRLREGVKSDRQGCINRIRSILAEFGIVVPKSPEALHAVLSEHIEDASNELPGIARLSLSRMQEQLSEFERHIKWCDERIAAHIKSDERARQAQQLLGVGPVGASALIATVGDFKQFDNAAQFSAWLGLVPRQNSTGGKSRLGKITKRGDIYLRMLLVQGAKAAVLSTWRHDSPTSQWVTRLCERSGWQVAAVALANKNARVLWAMFAKGKSFDPNYVSSRPSSVV

SEQ ID NO: 191379 - protein, 402 aa, unidentified
MNAVGIDVSKGKSMVAAMRPFGEVVLSPFEVSHTDRELRELAAKIKSLPGETRVVMEYTGYYHAPVAQVLCDSGIYVSVINPLLVKDYGNNSLRRAKTDKKDAVKLANYALDRWLSLQRYFPAENTRLMLKTAYRQYEQLIGIQTMQKNNLISLLDSVFPGANRLFSSPQREDGRIKWVDFLARFWHCECVSSLSQKRFTECYRAWCHKKGYNFSEDKAFDIYAEACGHISTMPKCESTEFIVKQAVAQLQSTSIAVSALRKQMQSIALTLPEYAVVIGMYGVGPVLGPQLMAEIGDVRRFHSKGALVAFAGLDAPAYQSGQMNVKSRSISKRGSPSLRRTLFLVMSVILQNAPETEPVYQFMDRKRAEGKPYKVYMMASAGKFLRRYYAIVKKQLDELEEA

SEQ ID NO: 191380 - protein, 371 aa, unidentified
MLYLAIDQHRKQLTVNLRGEDGNVLLQRQVSTRWQAVREFFQDIQKRGREAGGWMVVVEVCGFNDWLLKLLGEYQVTEIVLLQPEDRQCQKTDRRDANRLGEILWLNRQRLAAHLRVQGMRRVVIPSADDRLDRHLTSLRWGIGRERTRLLNRIKGLLRRHNLEQECPTKGIGTQQARRWLAKLPLHALERLELDQLLARWKTLEPERAALEATIRQRQGRHLTAALIATIPGMAAYTSLALACRVGEVQRFPRPRSLANYWGLAPSCRDSGETTQRLGSITKQGSALARFVLGQAVLHVLRKDGVLRHWYKGIKRRRGSKIARVAVMRRLTTAIWHMLHKQQPYVPGGPRAKNKDRAQEEPVVAAGAAES

SEQ ID NO: 191381 - protein, 350 aa, unidentified
MYHMENDMQEKATFPVWFGVDVSKDSFTAACRSILRGDETVFPPQGGFAIERKSVKEFMRWADGVAGGFPFGIAMESTGVYSQRLSALIRSVSPAQHVAVCNAASVSLYARSFTEEKNDKADAEAIARYGCDRNPRQPRIQGKEESRLRELVRERDRLVGLKKDMDNGGEALAGTDVRRIHATAARALDKAIGKLDKLIQETVDSSEEIREEVARMATAPGVGFLSAACVYAELGSLKNYTRRQVSAMSGVCPVNRKSGTSVDRHAMSRRGSVLLRKILFLDSHQAIRGIPSMGKFHKRMLEKPNSSKMSAKCACMRKLLLILHAMVVNGMDFNPNYESEKNMKKNNQTT

SEQ ID NO: 191382 - protein, 410 aa, unidentified
MQSAPTTLPRTPDGGLTSGIDWASSDHAVAVVNTDGLEVDRFITEHNQAGLLAMTRRLRKLGVGEVAIERPDGPVVEALLGAGFTVVVISPNQVKNLRGRYGSAGNKDDRFDAFVLADTLRTDRARLRPLVPDSPQTVTLRQTCRARKDLVAHRVAVANQLRAHLQLVFPGAVGLFADIDSPISLRFLDRFDCQERADWLSPKRFEAWLASVGYCGRTDPAVLHARLVAAPRGAAGTTATVHITRAMTAVLRTLVEQIKALSEQIDEQLAGHVDAHIFTSLPRSGTVRAARLLAEIGDCRARFPTPESLACLAGVAPSTRQSGKVRAVGFRWACDKQLRDAVCDFAGDSRRGNPWAEHLYQQAIARKHDHPHAVRILARAWLFVIWHCWQDGVAYDPTKHRALQNLGLPA

SEQ ID NO: 191383 - protein, 389 aa, unidentified
MKRVCGLDVHKDNAFVCILGENGEKIEFKTGVLTVELDSFRDRLVELGVGEVAMESTSVYWMPIWRILTSDFQLYLVNPLSIKQLPGRKSDVKDAEWIATCLQKGLIRGSFVPPLAIQQLRQYNRRLFDLNKQAVYVQNKMDAALQRCNIRISNYVSNVDTKGYREVVELLSEGTTDPEQLTGKIHKRTINKHGRDTIKAALTGVVTDVDSDLLRQYSEELDLLRRHKLECLSKMREMCEELYPEELKRIEDIPGVSAQSATQIIAEIGTDMKMFLTARTLVAWAGLKPRNDGSNGKIKSRRITHGNKYLKKLLIECAWAASRTKDCFFSSFSYRMVTVRKKGRLKVQVAIARKLLVVIWNILAKGTTYSDRLAQTEDSNTESSDAQKG

SEQ ID NO: 191384 - protein, 359 aa, unidentified
MHSECTQVQFTGQHVHVGIDVAKRSWKACVFLGQAFHKQFAQPPDPKALVHYLHKNFPGAVYHSVYEAGYFGFWIHEALVELGVDSIVINPADVPTTDKERRTKTDRVDAAKLGRSLANGELHPLYVPERSALEDRTLVRMRMTFVRKQTRCKNQLKALLQYYGVKKSDDVSDRYWSRAYLRWLESITFKEESGTIAFKALLNELLTLRTTIADLTRRIRLLAHEARYRSQVELLCSVPGISVLSAIIFLTEVVSLDRFKNLDRLACFVGLVPGEKSSGDTEQDTGLTPRRNRALRYILIECAWIAQREDPALLKAFTEYCLRMPKSVAIVHVARKLLSRMRFVLKNNQPYVTGVLKNG

SEQ ID NO: 191385 - protein, 274 aa, unidentified
MLHAGLDLSRKRLDFHLLDEQGETVEVGAAPPDADGLHHLAVHLRRHGQPLRAAIESMTGARFVHDQLELHGFEVEIADAVRVKGLAPLACKTDRIDAWVLAELSRRELVPAIWLPDPKVRAERERARFRLHLVRHRTSLKQRVHATLLTHGTPCPGSDLFGVSGRELLARLGLPEPWAGDVAASLRLIDELEREIAACEAELRALGSDHRYVPLLTTIPGIAWVLAYTIAAEIGDVARFPSPAKLVGYTGLCPRVYQSGESDRRGPLSKKGPR

SEQ ID NO: 191386 - protein, 320 aa, unidentified
MQAAGSGYEGGRILYMALELSNRTWRLGFSNGTKMRQKSVEARALERVVEEIALAKHKLGLEPGARVVACYEAGRDGHWICRWLRTLGVEVLVMDSSSIERAQGRKHVKTDGLDVTRLLDLLMRYCAGFRRSFRVVRVPDEAAEAGLRLHREDAYLVKARGRVVNRIRSLLATQGLVDVPLGRGFVAWVKAVQLWNGAGLSAELEAELERLYEQYQLLGRQQVDVAKCYQAELASPSVIGQQRGRLELLKGIGPKISRVLSAEVFSRRTFRNGKQVGSMAGLTPTPDQSGDLSRERGIGKHGNRRVRHTMIELAWLWQRW

SEQ ID NO: 191387 - protein, 367 aa, unidentified
MKSIIYVGMDVHSTSFTLSCYSLRTQSAFATLKMEPTAKAVKKYLDGIRNFYEEECTFVCGYEAGCLGYTLFHQLTAMDIKCVIIAPTTIMRKSHEIKTDRRDAEKLAKVLAYGDYSSVYIPTAQDEAVKEYIRMRDDHKLMFKKNKQQILAFCLRHNKHYPNSYWTQTHLRWMSKLEFGGYLQDAFNEYLLTYRQLEEKIERLDAQIKQLCEIDDYREKVNKLICFKGIREHTALSLIVETGDFHRFESAERYASYLGLVPGERSSNDNQVRLGITKAGNRHLRMLLVEAAQSYSRGAVSQKSKALKARQSKASPEAVIYADRAATRLRKKFIKMEFHSKKHNVAKTAVARELACFIWGMMTDNIA

SEQ ID NO: 191388 - protein, 320 aa, unidentified
MQTPSPVRHIGVDIGKYEIVAACAEGHFSVRKIRNQRSALTAFLKGLPAGSRIAVEATGGYHELLADLAHQRGFVVYVLNPKDTRHYAKAMGLRGKTDRVDAQLIARLLYREHEQLHPWIPPTPEQRQIDQMLKRRAKLSRTQAALIQSLKDLDEFTPDLKSLKERLDKVIARIDEKVKTLTEANAERKQHHTRLCSITGVGAVVGSSLLNTLERVPLKNADAFVAFTGLDPRPKDSGQCRGRRRLSKRGPGELRRLLYMAAMAAAKTKAWKAFYEHQRDKGLSTTAALVVLARRIARTAWSIFTYKTEFDAGRMVVMLT

SEQ ID NO: 191389 - protein, 341 aa, unidentified
MKHYAGIDVSLECSSVCVVDTNGKILREARVASEPEALIAWFASLGFGLERIGLEAGPLSQWLFAAMRQAGLAVELLETRHVRKAFEAMPVKSDRNDARGIAQLMRLGWFRPVHCKSMSAQETRTLLTARKLVQSKLRDVENSLRGILRGFGLKVGKTTEREFAGRIEELVAGHPHLQVIAKALLSVRAVLRSEFAAFEKQVRKMARSDMRTRLLMSTPAVGPIVALTYASAIDDPTRFKSSKQAGAHFGLTPKKYQSGETDYTGRISKIGDASVRTALYEAAHVMLTKPVKGCSQLKSWAMRIARRTGMCKAKVALARRLAVILHRMLADGTPFNAAAAT

SEQ ID NO: 191390 - protein, 340 aa, unidentified
MSEVTTIGLDLAKHVFQVHGVDANGAVVLRKQLRRGQVVAFFAALPRCLIGLEACATAHYWARELQAVGHEVRLMPAQYVKAYVKRNKNDAADAEAICEAVGRPSMRFVAIKTAEQQAALLLHRGRERLVRQRTTLVNALRAHLAEFGVIAPHGLRHVARLVAIVRDDSDTRLPALARQVLEVLAAQLEQLTTAVTAIEKELMAWHRNNPVSQRLASIPGIGPIIATALAATVVEPIGFKSGREFAAWLGLVPRQHSTGGKARLGGISKRGNRYLRRLLINGASANLLRSRATNANPWVIGLRRRRPSLVVAVALANKTARIAWAVMRRAQSYRHRSAAA

SEQ ID NO: 191391 - protein, 414 aa, unidentified
MDRVVERCCGLDVHKASVTACVKVPAESGGPPHQEVGEFATTTQGLLKLRDWLASFEIELVGMEATGVYWKPIYYLLEDDFECWLLNARHLKNVPGRKTDVKDAEWICQLVEHGLVHPSFVPPKEIRELRNLTRYRKAQIEERTREVQRLDKVLQDAGIKLSCVATRVLGVSGRAMLDALVEGTTDAEVLAELARGKLRSKLPALRDALEGRFSSHHALMVGKILAHIDYLDESIAELSVEIERVIAPFSDKVELLDTIPGVDRKTAEVLIAEIGVDMGQFPTHAHLASWAGMCPGNDESAGKRRSGKTRKGSKWLRSALIEAARAAARSRGTYLAAQYARLKGRRGSKKAAVAVGHSILVICYHVLEREVPYEELGEDYFHRHRSGEAYTKRLVRQLERLGHKVALEPLPQSA

SEQ ID NO: 191392 - protein, 394 aa, unidentified
MYFVGIDVSKYKHDCFIVTEAGVVIKDTFTFDNTRTGFDQFFSILDGLGPKNEIKIGLEATGHYMNNLMKHLSVKGYSFILLNPIIVSQFRHLETLRRTKTDKVDAKLIAQVIASKDFSSYPLQAYHFPDLKTLTRLRDRLIKQRSLYLVMLTNQLDLSFPEFKEFFDGRLKSKTVQFILTKYGISSRIANMNSQSFELLRKVSRGKFSYAKFAKLKELAKNTIGCSSEIDEMLFSLTINLYQSIDEVITNVESKIAEIMEKLDSPTASIPGIGTMSAATIIAEYGDVSRFANDGQMLAYAGLDCGRYQSGTSDFPGRMVKHGSGYLRQALMNVAETCMIHVPSFYDYYLKKRNEGKSHRVALSHLARKLVRMIYKLETSHTHFDLSVFNSQHQ

SEQ ID NO: 191393 - protein, 343 aa, unidentified
MSEYDGTQFVGIDLHRRRSVIVRQSGSGEQLSVRRIDNDPITLGLEIAKAGENPEVVLEATYGWYWAVDALSETGARVHLAHPLGIKGFTYRRVKNDVRDAADLADLLRMGRLPEAWIAPPATRQVRELVRHRAKLVSLRSGLKAGVHAVLAKQGLRIPVTDLFGVRGQRLLAQAGLDDAYRARVNSICRLIDAFDFEIDLAGRLLAGRLARDPGYLAIQQIPGVGPILAAIFVAEIGDVHRFPSARHLCSWAGLTPRHRESDTHVHRGPITKQGSALVRWAAVEAAQKTPAWAGWLIRTRAEITARRGTNVATVAVARKLLILVYYGLRDGHIRALTRPKAA

SEQ ID NO: 191394 - protein, 380 aa, unidentified
MLKNTKASLNFVIVYLVRQNINTQRRLAMEKSNKLDFGGQHIYVGMDIHKKSWSVSIHTEQFEHKTFAQPPEIEKLTDYLQRTFPGATYHTVYEAGFSGFWLHDKLREKGIDCLVVNPADVPTKDKERAGKTDRVDCRKLARGLRNGEIKGIYVPSRVKVEDRSLVRTRQSMVRKQTRCKNQITSILFFYGIVIPEEGRWSRRFINWIESIRMERASGDFALKAHLEELKHLRQIIANLNRAILSLSRTEEYRADVLFLKSVPGISTLTAMILLTELADVSRFSSLDKLASYAGLVPDIRSSGETEYATGITFRRNAAIRALLIESSWIAVRKDPALTMAFNKLSTRMKKTKAIVHIARKLLNRIRFVLKNRQEYVPAVV

SEQ ID NO: 191395 - protein, 369 aa, unidentified
MTSIIYVGMDVHTTNYTLCCYSIETNQAFAQVQVDPDYKEILRYLNQVQSQRGGNCKFICGYEAGGLGYSLYHELSYHGIECVILAPSTMAVIPGKRIKTDARDAEHISKCLAYHTYSSVHIPSQEDDAVKEYIRMRDDAVTTLKRIKQQTIAFCVRHGKQYDGKSYWTKRHLDWLESLKFDHPILQEAFQEYLIQYYQASEKVDIYNTRIEELAQRETYRGQVQKLICFRGVAVHTALSLLVEVGDFHRFKTAQHFASYLGLVPGEHSSGGKQIHTGITKAGNTHLRRLLVESAQVFSRGVIGKKSVKLKAKQEGKPAAVIAYADKANERLRRKYSKIASHSKYNIAKTAVARELACFIWGMMTDNIA

SEQ ID NO: 191396 - protein, 319 aa, unidentified
METQYFIGIDISKESLNWAVCSSNKIILEHVSGNDIKSITKTVISLQRQLNFKLGSAVFCMEHTGIYHTRLLKYLLSRKAAIWLESGSQIKYSMGDVRGKNDIIDAQRIARYAYKNRDEIKLYVPPRAIIDQLDNLLDIRDRLVKVRQICLTALNEQKSCEANKTLTKDTKKYSAHTLKGVETDLQTLEKQIKELIDSDPQLKSLFDNITSIPGVGTVTAAKCIVITDEFKKFENAKQLACHAGVVPFENSSGSSLHSKPKVSKKAHKGIKATLSNCVMSAMRYNTHFKAYYERKLKEGKNKFTVFNAMKNKLVRLIFL

SEQ ID NO: 191397 - protein, 419 aa, unidentified
MSFKIFKFNCCGLDVHKTWIYACIGITDSFKRTEYKQARFSSFTKGLQELCLWLAKYNCIDVCMESTGKYWIPVFNVLEKNNIFVTLSHPKYTKPQKGNKTDRKDAKWICDLYMCGMVKPSFIPPADIRQLRDLVRYRFKLTCMITGEKNRAHNCLTVSNLKLDDVFSDIFGKSSRSITEQILQHPGEVFDVAPFVDSRCKTPIEEIQAAVDGAISHEQAVKLRQCLKHIDELEMHKAEIEREIFRLSQKYESVLDLIRTIPGFDKNPLTAIQVLSEIGADMSVFPTAKNLVSWAGCCPRNDQSSRKIKSTRISRAGSYFKPVLVQVANALIKSKKHSEFTSRYKRIKARRGHKKAIIAICRMILTAIWHILTDLKPYTPEGFLESRPVNKEKVLTISQALNLIKQRGYIIKDDVGPVT

SEQ ID NO: 191398 - protein, 368 aa, unidentified
MYIVGIDIGKNHHEASIVSPEGKQIGRSLRFATTHKGADSLMSFIFKNIGNSPCVFGMEATGHYWYPIYSFLKAKGYTICVINPIQSDSLRKMYIRQTKNDSIDSFLIAEVIRFGQFGTTSMADENILAMRQLCRYRDSVISSRTEIKLRIGTIMEQIFPEYEKQFSSLCVSTSMGILEKYLTPENIENAPIDELFEIIKDKSHNRLTKAKAISIKEAAADTFGIKIAQDTFSFQLKQLIDRMNFLDKQIEALDIEIMKYYEQFDCYLHTIPGIGIIGAATILAEIGDISRFKNSSALVAFAGIDPTVRQSGEFNSTHNHMSKRGSPYLRHAIFLAATTPSQWSSAGWEPSCRASGPDGRWRRCKRRA

SEQ ID NO: 191399 - protein, 287 aa, unidentified
MQITTIGLDLAKNVFQIHGIDAGGSVVARCKLRRAKVRDFFAGLAPCLIGMEACATAHFWAREFIAMGHQVRLMPPSYVKAYVRRGKNDAADAAAICEAVMRPHMRFVPIKTEEQQAALMLHKARDLLIRQQTMLINAIRGHMAELGMIAPQGFTKIKDLIAVIQDSEDQSIPALARVALQSLVRQMQSLTGEVEALDRKIKAWHKTNETSRRLATIPGIGFLTASAIAATVLDPSFFKSGREFAAWLGLTPRQNSSGNKERLGRISKKGNTYIRRLLVAGATSMLR

SEQ ID NO: 191400 - protein, 352 aa, unidentified
MVTVGIDPHKRVCYAAAVDAAGRRIDPVHKTAGAADLPALLDWARRNAGEAAEVLWALEDGRGLARPLADALLLAGQRVVWVPARAMAAHRRLHNRTGAKSDAIDAAAVARAAVAECDLAPHRIDEPIRELRLMADRRADAVQRRTQACNRLRAWIHTWFDHTPADLTRAKGRAALQAALEEAALPARVHAVFTGLLAEVAELSALIAALERDIARAVEPLAPHLLAIPGIGPVSAAVLLGEIGDITRFPTAAKLAAHTGCAPIPVSSSGRDRHRLCRGGNRRLNCVIHIAAVVQKQRHPGAGALVERLEPTKGKRGAYRVLKRHLVDVIYRAMVRDRARWAHAAVEHHLAA

SEQ ID NO: 191401 - protein, 411 aa, unidentified
MIKENYIYVGIDLHKETHTAVMIDCYNQKLGEITFPNRPADFPKLVAKVKKCNTDGKTIVLGLENAYGYGRALAVWLIDKGYLVKDVNTAISHRQAKHRGAMYRKSDSDDAEAIALATLNMLDKLPDAYPNDAYWSLGQLVHRRDNIMKQQTRLVNQLHEQLCIAYPSYKQFFNDISRPTALYFWEHYLSRKYLKGKSVEDLRAELVPVSHNKCSTKTCEKILDAVASDKVKNNAYQDARDMVTLSIVSDLQHYDKQLAEVDKMLEQMYKMLGCTLTTIPGVNVITAVKILAEIGDIKRFSNANKLAQFAGIAPLHLSSSGKGKDVATKQGNRRLQATIYFLAIQMVQVSSKGTPRNSVVRAYYEKRKAEGKTSQQALICISRRLISIIYGMLKHGTEYRMPVVESAGENR

SEQ ID NO: 191402 - protein, 330 aa, unidentified
MSPRPQFAGIDVSKNSLHVHIAKHLMDNDGPFRVFSFDHKGLSLLKAWLLEHHVQHTVFEASGGYENTLRDFLLEHHLPCTRLQPERARAFAVGIGAIEKTDKLDARVLARMACVRTQHKEVLRSETQRELVTLMDFRLQLREDLTRLKTQRQKQTNAWIKETQDERIRDLEVRRDALDKRIQTLVDGDQEMSALCELMCQLKGVSYVTAWSLLAYLPELGELNKRELAKLVGVAPMAKESGDFTGKRRCSRGRGKVKACLWMASLSVATHEEPFKQFYQRLKEKGKPPAVARVAVCRKLLTALNAIARDGEAYKPELLMPRSGSLEKVS

SEQ ID NO: 191403 - protein, 312 aa, unidentified
MTKIVCGVDVSKRRLDAHVVPSGTVAGFDNDATGIAALAEFCHRQGVQLVAMEATGGYERQPFLLLWAAGIACGLTNPRSVRRYAEAMGTLEKTDRLDAGVIARFAIAKELKATNPPTAVQQRLNALVARLRQVTEDLTVNKQRRSSAMSPEMVVSLDEVIGLLKRQARALEGEIASMIDDDPLWSHLDAALRTTKGIANRTVARLFAELPEIGIYSNKAVVKLAGLAPLANDSGAKTGQRHIRGGRAGIRSILFLVADIARRFDPSLADFHRRLTAAGKKKMVVRIALARKLLVRLNAKAREARACYALAT

SEQ ID NO: 191404 - protein, 344 aa, unidentified
MANLNQFCDFTKLIGIDIAKSVFQIYSCDTQTGEITNVQVKRDKVLESFANCGKCLIGMEACGSSQYWARQLQALGHNVRLMDPKLVKPFVRHNKSDKADAEGVYHALVSGVRAVAVKTETERDIQTLLTMRALLVKQRTARINHVRGLLAEYGHVMPKSVDQFDKKVDECINSLEGDAVQLVINMMRDTVKSIRDDQDRIKTLQREISRLANQTRNAKHFLTVPGVGETIMAYMCVLLADPTQFSSARQFAAYLGLVPMHTGSGGKTVTTKIPGRCDKALRAVLVQGAHAVARSKCRTDWVKNILAKKPKKVAMVAIANRMARQCWAVASKGQDWRRMPVTAA

SEQ ID NO: 191405 - protein, 454 aa, unidentified
MPSNEKAVICDGHGDILKAAFPVENNAAGIAHLIKEISATARRRKIPKDQIFLGGEDEAAYVANFTEALRVKGYLVVRVNAYEAKENRENLLASTDTLDLLGIAKTLLSRRARLTGETGTPNPAYHHLREITRCRRNLVRQQTAASNRIHALADQLFPGFLNGSKSALTPFCDASLELMKERFSAPEIARRKPISLANLLRRHRVQLPDETASQIILLAREALPPAAHRVATLQRALAATVDLYQCLQRNAIELRADAALTLATTPYVMLTSIPGIGFVLAAGLAGELGDPKHLGKLDSLCAYAGIVPRTLQSGGPDSPAVQGHASPRCNRILKDWTVQSAQKIHLYGPPELKDRITRWNAEGKHGIFAAARHHLRLVSTLVKNEIPYLSPEGRDRHATPEQIASAAQATWTIIQRKWRTISGGLDLITDEAHPLGFWRKVMLELHRIDLPPRP

SEQ ID NO: 191406 - protein, 339 aa, unidentified
MELYSAIDLHSNNSHVAIIDDQQNRVFYRKLANDAELIANVFAPYRERLKGIVIESTFNWYWMADLLIEKGYPVHLANPCGIQKYSGLKHADDKHDAFWLAQMLALKILPEGYIYPKEDRPLRDLLRKRSHLVRVRTSLVLSLQNIVMRNHGIKIRSNELKKLTQDPVAELLKDQEELALAGRASKETIDFLTRQIQRIEKVARSKALLKEPFSKLLTLPGVGDILGMTILLETGPIERFQAVGHYASYCRKVSSRWTSNEKTKGKGNTKNGNRYLSWAFSEAADHARQTHGPSRDFYNRKLNQTNASVAHNALAHKLARAAYYIMRDHVEFKEAKMFR

SEQ ID NO: 191407 - protein, 459 aa, unidentified
MRKPRKSQSRKFVDPTQGLPMLNLNAAGIDVGNREHYVAVPPGRDPQPVRKFGSFTADLHRMAQWLKACGVDTVVMQATGVYWVGLFQVLQDYGLNPQVVNAQHTKSLPGRKSDVQECQWLQKLHTFGLLNRSFRPAQDIGVLRCYLRQRENLVSAASTCIQHMQKALTEMNVQLANVISDITGITGMAILRSMVAGERDLHKLAALKQRQIRASQQEIAQSLEGNWRPELLFVVGQNLDLYDVYLDEIQKCDKQIETHMNSMKSKIDPATKKMPDSRHGHKKRKHGPQFDLRQHLYRLAGVDLTQIDGLDVQTVQTIVSEIGTDMSPWKTEGNFASWLGLCPDNRTSGGKVLKRRTRHVVNRAATALRIAAWNLIRSQSALGAKFRRLRARLGAPKAITAMAHQLARLVYRMLKFGKEYVDRGTEHYEAKYRLNQVKWLTKQAAALNLKLIPAQGLTG

SEQ ID NO: 191408 - protein, 286 aa, unidentified
MDYFAGLDISMDETHICVVDRDGAVVYEGKSASTAGAIADKLSEAPSCRRIVFETGRMAPILFHGLSQLGLPAVCVESRQAYQALKSIATHKTDRNDARGLAHLARTGFFKPVHVKSLSAHAVRSLIIARKKLVGQRVTLENQIRGLAVVFGVRLPRALTAAFIDNALRASEGIAGLSAAMRGLIAARTAVMSAVAAIDADIRRMTRASAACRRLMTIPGVGQLTALAFVAAIADPSRIRRSRVSAPIWAWSPGGISLARSTTSAGSRNAGTGGCERSYTRPPMSC

SEQ ID NO: 191409 - protein, 321 aa, unidentified
MTYVGIDVSKATFVVAYSSAKSSETKTFKNTTKGIREFIRTISPEENHCVLEATGNYSMLLVYLLSKAGFTVSMENPLKIKNFARVMLSVVKTDEIDARLIALYGERMQPAPFKLRSDSLLLLKQKRTVLRQLKKQLTANRNLEGSLKVLPFIDSKCKKVLEKTIKFLEKQIQEMEEELTSLAEIEYKKQMDLLTSIKGIGATLAAALIIATGGFTYFDNAKQLTRYLGLSPTYQQSGTSVNVKGHINRNGDAYLRSQLYIGAMASLRCNKECKACFDRLRSNGKPGKVAIVAVANKLIRQAFAVVTHEKKYIDGYKSVKP

SEQ ID NO: 191410 - protein, 352 aa, unidentified
MNKDTTKFVGIDLGDKTSLVYVIDQAGEFVKETRLPTTATALEREFGGQALLRIALEVGAHSRWVSRELSGYGHEVVVANASKLRLIYENPRKSDRVDAEYLARLMRLDVSLLAPITHRGEAAQQHLAVLRSRDSLVRARTQLVNHVRGTAKSFGVRLPQCATEYFARKARPELPDSLRPALEPVLDSIQDLSERIRAYDQEIERLCDAVYPETQALRSIKGVGAWTALAFVLTLEDPQRFRKSREVGPYLGLAPKRNQSGDEDPERNISKRGDKFLRRLLVGSAQYILGPFGQDSQLRRWGLQLAGEGSKAAKKRAVVAVARKLSVLLHKLWVSGETYQPFYPLRQEAGLA

SEQ ID NO: 191411 - protein, 342 aa, unidentified
MNYYAGIDVSLKCSSIAVVDANGEIIREAKVATDPMVVIEWFRSYGLQMERIGLEAGPFSQWLYAGMKEADLAVELLETRHVRNAFKTMAVKTDRKDARGIAELVRVGWYRPVHCKSMDAQETRTMLSARKLIDQKLRDVEMSLRGLLRGFGLKVGKTTPTRFADRIKELVSGNATLQVIAESLLAVHQVLLREFKGFEKRVRTMARDSAEARLLMTTTGVGPIIALTYAAGIDDPGRFKKSKAVGAYFGLAQKKYQSGETDITGRISKAGDAGVRTALYQAAHIILTRPVKSSALRSWALRLAKRVGMSKAKVALARKLAVVMHRMLVDGKPFNPAAGAAA

SEQ ID NO: 191412 - protein, 373 aa, unidentified
MISVGIDVSKGKSTVCILKPYGEIVSKPFNITHTQKDLSELSSMLFRLNDEVKIVMEATGIYHLPVLTYLQEKGFFVSVINPYLMKSYRNESLRKAKTDKIDSRIIANYGIDHWFKMKEFQTSGEIYEELKLLGQQYRHYMKLHLLSLAELTHLLDLTMPGIKNLLASWNETNRKDKRSDFVERFWHYDVITSMSEQEFTEEYILWAKEKKYVPSQEKAKVIYALAQESIPTLPSETSSIKMLVTEAVRVLKEVDATLGLILSRMQEIAKTLPEYSVVIEMGGVGNTLAPKLIAEIGDVRRFRNGKALVAFAGIDPPPYESGQFVGCNRKISKRGSASLRKVGYETMRSLKMRSRPEDPVYRYVVKKESEGKK

SEQ ID NO: 191413 - protein, 427 aa, unidentified
MSYRIAGIDVHKKMLAVVVSNVEVESDFQFERRMFGSNPEQLRSLAAWLLEQEVEEAVMESTAQYWKPVWEALERYWKLICEKREGARPKSGSLHLAHALSNRGRRGRKKDFRDAERLVKRLVARELTLSFVPDAEQRLWRTVTRKKYQLRRDRVRLQNQLEAMLEEAHIKLSSLVSDLLGASARRMLQALAEGETNPAALATLADQNLRATPEQLCDALGACTDLKPIYRRLLKMALEQLQFLEQQMGQLDQELASLLHPHQDAVQRLADVPGVDSAQQIIAEVGPTAATFPSEKCLSSWVGACPGDEESAGVNYSRRSPKGNRHMRRVLNQCANAAARTKGSIFEIVYRRSVPRLGHNQAIGAIAHRQCRLIWLILHQGVRYEERGPAVTKQSRQARTARMIRQLRKLGYRIDLPNSQPTNSEGM

SEQ ID NO: 191414 - protein, 378 aa, unidentified
MPGHHDGAPVEAQSGTVLMVFELSKSSWRIGVVRPGGQKMSRHALDGGDTAALEALIGRLRVEAPDARMVSAYEAGLDGFWLHRWLVARGLDNRVLDPASIQVNRRARRAKTDRLDLDILMRTLAALERGEPRVCSVCRPPSAEHEDARRLTRERGRLVRERTAHITRLKALLIGQGVRGLEPLSRSFRDDLATARTGDGVALPPNLTAELIREHDRLGLVVRQIDQLEAAAKAEAQAPQLAPLAAKTVQLTRLKGIGPISAAPLAREVFYRRFDNRRQVAAYFGLDGSPFNSGASRREQGISKAGNPRARTLAIELAWLWLRHQPNSDLSRWFVARVGEAKGRVRRIAIAALARKLMVALWRYLETGVVPNGAVLRA

SEQ ID NO: 191415 - protein, 379 aa, unidentified
MDHAITDTSAETVLRGALELSKNSWLLALQLPDRAQPSLYPIRGGDTEGLMAKLTAARDRWAKVSGKAPSIVLCYEAGYDAFWLARFLKAHGIECLVVDAASMQVNRRARRAKTDRIDVGMLLRALIAWGQGDRHVWSVVRIPSVDEEDLRRLHRERDRLVRERTAHINRIKGLLFGQGIRDINVKSKYKTLQIDKLVTGDGRPLPPRLASEITREIARLALIQEQITALERERDQAPTPCKITERKRVQLMCLTGIGPAIAAVMTREVYYRQFDNRQQVAGFLGLATSPHDSGDVERSQGISRAGRGQVRGIMIQAAWLWLKHQPKSAITRWFVQRTAGQSGRIRRIMLIAVARKLAIALWRFVEQGLVPQGAMLATR

SEQ ID NO: 191416 - protein, 465 aa, unidentified
MKHAQRRPRTKPASGPSLLERITPTAAGIDCGSEEHYVAVPTDRDAAPVRAFKTFTTELHRLADWLTACGVTTVAMESTGVYWIPLYEILEARGLDVVLVNARHVKNVPGRKTDVVDCQWLQQLHSVGLLRGSFRPTAAIAALRAYLRHRETLVQSAATHVQRMQKALVQMNLQLSTVISDITGVTGLRIVREIIAGQTDPRALAQHRDARCRASEEDIMAALTGNYRPEHVFVLQQNLELFDAYQRQLAACDAAIEAHVSTLAAKAPTPAGPLPAPRTRKTPRDNEPRFDIRRPLHQLTGVDLTQIDAIGPYSALRLLAEIGPDMRRWPTEKHFTSWLTLAPHNKITGGRLLSSATLPSANRAAGILRMAAMSLGRTETALGAFYRRLAFRVGKAKAITATARKLAILVYRTLKDGLVYRDPGAAAYDAQHRQRVIRRLRQRAANLGLALVNRETGELLEGPVS

SEQ ID NO: 191417 - protein, 427 aa, unidentified
MSYRIAGIDVHKKMLAVVIADVARCGEYEFQQRKWGANPSELQALAQWLVDEEVEEVVMESTAQYWRPVWQALERYWQRAWRERGGAGSKSGTLHLAQAESNRARRGRKNDFEDAERLLKRLVAQELVLSFVPDAEQRVWRAVSRRKYQLTQDKVRLRGQLEGLLEEAHIKLTSLVSDLFGVSGRRMLEGLAEGETDARALAALADFRLRATPEQLRDALGACAELNPVYRGLLKMSLAELKLMEDHIAQLDREMCRLLEAHHEAVQRIAEVPGLGADSAQQILAQVGPTAEAFDSAQQLASWVGVCPGREESAEQSHSDRSPKGNRTLRRILNQAAHAAIRVKGSIFEVTFRRLVPRLGYPKAVWAIAHRICRLIWKILHQGVRYEERGPSVSAKSKNARIVRMIRELRGFGYRVDALTLQAECAR

SEQ ID NO: 191418 - protein, 353 aa, unidentified
MEYASRVDFTGQPIYIGMDVHKKSWTVSIFLEHLEHKTFTQPPMVAPLVSYLHRHFPGACYRAVYEAGYCGFWIHDQLVENGIVCMVTNPADVPTRDKERRRKGDRSDSRKLARTLRSGQLEGIHVPTRARVEDRGLVRTRQAMVRKQTRCKNQIKSLLFLYGLAVPDAGSSWSRNFIRSLEALRFERDSGNLALKAYLAELMQLRQIIAQLNRDLRALSRTDEYREGVQLLKSVPGISTLSAMVFLTELGELSRFVSFDKLCGYVGLTPDTHGSGEKQGIGDITRRCNQMLRSLLIECSWTALRKDPALALAYHCYCQRTRKTKAVVKIARKLLNRIRFVLNHRHPYVLKVA

SEQ ID NO: 191419 - protein, 366 aa, unidentified
MTQQWIGGVDAHKQSLTVALVEPAGGGVAAVSFANTQAGLVEVLAWLAEQPATLLRIGVEGSAGHGRHLAMVLLAAGYDVREVPARRTAARRRERRRAKTDIEDAYAIARATAGEPTLGPVKPGAGLGAAHEELVVLVGHRGILVARRTMMLNHAEATLAALPLALTDTLRGRAVRPRLRTLLATDHGQQPAPVRAQLALLAELHTDLADLSGRIRQLESRLARLISACGSTLLAEHGIGVVTAATLLAEVGDPTRFRTESAFNRWWGGAPVAVSSGEGHGQPTRHRLDLLGNRTVNHVLHIMSVTQARYHPPARTYLQGKRAAGHTGREARRAHKTLLGRRIIRRMWTDHHRQHNPHQDQQTVAA

SEQ ID NO: 191420 - protein, 379 aa, unidentified
MDFSTVALPPVSDKPATLFVALELSKATWLVALHSPSADKVSLHRLAGGDTQELLTLIARKRDQAQAALARPVHVMSCYEAGYDGFWLHRLLCASGIDNRVLDAASILVDRRSRRAKTDRLDAAALLRTLMALDRGEPRVCRVVRVPSPEHEDERRRSRERARLVNERGQHASRIKGLLMTQGIRDFVPTRRDWRERLAELRTADGRALAPCLTAEIERECRRLWQVIAMIAEVEAEQHRAAEKSSTGAVQLSRLRGIGLTIASVLADEVFFRSFHNRREIAGYLGLASSPWNSGAVSRDQGLQRSGNPRARRTAIELAWLWLRHQPESDLARWFQERVGAGKGRIRRTMIVALARKLMVALWRYVTQGLVPEGAAIKG

SEQ ID NO: 191421 - protein, 427 aa, unidentified
MTDQLKHKAYDSWVAIDIAKDYNVVMVELTDGKTRRFRMANSGKDHDRLIDFIRELPQPCHIGFEATGNYHRPLAYRLLTEGFDVSLISSLASARYREAIFNSWDKNDPKDAGILLELLKRGVVQTYVDPIRSGYHDIQELSKTYSNITLSRTRLQHSILTHYLPLYFPEMAKFWCSTRNAWWINYLLHFPTPASVTQYSEQAFCQIASPIIGRKMNKQAKLLELYEAAQHSIGLPIAPDSLACQTFQLQLQRYQELTTQRQQLEQQAEAMLSTHPDYCLLKTVPGIGPIVAMTILAEGGDLRRFNHHRQFLKYCGLDLAKNQSGNFRGQDKLSKRGNARLRLALYMASLHAIRQTENSFRNKFHRYTQATPKDADCKRKAMTAVIAKMARVVHALIKSGTPYQGYFEVSPSGSIPLSRAVGATRTP

SEQ ID NO: 191422 - protein, 335 aa, unidentified
MSSLVCGLDVHKDSIYATVMNYSGEVVEKRKLSNTEVVNFLSQYPIDKIAMESSTSIVPVYRALRGRGYEILVSHPKKTRLIAESRIKTDRVDSWAVTELARLDALPLSYMPPDDIAMLREKVRRRAFLVRMRSKLKVKIKAQLVINGLTPPSEHGLFTSKGLEWLRSLQLDAIDSYMPVIQTLDIQVGKLSRELRGMASGDEDVKLLMTIPGIGYYSALLVKSEIGSIDRFPDGEKLCSYAGLVPSVSISGRYRRHGSITKEGSRWLRWIMVESVHTHLKYDTSITRAYHAIAERKGGQIAKVAAAWRLLMCCYSVLRNREPYHDPAGHYHESS

SEQ ID NO: 191423 - protein, 359 aa, unidentified
MKKEQRKQISFKGQRIFIGIDVHLKSWCVTIASEHAVLKRFTQPPSPEALYSFLTREYPDAEYKSVYEAGFCGFWIHERLMELGIDNIVVNPADVPTTTGEKLRKTDAIDSGKLARSLRAGELKGIYIPDKVSLEIRSLTRLRDSITKDQTRQKNRIKSHLRYLGIEIPQEYCERGRCWNKSFVAWLRSVESACEYGKQTLDQLICQYEDLRKRRLEMIRLLRRLSRTERFSEPLGWLMSVPGIGQLTGMTFMSEIDDISRFKNADQLASYIGMIPMCHSSGEHDGTGDITLRCHSKLRAVLIEAAWVAIRQDAAMTQAYTEYCRRMKPSKAIIKIARRLVNRIYFVMKHKKKYVNNVA

SEQ ID NO: 191424 - protein, 431 aa, unidentified
MTHTVSCCAAIGVGIDTARYGHHVSFLRDDRQPAAKSLAIPESRVGYEELNLALRQLHERHPLAHFHVRIDAAGQYAVNMERFLRELPFPMTISTGEPGRNKSYREAHFPKRKSDATDSHANARYAVVEQPCATPDTPIEFQQLREVVARLESQVRHRNRLTNQLHNLLSRVFPELALVAPDLAARSVLRMLQKYPTPQKIAAAQLPSLTAIPYLKEEKAKAIQAAARQSVGSMRGDIAGELVRQRVQEIQQCRAQENQLEQLMTAALDAITPSGHVHLQSIPGIGKATAAVLVAKIVSIDRFATPNQLVSYFGIFPEESSSGVDKAGRPLPVGKVQMSKKGNDLVRHYIWQAARTGVLYNPALRSLYARQRAKGKRGDVALGHCMRKLLHLVFAIWKSGKPFDLSRYPVDEQQEATGRTEASPPDGQRSP

SEQ ID NO: 191425 - protein, 302 aa, unidentified
MKYTTVGVDIAKNVFQLHWVDAGTGEIVNRQLKRAKFLEHFANREPCLIGMEACGGAQHWARRLTEMGHQVKLMPAKFVKAFNIGNKNDPADARAIWMATQMPSKPVAVKTEAQQAVLALHRLRQQKIKFRTMQMNSLRGLLTEYGEVMAKSRAALDKAIPGVLERLAERLPAMLIDSLRELWNDLNRLDKQIADIERRLHTWMKEDKACKAIAAIPGVGLLTATATVATMGDAKAFRSGREFAAWLGLVPKQIGTGGKIQLLGISRRGDSYVRTLLSIGQQDGTNDLGSARARHPIQDRSR

SEQ ID NO: 191426 - protein, 369 aa, unidentified
MGRKSSKLFVGMDVHKDSIDIAVAEEAGEVRHHGRIGGDLNALGRAVRKLESLGRSLVFVYEAGPCGYGIYRMLKARGHECWVVSPSNTPRRVRDRIKTDRRDCLKLAGLARAGELEPIYVPDPADEAMRDLVRTREDAVAMQRQARHRLAALLLRNDHRYAGKTAWTEAHRRWISRLSVPSAAQRIAFEEYVQALTEATERVGRLTQAIEQELAHWRWRPVVAALQACRGIQLIHAARIVAELGDLARFSHPRELMAYLGLIPSEDSSGDRRRQGAITKAGNSSARRALVEAAWAYQHAPAVSPVIARRQTGLPKAAIEIAWRAQLRLCARFRRLQARGLNRNKIAVAIARELSGFVWAIGQQVRPAA

SEQ ID NO: 191427 - protein, 356 aa, unidentified
MTIVAHAHPFIMGVDTHAKTHTISILAAATGGEIACEQFPSTAGGIGRAIAWAARRTGGDLAALWVIEGIGSYGAGLARAVADAGYEVAEAPRINARSRRGTGKSDPLDARAIAAAALPVATDELRRPRRDDGVRGALRVLTTAREQMAGERTMNVNALIALLRTVELGIDARKPLTGQQITEVSRWRARSEDLAAVTARTEAVRLAKRVTTLDEDLKGNKAQMTELIQTSPAAPLLAKTGIGPVTAAAVITAWSHPGRVRSEAAFAALAGVSPLPASSGNTIRHRLNRGGDRRLNRALHIATIVRMTHDPSTRAYVERRLTEGRTKREIRRCLKRYLARHLYRTLNALYASPTTT

SEQ ID NO: 191428 - protein, 314 aa, unidentified
MQDVVIGVDVAQDKLDIAGSPGSEHLSLANQKRAIDQWLKQLCPGAAIAMESTGSYHQLLATRARQAGMHVFVLNPKQVRHYAKSEGRRGKTDRMDAQVIRNFLRHHIERLHPWCPGTALQAAIEKLHRRRQTLERHFTAIRLSMHDLGALQSELDTLMQGFQALTQAIDVRIQLLIAQDEQMARKDALLRTIPGVGPQGAAAWGSVFARIPFARADAVVAYVGADPRPRDSGKRRGKRRLSKQGPSHLRKQVWLSGFSASHSKLFKPLYEALRARGLASTEAFMILGRRILRIAWAVWSTNRPFDPRLLTRQT

SEQ ID NO: 191429 - protein, 310 aa, unidentified
MAAYVGIDVAKATLVLCLQPEGRTWTRPNTPAGQAEVVAELQVVQPERIALEATGGYERAIWQQLHAAGLVVVRLQPRRVKALARALGRQAKTDPLDAALLAEAARILVVPVAIVPDAATEALRALVDLRRQLVSQRDDNRRRLKQSPAAVAQQVLGRVNAGLQREIRQLDGEMRVQLAVTTSPDLATAPGAGPVLRATLAARLPELGHLDRRQIAALVGIAPYNADSGAHQGKRHIRGGRADLRRVLYMATLASIRARSVLATTYQQLLARGKLKKVAIVACMRKFLTMLNAMARDHTTWAPPTLSGAA

SEQ ID NO: 191430 - protein, 333 aa, unidentified
MVAGTIGSLDKAGATKMTQTNTLTAGIDTSKAKLDVAVHGSGECWQVANTPSGWRRLTAALLKIGVGRVGIEATGGYERGVVAHLRAAGITVLLLQPIQVRSYARMHLRRAKNDRLDALLIAACAAGMEPPRSEPDARLAELAPHLTFLEQIEVDIARFKVRLEPIKEGRLRRIVLADVVRLRRRRQAELACIVAALRSHDDLARRLDLVGSVPGIGERTAVAIVVRMPEIGRISREQAAALAGLAPFDHDSGTHEGQRRIEGGRARLRRSLFAAALPAAFRWNKALIALYARLTARAKAHNAALVACARKLIVYANTVVQRGTPWTERSAAT

SEQ ID NO: 191431 - protein, 373 aa, unidentified
MKSITKYVGLDVSKKSVDVAVADHGREAPRYWGKIPNCPEAVSKLMRKLGDPKELLVCYEAGPTGYDLYRQLTRMGIQCIVVAPSLTPVRPGDRVKTDRRDALRLAQLLRAGELTAVWVPGEEDEALRDLTRAREDAKKDLLAARHRLSKFLLRHGLYAPEKVKPWGAAHRRWLDGLHFENKALQVTFQEYLHAIDEITERVKRLEAEIHEQASNSVHAPMIQALETLRGVAEVTAVTLVAEIGEFSRFTNPRQLMAFAGVTPREHSSGGTTRKGGITKAGNAHVRRVLLEAAWSYRYAPALKGGLRRRQEGQNPQLQAIAWKAQNRLHRKYHRLVLRGKSPAVAATAVARELLGFVWAIACKVEETRRTMAA

SEQ ID NO: 191432 - protein, 412 aa, unidentified
MLQRLNLFTPCMLTIMFCFNKNRKSTEARTEMRREWTDEQFVGGAFSSGYSFTGRDRPSTPWDTKPVGELGSSRHFLNNPNSCQSLFKSSHLARPGKGEMMSERKYVGIDVDKINLEVAFDPEQPKKSFPNDKGGFKALIKLFQESAVDQVVMEATGGLQNPLAVALARRNIAVAVVNPRQVRNFAKAMGYLAKTDAIDALVILKFAEAVKPEPRPVKSKQAQQLTDLIARQEQLVQMLTAEKNRLHTANKSVRKDIEVHIKWLKRRMKDIDNELRRRIEDSPIWRVKDDLLQSVPGVGPKTSAKLIASLPELGNLNRRQIAALVGVAPFNRDSGSFRGRRTIWGGRAQVRCALYMAVLSATKHNPVIRAFYQRLLEAGKAKKLALAACMRKLIVILNTMMKNQTHWQTTRT

SEQ ID NO: 191433 - protein, 465 aa, unidentified
MKHHRRRRPPKPRVSPSVLERINPNAAGIDCGSAEHFVAVPPDRDPTPVRSFQTFTGDLYRLADWLAACGVTSVAMEATGVYWIPLYEILEARGFQVLLVNARHVKNVPGRKSDVADCEWLRDLHSVGLLRGSFRPTDAIVALRAYLRHRETLVQSAGTHVQRMQKALIQMNLQLPLVVSDITGVTGLRILRDIVAGQRDPQVLAQHRNYRCHASIAEIVGALTGNYRSEHLFVLQQNLELFDIYQQQIAACDAAIEAHLHALTAQAVVPRTPLPSPRPRQKPRDNAPRFELRAPLHQLTGVDLSQIDAIGPYTALRLVSEIGTDMSRWPSEKHFTSWLTLAPKNKVSGGRLLSSQTMPSANRAAAILRLAAMSLGRTQTALGAFYRRLAFRVGKAKAITATARKLAVLVYRCLKDGLVYSDPGAAAYEAQHRTHVLRRLRQRAANLGFGLIDLSTGEVIDGAVS

SEQ ID NO: 191434 - protein, 312 aa, unidentified
MVEHCYGGIDVSKDRLDVQVLPQGRCFSVANTSAGWSQLVDRLRGLSIAALGIEPSGGYERGVIRALLAAGLSVRRINPNKLRQFARARGVLAKNDRLDARLIAEYVAIMPTRVVHRDPAAEQLAAVVTMRRQLSDEHVAVENQAAHIEDAMLRRLNKRRLARLEADILLLDKRMAEIVASNANLARRYDLLTSMRGVGPTLAFTLIALLPELGQMSRKQIAALVGLAPYDFDSGKLKGHRCIYGGRVPVRNVLYMAALSAARYNPALKTFHNRLAAANKKPKVVIVAVMRKMITILNAMLRDNVAWQPKTA

SEQ ID NO: 191435 - protein, 386 aa, unidentified
MENEALGVSIQYVGLDVHKDSIDVATADEGRGAEVRHVGKIGGDLAALDKSLRRLISRGCRLHVVYEAGPCGFVIARHLAAQGIDCTVVAPSSIPRRPGDRVKTDRRDALMLARLARAGELAPVRVPDLRDEAVRDLVRAREDAVREQRNARHRLKALLLRNGIAYAGKAAWTPAHLRWLAALKMPEPAQQIGFQEYLHSITESGARITRLEQALRDQLPGWHLRPHVQALMALRGVQLIAAMTLVAELQDFMRFAHPRQLMAYVGLVPGEHSSGDKRRQGSITKAGNSAARRMLVEIAWQYLHGPRVSPIIARRHDQLPKAITDIAWAAQLRLNAKFKRLLARKVMKTKAVVAVARELTGFVWAIGQQVSTSGWQGVALPEATAP

SEQ ID NO: 191436 - protein, 387 aa, unidentified
MPQPNDLSRSLVALDQDSTLIAVIEMGQASWLVAGIVPGVNRHPLKKIATDQEQLLQVLRRWAKEAETTGRTIKRIAVAYEAGRDGFWLARWLRARGVEAYVIHPSSVPVSREHRRAKTDRLDTELLKRAFLGWLRGEPDHCNMAAIPTLTEEDAKRPGRERESLVGERTRIINRIKGALARLGIREFKPMSRSAPQLLEALRTPEGAALPPNTLAELRRDMARLSFVKQQINEVERARLERLQRAPGERGNAMVHLLTRVVGVGVETADMLVQEIFSRNLRDRKAVARYAGLTGAPDESGKKRRERGLAKSGNARVRRGMLQLAWGFLVHQPDSVLAKWYRARTADARGVTRKTMIVALARKLLIALWRLAATGEVPEGLALRAAA

SEQ ID NO: 191437 - protein, 347 aa, unidentified
MDQIIIGVDTHKSCHIAVAINTQGKRIGTMTIPTTRQGYRSLEAWATGFGPVKAFGIEGTGSYGAGLSRDLQTKGHTVLDVIRPNRQLRYLHGKSDILDAESAAKSVLNGQATALAKTQSGASEMVRHIKIARDSAVKSKSQTMITLKTLIINAPAELRASLDQIRGPITLVRHISALRPGEITSPLASAKAALRALAQRWLALHEEIQIHEAELERLVADKAPKLMKSHGISTLTVAEMLILVGDNPERIRSEAALAKLCGICPIPASSGKTTRMRLNRGGNRQANAAIYRVAIVRMRDDDRTKAYAARRTAEGKTRREIIRCIKRYIVREVYTALCATKSTQFST

SEQ ID NO: 191438 - protein, 402 aa, unidentified
MNCVGIDISKGKSMIAVMRPFGEVVVSPFEVLHTDSELSKLARLLKSLDGETRVVMESTGNYHAPVAWLLHDAGLYVSVVNAKLVHGYGNNDLRRVKTDKKDAVKLANYGLDRWLTLPRYVPEEDTRLLLKNCYRQYRQYSKVQTVLKNNLISLLDTVFPNVNRLFSSPIRGDGSEKWVDFVAEFWHCRCVSEKSEKAFTNKYQRWCKTHGYNFSEAKAHTIHAEASGHIGIMPKSETTKLLVEQAVVQLRATSAALIALKREMLTLAAQLPEYPVVMGMFGVGPTLGPQLIAEIGDVRRFYSKKALVAYAGLDAPPNDSGDVTGRHKSMSKIGASSLRRTLFLVMGIYLQNAPLDEPVYQFMDRKRAEGKPFRVYMMASANKFLRIYYATVKAYLESLEQV

SEQ ID NO: 191439 - protein, 414 aa, unidentified
MDTIYESVAGLDVHQKTIVACVRRIQPQGGVVEQVRTFGTMTGELLQMSDWLAKERVTHVAMESTGVLWKPVWNILDGRFELLLVNPRHIKKVPGRKTDVTDSQWIAHLLQCGLLRSSFVPSRPQRELRELTRQRTQLTREQTRIVNRIHKTLEDANIKLGAVASDIMGKSGKAMLQALVAGERNPTKLAELAKQRLRKKIPQLREALQGRLTEHHVFLLQTLLSHLQYLEREIANFDERIEVGLRPFLDSDQIRRLDDIPGVNRRTIENVVAEMGTDMSRFPDEDHLSSWAGMCPGNEESAGKRTKCRTTKGNSWLRSALMEAAWGASRTKGSYLGAQYRRLAARRGKKRALVAVGHTLLVIFYHMLEAAVPYNDLGPDFFDKLNPEQYRRYLVKRLENLGFDVQLTPKDAAA

SEQ ID NO: 191440 - protein, 423 aa, unidentified
MQKIAQFHQSDKPSPTHLLLAVDVSSRTLDIYSRYHQAGTEFELCESVHNDLSTIHQTLESYQKQACRLGYSGLSMVVEPSGAYEKKLTHAALQKGVDVWMVNPERMYKAGVIHHGDDGKSDPLDGKVLFMMARMGKVSRLVPLPGPWGALRRLGQWMEDATLAAADARIHIGVIRRGLFADWRQSGDLTWGPTGRAIQTLYGFDPWKVTSDSFETYITRMQAHHKGLPRRCLAGIWQQAQSSCQAPLPPRQRQALQGQLDHLWNAWSLHQDRKTHLGQQMVDLVDGLDPSDHWIPPLMSGFTKVARAKILAETGPLERFPHWRALLAYAGLKVRMRASGKYRGQDKITKKGRILLRKHLGQLAWVLSRKDRVLGPYYHRKLAEGMPARKAKVACMRKLVKLLYGAAKSNQQFNPERVYRSAG

SEQ ID NO: 191441 - protein, 424 aa, unidentified
MKVTYQTCCGVDVHKSFLVATIVKTTGGIEPSYQKKRFSTFNNSILEFKQWLLDNHCHDVCMESTGKYWVPVFNLLEDKINVVIANPKWVKAVKGNKDDTKDSKWIGDLFRLGLVKGSYIPCKKVRILREYIRYRYKLVSCRSSEKNRYQNALTVCNVALDSIVSDIFGKSSTSIIDYLLEQSGTSINHEEIASKLLRSLKSKEDAVIESVEGYQMTDAQKYRMRLVRAHMDYITAEINDVDKMIENMISSNPDFENAVQFLCTIPGVKRDSAITIISEIGTDMSQFSSSKRLCCWAGLTPGSNESAGKKKSVRITRAGVYLKPALVQCAHAAVKSDKSPYYKKKYESLVKRRGKKRAIIAIARMILTAIYQMLSIGEQWNPSDLYKIDMPVALVEKQKAKAIKQAKKLLQREGLLPPDEPLAS

SEQ ID NO: 191442 - protein, 313 aa, unidentified
MNTVTIIGIDLGKHCFHLHGQDAQGRMVFRKKLSRSQMLTQPSNFPVCRVVMEACAGAHWIARRLSAMGHEAKLISPQFVKPFVQGNKNDFADAQAICEAASRPNMRFVSPRNESQQTISATHRVREALVRDRTSTTNQIHAFLLEFGISLPKGPAIIKRLPAVLAEHEVALPPRLIAVIERLRAHFKYLDEQIKAVESELSQQLAEDERSQRLLEIPGIGPITASVLAVELGDAHQFANARQFAASIGLVPRQYSTGGKPTLLGISKRGDKNLRRLLVQGARTIMQRIQTRSDGLGEWVRDMLCRRHSNVVA

SEQ ID NO: 191443 - protein, 368 aa, unidentified
MGLDVHAETIAVAIAEPDGEVRSLGTIVNRAESIRKLVKKLGPVEELKACYEAGPTGYVLYWQLAELGVRCEVIAPTLVPMKAGDRVKTDRRDAERLARSYRSGDLTPVWVPNEGSEALRDLVRAREAAKQDQLRARHRLSKFLLRTGQRPAVGVKAWTQAYLTWVKQIHFTQAARESTLLDYLHEVEHVAERVKRLEQAIADAVQVASPQMQEVVRGLQALRGIAQISAVTLVAELGELSRFESARQLMGYSGAVPSEDSSGQRTRRGGITKTGNAHLRRIAIEAAWSYRLRPGVGPALRKRQEGVSEEIKEIAWKAQHRLHKRYTRLSAAGKDQRKIITAVGRELLGFIWAIGIKAEASSRLQIAA

SEQ ID NO: 191444 - protein, 353 aa, unidentified
MDSTKYIGLDVHKETISIAVLNSSGKLVMETIIETKASTLLEFVQGLHGSLQVTFEEGTWAAWLYDLLKPHATKLVVCDPRKNSRQGNKNDQIDARELSDRLYMNKLSSVYHGGAGVRTLKELARSYLTISKDLARVMTRVKAIYRSWGIPCAGKQVYAPRHRAEWLAKITEVGVLRRAEFYYQQLDALRSLRHEVRRELLAESKKHKASKLLCQIPSIGPIRAALLIALIQTPHRFRTKRPLWKYSGFAIETHSGADYRSVKGQLERTKKQVSVRGLNRDCNHDLKNLFKSAATIASVKPGPFQEFYAALVAKGTRPEMARLTLARKIATVVLIVWKKGVSFDAQYLKPQTA

SEQ ID NO: 191445 - protein, 350 aa, unidentified
MQYLGIDWGIRRAAWCALTAAGELTEGTISADEDGLTRLVARLGPDVRGCIEMMSGAAWVRDRLGACGWTIEIADARKVKAIAPLACKTDRVDARVLADLARRDLVPTVWVAPLDDRAIRERLRRRSHLIRLRTSATNRSFGLLTQWGLRRNLTALRKPGALEALAEHGVPEVWRDSIAMLLGVIEDLDRQLAPLERELRPLARRDPRAALLMTIPGVAELLGLTLAAEIGDIARFPSARKLVGYAGLAPRIKQSGQSSRVGRLSKAGPETLRWAAVEAAQQAWRPSNPWHPLYSDIKRRQGKANPAKAAVARKVLIAAWHVLSLQQPFKPSAPRATDPVPASSSIRLAA

SEQ ID NO: 191446 - protein, 348 aa, unidentified
MKTTTVGLDLAKNVFQVHAIDAAGEVTVGRALRRRQVIPFFERLEPCLVGMEACGTSHYWARELSALGHRVKLMPPAYVTPYVKRGKTDAGDAEAICEAVTRPTMRFVAVKSVEQQAVLALHRVRDLLIRQRTQLVNMIRGQLAEFGIVVAKGIQHALRLVERLLDGEALELPELAAKVMITLAAQVRDLQGRLRDLDKDLMAWFRGSAVARRLETIPGIGVITASALAATVTDPHQFTSGRQFAAWLGLTPRAHSSGGKERQGRISKMGDRYLRRLLVSGMTSQLQSVRRHPDRHPWTTGLLHRKPAKLVAVAMANKAARVAWVIMTRGDVYRAPHLATGATQEAPA

SEQ ID NO: 191447 - protein, 367 aa, unidentified
MRKDNTAKKSPAVRKKTRQKLTVGIDLGDRSSRYCILDEQGEMLAEGSVATTKKGFAQVFGSKPRSRVALEVGTHSPWVSRYLAELGHEVIVANPRRVRLITESSRKDDRLDAKTLARLARIDPELLSPIRHRSQQAQADLMVIRARALLVEARTMIVNAVRGLSKSYGERLPSCATGQVREGLAASLSQPLQNALQPLLAEVESVSQRIREYDEQIENMAMNQYPETGLLKQVHGVGALTALTFVLTVEDPHRFRRSRDAGAYFGLRPRRRESGDSRPQLRITKEGDGYVRKLLVQCAHHILGPFGPDSDLRQWGLALAARGGKNAKKRAVVAVARKLAVLLHKLWVTGEGYEPLHVRRDRNAVAA

SEQ ID NO: 191448 - protein, 454 aa, unidentified
MCLEDRPILEQSAAGIDIGSREIFAAVPPDRDPNPVRVFPTFTEDLQELATWLLRCGVTTVAMESTGVYWIPLYDILEQHGIKPCLVNARHMKNVPGRRTDWHECQWLQFLHSVGLLRSAFRPEPEVCAVRTLLRHRSELVQAASQHIQHMHKALTQMNLQIHHVISDLTGVTGLAIVDAILAGERDPVSLAQFRDPRIKATEETMQKSLVGNWRREHLFTLKQSRELYRIYQQQIVACDQEIEGLLNQFTPRVDPIEKPLPPDRKRNRAARKRRKKTGNPDTTFDLRTEAYKLFGVDVTQIPGVETIALPLFGEVGRDLSKWPTGPHFASWLALCPDNDISGGHVLWKGMRKVNNQAGQLFRLAAYSLHHSLTPMGDYLRRMKSKIGPAGATTATAHKIAIVFYTMVKNQVEYDETLWAARDMHRQKHLEARLKRQAKQLGYELIPIGDKPAA

SEQ ID NO: 191449 - protein, 346 aa, unidentified
MEHYVGLDVSLKLTAICVVDRTGKIEREGVVHSDPEAIAAFIKPNAPHVARIGLETGATSTWLWTELNKLGLPVICIDARHAKAALKMQINKSDRNDAVGIARIMQCGWYREVRVKDLDSHAVKALLVSRALLVKIKRDLENQVRGLLKNFGLVIGPAKMNAFALRAARLSEDRPELAAAVTPLLNARVAIEQQIADLDRKVMKLARDNAQVQQFMTAPGIGPVTALCFLATIDDPGRVRRSRNVGAYVGLTTRRYASGEIDWTGRISKCGDKMLRSYLYEAANVLLTRVAKWSALKAWGIRLAKRSGLRKAKVAVARKLAVILHRMWIDGTDFKWSSKETANQTA

SEQ ID NO: 191450 - protein, 317 aa, unidentified
MKKHSMVCAGIDTGKSKLDVALDSETERLQVGNADAGHHALIAWLRRHRVKRVGIEASGGYEQGVVCRLRGEGFTVIVFQPLQVRAYAQFHLQRAKNDRIDAALIAACTAAAKKIHPPPDPRLTALAGQQTLIDQIVDQMARFKTYREACRDAPLRPFWNDEIKRFRGLFRQELKRLVAAIRRHPDLAERLALIASVDGIALRTATAILVRLPEIGSISREQAAALAGVAPYDDESGERIGERHIAGGRERLRKNLYTAALAASFHWNAELIELYQRLTAAGKDHKVALIACTRKLLVFANAVVARGTPWQPRTAAR

SEQ ID NO: 191451 - protein, 317 aa, unidentified
MKRSAPSVNVGIDVGRDRLDVFIHERQLALSYSNDDVGIRALLRRLAYYRLARIVLEATGRREQALVSAALEHQMPVIVVNPVMVRRFAGALGMMAKTDAIDARVIAHFAATIQPCVRAAPDPKARELKDLVVRRRQLLDMRTMEKNRLQIMPKALTERIRRHINALTDDVRELDSLIDSLVGKLAHWRERRELLLSMPGVGAVVAHTLIAELPELGKLNNKQVAALTGVAPFNRDSGLLRGKRRIRGGRRTVRTVLYLGALAAVRFNPVLKAFYARLLAAGKNKKLALTACVRKMVVMLNAMLRDGQNGTLQPDDT

SEQ ID NO: 191452 - protein, 373 aa, unidentified
MLEKMLLTFEFHNTVSGATAMGIVPVYVGLDYHSETIRVCVMDEAGEVLVNRNVANDPAAVVDLVRVNGGLVQAVSIEACCGAADFATALSAMTEWTVRMAHPSGVNRMKQGPDKTDHTDAWHLANLLRVGYLPHVWLADETTRQLRRLVRYRAGLVEQKKDIKLRVLSLLREERIENTSGASTWSKPWMVWIKTAKLGEQSRWVLDQELRRLEQAEKDLAAVDQRMEQATADDPVVAKLQEQPGIGPVTAVTMRAVIGRFDRFLTGKQLSKYCGLSPCNASSGGRQADAGLIASGNDILRPLLMQLAKRLPREAPRWKELHAKLRITKGANVASAALANRWLRWLYHEMNGKSKVQVPEGQPPVTDVKLQAS

SEQ ID NO: 191453 - protein, 325 aa, unidentified
MEKVFIGIDVSKLTLDFYVKSNSLQQHYQIENNVKAIKKLLKPFQNNENTIIAMENTGRYNFALYEFLAENNFSVFVVNPLHLKRSIGLLRGKNDKVDAQRICVFIEKNHMDLELWNPSNIDVQKIALLNTERRHRVKLKSGLLRQIQDLELLKNIADKEIIKLNQQLIKTIEKQIKVIEDKISLLIFSNPELKEQFNRMISIPGVGKVLATLMIIKTKGFSEVKSARKMACFAGVVPFEHRSGSSIYYKPRISTMADKELKKVLHLAALSTIRLKNDMAAYFNRKVNEGKNKMSVLNAIRNKIIHRIYAVIKNKSVYENCFVMS

SEQ ID NO: 191454 - protein, 375 aa, unidentified
MSDHSEAFIGFDTSKLRNAVAIAEGVRGGEVRFLGEFENSAAATAKLVKKLAAKYQRLTFCYEAGPTGYGLYRQIKKLGPECIVVAPSLIPKKPGDRVKTNRRDALSLAKLLRAGELTAVWVPDRGHEAMRDLTRARETAMMDLRSKRQQVSAFLLRQGLHYSERKKTWTKTHMNWLASQKLEYAEQRLVFEEMMLAVRQAQERLERLEQAIRVAVPDWSLAEVVTALMAMRGIDLISAATFLAEIGDLSRFQHPSELMGYLGLVPSEDSTGDKIKRGPITKAGNRRARRILVECAWSYQHPPRVGQDKQEKVAAAPRAVREIAWKAQCRLHGRYRALVRRGKLKTVAVTAVARELAGFIWAVSRAITTARVVAK

SEQ ID NO: 191455 - protein, 435 aa, unidentified
MKQNLTKVHSRAAGIDVGSKNYYVSADEGEVRVFPTFTADCRELRDYLLSKGVTTVAMESTGVYWINLYGVLEEVGIEVYLVNGRDVKNVPGRKSDVKDCQWLQQLHSYGLLRKSFIPEAGIRKVRSYLRLRQDHIRGAATQVHLMQKALTQMNIRLADVLNDITGASGLRILEAMLSGERDAGRLTELCVSQIKDKKRELVYKSLEGDYQEEHLFGLQQAFATWKHYNSLIEACDKAVEKQLAAMTEGKPRIESPAKRKPIRYHRPQIEELHQPLLQLTEGRDPIGIPGLTDYSFLQIVSEVGTDMSAWPTEKHFTSWLKVAPMRSSSGKMVKRVTLKRHNKAGQLFRNLAQGILTSKHLALGVFGRNIRARRGSAVAIKAIARKIACYYYRVMTKGGDFVDQGIAAYEQQLRERKQKYLEKMASKLNLQLVPA

SEQ ID NO: 191456 - protein, 375 aa, unidentified
MDIIYIGVDFHARQQTICYLTTETGEIVSCELKHSDQTAVRAFYAQFQGRVIVGLEASGYSPWFERLLEQLGCEVWLGHATEIRRRARWRQKNDRRDAELILDLMLHDEFPRLHRPAVQSREVLRMLRYRQKLTKLRTMSKNSLQSLALQAGLAKRSQLFTKDGLQQLRAAEMSPVMQWQCEHWLQLLQPLNQQLLETMVWFKAQSRGDVCVTRLRTHPGIGLLTSLSLVHTLQPVSRFRNSRKVAAYAGFDPVERSSAERKCFLGISKAGSRLLRYLLVEATHTAVRKDEDLKRFYQRLAERRGRPKAKVAAARKLLIRAYIMLRDEIDYAEFRRRAVAARLARASRRPNMPESLIGQPASAEGQELTHSPQSK

SEQ ID NO: 191457 - protein, 360 aa, unidentified
MATMPEDEVFVTVGVDTHKDIHVAVALDQLGRFLDAIEIPTTSAGYAELLAWASELGTVDRVGIEGTGSHGAGLCRWLTAHGLVVVEVDRPDRRTRRTKGKSDTIDAESAARKVLSGEATAIPKTQDGNVEKIRILRLTRRSAVIAQGQASNQIHALIATAPDELRDQLRELTTRKRVAVAAKFRPDRQADSLLATTKHALKILARRFRDLDAEIKQLDRQLDHLVQATAPRLVARHGIGTHTAATLLVTAGDNPERLRSEGSFAALTGSSPLEASSGPRKRHRLNRGGDRDANAALHMIAVNRLANGDQRTRAYVRKRTGSDKADLDTLRRIKRYIAREVFPELRDAITHHPDAVPKAA

SEQ ID NO: 191458 - protein, 343 aa, unidentified
MHIASIGIDLGKTTFHLVALGERNKILLRKKLSRAQLLAYTANLPLSLVGLEACSGAHFLGARLREQGHDVRLIPAQFIKPYRKSNKNDFIDAEAIAEAVGKENMRFVPIKSEEQLDVQAMHRVRDRLVQRRTALINEIRGFLLERGMTFAVRPTQLRKKLPDVIEDAEQNLSSRLRWLLERLWLEWKQVDHDIQTVTEEIERLSEANALCRRLRQIPGFGPLVSSATVAAIGNGAAFRRGRDFAAWVGIVPKQYSTGGKQKLLGISKRGNIYLRRMLIHGARAVLFRIKYDTAGFGQWVQRLAQRAPRNKVVVAIANKLARMAWAVLSSGRDYRHQPLQVAA

SEQ ID NO: 191459 - protein, 316 aa, unidentified
MRKNTGVCAGIDTGKRRLDAAVHGWGGTFAIDNTADGHAALSAFLRQHRVKRVGIEASGGYERDVVLALRRDGFKVIVFQPAQVRAFAKFSGQRAKNDKIDARLIAACTAAAKTIHAPPDPRLLKLADHLTVIEQIGEDIARYKTRRETCRDQRLRDLWSAQIARLETMLDAELKALAAAIRQHRDLATRLDLIASIDGIGERTAIAIVVRMPEIGRLSREQAAALAGLAPYDDDSGEHHGQRRIDGGRERLRTSLYAAALPAAFRWNAQLVAMYKRLIAAGKPHKLALVACARKLLIFANTVVARGTPWRSEPAH

SEQ ID NO: 191460 - protein, 351 aa, unidentified
MNYVGIDIHKRYSVLVALDERGRELKRCRINGNTAFGFDQFFSGLDGKSKVVVEACWNWGRIYDLLGENEQVEEVVLAHPLKTRLIADAQIKTDGLDAHGLATLLRGDLVARAYVPSKPTRQRKEVLRQRLYWARLRTRVRNRIHALIDRQGELSMPQCSDLFGRKGLNALNKLCLNEPDATLLREELALLELIQSQIKAQEARIVEFNSKDETTLRLQSIPGMGKILAAVAAVEIDCVERFSSAAKLCAYAGLVPRTHASGGRVYQGPLVKSRNKWLQWAFIEAAWVAIGCSAYFGGLYRQHRARGKNANIAITSIARRMCQISFTLLKERRDFIEAFPGRSAVRLTAAA

SEQ ID NO: 191461 - protein, 478 aa, unidentified
MPARKKNASKDGAPGAPGQPGGAGAEVAEERVEVVTYAAAIDVAKGSGMVCTRVPGSRADRKRQTVWQVDAAYHAVIALMDHLRCQGIQRLVLESTSDYWRIWYYLAEAAGLEVWLVNARDVKHLPGRGKSDREDCVWLCKLNERGMLRRSFVPPQAVRDLRSLTRTRSRLAQDQARHQSRVEKILEDALLKISVVISDLFGASGRRFLDALVAGERSPQALAALGDPRLKATRPELADALTGRFRDVHAFEIGVHLRLIDAINDEIARVDARIEQQLASVPRTAPACPGCGLIGGGHSPGCASDGTPVLGLVQRLDEMTGVGVRNAQVFIAELGTGTSVFPTPGHAAAWARLTPRNLQSGTSDRPGSTGKGNPYLRGALGQCVMAAAKTDTRLGEQYRRLARRRGKQKAIVAVSRVICEIAWILICDPGARFTDPGPGSYTLRSPARQTRSKIREIERLNPGMKVTLTPIDPATTAA

SEQ ID NO: 191462 - protein, 287 aa, unidentified
MKEFSSCIGIDISKDTFHVCVKQLVGEQVSIKGTHSFENSYVGFTEFLRWALTKTKNSETLYVMEATGIYHEELTHFLYSNTKTVAVVLANKIKHFAKSLNIKTKNDKADASMIAHYGLERCPEPWEPMMLQMKSLRDLCRERLSLKQNIVALKCQLHALDHAHGTLEFVFQMKQKQVKFMEINIQEIEQEIKRITMEDNDFYERVKKIETIKGLQLITIVTILSETNGFAQFNNIRQVVSYAGLDVAERQSGLFKGKTRISKKGNSRIRQCLYMPALSATNQLIVF

SEQ ID NO: 191463 - protein, 400 aa, unidentified
MLSIGIDVSKGKSTVCGMKPGGEIVYAPFEVQHTREGMSELVSLLRSSGEEVRAVLESTGSYHCPVVAALLENGIFVSVVNSLRMKRFCSQSIRKVKTDRIDAMQIALYGLAYWQELQPARLPEDTYRELQLLARQYYQMTSMLIKAKVDFNALCDQVLPGMQELMNDHAGRHKLSDFVLRYRHTTHILEMGETRFRKDYCKWAEKKGYRNCERMAVLIFATAQNGIPVLPNAPSTQIVITEAIRVLHTVEASRDAILTQMQALAKTLPEYSLVREMPCIGDTLAPRLIAEIGDVRRFHSKRALIAYAGIDAPPYQSGKFCANNRHISKRGNRYLRKTGYEVMQSYVMHKPANDPIFTFIEKKRGEGKSGKLAMVAGLNKFLRVYYGKVTELYRSLPAIE

SEQ ID NO: 191464 - protein, 323 aa, unidentified
MNKDIKYFGIDISHLVFDVTDSDGNYYQFKNTTSGFKKFVKLLDTDIHCVMEATGYYHYRLAYFLLESGIKVSVENPLAVKRFIQMKLSKIKTDKSDSKLICEYARQVELKLWKGNSKHQTECLQMTRLLSLYTKQSTMLKNKLHGEAVLGNPSKGVVSSLKRSLRHIQKEMKTLEEKLLILVKQAHQDVLTRLKTIPGIGNKTAVMLVVLTDGFDRFTSASELCSYAGLTPVIRQSGSSVKGRPRISKIGNQKLRNLLFMCSFNACKYNKACRDLYDRIVAKGKSKKLALIAVCNKLLKQAFAIAKSGLIYDDSYRSTLVKN

SEQ ID NO: 191465 - protein, 397 aa, unidentified
MSAVVGIDVGAYKHAAAVCRPGEREAERGVFRLSADRTGFDELDRWLKRQGPVERVVLESSGHYYWPLASHLYRRGYRVAVVNPLQAKYFAKSRLQRSKSDPADARTLAALGMSEEPRVKDPLLGVEAKEAARFWGGLVKEQAQIRNKLLRLVEIGFPELKECFEDPLCETALAVLREAPTARAASHKRVSTLAETSRPGGRRRLGAGKARRLHELAKQTIAPPELDAQMSFEVGMLIQQFDLLDKQIEIAEQRVAEVLDSELARRLQTIPGVGPALAATFIGEIGDIWRFEDFDQLASYAGVHPKELSSGTKGQNPETSWHMAKTGNAYLRSAAYKMAVVGTQHNTVIRAHYLRKRAQGKSAMNAIGHCMSKALAIVWGVWRSGLEFDPTLGGPRG

SEQ ID NO: 191466 - protein, 341 aa, unidentified
MKHYAGLDVSVKETSLCIVDEAGRICREMKVVSHPEDLLAVLCDPAWRLGLEAGPLSQWLFSGLAEAGVPAICIETRHAKAFLKAQVNKSDRNDARGIAQLMRVGLFQPVHVKTLASQKRRALLAARKILQEKALAIENDIRGLLRNFGLKVGIVGVVGFEQRIHDLVEGVPELADIMEPLLAARRVLREKFAKLHRKVLLLARDNEVCQRLMTIPGVGPVVSLAFISTVDVPARFRNSKAVGPSLGLTPVLNQSGESHRVGRISLCGDEAMRALLYEAAQVMLTRVQKWSWLKAWAMNIAKRRGQKKAIVALARRLAVIMHRMWSDGTEFRWTREMAPTI

SEQ ID NO: 191467 - protein, 366 aa, unidentified
MKKTSTVRVKGNMIFKGHKLTIGLDLGDRWSFYCVLDEAGQIILEQKLPTTPEAMKQTFGKIQRSLIALETGTHSPWISRLLRELGHEVLVAHAQKVQLISKSNRKDDRHDARTLARLARIDPELLGPVRHRSAKAQIHLTVIRARAELVSARTALVNAARGLAKSYGERLRKCGTQQVSRELAAELSVELREVLEPLLQEVESLNERIQQYDARMEKIARESYPQVERLKQVKGVGTQIALTFVLTLEDPHRFPKSRDVGCFLGLRPGRRDSGTSQPQMHISKEGDPYLRTMLVQGAHYILGPFGGDSDLRRWGLKLAARGGKNAKKRAVIAVARKLAVLLHRLWVGGEVYEPLRNSHQAMGAVA

SEQ ID NO: 191468 - protein, 406 aa, unidentified
MSRQTKRGPGPSSTLITLDQAGNVVGIDPHKRTLTATIVDPRGGLVASEHFRVSGDGHRALEAWALQFGPIVRVGVEGASAWGRHTAIFLIGRGYDVRDVCPNRTAQHDRARQRGKSDTLDSERIARETLAHPLLPKAFKRAGQDAGPDPQTELLAVWWTARCSVIKRRQHLLSESEALLRELPLELIERLPNAQRVRPRLAALPRVTARRRLAPPAAVRVRILAGYREEIANLDAQERQITRQLAELVSQSGSTLGELCGLSTVSVAELLVEVGDPRRFTEGGFARFNASAPLAASTAEGPGEPVRHRYNPGGNRRVNAILHRMAVTQLRCDPRAKKIYADARANGQHTKKEARRILKRHLSDVIHRRMIRDLAALPAQPLLAAQPRAAAAQSRVARQGRAKRAA

SEQ ID NO: 191469 - protein, 341 aa, unidentified
MKNLFIGVDFSKEKVDVAIIFADGLTETAPRVFNEFKTTVSGYKQLVKWVEQNSYGIDSSLWLFCGENTGDYSKGLCNFLYGKGYDMWLENAKSIKDASGLRRLKSDRADASMIAEYAMRNYDKAVMYEPLSESLAQLRELFLYRQMVVRHRCSFQVRRGEKRLTMEKSPIKTMISQSGRHIVSELNKEVEKIDKRITELIKSDEELTEVFTIVTSVPGIGTQNAVCLMVYTDNFRRFNYDSRKIACYYGIAPFGKDSGTSVHSDPHVHYMANRQIKAMLTQAALAAVNFNPIMARYYMRLVERGKKKQVALNNVKNKLVHLITAMVRNRQLFSPEYKISA

SEQ ID NO: 191470 - protein, 344 aa, unidentified
MIYVGMDISSKSFMVHAVNSKNKPVFKGEIKPTRQGLREMVKALGEQTKLIVFEAGNQLKWVALELKRMQGVHLHVVHPNEIKWINKSSAKTDKIDARKLAQLARGDMLPRKVHIVEGTVRQLRELISARHTLQSKRVALINSIRGCLKQEGYRLPEKFFGSGDWRMRLKRMRVGDTQKFILASYMTSIESLMAAESELTRKIIAIEHDQIYRLQSIPGIGALTSRVVLSAVDDVKRFESKKSLAKYGALTPRIYQSGGVTHLGRISRDGRHEVRRVLLQCAHTVARMKSYEARPLRMFFERVRQRRGKKIAIVALARKLLTIAYGVLRTETMYDPSVLTPEIV

SEQ ID NO: 191471 - protein, 355 aa, unidentified
MAQVRQLDFSGQKIFCGIDVHKKSWKVCIRSEHMELKTFSQNPSASELTRHLKTNYPSADYKVGYEAGFCGFNPQREFTEAGINCIVVHPADVPTTDKEKQRKSDVVDCRKLSATLNDGKLTGIYIPSIEQQDDRGVIRAYQQFIKDQTRCKNRIKGWLNFQGISIPGDDEHRYWSKNFIKWLKELSLTPSARISLDLLIQSYEQARIIVLAATKQTRLLSKQHRHQDKIKLVRSIPGIGAIGGLLFTTEIGDINRFKKFDSLCDYIGLVPNVNGSGDRVTVLGLTHRCHHALRETLIEASWTAIRLDPALTMAFNEYIKTMKKNKAIIKIARKMLSRIRFVMKNQTPYVTGVVE

SEQ ID NO: 191472 - protein, 402 aa, unidentified
MAYDCVIGMDVGKYFHHACVLDPQGRQVLSKRINQHEGSLRKLFGTYLADNAEVLVVVDQPNNIGRLTVAVAQAMGADVRYLPGLAMRQLSRIHVGNSKTDVRDAYVIAHAGLNLPDALRSVDRVEEVFLQLKVLNGIDEDLARAYTRLINQMRSALVGTYPAFEHVLHGQMIHRKWILHLLAKYGGPTKIRRVGKARLAAFARSHRARNPEPVIDAMLAAIEGQSVTIAGAEYAELGVAMSAKDALAKLEHRKEIEAQVLELIQDIPQTEILLSMPGVGPRSAAQILMTVGDMSDFPDAAHLASYAGLSPRTNQSGTSIMSNSPNRAGNKKLKNALWQSSFASIRFHERSRQFYERKRKEGKRHNAAVVALARRRLNVLFAMMRSGELYRDISTVQEAAAA

SEQ ID NO: 191473 - protein, 318 aa, unidentified
MNTNTKQSINVGVDTGKTQLDIYIRPIDHFFTVENNEKGIEKAIKVIQQYHPERVVIEATGRLEMPFVLACSEHSLPIVRANPIHVKRFAGAIGRRAKNDRLDAQLIAHYAEAIKPTTLNIKPKNIRLMSDLVIRRNQLMGMQTMEKNRLQILPQSLHSTIKPLLTALKNQITKIEQKLEKLIEESPEYQSKNIILQSVPGVGPIAAASIISNVPELGYITNKQAASLIGVAPITKESGRYKGKRAIQGGRAQVRTVLYMAMMSAMQCNPVFKTTYERLLAAGKPKKVAIIACARKMVVILNSMLRDGVMWDKNLVKN

SEQ ID NO: 191474 - protein, 347 aa, unidentified
MKVLIGVDPHKASLAVAAVDEATGELLERARFPQNRAGLSSLERWARRFAERRWAVENAGGLGRHLAGRLAGSGESVVDVPPKLSARVRVLSTGNARKNDGVDALAIALAASRNERLAAVDPEVGSEALRLLSERREDLVAERTRALNRLHGLLRDLVPGGVAGKLSADRAARILRGIRPKEGASARLRRQLASEVLRDVRTLNRKIADLNERIEAEVQASGTTLTQIFGVGPILAATIIGAVGNVGRFPSKGHFASYSGTAPLEASSGDVVRHRLSLAGNRKLNYALHMVAVCQARSEVRGGAYYRKKVAEGKSNKEALRCLKRRISDAVFRSLVADSQASSSSAA

SEQ ID NO: 191475 - protein, 403 aa, unidentified
MSTFFAGLDWASRTHAVCVIDERGTVCERLDIAHDAAGLRQLQRRLIHFDRPPVAIERPSGMVVDTLLEAGFTVVPIHPNAVKATRPRYRSHGAKTDATDAYLLADLLRTDGHRFKPLAPQSDAIRALRGLVRGRDDLVATRVQLANQLRSLLESFWPGAAEVFADVDSPIALAFIERYPTPESASRLGPKRIAAFCAQHAYCGRRSAEDLLARLPQAPAAVCGELEMHAKGALACSLAKTLARLVEQIRLLSSRIEHHVAGTDDGRILMSFPRAGRLCAAQILAELGSVRERFGSDEQLAAEAGVAPVTYQSGKSKAVAFRWACNHRLRAALTCLADNSRHASAWAASVYAKARARGCDHPHAVRILSRAWVRIIWRAWTDRKPYDPAHHGAAQLLLKTAAG

SEQ ID NO: 191476 - protein, 411 aa, unidentified
MDVFCGTDWAEDHHDIALVDRDGRLLARRRISDDAAGLAQMLALLAEHGDSAEDPIPVAIETPRGLLVACLRATGRQVYPINPMAVARYRDRHSVAGRKSDHGDAVVLANVLRTDMHAHRPLPADTELAQAIAVLARAQQDAVWDRTTAHNRLRSHLREYFPGFLAAYDGTRGGITRPEARAVLAAAPTPADAAKLTLTQLRGLLKKAGRSRGLDTEAARLRGAFRTPQMRQPPLVEHAMGRQALALLGQLDAACAAAGDLEHAVTESFNLHPDAGIITSFPGLGALTGARVLAEIGDDRSRFQDAKGLKAYAGAAPITRASGKTKSVTHRRVKNNRLNAAGYIWAFAALTASPGARTHYDHRRDAGDRHAAAQRNLFGRLLGCLHHCLITGQHYDEATAFPASTKLPAAA

SEQ ID NO: 191477 - protein, 382 aa, unidentified
MSQTASRWDSTARGSGLFMALELGWSKWRLAFGSAMDQKAWQMTIAARDVMALTRAIGKARQRLGLPSDCPVFSCYEAGRDGFWIHRLLLKMQIHNIVVDSSSIEVARRARRAKTDRLDAAKLLSMLQRHHAGEKKLWSIVHVPTPEQEDGRHLQRQIRTLKKEQTRQLNRIRGLLANQGVAVRANRGGLLEPLDSIRIWDGSPLPVGLRRRLEVEIARHAFIHRQLLDLELERDARIRQSQDRAAQIARHLMRLRGIAQVGAETYSREFSWRGFTNRRQVGSLIGLTPTPHQSGDSSREQGISHAGNRHMRGIAIDLAWLWLRQQPHSELTLWFNRRFAHASPRLRKIGIVALARKLTIALWRYADFAEIPKGALLKSDAA

SEQ ID NO: 191478 - protein, 294 aa, unidentified
MIYQDQSDRLEAIPNTKASISKWLRTLAGTVSIAVEATNTYHVLFADMAYEAGCTIYMIDGYQLSHYRKGVNVRAKTDALDARLLARYLKKEADELHPWVPPCPLYRQLLSLFRRRAALVQARTGLVQSWSNEPLLKTAFAAQINSMKRLEALVEKKIKDVLQRAELMGQVSRCMKVEGIGFLTAARLVTTFQRGEFSNANAFIAFLGLDLRVSKSGQSDGPRRLTKRGDPEARRLLHNAAMSGSRTAAWKPFYEEQRKRGFSTTQALVMLARKMARVVFALLKTQSEYQSKAA

SEQ ID NO: 191479 - protein, 430 aa, unidentified
MNSNTQNKKIKAITEKTLVIGIDVGSEIHYARAFDFRGYELSKKPFKFSNNETGFEMFHAWILELKERHEMDKVVPGMEPTGHYWFNLGKFLQDNDMKPVLVNPHHVKKSKELDDNNPTKNDRKDPKTIAGLVKDGRYMIPYLPEGVYAELRTASNIRFQLQSELTRIQNRINRWFSIYFPEYKNVYGRSDAISGMMILKVAPLPEDILTLGIDGIIKIWRDAKVRAVGEKRAKSLLSAAEHSVGNKEGRVTARMEIQMLLEDYESKRERMQEIMDLIEALVNEIPMAEKLLEIKGVGLKTVSGFLAEVGDVSRFKSPKELQKLAGLAIVENSSGKHKGKTTISRRGRKRLRYLLFEAAMSLVAKNPEFKGLHRYYTTRKQNPLKKMQSLMAVAAKLIRIFYVMLTKNVAYDPEKMVSDIKRPTEYLQAA

SEQ ID NO: 191480 - protein, 391 aa, unidentified
MISVGIDVSKDKHDCFIVNSEGEVLADVFTIPNTMDGFHRLLQRIRDCTNAHDTIKVGLEATGHYSYNLLGFLLDNGLATYVLNPLRTNLYRKSLSLRKTKTDRVDARTIAAMLLSDVGLKPYTDTAYHNEELKSLTRYRFDKVKERAKLKSSISRLICILFPELEKLVSSLHTASVYTLLEEFPGAKQVAGAHLTRLRSLLETASKGHYKRDMALEIRDAARNSIGSWMPAKSLELQHTIRLIRELDTEIAEIEEQIQSLMDGLNSPITTIPGMGFRMAAMILAEVGDFSRFDSPDKLLAYAGMSPSTYQSGQLKNCYPHMEKRGSRYLRYALYNATKYVCHWDPAFAAYLAKKRAEGKHYNIALSHATKKLVRLIFALEKSGTPYRSVV

SEQ ID NO: 191481 - protein, 420 aa, unidentified
MQIIYRRCAGLDVHEKSVSACIRIVKGKQVETVEATFPTFTEDLEQLRDWLIRNRIQRVAMESTGVYWRPVWNILERQPAKLDLLLLNPQHVKALPGHKTDRVDAARIAELTQYGLVRASFVPPREIRELRDLVRRRVHLQQDRSRVSSRIHRLLELQNIKISSVLKKMTSATARSILEGLATATTIKPEALALLATHKKVRGKREQLKKALRCHRTDHFRFLLRELLEELDRLTAKMKLMEERIGGRMAPYSELIERLCGIPGVKELTAWTLIAEIGVDMARFPTAGHLASWCGLCPGNADSGGKRRSGRTSKGNRYIRRALLQAAWGVERITSRRTFLTSFFFRVSRKAGRRKAAVAVAHKILTLAYVMIRDGSAYYEQGVDYFDKVHPERTKKRLTARLEQLGFTVRLEPKLSPETS

SEQ ID NO: 191482 - protein, 377 aa, unidentified
MDKDSRFVGLDVHAETIAVGVAEPGGEVRSLGTIPNTPEAVRRLVKKLGPPETLRVCYEAGPTGYVLYRQLSALGVPCAVIAPTLVPVKAGDRVKTDRRDAEKLARSYRSGDLTPVWVPDPGHEALRDLVRAREAAKKDQLRARHRLGKFLLRQGRRAPTGSKAWGVKHRAWLQTIRFAHAAQDATLLDYRTEIDHAADRIARLERAIATAADLTPAPVRAVIAGLQALRGIAKLSAVSIVTEVGLLSRFAKPRQLMGYSGAVASEHSSGPHRRRGGITKTGNAHLRRIVIEAAWAYRHRPAIGGTLRTRQEGLSEEVKALAWKAQHRLHGRYARLLAKGKAPTQVVTAIARELLGFIWAIGVHIEHHTAGGAPAAA

SEQ ID NO: 191483 - protein, 343 aa, unidentified
MDVGVLGIDLGKNSCSVVGLDPTGRVVLRRRMRRESIVGLAAKLSGCVVAMEACCGAHHLGRLLAAQGHEVRLMSPEYVRPYVKAQKNDDRDAEAIAEAATRPTMRFVALKTEAQLDVQVLHRVRDRLVGQRTALTNQVRSILLERGIVVPQGRRRLLEALQVLSDQPDGSGVGPRVRLLLDDMLDQWRGLDRRISALDDEFAAMARNDPAARRLATIPGVGVLNATALVAAIGDGRTFSRGRDLSAWLGLVPRQASTGGRPKLLGITKRGSKYLRKLIIQGARAALPSLSRTTTPLGSWLRGLLSRAHGNTAVVALASKLVRIAWALLRNETAFAAGGLAAA

SEQ ID NO: 191484 - protein, 416 aa, unidentified
MNAVGIDVSSRKSTVAVLRPLGEVVCLPFDVTHDIAGLASLVEKLKALDGETRVVMEHTGRYYEAVAKALHEAGLFVCAVNPLLIKEYGANSLRRVKTDKADAVKIARYALDNWADLRDFTPMDAIRYDLKTLNRQFQLASKQRTASANNLIALLEQSFPGIRKCFDSPVRSDGTQKWVDFAHSFWHVDCVRKQPFPAFCERYRKWCKLHAYFFKLRNAEKVYALAKSAIVLTPKSKVVKVLVQEAANQLISISRSVEVYRAEMDRLAAMLPEYPVVMAMYGVGKSYGPQLMAEIGDVRRFERKQALVAFAGIDPMPNQSGDKNVRSNKSSKRGSPYLRKTLFNVIRTYLQCAPQDEPVFQFLNRKQAEGKPFYVYMLAAANKFLRRYYAKLRDYFASLDTLQPVAPIPTILKATL

SEQ ID NO: 191485 - protein, 412 aa, unidentified
MDVYCGIDWAEDHHDIALVGQDGKLLARRRISDDAAGLAALLALLAEHGDSPGELIPVAIETPRGLLVACLRATGRLVYPINPMAVARYRDRHSVAGKKSDHGDSVVLAGVLRTDLHAHRPLPADTELAQAIAVLARAQQDAVWDRTTAHNKLRSHLREYYPGFLAAYATAKGGIMRPDARAVLAAAPTPADAARLTLTQLRALLRKAGRSRGIDTEATRLRDAFRTEQMRQLPLVEAAMGRQALALLGQLDAACTAASDLERAVTESFNLHPDAGIITSFPGLGALTGARVLAEIGDDRSRFQDAKGLKAYAGAAPVTRASGKTRSVTHRKIKNNRLAAAGYTWAFSALTASPGARAHYDRRRDAGDRHAAAQRNLFSRMLGCLHHCLTTGQHYDEATAFPNATRKSRQAA

SEQ ID NO: 191486 - protein, 370 aa, unidentified
MSVRRILAKTIDTDLEYEAIGIDLAKNCVSAALLTTDGEVVCIDRLDYSELEKSAQALSSTTFAMEPCTEMNYLVQKLEAWGHRCLVIGGKNVQNYVENHFSGQKTDLNDAQALAFLAQDTQLRTIKAKDVEQQKYASLTTLREQYIKQYRQTIVSLKGICQAWGLNISKGISGKARLKDLIENHAAFPEELKESLVDMVTHAQTAQKALNKITKTLEELAKSDKVCQLIQTIPGLGSICSCRLRATVGDIKRFKSPKDFPAYYGLVPRSIATGHNERKGKITHRGDRTMRSLMVQAAGSLVNMATKGKLKSKQLTKWILKKQKEKMPWGKLVCAVAAKLLRIVRAILISSKPYNPKIAGVAKCSLPKGS

SEQ ID NO: 191487 - protein, 390 aa, unidentified
MYIVGIDIGKRNHEASIMNAAGKQYGKPIRFANSHTGFNKLMDWVKNISGADDVVFGMEATGHYWLALYTHLCHEGYAVHVINAVQSDALRGMYIRQAKNDSRDSFIIAEVIRFGRFCETAVSAPELHALRELCRHRFWIVDSVSDLKRKVIALLDQVFPEYENLFTNTFGKTSLQLLSEYTTPEELLAVDTDKLAETIYTASRGHHGIEKAQEIQNTARNSFGILLASDSIALLIRQYIEQIRFVEKQVDRIDTEIARLLSAFDNQLTTITGIGPTLAATILSEIGDIRKFASPGKLAAFAGIDPTMKQSGNFVGSHVHMSKRGSPYLRRAIWLAATIAAFKDPSISVYYQRKRSEGKSHLTALGHVSRKMVNIIFAVLRDNTPYSPAI

SEQ ID NO: 191488 - protein, 360 aa, unidentified
MLYLAIDQHRKQLTVNLRNEQGDVVLRRQVSTEWPRVRSFLEEVRELSVPEGGVVVILEVCGFNDWLLKLLAGYGCRETILIQPEKRSKKKTDRRDAYALGELLWVNRQRLLAGKKVQGIRRIQLPTEMEAEDRQLTAVRQRLGRQRTRTINRIKHLLRKHNLEQQQPAKGLDTQRTRKWLATLPLGAIDRLEMDHLLAQWKLWDEQTAKLELEIEKRQAKNATAAVLATIPGCAAYGSLALASRIGSIERFARPASLANYWGLTPGCRNSGEVTDRLGSITKQGSAMARFVLGHMVLHVLRRDGRMKAWHGRIKRRRGSKIARVAVMRRLATIIWHMVKHNEPYVVGGPPQRKLSSQAA

SEQ ID NO: 191489 - protein, 348 aa, unidentified
MYIGVDTHKTQHVLVALDAQGRSLGTRTCANTPEGWANGLAWARSWESRVWGIENSGSLGKGFAQSLLVQGEGTVHEVSPHRTAQYRRRGRTQDKTDETDALAIARLLLAEGDTLPEVQRDDLSTELRLLSDHRDNLLAEKTRLINQLHGQMLQVDPSYKEKSGRLTDTRGVTYCRSLALPPDDRLVRTRLLIVHQLAEQILRLDAEVAAVAVELTARVQESQTPILALRGVGVVVAARIIGEIGVAPRIRSAAALAALAGISPVAVSSGGQGGYRLNRGGNRQLNRAIHVIALTQRRCDPRGRAYYMKKRAEGKTPRAALRCLKRRLVDVLFRAFSQHMEPRLGVAA

SEQ ID NO: 191490 - protein, 373 aa, unidentified
MNTIYIGVDFHARQQTICYLTTETGELVTTALKHEPKTAVRTFYEQFSGQVIVGLEASGYSPWFERLLEELGHQVWLGDATEIRRRARWRQKNDRRDAELILDLMLHDEFPRLHRPSLQSREVMRMLRYRQKLIKMRTMSKNSLQSLALQSGIARRGRLFTREGKAELDAAVMSPAMEWQRAHWWQLLEPLNQQVSEAMTWLKAASQNDVSIARLRTHPGIGLLTSLCLVHTLQPVARFRNTRKVAAYAGFDPLERSSAERKHFLGISKAGSRVLRYLLVEAANIAVRKDEELKRFYQRLAQRRGRPKAKVAAARKLLIRAYIMMRDEIDYAEFRRRAVAARLARLRQGPQIPAALIGQPASTGRQEPPARGK

SEQ ID NO: 191491 - protein, 362 aa, unidentified
MPKMIWLGMDVHAASITVARYEDQAATAMVQTIANDPAQVRRLVRRLPAGCDVRACYEAGSCGYGLHRQLTALGVHCDVIAPALIPRRPGERIKTDRRDAEKLGRFHRSGELTTITVPTPSQEAVRDLVRAREDVRRDRTAARQRLAKFLLRHGHRYPGSHWTKRHWEWVCGRPFEGAARTVFVHYCDHVLALNERLAHLEREIHTFADSPVYQPVVARLSCLRGLATLSALMLIAELYDLRRFRTPRELMAYLGLVPSEHSSGARERRGRITKTGNALARRLLIEAAWAYRHPARQTRRVQQALTTQPPEVHAISDRALHRLTARYRRLLSRGKTPHHAVTAIARELCGFVWAIALVPDLA

SEQ ID NO: 191492 - protein, 482 aa, unidentified
MIGLDLGVTSAHSAVVLDVTGQVLARRRVVSTVDSLAELEQAALRGAPEQTQLTVVIEPTGPMWLPIAVYFGRRGHTVLRVSSAKAADLRRFLSRHAKSNGIDAETLARLPMVAPAGLHPVELSGAQRASLDRRVRTVARLTREIGQRKVRIRALAQTLIPTIGDALGDGLNRTDLAVLERYADPRALLGAGRTRLLRLVRTESRGKLGDDKVRALRTAAEQALQLWGDDPAIALSDLAEEITTEIRLLRLAETERTRHEAARDTALAGVDPQGVATSLPGLGPVGATQLLAAMGRPGRFRNAAAFKSFTGLAPKASETGNTDRKSQPMSKAGNSALRSQLIQSANTARQLDPQLAAIYYAQMTQRGAPHLKALCVVAARLAERAWLTLSKAEPYIIRDLQGRPISPQRARELIAEQFTVPADVRRRRRSNKLAGRAPQQCSGHAKSRHTAGHEATLPPNTLTPPNPAVNPTQHTALTPTPA

SEQ ID NO: 191493 - protein, 386 aa, unidentified
MIYIGIDISKYKHDCFICKDTGEIIVENLSFENTKKGFQQFLDLLKPYDKYNVHIGLEATGHYGLNLKLFLEKNNYSFMEFNPLLVKEFKKSLSLRRTKTDKVDAIVICQKLMSVPYQPNSKLFYHKYSIKSLSRLRETLVKQRSKYMVQLTNILDIVFPEFKSFFNNRFSATSIYLLNKYGNAEKIANMRDFDTPNKLSKGHFTYAKFAKLKELAKNTIGESNEVFEIELQTLISLYNEIDSKINSIDKQISTIIKELNPPTLSIPGIGELTTAVIISEYGDFNKFPNADKLLSFAGLEPGIYQSGTILANGKMVKRGSGYLRYSLMNIANVVIRYNHTFYDFYLKKRSEGKTHRVALSHVCKKLLRVIYKLETQNTQFDPSLLK

SEQ ID NO: 191494 - protein, 346 aa, unidentified
MLHAGLDLSRRRLDFCLVDDEGVALERGAAAPDGDGLRGLAEGLAHYQEPIRAAIESMNGARFVHDELERYGWEVLVADALKVKGLAPLACKTDRIDAGVLAELSRRDLVPAVWLPDPAVRAERELARFRLHLVRHRTALKNRVHQTLVAFGTPCPVSDLFGRRGRALLERIVLPAPWRGTVEASLRLIDQLEREIAACEHELRQLGADHRYVPLLMTCPGIGWVLAFTIAAEIGDIARFPSPVKLAGYTGLCPRVYQSGESDRRGPLTKHGPRYLRWALIEAAMHASRHPAYGERYQRTKRRLGRQRGARVAQVDLARRLSEAIWYMLTRGQPFAPAGAPPVMAA

SEQ ID NO: 191495 - protein, 387 aa, unidentified
MTKNKGRVVGLDVHPDSFAGAVVEGRDPASAKVLSSSTRVELKQLEQWALRHTRAQDTLVLEASGNAFAVAARLRAIGRKVEILDSHRAGKVGKVYCANDRVDAVKIARIYLSALSPIVWQPDPKTLERREIFSAYQAVVKESTRAKQQLRSMLNEHCVRLEKGFRLCHPHAIRRLLALRAWTPARAMLLQQLHGSLVAARARRTLLRRHMAQEIVAEESLLRLTRLCGINLITLYGVVAAVGDVRRFAHSKKLVAYIGLNPSVSQSGNFEGSGALKRHGRGALRALLIQSGKKLLEVNNPLQKWGLAVAARRGRNKAAVAVARKLCVALWHVLMGHAIGALERLDTLETKLSKFATEMGPAALAAFGYNNKADFVEKKLYVLRSYP

SEQ ID NO: 191496 - protein, 350 aa, unidentified
MNIYFGCDAHKRYSMFASMNERGQTGRSVRVEHTRAMFREFLRGLPPGSPIAIESVGNWYWMIEEMEKAGHEPRLANAGKAKLMMGQINKTDKLDATGLATLLRNGTLPSVWIPPRDLRDERELPRMRMSLVSVRTMLKNRIHATLAKYAIEIAEVSDLFGVKGRELLKNRLEELPPYTRQSVETQLELLDEVEAHIDQAEKEIREVVKTTPAMTLLMTIPGVGPILAVVIALEIGDIARFPSPEHLASYAGTVPRIRSSGGKTSFGKVRSDVNRYLKWALIEAANMIVLHQRHWPDAHLTQLYLRLRERKGHAKAVVAVARHLAGAVFWVLKKNEAYKEPQRSISSSQG

SEQ ID NO: 191497 - protein, 391 aa, unidentified
MSLYFVGIDISKYKHDCCIISATDQKVISKFSIKNDKVGFEELITTFNSLSSPEDIRIGFESTAHYALNLELFLENAHHSFMEVNPVLIKEYKKSTTLRRTKTDSVDCESIARWLMTVEYKPHSKGFYHAYSLKSLTRLRDRLIRQRSFYLVKITNVLDHTFPEFKPFFNERLSKTALYLLENYGSAEKMARMNSVSYEKLRSISRGKFSPQQFIALKELAANTVGVNNSIFDVELNSLLILYKTLVTEINTLEKEINLLIEEVHPHYLSVPGIGPISAAIIYSEYGDISNFDNPGQMLAFAGIEPGINESGTESHGGRMVKRGSSQLRYALINCCLPLIRFDMTFATYYAKKRAEGKPHRVAITHVAKKLIRVIYALERQDTDFCVQKLR

SEQ ID NO: 191498 - protein, 414 aa, unidentified
MLKIVYPICCGMDVHKNFLVACIASTNNCGVTSYKTRRFSTYSSDLRLCRDWLNDNNCKDVCMESTGKYWIPIYNVLETSCKIVLAHPKYVKAIRGKKTDKKDAKWIADIFKHDLVNGSFIPPADIRQLRDLMRYRSKLTAFTTGEKNRAQNCLTVSNLKLDDVFSDVFGKASTGLLDYILEHPDESIDDVSRFRTKHLKATNEQILSAIDGDMCAEQAEKLRIIRSHMENLDLCKLNLESVILSLTDKYMNELNLILTVPGIQTFSAIAVISEIGVDMSVFPSSKHLCSWAGLTPQNNESAGKKKTTRISRAGAYIKPLLVQCALCAVRTKAFPEVSKRYNALKKRRGHKKAIIAVARMLLTAIYNILKKKEPYNSELFAHSNNTPPEHRTVSVEEAIFILQRQGYTVTPCAT

SEQ ID NO: 191499 - protein, 361 aa, unidentified
MRIIGCDLHARQQTLAILDTGTGEVVNLTLMHEGNAVRQFYSQLPRPVLVGIEATGSMHWFLNLMEELGIECRVGHPATIRAAEPRKQKHDRRDADLILKLLAEERFPAIWLPTKELLDLRALLLHRHQWVRIRTRIQNALQAIALANGLRRGPSLWSYDGQAKIAFLPLLPHASYRRSMLQEMYRKMDEEIENLTQQVAEQAEQRSGARLLMTHPGVGPVTALATDVFLGDPKRFLDGKALASYVGLIPREYSSGARQRLGGVTKQGSPLLRFLWCEAGAHAVRRDPELKRFYRRKLVQKGLGKTRVAVARKLGIRLWIMLRDEIDYQEFCRRGQKPQSGAACAGVLEVGNGANHHRPID

SEQ ID NO: 191500 - protein, 414 aa, unidentified
MEQKLIYLGIDWADDHHDIVITDDSAKTLNQFQIDHTPDGFALLHANIANYQKSPADVLIAIETNRGLLVHELIRTGYTVYAINPKAVNRYKDRHVLSKAKSDILDAQALAHLLRTDRHRFKALVPLPEDYRLLDRFCGDLRKLIDEKSRIVNQTISCLKEFYPKALELFSLNSQIFIDFLKAFPDHDTLRACKKKTFLAFIKKHRYPYPGKIEELWETIQSSTLQADTVTARAGKLRLLMLLDQLENLKIHCTHYEQEIQKILDTLPESNSIQSLPGVGDRLAPELVAALGPNGKDTHHRFHSAEEIAKLSGCVPIVKQSGKWEKVSIRHACVRSLRRTFHDWAFTSLKSSTWARAYYDYHKARNQSHFTILRNLGKKWIKILFAVWSKGTTYDEALHIQNLKARNIPWAMAL

SEQ ID NO: 191501 - protein, 436 aa, unidentified
MSNLVSFEQHNACAAAIDIGSKRIFVSCDGITVKSYDTFTFSYRKCIEDLRSQQVKTVCMEATGVYWIALHELLEQAGFCVCLVNPKEVKQVKGRKTDVADACWMQKMFSAGLVRQSYIPAGRLKELRMLMREREDIISMGSSYVNKMQKALELMNIKLTEVISQITGVSGIRMIEAILRGERDGKVLLSLCHKSIKDKKADEVLMALEGNYNESWLFLLEQNLKLWKIHEQQILIVDQRMEVLLSFLEQGSSFVAPVHKEKPVRHHKPMIKDLNQKLLNIYGVDAGCLPGVTNYSMLKLLGETGTDLSRFPTEKHYVSWCGLSPGHNQSGSRSRKAKMKNSSRVGQIFREIAQSLLNSKPIAIGTFIRRIRTRKGPAIAIKAGARKIAIAFYNLLTKGTAYLEQGAAKYEQQLKQREQQYLLKLATKHNLKLVEI

SEQ ID NO: 191502 - protein, 427 aa, unidentified
MNTTLLTNDFPEHPSFEPRPMAWVGLDWGDKEHAFVLCDDSGRCEKGKLEHGAEHLHHWLQGIGQRYGGRPVALAIEASRGAVIHGLLEYAWLIIYPVNPVTSARYRSAFKPSGAKDDLPDAEVLLELVRFHANKLRALATQDPNTIKLAGLVEARRHLVDRRTAVLNELMALLKSYYPQALDLLNNLNSELAVAFLRRWPDLISLKAARPATIRRFYYQHQVRSSKLLEERLARIGRAVALTTDEARVSVARLKLSCLLEQLELFRKQVACFEAEIKTAFVAHENAALFRDLPGAGPQLAPRLCVAFGTLRPLYPDPASLQKFAGLAPVIEKSGSQSWTHWRWGAPKFLRQTFVEWAGQTIRYSAWARIYYQRMLQKGKKHAVILRALAFKWVRILWKCWQTQTCYDETRYLRELHRRKSPNAVKL

SEQ ID NO: 191503 - protein, 341 aa, unidentified
MEHIAIDLGTRESQICVRNDSGEIIDERRYTTKHLRKYLTKRKPGARVLLETSSEAFAVADIAQECGHQVRVVPSSLVRALGVGERKLKNDQRDARKLSEMDCRMEVPSVHIPSAQHRDQQARITARQALVEVRTKLVNTVRSYFRSSGLSHVKATPKTLAKNVRQTLQESQIVPSFIEQVLCVLDTLNAQIAEADEELKVLANADETCRRLQTMPGVGPVTSLCFAAAIDDVSRFESAPRLTSYVGLTPGENTTGFKTRRTGVTKSGSVRVRWTLIQGAWTMVRTRPNDPLTSWFHAVAGRRGKKIAIVALARKMAAILYAMWRDQQPYDPRKAVAALAA

SEQ ID NO: 191504 - protein, 430 aa, unidentified
MTKPQLTPTQGILVAIDIGKTRNEVLIEIPGQARRRRLTVLNTRADYDRLIDLLSGLGQPVTCAFEATGNYHRPLAWRLLQAGFTVRLISSLALARTREALHNGWDKNDPKDAQVALHMLRIGASQHYHDPLAAGLNDIQEVSKTHEAISKAKTEVLHRILTHHLPLYFPEIGRFRHNSRSDWFFAFLDRFPTPGSITALSKEAFIAAAWGVVGRKVAKERLLGDIYETARASIGLPIPIDAPAVRLFRLVIAEVRSLIEQRNALEAMAIELLHESPDYKLLCRIPGVGPITALTILAEAGDLRRFGHHRQFLKFCGLDLATHQSGAFRGQTKLSKYGNARLRRALWLAGQVAIRQKENSFRDKFERTIARDRHKANLRRKALTAITAKMARVVHAIIKSGADYRPFVEGPVPGGRTSLSMGREGATATL

SEQ ID NO: 191505 - protein, 349 aa, unidentified
MERSMKHYAGLDVSVKETSVCIVDEAGKVCREVKVPSHPEDLVRLLKDPAWQLERIGLEAGPLSQWLFSGLAEAGLPVVCIETRHTKAFLKAQVNKSDRNDARGIAQMMRVNLFRPVHVKTLTSQKRRALLTARKLLQEKAISIENDIRGLLRNFGLKVGVVGLIKFEERTLELVEGIPELAEIMASLLAARHKLREQAGKLHRKLLSIARNDEVCRRLTTIPGVGPIVSLAFIATIDIPARFKSSTAVGPALGLTPVLNQSGESTRIGRISHCGDGMMRTLLYEAAQVMLTRTLKWSWLKAWGMNVAKRRGKQRAIVALVRRLAVIMHRMWRDGTKFRWTKGSAPAVA

SEQ ID NO: 191506 - protein, 392 aa, unidentified
MIYAGVDIAKMDHVIGAVDETGAEVARPMAFKNTEAGFERCIAWLESVAESEDDVFVGMEATGHYWMACFAYLVAAGYRVCVVNPMQVHAMRRLKGLCGVKNDRIDSALIAETLRQGDYDQTRLATDEVQALKRLTRYHQGLKQELATVKTQAICVLDAYFPEYAGLFSDMFGTASLKVLAECPTPSEASRKRTSSIARLLSEGSHGRLGAERAAEIKSAAKSSVGIRLGEDAASFQIKTMVTQVEFLNRTIAKVEREVASLLEKVEPNITTVPGISTTTGAQIVAEIGDVKRFKGAASIVKYAGLNSGVDESGMFSAEGVPITKHGSPYLRRSLWLAANRARQYDPRLKAFYDKKRREGKPHRVAVTAVARKLCHVVYAVMRDGEPYDPSK

SEQ ID NO: 191507 - protein, 351 aa, unidentified
MFQNPNTSIAVVGIDIGKNSFHVVGHDQRGAIVLRQKWSRGQVEARFANMPSCLIGMEACVGAHHLSRKLNELGHSARLMPAKYVRPYSKGQKNDFRDAEAIAEAVQRPTMKFVATKTADQLDLQALHRVRERLVSQRTGIINQIRTFLLERGVAVRQGLRFLRAELPRILATPPEVLSPRMVRVIECLAGDWRRLDERVENLSGEIEAIARQDAGCERLMSVPGIGPIISSAMVAAIGTGDVFTKGRDFAAWLGLVPKQISTGDRTILGKISKRGNRYLRVLFVQAAWVVLIKPKSWERHGLKPWIEAAKKRLHRNVLAIALANKLARIAWSVLARGRSFEARPATASAA

SEQ ID NO: 191508 - protein, 387 aa, unidentified
MARKRTLSTLDTSIAYEAVGLDLAKEDTAIAAFGPDHEGPYLIDRMPYDKLYELLADMAPTLVAMEPCSGAHQIAEQIQELGHEVMMISGRHVQAWVKDHCNGQKTDLNDAFAILNLAYDRWLTPIRGKTREECRLLALQSSYRQLKGQRTKTMVHVEATLHAWGFPIRTGSFNQKALHELIDANREAFGDEVVETLHLMINRVHDLDHDIATVLKLLTEATQRDPRASLLRSIPGFGVLTTSRWCAVVGDIARFDTPKQTMAFIGLVPNNRITGHHTETSSGREARGQGKMSKRGDKMLRSLCILGAGALCLMVRNDRLPDCPFVASIKERLASPRPWFKVLVYVAAKLVRIATALLKYGETFSFEKAGISKAVLKQWELEQAKAA

SEQ ID NO: 191509 - protein, 355 aa, unidentified
MNDSKFIGLDVHKTSISAAVLDHDGKLVMQSIFATHAAAVLSFIHGVGGSLRVTFEEGTHSSWLYDLLRPQVSEVLVCNPRKNALLKSGNKSDQIDARKLAELLRAGLVSPVYHGQTSTVTVKELGRTYTALTEDTTRVMSRLKALYRSQAIATEGKKLYTKRRRQQWLNELTQAGRRYRAERMFQQLDALQGFRRQARHDLFVECRKHAATAILTSIPFLGPIRAALLIARVQTPFRFRGKRQFWAYCGLALETRSSADYRLVEGELHRAKKPVFIRGLNLNHNHDLENIFKAAATTASACPGPFRDYYETLLGRGMKPEMARLTLARKIAAISLIVWKKGERFDPEQLKAQAA

SEQ ID NO: 191510 - protein, 467 aa, unidentified
MTPHKDFFLDSRPSAPTPTLPPSPVLSDALQVCHPHAAGIDIGEAEHWVAVPPGCDPQPVRRFGTFTVDLDALADWLIDCGITTVAMESTGVYWIPLFELLEARGVQVLLIDPRQAKRAPGRPQTDRLDGKWLQRLHAYGLLAGAFRPTDQVCVLRGYLRHRQMLITSAAHHIQHMHKALEQMNLKLTQVVSDITGATGMAILKAIIAGERDPQRLAKLRNARCHHDEDDIAKALQGTWRAEHLFALQQAVALYEFYHQQVALCDQPIKAHLETFADHSAGQPLPPKARRHKKTNEPRFEARTPLYRMAGVDLTAIEGIEEGTALAILAEIGTDMHRWPSVKHFCSWLGLGPQHQISGGKVLSRRVRPGAHRVTVALRLAARSLHHSQSALGAFFRRMKTRLGTPKAITATAHKLARLVYHLLKHGSAYVQQGLDAYEAQYHERKGKTMAKQAKALGYTLVPLVAQG

SEQ ID NO: 191511 - protein, 443 aa, unidentified
MEQVEHSVEQEMILARVAGIDVAKASGMVCTRVPGTGPGRRVQRVWAVPADSASILELGRALAGAGIERVVMEATGVYWRPFFFLLEAAGLECWLVNARDVKNVPGRAKTDKLDAVWLAKLNERGMLRPSFIPPRPIRELRDLTRTRKTMIEERTRHKQRVEKILEDAQVKLGSVASDVFGLSGRAMLDALVAGVRDPKVLASLARGNLLKKKTALEAAFVGRFTDHHAFLVRTELASIDHLAAQIDALTARIVTALAATHIPDPPDDRADGPGGGESLSTLAERLTEIPGIGPYGAQVILAEIGPDMTVFPTPGHLASWAKLTPRTIQSGARNTHGPTGKGNPWLRGALGEAAMSAARSNTFLGARYRRIVKRRGHIKALVAIARSILVAIWHLINNPGTHYTDLGPDHYQTHANRTRKTRSLIKQLEALGHTVTLTPANAG

SEQ ID NO: 191512 - protein, 443 aa, unidentified
MSTSSTQPQNEPEYVALVAIDWADKKHVWSLEVTATNRRECGSIAHTPEAVEAWVTSLHSRFGERPIGIAVEQSRGALLYMLTKYAQLHLYPIHPRTAAQFRAALFPSGAKDDPQDADLLLDLLIHHRSRLHRLEPDTEQTRTLQMLVEERRRMVNEKTRQSNRLTDKLKLYFPQVLNWFNDVDSELVGAFLERWPTLDALQRARPRTLHKFFRQHNCRSEQRIQERVEQSRKAIPATHDQAVIRSAVATVSVLVRLIQTLRDGIAALDEEIRQLAITHPDFSIFDSLPGAGKVMVPRLIAAMGSCRERFSSAQEIQSYVGIAPVLQRSGKTQCTHFRWACPKFLRQTFHEWAGHSIAWSSWAKTHYQRLRARGKAHHAAVRALAFKWIRILFRCWKDRKPYDAARYENTLRRREPSAPESASHPQLVWKNCAGFFKLTQLPS

SEQ ID NO: 191513 - protein, 384 aa, unidentified
MNKHSILFIGLDTHKEFNEVAYIEEHRGAQPVHLGRIPSSKVAVQKLVRQFESKYPGATLHFVYEAGPCGYWIYRLITSLGHCCYVVAPSLIPKKSGEKIKTDKRDALKLSKLLKSEDLTPIYVPEPEDEAVRDLSRAREVAMKDLKDAKYQLKALLLRNNINYKGTANWSQKHLRWLTELVLPHPAQHIVLQEFLYTITERISRLERLDNELTHHVHQWRYYPVVKAIQAMRGVRLLVATGVVAELGDLSRFDHPRKLMSYLGLVPSEHSSGGKRHIGAITKCGNGRARRLLVEGAHTYRYAANISTDMQKRQEGLPKDIIDIAWKAQLRLCKRYKKMIAKGKHYNLVVTAIAREMIAYIWAIAKEVVLTPVNTKLRLARVPA

SEQ ID NO: 191514 - protein, 424 aa, unidentified
MSSDLEIAAFIGLDWADQQHVIRLRVAGSAPVEAQLLDQKPETLRAWIGQLRQRFGGKPVAIALEQSRGSLLYALMNVDFLLLYPVNPQNLAQFRKAFYPSGAKDDPQDALLLLEMLEKHRDRLRVWVPDDADTRCLRLLAENRRKLVNRRTALTNQLTSLLKESFPQALDWAGPLDSLRACDFLQHWPSLQLLQKTSTSQLRKFYRDHTRLDSEAIHQRLDQIRQAQPLTRDSAVLAAAELMIPALVRQLRCLIESIQQFDQQLKDRFQQHDDYTLFHSFPGAGPALGPRLLSAFGSNRNRFECAAEVQMLSGIAPVTERSGKSHWVHWRLACPKFLRQSFHEFAAQSILVSPWARTFYDQLRLHGTSHHAAVRTLAFKWIRILFRCWKNRTPYDEQIYLASLRRHGSPLCAAMASPTTGANL

SEQ ID NO: 191515 - protein, 406 aa, unidentified
MMVRYIGMDVHREFAQLAVVEDGLVRDEGRIGVTSEALRQWAAGLRADDQVALEATGNSDAIATLLTPVVGRVVVSNPSKTRAIAEAKVKTDKVDARILAQLLAADFLPPVWLPDERIRSLRRQVTRRAHLVRQRTRIKNQVHAILARNLVPTPPVSDLFGKTGRHWLSRQPLPADESSSVRALLRQLDFHGEELAVVDKELAVEAFADPAVARLMTIPGVDAIVAISIVAAVGDFTRFRDADKLVAYVGLNPKVRQSGNSAPVHGRISKAGRAHVRGVLVEAAWSASRAPGPLRAFFQRVKARRGFPTAVVATARKMTALAWHLVTKDQDYAFARPGLVAHKRRKLELATGAPSRRGNHGTPGAAYNDKQRRAAETAAVEQAERAYEVFVAHWQPHNPAKTRAKT

SEQ ID NO: 191516 - protein, 316 aa, unidentified
MKSVTSQNINVGVDTGKQFLDIFIRPLDIYFTVTNDEKGVKEAITIIKKHCPQRIVIEATGRLELLFVMACAKANLPFVIANPVHVRRFAGAIGLIAKTDKLDAQLIAHYGEAIQPKLSTLKPESMRLMADLVARRNQILNMQTMEKNRLQIMPKGLHSTIKPILTAYKNQLAKIEKQLVKLIESCPDYQEKNDIVQSMPGIGKVSAAALIGYFPELGYVSNKQAAALVGVAPMNRESGRYQGKRKIKGGRPQVRTVLYMAMMSAMQCNSVFKRTYQALLAAGKPKKVAIIACVRKMVVILNSMVRDGKKWEENMA

SEQ ID NO: 191517 - protein, 438 aa, unidentified
MSNKVIFNLDELFISVGIDVGADFSWMSIALPNQQFVGKPYKILHNSIDSLTTAVSKIKEAEELYSLESRIFLESTGIYHYPLFCYLRDKGFNCSVINPIITKNSTNINIRKVHNDRFDSKKAALVGLKPDLKVSLMPSDLALNCRNLCREYYDLMDNRSAYVNKLQGELRMAFPQYLGIFSKVTINTSLTLLETYTSPSAFLKADKQEIIDIIKSTARFGLTYAQNKYNAIIQAATDANQFGYIIDSNIKRIRLYISFIRKYDEEINSILESLHELVDANEDSDFVKQIHLIETFKGAGFLSAVSIMGEIGDFSAFSKPKQLFAYFGLDPAVKQSGKFEGTKVQMSKRGSAIARRVIHTLTLQSISISRNREAKNPVLREYYLKKCDSKPKLVAMGAVSHKVCNMIFAILRDNKPFKIIAPQEHIKQYNSAKCVIAA

SEQ ID NO: 191518 - protein, 344 aa, unidentified
MSKHSIRAGDVAGLLVRLAQLKEKARGRTGRDFPIIAIQEAGLDGFWIHRVLQSEGIESHVVDAASILTSRRRRRAKTDGIDGETLVRTLLAYKRGEPRVCAMVKAPTPEEEDRRRICRERKTLVGERVEHVNRIKGLLFAQGVSNYEPLKRNRRARLEELKTGDGRPLPAHLKAQISRELDRLELVLPQLKAVEAERDALLKPVSEGCPTPAAMLAQLKGMGPEFTAILWSEGLFRSFSNRRQLAAYAGLAPTPWQSGSVAHEQGVSKAGNPRLRTTMIQLAWLWLRHQPTSALSVWFQERVQSKGGKIRKTTIVALARKLLVALWKYSTSGVVIEGAAMKTI

SEQ ID NO: 191519 - protein, 350 aa, unidentified
MGEVSTIGLDIAKSVFQIHGVDAGGAVVMRKRVTRAKLLEFFATLPGCLVGIEACPTAHYWGRRLQALGHTVKLMPPNYVKAYLKRSKNDANDAAAICEAVPRPSMRFVAMKSEQQQCGLMLHRSRQLLVCQRTMLSNAIRGHMAELGVVSAKGRNGTAELLKIIADEHDDRIPSAARFSLDVLARQYAVVRAQIVAIEKRIHAWHRSSEESRRLEEIPGVGPIVATALVAEVGDWKEFTSGRSLAAWIGLVPRQHSTGGKERLGRISKQGNRHLRWLLVAGAMAVIRYARQHGTKRPWLARLMDRRPIKVAAVALANKIARMAWAMMVRGERFKEPKLLPAAYTNPHIE

SEQ ID NO: 191520 - protein, 409 aa, unidentified
MIRYIGLDVHKQWTQVAWHMPDGSIERERLATCPALLREFAQRLGPDDVVALESTTNATAVAKLLKRRAGKVLISNPLKTRLIAESRIKTDKVDADVLAQLARSGFLPTVWQPTEEMELLRRRSAYHSVLVGQITRVKNRLHAVLHRQMIEVPVRDLFSERGRSFLRRVELPPDERMQVDLDLSILQTLEEAREEARKGLARLAQAHPQAQRLMTIPGIDYPTAVGLLAAVGDMRRFRHPRKLVSYFGLNPTVHQSAQHCYTGHISKQGRIHARWLLVEAAHCAVRCAGPLRAFFLRLRSRKGTNVAVVAAARKLTVILWHMLTNREPYRYAPQRTTRDKLNRLRYHATGVRRKAGPRKGSPLSPLYGTGLRGRTLRSRADRERLNTAQKDYEKLIKERKNGQKTPKIS

SEQ ID NO: 191521 - protein, 407 aa, unidentified
MNLIHERCAGLDVHKDSVVACVRVSGVEPEVRTFGTTTESLLALADWLRDRQVTHAVMESTGPYWTPVWHILNEEEIELVLANAEHVRNVPGRKTDVKDAMWLADLLAHGLVTASFVPPTEIRDLRDLTRTRRQLVRQRVQHVQRVQKTLESANIKLDSVISDIVGASGRAILDALVSGQSDPERLVLLANSRIKAAPEALKQALHGRVRDHHRNLLKLHLQQIDATNAGIAELDKEIERSLEPFRSQVEQLTSIPGIGDNVARTLIAEIGVNMKQFPSSAHLVSWAGLCPGLKESAGKRQSTRIRKGAPWLKPVLVQAAWSAIRKKDCYYRALFSRIKSRRGPKKAIVAVAAALLTSAYHILADGTFYEELGNNFLDRIDRVKKSKGLVGKLNKLGYDVTLKDLAA

SEQ ID NO: 191522 - protein, 397 aa, unidentified
MANYIIVGCDLSDRTMMLQVAHNQETPQKRTFSNDAEGQAAMVRLLKVRAEAVGGARMVFAYEAGPHGFGLADYLQAAQIECHVLAPTHLPHTAKSRKQKTDEKDARRIFEALRGHLLAGNKLPGVWVPDAATRDDREPVRARLDAGQKATRTRNQIRMLLKRHSVTPPPEVGKRWTLKHLAWLRGLAGGASALKEGARTVLASLLRQWAALEEEAATLDKAIERLADEPRYRAQAAALDAMVGVGVLGAMVFLTEMGDLKRFPNRRDVGAYFGLVPRSNETGERTDCKGSITRQGPARLRQVLSQIAWTRVRLDPSEKEVYARLLKKNPKRRKIPLVACMRRTGIAMWHVALAAQASAPSTPPTPPPPGGRRHFALPARARKHRRPSEPEERRIAV

SEQ ID NO: 191523 - protein, 415 aa, unidentified
MGRVVIGMDPHKRSATIEVCDERERVLQTGRFGTDRDGYRQLLAAGRRWSERVRAVEGCQGVGRHLAQRLVADGEPVVDVPAKLSARAREFSTGQGRKTDATDAHSVAVVGLRTPGLRAVQVDDATVALRLLVDRRDELGAARTLTVNRLHRLLVELVPGGAKKFLSATQAKALLASVRPRDVVGKTRRQLAAELVGELEAIDKKIQAAKQQLTELVEATGSTLLELNGIGPSGAARLLGDIGDVSRFSTRGHFASWNGTAPIDASSGEQRRHRLSRAGNRRINRALHIMAIVQLRNDTEGRAYYRRKVAAGKTSMEAMRCLKRRLSDIVYRQLVLDQKRRRAADDTAGPGGQAGAATGSSAADSNPNVDASEKSLPGPAGNDATPRQPSADRSSSRSRRPLPAPTGSRPQALSA

SEQ ID NO: 191524 - protein, 418 aa, unidentified
MTNPILPPSCTRFLAVDLHKDYAVVGGVNPHLDTVLSPRRIELNAWLRWASTNLKPTDALVVESTSNAWDFYDQVAPLVGRAVVANPRLVKLIAAARVKTDRVDTMSLAKLLAVNLIPEVWVPPLVVREARGLMAHRRRLVRNRTMITNRLQSLLLRHNLPGPEGNPFCAAHLPWWETLSVSPTEKLRIRQDLATAEHLSGQISELDAEIARLSTQKPWSDQATFILQIPGFSILLTMTILAAIGDISRFPHPKQLVGYAGLGASVHDSGQTHRTGRITKTGRRELRWALVEAAWSAVRYFPYWKSQFDRLTRRMPENKAIVAIARKLLVTIWYVLSKQTVDRQADPVRVATKLMRWSWELTDEQRGGLTSRQFIRYHLMRLNLGHDLSCISYGNMPRRIASEEDLLAVLSKKATAQA

SEQ ID NO: 191525 - protein, 329 aa, unidentified
MNYKWFIGIDISKETLDIVLYRKELREKSPHCKIRNNQKGFKEIITWLKGQRVELQHTLFCMEHTGIYGFEIAGFLNEKANYCMESSLHIKRSLGLIRGKNDKIDAYQIARFCYLHREELKPGKLPARSMLFLKSLVNERERLVKIRAIDRTVIKELNYKENLQCIARAKERVAILTAQIQQIEKDIEATIQEDQKIERSYRLAKSVTGIGLVNAVMFILFTNNFTSITEARKYACYSGIAPFEHSSGSSIRGKTRTSHLANKRIKVNLTNGARSAIINDPELRLYYERKKREGKEHGTIMNAVKFKLITRVFATVKRGTPYVKLRQAG

SEQ ID NO: 191526 - protein, 369 aa, unidentified
MDPSLCAKMKKHFIQRAQGTDGILKEDPSMNNISIVGIDLAKHVFQLHAIDDRGHQVFSKKVKRDQLSTVIGHLPPCLVAMEACGSAHYWAREIRQLGHEAHLLPPQAVKPFIQGHKNDARDAAGIAEAAARPATRRVAVKTQEQQSLQALHRVRSRLVRARTAVGNELRGLLNEFGIIVAQGHRVIRQGDIRRLLDERHTQLGMALCDVMHDLLDEWQALDTRVAEYDKRLGAYVQATPSVKQLMSVPGIGPVNATLLFSHMGDPRRFPNGRQFSASIGLVPRQYSSGGKNVLKSITKRGNSEVRRQLVHGARAALRQFQRQEHPDRLAQWIIRLAARVGQRKAIVALANKMARICWSILAHQRTYQA

SEQ ID NO: 191527 - protein, 394 aa, unidentified
MKLVGIDVGKNSHHFCVMDKETGEFNVTPSSFPNNKEGFDFLINSLKPYSKKSILLGMEDTGHYHVALLKFLLSNGYTVALINPKTTDLTRKMEGGITKNDKLDTITICDVLDTPERKKQYRITKVDRFDLYEQRQLTRHHHNLKEELNVYCNRLQKSIDLVFPEFNTLFSSKYGIVYMNLLKTFGSAEAIASTDIRTIRKCFEIKGRGNRISLTPEKLKECAKNSIGISSEVETIQIKHLVSQITLIKEQIAEIDKKIEEFSITNNSPILSIPGISHFSGTSILAELGDIGNYSKPSQIIKFAGVAPYHYESSQYNAQHTAITKKGSKYLRKTLYQIILPVINNNPVFKKYYLLKISQGKGHRCAQGHCIRKLLRIIYHLLETGQSFDPALLR

SEQ ID NO: 191528 - protein, 342 aa, unidentified
MTTTTIIGMDISKYSFELCGTDERGRHTLHRRLHRDKVSLFFANLPACIVAMESCSGSQHWARQLTELGHQVMLIPAQHVVAFRQGAKNDRNDAAAIAEAATRPHLRTVPVKSIDQQDLQTLHRVRERLVHHRTALINEIRGLLLEYGIVCAKGMTRFLIWLREEFAAHIADLSPMAQETFHALRDEFRMLDERLALLNKRIKAFFDSHPVCQQLATIPGVGALVATAIIASVCEPQRFKNGRQFAAYLGLVPRQHSTGGKPKLLGISKAGNRYLRMLLVHGARSIIYHHRAKEDPRSKWVAKLVERRGFHKANIALANKNARVVWKLLTTPGERFSLPLAA

SEQ ID NO: 191529 - protein, 316 aa, unidentified
MTNPLAKIHTALGLDVSQDSVTLYDSLTRQILTIANQREALTEALAPFTDRDLALCEATGGHEDALLTVLQAFGIPAHRADAAKVKAFIRSFGKRAKTDPIDARWLARYGIERSAKLALWQPPEACQRQIEALVARRLDLVAMRRQEQCRLKAPRALLASDIADHIVELDTRIRAIESRIQTLIAQHEQFALRDKALRSVPGISHVLAPLLIATMPELGSINRRQAASLAGCAPHPRDSGKSNPYRHSSGGRRQLRPPLFIAALAAARGDNPLGNFYQNLLNAGKPKRLALAAVMRKIIIIANARVRDALYPPQLT

SEQ ID NO: 191530 - protein, 431 aa, unidentified
MNYNQNHKITQITSETLIVGVDIAKHNHVARAQDFRGLELGKTCFFENTKAGFHSFLDWINQLVKECKLNQVIVGMEPTGHYWLNLAHLLKENNIKFVSVNPLHVKRSKELDDNSPTKNDVKDAKVIAQLVKDGRYAEPTIPQGIYAELRVAKKLRDLLNVDLQVVQGQVHNWLDRYFPEFLTVFKSWEGKAAIHFLKLEALPHQLVNYTDEELLLSLRQVVKRSIGLKKIRALKEAANRSIGIRQGAAMAKLELRALLEKYDFIQVKFEELDHQLDQLLDHIPGVTQMLEVSGIGRDTVAGFFAEVGDLRDYQHPRQIVKLAGLSLKENTSGKHKGQTKITKRGRKKLRALLFRAAMILVAKNKAFKALHIYYTTRSHNPLKKMQSLIALCNKLIRILFSIGKKQFTFQEDKMLKDIPHMATFVVHQTVA

SEQ ID NO: 191531 - protein, 467 aa, unidentified
MSPRSGKQFRTSHGVADLTVTHAHAAGIDVHAAVHFVSVAAEDVPSGFINPDVKLPAGVRKFGTNTADLEALTAWLKDCGVTTVAMESTGVYWIPLYDLLASQGFAVILVDPRQTKHAPGRPKSDVEDCQWIRRLHSYGLLTASFRPADEIVAWRGFQRQREMLIRHAAQHVQHMQKVLEEMNVKLTEVVSDIVGQTGMKIIRDIVRGERDPLQLAKHRHERCKATEAEIASALYGNWRKEHLFVLQQALRLYEFYQKQLRACETQIEACLRGMADKSQGARLPPCLRQRKPEKNEVRFGARALLFRMSGVDLTLIEGISATTALVLLSELGTDLSNFAHEKNFVSWLGLCPQHRSSAGKIFQRRTRRGANRAARALRMAAQGCHHAKNALGAFYRRIQARCGGAKAIVATARKIAERVYRLLKYGQDYVRQGQQAYEEAYRLRQLKYMAKKAASLGYKLVPEDISV

SEQ ID NO: 191532 - protein, 367 aa, unidentified
MQATTFVGLDVHKRWINVAVLLPGNDTPIEWRIANEAPAIRKMLKRVAELAPGDVRYCYEAGPCGYALQRQIISWSDASCMLVAPSLIPRKPGERIKTDRRDGRKLAQLFRAGLLTEVQPLTEEDEASRDLSRAREDLREDLVRARHRLSKFLLRRAITFTPGKRAWTLAHRRWLKSLSFDNPPDAVVVADYLLAIEQIEERLKNLIVHIERLAVDPRYAKAVATLRCFRSFETITAVGLAVELHNFERFTAARRLMSFVGLIPSEHSSGEKRRQGSITKTGNSHVRRLLIEAAWNYRHHPHVGRALRERRKGQSPRTVALADRAMHRLHRRYEQMTHRGVLPQKAVVAMARELTGFVWAALSPLAQ

SEQ ID NO: 191533 - protein, 337 aa, unidentified
MNMYVGLDVSQRTTSICIIDASGQRTWQGTAPTEPAAIVDMLRAHGAGEARVGMETGPLAVWLYHAMRQQGVNIDCIHARHVHAALTVQLNKTDRNDAFGIAQLVRSGWYRATHVRSLECHQVRLMLTVREKLISLRTATNNQIRGLLKTFGVVLGAGKNRVFETSVQDADPLRDGIKPVIGILLDTWRHLTTKIRELDRSIQRQVNQDSVCRLLMTVPGVGVITAASFRTAVDDPSRFKHVSDIWPFLGLTPRKYQSGEVDRNGTIAKQGNRQTRSMHYEAALARLKRYGKETNLAQWGAKLERRMGLRKAVVALARKLATVLLSMWRSGEQFRCA

SEQ ID NO: 191534 - protein, 371 aa, unidentified
MKKSITFVGLDVHKNSIEVALADAGREGEVRHYGAIDGDMDAFGRLLRKLVSTGKELRFVYEAGPCGYEIYRYLTAKGFDCAVVAAPAGDPTKGVRKRIKNDRRDAMTLARLHRAGELTYVFVPRKDDEAMRDLTRAREDASNAQRVARQQLTGMLLRLGFRYSGKKSWSLAHIRWLSGIKMPTPAQQVVFQEYIHAIKETTDRLERLTRQIEELAPAWRMFPVLRAYQALRGVCLIVAATVIAELGDLTRFDNPKHVMAFLGLIPSEHTSGERTRRGGITKAGNGHARRVLTEAAHAYQFPARVSRALLERQEGLDKTILDIAWKCQVRLCSRFRRLMTKGKNRKTVVTATARELIAFMWAIAKQVPISA

SEQ ID NO: 191535 - protein, 418 aa, unidentified
MQVLYARCAGLDVHKETVVACVRLVVDGEATREVRTFATTTAGLCALAEWLVAEGVTHVAMEATGIYWKPVWHVLSDSPLTMILANAAHVKNVPGRKTDVNDATWSAELLAHGLIRASFVPPREVAELRVLLRTRKQLVREHASHVQRLQKTLEDANIKLDSVISDIMGKSGRAMMEAMIAGETDPHKLVVLADRRIKAPRAKLVEALTGRIKSQHRFLLRLHLGQIDALDRATAEIDAEIEANLAPFRDAVKLLDTIDGVDVLAAEVILSEIGLDMGRFATDRHLLSWSCLCPRNDESAGKRRSNKIKKGARWLKATLIQCAWSATRMKGRYLSALYHRLRGRRGPKKAILAVAAAILTAAYHMLKTGTPYRDLGPRHFEPRKRTALASQLLKRLEGLGYTVDIKLLATAEPASVSL

SEQ ID NO: 191536 - protein, 408 aa, unidentified
MNTLYVGIDVSSKSNVIYLMLPNGDKHSNFSVANSHEGSTQLVKRILSALTSHSLDTVLIGLEATSVYGDNLVYFLREDATLAPFNRKIHVLNPKQVKKFHDAYNDLPKNDYVDSFVIADCLRFGRINKEVYMGDYHYKALQNLTRARFFAVQNLVKEKQRFMNVLFKKYSTMTQEKVFSDTFSTTALAVYDEFESAEALANMDLHELTDFIIEKGKNRFPDPDAVAKAIQKAARSSYRLPKTVNDSVNQVLSISITSMKALESQIKEFDKAIKTQMELLPNVLVSIPGIGPVYSAGIMAEIGDINRFNSQAALAKYAGLAWKQHQSGGFESEVTRLIPSGNRFLKYYLCEAAFSLVRCDKEYSDFYHLKYKEVNRCQHKRALALTARKFVRLVFRLLKDNRLYCPAK

SEQ ID NO: 191537 - protein, 341 aa, unidentified
MSPTMVPPQLCVGVDIAAATLTAAWSRADGSVSTPRTYAQDPHGFASLQTHLTTPAIPPQDILVVMEATGSYWIALAVTLHAAGYRVSVINPLQAHHFAKAQLRRAKSDALDAQDLARLAATLHPPLWEPPPAIYHEVRQRLLVRDGLVTMRQQARNQRHALTQWPVVVAGVEAQLTAVIADLDRRIDTLEGEIATALAASEWAASLGYLTSAPGIGLLTAAWLLVATVNFTIGETPEAVVAYAGLAPVPRQSGTSIRGGAQIGHSGNERLRTAVYLATLSAARFNPMIRGFYQRLRAAGKPVKVARCAAARKLLHLAWALVTKRQAFDPHRHAPPAPIAA

SEQ ID NO: 191538 - protein, 305 aa, unidentified
MQITTIGLDLAKHVFQVHGVDNSGQVVIRRRLRRVEVVRFFSTLPPCLVGMEACSTAHHWARELIALGHDVRLIPPTYVKPYVKRGKNDAADAEAICEAVTRPTMRFVPVKGAEQQSVLVLHRTRDLLIRQRTMLANSLRAHCAEFGIVVAQGMAKLAELMARIADEGDARIPPLARGCLLVLSQQLQELQLKVSEIERALQAWHRSNETSRRLETIPGIGPITASALAATITDPTLFRSGRHLAAWLGLVPRQNSSGGKERLGGISKQGDRYIRRLLISGAHAVLQYLKRGQARPGSAWATGLP

SEQ ID NO: 191539 - protein, 461 aa, unidentified
MPQPSSAQEPDFAAFIAIDWADSEHVWALQVAGSTQRETGKLEHTPEAIEIWALQWAARFPGRPVAVALEQARGSLLYALSKYQHLVLYPIHPTTSYQYRKAMFPSGTKDDSRDADILLDLLTLHRDRLRSLQPDTEHTRKLQVLVEKRRQFVAERTAQTNRITAQLKLYFPQVLNWFDDLSMPIVAAFLQRWPTLPQLQAEHPEEVRTFFHQHGSRSEARIQERLREMQESKLLTADAAVIEPGVLVVRTLLATVAALNAGIRQLDEAIQQVSATHPDYFIFSSFPVAGPVMAPRLIVAFGSQRERYGNASQILSLSGIAPVMKASGRQCTIHSRWACPKFLRQTFYEYAGLSIQRCAWARAFYETQKARGKGHHAAVRALAFKWVRIMFRCWQSRQPYHENFYLAAREGRAVPLTRRPPGTPTNTVASRHQASSTLCEKTHDFGLRKAGDILKSLMSEA

SEQ ID NO: 191540 - protein, 428 aa, unidentified
MQNESTPGARGPVFCGVDTHADSHWLCVLDWRGRKVLSRRFPADAAGYEALAGAIAAAGEPACVAMEGTSSYGAGLTRHLASLGMPVREALSPARTQRRRPGQGKCDEADAERAARAAMSGSRLGTPKSQDGWVDGVRCMLAARSGAVKARTSAINTARSLLTTAPEGLRSRFRGMGGPRLMELPSVRAEGALGAALGALADLWAAARDVALDMERAIEASLEENCPALLAMYGCGPVSAAKLAVAAGDNPGRLRSEASFAAICGACPIPASSGKTVRHRLNRGGDRQANSALHEIARQRVMRDPETAEYAERARARGKSDREVMRCLKRYVAREAYRALMRPHEIRRPEDASELVAARRAARVSQVRAASILGTSEKYISMLERGQRELKPIRRAYEAWVEAGLPLDWDRQAFEAERKMDSKKHLAK

SEQ ID NO: 191541 - protein, 322 aa, unidentified
MAMLSFGGIDVSKDRLDITVLPDEQCSSVSNDAAGWAELVEQLRGSSITAIGVEASGGYERGVVRALLAAGMSVRQINPFKLRQFAKASGTLAKNDRLDARMIASFVAVMPTRPAQRQAPMIEQLAAMLTVRRQLSEQKVATENASRLLEGAMLQRLSRRRVAGLTADIDLLDQRLVEIVTADAALAHRFRLLTSMPGVGAVLGCTLIALLPELGQMSRKQVAALVGLAPYDFDSGKLKGRRCIWGGRARVRHVLYMAALSASNWNPALKAFHDRLAATGKKPKVVIVAVMRKMITTLNAMLRDGTAWVDRYSGRRSATTAR

SEQ ID NO: 191542 - protein, 422 aa, unidentified
MKTPGDTPFTAFIGIDWADAKHDICIQAAGDERREFSRLSHKVEAIDDWAQSLYRRFGGPIAVALELSKGPVVYALQKYDFFVIFPVNPSSLAQYRETFTPSGAKDDPTDAEFVLDLILRHAEHFAPLKPQSVEMRTLGSLVEQRRCLVNDRVRTTNRLRNTLKQYYPQPLEWFDRIDTPLFCAFIERWPTLVQVKRARRTTLQSFFHQHNMRRTHLLEARLTSIKAASPLTLDNAVITPHRLQALVLVDLLRVMLAAIKRFDEEIAELAPQHPDYELFSPLPGAGPSLAPRLLVAFGEQRDRFKNAAELQKYAGIAPVTERSGKKHWVHWRWQCPTFLRQTFVEWAAQTINKSYWADLYYRQQRNKGCNHQAAVRALAFKWIRILYRCWQTKTPYNETLYLKTLKRRGSPLLNQLENTIST

SEQ ID NO: 191543 - protein, 324 aa, unidentified
MIDGILGIDVSKNTLDVSISSCGKVRTKSFANTSDGWHHLLDWLVAQKMRRVHACLESTGRYSLGIACALYEAGHIVSIINPAQVRDFVRTKLGRNKTDGIDASRIREYCELFKPLPWAPPSEAHRRLSELQTIRSGIIAGLTEWKNRKNSGIVDAEAQALADATILHFTSQIGAVDKAIALAIENDSDLRSKRDLLLSISGVGDTLAGIVLAELPGPKVLHSSGEVVAYAGLNPRQHQSGTSVDRATRISKIGNAVLRAALYMPALSAMRYNPAIVALVTRLKSRGRLKPKQIVVAAMRKLLVLCFGVLKTGKPFDPAIAMGC

SEQ ID NO: 191544 - protein, 433 aa, unidentified
MQDVQDEPLFAERVAGLDIAKTGVEVAIRVPGDTRPGRRQQETRAFATTRSGLESLADWLRCWGVAKLGMEATGDYWKPVFFLLESRGFDCELYNAAQVKALPGRPKTDRADSIWIARITERGMISSSFVPPEPIRRLRTHTRYRRHLTQARTAEKQRVEKLLEDGHLKLSSVISDIHGVSGRDMLSALAAGQRDPRALAQLARGTMRGKIRRLEEALDCCFFTDQHAAVLAMMLTTIDHYTAQIEQLTARIEVLTGPYLHQAGQLDEIDGIGVICAQDIIAEIGTDMTVFPTASHLVSWARWSPQVKQSAGKRKGSNSTGRGNPYLGAALGEAASSAGRTQSFLGARYRRLTRRMPKKKALVATGNSMLTIIHALLSDPDARYTDLGADYYETRMHARRQARNHVKSLERLGYQVTIQALNPAAGQPLTATA

SEQ ID NO: 191545 - protein, 330 aa, unidentified
MKKKDYVGIDVSKEKVDIRLFDSKMDGKFDNKPSGFRKMRSLIEKHVDKDTELLFCFEHTGLYAVPLQVYLEKENMAYHMVSGLQVKRSLGIQRGKNDRVDARRLAEYAQLHREEIKPQNLQSTHLIRLKYLLSMRSRLVRQRAGFMASIKEYKKCLALANTDVMIHVQQEMIKVLDKQVVKLEKEIRGIIASDTKIQSLFNLATSVKGIGLISATYMIVLTNCFTEFKTWRKFACYAGSAPFEHQSGTSVRGKTRISHYANKQMKAILTNAAQSAIQYSPEIRLYYQKRLKEGKHKKIVVNIIRNKLISRVFAVVRRGTPYVELVKYAA

SEQ ID NO: 191546 - protein, 359 aa, unidentified
MNSINKKYGTIKRIGIDLSKNTLQMHGEDEKSRKILERGFSRRSILSFTANLSPCTIAMEACGSSHYWGREFMKQGHTVQLLPAQYVKPFIKSHKNDRIDAEAICEASARPNKRLVPVKTIEQHDIQSLHRVRQNICKNRTALANQIRGLLGEYGIVIPEGIAHVFSEMPSVLEDAENHLSNLIREVLNEQFEELKHIDERFQAITKKIENVAASHPLCRRLMTLEGFGPLTATALYGAVGNGSQFKKGRHMSAWLGVVPKQYSTGGRSRLGRISKHGNCYIRSLMAGGARAVVQYADKKEDRLSKWICQIKGKKGYNVAVIALVNKNMRVAWAVLTKGEEYDITHQEQLAQRYEKAAA

SEQ ID NO: 191547 - protein, 432 aa, unidentified
MEDVREEPLFVQRVASLDIAKAGVEVTIRVPSDTSAGRRQQETRTFGTTRRQLLDLADWLRSWGVTKAGMEATSDYWKPVFFLLESRGFDCDLYNAAQVRALPGRPKTDRADSIWLAKITERGMIAASFVPPEPVRRLRTHTRYRRHLTQARTAEKQRVEKLLEDGHLKLSSVISDIHGVSGRDMLDALAAGQRDPHALAAMARGKMRGKIRRLEEALECSFFTAEHAAVLAMMLAVIDHYTAQISQLTATIDKLAEPYLPQITQPDAVPGIGMICAQDIIAEIGTDMAVFATASHLVSWAKWSPQVRQSAGKRKGSNATGRGNPYLGAALGEAAISAGNTQSFLGARYRKLTRRMPRKKALVATGNSMLTIIHALLSDPAAVYTDLGADYYEQRMHARRQARNHVKSLERLGYKVTIEAIDPATGELTAAS

SEQ ID NO: 191548 - protein, 429 aa, unidentified
MKIIYPRVCGIDVHKKFIVAVICISESVEPVYLKKRFSTFHNDLIRFRDWLIQNDCQNVCMESTGKYYIPVYNILESHISNIVVANPKWVRAVKGEKDDDKDAKWIADLFKLGIVKSSFIPQKDFRILRELTRYKYKLVNMRSSEKNRYQNALTSGNCKLDMVFTDVFGKSASNIIDLILSDNPYTDEDILSKVHKNCKASPDMILNSINGTDLTPVQKSRIELVNHHIKQLSSNIQRLDKLIDLMIEPYEDYISFLCQIPGVSRNSAITILSEIGVDMNQFTSTRRLTSWAGLTPSSNQSAGKKKSVRISRAGVYLKPCLVEVAHAAVKDTNHPYYANKFNKISKRRGKKRAYIAIARKILVAAYHMLLTGEIWNPADLAEVETPVEQRIKYVKNNLKSDIKQLLDIGLTVEELTLMIQQNANNIATQ

SEQ ID NO: 191549 - protein, 458 aa, unidentified
MSNRSSRRLSRGDRRRNDRLARLRAVVTRHSAVLAFDLAADKQVCALTGQDSQVLARRTVTVKAWQLAEVVAWGLARAAEAGFTSVVVACEPTGHRWRVLDRIAAEAGVGLVCVQPLLVHRAREAEDFTRNKNDDSDAMIIARLVTELRCYLPERADPDWARLRHLGARRAELVSDAGAACQQVRELLECAWPAALTAAAKPLEAKSWLAAVTVVLDRVGEGGDLAVVGRWGWTRFATAVRRELPAHGTSRWYSAIVRAVFDAATDSDQAGTGVLEQRSGALERVRFALADLAHARAQVAAVESRMVAVLDQLGLTGLATSIPGLSGVSAATILAESGDPARFSSARALVKHAGLCPRDNASGSYQGKTGISGRGRPELRLAAWRAVWGALHHNPVLAARYAHLVGRPERRLTDAQARVAVAGSLLRQLHAVITTATPWNPAIAAGRYRSEQEAATAA

SEQ ID NO: 191550 - protein, 346 aa, unidentified
MDYCGIDLAGVSSYMYVTDGKGKKLAGGEVATDKVAFARRLKRFVRGGLSIAIEAGNQTAWVYEALIEMGAKVTVVNPAKVKLIAESRRKTDKIDAKILCELLRLDGLPHPVHVPGRETRALRGLLVARRQLVSARTKLCNVVRGMLRQEGIRLPARALSSFVGWRRIQANGFEQDHLPVVVAAYFDTFVSLTDSIREIERLLAKREESDARVAKLKTIPRVGRIASLTFLAAVDDVHRFPSSRKLVGYSGLAPTVRSSGERTQYGSISREGRRELRAVWVQIAHLVAIDKTRATRSLRTWFNKVAKRRGKKTATVALARRLLVIAYHVLRDETEYDAARLKRKAA

SEQ ID NO: 191551 - protein, 353 aa, unidentified
MNSLTDLREAVDVVIGVDTHVATHSAAAIDTATGGVLGEVTVDATAEGYAQLVEFAGDHAVLRAWAIEGTGGHGAGLTRHLADRDEIVIELDRPKRALRRNGAKTDPLDAIRAAREALARPRLGTPRSGGERQALSVLLAARRSAVHAATEAQLQVFSLVIAAPEPIRMRFRGQKLPGMLTTAAGLRLHASWDVETTTTVLALRSLARHFRALNTEAKEHEKAIRTIIRSWRPDLLEEFGVGAIVAATVLCAWSHPGRIHSEAAFAMLAGVAPIPANSGQVTNRYRLIRYGDRQLNRALHIIVQSRIRYDDPTKAYVARRTTEGKTEREIKRCLSRYIARDLYRLLENGPITT

SEQ ID NO: 191552 - protein, 451 aa, unidentified
MFSERTSVGLDVHARTTMAWALDGETGEVFSERLDAETHKVLAWVATLPQPAAVAYEAGPTGFVLARALDSIGLRCVVAAPSKMERPAGDRIKTDKRDAQRLAKLLRMDELPVVRVPTLAEEAARDLVRGRDDVRRDLARARNRISKLLLRQGRVWRGGSGWTYIHHEWLRKQRFDDADTEFAYDNGYEEVLALETMRDRFDQRITDAAARPEWCPVVRRLSCLRGIDTLSALGLAVEVGDWQRFTGATIGAYLGLVPSEHSSGPNRFQGPITKTGNSQARRLLVEASWYHYKPLPRSRRDPAPPDGTGLPAGTATGRPRQPAAPPAVGILPRPEEEHQRRRRRGGPRTRGLVLEFGGDGLTLRGPQNGRREAGRASARDDARGPYEHPLRRATLDCRPEAPSPTNIRSCGNQPADIGLTARRRTTRHRPPAGPTEPPPGPHRRAHTLLPT

SEQ ID NO: 191553 - protein, 345 aa, unidentified
MQLFVGLDVSQVLTHLCVVDPDGRQVWRGKCSTAPDVLAQTIKTYAGSAAKVGIETGPLTPWLVHTLRAAGLDVVCIEARHAHAVMSAAQVNKNDRNDAKALAQLLRTGWYRAVHVKSYSAHQLRAVLGARAQLVTMTTRISNHIRGVMKIFGLVVASATKTTFAARVEELVADRPEVEAVVGPMLDTWRHLRGQIGAFDKQLMAIARARPECRLLMSIPGIGYVSALAFMGAVDVPERFASARAVGAHLGLTPRQHQSGEVDRLGAISKCGDPYVRTILVEAANSLICRYRKPSPLRDWALALQRRSGPKKARTALARKLAVIMLAVWRSGKPYGPSVPAVAMT

SEQ ID NO: 191554 - protein, 320 aa, unidentified
MSDSPVMVGIDVASEHVDVAAIGAAMPLARYGNDPEGHSALAEALVAIEAALVVMEATGGYEAALACALQAAGLKVAVINPRQARDFARSMGRLAKTDRVDAQTLAELAATLARRPDAERFLRPLPDAVQQDLAALVTRRRQLLTMLLSERQRLRLAVAVVRPSVEAVIEMIRKQLDDIEAQMTDHVHRHYAELDTLLQSVGGIGPVASASLIADLPELGRLNRRQIAALVGVAPYAKDSGQHRGRRRIAGGRFELRRALYMATLTATRHNPAIRAFYERLLAAGKLKKVALIACMRKLLTILNAMAKTRTTFDPDHTHA

SEQ ID NO: 191555 - protein, 282 aa, unidentified
MTPAQVYIGIDVAKRRLDVALWPTGELRTVANDATDINELVTWLQTQRPTLIVLEATGGYERAVVASLGATGLPVVVVNPRQVRDFARAVGRLAKTDTLDATVLARFAEAVRPSPRPLPDAQMELLRALVTRRHQVVEMLTAERQRLASVPPAIQGLIQKHIAGLEQELTHLEEELDRTIRQSPLWRARERLLRSVPGIGPAVTAVLLADMPELGQLDRRQVAALVGVAPLNRDSGQHRGRRCIWGGRARVRAALYMAALVATRRNPVVKNCYQRLLASGKA

SEQ ID NO: 191556 - protein, 376 aa, unidentified
MNNVRFVGLDVHAETIAVAVAEPQGEVRAVGVIPNRLESIRRLVKKLGPAEQLRMCYEAGPTGYVLYWQLTALGVKCEVVAPTLVPTKAGDRVKTDRRDALKLARSYRAGDLTPVWVPDAAHEALRDLVRAREAAKKDQLRARHRLGKFLLRHGRRPSTAMRAWTQQHLTWVKTVLFEHAAQEATLLDYLHEVEHQADRIARLERAIDDAVKTAPERVRTVIEALQALRGIAQVSAVTIVTEVGELSRFPKPRQLMGYSGAVASEDSTGPRTRRGGITKTGNAHLRRVVIEAAWAYRYRPAVGDALRKRQACLTPEVKAIAWKAQHRLHGRYCWLTAKGKCKQEVVTAVGRELLGFIWAIGVHVEANRRQASSAAA

SEQ ID NO: 191557 - protein, 387 aa, unidentified
MYFVGIDISKFKHDCAIIDELCDTVMPSWSFSNDREGFSHFKALLDSLEGEKKIGLESTGHYGQNLKQFLESNGFAFMEFNPLLVSRFVRSKSLRNTKTDSIDALSIAQYVMTVEYKPYPSSFYHLDKLKSLTRFRNSLVRQRSKQLVELTNVLDKLFPEFKPFFKDKFSVTALYILAHYQTPERIANMNARSYEALRKLSRGRFTLSNFTQLKALAKNTVGTQSDYLLDQMNILLELYSQLDSKVDELDAQIKECVRGIDPPCLSIPGVGELSAAMILSEFGDFSKFQNPSKMLAFAGLEPGYFQSGQSEYTGHMVKHGSSRLRYALMNCCLPLISNEPVFAAYYTKKRSEGKPHRVALTHVAKKLLRVIYTLQTKNIRYDPTMIH

SEQ ID NO: 191558 - protein, 397 aa, unidentified
MKGFCISLDVSKGTSFYQGFKGLDEPITKPKKIEHNLEGFKELLNLKEKIRKEYNEDCVVVFESTGIYHKPLQTYLDEHDFKYTIISPLLSAKVRKSDIRGTKTDAKDCASIAKVFYLKELRIYSKIDEIYADLKEKSRYYDFLVDEMKRWKIEFRRLLDIIYPGFDKIFDDLYSDFIQAFLLEYSHPEIIRKRRLDTIAKFLEKHTCHKEAYCIRQAQTLKEYTENCASGCSSKSYLVNQFDTVIHNLNAQIKHLEMVLDEIVELAKTLPNYDSIRSIPGIGDNLAARILAEIGDISRFNNASQLVAYSGIDPQIYQSGQMSGLHLKISKKGNKKLRCLLYLAVTCMIRTSREIVIVDFYKKKKADGLASKSALVASMNKLVRIIYSLCKNGCLFE

SEQ ID NO: 191559 - protein, 340 aa, unidentified
MDKRYIGIDLHRNRFTCCIRLENERTYVTEWELEDLGKFVKKLRPGDEVAVEITGNTRLFFDAVVPHVARVVVVDTNQFKVICQSVKKTDPHDARALALYLSKDMLPEVRMKDKEHGQLASLTQTRDTLVKLRTALKNKVNNILSARGLNLAKEALSSEKKLAEVLELPFDDIVRIELRVIVEQIRSLNKSIAELEKTIGEEGSKLEGHKGLSSIKGIGKITGAILLSVIGDVNDFADEGHLASYFGIVPRVSNSNETERSGRIHKRGTKLGRTALVQSALIAANYSPYLKRFYEQVKARRGAGKAIIALARKFLGIIYRTLKNKWVFEDFPNFVLAEAS

SEQ ID NO: 191560 - protein, 410 aa, unidentified
MAERFVGIDVALREHRIAVLDRDGEAVGPSFTIAASTDGVATLLRTLDARAATAAQTLIGLEASGHLWENLEAALVGAGYRVIVLNPLQTRRYRDVVRRKAKTDDIDAHVIAGLLRSGAAQASYVPDEQIQSLRELARLRARLMADRQDYLRQLIAQLDVVLPEHRTALGDLLSARARGILAQFPTAHHLAQASPRAIRRAAEDAGTRGFSLDDATAVRDAARRSIYSGKAAPARAHVVRTLVSQLERLTSAIDDVDRAATTLLPPSEPGAGPSDAQLLQTIPGVGPQTAATLLGELGALTRFTDARALVAYVGFYPVISESGERAATPRLSPVGSRIARHALYLAAVNAVRRSAEWRTLYLRKKAQGKKAKQALIVVAVKLLHTVYAMLKHRQPYNPSRLLVAPPTIGT

SEQ ID NO: 191561 - protein, 408 aa, unidentified
METLHRRCAGLDVHQKEIVACRRVVSGRKARSELARFPTTTRGLVDWSTWLSEAKVTHVAMEATGVYWKPVWHVLCHDFTLVLANASHIRNVPGRKSDANDATWIADLLAHGLIRASFVPPQPIQELRDLTRTRRELTREVVRHTQRIQATLEEANIKLTSVISDILGLSGRRILRAIVAGESDPHVLAGLRHPRLACPHEELVAALDGRLRDHHRFLVGQHLKTIEQIETTIAEFDARLEAALAPFRDAIERLKGMPGISDNVAQTLIAEVGADMSAFPSAGHLISWAGMCPRLDESAGRKRSKCLRKGAPWLKPVLVQAALSATKVKSSSMRARYLSLTPRLGHKKAIIAVAAAMLRTVYHMLKDGTFYQDLGPDYRRPGNPQRAANNLVKRIRALGFAVELKIAA

SEQ ID NO: 191562 - protein, 406 aa, unidentified
MFYGGIDVAKHRHEVCIMEQDGNVILQIFVDNTKDGLDKIIHNLKRLEIEVGNVEFCLEATGHYWLGLYCHLAELGYKVHVINPIQSDALRNFYLRKTKTDRKDAQLLADIVRFGHVSATKLASETVLKLQSLSRLRFEFVRQVGGLKNRVLAILDRIFPEYPQCFSNVFISTSRELLKSFSAPEDLAEADLSELTVFLNKHSRGRLGPERARQIQTLAKGSFGINLALDAFTLELRLLVEQIEFIEEQISVIEDAIDKVMEELRPNKDTAYRHVLETIPGIGPVLAASIIGEIGDINRFLNAKALVAYAGLDATVRASGQFEGTRNRISKRGSPVLRHSIWLAAVAARRFNPEMKQFFEKKRSEGKHTQVATGAVARRLVHLIYSLWKNNRPFDPDYQWSPVISD

SEQ ID NO: 191563 - protein, 334 aa, unidentified
MSFTNFIGIDISKNTFDLALIEENSSEKIITAKFSNTHKGIVALEQFIRKQKLVKQQILFCIEHTGLYCRVLSNYLVENQYAVWLEMPVQILRSLGIQRGKNDQLDAKRIATYAFTFKEKARLWQPPREEVQKIHDLLTLRERLIESRKSILTPIQELEATGLDEVATSLRKHCKKSIEALDKEIKQIEKELDEIIDKDTNLKNKYKLARSVPGIGKITAMTLLYYTNEFSLFRSAKKLACYCGVAPFARESGTSVRGKTRVSNFANKALKKLLPMASMAAISSDKQLKAFYERKVAEGKNKMLVLNAIRNKILHRLVAVIKRNTPFQSEYELV

SEQ ID NO: 191564 - protein, 346 aa, unidentified
MNYIGMDSHITTLDFAVVNEAGRLVKADSVATSVKGFIGFVKTVPQPRTIYMEEGTLAAWALESCVRFGEKLVIADPKKNRWIGSSGQKDDSIDALKLAQLARGGYIKEIHHPVGQRRRFRELMVAYHDTVRSTTRIKNKIKARFRQNGIQCTGITVYAEAYREAWKAKLPKEPTLVLILDNLWRQLEQSEQAEKELLAAAKDQAKHYPEVKNFEALPGVGFIIAATISAILETPYRFADKKKVWRYAGLGIMTRSSGGKTYSEKLGTDYNRLLKCSIKQAAETAIQAKDNPFRQKYLDMTLLHGTAPHRAKLTIARDMMATLLAMWRKGEKYNPEVRGKASRKQG

SEQ ID NO: 191565 - protein, 410 aa, unidentified
MDVFLERCAGLDVHQASVVCCVLIGAPGRKPQKLLRSFGTTTRDLKALRAWLAEHGVTHVGMESTGVYWKPVYAVLEGHLDLTVGNAHHIKNVPGRKTDVKDAEWIAQLVRHGLVAKSFVPPPAIRDLREMVRHRRTLIETRTAVRNRVLKLLEGANIKLSGVASDVFGVSGMAMLEALAAGTNDASEMAGLARGRMRRKHAALEAALEGRMREHQCFLLGMHLRNLKAIDQDLDALDARIETQLEPYQAQHRLLTQIPGVDWVTAASIIAEIGTDMDVFASARRLAAWAGVAPGNYESAGKPKGAGTRRGNVFLKSALFAAASAAVRTKGSYYRDKYNRLRARRGPVRAIMAIAHKLLLAAFHMLSTGEAFRDLGEGYLDQVARKRSTTKLVQRLSNLGYDVMLVPKAA

SEQ ID NO: 191566 - protein, 402 aa, unidentified
MNALGIDVSKGKSMVAIMRPFGEIVSTPFEIKHTSSDINSLVKLIKSIEGESRIVMEHTGRYYEVLAHQLSEANLFVSAINPKLIKDFDNDSLRKVKTDKADSVKIARYALDKWQNLKQYSVMDELRNQLKTMNRQFGFYMKHKTAMKNNLIGILDQTYPGVNTYFDSPARSDGSQKWVDFASTYWHVDCVRKMSINAFIDHYENWCKRKKYNFSKSKAEEIYGKAKELVPVLPKDDITKLIIKQAVDQLNSASITVESLRTLMNETASKLPEYPVVMAMKGVGTSLGPQLMAEIGDVSRFTHKGAITAFAGVDPGVNESGSYEQKSVPTSKRGSSDLRKTLFQVMDVLIKTHPQDDPVYQFLDKKRAQKKPYYVYMTAGANKFLRIYYGRVKEYLASLPES

SEQ ID NO: 191567 - protein, 410 aa, unidentified
MHYKQNHIYVGLDLHKDTHTAVIIDCWNEKLQTIVIENKPSDFTKLLNKVKKVAGDLTPVFGLEDVHGYGRSLAVFLLEKEQIVKEVNSALSYSERMSYPTTKKSDDWDAQCIANVLVRMLEKLPDANPLDLYWTIRMLVNRRNAIVKSITTLTNQLHGQLCNNYPSYKKFFSDVNSKTALVFWENYPSPHHLKGVTDEDLAELLRKPSHNSCSTRKAKTILEIVESDGDTLREYQEARDFIIQSIVRDIRFKSEEIEKVESEMKKLLALLEFKLETIPGIDTVTATTLVAGIGDINRFRNADKLARFAGIAPVNFSSAGKGKDKQSKQGNRQLYATIYFLAVQQIQVSKGKKTPRNQAFLEYYNRKVSEGKTKVQALICVMRRLVNIIHGMMKNKTEYVMPTVELKEAV

SEQ ID NO: 191568 - protein, 376 aa, unidentified
MPRQPDGVPVSKTVAKPGAPRRRPNLQNPNSWQSTSSNRTARTDASGRPSEATNEQKGMAVHVGIDVSKHHLDAHVHESGLAFRVSNDDAGIEELLRRLSEVEPARIVMEATGGYENASFAAMSVRSLPIALVNPRVTRHFAKATNRLAKTDQVDAACLAEFAATLQPKITPLPDEDATELDFLITRRRQLVDQLVAEKNRRSGPQLQRLDGDSRVKQSVDRHITWLEKEIAKFDDQIQQRIQSSPAWKQKDELLQSVPGVGPTTSANLLGHLPELGQLDRKQIAALAGLAPYNADSGQRSMPRHIRGGRAAARTALYMATVAAVTHNPTLRTFHRRLLAAGKAGQVALTASMRKLLTILNAILRDNRPWNPALNP

SEQ ID NO: 191569 - protein, 383 aa, unidentified
MKAVCGLDVHKDSIFLCILHSDGELFEQVFGVLTFQLEEMRKLLQKHHVFEVCMESTSIYWIPIWRVLSPHFTLRLVNPYFIKQLPGHKSDVKDAQWIAECTLKELVRGSFVPPEIIQQLRQYDRRIFDLNAEIVRKVSKVDGVLQRCNIRLSNYVSNIECKSYRDVVRWLSEGVTNPNELMKLVHGRIVNRHGAETILASLTGVVSQAEIDVLRQLHEEIGIAESHRNECQQRMLEICEKHFPEELERLQKIPGIKERAATSLIAEIGTDMSKFETANHLASWSGLRPRNDESNKKIKSRKITHGNVYLRNTIIQCAWAASRQKDCFFSRFSYHQTIVRRKNKMKVIVAVARKLLVAVWHVLHDKTDYVDFKPDREESANNG

SEQ ID NO: 191570 - protein, 308 aa, unidentified
MVCVGIDVSKDRLDVHVLPEAIAFAVARDGKGLAELIERLRPLGPHVVAVEATGGFETVVAAALAGAGLPLVVVNPAQVRHYAQAIGKRAKTDPIDAALIARFAHDTKPDVRPLPDAATQLLADLVARRRQIIEMIVAEKNRERRTAVKRIRKSIARLIGALEKELAEIDAEIDTGVRGSPAWREKEDLLASVPGVGPVTARSLIAELPELGSLDNKQIASLAGLAPYTRQSGQWKGKSMIGGGRKSVRSALFLAALVASRHNPVLKAFRERLVAAGKPKMVAAIAVARKLLTILNAILRDNKPWQPT

SEQ ID NO: 191571 - protein, 339 aa, unidentified
MQLYAGLDLHSRNTYIGIMDKEFKRVFNKRIANKLPLILATLKPFQDQLKGIVVESTFNWYWLIDGLMDAGYHYVHLANPSAMKQYEGIKHTDDQHDAFFLAQMLILGILPQGYIYPKEDRPVRDLARKRLFLVRHKTSHILSLQSLIARCCGKRVSANEIRKFTVEDLQQLLEQEYIVLSAQANLDTIVFLKQQIRQLEKAIKNKVKLSKAFQQLLTVPGIGLILAMTIMLEVGDIGRFPKVGNFASYSRCVSSQRLSDGKNKGHGNRKNGNRYLSWAFTEAAHLSRRYNERFRSYYNRKVAQANTSLATKALSNKLARICYYIMRDQVPFRDNLLSQ

SEQ ID NO: 191572 - protein, 345 aa, unidentified
MPMFAALDVSKKETQVHIVDVSGKCVWRGKVSTTPSDIATVLHPYAKQLEKVGLETGSWSSWLYHGLTDLGFDVACMDARQAHAALSVTVNKTDANDAEGLAHLLRTGLFRDVRVKPWCDLRRRALLRARATLVRTVIDLGNAIRSALRLFGFNMAAGSGSGGARAFERRVEQHLAEQPGLVPVVMPLLDAWRAARKQVARHESSIRAEVRTDERCQLLMTVPGVGHLNALGFVAAIGDTKSFPSGRTAAAWIGLTPRRYQSGEINMQGRISRHGDKLLRSYLYEAAAHILTRAKTDSALKRWGTDLREKIGFKRANVAVARKLAVTLFAMLRTGKPFEAEGVPA

SEQ ID NO: 191573 - protein, 409 aa, unidentified
MMNPLFVGIDVGSRNNVAYLMKPDGSKYSSFSVQNNLGGAKLLSERIVSALGSMQLSDVVIGLEATSIYGDSLVYALREDGRLGQFQRKIHVLNPKQVRKFKEAYPDLPKNDWVDAFVIADHLRFGRIAREVYMDDYRYKALQTLTRARFEVIQNLTREKQRFANYLFLKCSGMAQDKDIANSSSTTIALMERFETVDDLANSDLEELTAFVTETGRGRFADPAATAKAVRAAAKGSYRLPKTVNDTVNQAMSVSIASMRALKEQVKVLDKAIEQQFEIIPNTLTSIPGIGKVYSAGIIAEIGDIHRFDSQASVAKFAGLVWHKNQSGEFEAEHSRMIKSGNRYLRYYLLEAANSVRRCDSEFRRYYDLKFKEVNKYQHKRALALTARKLVRLVFRLLKDNRLYIPPEG

SEQ ID NO: 191574 - protein, 373 aa, unidentified
MPRYSTAFGMDVHLRSTTVCALDAETGEAVARRFRGNPWGEVAEWMSGFPGPSLAAYESGYLGFAPQRELSALGVDCVVAAVSKVPRSAADLSSKNDRNDAARMAKAILSHDVTPVWVPSPEIEGLRDLAAAHDAATARLAAAKQRLLAFLARRGYVYGGTTPAGNPRKYWTYGFLRWLDGIRPADDGGIRALAALRNEVEAADETREAVLAEYRAAVAAGPLSAEVEALQSIKGCAFALAAAFSAEVGDFTRFRSGRQVTAYFGLAPSQRSSADSVRLGGISGAGNALVRRLAVEGSWRYAQAGHQPKLMPKGSGVPLEIRMHGRKGSERLLRRREEMLERGMPQAKANAATAAELVRWLWALGMMCREAGE

SEQ ID NO: 191575 - protein, 391 aa, unidentified
MIFVGIDVAKDKHDCFITNSDGEVLFKPFTITNNLDGFDDLYQKIESVMEDVSKVKVGLEATGHYSYNLLGYLLDKGLPTYVINPLHTNLYRKSLSLRQTKTDKVDARTIASMLMSDVNLKSYSDTSYHNEELKSLTRYRFDKVKERAQLKQSISRLVCILFPELEKLVPTLHQNSVYELLYEFPGAKHVANAHLTRLSNLVETASKGHYTKDTAIMFREAARTSIGSNMPAKSLELKHTIKLIRELDSEIEEIENEIKIIMDKINSPVLSIPGISYRMGAMILAEIGDFTQFDSPDKILAYAGMSPSTYQSGQLDNCHSRMEKRGSRYLRYALFNATIYVCLWDPTFKAYLAKKRSEGKHYYVALSHAAKKLVRVIYKLETSGQQYIKAV

SEQ ID NO: 191576 - protein, 358 aa, unidentified
MEYFAGLDVAMEETAICVIDREGKVALETTATTDPDAIVTVLKPYVAKLRRVGHEAGSLSPWLQVELKQRGVPAICLEAWHARAALAAMRNKTDRADARGIAHIMRTGWFREVHVKSEESYRLRLLLTQRRNLKRKFLDIENAIRHSIKTFGLRVGQVSRGQFEARVRELVADDPLIAGLTDCMLRARAALWQEYVRLHKVVVDFVRRDELCRRLMRIPGVGPISALAFKTAIDDPRRFRQAKTVGAYLGLTSRRWQSGTSIDIAGRISKAGDGDVRHTLYEAANIMLTRFRGFCSLKAWGLRIAKRRGHKRACVAVARKLAGIMFAMWRDGSEFQFKAQRQADGNATSMPKLIGTAA

SEQ ID NO: 191577 - protein, 479 aa, unidentified
MAARKNDNAKVSGAAGQHGGDGAEVTEERVEVVTYAAAIDVAKGFGMVCTRVPGSRADRKRQKVWRVDASYGAVVALMDHLRSEGIQRLVLESTSDYWRIWYYLAEAAGLQVWLVNARDVKHLPGRGKSDREDSVWLCKLNERGMLRRSFVPPEGIRDLRSLTRTRSRLAQDQARHRSRVEKILEDALLKISVVISDLFGTSGRRFPGALVAGQRSPKALAALGDYRLKASTAELEAALTGRFREVHAFEIATHLRLIDAINAEIARLDARIEQQLASIPGVAPACGDCGLIGGGHSPGCASDGTPVLGLVERLDEVTGVGVRNAQVTIAELGTDMSVFPTPGHAAAWARLTSRTLQSGTTTKNGRTGKGNPYLRGALGQSVMAAAKTDTRLGEQYRRIARRRGKQKAIVAVSRVICEISAILIADPGARFTDPGAELQPGKPRTPDPLQDPRPRTPQPRHEGHPHPGRNRRHRLNLHR

SEQ ID NO: 191578 - protein, 316 aa, unidentified
MKNYIGIDVSKSTIDVYDGKKSYKFENSDVGFKHIVSLSKKSKDTVLIFEPTGIYSYALTNFCSTHKIKVVMVGPKESRDFARSLKVRSKTDKIDAKVLYKYQSHVEPKMVRVPVVNHHAVKIQEMLNVYEGILSAKQKFKNQIESTSKEHKDLVRILKRMIDNLDLEAQKLFTKIEHLLLKDTRVKSKYDAISTIPSIGQKSALYLAAFFLKYPSANAKELTALMGLDPVMRDSGIYRGKQRISKHGGQQLRNLLYLPTLCAIQYNDRIKAFYEGLTTRAKTKKLAVIASMRKLILMAFSLFKSEEEYQPLLVSI

SEQ ID NO: 191579 - protein, 384 aa, unidentified
MTTEWYGRLPSSAAALVHMSASCCAAARVSVRAPFSQDGGSEMNAVHTVVGVDVAKNVFQAYWVVAETGEIRNIQIKRAKFLEHFAGRPRCLIGMEACGGAHHWARELSKHGHDVVLLPAKAVGAFVAGNKSDAIDARAIWTAAQQGGIKRVAVKSEAQQAVLALHRMRQQLVKVRTAQSNALRGLLMEYGEVFRQGRASLARGIAAALERIEQRLPRVVVESLMELWQRVGQIDGQVKQIERRLKSLLTEDRNAQRILQIPGVGMLTATAVSATMGQASAFKSGREFAAWLGLVPAHTGTGGKTRMLGISKRGDSYVRTLLIHGARSVFSSTKHPGPWLQKISQRRPLNVAVVALANKMARTIWALLAHGRTYQPDHVSRAST

SEQ ID NO: 191580 - protein, 350 aa, unidentified
MTTIAEPRPGVTGGVDTHLDVHVAAVLSAVGGVLGTAEFPTSAVGYRRLLAWMRSFGDVDRVGVEGTGTYGVNLARYLREQQVPVIEVMRPNRQVRRRYGKTDVVDAIAAARAVLSGEATATPKTHDGAVEALRALKVLQRSATKARTQAINQLRSLLVTAPDELRARLRDLSQRDLLGTCAGFRVAADDDSLAAITRLALRELAQRALFLQEQLTQVRLRLTRITAQTAPDLVALKGVGPDVASALLLAAGDNPQRLTSERSFASLCGTSPVQASSGKTKRHRLNRGGDRQANAALWRITMVRLASDQRSKDYLTKRVTGGKSKPEAIRCLKRYIAREVYAALPIPTTT

SEQ ID NO: 191581 - protein, 378 aa, unidentified
MNRIIKIGMDVHTSNYTLCIFEPSFEHDGTVHCITQVKPEVKNIIHVIETFKKKHENEELNIVCGYEAGCLGYSLYHELKEKGIECVILAPTTMKTEKGGRKLKNDYRDAKMIAECLAYGGYSAVHIPTELDNSVKEFIRMRDDIKENLKSIKQQIIAFLTRNGKQFEGKSFWTRKHIDWINTVSFSEPLLQDTLKEYMIEYNHLCNRIETLDRQIEEISLKEEYVEKVQQLQCLIGIKTHTALSLIVETSDFNRFKKGNMYSAYLGLIPGDDSSGGHENKVGITKAGNSHLRRLLVEAAQGYTRGRVGFKSKDLKSRQEKCSSEVVAYADRANERLRRKYYRMTLRGKKFNVAKTAIARELACFVWGIMTDHIDLCN

SEQ ID NO: 191582 - protein, 338 aa, unidentified
MNAQGFDEFHKVLAAHHGDLGTIVAALESTGPYHLNLYSFLVTKGITTIVVNPLIIANFNKLSLRRTKTDKKDAATIARYLFLNREVLSKLSSCQTTTDLRDLARERESILKMIASMKNDIRRILQTTFPELEQLVDVLCVTMLHFLKAFPSARLINQATPEAVAEGFNQADGRRRISVQYTSIIDLARKSVGTASPSKELILPGRIDTLSYLTQKADEITKMLVKLCKTVRQAELSILTSIRGVASKTATPFLAELGDHRNFKSYKKMIAFSGLDPTIHQSGKYDTPVRQIRGDEHDIREMQSALAENHLQHDLLRHPLRRSVQGSLLQKKGRRPSG

SEQ ID NO: 191583 - protein, 355 aa, unidentified
MKQLEKVLKEVAGIDVAQKELVVSLGRLLESLSIEIFAYKVFVNSDKGIQSMIEWVSSCCENAAQMRYVMEATGVYHERLAYALESMNIDLSVILPNKISNYARSLDIKTVTDKTASQAIAQFGLERKLDNWVRPKDIYRELKQLTRERDQIVEERAMVKNQRHAEKSEAMPNQKSLVRIEDRIKFLNRQEKEIKLDITTLLKSHPELKQRVNNICTIPGVGELTAVTVLAETNGFELIRNKKQLTSYAGFDVKEKQSGTSIKGKPRISKRGNRHLRKSMHLPSLSSVKYNQSHKDLYVRLVSKSGIKMKALIAVQRKMLELIFVIDKNQNPYENDYHQKRVHHTNAEVPLQANL

SEQ ID NO: 191584 - protein, 404 aa, unidentified
MEVLYPRCCGLDVHQKTVVACVIAPGFKETRTFKTMTSDLLELADWIVAKGVTHVAMESTGVYWRPVYNVLETLGLTLLVMNAQHIKAVPGRKTDVKDAEWIADLLRHGLVKGSFIPERPQRELRESVRYRRSLIRQRAQIVNRIQKVLEGANIKLSSVASNIMGVSGRAMLEAIIEGVEDPQVLAALAKGRLKEKRPDLEQALRGLVGPHQRTMLQSQLRIICSLDEEITRMDEEIAERMLSFGDALDRVDGIPGMGRRTAEDVLAEIGVDVNRFPTAAHLASWAKLCPGNNESAGKRKTVTTGHGNPWLRDTLVEAAWAAARTRDTYLAAQYHRLAARRGAKRAIMAVAHSILIIIYSLLRKGEEYRELGVNYFDERNRLAAVRRAVRRIEGLGYQVELQPA

SEQ ID NO: 191585 - protein, 454 aa, unidentified
MAKKAKSLHTKKGLELKIVNPNAAGIDIADTEMQVCVPSDRDGENNRRFGSFTRDLEEISGWLKACGVDTVAMEATGVYWIPLFFRLQEDGFDVILCNARDVKNISEKKTDEADAEWLMLLHSYGLLKPSFQPENEARQVRNLCRHRNALLRSAAREVQHMQKAMEQMNVKLTNVLSDIVGVSGKRIIGAILDDGERDPAALAEMADGRCKRSKEEIALSLEGTWDEDHLFVLRQSRDLYEFYQGMIAQCDAEIEALMKRFPTVVDADLAKFVRSGKKPAKKNAVGFDVEKYAFGVWGVNMMAIPGMSAGSMLQLIGELGSDFTRKFDTPDKFCKWCNLVPNNKISGGKLISSRIPKRKNPTGQIFRLCANTVAKSKDPLGCFFRRIKSKSGHMQAIVATAHKLATIFFVMARDKVEFDQSKVGASEEEILKKKLARLKRELLSVNAELSKSAS

SEQ ID NO: 191586 - protein, 368 aa, unidentified
MSNGTATMSAPAIESSTMTILALDLGKFKSVACRYDPVTGEHAFETIATTPPAVHDLLIEASPAVLVIEACSASGWISDLAESLGIAVRVANTLGEAWKWKRVKRKTDRDDALKLAKLAASDQLPQVHVPALSVRQHRSLIKHRHALIDRRTGIKNTIRSLLDAQGLSMPMRSRGWTIESINELKQLSRPLSECDARTLWRGQLDLELRLLEAVSTLIKEADKKLDAIASQDERVKRLKTIPQVGSRLAELVVTTLDNAKRFKTARQVSAYAGLVPKQYQSGQMNRLGRITGQGPGLLRRVLVQVAWGLQRREETRGHAVFERLCHGQRTRRKQAAVALARKILIWCWAILRDESVWDEMRDRRLAVS

SEQ ID NO: 191587 - protein, 430 aa, unidentified
MNYTQNEKIKQVKKETLVVGVDIAKKHHVARAQDYRGIQYDKPFSFENNYLGFNEFLYWTKKVAKKNDKSEFIVGMEPTGHYWLNIEQFLRSNDIKLVLVNPAHVKKSKSLDDNSPTKNDKKDAKVIAQLVKDGRYSEPNIPEDVYAELRVAMTHRERLVKDLVRIKNKIIQWIDKFFPEFLDVFKSWEGKAALAILSEIPLPEDIVDLSTDEILTVIKKGATRGVGIKRAEKLKETAHKSIGLTEGLKMASIELNNLLQQYDILTSQLETLEEEVKGLLEEVPGAKEMESIKGVGTITIAGFVAEIGDIRNYDHPRQIQRLSGLNLVENSSGKHKGKTKISKRGRPKLRSLLYRVTLSLIGKNNEFNTLYNYYTNRTKNPLKSQQARVALVCKLIRILFALGKKQVKYDGEKMLNDIVRNQDISGKLAA

SEQ ID NO: 191588 - protein, 360 aa, unidentified
MQELIVAEKKKRTRKVVWFIGIDVSKHTLDYAVIYQGELLFHDKRENSKEAIGEFIKELKAQPKFSMAAAIFCMEAMGMYGNHLYSTVNKLKGKITAVNPLIIKNFIGLARGKDDKTDAIRIAFYAQKNTGDLIFRVNERPVLTELRLMFTLRERLLTTAVALRNPLKELEGYAEPKLQKQTLVYTGKSINAIEQSLEEINLVIDRILNNDEELSRLFAIMCSVTGVGRVTALLILITTNEFRDIQCPKKFACYAGVAPFRNESGLMTRRRRVSHLANKKMKSLLHMCALNAIRVDNEITRYFNRKLMEGKPKLLVINAIRYKLICRIFTCIRQNRLFVKHSAGTDITTAASDFMQSNKA

SEQ ID NO: 191589 - protein, 492 aa, unidentified
MTDSMIRFVGLDVHKRVVEACVIDQGGEVVRRERFVLSRRILERFAARVLRSSDCVALEVTTNCWAVADALRPHVARVTVSNPMATRAIAQAKVKTDKVDAHVLAQLLRCDYLPEVWQPDEATRRLRELTGRRSALVGQRTRMRNRIHSVLAMRIVEAPARLFNAEGLQWLGNLELDAQARMLVDSDLRQLDLVRKEIDALDAELARRGYARAEVKLLMTLPGVDVATAEAILAAWGDVQRFPDGDHAASYLGLVPSTKQSANQCYHGPITKRGNSQARWMLIEAAQHLDTHPGPLGCFFRRLLRKKNRNVAVTAAARKLAWIGWRMLVTGEPYRYALPRATQTKLSRLRVKASGQRRKSGSPKGTKCIAKLPGGSRTIRSLDEVCQGEGLPQPQPLSRGEERTVARAGCQALVAQLAQRQVVPRRGASAGTPAAAQPRRRATSSQPPNRASCEDFRPPPAGDQGDESPPPGPPTLSPVPDEKTRKRLLPAS

SEQ ID NO: 191590 - protein, 315 aa, unidentified
MSKIVVIAGIDVSKDKLDVHVLPSHQTFMVARDRRGLTSLVRRLRQAGVEQVALEASGDYERIVIEALEAAGFVVRLLNPARVRAFAEAIGILAKTDPIDARLIALYCQHFPDKGLTRRPEQARKLGEFLNMRTMLLKLAGEIRNSLEHVREAGLKALADSLADDIAAKLKDVDDRIAKVIADDVATTRKARIVRSFTGAGPVLTSSLLARVPELGSVTRHAAARLSGIAPTDRQSGRSKRRSSIEGGRDQVRPVLHMAALAAMRSNPIIKAFAQKLSAAGKPKQLVIAACARKMIVILNAMLRDNTEWKYAKAA

SEQ ID NO: 191591 - protein, 374 aa, unidentified
MSDHKNDVKMKLIIGIDFSKTKFDATIIVAEGINEKAPRVHNVFANNIEGFRDFDKWVDANSGDVDKDEWIFGGENTGEYCKALAYYLYGTGRNIWIEDAYRMKHTMGMVREKSDKADSNRIAEVIMRNHDKAVWYKPEQQGIQDLREVFLWRQTLVCERRRLTVRTGEKQNVEKDVRDVKKALGGRTRAKMCSGSDFVRKLAQKQVRELDKQIKACDAEIKRIIDADEVLSGTKRIVTSIKGIGLQNAAALIVFTNNFARFDLNARKIASYYGIAPFKNESGSSVHCGTHVNSMANKMLKALLSEATLCAIKYCPEIRTYYDRMIMNKKKKQVALNNAKNKLLHIVVAMVRNNTTYNPAYLDSLTKKYDKNVA

SEQ ID NO: 191592 - protein, 459 aa, unidentified
MRRDKPAVSTWEGLKVIHPNAAGLDIGSEEIWAAVAPGRTAEPVRKFGTFTPDLHALADWLTACGVDTVVMESTGVYWIPVYEILAARGFQVQVVNARHVKNVPGRKSDIQDCQWLQGLHSVGLLRGSFRPEGEIVALRAYLRHRAALIEHRAAHIQHMQKALQQMNVQLTQVIADISGVTGLAIIRAILAGERDPQQLATLRQPGCKKSAEQIAKALTGNYRAEHLFALKQALALYDFYTAQLTDCDAEIERQFANLKPVSDDLPPLPPSAKRDSHSKNAPSYDARSLLYRLTGVDLVAISGLNESTVQTIISEVGTDLRAFPSAKHFCSWLGLAPHNDISGGKRLRSRTLKTDNRAGQAFRLAAQSVAKSPESAFGTFYRRMKARLGAKQAIVATAHKIARAFYHMLTHRTPFHDLGGEEYERRARERELKNLEKRAAKLGCSVIKNPADVALVGSF

SEQ ID NO: 191593 - protein, 552 aa, unidentified
MKITLMDHDNTVETESAPAGAETDSVSTVSREYGIMRDVSAMATADAPTFIGAMCPTCRLSSARPMFNGRAAVELHGGVLPRQDFTSIPPKPSPCSYWEGQDMAGKTNRFEEVRRFVAGVDLAGHSDHYVCGPRKDDGTHDIEHFGTTTNELKRMVAWMKERKVESAAMESTSVYWIPVYDTLESAGIEVVLVDTRTVKMVPGRKSDVKDCQWLQRLHSCGLLRGAFRPPEAFNAVRSVIRERGNVLQMRTQAIQAAQKALDQMNIHLHHAVSDIDGVTGMRILGAITDGERDPHALAKLRDKRCRKSESEIAEELTGNWREEHLFNLKQAYRTLCFLDERVAEYDRQIRDMYARIAETFPPTDPPPGGGGKKLKDKEDANAKADLARICGGFDMTKIDGIGYDSAAAILAELGPDLSAFPTERHFVSYIGTAPSLGKSAGKNVSTRNKHKNTSRVGLILKMSASALFRSESSLGARIRCVRSRTCSRTAIKDVAREMGKRIYRGIKHGQAYVDEGEQAYMNRTRERTIRSMKKKISKLGISAEELGIRIAS

SEQ ID NO: 191594 - protein, 335 aa, unidentified
MRYVGLDVHYRSSTYCVLEENGREVQCETIRGHWPKLLDRLRTVAGPWTICFEASCGYGYLYRELSRLASRVVVAHPGQLRLIFRAKRKNDRVDARKLAKLLYLDEVPPAYVPSEDVQSWRELIEHRRRIMDRQTTCKNAIRSLLRSHGKIAPKGLWTKKGLAWLRQEEMPTAAARLKRDLLLDELAEAKRRVRTVTKALDAIGERHPTVLLLRTIPGVGIRTAETVAAYMDNAKRFLRSSQVGAYFGLVPCQDASAGVNRLGHITRQGPATARKYLVEAAWQGVYRSPTIRAYFERVQHGRPERRKIALVATAHYLLRCMHAMLVRNQPWHEAA

SEQ ID NO: 191595 - protein, 317 aa, unidentified
METTSYYVGIDVAQAHLDVAVCPSGEEWRVAHDPDGITFLVERLNALAPALVVLEATGGLEMPLAGELLGAALPVAVVNPRQVRDFARALGKLAKTDTLDAQVLARFGEGAKPQPRPLPDAQTQELKALVVRRRQLVEMTTAEKNRLRRATPRLRSQLQEHIEWLKRQLEGVDKDLGELIRSSPVWRAKEKLLDSVPGVGPVLRATLLAQLPELGALSRRQVCALVGVAPFNRDSGTLRGRRTVWGGRSQVRAALYMGTLVASRFNPVIKAFYQRLCAAGKAKKVALTACMRKLLTVLNSMLKHGNTWNPDLLQQNS

SEQ ID NO: 191596 - protein, 308 aa, unidentified
MKEEVVYCGIDVAKSRLDVALSGQRWEVPNTKAAIARLVQGLEGRAFKAQVICEASGGYEQTLLRALHRSGLAVTLVQPNRVRQFARASGILAKTDRIDAAVLVRFAQAIKPAATAAQPLPLLRLRELDTQRAHLTWLLVREENRLAQLNCAAQLRRFTRSLMHKVQKQIATIDQRIKELIREDETLRCKAQKLISFNGVGERTAALLLAQMPELGQLNRRQVAALAGVAPFNRDSGTMRGKRCIFGGRRALRSGLYMSALTAVRYNPVLAPFYRPLLAAGKPPKLALTAVMRKLLIALNSALTPHPA

SEQ ID NO: 191597 - protein, 356 aa, unidentified
MESMPAPESPVTVGIDTHLDQHVAAVVDQTGRLLDTQAFAASTRGYVALVTWAEGFGAVERIGIEGTGTYGAGLARFARAYGLQVLEVDRPDRSTRRRRGKSDPIDAQAAARATLAGVAATTPKTRDGQVEMIRVLRVARRGALKARVAAAEQLHGVLYSAPEELRQPLLGLKTKALVGICAGMRPGPLTSPTAATKTALRTLARRWQQLQAELDQLDGQLHTLVAAVAPTLLALPGVGVDTAGQLLVTAGDNPQRLRSEAAFAHLCGTAPIPASSGRTDRHRLNRAGDRRANNALWRIALVRMHCHQPTRAYVERRTNQGLSKLDILRCLKRYIAREVYLHLTSPPPTAATACPK

SEQ ID NO: 191598 - protein, 336 aa, unidentified
MVQIYGIDLGMSSFDVSFLSESGSVRHLSGVKNTVHGISKFLLSLPSSAVLCAEHTGVYGDLLLRLCTLNRTCLCFVPGYQIKHSLGLQRGKSDPLDACRIREYAERFYDLLRPCFYPGEEMSELQELYRTRSLLVDSRKRLDTLNIGDNCKSSVSLAADHARRAVLAELNTQISGLDHEIEALIQNSSEFSRNYQILTSIVGVGPVTSCELIIKTENFRKLDTAKKCAAYAGIAPYPKESGKMKCGHKISPMGDKQLKTLLFLCARSAKEHNKEIRLYFLKKHKVEKKHFFVAMNNIANKLLRLIYSLIQKQQTYDRDYIQRDPRCVVISDTHKC

SEQ ID NO: 191599 - protein, 385 aa, unidentified
MSGQTFIPMDYDVFAGLDVDKRSISVTFTTHHGFLKSLRMPYSVEHLLNHVRKHFPAQKVAFAYEAGPTGYGLYDGLVAQEYRCLIASPSMIPKAPGQRVKTNRLDSRGLAETLRGGQLKSIHVPSAVYRELRHLTQLRDTFVSEMAARKQRIKSLLLLEGIEFPPAPAGSQWSVLVKDQLRTLPCSTTVRFKLDQLLDSLAFNEQQVVKTTKEIRRFCQHEPELVQCIKYLMTLPGIGWIVASQLVARIGDWRELRNIRQLGGFLGLVPTEHSTGDRTERGSITHTGDPRLRSKLIQAAWSAIRQDGELREFFRSVCHTHPRPLAARVAIVAVARKLSVRIAVVLMKQRAYEVRKPVHSAPLTPEETVPQGTTRRLPEPGEKNS

SEQ ID NO: 191600 - protein, 341 aa, unidentified
MRKNLYCGVDLHSNNAMYVITDEQDKQLLRKRLPNELPVVLEALAPFRTRLQVVAVESTYNWYWLVDGLQEQEYPVVLAHPSEMDQYDGIKEADDLTDAAFLARLARLNILPTGYIYPKEDRPVRDLLRRRMLLVQQRTGMILSLQNMAQRQTGQRVGWRTLRQLNDQDRAELLGDHDCLAFVTDEQVDLIEVLTEKIKRFEKKVLEHAQLRPVYVRLLTLPGVGVILALTIMLETGDIGRFPTVGDYTSYCRCVRARHLSNGKKKAHNNGKNGNPYLAWAFVEAVHHAVRTCPQAKSFYDRKRAQRNGALATKALAAKWSKAAYYIMKRQEDFDVTRVFG

SEQ ID NO: 191601 - protein, 311 aa, unidentified
MPNPFYAGIDISKNWCDVALEAGDSSARFDQTSEGREDLVAWLKAHGVTHAVLEASGGYERPVLRALDRAGLHACLVPPHRVRALARASGQSAKTDALDARVLAAFGRLLNPRVRQSQGLEVQALATLVRRRRQLVDLLTLEKSRKEQEEDVDILADIKELLDLLRRQLEAVDRRITEQIRANKPLREKHDVLTAFPGVGPVTCAVLLAEMPELGSLDAKQAASLAGLAPFNNDSGSSEKKRAIHGGRAGVRCALYMAALSAIRHNPDIKTFYKRLKDQGKPQKVAHIAAARKIIVILNAKLRDAPIAAGA

SEQ ID NO: 191602 - protein, 345 aa, unidentified
MRIVSLDLHAEASQMFVRDDSGEILREMRIPTNREQLRRAVSEIPGEKYVVFEEGPLSSMVSEALQDLAEEVVSCDPARNALIARDEDSDDERDARHLEKLFRLEAVRPVYIPEEPYLSLRSVLKHRTALQRSATGVKNRIKALARRCDVGAGGKTLYESEKRSTALQQIDSEQMQWQMKSLWRQLDMLSAELQESEREARKLTHRIPAVRRLRTIPGVGFVTSATLVAWIADPRRFKNRSALSAYGGLGLSQKETNWEPTGPAQASRRGNRQLKRVLFLAATAAGRTDSALGFRYRARRRQGWNEIRSKRDVARKILHISWALWRKGTEYDDELVNGPQIGSRS

SEQ ID NO: 191603 - protein, 334 aa, unidentified
MSSLVCGLDVHKNSVYATVMSYGGEIVEKRKLSNDDVVSYLDRYPIDKVAMESSTSIVPIYRALRTKGYTILVSHPKKIRLIAESRIKTDRVDSWALTELARLDALPLSYVPPDNIAALREKVRRRAYLVRMRSKLKVKIRAQLTINGIQPPPEHGLFTSKGVEWLHSLQLDPIESYLPIIQSLDVQIRKLSKELQALAPEDNDVKLLMTIPGVGYYSALLVKSEIGDISRFSDGEKLCSYAGLVPSVSSSGTHTRHGSITKEGSRWLRWIMVECVHTHIKYDTSITRSYHAIAERKGKPVAKVAAARRLLMCCDSVLRNRRPYYDPAGHYESS

SEQ ID NO: 191604 - protein, 446 aa, unidentified
MTDRVRAQALEVAHPNAAGIDIGSGSHFVAVRADADERPVREFLSFTEDLDALAQWLTQCGVDVVAMESTGVYWIPLYELLESRGFVVHLVNSRHVRNVSGRKSDVLDCQWLQQLMSYGLLSGAFRPQEEICVLRAVARQREMLVQYQSKHIQHMQKALTQMNVQLDNVISDLVGATGQKIVRAIVAGERDALKLAQLRDVRIRASEADIVKSLQGNWRAEHLFALKQAVSLYDSYQTSIAECDEQLAQVLGRLAVHDDAPEPPKSGRGRRPVKVEKFDLRKALYRACGVDLTRIEGIDVGTALTMIAEVGPDLSRFKTVKHFASWLGLCPGTKISGGKVLSAASKRTANRLAQALRMSAVAAGRSHSALGAYYRRLAARLGKAKAVRATAHKLARLIYTLMTKGEAYVDQGQDYYEQQHQQRVLKNLKKKALEMGFSLTPVAAAA

SEQ ID NO: 191605 - protein, 384 aa, unidentified
MRRAKKRGPGASHLLMTPDHAGNVVGIDPHKRTLTATVADARGGILASAHFRVSGEGHRELEAWARQFGQIARWGVEGSASWGRHTAMFLAGRGHDVRDVCANRTPRSDRARQRGKSDMLDSERIAREVLAHSLLPKAFKRAGQEQGPDEQHQLLGLWNNRRRSILTGRQHLVGEAEYLLCELPLELREQLPDTKAVRPRLAALTCRNRRRRYDAPTRLRLQLLDGYRAQIKALDDQERQVLAHLEELVDQSGSTLGELCGLSTRSVAELLVEVGDPRRFTEGGFARFDGSAPLPASTAEGPGEPVRHRYNPGGNRRINAILYRMAITQLRCEPRAQAIYANARAGGHTKKEARRVLKRHLSDVIYRRMIRDQAALSAQPLLAA

SEQ ID NO: 191606 - protein, 465 aa, unidentified
MNTRLQNQKKKKKKINLDSMPMLEPNAAGIDISHREHWCAVPADRCDKPVRAFGTFTEDLEKMADWLKECGITTVAMESTGVYWIPAFQVLERRGFKVVLVNARHVKNVSGRKSDILDCQWLQRLHSFGLLNASFRPDDSMCVLRSYLRYRDDLVCARSVQCQHMQKALQQMNVQLHQVLSDVTGLSGLRLIQAILAGERDAKKLAAMVDRRVHASQATIQKALRGDYRAEHLFVLQSAVDLYQTYERKIYLCDEQINAQLAQLPARVDMVQKPLPPRKPGRPQIQDMVAGQDLREELDRCTGVDLSAIEGLGVLTAEVVLSEIGLDMTHWPSEKHFCSWLGLCPDNRISGGKVLSSHSRHVLNRVSDSLRIAAATLTKSKTALGAFFRRMRGKLGAVSAITATAHKLARIIYRLLKHGEAYVRQGLEDYEKKYRERVLHNLKKTAAAFGLELTPAPQQPTPSVS

SEQ ID NO: 191607 - protein, 412 aa, unidentified
MQVIAERCCGLDVHKKTVVACVLITHGDGTVQRQVRTFATMTADLCALADWLSGWGVTHVAMESTGVYWQPVFNILEDDARTIILVNAQHIKHVPGRKTDVRDAAWLADLLRHGLLRASFIPPAPIRELRELTRYRKTLVQERVAEVNRLHKVLEAANLKLASVASDVLGVSGRDMLAALLAGAQDPDALAELARGQLRAKLPDLRRALVGRVKPHHLVLIGRILAHVDFLEQSIAEVQEEIDRSLAPFDEAVTLLDTIPDVGAVVAATLVAEIGTDMSRFPSHNHLSSWVGFCPGNKQSGGKRLSGKTTKGNSYVRAVLGEVAWTISRSPGTYLHAQYQRIARRRGKNRAIVAVAHSVLVIAYHILKDKRPYSDLGADYFDTLDTARIERHHVHRLEQLGYTVTLSPKEAA

SEQ ID NO: 191608 - protein, 379 aa, unidentified
MGHHNEAFIGIDTAKLRNAVAIAEAGRRGEVRYLGEVGTSEAATRKLVAKLSARYDKLTFCYEAGPTGYGLHRLIESLGHSCIVVAPSLIPKKAGDRVKTNRRDAEGLARLLRAGELTGVWVPDARHEAMRELTRARDSARQDLTRKRQQVSSMLLRLGRHYPGIKTWGARHRSWLANLRLDHREQRFVLEELLQAERQAGERIGRLEQAIRTAVADWSLAPLVPALQAMRGIDFVSAVTILAEIGDLSRFANPRQLMAYLGLVPSERSTGESVKRGGITKAGNGRARRVLVEAAWAYRHPPRVGYEKQAQVAAAPRRAREIAWKAQVRLCARFRTLSRKGKKSTVVATAIARELAAFIWAIHREVAGPITAAKTSRRA

SEQ ID NO: 191609 - protein, 389 aa, unidentified
MQPAHTQDFTLDDQTLTASLELASKHWKIALQDGAHRSPSVHTTEQEGAAERLAEAIALIETTRREWRLTPSSPVVIVYEAGQDGFWISRALQQRGYEVVVVDPASIPVERQARRAKTDRLDVIRLLCCLRGWLRGERDRLHAVRVPEVKAEEIRHLVRDRGQLQKEVGQHRDRIRKLLCTVGCWIKVGPAFADQLERGAVVCHDGVALPQCLRQRLMRECERLALVTRQLKELEEKLPETLPEATAQSVAALKKLRGIGQVGAHRLVLELFWRHFDNARQVGSCVGLVPQPYDSGQSRVDQGISKQGNRRVRALLIEMAWMWLRYQPDSALTRWFTRRTGSGTADPAAGKRGKRVAIVAVARKLVVSLWRYLKDGVVPEGAEMKVKMG

SEQ ID NO: 191610 - protein, 353 aa, unidentified
MITVGVDAHKTVHVGVALNEAGEVVGRWSGGNTVAEWERFQAWLADLGDERQVGIEGAGSYGYGLAQALVAIGETVLEVNSRLTALGRRHARRQGKSDALDAQAVAEIVRREGTSLPHVGYDEQASILAHLAEERESLVSEATRVRNRLHALLLKVDPEYKRNAPSLRSKRVIAELRTYESGSAPTGLKGELVASVRRQASRLNDLLIAVEELGEQIEARAVRYQPLTQITGISYLTAGTLAGILGKHTAFRTDAQLASYAGVAPLEASSAGNGRYRLSRAGNRRLNAIIYRIAVAQLRYPGRAKTFVEKKVSQGHSKREAIRSLKRYIVRAIWQQWKLCPPSVAPQTSCACL

SEQ ID NO: 191611 - protein, 438 aa, unidentified
MRAKCNDDLSTVNFSTIGLDVHKNRLVACAVHVQHDAKGREVHEKEYFESTGTYSGRQRLTEWCSSQNADLILMESTGIFWKAPFRDLEKADLHPVLINPRIFNRGSDKRKTDKSDATWLANLARLGLYRASFIPAEPYRSLRLVQSQIKSLVAERQRLKNRLVKVLDDSGFRFTVAFTDIGGASSQSLIAGILEDAPREELALMIDPLCKKSIEEILDAVSGELSQINKDIVQSILRLIETHTKEIETLEQTVIRELKKCEKVKQNIRLMTTIPGVSEKSAQLLMSMIGPDFVENFSSPHAFARWQGVCPGNNESAGQIKSGRTPHGQRLIKKVLTECAQAACHTKGSHLAVLFGGWKHKGFCKAVMAVAHKLALLIHWVVVNQKPYIDKEFDYTGVFKQDGQRRPRWIRALRRYGLMTLADVEKEKAARGWIIAKA

SEQ ID NO: 191612 - protein, 414 aa, unidentified
MSAHPTQIQAAAQLQANTLFASLELSKARWLVTVSAPGSDKLSRHQVPGGDGQALLDLLWRLQATAARRTGAPVMIIVIQEAGLDGFWIHRLLVQNGITSHVVDPASIAVNRRHRRAKTDRIDGVKLLRTLMAWMRGERQVCTMVQPPSPEDEDRRRLARERARLLKERVQHTNRIKGLLSGQGIADYDPLHRDRRARLAALTTGDGRPLPERLKAEIGRELDRLEMVVSQLTVVERERDALVARTAEADACAAPAALARLRGIGPELAALLWLEALFRRFDNRRQIAAYAGLTPSPWQSGGIDREQGIAKSGNPRLRRAMIELAWFWVRHQPGSALSRWFVARVGAARPRAPDRRCGPGSQAARGAVALRDAGRGPGGDRAQSLVPELHPILRAGSRPERRRRASGDRTLPPG

SEQ ID NO: 191613 - protein, 446 aa, unidentified
MDMVFLRCAGLDVHKKSITACRIVPDPTGQEAEGIAELRTFGTMTLELLALADWLTEASITHVAMESTGEYWTPVYNLLEGTFTVFLVNAAHVKNVPGRKTDKADARWLAKLMRFGLLQASFIPPKGQRDVRDLTRYRTKLVQERVREVNRVQGVLERANIKLASVASDIMGVSGRAMLEALIAGKADPATMADLAKRRMRSKIPLLEQALTGVVRDHHRQLLAMQLAHIDFLDEQIDALNTTIETALRALSADAPLSPQPLPRAAASSALPLTVSTPLTFTRAVELLDTIPGVDQRGAEVLVTEIGIDMSRFETAPRLAAWAGVAPGNDESAGKQRSGKTRKGNRSLRAILTQLAHGAVRTKGTYLSALYQRRAARRGKQRAIIAVAHSMMRSVFHMLSRNEVYRELGANYFDERRRHYTVDRLARRIEHLGYRVSLEPVAAPAV

SEQ ID NO: 191614 - protein, 350 aa, unidentified
MEVTTIGIDLAKSEFAVSCADARGKLVVRKQLRRGQVLEFVSRFKRCVAGMEACGGAHHWGRAIGKLGHEVRLMSPALVKPYRTGPKHDRNDADAICEAVGRPKMRWVAAKSVAQQDSLALHRVRAQLMKQRVALSNQLRALLHERGVAARLGAAGLRAGLARALADENAENHEVSGAMRELLVEMSGWLRELEQRISSLSGRIERAAKRDERCTRLMEVPGVGPLSASALVATVGNAREFKRGREMSAYLGLTPRQHSSGGKAVMLGISKHGDRYLRTLLIHGARSLLYRNRRGAHPRAAWAARLIASADPTSPQSRWPTIMHACCGPCSAAATATAPLRNLLLTKERS

SEQ ID NO: 191615 - protein, 307 aa, unidentified
MDITSIGIDVSKRRLDIAVRPSGEVFALDRNPAGLEQLSERLRSLSPQIVALEATGGFETVVAAALAATGLPVVVVNPGQIRAFARALGQRAKTDPIDAMVIAHFAEATGLKPRPLPDEATRLLADLVTRRRQILEMLVAERQRHERMLAAHLRKSIARLIKALEKELFSLDTDIGDAVRSSPAWRDKEDLLASVPGVGPVISRTLIAELPELGQLNRKQIAALVGLAPFTRQSGQWRGKSFIGGGRSAVRSALFMGAKQHNPVLKAFFDRLIAAGKPKMVALIAVARKLLTILNAILRDNKPWQTA

SEQ ID NO: 191616 - protein, 332 aa, unidentified
MDNCIGIDVSKASINIHISKNAQDLKVDNNMKGFKSFHAKLKKLYKKEIENNVFIFEPTGSYSEALRKYCFEQKIKCFIINPKQFSNYAKALGVEVKNDIEDARVLSKALHLAKDGQVKIPVYDKDVERIKELMSYYKFTTKQTTQQKNHLESLESKDGDSFAIRELKKSIKASKIKEQGIINQVQIIIDTNAKYKNDYENIISIMGVGQIGAISLLHLFLKYPEANQRQITSLTGLNPIYKQSGTSLQSGYRISKSGAKTYRGSLFMAAMSAIRYDKNFKAFYERLKSKGKHTTQAQIAVMRKLIITAHSLYKNNRKYDVNYNSQEVKTMG

SEQ ID NO: 191617 - protein, 415 aa, unidentified
MIAAVTECCAGIDVGKKFVVACVLKGPANGDAQAQIRKYGTTNAALTQMRQWLADCGCTHVVMESTGEYWRPIFNVLEEEQTLQIVLANSQQVKGLRGHKTDPEDAHWLAHLLRHGMIRPSYIPQKPIRELRDLTRRRRQLVRNGAQERNRVQKILEGANIKLGNVLSDVFGLSGQLMLEALLNGEASPEQIAQLAQKQAKKKIPQIREALEGHRMSALHRRLIGLSLDHMAFLEEQITALEEEISAHIRASELQSQHEILQTIPGVKQEAASSLLAELGPDMKVFGSPAKCSAWAGVAPGNNESAGRKKRAPALRGNPWVRSTLVECAWSASRKNESEFQNQYERLKPRLGHKRAIVAVAHSLTLVIFQVLSSGEPYTKPGANPMPGTMAARLIRHHTRRLKTLRKRLTRQAKA

SEQ ID NO: 191618 - protein, 452 aa, unidentified
MTRKKVMEMEIVNTKAAGIDVGSRSHYVAVGQSLQDVKEFGVYAEDLILLCQWLKSYGITSVAMESTGDYWQNLFAELIKHGIEVTLCNGKFTKHPKGKKTDVKDCRHIQKLHALGLLTSSFLPDETTEKLRTYTRQRTNMLSLASAASRKMQKYLKFLNFRLDVVVKDVCGLTGLKIIEDICNGNLDPNSLAEHRHYNCRKSKEEIAKALHSNNREDFIFGLKQELESYQFYQKKIRDCDKEISKFIKEEIKKNPDKQKLKTSDKPYKRINKNAPGIPNLNQIAFQYFGGVDLMAIEGLGHASVLSIMSEIGPSGFEKFKSSKDFVSWLRLAPNNKISGGKVLSSKIPKGSNRLKIALRQAANAIGNLKDTHLSDFFKRVAYRRGRQAAVSATARKLGVIIWTMVTHKVQYQPPKEYLFLDQKRKLQMVNRIKKNIAKFDINPQEIGFAIA

SEQ ID NO: 191619 - protein, 387 aa, unidentified
MRPISQTTTQNLSHRQWDDTTLYASLELSQATWLVTSLSPGSEKMSKYSTPGGDGATLLGLLRRLQVRAEQITGGPVDIVVIQEAGLDGFWVHRLLNANGIESHVVDPASIAVPRRRRRAKTDAIDGETLLRTLLAWQRGEPRVCAMVVPPTPEQEDRRRTSRERAILLQERVRHVNRIKGLLAGQGITDYEPLHKDRRAHLAALKTGDGQLLPLRLKAELLREIELIELLIRQIAEVEVERDTVELDAEGSQSPVALLARLKAIGPQIAAVLYLEGLYRSFANRREVAAYAGLVPTPWRSGTIDREQGISKAGNRRLRHIMIELAWLWVRHQPDSALSRWFRARVGTERGRIRRIAIVALARKLLIALWRYVTHGEVPEGAVLKAA

SEQ ID NO: 191620 - protein, 418 aa, unidentified
MNSQTLASPIDRYIAIDIHKHYVLLGGMNAHREWVLRTRKVRMSRFPEWVLKNLIPTDAVVIESTSNAWEVYDLIAPIVAKAVVANPLKVGEISGAKVKTDRLDVERLLTLLIADIVPEVWVPPHHVRDLRSLISHRWRLHKQIAMTKNRLQSFIHRFNLIPPEGKLFSEENRSWWQDQDFSSIVRIQIEQDLLILEHLTAHKEAIHQELACLSNRKPWAEDMVFLMQIPGMGVVLSMTVLSAIGDISRFEHPKNLVGYAGLGAGVHDSGKKHQGKGITKAGRKELRWAMVEAAWSAVGSSPYWKSQYENLKNRSKHSNEAIVAVARKMLVAVWHVLSKREPYRHATQEDLAYKMVIWSQRMDPIALRGMTRQQFVKYGLLRLGVGHDLTRIERNGVPRRIAPTAEVLALKPDLPPPS

SEQ ID NO: 191621 - protein, 342 aa, unidentified
MDYFAGLDVSVKETSVCIVDDAGKIVREAKVASEPEALLQVLTNTLYRFKRVGLEAGLSQWLYSVLAEAGLPVICVETRHMRAILKAQINKTDRNDARGLAQMMRVGLYRPVHVKTLRSQKLRVLLTHRKLLQSKAIAIENDLRATLRNFGLKVGMVGTVKFEARIRELAESLPDVAVLVEPLLVVRRVLREQVGILHRRLLAIVRDDDVCRRLMTIPGVGPVVALTYRATVDVPARFRNSKAVGAVLGLTPSRYQSGESDRIGRISRCGDEMMRMMLYEAAQSMLVRSAKWSWLKAWAMKIARHRGIKKAIVALARRLAVIMHRIWVDGTEFRWTKEVAAA

SEQ ID NO: 191622 - protein, 460 aa, unidentified
MVIDPDKQSGPRRIEVPLFVALGNGEHVWQCLGRTCDVTIVFLSREAMMQVIIERCAGLDVHQETVVACVLIGTPGVRPSKEIRTFRTMTRDLEALRDWLKAAGVTHVGMESTGVYWRPVYGVLEGHFELIVGNARHIRNVPGRKTDVKDAEWIADLVRHGLIAKSFVPPKPLRELRELLRYRRKLVESQAAERNRLLKLLETANIKLASVASDVFGVSGKAMLKALILGTASAEEMAALAKGQLRRKHADLVLALDGKIEDYHRFLLTMQLRRLDTAELDIIALDQRIDEKLEPYRTQHTLLMQIPGVEWLVAAVLIAEIGIDMSQFLSVFHLAAWAGVCPGSYESAGKQKSGRARKGNVHLRTILVGAAISASRTKGSYLKDKFYRLKARRGALRAALAIAHKILVAAYHMLAKGVPYKDLGDAYLDHIGHTRTLANLKRRIERLGYHVILEPQAAAA

SEQ ID NO: 191623 - protein, 357 aa, unidentified
MSSKHNGAIASVIGIDIGKNSFHIIGQDQHGAIVLRQKWSRGQLEARLANVPPCLIGMEACVGAHHLSRKLQALGHDARLMPAKYVRPYSKGQKNDFRDAEAIAEAVQRPTMKFVATKTADQLDLQALHRVRERLVSQRTGITNQIRAFLLERGIAVRQGLRFLRAELPRILATRADVLSPRMLRLVEDLAGDWHRLDERIEGLSAEIEALARQDKGCERLMTVPGIGPIISSAMVAAIGTGDAFAKGRDFGAWLGLVPKQISTGDRTILGSISKRGNRYLRALFVQAAWVVLVKLRPDQWQSYGLKSWIEAAKKRLHHNVLAIALANKLARIAWAVLNKGRAFECVKTDETASQPA

SEQ ID NO: 191624 - protein, 347 aa, unidentified
MSISMIGLDTAKTVFQIHGVDETGRAEIRRKLRRNDLIAFFEKQAACTVVMEACGAAHHWARMLTGLGHSVKLIAPEAVKPFVKKGKKNDAADAAAICEAASRPDVKFVPAKSVEQQGILALHAARSLLVKQQTMLANAMRGLATEFGITVPKGIHKLDELMVVVDADEIMPKQAKQAIIGLHDYCNNLSEGIETFEAEIVAHARRDETARRLATIPGIGPITASLIAATVGDITLFKTARQFAAWLGLVPRQSSTGGKTRLGRITKTGNREIRKLLVLGATSMVYRADGWNSAVGAWLRSVLERRPVRLVTVALANKMARIAWAVMTRKEVYRPKGGVAAVSQATA

SEQ ID NO: 191625 - protein, 338 aa, unidentified
MELSVIGMDIAKNVFQLHCVDRQTGEIERIKLRRNEVLPYFARRTPALVAMEACGGAHWWARQLQQLGHTVRLLPAKAVRPFVLRNKTDAADARAIWTAVQQPEMKTVAIKTEYQQSILALHRMRAQLLKFRHMQTNAIRGLLLEFGHPLPESDLALRKAFPTVMATLDKQLPGILIETLREQWARVQSLDNEIALIEGRLKRALAETPTCQMISDIPGVGLMTATAAVATMGDPASFKTGREFAAWLGLVPRQTGTGGRIRQLGISKRGDAYLRTLLMHGARAIIARRRYSDWVAGLIARRPYSVVIAAIANKLARTIWAVLATGKRYDGAAFAAAI

SEQ ID NO: 191626 - protein, 417 aa, unidentified
MNSPPEINPIQRYIGIDIHKYYVMIGGQNRHQEWTLRPRQVQMARFRSWAEKNLKPEDEVVVEATSNVWDIYDIVVPLVRKTVVANAYKVRQIAEARVKTDKEDIKRLITLLIADIVPEVWVPPMYVRELRSLISFRWRLTKQITMSKNRLHSVVQRFNLDPPEGGLLTDKNKSWWDRQEFSDLTGFQVERDLEIVEHLEGQKEAIDQKLAELSNTEPWASDMVYLMQIPGFGLIFSMVILSAIGDISRFARPRELVGYAGLGAGVHASGEKYQEKSITKEGRKELRWALVEAAWVAVRSDPYWKAQLKRLEKRMHRNKAIVAIARRLLVSIWHILTKREPYHHFDEETIAYKMLIWSWAMDEKSRDGMTPQQFAKYGLLRLGIGQDLERIVRGGAPRRIAPTEEILALKPELAPPR

SEQ ID NO: 191627 - protein, 317 aa, unidentified
MAKDTMTCAGIDTGKRKLDVALNGRKERLQVDNDPQGHLTLLAWLRRHRVKRIGIEASGGYEQEVVATLRGHGMTVIVFQPAQVRAYARFTLQRAKNDKIDAALIAACTAATKKIHAAPDPRFAALAQHLTFIDQLGEDAARLKNRCETCRDPRQVVFWRSEIARIEKLERTEIKMLVAAIRQHEDLATRLDLIESVDGIGVPTAVAILVRMPEIGCLSREQAAALAGLAPYDDDSGTYAGERHIAGGRERLRRALYQAALPAANFWNPHLKAIYKRLRAKGKEHKRALVACARKLLIYANTVVARGKPWVRQPAAS

SEQ ID NO: 191628 - protein, 340 aa, unidentified
MRQLYAGCDLHGNSNLIGIVDGEGKRVFKKKLSNDFSLVRDTLKLFQEELVGIAVESTYNWYWLVDALMEEGYKVHLANPAAIQQYSGLKHADDKHDAFWLAEMLRLGILPEGYIYPKEERPVRDLLRKRGHLVRLRTSLILSLENIISRNFGSKLPVNHVKGLRKDRVTPLFEGNEDLALAGRVSKETIDFLTHQIRQIEGVVEKRIQLKEAYRYLLTLHGVGKILGLTIMLETGPIGRFETVGDYTSYCRKVPSQWISNEKRKGSGNRKNGNKYLSWAYAEASDFARRLHPESRAYYNRKMQQSNPAVAHSALSHKLARAAYYIMRDQVAFRPEKLFG

SEQ ID NO: 191629 - protein, 424 aa, unidentified
MNLTQNDRLKQVTSDTLIVGVDVGSQTHFCRAFDWRGFELSRRVFKFSNTGMGFLTFLRWTEELMNKTEMKKVIVGCEPTGCYWLTFQKFLQDHDIQLVTVNPFTVNRSMELDDNSPEKSDLKDPKTIALLVKDGRFSTSYLPSGVYAEIREASVCRDQIMKQHVRLSNQIQGWIQKFFPEYFECYADWDSTSGLMLLREAPLPQDILKIGAGGINQIWRNAKVRAVGIKRAQTLVEAAQNSVGLEAGEAARFEIWVFVNDYIFKAEQLKRLDEYLEEKVKEVPNVEKLLAIKGVGMSTVIGFIAEVGDIGRFTDPKQIQKLAGMEIVKKSSGKKKGQPRISKRGRRKLRRTMYESARALMTWNPAFQDVFLYYRNRTKNPLGGMQAKIAVACKAIRIFYVVLQTGCDFDEEKFRKDIIRPEAA

SEQ ID NO: 191630 - protein, 335 aa, unidentified
MKKIYVGIDISKEKCNLCFRSGLEIVREEECSNDVKALKKAFKAALKVLGASVDEVLVCAEYTGRYIYPLTVACQELGIFLWMDDPTRIKNSMGLTRGKNDAIDAARIAEYAFRYSDKAIRYCIPDAALVSMKNLLADREFLLIDRKRYQSQLTDQKKYMAPGDFKHKSSRWKKVIKSIDEQIAAIDTEIETLIAADPVLTRQKELLLSIDGIGERIAINMIAITGGFTRFQNARQFCSFAGLTPYKYDSGTSVRSKAKISKRANQTMKALLHLAAVGAATHMKEGEYKDYYERKTKEGKHVMCVLNVIRAKLVHRMFSVIKRDTEYTKEYKPAC

SEQ ID NO: 191631 - protein, 465 aa, unidentified
MPTDKKGTRSRKERKELARQLRSEDPGLEVVHPDAAGIDVGNSAHYVAVRPGRDKEPVQRFECFTADLYRMANWLRSCGVKSVAMQSTGVYWIPLYDILEDSGFEVFLVNARHTKNLPGRKSDVQESQWLLKLHTHGLLNNSFQPASEIRVLRTYWRQRSEHATGMATCVQRMQKALTQMNIQLANVISDLSGRTGQAIIRAILAGERNPQKLAALSDRRIHATKKEIANSLEGNWRSELLFVVKQQLEMYDIYQQRIAECDQKLQEHLAGFADAVLPEPKVGPSLGKKTRQHRYMPQFPLTGELLRIAGVDLTQIDGVDVMTAQTLISEVGLDMNRWKTEAHFASWLGLCPDNRISGDKVLSRGTRRVINRAATALRIAATTLLKSKTYLGAQYRRLRTRLGAPKAITAMAHRLARLVYRMLKYGQQYVDKGAEYYEQKSRRQHIDFLTKRAAQLGFRLTPTRT

SEQ ID NO: 191632 - protein, 367 aa, unidentified
MTIVAHAHPFVVGVDTHAKNHALSILATPAGVQVDDGEFPTTAAGMARAIDWVARRTGGDLAVLWVIECAASFGSQLAHAVTAAGYQVVEAARMSAKANRGVGKSDPLDARRIAAAVLPLELDRLRHLRKDDGVRVGLRVLIAARDHMTGERTATVNALIALLRVLDLGIDARKPLTAAQIIEVSKWRTRTEDIGAAIARAEAVRLAKRVIVLEAELAQNTKTTTDLLRRSPARVLLDKPGISPVTAAVAMAAWSHDGRLRSEAAFASLAGVNPIPASSGNTVRRRLNRGGDRRLNQALHMAVVVRTRMDPATKAYVERRLTEGHTKKEIRRCLKRYLARQIYRTLTAVTRADEALAAVTSATPIPA

SEQ ID NO: 191633 - protein, 346 aa, unidentified
MKKIFIGIDFSKEKFDATVIKAEGVEERAERQHEVFDNKVSGFRRLLRWVKSVVDEQDTGLWLFCGENTGGYSRALCNYLYGSGYDMWLENALSIKRSSALQRTKSDKADAGIIAEYAMRNYDQMRLYKPLDKNLERLREVFLYRHNLVKLKASMTVRKGEKKQTQEKSDISRFMAMSSKHLISEFNKKIAECDMRIEKIICEDEELRRSFEIITSVPGVGTQNAVCLMVYTDNFSRFDYDSRKIACYYGVAPFGRQSGTSVNTPPHVSPFANKLIKALLTQAALASIQFCTQMAIYYHRLVEAGKKKPVAVNNVKNKLLHIITAMVRKQEMYNPDHDYHAALKAA

SEQ ID NO: 191634 - protein, 348 aa, unidentified
MTIVENNPDTVIGGVDTHVDVHVAAAMNHVGGVLGVEAFPTTRVGYRRLLGWLRSHGELTLVGVEGTGSYGVGLSRYLARAGVRVVEVDRPNRQVRHRHGKSDPVDAVAAARAALGGTATGLPKSRDGNVEAIRVLMIARRSAVDTRIETLNQLRHMVFTATPEIRARFTGLTAISLANQASALRPRPGSDAVRYTTLVTIRALGQRVQYLRDETKGLNRLLRPLLRESAPELLNVFGVGFDTAAKLLVAAGDNPERIRTEAAWGHLCGVAPIPASSGKTRRYRLNRGGNRQANSALYHIVITRMRHDQRTRDYVARRLAEGKTIGEISRILKRYAAREVFKHLPRPA

SEQ ID NO: 191635 - protein, 364 aa, unidentified
MNQIIRIGMDTSKHFFQLHGVDAAERPILRRKLRRKEVFAFFATLPPTVIGMEACGASHYWARELGQRGHTVKLIAPQHVKPYIKRNKNDGRDAEGLCEAMSRPTMQFVPAKTAEQQAALMLAGMRERLVAQRTQLSNAIRGYAAEFGLVAAKGLDKIEPLLADISADEALPVMARELFAMHGREYAQLQAELKAVEARLKAWHRANADSRRLAQIPGIGPIGATALVMKAPDPRLFPSGRHFAAWIGLTPKDHSTAGKTRLGKITRAGDERLRSGHRRNPAGEARPWPCVALAARPAEAQVAKTRGGGARQQDCPHRLEAIGDGRKLRRHADAWRIGIRRLRDQPVGGFAAPAEPELQEENRW

SEQ ID NO: 191636 - protein, 409 aa, unidentified
MVVIGIDAHTRSHTAAAVDEHGRELGTLTVGAGADGLEALDAWIAERGPVQLVAIEGARGFGLPITRRLLTAGAEVVDVPTHLTAFGRRSSRSRGKDDESDAVTIARVALREPGLPRLRLSHLTADLKLLVHARDQVVAEGTRVRNRLHALLLALAPGYRDSTGALATEAALRRARRLVRRAEASDPVRARLALAAIRRLRAVEAEAGELEAEIRALVDASDAPRLLAICGVGPIVAAKILGETHDVGRFPTAAAYAAHAGVAPVPASSGTTTRHRLNRGGNRQLNRALFTVAIVQARWWCWTRARRLDIAAPEPGGGHPPGRDGPRRAGRRVAHDGQALPHTGLDDPAHRRHSVDDPGRPAQGGCRRLRSDQAGGRLTPLDGARPAWAVPPDSSGLGPHYPRTINHLF

SEQ ID NO: 191637 - protein, 316 aa, unidentified
MAKPVTKITLGIDVAKDQLVICQWGCEQLFTLVNQPAEIQAWLETLCGPVRLAIEPTSHYHLAVVEAALACGHQVYLVNPRQLVHYRYAVDVRNKTDAVDAWLLARYLEHEAAQLRPFRPQDRRAQRLWALLTRRATVVQSRQQLQQSFAEVRLSIQALLSQFQQLLQRLDQQIQHLLRELGWWPDYLRCQSIPGIGPANAAALVAAYHRGAFAGSYAFIAYLGLDIRLRESGRFKGKSKLTKRGEPELRRLLYCGSNAACNHPRFAAYRQRQLDKGLSKIAARVALARKLARIAFTLMNQQETFATEQKTHCMAP

SEQ ID NO: 191638 - protein, 441 aa, unidentified
MIRRNVAGIDLGSERHWVCAPTPDGSGREIASFGATTVELMRMAEWMKSRSVESVAMESTGVYWIPPHEVLEGQGLQVLLVDTRQLARVPGRDKKTDPTDCEWIQRLHSCGLLRGSFRPEEAVCMLRTLVRDRANLVAERGDWLRRMQKSLDQMNVRVHRAVSDIDGVTGMAILRAIAGGERDGQKLAKLRDPRCSKTEQEIAEQLSGHWREDHLFGLQQALKMYDAVQERIAAYEQEILRKLGEMERAEQRGQTAPPLKNANKAKMIKKRGQEPVRQALFRMSGVDITHIDAIAVETVEVVLSEYGPDLSRFPTEKQFVSHATLAPHVPTSGGKPIRKRRRNSASTRVAAALRMAALSLRHSQTALGAYYRKMAQRLGGDIAVFATARKLATLIYRLLRWGQPYVDEGATAYETRYCQQRIRRLAATAKELGYQLAPINA

SEQ ID NO: 191639 - protein, 350 aa, unidentified
MNLKYSVGLDVSSKKINVCISIIDEKQKVVCKSSTEISNTLKGFAILEDWIIKHKKESIPVVVCMEATGIYHENCACYLYGKGFNVSIILPNKAKKYLEAIGLKSKNDSIDAKGLSQMGAEQCLELWQPMGTFFYELRLLTRQHQNVTELKTVLKNQLDALSYAMHHLDSVTNQLKQTITLFETQLKELDKEIRAHLKSNKEVFEKAENILKMKGLGVLTLSTVLAETNGFTLFKNYKQLVSYAGYDVVEAQSGTRVGKTKISKKGNSRIRRAMHMPSLVVIQCQVKPFKDLFERTYEKHGIKMKSYVAVQKKLLTMIYHLWNKNEQYNSNYQINIQEEEHEFSLGQLAS

SEQ ID NO: 191640 - protein, 342 aa, unidentified
MGSVKRGGRSCHSMSALVCGLDVRKDSTYATILSPEGKIVNQTRMENERVLPYLSHFKVSKVGMESSNQIAQLFRQLTAKGYDVVVSHPKKTRYIAEAKIKSDRVDSKAIAELVRLDALPLAYFPTGEIAKLREKVRRRAFLVRERVKLRVKVKSVLTYEGLKWPSEHGLFTKKGVEWLHQLKIDSIESYLRILESLDEEIKLLSKDLVGVAEDDEEVKLLMTIPGIGYYSAVLMKSEIGDIGRFPFPERLCSYAGLVPSTHASGKSVWHGGITKEGSRWLRWVMVEAAQTHVHKYDTSITRAYSRIAEKRGKKIATVAAARRLLMVSFSVLKNKKPFYDQA

SEQ ID NO: 191641 - protein, 351 aa, unidentified
MIVIGIDPHKATHTAVAIDGSSARPRGERTARARQDGFGELMAWARALADERVWALEDCRHVSGSLERFLLAHGETVIRISPQLMGDARRGQARERGKSDPIDALAVARVAVRDGMDSFPHAQLAGRELEIRLLHDHRARLVADRTALTNDLRWHVFDLWPDYEIAPRTLSLLVHQQRLARRLQAAEPTARVRVARDELRRVRELTRAISELGRELAKLVATVAPALAGDRGSGPILTAAFVGEIAGITRFATAAKLARAAGAAPVPVWSGRSDGRLRLDRGGNRRLNHALHLYALSRIRFDPATAAYIARQRAHGKTQREAVRLLKRHLVNRVWRLLQADAPPAPAAVNC

SEQ ID NO: 191642 - protein, 345 aa, unidentified
MELHTIGIDLGKTVFHLVGLNLRGEVVVRKKFSRTQLLRFTANVHVGLIGMEACGGAHFLGRALREQRHEVRLIPAQYVKPYVKTNKTDYIDAEAIAEAVARPTMRFVPIKTDDQLDMQSLHRVRERWVMRRTAVINQIRSLLLERGITVRKGRRYVDAALPLILEDADAKLSGAARMLLAQLKLDLDQLAARIDEADAVIGKTAHENEACRRLVAIPGIGPVTATALIATIGNGGAFHKGREFAAWLGIVPREHSTGGQQKLLGISKRGNSYLRRLFVQGARAVMQQRSKQSFGLSAWLAQLTARTHRNVAAVALANKLARIAWAVLAKNEQYRPQVLADVAAA

SEQ ID NO: 191643 - protein, 328 aa, unidentified
MKMAHSEAVVGIDVSSSKLDAHMLGPDTDESRQITNDTTGHRELVTWARAKRARTVVMEASGGYERDLARALRRAGFAVYVVDPKRVRHYAKAVGQLAKTDRIDARVIAEYGTTMLAAGRLALPHPDDPQRNRLSELLGARAALIEHRDGLQQQSRAMPAGPARQVLKDAHGSMQLRIKRIERDIGALIAGHAAFATLARRLRTVPCLGPVAVAALIAWLPELGYAGRSQICALVGVAPTANDSGDREGRRHIAGGRKKLRNILYMPMVAAIRCNPVLAAYYKRLVARGKEPKVALIACMRKLLVIVTAMIANQQDWVPRSDTQAAAA

SEQ ID NO: 191644 - protein, 410 aa, unidentified
MEVLYQRCCGLDVHKETVTACLRVVSSGEVVSEVRTFETTTASLIALSEWLAENGCTHVAMEATGVYWKPVWHILDDGDFQLILANAAHVKNVPGRKTDVNDATWLADLLAHGLIRASFVPDTQTQELRTLLRTRKQLVREKSSHILRVQKMLEDANIKLDSVITDVMGMSGRAMIEALIAGESNPAKLARLANYRLRASQEKLREALRGRVTKHHRFLLRLHLNQIDALDASIVMIDEQVEAGIAPFRAAVGQVMTIPGIRDIGAQVIVSEIGTDMSRFPSEGHLISWAGLCPRNDESAGKRRSNRLRKGAPWLKTTLVQCAWAAVRKKGSYLQAQFLRLKARRGPKKAIMAVAASILTAIYHMLKDGTLYQDLGSNHFQNRSKGQQTKRLVKRLADLGYKVALTPLAG

SEQ ID NO: 191645 - protein, 376 aa, unidentified
MREKLRFLGLDVHAETIAVAVAEPDGEVRSLGTIANREDSIRKFIKKLGSPDQLRACYEAGATGFVLYWQLAQLDVECTVVAPTLVPKKPGDRVKTDRRDALKLARSHRSGDLTAVWVPDEASEALRDLVRQREAAKQDQLRARHRLTKFLLRSGQRAPLGVKAWTVRYMQWLAQVRYTQPAQEVTRLDCMNEVEHMSARVKRLEEAILEVVKQAPQAMQELIRGLQALRGIAHISAVTIASELGNVSSRFESARKLMGYSGAFPSENSSGNRIRKGAITKAGNAHLRRIVMESAWCYRHLPRVGEKLRKRQQGIPAEIIEIAWKAQNRLHKRYTKLAMAGKDQRKVITAVGRELLGFIWAIGVKAEQASRQPLAA

SEQ ID NO: 191646 - protein, 348 aa, unidentified
MGLYAGIDLHSKSNHLAIIDENRKRVLKKKLANDPDLILGVLAPYQGEIAGIVVESTYNWYWLVDLLQENGYRVHLANPAAIQKYAGQKHVDDTHDAFWLAELLQLCILPEGYIYPKETRALRDLLRKRQQLVRVRTSLILSLQNIVTRNFGIKLSASDLKILTEDRVQPYLQENEDLLLAGSANKSCIDSLTLQIVRIEKAVEKKLKLLPPYIQLLTLPGVGRTLAMTIMLETGPISRFDKVGRYASYCRKVSSKWTSNEKVKGHGNKKNGNRYLAWAFSEAAEHARRHHAGSRHFYQRKLRQKKNMMVAHNALAHKLARAAYWILRDNVPFQEAKMFGQLEATLYN

SEQ ID NO: 191647 - protein, 425 aa, unidentified
MKITQTAQKIKVNFAMDVSVDVHKDTLNIFFETNGKEYVDECSNRTTVIQKKLKQYHEVALAHGMKTLRIICEPTGEYQNKLFRTARKMGFLTCYVNAESVAKFRVVETNDNGKTDTKDPRVIRTLGQLNKTIRHRILDDDYLTLRKLNKVLDEVDEVKKGIRCRISKLLVEMFCDYSFEKDFLYIPSGRALVDKFGCNPYRIANAGYRRFCAAMKKEAPRIRESTLKRLWDDAESSALNEQPEGYIEVIETQLKQLIEDYWRNQQRSEAIIEKMIEILDRLRSKDPNIPKAVKGVINDKHIARLLGETGPLGDFTNWRMLMRYAGLNIRMRQSGRYSGLNKITKKGRSLLRKVLQRIIFPLVRRNCLYGPYYHRKKEIDKMPGNKIITCVSRHFLKKFYGWYKSGEAFDQQRFFSCETQYRKAA

SEQ ID NO: 191648 - protein, 357 aa, unidentified
MMNQVNQLDFERQPFFIGLDVHKKSWTVTIRSNQMHLKTFSMNPSSQELCRYMNKHYPGGLYHTVYEAGYCGFWIQKQLEGCGFHSIVINPADVPTTHKEKTNKRDKVDSRKLSRELENGSLRGIYIPDEFHQQLRTLCRLRYRIIQSQTRVKNRIKGILSFYGIFLPDHCELSHWSRAFIRWLQSLEFSFPMGTESLRFCIEELLGHRKRLAELIRVLRKNINQYELSQLINNICSVPGIGFVTATTLYCELIDINRFYNLDHLASYVGLVPSVAGSGDWESDRGLTFRYNQHLRYLLVEAAWIAVRKDPVLTLKFSQLTRRMTKQNAIIRIAKKLLSRVRYVWKHKERYVPGVIK

SEQ ID NO: 191649 - protein, 350 aa, unidentified
MFVGIDVHKHTHAAALIDERGGELGTLTFANSPAGYERLLGWLAERDAKLAVIGVESPGSYGRCLTGALAAAGHEVLHVPAWRTHRERRRQGPGKTDPGDALAIADVVRRKRAELGPALQPELVRAIATLELQRRRFVLDRTQAIQRLRSDWTQVDPVAEANVVHCQRLTALRKLKRLQLGDGLAERTAAACIRQLARDIEDLNARIADLETEIATLLEQHGNPVAELLGAGNQIAAALIANAGDVRRFKNAAAFARYCGAAPIPCGSGQTSGRHRLHRGGNRQLNAALYRIAIVQQRHHPQAKAFLARKIAEGKTAREARRALKRHLANVVYRHLLTWANSCPEMNLLT

SEQ ID NO: 191650 - protein, 408 aa, unidentified
MDRITCGIDWAEGHHDVAISDSAGTVLARRRIDTGVIGFTELEELFAAHSHEPGTVPVAIETDKNLLVVALQAAGHPVYPINPRAVARYRERYGQAGGKSDPGDARVLADILRTAVHRHRVMPRMSANALAIKALARQHQEAIWAEHQTISRLRSVLLEFYPQALQAFPNLKHKAALAVLAAASTPTQGKQLSRRSLVTLLHRCGRRNDPALVDRVLADLKTPSLHQPATVETALGLTVNGLVHVIAAMQSTVHSLEAALATEFDQHPLAPVLRSAPGLGPVLAARVLAEVGDDPDRFATAQGLRAFAGTAPITRASGRSRFVNARRVRNKRLADACHWWAFSALTKSTGARTHYDLRRAAGDTHNAALRNLANKNLGRLWWCLIHEQLWDETHAWPSNNDLSQPAAA

SEQ ID NO: 191651 - protein, 355 aa, unidentified
MNYIGVDCHISSLSFAVVNERGNVSREDQVNTGVKEFMEFVRSIPKPRKIIIEEGTLSAWVLETCSTFGEEVIITDPKHNRWIGRAGEKGDAIDATKLAQLARGGYIKEIHHLVGNRRRFKELVFFYHDTVKSQTRIKNKLKSKFSQNGIRCSGKTVYLSKYREEWKRRLPKERVVHLMVEGLWCQLEQIEEVKEELLRNIRIQSRHYPEIKMFKQLPGIGIVHAATISAILGTPHRFPNKKKVWMYAGLGLAERGSGGKVYSRALTRNYNRLLKYAVKQATEAAIIAGDNQFRRQYLRLTFEQGIPSHRAKLTVARSILATLYGMWKNGSEYDADIDKKRLEGKENISSCIPSR

SEQ ID NO: 191652 - protein, 421 aa, unidentified
MKKADTRKVKFVKDSTLIVAVDIGMEMNRGYCTTPDGRDIKPFQFGNTREGMDKLWGMVMASKNRFQCNEVIVGYESTGPYGEPFLHYLVKKDVKIVQVNPMHTKRIKEISDNSPLKTDDKDPRVIADIIRWGHALSIVIPEGDGAYLRRLNNSRERHVRERTALLNQLQQLVFVLFPEFKTVMKDIKCQTPLYILHKYLTPEAISVLDRDTLGQEMRKQSRGKFREHHAGMLINLAGNTIGIKEGIDGISLDIRHILVQLEMLNVLIGEIESEMETALHRIPYSSKLLSIKGLGVVSVAGIIGEIGDFTKFRTQAEIMKLAGLDLYEISSGRWKGQRKISKRGRSLLRKILYYAAMQAIRKDGILHDYYTRLTEKGMKRMKALVAASRKLLGIIYAIVRDDSEYLVNFESIKRQVIKKAA

SEQ ID NO: 191653 - protein, 371 aa, unidentified
MAALTIVAQTRPFVIGVDCHARTHTYAVIEASTKRQVACEQFPTTSAGISRALAWVGRRTDGDMACLWAVEGIGSYGACLARAVADAGYDVAEAPRMNARGRRAIGKSDPLDAAAIGNAVIGLEESHLRAPRRDEGTRAGLRVLSAARDQLTRERTVNVNALIALLRAHDLGIDARKPLVPAQYTTITRWRERQEQIELSIAREEAVRLARRVLEVTAQLTANQKRLTELIQQSPAAPLLEMVGAGAVTVATVLTAWSHPGRVRSEAAFASLAGVNPLPASSGNTVRHRLNRGGDRRLNRALHTITMTRMVHDPRTRDYVAKRTQEGRSYREIRRSLKRYIARILYRQLNSLYATAELARSHVAGVDPYPE

SEQ ID NO: 191654 - protein, 343 aa, unidentified
MAYFAGLDVSVKETSVCIVDDAGKIVREARVASEPEALLQVLANTIYRFKRVGLEAGPLSQWLYSILAEAGLPVICVETRHMRAVLKAQINKTDRNDARGIAQMMRVGLYRLVHVKTLRSQKLRMLMTHRKLLQSKAIAIENDLRATLRNFGLKVGVVGAVKFEARIKELVENLPDLIVLVEPLLIVRRVIREQVDILHRRLLAIVRDDDVCRRLMTVPGVGPVVALTYRATVDVPARFRNSKAVGAVFGLTPAKYQSGQNDRTGAISRCGDEMMRMMLYEAAQSMLARSAKWSWLKAWAMKIARHRGMKKAIVALARRLAVIMHRIWVDGTAFRWTREVAAV

SEQ ID NO: 191655 - protein, 338 aa, unidentified
MKVTTVGLDLAKSVFTVHGVDERGNTVLRKTVRRAKVLELFVQLPACVVGMEACSGAQHWARELRKLGHDPRIMAGEFVEPYRQGGKNDANDAAAICEAVSRPKMRFVAIKSVEQQAVLAVHRLRQGLVEERTALANRVRGLLTEYGLVIGVGLDRLRRALPAILEDGANGVPGIARQVFADAEQQLHELDARIAAYDQRIAALARASAPAQRLMKIGGVGPVTATALVASVGDAKLFRNGRQFAAWLGLTPRQHSTGGKQRLGAMTKHGDVYLRTMLIHGARAVLRVTPKRSDAKSRWVESLRRRRPDNVAAVALAAKHARIIWALLARTQEYQPAV

SEQ ID NO: 191656 - protein, 349 aa, unidentified
MSQSLNSAVAVIGIDIGKNSFHVVGLDDRGAIVLRQKWSRGQIEARLANMPPCLIGMEACVGAHHLSRKLKAFGHDARLMPAKYVRPYSKGQKNDFRDAEAIAEAVQRPTMKFVATKTADQLDLQALHRVRERLVSQRTGIINQIRAFLLERGVAVRQGLRFLRAELPRILAAPPDVLSPRMARIIKDLAEDWRRLDERVDHLSSEIAVLARQDAGCERLMSVPGIGPIISSAMVAAIGTGDAFAKGRDFAAWLGLVPKQLSTGDRTILGKISKRGNRYLRVLFVQAAWVVLIKPMSWQRHGLKHWIEAAKKRLHRNVLAIALANKLARIAWGVLAGSRTFEATKLQAA

SEQ ID NO: 191657 - protein, 435 aa, unidentified
MSTLGVDLAVRAAHVATLSSDRGEVIWSRRRFTSHPHDLAALSAAVGPTSELTVVMEPTRSAWVVVAAHFRATGAKVVMIAPEQSADLRNYYKKHTKNDRLDSLVLSRVPLLHPEGLTEVSGLGPAEPLKRAVRRRVDIVDQRGACHQRIDAMLDLLGPAYNEALGSRGTKTSAVVLERYGNPKTLRRLGLSRLTDLVRKTSGGHLDAEYAARLLEAATQAITLWKGGGLDFDELAWDLAQEVRLINQLDVEIERLDGRIAELYQLADPKGIVRSAPGVGPVLSAGIAGRLGDATRFANLAAVRSFSGIVPGVNQSGFTETRPGITKQGDPGLRRDLFLAAELARHQDPQLAAKYYRLIMERRLHHYSAICHLATTLVTRIAACMRSGQLYVVRDVDGTPVNSEEARAIIAKRYSIPPAARRRSRIPDAVSEPTR

SEQ ID NO: 191658 - protein, 423 aa, unidentified
MRQGPGCQGAPLVPHNTSTSASEVFAGIDWGGSFHQVCLINAHGEVIVQQRVQHDLAGLAELDRLLLVHRNAASRLRVAIERADGLLVEHLHTIEVEVFCVSPKISARARERYRLAAAKSDAFDAFVLADTLRHEHRHWRALSPASPALAELRAISRDRDRVVIAQQATENRLRAVLEAYHPAPLHLFSSLDRDITLDFVTDYPTPEQAARVGEARMQQFCRRHGYSGRTDPTVLVERLRPHLLSAAEGTEAGKAFSATMFTEELRLLNAHLRAYDKRLVELLDQHPDAPIFTSFPGIGPVVAAALISEMGEDRGRFPAPEALLAEAGLSPVTRASGRTRQVRFRYAANRRMRHMIDWWAFVAAREDAWSRRIYDDARARRQGKYRALRGLGSRWTRILWRCWTDHTTYDPAIHHKQQEPAQA

SEQ ID NO: 191659 - protein, 343 aa, unidentified
MTYYAGLDVSQKETSICIVDEQGRRLWRGTAPTDPEALAQILCRHGSDLQVGIETGPLMPWLVHELRRRGLEVICLDARHAKAALAMQLNKTDRNDAEGLAQIVRTGWYRSVHVKSFEAHRLRALLGARRQLVGMTTQLSNHIRGILKVFGLVVGPAHGRTFSERVETLVADQPAVAGIVRPMVQVWRALKEQIARFDKAVRQEVRQRAECRLLMSVPGIGALSVLAYVSAIEHPERFRQSRNVGAHLGLTPRRYQSGEVDRSGRISKCGDELVRSYLFEAAGVLLTRVQRWSPLKAWAVRLVQRSGFNKARVALARKLAVILHTIWRTGEPFRWTNLEAAAA

SEQ ID NO: 191660 - protein, 352 aa, unidentified
MSHKSAPSTAVGTIGIDLGKNSFHLVGLDQRGAIVLQLKCSRAQLERRLANIPSCLIGMEACSGAHYIGRQLAALGHDVRLIPAQYVKPFLKGHKNDYRDAEAIAEAVQRPTMHFVAIKTPEQMDLLALHRVRSRLVGQRTGVINQIRGFLIERGITVRQGVVPLRKALPDILSSYTDALSPRMVNLITELVQDWRRLDERIAAVSAEIESLAEQDEGCQRMMTVPGVGPIISSAVVAAIGNGAGFTQGRDFGAWLRLVPKQESTGDRTILGKISKRGNKYLRTLFVQAAHVVLVRRPRAAMRGLWPWIEQASKRLHRNMLAIALANKLARIAWAVLARGREYQPRIAPHAV

SEQ ID NO: 191661 - protein, 372 aa, unidentified
MNYTTVFVGMDVHKESFSLCCYTIDEEKAKHFQKTPADYKNVLKYLEFLRSVYGNDAHFVCGYEAGCLGYSLYHQLTANNVKCEILAPTTMLEQRSKKRIKTDKRDAEIIAKCLAQHNYSSVHIPSALDEETKEFLRMRDDHKLALKKVKQQILAFCLRHNYRYEGNSHWTAAHLNWLKSLKPEGLYKEILDEYLLTYTNLSDKIERFDNRIEELASKDEYKESVQKLRCFIGVKTHTALAVLVEVGDFKRFQSAQKFASYLGLVPGEDSSGDDRTRLGITKAGNRHVRQLLTEVSQCYGRGQIGYKSKELKSRQKGNTPQVIAYADKANERLRRKYYKMVLGKAKKHNVAKIAIARELACFMWGMMTDHVA

SEQ ID NO: 191662 - protein, 325 aa, unidentified
MSEVTIIGIDLAKRVFQLHGARYNGSVAFRKKLSRGQLLAFIARHPKCVIAMEACATAHGWGREFGKLGHEVRLIPPVYVKPFVKRQKNDAADAEAIVEAALRPTMRFVAVKTEDQQARAMLFRTRQMFVGQRTQMINALRGHLAEHGLVAARGPAHLKRLADAIAEDDTSLPDEVRELGQMYLEQIDGLSARIAELDGKMKRAAKEANLARRAQTMPGVGPVTALAIETFAPDLATFKRGRDFAAWLGLVPKQHSTGGKARLGKTSKMGQRDIRTLLVSGAMAVLQAVERFDTPKNGWLKRLLVPSRMITFPLGDQRFSWQDRF

SEQ ID NO: 191663 - protein, 362 aa, unidentified
MLVVQRSEKKEKSALKISVGLDVHKEKWAVAIYEDGELKKTYSQQSSVEVLVKHLRRYYEGIEIELAYEAGCCGFWIQRSLQKAGLMCMVVHAADIPSTDWDRRRKNDKLDARKIGYLLSRGLLKGIYIPSEDQEHLRNIVRGRATVGKLKRGYMSRIRAHLLRYGISLPQELKGKLWQKRGQAWLSEHSLVDKGLARLQKMYNMLRNEELSVLKMMHQELEQGSYSALYKYLLSIPGIGRCTAALLISELGDINRFKHLDHLASYCGLVPDVRSSAGREKVLGLSRRGNRRLRTALVESAWVAKRWDESLANTYSTAIEQGKCPQKAIVKVARRLLNRIRAVWKKGEYYQKGQEQAIKARA

SEQ ID NO: 191664 - protein, 414 aa, unidentified
MDVVVERCAGLDVHRDSVVATVRVPGTGKSRRRREQQSRSFGTTIRQLETLADWLQGFGVTLVGMEATGVYWKPVFYVLERRFECWLLNAQHLHNVPGRKSDVIDSAWCCQLLEHGLVRPSFVPPPEIRRLRDLTRLCVAQVEERTRAIQRLEKVLQDAGIKLSSVASSTYSASARAILEALLGGVSDPDALAELAKGRLRAKIPQLQEALANRFDLAHHGVLVAGLLAHIDWLDQTVATLDARIAAATQPHAELVELLCTIPGVRVNTARVLIAECGLDMSVFGSAEHLVSWAAICPGLNASGGRRRSGKTRHGNRWLRKTLTEAARAAARSKNTYLASHYWQIRGRRGDAKAIGATRHDILIAYYHIVRERVPFRELGPDWLARRHSVEHRTRRLVKQLEALGHTVTLEAAA

SEQ ID NO: 191665 - protein, 402 aa, unidentified
MNSVGIDISKGRSMVAAMRPFGEVVISPFEVHHTDSELSELAKLLKSLDGETRVVMEATGNYHAPVAQLLHDAGLYVSVVNAKLVHSYGNNDLRRVKTDRKDAVKLANYGLDRWLTLPRYIPEENTRLLLKNCYRQYRQYSKVQTVLKNNLISLLDTVFPNANRLFNSPARADGSEKWVDFVAEFWHCKCVCERSEKAFVNKYQRWCRKHGYNFSEDKAHAIYDEASGHIGVMPKAETTKLLVEQAVSQLRTTSAALAALKQEMHSLASQLPEYPVVMEMFGIGPTLGPQLMAEIGDVRRFYSKKALVAYAGIDAPPNDSGDVIGRHKSMSKVGASSLRRTLFLVMSIYLQTSPPDEPIYQFMDRKRTEGKPYRVYMMASANKFLRIYYATVKAYLESLEQI

SEQ ID NO: 191666 - protein, 391 aa, unidentified
MGCPMPQRNDLSRSLVPFQQDGTLVAVIELSRSSWLVAGIVPGLERHPLKKLAPDEDALLRLLHRWRDEAAKAGCAITRLAVAFEAGRDGFWLARWLRAREVEAHVIHPTSIAVSREHRRAKTDRLDTGLLKRAFLGWLRGEPGHCTMAAVPTLEEEDAKRPSREREGLVGERTRIVNRMKGALARLGVRGFKPTLRKACERLGTLRTAEGAPLPPNTLAELRRDMARLRLVREQIAEVEAARLQRLEEEPGSRPHAMVRLLARVIGVGVETADMLVREVLSRDLRDRRAVARYAGLTGSPDESGRRRREKGLAKAGNARVRHGMVQLAWRFLLFQRESALARWYRERTADARGGTRKTMIVALARKLLIALWRLVTTGAMPEGVVLRPAA

SEQ ID NO: 191667 - protein, 326 aa, unidentified
MNIIGIDVSKAKLDCAWFRDVARGKVKNRVFMNTPKDYPLLVAWAKKQSGEDIEALHFVMEATGIYHEAVAHALHDMGARVSVVNPAQIRDYARSLGARTKTDKKDSVVIARFGLTQQPRLWQPEPLEIRTLKALISRLEAVEQDIQREKNRLEKADIACTSEEVMISIQTVLKQLEEEKKRLEALIRRHIDGHPQLKQDEQLLQSIPGVGPVLSRLMMSVLRSRDFESAPQCAAFVGLVPVQYESGSSVRGRSHLSKTGCAHVRAKLYMAAVVALQYNPDIKRQYERLIKKGKTKMCALGAAMRKLVHICFGVLKHQKNYQPQAA

SEQ ID NO: 191668 - protein, 410 aa, unidentified
MYGKAGPMIYAGIDIAKNDHVVGATDERGREAAKPMKFANSASGFDRCAAYLDGLSESKSDLLVGMEATGHYWLPLFCRLQDEGYAVVVINPMRTDAMRRFKGSSRVKTDMIDCALIAETLRCGGFQPSRLGDEAMIELRQLTRLHQALKESVADLKRQVIVALDQVFPEYDSVFSDTFGESSKAFLKRCPTPEECLAVRADSLAKTLERASRGKLGRAKADEIKGIAKASCGIGLATSAFSFQIKLLIDQIDFIEGQVSEVEARIRAGIEEVEPLILTIPGIGYALGAQVVSEIGDVRRFRNASSIVKYAGINPSVSQSGKFSSEESHITKQGSPYLRRALYLAAMAQLKLKSPFYDYYAKKRADGKSHREALVAVARKLVHVIYAVLSKQEPYDPNVTKNPELASRSE

SEQ ID NO: 191669 - protein, 341 aa, unidentified
MDTISLIGIDLGKHCFHLHAQSASGRMVFRKKLTRSQMLTLLGNLPRCTVVMEACAGAHWVARRVEVLGHQAKLISPQFVKPFLLGNKNDFADAQAICEAASRPGMRFVSPRNETQQTLSAMHRVRESLIRDRTGTINQIHAFLLEFGISLPKGIAVIRRLPAILAAHDLPPRLIALLERLQAHFKYLDEQVSAVERELMQQLREDERSQRLLEIPGIGPVTASVLATELGDAGQFASARQFAASIGLVPRQYSTGGKPTLLGISKRGDKNLRRLLVQGARAVMQQIERRPDRLGCWVRSLLTRRHSNVVACALANKLARIAWAVLARGTHYQGEQAVTAA

SEQ ID NO: 191670 - protein, 350 aa, unidentified
MNEYIAFDSHKRYTWVEHEQVATRKMKQYRIEHAPGAIRRALAGCAPGTPVAVETTGNWYWIVSEIEQARQQPRLVHARKAKLMMGLINKTDKLDAHGLNVLQRNGTLPTVWIPPGPLRDLRELTRTRLVLTAERTRLKNRISATLAKWGTPASEYSDRYGQRGRSELEQNFERLPEQTRWVSRQLLAQLDFVSGQVRAIEERLKTLVEVNESMQLLMTLPGVAEILGATIALEIGEVSRFPSAAQLASYAGTTPRVHASGGKVRYGPLRQDVNRYLKWAFAEAANSVAVNHRRHPEWHVNRLYQRVRAKSHAKAVGAVARHLAESAFHVLHRKQAYRDPTLERGCTHPG

SEQ ID NO: 191671 - protein, 371 aa, unidentified
MEHTRFVGLDIHKERISISVAESGRSGAVEYLGEISNDPVAIGKLCDRLGRPGKPLAFCYEAGPCGYGVHRQLTSLGHRCDVVAPSLIPTKPGDRVKTNRRDATMLARLHRAGELTPVWVPDADHEAMRDLIRLRSVVRQIVTRARQHLQGFLLRHGRKHGRGTAWRMAYRRWLSTLAFEHPAQQIAFQDYTDAAMDAERRLKRVEEQISGLLPEWNLRPVVDALQAMRGIALINAVVLVAEVGDFTRFSNPRQLMAYFGLVPGERSSGETIRRVGITKTGNAHARRALVEGAWAYRMKARIGRHKVDRIEALPKIIRDIGWKAQVRLCTRYRRLRARGKTANVVNVAIAREMVGFIWSIACTVQSAPKTA

SEQ ID NO: 191672 - protein, 344 aa, unidentified
MKNCNVIGIDLAKNIIQVCIINKHGEVRSNKAMSPLKLKEFLTKSSPSIVAFEGASTCHYWGRFASNLSHDVRVIGPRKVKAFLQGQKTDANDALAIAVAATQPGMLFSQLKNEEQQVLQSLETSRRFLDKHRVSLENHIRAFLYEYGITVARGAKYLRQSVLDILSEGSDELPHHLLAPLLSLWEQYRDTVKRVAAIEKELTQLVKRTDACQRLKALEGVGDVCAIKLFTSLGNGEGFKNGRQASAYIGVTPKQYSSGGKVSMKGIDKVGGNKVLRANLFMGARAVIKALPDKPRTSKEQWLIALIKRVGEKRACIALANKTVRTAWALLASGEKYKSTALVA

SEQ ID NO: 191673 - protein, 343 aa, unidentified
MQVITTIGLDIAKSVFQVHGVDAGGQVVMRRQLKRRYVLTFFQKLPPCLVGIEACASSHHWSRELQALGHKVRLMPPAYVKPYVKRQKNDATDAEAICEAVSRPNMRFVETKTPEQQSCLVLHRTRHLFIRQQTAVINAIRAHLAEFGIIAPVGRNGVEQLLGVVADASDKRLPEVARACVAALGAQLQMLKAQILEFDRMIRAWHRSSEASRRLDDCPGIGPALATALVATVADPKVFRSGRNFSAWIGLVPKQHSSGGKDRLGSISKQGDRYLRGLFVAGALAVIRYAKIHGTKHRPWLTALLARRPTKVAAIALANKMARMAWAMMAKGERYKEPAALAA

SEQ ID NO: 191674 - protein, 323 aa, unidentified
MDKDKQIIGVDVSKDTLDLYSEDKGHLKVSNNEKGFKELRKHYGKDGVYVMEATGSYHQQFATYMYGKGISVSVVNPLSVKRYIQMKLCRNKTDKSDAKMISMYGASERPKLWSPPSVYIEMSIAIQGVISKYLRERTGLKNKLHSLTSKGIKKGLVIQSLKRSIDRLSKEIQKLEEEKERLIKEHEPALLSNLQSIPGIGRKTAMLLISGTNGFRDFDNHRQVISYIGLSPIEYSSGTSVRKQSRISKTGNPQIRNHLFLCSFTASEHNKQCNALYERITAKGKSKKLALVAVCNKLIKQAFAIAKSGIPYDSEYRSVSPTS

SEQ ID NO: 191675 - protein, 411 aa, unidentified
MDVVKPRCAGLDVHKKTVVACVREPGQRRGERRGETKTFATTMRGLGELRDWLLAHEVTDVAMESTGVYWRPVYAVLEGTVELVLVNARHVKMVPGRKTDVKDCEWLAQLLECGLLRSSFVPPPPVRDLRDLTRLRKALIRERSHHVNRIAKTLELAQIKLGSVITDIMGKTGRAIVHALSTGIDDPDRLAACAQGNVRKKRAALREAVVGRLTPHYAFLLQPHLSLIETLDAHIATLDTRIEAAMAPFAAELALIQTMPGVAKRAGEAILAETGVDMTQFPTAGHFASWARLCPGNHQSAGTRYNTTTGKGATWLRATLQEAAWAAARSKNSYYRALYHRIKGRRGAKKAIVAVQHAMLVALWHMLKNRVAHHDLGVDYFDRRNTERVRRHHVRRLEHLGYDVVLVQKAA

SEQ ID NO: 191676 - protein, 458 aa, unidentified
MKKEAFTLSCIGLDCHKNFSLASARDVSGRIVWRQRVEHADRDAFRKQIRCWARNTPVILEATFGWGWISDELKDAGLDVHLCSGRKVSGVRQARQMAKTNKKDADLLSELWTEKQRWWEVWTAPPAVRDMRELLRRRMSLVQTQTQLKNQIHATLHRHGLVQPFSDLFGSGGRRWLAEKIQDTTAPLRAMGRETLVGQLRMLDQVRQEVAQLTRQFRKQVLGHPAARRLMTLPGVSTVLAYTIVAEIGQIERFKTSRGLSRYSTLAPMSDDSGDEPTGTPMGRHVGKAGRAALKWAWIEAARMAVRKSPAMRLLFDHHTHGGTRDRNRGYIAVAHRMCQIGYVLWKNEVDCTESPPPRPGSKPPPLEMIQVTGEQTPAEQTTTQTNARTSLRSDRCEAPLRKTPMQKASVFCGENKKEKLNPVAGPINIRDVSRPGTDQPNPALAAERQPTFRQTEK

SEQ ID NO: 191677 - protein, 345 aa, unidentified
MEHFAGLDVSVKDTSVCIVDETGEIVREVKVASEPEALLAVLKSPAYRFKRLGLEAGPLSQWLFSALAEADLPVICVETRHMRAVLKAQINKTDRNDARGIAQMMRVGLYRPVHVKTLRSQKLRMLLTHRKLLQSKAIAIDNDLRATLRNFGLKVGLVGAVRFEARIRELVEDLPDLAALVEPLLIVRQALREQFGILHRRLLAAVRNDEVCRRLMTVPGVGPVVALTYRATVDVPVRFRKSKSVGAVFGLTPARDQSGERDCMGTISRCGDEMMRTALYEGAQVMLTHSAKWSWLKAWAMQIARRRGMKKAIVALARRLAVIMHRIWVDGTDFRWTREELAKAA

SEQ ID NO: 191678 - protein, 335 aa, unidentified
MQIYGIDLAKEKFDVSFFNPTVKNCSGTAEHKVIRNTDKGIQKFLSSLPADAVLVAEHTGIYGDRLLKHCTDSHIDIAYVGGHVIHTYKSSPDRGKTDEQDCAVLREFGERFADKLTFKKFPQAEIYGLRQLARHRSMLVEDRKRYVTADKGEDCRPCRETFVKESMKRIVAMLDEEIAATERQMQHLISSRKELEKNYDIITSVKGVGLVTAVEILVKTDNFTTITTARQYAAYAGTAPYEKSSGKMNKGRHISRIGNRRSKTLLYICAESARMHNKDIKLFYERRRTIDKKAHHYVLNAIANKLLRIIFTLIAKGQKFDDKFIRKDPRQIKHN

SEQ ID NO: 191679 - protein, 412 aa, unidentified
MYYVGIDIAKRSHVACVMREDNSLIVKPFEFLSTQSGFKKLLAHLQSLSCDLSDVIIGMEATGLLFENLYRYLKEMAYRVVLLNPYQTSKFREMDTMKRVKNDNIDSVMIAALIKSGRFSEGYVSDEQLQSLRELYRHKASLDDQLKAIKRQTGTLLAVVFPELEQIVSDPFNVTGMTLLEKYPTAKHYDYASTDRILKTFRGIKGNNFNETKALKLLELAKESIYSGAAKEARAMSIRSNIALMRLLQTQMDECDEEMLRLFQAKSASKEDQEIMSDLIDNLRSIPGVGDKTILALLAECGNLDRFTDAKALVGYLGLYPTLEQSGGTIKHGRLAKRGARLAKKAIYLASIAAIRHNKELHTLYDKYRSKGRAKKECVIIVARKLIQIIYSIYIRNTPYDPIRVFVPKPNQ

SEQ ID NO: 191680 - protein, 429 aa, unidentified
MNCTQNKKIEQVKETTMIVGIDVGSEKHYFRAFNWRGIELTRKPVAFSNSMEGFNSFYNTIVELMQKSELEEALVGIEPTGHYWFALGQFMGEKDIKFVMVNPHHVHKTKELDDNSPSKNDRKDPRVIAGLVRDGRYFYSYMPTGVYAELRNASNRRFVLVEEQTRAKNRLQKWIAVYFPEYKGIYTHIDAKGGMLVLKKAPTPEEIVRLGVEGIIKIWKDAKLRGNGHKKAMLILAAAMRSIGLKAGLTEARMEIQDLIEDYELQTKRLERVNDLIKELCQQIRYADKLLEIKGIGITTVAGFIAEVGDITRFDSTKELQKLAGLELVADSSGKHNGKTKISKRGRKRLRYLLFEAAISVVGKNEEFKEIHRYYTTREKNPLKKMQSLIAVACKLIRVFHVILTKGISYDASKMLKDIRHPGEQLKAA

SEQ ID NO: 191681 - protein, 312 aa, unidentified
MTRIICGVDVSAATLDARIGRDGPWQQFARTIEDISQLARFCKDHQANLVVMEATGGYERLPFAQLWAAGLPSAIINPRSVRQFAEAMGALEKTDKIDTAMIAWFAEVRHIEPMPLPRNNQQRFTALVVRMRQLVELRMAQDNQRRLVTDPAALASFTTVLAAINKQLRTLELQVIDLIDADPLWLALDVAFREIRGVADRTIARLIAHLPEIGTLSGKAVAKLAGLAPIARDSGKKIGRRPVRGGREPVRSILYTVAELVRRHDPDFKAFHARLRAAGKPARAVRIAVARKLLVRLNAKARDVRKALAVTA

SEQ ID NO: 191682 - protein, 369 aa, unidentified
MNERITHVAMDDSKRKIIAGVLRPEATEPELRSIPNEPRHLRRFFERLQREGRVVACSEAGPSGYDLYRQLTALDVPCQVIAPALTPRRPGDRIKTDRRDAAKLVRLFRAGELTPIHVPDEASEAVRDLVRCREDAQEDLRRWRHRLLKFLARHGRVYRDGRNWSQRHWAWLRTQRFTLPALDRTAQEYRWTVEQLLARVADLDREIAAFAETAPYREPVGWLRCFRGIDTLAAMTLLVEIGDFQRFRTPRELMAYLGLVPSEASSGDREQRGSITKAGNTHARRILVEACWHARHPPRLGPALARRSQGQPPAVRAQAWRAQQRLHRRYRHLVGHGKRPPVAVVACARELVGFVWAALTQPVPAQAAA

SEQ ID NO: 191683 - protein, 343 aa, unidentified
MDHFAGLDVSVKETSVCIVDEMGKIVREVKVASEPEALLAVLANPAYHFKRIGLEAGPLSQWLYSALAEAGLPVICVETRHMRAVLKAQINKTDRNDARGMAQMMRVGLYRPVHVKTLRSQKLRMLLTHRKLLQSKAIAIDNDLRGTLRNFGLKVGMVGAARFEARIKELIQNLPDLAVLVEPLLVVRRVLRQQLGILHRRLLAVVRDDAVCRRLMTVPGVGPVVALTYRATVDVPARFRKSKSVGAVFGLTCAKYQSGEIDRSGAISRCGDEMMRTMLYEAAQSMLFHSTRWSWLKAWAMQIARHRGMKKAIVALARRLAVIMHRIWVDGTEFRWTREVAAV

SEQ ID NO: 191684 - protein, 431 aa, unidentified
MCQETKDSKSLGEEKIAAGKGKRGRKRKGLCLEDRPILEANAAGIDIGAREIFVAVPPGRDEHPVRVFSTFTEDLKKMAEWLVSCGITTVAMESTGVYWIPLYDVVEQHGVKACLVDARGMKNVPGRRTDWHECQWLQFLHSVGLLRAAFRPESDVCAVRSMMRHRTELVEMTSQHIQHMHKALTQMNVQIHHVISDLTGVTGLAIIDAIIAGERSPAVLAKLRDPHIKASEETIRKSLVGNWRAEHLFTLKQSRQSYQHYQEQIASCDEEVEKLVVAFVARVDPAERPLPPDRKRKHRGRKKKHVNSNTGFDLRTESYKLFGVDLTQIPGLMAMVLMLFSEVGRDMSRWPTAAHFVSWLALCPDNDISGGRVLWRGMRRVHNRAGDLFRMAAYALHHDQTPLGDYLRRMKSKLGPAGATTATAHKIAIIF

SEQ ID NO: 191685 - protein, 405 aa, unidentified
MDIIVERGAGLDVHKHSVVACIMGTGIKKQIRTYSSMTNDLLRLRAWLQENEVTHVAMESTGVYWKPVFNLLEDAFEVILVNARHVKHVPGRKTDVQDSEWLCKLLRSGLVRGSFIPPKPVRELRDLTRYKRKLIQTITAEKQRVEKILEDANIKLSSIASDTFGASGKKIIGELLKGDLRPDQMAELSKGKLRNRKEELKEALVGHMEEHHKRMIRTSLEHISAMEEILVTVEQKITEKIDLHFKEEFELLKTIPPVKDSASVIIAEMGVNMDLFPTEAHISSWAGMSPGNNESAGKKKSGATTHGNIHLKTILTEFGWIASKMKGTYLWSKYQSLVGRKGKKKTLVAVGHKILISAYHILKYRVPYKELGANYLDERKKEKIVRSYVRRLTNLGYDVTLKDVA

SEQ ID NO: 191686 - protein, 356 aa, unidentified
MQSMPAPAAPVTVGVDTHLDLHMAAVVGQTGRLLATQAFPASTRGYVALVTWAERYGPVERIGVEGTGTYGAGLARFVRAYGLEVVEVNRPDRSLRRRRGKSDPIDAQAAARATLAGVAATVPKTREGQVEMIRVLRVARRGAMKARVAAAEQLYGVLSSAPDELRQPLLGLKTKALVTACAAMRPGPLTSPTAATKASLRILARRWQQLQAELLQLDSQLQELVSAAAPTLVALPGVGIDTAGQLLVTAGDNPQRLRSEASFAHLCGTAPIPASSGRTHRHRLNRGGDRRANHALWRIALVRMHCHPPTRAYVQRRTNQGLSKLDIMRCLKRYIAREVYHHLTSLQPTTPAPCPK

SEQ ID NO: 191687 - protein, 385 aa, unidentified
MSSKAFVPRDYDVFAGLDVDKKSISVTFANHQGFIRSLRVPYSAEHLVNHVRKHFPDQKVAFAYEAGPTGYGLYDEIVAQDYPCLIASPSMIPKAPGQRVKTNRLDSRGISENLGGGQLKSIHVPSVLYRELRHLTQLRDTFVSELVAMKQRIKSLLLMEGLEFPPAPAGSQWSFMVKDKLRKLACSSTVRFKLDQLLDSLEFNEKQIVKTSQQIRRFCRNDPELSQCIEYVVSVSGIGQIVASQLLARIGDWRELRNVRQLGAFLGLVPTEHSTGDRTDRGSITHSGDPRLRSKLIQAAWSAIRKDGELREFFRSVCQTHARPVASRVAIVAVARKLTVMVSVVLMEQRPYVVRKKVHSAPLTQEETVPQGTPRRQAEPGAKNS

SEQ ID NO: 191688 - protein, 402 aa, unidentified
MHVAATAGAWAGIDVGKRHHWVCVVGQDGRQLLSVKVANDEAAIAAVIGSVTGLAATITWAVDIVGAPSALLLALLSQAGQHVRYASGRLVAAMSGAYSGEGKTDAKDAFVIAETARLRPSLPGIDHKSDLVRNLGLLTAHRADLTADRVRMINRLRDVLTSVFPALEREFDFASCKGALVLLTGYACPARLRRAGEARLANWLRQRHVRGYAGVAARAIAVAQSQHITLPGQDLAAGIVAELARSVLTLDQRVAELDKQIAAVFAEHPQAEVIQSMPGFGPILGATLLVTAGDLAAFPSAGHLAAAAGLVPVPNDSGRRTGNLHKPRRYSRPLRHVFYLSAQTSMMRDGPSRDYYLKKRQHSRTHTQAVIALARRRVDVLWALLRDNRTYTATPPQLPAAA

SEQ ID NO: 191689 - protein, 394 aa, unidentified
MKLVGIDVGKNSHHFCVMDKETGEFNVTPSSFSNNKEGFDFLINSLKPYSKKSILLGMEDTGHYHVALLKFLLSNGYTVALINPKTTDLTRKMEGGITKNDKLDTITICDVLDTPERKKQYRITKVDRFDLYEQRQLTRHHHNLKEELNIYCNRLQKSIDLVFPEFNTLFGSKYGVVYMNLLKTFGSAEAIASTDIRTIRKCFEIKGRGGRISLTPEKLKECAKNSIGISSEVETIQIKHLVSQITLIKEQIAEIDKKIEEFSITNNSPILSIPGISHFSGTSILAELGDIGNYSKPSQIIKFAGVAPYHYESSQYNAQHTAITKKGSKYLRKTLYQIILPVIKYNPVFKKYYLLKISQGKGHRCAQGHCIRKLLRIIYHLLETGQSFDPALLR

SEQ ID NO: 191690 - protein, 337 aa, unidentified
MSKRIRKSGDEMHMYVGVDMHKATFSAAVIDEDGSIVREAKLPSDPEQLRNFSYSLPSGSEIVMESSSTWYWAYRILSERHKVVLSNPLKTKAIASAKVKTDRIDSLTLAELLRGGYIPECYIPDVYTQQIRELVRYRAKLVRLRTIVKNSIHAHLLMYNIKVEGYPFTESFKERLRGLGDPKITGYLKILSVLDNEIHEASETIKGIANDNKDAQLLISIPGISFYSALLISSEIGDINRFPDSEHLVSYAGLAPSTYSSGNAVYHGSITKQGSPYLRWILTQVTWANIRKDPYGRIAQFYNRLKAKKGSSKAIVAASAKMLRIIYSVLKNRSPYS

SEQ ID NO: 191691 - protein, 361 aa, unidentified
MKYYNSTTQFNCGIDLHARQMYVCVMDRQGKKLVHTNVKDNDFDYFLKLVTPYKHDLTVCCECMFGWYWLADACQAAGLTFVLAHALYVKAIHGGKNKNDRIDSEKLTHLLRSNLIPPAYVYPAEKRPLRALLRQRIFYVWRRSELLARIHSHQLAHNRVPPKRTCSTRDPWEEALLAAEPNPLRRLAIQNDMALIRDIHRFPTVKDFLSYCRLVKGTVASAGKIKGLRGAKLGNPYLRWAFGEAAVIAKRDHYLIGPLSQRLEAQMNGNKFKANTVVAIKLARAVYFMLKNKTVFDPERLVASMQKCFSPGRRQPGGLTGCAKKATPPSVADHSSCASGTSVCVGQASNPAIRLGPVASG

SEQ ID NO: 191692 - protein, 347 aa, unidentified
MNHYAGIDVSLKSSNVCVVDESGKVVREVKVPSEPVALIRCIKSLGVRVERIGLEAGPLSQWLYGALRESGLPVELLETRHVKAALSAMPVKTDRNDARGLAQLMRLGWFRPVHCKSMAAQEVRALLTARKLVQSKLYDIEMSLRGILRGFGLKVGPTTSRSFAARINHLTADHPSLEMVAEALLSTHAAALCAFKNLEKNVRQISRADTRVRLLMSTPGVGPVVALTYVSAIDDPKRFTSSKPVGAHFGLTPKKYQSGETDINGRISKVGDSSVRAVLYEAAHIILTRPIHGGALKSWAMRLAKRAGMKKAKVALARKLAVVLHRMWVSASTFDFEKANSCTRAAA

SEQ ID NO: 191693 - protein, 422 aa, unidentified
MTDTFSYFVGVDLGAEQHAVVVLNHAGDILGRRSFSHSGAEVSELFSWLAKLTGGAAPQQVALTAETPRGSIVESALERRHPVFSINPKQLDRFRDRFSVAGAKNDDRDALVLAASLRTDPHCFRPLQLGDPRLLLLRELSRSQEQLQENLRRDCNRLWSLLQRYFPALLQLSPAADDPWLWSLLQLAPLPTAAARLKLPRLEKLLAQHRIRRFSASELADLLRQSPLPLAPGAAEALAQSVLLLLPHLSLLHKQLAHLDARLDKVVDELQQDTDFTEHRDIEILRAFPGIGRVFTVTLLAEAHTPLVERDYHALRVLGGAAPVTRQSGKTKLVLLRRACNHRVQHALFHSANVFVQKDPRAKQQYDRLRARGNTHARALRGVGDRMLQLLFVLLRSQSDYDPQRRLVSLPQEGTPPPQKPS

SEQ ID NO: 191694 - protein, 328 aa, unidentified
MTASLSNYQCSRGVNVGIDVAKDTLEVAVRPDNEQWSTKNRVEDFPALIEKLRQLAPERIILEATGGWEAPLANHLAAAGLPVVVINPRQARDFAKATGKLTKTDKVDARGLAHFGEAVKPQVRPLPNEQTQALAALLTRRRQLVEMLAAEKNRLVTVQHRPALKRDVEEHIKWLEKRIDHLDDDLRKQLEESEVWRVNDQLLQSVPGVGDVTSRTLLSQLPELGSLSDKEIAALVGVAPHACDSGQRKGQAHIRGGRANVRSVLYMAALTAIRCNPVIKTFYQRLLAKGKLKKVALTACMRKLLVILNSMIKKQKSWSSGQIPAAQA

SEQ ID NO: 191695 - protein, 326 aa, unidentified
MQKVLGIDVSKEKHDIVLVIEGKKYHKEISNDPKGFDFLERWLGAHQTTHVHACLEATGQYGEAIAEYLYTRGHLVSVVNPARIKRYGESKLHRNKTDKADADLIAEFCLKEKPASWEPLSPEVKHLRSLIRRLQALKANVHQEKNREKSGEMDSWVIDDLAIHIEFLNERIKAIKKEIRDFLKQTPDLKSQHDLLTSIPGIGHLTAITLLAEIGDFLAFENAPQLAAYAGLNPQGHRSGSSVFKKTQISKQGRVELRRCLYMPAIVALSCNPVIQSVSERMTKTNHHKMEIIAAAMRKLLHLAYGVLKNQLPFDPNYGKKFDFSS

SEQ ID NO: 191696 - protein, 347 aa, unidentified
MKDVTTIGLDLAKHVFQAFGAGAEGTPLFNRKLRRAEVLRFFERLPPCLVGMEACASAHCWAREISAFGHDVRLLPPQYVKPFVKRGKTDAADAEAIAEAVTRKTMRFVPVKTAEQQAAVMVLKTRALLVRQRTQAINALRAHMGELGIIAPTGIANVKALAPIIRDEEDTRLPPAARFALTEIINQIEMLATQIDKLEREIVVQARQDDEMRRLATIPGVGAIIAMAVKAFVPDPAGFKSARHFAAWIGLTPKAHSSGGKERLGRISKMGNPVLRSLLTTGAASVLRHVQYRDRVWPWLKNMLTRRPFKVVAVALANKIARMIWALLTRGGIYRDPTGLEAGPIAA

SEQ ID NO: 191697 - protein, 420 aa, unidentified
MSVTHPTVLLHGGLPAPAGPTGGIDWARDDHAVSVLDPDGRQTQRFSVPHTAAGLGQLVRRLGRASVSQVAIERPDGPVIDALLAAGLTVVVIPPSQLKGLRSRYGSAGNKDDRFDAFVLADVLRTDRHRLRPLAPDTPATVTLRATCRARKDLVGHRVALTNQLRAHLQLAFPAAVGLFADLDSPISRRFLTRFPNQDAADWLSPTRLGAWLRAAGYCGRKSAQQLHAHLAAAPRGATGPDGAARTHITRALLAAITTVADQITQLEAHIREQLQLHPDQQIFTSLPRSGTVRAARLLGELGDCRARFPTAAALACLAGVAPSTRQSGRHRAVAFRWSCDKQLRDAVCDFAADSRRASPWAARLYQQAINRGHDHAHATRILARAWLGVIWRCWQDHQPYNPAKHGALQALTNTTNPAA

SEQ ID NO: 191698 - protein, 459 aa, unidentified
MRKVKNKNENRFEKMPVVHLHSAGIDVGSRSHFVAIGQNKEDVQEFGVYTENLHDLCKHLVSNGITETALESTGSYWQSLFVLLQQYNLNPILVNGKFTKNVKGRKTDVQDCQWIQKLHTMGMLEGSFIPDLFTETVRQYYRHRQCLVESAASYINKMQKALRLINIRLDAVLKDVMGKSGKDIIEAILKGERNPVVLASLAQKSVKASTAEIESALTGDWREEYIFELRQCYELYKYYHQKIDECDEEIKKLLTAEIERKQKEESLAKVEDVKIKKKKARKNEARINIQQLMVDLTGGIDISVIDGVGLGLLLCLIAETGLELKAFATDKQFASWLQLSPDLKKTGGKVISNKTRKGKNRLSHAFMHAANAIGNMKQGDYLVHFFKRIERRSGRAIAIVATARKLSVIVWNMIVKKKPYKPELPAEYLCKIRQNQVRNIQRKIQQLNIHEGELLFTTT

SEQ ID NO: 191699 - protein, 359 aa, unidentified
MATLTKIEKFINNVSLTADDQLFVGIDVHKKSYHVAFYLNDAPALDFNMPAKKEQLSQKLKHVAPALRQIVYETGPTGYGLVRHLHQEKLPASVAATSRILKLPGRENKTDRIDSKKLAQYAAKGLLKPVQIPTLQQEADRQLYRMRHRQARNLAKSKTQIKSFLLMHDIEEPTGLVQWSRGSIDQLRTLPLRKNLRLSLDELIGDMDHFEARVKALNKSLAEHLNTGRLAQRIALLKTHPGVGIVVACQFATELFHYRDFKSTRQVFQYLGLSPRIHQSGDRSVRGPINRDSNGRLRSNLVQAAWRWIAVDIQAKKAYHRLLNNCGGISQKAIIAMARKLSGHLWMMLIKDQPYDPTK

SEQ ID NO: 191700 - protein, 347 aa, unidentified
MRFYTTQHPFYCGIDLHARTMYVCILDQAGETLLHRNMTATPEALLKAIAPYHDQIVLAAECMFTWYWLADFCAEHGIPFVLGHALYMKAIHGGKAKNDKIDAHKIAVLLRGGMLPQAYVYPAEMRATRDLLRRRMHLARKRGELLAHVQNTNSQYNLPAIGKKIAYKANRDGVAERFADPAVQKSIEVDLALITYYDALLRDVELTIVKTAKHHDANTLYLLQTVPGIGKILSLVLLYEIHDIARFPRVQDFASYCRLVKCARESAGKRSGTSGAKIGNAHLKWAFSEAAVLFLRDNPAGQQLLTRLEKKHSKGKALTILAHKLARAVYYMLKRQTAFDLETFLQA

SEQ ID NO: 191701 - protein, 347 aa, unidentified
MEEISVIGIDLAKQVFQLCGENKAGEVVLTKRLKRKAFMTFMEQEALRCLVGMEACGGAHYWGRWLMARGFTVKLMAPRIVKAYRTSRHKNDFRDAHANCEAAGRPYVAGVAVKSEATQAAQALLRVRELQIKQLLQTTNQLHGLLHEFGIVLPRSTGRMLEKLARLEAEGRLTELPAAMAAIVKLQSSEIARQAAKVKAATKALESAAETDADCALLMSIPQIGPINATALAVALEMPKAFHNGRAFASHLHLVPRQHASADSNVMLGIGEMRANETRRYLVLAAQGLLTRAAKLKGPTNDRLLNLARSLLARKHRNVAAVAIANKLARIGWAVMATRTPYQPIAA

SEQ ID NO: 191702 - protein, 408 aa, unidentified
MLRLFVGDDWAEDHHDVEVLDAAGRRLARVRLPEGVAGIARLHGIIGDLVGEDVEDVEVKVGIETDRGPWVDALVAAGYQVFGVNPLQAARYRQRHTVSGAKSDAADAHVLADMVRTDSHQLRQVAGDSAQAEGIKVVTRTHKTLIWERTRHTQRLRHALRDYFPAAVEAFEDLDAADTLELLAKAPDPASAAKLTIAQISAALKRARRRDVAAKAGRIQAVLRADQLGRPPVVTAAYAASARALIAVLSVLNEQVKTLQEQVEAHFGRHPAAEIITSQPGLGPVLGARVLAEFGDDPDRYVSAKARKNYAGTSPITRASGKKKIVAARYVHNDRLIDALMSQALSALTASPGARAYYDQLKARGAEHNAALRQLANRLVGILHGCLKTGTLYNEATAWSHHSETRAA

SEQ ID NO: 191703 - protein, 369 aa, unidentified
MADRITYVGLDVHKDSIVVAVAAGGLRGEVREYGRIANTSTALDRLLRKLGGDGMRLRFCYEAGPCGYGIQRRLSTRGHECVVVAPSLIPKRAGDRVKTDRRDAASLARLHRAGELTAVWVPDVGHEAMRDLVRARLDAVHSLRRARQQLSGFLLRHGCHYGRPAWTRLHRRWLAGLKFEQAVHHIVLEDYIAAVEAAEARRNRLTAQIEAMLPDWTLAPVVAALQTMRGMALVNAASLIAELGDLSRFANPRQLMAYLGLVPSEHSSGSSVKRGGITKAGNAAARRLLIEAAWSYRFPARLSRELLLRQERQPRLIRDIAWKGQLRLCARYRRLARTGKPANIVTTAIARELAGFVWAIARQVTVTTD

SEQ ID NO: 191704 - protein, 342 aa, unidentified
MEKSLFIGIDFSKKTFDVSVIRQNNLQAVDYQQFENSKEGCIALLKWIKSLTKEPCADWLFCGEHTGLYSICLSEFLIKKGLFIWLENPLQIKMSSGIKREKNDKADSREIALYARRYQDRARAYHLPDKALKSLELLLSFRERLVSNKQTLLVSSAEIRRVLSRDTTARFIYDRSQKEIERINKEIKEIEKRMLEQIASDESLQENYELVSSVKGVALINTVAILVATQNFTRFENSRQFACYAGMAPFGKQSGTSINAKPRVSRLADKKIKTLLTQAAKCAMIYDPNVKRYYERKLAEGKNKWLITNNVRNKIIHRIFAIVRNRQLYQVDFCNLLDKKAA

SEQ ID NO: 191705 - protein, 358 aa, unidentified
MKAQVKKIDFTNQNIYAGFDAHLKSWKVTVMAEDVVYKTFTQPPSPETLFNYLQDHFPGGTYHTAYEAGFCGYWIHDKLVSFGIKSIVVNPADIPTTDKERVQKEDKRDSRKIARSLSSGSLTPIYIPSLKTQRDRSLLRTRAMLVRDLARYKNRIKSFLYFYGISIDSSFINPQSHWSNRFMSWLESIDMGEESGKEALNVLISECKNLRTSILNITKQVRRLSQTEIYQERVILLRSIPGIGLLTAMIILTELETINRFRNIDKMCGYIGLVPSTKSSGEKEKTGDITPRGHNVLRTAIIESSWTAIRNDPSLMRSYLSYKQRMDENKAIVKIAKKLLSRIRFVLTNNKPYICSIV

SEQ ID NO: 191706 - protein, 360 aa, unidentified
MSNWTSSVGLDVHALSVVAHAVDEETGKVARARLCPDHGEVLGWLHQLRAPVRVTYEAGPTGFGLARAITGAGMECLVAAPSKLQRPAGDRVKTDARDAAHLARLLRLGEITAVRVPEREIEAVRDLVRAREDARADLMRVRHRLSKLLLRQGIVYSGGTPWTCVHEEWLRRHRFDDIHLKAAFDHSFDAVLAATAARDRLDEQIMVVAASPRFADPVNRLGCLRGISALTGLALTVEIGDWSRCSGSSIGAYVGLVPCEYCSGNSRVQGSITKAGNTHVRRLLIESAWHHRKSYSTSGPTLRARWAKVDPALRARGHAGNRRLNKRWRSFTERGKNPLVANVAIARELAGWCWSLATMH

SEQ ID NO: 191707 - protein, 356 aa, unidentified
MGPTVIGVDPHKRSHTAVVLDEDEEIAAQLRVVADRRQVERLLAWATDWPERIWAVENANGLGRLLSQQLVMAGEQVVDVPASLSHRTRKLSGKSGRKTDEHDARSVAITAAHPGRLRTVELEDFSQALGLILDRRQHLVTFRHRTICRLHALLAEMIPGGAPKHLTAVKAAKMLRSVRPATLVETERREVAKQLLDDWRWCNRRIPAVESRLHEALQAHGSTLTGIFGIGDLGAATILSIVGDLGRFRTAGHFAAYNGTAPIEASSGDVKRHRLNQGGNRQLNSVIHIAAVTQVRHHGPGRAYLQRKLAERKTNAEAMRALKRQLSDVIYRRLLADQHRREAARGRQAGTRLASA

SEQ ID NO: 191708 - protein, 385 aa, unidentified
MLPHPSPEQTVAVRPDLTLYASLELSRATWLVTCLLPERDRISKYATPGGDGNALLGLLERMRARGQQLTDRTVQIVVIQEAGLDGFWVHRLLEANGIESHVVDPASIAVPRRRRRAKTDAIDGETLLRTLLAWKRGEPRVCAMVVPPTPEEEDRRRICRERAILLQERIRHTNRIKGLLAGQGITGFNPLHKDRRHLLHAARTGDGRPLPPQLKAEILREIELIELLLRQIADVEAAREALAGPKTTTFPSPVVLLKQLKGIGPEIASVLYFEGLFRSFGNRRQLAAYAGLAPTPWRSGTVDQEQGISKAGNPRLRSTMIEFAWLWQRHQPASALSRWFHSRVGKERGRIRRISIVALARKLLIAVWRYVTQGEVPEGAVLKAA

SEQ ID NO: 191709 - protein, 457 aa, unidentified
MPRIIKQRKKRTSSVVSLPVFRANAAGIDIGAREIYVAVPPDRDPHPVRAFPTFTSDLLELADWLKQCGVDTVAMESTGVYWIPLFQILEARGFQVFLVNAHHVKNVPGRKSDVSDCQWLQYLHSVGLLRPSFRPPQAVCQLRAILRHRDNLVQMAATHVQHMQKALDQMNLQLHHVISDLTGTTGLAILDAILKGERDPQVLAQLRDRRIKASAETIAKSLVGDYRPEHLFVLRQSLTSYRAYQELILECDKEIQTVLATFQTQADPAAMPSPTKKPHKAQRNQFHFDLHAEHYRILGVDLTQVPGLETLSVHTLLSEVGPDLSAFPNEGEFSSWLGLCPNRRITGGRVLSSRTRKVRQRLARALRMAAESLHHSQSRLGEFYRRMRAQHGAPKAITITAHKLARIIYHLLKTRQRYDESVFAREEELHRHRTRARLQRQAKTLGFQLVPLNAPTT

SEQ ID NO: 191710 - protein, 354 aa, unidentified
MLEYIGVDVGKRKCVACVMDQDGNISETYSYPNTAADASNFGRRLVEKYGECKAVVESTGNMWMKTYEAFEEAGIEMKLANPSKTRVIAEARIKTDKVDCRILAHLLRADLVACCYVPTKRLRDARYTLTHRMNITRDRTRVQNRIHSLLHKYDFQCGYGDIFGTHGMNWLRTLELPAKRDREILDSLIRQVEFLSGEEEAVNMEIASNAVNNRYIVTIMSMTGFDYYGASILAAYIGDINRFPSPSHLVSWVGICPSVHQTGDSLHMGKMKDGNTKVRWIMSQAANVAARCDPRMKAYYERKLRRHHHNVAITHVANKMLRILWHMLHNNTLYNERKPQLYHRKLIRMARTAS

SEQ ID NO: 191711 - protein, 379 aa, unidentified
MDASREQEYSTIATLYVALELSQKAWKLAFSTGTVQAPRQREIPAGNIVALEQEVGRAKVKLGLAQEAPVKSCYEAGLDGFWIHRCLLAHGVENLVVESSSIEVSRRAKHTKTDRLDAQKLVQMLIRYAHGEPHVWHAVHVPSVEEEDARHLHRELLTLKHDRTRSRNRITGVLTTHGVRQQPHTRFLAELATARQWDGQPLPPGVVKRVTGEYAHLKFIDAQIKALEAERQELLATSTEPAIVQMRQLMLLRGVGVNGAWLLVQEFFGWRKFKNRREVGALAGLTPTPYQSGDSYREQGISKAGNRPVRGMMIELAWCWLRYQPESELAQWFNRRYGEGGKRARKIGIVALARRLLVAFWRYLESGEIPAGAQLKVTV

SEQ ID NO: 191712 - protein, 390 aa, unidentified
MDVLYQSCAGIDVHQATVVVCILHGPLTSTRPKREMAQFDTTTKGLKACHDFLSQFHVEAVGMESTGVYWRPVWHELCDDFELILAQPAHMKAIPGQKTDQKDAHWIAQLTRIGLLPRSFVPDETIQELRELTRQRKHYVESRNRETNRIHKILQSGGIKLTTYIEDIMGASGRNLLQLLIDETPLTPRMIHQSFYTSLKRKVPQLLEALDGYFSAHHRFMLGQSLEIYDFYQKQIDCLEERMNGYLNLYERPVEILDSIPGMDLITASVIIAEIGVDMSQFPTAGHLASWAGLCPGNNESAGKKRSTKIRHGNSYLKRCLCQAVFAAKRQKGSPLAERYYQIQSRRGPQKATIALAHQLLKIAYILLKENLTYQEFVLQKKATRDEPVA

SEQ ID NO: 191713 - protein, 367 aa, unidentified
MKKLTTTMMQRTLNKEDGRLTIGLDLGDRSSFCCVLDETGDVLLEQKVSTTPKSIREIFGTMPLSRIALETGTHSPWVSRLLSELGHEPIVAHARSVRLIGESRRKDDRLDARTLARLVRIDPDLLCPVKHRSAEAQADLTVIRARAALVRTRTMLVNAARGLTKSYGERLRGCNARGMKPKAAQDLSPELKSALEPMMREIESVSERICEYDQMLDSMARNRYPEADQLKQIKGVGTLIGLTYMLTLEDPHRFRKSRDAACYVGLQPGRRNSGQSEPQMHISKEGDPYLRSLLVQAAHHVLGPWGVDSDLRRWGMKLAEHGGQRGKKRAVIAVARKLAVLLHRLWVSGEVYVPLRPSNRITLPAVA

SEQ ID NO: 191714 - protein, 363 aa, unidentified
MFTERTSVGLDVHARSVAAAAIDGVTGELMQAKLTPSHEHIRSWVQDLPGPVAVTYEAGPTGFDLYRYLSSTGIRCEVAAPSKLQKPAGDRVKTDAKDAIHLARLLRLDEVTPVAIPTVDQEAARDLVRAREDCRGDLMRARHRLSKLLLRHGIVYSGGDAWTGKHEAWLRHEAAPQLCCTATRLTFDSDYESVLAVKARRDRLDAAIEQMAADSEFTPLVRRLGCLRGISILTGFALAVEVGDWHRFTGNTIGSFVGLVPCEYSSGASRVQGSITKTGNTHVRRLLVEAAWHHRARYRVGKTMRDRWELAPAAARIRGDEGNRRLHQRWVKFIERRKRHTVANVAIARELAGWCWSLAILEE

SEQ ID NO: 191715 - protein, 339 aa, unidentified
MLIIGCDYHPSFQQIAFVDRETGECGERKLTHKEEAESFYRDLNGRSVRVGMEATGHARWFERLLAEQNFELWIGDPAEIRAKRVRKQKNDRQDAEHLLQLLVEDRFPQIWVPSPENRDLRQLLWHRHRLVQMRTRVKNQVQAIALNEGIRRKKGLWSKLGRVQLESLSLAPWSARRRQDLLELLDRLNPKIDELSTAIQQAAEQRPEVQRLMTHPGVGPITALAFVLILGVPERFQCGKQVGSYLGLIPCEESTGGRQRLGHISKQGNTLLRFLLIESAHAVVRYDPDWRRRFLHLAMRRGRPIAKVAMARRLAVRLYWMWRKGRDYQQISKFGSHVE

SEQ ID NO: 191716 - protein, 340 aa, unidentified
MMTTTIGLDLAKSVFQVHGVSSEGQVTVRRKLRRAELMGFFRDLPPCLIGMEACATAHYWARELSALGHEVRLMPPSYVKAYLRRQKNDAADAEAICEAVTRPTMRFVPVKSAERQAILTLHRTRELLVRQKTTLIRAIRSHCAEFGLVVPQGARRIFDLLQLVREASPSALPETAVLTMQMLGVQLDALAVQIRTLERRLLAWHQQNQTSQRLATIPGVGIITATALAASISDPGLFRSGREFAAFLGLVPRQNSSGGKDRLGRITKKGDGYLRKLLVVGATSVIRRARTGVTPSAGWVQSLLERRPSRVVTVAMANKTARIAWAVMTRGESYRTMAMV

SEQ ID NO: 191717 - protein, 346 aa, unidentified
MRGRLKRREADVENCGIDVAMKSSSVCILDGRGAVVLEQSISTDEVGLGSVLSGRRRMRCVLEAGPLAEWMSKLLEQMGHEAVVIDARKAKGVIRTKKKTDRLDARNLARMGKTGWYTAVHRKSAQARVTRTFLQARQGLVRTVLAQGSRIRGLLRAHGIKLGEVKESRFGSEVKRLACEKSQQLWEMLEPLVEVRRQALRASEQMRRRMVGQATEGSVARRLMAVPGVGPLTATAYVATIDDPTRFRSSDQVAAYLGLVPSVAQSGELEVHGHITKEGDGLLRCYLVEAAHVLLTRKRGSCRLKQWGLKLAKKKGHGKARVAVARKLAALLHHLWITGETYQATA

SEQ ID NO: 191718 - protein, 368 aa, unidentified
MKYIGIDVHKKICVACIKDESGTTLTEMKFSNNKEGFRDLLSVVGEKRARAVMESTGNYWLQLYDALETQGIEVVLANPLKTRVIAESKLKTDSVDAAMLADLLRADLIAPCYVPPPEVRDIRALIRKRMALKKECTRVKNRIHSLLAKHELPSFPGSDLFGKKGLKWLEDQKEHLTPVDQILLDVELTQLKTLITLIEKINEDIAELAKQSEDVSLLMTITGVDYYTALLFTSEIGDINRFSSSSKVASWIGLVPRVHQSADTYYHGRITKQGSSLVRWALVQAAQVAVRWDPHWKKVYERISSRAGKKKAIVAIARKLAVTMYCMLTRKEPYRYFNEESYRRKVKKLERIINTTPKNRGEAVMLSS

SEQ ID NO: 191719 - protein, 400 aa, unidentified
MLRRTIEDSARADVGSQRPTAIPGIEPAGARGPRSFRNARVNRSMRSTRYSGDFPREQAIHAALFMKPKAAKTKPITFVGVDIGKKWLDVSASRTSFRTSNTSSGHRKLVELSAKRGRRPHFICEPGSYGRTLVRFLRTQKLAYSIVSAYQVRQFAKAQGREAKTDKIDAAMLSLFGKTFRPEPTAQIDPKLESLRRLVRRRQQIIEATKIQKHHLETMEGTALIRGAKRLVRTLEIEGRELEVTAVKHVKRAPALRKRFLALTQVDGVGTISALQLMSEVPELGRVSRREIAALVGLAPINHDSGIKTGRRSIRGGRILARAALYMAAFHASRVNPVLAPFFQRLRARGKPYRVALVAVMRKLLVHLNSVVAALERNDPPPLPKTARLTPKAPAADAFP

SEQ ID NO: 191720 - protein, 354 aa, unidentified
MAKILRSGVSVVGNDIGKNSSHVVGLDERGAIVLRQKWSRGQVETRIANMPACLIGMEACVGAHHLSRKLRALGHDARLMPAKYVRPYSKGQKNDFRDAEAIAEAVQRPTMRFVATKTVDQLDLQALHRVRERLVSQRTGIINQIRAFMLERGVAVRQGLRFLRIELRGILATRCDVLSPRILRLIEDLAGDWRRLDERIEGLSGEIDALARQDAGCKRLMSVPGIGPIISSAMVAAIGAGDTFSKGRDFAAWLGLVPRQISTGDRTVLGKISKRGNRYLRVLFVQAAWVVLVRPKNWERHGLKPWLEAARKRLHPNVLAIALANKLARIAWSVLARCRTFEARRIDEAIVQTA

SEQ ID NO: 191721 - protein, 440 aa, unidentified
MKEKELSMQIVHPNAAGIDIGSKTHWVAVDQIPGNVREFGVYTRDHQRLIDHLKSNQITSVAMESTGSYWQTLFHALQKAGFEVILVQGNQTKNVQGKKTDVLDCMWIQKLHSLGLLSSSFLLSDYLQTLRSYYKHREHLIEQTAMYMNKMQKALRLMNIRLDVAIRGLAGKSGRAILDAILAGHRDPNYLASLAHFRVKKSPDEIAAALHGNWREDLLFELRSCLAFYDAYRKEILICDQKLQTIMLEFIPEAEALTLDTNPAEKPIRKQVNRNSPSFNIRHLAFAHLKIDLFKIPGVSHSTALCLLCNMGNDIKRFASAKRFASWLRLVPNNKLSGGRIISSKTPKGKNAIALALRQAANSIGNQKEHPLTPFFKRIAYRKGRNAAITATARKLAVIIWNMAIKTQPYRQPNNELLLEKRKVCPGKKYQIETLQAESI

SEQ ID NO: 191722 - protein, 407 aa, unidentified
MEVLYPHCAGLDVHATSVTACARIANLAQITYDHLTVPTTTRGLLELDAWLTGQGCTHVAMEATGVYWKPVWHVLEEHFTLVLANAMHIRNVPGRKSDMNDATWIADLLAHGLIRGSFVPPTPIQALRDLTRTRRQLVHEMSRHVLRIQKTLEDANLKLTHVISDVVGTSGRAILTALIAGETDPGRLTDLTRGRLKAPRAALVEALHGRVTDHHRFMLQLHLTQVDAVQKAIDAVEARIGDALGPFQSAVTLLITMPGISETTARVLVAEIGTDMTRFPSVGHLISWAGLCPRLDESAGKRRSTRTRQSAPWLKPTLVNAAWAATRKRNSYLHAQFLRIKTRRGAKKAILAVASSMLTAAYFMLRDGVVYEDLGPNHFAQQDKERLTKRLLQRLQHLGVVVEVKAA

SEQ ID NO: 191723 - protein, 360 aa, unidentified
MQRQVNKNLFTGQSFYIGIDCHKKSWKVTILSEHNEHKTMSQNPDPDILANYLKRNFPGGNYYAVYEAGFSGFDACRRMKQLGIDCRVIHPADVPTNQKERLQKTDKADSRKLAKSIRNQEFSSIDIPDRKLEADRALVRQRFRLMKDLSRTKNRVKSLLFQFGISIPERFTHAQMRHWSKPYVNWLKTLSVEEESLRETLDNYINIGQKQREELLRVNRQIKKLARSDAYRNNCNLLLNVPGIGTITAMTFLVQIGNITRFKRLDELCNYVGLVPSMHVSGEKMETGEMIKRGRKELKIMLIEAAWIAVRKDPALMAKFNELRSKMNKNKAIIRIARKLLNRIRSILINQRPYEMNVIE

SEQ ID NO: 191724 - protein, 422 aa, unidentified
MHARCAGLDISKKDAKVCVRVAGAGRRKTVETVTTWSSMTSRVLALQEHLATEQVTCVVMEATGDYWKPFYYLLEDLPGVEVVLVNARHVKNLPGRKTDVADATWLAQLGAHGLVRGSFVPPEPIRQLRDLTRTRTSITRERSREIQRLEKLLEDAGIKLSAVATDIVGVSGRAMIEALIAGDRDASRMADLAQRRMRVKIPQLTEALVGRFNEHHAFLARVHLDLIDQHTAKIDQITERVELMMEPLRGFHDLICTIPGIGTRTADVVVAETGADMSRFPTAKHLASLGRHDPWEQRVCGKGEVKPDPSGQPLSPGRARSLGDVDRAHTRDVSQRQIPTDRDSPRTAEGQRRHPAHPPCHDLAHGSDGNALRRPGVRLLHPSAARSSPPTRHPSARDHGLPRHARSTLTSLVALTTPAWLQ

SEQ ID NO: 191725 - protein, 405 aa, unidentified
MGMVFVGHDWAEAHHDVHVEDDQGRLLGKARLPEGVEGVARFHELVAGFINDPGEVTIGTETDRGLFVGALVAAGYQVLAVNPMSTSRYRERHSTSGAKSDPGDAFVLAELVRLDGHNHRPVAGDSDLVEAVKVLARAHQSLIWTRQRQINQLRSTLREFYPGALDAFPELGHTDALAVLATAPTPTLGRGLSRSKIAATLRRGGRQRRIDERSVEIQTALRAEQLQAPTIVADAMGATVTALVAVVAELTAQIAGLETQLADRFDQHPDAKIIRSLPGLGMTLGARVLAEFGDDPNRYVDAKSRKNYAGTSPITRASGKHRVVLARYARNRRLADACYLWAFATLTASPGARCFYDQRRAAGDTHNRALRALANRLVGILHGCLRHGALYDEHTAWGHRTQLAA

SEQ ID NO: 191726 - protein, 391 aa, unidentified
MIYVGIDVAKDKHDCFIVSSDGEVLFDVFTIQNNMDGFEDLLFKIKSAEKDSGNVKVGLEATGHYSCNILGFLKNKGLPTIVINPLYTSLSRKSISLRKTKTDKVDARTIASMIMSDVSLKPYSDKLYHNEDLKSLTRYRFDKVMQRAKLKQSVSRLVNILFPELETLVSTLHGKAVYELLLEFPSAQHIASANLKHLTHLLNTSSKGRFKRVTADEIREAARKSISSYLPAKSLELKHTIKLIREITLEITEIEAEIKKIMDAIDSPILGVPGIGQNLGAMIIAEIGDFSRFDSADKILAFAGCSPSTYQSGQLYSSHAKMEKRGSRYLRWALLNAAAYVCNWEPTFAAYLQKKRSEGKHYYVALSHAAKKLVRVLYHLETTGETYSPTA

SEQ ID NO: 191727 - protein, 352 aa, unidentified
MMKVTTIGIDLAKDVFGLHGVDGEGRVTFKRRLVRSRLLEFLSQLPRCLVGLEACSSAHYWAREIERLGHRVRLMSPRFVKPYRKSDKNDANDAEAICEAVTRASMRFVPIKSEAQHEVQALHRVREQLLKSRTALVNQVRGLLAEHGVVAPHGIARARRLLLGILADPERHGLSGLFRETLQEMAERLRFFDDRVGAYDDRIERVFKEDERCRRLAKVEGVGPLVATAVVAAVGNASEFKSGRELSAWLGLVPRQHSSGNRSQLLGISKRGDRYLRTILIHGARAALRRADHKRDQRSRWAMRIKLARGYNKAAVALANKNARIIWALLTRGENYRPAAISVASAGSVESV

SEQ ID NO: 191728 - protein, 337 aa, unidentified
MTIVFVGIDLAKNVFALHGVDDAGKARLVRPAVRRDQLLETVAKLPPCTIGMEACSGAHHWARQFMAFGHTVRLMAPKFVVPYRMSGKRGKNDAADAAAICEAVQRPNMRFVPVKSELAQARLAVHTVRQGLVAGRTATINRLRGVLSEFGQVMPLKAKTVRLEAAARAEGLSQWAQTACMDLLAEIRRLDEQIDTDDQHIRLMAQADDRSKRLMGVPGIGATTASALLASIGNGHDFDNGRQVAAWLGLVPGQYSSGGKNRLGRITKAGDSYLRTLLILGARAVLAAASGKHDRISRWAQALAERRGYWKAVVAIAAKNARMAWAMLAKGEAFKPA

SEQ ID NO: 191729 - protein, 341 aa, unidentified
MYPFYLGVDLHLRRSYVVLMDSNGAIVDERRLANSEVRAYLLAHVPPETYAVLEATRNWPFMYDLLTHHVERVELAHPQEIKSIASAAVKTDQIDAGVLAHLARLNYLPTAYAAPVSVRDLRMIMRHREWLLRQRTQAKNRIHAVLAGYNLVSPMSDLFGVRGREYLAAVRATHLRPASERVVADNLALIDQLEGLIAALEGAVQLTPQQARAVRLLCTIPGVGRITALTLVAEIGSIDRFGSPKALCNWAGLTPRVRKSDAIVRHGKISKRGSPYLRAAMVRSATVASRCSRRWYQVHEGIARRRGKRAAKVAVARRLLTVIYYMLKREQPYQEDYPRGA

SEQ ID NO: 191730 - protein, 395 aa, unidentified
MFQRERAPSLSCNQQVLLFVSLLMLITHPVNLDELAKYIGSLEGETRVVLECTGRYHEPVVKTLSEAGLFVSAVNPHLIKNFGNNSIRKVKSDPADAKKIARYTLDNWAELRQYSGMDNTRTQLKTLNSQFSFFMKQKVAAKANLIALLDNTYPGVNKLFDSPVRDDGSEKWVDYAYSFWHVDCVRKIGLKTFTERYQAFCKKHHYNFQPAKPAELFLASKDLIAVFPKEASYKLLIQQSIQQLNLASSHVEELRSKMNELASTLPEYATVMGMYGVGKTFGPQLIAEIGDISNFSHREALTAFAGVDPGVDQSGTHNSKSNKASKCGSNRLRKTLFQIMSTLLQTAPEDDKVYQFLVKKRAEGKPYYVYMTAGANKFLRIYYGKVKECIRNLEQ

SEQ ID NO: 191731 - protein, 347 aa, unidentified
MVTDSLDVVIGVDTHRDAHALALVRCRDGVLLAEEELPANRAGYRAALRLGKRSGRRRLWALEGTGSYGAGLARFLAERGEQVREVERPAREGSRRRLKSDSLDALRAARAALTGQALASPRAAGRREALRVLLQTREGAVQTRRSGLNQLRALVVSAPEELRERLRGRGRDALVRACTRLRPQQRSRPELYATALALRSCARRVERATREAAELGDELRRLVVELAPQLLSLDGVGPISAAQVLVSWSHPGRFRSEAAFARLAGAPPIPASSGKNVRHRLDRGGDRRLNRALHTIVLTRRRGDAATIAYIARRVSEGKSERDAVRCLKRYLARSLFRLLEAAPATT

SEQ ID NO: 191732 - protein, 410 aa, unidentified
MQVLYPHCAGIDVHKKNVVVTILLTAPTGQVTKYTQTFGTMTADLLQLDAWLDEHQVTHIAMESTGVFWFPVYNLLEDERDVILVNPQHMKAVPGRKTDVKDSEWLADLLRHGLLKASFIPPRPIRELRELTRYRKRLVQDRAQQCNRLQKLLESANIKLAAVASDILGASGRAMLEALIAGKQTPEEMAELAKGRMRQRKGDLRLALEGQVTEHHVFLMRQMLDLIDNLDQVIHRMDVRIADCLQPYEEAMTLLQSIPGISATSAATILSEIGVDMSTFPNAHHLASWAGVCPGNKQSGGKRMKAGTNTGNRWLRGMLGEIVWSLSHTHDNYLAAQFVRLMRRRGKYKAVIAVAHSVLVIVYHVLTRKQPYTDLGADYFDRLDRERQERQYVRRLEQLGYQVTLTPAAA

SEQ ID NO: 191733 - protein, 392 aa, unidentified
MVIFMFFLGIDIGKNTHVASLLDEKAKIIFKAYSFANTLDAAEALLVKLEPYKDSLEIGMEATGHYWLSLYSFLAEHKFIVHVLNPIQTDGWRKGIEIRKRKTDVIDSVLIADLIRYGNFLETSLADEDILSLRNLSRFRVYLVNSVSDLKRKAIAVLDQIFPEYASVFSNVFGQTSKELLKSLSLPSDYENLSATKIEEVLSNITQKKKASKTISTLSDKASRSFGISFCKDSFAFQLKLIIEQICFIEEQIASVELEIDQLMSKLGTNIKTIPGVGSVIGAVILGEIGDIERFDNPSKLVAYAGLDASVSQSGEYEASSGKLSKRGSPYLRKALYMAAQRAEFCDPVFHAYYEKKRNEGKHHLVATNAVARKLCHTIYAILKKDVPYEVQ

SEQ ID NO: 191734 - protein, 338 aa, unidentified
MDKCAMCGIDVSAKELVVVLQREGKNEAARSFANTVPGHQELKRYLTGASSRVRVCLESTGLYGLDVALFLHADTRFEVMVANPRAVKNFAQALLERSKCDPLDARVLAEYAARMPFQAWQPPSPAALSVTALTRRLHALTESATREKNRLHALSATATTVKVLVADLKRSLQSIARGQARLAREARKIIAADALLERRFRLLLSLPGVGETSALQLLGELALVPADAEVRQWVAYAGLDPCQCKSGSSLAKRPHISKVGNRHLRRALYMPALTAAHHDPAFGSYYRALQERGKCKMVALVAVMRKLLHAVFGMFKHDALFDGARVCPSLAVPTGVAA

SEQ ID NO: 191735 - protein, 488 aa, unidentified
MSKRKAKSKAKGYSRGQRRPPRGVKAEVAIEQMAPVYHRAAGIDVGAAEHWVAVPAECDEEPVRRFDAFSCDLRAIADWLKACEITTVAMESTGVYWIALFELLEARGFEVKLADARAVHHVPGRKSDALDCQWIQQLHTYGLLSGAFRPAHDVCKLRVYLRQRSMLVEHAAQHVQHMQKALSQMNLKLQHVVSDITGVTGMAIICAIVQGERDPSILAKHRHERCAHSEEEIAKALDGSYREEHLFALRQALELYRTYRRQIQACEAQIDTHMAEMDTKMEGPPTDDADYKRKRKGRIQKNSVRFDARGHLYRITGVDLTRIDGIDATTALKLIAEIGTDMTRWPSVKHFTSWLALCPGLKKSGGRVISSRTKPSANRAAAAFRMAAQTLLRSKSALGAYYRRMRTRLGAPKAVTAAAHKLARLVYSMLRYGQEYVDQGEKHYEQQYRARVLRNLTRRARNLGLKVVPMNNLEPHDNQSTDLAADSG

SEQ ID NO: 191736 - protein, 339 aa, unidentified
MQACIMDEDGGILDEFPFANNGEGIKSLLECVSDIQCKAVVESTGNLWLRIYEALEGHGVEVKLANPYKTKAIASARIKTDKLSARILAHLLRADLIAEGYVAPREVRQVRALLRQRASLVKMRTMVKNRVHSHLDRYGLSSPWSDAFGAGGLEWLHGLELEPVDRCILDTHLRHLECLNSEIGFLDSRIAGQALESEDALLLMTMTGVDYHSATLLACEIGDIRRFPSPKHLVSWIGLCPSLYQSGNSLVMGRMKKDSNGRARWVLVQAARTASRRDPRMRELYQRVSSRKGTGKAAVRVANKMAVIMWHMLTEGKPYMQVKEGLYRSKLKNVKRLAS

SEQ ID NO: 191737 - protein, 343 aa, unidentified
MNITTTGLDLAKSVFHVVCFNNQFKEVKKRILRRSQVLHFFTQLPSCRVAMEACASSHYWGRELRALGHDVKLIPPQHVKPYLRGNKNDYNDARAIAEASTRPGMPFVAIKSTEEQDMQAIHRMRSQCIRDRTALSNSTRGLLGEFGIALPKGLATLRKSIHGILEDADNGLSDRFRKLLARRYDQFVALDDHIAFYTNELEILSQQDDACQRLQTIPGFGPVISSAFRSVIGDGRAYDRGRDASASLGLVPRQHSSGGKNVLLGISKRGDRYLRSQLVHGARAVVIQAARKDDPLSKWINRIREERGWNKAVVATANKMARIGWAILRHNTIYQPDSEQSIH

SEQ ID NO: 191738 - protein, 373 aa, unidentified
MNTRITHVAMDTHKKRHKVAMLDQQTGEIREFTVNNLAKDIAKMVKKIKKQSSGQIHFCYEAGVCGFTLKRQIEKFGCRCSVIAPSLVPIRPGDRVKTDRRDAKKLLGQFVAGQLTEVYPPNEQQEAARDLTRCRESALQNLQRIRHQLLKFLTRNGYIYRNGSHWTEKHLQWLHSLEFDLMDQKEVFEIHYAELQHCVQRLKSLDRQVEQLAKRPEYSQIVDLLCCFRGIKTLTAITVLTEIFEFGRFDCPRALMSYLGLVPSEFSSAEKRHPGGITKTGNRRVRRLLTETAWHYRHRPKVSGALKRRRQGQPDWAINIADRAMARLSIRYRRLWARGKMPCKIAVAVARELVGFIWALLREFEIRKKCQVT

SEQ ID NO: 191739 - protein, 347 aa, unidentified
MTLYCGVDFHSRRQTVYYCNTDDGEVKIKDLHHYEDDVRSFYEQFKNEQVIVGYETSGYARWFETMLFELRIEVWVGDAAEISRLGKRRQKNDRRDAEHILDLMLKGEFPKLYRMSEKSQEIVRLLRHRQKLVKHSVMIKNSLRRILIETGLIFKAPLSSQKAKQKFRELKLPLLLANERDRWLELLIEIEKQIAGLEQKLKAESQTDERVQRLLTHPGVGLLTSLCIVNTLGDVRRFATTRKVAAYAGLEPMEHSSGEKRRYGAISKAGNRLLRFLLGEAAHIATRTDDELKQFFGRLKNKCGTAKAIVAIARKLLIRCFIMLRDEIDYAEFRQRGIEARFARVYT

SEQ ID NO: 191740 - protein, 315 aa, unidentified
MIIPLRCVGIDVSKSMLDIFDDAVGKPERIANAPQPITEQVARWRCADNVFVVFEATGVYDCMLAEALHQAGIRFARINPARARDFARAGGRLAKTDAIDARMLAVFARAMGPVADPPPEPARNTLASFAKRRDQLVHIRAQEKNRRSEVRDPAMAEDITLHIDFLSRQITAIEARIEALIKAEPEICEQARLLRSAPGIGPVACMQLIAQMPELGRVGPKQVAALAGLAPFNVDSGSYRGKRAIGGGRKRVRDAIYMGALNAVRRDPTLKAFYQKLRAAGKPAKLALIAVARKLLTILNAMLRDRKIYAIAGST

SEQ ID NO: 191741 - protein, 370 aa, unidentified
MNQSSTLYIGMDVHKDTIAVAYVAKDHDAEVVYLGTIGTRHCDIDKLIRNMQSKAKQLIFVYEAGPCGYWLYRYLRKKGYDCWVVAPSLIPKKAGDRVKTDRRDAVQLARLMRSGDLTPVYVPKEEDEAIRDLTRAREDALRDLKAAKFRLKAFLLRQDIRYTGQANWGPAHLRWLSEVVCHTPAQQIVFQEYVRAVNEHTERLGRLEQELQDQAKSWRLHPVVEALQALRGVQFIVAVTTVAELGDLTRFDNPRQLMKFLGLIPAEYSSGERRRQGSLTKAGNTHARRALVEGAWAYRYPAKVSRHLQLRLEQQPKTIQDISWKAQVRLCKRFRRLMARGKHANQVVVAIARELVGFMWAIAKQVPVTR

SEQ ID NO: 191742 - protein, 361 aa, unidentified
MAKVRSWAGLDVHARSVLAVTLDAESGELRSARLSGETAKVVEFLAKLPGPTRAAYEAGPTGYGLARALIAAGIGCVVAAPGKIERAAQDKLKTDQRDAERVLRLLMIDALHPVRVPTVEEEALRDLIRAREDVRGDLMRARQRLSKLLLRHDILYEDSASTWTQRHRSWLRAQQLGGGAQATLLDYLGAIDTLELRRGTLETTIGELVPASSYAQAVARLRCLRGIDTLSAAGLCAEIGDFTRFERPGKLMSYVGLVPSENSSGESRRQGPITKTGSRHARRLLVEASWHYRKTPSRGITLQRRQDGQPANIIAISWQAQQRLHRVWQRLAEQRGKRRTIVAVAVARELTGFCWALARAD

SEQ ID NO: 191743 - protein, 472 aa, unidentified
MSDSIFKATGTNLRDVLASYDPGEILYTSIDVAKYYHSAMVVNFFGDVIIPKFDFPYSNHGINFLKNKIQTAQKQTRARKLLLGLESTGHYHENLVASLTASGYDVQVIRPIDSKNERDNVHAKTDAIDLAAIAKVIIFNKGARSHMPDTIYYNLQRASRTHRQLTWQETRTKNIITFIVDKTFTGLWNPEDSIFSDKWGKASLFFIENYSTPQQATRLGVKRLAAFFRKHDTKLGMDTAKKIIQLAKNTPARPLEEMESDIKALKAHIQVLKTLTSAILEQRKQMVKFLIQTPGIYLLSVPGVGVVYASDFTAEVGDIHRFAYAKQITSLAGTAPRKHQSGEVDKTNLSTSHKGKNHLRVTVNQIALSLNSHCPEYHSYYSKKHFQYKDASGKARTATANKFIKLAFAMMRNETLYCPKTGNPFMTEKQYYQEVWDKMKTKLTPYLYDDIPQDNYLTKIQHELEEKYGINT

SEQ ID NO: 191744 - protein, 488 aa, unidentified
MEHIAIDLGGRESQVCIRASNGAITFEERVATTALPEFLRRATGRVVLETCAEALAVADAALDLRHEVRVVPATLVRALGVGARGLKTDRRDAQALSEASCRIDLPSVHVPSRWSREVKSMCGMRESLVQARTRLVNTVRGWLRGQLKGSGLRGGGPVAMPKRMRAYFEAQQMEVPAFVTRQLETIDLLSEQIKEATQELDTLARGSDLCRRLMTVPGVGPLTSLRFVSAIDRVDRFQNAHQLESYLGLTPGEDSSSDRRRITFHEGGLRLRSVDLGAGSLVRPPHARSTSHVRVGPGGREASRNVQGDRCFGPEDRWNPLRAVARRDQLRALLSARTNSCCQCLAELGTRPARGDGCPEAVIAQNRERLDCSYVADLVTATATRRRTSISAPSSANSRVRQLVALRLVKVGSRTSTDREQDPGPLGEVYLDGGGHFIVAIQNTLKWWSAAPCIWTTWSKTTSTSGEQPPILGPRGPRQLRPAARNPQ

SEQ ID NO: 191745 - protein, 424 aa, unidentified
MKSEHADQIDFAAFVGLDWADQEHAVCLQASGLTKVETYVLKQTAQSLGEWAKQLRVRFGGRKVAVCLEQSKGALIYALMSYEFLVLYPVNPQTLAKYRKAFRTSGAKDDPDDAGSLMELVKLHRNRLRAWVPDDVQTRTLQMLVESRRGLVRERTRLTNRLTSLLKAYYPQALEWAGEIKRLRACDFLKKWPTLEAVKRAKGSELKKFYRQHGCRNEEVIEERIKQIRASDPLTRDQAVIRSSAMVVEAIVSQLPCVIRAVEQFDQEIARVFEQHPDHELFNSFPGAGSALAPRLLAAMGSDRARYESAEEVQQFSGIAPVTERSGKSKWVHRRFACPKFVRQTFHEFAKQSIVWSKWAHAYYDQQRRRGKHHHAAIRALAYKWIRIIFRCWKERTVYNEQAYVEALRRRGSRLIPSPVPGEN

SEQ ID NO: 191746 - protein, 376 aa, unidentified
MREFNNIYVGLDVHKDTIAIAVARAGRGEPDYHGEIAHNSAALSKLLKRLSPNGEVLNVCYEAGPCGYGLHRQLTALGHECEVVAPSLIPRKAGERMKTDRRDALMLARLHRSGELTGVWVPDEEQEAVRDLSRAREDMKSLELKARQRLGAFLLRHSKVYPGKSRWTQAHWRWLEEVKFVQPVQQLVLQEYIDSVKSAQRRVAELEEQMRQVLKGWSLGPVAEALMALRGVKLVTAMTTLAELGDITRFDSPRELMGYLGLVPSEHSSGSTRRQGGITRTGNGHVRRVLVESAWNYRFPARKTRDIEKRAEKTSEQVQAIAWQAQKRLCGRYRALMQTGKQNKLVITAVARELAGFIWAIACEVQGKTHASKALA

SEQ ID NO: 191747 - protein, 393 aa, unidentified
MTATHTTHGSTTTVRLHLAFELGENEWKLAFSVGHGQAPRLRTIPARNVAMLLTEIANAKRRWRLAPDTPVVSCYEAGRDGFWLHRFLSAQTGIDNLIVDSSSIEVNRRQRRAKTDRLDAEKLVNLLIRYHNGEEKVWRVVRVPTPAEEDQRQSARELLALKDERTQHVNRIKGLLAGHGLQAQVNENFPEQLAALRLWDETAVDEELQQRLRREWARWQFVQQQIRVLEGERRQQIRQGKAPQIEQVRTLLQLRGIGLNGSCLLVRELFGWRHIRNRRELAALVGLTPTPYQSGGSNREQGISKAGNRRLRRLLVELAWGWLRWQPNSGLTRWYQARFGNGRRARKIGIVALARKLLVALWRYLERGEVPEGASLCDWRIKLGIRPKPAAAG

SEQ ID NO: 191748 - protein, 371 aa, unidentified
MKQSSTTLYVGLDVHKESIAVAYAPEARGTDVIALGSIGTRQCDIDKLIRTLKSKSARLVFVYEAGPCGYWLYRYLTKKKLTCWVIAPSLIPKKAGDRVKTDRRDAIALARLMRSGDLTPVYVPDVADEAIRDLTRAREDALKDLKSAKYRLKAFLLRQDIRYEGKANWGPAHLRWLSEVVCYTPAQQIVFQEYVRSVSEQQARLHRLEAELQDQTRDWRLYPVVEAIQALRGVQFLTAVTLIAELGDLTRFDNPRQLMSYLGLTPCEYSSGGQRRQGGITKTGNGHARKALVEGAWAYRYPAKVSRHLQLRLEKLSQPLQDISWKAQIRLCKRYRTLVNKGKHQNQVTVAIARELAAFIWAIAKQTSLTD

SEQ ID NO: 191749 - protein, 338 aa, unidentified
MNKYKLISIDLAKTVFQLCAFSDFNKIAFNQRIHRGKLLDRLRAMEPTTVVMEACYSSNYWGREIEKLGHTVKLIPPFKVKPFLIGNKNDANDAIAIGEASFRPKSRFVSVKTIAQQDTQTLLRVREQLQKIRIMTSNQIHGFLSEYGVFCAKGHKSLITTLAEALAPESELLSPIAIEAIRMQSDYYKELKAKEDEISNRLIFLCEGNPIYHYLKTIPGIGPITAATLISSVGDPRYFNNAREFSAWTGLTPLQHSSGETSRIGKISKRGDRHLRKMLIHGARSIVNWVKDKEDKLSLWIKSLSARMCPNKVTIAVANKLARIAWAVMTYQVEYRAK

SEQ ID NO: 191750 - protein, 450 aa, unidentified
MGSRYAGIGWATEKHDVRVANETGEKLLAATFVHGEAGLSALCRRLVRMEVGLVAIERPDGVLVERLLDAGLRVLPLHPKKVAAARDRFRVSGGKSDHFDAFVLCELARTDSHRFRVLEPDSDQTKALRAMTRAREDLVHTRTAVVNQLRAELERCWPGPLRLFSHMDSEILLAFLERYPSPVDARGLGIGRIEAFLRRERYSGRQKPAALLAKLRSAPQGRVGELELAARRQLVLTYVAMLRTLNGQIKGLERDIRTAVRAHPDGPVFLSLFKQAHSVITAAELLAEIGDCRARYPNRDALAADAGQSAVAKESGKRKTAQFRWGCNKRLRVAFSRLADSTRHWHPWAQALYGQARQRGLEHPRAIRTLGRAWCRIVWQCWQHRTPYDPTRHRSLQRHVTVTIPSPSGPVTDLAATQRMAAAVTSELDALEPSPEPLTTGPHPLVHTGG

SEQ ID NO: 191751 - protein, 478 aa, unidentified
MKAKSASPSRRVVKAIRPAKQLPVLHPHAAGIDVGATEHSVCVPEDAVPAGESSVRQYRAFTGELDQLVEWLQACGVQTVAMESTGVYWIPLYQKLEPAGLEVVLVNARHLKRVPGRKTDVLDCQWLQQMHSYGLLSGSFRPADDICVLRTYLRHRSNLVAGCSQQVQHMQRALDQMNIHLHHVVSDLDGETGLAILDAILGGERDPKQLVQWRDPRCRKSTVAEMEAALQGDWREEHLFVLKQAREGYRALQGQIVECDRAIEKVLERVAVNPSAVPEDQRPRNPVAAPPEAGAKQKRRKPSRGNAPQQDLTTQLQRICGVDLTRVVGLNVLSVLMIISEIGVDMSRWPNAKAFCAWLGLCPGNKISGGKVLSSRTARVVNRVAILLRTLAPTLGRTDTWLGVFHRRMKARLGPAAANTATAHKLATILYHLLKYKEEYLDVDRLVYEEKFRRYRVSRLRKQAAELGYEMVELKEAA

SEQ ID NO: 191752 - protein, 319 aa, unidentified
MDTVTQAAIIGIDISRDWLDVHCLPGGNRARFPNKVKGHEQVAQLAFELSALVCFEATGGQEWRLWVALDDAGIATRQLPPAQIKAFAASRGTRAKTDRIDAELIARFMAFRPDAGRTLPHGKLRLLRALTSKRAQLVETRKRLLGQIKAQGKLGSTEMFAAMDEDLKGLLDSQIAGLEAQIEDIIAADASLAMTADILRSVPGIGPVASTMLIAEMPELGQISGEQAAALTGLAPIAHDSGAMRGKRAIGGGRRLLRHVMFQAALVASHHNPVLKIFADRLRAAGKPHKVVITAVARKLITIVNALCKSSQKWAVPAS

SEQ ID NO: 191753 - protein, 420 aa, unidentified
MNREVRAWIGIDWADEKHDVSVYEVATGRQERLEVKQSPEALAEWIGQLRTRYGNAGQVAVVLEQGRGALLNVLMGCEFLVLYVINPKSLSCYREAFYGSGAKSDPVDAELMREMVRQNPERFRAWHPDDVLTRSLRLMTEGRRDLVNQATAVTNQLTALLKGYYPQALRWIGALDTHWACDFLDQWPTLQALQSSSRRQILRFYEKHPRHHLDLEQQIQQFHQTLPLTGDEAVLQYSTLMVQALIPQLRALLDSIDEFDRKIAEVFRKHPDRPIFESFPGAGAALAPRLTAAFGADRDRYAAASEMQQFSGIAPVTEKSGKQHWVHWRMACPKFIRQTFHEFADHSRRWSAWAKAYYQLQIERGKKHNAAIRALAYKWIRILFRCWKQRVPYNEQLYLASLLKHQSALLSKSAPAVEKL

SEQ ID NO: 191754 - protein, 362 aa, unidentified
MNKELKKRKICFKGKIVNIGVDMHKRSWQITVLVEGTIFFAVTMSRPNYPAFKKLLTQFDGNIVRVAYEAGPCGFELFDRLTADSVECIVAPPALIPTEIGNRVKTDKKDSFKLAQLLEKNMLKKVHVLSAQERAHRQLVRTRRQIVNHRSSVMRQIKSFLLFHNMEIPFLSAQHWTTPFITWLDELDLGDQYLNRSLRALLDLFYYLNGAMKTMTQEVIELSKIEKYARRVQILKSIPGIGDLSAIEILVELQDINRFKTEDQLAAYLGLTPSQYSSGEHIRMGRITHGGNSRIRTALVESSWILIGRDPAMRKKYETIKYRRGAKRAIIAVARILSSRIRRILIDQVPYKIGFQSFNLSC

SEQ ID NO: 191755 - protein, 339 aa, unidentified
MNVVIGIDPHKASHTAVAIDEAEDELSSIKVRATRRQVDQILGWAEPFEKRTWAIESAGGLGYLLAQQLVARGEVVLDVPATLASRIRVLATGRSNKNDPNDALSVAIAAFRAPNLRSVEAADHAEVLRLLAKRNGDLGSHRTRVVCRLHALLAELAPGGIAKELYVSDAERLLAKIRPETPAEQVRYDLALELLDDVRRLDAQTKESHRRIRVAVKASGTSLTELFGVGPIIAAQLIGYAGDVRRFANRDAFASYNGTAPIELSSGGRVVHRLSRRGNRQLNHAVHMAAISQIRQSGSEGRAYFERKVAEGKTKKEAVRSLKRQVSNAVYRQLLLDAR

SEQ ID NO: 191756 - protein, 387 aa, unidentified
MPEDAPRPAQAAIRTDLGAIFVSLELSRRAWLVTSLSPGGGEKMSKHSVQAGDIAGLLRRFAQLKEKARARTGRDFPVITIQEAGLDGFWIHRVLQSEGIESHVVDAASILTSRRRRRAKTDKIDGETLVRTLLAYKRGEPRVCSMVKSPTREEEDRRRICRERRALVAERVQHTNRIKGLLFAQGAFDYEPLKRNRRAHLEDLKTGDGRPLPVNLKAQISRELDRLEVVLQQLQTVDAERDALLEPASEASPAPAAMLSQLKGIGPEFATILYTEGLFRGFDNRRQVAAYAGLAPTPWQSGSVDHEQGVSKAGNPRLRTTMIQLAWLWLRHQPDSALSRWFQDRVQRNGGRMRKTTIVALARKLLVALWKYATSGVVIEGAVLKAA

SEQ ID NO: 191757 - protein, 388 aa, unidentified
MDSVKYIGMDVHKEAISIAVLNSSGKLAMECTIETKASTILDFLKGLRGSLHVTLEEGTWAAWLYDLIKPHVTELVVCNPRRNALLKEGSKSDRIDARKLAELLRSNMVRAVYHGEHGVRALRELARSYLTISTDLIRVMTRVKAIYRSWGIPCRGKQVYAERHRAEWLGKIQEAGVRRRAEFYYQQFDALRALRQEVRRELLAEAQKHDAWKLLREIPFIGPIRAALLIALIQTPHRFRTKRQLWTYSGFGIETHSSAEQRFVQGELQRAKRAASIRGLNRNHNHELKNVFKSAATVAASKAGPFKEFLRCAAGQGNPAGDGASDFGAQDGGHHLARLEKRSALRRPTFETTNSLNVSSSSVPSWNFFRWWSVGSGDIRVRGRVSAE

SEQ ID NO: 191758 - protein, 364 aa, unidentified
MIVIGTDTHKRTHTCGAVSAATGQLAGELTATAREPGFRELLAWGRSLDEERIWAIEDCRHVSGSLERFLVASGERVVRIPPKLMGQSRRGERSSGKSDPIDALAIARAALREGPDTLPAAHLDERSLQVKLLLDHREDLVKARSEDQCRLRWHLHDLWPELEIPVGALDRTVWLDRLARKLARAEQGTRVRIARELLTEVRRRTRRAAELEREIGALVKAQTPELLALEGCGALTAAKLIAETAGAGRLSSDAKFARLAGVAPIPASSGMRTRYRLDRGGNRQLNCALHRIAVTQGRCHAPAREFLAKKQAEGKSRIEALRCLKRHLARRVWRLLNQSEIDLSMSNSVNPQRGSLAPQIAVAA

SEQ ID NO: 191759 - protein, 344 aa, unidentified
MAQVTTARVTTVGIDIAKNGVCIHGVDAHGHVVVKKRLARQKVLPFLTQLPPCLIGMEASGGAHYWAREFTQLGHTVQLMSPQFVKPYVQSQTNDPNDAAGICEAVERPRMRGVPVKSITQQDVQALHRIRERQIKARTALINQIRGLLMEYGIVIPQRASQVRHKLPIVLEEAENGLTATAREWLHALAEELQALDQRIAATDQQIERVFEADEACQRLAQLPGIGPLTATALVAAVGDATECKNGRQCAAWLGLVPRQHSTGGKTTLLGMTKRGNCYLRTLLIHGARAVLRGVDRNTDARSRWLPGVKARRGMNCASVAQANKTARVAWALLAKGDRYRHAA

SEQ ID NO: 191760 - protein, 377 aa, unidentified
MHSENIAAYIGLDVHKETLAVAIAAPERLGEVRYYGTINNEAQAVRRLFQKLQGLYGNILSCYEAGPCGFGLYHQLTAMNIKCQVIAPSRIPKSPTDRIKNDHRDAISLARLLRAGELTPVWIPDLTHEAMRDLIRARAAAKRDSRVARQRILSMLLRTDKRYAGKHWTGKHRTWLANQSFSLPSQQIAFQHYCQSLEQIEDRILQLDQEISRLLPEWSLCNLVCQLQALKGVGRLTAITLVAELGDFSRFSSPKQLMALLGLVPGEYSSGNSIRPRGITKVGNSELRRLLYEAAWSYRTPAKVGAWLIYYRPDSVTQYSKDIAWKAQQRLCSRYRSLTAKGKKSQVAITAVARELTGFMWDIALAAQSPFSQQKQN

SEQ ID NO: 191761 - protein, 456 aa, unidentified
MPDYFFGIDASKGYSNLVMLDSSKRCVENDFQLDDTFDGHQKLYSILSEFCVRHPKANIFAAVESTGGYENNWFNALVRFQSHLPIKTARLNPCGVYNNSRAGLDRNITDKISAENIAKYIIEHPEKVRYQQQDPLAPLRKQWGFIKMLKKQKTQLLNQLESNLYTANPEILAYCKDNTPAWVFSLLQRYPTASKLAKARKSSVALIPYVTPQKAKKLIEEAKHSVASATDETTSQIIKATVQQIRQLSKIIDAQTKAMTDKCSIPQVELLKTFIGVGDDSAVGLILEIGSIERFESSKHLASFFGLHPVYKKSGDGAWGFHMSKKGRVVPRQILYMVAMVAIQSNPLIREIYEKHTEKGMEKKAALGVCMHKIIRIIYGMLKHNKSFNPEIDRKNRKKQNTQGEKKICRDKSRRYQAYDAKAPISRRQAKKREERKQSQSDNIAKCGIKAPVPVL

SEQ ID NO: 191762 - protein, 366 aa, unidentified
MQKLSTRRVMGDKILKVHQLTIGLDLGDRWSFYCVLNERGEVVREEKLPTTPEGMKRIFEQLPASRIVLETGTHSPWISRLLTELRHEVIVAHAQKVQLITKSSRKDDRHDAQTLARLARIDPQLLGPVRHRSAQAQIHLTVIRARAELVSVRTALINAARGLAKSHGERLPKRGTQQVGRELAATLSIALREVLEPLLREVESLNERIREYDQRIEQIAKQVYPEVALLTQVKGVGTQIALTYRLTIDDPHRFTKSREVGCFLGLRPGRRNSGQSEPQQKISKEGDRYLRTMLVQGAHYILGPFGEDSDLRRWGLKLAERGGKNAKKRAVVAVARKLAVLLHRLWVGGEVYERLRNTNRAMGAAA

SEQ ID NO: 191763 - protein, 314 aa, unidentified
MGTDSFPACTSGYVDLTRWLRHFGAPAKVGVEGAGAYGAGLARHLASEGIEVIEVDRPNRQARRTQGKSDPLDAVEAARAALSGRAHGHPRGRDGVVEAIRVLVVAKRSARGARVRAINQMRHLIYSAPDELRLRLKALSITELVATASALRPKRCGDPVMAATQAALRSLARRVHALGEEMRLLEQLLQPLLEAAAPALLSVRGVGPDTAATLLITAGDHPERLRSEAAWAHLCGVSPLPASSGKLIRHRLDRGGDRQANSALWRIVMVRLACDPETQRYVERRTKEGKSRREAMRMLKRYVAREIYAYLRAT

SEQ ID NO: 191764 - protein, 344 aa, unidentified
MGEVITIGMDIAKSVFQVHGVDAAGSITIRKRIGRAKVLEYFGELPPCLVGIEACPSAHHWGRELQSLGHTVRLIPPSYVKAYLKRSKNDANDAAAICEAVARPSMRFVPIKTTEQQSALMLHRTRQLLVRQRTMLSNALRGHLAELGIVSAKGRNGTAELLEIIADGADSRVSPAVRGILEVLARQYGVIGTEMASIDKSIMALHRTCEASRRLAEIPGIGPVGATALVAEIGDWNAFSSGRSLAAWIGLVPKQNSTGGKDRLGSITKQGNRYLRWLLVVGAMAVIRYARKHGTQRRPWLARLMERRPTKVAAVALANKIARMAWAIMVGGEKYREPQLPLAA

SEQ ID NO: 191765 - protein, 351 aa, unidentified
MITIGVDYHPSFQTIAFLMEETGEYVEQELNHSDGEAERFYRKLKEKGVSVRVGMEATGHARWFERLLAELGFELWIGDPAEIKAKRVRKQKTDREDARLMLKLLQENRFPRIWVPSPENRDLRQLLWHRHRLVQMRTRIMNQLQAVAMNEGYRWKKKLFGEKGRALLEKLSLALWASRRRKELLELLDQLDPKIAELTAAVEQEAKKRPEVVQLMTHPGVGPITGLAYVLVIGTPGRFPCGKQIGSYTGLIPCEDSSAGKQRLGHISKQGNTLLRFLLVEASQAAARCNPDWRRRYAHLMMRREKRIAKVAMARKLAVRLYWMWRNNWQYSQLVEFGSNAGKLGTVHGVK

SEQ ID NO: 191766 - protein, 313 aa, unidentified
MGKSLFVGIDVSKAILDVGIIPTEEVKRFPNDSDGCKELVLWLSKVEPELIVLESTGGLEMQSAGCLTSAGLPTVIVNPRQVRNFAKALGKLAKTDAIDALVIARFAQAVQPEVRPFNDEQTLELKALVTRRKQLSDMLVAEQNRLKSAHKRVKKSISTSIDWLKSQIDDTDKDISDSISNNDIWRDKEEILTSVKGVGPVLTASLLCLLPELGTLNRKKISALVGVCPYNRDSGYFRGKRCISGGRADIRSVLYMATLAATRYNPVIKTFFGRLKEAGKPPKVAIVACMRKLLTILNAMLKTSQKWNPVMVS

SEQ ID NO: 191767 - protein, 402 aa, unidentified
MKKVCGLDVHKDSIFCAIYNGENYSQVKEFSTMTPNIYSMGEYLQSEDVEDVALESTGIYWIAVWDLLYEMGFNLTLVNPYFIKQMPGRKSDVKDAQWIATLLHKGMMRGSFVPPPVIQELRVYSRKQGKLKQQVTRVLTVMDGILVKSGIRASSCLSSITTKSFQCIVEALIAGWSDPGYLVSLVYGNRKNKQSGKLKEALTGNLKAHHRQELSWAKQEYEMYQVQISECLSEMRRICDEPFSVMVKLLQTIPGISQVAAMTIIAETGGDMSVFESSDKIVGWAGLRPRNDESAGKYKSTATTKGNKYLRSILVQASWAASRMKGSFFKDKFQRLAMRKPRKKALIAIARKLLVVIWNVLQYAKEYNPTLVPVQDPVKMKARLAYHKKEYEKAANLLNITV

SEQ ID NO: 191768 - protein, 407 aa, unidentified
MIFVGDDWAEDHHDVHLMDETGARLASRRLPEGLAGIGEFHELLARHAEESDQVMIGIETDRGLWVTALVAAGYQCYAINPMAAARYRDRHHVSGAKSDAADAKLLADLVRTDRHNHRLIAGDTADAEAVKVLARAHQNLIWNRNQHTNALRSALREYYPGALEAFDDLHDRDALAVLSRAPSPAQAASLSLAKIRSALKAAGRQRNLDIRAQEIQTALRTEQLTAPAAVTAAFAASTRAMVSIVNELNHQIADLEAELATHFETHPDADIYRSLPGLGVILGARVLGEFGDDPNRFTTAKCRKNYAGTSPLTIASGKKRAVLARHVRNRRLYDAIDMWAFCALSSSPGARAYYDQHRSAGDLHHQALRAVGNRLVGILHGCLRHRTPYNEHKAWAHQHSNHNTQAA

SEQ ID NO: 191769 - protein, 344 aa, unidentified
MTYYAGLDVSLRTVNICVIDDDGERVAETKLASDVQDIVAYLDDLNIEIESVGLEAGTLTQYLTYGLQSADFEVICMEARQVKAALSAMRNKTDKHDARGIAQLLRCGWYSRVHVKSMQSHHIRMLLSSRKAVLSKCVDLENEVRGLFKIFGIKLPPKLGHGAFDPMVRDIIEIDEMLSHALLPLLDARLVLYQTFRVLDNRTRKMAHRDPVCERLMSAPGVGFITALTFKAGVDDPTRFKRSRTVAAHFGLTPRRFQSGEMDIEGHISKCGDADVRCALYTAANALLTRSSRWSSLKAWGMKLAKTRGHRKAVVAVARKLAVILHRLWIDESQFCWGTEGARS

SEQ ID NO: 191770 - protein, 350 aa, unidentified
MGYSIGIDLHSNNAVLGVLDQHAQRVFSKKLPNDLDIILKTLAPFQSPQSGVVVESTFNWYWLVDGLREHGYTVHLANPVASRQKYSGLKYTDDKDDAYWLAQLLKLDILPTGYIMPKEERAIRDLLRKRWHLVKLRNSMILSLQNIVSRNTGHSVSGARIKEEAFENIAPPAFVNQHIQLAGQASKETIDFLSIQIDRLETVILRSLTPNTHYHRLKTTPGVGVIIAWTILLETGPIDRFPSPGHYASYCRKVGSARISNNKKKGVGNTKNGNRYLAWAFSEAAVFARRYYPECQKFYDNKLRKRNEPVAHNALAHKLCRAAYHILKDGTEFDMNRLFHQPVAEKATSQ

SEQ ID NO: 191771 - protein, 449 aa, unidentified
MSRPQVIDDQEHERVHERVAAVDVAKDTGMVCTRTPHSARPGARRATVWTVKARMGAVRALGRQLKRDGIEVVTLESTSDYWRIWFFVLEACGLAVQLVHAAQAKNLPGRPKTDKLDAMWLARLTELGLLRASFVPPKAIRDLRDYTRARTRLVQERTRCWQRLEKLLEAALVKVSSVASKLTTISAQDMIKAMIAGQRDPQVLAALARTRMKAKHDDLVQALDGMFDDHHGELAGLLLDQIAFLDHRIEVLGARAAELTAAMPAAWGVEPDGTTGPDAGATAGAPVLNAVARLAEIPGISENLARSVIAEVGLDMTRFPTAGHLVSWAGLCPSARQSGPRSRPGKKGQGDTWLRGSLGQAATGASRTATFLGERYSRIVRRRGKAKAQVAVARSILVIIWHLLNNPEARFTDLGYGYYQARTDTDRKLRNHIRQIQALGFEVTVTKTT

SEQ ID NO: 191772 - protein, 337 aa, unidentified
MIIIGCDFHSRFQQIAMLDTATGEITERRLEHENGEARAFYGALVSPVRVGMEATGYARWFQRMLTEQKHELWIGDAAEIRAKMVRKQKTDSRDARHILELLTENRFPKIYVSKLEDRDAWQLLRHRDKLVRWQTSVRNQLHALAMGEGVCRKQKLWSQRGRQELEALALGHWATRRRKDLLEMLDQLQPAIEELDRAVKQQAEARPAAMRLMQQPGVGPVTSLAFVLLVGPVKRFGTSRKLVSYVGLNPRESSSAGQQRLGAISKQGNSLVRYLLLQAAQTASRTDVELRRDYQRLVFRRGKAVAKVAIARKLAVRLYWILRQAGAQPGAAHSHAG

SEQ ID NO: 191773 - protein, 354 aa, unidentified
MSEKHNSVIAVIGIDIGKNSFHVVGLDGRGAIALRQKWSRGQVETRLANMPACLIGMEACVGAHHLSRRLRLLGHDARLMPAKYVRAYSKGQKNDFRDAEAIAEAVQRPTMKFVATKSADQLDLQALHRVRERLVSQRTGVINQIRAFLLERGVAVRQGRHFLRAELPGILATGCAVLSARMVHLIEDLAGDWRRLDERIEGLSGEIAALARQDAGCERLMSVPGIGPIISSAMVAAIGAGDTFTKGRDFAAWLGLVPKQFSTGDRTVLGKISKRGNRYLRVLFVQAAWVVLIRSKNWERYGLKPWIEAAKRRLHRNVLAIALANKLARIAWSVLAHGRNFEASKVAEAAIQPA

SEQ ID NO: 191774 - protein, 316 aa, unidentified
MDVASKSLEVRVGQQGAAGSFANNPEGIAALGAFCQVHQVDLVAMEATGGYEQQAFAQLSEQGLPVAILNPRAVRQFAQSMGSLEKTDAIDAGMIAWYAEVKKSQPACLAPENQQHLRALVTRLRQLTEMRVVQLNQQRLVTDRAVQASFKKLLGMLARQIRELEQRIAGLLEKDPLWRQLNASFRTIKGVADRTVARLMAEMPEIGTLSNKTISKLAGVAPLANDSGKHQGKRVVRGGRATVREILFIVASVVGRYEPDFIVFQQRLRAAGKAPKVVRIALAHKLLVRLNAKAREVRQQLATLQPDGTALIAESR

SEQ ID NO: 191775 - protein, 353 aa, unidentified
MFEHPTEEKASKDQVTIIGLDLAKRAFQVHGARGDGGVVYRQKFSRDKILTFLARQPRCVIAMEACGSAHHWGRAIRDLGHEVRLIPPIYVKPFVKRQKNDAADAEAIAEAAVRPTMRFVAVKSEDQQARAMLFRTRDLLVRQRTQTINALRGHLAEHGIVAPQGPANVKVLGQAIEDGETSLPLLVVELARIYLDQIEGLSKKIAKLQMVTVQEAKREPLTRRLQTMPGVGPITAMAIETFAPPMELFKRGRDFAAWVGLVPRQHSTGGKQFLGRTSKMGQRDIRRLLITGAMAVVRLAGRKGVPEGTWLSRMLVRKPRMLTAIALANKMARTMWAMLTKGEDYRVPAAVTT

SEQ ID NO: 191776 - protein, 406 aa, unidentified
MPQFYAGIDWSDDKHDVLVLNEAGQRVGERQVKHTVEGLRELNEFLQTLTGPQYKEEMACIIETNHGLLITSLLEAGFAVFPVNPTTIDRRRTASGAKTDRIDAYLLAKTGRADFADLRQLQPDSPTIAELKALTRDQDGLIQSQTRLVNQLTACLKAYYPVALQLFAKVQQPVTLAFLQAYPTAQSAMAASLDQLIATLKQAKHPHPTKVGPKLFEKLHQPHLTADTITTRTKSRLMLVLVKQLQPLVEAIAHYDEEIARLFLTHTDSPRFQSLPRAGKRLAPRLLAEIGDDRSRYADAASLQALAGTSPVLFQSGTYSKPHRRYACIKPLRNALQQFAWQSTLSEPWALAYYERKRAEGKSHTVAVRSLANVWIRIILALWRDKQDYQRETFEAAQRAHGQQVA

SEQ ID NO: 191777 - protein, 294 aa, unidentified
MTQFYAGLDVSLEMTSICVVDEGGHICLETKVASDPTSLAQSLVALEGEFVRVGLEAGPLSQWLYFGLQDAGLPAVCIETRHLKGAIGAMAASKTDRNDARAMAQVVRSGWFKAVHVKSTESQELRTLLTAREFLVNKVRDHENEMRGVLRPFGLKVGRVGPAGFEARVRELVADRPGLALCMEALLRAREGLRRELNVLHLALLRVVKNDELCRRFMTIPGVGPVTALAFKTAIDRPDRFRRSTDVGAHLGLTPRQHQSGEVDRRGRITRCGDAFTRTALFGAANVTLNCPSV

SEQ ID NO: 191778 - protein, 335 aa, unidentified
MGAYVGIDLHRRRSVAVCLDETGQRLWWRRFENTPLTMAEVISEAGPDPEVVLEATWGWYWAADVITEAGGRVHLAHPLGVKGFDNRRVKNDLRDATLLADLLRMGSLPESWIPPHSTRELRELVRYRHKLSQLRTGLKNQVHAVLGKEGVIPHLVELWGPAGDQFLDDTQLADAYQYRVGSLRELIGIYEREIKLVDGRIHRQLKDDRGYRAIQQLNGVGRVHGAALVAEIGDVTRFRSPKHLCSWAGLTPRLRESDTTTHSGSITKQGSRLVRWTAVEAISSRHGGAPIRDHYQRVAERRGTNIGRVAAARKLLTLVFYGLRDGEIRCLGETR

SEQ ID NO: 191779 - protein, 423 aa, unidentified
MKNYRMQTQKKFAATIGLDWADTHHDLWLQPADGSKPEHIILEQQPEALHQWIAQLRARFKNQPVAFAIETSRGPVISALLGYDFITVFPINPKALSSYRASFRVSGAKDDRSDARLLEQYLRHYTDQLKPLCPDTVLTRQLAGLVEKRRALVDLRTELVNQLHAELKMYYPLAHTLLDNLTLPLAAVFLKKWPTLEALQKAGPQKLRAFFYAHNCRSAKKMEARLQALASAQALTTDTALIIPASLKVQALVAMLQALHPAVATLDDQIQKAMDAHPDAPIFRSFPGAGPALAPRLLVAFGTQRDRFACAQEVQQLFGIAPVKKESGQTEAIYMRWRCPKFGRQSFHENAGQALKKEPWARAYYDHQRKSKKHHAAVRALAFKLVRIYFACWRDRKTYDPNTYLSSLQKRGSALVKVASKTP

SEQ ID NO: 191780 - protein, 347 aa, unidentified
MTSILGLDLGKFKSVACLYDPNTQEARYETIPTDPDTLRRHLQRLRPDLVVFETCTVAGWVADLCDEMGSPRLVADPMNEAWSWSKVKRKTDRDDALKLARMAALGELPTAYVPPAEARQYRGLVAYRHRLVGRRTAIQNHIRALCQAHGVLLPPAHRAWTASGRAHLAGLGRPPGQCPAQELWRGELTLEFAALEQVLGLLAEAERSLDVLGAADARVRLLETIPGVGRRTAEVIACYLDDPRRFRTAGEVSAYAGLVPRQFQSGACDRKGRITKRGPRLLRAALVEASWLVVRYNAWAARLFARISRGQKARRKPALVAVARKLLVRCWAILRTGQPWRAEPTTA

SEQ ID NO: 191781 - protein, 375 aa, unidentified
MAQGTRWVGLDAARVSALVAGQTQNDGLVKGEAAGRLPIVMGLDQHRAQITAEWIDLSSGEISRGRVVPADRASVRKFLKRFAGRDLEVALEATTGWRFVAEELERVGAGVHLAEPAETSGLRGPKKRPKTDWADARHLRELLLIGRLPESWIPPDHILDLRARVRCRHTLSHQRTECQQRIQSVLYHHGCPQRRALMTVEGREWLDAQPLPAAAREQITVAVAMINALDVQVAPLTARLYDYAKRQTGCKALIAAYYGIGGLTAVTILAELGDTRRFENSRDVVRYGGLDITVKQSDQHRAPGHLSRQGPPALRWALYEAAQQARHPRSPDREYYLQAAERIGGNRACLALARKLLKRCYHTLRDLGDHALTPA

SEQ ID NO: 191782 - protein, 394 aa, unidentified
MKKNISKAKKTQQVKQRKARRRQNAKGMKKVAATPQGTVKEPTQQLESWGGRRVTIGLDLGDRKSKYCVFDGEGYLKESDVVTESDAMKATFGAMKPCRIALEVGTHSLWVSALLKGLGHEVIVANAREVRAISKSKKKNDKLDARKLARLAHADPQLLSPIQHRSMKAQMDLLKVRARAGLVEARTGLVNMVRGLVKSHGQRIQKCDTDSMSAELLRGLDEGLIEALKPAMRVIEKLTEQIEQYDKQVEELAKKYPETQLLRQVSGVGPLISTAYVLTLEDPERFTKSRHVGGYLGLTPAQRDSGDSQPQLRITKEGDCYVRTLLVQGAQYILGPHGPDSDLRRWGLKLVGGGSKREKRRAVVAVARKLAILLHRLWKTGEIYEPLRNSQAAA

SEQ ID NO: 191783 - protein, 363 aa, unidentified
MRFYGEQRRFYCGIDLHASKMYVCVLDDQGNVVLHRNMRAEPEPLKRALAPYRASLVVGAECMFSWYWVADWCRQEGIEFVLGHALYMKAIHGGKAKNDRIDSEKIARLLRGGTFPLAHVYPKEMRGTRDLLRRRNLFVRRRAELLAHVQNTFTQYNVPTASGKGRDRLREGDVGSSFEDGSVQVMLDADVEVIEQLDETIARLETHVLKHAKVHDPARLHLLQTIPGVGKVLSLVMLYEIQDVDRFENIGQFVSYARLVSCAKESAGKKQGSGGRKIGNAHLKWAFSEAAALMIRSSPEAKAFMEKMTRQRGKARAVALVAAKIGRAVYWMMKRKQPFDARKLWKSSLPKGVREMEGAAMKG

SEQ ID NO: 191784 - protein, 439 aa, unidentified
MRDGNDGEIEFAAYIGIDWADQKHACALQSSTESGVVQGELIHKPEAVEAWAADLYRQFGGRPIAIALEQSRGSLLFMLLKYEHLVLFPVHPSTLVNYRKGFRPSGAKNDPSDATLLVDLLVRHRERLRRLHPDSEQTRTLQFLVEGRRKFVHEKVRYSNRLTAYLKMYFPQVLDWFFAVDSAIVGDFLLRWPTLEKLQKARPDTLRAFFRQHNSCKSDSIERRVQEIRDAVPATHDTAVIRSCCKAALSFARMLREVRAAIRSYDQDLEKLTREHPDFALIDSLPGVGPVLAPRLIAALGTQRDRYQSASELQCYSGIAPVLASSGKQYWVHWRWACPKFLRQTFQEWAVHSLASCAWAKDYYEQQRAKGKPANTVVRALAYKWIRILFRCWKDRTPYCESTYLQGLERCQPLARKGVLVKTRWKTSAGFRKIDAATS

SEQ ID NO: 191785 - protein, 379 aa, unidentified
MPTRAAKTTKALPVINPNAAGIDVGATAIYVAVPEDRAERPVRSFATFTQDLHAVADWLHACGIQTVAMESTGVYWIPLFQILESRGIEVCLVNSRHVKNVPDRKSDVADCQWLQYLHAVGLLRASFRPPQAVCAVRSLLRHRDTLVTYAASHIQHMQTALTQMNLQLHHVISDLTGKTGLAILDAILAGERDPHKLAQLRDFRIKASAQTIAKALVGDWREEPLFTLRQALSTYRHYQHLIAECDYEIERLLAQFDSQVDPATTPLPPATTTHRQPQRNELRFAHTDLRTELYRILGMDLTQVPGLQTTTIHTLLTELGPELSAFPTAKHFASWLGLCPDNRVSGGRVLSAKTRKRCATGRPTPCASRPTAYTTVTPL

SEQ ID NO: 191786 - protein, 422 aa, unidentified
MVTKDTTSFERVIGLDCHPDTFTAAVVRGQTPAQALIGKVFNKVPMAQLQSWAKKHTTAQDLFVLEASGNSFHVVRSLASIQRRALVLESCQLGKLKEAHANNDRISAVRIAKAYLAGTAKTVWVPDLKTQERRDWFHAHEKAIKRTTQMQNRLRSYLSDNGVRLKKGTHLAQPDPVVETLLRQAKAWSVRQWQIIEGLLMELRHADEQRRFWRSAIAQEVLGDPELLKIVRLCGVRDLIAFALGAIIGDIKRFARPGSLVKYIGLNPAFDDSGQGQWHGGIGGHGRKDLRSLLIQSAQAILRSKDPLAQWGRRLAARKSSTKLAVAAVARRLAVAVWYLMSGQWSQLQEIDQRLEIKVSRIISQMGTEALKKAGKTRPALRDETYQSLKTGTTYLLDAKKMFTPKPKFERPMTLAEEYGLK

SEQ ID NO: 191787 - protein, 326 aa, unidentified
MRKKGYFIMGSSSTSFVGIDVSKNTLDVVIRPTGEYFQVPNSPDGHRQLIERLKPLDLGAIVLEASGGWERACTAALVDAALPVAVMNPRRARDLAKGLGKLAKNDRIDAGVLAYCAEHCQVKKAIKVPENQAQLEALVVRRRQLVAMRAQEQTRLQQALVKEAKKDVQQSISFLNKHIDKIEKQIAKLIDSDDHWGERHKIIDSVPGIGPTTAAVIVAELPELGGLNRQKVGALVGVAPYHHESGTRKGKRSIYGGRAPLRSSLYMATLTAITKNDVIKVFYQRLSAAGKPFKVAMVACMHKLLNILNQMVKNRQHWNQHLVKSA

SEQ ID NO: 191788 - protein, 434 aa, unidentified
MANSEGEPLAAFVALDWGDRKHVWALQPAGSEAVEEGEIEATPEAVEAWATRLAQRFGGRAVAVALEQSRGALLFMLTKYGHLVLYPVHPGTLASYRKALCPSGAKDDPSDSSLLLDLLRRHRDRLRAWEPDTVEIRTLQFLVEDRRRLVQEKTRQSNRLTARLKLYFPQVLAWFEDVDSVLVGDLLQRWPTLEELQKARPATVERFLREHNCRSAERLQERLELIQRATPATRDAAVVISSVSLVRILVRLIAALREGIAELDRQIAEQFAQQSDAALFEALPGAGPALAPRLLAALGTRRERYRSAAEVQCYSGIAPVLERSGKKQWTHFRRACPKFLRQTFHEWAAQTIHCSAWARDYYQQQRDQGKGHHAAVRSLAFKWIRILYRCWKERTPYDEARYLQALRCHSSRPKLPTQFHWQTCAGFSRFVGAS

SEQ ID NO: 191789 - protein, 313 aa, unidentified
MSPNNPNILYVGLDVAKLSLELHLAGHSHSLTNEAKGHAKLLKHLRAHPGAHVVCEATGGYEQPVVRVLHAAGIPISILEPGRVRHFAKAQGLRAKTDPIDAAVLTAYGMTFQPTARPPASPQQQQLADLATRRRQLIHTVVTERNRAEHYTDPLCVRQARQLHKALKKQIEQCDQAITQLIAADAVLAHKAKRLNAIPGVGPVVAATVLAEMPELGQLTKRTAAALAGVAPYNRDSGGQKGVRHISGGRRPVRCALYMATLSAVRYDRILKEFYLRLLAAGKKPLVAMTACMRKLIILMNHLLKNNDFQLAS

SEQ ID NO: 191790 - protein, 398 aa, unidentified
MTRKNTLKSLPTDTEFRVVGLDLAKSDVSVAAIPVDDNTPSLVDRMTYADLLDWAGKISPTLFAMEPCNGYSLLCLQLENLGHEIKVISGSTVSMWINTHLSGQKTDLNDAIALARLAVSDAELTPIRHKSITEIRIQTVQAVRQQLMSQRSKSIVSFKALAQQWGIPCAAGHRNLKKLRESIEAKVDLITRPVANAMLFLLDAVKSLDRQIGQLNQTLQELVMSDERGRLLQSVLGVGTQISARVITVVGNVERFNSPRSLVAYVGVAPRNFITGHKNLTKKKHGNCPDLSHKGQGKISRRGDKLLRSLFIQGAACLYMQFCKDQLPECQLKRWILKQLARQKPYGKLIVSLAAKLIRIVWAVLTYGEKFNIQKAGMTRSMWSEMALETPLNKEVPA

SEQ ID NO: 191791 - protein, 311 aa, unidentified
MSDKTTVGIDVSKFALDVWIDTSERLIHLENSASGIMQLLKELEGLYISGVIMEATSRYHSLAESILISAGLPVAVINPRQIKNFGRAMGKVAKSDPIDARIICEYGRRMNPEFRPARDKELQDLALLLTRRRQLVQNRVMEANRLQEKSGVYIEKGIADHIAWINVQIDTLDQEIKYQLHQNAALFPKRKMLEKVKGIGPVTQAAILSQLPELGELTRRQISALVGVCPYDRDSGQLRGKRAIWGGRSGLRATLYMAMLSAVRYNPQIKDFYTSLVARGKPKKVAITACIRKFITILNAMFRDQKDWVYS

SEQ ID NO: 191792 - protein, 334 aa, unidentified
MDKVTTVGIDLAKRVFALHGVDASGRVVLRKTIRREQFVETVAKLPPCLIGMEACSGSHEWARRFQALGHTVRLMAPVFVVPYRKSGKNDGNDAEAICEAVSRPNMRFVPVKSAEQQALLALHRVRQGFIEERTALINRLRAVLTEFGVVLPNRTQWVRRDAVAVAEPLPVLARQAVEDLRAHLRRLDERIGAYDRQLEQQARQSEAAMRLMQVRGIGPLTAVAIVATVGSARDFASGRQFAAWLGLVPRQNSSGGKARLGHISRRGDAYLRMLLVQGARSVLNTAARHTDRLSLWALSLQARRGMHKALVGIAAKNARIAWALLSKDQTLRTA

SEQ ID NO: 191793 - protein, 346 aa, unidentified
MQYVGLDVHRAFSHACVMDEKGVVLMSEKVPNEMKAVDEFISELEPGSKIVVEASYSWQYLYDYLEQNGFDMTPANPLQVKAIASARIKTDKIGAEMLAHLLRADLIPESYVAPQRVRDERQVARLRSSLVNIRTEVKNKIHAILARHGINYEMSDIFGKSGMEYLQTLELPAASRFEIDQYLFLLPALDERIDGVQKQVEAMAEDNYHARLIMTIPGISHYSALMIMAEIGDITRFPPSRQLCSFAGLVPSVYRSGNTMRTGHLTKRGSSWLRWMLVQCANMAIYTNSALRKFYLTLHDKKGHKTAVIATARKMLVYIHIMLKHNLQYSALQVSRQMQKDLEDVN

SEQ ID NO: 191794 - protein, 347 aa, unidentified
MAITVLGIDLGKNSCSVAGFDETGHVILRRRLTRDGVVRLGAKLPACTVAMEACCGAHHLGHVLREQGHEVRLMSPEYVQPYVKAQKNDERDAEAIAEAATRPTMRFVELKSEAQLDAQILHRARTRLVGQRTALINQLRAVLLERGIVVAKGRQQLERFLTEMLDPAIEPPSTLSPRTRLLVEDMRLEWGELDRRIAALTTEFVARAREDQAARRLVSIPGFGALNATALVAAIGTGETFRSGRDLAAWLGLVPRQATTGGKPKLLGITKRGNTYLRTLLIHGARAALPSLSAGQTLIGEWLRGLVGRAHKNKVVVALAGKLARIAWAVLRSGEGYAARVRQLVAA

SEQ ID NO: 191795 - protein, 324 aa, unidentified
MVDNVLGLDVSKDTLDAYLLCGQRGRHRHVENNPAGLHTLVTWLQSQPTPPTWACCEATGTYHVACARALHEAGFAVSVVNPACVKGYAQSELSRTKTDRVDARLIARYAQQAQLRPWQPEPPEIVSLRALQHRRESLEKVHTQELNRIQAPELPACVRASCQRLLAAIEQEQAEIEAQLQALFAAHASLRRQQELLDTIPGFGAQTAAAVAAVLLSRPFSRARQLAAYSGLTPRERRSGTSVRGPARISKQGPGFLRKTLYWPAIVAIRVESPQIMPLVTGMRARGRTKMQIICAVMRKLLHTAFGVLKSQRPFDPTYHLQRA

SEQ ID NO: 191796 - protein, 417 aa, unidentified
MHQPTVFCGIDWASDHHDIAIIDGAGSLLARARIDDTAAGLAQLLQVLAEQGDCVEQPTPVAIETSRGLLVACLRATGRRVYAINPMAVARYRERHTLTRKKSDHLDAMMLANILRTDAAAHRELPADTELAQAVAVLARAQQNAVWDRTQAGNKLCSHLREYFPAYLAAVGVRREGVFHPIARVLLAAAPTPEQAAKLTRAQLRSLLKQAGRKNTIDTESQRLHTALRAPQMRQLPLVEQAMGRQSLALLRQMEAACVSADDLAEASTESFEAHPDAEIITSFPGLGALSGARVLAELGDDRSRFADARGLKAYAGAAPVTRASGKNRAVLARRIKNQRLAAAVGYVWAFAALTHSTGDRAHYDRRRQAGDRHTAAQRNLFNRMIGCLHHCLSNRITFNETVAFPTAPDQPLPATT

SEQ ID NO: 191797 - protein, 423 aa, unidentified
MTKFAATIGLDWADQKHDLWIQPADGSKAEHRQLEHTPEALHEWVAKLRERFGNRPVAIGIETCRGAVISALMAYDFIVFFPINPKALKDYRAAFAVSGAKTDRVDASLLEEFVRLHGDKLHALEPDTELTRKLAGLVQNRRLLVDERTRLVNQLHATLKTYYPLAQSLLGAQMNTAMAAEFLARWPELQSLKKATIETLRAFFYKHNSRGAQLMEERLEAVQKAKALTTDPAIIEPARALVTALAAMLKPLHKVIAFLDKQIELTMDQHPDAAIFRSFPSAGPALAPRLLVAFGTNRARFASATEVAQFYGLAPVVEQSGNSKTVRMRYRCPKFGRQSFHENAACAIRKEPWANCYYTQQKARHDDKHHLACRALAFKLIRIYFACWRDRQPYDPARYLSALEKNGSPLLAKLEASTTTARE

SEQ ID NO: 191798 - protein, 356 aa, unidentified
MLNDKKYIGMDVHKESISIAVRNEAGKIVMECVIETKASVILQFIDGLRGDLHVTFEEGTWAAWLYDLLKPHVTELVVCDPRKNASMREGNQSDKIDARRLAELLRLNHLSPVYHGEHGLRSLKELVRSYLTITKDLGRVMSRVKAIYRSWAIPCTGKQVYAPRHRAEWLGKITEPGVRRRAEFYYQQLDALRALRQQVRRDLLAEGKKHPAWKRLCQIPSIGPIRAAVLLGILQTPHRFRTKRQLWTYSGFGIETQSSADHRSVDGQLERVKKPSSIRGLNRNCNHDLKNLFKGAAIVASSKPGPFQEFYTALLTKGLRPEMARLTLARKIATIALIVWKRGVNFDAQHLKPQTA

SEQ ID NO: 191799 - protein, 340 aa, unidentified
MRFYNGKHRYFCGIDLHARSMYVCVLDPEGQVLLHRDLPTDPDVFLKAIAPFREKLAVAVECIFTWYWLADLCAREGIDFILGHALYMKANDRIDSLKIATMLRGGMLPQAYVYPPEMRSTRDLLRRRLTLVRQRGQLLAHIQNTHHQYNLPTPKARINYRCNREGIAEKFTDPSVFESVSSDIELAGHYDFLIKDLELFLTRKAKVHDPENFYRLRSIPGVGKILAMTILYEIHDIGRFERVQNFASYARLVKCEKSSSGKRLGTGGAKIGNVHLKWAFSEAAVLFLRANEPAQQYIESLRKKHGRAKSISILAHKLGRAVFHMMKNKKPFSLEAFRLS

SEQ ID NO: 191800 - protein, 313 aa, unidentified
MKYYTSTTEYNCGIDLHARQMYVCIMDRQGKKLVHCNVKDNDFAFFLKLVEPYKHDLTVCCECMFGWYWLADACQDAGLTFVLAHALYVKAIHGGKNKNDRVDSEKLTHLLRSNLIPPAYVYPSAKRPLRALLRQRIYYVWRRSELLARIYSHQLAHNRTPAKQTRRVRDSWEEQLLKAENHPLRQIALKNDMAMIRAFDHQIFQLEEELQRQTKQVACREYALLQTVPGIGENLGLTILHEIGDINRFPTVKDFVSYCRLVKGTVASAGKIKGLRGAKLGNPYLRWAFGEAAVIAKRDHYLIGPLSQRLELR

SEQ ID NO: 191801 - protein, 330 aa, unidentified
MNLRHVGIDVSAKVLTVVIDHQGNRTEAFDLPNDAKGHKALIRMLTKNGFHAKVVLEATGVYSLDVALALHRAERVDVMVANPRAIGQFAGAYMRRSKTDSLDANIIVEFAMRMDFQAWSPPAPHIFDLRAISRRIEGMIKMATQEKNRLHAATSFDEMSEIVRNDIEVNIRHLERRIERMREQARELIADHPDLERAFLHITSVKGIAQAAGIQILAEIAVLPEGMDVRQWVAHAGLDPRVFQSGTSINKPARISRQGNVHIRRALFMPALVAVQYEPNVKAFYDKLLRRGKTKMQANVAVMRKLLHAIYGMLKHDRDFEGEKFYVIGA

SEQ ID NO: 191802 - protein, 461 aa, unidentified
MAKQSGKRKKGGAKVDATEGLPPLNLHAAGIDVGSAEHYVAVPLDRDVEPVRRFGSFTADLHRMAHWLKDCRITTVVMQSTGVYWMALHDVLESHGFEVNVANARHTKTLPGRKTDVQECQWLQKLHTFGLLNNSFRPPEEIRVLRGYLRQRENLVAAAATCIQHMQKALTEMNIQLANVISDISGTTGLAILYDIVRGERDPYKLAMHKHSRIRASRQEIARSLEGTWRQELLFVLEQSLDLYQTYQQKIQTCDERIDGQLRSMEPKIDPVSEPIPEPRRGKDWRGHQSGFDLRGQLYRITGVDLTRIDGIEVQNAQTIISEVGVDMSRWKTEKHFASWLGLCPDNRISGGKVLKRGTRHVVNRASTALRLAASALLRSQSALGAKFRRLRSKLGAPKAITAMAHMLARLVYRMLKFGHDYVDRGIEFYEAKYQHQQLQRIRKQAAALHMQLIPLTRVVS

SEQ ID NO: 191803 - protein, 337 aa, unidentified
MKITTIGLDIAKRFFHVVCCNEQGRLVKKKMLKRAQVLSFFQQHTTCLVALEACATSHFWAREIRKCGHEIKLIPPQHVKAFLVGNKNDYNDALAISVASKQHHIKSVCIKSVEQQDNQAQHKARELAVRQRTALCNQIRGLTAEYGIILNQGVNTIRKSIPLILEDENTGLSGAFKAVLKQLETQLNNLDSCIETYSTLIVETAKNNDICQRLQTIPGFGPMVSSAYFNEVGNGSNYKRGRDVSASLGIVPRQHSSGGKDTLLGISKRGNSYLRCLLIQGAKAVVSRAKTKNDKLSQWINRLVQTRGHNRACVAYANKMARMAWAISASGESYSPV

SEQ ID NO: 191804 - protein, 418 aa, unidentified
MDNRPPFLYQATVGIDWADQKHDVFVRFTNGDSYRRKIDSRPEAIQEWLLELRSVCAEGKIAIALEQRRGALFYQLCTHLNWIDLYPVNPHSLSSFRLTFFSSRAKDDPIDSQLLEELVRTHSDRLRPYRPESVTERKLDQYCRHRRSLLDLATKTELKLISTLKQYFPLAVNLFAAVGMKSDIALSFLSRWPTLSELQRAKAHTVRSFFYAHNSRSQSRIEKRLQQIGQAHNVTDDLALIEPLVLTTKCLVGQLRQFNHAIKEFDHQIKELFKSHPDHFLFENFPGAGEQLAPRLLSLFGSDRARWADATDIQKYSGIAPVIERSGKSVWVHRRLSRPKFICQTFHEFAQQSVQHSSWAKQFYQHQRDSGKSHHSAIRALAFKWIRIICACWKANKPYDESFYLQALAGKNSPLPST

SEQ ID NO: 191805 - protein, 460 aa, unidentified
MKQKRSKPKIYHKMPMVYPNAAAIDVGATMHMAAVRADRTSEPVRSFGTFTTDLHQLVDWFAECGVETVVMESTSVYWIPIFELLDARGFIVFLVNARDAKHVPGRKTDVSDAQWLQRLHSYGLLRASFRPKDQIAELRAYVRQRERLLEYAASHIQHMQKALIEMNLQLHHVVADIAGATGLRIIRAILAGEHDPKVLACLRDYRCHASAETIEKALTGSYRAEHLFALEQALALYDAYHEKVSACDARIEAVLKALIVHRGHGHGSAPRASRRRNRTDQANALAFDVREALFALLGKDITQIDGLGPYLSLKLIAECGDDLSAWGSAKHFTSWLGLAPNNKISGGKVLSSRTRRCGSRAAALLRLSAVTVGRTDTALGAFYRRLSARIGKAKAVTATARKIAVLFYNAVRHGMEYVDPGASFYETRYRSRVIDNLHRRAKSFGFVLRPIEPTPEDAVS

SEQ ID NO: 191806 - protein, 453 aa, unidentified
MSRRRAAINLKTVKSRAALTITHPNAAGIDIGSAAHFVAVPPDRDDTPVREFPSFTVDLNAIADWLKSCKVDTVAMESTGVYWIPLFELLESRGFTVLLVNARHVKNVSGRKSDVLDCQWIQQLMTYGLLSGAFRPADAVCVLRSLWRQRATLLRDQARHVQHMQKALTQMNVQLANVIADVVGVTGQKILRAIVAGERDGHVLGAMKDVRIHASIDEIAKSLEGNWRAEHLFALKQALAAFDFIGTQLSECDSELEQQIQRLQAHDGEPAKGKPRPRRRNSPNFDLRTQLFKMCGVDLTRIDGIDVTTALAVISETGTDMSRFATVGHFTSWLGLCPGTKITGGKVMSGKTKRCANHAAQALRLAAAALRPSQSALGAYYRRMCARMDKPKAVAAAAHKLARLIYTMLTKGEEYVDQGQDYYEERYRQRVLRQLALRAEKLGMRMVAIEQPA

SEQ ID NO: 191807 - protein, 414 aa, unidentified
MDVPAPHHFAGIDWASDKHDLCVLDPAGKVCLHLCIRHTAEGLAELIRALDRFGPRAQLPIAIERPSGLLVDTLVEAGFPVVPIHPNALKATRPRYSAAQGKSDPGDAFILADVLRTDGHRFRSLRAPSDQTRALRAAVRTRDDLVATRVQLANQLRSLLDSFWPGAVAIFADIDSPIALAFLDDFPSPESATRLGEKRLDRFLKRHAYCGRRSPAELLARLRAAPQGKAAALESETKGQLVRALVAVLWPLVRQIRDLAGLIDAHLQQHPDGPILQSFPRTGSVNAAQILAELGDDRLRFDSFEQLAAEGGVAPVTHASGKHRGVSARFACNKRLRQALTTWADNSRHASPWAASVYRQARARGCDHPHTIRILARAWTRVLWRCWHDHTTYDPQSHGRALPFLPPETLPIAA

SEQ ID NO: 191808 - protein, 397 aa, unidentified
MIYVGIDIAKTNHYASIVNYSTGEVIESPFLVTNNKQGFELLYSKIKDLNKENVLIGLESTAHYGNNLIFYFHEKGFKLGVINPIQTASLRKTRIRKVKNDKVDSMLICEALSLGYYNLLSDYDIKLLEIKSLCRFRKELKDKASDAKIQLKTYVDQLFPELNSFFKDNIDIKTAHELLKLYQSPEDISKVNLTKLSNLLIKSSRGKYDKNRAIELKKLAANSVGINNKALCIQIKMTIELIELLESQIKDIEKQVSEFIKKSDNVITSIPGIADATAAIIISEIGDINRFNNPGQVLAFAGLDPSVKQSGTFNASSTRMSKRGSSILRYALILAANNVQLNTKTFHDYYNTKRLQGKLHYNALGHCAGKLVRIIFYMLKNNVTFNLDWFFKELYLF

SEQ ID NO: 191809 - protein, 408 aa, unidentified
MKLFVGIDVSSLTLDVCFLDSDDQILKQCSLPNDLHGASSIKELILEYHQNVSYESILVGMESTSVYSFHPAAFLNEDPDLKELDVKVVVQNPKAIARFKGLFDEDKTDKVDAYRIADFLRFDRFNLSLVKEEKYLALQRLTRSRYQLIQQMTQCKQHFLENLYYKCNTLTRDVDTSVFGAAMMDLLSESLSLDDIAAMPIEDLAELLQQKGRGRFADPTKLAKAINKAARDSYRLGQVMQDSVDVVLGSYALMIRTIKEQIKSLDSAIGRLLEAIPESQCLLSIPGIGKVYTAGILAEIGQIDRFEDQAKLAKYAGLYWKRKQSGNYESQRTSLTRTGNHYLRYYLVEAANSVQRNEPVYREFYLKKYREVPKHQHKRALVLTARKLVRMVDVLLRNRQLYAPEMSV

SEQ ID NO: 191810 - protein, 369 aa, unidentified
MAVPQNDGVRNEVRAIGLSIMRGTAVEHYAGIDVSLKESSVCVVDATGKVVREVKIASEPEALVGYFEMLGLPVTRIGLEAAGPLSQWLHAALVNAGRDVVLLETRHVKAALSAMTVKTDRKDARGIAQLLRMGWYRPVHAKSSVAQDTRALLVGRKLLQGKLLDVELSIRGILRGYGLKVGEVSRGRFEARIKALIEGHATLSKVIGGMLAARATLWSEFTKLHREMLRISRADPICHRLMSVPGVGALVSLTYRSAVDDPTRFGKSSTVGAYFGLTPKKYQSGETDRDGGVTKVGDAMVRTALFEAAHIMLTRATRFSSLKRWGLEVARRRGMKRAKVALARKLGVVLHRMWVDATDFRWGAAPVAA

SEQ ID NO: 191811 - protein, 365 aa, unidentified
MEITTIGIDLAKSVFALSGADRAGKVVLREQLRRGQVLEFLRGRRLCLVGMEACGGAHHWARAIGALGHRVRLMSPALVRPYRSGANKHDRNDADAICEAVGRPQMRYVAVKSVAQQDLLALHRVRTQLLKQRIALSNLIRALLHERGVIAPLGAAGLRQALAQALPAENSELSGAMGEVLRELSGGLRELEQRIATITRRIECAAKDDERCARLRQVPGVGPLTSSALVATVGNAREFKRGRELSAYLGLTPRQHSSGGKTVLLGISKHGDRYLRTLLIHGARALLYRNRSNPRAAWAARIMAARGPNVAAVALANHNARVLWALLSRGTSYRPAPHPSSFPSRPSPVVARAREGKLLITTERS

SEQ ID NO: 191812 - protein, 345 aa, unidentified
MNKITTVGLDLAKNIFHLVACDRRGKVVFRKKLRRGKLLAFFGQLPSCLVGMEACSTSHYWAREFQKLGHEVKLIPAQHVKAFLRGNKNDFNDSMAIAEAVVRPEMRFVPIKTVQQQDQQTLNVHRQQLIRTRTAEANRIRAMLIEQGIIIAKGLSVLKRRLPELMENPENQFSELFITLLQQAYIHLTQLDAHIARCDRELKAYTARSPACRQLQSIPGFGPVSASLFQSYVGDASGYRRGRDVAAALGLVPRQFGTGGKVVLMGISKRGNRTLRCLLVHGARAAVSRVGNKQDALSCWIRRLVARVGIHKATVAYANKMARIGWAVLRYGGEYQPNYIPITAK

SEQ ID NO: 191813 - protein, 456 aa, unidentified
MSKKKISLEVINPNAAGIDIGSRSHWVSVGQDSQDVKEFGVYTEDHNELINWLKEHDVSTIAMESTGTYWQNIFSSLIGEGFEVILVNGRQTKNIKGKKTDILDCQWIQKLHTLGLLSASFLPNSTTDIIRTYSRHRQNIIKQAVTTTLKMQKYLRLMNLRLDVVVNDIVGLTGQKIISDFVAGERSGTELAKHRHYNIRKSEEEIAKALQFNGREDYFFALKQEWKTYLHLQKQIDETDKEIKKLLKGIIRSDENKKHKKVKKKAYKRKNKNAIRNTDMNKISFQMFEGIDLMAIEGVNDATVMAFISEIGLEGVKKFKSSKEFTSWLRLAPNNKISGGKILKHHLPKGSNRLKVALRQSANVIGNLKEGHLNNFFRRINYKKGRATAVSATARKLAVIIWNMLSKNEQYQPPTEYLFLDQKRKRKLVSRIKKSIAKFDLKPEDVGFLNKLNIST

SEQ ID NO: 191814 - protein, 435 aa, unidentified
MEQPTRFVGMDVHKDTIVVAVTATGEVGKAPAYGTFPNTAAALEKLVKRLRQAGDGPIKFCYEAGPCGYGVHRSLTRMGEDCMVVAPSMIPRKSGERQKNDKRDAANLAVLHRGGLLTPVWVPDAAHEAMRDLIRARQAAVRAVRAARQQLSAFLLRHERIYPDGKKAWTKVHRRWLAEQSFAQPAQQIVLEESIEAVRLGEQRRDRVDGYLRAQIPTWSLFPLVRNLCALRGLDMIAGAGLAAAIGDPSRFASAPDFMAYLGMVPSEHTSGPKRRIGAITKAGDVHARTLLIEAAHSYRFPARIARDKLKAVDTVPDAVRAIAWKAQTRLCQRYRSMVAKGKPNQVVVTAVARELAGFVWSIACITSDPHATESVVTLAHNKVNIESPAVMTLSEEVTRQAQQIASGTGSSNAPRRARRPEQSKATSAERSLTG

SEQ ID NO: 191815 - protein, 473 aa, unidentified
MIKSVGIDLAGIGEHKVRCLDERAQMCDGFSFETTTAGLAKLEERVFGNGANPVIIFEPTGLAWLPVAVYLKAKHPDSRLVRVQAQKVVALRKYLNRSSKSDKIDSLTLAKMPFIDPEKLEEIYFPPGKIYAIQRLARQRKRLENDIAGRKRRIGAVVDGYFPGIRSAFSDPWSAHARAFLRSRLNPLTVARYGEKALCAFLTKARRHCKIESSVESHSIYLACREAATLYKASGSITTIDADFFSALQDEVSRELRLMEMEEAESATIAKRLEHLYLEIHPSDNLRTIPGVGDHTAPIFLATIGDPARFRSQSSFANYCGIVPGASQSAGSEAKGLRMTKAGPAIMRWALFQAGGIGRAHDPQLACIYYREMVHNGKNHMQAMGAVMSHLSARVLAVLREDKPYDLRDMDGRPVSREEARKIILAKYQVPEEIRRERRRRKITGNPGLRKKLGEMLVPRVYEAVETPQPVVT

SEQ ID NO: 191816 - protein, 409 aa, unidentified
MSSENCTEVFAGLDWAVHTHAVSVIDAAGKVLERFEIAHDRDGLAELMRRLARFSAHVRIAIERPSGLIVDVLVEAGHHVFPIHPNAVKASRPRYRSHGAKSDASDAYLLADLLRTDGHRWRELAPQSDSIRALRALVRSRDDLVSARVALSNQLRSTLEAFWPGAACIFADISSPIGLAFLRRYPSATAGAKLTEAALARFCKSQHYSGRRSAAELLARLRCAATGLAGAQTNDAAGQLVRSMVAVLQPLVEQLADLTRRIERFVESLPDGQIVMSFPRAGHVCAAQILSELGDVRERFPSADQLAAEAGTVPVTYQSGKTRSVAFRWACNHRLRQAITCLADNSRHANEWARSVYTAARKRGHDHPHAIRILARAWLRVIWRAWTDRTPYDPALHNAAQRLASPGGG

SEQ ID NO: 191817 - protein, 338 aa, unidentified
MEHYAGIDVSLECSSVCVVDASGKIVREGKVASEPEALIAWFGSLGFGLVRIGLEAGPLSQWLYAAMQQAGLAVELLETRHVRDAFKAMPVKSDRNDARGIAQLIRLGWFRPVHCKSLAAQEVRAFLTARKLVQSKLFDIEMSLRGILRGFGLKVGPTTPMRFAGRIKELVSGHATLEVVAKALLAAHAVLLREFASFERRVRTMARDDARVRLLMSAPGVGAIVALTYVSAIDDPMRFKSSKGVGAHFGLTPKKYQSGEKDVTGRISKLGDGLVRAALYQAAHIILTRPVKGHHLKSWAAKLAKRAGMKKAKVALARRLAVILHRMWINNTQFAATA

SEQ ID NO: 191818 - protein, 410 aa, unidentified
MRYYLGVDWADQTHAVWVVDEGGTKITARTVPHTAEGLSEWGRELDEWRAQGIELWAAIERREGRVVDFLLDHGVVVYPVNPKALDRARDRYRQSGAKSDPFDARVLANFLRTDHAHLQTLQPSSAAAQELKLLTEDYQQQIRQQTRLVNQLTAALKAYYPRALEVAELTTALAREFLQAYPTPAAVAALTPRQWQRWARAHRLSDARTQALWAVLQQPQLPVPAHVLRAKARLMRSLVAQLTLVVATVDDYREAIEDFFARMPAAQWARTLPIGKHGITAPTLWARLGDAPGRWESFRHLQAQAGAVPVTKRSGKQQRVIQFRFACDKALRYVIDHVAFLSLHASVWARAYYDQQRARGHSHRQALRALGAKWLKIIFVMWQRQIPYDEQYHLATMTRQQLRHCQNQSA

SEQ ID NO: 191819 - protein, 404 aa, unidentified
MHHVIGIDVSKSTSQVAVAVDQEIVETYKIEHNVFGFNRLKTSIQQFNEFPDIVFEATGIYSRRLKHFLDSHHYSYRFLNPSAAKKELDQLRPNKNDPNDAKNLALTQFILDRPKSYVQNPIYIELQDMSLFYQQLTHDIVTIKNRLHRVLQLTFPEIEELFSTTDSQQFLEILQAFPHASYAQHELQSLEDTIQSCCSRHIRQIRLERITKRLVSLASQAAPAVTMHSHTVYQVRYYSSQLVALMQEKDAVLNEMINQSRGLPEFEIYMSIPGLSDKTVVSLIAELGDITRFQTSNKLNAFIGIDLRFNDSGQYHSSGFITKRGNHIARKVLFKAIGNKASTATYGHPNHINDWYQKKKQSSDGRGTKKIAIGAMSRLIRTLHYLVLHNQLYDYEIASRNSTI

SEQ ID NO: 191820 - protein, 433 aa, unidentified
MLVCHGKGEGVVLQEDPQGEEIVARVAALDIGKAELVCCVRVPHEAKPGRRLQEVATYSTMTRSLLAMSDHLRCLGVSRVVMEATSDYWKPVFYLLEAQGLDPWLVNARDVKHLPGRPKTDKLDAVWLCKVAERQMIRPSFVPPPEIRRLRDVTRYRIDLVGVRTAEKQRAEKLLEDAQIKLSVVASDIFGVSGRQMMAALIGGQTNPKALAQLARGRMRAKLDALEEAFTGHFTDHHALLLTKMLARVDALDTDIAELDTAIEEMIAPFAPTVERLDEIPGVGTTAARVIIAEVGMDMSRFPTAAHLASWARFAPGVKESAGRKKGSHTTGHGNRYLARALGEAAVAAGKTGTFLGERYRRIARRRGKKRAIVAIGRSILVIIWHLLSDPQARFHDLGPDFYDNRIGPERKKRNHIHQLEALGYKVTLEPAA

SEQ ID NO: 191821 - protein, 377 aa, unidentified
MKKDIRFIGLDVHAETIAVAVAEASGEVRSLGVIPNRPESVKRLVKKLGPTGSLRICYEAGPCGYVLYWQLTELGVHCDVVAPTLVPVKAGDRIKTDRRDALKLARSYRSGDLTPVWVPDAEHEALRDLVRAREAAKKDQLRARHRLQKFLLRRGLRAPEKIKAWTAKHLAWAKTLRLEQAALAATLLDYITEVEHAHERIERLERAIDQAIEAAPAAIRAVIEGLQALRGVARISAATIVAELGQVSRFRRPKQLMGYTGAVPSEHSSGERVRRGAITKTGNAHLRRILVEAAWSYRHRPSVRGELQRRQKNASEEVKEIAWKAQQRLHYRYARLVGRGKLKQQVVTAVARELAGFVWAIGVAVEGKLAALSARAA

SEQ ID NO: 191822 - protein, 336 aa, unidentified
MSHYCGIDLHSNNHVVVVIDDEDKRVLDRRLSNDLSMTLEVLSPYRETLKGIAVESTFNWYWLVDGLQDNGFGVQLVNTAAVKQYDGLKYSGDHQDAFHLAHLMRLGILPTGYIYPKEQRAIRDLLRRRMSLVRSASTQLISVQSQIWRSTGIRIKSGDLRKLEFIAPVMDKYTLQAVHAGLMVYQAIQQEINGLERSAFEVIKLTQDFKILQTITGIGKILGLTIMLETGDIHRFAAAGNFASYCRCVDSSRTSNGKKKGVGNAKAGNKYLSWAFSEAAHFAVRFEPLAQRFYERKKAKTNGIIAIRAVARKLARATWMMLRHQVPYDAKLMFPN

SEQ ID NO: 191823 - protein, 320 aa, unidentified
MKVSIGIDVSMDTLDVALYDGKSHKILRCENRETGFSEIEKELIGYDRANILISMEATGIYHLKMAVYFHERGYSVSVLNPLIMKRYTEMKMLRAKTDSVDARAIAEYGYTESPCYFIPKKGQNERITQLLKLIDGLHRTKSEIRNRFHAFKRVPGADETALLICEELEACINAEIRQAEQKINQILKEYYSDDNKRLREIPGVGERLSSLVIGFFGKFENFDNAKQVSSFIGLNPSPRQSGISLNGRGIISKKGNRYIRKIFYMAALSASKHNSACKAQYERLIANGKSKRVALIAVANKLARQIFAVMKYDRIYDPNF

SEQ ID NO: 191824 - protein, 331 aa, unidentified
MNYAGVDLHKVALLVASETDSGETTPARRIGCHEREEIVKHFKALRPFVAVIEASSSYRWLYELLSPLGKVVLAHPLRLRALVSARAKTDKLDAALLARLLRAGLIPEAYIPPKGMHELREVTRNRARLTWGATSAKNQLHTLLQGRNLRSPFEAVFCKGGRQWLAGQDLGVSGNMMRDELLRRLSYYEEERRRVDACLDAMAAEFPEEESLVGLYGFGRYTALLVVGELGEPGRFRRTKQVGAYAGLTARVHQSGGHEYHGHISKQGSGWLRWVLVQAAIKIIRKDEKLKNFYTRIRKRAGRNVARVAVARKLAGICWVRLRQWHREHAA

SEQ ID NO: 191825 - protein, 337 aa, unidentified
MKVTLIGIDLAKSIFQVCGVNQVGKRIFNRQVRRARLMELLIQHPDATIAMEACSGSNYWGRALQQRGFQVMLIPPQHVKPFVKGNKNDRNDAFAITEAARRPDLKCVEPRTLAQTDLIQVHRVLDRMVRQRTALINQIRGFLNEYGIVIAQGKERLLAAMPDLLEDAENGLTPSSRALYQELYEQWRQANEGIDRIEKGLKNQANTNEAAQRLMKVKGVAVKISTATIAHAGNGHGYKSGRHFSANLGLVPKEHSSGGKQKLGGITKRGNHYLRRLLIQGAWSVVRNADKNDDRMSRWARQLVERRGKHKAVVAVANKMARIMWSMLYHQTEYQAN

SEQ ID NO: 191826 - protein, 349 aa, unidentified
MAIIGGLDVHRSQITYDWIDSDTGQGQRGQLAPAHREHLREWLGRFAGHPTAFALEGCTGWRYVVEELQRAGIQAHLAEPADTSAARGPKRRAKTDQLDARHLRELLAAGRLPESWIPPVHVLEVRTQVRLYKALGDDHTAWLQRVQATLFHHGVPAERRLLAPDRRQRLERGSGLSPAGHQLLTVTLGTLDHLDGELDLLRGELTRFARQQPGCQALDALYGIGPVTAVAIWAELGDVRRFTSSRHVVRHTGLDVTVYSSDGKRSPGHLARQGPPVLRWALFEAATCAARASSPDHAYYTQVKDRLGGNRATLAVARKLARRCYHTLRALGEQAYAPPADPQPVGQVA

SEQ ID NO: 191827 - protein, 339 aa, unidentified
MVELYAGLDVSDKMTHVCVVDGTGAIKWRGVCATDPEVITKTLGRHARGLCRVVLETGSLSAFLYHGLAERGVPVTCICARHAKGVLSTRVNKSDPHDAEGLAQMARTGWFKSVLIKQEATHIDRAQLKIREQLIKSRNAIANQMRGLLKLFGLRMGKITTPGKRAEWLVTLFAQKPELKPVMQPLVDSLEALEVQIRKATKLLAASAAADPVAARLMSVPGVGPITALTYKSSIEDPNRFARGEDAGAFAGLAPRRSQSGERDHMGRISKAGDPMLRSALYEAANNLLVRVKRSCALQEWGKRIAATKGGKRARVAVARKLAVLLHRLWQSETEFSWA

SEQ ID NO: 191828 - protein, 418 aa, unidentified
MRVFATFTEDLERLTDWLEQCGVTTVALESTGVYWIPLFEILEQRGIRPCLVNARHMKNAPGRRTDWHECQWLQFLHSVGLLRAAFRPGQDICAVRTVLRHRNELVSAASQHVQHMHKSLTQMNLQIHHVISDITGLTGLAIVDAILAGQRDGAELAKLRDPHIKADTETIRKSLEGNWRPEHLFTLGQSRDLYRIYQQQIVNCDLEIEKMLREFEPRTDPAEKPLPPDRKRNRAGSKRRKKNGHPHPEFDLRTEAYKLFGVDVTQIPGLEENALALFSEVGRDMSRWPTAGNFISWLALCPDNDISGGKVLWRGSRRVKNRAGHLFRLAAFSLHHSLTPLGNHLRRMKAKLGPKAATMATAHKIAVIFYTMVKNQVEYDETIWEARDAQREKRWEAKLKRQAKQLGYQLVPIEPKAA

SEQ ID NO: 191829 - protein, 366 aa, unidentified
MPRMQRSADLVHIAFDTSKDQLVAGVLRPGEETPTIERIFNDEASVRRFVKGFADPAKLRTCYEAGPCGYELHRLLASLKVSCQVVAPSLIPTAPGDRVKTDKRDARRMVRQLRAGELVAIRVPSRSEEAVRDLCRARGDAVEDLTRAKNRLGHFLLRHGRIWRDGSTWTLKYRSWLGTQSFDEAAATATFRRYKATVECREAEVEAIEADMATYLEAEPFADALARLSAYRGVDRLGALVLQAEVCDWRRFSGREDIGSFCGLVPSEYSSGSSVQRGSITGAADVHLRRQLVESAWAYKSGPSLGPSLRRRQEGVPAESAARAWAAQVELCRRFRSLDARKSVRAVVVAAVARRLVGHLWAEMVA

SEQ ID NO: 191830 - protein, 411 aa, unidentified
MKSVNPLFVGIDVSSKNNVAYLMKPDGSKHSSFSVQNNLGGAKLLSERIVSALSSMRLSDVVIGLEATSIYGDNLVYALREDGGLGRFRRKIHVLNPKQVKKFKEAYPDLPKNDWVDAFVIADHLRFGRIAKEVYMDDYRYQALRTLTRARFDVIQNLTREKQRFANYLFLKCSGMAQDKGIQNTSATTIALMERFETVDNLANADLDDLTAFVAETGRGRFADPESTAKAVQAAARGSYRLPKTVNDTVNQAMAVSIASMRALKEQVKVLDKAIEQQFEIIPNTLTSIPGVGKVYSAGIIAEIGDIHRFASQASVAKFAGLVWTQHQSGEFEAEHSRMIKSGNRYLRYYLLEAANSVRRCDSEFRRYYDLKFKEVNKYQHKRALALTARKLVRLVFRLLKDNRLYIPPEG

SEQ ID NO: 191831 - protein, 347 aa, unidentified
MKNKSRLLRKIVGIDVSMDTFTACFATLNLEMEKKFSKVFEFSNDLKGFKGLLRAMEKIDVFRSSDQEENQPRVCFVLEATGVYYEDLAYFLRESGYQISVVVPNKTKNHAKTLKQKSKTDKLDAGKLATYGLERELTLWEIPYRIMKELKALTREYSSLKDMKTEVMNRIHAQKHSHQPLKKILNRHEQIIRLYEKQMKVVLQQIKDLVKTDEELNRKIKKIMTIDGVGFITIVIVISETNGFSTIRNSKQLASYAGYDVVINDSGKKKGKQSISHQGNSHLRASVYMPALSAIQHNKTLKEFYERLLAKNKLKMVALIAVARKLLLLIYTLWKKDEEYNPAYNVA

SEQ ID NO: 191832 - protein, 310 aa, unidentified
MAAVVVGIDVSKEHLDVHVRPGGESFRVSRDGAGLDELAQRLQPLDAVLVAMEATGGFETVVAASLGTAGLPVIVVNPAQVRAFAHALGKRAKTDPIDAAVIAHFAEATNPEVRALPDEATRLLSDLLTRRRQIVQMIVAERQRARVLTAPRLQKSVARLLKALQRELETLDKEIDDSVRNTPAWREKEDLLRSVPGVGPTIARTLLAEMPELGTLDRREVASLAGLAPFTRQSGQWRGKSFIGGGRSRVRAMLYMGALVAVRYNPALRTFYDHLLAAGKPKMVALVAVARKLLTILNAILRDQKPWLPA

SEQ ID NO: 191833 - protein, 317 aa, unidentified
MSFILGIDVAKAKLDLALRRPDGRFRSKVVHNTPDGFQALSSWLTRQGVDQLHVCMEATGTYWEAVAEYLADAGFTVSVLNPAQIKAYAGASAVRTKTDKVDARLIAAFCAAQHPEPWQAPPAALRELRALVARRESLVAMRTQELNRLSVAREPVRPDIQAHLSYLNKAIAEIEAAIRQKIDDDPDLKAQRELLDTIPGLGEKTIPTLLSYYGGPQRFTRAKAAAGLDPRQHESGSSVRGKTRLSKFGHAALRKALYMPAMVTTTRTVWGRRFRDRLAAAGKPPMVILGAMMRKLVHVAFGVLKSGQPFNPSLHDA

SEQ ID NO: 191834 - protein, 412 aa, unidentified
MEGETVIAGVDTHKDVHVLCLLDGLGRKIWSGSFGADPEGYDRLAEAIGDPGSCMVVGVEGTASYGAGLTRRLVELGYNVVEVLRPKRDKVRPGEGKSDPLDAERAARKAASGKGCSVPKSQDGWVEAVRQLYVARRLAVATSTSCVACAKSMLTTAPSALRERFRGRERPKDLMPLLARGRKAGDALEESALASLRSVAAVWKEARSQVESLDERIRALLEANAPALLGVEGCGTTTAAALVVAAGDNPGRLKGEAAFSMMCGASPIPASSGKTDRHRLNRGGNRQANWALYEIAIKRMAYDERTRRYVARRTSEGKSRREAVRCLKRYIAREVYHVLMDPNPDGAAPEGPELAKMRKAMRVTQKKAAAELGLSAATLGHLERGKRRSTKLERRYYELLCELERALPQTAS

SEQ ID NO: 191835 - protein, 348 aa, unidentified
MKILALDLGKNNSVACSYDVETHKAEYRRLETTASAIRRLVRAMRPDRVVFEVGTPAGWVYDAVRPLVGSVEVANPTHEGWRWRNVKRKTDRLDALKLARLSAAGQLPTVYMPTKQVREHRALIAYRGKLVARRTRVKNTIRSLLHRQGLSAPSGPAGWTRKAREQLEQWARPLEQTDETTLWRGELYEELQSLARLEGQLGRVEDRLDSLSRMDARVRRLRTIPCVGPRTAELLVAVLDDPRRFSNGRQVASYVGLVPRQYQSGQSDRMGRITKQGHRQLRRMLVEVSWVALRYNPDLREVYRRTRRGSRTRSKIAIVAVARKLLVTAWAMLRDGTVWHSRLRQAAA

SEQ ID NO: 191836 - protein, 386 aa, unidentified
MDQATASTASANTLHCALELSKKSWLLAIQFPDREQPSLYPITGGDTEGLMAKLTAARDRWAKTSGALPMITLCYEVGYDAFWLARFLKTRGIECLVIDPGSLQVSRRGRRVKTDRVDVKMLLRTLIAWCRGERHVWSLVRIPSIDEEDLRRSHRERSRLVRERTAHINRIKGLLFAQGIRGINVKSRYQTLAVDKLVTGDDHRLPPRLAGEIAREIQRLAMVQEQIAEIERERDAAPTTCEATERKRDLLSQLKSVGPTISAFLSREVYYRQFANQRQVGSFLGLTPSPYDSGEEEHCQGISRAGSGHARAIMIEAAWLWIKHQPKSALTRWFVERTAGQSKRVRKIMIVAVARKLAIALWRYVELGLVPQGAIINPPMTRKARS

SEQ ID NO: 191837 - protein, 313 aa, unidentified
MTLPIFVGIDVAKATLDVAVRPSGECWQLANEATALLSLIARLQALEPTLVVLEATGGFEHAVVAALAAVALPVVVANPRQVRDFARATGQLAKTDVIDAQTLALFAERVRPAPRPLPDEAAQALDAVLTRRRQLLEMLTAERNRLGFARAPVARRIRTHVRWLQRELADVDRDLGRLIEQSPVWRAQDDLLQSVPGVGPIVSRTLLGELPELGRLTRKQIAALVGVAPLARDSGTRRGRRLIWGGRAPVRAVLYMGALVATRWNPVIRAFYQRLRAAGKPAKVALVACMRKLLTILNAMARSGTTWRHSALA

SEQ ID NO: 191838 - protein, 344 aa, unidentified
MEHYAGLDVSLELTSVCIVDARGEVVREAKVASEPEALIGFLRGQQLEIARAGLEAGPLSQWLRAGLAEAGFEAVLLETRHVKAALSAMTVKTDRRGARGIAQLLRLGWYRSVHAKSANAQEVRALLTARKLIQGKLLDIESGIRGVLRGFGLKVGPISRGRFDLRVRGLVTGQPTLEEVIGAMLAARAALETEFKRLHRALLGLVRDDPVCRQLMSVPGVGAIVAITFKSGVDDPARFRRSRDVGPHFGLTPKKYQSGELDVTGSITKVGDRMVHTALYEAASVMLTRAVRFSGLKAWAMAVAKRRGMRKAKVALARKLGVILHRMWVDGTSFRWSNEATAIA

SEQ ID NO: 191839 - protein, 409 aa, unidentified
MKMAGIDVHKKVLMVVVVDTSALQEKPARRRFVTLPSELQRFRIWLQEQGVEEAVMESTAQYWRSVWLELEPHMRLHLAQAFSNRAPRGRKHDFKDAERLVRRLIADELILSFVPNGEQRIWRSLTRMKVQLTRDRVRLQNQMECLLEEMRIKLSIVVSNLLGASGLRILHALAQGETDPKKLAELGDERLHCTEEQLVDALTGRVQPMHRGMLALQLQRLQLIDQQMAQLNHMIAQAMKSHQDAVIRLAEVPGLGVDSAQQIIAEVGAQASTFSSAAELAAWVGTCPGKEESAEQNQSSRSAKGNKYLRRVLNQAAHAAVAKKGCHFQVVFRRLMPRLGYKSAIWAVAHRLCRVVWKILHEGVRFIEQGREVGPREKKQRAQLLARALRKLGYEVTITPINQLAPKPA

SEQ ID NO: 191840 - protein, 319 aa, unidentified
MAEEGYVGIDVSKAELVVAVRPSGERMTLANDRGGIKRLVERLNELKPKLVVVEATGGLQRQVVGALWMAGIAVAAVNPSWVRNFAKGRGVRAKTDRKDAELLALFAERERPEARPPADAETQALQELVMRREQLLEMLVAEKQRLHRASGAMRKELRHHIAYLEGRVKDVEEDIDKTVRRSDAWRRKSEIVRSVPGFGKAFCAMVLAKVPELGALNRKQIGALVGVAPMPDDSGSRHGRRMIAGGRFEVRNKLYMCAMVAARSNPVLKQFYERLVARGKPKKLALAAVMRKLIVTLNAMLKTNSLWRPPCPDLSVAEN

SEQ ID NO: 191841 - protein, 341 aa, unidentified
MSKVTVYVGLDYHKDSIQVCIMDRDGTILANRSCPNRAEAVVALVAGHGQDVRAAVEACSGSANLADELATEHGWIINLAHPGYVARMKQTPDKTDWADARVIADLVRVGYLPKVWLAPHDVRQLRTLTRYRQQLVDRRRDTKLRVTALLRDARIVEPGGRRWGRAWMTWLATAEGLGSEGRWVVDRLIGELGELDGAIAEVERRLAEVTAGDPVVAQLLRLPGVGPVTAWTLRAEVGRFDRFTTGKQLSRYCGLSPRNASSGQRQADAGLIKAGNDRLRATIIEAAHRLIRYDPRWKALAAAMRRAGKPACVIAAAVGNRWIRWLFHQVAGGPVTLQGAA

SEQ ID NO: 191842 - protein, 428 aa, unidentified
MKITRRAEKINLNNVVDVPTDVHKDTLYFFFEIKGHEYSDTCHNRSSVIEKKLLAYHAIAKEYGMKTLRIICEPTGQYQNKLFRTARRLGFLTCYVNAESVAKFRFVESNDANKTDTKDPRVIGTLGKLNKTLRFRVLGEEYLMLRKLHKIYDETDVSLTSLRCRISKLLLELFCDYSFKKDFLYSRSGLSLVKHYGCNPRRIIADGFSVFCRTIKKDALRIRKKTLERLWEDACSSVLNELPAGYVGVLESRLKEYLEDYHREQERKEEVTRQMVELLKRLREKDPNIPPPTPQVISEKNLARILAETGPLKDFSHWRKLLRYAGLNIRMRQSGKFKGKDKISKKGRPLLRKVLQQIVFPLVRKGYLYGEVYHRKKDDENRPGTMAMTIVARQFLRKLHGWYRSGDVFDEHRFFTCKSQYVELAEAA

SEQ ID NO: 191843 - protein, 379 aa, unidentified
MEQITRVASRGEAVRVGVDLAKRVIQVHAVDDAGQVLTSRALARDKFIAWCTQLPAGCIVAMETSSSSHHWARRLIALGLDARIIAAQLVSPYRRQGASGKNDANDAAAVCEAASRPQMLYVPVKSIEQQSMLCVHRLREGFKAERTACINRIRGLLAEFGLVFAQSPAALQAVLSDVLEDASNEMNTLARLVLQRAQSQWRELDEHMAWCDERIVAHAKDNADVKKAATLMGIGPVTASAAVATVGDFKQFRHGAQFGAWIGLTPRQDSSGGKNRLGGITKRGDVYLRSLLIQGAKSAVMTAHKRSDPISQWTAALRDRAGWQKAAVALANKNARILWAVMTKGEAFDARHVSTKPKAPALATTPASTSSAHPAMSSA

SEQ ID NO: 191844 - protein, 331 aa, unidentified
MNDSIMPAAAARFNHAIAFDVAKDSLSVHILPSGESFEAPNTALSARRLLRREQKRNAKLGNGPLLVICEATGGYETPVLEAACEFGLACHRTHGSSVRAYAKFRGRHAKSDPLDGRPIAEYGRDKPALRLYEPPSPQQAALRELMDRRAVLRDMIGAERCRLEHASLKAVRQSLEKHLKMLNNEFLAIEKEIEALAKSGTVLDRRIRLMQTLAGVGSVTAHTLLAFMPELGSIPPSTAAALAGLAPYDRDSGKERGRRRIFAGRSQVRCCLFMAARAAIKHHEVFRTFAERLMQRGKPYKVAVTAVMRKLIVILSAMLKANEPWKHAKTA

SEQ ID NO: 191845 - protein, 354 aa, unidentified
MNLIIGCDAHRRYSLFAVFDTHTLSVEQTRVNHQPGAIREFLSDYPEGTPVALETVGNYYWIVDEIESAGCIPLLAHAAKAKVIMGNINKTDKLDAKGLATLVHLGSLPTVWLPPGEIRDERELHRTRMAFSKPRTALKNRIHSTLAKYALNTCEHSDIFVGKGRAWLGRAIKKLPTETGRCIEQELDLLDATMEQIAALEERILERIQLTPDMQLLKSLPGVADILAIVIEREIGTIDRFPTAGHLAAYAGVVPKVHSSGGKTRFGRMRKQANNYLKWAFIEAANVVVAHRHHPAWKAKKVSLVYERICRRKGHSIAVGAVARHLAESSFWILKKGETYQDPALRRQGSPKQA

SEQ ID NO: 191846 - protein, 341 aa, unidentified
MGEVSTIGLDLAKHVFQVHGASASGAVVVRKKLRREQVLTFFAGQPRCQVAMEACASAHHWARAIGELGHEVRLIPPAYVKPFVKRQKNDMADAEAICEAAQRPTMRFVAVKSEAKQASAVIFRTRDLLVGQRTQITNALRGHLAEYGFIAPQGLSHVERLIAEVEDPASGLPDAARSCLVRLVGMLRHLQTEIAELDREIAARAKADDLARRLMTVPGIGPMIATAIEALAPAPETFRSGRDFAAWVGLTPVQRSTGGKERLGRTSRMGERTLRRLLIIGASGVVRWAKRKGVPPGSWLGRMLARKPPMLVIVALANKIARIAWALIAKGGVYRAPAVAA

SEQ ID NO: 191847 - protein, 434 aa, unidentified
MSRKKTRLQSVTEPPQVRPDVAGIDISPEVIYVAVDARHHMPVRRFGTFTGELRRIADWLVECGVRSVAMESTGVYWIPLYQVLEERGIEVYLVNARHYKNVPGRKTDVCDSAWLQYLHAVGLLQGSFRPEQRICAFRTVLSHRSALVQFASQHIQHMQKSLDQMNVQVHRVLSDITGVSGLAIVDAILAGERDGHRLAALRDGRVRASEETIVAALESDYRAEHLFTLRQSLEGYRHYQSQIADCDGELRRMLDRLEGGPDGQPDGQQPPPPARKKMRTPDEEQRAKFYRIFGTDLTAIPSVNVGTVEVLLGEVGPDLGRFRSAGAFANWLGLCPNETIAGGKVLASKTRKIESRLALSLRMAAESLCRDKSYLGAFYRHMKAGFRSAPEAITAAAHKLARIIYTLVVKRVPYDDGVFAEIERRTARSSASGS

SEQ ID NO: 191848 - protein, 338 aa, unidentified
MKRYPGVDLHRNCFTVCTRTEGGQEALRSWSIHELHRFARAVRSTDEVAVEATGNTRLFCEGLRERGCRLAVVDPRQFEVISRSVKKTDTHDAKVLAEFLAKGLLPEVRMKDGIQARIASLTQTRDKLVKLRTILKNKINNLLAARGILIRKESLASEKGLVGVLRAPVEDLERVELEILVEQIRHLNESIEKVEAVLREQGPKLPGWKNLTSIKGIGDTGASILLSTIGKIEDFADEGKLAAYFGIVPRVSNSNETERSGRITKRGCKLGRTALVQCSLIAMRYSPYLRAYYERIAARRGTGKAIIALARKFLGIIYKTLKNDWVFEDFPNFVLVKT

SEQ ID NO: 191849 - protein, 408 aa, unidentified
MNPLYVGIDVSSKNNVIYLMLPNGDKHSSFSLANSHDGSTQLVKRIFTAMTSNNIDSVLIGLEATSVYGDNLVYFLKEDTTLASFDRKIHVLNPKQVNKFKESYNDLPKNDYIDAFVIADCLRFGRINKEVYMDDYRYKALQNLTRARYFAVTNLTKEKQRFINVLFKKYSTMTQEKVFSDTFSTTALAVYEKFESAETLAKMDLQELTAFIMEKGKNRFPDPDAVAKALQKAARSSYRLPKTVNDSVNQVLAISITSIRALESQIKAFDKAITKQMELLPNVLISIPGIGPVLSAGIMAEIGDINRFQNQAALAKYAGLAWQQHQSGDFEAQTTRMIHSGNRFLKYYLCEAAFSLVRCDKEYSRFYHLKYKEVNRFQHKRALALTARKFVRLVFALLKDNRLYRPAE

SEQ ID NO: 191850 - protein, 345 aa, unidentified
MIIGCDFHPSWQQIAWLNTETGETGEQKLVHAAGNAKLFYQQLAAPVLIGMEATGNSQWFIELVQDLGHEIWIGDAAQIRASYVRKQKTDKRDAAHILKLVVESRFPRLWTPDREQRDLRQLVLHRHKLVEIRSRVKNELQHLSLNKGIQRKAKLWSQAGQKLLRELTLKPWAACRREDLLGLLAMLNQQIEKLDQAVQQAADEHPQAQLLMTQPGVGPNTALAYVLTIGDVSRFPRGKQMASYLGLIPREESSGGRQKLGAITKQGNRLVRSLLVEAAQIAVRFDPGMKKQYLHRCHQKPKGVAKVAAARKLAVRLYWMLRTQKPYPEIVRIESSPRVPLVGAS

SEQ ID NO: 191851 - protein, 419 aa, unidentified
MSQESNLVERVIGFDSHPDSFTAAVLRGPTPAQAITEKIFNKVPMSQLQSWARRQTTDQDLFVLEASGNSFEVVRALQRLGRKAEVLESCQMGKLKEAHANNDKISAVRIAKAYLAGTAKKVWVPDAATQERRDWFHAHRKAVKRSTQMRNRLLSYLSDNGVRLIKGTELTGQAKAEKQLRQAKDWTSRQWQVIAGMLMELRHADQQRRHWRSLIAQEVISDPLLLSLVRLCGIRDLVAFALGAIIGDINRFAQPRKLVKYVGLNPALDQSGQGQWEGGIGGHGRKDLRALLIESAQAILRSKDPVAKWGKKLLARKGSVSLAVAAMARKLTVAIWYLMMGRWTALEEFDPRLSRKAGKIISAVGTNALKTIGKTRKQLRQQIEQSLKTGRIYVLDLDKKFVPQKASQKQSLAADYGMV

SEQ ID NO: 191852 - protein, 427 aa, unidentified
MDKKDINRIERFRQFKKRVRGSQEILIVGIDIAKSKHHAFLGNANGKTVLKGVVVENTASGFEHLLTMVQFYMDRDGFKEVVFGVEPTGVYHKPLAEFLINQGFLVVYVTNEAIKNNRSLLNGRWDKNDTKDSANVTDLISQGKCHFYDLPDIQLRDIRSLLLLRRRLRKQLHSYRVRIRNNLVAQYFPELDRLWNQSELENLAIVRWCLSPHKIDQLKFEEFYHMVTSRNRGFRQHRRLHKIWEIAPYSIGCRPGSALELEAKVLIDNINQIKEQIEEIDSSIKDLCQSYEEYEYLQTIPGFGPYISAVVLAAIGNPFRFENSSQLIRLAGFDLNANRSGKKSQAAVPVISKKGKADLRFALYQAALIATSVTTHLRAYYHKILEGRQREPGIRTKMRVKLAVKLLVVAWTLMKKKEPFDPAYLNT

SEQ ID NO: 191853 - protein, 456 aa, unidentified
MKVIYIGGDVSKGYVDVAFLNQSMTFLQEAGRFDDTAIGQSQLRDRILKLKEKHDPVQFVVGLEASGGLERNWLKFFREMKTLCDIKVFLLNPLAVRKFFERNLRRNKTDRISARNIAEYLFSGGRRKDFEYEPQIQGARTLYGCIDAAIGRRVQMQTQLQSLLPTVQPELVQYCREGIPDWILNLLTIYPTAAQLAKARAKSVCKINSITASRAARLIQAAKQSVASQIDESSAETVSFLTSEIKQQNQKIADLQKSLTKSLKDDPAIKIIDSIKGLGVWTATVLRLEYGNIERFYSAEAAVAYSGLDPRIDQSGDELHNCGISRAGRIRIRAALYMPTLAAIRFNPIIREFYKRLIAAGKPKKVAIVACMRKLIHIVYACWITGRPFNPNHQQQHAKKAEKQKTSMQPLANIIASVTAPVSRKEAKRRKAAAMPQKGISPLMRGLSAASNNNSK

SEQ ID NO: 191854 - protein, 366 aa, unidentified
MFKVGEKSKSVSADRDGSRDHIVKRRGSMSQLSKSATGVVFCGIDVSAATLAVAVEQQDQPVVEREFPNNASGHKALIGWLGQRGHARVSLEATGVYSLDLALALDAAEGIEVQVLNPKVAHRFGQTLSRSKTDPVDARTLAVYSRRMEFTGWRAPSRSQMQLRSLTRHIDNLTAELTRGKNRLHAAKVSDMTPACIVEDLQNALESLECRIHVLRREALALVRADAVLKENFELLISIPGIARVSALQILGELVVLSPELSVRQWVAHSGLDPAHHISGSSIHKPSRISRAGNRALRRVLYMPALVAIQHDPHIKAFYRAMVHRHKAKMQALIAVARKLLHAIYGVLKSATPYNGQKLFPQIQTI

SEQ ID NO: 191855 - protein, 441 aa, unidentified
MCPKPRFSDMVGAKLSPASLADTRPFYLGLDVSLQTGMACLLDALGQEVVPRWSFRNNQPGAEELAQKVADLLNRHGATILIVGMESTGIYGWHLACFLSDTPLLRAWNARVYMFNPYRTLNFKKAMGDLGKTDRVDALVVAQWLRVGHLPAPFAIDTVYGPLQRLTRFRYHLSETLTREKIYTLGLLFLAFSEFGSATPFKDPFGATSQAVLDEFSLDELATKPLEELSAYVARSGRGRFADPEEVARTLQQAARDSFRLDKVHDSALRLVLSVSLTTIRTLTRQLKEVDEVITRDLKAIPIAACLLSVPGLGPVYTAGLLAEIQDIHRFQDHAALAKFAGLTWRPHQSGDFTAEETPLTKTGNTYLRYYLVQAANSVRVHEPEYRTYYQVKYNEATKHHHKRAVTLTARKLVRLVDALLRDAQLYLPPGQRHGVRADVA

SEQ ID NO: 191856 - protein, 349 aa, unidentified
MPKPNTAVVTIGIDPGMNTLHLVGLDARGGIVLREKVARTKIVSRLANVSPCLIGIEAGMGTHYVTRELLALGHDVKQVPPVYAKPFRQTHKNDFRDAHAIAEAVQRPTTRCVAPKTDEQLDLQALHRVRYRLVGQRTAIINQIRCFLLEHGITVRQRLHWLRHALPDILAQRTDVLSPRMVRILEDLAQDWRHLDDRIETVSGEIEALSKNTEPCRHLMTIPGIGPIISSAVVAAIGNGTAFTRGRDFAAWLGLVPKQISTGDRTILGRITKRGNRYLRMLFMQAARVVLLRPRNWMRNGYGPWLAAAAQRLHHNVLATALANKLARIAWSVLARHRAYEARLSPAVV

SEQ ID NO: 191857 - protein, 331 aa, unidentified
MFPVGIDVSKNTLDLCMLYDGIKGRIKTRNIQNNRHSVENILRWLRLQHCSPEDVHVVMEATGVYHERLATELHDAGFRVSLANPHRSREFARGMGIMTKTDKVDAYMLACYAFLKKPHRWEPPAPEIRYLGALLRRRDVLLGDALREENRLEKYLSTDTPADIISSCRRMAQLLREEVSNIERQIKAHIKASPALRRDYTLLTSIKSVGPQLGMHMLGVRRSHYFVSAEQAAAFLGVVPIEKRSGTSVRRRPRMSKIGPPQLRAKLYMSALCGKIYNKRMRNIYDEMCLRGKPKMVAIGALMRKLVHWCYGVLKTGTVFNDEDLKPALST

SEQ ID NO: 191858 - protein, 310 aa, unidentified
MEEKVFIGVDVSKDSLDVAIGTQKEIITFTNDQKGVDSLVKKLRRIDAQLTVFESTGGYELLAASCLAQAGLSVVIVNPRQVRNFAKATGILAKTDAIDARVIAHFAQAVKPEVRPLKDRQTSELTALVTRRRQIIEMIVAEKNRLRLANKRNKKDIEAHIRWLQKRLDKIETDIGKMIQSSPIWRCKDDILQSVPGIGPVTSARLICDLPELGVLSSKKIAMLVGLAPLNCDSGKYKGRRRIWGGRAAVRSGLYMATMAAIRCNPAIKEFYRRLIAAGKCHKVAATACMRKLLVIVNAMLRDQTLWQQN

SEQ ID NO: 191859 - protein, 343 aa, unidentified
MDKIATIGLDIAKQVFQVHGADAQGATLFNRKLRRAEVPAFFEKLPPCIVAMEACASSHYWAREISALGHQVKILPAQYVKPFVMRGKTDATDAAAITEAMKRSDIRSVPVKTAAQQAATMTLRTRTFFVRQRANAINALRGFMAEFGLVANRGITNVGKLVAALPERGDARIPPVARLVLDEILAEIETLRVRIQQIDDQIATHAKQDEDHRRLTAIPGVGALTASAIQAHVPDPGSFKSARHFSAWLGLTPKQNSSGEKSRSGRISRMGNGELRSLLYIGAMGVLSAARRFGTRSAWLRRLMDRRPLRVVAVALANKTARVVWALLVKGGTYHAPAELAGN

SEQ ID NO: 191860 - protein, 435 aa, unidentified
MDRVIIGVDPHKLSVTIEARDSREILRATGQFGSDTRSYHQLLKVARQWPQRIWAVEGANGIGRPLAQRLLASGERVLDVPAKLAARARVFDTGQGRKTDAADAHAIVMVALRDKGLRELRIDPELTVLRMLCDRRDELSRARAQALNRLHRLFLGLLAGGAPVKKSASQYQALLATVRPRDLAGKTCRRMAAEELEDLERLDIKLKAMKAELKAAVLAAGSHLMDIHGIGPAGAARILADVGDVTRFPDRGHFASWNGTAPIDASSGQHTRHRLSRAGNRRINHVLYMAGLVQLRNDTEGRVYYRRKLQQSKTSMEAMRALRRRLSDAVYRQLAADAAARQAALQTGPGGHSGAALSSSAAGLPPGTGTSDQPLPGPAPSTLPPPQAALKTPAAPIAAPSRRRAGGVNVERPTGRTTLTPTSAGAHSTAPGPRT

SEQ ID NO: 191861 - protein, 434 aa, unidentified
MKVTRGMQRRTAKLARRSEIVTSETLIAGVDLAKKESVVVFVRASDKARLGHIRISTDEPGLRELLRQADSLLGAHGLSRLVVAMEATGNLWKIAARACTNLEIAYVIVQSFVLSRAREFDDLTRDKTDRRDAGLIADLAADRRFTDVQLERGPWAQLRMYADGRDHLRVRRSADLQEQRALLELVWPELLKRLPDLQGAHLQATLRLGRSPLEIAGLSRSRFVRLLRREQQERRFLELVAGRIWEAAAETQPCDELDAAVLRLQCAAQRVRASDAAIAAYDRRLVSTFQTTGLGWMQGQLRGLGDVALASIMGLAGDIRRLDDGGCVVKLAGSNPTERSSGETIVQVGIHRRGRPTLRTFAWQAATNLIRHNPDFRARYVALTAREKRPLGKRQAQLAVANKLLRVLWAMAVTGQPYSSELANHGRLRQEVAA

SEQ ID NO: 191862 - protein, 355 aa, unidentified
MTSTTYSPRNYDIFIGIDVDKKSFAFTVRDHLNMKRSKKIPADSAQFCNYIQKNYNDQKVICAYEAGPTGFYLYDYLKEQKIFCLVTPPTSIPKAPNEKVKTNKIDSIKITEELMAGKLKSIRVPEGAYRELRNLVNVRENYAYNRKGAKQRIKALLLSENLYPLLKDADIKWSSRYMKELASIQCSPAVRIRLDMLLMDLEYAREQTLSIHKKLKTFCKNNKEINEYMDYLKSIIGIGFITAVSILGRIGDPKSLKDSREIGAFIGVVPRENSTGDRINKGSITHLGNQNLRALLVEAAWIAIQKDTELQQFYYRIKKKHHPKIASRVAIVAVARKLTQRIYKVLKEKRKYIKH

SEQ ID NO: 191863 - protein, 411 aa, unidentified
MNAVGIDVSKGRSTVAILRPMGEVVQTPIDVMHNAVSLERLAYQILTLGEDTRVVMEATGRYHEPIARELHAHGIFVSVINPIAIHGYCTSGTVRKVKNDQKDALKIARFALDRWTELREYTPMDALRQQLKIFSRQYNLYMKSCVALQSNLISLTDKVFPGVNELFKSPQRADGHEKWVDFVTTFWHCECISTVSENAFTERYQKWCRRMGYNFSLTKAADIYTESLGHIITLPKNNNTKLLIQTAAKELTAMNELIAVVRGEMTRLARELPEYETVHAMYGVGDTTAAQLIAEIGDIRNFPRRSSLVGFAGVDPAINDSGKSVGNSMAATKRGSPHLRKTLFQIMTIYLRLTPQDEPVYQFLDKKRSEGKPYYVYMTAGANKFLRIYYARVKECIANLDASAEDSETAE

SEQ ID NO: 191864 - protein, 346 aa, unidentified
MAGFDLHSNNVVIAMIDQEGERIAQRKVDCNLAEVERFLKPFRPQLQSMAVESTYNWYWLVDGLRAKGYPIDLANPAKIEQYSGIKHADDEHDAFHLAELQRLNILPKAYVYDPQLRPVRDLLRRRTNLVRNRTGLFLSFKSLYTRTTGQPMPLNTLKAMEPAAARDLYEHPANQLIARIELEEIASLDGSIGRIEKAVLACARELPIYAKLLTLPGVGKILGMTITLEVGDIARFKSDGNFASYCRAVDSRRISNGKQKGENNAKCGNKYLSWAFVEAANFAKRSDAHCRRWYDRKKARTNSIVATKALACKLAKAAWHVMARQTDYDPRRMFPELAQKTNGEKA

SEQ ID NO: 191865 - protein, 321 aa, unidentified
MSDSVTVGIDVSKLTLDVHVSPAQLHQTVSNNESGFAELKTLLSMQQVSLVLLESTGGYEDAVVCFLQSLGYDVSVINPRQARDFARSMGRLAKTDRIDAELLAQLASVIHARPDRERFVKKITDDRRRKLACMVARRRQVVNMISTEQQRKSAASNYSTDSINKVLSFLRSELKSIDADISLHVRSHFADISGLLASFKGIGPATIGVLLGEVPELGRLNRRQISALIGLAPFNRDSGFMRGRRTVWGGRAMVRNALYMPTLSAVRFNPAIRVFYMRLISQGKPRKLAQVAAMRKLLCIINAMLSSGTMFNPALHPSPGA

SEQ ID NO: 191866 - protein, 429 aa, unidentified
MNNNRKRRINQIDEDTLIVGIDIAKNRHAARAQDFRGIEHGKVRYFLNREHDFERIKRWILNLAKKVSKKDIIIGLEPTGHYWLPLFKYFTASGFKVVTVNPYHVEKSKELDDNNPTKCDKKDALVIAQLVKDGRYSTPNLPEEKYAELRVAINHRERLMKNLNGVQNRVIRWLDIYFPEFSNAFKDWEGKAALSTLKNLPLPEKINQKEVKEIVNIWREDGIKRGIGKKRAKKLKRCAQRSIGLQTGKKMAELEIRNLLKQYEQLSKQLEDLEEKIEKILKEIPGAEEMVSIPGVSLMTVAGFLSECGNLDDYNHPKQIIKLAGLNLMEHSSGEHKGETRITKRGRPQLRSLLYRVSMPLVRHNDEFSQIHEYYKNRSQNPLEKKQSLIVICCKLIKILYTLGTREIEYDGEKMLNDIKRPKGYKKAV

SEQ ID NO: 191867 - protein, 348 aa, unidentified
MMHFVGLDVSVQETSVCVVDDAGKVISEQKVPTEPADIIALLASLGVSFGRIGIEAGPLSQWLVNALTAAELPVICVETRHMKALLTAQQINKTDRNDARGIAQMMRIGLFKPVHVKTLVAQEQRMLLTSRKLLQRKLLDVESELRGTLRNFGLKVGIVSGSRYEARVRELVAGFPGLASIAEPLLSVRRVMRQQFAVLHKMLLDMVRGDPVCRRLMTAPGVGAVVALTYRATVDQPQRFVHSRAVGAHVGLTPKRYQSGEIDYDGGVSKCGDALLRTMLYEAAHSLLTHSGKWSWLKAWGVRVAQRRGMRRAVVAVARRLAVVLHRMWVDGSEFRWRKGSVTVPAVA

SEQ ID NO: 191868 - protein, 381 aa, unidentified
MQQSAPEEFGAYIGIDWADQTHFVSLRDANSQEVKRYKLEQRPEVLLQWVNELQQQFPGQRVAVALEQTRGALIYALMSYEFFVLFPVNPKALARYREAFNVGGAKDDPSDSDLLLELVTLHRSKLRAWRPDDELTRTITLLVQYRRDLVATRTALTHRLTALLKLYFPQALQWAGELDTLQACDFLQRWPTLAKVQKTPATKLRQFYISHSCRTVAVIERRLQQIPIAQPLTTDGAVITTSVAMVQAIVNQLRPLLGSIKALDKQIAELFAKHEDHELFRSFPGAGEVFAPRLLSAFGADRERFASAAEIQQLSGIAPVTERSGKTCWIHHRFACPKFLRQSFHEFAGSVYQPVALGAHLLPEPARTGQWPSGGGPQPGF

SEQ ID NO: 191869 - protein, 479 aa, unidentified
MTKDQKVIRAKAGLLELAKQLGNVSQACKIMGYSRDSFYRFKDLYDKGGELALQELSRRKPLLKNRAAPETETAVVAMAIDQPAWGQTRVSNELAKRGVSVSPFGVRSIWLRHDLATMEFFGGLDVSIDETAVCVVDDKGAVLVQTSVATDADAIMKALKPFLPRLRRVGHVAGALSPWLHPELTALGLPAVCLETRHVHAAMSAQRNKTDATDALGIAHIVRTGWFKAAFIKSEPCYRMRLLLTQRRNLKRKFLDIENTIRHSLKAFGVRLKGTSRGAFEQAVRESVAGDPLTVELMDAMLTARAALWKQYCKLHDLVMKFVSRSELCRRFMAIPGVGPVTALSFMTTIDDPSRFQRSRDVAAYFGLTSKRRQSGTSIDVQGRISKAGDPEMRRALFEAAGVMLMRFKGKDKLKSWGLALAKRGCHRKATVAVARKMGVVMHAMWRDGAVYVGDSTAREADVAARAAVKSRKLLGAHA

SEQ ID NO: 191870 - protein, 358 aa, unidentified
MSVYVGIDVHRKRSQVAVIDEHGEVLANRSVPNGVKPVLSVIGELPAGTPAAYEAAFGWGWLLELLEGYGFEPHMVHPLQCKAIASARLKNDKVDAATLAQLLRADLLPEAWIAPPEVRQLRALLRHRAQLVRLRTLLRNRVRAVLAGHGYGRPAGCWNGAGRAWLASLELPAVSREVIDDALALMDALQQPIDRLDEEVRQRAKADPRVKVLTPLPGVGMVTALVLLAEIGDITRFGSARQVASWAGLTPTVAAATARSTTGTSPSRDPPGRAGYCARPRRPPSVTRTSLPALRPSPAAAAGRSPPPRSPASSSPASATCSPTSPMPAKAVHPANGEGRQPRASSRLRMSRPRSRAR

SEQ ID NO: 191871 - protein, 438 aa, unidentified
MSNLDQAAVNREFAAHIGIDWADQKHFWTMRTADGKTQRGELDNTPEAVQVWAAELEQRFGGRPVAVALEQARGAVIAMLCKYAHLVLFPIHPNTLANYRKAFRPSGAKSDPRDADLALELLVSHADKLRRLEPDTVETRKLQFLTEERRRLVNQQTSETQRLIGWLKQVFPQILPWFEDPACAMVGELLLRWPTLPALQKATPKTLRTFFHRQNCRSAERIEERIAQIRQAVAATHDAALLETGILCIQNSVHVLEQMREGIARFDHQIAETYRQHPDRAIMESFPGAGPALEPRLIAAVGSRRERFESAQSVACFVGIAPVKEASGQQRWVHWRWACPKFFRQTFHEWAGCSIRTCQWAREHYDQQRDKGKGHHAAIRSVAFKWIRIFYRCWRDRVPYSEQTYLKAKAARAPKPHPAVSMQWESCGGFAKLSKLPS

SEQ ID NO: 191872 - protein, 393 aa, unidentified
MFYLGIDIGKNTHVASLMDEKAKIIFKAHSFSNTSEGAKTLLERIAPYAPDLEIGMEATGHYWLSLYSFLVENHFVVHVINPIQTDGWRKGTEIRKRKTDIIDSVLIADFIRYGDFIETSLADEDTMSLRNLSRFRNYLVSSISDLKRKTICVLDQIFPEYHSAFTNIFGKTSKELLLQFNSPSDYEEVTSKQLEELLSQVTLKGFATKKFNAISSLAKTSFGITFCVDSFSFQLKLLIEQINFIEQQVIDVESQMFELLEKINSPITTIPGVGDVTAATILGEIGDINRFSNASKLVAYAGIDASVSQSGEYESTNNRMSKRGSPYLRKALFRAAFIASNHDPVFKAYYQKKRREGKHHNVAVGAVARKLCHTIYAVLKNNVPYEVQVPREL

SEQ ID NO: 191873 - protein, 320 aa, unidentified
MQTPTEALNIGADVAKDEIVVACALGSFPARKLANQRSALLAFLKGLPAGSRIGMESTGSYHELFADTAHKLGFVVFVLNPKDARHYAKAVGLRGKTDRVDAELIARMVAHEHAKLHPWIPPTPEQREVARLISRRAKLSSLRQALAMSLKGLEGFAAELQALRARFDQLLARIDRRLKALLEASPERKQQLTRLRTICGVGPVVGAALVNTLERVPLKSADAFVAFTGLDPRPDDSGQHRGKRRLSKRGPAELRRLLYVAAMSAKKKPAWKPLFDHYRAKGLSSTAALVILARRIARTAWSIYTYKTDFDPARLTKGLT

SEQ ID NO: 191874 - protein, 402 aa, unidentified
MAGSPTRFFGLDIHKEYFVAVGVNAQREVVFGPQRVSNYQLDDWVSRVLTTQDSVVLEMTTNTYLFYDTLLPQVHSVIAVHPPSVTLVTNAQVKTDKKAALTLAQLHAAGMLTGVWIPPHPVRDLRALIARREKMVRLSTMAKNRLHSILHRNHLILPEKPFSPEQRTWWESLPLSATEQFLVRSDLDTLAFAQKQVEQAEECLKKESAQDERIPLLVQLPGVAMLTAITILAAIGDITRFPTAKKLVGYAGLGTRVHDSGMTHNTGRITKAGRKDLRRAMVNAANHAIEHHPHWKKEFERLEPHLGRSKAVVAIARKLLVAVWHVLSEKTADRFADPDNVARSFFAHAYRVGVRNLPEGQSALAFTREQLDRLGIGKGLQEIPWGSKRHKLPPSKLLLEKE

SEQ ID NO: 191875 - protein, 420 aa, unidentified
MRGMRGKKVRAVKEGMLIVTVDIGMASNTGYCTTVDGRDIKPFRFENSREGFEKFWHIIMAGKNRFSCNEVMVGYESTGPYAEPLAHYLMDKPVTIVQVNPLHTKRIKEVNGNSPLKTDDKDPRVIADVLRLGHALSVVVPEGDAAYLRRLNNARERHVGERTALLNQLQQLVFLIFPEFKTVFNDIAKTAQHVLKNYTTPEKIGALNKDSLGEEIRKRSMGKFGLREAELLINLARDTVGIKEGVAGIVLDIRHILVQLEALCGFVHEAETEMAKTLERIPCSARILSIKGLGVVTVAGLIGEVGDFSKFRTQAEIMKLAGLDLYEISSGKRKGQKRISKRGRSLLRKILYYAAVSMVRKNGIMYTQYANLIARGMVRTSALIVIAKKLLRIIHAIVRDDRDYVPDYASQKRMVIKKAA

SEQ ID NO: 191876 - protein, 357 aa, unidentified
MDNVTRIGVDLAKNVIQLHGVDSAGRVVLKKSISRHKFLDYFANLPSCLVAMEACSASHYWARKLRALGHEARLIAPQFAAPYRKGGKPVKNDARDAEAVCEAAGRPQMRFVPVKTADQQNTLVVHRMRTGFVEERTALVNRLRAELVEFGVFLPQGIDALRAHFLDALEDGATELNGTARTALLRGWEHWQALDREIAWFDGQIAAQVKHDPNAQRVMAIVGIGPLTASAAIATVGDARQFRNGRQMAAWLGAVPKQASSGGKTRLGHITKQGNTYLRTLLFQGARTAVTTAHRRDDRLSRWIVQLRARVGLYRTVVAVANKHARILWAILAKGERFDPSHVPTRPTPARCHKATR

SEQ ID NO: 191877 - protein, 355 aa, unidentified
MKNQAIYYLALDVHQATVVASMRNEQGVVVMRATVRTEAQAVVGLVRAAGGRVHVAFEEGTQAQWLHDVLEPHAERVIVCNVRGKNEVANKSDRLDADDLCERLRLGSLKAVYHGAPSVLTLKELVRNYNSIVEDATRVMLRIKALFRARAIRTPGRSAYRPAQRHEWLDQLTTPGARVRAASLFEQLDLLLELRPKAKAAMIAEARKQPGWKPLRSMPFLGVIRVSQLLAIMATPHRFRTKRNLWPYAGLAVVTRSSADQEFAGGKLRRRARAARTRGLNRNHNPMLKSIFKGAATAAAAKAGPLKDSYDACVARGTKPELARVTLARKIAAIALRLWKKGELWDPAKLTIATT

SEQ ID NO: 191878 - protein, 407 aa, unidentified
MLFLGNDWAEVHHDIELQDDQGRVLARRRLPEGVAGLAQLHAVIADHLGEDDEPGAVLVGIETDRGPWVQALIATGYTVYAINPMQVSRYRERHATSGAKSDPGDAHVLAEIVRTDRAHHRPTAGDSEQASVVKTLARTHQSMIWTRQRQTNQLRSMLREFYPAALVAFGEDLAGRDALAVLAIAATPAAGRALSRPKIATALRRAGRQRNIDTRAAQILEALRGDQLGLSDALTSAYGVSVRSIVAVIATMAAQIAILEAEVSQCFGQHPDVEIITSQPGLGVVLGARVLAEFGDDKTRFADAKARRNYAGTSPVTKASGTRRVVLARFTRNRRLADALHQQAFAALTGSPGARAFYDTHRARGATHHQALRALSNRLVGILDGCLRHHSTYDEHIAWAHRTAAAA

SEQ ID NO: 191879 - protein, 484 aa, unidentified
MAKRKMSTFERLKRGELNRKQRRDLGRKVAAGDPGLTIENPNAGGIDVGNESHYVAVPPDRDPNPVQEFGCWTEALQRMTEWLKACRIDTVAMQATGVYWIALYDVLEQHGIRVVLVNAQHTKNVPGRKTDVQESQWLMKLHTYGLVRDSFRLPEQIESVRTIWRLRDRHVKEAGRAVQHMQKALTKMNIQLANVISDIHGVSGQAIIGAILKGERDPYKLADLRDYRVRASREEVARSLEGNWREDVLFELQQAVNSYHFLHQQMQECDWKLERYLASLPTRILDVPAQPEGAPAVTPKRKKKAKKPQGNEPQLDLKVELKRICGVDLTSIDGINVMTAQTIVSEIGTDMSGFKDENHFASWLGLTPSKDISAGKTVRRGKKKVNNRVAVALRTASTTLLESDSYLGARYRHLRRQLPTFASAVKAMAHYLSLLVYRMFTKGEAWVDRGAAQFERRRTERELVSLNSRARANGFKLIPIAEAS

SEQ ID NO: 191880 - protein, 378 aa, unidentified
MNRIIKIGMDVHTTNYTLCIFEPSFEHDGTVHCITQVKPEIKKIIHVIETFKKKHENEELNIVCGYEAGCLGYSLYHELKEKGIECVILAPTTMKTEKGGRKLKNDYRDAKMIAECLAYGGYSAVHVPTELDNSVKEFIRMRDDIKENLKSIKQQIIAFLTRNGKQFEGKSFWTRKHIDWINTVSFSEPLLQDTLKEYMIEYNHLCDRVETLDRQIEEISLKEEYVEKVQQLQCLIGIKTHTALSLIVETSDFNRFKKGNMYSAYLGLIPGDDSSGGHENKLGITKAGNSRLRRLLVEAAQGYTRGRVGFKSKDLKSRQEKCSSEVVAYADRANERLRRKYYRMTLRGKKYNVAKTAIARELACFVWGIMTDHIDLCS

SEQ ID NO: 191881 - protein, 461 aa, unidentified
MAKKAKKVKTAKGAELRIVNPDAAGIDIADGIMQVCVPADRSKDNNRAFGAYTSDLHAISAWLRECGIKTVAMESTGVYWIPLCCRLQEDGLDVVLTNARDVKNITERKTDESDAEWLMLLHQYGLLKASFQPHNDAKRMRTLTRHRDTLSREASSIVLRMQKAMQQMNIKLTLVLSDITGKSGIRIIEAILAGERDPKRLADLADIQCKTPKEEIAKALEGNWEEDLMFVLRQNYDTFKHYCTQLGECDAELEKLMENYRAEVAKVEDTSYSPAKKRRDYKKTRHTVGFDVERKAYEMWGVNVFEIPGISHLTALELMSELGHDFTRKFPSSKQFCCWCNISPNTKISGGKRISSHVPHRRNNVGLIFRSIASSLANAKNQLGNFYRRIRSRAGGKAAVIATAHKVAEIFFAMVANQTTYNPERVGIDEKVLLEKRITRYKRELERITGTHIEIGNACVP

SEQ ID NO: 191882 - protein, 350 aa, unidentified
MIIGCDFHPSWQQVCWLDTATGESGEQKLVQASGDAERFYRQVAAPALIGMEATGNCHWLVDLLAEIGHELWVGDAAQIRASYVRQQKRDKRDAVHILKLLVEGRFPRIWMPSSQVRDLRQLLLQRYKLVMIRARVKNEVQHLCLNQGVQRKRKLWSQAGQQVLRELPLKPWAGRRRDDLLKLMAMLDQQIGPLEEAVKAEAQGDKMARLLQTQPGVGPITALAYVLTMGDVGRFPRGKQVASYLGLIPREHSSGGRQKLGAITKQGNRMLRMLLVEAAQIAVRYDPPVSPPVFASLSPEAESRGQSGGGAQVSRTTLLDAAHASGLSRDRSHREQPAGAPGRRKLDRER

SEQ ID NO: 191883 - protein, 342 aa, unidentified
MKQYVGLDVSQKETAMCVVDQSGKILFEGKAPSDPGALARLIHKRAPDAERIGFETGAMASWLWHELKRIGLPVVCVDARHAHAALSVRMNKSDPNDARGLAELIRVGWYREVRVKSDDSQAIRSLLVARARLVSIRRDLENQVRSLLKEVGLLFPRAIRGPFRTKVQQLLDDDHVLRPIVAGLLAVHEQVEREQAAFDQRVRAQAKADETTRRLMSVPGVGVVTALAFRHTIDDPTRFRSAQTVGAYLGLTPRRKQSGEQDYNGRISKWGDRLLRTYLFEAASVLLHRTQRWSALKAWGTRLMKRVGAKKAKVAVARKIAVILHCIWTDGTSFDWGAPQAA

SEQ ID NO: 191884 - protein, 315 aa, unidentified
MPNSHYIIAVDVSKAKLDYYVSDTQRGCVENTQQGVEKLLALCASKDGEKPHLCLEHTGIYGHLLVQACHERGITCSLLDSKKLYHYKCEHGLRAKTDPHDAKLIHLYATDRKPAPTQAESTHHAKLRELQNLRTLLVQQAAQLKTGCRQALQKEVLKHYARNLAHLEKQVAKLDARIAELLDTQPETRTLREHLQEVQGVGPVTANAVLIHLSGALGHVSDKRIAALAGLAPVPDQSGQSNKPWHIRGGRHQVRRVLYMAAVSAVRCNPILKAFYKRLRTERHKPARCALVAVARKLLCLLNRIAREPEFMPNR

SEQ ID NO: 191885 - protein, 341 aa, unidentified
MKSVALIGIDLGKHSFHLHAQDNSGSEVFRKKTTRQQLLRLLANQPACTVVMEACAGAHCLAREITALGHEARLISPQFVRPFVQGNKNDFIDAQAICEAASRPSMRFVTPKNEAQQTLSVLHRLRESLIRDRTKVINQLHGFLLEFGISLPVGTAVIRRLSSVLAEHELPVRLVALLQRLHEHFTYLDEQIKALDKEVASQLGEDDLGSRLLTIPCVGPITASVLAAEMGDGKQYTSSRDFAASVGLVPRQYSTGGRANLLGISKRGDKNLRRLLVQCARVYLLRLEHQRGALADWVRSLLCRRHSNVVACALANKLARIAWAIATQHSSYETGPDGYAA

SEQ ID NO: 191886 - protein, 375 aa, unidentified
MKEKVRFLGMDVHAETIAVALAEPDGEVRSLGTIANRGESIRKLVKKLGPMGQLKACYEAGPTGYVLYWQLAELGVACEVIAPTLVPMKAGDRVKTDRRDAERLARSYRSGDLTAVWVPDEGSEALRDLVRAREAAKQDQLRARHRLAKFLLRSGQRPRPGVKAWTQLHMGWVRQLRFAQAAQESTRLDYLHEVEHMAERVKRLEQAVAEAVKLASPEIQEVIRDLQALRGVAQISAVTIAAELGNISRFEGARQLMAYSGTVPAEDSSGKRTRRGSITKTGNAHLRRIVVEAAWSYRLRPGVGPALRKRQEGVPEQIKEIAWKAQIRLHKRYSKLAAAGKDQRKIVAAVGRELLGFIWAIGVKAEAAGKLRMAA

SEQ ID NO: 191887 - protein, 345 aa, unidentified
MKIVGCDLHTRYQQIAMLDDESGELMERRLEHANGEAKEFYAKLAGPVRVGIEATGHTRWFERLLAELRHELWVGDAARIRAADVRKQKTDARDAALLLELLLSGRFPRLWRPRREDRDLRQLLWHRQKLVWMRNAVGNQLHALAMGEGICRKKQLFTKKGRAELQGLKLDPWASRRREELLRMLDQLDASLKQFDDAVNQQAAQRAEAVRLMTHPGVGPVTSLAFVLMVGPVARFQRSKQLASYLGLNPVEHSSGGRQRLGAISKQGNPMLRGLLVEAGHTAARLDPALRQDYQRLRLRRGGSVAKVAIARKLAVRMYWMLRREMNYTQLVRMQGSSRATLVQP

SEQ ID NO: 191888 - protein, 384 aa, unidentified
MGGIILDVLMTRCAGLDVHAETIVACVMIGEQDDELFIETETFPTLTKDLFRLLKWLENHGITHIAMESTGVYWKPVYNILEDYFDITLANAQRIKNVPGRKTDVSDAEWIAKLLRYGLIEKSFVPPEDIRNLRDLTRLRKKWIGHLTSEKNRILKVLECSNVKLNSVISDVFGVSGRKLLSKLIQNGYVDSIDVENSIHGRMKHKKQMITDSLFGTLNDHQIFLIKQSWQHIVYLESLISQIEERIDEILKNYKEEVELLLTIPGIKKDSAAIIIAEIGVNMEQFPTSQHLASWAGVAPGNHESAGKRKSTKTTKGNPHIKTVLCEVAWAISKSRNRWLAAKYWSIAARRGKKKALVAISHRMLRIIYSMLINKEPYKEPLIN

SEQ ID NO: 191889 - protein, 310 aa, unidentified
MDIIAVGIDLSKDRLDVAVRPSGEAFAVDRNAAGLDRLTARLQELSPHLVALEATGGFETIAAAALASAGLPVVIVNPAQVRAFAKALGQRAKTDPIDAAVIAHFVEATKPQLRTLPDEATRLLADLVTRRRQIVEMMGAERQREKRMTQPHLRNSIVRLVKALEKELASVDADIDDAVRGSPAWRDKEDLLASVPGVGPVIARTLIAELPELGQLNRKQVAALAGLAPYTRQSGQWRGRSFIGGGRKVVRTALFMGAMVAKRHNPVLKAFFDRLVAAGKPKMVALIAVARKLLTILNAILRDHRSWQNA

SEQ ID NO: 191890 - protein, 429 aa, unidentified
MNYTQNEKIEQVTDSTMVVGVDIGSQIHYARAFDNRGRELTKRIFSFHNDLEGFNSFNLWAETLKTENKKTAVLIGCEPTGHYWFAFAKYVNDHQKRLVMVNPFSVKKIKELDDNSPKKTDSKDPKTIAKLVVDGRYSIPYMPEGIYAEIRDLVYSRDRIMKQHNISANRIQRWLAIHFPEYLGLYTRFDAISGLAVIEKAPLPKDVIALGVNGIRKIWHDKKMRGRGVTEDRAKTLVEAAHNSVGLDGGIGTKSELYMLLEEHRLWTSQLEAVNKVLEEMILKVPHVEKLLAIKGVGSITIAGFIAEVGDIRRFDSPKQIQKYAGLELVENSSGKHKGRTRISKRGRRKLRKILYQVMVPLLARNREFREIYDYYVTRVKNPLKRRQAMVAVSCKLIRVFYAVLTKGMEYDRFKMMSDIHRKSDIIAA

SEQ ID NO: 191891 - protein, 431 aa, unidentified
MSKFLNSLVVGLDVAADFSFAAILTPDGSLYRKPFKVNHDADSLRKFAAEIQKVEKLFSTKAFLFMESTGIYHLPLFHFLKDIKFEVFVLNPLITHSNRNNDIRKVKNDKKDAIAIAKLVKYQDVKFSTNAEPALFTLRSLCRQYYSFVDSRIAYKIKLSNELHISFPGYHTVFADITGNTSMAILNSYPSPKSILDAPKETLISLIQESSKKGVAWATAKYSKLIDAATNALSLGLKHLASETLIKCHLNLIKEFNTQIAALLMEIESFVLSGEFPLQAKKNLKLLLSITGVGFISAVTILSEIGNFDEFSKPKQLVAFFGVDPAVNESGKFKGDKVKMSKRGTRYGRRALYAVALACIRKKRNGMPNNPVLFQCYQKKSDSKKKKVAIGAIMHKILNYIFAVLRNQTPYELRSPEAHVSTHFEIQSIAT

SEQ ID NO: 191892 - protein, 348 aa, unidentified
MLADELDFVIGVDTHRDEHALALVACPSGARVQERLIGADERGYAAALAFAVERAAGRRAWAIEGTGSYGKGLARYLTQRDERVHEVERPKRQGGRARAKSDRLDALRAARSLIAAEKPALPRAAGLRESLRVLLQVRTSAVAARRVALNQLRALLVTCPEPLRAELRSLTRARLLRRCRELEPERTDDPELRSTLQALRLLAARVESLTAETRELEQELRAEAEQIAPALLAERGIGPIGAAQALVSWSHKGRFRSEAAFARLAAAPPIPASSGKTVRHRLDRGGDRKLNNVLHQIVITRRKHDPRTIAYIERRRREGKSEREAIRSLKRYLARHLFRLLETTATPT

SEQ ID NO: 191893 - protein, 428 aa, unidentified
MTKRTENLNLIRGGRTLIVGIDIAKNVHWARMLDGKTSIEVGTAFKFKNNIVGFDRLLEKTNQARKQIGAERVVMAMEPSGHYWKALAAYLYQLEITVVMVNPFHVKRQMELDDNSPAKNDRKDALTIAVLTWQGRFSRCYLPEGVWAELRGYTVIRCQQKRKLNAALNNLAAVLDECFPEYKEVFKEPLGKASQHVLTHFPFPVDIVKLTEAKITQELKKATSNRVGEKKAALLLSKAKVSVGIKEGLAAARLRLSHCLSEISFYQEQLAQTEAAMEDALKQTEIADSLLSIKGIGAVTVASFLGEVGDLSRFDNWRQVRKLAGYNLVENSSGKHIGKTSISKRGRPRLRSILYQTSLRMVVHNPEFKALHQHFKTRRENPLKPKQSLIAISSKLLRVMFTLAKKKRSYDPEKVLGVYRQQQLELVA

SEQ ID NO: 191894 - protein, 325 aa, unidentified
MIAVVGIDVAKHTFDIATLQANGKYRTRSKLANNLDGFAQLGEWLEKHAGPEAWIVMEATGIYHEALATWLFEQGYRVSVVNPAQTAAYAKTQLSRGKTDRTDAKLIAGFGQHQLDKGRLRPWQPEPPAQKRLRALVRRLADLREMEQMERNRLESADANVQDSIHTVLRHIEEEIRRTLKAIEDHIDSDPDLRQRKELLVSIQGFGEQTAALLLGELGDPLEFRSAKAVAAFAGVTPRPDQSGEHRGPTPISRIGSGFLRSRLYMPALVALRHNPAIKALAERLRSRGKSGKQIICAAMRKLLHIAYGVLKSGRPFDPELALAR

SEQ ID NO: 191895 - protein, 338 aa, unidentified
MKVHTLGVDLAKNVFQLHGVDRKGRPVLVRRVRREQLLKVLGELEPCLIGIEASTGAFYWQRQFEKLGHAVKMMAPQYVKPFVRRQKNDSNDAEAICTAVQQRNMRFVPKKSLEQQDIQALHRARQRLVNHRTALISQMRGLLLDRGIAIAVSATRARRLIPKILSDSNDELTDMMREIVSSLYAFMLQIDERIKAFDRKIAAIFKASDVCRRIGKIRGIGPKTATAMIAAIGDGSDFKNGRHLAAWLGLVPRQHSSGDRKVMMGITKRGSQHLRTLLVHGARAVVRTAVRKTDSRSVWVNELRQRRGYNRATVAVANKNARVIWAVLTSGEPYRAAA

SEQ ID NO: 191896 - protein, 356 aa, unidentified
METTTKYVGMDVHTEAISIAVVNSAGKVVMESILETKANTILEFFQGLRGNVQVTLEEGTWAAWLYDLLKPHVTTVVVCNPRKNALLKDGNKGDKIDARKLAKLLHLNNLKPVYHGENGIRTLKELSRSYLTISKDLGRVMNRLKALYRSWAIPCAGQQVYAPRHRSEWLSKITEAGVRRRAEYYYQQLDALQALRHDVRRDLLAESRKQTATKLLRQIPCIGPIRAALLIALIQTPHRFRTKRQLWNYSGLGIETRDSAQYRFVGGELQRSKKPQQLRGLNENHNHDLKNIFKSAATMATISPGPFHDFYEGLLAKGRKPTMARLTLARKIAAITLIVWKKGDSFDAKHLKPQAA

SEQ ID NO: 191897 - protein, 342 aa, unidentified
MQVTTIGLDIAKNVFQVHGIDAAEKVVVRKQLRRRQVLEFFKALPACLVGMEACATAHYWARELTKLGHRVRLMPAKDVKAYVKRNKNDAADAEAICEAARRPTVRFVQIKSTEQQGRLMLHRARDLLMRQRTQVINAMRAHLAELGIVAAQGRDGIKELLKIIASEADARLPVDAHTSLVVLAAELQAMQTLIGSIEKRIMVQHRLSEASKRLKSIPGIGLIGATAIAATVPDPKVFGSGRDFAAWIGLVPREDSTGGKQKLGPISKRGDRYLRRILVVGACAVLRYARHKPEKYPWLTQLLARKPFKVVAVALANKMARIAWALLAKGGTYRVPALAAAV

SEQ ID NO: 191898 - protein, 414 aa, unidentified
MTEEETISWFAGVDWGSERHQVCLLDARGTTVGEREFPHSGEGLAELGDWLLSMASAASTVAVAIEVPHGPVVDALIDRGFVVYAINPKQLDRLRDRFSVAGAKDDRRDAYVQADSLRTDRRLFRRLQVADPRLIELRAWSRLAEELRAERVRLSNRVRHQLWRYYPQMLKLTDDLAAPWFLELWAIASTPAKAGRLRKSTVERLLKQHRIRRMDAETVLRILREPAIKVAQGVAEAASIHMRSLVARLRIVNRELREAERKLDELCTTIGEIEQTSGEGLQRRDVAILRSMPGIGRINLGTLLSEASGPLSRRDYEGLRTLSGAAPVTKRSGKSLIVVRRYAAHVRLRDTVYHWARVATQRDPKCRARYTALRKRGHSHGRALRGVADRLLALACVLLQRQTLFDPYFGGSTA

SEQ ID NO: 191899 - protein, 416 aa, unidentified
MQVIYPCCCGLDIHKKFVVACVLTTADNGQVQKVTRTFGTMTDDLLAMLDWLTGAGCTHVAMESTSSYWRPVYNLLEGQVTLLVANAYHIKAVPGRKTDVKDAEWIADLLRHGLIRGSFIPSPAQRHLRDLTRYRTHLVEERARLTNRLQAVLEDANVKLASVVTDVRGVSARAILEALLAGATDPALLAELARGRLRAKRDQLARAVVGRFTGHHAFLLTEHLSHLDYLEEAMARVSAEIADRLREDLAAVALLDTVPGISVRSAEVLLAELGTDLSRFSDAKHLASWAGMCPGNAESGGKRLSGKTRKGNPALRQALIQIAHVASKTKDTYLAAQYRRIAARRGKKRALVALGHTILVIVYHILTRRQPYHELGVAYFDQLERQRVEQRLVRRLERLGYTVSLHSPEPEPTVAA

SEQ ID NO: 191900 - protein, 413 aa, unidentified
MMQDILTCAMGLDIHRDVIVACLAKGELGTDPEIEIRSFSTLIPEMRKLRDWVLEAECRYVAMESTGIYWQPIYEMLEPCFDGQISILVVNARHMKNVPGRKTDMRDAQWIATLLRAGLLKGSFIPDKTFRELRHLTRYRKSIVRDITAQKNRIDKFLQSSGFRFTAFLSDAFGASGRNIIRHLMEYGNISREALDRCLKTQTRKRIDEILIALNGSLSEHQRGFLRMIFGHLEVLEQHRHTVEDAITKEITKHEEALSLLCSIPGIDVTAAAAIIAEIGTDMSAFPDSQHICSWAGLSPGNNESAGKRKSAHINKGNPYLKSMLCEVGWVISGKRSLYLSGWYWRIKQRKGAKRATIALARKLLALIYTMLKTGSPYNEDCFEIRRKQSERKRASRMVNELQKLGYFVVAPG

SEQ ID NO: 191901 - protein, 399 aa, unidentified
MKSPCVAVDVSKGKSYYQGFIEIDKPASKATPIMHDLEGFKSVYELGQTLKEKYSDVVYVFESTGIYHKALETFLMQHEEKCVILNPLEASKIRKTDLRSTKTDARDCKSIAKAYFMKDFRLHNQKDELYGKLQSMNGHYNFLIQQLREMKVHFRNALDIVYPRFDVVYPDPYLDIPMSILKRYTHPDEIKSKHVETIVKYLMKDTKHRESKAVDETKKLKGYIDNVSSGCRISSYEVTILKSMVQKIGDQEVEIKLCLDEMRDLATEIPLYHQLMSIPGIGDNLAIRLIGELGDLDRFERSEQLVAYAGIDPRVYQSGQMTGEHLHITKKGNKHLRTLLFLAVSSNVRIGKTNSILDFYNKKRQQTNPLVYKAALIACANKLLRIIFGMYKSGINFHN

SEQ ID NO: 191902 - protein, 473 aa, unidentified
MRSRSTNEFSFADADFQRLDYKAFAEREQCVFAPKIQINSTPKATTPMNQINQCFAAFIGLDKSDKKINVSLKQCGKSKIERTIIEGGAEALHAWVAVLCTRFAEQKVAICLEQPAAGLIHALMGCSFIVLFPINPVTLARYREAFTTSRAKDDPTDADLLCQLLAMHREQLKAWYPDDVCTRKLRHLVEARRCSVNMRTRLSNQLKALLKAYFPQALELCGEELTAPMACDLLGKWPSLQQLKRARPETIRRFYYAHNARRGDVIEKRLALIEKAVPLTNDPALIESSIITVQALILGLRASHTAINRFDREIARVFAQHPDAALFAALPGSGTAYSARLLAAFGSRRERFESAEAMLNFSGIAPVLKRSGRSTIVHRRFARPLFLHQSFIEYANESIRHSLWARAFYQMQKAREKTHWVIIRALAYKWIRILFRCWQARTPYDELRYLKSLQKSRSPLLQYLAQPSTNPPE

SEQ ID NO: 191903 - protein, 416 aa, unidentified
MNAVGIDVSSRKSTVAVLRPLGEVVCLPFDVTHDIAGLASLVEKLKALDGETRVVMEHTGRYYEAVEKALHEAGLFVCAVNPLLIKEYGANSLRRVKTDKADAIKIARYALDNWADLRDFTPMDAIRYDLKTLNRQFQLASKQRTASANNLIALLEQSFPGIRKCFDSPVRSDGTQKWVDFAHSFWHVDCVRKQPFPAFCERYRKWCKRHAYLFKLSNAEEVYALAKRAVVLTPKSKVVKVLVQEAANQLISISRSVEVYRAEMDRLAAMLPEYPVVMAMYGVGKSYGPQLMAEIGDVRRFERKQALVAFAGIDPMPNQSGDKNVRSNKSSKRGSPYLRKTLFNVIRTYLQCAPQDEPVFQFLNRKRAEGKPFYVYMLAAANKFLRRYYAKLRDFFASLDTLQPVAPIPTILKAAL

SEQ ID NO: 191904 - protein, 438 aa, unidentified
MRRVDDVTDEPLYRDRVCGIDIGKAGLAATIRVPSEEDPARRAAETRSFGTTKREVLALGDWLRCWQVPAVVMEASGDYWKGPFYRLEAEGFECVLADAKQVRHLPGRPKNDPADSRWLAACFERGAVTSCFVATEEFRLIRLHTRYRRDLTAERTREKQRAEKLLESAAIKLSSVLTDLHGVTGRDIMDHLIAGQRDPKVLAQLARARARRKITELEAALEGAEFFTPAHAALLAAMLSRIDHLDTQIGKLTEVIETLLAPYEEQLAQAESMPGWGRRSAQDALAETGADMSRFPTGAHLASWAGRTPLDNSSGKRTGRAKSKKGNRYLAAVTGETAVAAGKTQTREGARYRRLARRRGKAKAQVAVGNTQLRVYHKLLSNPGMRYEDLGPDYYERMRGHRRQVSQLVGKLGALGYEVTLCRLPEPGPGQAASTPAA

SEQ ID NO: 191905 - protein, 311 aa, unidentified
MCEEIHRQFSNDQSGFILMRKWFKECGMKTVELVIGLENTGIYSFDLCLSLESAGIDYCCFNPLHLKRSFGLTRGKNDKVDAWRIAYYCYLHREELVYCKMSASTIMQLQELSSERKRHIKHIAEYKAYLTDRKQRITDSTQKRTANALEYEQALVDEIEKEMEVIIRSDTDLKKNYDLLLSVKGVGAVNAITIIIHTNNFESFGNARKYACYVGVAPFENTSGTSTKGKPHVCSIGAKILKSDLSMAARSARIHDPEMKEYFERKTAQGKEFGVVMNAIKYKLIQRMFAVVKRGTPFVQLQTYKSTTTIN

SEQ ID NO: 191906 - protein, 280 aa, unidentified
MANQAHSAVVYGIDLGKTWFHVAGCDATGRSLHKVKLSRSRVFPFFANTSVALIGMEACPGSQWLARRLQALGHTVKIMPAQFVKPYVKSNKNDAVDAEAIAEAVTRPSMRFVQVKQTEQVDLQALHRARDLIVSTRTRLICQMRAFCLEYGIAMRNGAGAFKLDADVLKVLNDDTNELTPAVRHLLRELWNQLQELEARIQKFTRQIESIASRSQFARRLLTIPGIGPLGATALLAAVGDGKQFKSGRDMAAWLGLTPAQYSTGGKQRCSESANAAMLT

SEQ ID NO: 191907 - protein, 343 aa, unidentified
MQRDLGMVVGVDTHKDSHSAAMVDPMGALLAATDVGANRKGYRRLLEWARCQAPQRTWMVEGTGSYGAGLASFLAASGEVVFEGDRPQRRKPGAADKSDQLDAVKVAREALAREHHAVPRQRGNREAIRVLLSTREGAVSAYRQALNQLYALVVSAPEPIRERLIRLKGEHLVTACGALRSAAGDIETSVTVRVLRQVARRTRNLQAEAAEHQALLEKLVAEAAPSLLAQPGVGAITAAQLLVSWSHAGRIRNQNAFAALAGVAPVPASSGRVIRHRLNRQGDRRLNRALHVVAVCRSSFHAPTKAYIARRTTEGKSTREIRRCLKRYLARRFFRLLQRLDNL

SEQ ID NO: 191908 - protein, 274 aa, unidentified
MSVCVGIDVHRKRSQVAVVTGDGQVQVNRNVVNGSEPMLRLIGALPAGTPVAFEAAYGWGWLVELLEDYGFDPHLVHPLRCKAIASARLKNDKVDAAILAQLLRADLLPEAWIAPQPVRQLRAQLRHRASLVRLGTQLRNRIHAVAADHGYDRTGSYWTGPGRGWLAELDLPAVSREIVTDCLAFLDGLAPVIERLDGEVHQRAKADPRVKVLTALPGVGEFTALVMLAEIGDITRFASARKLASWAGLTPTVRGSDLTVRHGHISKQGSAWLR

SEQ ID NO: 191909 - protein, 416 aa, unidentified
MDTMYERCCGLDIHKKTIEACFRSGKKKTHMSFGTTSAELRKLTMWLVENDCQSVAMESTGSYWKPIFNILELSGTDMKIIVVNARHMKNVPGRKTDVHDAEWIAELLQYGLLRPSFIPDREQRELRELSRYRKSLVEERAREINRLQKMLEGGNIKLTSVVSEVTGYSSRRLLDRLLRNDEPMTEDVISGLVHTSLAGKSKELETALDGLLSELQKELLIKVLDHIDDMSRRIADLDDFCRKQMKKYEDALDKLDEIPGIARRTAETILIETGLDMSRFPTAKHFARWAGLAPGNNESAGKRSSGRTTKGNPTLKSTLIQSAKVAARKKDSFFKARYQKIAAKRGANRASVAVAHSMLIAIYHILKSGERFKDLGEDYYNQFNKEKKKKYYLKKLTKLGVNLKEATLSISIQTAT

SEQ ID NO: 191910 - protein, 367 aa, unidentified
MMGWMAPLRHLSAKLLCDRISSEWEPSMGEVTTIGLDLAKQVFQVHGVDAKGATVLRKQLRRAQVLGFFSRLPPCLVGLEACATAHYWARELAALGHELRVMPAQYVKAYIKRNKHDAADAEAICEAVVRPTMRFVPVKTADQQAAVLLHRGRERLVRQRTGLVNALRGHLAEFGVIAPQGLRNVGKLIDIVRDEGDARLPDLARQVLQVLAAQIEQLEAAVAAIEKQLMAWHKSNPVSQRLASVPGIGPIIATALAATVVEPSGFRSGREFAAWLGLVPRQNSTGGKHRLGGISKRGNQYLRRLLINGASANLLRSKATNADPWVIGLRRRRPPLVVAVALANKTARIAWAVMHRHENYQRVAAAA

SEQ ID NO: 191911 - protein, 338 aa, unidentified
MAIVGGFDLHRRQITFEYLDTASGEVSRGRVAPADREHLRAWLRRLEGQEAAFAVEACTGWRFVVEELERAGAQAHLAEPADTAALRGPKRRAKTDRADARHLRELLMAARLPESWIPPAHVSDARTQIRLYKALVDERTAWLQRVHAILFQLGAPAVPGLARASGRGRLDLAALPPAARSAVEVALRSVDRVNDELDTLRPELARLSRAQSGCRALQAHYGIGPLTSVAIWAELGDCGRFSSSSDAVRHSGLDVTVHSSDSRRARGHLARQGPGVLRWALFEAAVCAARPASPDHAYYLQVKARLGHQRAVLSVARKLTRWSHHTLRALGDQALAPA

SEQ ID NO: 191912 - protein, 367 aa, unidentified
MSLQNAPNINVDGKMDVSNIHFINENAGGAFMAKYNIGVDYHKKFSYLVVKEEKGRVLRSGKITNSKKAVADFLKPFKDDSTAVLESCRNWCVMHDWLEDIVDDVILANPYKVKAIAEAKIKTDKIDATVLADLLRADLVPQAYIAKRPVRDMRNLLRERIYFVRLRTMTKNRITTIFDRYPEEVRKEKAKTDLFGKKGRAQLENIELRPADRALINRELNFIDFINVFIKEVEEVIAENFQISKNAKYLKTIPGIGQFFSMLIDAEVGDINRFRNEKKFAAYIGLVPSTYSSGGNTVNGRIIKRGNKLLRWAFIEAVIPAIAHDEYMRWEYDKLRERMNYNKAKTAMARKLSSIAFKCLKEQRNYK

SEQ ID NO: 191913 - protein, 368 aa, unidentified
MKTNTTPSVVSNSTPAVVSGFTLGLDLGDRQHHVCVLDAAGQIVREASLPNTRPALTQLLADFPHATVALEAGTHSPWISRYLTDLGATVLVANPRKLHAISRSERKCDRRDAQMLARLARVDAALLHPIQHGSAQAQHDLLGLKLRDALVRTRVSLINAIRFTLKSLGHSVRNPASESFHKTVLADIPADCLPVVQPLLTVLTNVTEQIKAMERDLVQRSKKDYPVTQRLQQIAGVGPLTALCFVLKIGDPERFSRGRDVGAYLGLCPRRDQSGGTDKQLRISKCGDGLLRRLLVSAAHYVLGPFGPACALREHGQRLTGTGSAREKKRAVVAVARKLAVLLLSLWKHGTDYEPRSTASAVSVLTPA

SEQ ID NO: 191914 - protein, 359 aa, unidentified
MTTEQRQQTMFIGIDVHKDTHTAVGVSPFGEKLFEITVGNYQSDFDQLRQKVELTKGSLSPYFGLEDCQGYGERLSAYLHDNGERILAVPSVMVDRQRQKETHPEKSDSLDAFGVAKVMMQNIDSLPAYTISEEAKKAKQIKEISIDREYIVEERTRIKNHLHNLLHRIYNSEYRVKYKDPFSLKALKHWSKSKPKCDQFLLRSMKRKIKRLIDIHYEILDLEKEMETLLNESYTIQTASGCGSIVAGMIIGEIGDINRFHSPGALAKYAGCSPRECSSGKNHRHRKTKGGNRRLNCAFHRMALSQISRSGNDLARTYFKRKILEGKSKQQALVCLRRQMVNIIWCMLKNKTNYNPRMN

SEQ ID NO: 191915 - protein, 346 aa, unidentified
MTIVGCDFHPSGQQVAIFDAETGEICERKLMHQEGEAEQFYRQLPVPSLIGMEATGNSQWFVQLLQAMGHEVWIGDAAEIRASYVRKQKTDKRDAAHLLKLLLEGRFPRLWVPDAEVRDLRQLLIHRHKLVEIRSRVKNGLQHLALNQGVQKKHRLWSVAGQKALRELPLVGWTACRREDLLQLRSMLDQQIAQLDGAVAQAAEKNPQARLLMTQPGVGAITALAFVLTIGEADRFQRGKQIASYVGLIPREHSSGGRQRRGAISKQGNRWLRMLLVEAAQSAVRHDPEFRKQYQHRCHSKSKGVAKVAAARKLAVRLFWMLRTNTAYPEIVRTESSPRIALVGTS

SEQ ID NO: 191916 - protein, 437 aa, unidentified
MAMQTSVYERLMGGNRKQRKDLQRRLCSDDPGLGVVHANAAGIDIGNESHFVAVPAGRDAEPVREFGSWTADLERMAAWLQSCGIETVAMQSTGVYWFAVYDVLEKRGLQVFLVNASHTKNLPGRKSDVQESQWLMKLHTYGLLRNSFRPPEEIRPIRAVWRLRDRHVEEAARSIQHMQKSLTSMNVQLANAISDVGGVSGQAIIRSILAGERDARQLARLRDRRIKASEEEVARSLEGTWQEDQLFELQQAVDEYDFRQKQIAECDRKLQDYLAVLPSRPAPDGDAGTVMPPPATPGKKKRRAKKIGGGNAPQSFDLGAELKRVTGVDAIRIEGVNLMTIQTVVAELGTELGNWWPTEQHFASWLGLSPKRDVSGGKVIRHTHGKNPNRVAGILRMAAISLLRSDSYLGARYRSLRTRLGAPKAIKAMARYLACVI

SEQ ID NO: 191917 - protein, 417 aa, unidentified
MSHLAKRTRAAQARAVVGVDAGKYHHALVVRPRGGADSRALTIPTTRAGFDEAVAFIDDRSGGAPTADVLVGLEFAGNYGFTFAHYLHQRGFPIVSVLPSHTKRWKEVTHHLPLKTDAKDALGITDLTAQGHFVGFPFLALPYAELRYLVSARERLLTLHRGTLTRLRTILHVVFPEFEQLMGQFTKRTPLALLAAFPGPDVLATVPLRRVTALLETSSRGQLGREMAQALRAAARGTLGLPSAQGVLKDEIPLLLEQYHLVQRQRCVVERRMVDALEGLPETPALLSVPMVAPVTAAVFLGAVGDPQSYESAREILRVAGLSLVEHSSGLLQGRHRIAKRGRPTLRAAAYLFAVRSIRHGGLFRAEYEGLLARNGGNRMKAVVAVSRSALRLLFSVARDRRLFTTLPPARGRVPVH

SEQ ID NO: 191918 - protein, 342 aa, unidentified
MDYYAGIDVSLEYSSVCVVDANGKIIREGKVTSEPEALISWFSSLGHELSRIGLEAGPLSQWLFAAMREAGLAVELLETRHVRKAFEAMPVKSDRNDARGIAQLIRLGWFRAVHCKSMNAQEVRAVLTARKIVQTKLLDVENSLRGILRGFGLKVGKTTARSFPGRIQELVKGHPHLEAIGEALLSVRTVLLREFNAFEKRVRAMARSDARTRLLMSTPAVGPIVALTYASAIDDPARFKSSKQAGAHFGLTPKKYQSGETDYSGRISKIGDASVREALYQAAHVMLTKPVKGCPQLKSWAMRIARRTGRSKAKVALARKLAVILHRMLANGTPFNTAAAAA

SEQ ID NO: 191919 - protein, 371 aa, unidentified
MNQIIRIGVDTSKSVFVLHGVDAAERPVLRKQLRRKKLIEFFAELEPTKVGLEACGAAHHWARELQELGHEVVLLPPQYVKPYVKRNKNDAADAEAICEAMSRPTMRFVPVKTAEQQAALMLVGTRDALVRRRTQVTNAIRGYAAEFGLIAARGLDKIEPLLARIAADTSLPRLAKELFETHAEDYARLREEIGKIEARLMGWHKRNELSRRLAEVPGIGPIGATLTVMKVPNPQAFSRGRDFSAWIGLTPKDHSTAGKTRLGVITRAGDDALRSAFVAGATAVIRHVKEGKGNPSPWLVELVRRKPAKLAAVALANKNARIAWKLMVSGERYNPVAARGGRVAALRGGSAPRPPRAPNDEPRAEAATTEA

SEQ ID NO: 191920 - protein, 394 aa, unidentified
MPKASAHPEAPAAIQTHLTAIFVSLELSRKVWLITSLSPGAGEKMSKHSVPADDVAALLMRFSELKHKAEARTGKTFPIVTIQEAGLDGFWLHRVLQSEGVESHVVDPASIATSRRRRRAKTDRLDGEALLRALMAFKRGEPRVCAMVKPPTPEEEDRRRLSRERKTLIAERVQHVNRIKGRLFAQGVSDYDPLARDRRQRLVELKTGDGRPLLPHLKTQIVRELDRIELLLGQIKAAEAERDAMLAASKAEAQQVGSPPPAGKMLLDFKGIGPEFASVLWHEALYRRFDNRRQVASYAGLAPTPWQSGSVDHEQGVSKAGNPRLRTALVELAWLWLRNQPDSALSLWFKQRVAANNGRRKKATIVALARKLLVALWKYVTFGVVIEGAVMKQA

SEQ ID NO: 191921 - protein, 349 aa, unidentified
MVVIGADVHKRTHTFVAVDEVGKQVGQITVRADSAGHLKALRWARLQFPQDKMWGIEDCRHLSARLERDLLTAGEKVVRVPPKLMAQSRASARTRGKSDPIDALAVARAVLREPDLPVAAHDQTSRELKLLVDRREDLVADRTRMMNRLRWHLHELDPHLDPPKASLDRAKTRQELTEQLQRFDGLVAELARDILADIDRSTAMINALERRISHRVDEQGAALIGLPGCGALTAAKIIGETAGVARFRSEACFARHAGVAPVPVWSGNTAGRVRMSRAGNRQLNTALHRIAITQLRLNGDGLRYYRKRIMAGDSKTEALRCLKRRLARVVFKTLHTLNQPTAASQPAAA

SEQ ID NO: 191922 - protein, 347 aa, unidentified
MAHFVGLDVSVKETAVCVVDEVGEVVLEQKVPTEPDDIVTLLTSIGEAYGRVGIEAGPLSQWLVNGLASAGLPVVCVETRHMQALLKAQQINKSDRNDAHGIAQMMRVGLFKPVHVKTLVAQEQRMLLTSRKLLQRKMLDVECDMRGTLRNFGLKVGVVSSGGFEARIRELVESFPRLATIVEPLLTVRRVMRQQFAVLHKMLLNTVRHDPVCRQLMTAPGVGAVVALTYRATVDQPQRFVHSRAVGAHVGLTPKRHQSGEIDYDGGISKCGDTMLRTMLYEAAQSLLTHSRKWSWLKAWGMRVAQRRGMRRAIVAVARRLAVILHRMWVDGTEFRWSNGPAVAKAA

SEQ ID NO: 191923 - protein, 341 aa, unidentified
MAKFIRTAIDLGKNYFQVHGLESEGGRSISRKVKRSKMHEVCSQIEPCRIGMEACGSAHYWARQLTAMGHEVVLIPPAYIKPYVQRGKNDVVDAAAICEAMSRTGMRFVPIKSADQQAVLMLHKTRELLVKQRTMAVNALRGHLAEFGIVAAKGIGRVDELLALAKADAALPLIAGAAVDCMAQHLEGLDLSIETVDEEIAKAHRQNPIGRLLDEIPGVGTLIASATAASVPDPGVFKSGRDFAAWLGLTPRQNSSGGKEKLGAITKQGNRYIRKMLVTGATSVLRVAGKRKGALADWINALRARKPERLVAVALANKLARICWAIMTTGERFRTDTYVKA

SEQ ID NO: 191924 - protein, 332 aa, unidentified
MNMHLQGGVAKGDRRPNAGVDVSKHHLDVCFNGQSHRVTNDAQGWDELTAMLRQEQVDLIVMEATGGYERGLLCALQSAQLCVARVNPRQARDFAKSMGVLAKTDRVDARVLCDFADVLARHAGRERYVTPMLEQARQTLAELMTRRRQLVDMRVAEHNRLEHAGPKAKRSIHSVIKLLDRQLESIDRQIDDHMDEHFKQQRQLLDSVKGVGPVTILTLTAMLPELGQLGRRQIAKLVGVAPLADDSGTRHGKRMTWGGRAEVRSVVYMAAIVAMRHNPVIRAFYERLVAAGKPKKVAIVACMRKLLTILNAMLRDQATWNAARHLSLAIGA

SEQ ID NO: 191925 - protein, 340 aa, unidentified
MSEITTIGLDLAKHVFQVHGIDAQGTTVLRKRLRRGQVLAFFSRIPRCVVGLEACATSHYWARELGALGHEVRLMPAQYVKAYIKRNKHDAADAEAICEAVQRPTMRFVPIKTAEQQAAQLLHRGREQLVRQRTMLVNALRAHLAEFGMVAAQGLRNIGELIAIVGDDGDTRLPDVARQVLQVLANQIRQIEAAIAALERQLFAWHKNNAISQRLASIPGIGPIIATAIATTVADPKVFRSGREFAAWLGLVPRQNSTGGKTRLGGITKRGNRYLRRLLINGASANLLRSKATKADPWVIGLRRRRPPLVVAVALANKTARIAWAVMLRQREYQPRAVAA

SEQ ID NO: 191926 - protein, 340 aa, unidentified
MIDISKFFIGIDVSKPYFDVSLLTVKNYQKQGIETMRFENTSPGIKLFEKWLKGHGVLMNGQSLVVIENTGIYHRLIWAFCSKKNLPIHIGNAAHIKWSFGIARGKNDKIDSLRLCNYAFKEADALKATPALDAELLQLKDFVSARTKLLKQLSAIKTSVKELGSVNDKPHQKLIEKSLKAATDGIAKSIDSIEAQIRKIIANNEAFRQSYDLLVSIPGIGHVTAVYLIGCTANFAGCPTGKELACYAGVAPFEHSSGISIKGKTRVHRMANKELKRLLHLCALSVIQHNLEFKNYYNRKQDEGKHNMSILNAIRNKIVLRVAAVIKSKSPYKENYKLVA

SEQ ID NO: 191927 - protein, 346 aa, unidentified
MQYIALDVHKHYTWARVEAVDGRLVRERKVMHRPGALRAFLEEVEPGSPVAIETVGNWYWVVEEVEQAGCVPQLVAAHRARLMLGGANKTDRLDCRGMIRLQRAGTLPVVWIPPRQMRDIRELVRTRMVLVRQRVQLKNRIHSTLSKYGVVVGEVSDLFGKKGRQLVREWLSQLPPHTAFVTERLLEEVEALDRRIEEVESRLGEVLEVDEDLRRLMTLPGVGFLLAAVIRTEVGDVSRFSRPEQLAAYAGVVPRVHESGGKRRYGGLRTEANRYLKWAFVEAANICFRLRRRYPQRHTSRLYERVARRRGHQKAIGAVARHLAEAAYWVLARKEEYREPGSSTGA

SEQ ID NO: 191928 - protein, 403 aa, unidentified
MTIYHVGVDVGKDRHHVSIRDISKDTYCKAFSITNDRSGFMELIAAIEKLSPEKSDFLIGVEACSFALNLSYFLMEAGYNLVEVNPFRASQFRKAQGKKAKTDRIDARTIAAILSLGDHKPLSLPDPILDNLKELTRFRTGLVDERATMIIHLREALSVLFPEFEKVFRQLDSAGSLALLAVFSGPENLIAAGEETVGKTLLLASPRRMGRGMARRIIEAAKGTVGVVQKQPALGIKTSILAKRIANLQSTIRELDKQITVLFNELPCKPQGFPLGRAPTLAAIVSEIGDIHRFPTLKKFLSHLGWCPQSFQTGNFRLEHPRMSHAGNKYIRRLIWMLSILAIRTVPRYRMYFQRRVGEGKAKMHILVAVGRKLLSMLYAMLKRGVPYDSNWEENSRLALARH

SEQ ID NO: 191929 - protein, 482 aa, unidentified
MTPRRQKNGRVVASPEPLRVANPHAAGIDVHAAVHWVAVPPNHVAAAKCMDAGAGDAANLPPHVRKFGTCTADLELLADWLHQCGITSVAMESTGVYWIPLFELLERRGFQVYLVDPRQTKHAPGRPKTDVLDCQWIQRLHSYGLLTASFRPEDQVVVLRGYLRQRHMLIRYAGQHVQHMQKALEQMNVKLPEVVSDITGVTGLAIIKAILAGERAPRKLAKLRDERCKRTEAEIARALQGNWREEHLFALKQALELYQDYEHLLRECDVKLEAHLATFADKSGGQKLEPKPRRCGRRHNEAAFAVRSALHRMSGHDLTVLEGIDDNTALVILSEIGMDMSKWPTEKHFTSWLGLCPQHQGSAGKIKSRRVRRGSNLAARAFRLAAQGCHHAKNALGAFYRRIQARCGGIKAVFATARKIAERVYRLLKYGTEYVRQGIDAYEAAYRERLLKGLTYRAKSLGYALIALPEAPPSTEATPATL

SEQ ID NO: 191930 - protein, 315 aa, unidentified
MSETSISVGIDVSKDTLDVALSTGARFSSANDENGILSLVKQVKALQPERIVLEATGGYEQALVAELAVNQLPVAVVNPRQVRDFAKALGRLAKTDSMDAEVLMHFAQAVKPETRALPDEQTRELEALVVRRRQLLGIVVAERQRLAKAPAVVRQDIRSHITWLIKRLKDTDRQLATALRASPLWREREQLFKPVKGVGRVMLSTLSASLPELGRLNRRQIAALVGLAPFNCDSGKFKGKRHCWGGRADVRAVLYMATLSAKRFNPAIRVFYERLIALGKPKKVALTACMRKLLSILNAMVRDRTQWNPNLHLST

SEQ ID NO: 191931 - protein, 333 aa, unidentified
METQVFVGIDVSKARLEVALRPADESLSVTNNQRGIATLVRRLKKFSVSRIVFEASGGYEIAAASELAAAGLPVAIVNPRQVRDFARATGRLAKTDAIDARVLAQFAELIQPKSRPLPDAQSRELMALVARRRQVVEMLTTETNRDERAPTCLRNAIAAHVRWLRKQLAELDASLGRAIRDSPLWSQKARLLRSVPSVGSVTVNTLLAHLPELGTLSRRKIAALVGVAPFNRDSGKMRGTRSIWGGRAQVRAVLYMSTLSATRHNPVLRAFYRRLLAAGKKPKIALIACMRKMIIILNAVLRHQTSWNPELCDLSRHPPLPDFANPARPTLIL

SEQ ID NO: 191932 - protein, 368 aa, unidentified
MTNNFIFVGCDSHDKTLVTRIALNRKKSEKKTFSASQAGRRKFIEELRRRSEQAGGAKIVVAYEASGNGFILSDELKKAGMECHVVAPSKIERSSKQKRNKNDDRDAERLLEILRGHYLGGNKLPSVWVPDLQTRDDREIVVGRQDLSDKKSKIKTQVKTLLKRHGLEKPEGIGAGWTKGYRRWLEGLTEDSRTGLGVRTRLKSLLRQLEFVEEEMDRADEGMKELANRARWKPIVDALMKEKGVALKAAMKYATDIGDFGRFRRGRQVGAYFGLTPSSAESGETDDRKGHITHQGPASSRKVLCQAAWSRVRHDKQEREVYMRIVAKNPKKKKIALVASTRRLSVRLWHIGRQAQLKMQSIPAGSLE

SEQ ID NO: 191933 - protein, 410 aa, unidentified
METLVERCAGLDVHKNSVVACLRLPGHRGERQVVHRRFGTTTPQLLALRDWLEAEQVTLVGIESTAEYWKPVFYLLEEAMECWLLNANHLKQVPGRKTDMNDAAWIAQLLEHGLLRPSFVPPKPIRELRNLTRYRRAQIEERTREVQRLDKVLQDAGIKLSSVASDILGVSGRSMLRAMVAGSRDPEVLAELAQGALRKKLPALREALTGRFGSHHGLLVGEILAKLDYLEEAIERLSAEVERLMAPFETQIELLDTIPGVNRRTAEGLIAEIGVDMSRFGSPGRLASWAGMCPGQHESAGKSRSGKTRKGSKWLSAHLREAAKAAAQSKDTYLSAQYKRLRGRRGGPKATVAVQHSILIAAYHMLERGVPYQDLGADWFVTRSPEQRARRLLHELRHLGYEVTIEREVA

SEQ ID NO: 191934 - protein, 375 aa, unidentified
MSNHSEAFVAFDTSKLRNAVAIADGGRAGEIRFLGEIENSGAVTAKLVKKLAAKYQRLTFCYEAGPTGYGLYRQIKSLGHECIVVAPSLIPKKPGDRVKTNRRDALSLAKLLRAGELTAVWVPDRQHEAMRDLTRARDTAAMDLRAKRQQISAFLLRQGLHYSEDKKTWTKMHLNWLASQKFELAEHRIVFEEAMEAMRQAQGRVERLEQAIGAAVADWSLGEAVSALIAMRGMDLVSAATFMAEIGDLSRFQTPRELMAYLGLVPSENSTGDKIKRGPITKAGNRRVRRVLVECAWSYQHPPRVSKDKQKKVDAVPKAVREIAWKAQGRLNRRYRALVRRGKLKTVAVTAVAREFAGFIWAVAREVRTARAAAK

SEQ ID NO: 191935 - protein, 509 aa, unidentified
MVPDAGAYVIGEDLITTVSIPFRRVTNERLRAAMRPTSTCEDAMTKTGKKQQRGRQRSGKVERGMPLVNVNAAGIDVGAKQHYVAVPPGRAEPAVRCFGTFTEDLQALAKWLQQCGVSTIAMESTGVYWIPLYQILESYGFTVKLVNARHVKHVPGRKSDVQDCQWLQQLESFGLLTASFRPAAQICVLRNYMRQRQRLIDYGSRHVQQMQKALTEMNIKLQHVLSDLTGVTGLAIIRAILEGERDRLKLAALKQRQIKSDVVTIAKALEGDYRPEHLFVLRQALELYDYFQQKIAECDDEIMKAMQTLESEATASLPATAKPPRKARSKHHPFPFASQQKLQRIMGVDLTRIDGINETTAHLVLSELGLDICHKWPTEGQFTSWLGLCPNNEISGGKVLRRGKRKVVNRLSNALRMGAQSLLKSKSALGAYARRMRAKRGTPIAINATAHKLARLIYRTLKYGQEYIDIGQQQYEQRYKENALKALQRKARQLGYQLVVSVHPSTVVP

SEQ ID NO: 191936 - protein, 373 aa, unidentified
MPKYSTAFGMDVHLRSTTVCALDADTGEAVTRRFPGNPWGEIAGWMDGFPGPSLAAYESGYLGFAPQRELAGLGVECVVAAVSKIPRSAADSASKNDRNDAARMAKAILAHDISPVWVPSPEVEGIRDLAGAYDGATARLATAKQRLLAFLAKRGFVYGGTTPAGNPRKYWTYDFLRWLDKVRPEDDGGVRTLAALRNEVEAAAEARADLLSEYRAAVDASPIAAEVAALQSIKGCAFALAAAFSAEVGDFTRFRSGRQVTAYFGLAPSQRSSGDSVRLGGISGAGNALVRKLAVEGSWCYAAARHQPKLMPRDTGVPLEIRMHGRKGSERLLRRREELLARGMPAAKANAATAAELVRWLWALGMMCREGAE

SEQ ID NO: 191937 - protein, 349 aa, unidentified
MLHVGLDLSRKRVDVCLISGEGELVEHFRSPCDRDGLYGLSRRVAVYDEPVRGVIESMNGARFVHDELVRYGWEVLVADAQRVKGLAPLACKTDKVDARVLAELSFRDLVPAIWLPTPELRAERERSRWRLHLVKHRAILKNRVHSSLIAFGHQVPMADLFGVAGRKLLSELDFPEPWRGHVQASLELIDDLERRIGEIERWLRRSGADHRYIPLLMSAPGIGWVTGFTIASEIGDISRFSSPVKLTGYTGLCPHVRQSGEMDRRGPLSKHGPKYLRWGLMEAAIAASSHPLYKERYQRTKRRLGRQRGAKVAQIELARKLTEAIWYMLTRNQPFKPFAPAGAIFALTA

SEQ ID NO: 191938 - protein, 324 aa, unidentified
MVGVIDANGKIFRETKVASEPEALIGWVGSLGVSLARIGLEAGPLSQWLYAALRQAGLAVELLETRHVRNAFKIMPVKTDRKDARGIAELMRLGWFRPVHCKSMEAQETRAILTSRKLLQKMLHETEMSLRGVLRNFGLKVGKVAAGQFAFRIGELVEGHPTLAAIAASLLATRATLRREFNALEKRLRTVARTDPRARLLMSTPGVGMIVALTYVCAIDDPSRFKSSKTVGAHFGLTPTKYQSGETDCTGRISKIGDSSVRAVLYEAAHVILTKPVKGCTALKSWAMRIAKRAGMNKAKVALARKLAVIMHRMLADGTTFQPA

SEQ ID NO: 191939 - protein, 457 aa, unidentified
MQSFFLGADVSKGYADFVILNEHKQPVVQNFQLDDTHRGHQRLLDIVNGFLKQHPGTALFAAVESTGGYENNWYHCLQQLHHSLDVSVARLNPLGVTHNSKAKLQRNRTDKISACSVAEYLITHSEKVAYQRRDPWAGLKKQWGFIKMLTKQSTQLRNQLESLLYTANPELIRYCKDGVPTWVLKLLLKYPTAVQLARAKVSALAKIPYVSEKRARELIAGAKHSVASATDAVSKNLVQDTARQILSQKQVIDAQTTAMLARCSIPEVALLKTFPGISDLSAVGLMLEIQAVDRFGSVKKLASFFGLHPVFKTSGDGQSGFKMSKQGRKEPRRILFLTALTAIRCSPLIRDIFEEHLGRGKCKMDAIGVCMHKILRIIYGMLKHNTAFDPQVDLRNRERNVDSAAAPAKDKTRRFLDYDPQAPISSRQNKKRLERKQPQCAANTTDGVIAAVPEPVA

SEQ ID NO: 191940 - protein, 463 aa, unidentified
MKHNSTRERKEKSARLSVSLLERIQPDAAGIDCGQNSHFVAVPPERDPQPVHEFRTFTADLHRLADWLMQCGVKTVAMESTGVFWIPLYEILEQRGLQVVLVNARDVHNVPGRKSDVKDCEWLRELHSVGLLRASFRPAAAIVPLRSFMRQRETLVEEAATRIHRMQKALSEMNLKLHTVLTDLTGQTGLRIVRSILAGERNPERLAAHRDYHCHASQAEIVAALTGNYRTEHLFALRHNFATYEFLLKQIAECDGEIEALLTTLAAQQPPPSAPLPAARRRRASKHQPQFDIRGPLHRLTGGADLSQIDSIGPQTALQLIAEIGTDMRRWPSEYHFASWTSLAPNNRISGGRLLSSRTPPSANRVAAILRRCAMSVGKTSTALGAFYRRLAIRIGKAKAITATARKLALLVYRVLSGQLVYNDPGADAYHQLNRTRELKSLRKRARLLGFHLVDQTTGEVTT

SEQ ID NO: 191941 - protein, 422 aa, unidentified
MVLKGVPMALKIVYQICCGIDVHKTFVVACIASTNKQGVTTYKRHRFSTFTQGLKELLQWLLDNHCKDVCMESTGKYWIPIYNVLEKDCNIVLAHPKYVKAIRGKKTDKKDAKWIADLFKHDLVAGSFMPPADIRQLRDLMRYRFKLTCFKSSEKNRLQNCLTVSNIQLGNVVSDTFGKSAQAILDKILEDPADTSFDLEPLVFKSLKKKLPELRDAIDGYITPEQAGKLKVIKAHYENLEARKAELEELILALATPYQQELAILQTAPGISSDFTAIGIISEIGTNMEAFPSAKHLCSWAGLTPTNNESAGKKKSVRVSKAGCYIKPLLVQCANAVVKSNKHPEIRNRYLRIKKRRGHKKAIIAIARMLLTALYHILKNGENYNAELYRKSDLPPVDREITVEQALMIARNQGYKIKSATA

SEQ ID NO: 191942 - protein, 455 aa, unidentified
MARKARRASQSPKLPASLKHVHLNAAGIDVGSESHYVAVPVDRDERPVRTFSAFTPDLLRLADWLKECKVDTVAMESTGVYWIPLYEVLDKRGFKVFLVSPQHLKRVPGRKSDVLDCQWLQELHTFGLLSGAFRPEDIEVALRGYMRQRAMLVSYASQHIQHMHKALIQMNVLVQHAVDDITGVSGMRIIRAIIAGERDPLALAAMREAGCKKDTATVAKALEGNLRKEHLFALRQAVELFDSYQAKIRECDQQILAHLSTMEDLSTGGTGTPPEPEGKRPRKNELNFDGAAAAYRISGVDLTKITGIGPHTALKILSEIGTDVVHWPTAKHFASWLTLAPKNWISGGKRLSQRRAPANANRVAQALRVAAFSLHASHSYLGAFYRRIAARAGKTKAIQATAHKLANQVYYALKYGHDYVERGEKYYEENYRSKVVKSMSRRAKELGYELVRVGA

SEQ ID NO: 191943 - protein, 387 aa, unidentified
MTQVDDLSRSLAAFDQITSLVVVIEMSEASWLVAGLVPGVDRQPLKKLEPDPNALLRLLERWQAEAEKTGRTIGRVTLAYEAGRDGFWLARWLQARGIEVYVIHSTSVAVSREHRRAKTDRLDTAMLMRVFLGWLRGERGHCGMVAIPTLEAEDAKRPSRERESLVGEQTRIANRMKSALARLGIRGFKPKLRRAPQRLATLCTPEDLPIPPNTLDELRRDMARLAVVRGQIEEIEQARLERLEQAPDEGPNAMVRLLARIVGVGIETADMLVREVLSRNLRDRRAVARYAGLTGSPDESGSKRREKGLAKSGNARVRRGLIQLAWRFLMFQKGSALAQWYRARTEGAKGARKTTMIVALARKLLIELWRMVTTGSVPEGVVLRPAA

SEQ ID NO: 191944 - protein, 400 aa, unidentified
MISVGIDVSKGKSTVCVLKPYGEIVCRPFEMQHVEKDLEAFHNLLQKLDGEIRIVMEATGIYHLPILIFFHNKGYFVSVINPFAMKKYAKDNSIRGAKTDKLDSIMIANYGIEKWFKLQRYEGDEEIYAELKLLGRRYRYYMELHVKALQELTHILDYVMPGIKKLFSSWNEANGKDKLSDFVERFWHFDLITSMSLETFTDEYLVWAKEKKYHRSRSKAETVYELASSGIPTLPSSTPSTKMLVQEAISVLRTVDSSLSLIVTRMQVLAKSLPEYSTVREMGGVGDVLAVKLIAEIGDVRRLHSAKALIAWAGIDPPPYESGQFIGSKRKITKRGSSTLRKVGYEVMRVLKSHPAPKDDAVYNYILKKEGEGKSKKHAKIAGLNKFLRIYYARVIAVYQ

SEQ ID NO: 191945 - protein, 404 aa, unidentified
MSKGPDEFAAFIGLDWADRKHDICLRARELERLERTVLEHRPAAIEPWARALEKRFGGKPIAVAVELSRGPIVSALLEYDFFVLFPINPNMLAQYRRAFTPSHAKDDPTDAEIALELLLRHRDKLKPLRPESPAMRSLQRLVEARRSFVQDRVRITNRITHALKAYFPQVLRWFRDKETTVFADFVERWPTLEAVQRAREETVTKFFQAHNVRHKATLERRLEAIRSERPLTSDASVIESYCLIVQGLLPQLRAASAAIERFDREIARLCVELPDHRLFPALPGAGAVFSARLLAAFGEQRERFPDAAAVQRCVGVAPVTERSGNKSWVHWRFRASKFLRQTFVEWAGETIPRSFWARAFYESKRKAGTSQPLQSARSLSSGSAYSIAAGSTALHTTRPAISWR

SEQ ID NO: 191946 - protein, 315 aa, unidentified
MDSATVYVGIDVAKGQLVIAVHPTQTCWETTNDQKAYRSIVRRLLALRPTGIIVEATGRYHQPLTRALAEAGLPVVVVNPRQVRQFAGASGRLAKTDVIDAHVLARYGEAFRPAPREVRDVEAQQLHDLVARRRQLVRMRVAESNRLDGVSPIAAASGRRMLRVLDREVAALDAALDRCLSGDRWRDTAAIVGSVPGIGPQSTRSLLTGLPELGTLNSKEAAALVGVAPLNNDSGKHRGRRTTWGGRRELRSTLYMATLCAIRCNAPIRAFYQRLVAAGRPKRVALIASLRKLVVLLNALVRQRRTWTPEKPLAA

SEQ ID NO: 191947 - protein, 390 aa, unidentified
MTVTIVETRPQARAITGGVDTHADVHVAAALDPLGGLLGVQEFPATPAGYARLLEWLGGFGTVCLAGIEGTGSYGAGLARHLAAAGIRVVEVDRSDRQDRRRKGKSDPLDAISAARAAQPGRAAGEPKGRDGQVEAIRALMVAKRTARSERIQTINQARSLIVTGPEDLRARFARHAADDLAAELAVLRPRPGSMIRYHTLLSLRELGRRVAFLDGQLQRLDELIVPLVTARAPGLLALYGVGHDTAARLLVAAGDHPGRLRSEAAWAHLCATAPIPASSGKVTRHRLNPGGDRQASHALYPIVITRMSSHPPTRAYVDRRSKEGLSKKEIIRCLKRYVAREVYPTCAPAPADAQAPGAAWPHNRLPHSAGPRTIRRPPPATHPDLLGVT

SEQ ID NO: 191948 - protein, 346 aa, unidentified
MMIIGCDFHPSWQQVSWLDTETGETGEQKLVHASGDAKTFYAQLARPALIGMEATGNSQWFIEVVEDLGHEIWIGDAAQIRASYVRKQKTDKRDAAHILKLVVEGRFPRLWTADREQRDLRQLVLHRHKLVEIRSRVKNELQHLSLNRGMQRKAKLWSQAGQKLLRELPLKPWAACRREDLLGLLEMLNQQIGKLDEAVQQAAEEHPQAKLLMTQPGVGPNTALAFVLTLGDVSRFPRGKQVASYLGLIPREESSGGRQKLGAITKQGNQLVRSLLVEAAQIAVRFDPGLGKQYRHRCHQKPKGVAKVATARKLAVRLYWMLRTEKPYPEIVRIESSPRVLLVGAS

SEQ ID NO: 191949 - protein, 436 aa, unidentified
MTLINFVAANQKYYAFNLLSVFIMVFWSVQYLLQHLLVQTQVSHQLLQPLILILQLPQTPQFRHARPGKFFLPVNGMDYFLPLRLTVRNVLTRRITMNIVFLGIDLAKNVFQLCGLNQAGKPVYTKRTGRKELLQTLANIPACLIGIEASTGAFYWQREFEKLGHKVKVISPQYVRPFVRGQKNDGNDAQAIAVALMQPTMQFVPPKSPEQQDIQALHRARQRIVNHRTATVCQIRGLLLDQGIPIGSAVSRARRAIPLILEDAENGLSSRMRRTIAELYDLFNDLGRRIHFFDKEIETVFRQSEACPRIAKVKGIGPKTATAVVAAIGKGTEFKNGRHFAAWLGLVPRQHSSGDRQVLMNMTKKGDKHLRTLFIHGARAVVRVATNNNDGHMNQWVNQLKERRGFNKTTVAVANKNARIIWSMLRNDTGYQVVCN

SEQ ID NO: 191950 - protein, 420 aa, unidentified
MYYVGIDIAKRFHIASVIDEGNNIIKKNYRIESEISDFTLFGSMLSEIDQDKSNFIIGMEATGLLFENLYLSLKTQGFHVVLLNPYQTNRFREMDTMKYVKNDNIDSQMIAALLKSGRYSEAYVSEELYQSIKSLYRHKATLMDEMKKAKRQVSTTLAVVFPEFDRIIRDPFSVSGMALLEKYPTAKHYRHASGERILKVFRNIKGNNFNLDKANELLDLAITSIYQGNAKEERAYVILSNLRRIKFLKEEILQCEIQMSQLLDDSNKEIDKTLSKDDEVYISNLVDNLRTIDGVSDKTIFAILSECGDINRFKDAKAFIGYLGLYPTLYQSGNSTKYGKLAKRGARLAKMAIYQASIAAIRHNDELKKLYLDKKSSGRAAKEAVIVVARKLAKIIYAIYKYNTPYNPVRVFSSKTSLSH

SEQ ID NO: 191951 - protein, 437 aa, unidentified
MSDKKALELRVSVDVGYRRHSVAIGLPSGEVLEEFEIAHRPEGFEEFFSRIEKHHKARRCGVAVAMEGYNGCARPLDRMVRRHGYRLYNINNLKLARFKEIFPGAAKSDRIDARKGLELFQLSDHLPLAKEVLQEVKGTPQENEVLKRLTRRRRRLVDERIRVISNLQTDLQAVCPGLLEMTKTAGNQWFLNFLVGADTLPQLARLRPSTLLKIPAVGRKYARLIEDWQKRAHFSEEVEWVSEMIQEDAQRCLELDEKIKALKAKVKEVAKGSKIAKILLSIPGCGTICSAELAGEIGTIERFSKEGSLALYIGMSTLDNSSGKYQGSKQPKHVNTRAKAATMIALDRHRKYVPESQRYYEKKRSEGKKHNQAIRSLGRHLSRIIYKMLTEGREYEMRPEKRNTKGKVNPRSLIKTQIRKPKISAKGRNNKIYQQSA

SEQ ID NO: 191952 - protein, 428 aa, unidentified
MAEDTTLTSQTWLVAIDIGKSFHAVLVEGGDGTRQQFRMANHVEDYDRLVVFLRGLPGPARIALEPTGDFHRTLAHRLLREGFSVVSVSSVAGARYREALFNSWDKNDPKDAHVILQLLKHGLVQHYHDPLLAGDHDLQELAKTYHQIVLARKRLADSLLNHYLPLYFPEMGRYWESTRVEWFVAFLEQFPTPAAVQALPKEAFVRAAWSVVGRKVNKQAKLEELYELAQRSIALPVAVDSVAIETFRLQLAQLRRLAELRQTLEARAHALLKDRADFQRLCSLPGVAAILALVILAEGGDLRRFPHHRQFLKYCGLDLAKCQSGQFRGRARLSKRGNARLRMAFWMAAQRAVRMNENSFRDKYERYTRHDSGNPDVRRKALTAVAAKMARVAYAVVKHDQPYHGYHEHALPSGSIPLKRAVGARATP

SEQ ID NO: 191953 - protein, 428 aa, unidentified
MIPAVLERCAGIDVHKKFVMVCALLGPAQANPEAKIRRFGTYNAELGQLRDWLQELNCMHVVMESTGPYWKPVFNVLEEAGVQTTLANPQQVKNLRGHKTDMKDCQWLAHLLRHGMIRPSYIPPRPIRELRDLTRRRKQLVRNGAMERNRVQKLLEEANVKLGNVLSDVFGASGQEMLFALVQGKATAEQIAQLAKQRARKKIPQIQAALEGHRMNQTQRELIHQCMAHMAFLEEQIEEVDRQIQDKIRSFGLSQSYVLLQTVPGMKKEAAATVLAEVGANVDAFSTPAKLSSWAGVCPGNNESAGKRKSTRTTKGNPYLRDMLLECAWASSHRKNSQMQHRYQRLQPRKGYKRAIVAVAHALIQAVYYVLSTRQPFVDTAEPPRKPATVRRLIRHHTRRLRKLSCWLERGAHATQTSTLHQQQITSG

SEQ ID NO: 191954 - protein, 347 aa, unidentified
MLHAGLDLSRKKLDVCLLSDQGEHLDQLVVPPDVDSLRRLARRVGEVHRQPVCAVIESMTGARIVHDTLEAQGWSVEIADAQKVKGLAPLACKTDKIDSKVLAVLSHRDLVPAIWLPDPRVRDERELARFRLHLVKHKSALKCRIHSTLINFGRACPVTDLFGAEGRRLLERLEVPEPWRSNVTASVCLIDDLEEQIAEINARLRRGHAEHPYIPLLMSVPGIRWVLAFTIAAEIGEIERFSSPEKLTGYTGLCPRVNQSGEKDRRGPLTKHGPTYLRWALLEATMHALRHPAYAERYQRTKRRLGKQRGAKVAQVDIARRLAHAIWHMLSRKEKFAPRGATFRLAA

SEQ ID NO: 191955 - protein, 352 aa, unidentified
MNVIHYIGFDVHKKSVSYCVKDAAGKILEEGKLRATRQALRQWAGDRTEPWHGAMEATLFSGWIYDTLKPFATELQMGHPAMMKAIGASKKKNDKIDARQTADLVRCNLLPACYVAPTEIRELRRMLRYRNVVVAQAVRMKNKMSGLLMEVGAEYNKQRLHGKKYFTELLGSLEEVPESVKDLLRLSRGALELFETTQKKILDRLQKEPRLVRRLEGLQSIRGVGVVTALSWTLEICDPHRFPSIADAVSYCGLTSALVSSADKQQRGPLSQQRNAHLQTVLIEAAKLAPRWNSQLAAVHEREMNRGNRNRATLAVARKLVAYLLAVDKSGKPFQVQTPPAPATETEVPAVA

SEQ ID NO: 191956 - protein, 399 aa, unidentified
MLAVGIDISKSKSVAAILNQDGSMHTSPFEFHHTQPELDAFIKYILNSNQSATILMENTGHYHYPVLKAFREAGLPVCMVNAYQIKKFGDMDLRKAKTDKKDAVRIARYALEKSYSLVPYTSMEQKYEDLKFLARQYNQRMLTLKTNKVFLLNLLDETMPGITNILPLTTRTPETSLSVLFINRFKSYDRIKKMGKSRFLDAFEKIARKSRNRQTKTYGLAIYEAALRNITTRGENEYTLAAQDQCLELVCESQKAADSIILKMQTLAETLPEYAVLRSMAGVGDRLGPLILAEIGDIRRFHSGKALNAYAGNDAPPYQSGTFESHNRHISKRGNAALRKYCFEVMQALKLTRPQDDPVYLFLLKKEQEGNPYNVAKMAGVDKFLRIYYARAMETLKQQ

SEQ ID NO: 191957 - protein, 327 aa, unidentified
MMFIGIDISKEKIDLSWLRDQLTNKIKTKVFKNKHQDFEKIEKWLLNTTKSVASELVITLEPTGVYHEALMYFLHEQGFNIILANTGKAKKYADALNIIHKTDKSDATMLAHYGCAKHAVVDYWQPEALEVRELKALIRRLDALESNRQREANRLEASEFSNVSARVRQSIKVTIAFLDDEIKQLKSDIDDHIDNEPGLKRNRKLLESIPGIGHVLSRELTYLFAAKKFNKAKEAAAYCGLIPRHNESGKLKGRTSISKLGPARIRCKLYMAAIVAGQWNKTIKRHKLTLINNGKTPMQTVCANMRKLIHICFGVIKNQEEFKLQES

SEQ ID NO: 191958 - protein, 487 aa, unidentified
MRPRTTNSSTQTFDVYRFSFESAGALAFVNEYSGFAVPPAHYIAFAERKLARPGSSIYHCRRCSVKPLSERPFTAHVGIDWADAKHDVCLQAADSEQREFDRFAHQVGSIDQWAKSLHQRFGGPIAVALELAKGPIVYALQKYDFFVLFPINPATLAKYREAFKPSGAKDDPTDAELALDLLLRHPERFAPLKPQSVAMRTLLSLIEQRRELVDDKTRVTNRLGNALKQYYPQALDWFEQRDTILFCDFLSRWPTLSAVKRARKAGLQAFFYAHNGRRPKLIDDRIDSIRAATPLTDDMGVIAPYRLQVQVLVEQLRVTLQAIDRFDRQIAVVAATLPDYALFSPLPGAGPHLAPSLLAAFGEQRERFMSADELQKYSGIAPVTERSGKKRWVHWRWQCPTFVRQTFVEWAGQTINKSFWAGVYYRQQRDKGSSHQAAVRALAFKWIRILYRCWQAGTPYDESTYLNALRQRGSPLLKQLHPTAQNA

SEQ ID NO: 191959 - protein, 361 aa, unidentified
MSHSTLCIGADVHLDEIVLCVVDKADGHAVTDGFRVANNRPGAQAAATAIAETATRLGCTRIEIGWEATGMLWIPFHRYLSCCSQLQSFALELVCFNPQLVTKFKDGLVLRRPKNDKLSALAIAARLRFGELPLSYVPGDFWQGLRRLTRYRFHLSRNLSREKMRFQSCAFLKCSDWKRIRSFSDVFGATSIALLTEFTVAEIKEMTHDQLVDLIIRRGRGHSVDPTGTARKVREALRSSYPIDPQTDEMVTATLATAWEHIRFIKRQMKRLDKHIARVIDPVPNSIITVKGLGAVITAGILAEIVDITRFAEHKHLAQCAGLTWEKRSSGNSVSQNTRLTKAGSKLCWLLNSSTRIPASE

SEQ ID NO: 191960 - protein, 414 aa, unidentified
MEIVHTHCAGLDVHKKTVVAAIIIPDPKGGLHKETRTFGTMTPDLLALSDWLMAQGVSHAAMESTGEYWKPVFNILENNFEVLLVNAQHIKAVPGRKTDIKDAEWIAELLRHGLLKASFVPPLGQRELRELTRYRSTFVKERASLVNRLQKVLESANIKLASVATDVTGVSGRAILQALLEGKSSPEEMAELAKGRMREKRELLAKALQGQVKAHHRFVLTELLCQIDGLDETIARFDEQIEAYCRPFEEVVELLDTIPGVARQTAEMIVAEIGTDMSRFPSADHLASWAGVAPGNNESAGKRRSGKTTPGNHALGVALNHAANAASHTKNTYLSAQYHRLASRRGKKKAIVALEHSILIIAYHIIQRKEPYHELGGDYFDQRRPEATAKRLVKRLERLGFQVSLQQSLAPVAA

SEQ ID NO: 191961 - protein, 363 aa, unidentified
MLFVGIDQHKRHLTVCIRDEQGNVALRRQVSTKWENVDAFLASLQERATVRGGYVAVVEVCGFNGWLVKRLEAWGCKRVYVISAPDRVRQKTDRRDAAKLSELLWINRDRIADGQKLVHVSVVYQPTEEEQYDRQLTHLRLRLGQALTRVKNSIKGILRRHNLEQECPTKGGFTQAALRWLRIVQLPQLDRQELDMRLTQYRVYAMQLADVALMIEKRAEQNAEVPRVRTMPRVGAYTALALVAHIGSIERFSHARSLSNYFGIAPGCRNSGDTDRPGAITKAGHPFIRFLLAQTVLHALRGDPGLRRWYQRVKRRRGSKVARVAVMRRLCESLWHMLSKKEDYRFVDGTHADDGKKTCRPAA

SEQ ID NO: 191962 - protein, 427 aa, unidentified
MPYRIAGIDVHKKMLAVVVADVEVEGNYQFERRRFGSNPEQLRLLAEWLLEQAVEEVVMESTAQYWKPVWGALERYWKPICQKREGAGPMSGALHLAQAQSNRGRRGRKRDFPDAERLVKRLVAQELTLSFVPDAEQRLWRTVMRGKYQLTRNHARVQNRLEALLEEAHIKLSSLVSDLLGASARRMLKALAEGETNPVALAALADQRLRATPAQLCDALGACTELNPVYRRLLKMALEELQFIEQQIGKLDQEMATLLSRHQDAVERLAEVPGLGADSAQQIIAEVGATAATFPSAKNLSSWVGACPGDEESAEVNKSHRSPKGNRHMRRILNQAANAAVKHKGSIFDIVYRRQVPRMGHKQSIGAIGHRLCRLIWLILHQGVRYEERGPAVSRKSRQRRTAKMIRELRLLGYRIEPVSAQFTNPA

SEQ ID NO: 191963 - protein, 331 aa, unidentified
MMSLPNRTNETPLTVGVDVAKATLEVGFSDRDATLAPTNDEAGHAVLLAHLAALRAKGSGIGLIVLEATGGLELDVATALQLAGYAVVIINPRQARDFARSMGYLAKTDRIDARVLAHMGRTLLQRDDLRKLIKPLPDEGQRMLQALVTRRRQLLAMRIAEQQRASGPDRRMRRSLNIILKALDRELARLDKDMQAFIGEHHAELATLLNEVKGVGKATISTLLAEVPELGELNGREVSALVGVAPINRDSGTMRGKRTIFGGRPNVRKVLFMAALVASRYNPVIKVFYQRLLAAGKPKKLALTACARKLLTILNAMARTRKPFNAALHLD

SEQ ID NO: 191964 - protein, 384 aa, unidentified
MNKLQRIRPNCAGVDVGSSRIFIGIENKPVRSFDTYTNSLRQAVIYLTESGITELAMEATGIYWITFFDMLVAAGIEVHVVNGRHVKHVPGRKSDVADCMWIQQLHSYGLLTNSFVPDDNIRQLRTYMRIRKDSIEMQITHVHHMQKALTQMNIRLTEAISEIHGVSGLRMIEAILAGERDSEKLVDLCADQIVKRKRGVVLEALNGFYKEEHLFELGMAYTGYNFYEAQITHCDKEINHWLEKHMPEEKLVELKTKTKKIRHHAPRIKELHSKMVQLYKGKDVTALPGITQYTWLQLTAETGMDLSAWPTAKQFTAWLGLAPSKYSSGKVSKNKKRKSSTKAGQIFKEASIAVLNSKNHALGSFGRKIRSRRGCTDPLNGWTN

SEQ ID NO: 191965 - protein, 361 aa, unidentified
MRIIGCDLHARQQALAMLDTTTGEMVAMILKYEGNNVREFYSKLPRPVRVGIEATGSMQWFVNLMEELGIECQVGHPANIRAAEPRKQKHDRRDADLILKLLVENRFPKIWLPSKEQQDLRALLRHRHQWVRIRTRIQNALQAIALANGLRRGPGLWSQDGQRTIASLPLAPHAAYRRSELQAMYAKFMKEIEKLNQRVEEQACERPGARLLMTHPGVGPITALATEVFLGDAARFADSKALASYVGIIPSEYSSGERQRFGGLSKQGNPLLRFLWGEAAMHAVRRDPELQRFYRRKLVQKGLGKTRVAVARKLGIRLWIMLRDEIDYNEFCRRGQKQQKSSEACAGMPDTGHGAKQSPAD

SEQ ID NO: 191966 - protein, 368 aa, unidentified
MLLPRQRSKLAKGAKDKEHAMPQNPSSSMAVIGIDIGKNSFHIVGLDARGAIILRQKWSRGQVEARFANMPPCLIGMEACVGAHHLSRKLKAFGHDARLMPAKYVRPYSKGQKNDFRDAEAIAEAVQRPTMKFVATKTADQLDLQALHRVRERLVSQRTGIINQIRAFLLERGVAVRQGLRFLRAELPRILAAPPDVLSPRMVRVIEGLAEDWRRLDERVDHLSGEITALARQDVGCERLMSVPGIGPIISSAMVAAIGTGDAFSKGRDFAAWLGLVPKQISTGDRTILGKISKRGNRYLRVLFVQAAWVVLIKPKSWERHGLKPWLEAAKKRLHRNVLAIALANKLARIAWSVLANGRVFEARLQAA

SEQ ID NO: 191967 - protein, 329 aa, unidentified
MDHIAIDLGSINSQVCIRQSDGMIVQEEKVRTDCLGDLLGQLKPGRVIVETCAESLHVVKQAKAVGHDVRLVPSTLAPELGVGRRGIKTDIRDARHLSEASCKIDLGSVHIPKDSSMLLKQQCGARDSRVKARTMLINTVRGWLRQSVLRPKSGVTSTLPARVMALMESEQLDTPLHIASLLTMITHLSEQIKAADVTLLAWCKQSELATRLMTVPGVGPITTVRFIASIDTVERFPNAHRVQSYLGLTPGERSSGTKQHRTGITKAGAAATRRVLVQAAWVIKRTQKGSPLVDWNAGVEYRRGKQISAVAMARKLAGILFVDDTRHPL

SEQ ID NO: 191968 - protein, 337 aa, unidentified
MDTIGLDLHKRETQLCVLTEAGEIVERRIVTSRERFTAVLGGRAPARILVEASTESEWVAQHLESLGHEVIVADPTFAPMYATRRRGVKTDRRDARTLAEACRLGAYRAVHRASAAQRHVRAQLAVRDALIRTRTRYVSVVKALARRDGLRLPSGEPVHTEAKLAALPLSAALAAELAPLRVVLEPLNAEIVAADARLAAVAADDPLVARLQTAPGIGPVTAVAFIATLDDVTRFASAHHVEAYLGLTPREYSSGEHQHRGRISKTGNPRLRVLLVEAGWRLLRSNAAAAAPLRAWAERIAARRGRTIAAVALARRLAGILFAMWRDGVDYRVRAAA

SEQ ID NO: 191969 - protein, 415 aa, unidentified
MEWTERNTFVGFDWAKDHHDVVVVNREGRIVEEFRFDDSAEGWQLWVRKLSPYPHAAVVIETSSGATVERLLEGGYAVYPVNPKAAKRYRERKAPSGTKSDRFDAWSLADALRLDGHTWRALKPDDPLTVELRLLCRDEIALIEQRTALVCQLRAALGEYYPLVLEAFDDWTVPSSWSFVEAFPTPEALVKAGKRKWEKFLHVHKLYRRETYEKRLGLFAQAQTFCGSPAMTKAKSMLAVALAGQLRVLQSHLAKFRVRIQELFEQHPDHELFESLPGAGEKIAPRLLAELGDDRERFDSPEAIQCHGGTAPVSYQSGQIKKARFRRACHKVLRHTVHLWTNLSRAKCPWAEAYYRKKREQGQSHACALRCLGQRWFKILWKMWQTRKPYDAELHQRNQVKHGSWVIALMPSPAT

SEQ ID NO: 191970 - protein, 307 aa, unidentified
MSGLGARQDALSLPDGEYQRFENTDCGLQQCLAWVQGKRHCLCVVEASGGYETALAGVLAAAGVPIAVVNPKHVRDFARGMGILAKSDRIDARVLALFAQKRRPPIRALPGEAQRRFIDLVDRRRQLVSMRAQEQTRLTQAKGRPRKSIQAHIKWLNAAIDDVDRNLNDTLRGCELWLVDSQLLDSVPGVGKVTICTLLARLPELGHLDRAAIAALVGVAPFVRESGQWRGRRFIWGGRAEVRSVLYMAVISAIRCNPVIKAFYQKLLAAGKAPKVALTACMRKLLTILNCMMRTRTPWNPPLAQNT

SEQ ID NO: 191971 - protein, 387 aa, unidentified
MPQSNDLSRSLAALDQDSTLIVVIEMSQSSWLVAGIIPGINRQPLKKLAAAETALLGLLHRWRDEATKAGRPVSRIVVAFEAGRDGFWLARWLRTRGIEAHVIHATSVAVSREHRRAKTDRLDTELLKRAFLGWLRGERGHCSMAAIPTLEEEDAKRPNREREGLVGERTRIVNRIKSTLARLGIRGFKPTLRRAPERLAALLTPEGTPLPPNTLAELRRDMARLRFVIGQIREIEAARLERLEQHPQQGAHAMVRRLAQVIGVGVETADMLVHEILSRNLRDRRAVARYAGLTGAPDESGARRREKGLARAGNSRVRRGMIQLAWRFLMFQKDSALAQWYRARTADARGATRKTMIVALARKLLVALWQLVTTGEVPQGVVLRAAA

SEQ ID NO: 191972 - protein, 411 aa, unidentified
MRRVIGMDIHRTFAEVVFWEDGKLRPAGRVSMTRSGLEGFGRSLGKEDEVVIEATGNAMAVVRVLSPYVARVIVANPLQVKAIAHAHVKTDKIDAGVLASLRAANFLPEVWLPDSDTERRRRLVARRNQVVRHRTRIKNEVHAILHAHLIPPCPHADLFGRLGQIWLAQQLIPDDEGAAIERHLRELDRLSEDLGVLDTQIAQAGNDDPAVKRLLTITGVNLIVAAGLVAAIGDVRRFTSPQQLVSYVGLNPRVRQSGLGVAQHGRISKRGRSHARAMLVEAAWAAAKAPGPLRAFFLRIRARRGHQIAAVAVARKLAVLCWHLLTKSADYQWARPALVASKLRAMELQAGQPARKGNKRGPAYAYNVKALRDREIELARHAEQAYERFVSQWQRRGTAKQRTGAANEERR

SEQ ID NO: 191973 - protein, 334 aa, unidentified
MALKNRIIVGIDVSKDTLAASIFDGSTHEYVYLEYTKKAINKEFIKRFENLKTSVVFVMEATGIYHSKLAYWLHGAGFDVAIINPLIIKRYAQMKLSRVKTDKSDCAIIAEYGYKEELHLFKPKSKETIELGNLLKAVEDFLHQQSITRSQKHALMHQADYSKEIVAVYEKHIAYLTKEIKKLKKKIELLLKQYFTNEYKLLNTIKGVGIMSSAMIISVFDSFKNFDNAKQASSFAGIAPAPYESGTSVKKRGSISKQGSTLARKLLYMATLSGMQFNELLKAQYIRLLQNGKSKKQAIVAVAHKLLRIAFGVLKHNRPFSANYIEERKMLTIC

SEQ ID NO: 191974 - protein, 405 aa, unidentified
MNAVGIDASKGKSMVTILRPFGEIVSSPHEVKHTSDQIDDLIREIRSLEGESRIVMEYTGRYHEPMARWLSDAGLFVSLVNPKLIKDFDNDSLRKVKTDKADSVKIARYTLDKWHKLKQYGAMDELRNQLKIMNRQFGYYTKLKTAMKNNLISLLDQTFPGANTFFDSPARSDGSQKWVDFVDTYWHVDRIRSMSLAAFIEHYQKWCKRKGYNFQPDKPAEIYESVRNIIPMLPKDEVTKFIVRQAVNQVNTASAAVEELRTRMNDIASQLPEYPVVLAMKGVGTSLGPQLMAEIGDVTRFTHKGALTAFAGVDPGKNDSGSYSQKSVRTSKRGSAPLRKALFQVMDSLIKTMPQDDPVYEFMNKKRSQGKPYYVYMTAGANKFLRVYYGRIKEYLSEHPEIAEN

SEQ ID NO: 191975 - protein, 339 aa, unidentified
MSQTPNTAIGIDIGKNSFHVVGHDARGAIVLRQKWSRGQVEARLANIPPCLIGMEACVGAHHLSRKLASLGHDARLMPAKYVRPYSKGQKNDFNDAEAIAEAVQRPTMKFVATKSAEQLDLQALHRVRERLVSQRTGIINQIRAFMLERGIAVRQGIGFLRTELPTILATRTDALSPRMLRVIEELAGDWRRLDQRIDGLSGEIEALARQDQACSRLMTVPGIGPIISSAMVAAIGTGDVFSKGRDFGAWLGLVPKQISTGDRTILGKISRRGNRYLRVLFVQAAWVVLVRIKNWERYGLKSWIEAAKRRLHHNVLAIALANKLARIAWRCWLKDVPSS

SEQ ID NO: 191976 - protein, 352 aa, unidentified
MNLLKYIGMDVHKATTVIAVVSDVGKVVADAIIETKAQAILDFIKGQRGTLHVAFEEGTQAAWLFDLMQSHVASVVVCDPRKIPSQGRKADKPDAKRLAELLRSDSLSPVYHGERSTRALKELAQSYVAVVGDCTRVKNRLKAMFRGRGIDCDGSAVYSADEREKWLGKLDTAAVRARADRLCKELDCLVPLYEEAENELVAEGRKHAATKIFRSIPGIGPVRAAVILGVAGTPYRFRTKRQFWAYCGLGIVTKTSSEYEVVNGQVRRSKKRPLVRGLNRNYNRALKAVFKGAAKTAASGPWKSQFEAMVAEGTSESLVRLTLARKIASITLALWKKGERYDPKKVKVMHAA

SEQ ID NO: 191977 - protein, 339 aa, unidentified
MNITTLGIDLAKNIFQLHGVNSAGEIVLKKTLSRIKLLEFIAQLPVCRIVMEACAGAHYWARKFKEYGHEVKLISPQFVKPFVKGNKNDKNDAEAIVEAASRPNMRYVSAKTLEQQDMQSLLRMRDACVEMRTKMTNQLRGLLAEYGVVLARGICQLRKRLPELYDRKINNGLSDSFKELLETQYNLLLVIEEQIAIYELKMKAIVKEQEVCQRVQAIEGIGLVTAIALAATLGNPRDFKNGRHFAAFVGLVPRQQSSGGRERLLGISKRGDVYLRKLLVHGARSVLLRASKKTDARSRWLMSLKQRVGHNRACVALANKNARIVLAMLLKDEAYRPAT

SEQ ID NO: 191978 - protein, 440 aa, unidentified
MKQFLECCAGIDIGKREMTVTILTGSVEVEPIPQMGTFGTTVQELNRCLEWLLGNHCCTVVVESTGTYWVPVWNVLHERVAVIVANPEHVKARRGEKTDPEDSRRLAERLRVGDVRGSFVPSAQVVELRDLTRRRKRLLSAANSERNRIQKLLEQANVKIGNVLTDVFGVSGQRILHALLQHPELPPAALADLAKGRLRHKRQALIETLQGHRLNDHVRWMIQHSLDHLVFLENQLTELSQRIVLKLQPFEREYELLQTIPGIAAETAAVILAETGGNMAQFPSPKHLTSWAGVCPGNNRSAGKQKSASIKRANKWLLAALVQSAWATVRQRGSIFQKRFYRQMQHRGRKRALIAAARSLLEVVWQVLQRMTPYNEPANEVLQQQERGKKIRHHLQRLRQLGIDISDLQLPPLTPLIPSDGTRLLTGTPHPLGVLGIHAR

SEQ ID NO: 191979 - protein, 392 aa, unidentified
MRKANDMSRCLAAFNQDSTLVAVIELGLKSWLVAGIVPGIERHPLKKLKPNEGALLALLYRWCDEARTAGHPIKRVCVAFEAGRDGFWLARWLRSRKIEAYVIHPTSVPVSREHRRAKTDRLDTGRLMRAFIGWLRGETDHCSMCAIPTFEEEDDKRPNREHQHLVGERTRIINRLKSCMARLGIRDFNPASRKAPERIAKLRTPEGVPIPPNTLDELEHDMAHLRFIDDQIDEVEKARLARLRKEPNKKSHAMLLLLARVRGLGIETADMLTHEVFLRDLRDRRAVPRYAGLTGAPDESGERRQEKGLARTGNARARRGMIELAWRFLVYQKESALAKWYWTKTADRRKDIRKIMIVALARKLLIALWQMVTTGEIPEGVELHPQDYRLRA

SEQ ID NO: 191980 - protein, 392 aa, unidentified
MYIVGIDIGKNHHEASIVSPEGKQIGRSLRFATTHKGADSLMRFIFKNIGNSPCVFGMEATGHYWYPIYSFLKAKGYTIYVINPIQSDSLRKMYIRQTKNDSIDSFLIAEVIRFGQFGTTSMADENILAMRQLCRYRDSVISSRTEIKLRIGTIMEQIFPEYEKQFSSLWVSTSMGILEKYLTPENIENAPIDELFEIIKDKSHNRLTKAKAISIKEAAADTFGIKIAQDAFSFQLKQLIDRMNFLDKQIEALDCQILEYYEKFDCYLHTIPGIGMIAAATILAEIGDINRFKSSSALVAFAGIDPTVRQSGEFNSTHNHMSKRGSPYLRHAIFLAATTCSFHNSPLNAYYKKKRDQGKHHLTATGAVARKLTTVIYAVLRDSKPYEPKKFC

SEQ ID NO: 191981 - protein, 388 aa, unidentified
MYYVGIDIAKYKHDCYICTSEGVTVLESFSFDNSNTGFKELQSALDHLDHSQQIKIGLEATGIYGKNLKLFLSSIGYDFHEFNPLLVKRFHDSLSNRKTKTDKIDARIIALYLSTGASRTYLYSSYHTQALKQLSRTRNKLIRSRSDQYVIITNVLDVEFPEFKAFFHNKLSDTALFLLNKYKTVDRMKRLTHQDCVLLHNKSRRIPTSSFEELRDLAKHTIGHHFNYNDLILSSALQIVNTLERQIESIEKEILAIMEELRSPIDTIPGISTLSAATILGEFGDFSKFSNPKQLCAFCGVEPAIYQSGTSSHKGKMVKHGSSQLRYVLFNAVPYLVIHNITFREFFYKKLHEGKNYRVAQSHVVKKLLRVIYHLELTGESFDPTFLY

SEQ ID NO: 191982 - protein, 340 aa, unidentified
MRIIGCDLHASQQTIAMLDRETGEVLEKTLTHEGDAVREFCAGLPAPVVVGIEATGSMGWFVRLMDELGVTCRVGHPAAIRKAETRRQKHDRRDAALLLQLLTEDRFPAIWMPSTELRDLRALLLHRHQWVRLRTRVQNALHAMALGHGMRRGHTLWSRDGQAALTALPLPPHASYRRDELLALYRHLEGQIETLDDRVQHQANERPRARLLMTHPGVGPVTALATDVFLGDPARFADGKALASYVGMIPSEYSSGGRQRLGGLSKQGNPLLRFLWCEAAMHAVRRDPALTRFYRRKLVQKGLGKARVASARKLGIRLWIMLRDQIDYAEFCRRGPERQS

SEQ ID NO: 191983 - protein, 453 aa, unidentified
MAQRKRSINLKTVKSRVALTITHPNTAGIDIGSASHFVAVPPDRDDEPVREFPSFTVDLNALADWLDACRVDTVAMESTGVYWIPLFELLESRGFKVLLVNARHVKNVSGRKSDVLDCQWLQQLMTYGLLSGAFRPAEQVCVLRALWRQRGALLKSQSRDVQHMQKALTQMNVQLANVISDVVGETGLKILRAIVAGERDGRVLGAMKNARIHASVDEIAKSLEGNWRAEHLFALKQALDAFDFIGTQLAECDRAIEAQLRLLQTHDGEPAKGKKRGRARNAPKFDLRTQLFKMCGVDLTRIDGIDVTTALAVISETGTDMSRFPAVGNFTSWMGLCPGTKITGGKVMSGKTKRCANRAAQALRMAAASLRTSQSALGAYFRRMCARMDKPKAIAAAAHKLARLIYTMLTKGEEYTDKGQAYYEERYRDRVLHHLAKRAEKMGMQLIAAEQPT

SEQ ID NO: 191984 - protein, 403 aa, unidentified
MTVRPRVWVGIDVGKTSHYACAVDESGKVAWSQKVANEQRAIEQVIDRANNTAERVRWAIDLTSPMALMLITVLLGAEQSVAYVPGRVVNTMTGALRGEGKTDAKDARVIAESARMRSDLSEVSMPDELVVELTQLTGYRADLMADWVRGINRLRALLGSIFPALEAAFDYSTRTPLILVAGLCTPAEIRTAGVDGVTAHLVENQAWPAGITKTAATAVAVASQQQLALPGEAATAALVKRLARKLLDLDREIKDIDKTITERFRDHPYARIIESLPGFGPNLGAEFLVATGGDLASFATPGRLASYAGLVPVPRDSGRVSGNLHRPKRYNRRLRRVFYIAALSSIRANGPSRRFYDRKRGERLIHSQALLALARRLVDVLWALLRDGREFSPHRPTTVAPTA

SEQ ID NO: 191985 - protein, 397 aa, unidentified
MNRLLYIGMDVHKESFTLSTYHVTLEESELTQNFIGAPLKITDATASGVEKYVKNLKTMLNIKATDNVWIQCGYEAGCLGFDLYFQLKAKGIECVILAPSTIQKSANAKKKKNDPLDSKAIAMALANKTYKSVHVPDKDDLNVREYLRMRNAHRDAVKKVKQQILAFLLRQGIKYSNTNWTKAHITWLHGLKFDHALLKETLDEYITSLENYVAKLERLDKRIEEFAQGDKYQEKAAELGCLLGIKTQAAMTMMSEISDFSRFRTASEFASFLGLVPGENSSGEKTQRTSITKSGNSQCRKTLIEAAAGICRGKVGHKSKELLRRQALCNNPIAISYADRANERLRSKFYRLNLRNGKPANVAKTAVARELACFIWGIMTDTYNGKVPRNDEYALGK

SEQ ID NO: 191986 - protein, 325 aa, unidentified
MSTEVARPVEWVGIDVCKAKLDAYVLSKQAYRIFENTEAGIVKLIAWLRTYENVQVVCEATGGYEAAMARQLHAASLPVSVVNPRPVRDLARALSKLAKTDPIDAYVIAKYGEVTEPAPTVFVSELEDELKQWVTRRQQLVEILSAEKNRRTLLLRGVARDEVNEHIEWLEEKIKQLDGKIDTLSESTAEWRSRKAILRSPKGIGPVISASFLVLLPELGKLNRGQIAALAGLAPFNRDSGKFRGQRKIWGGRGSVRALLYMATLSALRSNPPIRLFYQHLLEKGKVKKVAIIACMRKLLICLNSMVKNNEMWDDYKVTALLQKP

SEQ ID NO: 191987 - protein, 362 aa, unidentified
MQSTTVIAFDQHAATTVAAVLLAGHRTPALHSLTSDSPTILRFVQRVQRHHGRVACCYEAGPCGFELQRALTARDIPCDLIAPALIPRRAGDRIKTDRRDAGQLAILYRADALTAIHIPTEQEEAARDLLRCREDIKGDLLRARHRLSKFLLRHGRRFTGTKKAWSKGHDAWLRAQTWPIAALGQTHHAYVRAVDEARARLRSVEDDLRTLLALEPLRPRVERLRCFRGIDDLTALTIAAELGDPRRFASAPRTMAFVGLVPSEHSSGTKQARGAITKTGNAHLRRVLVEAAWHYRHRPFVGAALRRRQAGAPATTVTQAWTAQQRLYRRYHRLRSRGKPSQHVITAVARELTGFVWAALVQ

SEQ ID NO: 191988 - protein, 421 aa, unidentified
MTHVSHEAFAAFVGIDWADAKHDVCLQPAGSATCECFQLEHTPEAIDAWVTTLRTRFNGQPVAICLELNKGPIVSALRKYDFLVLFPLNPLTLARYREAFTPSRAKDDPTDAALQLELLLTHRDKLQPLQPQSPTMRALAQLVEHRRRVVGDKVRITNRLTSTLKNYFPHVLHWFQEKDTAIFCDFLSRWPTLKAVQLARRSTLDTFFRAHHVRYADVIAQRIQAIKAATPLTTDEGVIAPNALLVQALIAQLRVTLQAIADFDTAIAQCAQNHPDFSLFQALPGAGPVFASRLLVAFGEQRERYASAAELQKYAGIAPVTERSGKKSWVHWRLQCPKFLRQTFVEWAAESIRHSFWAQLYYQQQRDKGKAHQAAVRALAFKWIRILYRCWQERTPYDESTYLQTLMRRNSSLIPNRVKAS

SEQ ID NO: 191989 - protein, 347 aa, unidentified
MNFYTQQHKHYCGIDLHARAMYVCILDQSGTILVHKNLPTTPEAFLRIIAPYREDLVVGVECIFTWYWLADLCSKEGIAFVLGHALYMKAIHGGKAKNDKIDAHKIAVLLRGGMLPQAYVYPAAMRATRDLLRRRCHLVRKRAELLAHIHNTNSQYNLPEIGKKLAYKANREGVEDHFPDPSVRKTIEVDVSLIDHYDQLLGEVELYITRSAKAHDGQTFSRLQSVPGIGQILALVILYEIQDIARFPRVQDFVSYCRLVKCAKESGGKRLGTSGKKIGNVHLRWAFAEAAVLFLRHNQPGKAYFTKLEHKHGKAKALTVLAHKLGRAVYYMLTREQAFDLQRFVTA

SEQ ID NO: 191990 - protein, 370 aa, unidentified
MEIIIYVGMDVHKETYSVCCYDPRTDKYMYEHKMKATTINVLKYLKSVKEQIGEDTVFVCGYEAGPTGFGLCRELLRADISCVIMAPTSLKRSSGKKVKNDRVDAKHLAKALFTKDYSPVHLSSKKEEAIKEFCRMRRSLMNELKTAKQVLLLFLLRQGKIFEKTYWTKEHRLWLKKVTFDELYLQEAFNEYLISVNTLESRLKAVEKRLEDISKDEEVKSKVERLICFCGIDTLSAISIVSEVGDFMRFGRAWDFSNYVGLTVGESSSGEKEKRLGITKSGNRYLRRLFMESAKSIKRSNPRGEKSKRMKQRQEGQNPLVIAYADKCRLRLRNKILRLEMRGKPANVASTAGARELACFVWGMMTDHIA

SEQ ID NO: 191991 - protein, 341 aa, unidentified
MDIKTIGIDIGKTSFHLVGCNRAGTQVARQKYNRSKLLEFLVKLPACLIGMEACPGSQHLTRVLQSYGHEVRLIAPKFIKPYLKGQKNDFNDAAAIAEAVARPSMRFVAARSIEQLDLQAIHRVRSHLVGERTAVINQIRCFLLEYGLPVGRGVAALRNSLTSILEDTANGVSGTMRSIIARQREHWQYLEEQIERCMVEISAVAVRNNDCHRLTSIPGIGVLTATAIMAAVGSAANFRKGRELAAWLGLVPRQRTTGGKPTLLGISKQGNPYVRKLLVHGARSLVQHLRRDQHELGRWITQLEQRAHRNVVIVAVANKMARIAWAVLAKQETYRPTVSAA

SEQ ID NO: 191992 - protein, 345 aa, unidentified
MELHTIGIDLGKTVFHLVGLDLRGEVVVRKKFSRTQLLRFTANVHVRLIGMEACGGSHFLGRALREQRHEVRLIPAQYVKPYVKTNKSDYIDAEAIAEAVARPTMRFVPIKTDDQLDMQSLHRVRERWVMRRTAVINQIRGLLLERGITLRKGRHHVDAALPLILEDADANLSGAVRLLLAQLKLDLDQLSVRIDQADTVIQKTAHENDACRRLVAIPGIGPVTATALIAAIGNGGAFRKGREFAAWMGVVPREHSTGGQQKLLGISKRGNSYLRRLFVQGARAVLQQRTKQSSGLSAWLAQLTSRTHRNVAAVALANKLARIAWAVLAKNEQYRPSVVADVAAA

SEQ ID NO: 191993 - protein, 403 aa, unidentified
MPDTGKRYVALDVHKSYLMIGAVNSQQEVVLSPRRVPFLEFEDWVAKHLRSNDAVVLEATTNAWLVYDLLVPSVERVVVVHPYHVKLIAASMVKTDKIDTLVLARLLAANFLPAIWVPPVHVRELRGLIAHRRRLIQQRTAAKNRLHSLLHRHNLIPPPGDLTAAGQRDWWANQPISGTEQLRARQDLTVADYLAPLIAEVEAELARLSASLPWADQTPFLIQLPGIGLLTAMTILGAIGEIGRFPSAKKLVGYAGLGASVHVSGQTHRTGGITKQGRRDLRTVMIEAAWVAVRTHEHWQSQFENLERRIGRQKAIVAVARKLLVVVWHVLTACAADRRAEDQAVARSFMAWGAKHGLANHLQMPRTQFVRQELDRLGIGQSLTVVHYSGRDHPLPPSQLGAS

SEQ ID NO: 191994 - protein, 355 aa, unidentified
MNDAKYIGLDVHQATISVAVRDSDGKLVMEAILETKAETILQFVRGLRGSLHVTFEEGTCAAWLYALLKPHVTQVLVCDPRKNALLKVGNKNDRIDSRKLAELLRANLLSSVFHEDTGLRAVKELARSYLTMTKDLTRVMVRLKALYRSWAIPCATKQVYAPRHRAEWLAKIRQARVHRRAELYYQQLDALRSLQQQVKKELLIEGRKHSATKLLRQIPSIGPIRAVLLLALIQTPHRFRTKRQLWSYCGLALETRTSAEYRVVHGQLQRSKKPVAIRGLNKNHNHDLKNLFKGAALRAAAVEKPFQEFYAALVAKGIKPEMARLTLARKIAAVTLIVCKKGARFDAEQLKPQAA

SEQ ID NO: 191995 - protein, 345 aa, unidentified
MELHMIGIDLGKTVFHLVGLNLCGEVVVRKKFSRKQLLHFTANLQVKLIGMEACGGSHFLGRALREQGHEVRLMPAQYVKPYVKTNKSDYIDAEAIAEAVGRPKMRFVPIKTDDQLDLQSLHRVRERWVMRRTAVINQIRGLLLERGITLRQGRGHVDAALPGILEDASALLSGALRLLLAQLKLELDHLQMRIDEADAMIKKAAGDNEACRRLVAIPGIGPVTATAIIAAIGNGAAFKKGRGFSAWLGIVPGEYTTGGKQKLLGISKRGNSYLRRLFVQGARAVLQQRAKQSSGLSAWLAQLTTRTHSNVATVALANKLARMAWAVLAKNEPYRPPMLVGAATA

SEQ ID NO: 191996 - protein, 394 aa, unidentified
MKLIGIDIGKNKHFFCIMDQQTGEIISQPISFSNDKEGFDFLVQKIKSYPKDSILIGMEDTGHYHFALLKYLLDLQYTVALINPKTTDFNRKMQGGITKNDKLDTINICDVLDTPERKKQYRITKVNSFDLYEQKQLTRHHHNLKEEENVYKNRLQKCIDIVFPEFNNLFNSKYGTVYMNILKMFGSAENIANTDIRTIRKCFEIEGRGNRISLTPERLKECAGSSIGISSSAEVIQIKHLTAQIELIEEQLTEIDKKIEEFSIQNNSPILSIPGISHFSGTSILAELGDISNYSKPSQIIKFAGVAPLHYESSQFNAQHTAITKKGSKYLRKTLYQIILPVIRHNPVFTKYYQLKISQGKGHRCAQGHCVRKLLRIIYHLLKTNQQFDPQLLR

SEQ ID NO: 191997 - protein, 343 aa, unidentified
METITTVGLDIAKSVFQVHCVDANGDVVLRRQLKRRYVLTFFQKLPPCLVGIEACASSHHWSRQLQALGHTVRLMPPAYVKPYVKRQKNDAADAEAICEAVTRPNMRFVPTKTPEQQSCLTLHRTRHLFIRQQTAIINSIRAHLAEFGIVAPVGRNGVEQLLEVVANVEDTRLPEVARACVAALGTQLRALKAQILAFDRHIMAWHRSNETSKRLDVIPGVGPALATALVASIADPKAFRSGRDFAAWIGLVPKQNSSGGKDKLGSITKQGDRYLRSLFTTGALAVIRSAKLHGTKHRPWLAALLARRPTKVAAIALANKIARMAWAMMARGERYKEPVALAA

SEQ ID NO: 191998 - protein, 352 aa, unidentified
MIIGIDPHKMSHTANAVDPATNTTAASLRIDATLTGYRELMRWSKQFPERRWAVENARGLGRHLAQWLVARGEVVLDVPCTATARVRELSRGSRRKTDVIDAAAAASVAALHGDATVVAAEDHTTVFAMLEERRANLAAQRVRITNQLHAVLRDLVAGGAAVGITAKSAASLLRTVRPESPAERTRKQLAHDLVRDVRAVDASLADIEKRMTAALDDHGTRLREIDGIGAITAVRLIGRTGPAARFGSPHAFATYAGTAPIEIASGEHSRHRLSRAGDRRLNSAIHLVAVTQVRMRDSIGRAYFDKKIAEGKTRNEAMRCLKRRLANHIWRMMIADELRLATAPRDNIEIAA

SEQ ID NO: 191999 - protein, 368 aa, unidentified
MAQGSTLFIGLDVHKETIAVAYVAEEREAEVLSLGTIGTRQCDIDKVIRKLQAKGKPLHFVYEAGPCGYWLYRYLTKKNLKCWVVAPSQIPKKAGDRVKTDRRDAMQLARLLRSGDLTPIYVPVVEDEAIRDLVRAREDVLRDSKAAKVRLKAFLLRQDIRYEGRANWGPAHLRWLAKVVCPTPAQQIVFQEYVRAVSEHTERLQRLEAELQTQVQTWRWAPVVEAIQALRGVQVTAAVTLIAELGDLTRFENPKQLMSYLGLIPSEHTTGERRRQGSITKTGNSHARRALIEGAWAYRYPAKVSRHLQLRLGQTLQALPPPGRPRQAGQPSRRCDRPGNGGLRVGHRPRGESDPLSPPRSERDTVVG

SEQ ID NO: 192000 - protein, 458 aa, unidentified
MGRGTTSGAKIKSRPEKRKHSRVLDRINHNAAGIDAGSEYHYAAVPDDRSPSPRKFATTTAGLYELVDWLIEAGVDTVAVEATGVYCVPLLEVLEARGLEVVLAKPSSLKSVNDRQKTDMLDCQWIQLLHTFGLLRGSHRPAEMVATYRTYNRQRQMLIQQASTAIEHMKKALTSMNVRVELAVTDVTGKTGMAIIRAILKGERDPVELARMRDGRCGKSEQEIAEALFGKYTDDHLFELDQAVRTWDHFQVLIAECNAKLEEQGEKFEKKADRKDIPPPRRIEHVRKNVLTFDARSLFYELLGQDLTQIDGISTGTVSAFLAEVGTDVEAFESAKHFASWLRLSPGSNQSGGRNRSGKNRPTSNRLSTALRIAAQTLSRSRSALGAFYRRKRAQLGAEKAITAAAHKLARMIYFTLKEQRSYVDPGPDHYTQQHRDRILKAMEKRAKQLGYQLVKAS

SEQ ID NO: 192001 - protein, 346 aa, unidentified
MMLIGCDYHPSWQQICWLDTATGETGEKKLEHASGEAERFYRQLPAPALIGMESTGNCQWFVELAATLGHDLWIGDAAKIRASDVRAQKHDRRDAELILKLLREGRFPRIWTPSGEEKDLRQLLIHRYKLVRIRAQVKTELQHLAMNQGITKKRRLWSKAGEKVLRELPLAPWASQRRKDLFRVREMLDGQIDLLDQAVVEIAEKNEKARLLMTQPGVGPITSLAFVLTMGDVSRFQRGKQVASYLGLIPREYSSGGHQRFGSISKQGNRFMRMLLVEAAQGAVRCDPGFRNEYVHRCHRKPKGVAKVAAARKLAIRLYWMLRTNTGYPEVVGVESSSRVPLVSAS

SEQ ID NO: 192002 - protein, 389 aa, unidentified
MLFCGIDVAKYQHAVVLLDDEGQVRQPAVGIENTRQGFDKLCSLLQSQPEALQVGLEATGHYWLALYEELTRLGYPVVVLNPLQIAAYRKSGVRKIKSDRSDAWWVADFLRVARLPATSPQMPLMLQLRELTRFRFRLVEQIGDCKRKILSILDRVFPEYETLFSSVFLKSSRELLKNAVSAHDFAAFDLAELSRILHDASRGRFGQPEAETIQTLARRSVGVGFLVDAARMEMRCLLDQIDLLQEQVAQIDTSVAELMAQIPQYLTSIPGVGSVTAAAILAEIGDVQRFDSPEKLVAYAGIDATVYQTGQFEASESHMSKRGSPYLRHALWQAASMTVLYDPQLKAYYQAKRQEGKHHNTVIGAVCRKLLVRIYVILKEQRPYLIRDC

SEQ ID NO: 192003 - protein, 324 aa, unidentified
MDDTGKITREVRVASEPDALLAVLRDPTYRFKRIGLEAGPLSQWLFSALATDLPVICVETRHMRAVLKAQINKTDRNDARGIAQMMRVGLYRPVHVKTLRSQKLRMLLIHRKLLQSKAIAVDNDLRATLRNFGLKVGMVGATKFEARIKELVENFPDLFLLVEPLLVVRRVLREQIGVLHRRLLAVVRDDEVCRRLMTVPGVGPVVALTYRATVDVPARFRRSKSVGAVFGLTPSRDQSGETDRPGAISRCGDAMMRTALYEAAQSMLVHSTRWSWLKAWAMKIARHRGMKRAIVALARRLAVIMHRIWVDGTEFRWTREAAAA

SEQ ID NO: 192004 - protein, 315 aa, unidentified
MRNCIGIDVSKGSFDVFVLEKNKALVMTNDSEGICKCVDLCQQIQPELIVMEATGGYEALLASTLQAKGFPVAVVNPRRIRDFAKAVGQMAKTDKLDAQIIARFAAILEPMPHELIDSNSRKLKALMSRRKQLVEMHTAECNRKEHAIDIEVTRSIEAIVNAIESQLSNVEKELDSWIQQMPELKQKAEYLQSIPGIGKTTAHMLVIELPELGVFNRRQIAALVGVAPINRDSGVFRGKRMTGGGRRHIRARLFMPTLVATQFNPVLRKYYRTLVDAQGKCKMVALTASMRKLLCIMNAMLKNEQYWQPNLIENA

SEQ ID NO: 192005 - protein, 365 aa, unidentified
MPSVPPAAELIHLGMDTSVKEIVFGVLRPGEEIPAVDRIPNDEEPVRRLIGRLGDRRLLSACYEAGPGGYELYRLLTSMGVACAVVAPSLIPKGSSDRVKTDRRDAIRLARLHRAGELTAVRVPSPAEEAVRDLVRARADLLDDRKRMQQRLNAVLLRHGRVWRGAKWTYAHRVWVDKQEFGEPALAEALAVYRAGLEAREAELRAAEARLADWAGRDPLAGPVARLGGYRGIAQLTGLTLAAEVVDWRRFASARGFMGFAGLIPTEYSSGSRTRRGHITKAGPQAVRTALIEAAWAYRYRPAIGATLRRRQAGLEPETLARSWKAQQRLHAKYKKMIARGKPPGVAVVAVARELAGFVWAEMTT

SEQ ID NO: 192006 - protein, 349 aa, unidentified
MDRTTYGVDIAKSVMQVHWVDAETGEIGRKKLARARLAEYFAQLQPVRVAMEACGSAHHWARELGALGHEVELLPAGQVRPFVRSNKDDAADARAIWLAAQQSDIRRVPIKSCEQQAVLALHRTRQHWVSVRTATVNALRGLLYEFGVVLRGGRRAGLKALAEQRAAIDERLPEVMRRLVNAQLHSVEQIDERVDQLERDLAALQRQMDQAVRVREVPGIGVLGATALAATLGDGAAWRSGREFSASIGLVPAHSGTGGRTRIGHISKRGDPYLRTLLIHGARALIQHGKFRPTWLVQMLARRPMNVVIVALANKMARMAWALVAHGRDYQRDWKSARTECSAASAAAA

SEQ ID NO: 192007 - protein, 420 aa, unidentified
MRGLRAKRVRTIKEGTLIATIDIGMTSNTGYCTTTDGRDIKPFRFNNTREGLDKFWDMVAINKNRFACDGVVVGYESTGPYAEPLVHYLRNKPVKIVQINPMHTKRMKEVNDNSPLKTDDKDPRVIADIIRLGHALTVIVPEGHAAYLRRRNNARERHIRERTALLNQLQQLVFLLFPEFKTVLKDIKVKTARYILKHHTTPETIGAMVKETLGEEMRKKSRGKFGIKNAETLISLAQGTVGIKEGIAGLVLDIKHILIQLETIEGFVAEIESEMEGTLSEIPYSIKLLSIKGLGVVSVAGIIGEIGDFMKFTTQSEIMKLAGLDLYEISSGKRKGERRISKRGRSLLRKILYYAAIQTIRKNGIMCEYYANLTSRGMKRMMALVAIARKLLRIIYAIVRDNSEYKVDYELTRKVIKKAA

SEQ ID NO: 192008 - protein, 336 aa, unidentified
MYYIGLDVHKKTISYCVKEANGHIYAEGKVGATRWELDDWMKTLPRPWTVAMEATIFTGWIYDHLLPHAAQVKVAHPVMLRAIAAAKKKNDRIDAGKIADCLRCDFLPECHMVSTEIRDRRRTLRYRHLLVHQIVQMKNRISGLLLETGVSHNKQKLHKVGYFRELLSNKDEVHESIRPLLRLSRETIVRFEKTEYALVSSLQRDPLLAERIKRLRTVPGVGPITALTWALEIGDVTRFRSIKQAISYCGLSSDEKSSADKVMRTPLSKQRNKHIQRALVEAAKLAPRQDHQLAVVYEKEKEKGHANRATLAVARKMVAYLVPWIGPNGTSLPKKI

SEQ ID NO: 192009 - protein, 343 aa, unidentified
MLAVTTIGLDIAKSVFQVHGVDAHGKVVVRRQLRRRQVLPFFKKLPSCLIGVEACATSHHWSRQLQALGHTVRLMPPAYLKPYLKRQKNDAADAEAICEAVMRPSMRFVETKTLEQQSCLMLHRTRHLFIRQQTAVINAIRAHLAEFGIVAPVGRNGVEELLDVVADPDDDRVPEVARECLGALGKQLRMLKAQVLEFDRRILAWHRSNETSKRLDEIPGVGPALATALVASIANPRAFRSGRDFSAWVGLVPKQNSSGGKERLGSITKRGDRYLRSLFTAGALAVIRYAKIHGTKHRPWLTALLARRPTKVAAIALANKIARMAWAMMAKGERYKEPVALAA

SEQ ID NO: 192010 - protein, 362 aa, unidentified
MRIIGCDLHARQQAVAMLDTNTGELMEITLTHEGNNVREFYSKLPRPVRVGIEATGSMQWFVNLMEELGIECLVGHPAQIRAAEPRKQKHDRRDADLILKVLVENRFPAIWLPSKELQDLRALLRHRHQWVRMRTRIQNALQSIALANGLRRGPSLWSHDGQNTIASLPLAPHTAYRRNELQALYAKFEAEIEKLNQRVEEQACKRAGARLLMTHPGVGPVTALATDVFLGDPARFADSKALASYVGMIPREYSSGGRQRLGGLTKQGNPLLRFLWGEAGAHAVRRDPELQRFYRRKLAQKGFGKASVAAARKLGIRLWIMLRDQIEYNEFCRRGQKQQKSSDACAGMPEKRYGAKSHRHVD

SEQ ID NO: 192011 - protein, 347 aa, unidentified
MEHPIRVFIDTSKSVFQLHGVDAAEQVVVRRQLRRGQVLEFFAKHSPMAVGLEACGGAHHWARELRQLGHEVKLVPPQYVKAYLKRNKNDGRDAEAGCEAMSRPTMRFVPIKSQAAQAVQMLAGVRERLVRDRTRLSNEIRSYAAEFGLVTAKGLDKLEPLLARIGQDERLPPLARELFAELGEELAGLEAQIERTDRRLLAWHRQDKVSRRLAAIPGVGPVGAVMLTIKTPEPQSFRSGRDFAAWMGLTPKDHSTAGKSRLGVITRAGDEGLRAVLVSGAMSVIQQAKAGRKPPSPWLAELLRRKEAKEAAVALANKTARIAWKLMVSGQVYRPEPERRAPIQVAA

SEQ ID NO: 192012 - protein, 442 aa, unidentified
MINFALRNPPFAHKLRQKEEIVTNKRLIQRGRYVNPDILIVGIDIGKYKHAAVGTSLHSGFTKPFFIKNNRISYESFESEVKEWKKRFKCKDVVFSFESTGHYWKTLVYYLKKRGGYLIEVSTNYTKKAKEMMDNSPLKCDPKDARIIADLVKQGKILTPVLPEGKILALRNIIQTRENLIKERTSIVNRLQKIVDIGFPERREIIGKINSKTSLFLLEEAPFPEDIIDKGLEWLKKEIRKKSMGHYKYEDARKLYQSARETIGLKEGRDGSICELKILLFRLNKLEQEIEKIEYNIEDRLKNIEEAKYILSIKGVKEITAATIISETGGLSNYEKISSVLKVAGLNLFEISSGEHQGEKHITKRGRNLLRHKLYFAALQQAREGMPFYSFYRRLVEENGVKKNKALIAVARKLLRVSFALVRDKTEFTNSYEGKANIRKVA

SEQ ID NO: 192013 - protein, 316 aa, unidentified
MSKAVLGIDVAKKKLDVALMFDQKTLTRKFDNSPNGFKLLHGWLLSLHFEQIHACLESTGTYGEAVAEFLHERGHRVSVVNPLRIKGYARSDLQRNKTDPADARTIADFCLTKDPEQWHPLPAEIKHLQALTRRIESLQGMLVAERNRLELAAREVRPSVDRMIGTLEKEIELVQGLIKEHIDNHPDLKGQSDLLQSIPGIGEKTAQLLLGELEFAAYPSARALAAQAGVTPQQFQSGTSLNRTRLSKLGNGRIRKALYFPAIVAGKHNEIVKKFASRLSQNGKTPMQVICASMRKLLHIAFGVLKNNRPFDPNLA

SEQ ID NO: 192014 - protein, 340 aa, unidentified
MTITTIGIDLAKNVFAVHGVDQNGKTVLVKSRVIRAALPGLITGLPLCVIGMEACSGAHYWARLFRQYGNEPRLMAAKFVSPYRMAGKSGKNDAADAQAICEAVRRPHMRFVPVKDESRQAMQCLHRPRQGFIEEKIATYNRLRGLISEFGVIAPQGTDALRHIVSAQKNSLPLQVQQCVDDLLEHVDRIEANITEYDQILPRIAKTDHRSQRLMKLKGVGPTTTCALVACIGNAHDFKNGRQLAAWLGLIPSQYSSGRKSKPGRITKAGDSYLRTLLVQGARSVLIGAEKRTDSFSRWVCSLVERRGYWRAVVAIAAKNARLCWASLHYGDDFRLYSAS

SEQ ID NO: 192015 - protein, 415 aa, unidentified
MISERRWYVGVDWASESHHVFLTDGAGAKLGERIFKHGGEGLAEMAAWLIAATVAEPEQVHVAIEVPHGPVVETLIERRFNVYAINPKQMDRFRDRFTLAGAKDDSRDAETMASALRTDPRCFRPLAAMDPIVIELREWSRIAEDLGTERIRLTNRMREQLWRHFSAMLELESDLAAPWLLDLWEVVPTPEKARRIRETTIARILKRNRIRRLDAAQVLEVLRKEPVTVADGAVAAASAHITTLIARIRLLKRQIDDAHRRFDRLTTELASSQESEPGQMKQHDVEILASLPGVGRIVLATLLAVAWDALQRRDYASLRSLTGVAPVTKRSGKSLIAIRRQACHRRLSNAMYHWARVAVQHDRTSRAKYTALRGRGHSHGRALRSVADRLLNVACAMLKTGTTFNPPQAAKLARC

SEQ ID NO: 192016 - protein, 349 aa, unidentified
MTMTIVEAARGVTGGVDTHLDTHVAAALDPLGTLLGSEAFETSTAGYKALLAWLESFGDVTKVGVEGTGSYGAGLTRFLRRAHVAVIEVDRPNRAERRRSGKSDPLDAVEAARAAMSGRATSISKSKDGAVEAIRVLVIAKRSARQARVKALTQMRHLIITAPDQLRCRLKGLTVTAMVSEAARLRPSRSGDSVTAAHKASLCSLAHRVLSLEEEIAELDERIEALLAATAPDLLALFGVGPDTAAALLVSAGDNPERLHSEAAWAHLCGVAPIPASSGKSAGRYRLDRGGDRQANSALWRIAMVRIAHDPETTAYFERKVKEGHSKRDVIRLLKRYIAREIYHYLPRG

SEQ ID NO: 192017 - protein, 377 aa, unidentified
MHSENIAAYIGLDVHKETLAVAIAAPERLGEVRYYGTINNEAQAVRRLFQKLQGLYGNILSCYEAGPCGFGLYHQLTAMNIKCQVIAPSRIPKSPTDRIKNEHRDAISLARLLRAGELTPVWIPDLTHEAMRDLIRARAAAKRDSRVARQRILSMLLRTDKRYAGKHWTGKHRTWLANQSFSQPSQQIAFQHYCQSLEQIEDRILQLDQEISRLLPEWSLCNLVCQLQALKGVGQLIAITLVAELGDFSRFSSPKQLMAFLGLVPGEYSSGNSIRPRGITKVGNSELRRLLYEAAWSYRTPAKVGAWLIYYRPDSVTQYSKDIAWKAQQRLCSRYRTLTAKGKKSQVAITAVARELTGFMWDIALAAQSSFSQQKQN

SEQ ID NO: 192018 - protein, 360 aa, unidentified
MHATTVAVDLAKSVFQIAVADEHWHVVETQRLTRSQFERWFLNREVGLVVMEACGSAHHWARWLNSLGIEVRLLPAQYVRAYVRRNKTDATDAAALLEAVRASDLRPVRVKSVEQQALQGLHRIRSLWMGTRTSRINALRGFCREFGLAIPQGARTGLEVLGRVLADPNSAVPGLIRDSAKLLLEEVRLLEARIAQVERELANAARHSPACTLLLSVPGIGLLTATAMVAATSGDVTHFQDARHFASWFGLTPREFSSGGTRYLGRISKKGDRYLRMLLTHGARSVLRAATAAVEKGKVLSGVRHWALQVQARSNHNKATCALANKLARICFATLRDHAVFDENAPAARKGRRLSFAVPA

SEQ ID NO: 192019 - protein, 374 aa, unidentified
MSNSTKYVGLDVSKSKIAVAIAEEGRQEPRYWGSIPHSKEAIRKLILQLRKTEDIVLEVCYEAGPTGYVLYRWLLEMAVSCTVIAPTLIPKRAGDRVKTDKRDALRLAQLFRAGELASIYVPTPEDEALRDLVRAREDAKEDLNRYKQRLGKFLLRNQLADPKGSSPWTNAYEAWLDTLKFADDCQRLAYQEYRQSIWETKERIKRYEKEIEKQEEINIQAPLIQALQALRGVAVLTATTLASEICSISRFPHASSFMSYCGLVPSESSSGDSRWQGKITKAGNAHLRRVLVESAWSYRYSPAVKRKMRERITGLSPEVQRIAWEAQNRLHKKFKNMMRMGKHKGAITVAIARELAGFVWAIAKEIDKGRQNVA

SEQ ID NO: 192020 - protein, 408 aa, unidentified
MTYKVAGIDVHKKVLMVVVGEVGEVGEAEGRQERRRFGTTVSELRRLARWLQEQAVEEAVMESTAQYWKPVWYELEPHLRLQLAQAYSNRAPRGRKHDFKDAERLVRRLVADELQLSFVPQPEQRAWRTLTRMKVQLSRDASRLHNQLECLLEEMRIKLSSVVSDLLGLSGRRILHALAEGESDPRQLASLGDPHLRCTQEQLIDALSGSPQPLHRQLLQLYLDRYQLIQQQIEQLKQMTASAMLAHAEAVKRLAEVPGLGVDSAQQVIAEVGVEASAFASPARLSSWVGTCPGKQESAEQNRSSRSAKGNRYLRRVLNQAAHAAVKKNGSHFQSVFRRLLPRLGYKSAIWAIAHRLCRLVWKILHEHVAFLEQGNEPSPRQKRQRAQRLLRSLRRLGYEVTLTPSPA

SEQ ID NO: 192021 - protein, 410 aa, unidentified
MTKIIVAQDAPVLVAIDIAKARHEVLIAIPDKKRRRRLTVLNELADFNRLVTALKEYGRPVRVAFEATGNYHRALAYHLATAGFEVKLVSSVALARTREALNNSWDKNDPKDAQVILHMMEIGNEQYYHDPLVCGTNDIQELSKTHDIVSKSKTELWHRVLTHYLPLYFPEADRFHRSSRSDWFFAFLERYPSPHLITAMGKAAFTADAWDVIGRKVAKERLLADIYETAKSSVGLPVAPDSDAIRMFRLVLGEGRSLIAQRNQIEDRAVALLKDLPDYQLLTSIPGIGPINALTILAEAGDLRRFGHHRQFLKFCGMDLATIQSGTFRGQTKLSKYGNARLRRTLWMAGQVAILQRTNSFRDKFERYIAKDRQNTHLRRKAYSAIAAKMARTVHGIIKHGEPYRPFFEG

SEQ ID NO: 192022 - protein, 367 aa, unidentified
MKNHSSIDQSLSSSDLSACTTLAVDLAKQVFQVAGEDVLGQVRYEQRIKSREAFYEFLHKLPPYVVVLMETGPGAQAWARQLQEQGNLARILPAGLVATHRSGPKNDRNDALAILRAGRDEKICAVPVKSVAALAMQALHRARQGYVRRRTAVSNQMRGLLLEHGVALAQGDVAISQKIPRVLEDATQPVPGLLRELIDELLAEWRHLGERISVLTGRLEVAANADMTAKRLMTVRGIGPVTATALVAKETKPERFPNARKFAAYFGMVPDQHSSGETVRLGDMTKRGDVYLRSLMIQGAHAVLQQLRPDSQQPDDRRLLRWMSRLGRKEAAIRLANRNLRIVWVLLQNDQTYRRHAGDGQQATMSH

SEQ ID NO: 192023 - protein, 339 aa, unidentified
MYYVGIDVHQRRSSVEILDQNGALYKRFEVRGPWTEVIGKIEKETPRPYAVAYEASCGYGYLHDALARRAARVEVAHPGKVRLIFNSKHKFDRIDAAKLGKLLFLGAIPQVHVPSAAVRAGRALVEFRQQLVTRKVGAKNRIKALLRGLGIESPIKRLWTQAGIIWLKALALDPLDGFRRDVLVAELRRYHREIRRVDKKLMAMMDQDSRVDLLRTIPGVGFHTAAAFIIYIDQIERFSNVRQVGNYFGIVPRQDTSAGKTRLGHITKDGPATVRKLVCEASWMAIRKSPSLRQRYERIIKHSADRKKIAITAIGHHLLRVMAAMLRTGEMWRETPATS

SEQ ID NO: 192024 - protein, 341 aa, unidentified
MSIIRVGIDLAKNIFAVHGVDETGKAVLIKPKVLRDQLLLLIAKLPPCLIGLEACSGAHYWARQFRTHGHTVKLIAPKFVTPYRLSGKRGKNDAADAAAICEAVGRPNMRFVPVKEEHQQIILTLHRTRQGFVEERTATYNRLRGLMSEFGIVLPQKVACLRRSIGAHLEDLPGYANQCIGDLLSHADVLDARIADFDKAIAKAAREDARSKRLMDHRGIGPVTASAFLASIGNGHDFKNGRQVAAWIGLVPGQYSSGGKTRLGRITKAGDSYLRSLLVMGARAILSGLGDKQDGFSRWARSLVERRGYWKAVVAIAAKNARLAWAVLHYGEDFRLPPDAV

SEQ ID NO: 192025 - protein, 401 aa, unidentified
MTESSDYESVQVFIGVDVGKDTHHAVAVNRSGKRLFDKALPNDENKLRALISDLKQHGQILLVVDQPATIGALPVAVARSEGVLVGYLPGLAMRRIADLHAGEAKTDARDAAIIAEAARTLPHALRTLKLADEQIAELSMLCGFDDDLAAQTTQTSNRIRGLLTQIHPALERVIGPRLDHPAVLALLQRYPSPEKLASLGEKKLATQLSKLAPRLGKRLAADITRALTEQTVVVPGTNAAVVVLPRLALQLITLRKQRDEVALEVEQRVLTHPLYPVLTSMPGVGVRTVARLLTEVACRAFASAAHLAAYAGLAPVTRRSGSSIRGEHPSRRGNKTLKRALFLSAFAALRDPISRAYYTRKMSQGKRHNQALIALARRRCDVLFAMMRDGTFYTPQTSSHA

SEQ ID NO: 192026 - protein, 359 aa, unidentified
MASIILERTDVIIGVDTHKDEHVTFAIDGHGGSLGEPLHVPATNDGYAQLLVWAQALGKIHRFGVEGCGSYGIGLARFLRRNGHHPIEVSRPPRKAARRLAGKSDAIDAEHAARSVLAGEATAIPKLANGQVEALRLLKIARDTAVKAQTTAMIALKATLVTAQWGLRSELELLTDFKLITACADLNATGTLGDPNLAMCHVLRALARRWLILHDEIKTHTSQLKQITAATAPQLLEAFGVGFDIASEMLITAGDNSDRIRSEAAFAKLCGACPIPTGSGKTSGRHRLNRGGNRQANAALYRAIIVRMRWHAPTIAYVARRTKEGLSKREIIRCLKRYLAREIYHLLPAPSVAKLDRAT

SEQ ID NO: 192027 - protein, 401 aa, unidentified
MYKTCGLDVHKDTVFCGIFDGKRHQVVKEYSTLTSSITSLGNYLRSEGVEDVALESTGMYWIPVWNILEEMGFKLTLVNPYLIKQMPGRKSDVKDAQWIATLLHKGLVRSSLIPCKEIRELRVYSRKYIKLQHRLTSILQEMARTLEMCGIRITSFVSNTSGKSVMRVIHALIEGENDPGVLAGYIHGRIVNRHKRETIVESLRGHITAQHRFQLELSMEEYELLCRQSDRCKEEMSRLCCQHYPGELALLQTIPGISLLSAMIVIAETGADMKAFENSGKFAGWTGLRPRNDESAGKYKSTATTKGNRYLRAILVQIAWAASRTKGSFFKEKFTRLCLRKNRKKALTAIARKMSVLIWNVLNYQQVYDPQKLIVYEPGKVQAKMNYHQKEFRRLENLLKN

SEQ ID NO: 192028 - protein, 412 aa, unidentified
MGDALLYVGDDWAEDHHDVEVMDGAGRRLAKARLPEGVAGIARLHAMIGAHLGDEVEDAASLVKVGIETDRGPWVQALMAAGYTVYAVNPLQAARYRERLAVSGAKSDAADAHMLADMVRTDSHQLRPVAGDSVEAEAVKVVTRMHKTLIWERTRAGQRLRHALREYFPAALEAFEDLDAADTLELLAKAPDPASAARLSIAQISGALKRARRHDIAAKAAAIQSVLRAEHLGQPAVITTAYAVSVRALVAVLGTLNEQVKILQGQVEAHFGRHPDAEIILSQPGLGPILGARVLAEFGDDHDRYVSAKARKNYAATSPITRASGKKKTVTARFVHNDRLIDALMAQAFSSLRSSAGARAYYDRQRDRGASYSAALRQLANRLVGILHGCLKAGTCYDETTAWSHHLTEAAA

SEQ ID NO: 192029 - protein, 420 aa, unidentified
MRAVALDVHRDFCEVAIVAEGRLRSAGRIATTPQALELFAQSLDPRDWVALEVTGNAWAIARILEPHVARVIVVSPSDTGIRQARAKTDRLDARALARLLWAGQLDGVWTPDERVRAMRRRLARRAQLVRARSRAKNEIHAVLMRCLKDRPPASDLFGVKGRAWLAEQQLALTERETVDSAMRQVSFLDSEIAEVERLIAAEALSWPEVKRLMTVPGVNVIVAATFMAAVGDIRRFPDRRKLTAYLGLDPRVRQSGAGPATHGHISKQGSSSARHALVEACWSTVRQPGPIAGFYQRIRARRGHSIAIVASARKLACLFWCLLTRGEDYAFAQPSLTTKKMRRLELQAGAAKFQGARGIWSTNETMRHAERELALQAQRAYERTIKDRQQAGASATPGRASRGSSKEQVARQTTRPKSAL

SEQ ID NO: 192030 - protein, 356 aa, unidentified
MTSSSKYIGMDVHKESISIAVRNSAGKIVMESVIQTKASMILQFIDGLRGEVHVTFEEGTWSAWLYDLLKPHVSKLIVCDPRRNALLKEGNQNDRVDARKLAELLQNNQLRPVYHGDHGLRAVKELVRSYLTITKDVSRVMTRVKAIYRSWGIPCSGTQVYSARHRAAWLEKIRETGVRRRAEHYYQELDGLRSLRRVVRKELLVESKKHQVWKRLCGIPAIGPIRAAVLLGIVQTAHRFRTKRQLWTYSGFGVEGHSSADHQVVNGQLQRKKKPIEIRGLNKNCNHHLKNMFKSAAINASTKPGPFQDFYAALVAKGMRPEMARLTLARKIATIVLIVWKRGVCFDANHLKPQTA

SEQ ID NO: 192031 - protein, 350 aa, unidentified
MDRYIGLDAHASSCTVATVGPSGRRLHSQVVETNAGALIRVLRGIPGTRHLCLEEGTHATWLYEVLSPHVEEIVVAGVRESRGPKSDKLDAFGLAEQLRIGAVKRKVYKKQGEFGALRHRAKAYTLLVSDSVRVQNRIKSLFRSRGVAVAGKGVFRAAERDAWLKKLPATARSLAELLMLEHDGLLELRKKAEKEMVAEARKHRAWRLVKSCPGLGEIRTAQLLPIVVTPYRFKNKRSFWAYCGLGIVMRSSSDWVRTQSGEWVKAPIQQTRGLNRNSNRTLKGIFKGAATTVIGQAKDEPLYRHYLQLLDGGTRPNLAKLTLARQVASIMLAVWRNQEVYDPARVDQAV

SEQ ID NO: 192032 - protein, 371 aa, unidentified
MDTRVASQSEVILISMELGNKEWKLRFSSLHKEREVTIPARNIEKLQRAILTAKEKLGLAAECRVLSCYEAGRDGFWLHRCLEKMGVENVVVDSASIEVNRRKRRAKTDRLDAKKLLAMLVRHAIYKEKDMWKIVRVPTEAQEDERRRHRQHDRLTGERTGILARLRSLLVLHGINPGRLLADVAAYRDWEGKPLPEAIQDELKHDFERLALVTRQLHDLDQEREKRIKSQATKGDQSTAKLMQLKAVGMETASVLGYEFFGWRKLRNRRQVASLAGLTGTPYDSGDSKRELGISKAGNPRVRHKMIEATWIWLRYQPESDLTKWFLKHYGPGSHRKRKAGIVAMARKLLVAFWKYVDFGEVPVGAVLKQA

SEQ ID NO: 192033 - protein, 310 aa, unidentified
MKEELVYVGVDIAKRYLDGAMGNEKRRFSNDALGHRELIKWVKQLSAPPVQVICESSGGYERALVQALARARVKISLVQANRVRQFARAAGILAKTDRIDAKLLCSFGEAMQPGTISASQLEQEHLREVESQRRHLTHLLVMQQNRAVRMSDLCVCKMNRRLITQIKKQIEQLDLLVQEQIKASPELSMKAQKLTAISGVGTRTAALLLAQMPELGQLNRHEAAALVGVAPFNRDSGRMRGKRAIYGGRRSVRHGLYMAALVAARHNPILRGFCLRLRAGGKPAKVALTATMRKLLIVLNSALKPDLNYA

SEQ ID NO: 192034 - protein, 338 aa, unidentified
MNLSRIGLDLAKQVFQVHGVDRHEHVVCRRQLKRAQVRDFFRQLPPCLVAMEACGSAHYWARELRELGHTVRLIAPQFVKPYVKGDKHDAHDAEAICEAASRPSMRYVPVKSAEQQAVQSVHRVRSRLVRARTALCNEVRGLLGEFGLIATRRGRAATMALLETVTATEPASLPAPMGELLRELKDELQTLEARIARLERQIQAHVRGDARIQRLLAVDGIGPISASAVAASAGDARQFRTGRQFAAWLGLVPRQHSTGGQQRLGNISKRGDTYLRTLLIHGARAVVRCCANKTDARSRWLQGLLQRRPANVVAVALANKNARILWALLSRETCYRPG

SEQ ID NO: 192035 - protein, 405 aa, unidentified
MISSLPTRPRKYFCGIDVAKNKHVACVIDRDGKLIVRSQSFTNDAEGFQCILDRLKEVGGPTKVAIAMEATGHYWYSLHDFLVRQRYDVAVLNPIQTAKQVTKGIRKSQTDKIDAHHIAVLLKNGEQRPALIPGELGMTCRQLTRLHHSMVRQASRIKQLLWAKLHPVWPEYEDLFATPFCKTGRTLLNTAPTPQDLLILSPEELNDLIRKTSRGRYGVIQADKVRQAAQNSVGTHRGIAAARASIRLLLAQLDALKPIREQLQGEIETLAARLPDYLMTLPGASPLNIVSLFGETDPFEAFTSPSKLIAFAGLDLVVSQSGEYQATRRHISKRGSPFLRHTLWAMAHRACYQEGDLRDYWLRRKGQGLKHLAAVTAVAVKLCPVVWRIMTDRRNYLPQRPVTKP

SEQ ID NO: 192036 - protein, 365 aa, unidentified
MKKGSTTMAASNKNFKQKLTIGLDLGDRSSWYCVLDEAGEVISEQKMSTTPKAMREVFAAMPCSRIALETGMHSPWVSRLLSELGHEVIVAHARNVRLIGESRRKDDRLDARTLARLARIDPQLLSPVKHRSAQAQADLTVIRARASLVRARTALVNTARGLTKSYGERIRGCNPRNLDTEKAQALSPELQAALGPLLQALESLSERITEYNRQIEGIAQQSYPQTALLKQVKGVGTLIALTYMLTLEDPHRFRKSRDVGCYAGLQPGRRNSGQSEPQMHISKEGDPYLRTLLVQGAHHILGPFGADSDLRRWGLRLAERGGKAGKKRAIIATARKLAVLLHRLWVSGEVYEPLRNTKRTMSAAA

SEQ ID NO: 192037 - protein, 398 aa, unidentified
MDGPLISFDVSKKNNHMQGFLGPGNPLRKATVIRQNDEGFAKVTELYNELKEKTGKEPVAVYEYTGVYAHPLERFLISKGINRIPIAPLESAKFRKSQIRSTKNDKRDCKTIADVAYTRDHPFAKEDFPAMEKLKYLLGEYQHAEKELVRAKNWYVRQLDDVWPEFSVKFKKSGQKGLALVKKFGCPQNIRSRAAIEKALSKVDKRGPVKFDDCVDKFWNYAQNHRSAEIPDYVADRVRHAAEDVEKVQSKEDEIFDIMFQIASGMKETKLLETIPGIGDRLAVRLLAGIGDVKRFPRAKSLVAYAGLDPTVYQSGEQTGNHLSITKKGNAYLRATLRQAVEELMMFDSDGPVAQFVKRKIKDGHPKKAAITAGCSKLLRLIHAMLRDGTCYSPKVER

SEQ ID NO: 192038 - protein, 388 aa, unidentified
MEVVKKNVGIDISKDDFVATLVTLMANQEIVYHGNNKYKNNPEGFKKFYLWVNSIFVDDDLPVHFTMEPTGVYYESLAYYLFEKEQIVHVVLPNKAKKFAESLNIKSKTDKLDSKALGRMGAERKLDRWVLSSKIYRKLKILTREREMLQKDKTRTQNQLHAENHSAEPIKRTINRMKNRTKYLEKQIKAVEKDIRELIENDEFVSQKVKKITTIPGIGLLTAAVIIAETNGFCSIKNQKQLTSYAGYDILLKESGKWKGKSKISKKGNSHIRRALYMPSLSSINHTETYKNIYTNLYEYKQNGLIAGTAIQRKLLCLIYTLWKNDTCYIENYQQMKRSKDVTSGNDETKSSFCAFAKQKKVGEKLPLNKIDFGLMNQLKPSFCALQN

SEQ ID NO: 192039 - protein, 474 aa, unidentified
MIYSVGIDFHKDQHRARCLDERAQPCDSFSFQTTPEGLAKLEEHVFRDGANPTIVFEPAGLAWLVVAVYLRSRHPDCRLVKAKMQKIAALRRYLRGSAKSDRIDALTLAKMPFIDPEQLYEIYLPPAEVHALQRLTRQRKRLEGDITGRKIRIGATVDGYLPDVRQVFTNSWSPQARAFLRSRLNPFAVARDGEKALHAFLSKATPRVKGSRAESHLVFLACQSVVALYELSRSVETISEEFFTELQEEVARELRLMEAEEAESESLARHIAELYRKIHPSDNLRTIPGVGEHTAPVFLATVGDPARFRNQSAFANWEGVVPGARQSSNAEAKGLRMTKAGPSIMRMGLYQAGDIGRRLDPQLAGVYYREMVYHGKNHKQAMGAVMSHLGARVLAVLKEDRPYELRDPEGKLTSKDEVRKLILSKYHVPEDIRQERRRRKPAKAAKKNREMTTYRTHEAAKAPQPVEVMTISRK

SEQ ID NO: 192040 - protein, 461 aa, unidentified
MSANKATGAKKKSVPKKVDWKALEVVHPDAAGIDVGGSEHWVAVSPDRDPEPVRCFGCFTADLREMARWLVEKGVRSVAMQSTGVYWMPVFEILEQQGLEVYLVNAQHTKNVPGRKSDIQECQWLLKLHAFGLLNNSFQPNDEIRIARTLWRHRGNLVAEASSVVQRMQKVLTEMNVQLSNVLSDISGVSGMKIIQAILGGARDPWELAALVEPGVKATPEDIVKSLEGNWREELLFVLRQQVEFYEIYQNKIRACDLQLRKHLQSLGSKLDLQAQPLGPRPQGKKLSRNAPAFDLRTELYRITGIDWSQINGIDVLTAQTVIAEAGADLSAFPSEKQFTSWLGLCPTNQQSGKKILNRRTRKVVNRATVAFRNAAMTLVRSQSYLGAQYRRLRTRLGAPKAITAMARKLACLFYRLIKHGQQYVDQGTEYYEARYREQQIRSLAKRAQKLGLQLIIPKTA

SEQ ID NO: 192041 - protein, 331 aa, unidentified
MTVLDEQGREVRTARLLNIEAEVAAFVLEAAPGGFQAVLESGRSSYVMADFLRELGGEVKLANPYELKAIAHAQIKTDRRDSKLLARMLRTGMIPEIYQRELSNREAQRVMRQRIFWTRLQVEVKNKIRVLLAQQREAVRLGVEALQDRLFGKRGLEYLSQVALRDKDRRLLQELVAAFRELEAHKKNSDGMVEVLYQELPSARLIDTVPGFGKTLSVMVAVEIGDVRRFSRAEKLLSYAGVIPSTHSSGEKTYHGHLKQGNTWLRWALIEAVYPATRVDPGLSIYYHRLAARKGSNIAKAATARRLLTIIYRMLVEERRYIPYSNKTSAA

SEQ ID NO: 192042 - protein, 350 aa, unidentified
MAIVGGFDVHRKQITFDYVDNDGLVQWGQIRPATRKTLRSWLAKHCPEGAGEFALEGCTGWRYVSEELTAAGVGVHLGDPAEIAALRGPKKRAKTDRADARLLRTLLVEGRFPESWIPPAHVAEIRALGRLYCALMEERRGWQQRIHAQLFHQGCPPVKALLSEPGREVLVAAELSAAGRQYVDTALRRIDELTAEIDPLRMQLVRFARRQSGCRVLQRHYGVGWLCAAIIWAEVGDPRRFSSSDQLVRFAGLDVTVYSSDGKRAPGHLSRQGTPELRWAAFEAAKCAARRGSPDYAYYHNLAAKHEGRNGKNPTLAVERKILRRCYHTLRELGDAVLAMPIAEAEEVAA

SEQ ID NO: 192043 - protein, 428 aa, unidentified
MNEVDIIRLEQFRQLKKEIRGSKEHLIVGIDVAKDKHNAFFGTATGKTLFKRLVFENTIEGFNRLLTQAEALKVQHALTKTVFGLEPTGNYHKPLGEFLIKSDHMVVLMSGVAVKRNRELLDGRWDKHDTKDSANVSDLISQGKCLFYEYPSMALRDLRNLLSLKRRLKKQEHGLKVRIRNHLLAAYFPEFDRYYRQSDSQGLAIVRWCLDPSVIAGLKYDEFVRLVAPRTRTIGQRDRLKAIWKKASDSIGCDASESLEFEAKVMVEGLKHVQEAISEVNDKIEDICCEFPEYSYLLTIPGFGPDVSSKVFGAIGDPFRFKTGKQVLKMAGLDLSAERSGKRSDTATPVISKKGKADLRYALYQAAMIASTRNKHFITYYTNKLRGREKERGIKTKMRVKLAAKLLIIAWTLMKKKEVFDFKYLNIE

SEQ ID NO: 192044 - protein, 487 aa, unidentified
MTRRKMSTFERLKQGKKLNPQQRKELGRRLQAQDPGLEIIYRDAAGIDVGSESHFVAVPPGRDPQPIREFGSWTAELQQMVGWLKKCEVGTVALQATGVYWMALCDMLEEAGIQVWVVNAQGTKNLPGRKSDVQECEWLRRLHTYGLLRNSYRPPEQIRGVRDLWRLRERWVKDAGRAMQQMQKALTEMNIQLTNALSDLSGVTGMAIIRAMLAGERNPWKLAQLRDKRVNASEEEIAHSLEGTWREEKMFELRQVVEHYDFMSKQMGELDRELQKRMAAMPGRETAGSAVAEEEKAAEMPQKKCKKPRRKKPPKNAPVFDLRAELRRLLGVDLLTIDGVNVMIAQAVYTEVGPDLSAFPSEAHFSAWLGLTPQRSISGGKLIRHEKRKVKNRLAIALRMGAETLERSDSYLGERFRCLKSRLGARKAVKAMARYLACLIYRLMTKGQAWIDRGKAYFEQKKAEREVRTLTRRAKAIGMQLAPLATT

SEQ ID NO: 192045 - protein, 443 aa, unidentified
MSNLAVLDPRAAFVDVGSEKMHVSIAGGPPAVFGTVTSQLHALRDYLAEHQVRSVAMEATGVYWLPLYGVLEAAGMEVVMVDGRQTRNLPGRKTDMKDCQWGATLHAHGLLRAGFVPPAHIRRLQDYLRLRGEHIAAAAGHVQHMQKALERMNVKLHEVISSLTGASGLAVIRAILAGERDPQVLLGLCDVRIRNVKAERIVESLRGDWAEEHLFALAQAVQSWDHYQGLIAACDRQIAVVLRQMPDAKAPPSAASTKTGKPRTRPGVNAPDIAGLREILAQICGAKDLTTLPAHSEYSVLQLIGEVGTDLTKWRTEKHFTSWLGLAPGSAQSGKRKTSIKRRRNRAGQMFCVMARALARSKYVALGGFYRRMAARRGGLVANKALARKLATLFWRVMVKGLDFVETGVAQYEAKVLETKHRILQRLARQLGHQIVPNPAPVV

SEQ ID NO: 192046 - protein, 319 aa, unidentified
MGTVMNQISSSVYIGIDVSGSTLDVAIHDTTEHFSVDNETAAIDQLVQRLIALGPTLIVMEATGKLELAVLRALCEAGLPAVAVNPRQVRDFAKATGKRAKTDRIDAFVIAHFAAVIKPVVRPLNDVQTEQLQALLLRRAQLIDMLVAEKARLERAHAAAKESLNDHIKWLKQQLTVADKDIDSFMRSSPAWRQKEDLLRSVPGIGPGAAATLIAFMPQLGSLNRREIAALTGVAPFNCDSGKHTGKRRIHGGRAIVRRALYMACIPALRFNPVIRAFYDRLRKAGKPFKVAMTACIRKLIVTLNAMVHNSTPWNASTN

SEQ ID NO: 192047 - protein, 345 aa, unidentified
MQTVTTIGLDIAKSVFQVHGVDAQGKVIVRRQLKRRYVLAFFQKLPPCLIGIEACASSHYWSRELQALGHTVRLMPPAYVKPYVKRQKNDCADAEAICEAVTRASMRFVATKTVEQQSCLMLHRTRHLFIRQQTAVINAIRAHFAEFGIVAPVGRTGVEELLKVASDGNDKRLPDVARVCIAALGAQLQMLKARILEFDRLIMAWHRSNQVSKRLDEVPGVGPALATALVGSIADPKAFRSGRDFSAWIGLVPKQHSSGGRERLGGISKQGDRYLRSLFVAGALAVIRYAKKRGSKHRPWLAALLARKPTKVAAIALANKIARMAWAMMAKGERYKQPVALAAAW

SEQ ID NO: 192048 - protein, 422 aa, unidentified
MAAKKNKTSSRVVIGVDPHKRIDAVVVLDELGAVLAREIVPHTSAGFKTLMAQARQFPQRVWAVEGCNGVGKNLAHRLVAVGETVLDVSTRKSSLVRALATNSGRKTDDTDAYSIALVGLRSTDLPVVVRDQQTELLRLLSHRRRELVGLRTQAVCRLHRELAILIPGGASSRLLATRIRALLNGIRPHDEVDRLRKQLARDQLADLVAIDQRLAAINIEIRDAVRATGTTLTEIFGIGPVNAAMILGEVAQVARFDTRHHFAAYNGTAPAQWGSGGDTHDRVNLGGNRRLNHAVHIAAITQARYPGPGRDYYQRKLADAKTAKEALRALKRRISDSIYRQLLADAKAREAEGTGPGGQVGAALSSSAANRSPVVSTSDRPQPGPVATDHTPTIPSPGKRSSGASRRPKNAPTRRPRQAQSA

SEQ ID NO: 192049 - protein, 425 aa, unidentified
MSEKIVVGIDVSKAFSDICILSPNNDIIKRLKISNDITGMKSLIYVLEKVEDEYKDRAIIIMEATAHYHQILANFFRKHNYEVIVINPIQSGALKNINIRKIKSDKTDAYNIALLYRIKNYNETITHSDTVNSIKKLCRQHKELTDEIVEHINRLIAFLDISFPDFKKVFMDLQGKTPLSLLEKYPTIQEVLSPENKQDIIQLIKENSHKSSSYAEVKHEKLLKAAEKYIEVCIVSLSSAVLIQTTVRVIFSLQEALKAIDNEIKRLSLLDEKFHKEIVLLQSIPGVGEYTACVVLSELGDISNFSKPKELVAFFGLDPGVTQSGTYNRKNNKISKRGSPHVRSILHMLAKSNVYPNRNREYLNPIMRAYFEKKIAEKPYKVVMCAIMRKMVQIIFAVLRNQKSFELRTPEEHQKLIREKSKLVA

SEQ ID NO: 192050 - protein, 342 aa, unidentified
MPQVAIIGVDLAKRVFQLHGAAADGSVLFRKKLTRERFLSFLASHPPCVVAMEACATAHGWGREIERVGHMVRLIPPIYVKPFVKRQKNDAADAEAIVEAASRPTMRFVAVKSEAQQARAMLFRTRDLLVRQRTQLINALRGHLAEHGVVAAQGPAHVKRLADAIANDDSGLPIAVRELGELLLEQIAALDEKTGDLDKRLRDAAGRDGATKRLQTMPGVGPVTAVAVETFAPPMEVFRRGRDFAAWLGLVPIQRSTGGKPRLGKTSKMGQRDIRRLLITGAMSVVQAAGRSAPPENSWLAHMLGRKPRMLVALALANKMARGIWAMLTKGENYRDPVTTGA

SEQ ID NO: 192051 - protein, 424 aa, unidentified
MPYRIAGVDVHKRMLAVVVSDVEVDGEYEFERRQFGSSPVQLRWLAAWLLEQQVEEVVMESTAQYWKPVWGALERYWKPICQKGEGARPMSGTLHLAQAQSNRGPQGRKKDFPDAERLVKRLVANELTLSFVPDAEQRLWRTVMRRKYQLTRNRVQLRNQLEGLLEEAHIKLSSLVSDLLGASARRMLKALAEGETIPATLAALANRKLRATQEQLRDALGACVELNPVYRRLLKMALEELQLIEEQIGQLDQEMATLLSHHQDAVKRLAEVPGLGVDSAQQIIAEVGATAATFPSQGNLSSWVGACPGDDESAGVNHSHRSPKGNRHMRRILNQTANAAVKAKGTIFEIVYRRYVPRMGHNQAIGVIAHRHCRLIWLILHQGVRYEERGAVVSKRSKQQRTARMIRELRGLGYRVEPATSQTG

SEQ ID NO: 192052 - protein, 337 aa, unidentified
MQAIAVVGLDLAKTVFQVHGVAADGTVVVRRQLRRGQVLGFFQSIGPCVVGIEACASAHHWARELMAIGHEVRLMPPAYVKAYVKRGKTDAADAEAIAEAVTRPTMRFVAVKSKAQQAVLMLHKTRDLLVRQRTMLINALRGHLGEYGITAPQGPAGVQAALKALREEDQDLPDLARTALGGLAEQLEQLGAEIGRLERRILEWHRQDETSRRLATIPGIGPITASAMAASAPDPKLFRSGRQFAAWLGLTPRANSSGGKERQSGISKMGDSYLRRLLVVGATAVLRMARQRARAGWVGNLLERKKPKVAAVALANKTARIAWTLMVRQEDYRPIAA

SEQ ID NO: 192053 - protein, 352 aa, unidentified
MAKTLPIRQSLGIDVSKDHLQVCISNLEADQRIRVIASTKFSNNGKGLNQLIVWVKKHRIPELDFKVILEATGVYHEQATYFLHEKGFEVSVVLPNKAKAFARSLNAKSKTDQIDAKILAQMGLERKLDIWKPASQNMVSIKRLCRERTTLQDHKTAALNQMHARKSSHLPEKSSQNRSLKLIKFIEKQIKEVEESIKQVVKTDPDLKEKVDKICKVKGLGLITVIAVIAETDGFALFKNKAQLVSFAGYDVVQRESGTSVKGTTRISKKGNSYIRRALYFPALTAVKYEPQFKDFYQRVFEKSFIKMKGYVAVQRKLLVLIYTLYKKEEPYDPQYLFKTPLQKNRQELCPA

SEQ ID NO: 192054 - protein, 389 aa, unidentified
MYTDPTRTSQATTSPTIVPTLYVAFELGGSSWKLAATTGLGQPPRLRTLPARALPRALDELARAKARFHLDPAAPVVSCYEAGRDGFWLHHALPAHAVRNHVVDSSSIEVNRRQRRAKTDRLDARKLVSMLLRYAEGDRHTWHVVRAPSSEAEDQRQLHRELKTAQRERLAAVTRVESLLVTQGLTLPLSGRETVAEVRAAVAALRRWDATPVPPALQTRLVREWGQVVALTAQLRALARERAELLRTGDAPALAAVRQLMRLKGVGVATAWIYVMELFAWRTFRNRRELGALTGLAPTPDQSGTGRQRELGMGKAGNRWVRAVAVEGAWCWLRHQPQSELSQWFERRFARGGSRQRRIGIVAVARKLLTALEHYLRTGTPPAGAAVRA

SEQ ID NO: 192055 - protein, 391 aa, unidentified
MICVGIDVAKDKHDCFILSSEGEVLADVFTIPNNAEGFDTLFQTICRCTRPADKIKVGLEATGHYSYNILGFLLNKGLHTFVINPLHTNLYRKSLSLRKTKTDRVDARTIATMLMSDVDLKSYTDTSYHNEELKSLTRYRFDKVRERAKLKTSISRLVCILFPELEKLVPTLHMASVYALLSEFPGAKQIASAHLTRLTNLLYEASKGHYGREKAIQIRDAARNSIGSAMPAKSLELKHTIALIGELDAEIEEIEKEINSIMDAVHSPITTIPGIGNRMGAMILAEVGDFSNFDSPDKILAYAGLSPSTYQSGQLTNCYSHMEKRGSRYLRYAIFNATKYVCIHDPTFAAYLAKKRAEGKHYNVAISHAAKKLVRLVYAMEKTQQPYRPAA

SEQ ID NO: 192056 - protein, 348 aa, unidentified
MAHFVGLDVSVKETSVCVVDDTGKVILEQKVPTEPADIITLLSSLGVSYGRIGIEAGPLSQWLVNALTVAELPVICVETRHMKALLTAQQINKTDRNDARGIAQMMRVGLFKPVHVKTLVAQEQRMLLTSRKLLQRKLLDLESDLRGTLRNFGLKVGVVSGGRYEARVRELIAGFPRLAAIAEPLLKVRQVMRQQLAVLHKMLLETVRDDPVCRRLMTAPGVGAVVALTYRATVDQPQRFVHSRAVGAHVGLTPKRYQSGEIDYDGGVSKCGDALLRTMLYEAAQVLLTHGSKWSWLKAWGVRVVQRRGMRRAIVAVARRLAVVLHRMWVDGSEFRWSKDSAAVPTAA

SEQ ID NO: 192057 - protein, 397 aa, unidentified
MIAVGIDVSKSKSTVAILNGDGSIRAKPFDVHHVADELQALVDYIKRTSEPPTILMEPTSHYHYPLLKAFTEAELPVCLINPYQMKKYGDTELRKAKTDKRDSLRIAQYALEKSYSLIPYTPQDQKYEDLRFLSRQYSQRISTLTVAKVQLLSLLDETMPGITTILPLKSRDPDNCVLLRFIKRFKSFDVIRKMGKTRFLDSYQVLVKKTKDRFAGSKGLVIYELVLSSVTTRGENPLSAMTQDQCVDLVSTSQKAADEINLQMRIIAETMPEYKVLRSMAGVGDRLGPIILGEIGDIRRFHSGKALNAYAGNDAPPYQSGQFESRNRHISKRGNPALRKACFEVMQALKLTKPQDDPVYLFLLKKEQEGKPYNVAKMAAVNKFLRIYYARAMELYK

SEQ ID NO: 192058 - protein, 337 aa, unidentified
MNEITTMAIDLAKNVFQLHGVDARGVCQQRRRVRRAQLLRVMAQMPPCLVAMEACASAHYWGREFIELGHRVKLIPPQYVKPFVRGNKTDGNDAEGICEAALRPRMPSVAVKTQEQQAVLAEHRIRQLLEGQRKQLGNQLRGLLAEFGIVIPLGSAVLSKGLAEAIERAPARLRPALNEAHQRLVALQQQCKEQTRRIEQLAAAAPLCQRFMQERGVGPIIASAYAATLGSPTHYRNGRQVSASLGLVPKQYSSGDEPQLLGISKRGDTYLRTQLIHGARAVVRGIGGRSDPLSVWLQGLVARRGKNKAAVALANKTARRLWAIWRDEGAELAPVAQ

SEQ ID NO: 192059 - protein, 378 aa, unidentified
MAFYRTQHELYCGVDLHARRMYTCVIDSNGRTVFHKNLNCTPQDLEAALEPFRDRDIVLAVESTFNWYWLADACDELNIPFVLGHAYGMRSIHGGKTKNDKQDSLKIAQLLRGGNLPVAWAYPKAMRSQRDLCRRRCYFTRQRAELQAHVRSSCLQYNVAAPSGQLRYATHQEGLAEAFPTQASQLTIETDIAMINALTTQISRLEKTLVQMAQFDDAGMFYRLKAVPGIGDILALVILYEIGDLKRFRRAGDFLSYARLVPGQHSSAGKNYGSPGRKQGNPQLKWAFSEAVALLLRDSPATKAAFAKMEKRHGRGKALSILAARLGRAVYLVLKRGDIFSEREFLRLPDDARVDVPKPRRRRKAASKATQTSATGNA

SEQ ID NO: 192060 - protein, 322 aa, unidentified
MRYIGIDVSKATFVVAYSSDKGGGIRTFNNTTAGIRQFIGTLPKDGSIHCVMEATGNYSALLLYMLNVAGITVSMENPLKVKNFAKAMLSTVKTDKSDARLITLYGEKMNPRPFKVQGEAILRLRQKRTVIRQLTKQITAMSNLRGSLVCLPVPDKGATHTVDETIKFLEKRRDRLQSELTELVEVEFSRQLALLTTIKGIGITLATALIITTGGFTYFQNAKQVSRYLGICPTYEQSGTSVNIRGHINRNGDAYTRGLIYVAAWNASRFNAKCGETYTRLRQNGKPGKLAMIAVANKLVRQAFAVVAHDKEYVDGFVSNRP

SEQ ID NO: 192061 - protein, 347 aa, unidentified
MERYVGLDVSQQFTHVCVVDDEGRISWQGRCASTPDAIAATIGDKAAGARRVGLESGPLSTWHYHGLKELGVPVICIDARHAQAGLSMQLNKTDKNDARGLAELMRVGWYREVAVKDLDSHTVRAMLGVRFQIIGMRTNIINQMRGMLKTYGIILKPDFGKNQEETIQRICEENHGVLFETLAAVLSVYQGLKRQIAVLDRLLARFVRSNSTGRLLMTIPGVGVLTSAAYVCVIDDPKRFPRSDLVGAYLGLTPQRYQSGQVDRIGRISKCGDPLLRAYLFEAATSLLTRTAQWSAIKAWGLRLAKNRGMKKAKIAVARKLAVIMHRMWLSGERFRFATPVAAVSGA

SEQ ID NO: 192062 - protein, 370 aa, unidentified
MRKNTLWVGLDTDKKHIDVAVAEALPDGEVRLWGRTANTPASVDRLVKKLGQGGRELTVCYEAGPCGYGLYRHLASKRGVKCLVVAPSMTPRRPGDRVKTNRRDALKLAKLLRAQELTEVWVPDAAHEALRDVVRARTTAVSSLMRCRQHISSFLLRQGIYYTGKPWTKKHRLWLGRLEFEHAAHRLLLVELLAALDHQQARRDRLTDHIRELVPGWSLAWLVEAVQALRGYDLINAANVVSEIGDLRRFTSPRQLMGFVGLNVCEASSGDTVRRGHITKTGNKPARKALIEAAWTYSRPTAATGKPIAARLPVEVQQIADKARHRLSRRYRHLLAHGKLKQVAIAAIARESLGFLWAIAHAAAPTSAPS

SEQ ID NO: 192063 - protein, 349 aa, unidentified
MVVLGADLHKRTHTVVAVDEHGRRLAERTVTATREGHLELRRWAAQWPERRWALEDGRHLSRRLEADLLRAGEHVVRVPPKLMAGTRRSAREPGKSDPIDALSVARAALREPDLPTATLDGVEREVRLLVDRREDLVGERTREVQRLRWFLVELEVPEPAPAALDRVVVQTRLAAELASRPELVARLAREILARVVELSHTIRRFEREIEARIRPLAPHLLALVGCGPLTAAKLVGETASVSRFRSKEAFARHNGTAPVPVWSGNTVRHRLSRGGNRQLNVAIHRIAITQVRLGGLAKGYVDHRRAAGDTKTEALRALRRRLSDEVFRRLRLDEEAQVKVAATLTTAAA

SEQ ID NO: 192064 - protein, 347 aa, unidentified
MNQVTTIGLDIAKSIFQVHGVDAAGQSVLRQRLSRSRVLEFFGKLPRCLVGLEACASSHYWARELIKLGHEVKLMPAQYVKPYVKRGKNDAADAEAICEAVTRPTMRFVGLKTIEQQSIMMLHRVRRILMRQRTQLSNALRSHLAEFGIVSPIGREGLDRLLKIVADTDDGRVPAEARVSLEMLAAQLEGVKAKILENDRRIIASARATEVGRRLLEVPGVGPVLASAFVASVANPAIFKSGRDLAAWIGLVPRQNSSGGKERLGGITKAGNGYLRQMLVVGAMAVIRYAQRNSTRRPWLVQLTGRRPTKVAAIALANKTARTVWALMTSGERYRDPKVIQAVSATA

SEQ ID NO: 192065 - protein, 320 aa, unidentified
MNQDFCFVGIDVAKTRLDVAIHPTGQQWQVAYTEKGIQDLVDQLADLHPTLVLLEASGGLELPMVTALAVAGLPVVVINPRQVRDFAKATGKLAKTDVLDAQVLAHFAEAVRPMPRSLPDTETQALTALVTRRNQVISMLVAEKNRLYASRPPVHQRIQTHIAWLEQELDEIDQDLKETLHKSPVWREKENLLRTVPGVGPQLTISLLAYLPELGTLNRKSIAALAGVAPFNRDSGTLRGKRAVWGGRSRIRASLYMGALVASRHNPVISTFYQRLLAAGKPKKVALTACMRKLLIILNAMLKHHTSWQSFAPQLLGPCS

SEQ ID NO: 192066 - protein, 390 aa, unidentified
MLIIGIDISKYKHDCIVIDDAGVIIRNVFSFDNSRTGFDQFMEMYRSLDPTEIKKIGFEATGHYQDNFKVYLERSGIEFMELNALLVHKFKNSQTLRGVKTDKTDARLIATYLSSIEFKPYPKISYHTLALRSLCKRHFDLINERTKYLIRITNFLDRTFPEFKEFIKGNIKSKTSMYILHNYGIPSKISCMNIQSYENIRKCSYGKFSVAKFAQLKELAKNTIGFSYETDLFEIKSLLRVYDTLQDEISLVENEITTILSKINSHIPSILGIGEVSAATMIAEIEDISRFDNPSKLLAFAGLDPRIYQSGTQDFKGRMNKKGSVVLRRVLMNCAESILIYNPTFYSYYRKKRDEGKSHRVAISHVARKLVRIIYKLETEHIDFDLSFVK

SEQ ID NO: 192067 - protein, 348 aa, unidentified
MEITKMSYGIDVSSESFTVSQGVLFANTKNEISHTCSFTIDVKGFKSFLKYVNSLNKKYQSNAGIQPWFVMETTGVYYEKLAHFLNDKGFNVSVVLANKMKAFSRVVSPKSRTDEIDSRTIALYGLERQLQKWDPPSEFISCLKELSREANDLNEQVAMIKNRLHAKKHSHKPDQLVIKRLKDQITFLKKQNAQVKKQINDVVKTNKAFSEKVKKITLVKGLREYTVVSVVAEMNEFKHADNKRQVVSYAGLDLKIDQSGKKDSKRRISKQGNSNIRRALYMPALSSKKHEKKLKLLYDRLCQRYNFKDKKRAIVAVMRKLLILIYTLWKNDTAYDPDYYLFNKSIAI

SEQ ID NO: 192068 - protein, 356 aa, unidentified
MKIIGVDLHTRQQSIAMLDDQTGELVEKELPHEGEQVREFYAGLARPVLVGLEATGSMQWFLRLLEELQIEFRVGHPAKIRAAEPRRQKNDRRDARLLLTLLTENRFPAIWMPSREQRDLQILLRHRDQFVRIRTRVQLSLQALALSHGLRRGHTLWTREGQHTLRALPLAQHAGAQRDTLLALQPQLQSPIDDLDREVEKQARQRPQSQRLMTHPGVGPITALATEVFLGDPRRFADGKAVASYVGMIPREHSSGGRQRFGRLSKQGNSLLRFLWGEAAIHAVRRDSELLRFYRRKLVQKGMGKARVAAARKLGIRLWIMLRDEIDYVEFCRRSHQRQDSGAACAGMPGVGQWSN

SEQ ID NO: 192069 - protein, 316 aa, unidentified
MMDILGIDVGKEYIDCELLGEKRATKRVNNTVRGFEQLQTWLRHRNVRKVHACMEATGGWSEELAYFLQERGHVVSIVNPVQIRAFGQSELTRTKTDKADAALIARFCKAMQPNAWEAPTPSERRLRQLVRRRRALIEMRTQELNRLAAPGTENVEKSIRDMIATLEKQIAELDADIKKTIDDDDDLKGKRDLIESIDGIGPTTSATLLAETPHIDKFESSKALAAYAGVCPQLQQSGKSVSKSWTTKIGNRELRRVLYMAALAAKRSNPVIKAFADRLHERGKRPMEIIVAIMRKLIVLVFGVLKTRRPFDPNWA

SEQ ID NO: 192070 - protein, 325 aa, unidentified
MEKLYGGIDIHKEKLAGCIMDKDGNITREHIFPSSKKAVERFLCDIPNSGITIAIEACGMWRGTYKILTDMGYSVKLANPKKTHDIACKKKTDRIDAKILADLLRTKYLPEIWIPDEQTLRFRDLTRHKANLTRLKTQVQCKVKSYLLRKGATYSKQWNKKTLAALANQDQDIQNLINVYTQITEEEKEAMKRIKQIAQQKKDTTMLMTMPGIAEFSSLMILAEIGDIQRFNSPKELVSYAGLCRGIYQSASTERSVRNTAVNKWLKWILYECSGRAIMLDQRFQKYFYLVQKRKGYKTARRASARKMLTIIWYMLTNKEPYRSS

SEQ ID NO: 192071 - protein, 341 aa, unidentified
MDRELYIGVDVSKKTLDLAYYDGETIDWKNAHIKVSNDDAGFKKIDSWVAKVGKDFDTFLFCMEYTGLYNQNFRLWLESKEYIYGMVEPRKMHHFEPDLDDDQRSLDRIKTDELDSFRIAIYCEQNHKKILRNPSKLPSPVYFKLKRLLAERKQNTKQSTLYKQQLHDICAYDTDLSVERKKLLLKNMKENLKAIDKEIDSYMQEDANISKNYNLLTSIPGIGRIIALETIVLTENFTAISNPRKYACYIGIAPFKKESGTSVRKKTGVSKKGFSEAKADLSIAVLSAIKNNPSIRDYWIRKRKEKCGGIVLNAVKFKLVLRMFAVIKRGTPYVETDAYKN

SEQ ID NO: 192072 - protein, 364 aa, unidentified
MAQDTTIEAAVTGGLDVSDRYTYVCVLNVSGEVVDEGRVPTTPEALRRRFSGHGPMRLVLETGTHSPWISRLLEACGHEVLVANARQLRLIAQSDSKNDRADAETLARVGRLDPALLKPIRHRGAEAQLDLALIRARDALVQARTQLVNHVRGAVKAVGGRLPACSTTSFPMKVGEAIPAGLRPALGPVLDVIAAVGQELGRYERLVEALATTRYPETAALRQVPGVGALTALSYVLTLEDPARFPKSRAVGSYLGLRPKQRDSGAGAPQLRITKTGDAYLRRLLVGSAHYVLGPFGPDSDLRRWGSALAARGGKNAKKRAVVAVARKLAVLLHRLWVTGAVYEPLRVAEQRPATTPVLTASNC

SEQ ID NO: 192073 - protein, 348 aa, unidentified
MVTIGVDLHKRTHTLVVVDQAGRQLATRTVPATVAGHLEALKWALGWAERSWALEDCRHLSRRFEADLVRAGEAVVRVPPKMMAGVRRAARTRGKSDPIDALAVAQAALREPNLPTAQLDGVAREIQLLLDHRDALVAERTRHQNRLRWHLHELDPGNEPAPRSLSRAHVLLALETQLAPLSDVVARLACDLVARCRSLTAQIKELDAEIKVRATALAPTLLALQGCGVVTTAKLIGEAAGIRRFRSRAAFAMYNGTAPIPVWSGHERYRLNRGGNRQINTALHRIALTQMRDPGPGRDYFLRRRAAGDTKLEAIRALKRRISDEVYRRLWQDELRIRSAQPDHEAAA

SEQ ID NO: 192074 - protein, 338 aa, unidentified
MKDIKYFIGLDVHKERTSYCVRDKLGIILTEAETATLYSELEPRLKPYLAYSLIALEASTSYYTLYQTFLKKGYRIKVANTIQLRQLIAKNDKLDAQRLSEMLRLGTLPCSYIPEEKIQHLRSMIQMRHALMQEKVRCNNRIQAFLDRNGIVMPPVKAFSKKWKHALMQHLGTGTASMELRYEYNHYAYLEKTNEQADQEIIGYTKTYWKLEYNLLRSITGFGVLLPCYVIAFVHPIERFLSNRKLRRYAGVIPLSKESGDTTSPGRIPKTTSKALLRWALVQAANTIGKTNTRLGRYYRRKKNQKKKSGIAKIAVASTLVDIIYKVLTTKKPYVSTC

SEQ ID NO: 192075 - protein, 347 aa, unidentified
MRKISTVAKSGNEILKEPKLTIGLDLGDRSSHYCILDEAGKVILEHNLPTTPKGVQQIFSRIPRSRIALETGTHSPWVSRQLTQLGHEVIVAHARNVRLIGESSRKDDQLDARTLARLARIDPELLGPVRHRSAKAQIHLTVIRARAALVSARTALVNAARGLTKSYGERLRKCGTGQMNREIAEGLSPELRDVLAPLLGEIESLNERIAEYDGRIEQIAKEVYPEVALLKQVKGVGTLIALTYVLTLDDPYRFRRSRDAGCFLGLRPGRRNSGNSEPQLHISKEGDGYLRTLMVQGAHYILGPFGQDSDLRRWGLKLAERGGKNARVSGEVYEPLRNNHKVVSAVA

SEQ ID NO: 192076 - protein, 350 aa, unidentified
MDIVGGFDVHRKQITFDYVEMDSGEVHRGKIRPADRESLREWLDEFTERFLGKQIAIALEATTGWRYVVEELRRAGVEPRLAEPAETKSLQGRKKRAKTDRLDAGHLRDLMVINRLPESWIPPDHIQEIRTLMRLRHSMIEERTTHKQRIHAQLFHNGYPRQSNLDSTEGRANLEDMELPAAARKVVDLSLAMIEHINEELEPVEKELRAYARSQAGCKALMMSHYGVGELTSVALLSELGDTRRFSSSKKAVRYAGMDITVHNSDDKRAAGKLSRQGPPVLRWAAYEVAKRAWRKNSPDHEYYLQNKERIGAGRATLSIARKLIRRAHHTLGELGEEAISEPVLTSNSG

SEQ ID NO: 192077 - protein, 348 aa, unidentified
MKILALDLGKYKTVGCAYEATSGRHRFQASFTTPTGLAQLVSEVKPDRVVIEVCNIAGWVCDLLRGVGVEVQVANTSEDAWRWRKVKKKNDRCDALKAAQLSAVNQLREVHIPHIEVRQWRALIAFRQQLVRRRGKVKNHIRDLLLSEGQILPRGAKCWTQLGVEQLTALAKPFSEIGLHELWRGQLEIELRQWRELQHEIDQVEEKLDAIGKADPRVVLLRTIPGVGPRLSEAVVALLDQPERFHKAREVSAYVGMVPKELDSGETQRRGRITKHGSRLVRSLLVEVAWAGLRYNPWVRATFRRISGGKKSRKKIAIVAVGRQLLVRCWAMLRDGTSWRPPALPGIV

SEQ ID NO: 192078 - protein, 440 aa, unidentified
MLQALPMLDPLAAFVDVGSEHMHVSVGGNRPAVFGTVTSQLHALRDWLLAQGVHSVAMEATGVYWLPLYGVLESAGLEVRMVNGRQTRNLPGRKTDMADSQWGATLHMHGLLHAGFVPPADIRRLQDYLRLRADHVAAAATCVQLMQKAFERMNIKLHHVISSLAGVSGLAVARAIVAGERSPEALVALCDVQIRRKKAQAVIEALRGSWADEHIFALAQALQSWDHYQKLIAECDARIATVLPPHDDTQPPLPRTTRQSSVNAPDIARLREILAQMCGGRDLTKLPALSSYGVLQLIGEVGTDLSAWPTEKHFTAWTGLAPGSHASGKRRKGVRRGRNRTGRLFCLMAQSLIRSRDIALGGFYRRLAARRGGLVATKALARKLAAWFWRVMVKGDDYVEQGLARYEEQVRQSKERALKRLARELGRELVPLSAVDHATA

SEQ ID NO: 192079 - protein, 415 aa, unidentified
MLCGLLRPLESGKRLKMKTSVGIDISKGKSMVAAIASNKKVVLEPVEFLHTQEGLSQLEKILTSMGENTRIIMEATGHYHEPVSERLTNAKFFVSVVNPTLIFDYGNNTVRQIKTDKKDALKIARYGIDHWEELREYVPEEKIRQQLKAFSRQYNLCIKTVHSLENNLITLLDKTFPGLNRLFSSQKRKDGHQKWVDFAATFWHSDIIARMTETEFVDEYKAWCAAKKYQFKVEKAHDVYAASKGHMATLSESENTHLLIFTAVQGVINTSITLASFKLELIRLAKLLPEYVTVSNLYGVGALTAAQLMAEIGDVRRFHSRKALVAFAGIDPLPHQSGKLNKKSTQTSKRGSAPLRKTLFQIVSIHLRHSPEGEPVFEFLNRKRAEGKPYFVYMTAAANKFLRIYYARVSEFLNG

SEQ ID NO: 192080 - protein, 337 aa, unidentified
MTEKTAVGFAALVGIDWADRKHDICLQVAGEDEREFSVLEHRPEAIDEWANGLRVRFDNRPIAVCLEQRKGALITALRKYEHLVLFPVNPKLLAGLRRAFHPSGAKDDPRDAEIAVEILLHHSDKLTAWRPDDPRTRQLQALVEARRRLVGQRVRVTNRLSANLKGYFPQALECCESLDSTMACDFLTRWPSLGEARRAREERLRAFFHRHNVRGRELVEERVALLKSALSLTSDAGVILPSLVATATLVAELRVLIDGIEQYDDAIATLFKRHPDAFIFASLPGAGPTFAPRLLAALGSDRDRFDSPEALQEYLGIAPVTERSGKSTWVHCMANLF

SEQ ID NO: 192081 - protein, 457 aa, unidentified
MDTVMVRSVGLDVHKRVVEACFIDSQGNVVHRERFALNRRTLELFATKILQPGDQVALEATTNCWAVADALRPHVARVVVSNPLTTKAIAQAKVKTDKVDAHVLAQLLRCQFLPEVWQPDEATRRLRELTGRRSALVGQRTMMRNRVHSVLAMRLVEEPKKLFNAEGRQWLKTVELDAQGRMLIDSDLRQLEFLDQEITTLDLELARRGHADGEVKLLMTLSGFDVGTAEAVLAAWGDFRRFPDADHAASYLGLAPSTHQSAEHCYHGPITKRGNCHARWMLIEAAQHLDKHPGPLGVFFRKLMKKKCRNVAVVAAARKLARIAWLMLTRNEPYRYALPKSTETKLAKLRVKATGQKRKSGNPKGLKCAAKLPGGSRTIKSLAGLCAGEGLPPPRELTPGERRTVAESGCAEFVAQIAAAQVVPRAATRKPTVAARRCAPQATGSSSLLPETNHGGH

SEQ ID NO: 192082 - protein, 353 aa, unidentified
MKRDKYMGMDVHQATTVVAVIDAEGKIVLETIVATAAAPIRRLIESISGAVHITLEETTQAEWLYELLQGFVAEVVVCDPRRNRLLSEGSKGDKADARKLAELLRTGMVRSVWHGRQTTRGLKEMVRSYETFAADTRRTMLRIKALYRSRGIATTGTGVYQVKQREHWLKQLTEVGMQQRAAWLYQQLDHVRELRKQAKAAVLAEGQRHQAVELLRTIPQVGPVRAAQIVATAGTPHRFRTKRQFWSYSGLAVVTHTSAEYELRAGRVVRRNKPVATRGLNPNCNRRLKSVFVSAATAGGVSHPWQPYLDNLKRKGMRADMARLTLARKIAALALAIWKKGEAFDPKKLNWTT

SEQ ID NO: 192083 - protein, 346 aa, unidentified
MTNVTIGMDLGDKNHEVCVLDQKGHLMDRFAVGNTRKQLQKFFQPYAGALVAMENGTHSPWISRELEALGCKVLVGNARKLRMIWARSQKTDVKDAEMLARIARFDRQLLYPIRHRSQQAQIDLEQIKARDLLVRLRTDLINHVRSTVKAIGERLPACSADCFDKRAQTFMPDSLRTALMPLVEQIASLTQQIRGYDCKIEQLAVTVYPETTCLRQIQGVGLITSLAFILTLESPDRFDKSRAVGPHLGLTPRQDQSGSCDKKLRISKEGDVYLRRLLVSCAQYILGRYGQDSDLRRYGERLIARGGRGAKRKAVVAVARKLAVLLHRLWSTGEVYQPLYNARKIA

SEQ ID NO: 192084 - protein, 347 aa, unidentified
MVVIGVDSHKRTHTVVAVDEAGRKLAERTAAATADGHLELLGWSRTWPDHVWALEDCRNLTRRLEADLLRAGEAVRRVPTKLMAGARRSAREPGKSDPIDALSVARAALREPNLPVARLDGVEREVRLLVDYRDVLISDRTGHQSRLRWFLVELGIPEPPARGLTVLVLTGLDLQLVARTEPCARIARNLVARILEMTTAIDDLARQIGELTETLSPNLMGLFGCGPLTAAKLVAETAGIGRFRSRAAFAAHNGTAPIPVWSGNLVRHRLNRGGNRQLNAALHRIAITQLRCPGLGQAYVAKRIAAGDTKTEAIRALRRRLSDEVYRRLQADEVARAGMEGLARVAA

SEQ ID NO: 192085 - protein, 445 aa, unidentified
MFIQSQDDSHYCYSFFTKVVILMMKLKYSICCGLDVHKNVIVATIVITNKDGVSEYKQKSFSTISSDIQKFHNWLIENHCYHVCMESTGKYWIPIFNYLENDIEVCLTHPKYVKAIKGKKTDKKDSKWIADLYKFDLVRCSFIPPKDFRQLRELARYRFKLVCMKSSEKNRIQNCMTVSNVGIASVLSDPFGKTATEIMSYLLEHTADSIDEKAVRKLIKKGAKAKSDEIIEAIRGYNIETDQAKKLELARAHLDFPDDMITQTEVELYVRIKPYYEFVEFVSSMPGMTELSSTIVLAETGVDMNIFDNAKHLCSWCGLSPANNESAGKKKSVRIAKAGDYLKPMMVQCALAAVKSRKQPYFAIKYGRIKKRRGHKKAIIAIARMMMVCIYHMVSEKKPFTPTDYEELMDPQNHVERVVLNENNVFAYLETLGYDSSKLVKRSDN

SEQ ID NO: 192086 - protein, 407 aa, unidentified
MPEQAVTTHVVGIDIGMESCTMSCLTKDKRQVIKSTPFANTLQGFDWLFERLEGLEVAPKHVLVGLEATSRYGENLLQALLKRGYQVCLLHPAQMHAFAQQRGLRAKTDRLDAVTIARALLSGEARFGYVPSEQVATYRELMRLQKQLSDDVVRYKNEIHALLVVLFPEFTQVFVDPTRPTALAVLKRYPSAQAIAQTGVETLSKFLHELAPRHYGRPTAQELVGLAKSSGSPGVAVAARSSSLRILCDQLEHTQKNLEQLQREIDQLLNQDPKATGMLGVPEFGPTTVAVLRAELGDLTRFTRIDQVVAYVGLDLQVKQSGKWKGQTKLSKHGSGRVRRILYLAALRSIHLEASPFGAYYQRLVARGMKKGMAVVAVMRKMLIVAVHLIQTEERYDPGKVARQAGS

SEQ ID NO: 192087 - protein, 343 aa, unidentified
MLTNNVIAIDLAKNVLQACHISVHGELLSNKPLSRQKMKEFLAKAKPSIVAMEGCCGCHYWGQLAEKHGHQVRIINPKKVKGYLEGHKTDHNDALAIANAAIQIGIKYSRPKSLEQQSMHSLESSRRFLSRSVVSLGQHIRGTMLGYGVANPRGEKGLKASVQTALDGETSIPANVVSVLSMLWNQYKELKAQLIAFEKEKNALTRQIEPCQRLMEIEGVGETTAAMLYTTLGDGKQFKNGRQASAFVGLTPKQHSSGGKVFMIGIDKCGGVKELRSLLYLGAMSYVGRLPEKPKTQKDAWLRSIIDRVGFKKACIALANKVVRTAWAMLRYETEYKPVLLAN

SEQ ID NO: 192088 - protein, 409 aa, unidentified
MEVMFDRVAGLDVGKGSVTVCVRTPGSRGRRSETRTFKTTTGSLHLMRGWLVEAGVSIAAMESTSTYWKPAFYCLEEVMEVWLLNAAHMKAVPGRKSDVRDAEWIAQLLEHGLLRPSFVPPPEIRRLRMLTRYRTQLMGDRAREIVRLELMLEDASIKLSSVVSSLKTVSARAMLTAMIEGEQDPLRLADMAKGRLRRKIPDLAQALTGHFDANHARLARSMLQRLDLVEQALAELDAVIAEACQPWAHQIELLETIPGVGPKVAQVIVAETGADMSRFPSAAHLAAWAGLAPAMHESAGKQTPAGKRHGNKWLTAMLVEAAGSVGRMHGKNYLAAQHARLLKRRGMGRAQVAVAHSMLVSAYWMLKRGQPYHDLGADWHRRRNDEAHTRRLVAQLEHLGHQVTLSPAA

SEQ ID NO: 192089 - protein, 408 aa, unidentified
MDLHRPHDYEVYCGLDVGKSDHHACALDPAGRKIHDKALANDEAALRAVFTKLLTRGRVLAVVDQPAAIGALAIAVARDMGIDIAYLPGLTMRRLADLQPGQAKTDARDAYVIADAARSHPHTLRRVGTDDETLADLGVLAGYDDDLAQQATRLTNRLRDALTHVHPALERLLSKHMDRGGVLDLLAAAGTPTALATLGEHGIADLLRPRSPRLARTLPALIITTLTQQSVTIAGTAAFSRVITGVAAQLREVRDERAALAVELEARLEAHPLAEVLTSMPGVGVRTAIKILTIIGDGSAFTSAAHLASYAGLAPVTRRSGSSIRGESHSQRGHHALKSALFLSAFAALGDPASRAYYDRKRAQGKLHNAALICLARRRIDVLFAMLRDRQPYRPQTSASSAEVAVAA

SEQ ID NO: 192090 - protein, 379 aa, unidentified
MSRHRDGAPVEAQHATVLLVFELSKATWKLGVMRPGSEKLSRYTVAGGDVAAVASLLEKIGGRIGGPVRIVSAYEAGYDGFWLHRWLEGQGVESRVLDSASIQVNRRARRAKTDKLDLEQLMRVLAALERGEPKVCSVVRVPSVEGEDLRRLTRERGRLLRERVAHTNRIKGLLFGQGVLDLEPLEASFLDQLVEARTGDGRALPPKLVAEIRREHKRLGLVVEQIAEVEAEIRSLAKAPAAGSTPAKAVQLTRLKGIGPASAWPLVNEVFCRRFDNRRQVGGYFGLDGSPYNSGQSRREQGISKAGNPRARALAIELAWLWLRHQPNSTLSRWFSERVGVLKGRIRKIAIVAMARKLMVALWRYLETGVVPQGAVLRT

SEQ ID NO: 192091 - protein, 345 aa, unidentified
MDTIYIGVDFHARQQTICYLKTETGELVICELKHQDKQEVRGFYAQFKGQVIVGLEASGYSPWFERLLEELGCEVWLGHATEIRRRARWRQKNDRRDAELILDLMLHHEFPRLHRPAAESREVLRMLRYRQKLIKLRTMSKNSLQAIALQSGLAKGRGLFTKTGQQELSTAEMSPVMQWQREHWLQLLKPLNEQLLETMVWFKAQSKGDVCITRLRTHPGIGLLTSLCILHTLQPVSRFRNTRKVAAYAGFDPIERSSAERKCFLGISKAGSRLLRYLLVEAAQTAVRKDEDLKRFYKRLAERRGRPKAKVAAARKLLIRAYIMLRDEIDYAEFRRRAVAARLAR

SEQ ID NO: 192092 - protein, 385 aa, unidentified
MKTMTLQRESTPSSSTCLLLAFELGERRWKVGFTVGIGQRPRVRDLAAGAVARLDDEIRRAKQRFGVPSDAPVISCYEAGRDGFWLHRYLVAHGITNHVVDSSSIEVSRRARRAKTDRLDLGGLLTLLARFVQGERRLWHVVRVPSVTEEDARHLPRTIEAVTQHRTRLINRVKGLLATHGVRCRVDADFLRTIREVRLWDGTPLPPGLHERLQCEWAQLEHLEQQLRALKVVRTRRQRDLTTTHGRTITQLLRVRGVGPTSAAVLTAEIFGWRQIRNRRQLGALVGLVPAPYQSGQMQRDQGITRAGNTHARHVIMQVAWGWVRYQPHSELTQWYQHRFGGGGKRMQRVGIVALARKLLIALWRYLERGVIPEGAQLKPLPVSA

SEQ ID NO: 192093 - protein, 303 aa, unidentified
MDRTTYGLDLAKNVMQLHWVDSETGEIGRKKLARAKLGEFFAQLQPARVAMEACGSAHHWARVLGGLGHQVELLPARQVRAFVRSNKDDAADARAIWLAAQQCDIRRAPVKTVEQQAVMSLHRARSHWVSVRTATLNMLRGLLYEFGVLLPGKKAGLKTMSARRAQVDDQLPPLMRRLVDLQLETLKGIERSIDQLEAEIAEQQRKGDTARTLREVPGIGVLGATALAATLGDASNWRSGREFAASLGLVPAHSGTGGKTRIGHLSKRGDPYLRTLLIHGARAVIEPHRLSRRPVGLSQTGVV

SEQ ID NO: 192094 - protein, 339 aa, unidentified
MGVYAGLDVSLDAVAICVVGETGEMLWQGKVLGDPEAVRGALDRWRDGLARVGLEAGATSEWIGGHLVDEGFPVVCLESRHVKAALSAMTVKTDRNDAHGIAQIVRTGWFKTVHLKSAAGQRLRTLTAARKAAVRALTGNEQVIRGLLRPLGLKIGAVTRVRFEARVRQLVGTDRLLLSIFEPLLRLHKSLRENLADLHRLVLRAVRADPVCRRLMTMPGIGPVTALTYRATIDDPTRFRRSRSVGAYLGLTPRRYQSGEVDRVGRITKVGDGDTRTALFEAANVILRPTTRWSSMKAWAMKIADRQGVRRAKVALARRMAVTLHRMWVDEQDFRWTAV

SEQ ID NO: 192095 - protein, 399 aa, unidentified
MLAVGIDISKSKSVAAILNQDGSMHTSPFEFHHTQPELDAFIKYILNSNQSATILMENTGHYHYPVLKAFREAGLPVCMVNAYQIKKFGDMDLRKAKTDKKDAVRIARYALEKSYSLVPYTSMEQKYEDLRFLARQYNQRMLTLKTNKVFLLNLLDETMPGITNILPLTTRTPETSLSVLFINRFKSYDRIKKMGKSRFLDAFEKIARKSRNRQTKTYGLAIYEAALRNITTRGENEYTLAAQDQCLELVCESQKAADSIILKMQTLAETLPEYAVLRSMAGVGDRLGPLILAEIGDIRRFHSGKALNAYAGNDAPPYQSGIFESHNRHISKRGNAALRKYCFEVMQALKLTRPQDDPVYLFLLKKEQEGNPYNVAKMAGVDKFLRIYYARAMETLKQQ

SEQ ID NO: 192096 - protein, 310 aa, unidentified
MEITVGIDVSKARLDVYVHPAGESFAMGNDEAGVQALVERLGQLEGLAWIGIEASGRYERLVVAQLAAQGLPVVVLNPAQVRSYAQAIGQRAKTDPIDARLIALFLEAVRPELRPVADAQTQELAALMARRRQVVAMLAAERARRQQAAPGLARVSIARSVTFLEDELRSLDLEIDKTVRGTPVWRDKENLLASVPGIGKTIARTLLAELPELGTLNPKQIAALAGLAPYTRQSGKWRGRSFIGGGRTVVRTALFMGALVAARHNPVLKAFRDRLVASGKPKLVALIATARKLLVILNAIMRDKQPWRPA

SEQ ID NO: 192097 - protein, 387 aa, unidentified
MPKFDDLSRSLVALDQDSTLIAAIELSRSAWLVGGLVPGVRRNPRKKLAPDAQGLLGLLHRWRDEAVAAGHRIDRICVAYEAGRDGFWLARWLRERGIECQVIHPTSIPVSREHRRAKSDQLDLGLLLRALLGWLRGEPKHCSMVAVPTIEEEDAKRPIRERDSLVVEATRLVNRMTSLLALHGIRGFNVKLKGAAAKLGQLRTAEGVPLPPNTAAELRAAMQRRQAIKARIAEIEAARLERLRQVPQTGPTAMIVLLARVVGVGIETAEMLVREVLSRPLRDRRAVARYAGLTGSPDESGSKRREQGLAKAGNARVRRGLIQLAWRLLTHQPQCDLVKWYRERTVDGRSITRKVMIVAMARKLLLALWDYASSGQVPPGMRLHPAA

SEQ ID NO: 192098 - protein, 360 aa, unidentified
MAHNSLSALQSFVALYHSEPFWIGIDVHKRSYHLALLRADAKTFTLVVPATPEKLVEQLRHLDIRIAGIAYEAGPTGFSLARTLQTEQIPVIVAAPSKIPRSISRGAKTDRLDCLKLAQFASKGMLRSIAIPTVQEEAERALCRRRHQLVDSIRRSKQRIKGFLLYHGVKETTTLKNWHSDYPEQMAALPLEEEGRFTIESHLRELTFLQNELSSVTHQLDQMNSKPRKRAVIRSLTSVPGVGKVVATTFHTELFRPERFNQREEVASYLGLAPSVRQSGERTQRGSLVPVGQTRLRSLLIEAAWIWRAKDPDAQRIYNKLLSTTGIPQKAIAALARRLAIILWRLSIEQRAYRPSLLQK

SEQ ID NO: 192099 - protein, 410 aa, unidentified
MNPIIDGCAGLDVHQATVMATVRLRDEAGGRRSITAEFSTTTLGLLTLRDWLHAYGVTQVAMESTGVYWKPVYYVLEDDFSLLLVNAQHIKRVPGRKTDVTDSDWIAQLLECGLLRASFVPPRPIRDLRDLTRYRKHQIRDRAREVNRLHRVLEDAGLKLSTVASDVMGVSGRAMLDALLHGTTDPAVLADLAKGKLRRKLPALREALQGHFRAHHAWLVGQILAKIDFLDEMITSLTGEIDRLVAPFAPMLANLDTIPGVDRKAAITLLAETGGDMSRFETDHRLCSWAAICPGQHESAGKRRSGKTRKGNPYLRTTLIECGLAASRANRTALQACYRRVRRNRGHKKAVVATGHQILRIAFHVMHRNVSYHELGADYLDQRQRDRAIRRHVRQLEQLGYKVLLVEPAA

SEQ ID NO: 192100 - protein, 488 aa, unidentified
MAHSADTEFSSPAEAPARKAGWVHAHCARLRSPYAAQDKPFASGSTNPDRKGSDIMLKINYMSTLFVGIDVSSKSNAVYAMDFEENKYISSLFGNNQPGADELAGMIAGCMQNHKNLDTVIVCLESTSVYSVHIANFLSTCEMLMPYKPYVFVVNPKTTANYRKSYIGMEKTDPADAFLIADFARVGRTKKLEPWRGSQFIALKRLTRHRMHLSECIAREKTYMVSNLYLKFSELQLLDGDDKPFGNIYGATSSAVLTEFLSPQEIIDLSEEELLAFLAEKSRNRISDISRTSELLRKAARDSYRLDKCMYEPLNVSLASSFNCIQAYQKEIKLIEQAIEKCINGMNPNAFLILKSIPGVGPVWASGILSEIGDITAFHSSDALAKYAGLYWLKNDSGDFTSEDNAVSKAGNPYLRYYLGEAANSVRRYVPEYADYYAKKYAEVSKHQHKRALALTSRKFVRLVFGLLAKNQLYTGEKLDSEINTESN

SEQ ID NO: 192101 - protein, 440 aa, unidentified
MSNPRPLTRGDRRRNEKLARLRSIVRRDLAIVGIDLASAKQAAVVADHDSITLGRRMFDGDPWVIDDIIDWALPIAAEAGFAGIVVGCEPTGHRWKPVLDRCRARGIEVVCVNPMLVHRGREEEDFTRDRSDFKDSTIIARRVADRHCYVPYGLEGHWCRLRHLGARRNDQLVEATAARQQLRDLFECVWPAVLRSAAKPLESTTWRAAMAVSVDPAEIADMGYETFAAAVGVELARWGGQRRNHRVLQAIWAAAIEPDGVARERPAAIERATFALRDWQRALDELADVEARMVEVLDALELTELVKSIAGLSAVGAAAILAEAGDPARFDSARTWVKHAGLCPRANESGTFAGQTKVSGRGRPGLRTAAWRAIWGALHHNTVYAARYTHLRTRTDNPLRDGQARAAIAAALLRQLFVVVTRRVAWNPAIAAGEEAPIAA

SEQ ID NO: 192102 - protein, 367 aa, unidentified
MGWMAPLRHLGAKVLVGENQPADREPSMSEITTVGLDLAKNVFQVHGVDAEGSTVLRKQLRRAQVLAFFSGLPRCLVGMEACATAHYWARELRTLGHEVRLMPAQYVKAYVKRNKNDAADAEAICEAVARPTMRFVPAKTAEQQAAVLLHRGRERLVRQRTMLVNALRGHLAEFGVIAPQGLRNVGRLIAIIRDEEDARLPGLARQVLQVLAVQIEQLEAAIAALEKQLMGWHKSNPISQRLATIPGIGPIIATAIAAMVAEPSGFRSGREFAAWLGLVPRQNSTGGKNRLGGISKRGNQYLRRLLINGASANLLRSKATNADPWVIGLRRRRPSLVVAVALANKTARIAWAVMHRQENYQRMATAA

SEQ ID NO: 192103 - protein, 443 aa, unidentified
MSRKKRTHLRGERGQAFANKIRGIPLDQILCVSLDVHKYFHVVIIHNALGEIVTPTFEIDIFQTGFERLCLAIDEAIVQTKTQVVLAGMEPSGHYFENLARHLRQRPQPVTLINSFAVKKNRDQQMMQYEKDDEIDAAAIGDLLRRGEGSPFNPPSGIYLQLQHLGRVRFSKVKMRTSLQHQIIGHLDRIFPGLVIMGEEAKDRYEPLFATDFWKCQTMQHLIRVCPNPHTLVAMSPHDLIEAFHAQNYRMGPVRAAKIITYAKKVLLPDPELAAIRCHLLPHDIALLEDVEHHIAQLERELYTLLLETPYLVWTKLKGLSDTQVASLAGAIGDPANYKYAAQVFRRSGLVPGRNDSGTRQRKGKGKKVIKVGDVYLRRALMNALATLILHQPVLRDYYNKLKISKPAGVARVATARRATGILWAVLRDQHSETLILKKGAKM

SEQ ID NO: 192104 - protein, 384 aa, unidentified
MEKSSTLYVGLDVHKDSIDVATADAGRDDEVRHVGRLGGDLAGLDKALRRLISKGHRLHVVYEAGPCGFVIWRHLRAQGIECEVVAPSSVPKRSGDRVKTDRRDAMMLARLSRSGDLTAVRVPGAADEAVRDLARSREDAVRECRNARHRLKALLLRNGIAYAGRSAWTGAHLRWLATLKLEHAAQQIALQEYLHAVTEATARIARLEQAMRETLPEWSLAPVVQALQAMRGVQLVAAMTLVAELQDFLRFDNPRQLMAYVGLVPGEHSSGPKRRQGSITKAGNSAARRMLVEVAWHYQHSPRVSPIIATRQDQLPKEVTDIAWKAQLRLNAKFKRLVARRVMKNKAVVAVARELTGFVWAIGREVQITGWQGIKTEPVGSAAD

SEQ ID NO: 192105 - protein, 337 aa, unidentified
MKYCGIDLHSNNSVVVVSDEGDRIVFNRRLPNDLGQIRAALEPHQEELAGVVIESTYNWYWLVDGLMDTSYRVHLAHPAAIKKYEGLKHSGDFADAAYLAQLLRLGLLAEGYIYPREERGARDLARKRRQLVRYRTAQILSIEGILMRQTGARMKGEAVKRLTAEQVDAFAFAPDVALAVEANRAVSQALGQQIEALERRLKQRVSLRPEYRLLKTVPGIGDTLATTIMLETGSIGRFAQVGNFSSYCRCVDSLRESNGKKKGEGNTRNGNQYLAWAFVEAANFALRYCPQAKSFYDRKKSKTNRVLALKALAHKLARACYHLLREQKPFNVHLCFG

SEQ ID NO: 192106 - protein, 346 aa, unidentified
MMIIGCDFHPSWQQVSWLDTESGDCGERKLVHASGDAKQFYQQLAGPVLIGMEATGNSQWFIELVEDLGHEIWIGDAAQIRASYVRKQKTDKRDAVHILKLVIEGRFPRLWTPDREQRDLRQLVLHRHKLVIIRSRVKNELQHLSLNKGVQRKHKLWSQAGQKMLRELPLKPWASCRREDLLGLLAMLNQQIGKLDDAVQTVAEENPQTQLLMTQPGVGPNTALAYVLTIGDVSRFARGKQVASYLGLIPREESSGGRQKLGSITKQGNRMLRSLLVEAAQVAVQHDPGLRKQYLHRCHQKPKGVAKVATARKLAVRLYWMLRSQVGYPEIVRIESSSGLPLVGAS

SEQ ID NO: 192107 - protein, 318 aa, unidentified
MKGESIGIDVSKGTLDAAAYHANQKWQFSNDEAGIEQLVRIFSELAPALVVMESTGGYETPVAYALHKAGIPCAVVNPREVRDFAKATKKLAKTDAIDARVLAHFAAVIEPEPHDIPDEQTQELEAIMARRRQVIQMLTAEKNRLHTARKPVKDAIEAHIAYLENELARSDTDLQGRIEESPIQREKYKLLQSVPGVGPNLCATLLVELPELGALNRREIARLVGVAPLNRDSGAHRGKRHVWGGRPQVRAALYMAALVAARFNPVIKQFYVRLCEAGKAKKVALVACMRKLLTILNSMLKHHLPWCFNQPVLSLNYV

SEQ ID NO: 192108 - protein, 406 aa, unidentified
MEGPIITVDVSKGSCHYQPFIENGHPMRKPKQLSATIDGFQKLGQTIKDLEAKTEREDIPVIFEATGVYHRPLQKYLEDHKIRYYIISPLLSATYRKTDLHSNKTDALDCAHIAKAYYCEKELRQYQAQPQEYKRLYQLSRIYESELVHLRKRKVSLRSMLDIIYPRIDKTFKGNQNLYDPIPMEILKRYPHPSLLLSHREDTIVKAVGHRTGHLKGYTERIVHKIYEKAKECYSGCEINDIEVINLPRLIENVQEQKKKCDSLLKEMIEIARTCPYFASVVSIVGIGENLASRIIAELGDVNRFDNRAAIVAYAGLNPKIQQSGDIDGLHLKISKKGNKHLRCLLYLGAQCNYRLRKEDPLYEFTKKKRQQTQCPLSSKAAYTASAHKLLVIIYSLCKNGTLYHS

SEQ ID NO: 192109 - protein, 309 aa, unidentified
MKEELVYLGVDIAKSYLDAAIGDERRRFANERIGHRELIKWVKQLKAPVQVICESSGGYERALVQALVGAKLKVSLVQANRVRQFARAAGILAKTDRIDAEVLCEFGRRMRPQTVTAARLEQERLRELESQRRHLTHLLVMEQNRGARVSDASVQRLNRRLINQIKKQIEHLDLLIKVYIDQSHELLAKAAKLTSISGVGARTAALLLAQLPELGQLNRREVAALVGVAPFNRDSGKMRGKRAIYGGRRPVRHGLYMAALVAAHHNPILRAFYLRLRAAGKPGKLAITATMRKLLIVLNSALKPDLNYT

SEQ ID NO: 192110 - protein, 354 aa, unidentified
MRMVSALDVHRRQITYATVDVGSGEMSRGRISPASREPMREWLARFDGVGAAHSPLEGTTGWRFVVEEVERAGHRAHLADPAETAAKRGRKRRAKTDKADCDLLLRLLLAGELPESWIPPAHVLELRMRVRLRKALVDERTAWQQRLQAQLYHQGVPAGLRPRTRAGRQALATVELSPAGRELVALALRMIDGIDRELAPLDRALSVFARRQPGCRALIARLYGVGPVTATAIVAELGDARRVSRSDDAVRHCGLDVTVHQSDSKRSPGHLSHEGPELLRWALFEAAQQACRPASPDYEYYRQVARRIDHNRACLSVARKLCRRAYHILRELGDEALAPIGPSSADNEAIAAAA

SEQ ID NO: 192111 - protein, 327 aa, unidentified
MTPAILGIDVAKETLDVALKIEQRLLHKQFENTGSGYQHLTTWLKKQGSTQLHACLEATGQYGEGVADFLFSQGFQVSVVNPARIKHYGNSKLRRNKTDKADAELIAEFCEKEKPALWTPPPASFKDLQALVRHLDDLLETRQQETNRLGSGVHTKAVVESLSALLAFLDQQIKQCKQAIQDHINSFPELRRMQNLLITIPGIGRLTAARLLGEIRNILDFEDARQLAAYAGLTPRNFLSGTSVHKKSRLAKTGNAHLRKALYMSAISAKHHNPIVSQFCARLSQNGLRPMEVIGAAMHKLLHLVFGILKSGRPFDPNYLAYQQVPS

SEQ ID NO: 192112 - protein, 370 aa, unidentified
MKKHSTRPQSPRGAAARSKGPITIGLDVGDKTSRYCVVGDNGEVMSEGSVATTRKAMAQKFSGMGRCRIALEVGTHSPWLSRLLSKLGFEVIVANARQVQLISASSRKNDRMDAHMLARLARVDPELLRPIRHRSEQAQADLMTIRIRAALVEARTSLVNAARGFTKAMGERLPACDTDSLGVEKLEALPAALQPRLQPLLEQIEALTAQIKKLEGHIEQIARIEYPETRLLTQVSGVGTLIALTFVLTVEDRERFQKSRDVGCYVGLRPKQSESGQSQPQLRITKEGDRYLRTLLVQGAHLILNRRGPDTDLKRWGLKLAQRGGKNAKKRAIVAVARKLAVLLHRLWVCGEVYEPLRNSRPTPASKHAA

SEQ ID NO: 192113 - protein, 485 aa, unidentified
MVLGNVGDIGERVKRIPFERVSVDNVSIRCGIPFEIMEEVVATRKRVEFELAHPNAAGIDVGSASHWVAVPVDRDDEPVREFKSFTADLNALADWLQACGVDTVAMESTGVYWIPLFELLELRGFTVYLVNARHVKNVSGRKSDVLDCQWLQQLMSFGLLSGAFRPKDEICALRAVVRQRDMLLDYQASHIQHMQKALTQMNVQLGNVISDVAGATGQAIIRAIVKGERDPQKLAALRDCRIKATEEEIAKSLHGNWREEHLFSLGQALGLFDAYQAKIEECDGQLEKMFQRLERHQGELAKSRRRSRARNAPRFDIRAAMFKLCGVDLTTINGIDVNTALQVIAEIGPDLSRFKSTKHFCSWLGLCPGTKISGGKVLSGKTKRIANRVSRALKLAASNLRASQSALGAYYRRLCGRMDRSKAIAAAAHKLARIIFALLTKGSTYVDQGQDAYEKRYKERVLCNLKRKAAQFGFELQPSAQAKMA

SEQ ID NO: 192114 - protein, 402 aa, unidentified
MNAVGIDVSKGKSMVAIMRPFGEIVSTPFEIKHTSSDINSLVKLIKSIEGESRIVMEHTGPYYEVLAHQLSEANLFVSAINPKLIKDFDNDSLRKVKTDKANSVKIARYALDKWQNLKQYSVMDELRNQLKTMNRQFGFYMKHKTAMKNNLIGILDQTYPGVNTYFDSPARSDGSQKWVDFASTYWHVDCVRKMSINAFIDHYENWCKRKKYNFSKSKSEEIYGKAKELVPVLPKDDITKLIIKQAVDQLNSASITVESLRTLMNETASKLPEYPVVMAMKGVGTSLGPQLMAEIGDVSRFTHKGAITAFAGVDPGVNESGSYEQKSVPTSKRGSSDLRKTLFQVMDVLIKTHPQDDPVYQFLDKKRAQKKPYYVYMTAGANKFLRIYYGRVKEYLASLPES

SEQ ID NO: 192115 - protein, 353 aa, unidentified
MQCIAFDSHKHYTWASVQNEAGDVLREQRIDHARGALRGFLEEFEQGSPVAVETIGNWYWITDEIEAAGMVPRLVNARKAKLMSGSINKTDKLDARGINRLQRSGTLPTVWIPPKPLRDARELPRTRMVLVRQRTQLKNRIHANLAKYGLSTAEVTDLFGVRGRRILAQCLEQLPPQTRYATQSLLEELDQLHARIEDLEGRMAKLFGETKELELIQTLPGVGFILGVVILTEVGDVSRFPSASHLASYAGMTPRVHASGGHVRYGRTRADVNHYLKWAYAEGANVGMMHRRRHPQRHVSRLYERVKRQRGHPKAIGAVGRHLAEATYWMLRNQEPYRDPATDRAQGESKRET

SEQ ID NO: 192116 - protein, 424 aa, unidentified
MKVTYQTCCGVDVHKSFLVATIVKTTGGIEPSYQKKRFSTFNNSILEFKQWLLDNDCHDICMESTGKYWVPVFNLLEDEINVVIANPKWVKAVKGNKDDAKDSKWIGDLFRLGLVKGSYIPCKKVRILREYTRYRYKLVSCRSSEKNRYQNALTVCNVALDSVVSDIFGKSSTSIIDYLLEQSGTSINHEEIASKLLRSLKSKEDAVIESIEGYQMTDAQKYRMRLVRAHMDYITAEINDVDKMIENMISSNPDFENAVQFLCTIPGVKHDSAITIISEIGTDMSQFSSSKRLCCWAGLTPGSNESAGKKKSVRITRAGVYLKPALVQCAHAAVKSDKSPYYKKKYDSLVKRRGKKRAIIAIARMILTAIYQMLSTGEQWNPSDLYKIDMPAPLFEKQKAKAIKQAKKLLQREGLLPPDEPLAS

SEQ ID NO: 192117 - protein, 325 aa, unidentified
MRQPQSPVKPQTQVGLDVSSQTLDTHIRVDGKAFSVPNTDEGFDRLCELLSAYDVTMILMEATGGYEDNVACYLQLQGYDVVVINPRHARRFAQSMGRLAKTDRIDAAILAHMAFMIDSGPDRERYIKPVTDEQRKQLSRMSSRRGQVVDLITIEKQRLTHADEYARESINEIISLLNAQLKRIESDILRYVKKNFSELANRLLAIPGVGVQAVTVLIADLAELGHVNRRRISALLGVAPFNHDSGKFKGQRRIRDGRQSVRNVLYMGVISATRFNPVIRAFYDSLLSRGKPKKVALIACMHKLIRIINAMMRTGKPFDMSLHGV

SEQ ID NO: 192118 - protein, 409 aa, unidentified
MLFVGDDWAEDHHDVAVSDEQGRIVRTARLPEGVDGITGFHELVAAHLTGDADAPEQVMVCIEIDRGPWVRALVAAGYQVYGVNPKQAARHRETMSLSGAKSDKADARMLADMVRTRRHQLRQIAADSDEAEAVKVAARTHQTLIWERTRHMLRLRAALRDYFPAALLAYESLTLTGADTLELLAKAPDPARAAGLTNAQISAALKRARRRDIAVKAAAIRDALRAQHLGQAQAVTNAYAATVRAQVAILQTLNTQIKTLQGQVEAHFGQHPDAEIILSQPGLGAILGARVLGEFGDAPGRFADAKSRKNYAGTAPITRQSGKSKTVHARFVHNDRLVDALQLQAGAALLHDKGARAYYDELRARDMSHNAALRQLGNRLVGILHGCLKTGTLYNQATAWSHRYQHLAA

SEQ ID NO: 192119 - protein, 349 aa, unidentified
MRKVYIGIDIGSKTSAAAAIDVRGRLLAAEEFKTTERNLIGFVQRQGKRARVLIEEGELAGWVYRTLLPDAEIVEVADPKRNAWIAKAARKDDRTDALKLAELLRLGSYSPIYHPEEEEMAAFKVTVKHYDRMVKRTTAVMNQIKAILRGQGVITDGKQVYGIKGRAEAISEVTRPEVREMLMQDYSLLDHLLKERARARSLVVRLSKKFPVIERFRKMPGVDYVLASRFVAYIQNPNRFNKRELWRFSSLGVVKRESAGSSVGREHLDKAGNGALKDLSRKAFNGAMTTRRDNGIKTFYQRSCARTGNKNHARLNTQRKILVVMNAVWRDGTEYSDEMFIGKGAFGST

SEQ ID NO: 192120 - protein, 401 aa, unidentified
MPDGIRWVGLDVHARESTVAIFDQATGEVVTRRVVGHPHELLPVLVEIERPARMVYEAGPTGFGLARRARAAGIELGVCAPGKTERSPADRIKTDKRDAIRLARLLAAGELTLVTIPSVEREQLRDLVRCREDIRIDLQRARHRLGNFLLRREIYWEGPGVAWTRKHRSWLTSIRFSDHASQATLADYLHAHDVLIARRDQVEADLASLALSAPCAPTVARLRCLRGIDTLSALGLCAEIGEWERFDHPDQLAAYLGIVPSEHTTGQQRRLGSITKAGSTHARRLMIEAAYHYRRNPVVGQTLERRQRGQAPEIIHIAWRAQRRLNARWRQLKDARRKPNGIVAVAIARELTGYCWEITTWTPHPDRIPPASLPAGDPLPQAPPLPPKQKTTTRRRLTNSR

SEQ ID NO: 192121 - protein, 423 aa, unidentified
MENIAARKLKQVPEGYLIIGVDPHKKRHAAVAITQDFTTRDKFKFDNTREGLETMLRRARTEMVKLDCRGIMFAIETGGHYWRNIAYFLDEQGIPFRFINQFTLKRRREGKDLNRRKNDYRDSEVAAQLLCTGEFTESTIPQGVYAELRTAHNAYRRLVKERTRITNLVKGLLDALFPEFTLVFKDPCGLTALSVLSTCAIPGVIAGMTEEEFVATIKAQHQGRLMRKKLRELHHMARVSIGIAAGARSVSSEISFLVEKLELIREHICIIERTLVSLVDETEEGKYLLSIRGLNYIAVAGLLAELGCFKAYRTAKQMIKMAGSNPTESESTGKRGSHTPMSKQERPVLRYCAWTSVIPMLRLNSDFRTWAKQLRERPAHANPLNGREIVGAALNRLLRLAFAMVKNQTYYQVSKPELTLVAV

SEQ ID NO: 192122 - protein, 344 aa, unidentified
MILIGVDPHKSSHTAVAVDAAGHQVAQRRFVVNAGTFRQLMRWCEQWPERRFAVEGAGGLGRSLAQQLAAAGESVVDVPSTLSARARLLATGGDRKTDAKDALHVAQVALFRHDLRPVVQEDQTTILRLLTERRDDLVHERTRVLNRLHAVLRDLLPGGAPTGLSADKAAALIKGIRPVTATDNCRRDIARDLLADLRRLDRQVKDNEAEMREAVAATRTTLTTLPGLGTVLAAKVIGHIGDVGRFPTEHHFASYTGSAPLDASSGNNVRHRLNTGGNRALNSVLHTIAVCQIRDGGPGQDYYLRKISEGKTPSEARRALKRRLSNVVDRIMKRDQRNHLAQAA

SEQ ID NO: 192123 - protein, 346 aa, unidentified
MMKKVVKQSVGIDVAQKELVVTFGRMYDDFSIEMHAYNVFKNNDPGIKAMVKWVKKLSISELSVQFVMEATGVYHQKLAYYLDENAYKVSVVLPNKISNFFRTLEVKTINDKTASEAIARFGLERVLDQWKRPSELYKKLQQLTRERNQLVSERVVIKNQLHAEQNEAHPNVSSIKRFKARMKFINQQEKEVKQEIDTIVKSNKTLKEEIDRITTITGVGQLTAVIVLAETNGFELIRNKKQLTSYAGLDVREKTSGTSVKGKPRISKKGNRNLRSAMHLPALSAIKHNEKFKGIYARLVSKDGIKMKGVVAVQRKILELIYVLHKNKTVYQLDYDKNEKGTTSRS

SEQ ID NO: 192124 - protein, 401 aa, unidentified
MNAVGIDVSKGKSTVSILRPFGEIVYSPFDVNHSSSDINALIQLINSVEGESRIVMEYTGRYYEVLAHQLSEANLFVSVVNPKLIKDFDNDSLRKVKSDNADSVKIARYALDKWHKLQQYGDMEELRNQLKTMNRQFGFYMKHKTAMKNNLIGILDQTYPGVNTYFDSPARSDGSQKWVDFASTYWHVDCVRKMSLNAFIEHYQKWCKRMKYNFSKSKAEEIYEKAKELVPVLPKDDITKMIIKQAVDQLNNTSATVEKLRSLMDETASKLPEYPVVMQMKGVGPSLGPQLIAEIGDITRFHKKSALTAFAGIDPGVNESGSYEQKSVPTTKRGSADLRKTLFQIMDVLIKTAPIDDPVYQFLDKKRSQGKPYYVYMTAGANKFLRVYYGRVTEYLSTLSD

SEQ ID NO: 192125 - protein, 444 aa, unidentified
MVCFGLILIREGADAPVIMGISEPADLYSPLREVIDLNSLFVGIDVSSRTHFAYLMRPDGDKYSSFSLMNSPKDAKLLSEKIVSALQSLHLSRVSIGLEATSIYGDGLVYALREDGALGSFERKIHVLNPKQVEGFKKAYPDLPKNDEVDAFVIADHLRFGRINKEVYMEDYRYRALRTLTRMRFEVVQNLSREKNRFANYLFLKCSGIAQDPSIPNASATTLALMEHFETVDELAYADLDDLTAFISKAGRGRFSDPEKTAKTVQAAARASYRLPKTINDSINQAMAVSIASMKALQDQIKTLDGAIEKHFEIIPNTLTSIPGIGKVYSAGIIAEIGDIRRFHSHAAVAKYAGLVWTQHQSGPFESENSRLIKSGNRYLRYYLLEAANSVRRCDSEFRRYYDLKYHEVNKYQHKRALALTARKLVRLIFRLLKDNRLYIPPED

SEQ ID NO: 192126 - protein, 377 aa, unidentified
MPTIADRHDAPTAIQTNLAAIFISLELSRSVWLITSLSPGSGEKMSKHSVRAGDVAALLARFSELKRKASERTGKAFPIVVIHEAGLDGFWLHRVLQSEGIESHVVDPASIATSRRRRRAKTDRIDGEALLRALLAFKRGEPRVCAMVKAPTPEEEDRRRLCRERKVLIAERVKHVNRVKGLLFSQGVSGYELTTGDGRPLPVHLKTQIRRELDRLELLLDQIKQAEAERDVLLAAPQPAAPAPAGRMLLEFKGIGAELAAGLWLEALFRHFDNRRQLASYAGLAPTPWQSGSVDHEQGVSKAGNPRLRTTLIQLAWLWLRHQPQSALALWFKERVSGNGGHFKKSTIVALARKLLVALWKYVTAGVVIEGAVMKAA

SEQ ID NO: 192127 - protein, 436 aa, unidentified
MEEVEDEPLFAERVAGIDIGKAAVMVTIRVPGDGGRRRRQQETREFRAVRKDLLALADWLRCWQVTKVGMEATGDYWKPVYFLLEQAGFDCVLYHASQVKALPGRPETDKLDSVWLAKITGRGSLPGSFVPPEDIRRLRTHTRYRRHLTQARTAEKERCEKLLEDAHLKLSSVIRDIHGVSGRDMLTAIIAGERNPRTLAQLARGRMRVRIRELEQALDCSFFTQEHAFILAMMLANIDHLTAQVSELSARIEVLCEPYARQIAQLDGIPGLGIITAQDIIAETGTGMTVFATAGHLCSWARQAPQVSQSAGKRKGKNATGRGNPYTGAAPGEAAIGAGRTQTFPGARYRRLVRHMPRKKAQGAIARTQLVIAHALLSDPGAEYEDPGTGYYERRADIRRRARDHVRSLERPGYKVTIESLSPDPETGELPITQAS

SEQ ID NO: 192128 - protein, 410 aa, unidentified
MEPILISCAGMDVHEKKVDVCIAHGPFDKPPKFEIRTFSTMTSDLEELMAWLKKYEVTTIAMESTGVYWKPIFNVMEGEFAIVLANAQRLKAIPRKKTDIIDCKRIANLLRYGFLPNSFIPPREIRELRDLNRTRRKLVGMMTSEKNRLIKVLEAANIKLSSVVSKIYGVSSLALIRSLLEKDKLSREEISQLAKGKLKKKVDQLEKALNGKLTDHHRFLLEMHLENIDHLAKQIKKIDEEIQRKMVPFQKESKLIQTIPGISEVNASAILAEIGVDMSQFPDAAHISSWAGVCPGNNESAGKKKSGRTQKGNSFLKGALTESAWAASKTKDTSYSAFYRNIVRRRGKKRALIALAHRMLIDIYYVLKSGEPYQDTGAEAVCERTMKRRERSMIRSLEKAGYSVVKADAA

SEQ ID NO: 192129 - protein, 414 aa, unidentified
MAAETIAWFAGVDWGSERHQACLVDAHGTVIGERDYPHSAVGLAELGEWILSISGTANAVAVAIEVPHGPVVDALLDRGFLVYAINPKQLDRLRDRFSVAGAKDDRRDAYASADGLRTDRHLFRRLQVADPRLVELRAWSRLAEELQEERVRLRNRVYQQLWRYYPQMLGLADDLAATWFLELWERAPSPAKAAGLRKPAVERLLKQHRIRRVDADAVLRILRQPAIKVADGVVEAATIHMSSLVARLRVVNRELKHAEHKLDELCGAIGEAGAAAADCITQSDVVVLRSVPGIGKITLATLLAEASGPLSRRDYQALRTLSGVAPVTKRSGKSHVVTMRYAAHVRLRRAVYHWARVAAQHDHRSRTRYAALRRRGHSHGRAIRGVADRLLALACVLLQRQALFDPGLSQAAAP

SEQ ID NO: 192130 - protein, 392 aa, unidentified
MACVRHMVNGLVKREVRTFKTTTKDLLALSDWLAGENCTHIAMEATGVYWKPVWHILSDGDFTLVLANAAHVKNVPGRKTDVNDATWLADLLAHGLIRGSFVPDEQTQEMRTLLRTRKQLVRECSRHVQRLQKTLEDANIKLDSVVSDVMGLSGRRMIEALIAGESDPVRLAQLAHPRLKATPEALREALRGRVTRHHRFLLRLHLQQIAAINAAVEQIDREVDAQVEPFRAMIALLTTIPGVDELSARVILAEIGRDMRRFPTAAHLISWAGLCPRSDESAGKRRSTRMRKGAPWLKTTLVQCAKAAARKKASYLQAQFHRLRARRGAKKATGALAASILTTVYHMLTSGELYRDLGPQHFDHRAKAANTRRLVTRLQNLGYAVQITPLAA

SEQ ID NO: 192131 - protein, 426 aa, unidentified
MNSKQNFKISQVKENSLIIGVDIGSLNHYARAFDWRGLELGKVFKFNNSFEGFNSFLTWINSISEEYNKESSIVGVEPTGHYWFSLREFLYENNIQLVLVNPFHVKQTKEFDDNNQTKNDSKDPSVIAKLVIRGSYSMSHIPQGIYSNLRIADKLRQDVIKNLNSIKNKIKRWISIYFPEFSLIYSSIDSKSGILVLKDTPLPADIVSRGVDNIVEKWRQVKLRAVGKDKAIKLVEAAKNSIGIKNGNDFARLEISLLIDDLEYKQEQLHKITLQIEELCKEIPEIKEIAEIKGVGFLTAVSFVAEIGDIRRFDSPKQIQKYAGLALRENSSGKHKGITRISKRGRRRLRTLLFRVSIPLVGKNKEFSKIYTNYLTRKDNPLKKKQALIAICCKLIRIFYVILSKGIKYDEKKMIEDIEKNLSIAA

SEQ ID NO: 192132 - protein, 412 aa, unidentified
MQVVHPVCCGIDVHAKMLVACLILANGEKKKRTFSTMTAELLQLRDWLVAVQCTHVALESTGVYWKPVFNILEDALTVILINPEHAHALRGRKTDVKDAEWLADLLRHGLLQPSFIPPPVIRELRELTRYRESVVREQSSVANRIQKLLESGNLKLGQVASDALGVSGRMILKALAKGESDPRKLAALARGKLKEKSLSLEQALQGRLTGNQRFVLGELLSRWEQLEAADARVTSEIDKYAQANPKLARARELLDSIPGIGPRVAEVIMAEIGIEMASVFADAAHLASWAGICPGNKATGGKRLSGRTRKGNTYLRSALVQAAWGASLKKHCYLSSQFHRLVKRIGRKKALVAVGHSLLVIIFHVLQDDQTYTELGGDYFDRRHVEQQRDYYVRRLQMLGLKVTLEELPQAA

SEQ ID NO: 192133 - protein, 372 aa, unidentified
MQQNIRVFVGLDTSKRKISVALAEDGRRGEVRFLGDIDNTPDGIRRLVNKLSGKYQQLLFCYEAGPTGYGLHRQITALGHDCSVIAPSLIPKRPGEHVKTNRRDAVMLARLHRAGELTTIWVPDLGHEAIRDLVRAREAAMEDLREKRQHLQSFLLRHGQRYPGLRSWTLVHARWLSNLTFEHPAQYLVLREYRQAIEDAEARLERLTQQVTEVVSTWSMAPVVEAYQAMRGVAFLTAVTFVAEIGDVRRFETPRQLMAYLGLVPSERSTGEQVRRGSITKAGNPRARRVLIEGAWTYRYPARLSRPLQLRQESLPKVVREIAWKAQVRLCARYRRLMAAGKRQTLITTAIAREMAAFLWAIGHEVQPSSVA

SEQ ID NO: 192134 - protein, 340 aa, unidentified
MKKILFIGIDFSKSKFDASLLKSMSDEEVVSGSFENNRGGYVLFLKWVSDHTRIKKEDWLFCGEHTGLYSRDLAEFLSKKNLTVWLENPYQIKCSCGIKRAKTDKIDALEIARYAYRFQDKCTPYQPVDKAIESLSLLLSYRGRLIKEKVLLEVSAKETRRVISRDTTSRFVFENSMRNIERIKKEIKAVEEKMHQILMDSPLKENYLLTVSVKGIGLVTAVALIVYTNNFSTFNTARQLACYCGVVPFEKSSGTSLNRGKHISHLANRELKTLLTLCARCAIEHDKELNVYYHKKLSEGKEYKVIINNVRNKLIHRIYAVVTHKMPYMENYLNPFRECA

SEQ ID NO: 192135 - protein, 317 aa, unidentified
MTATPRFVGIDVSKFRLDVATRPESDRFTIGNDEVGVRALIRQMNDLQPLAIVLEATGGLEMLVVSQLAAAGLPVVVANPRQIRDFARATGQLAKTDALDAEVIARFAEAVRPGTRPVKDKALRDLESLVTRRTQLSGMLTAERNRRTMASDVVACSLDANVQWLKRNLRDIDQAIAKLIRSTPLWRAQDALLQGVPGVGPVLSVTLLAGLPELGRLNRKQIAALVGVAPLNRDSGLFRGVRCVWGGRAHVRSVLYMATLAGVRFNPVLRTFYQRLRASGKKPKVALTACMRKFLTILNAMVCSGTPWHGQIGVGAS

SEQ ID NO: 192136 - protein, 313 aa, unidentified
MAQILPTVGIDVSKDWLDVAVRPGEQQFRVANDAAGWRELCRRLKSVEPIAIGVEASGGYERDLTHALLAADLPVRMVNAWKLRQFAKAAGLLAKNDRVDAHAIAWFTATLPSREVRRDPAREHLAELVRARRQLVDARQAFANQLEHMRDGLLRRQMARRIRQLEADEASLDQRIVQAIEAEPTFAARHELVCSMRGVGPVLGSTLIALLPELGSVTNRQIAALVGVVPYDFDSGKMRGLRCIFGGRADVRRVLFMAAQAAAIWNPDLKAFKQHLRAAGKKPKVAIVAVMRKLIVTLNAMLRSGTKWHPKTT

SEQ ID NO: 192137 - protein, 338 aa, unidentified
MKKFSGIDLHSNNSVVVICDVEDRVIFEKRLPNDLKQILKALAPYREEIVGVVVESTYNWYWLVDGLMDNGYKVHLANPSAIKKYEGLKHSGDFADAAYLAHLLRLGLLPEGYIYPREGRAARDLARKRMQLVRYRTAQILSIENILIQQTGARMKSDAIKRLKRDEVKALGFAPDVTLAMESNRAVMEVLQQQIDVLEKRLAKRVGLRSEYRVLKTTPGIGDTLATTIMLETGTVERFAGVGNFSSYCRCVDSKRESNGRKKGEGNVRNGNKYLAWAFVEAAHFACRYGPEAKSFYERKKKKTNTMVATKALAHKLARACYHMLKEQKPFDVNRCFA

SEQ ID NO: 192138 - protein, 338 aa, unidentified
MIPHIPNSCVDSKSASRKAGNRKGMSEKIFVGIDVSKDRLDIAASNGERWSCANREGDFTELLERLRGWPVELIVLEASGGYEGAVVGSLAGAQLPVVVINPRQARDFAKACGRLAKTDQIDASTLALFAERIRPEVRPLKDEQTRELEALLQRRKQLLNMLVAERQRLQIATPTVRTDIREHIHFLVKRLKDVNGDLDELMRKTELWREREQLFKPVKGVGPQTLRTLCASLPELGKLNRRQIAALVGVAPYNCDSGTLRGKRHCWGGRAEVRCALYMAAITATRCNPVIRTFYARLLKAGKAKKLAITACMRKLLTILNAMARDTSAWNQNMHVIA

SEQ ID NO: 192139 - protein, 413 aa, unidentified
MEHKTITAVGIDVSKGKSTVAVRRPGGEVVLTPFQVEHDAAGLSGLVRTLQNLDGDIRIVMEHTGMYWRPIALALKEAGFFVSVVNAMLIHDFSDNSLRKIKTDKADSMKIANYALSFWAELRDYSPEDETRQMLKMQNRLYLRTKKSSVILRNGLISLLDQTFPGVNMLFDSQPKRSNGHFKWVDFVKRFWHKDCVAGVSLAAFSDVYRKWCAKSSYRFSQSDAEKLHAAARNAVATFPKSDSTKLLIVQAVDSLNAVYDALYILRGEMLRLASLLPEFDIVMAMQGAGEVTGPQLMAEIGDVRRFTHKGALVAFAGMDAPPFQSGTFDSKSRRISKRGSPHLRKTLFMVASTILQHSDPANPIFQFMDKKRAEGKHFYVYTVAGAAKFLRIYYARVKTHLAMLDSGANSAA

SEQ ID NO: 192140 - protein, 346 aa, unidentified
MILIGCDFHPSWQQVCWLNMASGETDNQKLVHASGDAEKFYRRLTVPVRVGIEATGNCQWFLELLGKLGHEVWVGDAAKIRACDPRQQKHDPRDARLLLQLLMENRFPRIWTPSSEEKDLRQLLLHRYKLVRMRVQVKNELQHLAMNKGISKGRRLWSAAGEKALCELPLAPWASRRREDLFKLRSMLNEQIAGLDQAVEKVAEQNDRACLLMTQPGVGPITSMAFVLTMGDVSRFPRGKQVASYLGLIPREYSSGGHQRFGSISKQGNRFMRMLLVEAAQSVVRYDEGFRNEYLHRCHRKPRGVAKVAAARKLAVRLYWMLRTNTAYPEIARVGSSPRVPLAGAS

SEQ ID NO: 192141 - protein, 412 aa, unidentified
MQAIIERCCGLDVHQETVVACLLVGAPGAQPTKEVRTFRTVTRDLEALRDWLWAAGVTHVGMESTGVYWRPVYAVLEGHFELIVGNARHIRNVPGRKTDVKDSEWIADLVRHGLIAKSFVPPQPLREMRELLRYRRKLVESQAAERNRLLKLLETANIKLASVMSDVFGVSGRAMLRALIEGKASAEAMAALAKGQLRRKCADLILALDGRIDEHHRFLLAMQLRRLEAIEADIAALDLRIGQRLEPYRTQHALLVQIPGVDWLVAAVLIAEVGVDMSVFLSVYHLAAWAGVCPGNHESAGRQKSGRARKGNIHLRTILVGAAISAARTKGSYLKDKFHRLKARRGALRAALAIAHKILVSAYHMLAKNLAYRDLGEAYLDQIGQTRTVANLKRRLERLGYHVTLQPTPHTA

SEQ ID NO: 192142 - protein, 415 aa, unidentified
MSLKIVYKICCGIDVHKTFVVACIASTNDKGVTSYESHRFSTYTSGLKTLLQWLLKHNCKDVCMESTGKYWIPIYNILENDCSIVLAHPKYVKAIRGKKTDKKDAKWIADLFKHDLVAGSFMPPADIRQLRDLMRYRFKLTCFQSSEKNRLQNCLTVSNIQLGNVVSDTFGKSAQAILDKLLENPADTSFDLEPLVYKSLKKKLPELRDAIDGYITPEQVGKLKVIKAHYESLESRKAELEELILALAAPYQQELAILQTAPGIRSLFTAIGIISEIGTNMEAFPSAKHLCSWAGLTPTNNESAGKKKSVRVSKAGCYIKPLLVQCANAVVTSKKHPEIRNRYLRLKKRRGHKKAIIAIARMLLTALYHMLKNGENYNAELYRKSDLPLANWEITVEQAIIIARNQGYKVKSATV

SEQ ID NO: 192143 - protein, 434 aa, unidentified
MTTSLFAGREALRNVDVAIGAVDEAGQKHDRRMHVIETGDIDVYLGLDVGKGEHHATAVTPAGKKAFDKRLPNTEPKLRELFAKLQAKHGTVLVVVDQPASIGALPLAVARDMGCPVAYLPGLTMRRIADLYPGEAKTDARDAFIIADAARAMPHTLRSVDLEDETIAELEMIVGFDDDLTGEATRVANRLHGLLTQIHPSLERVLGPRLQHPAVLALLERFGSPAQIRKAGRRRLITLLRPKAPRMAGRLVDDIFTALDEQTVVVPGTEAAALIVPSLAGSLASVLDQRKLLARRIGELLEAHPLSQVLISMPGVGTRTGARILIEVGDGSSFPSAAHLAAYAGLAPATRNSGSSIRGEQPSRRGNKQLKRAFFLSAFAALGDPASRAYYDKKIGQGKHHTQALLCLARRRADVLFAMLRDGTFYEPQPARSA

SEQ ID NO: 192144 - protein, 441 aa, unidentified
MEEKREEKLPQVSEFPEYCTPVGVTVGRIRKAIHPSGTKRFIGLDLSKQSCYVCIINRDGQIELLGKFSLQSDKRSELYEKLQEGDLVLMEASTGTFNIARAMNKLPGVLACVVNPHSTRINETKKKTDKEDSLFLAKLILRTPVEELQLVSIPSDQEMENREVISHYRQVDNRHTQVVNQLHALFFDKGFPEVGKTHDLHTKVGRYGAIEKYFGTDRAYSFTKRIAKDLSKELSLLEEQQAVGERQMARIVKQNDRVAAILGSIPGVGLKTIAAFIAFVGDVHRFSQGKQLSAYCGLVPRVYQSGQKDGIRKITKEGQAALREYLVEAVFAMMRTKFNFPLKEKYLELRQRMKSRKAAIAVARKLVVMIFSMLKNGTLYMVEKEENREQVAAYHKRKYIQSVGRYYKFRESCKDISAMIEITNTFYSNELGVLKFKQQGA

SEQ ID NO: 192145 - protein, 352 aa, unidentified
MKVTTIGLDLAKNVFQVHGADAQGHGLLRKQLRRSQMAQFFAHQPPCLVAMEACAGAHYWGRKLQTLGHQVRLIAPQYVKPYVKSQKNDAADAAAICEAATRGHMRFVALKSVDQQSVLALHTVRSGLVKHRTALSNQIRALLAEFGVVVPKGLSQLKAQLPLVLADQGSELSALVRKLVHLLQDQLAQLQEAVAQLERQIRHWASQDEGAKRLQQIPGIGPISASALVASVADARQFKDGRQMSAWMGLVPRQHSSGGKSVLLGITKRGDKYLRTLLIHGARAVLKAYQRNPAKMPAHLAQLLQRKHPNVVCVALASRNARVAWAMLSRGQDYQHRRKDALELPALPAALA

SEQ ID NO: 192146 - protein, 341 aa, unidentified
MDKELYFGVDVSKKTLDLAYYDGETIDWKNAHIKVSNDDAGFKKIGSWVAKVGKDFDTFLFCMEYTGLYNQNFRLWLESKEYIYGMVEPRKMHRFEPDLDDDQRSLYRIKTDELDAFRIAIYCEQNHKKILRNPSKLPSPVYFKLKRLLAERKQNTKQSVLYKQQLHDICAYDTDLSVERKKLLLKNMQENQKAIDKEIDSYMNEDASISKNYNLLTSIPGIGRIIALETIVLTENFTAINNPRKYACYIGIAPFKKESGTSVRKKTGVSKKGFSEAKADLSIAVLSAIKNNPSIRDYWIRKRKEKCGGIVLNAIKFKLVLRMFAVIKRGTPYVETDAYKN

SEQ ID NO: 192147 - protein, 345 aa, unidentified
MEIAVIGLDLVKHVFQVHGVDAAGRAVLRRKLRRGEVLAFFAKLPRALVGMEACHTAHHWGREIAKLGHEVRLMPPQFVKPYVKSQKNDAADAEAICEAVQRPSMRFVPVKSAERQAVILLHRTRDLLIRQRSSLISAIRAHFAEFGITASGGMRNIDRLLALLQTEGAERRLPAIAAEMLGVLAAQLRAVAERVDEVETRLLAWHRADETSRRLQSVPGIGPVTASALVATVGDPSQFGSGRQFAAWLGLVPQQRSSGGKERLGGISKRGDGYLRRLLVHGARAVVGWRKRAAVDGATSWIDRLLERRPTNVATVAYANKLARIAWAVMMRGRRYDPGRAFAAA

SEQ ID NO: 192148 - protein, 543 aa, unidentified
MVTATARKRWRSIPFRRVHPVSPEGRTGTSDYLKRGSQLQRPEMKTNHSKQTAKAASNDKAAVSAQRRPRRKKARNLRGAVLDGLEQINLHAAGIDVGAGENFVCVPRSSVKAGESPVRSFGVFTQDQDALVEWLKACQVSTVAMEATGIYWVSLFDKIEAAGIEVVLVDPHSVRQVPGRKSDVMDCQWLQQLHTYGLLRGAFRPEASVRRLRVLCRHRADLVCEGASHLQQAQKALVQMNVQLHLVVSDINGETGLRIIDAILAGKRDPSALAKLRDPRIKKSTVPQMEAALTGHYPEEHLFALRQNIEAWRFFQSQLAGCDLQIEAALKAMASAERTGVPLVPPKAVPAAVPGTEGAKPKRSRPLHGNNALTLDFSEQMRRICGVDLMKVCGLNLLSVLMIVAEIGVDMSRWRSAKAFSSWLGLCPGTKISGGKTLSRRTRHVVNRASILLRLAALAAGQTDTWLGRFYRRKRSHLGAPKAITATAHKLACVIYHMLKYQEEFLPLDVAIYDIKAQEHRMRYLRKQAEELGFDLVERKEAA

SEQ ID NO: 192149 - protein, 322 aa, unidentified
MNKNKAQTVIGIDVSKEKLDIYNTHSQKCEVINNDVRSIGSWLAKVRKNFEIETLALEPTGGYENKLTQLLCDKHVPTFAVHPNKLVNYKKSKGENAKTDKLDAKHIARYAVEYREHLKPILPQCASDKNLKEFVRTRQQLMDSLHRFKCHKEHDFKTKVVKRANAQVIRTLEKELSNMEQAIQDEIKNDEKKHQRFKSLQTIVGVGPVVACMVIAEIPELGQISHEQLSSLIGVAPFNQDSGKQAGPGRIRGGRARVRSKVYMAALSASTSNPKMKAVYERLIRKGKPPKVALVAVMRRMLRIMNAMARDESDYVVEGSLE

SEQ ID NO: 192150 - protein, 331 aa, unidentified
MNTLMMPAAAARFNHVIAFDVAKATLSLHILPSGETLSLQNDGTAIRRLLKREQKRNLKQGLGPMLVICEATGGYEDAVLKAASELGIDCHLAHGSSVRAYAKFRGRHAKSDPIDAGLIAEYGRDKPDLKLYQRPRTEEAALRALMGRRAELKDMIQAETCRLEHASLKTVRVSLEDHLAALKEQLALIEKDIRALTRRDEEFDRRSRLMQTLAGIGPVASQTILAFFPELGQIPSATAVALAGLAPYDRDTGKERGKRRILGGRSQIRTCLYMAALAAIRSHAHFREFAGRLTRKGKPFKVAVTAVMRKLIVILSAMLRKDEPWKHANAA

SEQ ID NO: 192151 - protein, 322 aa, unidentified
MENIQINYKYFVGFDVSKDTITVHNSQTGITTDIDNEPSSLRRYVSGLNKEYFAICEPTGGYEAALLDSLVGANIPTHRADARKVKAFIRSLGIHGKTDNIDAKALADYAKERHKGLSLWSAPNAILQELQALVARRQELTALRTAEKNRLQAPMTNRKSGKYIKSSCKRMIALLTKEIKKIQEAITNIISNDERLQDIQNILTSVKGVGSVIAFSLIASLPELGTLSRRQVASLAGLAPHPRQSGKMQGYRRVSGGRREVKRVLFMAAMVASRTNPKMIVFYKRLIKNGKKPIVALTALMRKIITILNAKIRDYRQVKLMS

SEQ ID NO: 192152 - protein, 371 aa, unidentified
MQDSIFIGLDIHKATISVAIARGERGGEVRHWGTIPNRADHVRKLAERLGADGCRLRFCYEAGPCGYGLYRQLVELGHDCIVVAPSLIPVKAGDRVKTDRRDAVMLAKLHRAGELTAVWVPDAAHEAMRDLVRARATAVRVLSKARQHLQGFLLRHGRIYPGKKGWTVAYRRWLTTLGFQHPAQQIVFQDYVDAVTHAQARVERLTGQITELVPIWSLAPVVEAVQAMRGVAFIVAVTVAAEVGDFHRFDNPRQLMAYLGLTPSEHSSGSSVRRGGITKAGSGLARRALIEGAWSYRMQARVGRKMFDRLETLPQTVRDIAWKGQLRMCQRHRHLIAAGKPKVVVTTAIAREMLGFIWAIAREVSMAPARA

SEQ ID NO: 192153 - protein, 423 aa, unidentified
MPVSTLYVGIDVSLKTNQVCPINFNQDVFFNEKFDNSPSGTEKMIIRILDVLSKNKDLNKVLFCMEATNVYHIHVSCLLASDPRLLAYGCKVYAENAKAIQKYKETFLDREKSDPEDAYLCADYVRIGKCKDSLSVIGYQKIALQRLTRQRKHIAEQLGKEKQYLSSNLFLKFSALKVNPEESPFSNIFGKTSSVMLTDFFSNEEIVKADLGDLVVKISEASKYHISDPEETAKLLQNLAKQSYRLDNIASDSVTMAMASSFRLIQTFQNELNKLDKEILRLIEGYDNKYYQILTSIKGVGKVYAAGIIAEINDIHYFKSDDHLASYCGLRWKKNDSGNKHSDHTKQPNTCNTYLRYYIIEAAQSILRFNEEYSSFYCRKKSEVKVNSYKRALVLTSRKFVRLVYGMLRDNKLFDDHYLAHKS

SEQ ID NO: 192154 - protein, 350 aa, unidentified
MIVLGADTHKRSHTVGAVAAATDELLGEQTVPVGLRGFGALLRWARSLDGERAWALEDCRHVSGSLERFLIERGERVLRIPTHLTANARRSARQRGKSDPIDALNVARAALREGLESFPAAHLDGPELDLRLLVDHRERLVRHRVELNSTLLWHLHDLWPELQLPGGALFSKKWSTRISRRLARAEQTMRVRIARDELRRLRELTQAVTGLEREITELVGQLAPQLLSEPGFGPLIAAKLVGEIAGAQRFATPARLARAAGVAPIPASSGNTQRQRLDRGGNRQINAALHRVIVTRARCHPPTRDYIQRRRSEGKSTREAIRCLKRYLARRVWRLLQPTTPPRTSTRSIS

SEQ ID NO: 192155 - protein, 443 aa, unidentified
MSRKKATHLRGERGQDFANRMRGIPSEQILCVSLDISKYFHVVMIHNGLGEIVKPTFEIDMMQSGLDQLCQAIEQAQVQTSAQVVLIGMEPTSHYFENLARHLLKRALPVTLINSFAVKQNREQRLMRREKTDEIDVAAIGDLLRRGEGTPYKPPTEIYLQLQQLDRVRLSKVRIAGMLKNQIIGHLDRIFPGLVVFGAEAQKRYPSLFETNFWTCSTLQRLIRLCPNPHCLAQMNPPALVQLFHEHQSRLGLKSAARIIVRAQETLLPEPLLVDIRAELLQHDLELLDEFQSHLAVLEQRLAQLLATTPYAVWAKLKGLSVVQVASLAAAIGDPANYSEAAQIFRRSGLVSGRNDSGRRQRKGQGSPVLKAGDVYLRRALMNALATLLLHQPVLARYYQQLKKSKPDGVARVATARRLVGILWATLRDQYPTTLICCKGADM

SEQ ID NO: 192156 - protein, 382 aa, unidentified
MELNLTTGTLPKPIEPVLYLAFELSEKNWKLGFTVGFAQSARLRDIPVRDIKNLQKEIQLAKKRFHLPETTMVISCYEAGRDGFWLHRCLISQGIMNLVVDSSSIEVNRRSRRNKTDKLDARKLLNMLIRYHHGENKVWSVVKVPSVAVEDYRQLHRELSSLKKERTQHINRIKGLLASQGKTLSVTSSFEDHLVTLRLWDGRPLSPYMRARLEREYQRIQLIEKQVKQIDDLRYTLLRTSQDPAIEQVRHLMKLKGIGINSAWLFVMEFFAWRAFRNRREVGALAGLAPTHNQSGESSHDQGISKAGNRFVRGIVIEIAWGWLYHQPDAQNSQWYQERFAGKSKRIRRIGIVALARRLLIDLWRYLETGVIPDGAVLLNPS

SEQ ID NO: 192157 - protein, 443 aa, unidentified
MNKNDSAHLRGERGQAFANLVRGIPPEQILCVSLDISKYFHVVMIHNGLGEIVIPTFEIDIYQSGFDQLCQMIDAAQEHTKARLVLVGMEPTSHYFENLARHLLARSQPVKLINSFSVKQNREQQLMRREKTDQIDVAAIGDLLRRGEGTPYKPPTSIYLQLQQIDRVRLGKLKIANMLKNQILGHLDRIFPGLVLISQTAQERYTPLFNVDFWQCHTLQALIRICPNPYQLVDMSPDQLVQAFHAQKHRMGPAMAAKIIAQAHKTLLPDLELAAIRCELLQHDLALLEAVQAHITSLEQRLSNLVAQTPYQVWTKLKGISAVQAASLAAAIGDPANYTEAAQVFRRSGLVSGRNDSGNHQRKGKGNPILKTGDVYLRHSLMNAVATLILHQPVLYRYYKQLSFTKPSGVARVATARKTIGILWAAQRDQSSNTLINCKGAAM

SEQ ID NO: 192158 - protein, 400 aa, unidentified
MRAVFGIDVSKTSSEVAILVNGEKVHGYTILNDTIGFNRLLGDLKTVHNPEIIFEATGVYSRRLQAFLEEYSYAYTRLNPLEAKKQLDSLRVRKTDKIDAEKLAKSQLVHNRKPTYVQEEVYQHLRDLSRFYQNMTEDLVRTKNRLHKVLQVTFPELENLLSTPTGEQYWNLVMAFPCKEFVLSLSQSNLCEIIRQSTSKRISEKRIAYLTDKLIKLAKQSFCAVKKTSPMLEEVRYYAQELLRLSERRQVVLNDMVALAQPLPEYDILRSIPGIAETTATSIIGELGDIRRFQSTNQINAFIGIDLRHYESGNFLAKEHITKRGNPYARKILFKCIHNIASASHTNPCHIADFYEKRKRQSTIASTKPHTIASIHRLIRTMYYLITHNKLYDYSLTQNR

SEQ ID NO: 192159 - protein, 392 aa, unidentified
MTATRVRHSTTRERILYLALELGWNGWKLGFSTSAAQPVRQRNLRARDLAGLHKEIAMAKQRFDLASEVPVRCCYEAGRDGFWLHRYLTHQGIDNVVVESASIEVNRRARRAKSDGLDVEKLVKMLMRYHGDDRKVWRVVRVPSMADEERRHLHRDLQEMKAERTRHNNRIKGLLAGVGLDVEVAADFPERLKELRTWDGAEVPGQLQQRLLREFERWQFVHQQILALDTERARRIRQGTSKQVQMVRDLLRLRAIGDSSAWLFVMEFFGWRRIRNRRELAALAGLTPTPYQSGNSDREQGISKAGNRRVRMMAVEIAWCWLRFQPQSHLSLWYQKRFGKGASRLRKIGIVALARKLLVALWRYLEQGELPEGAEIKAEGQPLLASVAAAFT

SEQ ID NO: 192160 - protein, 351 aa, unidentified
MMLIGVDYHPSFQTIAFFMEETGECCEQELNHSDGQAEKFYRDPKQRGICVRVGMEATGYSRWFERLLAELGFEVWMGDPAAIKAKRVKKQKYDREDARLLLRLMRENNFPQIWVPGPENRDLRQLLWHRHRLVQMRTRIMNQLHALAMNEGYRWKKKLFSEQGRAQLEKLTLAPWASRRRQELLELLDRMNPTIEELTAAVEREARKRPEAMRLMTHPGVGPLTALAYVLIIGTPTRFQRGKQIGTYVGMIPCEESSARKQRLGHISKQGNSLLRFLLVEAAQAAARIHPDWRRRYIHLAMRRHKSIAKVAMGRRLAVRLYWMWRNGCEYSQSLEFGSYAGQLGTGDGVK

SEQ ID NO: 192161 - protein, 337 aa, unidentified
MRYLGVDLHTNCFTVCIRNESGKEKLVTYRMSELKRFLKTLKDTDKLAVEATGNTRFFIDMVEPHIKEAVAVNPGKFEVIRASIKKTDKNDAKLLALFLSKDMLPEARLKNKQQAQISSLVGTRDKLVKLRTTLINKIHNILNHHGIKSKKEAFCSEKALDGVLAMDFDTIVKIELKVLVEQIRSLTDGIRKLDEQIKEVGTKMKGHDSLTSIKGIGDKSATVLLSVIGNIKDFADADKLASYFGIVPRVANSNETEHHGRITKRGSKIGRTTLVQCTLIAKRYNPYLRKFYERIQRRRGTGKAIIATARKFLGIIYETLKNGWIFEDFPNFVIANS

SEQ ID NO: 192162 - protein, 359 aa, unidentified
MQVQRNELNFEGQNIYVGLDVHLKSWTVCIMTEHLEHKKFTQPPQAQVLYNYLVRNFPCGNYYSAYESGFSGFWAHRQLEALGIKNIVTNAADVPTGQKEKIQKDDGVDSRKLARSLRSKELEAIYVPSESTLEERSLLRMRATLMKDLIRFKQRIKFFLYFIGISYPERFSNPCSHWSNNFLHWLKQEVCLSESGRQTLNSMIDEVEEQRKLLLLVYRQIKELAADKKYASNVKWLKTIPGIGLLTAMHFLTEMETVERFEDTDHFAAYVGLVPNRHNSGEVKNDGEMTFRGQSLLKKYIIEAAWIAARKDPALSLAYNQYVHRMNPNKAIIRIARKLLNRIYFILKNKKEYVNCIVK

SEQ ID NO: 192163 - protein, 530 aa, unidentified
MAREASTLSLVTCLPGFPGVVLIPLGRLRTSPILLLARGALLSHDQYPQPKETSMVVPNQEPKKPAKGKKSTKPDKSPQRSIPVPVPASTAALNVINPDAAGIDVHSNMHMVCVPADRDANPVRQFGANTADLHEIAAWLKKCRVRTVALESTGVYWIPLFELLEAEGFEVKLVEPGQLSRCGARPKTDVLDAQWIQRLHSYGLLRGSFRPPDSILALRAYWRQRQMQVRYAASHVQHMQKALEQINVKLAEVVSDITGLTGMSIIEAILGGERDPVKLAKLRDERCHCSEDQIALALQGTWRPEHLFELRQAYELYQFHHKQITECDNQVQAELAQFPNRAGEKTRTHKPRKRGRKSNDLRFDATGPLFKALGVDLTLIDGIDVGTALVILGEIGVDVSRFPTEKHFASWLRLCPPQDESNNTKKRRRRRKNTSRVATALRLAARSVGKTMTPLGLFYRRIRSRIGALGAVKATAHKLACLIYRMLKYGHEYVVQSLEEYEAKTKANMLKVLQRKAAAMGFQLTPIPTQ

SEQ ID NO: 192164 - protein, 403 aa, unidentified
MSPEHSIDIFLGLDVGKSEHHACALDRDGNKVFDKPLPQLESELAGVFHQLQKLGTVLVIVDQPNTIGALPIAVARDCGCEVGYLPGLAMRKAADLYPGRAKTDKRDAFIIADTARTMPHTLRAVDRNDEVLSALKMLSGFDDDIARDCTRTVNRLRSVLTQLYPSLERVFAGSTLTRTPILELLIHYKGPQGLKRAGYQRVLNWMIKRTRKDPTPLVDDIFTALKAQTVTVPGSDAAELVIPQLAANIQALKEQRNTIAEQVEEMLADFPLCEVLMSMPGVGIKTAAQILLAIGDGSDFASAGHLAAYAGIAPVTRRSGSSIRGEFPARSGNKRLKNALFYSAFAVIRSHEPSRRYYERKRAEGKRHNAAVICLARRRCNVIYAMLKNKEFFREIPPRPVAA

SEQ ID NO: 192165 - protein, 415 aa, unidentified
MGVLYARCAGLDVHKDSVVAGVRLAEDGTARTEVRTFGTTTPELLALSAWLAEHGCTHIAMEATGIYWRPVWHILSDGEFTLILANASHVKNVPGRKTDVADALWLAGLLAHGLIRPSFVPETVTQEMRALLRTRKQLVREQASHIQRTQKTLEDANIKLSSVLTDIMGKSGRSIIEALIVGQTDAEQLLSLVQRGVKAAPEKIKAALTGRVTDRHRFLLRLHLQQIDALTTALADIDAEVERGLDPFRQAVSLLRSIPGVSDLAAQVIVSEIGIDMSRFPTAGHLISWAGLCPRNDESAGKRRSNRLRKGAPWLKTTLVQCAWAGSRKKASYLQAQFLRLRQRRGPKKAVCAVAASILTAAYHMLRDGTFYQDLGADHFRRIAPETAAARLAAQITKLGFKCVVTPAQPEAVSI

SEQ ID NO: 192166 - protein, 328 aa, unidentified
MYHLGIDVAKNKLDGCLLNPENDQRRAKTVPNTPEGFTDLRDWLIRQKVPDLSQVHLILEATGVYHEAAALWFIEAGAVVSVVNPAQVKAFGQGVAVRTKTDARDSQVLARYGALVNPPRWQPPAPEIRELNVLIARLDAVEADLRRERNRLEKTAAVPAPATVLDSLQQHIAFLQQEQTRIQAAIHDHIDRHPRLKQDHDLLRSIPAVGEKTAQRLLAVLHGHDFTSADQVTAFLGLVPIECQSGSSLHRRPRLSKAGAPRIRAALYMAAVVATRHNPHIQALYQRLLARGKAKMAALGAAMRKLVQLAFGVLKHQQPYQANWTLAP

SEQ ID NO: 192167 - protein, 372 aa, unidentified
MLIALPHHHQGAMAKTTLTQPTLAEQYDVVIGVDTHKDFHVAVALSANGGRLAECRIPANQQGYSDLRSWSLELGTKPIFAIEGTGSFGAGLCRELMASGFPVVEINRTDRSTRRRLGKDDAIDAEAAARAFIAGLATIEPKGGHHVVEMIRLLKGNKDSATNSRTRAINQIKAILITAPALLREQLEPMANINLIATCAAFRIAVVDCPFAAAKKALRYLARRVLQLEKEIAELLEDLDQLTQQACPGLRKTYGIAVDGAATLLVAAGDNPARLRSDAAFAALCGVSPLPASSGKTNRHRLNRGGNRQANATLHRVVVVRLRWHEQTKAYAARRMEEGRSKPEIMRCLKRFIAREVFHTLLGRPPVRTAAT

SEQ ID NO: 192168 - protein, 403 aa, unidentified
MNGPIVSVDVSKGKSDYQAFKDLNVKFTDVRSIKHTKEGFDEIVNLVKDMERKLETEVCVVYEATGVYHRVLKKVLEDNNIKQFIINPLLSAKTRKNDSLRSPKTDKLDPKSIAKTYYNQSLHSSYKPQTTYHELRELSRYYEDILVRIRKDKVAFRAQLDIVFPGYDTLFDDLYGAVSLTVIEKYPHPELLQKKSINTVSKIIQKKTHHRQAVSNKMASKAIEYSKTIYSGCGKDDIDVLILERLIKKLNEDLNEAERTINEMIRLVQELPDFIIIKSIPGIGDNLAARIIAELGDMTRFKKKNELVAYAGLDPRIYESGQKDGAHMHITKKGNKRLRCLLYLAVTCSIRLKRDDNSIKDFYIKKMQQSNPMCSKAAKTACASKLVRIIYSMCKTGELYQYE

SEQ ID NO: 192169 - protein, 402 aa, unidentified
MNAVGIDVSKGKSMVAIMRPFGEIVSAPFEIKHTASGINSLVELINSVEGESRIVMEHTGRYYEVLAHQLSEANLFVSAINPKLIKDFDNDSLRKVKSDKADAVKIARYALDKWQNLKQYSVMDELRNQLKTMNRQFGFYMKHKTAMKNNLIGILDQTYPGVNTYFDSPARSDGSQKWVDFASTYWHVDCVRKMSINAFIDHYENWCKRKKYNFSKSKAEEIYGKAKELVPVLPKDDITKLIIKQAVDQLNSASITVESLRTLMNETASKLPEYPVVMAMKGVGTSLGPQLMAEIGDVSRFTHKSAITAFAGVDPGVNESGSYEQKSVPTSKRGSSDLRKTLFQVMDVLIKTHPQDDPVYQFLDKKRAQGKPYYVYMTAGANKFLRIYYGRVKEYLSSLPES

SEQ ID NO: 192170 - protein, 410 aa, unidentified
MDAFCGIDWAEDHHDVALVDHGGAVLARLRISDDAAGLTRLLGLLAEHGDSAENPVPVAIETPRGLLVACLRAGRPVYPVNPMAVARYRDRHSVAGRKSDKGDAAVLANVLRTDIHAHRPLPADSELARAIAVLARAQQDAVWDRVTAHNKLRSHLREYYPGFLAAFAAAKGGIMRPEARAILAAAPTPATAARLTLAQLRALLRKAGRSRGIDAEAARLREAFRQEQMRQPPLVEEAMGRQSRALLRQLDAACQNASDLEAAAIGSFSQHPDAGIITSFPGIGALTGARVLAEIGDDRSRFADGKGLKAYAGAAPITRASGKSRSVTRRHVKNNRLAAAGYIWAFSALTASPGARAHYDRRRDAGDRHAAAERNLFGRLLGCLHHCLATSQDYDEATAFPSHPAIPAAA

SEQ ID NO: 192171 - protein, 361 aa, unidentified
MFTERTSVGLDVHARSVVAAAVDGVTGEVFRARLTPGNDEVIGWVRSLPGPWAVVYEAGPTGFGLARAFSTAGIRCEIAAPSKIQRPSGDRVKTDARDAMHLAKLLRLDEIVSVTVPSVEREAARDLVRAREDVRGDLMRARHRVSKLLLRQGIVYSGGHAWTGTHLVWLRNQHFDAPGLQLAFDAEHEAVLQAEARRDRLDKAIVAMAANSEFTPVVNRLGCLRGVATLTAFGLAVEVGDWDRLTGSTIGAYLGLVPTESSSGQSRSQGSITKTGNTHARRLLVEAAWHHRKPYRTPGARMNARWELAPAAARARGHAGNQRLHQRWVHFTDRKKTPVIANVAIARELAGWCWSLAVMDF

SEQ ID NO: 192172 - protein, 336 aa, unidentified
MTYYAGIDVSLRTVNICVVDDEGELVAETKLSSDVQEIVAYLDEFEYSVDIVGLEAGTLAQYLTYGLQSAGFEVACMEAQQVKAALSAMRNKTDKHDARGIAQLLRSGWYSQVHVKSMESHHIRMLLSSRKAVLDKCIDLENEIRGLFKIFGIKLPPKLGHGSFDKAVRAIIEADEKLSHALLPLLDARLVLYQTFRVLDNRTRHLAWDDDVCELLMTAPGVGYVTALTFKAGVDDPSRFKQSRTVAAHFGLTPRRLQSGEMDIEGRISKSGDAQVRCALYVAANSILTRSSRWSSLKAWGMKLKKTRGHKKAVIAVARKLAVILHRLWIEETQFQ

SEQ ID NO: 192173 - protein, 357 aa, unidentified
MLSSNVKYIGLDVHKEAIAVAVRNGAGKLVMESIVETKASTLLDFLHGLRGELHVTLEEGTWAAWLYDVLKPHVREIVVCNPRRNALLKEGSKNDKVDARKLSELLRAGLLRAVYHGENGLRTLRELARSYEVVSKDLKRVMNRIKALYRAWGIPCTGTQVYSRRHREQWLNKITETGVRRRAELFYQQLDALQALRHTVRGELLTESRRHQAVKLLRQIPFIGPLRAAQLVALIQTPHRFRSKRQLWTYSGLAVETHDSAQYRYVDGQLQRSKKPQQVRGLNQNHNHAMKEIFKSAALSATGRAGPLQKFYEGLLAKGMKPELARVTLARKVAAITLTLWKKGEWFDAKYLKSQAA

SEQ ID NO: 192174 - protein, 388 aa, unidentified
MIYVGIDIAKLNHFASAISSDGEELIKPFKFTNDNDGFQLLISKLAPLDKGSPIIGLESTAHYGDNLVRYLVAKNYKVCVLNPIKTSTIRKNNIRKTKTDKVDTYIICKTLMMQESLRFVTFYDLDLMDLKALGRFRQKTIKQRTRLKIQLTSYMDEIFPELQYFFKSGLHQKSVYALLKEAPTPEAIASMHMTHLAHLLKVNSHGRFDKEMAQQLRVLAQKSVGANDSSLSIQVTHTIQQIELLDSQLERVEAEMTEIMKFNDSVIMTILGIGYINGGMILGEIGDIHRFSSPNKLLAYAGLDPSVYQSGNFQAKKTRMSKRGSKVLRYALVNAAHNVVKNNATFKAYYDAKMAEGRTHYNALGHCAGKLVRIIWKMMTDNLKFNFD

SEQ ID NO: 192175 - protein, 359 aa, unidentified
MHTMLAGAVQFVIGVDTHRDTHTAAIVEATSGGVVDHISVPTDAFGYRRLKAFADKHAASTRVWAIEGTGSYGAGLTTSLLEHGEWVVEIDRPARPARRDGAKSDDLDAVRAAREALSREHLAAPRARGDREALRVLMAARQGAVVARTKAIGQLKALIVNAPQSLRDQLRRGTTDEQLQRCARLRTLPSNSIEHRATIRAIRGTARRALALEAEAGEYETELEQLVVAICPVLIAQPGIGTITAAQFLMSWSHAGRIRSEAAFAALGGAAPIPASSGAVTRHRLNRSGDRQLNRALHTVALSRLRIHAPTKAYAARRTQEGKSAREIKRCLKRAIAREVYRLMETHAAAVAASLPRAA

SEQ ID NO: 192176 - protein, 367 aa, unidentified
MQLFVGLDVSQVLTHLCVVDPDGRQVWRGKCSTAPDVLAQTIETYAGSPAKVGIETGPLTPWLVHTLRATGLDVVCIEARHAHAVMSAAQVNKNDRNDAKALAQLLRTAWYRAVHVKSYSAHQLRAVLGARAQLVMMTTRISNHIRGVMKIFGLMVASATKTTFAARVEELVADRPEVEAVVGPMLATWRHLRGQIGAFDKQLMAIARARPECRLLMSIPGVGYVSALAFMGAVDVPERFASARAVGAHLGLTPRQHQSGEVDRLGAISKCGDPYVRTILVEAANSLISRCRKPSPLRDWALALQRRSGPKKARTALARKLAVIMLAVWRSGKPYAPSVSAVAMTRSEKVVAKAAKSSLLEARDFRA

SEQ ID NO: 192177 - protein, 380 aa, unidentified
MYIVGLDVHAKRSSMCILDENGKLVKHLEVKGAWARMLQVVDEQVPRPFAVCFEASCGYGYLHDQLAKRAERVTVAHPGQLRLIFRSKKKNDRVDADKLAKLLLLKEVPAVHVPGMDVRAWRGLINYRRKLIGRRAAVKTQVRAFLRGLGIAVGVKGGLWTKKGVAWLTELALLTSPADAVRRDVMVDDLTALEEKVRRVERELNRIGRAHPGVTLLQTIPGVGPRTAEAFVAHVDDVRRFARVKQVGSYFGLVPCQDASADRNRLGHITKDGPAGVRWLVAEAAWQGRRRSAKIRAFFDRVMRNDPGRKKIALVATAHHLVRVMTAMLRSGEVWREQEPQQPQTPPPTPAPPPPPPPPRSNEQDKRETSKAKTKASDKE

SEQ ID NO: 192178 - protein, 400 aa, unidentified
MNPVIGLDVAKGESEVQAFLDKDKPFGKSFSVKHTKEDLDSLISFLREIEGHTGVRPAVILESTGHYHTPIIQCLEGCQYLYILVNPIISYQAKKTSLRKVKTDAVDAYHLCVLYYKEEFEPYKKRGLRLLNLRTLSRQYETVTNLYIQAKLQFHTLLDQIFPEYRGVFGDLFSKVSLKILKEFPTSEDVLMAGEAKILARIKEMRIKRSPSWMREKAHKLMASAKRNPFQQGVYESQLFSLDMYINMLLQYQEHLSSLERQIDVLAEEIEECKIIQSIPGIGEKIAATIISEIGEIDRFNHPKKLVAYAGIDPSVHSSGKFTATINHITKRGSSRLRHALYMAVLCGIRSSRNKKLKEYYDRKRNEGKPSKVAMIACVNKLLHWIYAILKRNEQFLDMA

SEQ ID NO: 192179 - protein, 304 aa, unidentified
MNLSRIGLDLAKQVFQVHGVDRHEHVVCRRQLKRAQVRDFFRQLPPCLVAMEACGSAHYWARELRELGHTVRLIAPQFVKPYVKGDKHDAHDAEAICEAASRPSMRYVPVKSAEQQAVQSMHRVRSRLVRARTALCNEVRGLLGEFGLIATRRGRAATMALLETVMATEPASLPAPMGELLRELKDELQTLEARIARLERQIQAHVRGDARIQRLLAVEGIGPISASAVAASAGDARQFRTGRQFAAWLGLVPRQHSTGGQQRLGNISKRGDTYLRTLLIHGARAVVRCCANKTDARSRWLQGL

SEQ ID NO: 192180 - protein, 359 aa, unidentified
MSKRSFRMGNVKSLALSEGDTVVVGLDVHKKSVHAAVRRNGAEVETWVCPMDAEAITRSLLPMKPYLKKVVYEAGPTGYGLARALQKAGLPIQVLAPGKIEREPNPGSKTDRLDCRKLAEYAEEKKSLKAVAVPTEEEEADRQVWRLRDQLMTQQRRVKQQIKSLLLENGLAEPDGLSHWSASALEALKRMGLRHQLQLSLAVLIEELEKIIALRQRVERHLAWVGQRKRHRRAQSVLRSHPGVGPLTAMAFRLEVYRPERFADAQQMVCYVGLAPRVRQSGSKRLEGPLIQAGRGTLRALLIEASWRWVREDDRAATLYKRLVRNTGSAQKAIVGVARHMAVNLWCMVCRNEKYRAVA

SEQ ID NO: 192181 - protein, 377 aa, unidentified
MDNGSTHWVGLDVHKSSISVAIVGPDGSVKLQKQIGTDDQSVQGLIRELRSLKKQGAVECVYEAGPTGYPLQRQFTAAGLSCMVAAPSLIPRKPGERVKTNRRDARKLATHLRAGLLTAVCPPTPEQEAVRDLCRCREDAREDLMRARHRLDKMLLRRGRVYRDGIHWSQKHGRWLRGLKWDHQADHAAFQSYLRAVEHLEERLVELEAALEAAASKDPYRDPVAWLRCFRGFDTLNAITLVAELYEVARFAKPRQLMAYLGLVPSESSSGERRSQGSITKTGNSHLRRALINAAWHYRRPVHVSRVLRKRRDGQPSEIVRLADRAMHRLRRRFQHLTLTRGKSAQHAAVSVARELAGFVWAALVLYPQTPASQTHS

SEQ ID NO: 192182 - protein, 359 aa, unidentified
MEYFAGLDVSMKETAICVVDGKGAVIVQTAVPTEPEAIAEVLAPYGKSLKRVGHEAGSLSPWLQSALLKLKLPAACLETRHVRAAMAAQRNKTDATDALALAHIIRTGWFRTVHVKSDTSYRLRLLLLQRRNLKRKYLDIENSIRHSLKVLGMRVGRVGRLKFEARIRELVGEDRMILLMIEPMLKVREVMWEQYGRLHKLLVQIVGRDELCRRYLGIPGVGPVTALAFKTAMDDPTRFKSSKLVGAYFGLTPRRWQSGTSVDSQGHISKQGDNDVRRTLYEAASCLLVRFTGWSALKAWGMKIAKARGHKKALVAVARKLAIIMHAMWKNGSEYRWTTAEKAAAWSKKKDQHVLGAHA

SEQ ID NO: 192183 - protein, 386 aa, unidentified
MKEETFVPREYDVFAGLDVDKKSIAATFSSQQGFIRSLHMPYSVDYLLNHVRKHFGDQKVAFVYEAGPTGYGLYDGLVAQGFRCLIAAPSMIPRAPGQRVKTNRLDSRGLSESLRGGQLKSIHVPSPIYRELRHLTQLRDTVVREAAAHKQRIKALLLLEGIGFPQATAGRQWTLRVKAQLRKLRCSRTVRFKLDQLLDSLEFCEKQVVNSTKEIRRFCKEDAELFQSIEYLMSIPGIGWIVASQLLARIGDWREIDNVRQLGSFLGLVPTENSTGDWVDRGSITRAGDGRLRSKMIQAAWSAIRQDGELREFYRSVCQRNPRGKGARIAIVAVARKLSTRIYAVLKNQRPYIVREQVHSAPLTQEETSPQGTTRRCAEPGETDNS

SEQ ID NO: 192184 - protein, 328 aa, unidentified
MEREYIGIDLHKAFFQGCAVTATGERQWEQRWPTTDQGIAGLLSRCGPGSRVAVEASSPTWAFVDRIVDHVGAVQVVDARKTRLKAGYAAKTDRLDAQRLADALRRDSVVGIYYPPPAIRDLRELCRYRCHLSRLQASLKQRIQALLLRHGVSVPVKGLFTQRGTAWLDTLTLPGWAGSSLTGLRQVVTDVRTQLVPVLAELQRTAATDPIARALDTRPGLGPVFSVTLRAEIGTMTRFPDGPHLASYAGLVPRVERSGSRHWSGRITKAGSPWMRWTLIEAAIHQFRRQDDFGRWARQLAVRKGILKARVAVARALCDELFDAWPRA

SEQ ID NO: 192185 - protein, 342 aa, unidentified
MQVTTIGLDIAKNVFQVHGIDAAEKVVVRKQLRRSQVLEFFKALPPCLIGMEACASAHYWARELTKLGHKVRLMPARDVKAYVKRNKNDAADAEAICEAVRRPTMRFVQVKSAEQQSQLMLHRTRDLLMRQRTQVINALRAHMAELGMTAAQGNAGLRELLAIIAGAADERLPAEAHASLIVLAAELQAMRTLIASIEKRIIAQHRSDEASKRLRSIPGIGLVGATAIAATITDPKAFRSGRDMAAWIGLVPRQDSTGGKQKLGPISKQGDRYLRRILVVGAHAVLKLARQKPEKYPWLTQLLARKPFKVVAVALANKMARIAWALLVKGGPYRARALVAAA

SEQ ID NO: 192186 - protein, 487 aa, unidentified
MRSIFRKRNPDVEALFEKAAHPEKVMCVAFDYAKKSHTSVICNGLGHQLRGVFNVENNRDGLDYLLGVVAGLCKKHNIAREHVFFGGEDCGSYAFNFIHALVSRGFLVVGINTKQAKDERESSHASTDLIDTVGVAGMMIKMRGRTIGMATEQVHAIKRLRRQRGAILKAHSGSAHRLYRISDELFPDFLNYKKSGLSPFCRASLWLMDERFSAAEVHARKRPALTRKLREFTIRDPEGVADKLKALAEVALPPAEFMIPALQRSMAEELGLYQHLSGSLHGLDTDIAKQLAGTVGAMLTTMPGIGLRWAPGLYAELGDPIRRRNVHSMAALGGIVPRLKQSGGPDKPAVIGHRSKGCSSFLKHALMSGAVCLSQYGHPEVREAYQTDMALGRDARTRLAQKLLRLCLHIIDHQTFYLPPSLHTGGTRETIRAYYAMMWPKVLIKWRDRGAILDAVAEGAPLRLWRDMAQEKYDLKLSIKSPQTGRK

SEQ ID NO: 192187 - protein, 352 aa, unidentified
MRIIGVDLHTRQQSLAMLDTETGELVEKILEHEGEKVKEFYSALTSPVLVGIEATGSMSWFLKLMEELKIECRVGHPAKIRAAEPRKQKHDRRDARLLLNLLVENRFPAIWMPSPEQRDLRTLLRHRHQWVRMRTRVQHTLQSLALAHGLRRGVPLWSQAGQHVLQALPMAPHASQRRDALLRLYPCLQKSIDDVDEQVSEQSLRRPQAARLMTHPGVGPVTALATEVFLGDPTRFADGKAVASYIGMIPSERSSGGRRQRLGKLSKQGNALVRYLWGEATIHAVRRDPELKRFYRRKLMQKGLGKAKTAAARKLGIRLWIMLRDQIDYKEFCHRGLRRQKSGDARAGMPGR

SEQ ID NO: 192188 - protein, 344 aa, unidentified
MSSIKVLGIDLGKSSFHVIGRDGSDTPIFRKKFTRSGLLSYLQQLPRCLIAFEACGGAHWLGRKCESLGHEVKLIPPQYVKPYVKSNKNDFIDAEAICEAASRPGMRFVSIKSEQAQVISAIHKTRHGYVKERTACMSRIGALVLEFGMSLPTGHSTMKKLFNWLAQQKTSLPLLLMQELVELHEHYLHLNERIEHQDNKLKQLVANDPIGQLLKTIPGIGDMTASLCLAHISSASDFKSGRNMAAWLGLVPAQYSTGGKSKLLGISKRGNKELRTLFIHGARAIMSRADTTGKIYGDWLVNLRACKPFNVVTVALANKLARIAWAVMKTKQPFNSKELAPGLQ

SEQ ID NO: 192189 - protein, 334 aa, unidentified
MEKITTVGIDLAKRVFALHGVDGAGRVGLRKTVRREQLVETVAALPPCLIGMEACSGAHEWARRFQELGHTVRLMAPVFVAPYRKSGKNDGNDAEAICEAVARPNMRFVPIKSTEQQAVLSLHRVRQGWIEERTATINRLRAVLTEFGVVLPNRAQHVRRGARAAAEALPELARRAVEDLRAHLGVLDERIAAYDRELEAQARSSEAAQRLMCIRGIGALTAVAMVATVGCARDFRSGRQFAAWLGLTPRQHSSGGKPRLGHISRRGDAYLRCLLVQGARSVLLTAMRHSDRLSRWALSVQARRGYHKALVAIAAKNARIAWALLSKNQTLQTA

SEQ ID NO: 192190 - protein, 331 aa, unidentified
MKNYLNSVGMDISKKYFDTVLFFSGEHARFTNEKKGFSCLIKWLKKHKLGPDNVLICFENTGYYSLQLSFYLSEKGFDYVQEHALHIKRSIGFRRGKSDKADAVDIARYSWVNRESIHLSKPPSRVLLKLQQIKTTRELLVKHMVAIKNQIHALAVLGDKNVSRIAGRSLNCVLRAIEKQIFKLEAEIEVLISQDDQLASTFELCRSVKGVGLVLAVELILHTQNFTCFNEWRKFAAYCGTVPYPYQSGTSVKGKSHVHPASDKRMKCLLTMASISALRADPELKIYYKRRIEEGKPKMSVINMVRNKMLARIFATVNRGTPFITLSKFAA

SEQ ID NO: 192191 - protein, 389 aa, unidentified
MEHVVIGMDPHKRSVTIEVMTDSEQVLAKHRFETTAAGFRQLQGYAKQWPDRLWAVEGCNGIGRHVASRLVIAGETVVDVPPKLSARLRMFDTRQGRKTDPDDAHAIAMVAVRMNGLRAVVNDQQHALLRILADRRRALGEDHTRMISQVHQLLLELIPGGAKKDLSAAQARVLLAGVRPRDVVGKTRKRVALELVGDLEKIYQRSKALDKEIKQLVVDTGSSLMDLHGIGPSSAARLMIEVGDIARFPDRNHFASWNGTAPIDASSGENTRHRLSRAGNRQINRALHVMAIVQLRNQTEGRAYYDRRKAAGKTSMEAMRSLKRRLSDIVYRTMLADAGAGPGGQRGNDSDSSAAGPTPHTSTSESHNPDPPHQAYDQPSPPPLDRGEP

SEQ ID NO: 192192 - protein, 351 aa, unidentified
MQTNLKDFTGESIYVGIDSHLKSWKITLMCDELELRNFTQEPDSKKLATFLRRNYPGADFQCVYEASFSGFNAQRALNSEGIPCMVIHPADVPTTDKEKRQKSDRIDSRKLARGLKNGDFTPIYVPSIEQQQDRSLLRIYDKVTRDISRVKNRIKFFLMFFGIEIPSEFQGKNWANGFNTWLKQVNPGGLGNQSFRILLGEYEMLKGKWLELNQMIKELSNQDRYKENVELLNSIPGIGRLTAMILLTEIGDINRFPSFKELSSYFGLIPNCHNSGETERVGRNTKRGNVYLKYILVEVSWMCIRYDSSLLLTYKSAVRTMNSNKAIIKVAHKLLNRIRFVLRNKQPYKII

SEQ ID NO: 192193 - protein, 432 aa, unidentified
MNPISVSSPPSKVAAWVGLDWADQQHLVCLYDVGTGQTELSCLEQKPEALQSWLGQLRQRFGGQPVAVVLEQARGAVIYALLSADFLVLYPVNPQSLASYRKAYVTSGAKSDSADAVLLMEMVRNSPQRFRSWTPDDADTRSLQLLTQNRRQLVDQCTAFTNQLTGWLKSYYPQALELAGELDSLQACDFLEKWPTLEALQQARPAQIRKLYLDYGKPRPESLEQRLEQIRRARPLTTDLAAVLSGTMMVRALIEQIRPLRATLERFDQQIAALFRKHPDRLLFESFPGAGAVLAPRLVAAFGTDRDRFESAQQIQQLSGIAPVTEQSGKQRWVHWRWACSKFLRQSFHEFADHSRKWCDWAKALYQRLKRTGKGHHAALRMLAFKWIRILFHCWKTRTCYDEQVYLKSLEKRNPTLWAETQALPPRKKKAA

SEQ ID NO: 192194 - protein, 403 aa, unidentified
MNMNAVGIDVSKGKSMVAIMRPFGETVSPPFEIKHTASDIHSLVELINSVEGESRIVMEHTGRYYEALAHQLSEANLFVSAINPKLIMDFDNDSLRKIKSDKADAVKIARYALDKWHNLKQYSVMDELRNQLKTMNRQFSFYMKHKTAMKNNLIGILDQTYPGVNAYFDSPARSDGSQKWVDFASTYWHVDCVRKMSLNAFTCHYQNWCKRKKYNFSQSKAEEIYGKAKELVPVLPKDDLTKLIIRQAVDQLNSASTTVESLRTLMNETASKLPEYPIVMDMKGVGKSLGPQLMAEIGDVSRFTHKGAITAFAGVDPGVNESGSYEQKSVPTSKRGSGTLRKTLFQVMDALIKTKPQDDPVYLFMDKKRSQGKPYYVYMTAGANKFLRIYYGRVKEYLSSLPK

SEQ ID NO: 192195 - protein, 348 aa, unidentified
MTLVGCDLHSRKQQVAVLDTSTGELLEQELVHDGDAVERFYRALRPPVTIGIETTGYTQWFHALMHRLGHTVLVGEAAEIRAMVVRKTKTARRDARHLLDLLTHDRFPSVWIPDPATRDLRALLAHRVRLVRMRTMVKNRLQAIALNQRLALRSGLWTQRGLAQLQALSLPTYATRRRDDNLELLAWLTTRIDALDDRIAASADADPRARLLLTHPGVGPLTALTTVLVLGPIARFPDSKHVVSYGGLAPAINASADHHHLGKLTKQGSALLRWVLAQAAPLAARADDDFRRRYFAILHRRGRPKAKVALARKLRVRLYVMLRDRVDYGEFCRRGRASQASRRVTSVM

SEQ ID NO: 192196 - protein, 438 aa, unidentified
MISAAIERCAGVDVGEKFLAVCILVGPLEGEPRMEKRRYGTTMAELEELREWLRSEGITHAVMESTGSYWKPVFNVLEDAVKVYLANPQEVKNRRGHKTDDKDGWWLAHLLRHAMIYPSFIPPRSIRELRDFTRRRERLLGDATSERNRVQKLLEDANVKLGNELSDIFGVSGQCMLEALLKGEATPEQVAQLARGRAKKKIPQIIAALQGHRMSSHHRKMINYTLDHLRFLEEQIIKLDEDIAATIRQAGLEPKWQLVQSVPGVGATSGAKILAETGGDMRVFPSVKQFSSWAGVCPGNNRSAGKSKSSHTTRGNRWLRSTLVECSWAASVKRDCFIKEKFWRIVSKTREHKKGPALIAVAHTLLKLIYQAFSTDNPYKEHGTPALDERQKQRIIRHHVRRLGKLGIAVYSTQPAATAGIRRPPAALILDPATEPCR

SEQ ID NO: 192197 - protein, 418 aa, unidentified
MNVKTRRTKKQVNVENQAINLLSKEELNKKIEVVEKELRSYTWRELETNGKFAKNDKLSFITDDMLIVGCDIGSENHYIRAIDVRGRELSRGAFEFSNTSEGFENAKAWVLALAAKHDKKQIVLGLEPTDHYWFALAAWMISNGISVVQVNPYAVKQSKEIEDNSQLKDDRKDPKLIANLVKDGNYGMPYLPEKVYADMRRLSMFRDQLTEDRIRNINRLHKELKIYFPEYMDAFGKIDGAFTLEVLKVSAIPSDITALGAEGIKNIWHNEKLRGRGYSRANEIVSYAEKSVGLTDGIDAGREAVKWYAEQILKLVACSSGKYKGQTKISHRGRKRLRYWLFQAAKSAVSHADEFKQLHEYYTTRTNNPLKKMQSLVVIACKILRVIYTILKTGTTYDPQKLLEDIKRPTASQTPMAA

SEQ ID NO: 192198 - protein, 435 aa, unidentified
MQNNAVVSFISSRTAVISCDVHRDEIFWSSNIPGWEETSRWENRTRAVGAGLEAVRGAGLAAGFARFVVVAEPTGVYHRLLLEVARQHGMETALVNTESVSKMRQIEYNDSGKTDRRDPRVIARVYGIRALRDRVFVGPFARLRSWGKVYAEGEKMRAQAKAAIQTRLRGLFPDFPMKKDFLFGPSGRALEKLYGLNPWRIRGAGYARFVARLKRAVPRLRRRSVERVWEAAGDSIQVGSSSEASVAEQQLAQLWGDLDWAERRCREVGAELKRLYDQTRELDPRLPAAWPGVVSQLALARLIGELGPLSDFPDWRQVQRYMGLNLRERQSGQFIGQIRITRKGRPLARRILNQMALPLVRRNRLFGEYYHAKKRTMNSEQAMTSVARKLVKMLWGWYQAGQGFDPARVFACESQARAVNQWQTRRKGVCPAAPR

SEQ ID NO: 192199 - protein, 427 aa, unidentified
MNNTQNEKIKQVTNDTMVIGIDIGSEKHWARAFDNRGMEISKKAFGFNNTAFGFSSFESWYENQRRAAGLKRIMVGLEPTGHYWFNIKQFLTTNGIQVVLVAPQHVKHSKELDDNTQRKDDLKDPRVIAKLVIEGRYFLPYRPSGVYADLRDGFSRRCGIVESMTRVKNRLHRWFCINFPEYLELYSSVVAKTGLMILRKAPLPKDIVELGVDGIDKIWREAKVRGIGKKKAAALVALAQESIGEKSANEAARLELWQLLEDYEHYAHQYVVVEEMLERRIHEVPYADNLLRIPGIGYCTVIGFFAEVGAVDRFDDPKQIQKLAGLSIVENSSGKRKGMPGISKRGRDRLRCVLYQAAMSAVKNNSEFKEIHLYFTTRKDNPLKKMQSLMAVAAKIIRVFYGMVRTGAAYDPERLLRDIHRPEKATA

SEQ ID NO: 192200 - protein, 415 aa, unidentified
MEIVYERVAAIDVGKKEIAVTVRVPGQISRTRAQQTRKFRTFYQVLRQMVSWLVDHGVTHVAMEATGVYWKPVFHALCETDTLEVVLVNARHVKNVPGRKTDVKDSEWLAQLLECGLLRGSFIPPREIAAIRELTRYRKKTIQARTRELQRLSKVLEDAGIKIDSVASSITTLSARDMIEALIAGERDPRVLANLARGTMRNKIPDLAMACAGRFGDHHALLARMHLDHIDHLTSMIDGLDERIEQVLTPYAQQLRLLRTIPGIGDRAAQVLISELGVDMSRFPTAAHLASWAGLCPGNNESAGRRMSGRTRKGNAEVRDILTECAWSAGKTGSYIGAQFHRLHRRFGKTGGGKAAVAVAHTLIVIVWHVLHDQSEYRELGHDYFTRRDNPEAARRRLIHNLEALGYRVELTATA

SEQ ID NO: 192201 - protein, 340 aa, unidentified
MQVTTVGLDLAKNFFQVHGVNAHGKVVLRKQLRRDQVAAFFVNLPPCLVGMEACGSAHYWARKLQSMGHTVKLMAPQFVKPYVKSNKNDVADAEAICEAVARPSMRFVPIKDIEQQSVLALHRARQGFVKARTSQANQIRGLLGEYGIVVPKGLAHVTGRVPCLLDEATDLPGTFKQLITRLLDHLKELDRQAAEIEKEIRTWHRTNDASQRLEKIPGIGPLTASALVATVGDAKHFDSGRQFAAWIGIVPRQHSSGGKPTLLGISKRGDAYLRTLLTHGARSVLYRTTQGPGAGGWLRELAARRHPNIAAVAQANKTARIAWALLARDREFDPGFAAAA

SEQ ID NO: 192202 - protein, 323 aa, unidentified
MYKVIGIDVSKRKFDSTFLRQSNKWANKTYKNELEGILKFYKELPEGDCIFVMEATSSYYLKLAYFLSEKGEKVAIVNPLKIRRFAQMRFERVKTDKADARIIAQYGMSEELKLWEPLERELIDIRQICSVMEKLIKDRTMWYNKKEALENDPRHSHIAMNEINEMLAFLYDKHSKLEKALNILIQANYGAENEIIRSIPGIGPKTAIMLLSLTDGFKRFSNYKEFISYVGMSPRIYDSGTIKGRARICKIGMGRARQLLYMAARAASKYNKACKELYERLLAKGKAKKLALIAVANKMIKQAFALISKNQFYSENYSSKLGI

SEQ ID NO: 192203 - protein, 338 aa, unidentified
MRYYAGLDLHSNNTYLGILDAKGAKVSKAKVQNHIHLILSALRPVQKSVAGVVVESTFNWYWLVYGLMEENYKVHLANPAAIKQYEGLKHTNDYSDAFYLADLLRLGLLEEGYIYPKKERAIRDLLRKRMMLVRHRTTHILSFQSLYNREKGCKFAGNDVKRLKEENIDTLFSDEYVSLSAKANISIIHFLSERIKELETAVLSFMQVLPEFEKLKTVSGVGNILALTIALETGDIRRFPKVGNYASYCRCVSSQRLSNEKKKGENNRKNGNKYLGWAYVEAANFAKRYCPYAKRFYNRKLAKTNKIIAIKALAHKLARASYFVIRDRVDYNPEKAFG

SEQ ID NO: 192204 - protein, 466 aa, unidentified
MKPFYLGIDVSKGYADFIIINSKKQSVVQGFQLDDTFDGHRSLYNTLGRFLAEHSGSTLFVGMESTGGYENNWYNSLIEFQGSLKIQTARLNPFGVSHNSKADLKKNTTDKISAQNIAEYLVAHPEKVVYQNQDRLAGLRKQWGFIRMLTKQSTQFLNQLNGLIYSANPELLSYCQNGMPGWVLKLLIKYPSAANLKNAHAETVAKIPYVSRQKAQQLIANAKRSVASIKDITTEQLIVAIVQQILHLKKIISDQTNRMLCECSIPEIELLKTFTGISDLSAVGLIIEIQTIKRFTGVKKLASFFGVHPVYKISGDGVGGIKMSKQGRKAPRQILYMIALSAIQHNPLIREIYEKHRKEGKHNMAVIGICMHKILRILYGMLKNNKPFNPTIDIANRLRSVRLKKDTPADNKNRRFQKYDQKAPVSRRQRKKRLEREMSQSVCDTHSGITAPVPLANIITNILPQL

SEQ ID NO: 192205 - protein, 332 aa, unidentified
MHMLAIDLGKQSFHIYGITDDGEVVSRKVGRAKLVDAVTRLRPQLVAMEACASSHHWGRTFEALGHDVRLIHPRFVKPFVKGSKNDAVDAEAIFEAATRPTMRFVPLKSVEQQDLQALHRTRDRLVVQRTALINHTRGLLAEYGVVMPAGASRFRLQIEGIIETAELSDLAKPLFRQLVEEYRDLDARVSALDDMLVKICRTDERCKRLTTLPGVGPIVATSLVAAIDDGRHFKSGRALSAWIGLVPRQYTTGGKPRLGGIGSRANHYLRRQLIHGARSALLRISKHDDRRSKWAQDLLSRAGHNKTLVAMANKTARMAWAILRSGESYKIA

SEQ ID NO: 192206 - protein, 377 aa, unidentified
MYSENIAAYVGLDVHKETLAVAIAAPERLGEVRYYGTINNEAQAVRRLFQKLQGLYGNILSCYEAGPCGFGLYHQLTAMNIKCQVIAPSRIPKSPTDRIKNDHRDAISLARLLRAGELTPVWIPDLTHEAMRDLIRARAAAKRDSRVARQRILSMLLRTDKHYAGKHWTGKHRTWLANQSFSQPSQQIAFQHYCQSLEQIEDRILQLDQEISRLLPEWSLCNLVCQLQALKGVGQLIAITLVAELGDFSRFSNPKQLMAFLGLVPGEYSSGNSIRPRGITKVGNSELRRLLYEAAWSYRTPAKVGAWLIYYRPDSVTQYSKDIAWKAQQRLCSRYRSLIAKGKKSQVAITAVARELTGFMWDIALAAQSSFSQQKQN

SEQ ID NO: 192207 - protein, 463 aa, unidentified
MRETKKTSRKTSPAISLPAIRPDVAGIDIGSSQHWVCAPPQPDGEPNVRVFGTTTPDLQELVEWLSSEGVTSAAMESTSVYWIPLYELLESRGIEPVLVNARQLHNVPGRKTDFSDCQWLQQLHSCGLLRGSFRPTESISRLRALQRQMTNLVAERARCVQWMQKALDQMNVQVHRAVSDLTGQTGMAIVRAIVSGERDAKTLAALRDRRCRKSAADIARHLTGTWRDEHLFNLASALRLYDVFDEMIRSYDQRLVEELKLLQSPDRQDQSPPKHPSVAKEREFKYRGNQEMRTMLWRFAGVDLTRIDAINAGAAQMVLTEVGANLAAFPSEKHFVSWLRLCPRTPISGGKPLKKRRNGLGANRIAGVLRMAAATMQRSKTALGAAFRRIARHKGGAVAVFAIARRLAQLIYRMLRHGQDYLDIGAQAYEASFASKRLASLQEAARGLGYTLVEAGDPPQLPT

SEQ ID NO: 192208 - protein, 409 aa, unidentified
MELLISRCAGMDVHQATVVVTVRIPDEAGGRRSITETFGTMTPDLLALRDWLHAYGVTHVALESTGVYWKPVYYVLEAGYTLLLINMHDLKRVPGRKTDVKDSEWLAQLLECGLLKASFVPPPPIRELRDLTRYRVQQVRDQAQETNRLCKVLEDAGVKLTSVVSDVMGVSGRAMLAAMMEGTTDPAVLAELARGRLRTKLPALRRALEGRFRRHHAFLLQQILTKIDFLGETIERLTQEIDARVAPFEPMLAALDTIPGVDRIAAISIVAETGGAMHRFPTAGHLCSWGAMCPGQNESAGKRRSGKTRKGNRYLRRTLIQSALAATRKRDSALQAKYHRVKRQRGHKKAVVAVGHQILEIAYFVMRDGVTYHELGADYFDRRHADRAARRHVKHLEALGFRVTIEKAA

SEQ ID NO: 192209 - protein, 350 aa, unidentified
MLIIGCDFHSRFQQIAMVDTETGELVEHRLDHSNGETQKFYADLQKPVRVGMEATGYAQWFEQMLAKLGHELWVGDAAEIRAAMVRKQKTDKRDAQHILDLLVANRFPRIWIPSPAERDLRQLLRHRHKMVSLRTSVRNQLHALAMGQGVYRRRKLWAARGRTELDALVLEPWSSRRREELLALLDRLDASLPELDRAVAKEAEQRPAARCLMEQPGVGPVTALMMVLTIGPVERFRGSKQVVSYLGLNPRESSSGGRQRLGGISKQGNSMARFLLVEAAQTASRYDEELRRDYQRLKFRRGTAVAKVAIARKLAVRLYGKLRKLSSPAPSARMQGSPEYPVVGASLSRN

SEQ ID NO: 192210 - protein, 319 aa, unidentified
MQMIHFLGVDVSQDWFDVAIFGSAKPAQFQNSEAGFDAFAQHCVDLDWSKCFVVVEATGGYETRLLRYLIAQGAHVHRATPLHAKHFIRSLGLKAKTDKIDALALARYAVERHAELPVFVFPDEEQSAFNDLMMRRGDLVAFAAAEKARASQPRYKDAASSVMQSIEAMLGFIEAQIAAIEAELDALVEASPTLSRRIETLRTVKGVGRLSAYALQAFMPELGTLTRRTAASLAGCAPHPRDSGIKNRKRSVFGGRGTVKRMLFLAAMTARRYEPALKAFFEKLVATGKPKMVALTALMRKIIVIANARLKELNLQSSW

SEQ ID NO: 192211 - protein, 349 aa, unidentified
MSMVGGLDLHRRQITYDVLDVDSGEIWRGRLWQPDRQRFRRWLGTEVAARSRGESVALAVEGCTGWRYVVEEISAAGFEPFLAEPADTQAARGKKRRAKTDRTDAQLLRELLSAGELPESWIPPPDVLEWRERVRLYKSLVDQRTLWCQRIHAVLYHHGVAGPEGAIRTEKTRALITSEQVQLSAAGRERIAAGYKMIDAADREALPLKADLQRFGARQPACRALADAQYGIGGLIAVVLWSELGDCRRFCRSEQVVRHSGLDVTVDASDRRRAGGHLSRQGPETLRWALYEAAKNSSHGRSPDHSYYAKVKDRHDGKIAAISVARQLARRSYHVLRAVDPELVYAIPA

SEQ ID NO: 192212 - protein, 356 aa, unidentified
MSRDIKYIGMDVHKEAVVIAVLNSTGKLVMESIVETKANSILQFIHGLRGELHVTWEEGTWAAWLYDLLQPQVAQVLVCDPRRNALLKEGNKSDKIDARKLADLLRTGMLRPVYHGEHGLRTLRELGRSYRTISQDLNRVMNRIKALYRGWSIPCAGTQVYAPRYREQWLQKIEHAGVRRRAELLYQQLDGLQTLRRTLRPELLAESRKHKASKLLRQIPCISPIRAARLIALMQTPHRFRSKQQLWTYSGLGIETRDSAQYRYVQGQLQRTKKPQQIRGLNQNHNHEMKEIFKGAATRASCGVGPLRDFYVALLAKGMKPEMARLTLARKIAAIALTLWKKEERFDAEQLKPQAA

SEQ ID NO: 192213 - protein, 391 aa, unidentified
MIYVGIDVSKDKHDCTIVSSEGEVLSDVFTIQNNLDGFNLLFQKIKSAAPDLGKVKVGLEATGHYSYNILGFLLDKGLPTYVINPLHTNLFRKSASLRRTKTDRVDARTIATMMVSGVVQKSYTAISYHNEELKSLSRYRFGKVRERARLKQSISRLVNILFPELEQLVPTLHLAAVYALLAKLPGAKQIASCHLTHLNKLISTASRGRYGHDKAVEIRDAARKSIGSVMPAKSLELQHTIRLIRELDAEIDEIEAALKQIMDEIASPILTIPGISYRMGAMILAEIGDFSRFSSPDKILAYAGVSPSTYQSGQLDNAHAHMEKRGSRYLRYALFNAARYVCIWDPSFAAYLARKRAAGKHYYVAISHAVKKLLRLIFALQKSGECYRPAR

SEQ ID NO: 192214 - protein, 442 aa, unidentified
MKTKRTYKTVDVERVSLPRLLAAIAGAVVVAIDVAKTAMVAGFADAAGKTHELVRFSHPRQTLLFVELLCQLRHEGRAVEVAMEPTGVYGDALRFQLREREFPVFQVDPKRVHDASSFLDGSPSQHDPKACTLIAFLHAQKLSKPWRVRSGEERRARILLKEHQMHATPEMELYNELEAVTAASWPELNGLMSHDVHWPLELLSRYPSPRAVREAPPDEVKALLVQVSRGGLADETIARVLFTARTTAGEQLDTDEERFIAKLCGLALEHREQLDDVSKRMRALVAAQPELCAVADAIGPAATTALFALVGNPSGYESAGALEKACGLNLKERSSGMKRGQLAITKRGPAKVRQLLYLAALRLIRAEPLARAWYEARTAYKGGIKMKAVVAVMRKMLRAVFHVARGQPFDPGKLFDARRLRLAPSPVAQPQPPGSDTTSSAA

SEQ ID NO: 192215 - protein, 355 aa, unidentified
MDSKKYIGMDVHKESISIAVINGAGKIVMESLIETKASMILQFIDGLRGDLQVTFEEGTSAAWLYDLLKPHVTKLVVCDPRKNASMREGHQSDKIDARRLAELLRLNHLHPVYHGEHGLRSLKELVRSYLTITKDLGRVMTRVKAIYRSWAIPCTGKRVYAPRHRAEWLGKITEPGVRRRAEFYYQQLDALRMVRQEVRRELLAESKKHQAWKLLCQIPSIGPIRAAVLLGILQTPYRFRTKRQLWAYGGVGIEASSSADYQVRKGQLERKKKPVEIRGLNRNYNHDLKNLFKGAAIVAASKAGPFQEFYTALLTKGMRPEMARLTLARKIATIVLMVWKRGVCFDAQHLKPQTA

SEQ ID NO: 192216 - protein, 451 aa, unidentified
MKPKDTPDSRSEVWPMVCPDAAGLDIGASEIWACVPADRATPAVRSFTTFTPDLQALADWLSACRVRTVAMESTGVYWVPVFEVLEAHGLEVDLVNARHIKNVPGRKSDVQDCQWIQRLHSYGFLRASFRPEAEMVVLRAYLRHRAMLIEHRAAHIQHMQKALPLMNVQLPRVLSDITGVTGMQIIRAIVAGERNPQVLATFRNGRCQRSEAEIAKALTGNYRAEPVFALKQALALDDAYSGQLQECDEEIERQYAATRLRFDPEDPDEPLGPDTKTNTHSKNAPDFDVRRRLFQLTGVDLTAVDGLDESAAQLLVSEIGTDMSKWPTEKHFCSWLGLAPHNDITGGRVVRSRTLHVHNRAAQVLRMAAQSVGRGKSALGAFYRRLRARQGPEQATTATAHKIARIVYYMLKHRQPYRTLSAADYDEQQHHRELKSLQRRAAKLGLTLAPA

SEQ ID NO: 192217 - protein, 508 aa, unidentified
MDHLQYQSKIGNAMQLALPDRLTGNHGSLYHQPVGQITLATGSMMTLCSGRGLQGGSMPKNQKRAEQLPVLHPDAAGVDIGASEIFVAVSPDRDPKPVRSFATFTRDLSALADWLQRCGIRTEAMESTSVYWIPLYQVLEERGLDVCLVNAQYVRNVPGRKTDVSDCQWIQYLHSVGLLRPSFRPPAEICALRSLWRHRASLIQMAAEHVLHIQKALDQMNLQLHRVLSDITGESGLRILDAILAGQRDPLLLARLCNGRVRSSHDTIAKSLEGDYRGEHVFALRQSLTAYRYYQQLIIEVDLEIGRYVVDLPADPASDCKIPPQTKRTKHRRQHHEPVVFDLRSELYRIFGVDLTDVPGISSVTAHTILCEVGTDLTRFRNASAFASWLGLCPERQISGGKVLYTKSRRVKSRLAIALRIGANSLHHAKNFLGEFFRRIVRKLGKAQAITATAHKLSRIVYHMLVTKEPYREEVFQRTEEEELRRAASRLQRQAAQLGFTVTPAVTA

SEQ ID NO: 192218 - protein, 348 aa, unidentified
MDHIIRIGMDTSKHVFQLHGVNAAEEPVLRRKLRRNDMVVFFERLAPTIIAIEAAGASHHWARLLRSFGHEVKLIAPQLVKPYVKRGKNDAADAEALCEAMSRPTMRFVPVKTAERQAALMLLGLRDRLVRNRTQLGNAIRGYAAEFGLAAAKGIAHLAPLLARIQSDESLPGLARELFAAHAQEYAQLQAQIDEVEGKLMAWHKTNPGSRRLAQIPGIGPIGAAMLIMKTPAPEMFRSGRQFAAWIGLTPKDHSTAGKVRLGVITRAGDEGLRSALVVGATAVIRHLRNGKGRSMLSAWVEQLLKRKPPKLVAVALANKLARIAWKLMVTGKTYAAKPRPIASAGIA

SEQ ID NO: 192219 - protein, 345 aa, unidentified
MNITTIGLDLAKNVFHVVCFDNTGKELKKRMLRRHQVAKFFANVPPCRVSMEACASSHYWGRKLREMGHDAKLIPPQYVKPYLRGNKNDYNDARAIAEASCRPSMPFVAIKTVEQQDMQALHRVRSKCVKSRTSLSNSTRGLLGEYGIVLTRGIATLRRGIPELLEDPDNGLSDRFRQLLQRCYEQLVELDEHISFYTCELEHLSQQDEACQRLQTVPGFGPIVASAFRSAIGDGSAYSRGRDASASLGLVPRQHSSGGKDNLLGISKRGDKYMRSLLVHGARAVVIQAARKDDSLSRWINRIREKRGWNKAVVAMANKITRIGWAVLKNSTTYKPALAATAITS

SEQ ID NO: 192220 - protein, 421 aa, unidentified
MHKTQYSRQLEKRKRIGDQTLVIGMDIGSEFNAACFMDKEGNVLGRYPTIYNSRKGFDYFYTLVTKTKRKHRLTDVLIGMEPTGHYWRKIAFFAKEKGYEVRFVRTTAVKHQRELDESSSARSDIRDAHTIGNIVREGKYIDTVIEESVFRQLRTLAHARERILRYIVGSTHGLQAHLSDYFPELRHLFWSMKARGLWRLLETYPFPEDVRNAGCAAVTALLAKGRGKKRHVGEQAAQVCKAAAESVGLTAIGKADRARLTMYLEEIKRSDARRQLLEREMEELLKEIPCAQYILSLPGMGKVGCAVFLGELGNPEYFKNPRQIIKYAGYDPKENDSGLRVGRKIISKKGRWLLRKCLFFMVLRLVHRSSFFKAYYEHKKKGFDRPLEKTEALCAVILKLIRVLFALMRDRRMFIEELPRC

SEQ ID NO: 192221 - protein, 447 aa, unidentified
MESYAGVDWASDKHDVLVADAAGEKLLGATFAHDEKGLRSLCRQLVRLKVALVAVERPDGLLVERLLDAGLRVLALHPNQVAAARDRFRVSGGKSDGFDAFVLCELARTDHHRFRVLEPDSDATKALRALTRGREDLVGARTALVNQLRAELERFWPGPLHLFSDLHSRISLAFLERYPSPADARGLGEARLRAFLARERYCGRQKPAVLLAKLRQAPEGRVGELELATRRQLVCTLVAMIKTLNAQLSELEGQIATAIREHPDGAIFLSLFKGTVITAAELLAEIGDCRARYPAGDTLAADAGQAAVAIESGRRKAATFRWGCNKRLRQAFHTLADSTRHWHPWAQHLYASARARGHDHPRALRTVGRAWCRVVWRCWQDRVPYDPARHRALQRHITVTIPTPSGPVPDLAATQRMAGAAVTQRAARRAERAALDRTPTSAKSLQA

SEQ ID NO: 192222 - protein, 369 aa, unidentified
MDGHPRQAAGDRIEPILSSLWLPCSVIVVSTFIGPGWLPEQLGSLHKAGSTKMTQTIITTAGIDTSKTKLDVAVHGHIERWQVANALPGWRALVANLTNAGVTRVGIEATGGYERGVMEHLRAVGFTVLVLQPVQVKAFGRVHLRRAKNDALDAELIAACTASIDPPKIEPDPRLAELAGYLTFLEQIEEDIARYKTRLEHIDEPEIRRTVNADIARLKTRRAAQIRNIAKRLRAHHDLALRLDLVLSIPGIGERTALALIIRMPELGRVSREEAAALAGLAPFDDDSGQHRGQRHIAGGRSRLRRSLYAAALPAAFRWNRALVALYARLTARGKAHTAALIACARKLLIYANTVVQRGTPWAEKSFSV

SEQ ID NO: 192223 - protein, 340 aa, unidentified
MNEITTVGLDLAKHVFQVHGVDAEGTTVLRKQLRRGQVLVFFSRLPRCLVGMEACATAHYWARELRALGHEVRLMPAQYVKAYVKRNKNDAADAEAICEAVGRPTMRFVPVKTAEQQAAVLLHRGRERLVRQRTMLVNALRAHLAEFGVIAPQGLRNVGRLIAIIRDDDDAHLPGLARQVLQVRAVQIEQLEAAIAALEKRLMGWHKSNPVSQRLATVPGIGPIIATAIAAMVAEPSGFRSGREFAAWLGLVPRQNSTGGKNRLGGISKRGNQYLRRLLINGASANLLRSKATNADPWVIGLRRRRPSLVVAVALANKTARIAWAVMHRQENYQRMATAA

SEQ ID NO: 192224 - protein, 403 aa, unidentified
MEQHSEHVIIGVDPHKLSATIEVVDQHEQLLGLGRFTTDRGGYTAMRGYAKTWPDRVWAVEGANGAGRPLAQRLLEDGERVVDVPAKLSARVRLFDTGHNRKTDAHDAHAVAAVAVRTRNLRVLQLDGELEALRMLTDRREAFTRRRVQTVGRLQALLAELLPGQAKRDITTGQAKAMLASVRPRDIAGKTRRRIAAEELAELVAAEAKIKKSTAELKAIVLARGSHLMDLHGVGPVVAARVLADVGDVTRFADRNRFASWTGTAPLDASSGEQNRHRLSRAGNRRMNHMIHIAAISQIRLDTDGRAYYRRKRAEGKKSLEAIRCLKRRISDAIYRQLIEDAQRAAVEDVGTGPGGHCRASQESSAVDLPLHIDPSDQPLPGPATKTLRPTPPARKWSLKTAG

SEQ ID NO: 192225 - protein, 357 aa, unidentified
MVETLSEAKSSGEGVTNPYRRTEHCDKIHACRCDKGVGVIGIDVSKDYLITSRGRVRKYKNNKEGYEEILEMKPCTIVLEPTGVYAIRPSQYFKEKGIKVLQVSPNMLSREKEFRGKKTDFYDAEKIENMVDKAKEYEYNPLREMVTLYLFLNDIEVKYKNRLERTLFLVSDNNKISKERLEKLAKGDFTQEELYQLEYTPIVVEEIKVLAKTLLETQEKLKEVRRMIEEQVPDNHVLLTIPDVGKLAAGIIIGIVGDVKRFPKPESFVAYCGLDPVVERSGKAVISKGISKRGNKYLRSLFYFLAGRNYSRNPTLLKFYESHKDRLHGKKLYTALARKLARVVWSVWYNNKPYEPK

SEQ ID NO: 192226 - protein, 369 aa, unidentified
MAEVREAFIGIDAAKLRNAVAIADAGRDGEVRFLGEVDASPEGMRRLAARLAAKYDRLHFCYEAGPTGYGLHRLLTGLGHHCTVVAPSLIPRKPGDRVKTNRRDALTLARLLRAGELTPVWVPDEGHEAIRDLVRARAAAVETLRVHKQQVSAFMLKHGRHFPRKKAWGARYLRWLQEQRFEHPAQQIVLQEAVEAVRLAKERVERLERTIEEFVPAWSLAPVVRALQALRGVDLIVAVTFVTEIGDLRRFESPRRLMAHLGLVPSERSTGDSVRRGGITKAGNGRVRHMLVESAWTYRHPPRVGAKKLAQLERVPPKVREIAWKAQSRLSARYRALAARGKRLTVVCTAIARELAGFMWAVAREARTA

SEQ ID NO: 192227 - protein, 344 aa, unidentified
MATTEAQNRLYCGADLHGNNVFLTLCDSAGQRVLERRVKANLAAVNEALDPYWERIEQMAVESTYNWYWLVDGLRSQGRDVRLANPAKMDQYSGLKVGDDASDAGWIAEQMRLGILPESYVYPPEVRPIRDALRRRMLIVRQRTQTLLSLESLFARHGLSCPRAEVLKQWTTAEVEALKVDAFTRLQVESLLGVVRQQDKMASWIETTVRQAVKPRAEYGRIQQVPGIGPVLGLVVALESGDFGRFASAGDYASYCRTVKSERRSNGKKKGENNRRNGNPYLGWAFAEAAVYAIRFYPRIAAWYERKKRRRNVPVAMKALACKLAKATWHVMRGKDFDEAMLFG

SEQ ID NO: 192228 - protein, 313 aa, unidentified
MKEPQLFVGIDVSKACLDVAVSSEVECLSFTNDEKGISSLVTRLSNLQPTLIVLEATGGLEMPVVGALGAALLPVVVVNPRQVRDFAKATGILAKTDSIDANVLARFSEAIRPPIRPLKDKQTQELSAIIARRRQVVEMLGAEKNRFNSASHCVRKQIQAHITQLEKHLAAIDNDLQKLIKGSPLWREKETLLRSVPGVGPILCTTLLCNLPELGFLNRRQIAALVGVAPFNRDSGTFRGRRCVWGGRANVRATLYMGTISAIRCNPVIRDFYLHLSDAGKAPKVAITACMRKLLTILNAMLKTQTTWEAHCP

SEQ ID NO: 192229 - protein, 399 aa, unidentified
MQQGVAVGIDVAKDFHWVQALDRRDSEVLFSGRVDNTPPALAAFVEHLEALRGRGPLKVGIDVVGGIAGVLTAMLLDAGIEVVHVPGLAVNRAREGTTGGEHKSDPRDAAVIADQVRHRRDLRPIEPLGEMDAEIRLLVARRRELVGDQTRRINRLRDLLASIHPGLERVVDPTTKAGQQLLSRYVTPAEIRHAGRRRLTEHILRAGRIARRHADELADNALAAAHEQTITVPGERVAADLVRELAIEAARTRGRLCALDGDLQAALARHPDAALIQSLPGMGVTLAAEFIAEAGSIDRFPTADRLAAAAGLAPVLKQSGKVRYLKRAHGGNRTLKRVFFQSAFCSLSHPDSKAFYRRKRAERKTHHQAVLALARRRVDVLHAILRNRTPYELRHAKAA

SEQ ID NO: 192230 - protein, 386 aa, unidentified
MRLTGNPTPSTAALDYDSTLIGALELSSKKWVFAVQLPGVRKHSRHVVEPNGPALAELIERLKSRSAGAGRPITRVIITHEAGRDGFWLARFLARRGVEVHVMQSSSLPVDRRARRAKTDVIDVEMLLRTLMAWLRGEPRVCSMVPVPSEADEEARRRHREREDLIGARRSLLNKIDGILATLGIEGYRALRRDRRAQLADLRQPDGAPLPLAALARIERLLDRLELVMTQIKGVEKARDAVVAKPAAENDNERMIRDLAGVRGVGIESATLLVREAFCRDFANRRSLGAYAGLVGTPFASGGMQREQGISKDGNRRLRALVVELAWFWLRFQPDSALAKWFRERVSQARGRVCKIMIVALARKLLIALWRFAKDGVIPEGATMKA

SEQ ID NO: 192231 - protein, 344 aa, unidentified
MTSMNFIGFDIHKKTISYCVKDAAGEVLAEGTILSTRQSLDVWMRTLCEPWTVAMEATMFTGWIYDYLLPHAAAVKVAHPLMLGAIAAAKKKNDRIDACKIADCLRCNFLPECYMASTEIRERRRTLRYRKLLVRQNVQLRNKVSQMLMESGVVYNKQKLHKVGYFKELMTTNPDIGEGLRPLLTICRETIVRIGKTEGALVRSLARDPLLSDRVQRLMTIPAVGPITALTWVLEVDDVARFGSVKQAISYCGLCGAERSSADMVKRMPISKQRNKHLQSVLVEAAKLGPRLSPDLALVYETEKQKGHANRATLAVARKLVAYLLAVDRSGREFVVAGERREAA

SEQ ID NO: 192232 - protein, 433 aa, unidentified
MKVMYERVAGIDVHKEMIKVAIRSPGDMPWTRKTEILEFRTFYGVLQAMARELRRRGVTHVVMEASGVYTEPVYYALCEQDFTEVAVINPVHAKALKGHKTDAKDCARLAELFECGLLRGSYIPPAEQKEVRDLTRYRIKTVQARTSEIQRLGKALESAGIKLGSVASEITGKASTAMIEALIDGERRGGVLADLAIGRMRSAGKLADLSMALTGRFTGHHATLCRLHLDRIKVLDDAVDGLDDRIAAGAARWQREAGLLKSVPGFGDVVSCAWLAEIGPAPHKWFSRHEKLASWVSLCPGNNISARKRKHGRTGDAGTYIKPMLIQAAWSAIRVRGRLQARYNRLVRRFGGQKNPAAKKKAITAIAHTLLKIAYQVLKSGTPYQDLGADFYTRRNSPEEQQKYLERQLQKLHPGCTVTITISPPEAALPPGE

SEQ ID NO: 192233 - protein, 423 aa, unidentified
MDVLHERVAGLDVHQKTIVACVRRMAEGKVERECRTFETTTAGLLRLLAWLRECRCTHVGMAATGVYGKPVWNILSDGDFELIVANAAHIKNVPGRKTDLNDAMWIADLVACGLIRASFVPDEGLQELRSLMRTRKQFSREQTRHVQRIQKTLEEANIKLSAVISDIMGASGRRIVQAMIAGVRDPGQLVQLADRRLKASRTELYEALRGRLTEHHGFLLRVHLEQHDALAATIRQIDRQVEVALTRLDQERATGRITYRDLIALLCTIPGVSTLAAITILAEIGRDMSRFHTAGHLLAWAGLCPGQNESAGKRKATRLRKGAPWLKTMLVQCAWAAKRKKDSYYRAQFYQISARRGPQKAICAVAASLLTAIYHMLKDGTEHQDLGANRFDRRPVEAKVQSLVARLAKLGYQVQLQPLAEAA

SEQ ID NO: 192234 - protein, 349 aa, unidentified
MNILAIDLGKYKSVFCMYQTTTNKHSFGTVNTGPQDIHDLFCDKYPDRIVFEIGTVAGWITDIAKALRIDVQVANTTHDAWRWKNIKRKTDRDDALKLAQLSAMDQLPKVHIPSKKVREKRSLIQYRQKLITRRTQIKNTIRAILQREGIHMAVGKDAWNKENVKWLRSLAKPFGKISNADDLWKGQLHTELKQLRDIEEVIERVEVKLNKLGKSDSQVQRLQTAGGIGPRAAEAIVAFIDDPHRFENGKQVGNYVGLTPRRYQSSEVDIYGKISKQGNKLLRTLLIEISWTAVRYNPWARETYNRLLRGDKKRKKAAIVALARKILVRCWAMMRDQTEWNQNSSKAAA

SEQ ID NO: 192235 - protein, 454 aa, unidentified
MAKARDRRRTLDGFAEINHDAAGIDVGNAQHWVAVPAGRDAESVRMFGCFTADLHALANWLERCGIKTVALESTGVYWIALYEILESRGFKVCVVNARQAKNLPGRKTDVKDCQWLQQLHTYGLLAASFRPQGEIIILRRYLRHRETLVQEAATCIQRIQKALTEMNLQLADVISDISGTTGLRILRAIVEGERDPQRLAAMRDWRIKATPDEVAKSLLGNWRDELIFVVGENLALYEVYQQKVERCDYRIEQHLKNMSAQVDNNTNPLPKPRKGKRSHGNAPSFYLRSELYRVTGTDLTQIDGINVVTAQAILADTGTDMSAWRTEKHFVSWLGLCPDHRISGGKVLQRGTRKVISRAATAFRLAASALRRSQSALGAKYRRLQSRLGAPKAITAMAHHLARLFYRMIKYGSKYVDHGAAAYEAKFKEQQLRWLSRKAAELHLCLAPLPNSAV

SEQ ID NO: 192236 - protein, 365 aa, unidentified
MQVKPRRGRRRLAVHEFSKVTWQGVVGVDLGDRRSQICRLDQESGAILEEARVTTTAASFQRSFAGLAPQLVALESGTHSPWVVRLLRQLGHEVIVANPSKVRAISASRRKTDERDARCLAQLARVDPELLSPVHPRSEEALQALAVVRAREGLVRTRTKLINQIRGTVKVFGARLPASSTASFARRAQDALPRELKAALEPLVRVIATLSEEIAGFDRDVEAWSEKWPATKRLRQIRGVGALTALVFVLILGDPLRFARSRSVGAFIGLVPACRDSGSSTPQLPISKQGDGLLRRLLVQASHYILGRHGQDSDLKRFGLKLAQRGGKNGKKRAVVAMARKLAVLLHRLWISEADYVPLYRSEAA

SEQ ID NO: 192237 - protein, 349 aa, unidentified
MIIIGVDFHPEFQQIAMVDTDTGELEERRLHHPSEAEAFYRDLVSQGKTVRVGMEASGHGRWFERLMGELQIELWIGDAAEIRTKRVRKQKTDRQDAQLILKLMLKDDFPKIWVPSWENRDLRQLLWHRHRMVQARTRIMNQLQAVALNEGLRCKKRLWRTERPRLESFNLAPWASRRRRDLLELLDRLNPTIAELSQAVEQEVEKFPEAQRLATHPGVGPLTALAFVLIIGEAERFQCGKQVASYLGLVPLEDSSGNRRRLGHITKQGSSILRFLLVEAAQVTVRSLPEWRSRYFHLMMRRGRKIAKVAMARRLAVCLYWMLRQGRDYQQHIEFGSHAGQPGNRHGVQ

SEQ ID NO: 192238 - protein, 350 aa, unidentified
MLHAGLDLSRKRLDVCLLSEHGELVEEFSAPPDGDGLRGLVRHVGRHGAPVRGVIESMTGARFVHDTLEQLGWEVLIADAQKVKGLAPLACKTDKIDARVLAVLSERDLVPAIWLPDPRIRSEREQARFRLHLVKHKSMLKHRIHSTLLSFGHPCPVSDLFGAAGRELLERLEIPDPWRQSVDASLQLIDYLERQIAEINRDLRACGADHPYVPLLLTVPGIGWVLAFTIASEIGDITRFATAKKLCGYTGLCPRVHQSGESDRRGPLTKQGPKYLRWAMLESTMHALRHPAYAERYQRNKKRLGRQRGARVAQIDIARKLTEAIWHMLTNNQPFAPTPASGGATRRLAA

SEQ ID NO: 192239 - protein, 320 aa, unidentified
MTIITYETNIGVDVSKKNLDISLNDETCFTVTNEKKGFKKILRELKQFDKKSIRVAVEATGNYERRLVVFLQENGIAVCVVNPRRVRDYAKALGFLAKNDRIDAHVIRLYTKTSDPTPREPITKEDQLLDSLVLRRSQLVKQRTAEMHYRESAVDIEAQRSIERMINQFDKEIDKIECKIKEIIASRPDLDVLVKHICQIKGIGEITAFNLVANLPELGKLSNKEISALVGVAPFCRDSGTLRGKRTIWGGRSEVRSALYMATLSAIRFNPPIKVFYDRLIAKGKLKKVAQVACMRKLLTVLNSMVKNQTDWNPEHGLIA

SEQ ID NO: 192240 - protein, 344 aa, unidentified
MEPMYYIGLDVHKRKISYCVKDSGGKIYAEGSLSATRMDLDHWMKTLPQPWTAAMEATMFTGWIYDHLKPHAAALKVAHPLMLRAIAAAKKKNDRIDASKICDCLRCDFLPECHMAPTAIRERRRTLRYRNLLVRQMVQMKIKISSLLMEAGVSYNKQRLHKAGYFRELLATNPDINEELRLLLRLCRETVVRFEKTESALVRSLERDSLLMDRVERLMTIPAVGPITALTWALEVGEVQRFSSIKKAISYCGLCGAEKSSGTIVQRTPLSKQRNKHLQTMLIEAAKMAPRNSPELAMIYDREKQKGNANRATLAVARKLVAYLMAVDRGQRNFQVVETNGIAA

SEQ ID NO: 192241 - protein, 404 aa, unidentified
MKDVPVLSIDVSKSKSYAAVFRGYGDVYLKPFPFNHSPTDLNYLTSQLILLEKETGLKPSVVMEATGNYSKPISSYFRDNGYSVFVINPLQTHAQKKKSVRKVKTDPIDANRIAQVFYLDEFPSEYCYEPHILELRNLCRQYESFNNLYTETQNKYRAVLDLCFPKFESVFSHLRGPTALNVLSLFPSPDDLLDASRDELLASLKPAKKSREWNEMKADQLIMAAKESLPFNQAQQSSVRVLRSYIDLLLSQQKILADLRAQMIYWANLSPYYALLYSIPGVGEITATTILAEIGDIERFPSSKQLVAFAGLDPSVFESGKFKASKNRISKRGSSYLRKALYQAAVSGISNRQGGPLNKIIYEFYSKKLTEGKPSKAAIIATSNKLIRMIYGILKSGKPYSLTH

SEQ ID NO: 192242 - protein, 318 aa, unidentified
MILVGIDIGKNKHTFFIIDKNSGEILLSPSDFSNNLKGFLFLIQKLSSYTKSELLIGMEDTGHYHFALLKYLLDRRYTVALINPTTTDLTRKLQGGITKNDPLDSLTICDVIFSNHRNKPYRVTTLNCFDLYEQKQLTRHHHNLKEELNTYKNHLQKCIDIVFPEFNSLFHSKYGIVYMNILKAFSSAKAIANADIRSIRKCFEFKGQGKRISLSAEQLKLTAKSSIGIPSVAEEIQIRQLVSQIELLEKQLSEIDKRIEEFSLKNNSPILTIPGISHFSGTSIISELGDICNYTKASQIIKFAGVAPYHYESSQFTA

SEQ ID NO: 192243 - protein, 340 aa, unidentified
MALYAGMDLHSRNTLVGVINGSFQRVFEKRVPNDLSLIVDTLEPFASRLKGIVIESTYNWYWLVDGLMDAGYSNVRLANPSAVKQYEGLKHTDDRHDAFWLAHLFALGILPEGYIYPKEDRPVRDLLRKRSFLVKHRTAHILSLQSMLEREKGYKLRGNEIKRLKTEDIARIFSQEHLVMSAQANRASIEFLRHHIKRIEKAVRNRVKLHRSFEYLMTVPGIGDILALTIMLEVGDIARFARVGNFASYARCVSSQKLSDGKKKGQGNRKNGNRYLAWAFVEASHHARRYNERLRSYYQRKCAKRNQAVATKAVCNKLARACYYIIRDQVPFREEALFCS

SEQ ID NO: 192244 - protein, 338 aa, unidentified
MPLYGGIDLHANNSVIVLLDDQDQVVYQKRLPNDLPSLLQQLSPYQASLQGVVVESTYNWYWLVDGLMERGYVVHLANTAAIQQYAGLKYTDDHSDARWLAHLLRLGVLPEGYIYPKEGRAVRDLLRKRSQLVQHKTTHLLSIQNLLTRNTGRAMSGNRIKQLTVADVDGLLPEPELALAVKSNLAVMRCLETQIATIAQTVTQRVKLQAEFNDLLTVSGIGQILALTIMLETGDIRRFPAVGNFASYCRCVGSQKLSNGKRKGSGNTKNGNKYLAWAFVEAAHFAVRYNPCIKRFYQRKQAKTNTVVATKAVAHTLARACFYILRDQVPFDVSKAFQ

SEQ ID NO: 192245 - protein, 337 aa, unidentified
MEYFAGLDVSMEETHVCVVDRDGKIILEARTPTAPKTIAAALAKGPPVERVLFETGRMAPTLFHGLTALGMPVVCVESRQAYQALRSMVTHKTDRNDARGLAHLARAGFFKPVHVKSLPSHAVRALLIARKKLVGQRVTLENQIRGLAVAFGVRLPRGLSSGFSEKAMAAGRGIPGLDGAMRGLLAARDAILKAIVAINADMKSLERSSAACRRLMTIPGVGRLTALAFVAAIDDPNRFRRSRDVGAYLGLVPRRYQSGEIDYTGSISKCGDGRLRTLLYEAANVMLTRYRGSLVLKTWALDIARRSTLRKARVALARRLAVIMFAMLKHGTEFQPA

SEQ ID NO: 192246 - protein, 370 aa, unidentified
MGNRSMFVGLDVHKETIDVSIAEGARDGEVRHYGVIASDLEPLDKVVRALRAPDRHLHFVYEAGPCGFGIYRHLTNRGEDCVVVSPSMIPKRSGDRVKTDRRDSQMLARLHRAGELRAIYVPDDTDEAMRDLVRARADAVGVGTQAKYRLKAFLLRQGRRYPGREGWTLPYRRWLTDLSFPSAPQHIALQEYRDAINETERRIERLAEQLRQLAPPWRWAPVVDALQALRGVSFLIAVGLVAELGDLRRFGHPRELMAYLGLVPSEHSSGSTVRRGAITKAGNPHARHLLAEAAWAYQGIPRIGRQHAYRQEALPKVVCDIAWKAQLRLTTRFRRLVARGKAKPKVATAIARELTGFIWAIAREVSPASH

SEQ ID NO: 192247 - protein, 347 aa, unidentified
MNFYNQQHKYYCGIDLHARKMYVCILDHKGKMLVHQNIDTDGKLFFELIFPFLQDVVVGVECVFCWYWLADLCAAHKIDFVLGHALYMKAIHGGKTKNDKIDSYKIAMLLKGGNFPIAYPYPADWRATRDLLRRRMYLSRRCSELVAHINNTNSQYNLPAFKKKLSRKYNHDGVAERFEDPAVRKSVEVDLEVIVALNQTLKKLEWYIEKTARQHDYHTLYLLRSIPGVGPILALVILYEIHDVNRFPSVQDFSSYARLIKPVKESDGKWAGHSNKKIGNAHLKYAIKEAAILMLRDCPEAKNFVTKLERKYNKGKALGIFTHKLARAIYFMLKNKEAFDMKKFFSS

SEQ ID NO: 192248 - protein, 339 aa, unidentified
MTEEKGFIWAGIDVSKRTFFAAIDIENEAEKLPVAKLPAKEFKRSKDGVASFIKWADELLEDQEFAVVMEATGSYSLELISLLKNQRTDLRISMQNPRMVSDFIRSLNQPHKTDKTDAQAIARFGTERKPEEVSLPEPHWAELRELERLRSAMVRVRVELENRAESLFTAFARRTNQRTIGSLNMDISELEREIKHLVLEHEDIHSEVRILTSMPGVSFVSACAILAELGSLKQYDQKQISAVSGLAPRRMSSGSSLNKSFMGRNGSKRLRQILYLDSIYAVAKVPLLNSMYERLIAKGKSKMTARCACMRKLLLILRAMVVNNKRYDENYFKTFPKSA

SEQ ID NO: 192249 - protein, 448 aa, unidentified
MREPQEIEDREHEQAVLRVAAVDVAKASGVVCTRVPREGGRGFVTKVWAVEATTGAILELADHLAGLAVEKVVLESTSDYWRPFFYLLEAAGLDVALVNARDVKNAPGRPKTDKLDAVWLAKLAGWGMLRPSFVPPPEIRVLRDYTRLRIDLTRERTRHWQRLEKLLEDALIKITTVASRIDTMSVRDMVEALIAGQRDPRRLADLARGKMKAKRAALVRALDGRFDDHHAELAAILLAQIDALTGQIDVLTTRIEAVVSEIPAAQGVNEDGTTGADAGRGPDAAVLPAIDRLAEIPGISRDAAQVIIAEVGLDMTRFPTAPHLVSWARLCPRTLQSGARERPGRTAKGNPYLKGVLGNAAAAAGKTDTFLGERYRRLARRRGKLKAVVAIARTLLVIVWHLLAGRAARYHDLGMDYYISRLDINARARSHVRQLEALGFTVSIGQAA

SEQ ID NO: 192250 - protein, 347 aa, unidentified
MNIVEAARGVTGGVDTHLDVHVAAALDPLGGLLGTERFETNAAGYKALLGWLESFGDVTKVGVEGTGSYGSGLARYLKRVGVEVLEVDRPDRQKRRRAGKSDPLDAIEAARAALSGRAKGKPKSRDGAVEAIRVLVVAKRSARQARGKALVQMRHLGYSAPEQLRCRMKGLSVPALVAEGKGLRPGRSPDPVTAATKASLSSLARRISSLDDELAELNERIEALLVATVPDLLELFGVGPDTAAALVMAAGDNPERLHSEGAWAHLCGVSPIPKGSGKNSGRVKAHDGGDRQANSALWRIVMVRIAHDPETQLYFERRVKEGKTKHEVIRILKRYVAREVYRYLPRG

SEQ ID NO: 192251 - protein, 377 aa, unidentified
MKKVRFIGLDVHADTVAVAVAEPHGDVRSLGVIPNRPESIRKVVKKLGPAAHLRVCYEAGPTGYVIYWQLTGLGVHCDVVAPTLVPVKAGDRVKTDRRDATKLARSYRAGDLTPVWVPDAAHEALRDLVRAREAAKKDQLRARHRLGKFLLRHGRRPPTATTPWTQRYLTWVRQVHFEQPAQEATRLDYLHEVDHVADRIDRLERAIDDAVKTAPARMRAVIEGLQALRGIALVSAVTIVAEVGELSRFTRAPQVMGYSGMGAREDSSGTRTRRGGITKTGNAHLRRIAIEAAWAYRHRPAVGGALRKRQATLSEEVKAIGWKAQLRLHARYRKLLGRGKCRQHVVTAVGRELLGFIWAIGITVERQQRQTSSSIAA

SEQ ID NO: 192252 - protein, 392 aa, unidentified
MEERGTTAAVLGLDVGKASHWACGIDSSGRVVLSGRVANRAADVDAVLARAGSGALVVVDQKRNIGALAVARARAAGNPVAYLPGSAEKALRDAEAGVAKTDRIDAEVIARAALGMPHVLRPLAEEAPRAASVRLLASQLDFCTRSRTQAKNRLRAVLLEADPALEAAVDPSCAWHMAVLAEIGGPADCAEAGIRRFRAVAERAGGASRAASSRLWGALAASASAGRPSAPAEGALARMLARDILALDGEASELRALMAAELESDETYRCLLTVPGVGPKTAAALVAAVDVSLFPSHDKLASYCGVAPADSQSGTSVRSARPQRGGNKTLKNLLIFSCNSLVGTGNRFGRYYEECRARNMRHNAALKAVARKRLKVIWAIMRNPRPYEEPVA

SEQ ID NO: 192253 - protein, 356 aa, unidentified
MSHEIKYIGMDVHKEAIVIAVLNESGKLMMESVIETKASSILQFLHGLRGELHVTWEEGTWAAWLYDLLQPQVQHIVVCNPRRNALLKEGSKSDKVDARKLAELLRTGMLRPVYHGENGLRTLRELGRSYQTISKDLTRVMNRLKALYRGWGIPCAGTQVYAARSREEWLSKIPQAGVRRRAELLYQQLDGLQMLRRNVRPEFLTESQKHKAAKLLRQIPCIGPIRAARLIGLMQTPHRFRSKRQLWTYSGLGIETHDSAQFRFVSGQLQRSKKPQQIRGLNRNHNHEMKEIFKSAATRASCGRGPFHDFYAGLLAKGMKPEMARLTLARKIAAITLTLWKKEERFDAEQLKTQAA

SEQ ID NO: 192254 - protein, 374 aa, unidentified
MRLTFPPAGGNVSGGRGNVRPWQAFGRCVVVACSASAGWSKLEPLLERPVAAGAARISTSMSQNNNTPILHVGLDVAKSSLQLDLAGHSHALTNDARGYARLFKLLRDHPAAQIVCEASGGYEQPVVRALHATHVPVSIVEAGRVRHFARAKGQRAKTDPIDAAMLSAYGRALQPAPTPAPTAEQARLAELSTRRLQLLQTLLAERNRAHHYLDKFCVRQAQQLRRLLEKQIEQCDAAIAQLIAADPTLQQKVDRLDAIPGVGSVTAATVLAELPELGRISDEAATALAGVAPYNRDSGSSHGVRHIAGGRSSLRCALYMAALSAVRYDPILKAFYHRLRAAGKKPKVALVACMRKLVILMNRLIKKPNFQLAH

SEQ ID NO: 192255 - protein, 409 aa, unidentified
MAHQRKVRSALVPIPMLSQETLYIGVDIGKFRHVAGFLSRTLLARHERFEGCPTFAFEQSREGFRSFVDRLREYVPLEQATVLLEHTGHYHRLLEQYLLELDITVYRIHVQKRAEGMMKTDKRDALGLANTLYTQLELGAQVRDKLQLVHRILPPTKAAAQLHGLMRHRYELSHMSTQYRNKLTAICDELFPEVVQVFHDPNLPTALAFREAFPTPHAVAVASLDDLRVVRKRNFPSEVQLLRLQHLASETIGITDLDRQHGLVLEQGLLIKELRLIQEHVETLQTTITAIVQNCREGQILLSIPPIGLVQAATIIATIGNNANFVKASELKSYFGWAPQKKQTGVSMDRTTLSRRGVRPMKHMLFLMAAGATTFDGEWRRIYQRLLPRLCPYDERTRDYRGKKKRLGE

SEQ ID NO: 192256 - protein, 388 aa, unidentified
MAGNVVIGMDPHKRSATIEVMDQAEVVLGDGRFATDAAGYRAMVAYARQWPDRVWAIEGTNGIGHHIAARLVRDGEHVVDVPAKLSARARVFISGQGRKTDAWDAHCVALVGVRMGGLHPVVNDEQLGLLRVLVDRRRALGEDHTRMIAQLHQLLLELIPGGAKKDLSAAQAKVLLASVRPRDAVGKARRRVAAELITDLERIYQRSKAADKELTQLLAATGTTLTDLEGIGPSGAARLLVEVGDIHRFPSKAHFASWNGTAPLDASSGDQVRHRLSRKGNRQINRVIHIMAIVQLRNQTVGRAYFDRRTADGKTSMEAIRALKRHLSDAIYRQMVLDAQRAGTSPGGQPGNDSDSSATGSHPIAGSSDEPLPGPVTTEPRTASLAAS

SEQ ID NO: 192257 - protein, 440 aa, unidentified
MSKRAYRATRVNDVNWDQLAQGKDGLDITLGVDVGKYSLWAVCRWADGRFERPWRVQNPGEIPTLLTLLKRVSAGRKLVVAMESSGTYGDALRQALADNQIEVRRVGGKAAHDYAEVFDGVPSQHDGKDAAVVAELAALGKAMPWEYQPADPWEQELAYWVEWMVAHRQMLTIWQGRLEGLLARHWPEATQVLKLSSGTLLRVLKRYGTPQALAADGEAAKLLARWGGAFLAAEKIEQLLAGAGASVGVRLGEWQQRQIQNYAQQALAARQEANRAQRRLRSLAEGHAVLQAQGKVVGVPTACVLWVSTGDPRKYHAAGAYRKAMGLNLVERSSGTYQGRLRISKRGSPRTRQWLYFAVLRLVQKCGVRSWYEAKKAHDEADARRALVAVMRKLAVALYYVGVHNEEFQPGRLFGRIRRRRDSPGEQKSRTKRRSRAEQI

SEQ ID NO: 192258 - protein, 342 aa, unidentified
MKQYVGLDVSQRETSVCVVNETGQVVFEGKAKSDPGALAGLLRKHAPHAERIGFETGAMASWLWHELRRVDLPVVCIDARHAHAALSVRINKSDQNDARGLAELVRVGWYREVRVKSEESQRIRSMLVARSRLVGIRRDIENQVRSMIKEHGLLFRRAVGLQFRKQVTDLLGEGHQLRAVIEPLLLIHEQVCTQQNKFDDEVRRLAKSDETTRRLMTVPGVGVVTALTFRHTIDDPSRFRSASSVGAYLGLTPRRNQSGETDMNGRISRWGDGLMRTYLFEAATVLLYRTKKWSSLKAWGMKLAKRIGMKKAKVAIARKIAVILHCIWVDGTSFEWGAAKAA

SEQ ID NO: 192259 - protein, 322 aa, unidentified
MASFLGIDVSSRSLDGWVRPQAVRIAVSNNPAGFEELERTLRKFSIKRILLEATGGYERDVLRFLQDAGYKVIRVNPARARKFADSMGVKAKTDAIDAEVLAHYAEVIPDQPTLQISPDRALLRELLMQRDRLVQQRDDDRRRLKQAQSLVVANFLKANLQHFRSQIRLVEQEINQQAAKLNDERIARLTQVKGIGMVTAGKLVALLPEIGRVESREIASLVGVAPFNHDSGKSLGKRFITGGRFEVRRTLYMALLVAVKYNPALKARYEALRGRGKLAKVALVACMRTFIVRLNAMIKTGTPWRDLILPQPAGTTQVEKAA

SEQ ID NO: 192260 - protein, 352 aa, unidentified
MVVAVQYRSPSLNKNVMVQIYGIDLGMSSFDVSFLSESGSVRHLSGVKNTVHGISKFLLSLPSSAVLCAEHTGVYGDLLLRLCTLNRTCLCFVPGYQIKHSLGLQRGKSDPLDACRIREYAERFYDLLRPCFYPGEEMSELQELYRTRSLLVESRKRLDTLNIGDNCKSSVSLAAGHARRAVLAELNTQISGLDHEIEALIQNSSEFSRNYQILTSIVGVGPVTSCELIIKTENFRKLDTAKKCAAYAGIAPYPKESGKMKCGHKISPMGDKQLKTLLFLCARSAKEHNKEIRLYFLKKHKVEKKHFFVAMNNIANKLLRLIYSLIHKQQTYDRDYIQRDPRCVVISDTNKC

SEQ ID NO: 192261 - protein, 369 aa, unidentified
MTAGADGRGNVVGVDPHRHTLSATVVDERGGIVATGHYNVSGDGHRALEAWVLSFGPVVRWGIEGASGLGRHTSVYLCRQGHDVRDVCPTRTAERARGRHQGKSDVLDSERIARETLAHPDLPVAFKRVRDDSGPDETTELIALWHKERRSLLKTRQHLLNEADALLSDLPDELRGHLPQTKAVRPRLAALRRSRRAWPAATALRLRLLDRHRAAILELDRRDREVTQELAKLIASTGSTLDQLCGLDTRSVAELLVEVGDPRRFTEGGFGRFSGTAPLPASSGEGAGEPIRHRLNRGGNRRVNAVLHRMAVTQLRCDERAQRIRDEARRRGHTKREAVRIVRRHLAAVVYRRMIRDLRARPAASALAA

SEQ ID NO: 192262 - protein, 340 aa, unidentified
MEQVVTIGLDIAKSVFQVHGIDAQGAVVVRQRLQRSRLLPFFAKRGPCLVGIEACGSAHHWVHELVRLGHEVRLIPPSYVKPYVKRQKNDMADAEAICEAVTRPTMRFVPVKSPEQQSVMVLHRTRQILTRQRTQLSNAIRGHMSEFGLIAPVGRNGLKTLMEIVADREDARVPEDARGCLTMLAEQLDLINEQILESDRRILANARSTEVGRRLMEIPGVGPVLASAVVATVADPAVFKSGRNLAAWVGLVPRQNSSGGKERLGGITKQGDRQLRQLLVIGALAVVRFAVRNGTRRPWLVQLLSRRTPKVAAVALANKNARMMWAIMTSGERYREPLAA

SEQ ID NO: 192263 - protein, 347 aa, unidentified
MEQYAGIDVSLEASHVCVVDAQGKILKEAKVASEPEALIAWFAAHGTPMARIGLEAGPLSQWLFAGMKAAGLAVELLETRHVRAAFKTMPVKTDRKDARGIAQLMRLGWFRPVHCKSLPAQEVRALLTTRKLLQAKRHDVEMSLRGVLRGFGLKVGPTTPKTFAGRVRDLVAHHDTLQTIADALLSARTVLEQEFKAIEKRLSGLARANGPTRRLMTTPGVGAIVALTFVSAIDDPARFRSSRMVGAHFGLTPRKHQSGETDVTGRISRIGDHGVRVALYEAANVILTRAVKGSDLKSWALGVAKRAGMKKAKVALARKLAVVLHRMLADGTTFMASKVAPSAAVAA

SEQ ID NO: 192264 - protein, 347 aa, unidentified
MKYVSTIGLDLAKHVFQVHGADIAGSPLFNRKLRRGEVLRFFEKLPSCLVGMEACGGAHYWAREIANLGHDVRLIPPAYVKPFVKRGKTDAADAEAISEAVIRKTMRFVPIKTAEQQADAMVLKTRALLVQQRTQSVNALRAHLAELGIIAARGLPSVAALMTIVREGEDTRLPAAARFALMAVADQIDALADQIFKLERAIVTEAKRDEDMRRLTTIPGVGAITAATIKALVPDPGGFKSARHFAAWVGLTPRPHSSGGKERLGGISKMGNPELRVLLVLGATAVLRIARNDDRARPWLKALLARRPFKVAAVALANKMARIIWALLNKGGIYHRPEPLSIAAVAR

SEQ ID NO: 192265 - protein, 343 aa, unidentified
MDYFAGLDVSVKNTSVCIVDGTGKVVREVKVASEPDALLQVLRNRAYRLKRIGLEAGPLSQWLFSALGEANLPVICVETRHMRAVLQAQINKTDRNDARGIAQMMRVGLYRPVHVKTLRSQKLRMLLTHRKLLQSKAIAVENDLRGTLRNFGLKVGMAGATKFEGRIKELIENLPDLAVLVEPLLIVRRVLREQIGVLHRRLLAVVRNDEVCRRLMTTPGVGPVVALTYRATVDVPARFRKSKSVGAVFGLTSAKYQSGEIDRSGRISRCGDEMMRVMLYEAAQSMLRSKKWSWLKAWAMQIARRRGMKKAIVALARRLAVILHRIWVDGTEFRWTREVVTAV

SEQ ID NO: 192266 - protein, 320 aa, unidentified
MRNAVGLDISKLTFDATAIVGNAEYSAKFDNDSKGLDQFSDRLKSLGCQNLHICMEATGNYYEEVADYFAQYYSVYVVNPLKISKYAESRFKRTKTDKQDAKLIAQYCRSAKESELVKRQKPTDEQYRLLRMTAAYAQIKSECAAMKNRHHAAKDEEAAKAYAQIIKAMNEQLEVLKEKIKEQTEKPNCKEGVKRLETIPAIGRMTAAVLFHHLTSSKFETSNKFAAFAGLSPQQKESGTSVRGKGKLTKFGNRKLRAVLFMLTMVAYRIRAFPDFIKRLEEKKKPKKVIIAALMRKLAVIAYHVHKKGGDYDPSRYKSA

SEQ ID NO: 192267 - protein, 378 aa, unidentified
MNATTATRSSASVVGVDVAKSVFQLAVADRNWKVIETHRLTRSQFERWFANREVGLVVMEACGSAHHFARWLNGLGIEVLLLPARYVRAYVKRNKTDAADAAALLEAVRASDISPVRVKSIEQQALQGMHRIRSLWMGTRTSRINALRGFCREFGITISQGSRLGVEQISRVLADPDSAVPTLIRGTMKLLIDEIRLLEARVAQLERELTLLARQSPACTTLLSIPGVGLLTATAMVAATSGSVAHFKSARHFASWLGLTPRERSSGGTRHLGRISKQGDRYLRMLLTHGARSVLHAIGARQAAGKPLDALRAWAGALQGRTNHNKATCALANKLARICYATLRDSQPYAPKEVPLGDGLPAPRFNHKIERTAFAAAT

SEQ ID NO: 192268 - protein, 339 aa, unidentified
MWIIGCDYHPSGQQVFGIDSESGEVVADRWIAHGGSEVDEFYSSVPAGTEVGVESSGNMLWFERRLQQYGHRLRLGDAAKIRSQETRKQKHDRRDAELIARLLREGRFPDLPWVPSLAERDQRQLLMHRHKLVQMRTQVKNQLQHIAMNQGQQKKRQLWSKAGRELLEKLVLDPWTGQRRDALLRWLDLLNQDCQAWDEAVQQAAEGNADARLLMSHPGIGPVISLGFVLTIGSIERFQRSRQLVSYLGLNPSEDSSGERRRLGGISKQGSSFMRRLLIQGAQTAVRGDEGLHRQYRRLAAKKHRAVAKVMVARKLAVRMFSYAGQLESSWGQPDRPFE

SEQ ID NO: 192269 - protein, 487 aa, unidentified
MSVVTGHVCDIGEAAKAVIPFERVSITTYPNRCGIPNEMMEEDMVQRKRTALELAHPNAAGIDIGSASHFVAVSPDRDDEPVREFKSFTEDLEELADWLVCCGVDTVAMESTGVYWIPLYEILEARGFAVNLVNARHVKNVSGRKSDVLDCQWLQQLMSYGLLSGAFRPTDEICMLRAVSRQRDMLLASQGRHIQHMQKALTQMNVQLANVISDIVGETGKKIVRGIIAGERDGHVLAKMRNARIRASEEEIAKSLQGNWREEHLFALKQAMALYDNYGTLLTECDTKLESMLATLVGDDDSDPGRGRRASNSKNAPQFDVRTYLFRLCGVDLTRINGINPATALKVIAEVGPDMSRFKSAKHFASWLGLCPGTKISGGKVLSGASKRTTNRAAQSLRLAAAALHKSQSALGAYFRRLAARLDRAKAITATAHKLARLIYTMLTKGAEYTDQGQDYYEERYRQRVMHHLAKRAEKLGMQLVPAPQST

SEQ ID NO: 192270 - protein, 424 aa, unidentified
MLGVGIDWAESFHDVALGRPGEGVIGQFRIEHGPAGVARLVARCLELEPDPAEVRVVLETRHGLLVEALVDAGFTVLPVNPDLVARRRGPAKKKDDAEDARICCLLALDAYLDLRKLIPHGAAGAELRAIARDDERAARDERRIGNRLRADLLAVFPAAIDIAAGDLGSAVFLKLLQRWPSAQALAQAGREELEAFARTARHGWPGRFADRVSEAMAASRLSARPELARAKAGSITLAAAQLLAIRAQRRAWERRMSELLLGAPRTGRDRTAKDPDLGKAFPGGEIYLSMPGLGDRLAARVAGEIGEHPEQFTTPNALQCYAGRAPVTRRSGRSEFTIARRLAYNRHLGEAVHQWAFCSLSRSAWARQFYDAKTAAGDSHHAALRKLGNRWLEVLWHCLDKGACYDEAVHAANRARARPLKPAA

SEQ ID NO: 192271 - protein, 333 aa, unidentified
MNQEYCIGLDVHKSQTTFSVKSKEGITLAEGECATQYRDIKKNLSEYLDKASIVMEACTSYYHLYESMKKDKIDVHVANVIQLRKCIGKNDKIDAERLADMYRLNSLPEAYIPDKKIQTLRIMINIYHNLVCEGGRLQNQIRSMLDMKGFFCPIKELTSKKGMSYINSYLQANNDLSMRYLYESLNEMVQRIKRLTIEIDCYVKENFSEEYVLLKTIPGVGDIIAAYLIAEICPIERFSDKKKLRRYAGVIPIKEQSDKKIYATYLPKHASRRLLRYALVLAANAAARFNSKLRTYYNKKKKGKTHGHAIMCVTSSLSDIIYHVLSTKKPYNK

SEQ ID NO: 192272 - protein, 407 aa, unidentified
MEVVYRCCCGIDVHKKLIAACLNKGGKRELREFGTTTGEIKQLGNWLIEEGSQMIAMESTGVYWKPLYNLFEMMDLDAIIVNASHMKTLPGRKTDVKDAEWIADLLRHGLLKASYIPDREQRELRELARYRKSLVEERAREINRLQKVLEGANIKLDSIVKDINGKSSRKLLDKIANNEAMTADDVAGMIHGSMRPKLDAIMRSIEGITTPLQRMLIAKIVDHIDDMTRRIEELDGMMKEYTEKYEKAIAAIDELPGIARRSAEIIIAEIGMDMSRFPSAAHLCSWAGISPGNNKSAGKRKHGKTTKGNKALKTILTQCAKAARNCKESYFSAQYQRIAARRGKNRAAIAVAHSMLIAIYHVLNEGVAFRDLGADYYDNFNREYKIRSYLKRLNSLGWTPETALAMA

SEQ ID NO: 192273 - protein, 360 aa, unidentified
MKYFAGLDVALEETTICVVDQDGQIVKEARADSEPEALLAVLSGFELCFERIGLEACSLTAWMHEGLRSAGLPAICIESRHAKAAMGAMPNKTDRNDARALAQIMRTGWFRKVHVKSASCRAWRSLLVTRRTVLNEMRTIENVVRAVLREAGLKLGTPSRKDFVAHARDLIASEEGLTRTIEPLLEILVTMLREFAKLTKRAFDIVRNEPVCRLMMSAPGVGPLTALAFRATIDAPERFDRSRAVGAHLGLTPRRYQSGETDIQGRISRCGDELARTALYEAAHSLLIRSQKWSALRAWGMKIAKRRGMAKARIAVARKLATILHRMWIDATGFRFGREQPIAPVAGGRSGLRRKATVIE

SEQ ID NO: 192274 - protein, 344 aa, unidentified
MEISTIGLDLAKNVFQVHGIDAGGNVVVRRTLRRAQLLAFFASLPPCLVGMEACGTAHHWARELIKLGHNVRQMPAAYVKPYVKRGKTDAADAEAICEAVTRPTMRFVPVKSPEQQAALSMHRARDLLVKQRTQLVNMVRALLAEFGINIPQGVRLALEMARKIVDGEAPPVPREAAKIAGRLSQQALDTHAQLREIDLDLLAWQRTNDTARRLMSIPGIGPIGATALAASVTDANQFRSGREFAAWLGLTPRQHSSGGKERLGRISKMGDKYLRTLLVVGMTSLIKGVKRKPETADPRLVALLARKPVRVATVAMANHTARVAWAIMARGETYRAGHQPRLAA

SEQ ID NO: 192275 - protein, 401 aa, unidentified
MIYVGIDLHSEQMTVSVRNEGGDVVLRRQVSTRPAKVEEFLSQLHRMEEQYVVILEVCGFHDWLVKRLRQDPRCKDVVLIQPEQPSKQKTDRRDANRLGELLWINRQRLLAGERVNGLRRVYEPTDDERQDRQITSVRQRLGRQRTRTINQSRVILRRNNLEWARPTKGFQTKKVKGWLKTLPLDQTDRLEMDQLLQQWEMWDRQIEQAEQRIEERFQKNPMAQILATIIGVSCYTALAIASRIGKIERFVHARSLANFFGIVPGSRSSGKRARPGSITKLGSQMVRFLLGQLAAHVLRKDAKLRAWYRQIKRRRGSKIARVAVMRRLTVIMWRMLAKHEAYRYEGVTEPRRPGVSSPHEACQMPDRETILAAYPSLAAAAARSAGSTGSKEVGSTSPKQT

SEQ ID NO: 192276 - protein, 389 aa, unidentified
MEARTVNNLPPAGIDDDAVRCLIAIELSKKSWIVAVNTPLSDKISRHTLKACDGKELLDLCERIRTRAARETKKRVEIVSCYEAGYDGFWLHRLLEAHGIRNYVIDPASLQVDRRARRAKSDGIDVEKLLRSLMAYLRGEPKVWSVVRVPSVAEEDDRRLHRERGRLINERIQHVNRIKGLLAIHGIYNYQPLRRDRMQQLERLRTADGRTLSPRLKAEIRRELQRLELVIGMIKTIEAERDAIASTKTETEHTSAKKIQDLAKIKSIGPEFATTLVGEVFYRSFDNRKQVGSYVGLTPAHFQSGAMCRDQGISKAGNGKARTVMIELAWLWLRHQPDSPLSVWFRDRVGKLKGRIRRITIVAVARKLLIALWRYLETGLVPKGAALKV

SEQ ID NO: 192277 - protein, 361 aa, unidentified
MKLYIGLDVHSKATVYVAMDEEGQVMKRGNVETSPEGLARLLDETKAKAGTLVGLETGTQATWVARLLTAAGMEPVVIDAREVRAKARRRGQKTDGRDAFEIADGVRRGIYASIVYVPPVEVERLRKILSRRRHFVKAATRETGAAKFLFRQAGRGSAMPKLTTESAWAKLLASPRAEGLREHLAMHAALWRLAQEQVAALETELDEALAPFRETAELLTTVPGVGRITAASFIAVLGTPERFPDSGAVGSYLGIVPSTYDSGESERHGRITRQGSGPLRAVLVEVAHHAANPRHPLHPYFARVCAKAGYKKAVVAVAHRLARILYRIWRTKTAFDVAKLNVEAVRETRTRTVYYRIRTAA

SEQ ID NO: 192278 - protein, 345 aa, unidentified
MPIASGPTSSPDRLYVGVDIAAATFTAVWIASDAAPSRPITLDQTPQGFAALQMRLLATGRAAADTLVVMEATGSYWVALATTLAQAGFAVAVINPDQAHSFAKALLQRAKTDAIDARTLARLAATLQPAPWTPPPAIYTELQQRLTQRDALLDLRQQVRNQRHALGYLPVVVEAVRARMDELITTCDAQIAAIEREIAQVLPQDTAWAASAELLLSIAGVGLLTASWLLVATLNFTSCASPEAATAYAGLAPNPKESGTSVRGRERIGHGGNKRLRTALYLATLSAARYNPLIKAFYDRLRAAGKPKKVARCAAARKLLHLAWAVVRKRRAFDPLYQQQPQQAA

SEQ ID NO: 192279 - protein, 344 aa, unidentified
MTYYAALDVSLRSVCLCIVDAEGSYCFEGKLPSEVEDIARCLEGFDGEIELVGFEAGMLSQYLSYGLTAAGFNVVCLESHHVKQSLKAMRNKTDRNDARGIAQLLRTGWYQPVHIKSVESHQVRVMLSSRRVILRKCIDLENELRGLLRIFGIKLPSKLSHGAFDEVVRKPIEANPALTRALIPMLDLRGTLYSAYVKLDKEVRAMAHEDTVCRRFMTVPGVGAITALTFKAGVDDPTRFKNSRLVAAHFGLTPKRHQSGEVDYDGRISRAGDAEVRCALYVAAHVLVTRHGEWSSLKAWGIRVTRTKGHRKATIAVARKLAVILHRMWIDDTDFRWHSENRAA

SEQ ID NO: 192280 - protein, 345 aa, unidentified
MEIHTIGIDLGKTVFHLVGLNAGGEVVVRKKCSRTQLLRFTANLRACLIGMEACGGSHFLGRALREQGHDVRLMPAQYVKPYVKTNKNDYIDAEAIAEAVTRPTMRFVPIKSDDQLDLQSLHRVRERWVVRRTAVINQIRGLLLERGITMRKGRKHLEASLPHILEDAENKLSGALRALLTQLQIEMQYLHRQIEECDQQIVRIASELEACRRLIAIPGIGPVIATATIAAIGNGAAFKKGRGFAAWLGVVPGEHSSGGKRQLIGTSRRGNKYLRKLFVLGAHTVLLQRTKQAPGLSTWLASLIARKRKQVATVALANKMARMVWAVLFKGEAYRPPLVPQLNAA

SEQ ID NO: 192281 - protein, 370 aa, unidentified
MDERIKFFVGLDAHKDSIAVAACEAGREPARFVGTMGPDVNGLLKLLAKAGDPAQLSVVYEAGPTGYGLHRELCRRGYRSQIVAPSLIPRRAGERIKNDRRDCLRLAELSRAGELKAIWVPDEAHEAMRNLWRAREDAVGMRLKTRQQLQAFLLRHGRRYPGRTNWTKSHERWIAEQRFEHDGDRIALAEYQLAAQAAEQRVDRLTTALTEAAKGWRFEPVVAALRALRGIDTVCAIGLVTEIGDISRFGTARQLMAYLGLVPSEHSSGNSIRRGSITKTGNAHARRLLTEAAWSYRFPARMSQQLRQRSSDLPEPVRNHAWKAQQRLCGRFARLSSRGVQINKVCVAVARELAGFVWSIAHQASRTQTH

SEQ ID NO: 192282 - protein, 345 aa, unidentified
MDKIIRIGMDTSKHVFQLHGVNAGEKPVLREKMRRKDVPDCFTTCPPTLGAIEACGGSHHWARLLASFGHEVKMIAPQLAKPYVKRNKNDAADAEGLCEAMSRPTMRFVPVKTADEQAALMLISVRTRLIANRTQLANAIRGYANEFGVSAAKGLAHIPMLLERIQADATVPELAQELFMSQAEEYAQLEKKIADVEAKVKAWQRNDERSRRLNTIPGIGPIGSALLIMKTPAPELFQSGRQFAAWIGLTPEDHSTGGKLRLGGITRAGDEALRAVLVAGATAVIHHARRSGKASQWLAELLRRKPPKLAAVALANKMARIAWKLMISGQTYSAQSGAALTGCAT

SEQ ID NO: 192283 - protein, 307 aa, unidentified
MRAVGIDVGKASLDLAMDGHAGVTRFANSRSGITRIVKRLVAMDDPRILVEATGGYEEPLLEACCDAGLWVSRVNPRQARDFARATGELAKTDAIDARLLALMARLFNDRLRRYTAAPPWQRELRDWLRRRGQLVTALQAHKQQAAMAPARVRTLASRTIAAVKRELAAVDAAIHALIKQHATPAMHSCKGLGPVFQASILSLLPELGQLSRRQIAKLVGVAPMNRDSGQGQGKRRIRGGRAPVRVALYMATLSAVRWDPLMKAHYLHLRARGKLGKVALVACMRKLLGIVNAKRRDELRDQGLIAA

SEQ ID NO: 192284 - protein, 361 aa, unidentified
MSESMVLVGLDVDQAQSVAAVLDPSSGELRVERLRGAPAAVVPGFLKALGRPVRAVYEAGPTGFGLARAGTEHGLDVRVIAPGSIPRAPGDRVKTDRRDAKRLVRLFAAGELSFVFVPSEEDERFRDLVRCIDDARKDLMRARHRLSKFLLRRGERFRGCAWTQTHERWLRSLSFDDALTRATFIDYWCAVQALVARRAALIAVLEQAVPDSSHAPVITRLRCFRGIDTLSAAGLCAEVGSFARFAKPNLLSGYLGIVPSEYTSDSKRVQGQITKAGPTHARRLLIEAAHHYRRRPAISQGLQTRQAGQDPRAIQIAWRAQRRLHTRWAHLGAKRGKPAGTVAVACARELAAFCWEAATLD

SEQ ID NO: 192285 - protein, 422 aa, unidentified
MLEETQEREEIVERIAALDIGKAELVCCVRVPGGPGRSKRVQEVSTHKTMTRSLLVMIDRLRDLGVTRVVMEATSDYWKPPFYLLEAAGFETWLVNARDVKHLPGRPKTDRLDAVWLCKVAERQMLRPSFVPPPPIRVLRDLTRYRWDQVAVRTAEKQRVEKLLEDAQIKLSVVVSDIFGVSGRDMLAALIVGQRDPKVLAQFARGRMRGKLSDLEEAFTGRFGDHHAFLLAKMLARIDQVSADIADLDERIEVEVSPFASAVARLDEIPGIGPTAGCVIIAELGIDMTRFPTAAHLSSWARFAPGIKESAGRKKGNGASGHGNRYLARVLGEAAVSAGKTDTFLGERYRRIARRRGKQKAIVAVGRSILVIVWHLLSDPETGYRDLGADFYDTHLNTTNKKRNHIRQLEALGYKVTLEPAA

SEQ ID NO: 192286 - protein, 396 aa, unidentified
MGTVGIDIGGRVHVAARCREGQARADRGVLRIGQSRAGFTALDAWLDAGPEPVELVVMESSGHYWMPLAAHLRRRGVPVAVVNPLAARYFAKSRLGRTKSDPADARSLAEMAMRDTPPARDPLVGVELRQAARFAMTLVEAQAKVCQRLYRLVELGFPELRELFDDPTCRTARAVLRIAPTARQATRRQTETLANANKGRGQRRLGQTKAERLRTAAAETIAVPELDAEMAFEIGHLLDQYDLLERQIEAADRRVAGLLDGEIAHRLLTIPGVGPATAATLMAEIGDIGRFTDFDQLLAYAGVHPAERSSGTKGARPETSWHMSKAGNSHLRAAAYRMAVVGIQHNPVIAAHYARKRAAGKSPMNALGHCMRKALSLVWGVWRNGQDFDPDWGTEA

SEQ ID NO: 192287 - protein, 371 aa, unidentified
MTSIIYVGMDVHTTNYTLCCYSIENDTIFATVTMEPDYMNIVKYLEKVERNHGGDCHFLCGYEAGTLGYSLYHQLTGQGLDCVILAPTTMATARNKKGIKNDKRDAANIAKCLAYNTYSPVYVPTVEDNAVKEYIRMRDDAKDTLKRIKQQTLAFSTRLGKRFTEGRNYWTKKHLAWLGKLDFGDAILNETLREYLALYHQAVDKVELFDRRIAEMARSERYEEKVKQLKCFIGIKDHTALATIVEIGDFARFPAAKNFSSYIGLVPGEDSSGGSVQITGITKAGNSHVRKLLIEAAQSYSRGAIGKKPVALKARQAGNEPKVIAYADRANERLKRKCSRITFKSKRNIAVTAVARELACFIWGMMTGNIA

SEQ ID NO: 192288 - protein, 315 aa, unidentified
MSNEPCFVGIDVAKAQLDIALRPSGERWTVPNDAGGVVTLVERVPPLHPTLIVLEATGGLERVVTAALATAGLPVVVVNPRQARDFARATGQLAKTDALDARALAHFADVIRPTPRPLPDAQTQELRALLGRRQQLIVMRTAEQNRLAGTSGRLQTDIEAHITWLNVRLAMLDNDLETLLRASPLWRANDDLLQSAPGIGPVCARTLLLELPELGTLNRQQIAALVGVAPLNCDSGTLRGRRIIWGGRAHVRTVLSMGTLVATRYNPRIKAFYERLLAVGKVKKVALTACMHKFLTILNAMLKHRTPWQSQEVQG

SEQ ID NO: 192289 - protein, 438 aa, unidentified
MPNQSSSEPQWAAYVAIDWADREHVWEMQPVEGGPCESGKVEQTPEAIEIWASQLATRFNGRPIAVALEQSRGPVVFSLTKYSHLHLFPVHPSTLAHFREAMVPSGAKNDPGDTRLLLELLLHHRARLRRLQPDTEQTRELQFLVENRRRLVDDRTYFSNRLIAQLKLYFPQILRWFYKPASPVACDFLLRWPTLEAAQKATPRALKTFFAKHNCQDVERRMEEVRKAVCATHDQAVIRSAMIMVEATVRLLQTVHQDISHCEERIEQLTKSHPDFAIFDSLPGAGDALIPRLIAALGTQRDRFASAVEIQSYSGVAPVVKQSGNTKLTHCRQAYPRFLRQTFHEWALHSILKSTWARAYYERQLSRGKKHHTAIRALAYKWIRILYRCWKDRLPYVESFHGDAQKKRSAENVSTQNAVVELQCKKVAGFIKVVAVNY

SEQ ID NO: 192290 - protein, 351 aa, unidentified
MKTVPTAQPKLYIGIDIHKLSWKVHCATDLFCGKSFSMPPEANTLYDYVQKNFKDHQVSVAYEAGCCGYSAHRSFTGFGWHSVVTNPADIHRKGKEKHTKTDRIDAQLIARELKDGRLDCIRIPDVEREELRSLFRRRNDIVKDIRRNKSRIKMQLLYFGIKIPEEFSNDKWSHKFRDWVDAVRFAHPTAKSALEGRMRTFRFLDKEKREISTQLRAYCRKHHKEDYYLLRSIPGIGGIVACGILSELGDLRRFNNIKQFAGYLGLAPGIYQSGENSRGTGITKRANKIMRSYFVEASWQAIRADPVMQAYYRKHVHRNSKSIIIKIARKLASRTLAVVKTGIPYEPGVVQ

SEQ ID NO: 192291 - protein, 343 aa, unidentified
MQAITTIGLDIAKSVFQVHGVDAEGQVVIRRQVKRRYVLAFFERLPPCLVGIEACASSHHWSRELQALGHSVKLMPPSYVKPYVKRHKNDAIDAEAICEAVSRPNMRFVATKTPEQQSCLILHRTRHLLIRQQTSVINAIRAHLAEFGIVAPVGRNGVEQLLGVVADASDKRLPEVARACVAALGVQLRVLKAQILEFDRMISAWHRSNETSRRLDEAPGIGPVLATALVATVADPKTFRSGRNFSAWIGLVPKQHSSGGKDRLGHISKQGDRYLRGLFVAGALAVIRYAKIHGTKHRPWLTALLARRPTKIAAIALANKIARMAWAMMVKGERYKEPVALAA

SEQ ID NO: 192292 - protein, 365 aa, unidentified
MLYLGIDQHRKQITVNLRNEEGDVILRRQVSTEWTRVKAFLEQVRKDADPEGGFVAIVEVCGFNDWLLELLDEYGCQQTVLVQPEKRSKKKTDRRDASALSEVLWVNRLRLLTGRRVQGVRRVQIPSPQDAEDRQLTATRKRLGQVRTRTLNKIQHIVLRHNLHQECPTKGLQTKAARKWLAQLSLGQIDRQEMKHLLAQWNLWDEQLAEVEEMIKIRQQQNDTAMLIATVPGASAFSSLTLASRIGDIKRFATPASLANYWGLVPGCRNSGEATDRLGSITKQGSAIARFILGQMVLHVLRKDPAMRAWYARIKKRRGSKIARVAVMRRLATIIWRMVHDQQPYVTGGRPSVRQMQACFKAVET

SEQ ID NO: 192293 - protein, 416 aa, unidentified
MTDNIMAYVGVDWASATHYAYALDATGQKLGHRAFAHSGTGLTELVDWIRSTSGHEPGRIAVGIEVPHGPVVEHLMDAGLLVHAVNPKQLDRLRDRFTMAGAKDDRLDAFVLADSLRTDDKFYRLLEPMHPTIIELREWSRITEDLSTERNRLANRFRHQLWRYFPQFLDLSEDWARQWILDLWEVVPTPAKARGTRTVTIANLLKQSRVRKWTADSLLAHLRTVPIAVAPGVTEACIAHCRIIITRLRLVMEQLKTALKQLERLCSAVADLPVAPETMTDGRCDPDILRSLPGVGPIVLAALLSEGHDAIVRRDAPTLRALSGVVPVTRRSGKQCMVVMRQACPHRLRTAVYHWARVAVMRDPHCRTRYSDMRKRGHSHARALRSIGSRLIGVACVMLQTGELFDANRMPQPAIA

SEQ ID NO: 192294 - protein, 443 aa, unidentified
MCGSSVPAFSTPIFKRGGSNVKVVYPICCGVDVHKKFFIATLITSEGITPHYQKKRFSTFNNSILQFKRWLLDNNCTDICMESTGKYWVPVFNLLEDSINVTVANPKWVKAVKGNKDDIKDSKWIGDLFRLGLVPGSFIPKKSIRILREYTRYRFKLVSCKSSEKNRFQNAFTVCNVALDAVVSDMFGKSASSITDYLVNSDSFDPEYCVSLLQKSLKKKADAVIESIEGYQMMPEQKYRVRIIRNHLDFIEQSIHELDDMLNVLASPYESAIQLLCTIPGVDRTSAITVISEIGTDMSHFSSSKRLCCWAGLTPGNNESAGKKKSVRITRAGVYLKPALVQVAHAAVKSKDNSYYRIKYERITKRRGKKRAIIAIARIILTAVYHILSTGEIFNPCDLYQVDMPLELRDKHKQKALKKAVKLLIAQGIIKETDILGSFLQPA

SEQ ID NO: 192295 - protein, 344 aa, unidentified
MYFIGVDQHKQASVMTVLEEDGRECKTGRVLNRRNEVERFLEGYRPFKAVLEAGRSTYVMADLLRELGGEVELANPLQLRAIAHARIKTDKRDSRMLADLLRAKLIPAVYQRGERNRQAQRVMRIRAYWVAKQTEVRNKIRALLAQQKEEIRLEVERREESLFGPKGLELLRGLKLEGQDQWVLDDLLQGHREIQAHIKMTDGLVKALYGEMEEAARIDTVPGFATTLSVLVAVEIADIRRFATPADLHAYAGVIPSTHSSGNRTVHGPITKQGSSWLRWAALEAVYPAIKKDLALFGLYKRLAQRKTKNVAKVAVARRLLTIIYRVLSEKREYIPGPMKQSAA

SEQ ID NO: 192296 - protein, 344 aa, unidentified
MTSMHFIGLDIHKKTISYCVKDVSGTVLSEGTIAATRAQLDDWVKTLPAPWTVAMEATMFTGWIYDHLLPHAAAVKVAHPLMLRAIAAAKKKNDRIDASKICDCLRCDFLPECHMVSAEVRERRRTLRYRKLLVRQNVQLRNKVSQMLMESGVVYNKQKLHKVGYFKELMETNPDISRELKPLLAICRETIVRIGKTESGLIRSLRRDPLLHARVERLMTIPAVGPLTALTWVLEVDDVARFHSVKQAVSYCGLCGAERSSAETIKRMPISKQRNKHLQSVLIEAAKLAPRLSPELALVYDTEKQKGHANRASIAVARKLVAYLLAVDRSGREFVVAGERRAAA

SEQ ID NO: 192297 - protein, 368 aa, unidentified
MVVVVEMSKASWLVSSVVPGVERQPLKKLEPDATALLRLIERWRNEAVRVGRPISRIALAYEAGRDGFWLARWLIARGIEAHVIHSASVAVSRERKRAKTDRLDAAMLMRVFLGWLRGERGHCGMVAIPTMEEEDARRPNRERESLVNERSRIINRMKSALARLGIRGFKPHLRKAPERLAGLRTAEGTGLPANIIEEFRRDMARLALVREQISSIEKTRAERLERAPDTGPHAMVRLLARVIGIGIETADMLVREILSRKLRDRRALARYAGLTGSPDESGLKSREKGLAKAGNARVRRGLIQLAWRFLMFQKDSALARWYRTRTEGPSGARKTTMIVALARKLLIALWRLVTTGEVPDGVELRTAA

SEQ ID NO: 192298 - protein, 354 aa, unidentified
MKRNSKYVGLDVHQAMTAATVRTEGGRVIARSVLETSERSITEFFSAMAGTVHVAFEEGTQAQWLYDLLRPQVDRVIVCDVRGTKRSGNKGDRVDADHLSEQLLRGGLRAVYHGSRDGADLKELTRAYRNLVEDSTRVMLRLKALFRARAIRTPGGGVYAPRERADWVAQLPERGARFRAQTLYAQLDVLRTQRKKAKAAMVTEAKRDPAWGVLETIPYFGPVRIALLLATIGTPWRFRTKRNLWAYSGLAVVTRSSSDYEMFDGRARRRSRRPLTRGLNRNHNRVLKAVFKGAATTATGRPGPLQDFYHAMLERGMRAELARVTLARKLAALTLRLLKTGEVFDPTQLSRPQT

SEQ ID NO: 192299 - protein, 357 aa, unidentified
MLTQSKGLDFSGQVFYVGLDVHKKNWQVCIRSNQLELKRMSMNPSPEELVAYMKHHYPGGSYHSAYEAGFCGFWIHRSLQENGFHNLVVHSPDIPTTDKEKHFKSDKVDAGKLCRELEKGSLKGIYVPSPLQQELRSLYRLRYSSIQSRTRVKNRIKSHLHYYGIALPSEQEIPSWSKRFTRWLESVEFQHASARAYLDFCLEEFKQHRERVVQITQLLQAHLKTAGVDHTVNLLQSIPGVGPVCSLAFYTELMDMKRFPTFDQLSSYFGLVPTVHSSGDRHRVNGLSNRRNRYLRHLIIEAAWIAVRKDPALLLAYQNLSKRMRSQEAIIRIAKKLLSRLRYVWTHQKEYIPAIIR

SEQ ID NO: 192300 - protein, 332 aa, unidentified
MYLGIDVHKRYAQVAVMNEAGDIVEEVRVENANLDELAQRYAGSQAAIEATSNYYHIHDTLSEHLDVTVAHPKELTQIANTDKKTDRVDAKELARMVRLNSVPESYVPTDEIREARALVRGRQTLVETRTKYANKIHGLLADHGITEDVKPLSVEGREFLRELSLPTPWNTLLESYLDVIETLTEEMQKLEKTIRERAGSLKETQLLMTIPGVSYFTALTIYAELGEISRFDDDKAVVSYVGLNPVIRESGDSRIEGSISKRGSGRVRWLLVQAANTAVHTCNDEYLSRFYDRLASRKNSQKAIVATARKMLVSIYHMLDRGEVYDPPGVTA

SEQ ID NO: 192301 - protein, 347 aa, unidentified
MRFYTKTHQHYCGIDLHAKTMYLCILDSEGAVALHRNIPCEPEKFLRVIAPYRDDLVVAVECMFTWYWLADLCARESIAFVLGHALYMKAIHGAKAKNDKIDSKKIAALLRGGLIPKSYVYPAEMRATRDLFRRRTHFVRHRGQLLAHIQNTHHQYNRISPGKRIAYKSNREGIAEAFDDIAIQTNLATDLELVDYYDAVIGNLELTVLRQARSHDRDAYERLKTIPGIGKILALTILYEIHDINRFPRVQDFASYCRLVKCQSSSAGKIKGTSGAKMGNAHLKWAFSEAAVLLLAKCPEGKKLVDRLAKKHGKGKALSILAHRIGRAVYFMLKRKRAFDLERFLRM

SEQ ID NO: 192302 - protein, 387 aa, unidentified
MTVCTVNHLPAATHGETARCLFAIELSKQSWVIGFITPLSAKINRRILSGGDWRGLLELIEEMRARVSRETGRAVEVISCYEAGYDGFWLHRQLEAHGIRNYVIDPASLQVDRRVRRVKTDRIDTERLLRSLMAYLRGEPKVWSVVRVPSVAEEDARRLHRERDRLVSERVQHVNRIKGLCALQGIYDYHPLRPQAMARLEQLRTAQGVALPPRLKSEIKRELHRLELVVEMIASLEAERDIIAEDKASTHVNAEKIQALHKLKAIGPEFAAVLVGEIFHRDFNNRRQLASYVGYAPSPFQSGNVAHDQGISKAGNRKGRTTGIELAWLWLRYQPDSDLSVWFRARVGTVKGRIRRIAIVALARKLLVALWRYLETGLVPRGAVLKG

SEQ ID NO: 192303 - protein, 348 aa, unidentified
MTIVGGFDVHRAQITFDYIDTDSGQVTAGQIRPATRPMLRNWLQRFDGRDDVAFAVEGCTGWRFVVEELTRARVEPHLAEPADTANLRGRKKRAKTDRADARLLRELLAQHRLPESWAPPSHVLEVRTLGRLDVTLMDERRAWQQRIHAQLFHQGVPSVRALLTSDGRVALSTAELSPAGVQMLHTALAAVDALSLQIGPLRAQLQTIGTNQPGVLALTRQYGIGLLCGTIIWAELGDCRRFSNADQAVRFAGLDVTVWSSDTKRSAGRLARQGSPELRWALFEAAKSAARQTSPDHDYYDAVRDRLGGKRPALSVARKLVRRCYHALRELGDQAWLASAPSSEQRAA

SEQ ID NO: 192304 - protein, 343 aa, unidentified
MNVTTIGLDLAKSVFHVVCFNTQFKEVKKRMLRRNQVLQFFTQLPSCLVAMEACASSHYWGRELRALGHDVKLIPPQHVKPYLRGNKNDYNDARAIAEASTRPSMPFVGIKTTEEQDMQAIHRIRSQCIRDRTALSNSTRGLLGEFGVVLPGGLATLRKSIHGLLEDADNGLSDRFRNLLARRYDQFVELDGHIAFYTNELELLSQQDDACQRLQTIPGFGPIVSSAFRSVIGDGRCYGRGREASASLGLVPRQHSSGGKNVLLGISKRGDRYLRSQLVHGARAVVIQASRKDDPLSKWINRVREERGWNKAVVATANKMARIGWAILRHKTIYQPASEQLAR

SEQ ID NO: 192305 - protein, 349 aa, unidentified
MNIAFDSHKHYTLCSVATERGQIVEETRIDHERGSIQEFLSRYPASESVAVETIGNWYWIVDEIEAAGHRPLLVHARRAKLMLGNVNKTDRLDVRGLNRLQRSGTLPTVWIPPGELRAQRDLSRTRIYLVAIRTRLKNRLHATLDKYALSLSGVQDPFGVRCRERLSQLLARLPEPVHYTAREQLAYVERLDQSIAALDKEIEKVFAQVPEIRLLRSIPGIGRVLSITVNLEVGEVSRFASAQALASYAGTVPRVHASGGRIRYGQLRSDVNRYLKWAYAEAANSLVINQRLYPDRHVTRLYRRIKARKGHQKAIGAVSRHLAEATYWILSKQEPYQEPLSRQQLSTRV

SEQ ID NO: 192306 - protein, 344 aa, unidentified
MKCMAGIDLHSNNLFCAIVEMDGKRVFEKKLPCDLESVLQALKPFKKRLENMAVESTYNWYWLVDGLEDHGYPVVLANPAEMEQYSGLKHADDKSDAFFLAELLRLNILPTGYICDRAIRPVRDLLRRRMGLVHHRTSLMLSLKSLHTRMTGRDLETGRIKTMDPQEGEKLFEHPADRLITRLDLQLVEQLGRSIQEIETRILAEAKKMRRYQVLQTMPGVGEILGLTIMLETVDPKRFASPGDYASYCRCVDSRRMSNGKKKGENNSKCGNKYLAWAFVEAANFAQRHDLACRKFYDRKKAQANGIVATKALACKLAKAAWHMMSGNRPYDSGRIFPQFKMKK

SEQ ID NO: 192307 - protein, 351 aa, unidentified
MKKRVKSKGMNSDGILYVGIDLHERESQLAVFDQGGALLDEKRLPTKDLRNHLSSLPGQKRIAMESVGFVYPIYDELSSLKDCHVTVANPNRLQLISRSSTKHDKADARVLGDLLRTNYLPVAHMRDEETREKLVVIGERVRYGARGGELKGSIKWLLKRRGIEVEKPFSDEGRKRLRALRLQEVDNRLDELALVESFIERLDVQILDIASRDPKAKLLDTLPGLAPYTALYLACVLDDIDRFPDAKHACAYLGLVPWLDETADTTHLGHITKKGDKWLRRNLVQCARIAVRKDPHLNEFYTRLAHKRGEKKAVIAVARKLASYAYWMIKRNVTYEELSPWEANVRQSSVT

SEQ ID NO: 192308 - protein, 330 aa, unidentified
MTDATSRKAAPLPPDFVGVDMAQQVFEWALHGVRGTHVARNDDSGFEALLEALKGRRIGLIVIEATGGLERALAGFLLQHGVPVAVVNPRAAREFARSMGHLAKTDAIDAVALAHLAQTLAAKADQAGVRFAPPSAEVELLQAMVARRLQLLSMRTAEKNRLGGAVRVLHKSIEVVIKTLDKEIAKLDRDIDAHLARHFTEQAQRFEAIKGLGTNTCAVILAFMPELGTLSGARAAKLAGLAPLNQDSGNARGRRHVWGGRSIVRSALHMAMLSAVRFNPVIKAFYDRLIAAGKPKKVALTACSHKLLRILNAMARTGQRWNEKFHAVSP

SEQ ID NO: 192309 - protein, 321 aa, unidentified
MEVVAESVAGIDVHQKQITVSILVGLANAKPKKISKRFETITCRLKDCGEWLKQRHVEQVLMESTCQYWRPVWQILEPFGFKMILCNPRIVKNIPGKKTDQKDSEWLSELARYGLVSASFVPPKSIQALRESTRLRKKITQSMTATKNEVHNLLQRSNIKLTTYISDIFNGTGLKLLKLLIDGEFITLQAITKCRHTRIKASVEQLFVAMDGILPRNDRRLLGLNMELLADFRRVLAELDAQIDEQIMEFNDLYLRLQDIPGISQRIAQIIIAEVGSDVSPFPDAHHLASWAGLCPGNYESAGIKHGAHILHGNVYLKSPW

SEQ ID NO: 192310 - protein, 350 aa, unidentified
MRKHNKRRAKMQIETVGIDLGDKVSRYCILDADGERVEEGSFRNQVGSIEKHFAGPCRRIALEAGGQSAWISRELKRLGHEVIVANVRELKWITASDDKNDPVDAHKLARLARADVNLLAPIEHRSAEQQTELALIRARDATLRARTLLINTARGIAKGFGVRLPKSITARFGVRALAGLPEFLKTALAGLLEQIDSVSRQVADYDQRILAVAAQNPEMERLTSIPGVGNLTALTFILTLGRAERFAHSRDVAGFLGLRPKRRQSGARDPQLGISKSGDPYLRKLLVQCSHYILGHWGPDSALRRWGLAKAAGGKKASLRAIVAVARKLAVLLHRLWTTGDFYKPFPQNA

SEQ ID NO: 192311 - protein, 354 aa, unidentified
MLIIGCDYHPSFQQIAFVDTDTGELQERRLEHREEAEKFYRELAVQGMRVRVGMEASGQARWFERLLAELNIELWIGDATEIARKRERKQKTDRQDAQHILHLLLKDDFPQIWVPSWENRDLRQLLWHRHRMVQARTRIMNQLQAVALNEGVRCKKRLWREKGREQLESFRLAPWASRRRHDLLELLDRLNPKIAELGQAIEQEVRNCPVAQRLMTHPGVGPLTALAFVLIIERADRFQCGKQIASYLGLVPLEDSSGNRRRLGHITKQGNSLLRFLLVEAAQVTVRSLPEWRSNYVHLTMRRGRKIAKVAMARKLAVRLYWMMRKEWDYKQLKKFGSHAGQPGHRDGVKSNIE

SEQ ID NO: 192312 - protein, 385 aa, unidentified
MGIKTFISHDYDVFAGLDVDKKSISVTFTDHQGSLKSMRMPYSVDHLVNHVRKHYGDKKVAFAYEAGPTGYGLYDGLVAQQYPCLIASPSMIPKAPGQRVKTNRLDSRGIAENLRGGQLKSIHVPTTLYRELRHLTQLRDALVSEVVAMKQRIKSLLLMEGLEFPPAPAGSQWSFLVKDKLRKFPCSSVVRFKLDQLLDNLEFGEKQVLKTTREIRRFCRNDPELSQCIEYLKTVPGFGWIVASQMMARIGDWRQIKNIRELAAFLGLVPTERSTGERTTRGSITHSGDPRLRSKLIQASWSAIRQDGELLEFFRTVAKKHPRHLGPRVAIVAVAHKLCVRASVVLMKQRPYEVREKVQSAPLTQEETVPQGTTRRLRVPGDKTS

SEQ ID NO: 192313 - protein, 427 aa, unidentified
MPYRIAGVDIHKKMLAVAVADVEVEGEWRFERRQFGTSPSQLRALAQWFLDCEVEEVVMESTAQYWRPAWDALEREWQPTQRRRVTAGPMSGALHLAQAQSNHAPHGRKQDFPDAERLVKRLVAHELTLSFVPDATQRLWRTVTRRKYQVTCSRVQLQNRLECLLEEMHIKVSSLVADLLGPSARRMLRAVASGETDPAAVAALGSSRLHATPDQLRDALGACADLNRVYRRLLTMILDEVDIIEAHIQALDEELAGLLRAHQDAVQRLAAVPGLGVDSAQQIIAEVGSTAATFATAKRLASWVGACPGHDESAGVNHSHRSPSGNRQMRRLLNQAANAAVKTKGSIFELVYRRLVVRLGHQQAIGAVAHRLCRLVWKILHDHVVYEERGPAVTKARAQRRAAKMIRELRSLGYRIERSLAPVSKLA

SEQ ID NO: 192314 - protein, 343 aa, unidentified
MQSISTIGLDIAKSVFQVHGAEAAGQVVLRRQLKRRHVLAFFEKLPSCLVGIEACASSHHWSRELQAMGHTVRLMPPAYVKPYVKRQKNDTTDAEAICEAVTRPNMRFVPTKTVEQQSCLMLHRARHLFIRQQTAVINSIRAYLAEFGIVAPVGRRGVEQLLEVVADTADRRLPEVARACLAALASQLRALKAQILEFDRRITAWHRSNATSKRLDAIPGVGPALATALVASIADPVAFRSGRDFSAWVGLVPKQNSSGGKDKLGSISKQGDRYLRSLFTAGALAVIRYAKIHGTGHRPWLTGLLARRPTKIAAIALANKLARMAWAMMARNERYREPAALAA

SEQ ID NO: 192315 - protein, 326 aa, unidentified
MEEVVGLDMHLKKTQGTIMAMDGTIIRKERFDTDKENMRKFLEKLPPDTKVALESQGFCWPWIDFIESLGYRPLLANPVKVKSRAEDVKTDKVDSELLAHLTRMNWLPTCYVPSKELRWLRSMLRHRAFRRKITTALKNRTWSEFRKRDIRTDDFGACTCRQLASSSNIYEVNQNMEILEAVERQIKLIESRLKTQYQDVKPIRLLQNIKGIGFLTAITLYAEICDIERFSSPEKLAKYAGLVPRVRQSGEVTKMGREAKGNKWLKWILIEAAWSHIKFCRGGRLSRLYENAYQRKKDKKKAIKIVARKLINIIWAVWKYEREFHA

SEQ ID NO: 192316 - protein, 444 aa, unidentified
MLRFVGCDVHKRTAVFTLLLEDGTLFATYTVPVTREALTAFAERQLVGEDRLAMEATTNTWAVAGVLRPFVKEVVIGNPLRVRAIAEAKIKTDKVDSRVLAELLRCDYLPKVWQPDPETQRLRRLTHRRAALVSDRTRLKNRLHSILHHTLVPLPEGDLFSKKGLAWLRQVPLAQEEALARDSDLRLLEQTELEIAELDERLVREAWQDEKVRLVMSIPGIDYTVAQTCLAAIGDVSRFANAKKLAAYLGLNPSTRQSGEHCYHGKITKQGNAHARWLLVQAAQHLGQYRGPLGQTMRKMIKRKNRSVAVVACARKLAVLLWHVLTSGEPFRYAPARSLETKYSRLRVRATGQRRRGGVAKGTTRSAQYGHGRTRVVPSLPQVLAQNGLPAVAPLSKGERVMLERKRLDEFYRELQTPSRIQTNTRTTQVEEREENVKSELTQS

SEQ ID NO: 192317 - protein, 403 aa, unidentified
MNAVGIDVSKGKSMVTILRPFGEIVSSPFEIKHTSSDIHSLIKLIHSIEGESRVVMEHTGRYYEALAHQLSAADLFVSAVNPKLVKDFNNDSLRKIKSDKADSVKIARYALDKWQSLEPYSITDELRAQLKVMNRQFHFYVKQKTAMKNNLIGLIDQTYPNANTYFNSPTRSDGSQKWVDFVSTYWHVDCIRKMSLNAFVEHYQNWCKRKKYAFNKSKVEEIYTKTKELVPVFPKNEITKHIIRQAVDQLNSTSVTVETIRTLMNETASKLPEYSIVMQFKGIGPSLGPQLMAEIGDVTRFTHKGALTAFAGVDPGVNESGSYAQKSVPTSKRGSSNLRKTLFQVMDVLIKTMPQDDPVYQFMDRKRTQGKPYYVYMTAGANKFLRIYYGRVKEYLSVLPDPS

SEQ ID NO: 192318 - protein, 326 aa, unidentified
MEKLYGGIDIHKENLAGCIMDKDGNITREHIFPSSKKAVERFFCGIPSPGITIALEACGMWRGVHKILTEMGYDVRLANPKKTHDIAGSKKMDKIDAKTLANLLRTKYLPEVWIPDEQTLRFRDLARHKSNLTRLKVSVQGRIKGYLLRKGVKYCKQLWNEKTLSKIAEDDPDIKNLINVYWSLKNEENEVMKRIRKTAKNIKETTLLMSMIGIAEFSALMITGEIGDIKRFETPKELVSYAGLCRGIYQTGSTNRAVKNNAVNKWLKWIIYECSGRATMLDPRFQKYYYKMKQRKGEKVARRACARKMLTIIWYMLTNEEPYRAS

SEQ ID NO: 192319 - protein, 343 aa, unidentified
MPHYVGLDVSQKTTAICVVDEQGRRLWRGVCATDPEPISARISKYAGVDAKVGVETGSMTPWLVHGLRGAGLNVQCLDARRVKAALQMQLNKTDENDAEGLAQIMRTGWYRAVHVKSLDAHRARALLGARAQLVGMTTRLSNMIRGVLKTFGLLPGAGRGLRFDRKVEALLESAPEIALVVRPLLATWRQLREQIAVFDKAVLQQVRADPICRLLMTVPGIGALSSLMYVSTVENPSRFSRSRAVGAHLGLTPRRYQSGETDRSGHISRCGDGLARTLMYEAAIVILHRVKRPLHLKDWAEAIERRSGSGKARVALARKLSVILHSVWRSGEPFRWSAPVMAA

SEQ ID NO: 192320 - protein, 422 aa, unidentified
MNPAMHVCLNTHSPGVQLNVAVDVGCIRHRVAVGLSEGKVLDEFDIAHDGPGLTAFFTRIEHHEREHQATSVAVAMEGFGGYARPLDARVLMHGWRLFNVNNLKLARFKEIFPAPAKTDAIDARRMLQLFQLQDRVPMAKAVLQEVAPIGETEAKLKALTRRRKQLVDDRMRLSRRLQADLQALCPGLLAVTGEADNLWFLNFLTMRDDLTKLKNVRLSTLLATTGIGKGYAAKIRQWQQEATFSNSATYLGAMIVTDARQILALRKQILALEAQLEDLAGQSVMARRIQTVPGFGLICSTELAGEIGSVERFAKTDSLAMYLGVAPLDNSSGKYKGSKVPRQVNRRARDAMMIAAVQHIRSVPASKAYFDKKRAAGKTHQQAVRAVARMLSKVLFSMLKHSEDYVIPDVSNTPESNSVTVP

SEQ ID NO: 192321 - protein, 402 aa, unidentified
MNCVGIDVSKGKSMIAVMRPFGEVVISPFEVQHTASELSELAKLLKSLDGETRVVMESTGNYHTPVAWLLHDAGLYVSVVNAMLVHDYGNNSLRRAKTDKKDAVKLANYGLDHWLTLPRYVPEEDTRLLLKNCYRQYQQYSKVQTMLKNNLISLLDAVFPEVNRLFNSSHRADGSEKWVDFVSTFWHCQCVSTLSLKSFSARYLKWCRKHGYYFSQEKAFEIHSKAQSCIGVMPRNETTKLLVQQAIAQLKATSAALAALKQEMQSLAASLPEYPVVMEMFGVGSTLGPQLMAEIGDVRRFHSKKALVAFAGIDAPPCQSGQMDIHSRSISKRGSAALRRTLFLVMGIYLQSAPLDEPVYQFMDKKRSEGKPYKVYMMASANKFLRIYYASVTAYLNTLARI

SEQ ID NO: 192322 - protein, 347 aa, unidentified
MKYYVGLDVSLKETSICVVDGSRRVVKEGRVVSEPETIGVWLLGLGLDFELVGLEAGSLAPALYDGLREQGLPVVCLDARHLKNATTAMPVKTDRIDAMNIAWALQAGWYRTVHVKSRDTHKLRALLRSRAMLVKTRTTLDNHLRGILKAFGLKVGRIAVGRFEDRVRELISDIAVLEETAEAILRVRSEVAARLADLHRQVLAVAKSDPVCRRLMSVPGVGPVTALAYRTAVEDPSRFTKASLLGAHFGLTPRKYASGETDRNGRITRCGDRMVRSLLCEAATVLLCRVRSWNWLRRWGMQVARRRGMRRAQIAVARRLAVILHRLWTDGTEFQTSRAGIASATAA

SEQ ID NO: 192323 - protein, 344 aa, unidentified
MDYFAGLDVSVKDTSVCIVDDTGRIMREVKVLSEPDALLTVLKNPVHHFKRIGLEAGPLSQWLFSALADAGLPMICVETRHMRAALKAQINKTDRNDARGIAQMIRVGLYRPVHVKTLRSRKLRMLLTHRQLLQSKAIAVDNDLRGTLRNFGLKVGIVRAARFEARIRELVEGLPDLAALVEPLLVVRQVLREQVAVLHRRLLAVVRDDEVCRRLMTTPGVGPLVALTYRTTVDVPARFRKSKSVGAVFGLTCSRDQSGERDRAGAISRCGDKMMRTMLYEAAQSMLVRSTRWSWLKAWAMQVARRRGKKKAIVALARRLAVILHRIWVDGTEFRWTREAVPAA

SEQ ID NO: 192324 - protein, 362 aa, unidentified
MNTIAHHDVVVIGGVDTHKDIHVAAVLDNVGRLLGTESFPTTRPGYRRLLAWLQSHGELDVVGVEGCGSWGAGLARYLGARGVRVVEVNRPNRQERRRRGKSDVLDAEAAARAVLAGQATATPKAGTGPVEALRQLRVARAGAMKARTAAANQIHSLCDTAPDAIRAQLTGLTMPKKIALAERWRPGPSMTPENAAKRSIASIARRWRALDDEARALQRHTKAILDEIAASLLAVHGVGYDTAAQLLITAGDNPHRLRHEGSFAALCGSTPVPDSSGRTSGRLRLNRGGDRHANSALWRIVIVRMATHQKTKTYVERRTQEGMPTIEIIRCLKRYVARELFPHILATADHHITVPQPATTAA

SEQ ID NO: 192325 - protein, 370 aa, unidentified
MIMIGCDFHPGFEEIALLDSSTGRRRQCWLSHAYGPEQVRKFYAELPQPVLVGLEASGYSLWYEEMLEELGIELWVGDPGRIRKAAPRKQKTDRKDARLLLQLLEEKRFPRIWVPDKATRDLRQLLMHRHKLVTMRRSISNQLQAIAMNRGLQKKRALWNKEGREQLRSLELPHWTKRRRDELLALREQWDKAIAELDEVVEHQAERNADARYLMHHQAGVGPITALAVVLSLGPVERFASARKVASYAGLIPAEYSTGGKQRLGHISKEGNPFLRWVLVEAATVAVQHDPEMKHMYWRLIERRGKSIAKVAMARKLLVRLYWMLRRRHQSRVGRPKKSQGTAVDALGSATASQGSSRLDMADVLNRSFE

SEQ ID NO: 192326 - protein, 342 aa, unidentified
MEKITIIGLDLAKSVFQIHAITEDGHIAVRRALRRSQVLEFFRHIEPCLVGMEACGSAHYWANAIGEFGHTVRLMPPAYVKPYVKRNKTDAADAEAICEAVTRPTMRFVPVKSPEEQAAGMVLKTRELLVRQRSQTANAMRGHMAELGIIAAAGMTSIAKLIAILRDDQDGRLPHSAKAALLEMADQIERLTERVEVLDSKIIAAVKADDAARRLTTIPGVGPIIAATVRAAVQDPAAFRTGRDLAAWIGITPTANSSGGKERLGKISKRGNKQLRTLLIVGATSILKQARRGSKLPGWVVSLMARRPYKVAAVALANKMARTIWALLVKGGTYQAPAMAKA

SEQ ID NO: 192327 - protein, 388 aa, unidentified
MPVIIGMDPHKRSATIEMINEVGAVIETGKFGTDQPGYAGMLAAGRRFTERLWAVEGCNGVGRHIAHRLVHDGETVLDVPAKLSAQVRVFATGNGRKTDPVDAHSVALAALHAPNLVRVQVDPELVVMSMLVDRRDELGRARTQTVNRLHRLLLELFPGGAKKFLSATQARALVATIKLRDIVGKSRRRLTVELITELETIDKEIKTADEDLRDLVVARGSTLLDLHGIGPCGAARLLADVGDVHRFANRDRFASWNGTAPLDASSGEQQRHRLSRADNRRINRTLHIMGVGQLRNPTAGRAYFDAKKTAGKTSMEAMRALKRRLSNVVYARMLADQRRREAAGPGGQSGTTLQSSVTGLTPDTGPSDKPQPEPAVSQPTPRRSHPLT

SEQ ID NO: 192328 - protein, 421 aa, unidentified
METVAGVEPLAFVGVDWASEEHAVCVLGLDGRNQDAFAVAHSKDGLAKLIRRLSGLGSTGQVPVAIERPDGRLVDALLEAGHPVVPVSPNAIKAWRESEVLSGAKDDPGDAEVIAEYLRLRAHKLTVLAPFRDDTRALRAVVRARDDLVEQRVAANNQLEACLDAFWPGAKAVFADVCSEIALAFLERYPTPASARSLGEKRMAAFLAKHGYSGRRPAAELLERLRAAPDGIAEGAETEARRDAVLGYARVIRALNTSIKNLDRSVSAHLGEHPDGEIFASLPRSGRINVAQMLAEWGDCREAYDCPDAVAALAGATPVTKKSGKHEAVHFRWACNKRFRKAITSFADNSRHASPWAADVYQRAIARGCDHPHAVRVLARAWIRVIWRCWTDRKPYNATNHAAAVRLAGLANNNQKKRLAA

SEQ ID NO: 192329 - protein, 344 aa, unidentified
MSEAFIIGLDIAKYVFHVHGVDERGRAIFSKRISRKKLLDFFAAQPSCTVALEACGGAHHWARQLSQLGHEVRLIPPAYVKPFVKRQKNDAIDAEAICEAAQRPNMRFVAVKSEQQQAAGLVFRTRDLLVRQRTQLINAIRGHLTEFGWIAPKGPSHVAMLAGLIEEEEMAGSLPEAARAMLRLMLDLLADLDGKIADLDKEIARRAREDEVSRRLMTVPGIGPISATAIAALAPPAETFAKGRDFAAWLGLTPLQRSTGGKHKLGSTSKMGERTLRRLLIIGSSAVVLQASKRGAPKGSWLEQMLARKPRMLVTVALANKTARIIWALLVKKENYRAPVAAKA

SEQ ID NO: 192330 - protein, 388 aa, unidentified
MSFTIDPGVRTETTIRPDHATVFVSLELSRSKWLITALLPCSDKMSKYCVDSGDGTALLDRLARLRARAEPRIGTAVHMVVIQEAGLDGFWIHRLLESNGMESHVVEPASIAVPRRHRRAKTDVIDGEMLVRTLMAFKRGERRVCSMVVAPSPVEEDRRRVSRERRTLIRERIEHANRIKGLLATQGIVGLEPMRKDFRDRVEGLQTGEGQPLRPHLKAEIIRELDRIDLVLRQVAAVEAERDALVKSDSIDTTAPAALLMKLRGIGPEFAAVLWLEGLFRNFANRRQLAAYAGLAPSPWKSGSIDREQGISKSGNPRLRTTMVELAWLWLRYQPGSALSAWFRERAGSERGRSRRIMIVALARKLLVALWRYTTLGELPKGAALKIA

SEQ ID NO: 192331 - protein, 352 aa, unidentified
MQHFIGCDLHTRYQVVAWLDQETGEICARRLEHEGKEVEKFYQQFARGAVVGIEATIPALWFERLLESLGHEWWVGDSAVIRAHDVRAQKYDERDARNIEELLRSGRFPRVWVPTREERDLRQLLIHRMKLVRARTQVKNQLHALAISQGLCWKRRLWSQKGRAELEKLELLPWAARRRKELLEWLDRLDEQVRELDRAVEEAGQARPEVALLRTHPGVGMVVALAFVLKVGPVERFAHSRKLVSYWGLNPSEHSSGGHQRLGAISKQGNTMMRWLLIEAAQTAARFDPQLRRIYQRLKSRRHSGVAKVAIARRLVVRLFWMLRTRHNYAQLVRMSGSPSSAVVPPRAESNL

SEQ ID NO: 192332 - protein, 375 aa, unidentified
MKEKVRFLGLDVHAETIAVAVAEPDGEVRSLGTIPNRGESIRKMIKKLGPAEKLRACYEAGPTGYVVYWQLAELGIQCEVVAPTLVPVKIGDRVKTDRRDAEKLARCYRSGDLTAVCVPDEGSEALRDLVRAREAAKQDQMRARHRLSKFLLRSGQRPPTGVRPWTRPYLIWVAQLRFTQVAQEATRQDYLHEVEHMRERVARLEQAIMEAVKLASPALQQVINDLQALRGIADISAVSIAAELGQVSRFGSARQLMGYCGAVPSEDSSGKRIRGGSITKTGNAHLRRIVGEAAWSYRRPPGIWYGLRRRQESISEEVKEIAWKAQHRLHKRYMKLGAAGKPQGKIITAVARELLGFIWAIGTRAETAVSQRAAA

SEQ ID NO: 192333 - protein, 310 aa, unidentified
MERLFVGIDVSKARLDVHVRPQNESFSVSSDDAGIAMLLGRLSGLAPTLVALEATGGYEASVAAALAHAGVPVAVVNPRQIRDFARATGQLAKTDGLDAQVIARFAEAIQPPVRALASDQAQALAELVARRRQLVEMLTAELNRQRQVSQRAIQQRLTAHVTWLRRAIAEIEDDIQRLIRSSPVWRAKEDLLTSAPGIGDVTAHALIADLPELGQLDRRRIAALVGVAPFTRESGQWRGRRMIGGGRAAVRTALYMATLVAIRYNPRIGAIYRRLTAAGRPKKVAIIAAMRKLVTILNAMLRDHRPWQTA

SEQ ID NO: 192334 - protein, 353 aa, unidentified
MAIFIASDFHCKYQKVAWMDSTDGELHIADVHHQDVNEVAQFFRQFPAGSILGMETSGYSHWFEELVVGLGLELRIGNSQVIAGKRPRRQKNDQLDAEHMLCMLLENRFPTIWRPTPENREKRVLIRQRCRLVKMRTQLINALRALVYNHNLHLKRGQLSKKRRRQIADLAMSPILDQQRREMLGLIEQLDVSVKAKEAQIEQWARQDQAAARLLTIPGVGACTALTAVLILGPVGRFPTAKKVVSYIGLACSEHSTNNGYQKRRYGQISKQGNKLLRWLLTEASGTAIRTDVQRKRYYARLKYRKDWRVAKTAVARKILVCIYVLLRDGIDYPEFLRRGPGFGMPAETAGRK

SEQ ID NO: 192335 - protein, 436 aa, unidentified
MFVGHRFRTDPDELDTLWARLPKDAERIEVVMEPTRNAWVALAAWFRRHRATVVMVPPEQSADLRDYYNKHTKTDRLDSKVLARLPLLHPEGLHREDSLGPGDELKRAVKIRSGLVHRRTACMARLDALLEILGPAWIAALGSDMTSTALRFLARYANPVQLKRLGKARLAAFFRRSSRQAWADERADAVIEAAATTLRLWGAHGGELDFDALAADIAAEARLALTLTDEINGFDKRIGALYDQADPAGIVRSVPGAGRVCAPQILGRLGDPTRFANLAAVRSFAGLVPAADSSGQADGHRGPTKAGDSCLREALFIAADHARKVDPTLAVRYQRLMLAGKHHDSAVCTLAAVLLTRIAACLRAGTHYLLRDTDGRVITEAQGRAIVAERYTVPPEVRAARRKVTPHRHPRRNERNERAKTGVATRSKASPVPQPA

SEQ ID NO: 192336 - protein, 423 aa, unidentified
MPYRIAGIDVHKKKLAVVVADVEVEDEYQFERRWYGSNPEQMQLLGEWLIQQQVEEVVMESTAQYWKPVWGALEQYWKPSCEKREGAGRMSGTLHLAQALSNRGRRGRKRDFRDAERLLRRLVSQELVLSFVPHAEQRLWRTVTRTKYQLRRDKVRLHNQLEALLEEAHIKLSSFVSDLLGASARRMLQALADGETDPAALADLADQRLRATSAQLRDALGACTQLNPVYRRLVKMALEELQLIEQQITQLDQEMASLLRQHQDAVQRLAEVPGLGVDSAQQIIAEVGAKAATFASAKKLSSWVGACPGTEESAEVNSSPRSPKGNRHMRRLLNQAANAAAKRKGSIFEIVYHRLVPRLGHNKTIGAIAHRICQLIWIILNKGVRYEERGPAVSENSKRVRTSRMVRTLRRLGYRVEPLSDPV

SEQ ID NO: 192337 - protein, 372 aa, unidentified
MNYNTVYVGMDVHKESFTFCAYTIDAEKGSHFQRTEADYKNVLRYLEFLRAVYGNDANFICGYEAGCLGYTLYHQLTEHHVNCVILAPTTMLEQRSKKRIKTDKRDAEIIAKCLAQHNYSPVHIPTAADEETKEFLRMRDDHKLALKKVKQQILAFCLRHNYRYDGNSHWTAAHIKWLKSLKPEALYKEILDEYLLTYTALSDKLERLDKRIEELASKDEYKESVKKLCCFIGVKTHTALSVLVEVGDFHRFASAQNFASYLGLVPGEDSSGDGQTRLGITKAGNRHVRMLLTEASQCYARGQIGFKSKELKSRQAGNSPQVIAYADKANERLRRRYYKMVLGKSKKPNVAKTAIARELACFMWGMMTDHVA

SEQ ID NO: 192338 - protein, 343 aa, unidentified
MGTYVGLDVSLKTTSVCILGDDGSPVFEGKVATEPAALARLIRKRAPDLVRVGLESGPTSAWLTHALEAEELPVVCLDARHAQAVLSVRPNKSDPSDARGLAEMVRVGWFRSVQVKSMTSHERKALLIARQQLVETRVRIDNQVRGILKTFGLVIGACGRGQIGQRASELAKGRPEVDGIVTAMLVVRDSLVQQIAVFDRVIRRLVKGDDTARRLMSVPSVGPVVALAFRSTIDDPQRFSHARDVGAYFGLTPKRYQSGELDLAGRISKCGDGFMRTCLYEAAGVLLTKVKRWSPLKAWGVRLMKRVGAKKAKVAVARKLAVILFRIWKDGTKFQWAQEAEMA

SEQ ID NO: 192339 - protein, 303 aa, unidentified
MRSIGMDVHRSFAQVAIFADGTVTESFRVELEHDAVLAFGRSLRPDDEVVLEATGNTAAIVRLLTPFVARVVIANPLQVKAIAHARVKTDKVDAAILAQLHAADFLPEVWAADDATLELRRLVSERVAVIRSIRRAKSRVHAVLHANLIPKSEGHLFGKGGRRWLAEAPLPKSERDILGRHLDELDWLQARLESLEHDLIVFSLDDARTRKLMSVAGVSAIIATAVVAAIGDIERFATPQKLASYFGLTPSVRQSGADRAIHGRITKQGEGDALRVHAFLLGWTSVQACLCEVRRLQSGEPGT

SEQ ID NO: 192340 - protein, 402 aa, unidentified
MNAVGIDVSKGKSMVAIMRPFGEIVSAPFEIKHTASDIHSLVELINSVEGESRIVMEHTGRYYEVLAHQLSEANLFVSAINPKLIKDFDNDSLRKVKSDKADAVKIARYALDKWQNLKQYNVMDELRNQLKTMNRQFGFYIKHKTAMKNNLIGILDQTYPGVNTYFDSPARSDGSQKWVDFASTYWHVDCVRKMSLNAFIDHYQNWCKRKKYNFSQSKAEEIYGKAKELVPVLSKDAITKLIIKQAVDQLNSASTTVESLRTLMNETASKLPEYPVVMAMKGVGTSLGPQLMAEIGDVSRFTHKSAITAFAGVDPGVNESGSYEQKSVPTSKRGSSDLRKTLFQVMDVLIKTHPQDDPVYQFLDKKRAQGKPYYVYMTAGANKFLRIYYGRVKEYLSSLPES

SEQ ID NO: 192341 - protein, 336 aa, unidentified
MKEQQIKHNEVQIKKFVNKLKSEWNEIHCCYEAGVTGYPLYRYLNSLGVNCTLVAPGKIPRQNSDKIKTDKRDAIKLARLLRSGDLESIHVPNEEDEAVRDYLRSRDSLRLDLGRNRQRLMKFLLKKGNVYSATKYWTTSHYKWLNNLHFENEILQETFNDYYSRVRVQEENLKAMDQKIQEIAKSEAFKERVGILRCFRGVDYLTAMFLLCEVCDFKRFKTAGSFMSFLGLVPGEYSSGSKRKQTGITKTGSPRLRRILTEAAWQHRFLGTGSKIVAARRTGQPALVVALAEKASLRLHKKFRNLQLRGKSPQVMITAVSRELSGFIWAAMNLAA

SEQ ID NO: 192342 - protein, 336 aa, unidentified
MRYIGVDLHTTQLTVCYLKTVDDYEFKQYRLDEIETFAASLEAADELAVETTGNSRWLVGVVERRISRVVVVNPSEFEVIKRSVKKTDKRDALNLARFLAVDMLPAVRQRSELAEAVARMNETRNKMVGLKTSLLNKIHGLAVSRGWKLRRESLSSKKGLTKVTEFEWTAIERIELEIIIEQIGSLKESIKRLDEAIAEISPQMAGFENLITVTGIGTRSAAVLISVIGEVADFATESKLASYFGIVPRVSNSNEQVHHGRITKRGSKMGRTTLVQCALVAVRYNPYLKKYYEQVKARRGHGKAKIAVARKYLGIIYNTLKNNWMFEDFNNFVLAE

SEQ ID NO: 192343 - protein, 494 aa, unidentified
MVKSKRKSYKRRQHIQKVKGRRFTDEIRDLDLEKVLVVPVDGGKNSHKALVANYFGDILHDPFEFTNSVTGVKMFDNILKSVNSSIKAQKTIIGLEFTGHYYENLYRSLISLGYDVAMINPSSVYSQRSGQLNWCKTDEIDLCAIGQVLIDNQATETSLPEGLYYNLRQLGRLHTDEIRKRARLKVQIRVLCDHIFPGLQNSEIFSDFWGKGSILLLENYPTPTSIIRLGAKRLGKFFKKHNTKLSLYTAERLVNLAKNSLSVKVKKVNLEAHLLNLKFKIADLKMANEKIRKLNIELARYLVQTPGILLLSIKGINVPSAAKFLAEVGPLKQAGNAKKIIARAGLNPSRFQSSEYERANSPITKHGSNHLRSISLTISKDLLGLNPHSSLPYNPYFRGFFDHLIEEGKDKMLAKVACANKYIRVSWAMMVGRKFFSPPTWKKNKTSDEPLAKLKEFLSLNKDKELFEDLANIAREQMPSNYHSHLYKEQNSLS

SEQ ID NO: 192344 - protein, 342 aa, unidentified
MSIVYVGLDLGSSNFQQVALNHDGVSRVNRDFTTSEANLVKAFSDLKGEIHVHLEAGELAPWAASIIAPLVERVVCSHPQSNAWIAKDADKCDRVDAYKLAELLRLNRFKEVHYAPDQRRRNFKQLVQHYDELTAQQARLKTKLKARLRMQGVIVTGERLFSVPGRKEVLARVESRDLRTAISQLYEVLDQSVAAQSQARRLMLRAAQTFPEIKLFRTAPGVGPIGACRFSAYIHTPNRFSTTRKLWKYCRLSVSHRSSNGKPLRRPRLDRCGCGRLKDVSRKAFDVAIRSRQDNSFKRAYQCALETTHDKTHARLTVQRKIVSTLRAMWLNMTPYCDELSR

SEQ ID NO: 192345 - protein, 306 aa, unidentified
MLIIGCDYHPSVQHIAWIDTETGECGERQLRHSDGEAEKFYRDLKAKGANVRVGIEATGHSRWFERLLAELKFELWAGDPAQIKATRVRKQKNDRQDAEHILKLMMEKRFPQVWVPGPENRDLRQLLWHRHRLVQMRTRIMNQLQAVAMNEGVRRKKALWSQSGREQLESFRLAPWATRRRHDLLQLLDQLNPCIAELTAAIEKEAEQNSEAQRLMTHPGVGPITALAYVLIIGSPERFRCGKQIGSYLGLIPCEDSSAGRQRLGHISKQGKHAAAFLAGGGGASRRPWRCRLATSVPASGDATRT

SEQ ID NO: 192346 - protein, 375 aa, unidentified
MTSMTVEPAEQVADDVTSRQIIVGVDTHKYAHVAVALDHLGTRLAAQHVAANREGYAQLEAWAASLAGNGRVLAYGVEGTGSYGVGLTSFLRRTGHRVIEVNRGDRRSRRSNGKSDTLDAEAAARSVLGGQAKAIPKSADGTAEMIRQIKIARDTARKARTSAIITLKALIVTAPAELREHLAGTSDKVLIDRCASLRPGAVTSPTASAKHSLRTLAKRYQALDTEIREHDTILDDLTRAHAPTLREGLGIGADTAAEVLIVFGDNPERVHSEAAFAKLCGTSPVPASSGMTNRHRLSRAGHREANAALYRAVIVRMRFHQPTIDYVARRTAEGLSKRDVIRCLKRYLAREVYQAVMTDHRARQAIKPEAVPTKS

SEQ ID NO: 192347 - protein, 352 aa, unidentified
MKNFIGCDAHKKYSMFASINEADHRAQCIKVNNDRHQFSCFLNTLPPNSQIAIETVGNWYWMIDEMERAGHEPKLTNAGKAKLMMGQINKTDKLDANGLALLLRNGTLPSVWIPPGELRDQRELPRMRMALVHVRTMLKNRIHAALAKYALVITEVSDIFGVSGRKLLKKRLEELPLYTRRSVEAQLKLLDQVKEHIQESEKQIEEIIERTPEIMLLMTLPGVGPILAIVIALEIGQIDRFFCAEKLASYAGTVPRIKASGGKIRYGKTRPDVNRYLKWALIEAANIAVINQSRWSDRHVVRLYRRIRGRRGHGKAVVAVARHLAEASYWVLKKNEPYKEPKGNKPVSSTRK

SEQ ID NO: 192348 - protein, 409 aa, unidentified
MNPLYVGIDVSSRNNVVYLMKPDGSKIKNFSVSNSRDGSKKLVKEILAALAAFSLTDVLIGLEATSVYGENLVYFLREDISLVPFNRKIHVLNPKQVNKFKESYNDLPKNDYVDSFIIADCLRFGRINKEVYLEDYRYKALQSLTRARFVAVQNLTREKQRFMNVLFRKYSSLSQEKVFTNTFGASALAVYENFDSADALAYIDLQELTSFLKEKGKNHFSDPEKVALAIQKAARSSYRLPKTINDSVNQVLSISISSMKALESQIKDFDKAIAAQMQLIPNTLTSIKGIGPVYSAGIIAEIGDINRFANQAKLAKFAGLVWKQHQSGDFESQNTRLIRTGNRFLKYYLGEAAMSLVRCDTEYRRFYHLKYKEVNKYQHKRALALTARKFVRLVFRLLKDNRLYIAPQD

SEQ ID NO: 192349 - protein, 379 aa, unidentified
MRKNTRKSVTYVGLDVHAETISIAVAEGESRARGRSVGTIANRPEAISQALKKLGPAQSLRVCYEAGPTGYVLYWQLEKLGIACEVIAPTLVPVKAGERIKTDKRDAVKLAQCYRAGELTPIFVPDAEHEALRDLVRAREAAKKDQLRARHRLSKFLLRLGRRRDTKTRAWGQVHWQWLDSQVFAQPAQEATFQDYKNEVEHATERVSRLEKAIERAIEEAPPRMQELVGALQSLRGIGKLTAVTLVSEVGSFERFPSASQFMAYLGLVPSEHSSGGSRRQGRITKTGNAHLRRVLGESAFCGRLRPRRGPELKRRQEDQSQAIRDMAWEAQKRLHRKYGRMTLRGKSHPVTVTAISRELAGFVWAVARQRERELAAAS

SEQ ID NO: 192350 - protein, 313 aa, unidentified
MIIALRYVGIDISKKHLDIFDEADGVPRRIANAAQAITQQVSRWQCDALVVFEATGIYDLALREALRQAGIQFARINPARARDFARASGLLAKTDPIDARMLAAFARAMQPAPEQVADPARGALARLAKRRDQLVLMRAQEKNRRSEADDRAMAERIGRLIEVLDSEIAEIEADISALIKAEAQIADDAKLMRSLPGVGPVACMQLIAQMPELGRVGPKQLAALAGLAPFNVDSGTFRGKRKIAGGRKRVRDALYMAALNAVRRADPFKAFYARLRQAGKPAKLALVAVARKLLTVLNAMMRDRKPYLQTKPT

SEQ ID NO: 192351 - protein, 337 aa, unidentified
MSVYVGIDVHRKRSQVAVVTGDGTVELNKNVVNGSEPMLRLIGDLPPGTPVAFEAAFGWGWLAALLEDYGFEAHLVHPLRCKAIASARLKNDKVDAATLAQLLRADLLPEAWIAPPEVRQLRALLRHRAGLVRLGTQQRNRIHAVVADFGFDRSGSYLSGPGRGWLAGLELPPVSREVVADCLAVIDGLAPVIDRIDGELRQHAKADPRVKTLTTLPGVGQFTALVMLAEIGDISRFPSARKLASWAGLTPTVRGSDRTVRHGHISKQGSAWLRWVLNQAAQTAKRSPDFAATYSAIAKRRGKKIATIAISRKLLTRAWHLLDDMQATNTNEPPRRP

SEQ ID NO: 192352 - protein, 403 aa, unidentified
MVRYHVGVDVGKDRHHVSIRDVETNTYCKTVSITNDREGFAELVSSLERLSGDKSAFLVGIEACPYGLNLSYFLMGVGFNLVEVNPFRAGQFRKAQGMKAKTDRIDARSIAAILSLGDHKSLSIPDPILDNLKELTRFRTDLVDERATMIIHLREALSILFPEYDKVFRQLDSSGSLAVLAAFPGPEHLIAAGEETVGKVLSLASPHRMGRGMARRIIGAAQDTVGVVQRQPALGIKISILAKRIESLQSTIHELDRQITTLFNSLPCKPQGFPCGRAPTLAAIVSEIGDIHRFPTLKKFLSHLGWCPQSFQTGNYHMEHPRMSHAGNKHIRRLVWMLSINAIRMVPRYREYFLHRVSEGKAKMHILVAVGRKLLSALYAILKRGVAYDPNWEENSRLAMAKH

SEQ ID NO: 192353 - protein, 401 aa, unidentified
MASMTSEVSAAQPVGVLFGGIDTHKDIHVAALVDSAGGLVGSAAFPTTGAGYRQLLAWMRSAGTLGRVGVEGTGSYGAGICRQLSAAGVEVVEVNRPDRAQRRRRGKSDVVDAAAAAEAARTGNRTAIPKSRDGQVESVRALRLVRASAVKARTIAFGEFDQLLVTAPQQLRDQLRELPKMELIRSCADWRPNIAKVADPSTATRIALRKLARRYLALSAEIAELNELLTPLVAELAPPLLATVGVGTETAGQLLITAGDNPGRVHSEAAFAMLCGVAPLPASSGKTVRHRLNRGGDRQANRALHVIALTRKRCDPVTQAYMNKKTAEGHSRREATRSLKRLIAREVYYLLNPGALTAVPVLPSRPTSRRAAAVEVEPPTRGTTLTAASTGTPSKMEEPNP

SEQ ID NO: 192354 - protein, 338 aa, unidentified
MDRTTYAADIAKQVMQVHWVDAQTGEIGRRKLSRAKFLEFFAKLQPARVVMEACGGAHHWARCLRRLGHEVELLPAGQVRAFVRGNKDDAADARGIWLASRQGDIRRVPIKSCEQQAVLSLHRMREHWKSVRTATINALRGLLYEFGVVLPKGRTDGLKALAQRRADIDATLPQTMCRMVDAELSMLAELQRRLDQLEAEIQATSTSTAKRLRKASGIGMLGASALAATLGDGSGWRSGREFSACLGLVPAHTGTGGKTRMGHITKRGDAYLRTLLIHGARAVIAQSKNKPQWLQELLLRRPPNVAAVALANKMARIAWAMVAHGCDYDANWISAKPC

SEQ ID NO: 192355 - protein, 430 aa, unidentified
MKSNTQNAKIEAITEKTLVLGIDVGSETHYARAFDYRGIEYSKKPFKFSNTEAGFVTFKEWILDLKERHEKDKVVPGMEPTGHYWFNLGKFLQDNEMKPVLVNPHHVKKSKELDDNNPTKNDRKDPKVIAGLVREGRYMIPYLPDGVYADLRTASNIRFQLQAELTRIQNRISRWFNIYFPEYKTVYGKPDAKSGMLILKAAPLPEDILTLGIDGVNQIWRDAKLRAVGKARAKTLIEAAEHSVGSKEGAVSARMEIRMLLEDYESRNTRLQEVMVLIEELVRKIPMAEKLLEIKGVGIRTVSGFLAEVGDISRFNNPKELQKLAGLALVENSSGKHKGETTISRRGRKRLRYLLFEVAMSLVAKNPEFRELHTYYTTRRLNPLKKMQSLMAVAAKLIRVFYAMLTKGVDYDPKKMVSDIKRPAVYLQAA

SEQ ID NO: 192356 - protein, 388 aa, unidentified
MIYVGIDIAKLNHFASAISSDGEELIKPFKFTNDNDGFQLLISKLAPLDKDSLIIGLESTAHYGDNLVRYLVAKNYKVCALNPIKTSTMRKNNIRKTKTDKVDTYIICKTLMMQESLKFVTFYDLDLMDLKALGRFRQKTIKQRTRLKIQLTSYVDEIFPELQYFFKSGLHQKSVYALLKEAPTPEAIASMHMTHLAHLLKVNSHGRFDKEMAQQLRVLAQKSIGASDSSLSIQVTHTIQQIELLDSQLERVEAEMTEIMKFNDSVIMTIPGIGYINGGMILGEIGDIHRFSSPNKLLAYAGLDPSVYQSGNFQAKKTRMSKRGSKVLRYALVNAAHNVVKNNATFKAYYDAKMAEGRTHYNALGHCAGKLVRIIWKMMTDNLEFNLD

SEQ ID NO: 192357 - protein, 423 aa, unidentified
MEQPTRFVGMDVHKETIVVAVTASGEVGKATAYGTFPNTTAALEKLVKRLRQAGSGPIKFCYEAGPCGYGVHRTLTRMGEDCMVVAPSMIPRKPGERQKTDKRDAASLAVLHRGGLLTAVWVPDAAHEAMRDLIRARLAAVRAVRAARQQLSAFLLRHERVYPGNRTPWTKAHRGWLADQTFAQPVQQIVLEESIEAVRLSEQRRDRVESYLRAQIPSWSLFPLVRNLCALRGLDIIASAGLAAAIGDPSRFATAPHFMAYLGMVPSEDTSGPRRRIGAITKAGDIHARTMLIEAAHSYRYPARIARHKLAAVDAVPEAVRAIAWKAQTRLCQRYRQMTARGKLNQVVVTAIARELAGFVWSIACITSDLVVSDDIVTELYGVETTLGYEVTMSPERLLNKSHRSRPPRAAPGKTAPYLQKEA

SEQ ID NO: 192358 - protein, 393 aa, unidentified
MRTKTKVTQIGWDSHRKFSKVTARDESHRVIWRQRVDHSDREAIREQLHAWPEGTPVILESTFGWGWISDELLEAGLDPHLANSRKVAAWRDARGLAKSDRVDADLLSELWSQPSRWWEVWLAPPEVREQREWLRYRMSLVAIQTGLKNRTHAILHRHGIVNEHADLFGAQGRRFLSFLAGPGDMRLPESARVMLKGYLQLLDHLRRQIARVTQEFRRQLVRTPEGQRLMTLPGIGQILAYTIVAEVGRIERFADGRHLAAYSLLAPRANDSARENEAEAPKGRHVGHAGRRTLKWAWIEASHGAVRRGGRFREIYDRRTNGGTRDRNRGYIAVAHELCRVAYAMWSKETDYREDRPARPGATILRTELSSGNGPARPPYGRCRRKRQLQTSK

SEQ ID NO: 192359 - protein, 339 aa, unidentified
MAILSVGIDLAKNVFAIHGVDEHGQAVLVRPSVQRARLHQLVAALPPCTIGMEACSGAHHWARLFVQHGHTVRLMAPKFVSPYRMSGKRGKTDAADAQAICEAVQRANMRFVPIKSQDEQARLCIHRVRQGFVEQRTATINRLRGLLSEFGIVLAQKAATVRREAAAHLEDLPGWANTAVGDCLSEVHRLDERLAEYDRHIGKIAGEDERSSRLMRLQGVGCTTASALVSTIGDARDFKNGRQLAAWLGLVPGQYSSGGKTRLGGITKAGDGYLRTLLVLGAKSVLAAARSKHDRLSRWALALEVRRGYWKAVIAIAAKNARMAWAVLAKGEDFKLIEA

SEQ ID NO: 192360 - protein, 407 aa, unidentified
MQVFMGIDWGHSHHDLCFMNAFGQVLSQLTVEHTAAGLAQLEQARVQLGVNREDCRIGLETAHTLVIDFLWDQGYPVVFVISPGAIKGARRRYRQTNAHTDASDAWLIADVVRTDPATLYPWRPDSLLIRQLRTKVSLVHFLTKEMRRLTNRLGAVLARYYPAGLHVFRDFASPVSLQFLQAFPTPEAAAGLTRQAFGAFARARRYRQPEAVLSAAYGRLQAEYPRASDTTVAAYQEEAVWLAGHLLTTVQQKQTEIGRLQALFQQHPDHELFAALPGAADFLAPALLAKFGDDRERFPEPGSLQSMAGTCPVTEKSGKSRRISFRQACDHEFRDIAQQWAKSSIAQSSWAATYWHQVREHSRSANHAYRCLANRWLAIAWKCWQTRQPYDEGVHLQNRARRLAARA

SEQ ID NO: 192361 - protein, 450 aa, unidentified
MADRYAGIDWASDKHDVLVQEASGDEVLATTFTHDERGLRALCSTLVRLGVALVAIERPDGLMVERLLDAGLRVMAIHPNQVAAARPRFRTSGGKSDRFDAFVLCELARTDSHRFRVLVADSDDTKALRALSRAREDLVQTRVALANQLRAELERFWPGAAQIFAEIDSPIGLAFLARYPSPADARGLGEQRLAAFLARHAYCGRKPAAELLGRLRDAPRGRAGDSEIEARRAIVLALVAALKAIVAKISELTRELAHRVRAHPDGHVFLSLFRDPKSVVCAAALLAEIGDCRARYRCAEALAADAGMSPVAVESGKRKVACFRHGCDHRLRAAFATLADATRHWHPWAHDRYATARARGQDHQRAIRTLGRAWCRVLWRCWQDNTAYDPAQHRGLQQHIAVIISDGSRPRLDLTATQRMAGAAVTRRAARSDEREALDSKPTSATNAGG

SEQ ID NO: 192362 - protein, 375 aa, unidentified
MKNIRFVGLDVHAETIAVGVAEASGEVRSLGTIPNRRESVGRLIRKLGKPEQLRVCYEAGPTGYVLYWQLSELGVKCEVVAPTLVPVKAGDRVKTDRRDAEKLARCYRSGDLTAVWVPDAAHEALRDLVRARLAGKRDQLRARNRLSKFLLRHGRRAPEGASAWRTKYLMWVKSLRFEQTAQQLTLEDYLHEVEHAAERIARLERSIDAAIEILPVKMRAVIEALQSLRGIAQISAVSIMAELGEVSRFEHARQLMGYSGAVSWEDSSGERVHRGNISKAGNAHLRRIVVEAAWSYRHRPAIGKTLAARQRRSSARVTELAWKAQHRLHHRYARLIARGKCKQHAVTAVARELLGFIWAIGIEVERAHQEVRRAA

SEQ ID NO: 192363 - protein, 355 aa, unidentified
MEKAYDGRQVVGMDLHRRRSVLVRMTEDGRRLGTSRITNSPQELRKEIARAGRSPKVVLEATYGWYWAADTLAEAGAEVHLAHPLGVKAFSYRRVKNDERDSADLADLLRMGRLPEAWISPHEVRELRELTRYRIKLVRLRTSCKDQVHGVLAKLGVPVTCTDIFGKAGSAWLDGLRLPQPYAGKVTSLRHLTGELTTEITMLSEVIADLLAGDRGYQVIQQLPGIGPVLAAVITAEIGDVTRFKNAGQLCSWAGLTPRHRESDIKVARGHVTKQGSRPLRWALTEAIQRIPRDCVIGGVKDAIIARRGNEARNIAKVAAARRLLTLVFYGMRDGQIRCLSKPSQNPPATPAAAT

SEQ ID NO: 192364 - protein, 327 aa, unidentified
MQAMRTKVAGVDVHKEILAITILTGDADKEPIFEQFTCNTFSEDLMAMAVIIKEKGVTEIAMESTGVYWKPVYNVWSKMGIKCTVGNARSMRNVPGRKTDMNDSHWIAQLHRFGLIKASFIPEDKFQQLRLLSRHRTNLTDDLARVKNRVQRTLEDGNIKIGSVVSNVFGVAGEKVLRKLADGVTRADVLAAEVTTNIQKKGEVKKSLSNCFSANHIFLIKELMQQYDDIKARILEVDRQLANDMTPYAHLIDELRKIPGIDMTLAVGIIAEATNDVSNFADERKFAAWAGVAAGNNESAGKKKDQSVEMARHILENSLSKLLTAPN

SEQ ID NO: 192365 - protein, 456 aa, unidentified
MSPNTFVGIDPASGDFECAFIRNGEREATHRTFTITVTELDHMIEWIQEEKIDVVAIEGSGGYTRPLERALRDAEIPFYSIDPYRITRYRQAVLGQHKNNQKDAVAVAYFAREQAARGNLEVHRRTWFPDETLRPLVRLYEQKQREATREINRLWQRIQNVSGDMFLALRGLSGGTRKSRCVSQQWLLKLFAWYPDLTTWQSFTRDGIAELIDEHRTNIIDKIMMLKDVATVVTPYSRVAQVELQVSASTALALKQAVRLLYHQIEAEVERNAYTRRLMEYGGIGAITAAQIVSEIADISRFPNDDHLASYAGLGRREHKTGVGTTERNMFMFNHRLKNTFFTAARNYTLYNPDSHLTGYYRSLKARGMKQTELYKRVARALVRRFYRDLNAVAEQEAETRHEGNPEPEPAGNDSLKQPHTSPYEKKYTPVRPRKSKRVSPVDHSQKKEVITADFP

SEQ ID NO: 192366 - protein, 413 aa, unidentified
MKVFCGIDWASDHHDIAVVDGDGKLLGRARIGDDAAGLQQLLDLLAEHGDSPTERIPVAIETSRGLLVACLRATGRPVYAVNPMAAARYRERHSVSRKKSDHLDATVLANILRTDADAHRPLPADSELAQAVAVLARAQQDAVWDCTQAGNKLRSHLREYFPGYLAAVQPITDGLNAPLARALLAAAATPGQGARLTRAQLKAVLKRAGRQRGIDAEVERLHAALRIPQMRQLPLVEQAMGRQTVALLGKFEAACAAADNLAEASVELFEQHPDAAVITSFPGLGALSGARVLAEIGDDRGRFADAKALKAYAGSAPVTRASGKSHTVMVRRVKNQRLAAVGYVWAFSSLTASPGARAHYDRRRKAGDRHTSAQRNLYNRFLGCLHHCLATDTLYSESTAFPAPPKLELAIAA

SEQ ID NO: 192367 - protein, 364 aa, unidentified
MKWTPPSYGVKRQTNGAATSPGGGVSMNLSRIGLDLAKQVFQVHGVDRHEHVVCRRQLKRAQVRDFFRQLPPCLVAMEACGSAHYWARELRELGHTVRLIAPQFVKPYVKGDKHDAHDAEAICEAASRPSMRYVPVKSAEQQAVQSVHRVRSRLVRARTALCNEVRGLLGEFGLIATRRGRAATMALLETVMATEPASLPAPMGELLRELKDELQTLEARIARLERQIQAHVRGDARIQRLLAVEGIGPISASAVAASAGDARQFRTGRQFAAWLGLVPRQHSTGGQQRLGNISKRGDTYLRTLLIHGARAVVRCCANKTDARSRWLQGLLQRRPANVVAVALANKNARILWALLSRETCYRPG

SEQ ID NO: 192368 - protein, 345 aa, unidentified
MPIVGGLDIHRKQLTFDYLDTETGEVKRGQIAPADRAHLRSWLARFAGRDDVAFALEGCTGWRYVAEELAGAGVAAHVAEPADTAFARGRKRHAKTDRTDSRHLRELLAEGRLPECWIPPPVILECRALLETYHALRAEHTAWVQRIHAVFFHQGAPALGEAALRTDDDLKALRAAAAAHLSPAGQLQVATALDMLAALQARLDVLRRRLLAAARGLTGARVLAARLYGVGPVTGLAMTCWLGGAGRFSSSRKAVRFAGLDITVWSSDRKGPPGRLSRQGPEVLRWAVYEAGKTHARASAPDHDYYAQVKDRKGGKRAALSEARKILRQACHILAELGDDALTAA

SEQ ID NO: 192369 - protein, 455 aa, unidentified
MYLPDWKWIPIRKELLLMSNKVIFNLDELFISVGIDVGADFSWMSIALPNQQFVGKPYKILHNSIDSLTTAVSKIKEAEELYSLESRIFLESTGIYHYPLFCYLRDKGFNCSVINPIITKNSTNINIRKVHNDRFDSKKAALVGLKPDLKVSLMPSDLALNCRNLCREYYDLMDNRSAYVNKLQGELRMAFPQYLGIFSKVTINTSLTLLETYTSPSAFLEADKQEIIDIIKSTARFGLTYAQNKYNAIIQAATDANQFGYIIDSNIKRIRLYISFIRKYDEEINSILESLHELVDANEDSDFVKQIHLIETFKGAGFLSAVSIMGEIGDFSAFSKPKQLFAYFGLDPAVKQSGKFEGTKVQMSKRGSAIARRVIHTLTLQSISISRNGEAKNPVLREYYLKKCDSKPKLVAMGAVSHKVCNMIFAILRDNKPFKIIAPQEHIQQYNAAKCDIAA

SEQ ID NO: 192370 - protein, 372 aa, unidentified
MEQITRADAAGQARIVRVGADLAKRVIQVHGVDAQGAVVCRRALPRGKFMAWCARLPAGCVVAMEVSSGAHHWARRLTQLGLVPRLMSAQLVKPYRSEGATGKNDANDAAAICEAASRPSMRFVPVKSVEQQSMLCVHRLREGLKAERTACINRIRGLLAEFGVVFAQGPEALRRVLSDVLEDASNEMNTLARLVIQRAQDQWRALDAHIAWCDERIAQHARDNPAVRQAAQLMGIGPIGASAAVATVDDFAQFKNGAQFGAWCGITPRQDSSGGKTKLGPITRRGDTYLRSLLVQGAKSAVFSAHKRSDPISRWALALRERSGWQVATVALANKNARILWAVMTKGERFDAHHVSVKPAAPCAGARMSHEH

SEQ ID NO: 192371 - protein, 350 aa, unidentified
MVIIGVDYHPSDQYIAFVDRETGESGERRLNHSGGEAEKFYRELVAPGVSVRVGMEATGYSRWFERLLAELGIEVWIGDAAEIRTKRVRKQKTDRNAQLLLKLLLEDAFPRIWVPSPENRDLRQLLWHRHRMVQMRTRIMNQLQALAMNEGQRRKKKLWNDQGRAQLEKLPLAPWASRRRQDLLELLDRMNPTIEELTVVVEQEAKKRPEVLRLMSHPGVGPLTALAFVLIIGTPERFQCGKQVGSYVGLIPSEDSSAGHQRLGHITKQGSSLMRFLLAEAAQAAARCDADWRRRYMHLAMRRQRNIAKVAMARRLAIRLYWMWRNGWEHAQWVKFGSNAGQLGTGHGVN

SEQ ID NO: 192372 - protein, 456 aa, unidentified
MARRLVGIDLGIASSHTVRVLDETGQQVCRRRCEPTVASLTRIEDAASVGAPPGTVLEVVLEPTGPAWLPVAVFFASRGHRVFRVSSAKSADLRRFLSKHAKSNGIDAETLARLPLFSPGGLLPLELADAEHAALDRRVRACDRLTRAASEHKTRIKDLVRQLLPMTPLIEDIGVADLAVLERWADPRTLLKIGPSKLKSLIVKASHNHHGAERAEQWRSAAAAAVELYGEHPAVAWQDLAAEVATEVRLLKAIQAELAVHSARREQAYRWADHGQLARSLPGIAKVGGPVIAAAIGRAERFPTGAQFKSYAGLAPRASETGNTDRKGQPMSKAGSSLLRTTFFRAADTARKQDPQLAKIYYTQMVERGANHVKALCVVAAHLAERAWAVMARGMPYVICDINGEAVTAQQAKTIIAEHWTVPPQVRARRRSTKTAKAGKAPQKVHTGPAKPNRRP

SEQ ID NO: 192373 - protein, 365 aa, unidentified
MSHCTDPLYVGIDAHQESLSIAVLAPQAPAPEPVRVIPNDPARVRRYFRGLARRGPIQAVYEAGCLGFVLYRQLTSLGIDCTVAAPSRIPTLPGDHRKTDRLDAERLAVFLRGQQLTPVSPPTPELEALRSLMRLRLAVQEDVVRARHRLQKFLLLRGHVFRETGNWSAAHMRWLAQLKLDLGEDQLTCDFLRMELDGRVSALKILDERIERRALEPDVAERVVALRTFRGIGVLTALCVIAEIGDPRRFHCAEQVASYCGLTPSEHSSGEKTRRGAITKAGNPRLRRLLVECVQHVARPLGPGHARESRRAQAPAQVVALARQADQRLALRYRQLAHRKHTNQAKTAVARELVGFLWRALLLVA

SEQ ID NO: 192374 - protein, 396 aa, unidentified
MDRAWAGVDIGKQHHHAVVVDDQGTRVLSRRVANDQVALVELIGRVTELAGAVTWAVDLHSSEAALLVALLLAHDQTVVYVPGVMVNRAASAYRGAGKTDAKDAYVIAEQARMRRDLQVLRADDELIVELRLLVARRQDLRADRTRAVNRLHDRLVAVCPALERVLDLGNRGALVLLTGFQTPAALRAQGVAGLEAWLGSRKVRGAGKLAAAVVDAANAQTIRLPGEQVAACLIADLAEGVLALDEQIKQVDELIQGRFRRHPAAEVILSLPGMGVLLGAEFLAATGGDMAAFGTPDRLASLAGVAPVPVTPGRVVGNLHRPQRYHRGLQRVFYTSALISIRCCPESRAFYDRKRAEGKRHTQAVLALARRRVNVLWALLRDQRCYQQTPPEPKAA

SEQ ID NO: 192375 - protein, 339 aa, unidentified
MLYVGIDVAKNKHDVTALNVPGKTVLKPLTFSNNKAGFELLDLSLRQINQDCLIALEDTGHYAFNLLNFLHEQGYKVYTYNPLLIKEFAKSLSLRKTKTDKKDAHGIALKLLSDPNREQFQHDNRQVELKILARHIHRLKKKQSDWKVQYTRCLDIIFPELDKIVGKHSEYTYQLLTRYPNPQKRIEAGFDKLIEIKRLTASKIQDILSVAPRSIGTTSPAREFEIIKHYKRLIDKAETCVNDLMAEFNSVITTVTGIGNRLGAVILAEIRNIHAFDNPAQLQAFAGLDSSIYQSGQIDLAGRMIKRGSPHLRWALIQAAKACARFSPAFKAYLKTKLE

SEQ ID NO: 192376 - protein, 348 aa, unidentified
MAHFVGLDVSVKKTSVCVIDAADKVILEQKVPTEPADIIALLTSLGVSFCRIGIEAGPLSQWLVNALTAAELPVICVETRHMKALLTAQQINKTDRNDARGIARMMRVGLFKPVHVKTLVAQEQRMLLTSRKLLQRKLLDLELELRGTLRNFGLKVGIVSGSGYEARVRELVVGFPRLAAIAEPLLNVRRVMRQQLAVLHKMLLDTVRDDPVCRRLMTAPGVGAVVALTYRATVDQPQRFVHSRAVGAHVGLTPKRYQSGETDYDGGVSKCGDALMRTMLYEAAHSLLTHSRKWSWLKAWGIRVAQRRGMRRAIVAVARRLAVVLHRMWVDGSEFRWSKHSVAVPPVA

SEQ ID NO: 192377 - protein, 334 aa, unidentified
MKLMRIGVDLAKNVFQIHGVDCHELPVWRQRLPRDRWLQTVLEKIEPGCEIGMESCGGAHHWARQLQAHGFRVKLVAPQFVKPYVKSNKNDANDAEAICEAMSRPSMRFVAIKTIEQQDIQATHRIRAGLIEQRTAKANQIRGLVAEYGLVAPKELLMLRRAIPCWLGDADNGLTARFRRLLDGLWDDLRALDGRVCQLDGEITAIATNEPSAVRLQQLRGVGPMIATALVVALGDARQFANDRQFAASLGLTPRQHSSGGKDRLLGISKRGDTYLRYIDGAWRTLGATHSQIQRGSAQPVGRSFSRAIASQCGRYCAGQQNCTHGLGDAASRH

SEQ ID NO: 192378 - protein, 415 aa, unidentified
MAANLKLIGQRGIKEMNAVGIDVSKGKSTVAIMRPFGEVVAEPFEVSHTDVELRKLACFLEKLPGETRIVMEYTGSYWQPIAKVLHDSGLFVSVVNALLIYKYGNNSIRKGKTDKLDAVKIANYCLDRWTDLERYAPADQIRQTLKTCRRQYDQYIRLKVNLKNNLIALLDGTFLGLNTLFKSAPRDTDGHEKWIDFAAKFWHIECIYGSSEKAFTNQYQKWCARAGYRFSEEKAASIYAYAGSQVNTLPMTDAVKCLVTLAVSQLNTIIETISVIQHKMLSLAAQLPEYPVVMRMFGVGPVLGPQLMAEIGDVRRFDRKQSLVAFAGVDAPPCQSGTFESKNRHISKRGSPRLRKTLFQVMSTIIQHAPADDPVFQFLDRKRQEGKHYYVYMTAAANKFLRIYYGTVMAYLEKL

SEQ ID NO: 192379 - protein, 339 aa, unidentified
MGILYVGIDLAKNVFAVHGVDEHSKAVLVRPSVARAKLHELIATLPACTIGMEACSGAHHWARLFLQHGHTVRLMAPKFVAPYRLSGKQGKNDAADAMAICEAVQRPNMRFVPVKSQDEQARLCVHRVRQGLVEQRTATINRIRGLLSEFGIVLPQRAATVRREATVHLEDLPGWANTAIGDSLSDVHRLDERIAEYDHHVRQMARDDQRSRALMQLSGIGNTTASALVSTIGNAHDFKNGRQLAAWLGLVPGQYSSGGKTRLGSITKAGDRYLRTLLVLGARAVLAAARTKVDRLSRWALALEERRGYWKAVVAIAAKNARMAWAVLAKGENFKLLEA

SEQ ID NO: 192380 - protein, 423 aa, unidentified
MSPDGHPEPEQRRDLIGARLCVTRHSIVRPLLLIGWKLMATAKGAADVTMIGAERSDTEVETILGVDTHLDFHVAVAIDHLGRRLGEASVPTTVKGHERLLRWAERFGPVRCVGVEGTSSYGAGLARHLGAKGIDVLEVERPERRRRGSRRNLKKSDPCDAEAAARAVLAGESSGVPKSGDGTVEMIRTLRAARRSAIKARTQAANQLKGLRVTAPEQLRQRLRELSTKEFISVAARFRLGDDPRDVPTATKFALRSVARRYEALSAEIADLDAHLDRLVAQAAPELVSLPGIGTDSAATLLVVAGDNPQRLGSEASFASLCGVAPIEASSGKIVRHRLNRGGNREANRALYMICLARMRRDRRTKEYVARRTQEGKSKREIIRCLKRYVAREVYRLLISCDARSSPTGPQAEVHIASGSSAA

SEQ ID NO: 192381 - protein, 411 aa, unidentified
MRLFAGDDWAEDHHDVELMDAAGRVLAKRRLPEGVAGMARLHELIGQQLGEDAGDAEVVVGIETDRGPWVAALIAAGYTVYAVNPLQASRYRERHGVSGAKSDGADAHMLTDMVRTDSHQLRAVAGDSADAEGIKVLARTHKTLIWERTRHIQRLRHQLREYFPAALEAFEDLAAPDVLELLGKAPDPGRAAKLTRAQVSAALKRARRRDIPGKATAILAALRSPQLGRPPAVTAAYAATIRSLIAVIATLNEQVKTLQGQVEEHFGQHPDAEIYRSQPGLGTVLGARVLGEFGDDPHRYADGKARKNYAATSPITRASGKRKVVAARFIHNDRLVDALNAQAFAALNASPGARALYDDLRARGIEHNDALRRLANRLVGILHGCLKTRTLYDEATAWSHREQTPQSDVAA

SEQ ID NO: 192382 - protein, 408 aa, unidentified
MNPLFVGIDVSSRSNVAYLMKPDGSKHSSFSVQNNLGGAKLLSERIVSALNSMRLSNVMIGLEATSIYGDSLVYALREDGSLGRFQRKIHILNPRQVKKFKEAYPDLPKNDWVDAFVIADHLRFGRITKEVYMDDYRYQALRTLTRARFDAIENLTREKQRFANYLFLKCSGIAQDKDIQNTSATTIALVECFETADDLANAALDELTAFIAKTGRGRFADPVATAKAVQAAARGSYRLPKTVNDTVNQAMSVSIASMRALKEQVKVLDKAIEQQFEIIPNTLISIPGIGKVYSAGIIAEIGDIHRFNSQASVAKFAGLVWHKNQSGDFEAEHSRMIKSGNRYLRYYLLEAANSVRRCDSEFRRYYDLKFKEVNKYQHKRALAFTARKLVRLLFRLLKDNRLYIPPES

SEQ ID NO: 192383 - protein, 434 aa, unidentified
MSRRLKVGLDISLKSNDVCIETESGEILVTHRRFDNDWLGFQRLLELLLTTLRQGEFDGVDIAGEATGLLWFHSFYHLAQSDGLALFDPHLYLFNARVTKHFRKVLAERDTCDPKDAYVVAECLRFGRLPHEVTFDERYLPLQRLTRYRYHVAHTLARKKVYLITVALYLKASVYTRLKPFSDPLGVTSQHILSHYVTIDELASISVDDLAAELDLIGKRRFDDPANNARRLQQVARASYPLTPCLIEPVNLILDSLLQHIRFLEAILQSLDEPIEAALRETPGAAYLHSVDGLGLVYTSGILEVQAPGRFFDGLKRDKQGLLRPKTKHDAQAALAKFAGLWWPRNDSGDFHAEDRRLPHTGNCYLRYYLVEGANSLRRHNAEYTAYYDRKFQESAKHKHWRATILTARKLVRLVFTLLHEEQMYQPPEVRYRK

SEQ ID NO: 192384 - protein, 459 aa, unidentified
MRSVALDVHLDFCEVAIVEDGELRSCGRIATTPERIELFAGSLGPDDRVALEVTGNAWEIARIIEPHVAQVLVVSPSDTGIRQARAKTDRLDARTLARLLAAGSLDAVWMPDRATWVMRRRLSRRGQLVRARSRTKNEIHAVLMRQLVGRPPVSDLFGVKGRRWLAGLELALEERETVDGCMRQIEFLDTEIAAVERSIAQAALSSPEIRRLMSVPGVNVIVAASFLAAIGDIGRFQSPRKLVGYLGLDPRVRQSGPGPATHGHISKQGSVRARHALVEACWTAVRQPGPLHAFYERVRARRGHSVAVVAAARKLACLFWCLLTRQQDYAYAQPSLTKRSCGASSSPPASRATRRRPPGSGTPTTPSARPSASSRNRPRSPTSGPCATTTPRKRTRRARARHRNAHQKAVRAASSAARHQSQTLRFSSSSPAPATRSSAAARRGSSGASQACPRDRRHP

SEQ ID NO: 192385 - protein, 315 aa, unidentified
MVSYLGIDVSSLSLDAAVRPQGTRLHVSNDPAGFEALLDGLCGLSIKRVLLEATGGYERNILRFLQDAGYKVIRVNPRRARAFAESIGVKAKTDAIDAEVLAHYAEVIPDQPTLRISPERALLRELLQQRDRLVQQRDDDRRRLKQAQFSAVSDFLKANLQHFKSQIKLIEQAISQQTEALKDERVTQLVQVKGIGLVTAGKLITLLPELGRVESKEIAPLVGVAPFNHDSGKSVGKRSISGGRFEARRSLYMSCLVAIKYNPALKARYEALRGRGKVAKVALVACMRVLIVRLNAMLRTGKPWLDLVLPQPMRT

SEQ ID NO: 192386 - protein, 522 aa, unidentified
MTGFPMVLACPYRSLVPRLSADALVKFRGLWQARGTILFKRLQFFMPLLGRNHNHTNMKSKTPKSKKGKRKVSVDQGWEAINPRAAGIDIGAKEHFACVPAATTPKNVRSFGTFTADLGALADWFKECGVTSVAMEATGVYWIPVFQILEARGFAVILVNARQTKNVAGRKSDVQDCQWIQRLHTYGLLQGSFRPEDSYCVLRTYLRYRDELISARSTQCQHMQKALQQMNVQLTQVLSDVTGVSGMAIIQAILAGERDPVKLAALVDRRVRARPIQIQKALAGDYRQEHLFVLQQAVSLYGTYEEKINACDEQIVRETAALPDKVDPQRKPLPPRKEGRPASKDQMQDQDMREMLYRKFGADLTAIEGIGVTTALVVLTEVGPNVAGFRTEKHFCSWLGLCPDNRISGGKVLSSHTRRVINRFSDALRMAAVTLERSQSALGGFYRRMKGRLGAAEAITATAHKLARIIYRLIKHGEAYVRQGMEDYERKFRERKLHALRKTAMSMGFNLIERQEVTSPVS

SEQ ID NO: 192387 - protein, 315 aa, unidentified
MVEQVVVGIDVSKAKLDVAILPSGEQFTVSNDRHGIGELVRRLSPLAPSRVVLEATGKLEQLAVSELAAAGLPVVVVNPAQVRHYAKARGKRAKTDPIDARLIAEFARDLQPELRPLPDAETQALAALCQRRNQLLEMEQMEKNRLQRAPRANQKSIKAMLRFMRRQIEQVEKQIEHSIRNSPLWQAKRELLESMPAIGKVNSSTLLARLPELGQFTRQKICALVGVAPYDDDSGQWHGRRHIAGGRAGVRQVLYMAALSAVRCNPALRDYYQRLLARGVKQKAALIAVLRKMLTILNAMVRDNTPWRSPCQAPA

SEQ ID NO: 192388 - protein, 319 aa, unidentified
MEALQVSFKQVVSRGCGLDVHKKVVVATIDGEGIKKQTQEFSTVTSSLKEMRDWLLEHKVTHVAMESTGVFWKPVYNILEPSGLTVWIVNAAHVKYVPGHKTDKKDSAWLCKLLLAGLLKPSYIPAKEQRELRDLTRYRTTLIQSNASNKNRIIRILEDANIKLSSVLSSTSGAVGTKLINKLCDGMEVTMQDIDEVYHKKLEATKEELYEACQGFVTEHHVYMLQLIRKEINDTEQTIDSLNKRIKEVLSSYENALELLKKVPGISAKSVEDLVAEIGLDMSVFPTEKHLASWAGMAPGNNESAGKKKADEQPRETSR

SEQ ID NO: 192389 - protein, 456 aa, unidentified
MMVKQKRQMKIKVKVNALEQINPNAAGIDIGAEEIYVAVPPDRDTESVRSFPTFTADLRRLVEWLKACRIETVAMEATGVYWIPLYELLEEEGFEVCLVNARHLKNVSGRKTDVLDCQWIQQLHTYGLLNPSFRPPEQIVAIRCLVRHREMLVQYRTVHIQHMQKALTLMNVRLTNVLSDITGVTGLKIIRSILGGEHNPLCLAALREPGCKKSAAEIAKSLEGHYKREHLFALKQALELYEFYDQKLMACDAELEAMYQEFDPPDNPGTPPPTPRTQKRRKNQAHFDLAPALFRLTGVDLTRIDGVDELTVQKVLAEIGTDMSKWPTVKHFTSWLHLCPNNKITGGKVFQTGVQPTKNRASAALRVAAASLKTSDSALGAYFRRMCARLGTPAAITATAHKLARIIYFMLKYRKPFHDLGANYYEQQFRARVLRNLTRRAAVLGFRLEPAAQSVS

SEQ ID NO: 192390 - protein, 458 aa, unidentified
MAKQQNRKKEQKRDELDGLPPLNRNAAGIDVGSAAHYVAVPAGRDAEPVQEFGSFTADLHRMAQWLKACGIETVVMQATGVYWTALYDVLESYGFKVNVVNARHTKTLPGRKTDVLECQWLQKLHTFGLLNNSFRPAEEIRVLRSYMRQRENLVTAAGTAIQHMQKALTEMNIQLANVISDISGTTGMKILRDIVAGERDPQKLAMHKHGRIQASRAEIACSLEGTWRAELLFVLEQSLELYDTYLEKIQECDRRIDEHLKTMEAKADPTQPTPEPRRMRWPRKHEPRFDLRRQLYRITGVDLTQIDGMDVQTAQTVISEVGVDMSRWKSEKQFASWLGLCPDNRISGGKVLKRGTRHVVNRASTAFRLAAWGLLRSQSALGAKFRRLRSRLGAPKAITAMAHLLARLTYRVLKFGHQYVDKGMEYYETKYRQQQLQWVAKQAAALNMQLTPIAGVAN

SEQ ID NO: 192391 - protein, 337 aa, unidentified
MNTVATSVVGIDVSKRTLDIALLVNNKIKTKVLNNTASGHRELSQWLLERGNQQQTTHLCMEATGPYSEAVAIALVESGWSVSVVNPARIKGFSQGELARNKTDRADAALLARFCMAMRPPLWTPPTATWRELRGWVDRLQALKDMHQQEMNRLEAHQASGQTFLLATVQMHLDWLRQQIEKLERDIDEHIDRHPELKHDAELLHSIPGIGSTTVAKVLAYAGNVRRFSNAKALAAFIGVTPRQRLSGTSVKGRTMMSRTGHADLRRALYMPGLVARRHNPTLKVFGDRLKASGLAPKAVVGAVMRKLAHLIYGVIKSGRPFDVNFSGLKLDFQDGI

SEQ ID NO: 192392 - protein, 359 aa, unidentified
MKKNDFKVLRQNVGIDLSKDDFKADITVLTENLECRTITQKKFNNSPSGITEFLKWSDSNKANSSMELGYTMEATGIYHENLAYALFEKEKAVHVVLPNLAKKFAESIGYKSKTDKLDAKSLGRMGVERILTRWKPCSKNIKVLKNLTRERAMRQKEKTKAKNQLHALRYSNSPNQSTLERYDSLISFLEDQVKVIEKEINELIQSDQVLSKKVEKITSTPGLGLITVASVIAETNGFASITNIKQLQSYAGYDIRIRESGKWKGRSKISKKGNSYIRHALYFPSYTIIKYSKYHKSFYDRLVEKKGKSLIASTAIQRKLLGLIYTLWKNDTYFDPNYSQKKQDIHRELHEPVSSFGLL

SEQ ID NO: 192393 - protein, 422 aa, unidentified
MSYCPVAGIDVSKQFSDMCILSPDNKIFAQEKIYHDETSINRANALLQKAERLFFSKPVIVMESTSYYHLIPFQFFSEHGYDVIVVNPLQSNSMKDFSIRKRKTDRVDAFKLAMMYRTKTLRPSQIPQTETRALRQLCRHRAELLNDVSSYKNRLTALLDQTFPGYDKVFSDVGGVTSCAVLVRFPTPTILLVEEESELVEVIAAASKSGYSFAKKKAGLLISAAQKAQTLGIHSCADETLIVCTIQMLRTLSESVLQIETAIDNLLAQIKEMRNNVSLLQSIPGVGSHSAALLLGEIGDISLFKKPKQLAAYFGLDPTERQSGSFRGTKNKLSKRGSSYARAALHMGVVNSICKRGKDSAANPVLLSYYEKKCKNKPAKVAQAASMHKLVFIVFAVLRDQKPFELKTPEQHAVEQGFVKAA

SEQ ID NO: 192394 - protein, 400 aa, unidentified
MLSIGIDVSKGKSTVCGMKPGGEIVYAPFEVQHTREGMSELVSLLRSSGEEVRAVLESTGSYHCPVVAALLENGIFVSVVNSLRMKRFCSQSIRKVKTDRIDAMQIALYGLAYWQELQPTRLPEDTYRELQLLARQYYQMTSMLIKAKVDFNALCDQVLPGMQELMNDHAGRHKLSDFVLRYHHTTHILEMGETRFRKDYCKWAEKKGYRNCERMAALIFATAQNGIPVLPNAPSTQIVITEAIRVLHTVEASRDAILTQMQALAKTLPEYSLVREMPCIGDTLAPRLIAEIGDVRRFHSKRALIAYAGIDAPPYQSGKFCANNRHISKRGNRYLRKTGYEVMQSYVMHKPANDPIFTFIEKKRGEGKSGKLAMVAGLNKFLRVYYGKVTELYRSLPAIE

SEQ ID NO: 192395 - protein, 343 aa, unidentified
MEQFIGLDVSLKDTAISIRQDGSRVWRGKCPSDPKVLADIIRKQAPQVKRVIFETGPLSTWFYHALTDEGLPAICIEARHAQKILNETLNKTDANDADGLAQLAEAGFFKAVRVKSFDAMLTRTLIGVRKQVCGMSIQLSNQIRGVMKTFGLIVPRSKGRVFEGHVRELFGGNDSLAKIVLPLLDAWRDIRRHIDNLDRQLLAAARNNKASQLLMTIPGIGAITSLSFSAAIEDPGHFKRSRSVGAWLGLTTRRYQSGEIDYDGHISRRGDSHLRSLLYEAAVVMLTRTKSQHDSSLKDWGLRLRERLGIKRAAVAVARKLAVIMHSMLKTGEPFNKLAGAPE

SEQ ID NO: 192396 - protein, 378 aa, unidentified
MTSLDTVLQGKDTTTQGDLHVSFELGDRSWKLSCSDGIRSPSRYSVSAGDQAAVLDCLQKARARCGLDPQAKVHTCYEAGRDGWWLHRWLREQGIDSIVVDSSSIEVNRRAKRAKTDRLDADKLLALLLRYHRGERRVWSVVHEPTAQEEDARRTHREIARLVHERIAHTNRIGSLLVMHNLRPGRIGGRTWQGWWDGHCMQVPPLLRAEIGREYARLVLAKQQLNALETERRHEVAEGAHPVVAQLAKLRAIGPRGAWILDKELFGWRRFANRRELAGCLGLAPTPYASGTSEGEQGISKAGNKRARALLVELAWRWLKFQPDSAMSQWFHQRFGIAGKRSRRIGIVALARRLAIALWRYVEHGEVPAGATLKTVDA

SEQ ID NO: 192397 - protein, 419 aa, unidentified
MLKVQWFVGIDWASEAHEVCVLDREGHVCERRQVRHTAPDLQTFVDALLARGDGDPKAVAVGIEVPRGGLVELFVERGFPVYAINPKQLDRFRDRFTAAGAKDDRRDALVIGDSLRTDPQAFRHVRLDHPVIIQLREWSRIDEDLGGELTRLTNQLRDLVYRSTPGLLSLCPAADEPWFWTVLRMAPTPAAQQRLSERRLERLLHTHRIRRLTAKQVREVLQQPPVFTAPGVADAVADHLAVLLPRVELTATQRRAAERQLDRLLEVLDQELPSAGDQREHSDIAIVRSMPGIGTRVAARMLAEGSQPLVDRAYHVLRACMGVAPVTKQSGKRRSVSMRYGCNARLRNAAYHWARAGAQKDPASRTYYETLRARGHSHGRALRSVADRLLRILMTLLSRGQTFDPSHGQQSPLSVAAGA

SEQ ID NO: 192398 - protein, 412 aa, unidentified
MEVLYPHCAGLDVHKDTVVACVRHMVNGSVEREVRTFKTTTKELLALSDWLAGEGCTHIAMEATGVYWKPVWHILSDGEFELVLANAAHVKNVPGRKTDVNDATWLADLMAHGLIRGSFVPDQQTQEMRNLLRTRKQLVRQRSSHIQRLQKTLEDANIKLDSVISDVLGLSGRRMIEALIAGETDPGALAALAHRRIKATPAELEAALRGRVTAHHRFLLRVHLQQIDATDATVGEIDREVDAQIEPFRTAVQLLITIPGIDELSACVILAEIGYDMSRFPTAGHLISWAGLCPKNDESAGKRRSTRMRKGAPWLKTTLVQCAWSAARKKASYLQAQFHRLQARRGAKKAIGAVAASILTSIYHMLTDGTLYHDLGPDHFHRRAKTAQTSRLVARLQNLGYAVQITPVEAAA

SEQ ID NO: 192399 - protein, 342 aa, unidentified
MTQFTFFVGVDIASASFMACVGTAPWSLTVKPVKFDNHEDGVASFLNWLKNNSLIAEKTVVCMEATGVYGEGLAYFLFASGYTVAVEPPLNIQRKFPANASKTDELDCQYIAEYACRYVDKLAFWKPRADLLEKVKVLLTTRQHFSVQLTGHKNALIAVNRKKVTSELAQQVHQAMIQQINQHIKAIDQEIRRLIDDEPTFKQTFLLLMSVPGIGLQLAAHLLIHMQETLDPKVLAAFIGICPIKHESGTSVYSAPTSRHYGPPVMRKLLYLGACSVRTHKKQFQQYFFRKVAEGKHKKVVLNNIENKILKIACAVVRSQKPYIPNYVSVNPLVFQKTLTLS

SEQ ID NO: 192400 - protein, 402 aa, unidentified
MPMLSIGIDVSKGKSTVCGMKPGGEIVYAPFEVQHTREGMLELVSLLRGSGEEVRVVLESTGSYHCPVVAALLENGIFVSVVNSLRMKRFCSQSIRKVKTDRIDAMQIALYGLAYWQELQPTKLPEDTYRELQLLARQYYQMTSLLIKAKVDFNAICDQVLPGMQELMNDHAGRHKLSDFVLRYHHTTHILEMGETRFRKDYCKWAEKKGYRNCERMAALIFATAQNGIPVLPNAPSTQIVITEAIRVLHTVEASRDAILTQMQALAKTLPEYSLVREMPCIGDTLAPRLIAEIGDVRRFHSKRALIAYAGIDAPPYQSGKFCANNRHISKRGNRYLRKTGYEVMQSYVMHKPANDPIFTFIEKKRGEGKSGKLAMVAGLNKFLRIYYGKVTELYRGLPTIE

SEQ ID NO: 192401 - protein, 346 aa, unidentified
MEQIIRIGMDTSKSVFQLHGVNAKEQPVLRKKLSRREMVKFFEKLPPIEIAIEACGASHYWGRVLSCLGHTVKLIAPQLVKPYVKRGKNDAADAEALCEAMSRPTMRFVPLKSEEEQAALMLIGMRARLIRNRTQLANTIRGYAAEFGITAPKGMCRIEALLDRIAADESLPTLTRELFALHAKEYAELQGEIEQLEGKVMAWHRANECSQRLAKIPGVGPIGAALLMMKTPDPHLFKSGRAFAAWIGLTPRDHSTGGKTRLGRITRAGDEVLRSTLVVGATAVVSHARRTNGKNASSWLRELLERKKPKLAAVALANKIARIAWKLMVSGEHYKRLLQQPGAAAV

SEQ ID NO: 192402 - protein, 426 aa, unidentified
MAYKIAGIDVHKKMLAVVVCDVEVDGEYKFARRMFGGNPEQLRALAAWLLEEGVEEVVMESTAQYWRPVWESLEMYWKPICEQRDDRRPGSATLHLAMALSNRGRRGRKRDFADAERLVKRLVAGELTLSFVPDAEQRLWRTVMRRKYQLTRDRIRLQNQLEALLEEAHIKLSSLVSDLLGASARRILQALAKGEADPAALAALADKRLRATAEQLSDSLGAVRDLKPAYRRLLKMALDQLELLDLQIGQLDQEMAGLISQHQDAVQRLTEIPGLGVDAAQQIVAEVGPTAATFPSAKSLSSWVGVCPGEEESAGVNYSHRSPKGNRQMRRILNQTANAAVKAKGSIFEFVYRRCVAQLGHKKAIGAIGHRQCRLIWMILHQGIRYEERGPVVIEQSQRKRTARMIRQLRNLGYKIDAPQTATVGA

SEQ ID NO: 192403 - protein, 347 aa, unidentified
MRFYTKNHRYYCGIDLHARSMYLCVLNQDGEVVLHRNIPAQPEPFLAAISPYRDDIAVAVECIFTWYWVADLCAREGITFILGHALYMKAIHGGKAKNDKIDSRKIAGLLRSGMIPQAYVYPARMRATRDLLRRRTYLVRRRADLLSHIQNTNSQCNLPEFGRKIAYQVHRAGVVEQFADPCVRKSIELDLELIDLLDKQIWGLESYLLRTANRHDPNGLHLLRTVHGIGKVLSLVILYEIHDIRRFPRVQDFASYSRLVKCAKMSAGKKYGTSGSKIGNVHLKWAFSEAAVLFLRANPEGLKYKQRLERKHGKAKALSILAHKLGRAVYYMLLREKAFDMNKFLAA

SEQ ID NO: 192404 - protein, 349 aa, unidentified
MSTEQSIAVTYGIDLGKTWFHVVGLNAEGKPVKKAKFNRASITRFFVNIPRALVGMEACPGSQWLARKLQALGHNVRIVPAQFVKPYVKSNKNDTIDAAAIAEAITRPTMRFVQVKHCEQVDLQALHRSRDLLVSTRTRLINQMRAFCLEYGVAMRNGVGAFKASLPGVLADDSNDLTASMRQLLVELSQELAALEERIALLTRKINALADQSDSARRLATIPGVGQLTATALVAAVGDARQFKTARDLSAWLGLTPAQYSTGGKTHLTGISKRGNSYVRKLLIHGARSCCMHLDRTKDRLGAWIDQIEARLHHNKLVVALANKLARIAWVILTKAGALYERRDPQFAT

SEQ ID NO: 192405 - protein, 337 aa, unidentified
MKFSGIDLHSNNAVVAVIDDEDRVLYCKRLTNDLSLIVAALMPWRAELQGVVVESTFNWYWLVDGLMAAGFVVHLANTAAIKQYEGLKYAGDERDAVFLAHVFRLGLLPEGYIYPPQERGLRDLARKRMQLVQQRTLHILSIESLLARQLNLRMNGDHVQRLDDAAVHALALPPHVERSLMANLAILRTLRMEIASLETILHQEVKLRTEFQILKTTPGIGEILAATIMLETGTITRFPGVGHFSSYCRCVESKRISNGKKKGEGNARNGNRYLAWAFIEAAAIALRTCPQARRFYERKKAKRLPVVAMKALAHKLARAAYYMMRDGKPFEVQRCFG

SEQ ID NO: 192406 - protein, 460 aa, unidentified
MANRTKSHSELKALPMLPNESLYIGVDIGKFKHVSGFVSKTLLERHKHFEHCPAFLFEQSREGFRAFVERIRAYCPLEQCFILMEQTGHYHKALLQYLLELDLPVYVMHVQRRESGMIKTDKRDALGLANQLYNQLALGVQVSDKLQIVHRAIPPSEAAAQLKGLMRHRYELVNEATQRKNKLTAICDELFPELVQVLKNPNLPIALDLREQFPTPQAVATASPLALRQVRRRNHPSEAEFVLLQQLAAQSIGTKDVARQRGLVLEQSLLIKELRLMQEHLERLDMEVTRIVEHCREGQILLSIPPISPMYAAAILATIGHIANFEDAGHLKSYFGWAPKRAQTGVSFDRTSLTKGGSREMKKVMYLVAWHAIKDGTEWASLYKRLVPRLCTYDERTQTYKGRGKAVGHVIGRLITLIYALRHRKMMRHSAIFLLEHRHQNQCSIIQRCIGVTAQATTSL

SEQ ID NO: 192407 - protein, 397 aa, unidentified
MYIVGIDIAKRKHEAAVIDGEGTVIIKPFSFTNNCSGYNRLLAMLTKAKLPLDEVSFAMEATGHYWLALFTRLQKEGFRVQVINPVQTNSIRSFYIRQAKTDPRDALLIAEVIRFGHFSESTLHPENIYELRELCRGRHAIVSMQADVKRKVVALLDQVFPEYETAFTNLFGDTSMAILQTCPTPKELSEMPFEELCHLIEVSSHKRFRMAKAQELQALARNSFGFAMAGDVFSTMIRLYAKHLDFLKQQVQEMDRKIAEIMDTLDTPITTITGIGPTLGAYILSEIGDINRFSSAAKLAAYAGIDPTMRQSGEYNGVRNRMSKRGSPYLRHAIWLAASSAVLHDPALKLYFQKKRDEGKPYMASVGHACRKMVSIIYAVMRDNKAYTPRIPNEISA

SEQ ID NO: 192408 - protein, 368 aa, unidentified
MEKIGVSEGVRQERLPAPKRPLDGTQVWMAIDISRSKAVYCVRWEGSEQRRLSTPLGIEHVRAVVEHYRDCQLHVAYEACGFGYELAWWLQEHGVAVNVIAPSRVERVPGLQVKTDRVDVGKLARKFEKGDLKAIYIPSRTVHEQRQIGRTYAQSLKERKRAQVRIRSLMQEQGRLGPLPAVGWRVYRAWLSEQHLPKPVRLCVQAHEQMRRVADQQAQRMKAELYKLARRAEYRPLVTALSAQAGVGWQSAIRLVLELGTIDRFRTTDALPHYLGLTPSQYSSGELDHRGHILKCGPGVLRALLLQCAWSAVRQGHDTELQERFANLAPRIGRKRAIIAVARKLAIKLRGRWRDHLLASEPTPAVAV

SEQ ID NO: 192409 - protein, 422 aa, unidentified
MLDTMQIQSMEVFIMYNAVGIDVSKGKSTITIIRPQGVVIRKPFNVSHSVKELRDLTGYIASLDGETRAVCECTGRYHEPVLKAFSEAHIFISAVNPKLVKGMGENTLRKIKTDPADARKIAKYALDNWAELRQYSSMDDTREQLKALNSQYSFILKQRTAAKANLISLLDNTYPGVNKLFDSPARDDGSEKWVDYAYSFWHADCVRKIGLKAFSERYSAFCKKHHYCVRKNKAQELFEASKELVTVFPKDSTYKLLIQQQINQVNLLSGQLAAIRKEMNALASTLPEYTTVMGMYGIGETYGPQLIAEIGDITRFHHREALTAYAGVDPGANQSGSRDQKSNNASKIGSSKLRKTLFQIMTTLLQNRPENEPVYQFLDKKRSEGKPYLVYMTAGANKFLRIYYGKVKAHLRELEQDQETAE

SEQ ID NO: 192410 - protein, 386 aa, unidentified
MVIIGVDPHKRLHVASVVEPATNRRVATLEVEASLAGYRRLLKWAGGFGERRWAVENARGLGRHLAQWLVARGEVVDDVPSTATARVRELSRGGRRKNDVIDAAAAASVAALQGEANPVLTEDLTTVLALLDERRNNVVTQRTRLVNQLHALFRELLPGGAPTGLTATIASRLLIGVRPAGPVEAARKQLARDLLTEIRDADRRLKALTAQIADTVAATGSRVTEVAGVGPVVAGRLLARTRGASRFPTASAFASYAGVAPVEVSSADRVRHRLPRGGDRQLNFALHIVALTQVRMSGSAGRAYYDTKIAARKTHNEAMRCLKRRLADHIWRVMIRDEGSRAAGPRGHQGATLQSSAAGSTPTTSSSEKSLPEPATPDSTTGQTAA

SEQ ID NO: 192411 - protein, 337 aa, unidentified
MNQLYCGVDIAKETAVFCLLVDNGKALERATTFNNNAQGFKTGLKWLRKLAKPFKPFQIHLVMEATGVYYLSLAKFFSGQAGIIVSVVNPAQVKSYAQAELVRTKTDQVDAAVIARFAMALRPRPWSPPAPHEEEMLGILRHVEAIKEMIQAEKNRLHALEATGPSTVNVQRAVKKHIRFLEKQIDDLTGRLRQIAKEHPDLDENLKLLCSIPGVGEITAHTLLAEIGDISRFSGVKQLVAFAGIAPAERQSGTSVRGKVMINKRGSRRLRKALYMPAVVAARHNSNVKELYQRLLSAGKKPICAIVACMRKLLHIAYGVLKSKKCFEPNWTNANLA

SEQ ID NO: 192412 - protein, 368 aa, unidentified
MSARIITYERSTLVNSEKYIGLDVHQATISVAVLDSTGKLIMESILETKAATILEFFAGLRGTLSVTFEEGTWAAWLYDLLKPHVAKLVVCNPRKNALLKEGNKSDRIDARKLAELLRLDHLKPVYHGETGVRMLRELARSYLTLVKDLTRVMSRLKAVYRSWAIPCAGRDVYYTRHRAQWLGKIKEAGVRRRAEQLYQQLDMLQHLRQQARRELLAESRRHPITARLRQIPSLGPIRSALAVALIQTPNRFRSKRQLWAYSGLALETRTSGEHCYVKGQLRRSKKQISIRGLNKDHNHHLKGLFKAAATTASVRPGPFQDFYQRALAKGIQPTMARLTLARKIAAITLTLWKKGENFDAEKLKSQAA

SEQ ID NO: 192413 - protein, 433 aa, unidentified
MASRTYSKIIAFRRARRDNFYKERLVMEVVYRCCCGIDVHKKVIVACLVNGGEQELREFGTTTSEIKTLANWLTESGCEMIAMESTGVFWKPLYNLFELMDLDAMIVNAAHMKALPGRKTDVKDAEWIADLLRHGLLKASYIPNREQRELREITRYRKSLTEERCREVNRLQKILEGANIKLDSVVKDITGKSARKLLQRIIDDDIPDSDEVSKLVHGRMRPKLEQIVASIEGITTPLQRKLLAQIIDHIDDLNRRIGELDKLVQEYMAEYEAAIEAIDEIPGIARRSAEVILAEIGLDMGRFPSAAHLCSWAGVCPGNYQSAGRRKHGKTTKGNKALKTILTQCAKSAKTVKSSYFFAQYQRISARRGKNRATLAVAHSMLIAIYHILKNKTAFHDLGSDYYDSFNRDRKINSYLKRLKALGWEPDAIPSSA

SEQ ID NO: 192414 - protein, 375 aa, unidentified
MSNLSEAFVGLDTSKLRNSVAIAEGGRTGEVRFLGEIDTTPAAIRKLVKKLATKYERLSFCYEAGPTGYGAYRQITGLGHDCIVAAPSLIPKKPGDRVKTNRRDAVTLAKLHRAGELTAVWVPDCGHEAMREVTRARETAMLDLRRKRQQVSAFLLRQGLHYAAEKKTWTKAHMDWLAGQKLEHAEQRIVFEEMMLAVREAQARLERLADAIRVAVPEWSLAEGVTALMAMRGMDLVAAATFLAEIGDLSRFQGPRELMAYLGLVPSEASTGDTIKRGPITKTGNRRARRMLVECSWSYRHPPRVGRSKQEKVAAAPQAVREIAWKAQCRLHNRYRSLIRKGKLKTVANTAVARELAGFLWAVNRAITKTGAAAG

SEQ ID NO: 192415 - protein, 419 aa, unidentified
MEELLRVLLFIGDDWAEDHHDLEVEDETGRRLAKARLPEGLEGISRLHALVAEHAPAEWAELPSEEVAARVFVGIETDRGPWVTALRAAGYQVFAINPLSSARYRERYSTSGAKSAAGDAHVLAEIVRLDRDHHRQIAGDTDLVDAVKLVARAHQTAIWERTRQVLRLRSTLREYFPAAIEAFEDLAAKDTLLLLARAPSPARVAKLTRSQVVSALRAARRHHVEAKADAVLAVLRAPGLRQPATTEAAYAAVVVGQVGIIGALNEQITQLQEVVAEHFGRHPAADIYLSQPGFGVVLAARALGEFGDDKKRFHDARARKNYSGQSPITRASGKKTVVLARYATNRRLGAALHAQAFSALVASPGARAYYDALRARKIGHHAALRQLANRLVGILHGCLKTGTKYDENTAWQHQIVVAA

SEQ ID NO: 192416 - protein, 351 aa, unidentified
MRYIGVDVGKKRCQACVMDEEGMVLDEFPFTNNGEGIQRLLKHVGDAECKAVIESTGNLWLRIYEALEGCGVEVKLANPYKTKAIASARIKTDRLSARILAHLLRADLIAECYVAPREVRQVRALLRQRASLVKMRTMVKNRVHSHLDRYGHGSPWSDAFGAGGLMWLRGLELEPVDRCILDSHLRHMECLNGEIGFLDSRIAGHAVENMDVVLLMTLTGIDYHSATLLALEIGDISRFPSPKHLVSWLGLCPSLYQSGNTLVLGRMKKDSNGRARWVLIQAARTASRTDPRMRELYLRVAARKGTGKAAVRVANKMAVIIWHMLTERRPYGQVKEGLYRSKLKRMKRVAS

SEQ ID NO: 192417 - protein, 352 aa, unidentified
MQTKRVRFPKITIGVDLGDRQSVICEIDRKGAVVGRSTIRTAKASVREYFAGRERSRVVLEAGTHSPWFAREVEAHGHEVIVANPGRIYGARRRKNDPKDAEFLARQGRADVTLLHPISHRSSEAQKELAMIRARDQLVGARTKLINHVRGAVKAQGGRLRKCSAEAFATRATSELPEETRAALIPLLDIIAGMTATIRQYDQQIEKLVATSYPEAARLMQPKGVGALTALAFLLLVGDPTRFSHSRDAGPYFGLIPKLDDSGESQPQLRISKAGDELGRRLLVSAAQYILGPFGPDCDLRRHGLKIAARGGKNAKKRAAVAVARKLAVLLHKLWVSGAEYDPDWVLKHRAV

SEQ ID NO: 192418 - protein, 389 aa, unidentified
MVAIMRPFGEIVSTPFEIKHTSSDINSLVKLIKSIEGESRIVMEHTGRYYEVLAHQLSEANLFVSAINPKLIKDFDNDSLRKVKTDKADSVKIARYALDKWQNLKQYSVMDELRNQLKTMNRQFGFYIKHKTAMKNNLIGILDQTYPGVNTYFDSPARSDGSQKWVDFASTYWHVDCVRKMSINAFIDHYENWCKRKKYNFSKSKAEEIYGKAKELVPVLPKDDITKLIIKQAVDQLNSASITVESLRTLMNETASKLPEYPVVMAMKGVGTSLGPQLMAEIGDVSRFTHKGAITAFAGVDPGVNESGSYEQKSVPTSKRGSSDLRKTLFQVMDVLIKTHPQDDPVYQFIDKKRAQGKPYYVYMTAGANKFLRIYYGRVKEYLSSLPES

SEQ ID NO: 192419 - protein, 387 aa, unidentified
MKSVTSATVVATTARSNAITLFASLELSKSKWVVTISSPGSEKFSRHTVEGGNGGCLLDLLSRWRAKAEERYGVAIKTVVIQEAGLDGFWIHRLLLANGIESHVVDAGSIAVARRHRRAKTDSIDGETLLRTLMAWGRGERRVCSMVQAPSPEEEDRRRLTRERGTLVKERIQHTNRIRGLLTGQGVRDYNPLRRDRVERLEAVRTGDGRPLPPMLKAEIRREVDRIAVVTTQLAAVERARDALVHAPAEEPNTPAGVLLKLKGIGPEFASLLWLEALFRSFANRRQVGAYGGLAPSPWQSGSIERDQGISKAGNHRLRRTLIELAWSWLRHQPNSALSRWFQARVGAAKGRIRRIAIVALARKLLVALWRYVTQGVVPEGAELKAA

SEQ ID NO: 192420 - protein, 484 aa, unidentified
MQGVQEIPDEEHEQVLERVCAIDVAKTSGMVCTRVPRQGSKPGARVSRVWEVSATTRAVMGLAAQLVDLGIQKVTVESTSDYWRIWFYLLEAAGLDVQLVNARDAKNVPGRPKTDKLDSVWDAKLTERGMLRPSFVPPAAIRQLRDYTRLRVDLTRDRTRHYQRLEKLLEDALIKVSGVASKMDARSVRDMIEALIAGERDPTVLARLARGRMKAKYHALVEALTGRFDDHHGELARILLDQIDSLTRQIDQLTTRIDELICELPEAAASEPGDPTHQGTSVVVDRLTGELLAPEAAADPTDEGTTPMARQPNQRLGDRAALSAIERLDEIPGIDVRGAQIILAEVGLDMTRFPTADQLASWAKVTPRTIQSGARSRGGKTGKGNPYLKGLLGEAAAAAAKTQTFLGERYRRLVKRRGKLKALVAVARSILVIIWHLLADPATRFQDLGPDYYSNRIDKNKKIRNHVRQLEALGYTVTLNPAAA

SEQ ID NO: 192421 - protein, 385 aa, unidentified
MRSLCLWLAVQIERYLKPLVTREEFTSKDDRQTACRLFSPAVFSHTFEGGSPLITVFPTWTAYMGIDVAKTKLDVVLRLGERAIHQVFAKTADGFAALDGWLSSFALSPAQVRVCLEATGSSSDAIALDLFARGSTLSVLNPAVLVDARRSQQIRRKTDKLDAHLLARYAQENQPRAYQPLPAEILTLRALLHHRDDVQHMLRQERNRLEAGRMTDGIEQRVRKHIQDLQADFKATEGEIKAHLKAHPHLKAIWRRLQTIAGIGWLTATRLLAHLGEIGRFDKVGSLVSLAGLAVKEHRCGSSVRGKAQIDRHGRKDLRRSMSMSAVVALRVSPHMQQWAKRLQAAGKPKMIILVAIMRKLLHIVSGVWKTEQDSQPALAFPVAA

SEQ ID NO: 192422 - protein, 369 aa, unidentified
MPHVTSIGLDVHARSVAAAAFNPFTGEVVHRDFGTDAAEIAEWALGFEEPRACYESGPTGFHMARELRALGLDCAVAAVSKMQRPAADARRKNDRRDAEFIARMLATHNIVEVPLPDMAVEAARDLDRALDDATRELRRSRQRLNMFLIRLGHVWDERNADGARKKAWTRAHWRWVSEIRLEGPQRDALEYYVTAARCAESDRRQLERRVVALAGTDRWRATVEALSCIKGVDTLTAFRLAAGAGSFSRFRSAPAFASWCGLIPSEHSSGESERRGGITKAGNALARTALIESAWHYSTCSPRPKAPAPGTDVPPVIRSRADDCTARLHRRREALAAAGKSACKANAAVARELACWVWEIGCRSEGTVL

SEQ ID NO: 192423 - protein, 345 aa, unidentified
MPIVGGLDIHRRQITFDYLDTETGQVCRGQISPADREHLRAWLARFAGREDVAFAVEGCAGWRYVAEELAAAGITAHLAEPADTAFARGRKRHAKTDKTDARHLRMLLAEGRLPECWIPPARILECRALLELYNDLRRERTAWAQRIHAVLFHQGAPQLGEGALRTEKGVAALRAAAAGCLSPAGQLQVATALEVIDALEARLHTVRHQLTDAARHLAGAKALADRLYGVGPVTALAITCWLGGAGRFSSSRQAVRFAGLDITVSSSDRKGPPGKLSRQGPPVLRWAVYEAAKTHARTSAPDHRYYAAVKDRKNSKRACLSEARKILRQAHHILAELGDDALAAA

SEQ ID NO: 192424 - protein, 453 aa, unidentified
MGRRRSTGDAGAGIPLVNLNAAGLDIGASEIWACVPADRAAQVVRQFGTFTPDLHELAEWLVGCGIDTVAMESTGVYWIPTYEILEARGLRVYLVNARHIKNVPGRKSDVQDCQWIQRLHSCGLLNASFRPESDICTLRAYLRHRASLIEHRAAHIQHMQKALQQMNLQLTQVLSDITGTSGMAILRAIVAGERDPLKLATLCDRRCAKSQAQIAKALTGNYRPEHVFALKQAVALYDAYNEQIRECDAEIERQFSVIKPTHDGNLPPLHSGDKMNTHSKNGPSYDARTLLYRMLGVDLVAVTGLNASTVQTVISEIGTDMTRWPSVKHFSSWLQLAPHNDISGGKVLRSRLLKAHNRAGQALRLAAQSLARSPSALGAYFRHVRARSGAKHAVVATAHKLARIIYTMLKHRTPFHDIGADEYELRLRQRQIARLHKTAKNLGFTLQPIQVSE

SEQ ID NO: 192425 - protein, 362 aa, unidentified
MRIIGCDLHARQQTLAMLDTETGEIVKMTLTHEGNNVREFYSTLPRPVRVGIEATGSMVWFVNLMEELGIECQVGNPAKIRAAEPRKQKHDRRDADLILTLLVENRFPAIWLPSKELQDLRALLRHRHQWVRMRTRIQNALQAIALANGLRRGTSLWSQAGQHTIASLPLAPHTAHRRSELQAMYVKFESDIEKLNQRVEEQAGQRSGARLLMTHPGVGPITALATDVFLGDPKRFADGKTLASYVGIIPREYSSGGRQRLGGLSKQGHPLLRFLWCEAGAHAVRRDPELQRFYRRKLVQKGLGKARMAVARKLGIRLWIMLRNKINYNEFCRRGQMQQKSGDACAGMPGTRYGATSHRPVD

SEQ ID NO: 192426 - protein, 395 aa, unidentified
MRYAGIDIASQTHVVAVVDEAEEVLVRPTPFGEDAAGYAKLFETLGPPADVIVAMEATGHYWRNVAADLLARGFAVALINPLRTSRFAGEDLQRTKTDAIDALGIARFARQKRPAPTRLPDSATEELKELVRLRDRLVQDFGDRVRQLHRLVDLGFPEFTRFVKTLDSELATAVLHEHPTAQAFVGVSVKRLAKLCYDGRHKVGRELAHDLVRAAESSVGRHHAEIYRTQVRFACEDLDVLRRRLRRLSDEIEATLERHEVGKLLTSIEGVGPQTAARLVAELGDIAQFKDAGAIASYIGIVPGLKLSGLKTSKRAPIVGVGNVRLRTALWMPVLTAVRKNPWLRAFYERLRAKGKPAKVALVAAMRKLLVAVHWIAKHRRPFQAVMPKHAEALA

SEQ ID NO: 192427 - protein, 339 aa, unidentified
MTIVGCDFHPGWQQVAVFDAETGEIRELKLENGNGEAERFYRRLSSPALIGFEACGNTQWFEDLLDRLGHEVWIGDAAAIRASYVRKQKTDRRDAAHILKLLIEGRFPRLWRPSAQERDLRQLLIHRHKLVGIRARVKNGLQHLMLNRGVQMKRKLWSEAGQKALRALPLEGWAAQRRQDLLHLLSGLDPQIRQLDVAIERAAQENPRAQLLMTQPGVGPITALAYVLTMGDVNRFQRGKQVASYLGLIPSEHSSSQRRRLGSISKQGNSFMRMLLVESAQTVNRLDEGFRKQYQHRCHRMARGVAKVAAARRLAVRLFWMLRTNTAYPEIAHIESSPR

SEQ ID NO: 192428 - protein, 352 aa, unidentified
MNYVGIDWAYGRAAWCAKTESGEIKGEGLIPADEDGLARLVLELGTEVKGCVEMMSGAVWVRDQLQLAGWQMEVAHARKVRDVAPLACKTDKVDARVLAELCRRDLVPALWVPSEEDRAIRELLRRRSHLVKSRTSHRNRIFGLLTQFGLRISLKRLREPDASELLTRRGVPAVWRVSIASHLEEIDHLDRLVASIDREIGPIASADPRARLLATIPGVGPLIGLTFASEIGEVSRFSTPSKLVGYAGLAPRVSQSGERSATGRLSKAGSRTLRWAAVEAANQAWRLSNPFHEHYLRVASRHGKNPAKSAVARKLLITSWHMLSRGQVFQPRHPSGAENTTAPASSLRFLAA

SEQ ID NO: 192429 - protein, 420 aa, unidentified
MKAYNVNDFAALIGIDWADKKHDICEHPVDSEKYHYSIIKSKAEALHEWAMNLKKRYPNQQIAVVCELKKGPLIYALAKYSHLTLFTINPSTVAKYRKAFTPSGAKDDPSDALIQVEILTLHMDKLSVIEPESAAMRSLTQLVEYRRNLVQDSVDLSNKITASLKNYYPQALEWFKEKDTFIFCDFISKWPSLAHAKRAKKQTLLDFFNSHNSHYAHVNEARILGIKSAMELTEDTGVIEPNQLLVGVLIAQFKVLLKGIQSLNKVIKKAYKAQDDNVIFDSLPGAGQQFSPRLLVAFGSKRDRYNDASELQKYAGIAPVIERSGKKMWTHWRYSCPTFLRQTFVEWAGFSIRYSFWAKAYYEQQKSKGKPHNSIIRSLAFKWIRIVFRCWKTNTPYDESKYLEALKRRGSPLLKFAINS

SEQ ID NO: 192430 - protein, 338 aa, unidentified
MDTSKHIFQLYGVDGAEQPVLRKRLRRKEVLAFFAKLPPTVIGMEACGASHYWARELQQLGHTVKLIAPQHVKPYIKRNKNDGRDAEGLCEAMSRPTMQFVPVKTQEQQAALMLAGMRERLIVRRTQLSNAIRGHAAEFGLTVPKGLDKIEPLLAQLAADESLPALARELFALQGRDYAQLQVELKTVEVRLLAWHRAHADSRRLAEIPGIGPISATTLVMKTPYPRTFPSGRHFAAWLGLTPKDHSTGGKIRLGKITRAGDEMLRSLLVAGATAVIQQVRRGRGHPSPWLIALLKRKPPKLAAVALANKTARIAWKLMVTGENYDGARMPGASALAA

SEQ ID NO: 192431 - protein, 412 aa, unidentified
MRRVIGIDTHRTFGEVVFWEEGRLRRAARVDMTRTALEGFGKSLLATDEVVIEATGNCMAVSRVLSPFVKRVVIANPLQVKAIAHAHVKTDKIDAGTLANLYAAGYLPEVWMPDAATERNRRLNARRYQLVRHRTRIKNEVHAILYAHLIPKCPHADLFGRLGRAWLARQPLPDDERAAIERHIRELDRLSDDLEVLDREIAEGALDDGAINRLLTITGVNLTVAAGLVAAIGNIARFKSPQKLVSYFGLNPRVRQSGLGPAHHGRISKVGRSHARAMLVEAAWAAAKTPGPLHAFFVRIRAKRGHQVAAVAVARKLAVLVWHMLTKETDYLWARPSLVAHKMRGMELQAGKPQKKGNSRGPAYAYNVKELRNREMRVAEQAQKSYQHFVEAWRPRPPKGQARERLNPARNE

SEQ ID NO: 192432 - protein, 360 aa, unidentified
MQTQSTELDFKGQNIFVGIDVHLKSWTVTILTEALTHKTFTQPACADTLCNYLNRNFPGGDYNSVYEAGFSGFWTHYKLKEMGINNIIVNPADVPTSQKEQLQKDDPTDSRKLARSLRSGVLRAIYIPSPSTLEDRSLIRIRATLVKDMTRFKQRIKSFLYFYGVPFPPQFEKSSSHWSKRFMNWLNEKVSMQHESGDQTLKILVQEAEQHRKLLLDVLRKVRLLSLSEKYAGNIKLLRTIPGIGLITAITFLTEIENIERFVNTDHLAGFVGLVPNYHSSGEKNNNGEMTFRGQKSLRRSLIESSWFAVRFDPALTMSFNGYIKRMEPNKAIIKITRKLLNRIYFVLKNKMEYVSGVVK

SEQ ID NO: 192433 - protein, 418 aa, unidentified
MKPLANFEFTAFIGLDWADTKHDICIQPAGSLSREFDRIAHQPEQIERWAHEVHRRFGGSIAVMLELSKGPIVSALQKHDFFVLFPINPSTLAKYREAFKPSRAKDDPTDAELAIDLVLRHQDRFKPLQPQSTRMRTLAHLVEKRRRLVDDRRRFANRLISALKAYYPQAVEWFSHKETFVFCAFITRWPTLQQVKRARRSTLERFFREHRVRRPHLIEMRIQAIRAATALTDDPAVINPGILETLALARQLETTLELIREFDQAIAKLVPKLPDYALFAFLPGAGIVLTPRLLTAFGEDRNRFHSAAEVQQYCGIAPVTERSGQKSWVHWRWQCSKFVRQTFVEWAAKTVHSSFWAGAYYHQQRQKGATHQMAVRALALKWIRILYRCWKSRTPYNETVYLQALQNRGSNLIPKQIT

SEQ ID NO: 192434 - protein, 400 aa, unidentified
MSGLQGSFDGFVGIDVSKDKFDACGITGGEVKLFQFSATMDRKGFEKLKGHLAAASISSILIGMESTASYHVNLFSYLVCEGYKVLLINPLLISNYVKMQLRKTKTDKKDAVVIAEFLLTNGDTLIQRATPSLISDLRDLSRQRESLVDEMTALKIEIKRLLNITFPELEHMVGIFTKSILKLLQQYPSAFALRDADLGQLSRMLIADSYGRKREAFAAELIKAAHSSISSKSPAKEMILKQKIALLLHLEDALQEITSMLIEMSRKLMEEDINIMTSIRGIGDKTAANFLVEMGGDINQFERSGKIIAMAGLDPAVYQSGKHEGRGRITKRGNRHLRRVIWMMTTRVIHYSDIFKAYYLKRRKEGLPYKMAVLATAHKLIRVVYAMLKQRTTFCPVVNS

SEQ ID NO: 192435 - protein, 401 aa, unidentified
MNPVIGLDVSKGESHAQAFSDRGMPYGKTFRFEHNLEGLASFLRFAQNVESFAGHRPAIVLEATGHYHSPVIQFLDDHQYLYIVINPLISHQAKKMNLRKVKTDVADAYQLGEMFFKEELEPYKKRGQYLMNLRYLTRQHESLTEMYVQVKLQFQAVLDQVFPEYHGVFGDLYSKVSLRFLAQYPTSQSVLAMSEENVTASIQRLVGHVSSNRWSLERAQKLMAAAERNPFRETAFPSHLISLELFINLLLQYQEHLAKLDKSIEILAEELLEYDLIQSIPGIGTKIAATILAEIGEIDRFDHPKKLVAFAGIDPSVFSSGKFTATRNKITKRGSRRLRTALYQAVRCGLKGSRNKKIRAYYDKKRSEGKLFKVAVIACVNRLIHWIYAILTKKEPFRLTE

SEQ ID NO: 192436 - protein, 403 aa, unidentified
MVKYHVGVDVGKDRHHVCIRDLSKDMYCKTFSITNGRSGFMELIAALEKLSPKKSDFLIGVEACSYALNLSYFLMAIGFDLVEVNPFRAGQFRKAQGKKAKTDKIDARTIAAILLLGDHKPLSIPDPILDNLKELTRFRVDLINEKSTMIIHLREALSVLFPEYEKVFRQLDSAGSLALLAAYPGPEHMIGAGEEAVGKTLSLASPRRMSRGMARRIIEAAKRTVGVVQKQPSLGVKISVLAKTIADLQSTIRDLDKQITTLFNSLPCKPRGFPVGRAPSLATIISEIGDIHRYPTLKKFLSHLGWCPQSFQTGNYHLKHPKMSHAGNKYVRRLIWMLSIFAIQFVPRYREYFQRRVSEGKAKMHIIVAVGRKLLSALYAMLKSGMAYDPNWEVNSRPALARR

SEQ ID NO: 192437 - protein, 347 aa, unidentified
MRFYTKQHLYYCGIDLHARTMYVCVLDQQGEILTHRNMPCTPELFLKAIAPYREDIAVAVECIFTWYWLADLCAKENIPFVLGHALYMKAIHGGKAKNDKIDAHKIAVLLRGGMLPMAYVYPALMRSTRDLLRRRMHLMRKRSELLAHIQNTNSQYNLPEIGKKIAYKANREGVAERFEEPSVRKSMEMDLSLIDHYDKLLTEVELYITQTAKVHDVNAFHRLRSVPGIGKILALVVLFEIHDINRFPTVQDFVSYARLVKCAKESAGKRHGTSGKKIGNVHLKWAFSEASVLFLRGNPAGQRYVEKLTAKHGKAKALSILAHKLGRAVYYMLKREKAFAMNQFFGS

SEQ ID NO: 192438 - protein, 329 aa, unidentified
MEQEYIGIDLHKAFFQVCVVNGRGERQWEQRWPTTDEGIAGLVARCGASSRVAVEASSPTWAFVDRIVDHVGAVHVVDSRKTRLKAGYAAKTDRLDAQRLADALRRDSVVGIYYPPPPIRDLRELCRYRCHLARTQASLKQRIHALLLRQGVREPRVSKLFGKRGTQWLDTLRVSGWAGASLIGLRQLLADVRTQLVPVLATIRATAVADPIARALDARPGFGPVFSVTLRAEVGIIARFPDGPHLASYAGLVPRVERSGGRQWSGRITKAGSPWLRWVLIEAAIHQLRRPDDFGRWARQLAVRKGILKARVAIARALCDELFDVWPRA

SEQ ID NO: 192439 - protein, 363 aa, unidentified
MKNYIFVGCDSHEKTLVNKIAHNDGPLETKRFSARRAGRQKLIENLRERSRQAGGAQVVVAYEASSHGFILCDELRAAGFLCHVLAPTKIERSIKQKRNKNDDRDAERLLDIVRGHYLAATKMPAVWVADLQTRDDREPVRARQDLSEKQTTVKTQVQMLLKRQGIEKPEGVGTSWTKRYRLWLEALSGEGPAIQSGMRQTLKSLLRQLQFLEHEIEQMDQAMRELANTPRRKPIVDELMKEKGVGLATAMKYVTDIGDFKRFSRGRQIGAFFGLVPSTAESGENNDRKGHITREGSPSARKVLCQATWSRVQHDKQEREVYRRLVARNPKKKKIALVACMRRLAVRLWHIGFQAQLKMEAAG

SEQ ID NO: 192440 - protein, 352 aa, unidentified
MKSYFGCDAHKKYSVFASINEAGHRGSCIRVENDRYQFSRFLQTLPPGSPIAVETVGNWYWMIDEMEKARHEPRLTHAGKAKLMMGQINKTDKLDANGLALLLRNGTLPSVWIPPRELRDQRELPRTRMALVRVRTMLKNRIHATLAKYAIQIKEVSDIFGAQGRKLMENRLSELPQQTRRSVEEQLKLLDQVGEHVKECEKQIEEIIEETPAMRQLMTIPGVGSILAIVIAMEIGQIDRFPRAENLASYAGTVPRIKESGGKIRYGRVRPDVNRYLKWALIEAANVVVLNQNRWPESHVVQLYRRIKQRRGHAKAVVAVARHLAEATYWMLKKNEPYKEPKKNKTVSSTRK

SEQ ID NO: 192441 - protein, 430 aa, unidentified
MNESVSEQPLSPKVAAFVGIDWADQKHDVVLRSVGDPAKSEYQIIKSEINALADWIAQMHERFGAKGKVLVCLEQSRGALIYQLMAYELFELYPINPSQLANYRKTFFSSGAKDDRPDADLLSELVMCHRDRLKAWKPDDQLTRELTSLNEGRRNAVDRRTELANEIKSQLKLYFPVALQILENDITTALAADLLVQWPTLAELQKVSPGKLRKFFYGHNSRQEKKILERLALIKEAKPLTTDAAIIRPTALRVKLLAQQLKSLLPFIAEYERRIAELFGSHPDRFLFDNLPGAGPALAPRLLTAFGTDRDRFEVAGDLLNLSGIGPVRIASGKKTGKSASVHCRRACPKFLRQSFHEFGECSIRYCPWAQACYQAQRDRGKGHHAAVRAVTFKWIRILFACWKQRIPYDPDRYLKALQNRGSEYAQTAA

SEQ ID NO: 192442 - protein, 400 aa, unidentified
MPLAQRVWAGIDAGKRHHHLVVVDADGRKLLSRRIANDEPVLNEVVATVRALAEQVVWAIDLADGPAALMIALLLGQRQQVLYLPGVAVNRVTAAYRGEGKTDAKDAAIIADQARMRRDLRELRLADPTVAELKMLTAHRADVAADRTRAINRLRAHLLCIFPALERALDFTNRGPLVLVSRFQTPAAVLSIEETDLVAWLRERKARPAAKLAAAARRAALTQGTQVVGEETAARIISSLAATVLDLDRQLATLDTDISERFDAHRLAPVITSMVGIGPLLGAELVAATGGSLEGFDSADHLAGYAGLAPAPRDSGRRTGNLHRPKHFNRQLQRVFYTSALISIQRSPSSRSYYDRKRTEGKRHTQAVLALARRRVNVLWAMVRDDRPYQEPQLPSALAA

SEQ ID NO: 192443 - protein, 338 aa, unidentified
MGIVYVGIDLAKNVFAVHGVDEHGKASLVRSSVPRGRLNALIASLAPCTIGMEACSGAHHWARLFVAAGHKVRLMAPKFVAPYRLSGKRGKNDAADAAAICEALQRPNMRFVPIKSVEQQAMLTLHRVRQEFIEQRTGLINRMRGLLSEFGIVLPLKASTVRLQAGATLEELPGWARLAVGDCLDELHRLDERIAEYERHLAQQARQDERAQRLMQLNGVGQTTATALVAAVGSAHEFKCGRQLAAWLGLVPGQYSSGGKTRLGRITKAGDSYLRSLLVLGARAVLNAAKGRTDALSSWALAVQERRGYWRAVVAIAAKNARMAWAVLARGERFVMPA

SEQ ID NO: 192444 - protein, 316 aa, unidentified
MDVLYQSCAGIDVHQANIVVCILHGPLTSTRPKREMATFDTTTKGLRACHDFLSQFHVEAVGMESTGVYWRPVWHALCDDFKLILAQPAHMKAIPGQKTDKKDAHWIAKLTRIGLLPRSFVPDEAIQELRELTRQRKHYVESRNRETNRIHKILQSGGIKLTTYIEDIMGLSGRNLLQLLVDGTPITPRIVHQSVYTSLKKKVPQLLEALDGYFSDHHRFMLKQSLEIYDFYQKQIELLEERMNVYLSQYENHVEILDSIPGIDVITASVIISEVGVDMSQFPTAGHLASWAGLCPGNNESAGKNEVPRFDTEIHI

SEQ ID NO: 192445 - protein, 400 aa, unidentified
MNAVGIDVSKGKSTVAVLRPFGEVVASPFDVIHNDNDLKQLVKLIRSLPGESKVVMEYTGTYFEPIAQFLHNNGIFVSVVNALLVHDYGGNSLRKVKTDKKDALKLASYALDRWTELDEYVPADEQRKILKLLNRQYNQSIKIQTTMKNNLISLTDSVFPGINRLFTSLERQSDGHEKWVDFLHAFPHKDCVAKLYLSAFKAKYKSWCSRNKYRYSESKAEKIHSYAKSVIAVLPLNESVKLIVTQVVSQLNTILETAFSIRTEMNRIASSLPEYDTVMSMFGVGKVYGPQLIAEIGDTRRFRNRRAITAFAGLDAPPYQSGQFDVSSRHISKRGSAALRKVLFQITEVFILSKPENEPVYQFIIKKRSEGKHYYSYRIAAANKFLRIYYAKVNQILNAT

SEQ ID NO: 192446 - protein, 406 aa, unidentified
MIFVGVDWAEAHHDVCVEDEDGKRLGKARLPEGVEGIARFHDLVGDHVEEPGEVVIGIETDRGLFVTALVAAGYQVFAVNPMSTSRYRDRHSSSGAKSDPGDAKVLADMVRTDRHNHRLVAADTETVQAVKVLARAHQSMVWSRMRQANQLRSTLREFYPAALVAFDDLTSGDALEVLRIAPTPELGKALSRSKIAAALRRGGRQRRVDDRAVEIQGALRSNQLGMPSAVSTAMGTSVMASVAVIATLVAQIKALAEELEAGFEKHPDAEVIRSLPGLGIILGARVLGEFGDEPNRYCTAKSRKNYAGTSPITRASGTKRVVLARYARNQRLADAVYLWAFAAMNASPGARGLYDTRRAAGDTHHAALRALGNRLVGILHGCLEHHTAYDESVAWGHRIAPLADVA

SEQ ID NO: 192447 - protein, 409 aa, unidentified
MATDIPNIIVGVDTHSDTHYVAIIDEHGKHLAAEEFLAVGSGYRKILSFITHFGLVIGVGVEGTGSYGAELSRVLRTAGLPVHEVNRPNRQARRLRGKSDPLDAYQAAESVLAERGTSTPKTKDGPVECLRVLRGARSSAMKARTIAINQIKGILVSAPEQVRSRFRGLTSAQLIPALERSRPMGNLTAPDTATALTLKKLAARYQFLEREILDTDKALAEIIRDCAPLLRDVPGVGIEVASQLLVTVGDNPERIATEAQFAALVGVAPIPASSGKTSRHRLSRGGGRAAKAAIHHVVVSRLATDSRTREYAARRTAQGKTKKEIMRCLKRYVARELYRQLTNPHAAPSITDLRITREDLHITLREAAGHFNTWPGTLSRIERGRSHDDNLASQFRDWLHEQKETQNIN

SEQ ID NO: 192448 - protein, 367 aa, unidentified
MKKLVYIGLDVHRDTIVIAVARSGREAAMQLATIAHDALALIKRLEDVAPRSLLRICYEAGPTGYGLARRLNESGMCCVVVAPSLVPVQQGCRIKTDRRDAVKLAHFLRSGDLVEVSVPAAQNEAMRDLERAREDAVIAQRIARQQLSKFFLRHGRAWSGTTSWTSAHWLWIGHQEFNEEGLRRVRDDYVTAIVQATARIDRLTHDIEELVEHWALGPLVKALQALRGVRLVTATVLAAEIGDFARFRSPRQLMAYLGLVPSEHSSGKSRRQGGITRTGNRHARWILIEAAWSYRLRPKNSRTIEARRRQVAVGVRSIAEKAEQRLYRRYLRLTNRGKKSQEAVTAVARELVGFVWAIAREDKLLAA

SEQ ID NO: 192449 - protein, 428 aa, unidentified
MAAVSIPIVDWLDKPQSFHFAQGYEDRFLWNTVVANDTRSDAYMIYLGIDVAKNSHVAAAMSSEGEVLLMPFANSADGFTLLREKLNNLPKLPLLVGLESTAHYGENLICFLCGNGYHVAMINPLQTAAIRKSAIRKTKTDKVDAFVIAKALMMEGYTELQQSDIQILKLKGLCKTRQNLILMRTRCKIQLGSFVDQLFPELNRFFRSGLHINVSYTLLKAHPRPAEVGALHLTYLSNLLRKASRGKYKKEDAIRLRELARNSIGTDNPALALQIRQAVSQIELFSAQLKQVESEISTIMDSLDSPIMTVPGIGYLNGAMILSCIGNIQRFSSPAKLLAYAGLDPAVVQSGNFSAKSTRMSKRGNSMLRYALINASHNVVRNNETFAQYYNSKIAQGKSHYCALGHTAHKLIRVIFALLTNNIAFDLA

SEQ ID NO: 192450 - protein, 219 aa, unidentified
MNRTRNALINQRIEKISCQHAVVGIDIAKDKHVAQVTDFRNRVLTPRAFPFSNSGEGFLRFQRWLEDVQAKHHLPAVLIGMEPTGHYWFNLANWLLEQSMEVVLVNPVLTHRNKENRDNSPSKNDSKDSMGLGMIAQAALLGFGGDLSRYQHGRQLLRRAGLNLAECTSGTFKGKIKISKRGDRALRKHLYLAMLQLVRHHADFASGAPAGALYCGGAS

SEQ ID NO: 192451 - protein, 443 aa, unidentified
MSNLAMLDPRAAFVDVGSEKMHVSIAGGPPAVFGTVTSQLHALRHYLVEHQVRSVAMEATGVYWLPLYGVLEASGMEVIMVDGRQARNLPGRKTDMKDCQWGATLHAHGLLRAGFVPPAHVRRLQDYLRLRGDHIVAAAGHVQHMQKALERMNIKLHDVISSLTGASGLAVIRAILAGERDPQALLGLCHRQIRTVKAERVVESLRGDWAEEHLFALAQAVQSWDHYQGLIAACDRQIADILRQMPDANTPPPAASTKKATPRRQPGVNAPDIADLRDMLEQICGGKDLTILPAHTEYSVLQIIGEVGTDLTKWRTEKHFTSWVGLAPGSAQSGKRNGRVKRRRNRAGRIFCVMARSLARSKYIAFGGFYRRMAARRGGLVANKALARKLAALFWRAMVKGLDFVEMGVAQYEAKVLETKHSLLRKLARQLGQQVVPKPIAVA

SEQ ID NO: 192452 - protein, 466 aa, unidentified
MSKRRKPGKQRNPSGPASLPVVRARTAGIDIGSAEHWVCGPARADGKPNVRVFPTTTDQLNELAEWLVEQQVESVAMESTYVYWIPVYELLESRGLEVVLVNARQLHNVPGRKTDFSDCQWIQLLHSHGLLRGSFRPGEAITRLRAMQRQLANLVAERSRYVQWMQKSLDQMNVQVHRAVTDLTGTTGMAIVRAIVAGERDPKRLAVHRDPRCRKSVHEIAKYLAGTWRDEHLFNLASALRLFDTIEQEVAAYEARLVKELEALQPPERGDEPVPPHPNPAKEKAIRGRGEQPVRATLWRFAGVDLTRIDGISTGTARVILTEVGTDLSAFPSEHHFVSWLRLCPRTPISGGKPLKKRRNALGSNRIAGALRMAATAVQRSKTALGAFYRRIARHKGAAVAVFATARKLAQLTFRMLRFGQDYVDIGEQAYESQFAIRRLAYLNEAAKSMGYALVSQPAGQEVAVG

SEQ ID NO: 192453 - protein, 398 aa, unidentified
MTESSDYEPVQVFIGVDVGKDTHHAVAINRSGKRLFDKALPNDENKLRSLISDLKQHGQILLVVDQPATIGALPVAVARSEGVLVGYLPGLAMRRIADLHAGEAKTDARDAAIIAEAARTLPHALRTLKLADEQIAELSMLCGFDDDLAAQTTQASNRIRGLLTQIHPALERVLGPRLDHPAVLDLLQRYPSPEKLASLGEKKLAAQLCKLAPRLGKRLAADIAQALAEQTVVVPGTNAAAVVLPRLALQLITLRKQRDEVALAVEQRVLAHPLYPVLTSMPGVGVRTAARLLTEVACRAFASVAHLAAYAGLAPVTRRSGSSIRGEHPSRRGNKALKRALFLSAFAALRDPLSRAYYTRKMSQGKRHNQALIALARRRCDVLFAMMRDGTFYTPQAS

SEQ ID NO: 192454 - protein, 452 aa, unidentified
MARHGNKFDEVQRYVAGVDLAGNADHYVCGPRKDDGTRDIEHFGTTTNELLRMVAWMKERKVVSAAMESTSVYWIPVYDTLEAEGIEVVLVDTRTVKMVPGRKSDVKDCQWLQRLHSCGLLRGAFRPPETFNAVRSVIREKGNVLQMRSQSILSIQKALDQMNIRLHHAVSDIDGVTGMKILGAIVAGERNPRKLATLRDRRCKKSETEIAEELTGNWREEHLFNLKQAYETLCFLDGRIADYDTQIRAMYAKIAEAFPPVDPPPDGTGPKKQKDKEDSKAKADIARICGGFDMTKIDGIGYDNAAAILSELGPKLDAFPTESHFVSYIGVAPALGKSAGKNVSSRKKHKNTSRVGIVLKMAASTLSRSESSLGARFRCVRSRTCSRTAIKDVAREMAKRIYRGIKYGQAYIDEGERAYMERTRERTIKSMKKKISKLGISAEELGIYAVAV

SEQ ID NO: 192455 - protein, 338 aa, unidentified
MNTIALIGIDLGKHSFHVHCQEQSGKALLRKKFTRTKLMEFLADCSPATVVMEACAGAHFMARRIADLGHEAKLISPQFVRPFVKSNKNDFIDAEAICEAASRPSMRFVQSRTEAQQAMRALHRVRESLVRDKVKTTNQMQAFLLGFLLGFGISMPKGIAVIKRLSTVLAEHPLPPYLAQILLRLQAHYHYLVGQITEIETALSQEIIQDDTGQRLMTIPGIGPITASVLSSQLGDGKQYSRSRDFAASTGLVPRQYSTGGRTTLLGISKRGNKTLRQLLVLCARSFMQQIEHRQGKLADWVKQQLERKHSNIVACALANKLARIAWAITTQHTVFVA

SEQ ID NO: 192456 - protein, 341 aa, unidentified
MRYFGVDLHTNSFTVCIRNGSGKEKLETYRMSELKRFLHTLKDTDVLAVEATGNTRFFVDMVKPYVKDAIVVDPNKFKVIKSSIKKTDKNDARLLSWFLSKDMLPEARLKDKKQAQISSLVGTRDKLVKLRTTLFNKIHNILNHHGIKSNKEAFSSEKGLDKVLAMDFDMIVKVELKVLVEQIRSLTDGIRKLDVQIKEAGSNMKGHENLTSIKGIGAKSATVLLSVIGDIRDFADSDKLASYFGIVPRVSNSNETEHHSRITKRGSKIGRTTLVQCTLIAKRYSPYLQKFYEKIRRRRGTGKAIIATARKLLGIIYETLKNNWIFEDFPNFVLANSCVKK

SEQ ID NO: 192457 - protein, 449 aa, unidentified
MSNHKGSPRGLPVVHERAAGIDVGSRFHVVAVGAELCEQSVQTFQAFTNDLRRMADWLVGMGITTVAMESTGVYWVPVYEMLESREIEVILANAREARSVPGRKSDVSDAQWLQRLHTCGLLRASFRPGRDIAALRTYLRLRERHLDYAAAHIQHMHKALTFMNLQLHHVVADVTGVTGMKIIRAIVGGQRDPQVLAQMRDVRCKASEETVRAALVGNYQPEHVFALAQALALYDFYQARVDECDERIQEVLAMLVAQKAPPSAPLPKARHRTAQPNAISFDVRPILYQLAGVDVTQIHGLGPYVALRLIAECGTDLSRWRSAKHFTSWLTLSPGSKISGGRVLSAHTRKTSNRVVAHLRLAAVTVGRTDTALGAFYRRLSARVGKAKAVTATARKIAVLFYNAMRFGMDYQDPGAAHYEQKYRERVIKQLHRRAAQFGFTLQEAMSVS

SEQ ID NO: 192458 - protein, 361 aa, unidentified
MMTTTMKTIGVDLHKTSLTATVLDPSGGVLERKDIPTKCRRQIADYFLSHGPDVQVVVESVGFYHWFWDTLKPKVRHLHLADPAGVRACAGRLTKTDRNDSLLLANLLREDRLPMAYVPEEPVRALRELCRHRHRLARQLALARRQLRWIALKNNLPGPTTLSSDRAQKWLLSQDSKLSPVHRLSSRQLLDQIISLERQLADTESVLKDSVLSHPDLAPTLALIQSVPGVGFITALTILCECGDITRFDNIDQLSAYAGLCPRVTQSGESAHHGHISKQGPPVLRWVLQQAAWVAIRCDPNARRLYSRIARRAGNKKAATALARKLLSYAWSVCRRGQPFVWPSSDTPTATPAVPVWSYDI

SEQ ID NO: 192459 - protein, 322 aa, unidentified
MSQPNPLCVGIDVSKATLDIAASSDVAQFTVSNDSDGFNAIITGLRRHSVALVLMEATGGLEVAVACSLQAEGFEVAVVNPRQARDFARAMGYLAKTDRIDARVLTQMAEVINRHPERKRFIRALPDAERQALAAMVVRRRQLIAMLVAEGNRLHPFHPQNKKSINTIIKALEDELVRLEKEMDSHIRNHFKEIAERLSSIKGVGTMTVSAMLAEIPELGTLSRREISALIGVAPVNRDSGTMRGRRTIFGGRAGVRSALYMAALVATRFNPVIKTFYVRLLAAGKAKKVALVACMRKLLTILNAMLRKNEEWDESYHHVAP

SEQ ID NO: 192460 - protein, 352 aa, unidentified
MQSLSVGCDAHKRYSQLEAQDPKGKVLNRVRIDHAPGAISSFFSRLPTGTPVALESVGNWYWIADEIEASGCVPLLTNPGKAKLLMGNVNKTDKLDAGGLATLHRLGSLPTVWMPPAGLRDQRELPRTRMALTRMRTSLKNRIHSILAKYALSPEDGCQLFSQRGRAWLGSAVSLIPPETARCLAQHLQLLDFISLQIESLEDRIRSQISLTPSMQLLKSLPGVGDILAIVIDREVGCISRFCTASQFSSYCGTTPRVSSSGGKCRYGKMRTESNQYLKWAFIEAANAISAHHAQRGWTARHVSRLYLRIRGRKGASVAIGAVARHLAESAFWVLTKQEPYRELSKVSPRQE

SEQ ID NO: 192461 - protein, 341 aa, unidentified
MSKFIRIAIDLGKNYFQVHGLESEGGRSISRKIKRSKVHEVCSQIEPCRVGMEACGSAHYWARELTAMGHEVVLIPPAYIKPYVKRGKNDAVDAAAICEAMSRPNMRFVPVKSAEQQAVLMLHKTRDLLVKQRTMAVNALRGHLAEFGVVAAKGIGRVDELLALAKVDAALPPVARTAVTCMAQHLEALDLSIGAVDEEIAKAHRQNPVSRLLDEIPGVGTLIASATAASVSDPGVFKSGRDFAAWLGLTPRQNSSGGKERLGAITKQGNRYIRKMLVTGATSVLRVAGKRKGALADWINALRARKPERLVAVALANKLARICWAIMTTGEGFRTDTYVKA

SEQ ID NO: 192462 - protein, 412 aa, unidentified
MKDLLEISCGLDVHKEKIVACILTGPLGKPTRSEIREFSTLIPDMIALRNWIVSKNCHHVAMESTGIYWMPIYEILEDAFYGDITLLVVNARHMKNVPGKKTDMRDSEWISTLLRAGLLNGSFIPEKRIREFRDLNRYRKSVIRDITSQKNRIEKFLQSSGFRLSSFISDIFGASGRNIILHLIEHGQIDKTALDSCLKTKTRNRIDEILMSVNGTLSEHQKTFLKILMTHYDSLKEHLTEVETSLEEDMAPFTLQVEQLNSIYGISTTASCAIIAEIGIDMEPFKTAEHICSWAGLCPGNNESAGKRKSTSVTKGNPYIKSMLCEIAWVIAGKRNTYLSAWYWRIKQKKGAKKAIVALARKLLVIIYTMLKQGTLFDESCFETRRKNCEQKQLSRYIRELEKHGYHVEAQS

SEQ ID NO: 192463 - protein, 411 aa, unidentified
MDLMYPRCAGIDVHKRTAVATIGWVDEQGKRQRKTRTFGTMTAEIEQLAAWLVEHGVTHVAMESTGVYWRPVFNLLEPHVEVVLANAAHVKAVPGRKTDVRDSEWLLDLMQHGLIRGGFIPEAPIRALRELTRYRTSVIEERTRALNRIQKVLEDTNIKLASVVSDILGVSGRAMLEALVGGETDPEVLAGLARGTLRKKHDVLVQALRGRIEDHHRFLLRMLLAHVDQLTESITQLNAEIAQRLGPYAAAFDLLCTIPGIKRRVAEVVLAELGPDMGRFADARHLCSWAAICPGNHESAGKRRSGRMRHGNRWLRGILVQAAWAAIKVRGSSFGARFRRIAKRRGDKRAAIAVAHSLLTVVYHVLTRAEPYRELGGEYVDRRKPEHQARYYARRLAELGYEVTLDPITAA

SEQ ID NO: 192464 - protein, 385 aa, unidentified
MTQTVDIAAAVDYERTLVLAIEVSNESWVLAAQVPGLPHTKAKRTINPDAESLMAAIAGYRARATATGHSVERVITVYEAGWSGFWLARWIMRHGMEAYVIQPSSVPVDRRMRRAKSDGIDAELLLRTLLAWLRGEPRVCSMVPIPDEADEDARRCVRERTELISERVGLTNRIGAVLATLGVSDYNPLLRSRHRRLTELRTGLGEPLPRNAQAKIERLLARLELVLAQIAELERERDAVVEAEACDKASEMIQQLTNLRGIGVQSATVLVREAFVRRFANGKALGSYAGLASSPYSSGGIDREQGIGKAGNRRVRTVMVELAWLWTRYQPGAAQVRWFRERVGSTGRRARKIMVVALARKLLIALWRFVIDGVVPEGAILKPAA

SEQ ID NO: 192465 - protein, 348 aa, unidentified
MDKITAVGLDLAKQIIQVHAIDAAGRVVLRKVVRRERLLALLAQFPRCVVGMEACSGAHHWARELTQLGHDTRIMAAEFVRPFRKSRAAKNDANDAEAVCTAMLQPNMRFVTNKSVEQQALLCLHRVRQGLIEERTASINRLRGLLAEFGQVAPQSAPALYRMLAVLLAADTRLPGLVRRCMQDLREHVRAVEGRIAALDREIAQHAQSSESARRIAAVCGVGPNTASAMVATVGNARDYRNGRQFAAWLGLVPKQYSSAGKTKLGRITKRGDAYLRTLLIQGARSAIQAALRRAPEKRDRLSAWIVQLAQRVGYHKTLVAIANKHARIIWALLAHDAAFDRAYAGTH

SEQ ID NO: 192466 - protein, 416 aa, unidentified
MKLFVGLDVSSEKLDACFMTDDSTCSVLKEASYGNSQLGASQIKEYILEFSQKFEIESLVIGMEATSLYSFHPAMFFKEDLELNQLNLMVSVEQPNKIKKYRDIFEENKNDQIDAFYIADYFRIQRQVNSIIKEEEYLALQHLTRTRYQLIKQLVRTKQHFIENIYYKCNTLSKELKAEGGSVLSATLVTLMTEDYTMDQLAELLLEEFANLIQKLGKYRFKNPEGIAKAISKAIRSSYRLGKVHQDSVDIVLGVLAKEIRSLEKLIKDLDKAIDDLVVVLPEYQCLTSIPGIGPVYAAGILAEIGPINRFSDESKLAKYAGLYWRQNQSGNSEYENTPMAKRGNRYLRYYLVEATNSVRRYEPEYHAYYKKKYAETPKHKHKRAIVLTARKFTRLVDTLLRNHQLYMPPRSVIDK

SEQ ID NO: 192467 - protein, 332 aa, unidentified
MGDQQVNNIGIDVDSVNLVCRIRRNGKDFPQMIFTNNAAGHQKLIRWATRRRKPARVCMEATGVYSLPLALALDNAPNIEVMVVNPKAIKNFATASMQRGKTDSMDAATILSFLERMPFQPWHASATELLELQHICRRIVQLNAEVSRERNRHLAALRVGPHGRIVANDTSVNMKHLQRRIDLLEQAALDLINNAPVLADKLATITSATGIARKTGPRILAELLVLPHDMLAPQWVAHAGLDPKPHQSGTSTNRPGRISKAGNRYLRDALYFPALVASRRDPNVKAYYEKLIERGKKPKQALVAVMRKLLLAIWAMLSNDQAWDGNKFYKLA

SEQ ID NO: 192468 - protein, 453 aa, unidentified
MARKHKKDSKANNAMLPVMRPDAGGIDIGATEIFVAVPADRAAENVRSFPTFTQDLYALADWLEQCGLKTVAMESTGVYWIPLFQILEDRGLEVCLVNARHVKNVPGRRTDVCDCQWLQFLHSVGLLRASYRPEQEVCAIRSLLRHRESLVQMAATHVHHMQKALDQMNLQLHHVISDVTGQTGLAIVEAILAGERNPYVLAKLRNDRIKASEAVIAKSLVGDYRPEHLFTLRQSLVAYHHYGKLIDGCDREIRRCLEEFKPPHLLDAAEGGNQKSQSMTASPDGVLRSELNRVFGIDLTQIPGIRVGIAQTLFGEIGPDFTKFRSASAFASWMGLCPDNEISGGKVLWVGTRKVKCRAATALRLAAQSLHHSKSALGDFYRRMRAKLGAPKAITAAAHKLARIIFHLVTTGQEFNDSRFAADQLRYQKRQEAKLRAKAKALGFQLIPIEQTG

SEQ ID NO: 192469 - protein, 376 aa, unidentified
MQAVQKQAYEAGTVLYMAMELSNSKWKLGFSNGQRIRRKSIEARDRLRLVQEVDLAKQKLGLEREARVAVCFEAGRDGHWIYRWLSAEGFEVLEIDSSSIETPRGRKHVKTDRVDVEKLLDLLLRYCLGFRRAFRVVRVPSEEAEAGQRLHREDEYLLRQRLRVSNRIKSLLVTQGVVEVSLKRGFEAWLEAVQSWDGSDLSSALQDELRRLYAHYELISTQMAEVAQAYQQELLSDTAVADKRRRLEQLKSIGPKTSRVLSAEVFAWRVFRNGKQVGGMSGLTPTPSHSGDVEREQGISKAGNRRVRRVMIELAWLWLQWQPDSALSQWFNRRFARGGKRMRRIGIVALARKLLVALWRYVEWGVVPEGAVLKAV

SEQ ID NO: 192470 - protein, 355 aa, unidentified
MCVNKTGSIEDLAVVGIDIGKDTFHLVGFDCSGQLVLRKQIKRLALEATFEKLPQCVVGMEACLSAHFVSRTLRRMGFEPRIIPAIYVKPFNKGQKNDYNDAEAIAEAALRPNLRTVTEKSQDQLDLQALHRVRARLVSRRTATINQIRAFLIERGITVRSGLRALKNSFETILEQRRDEISPRMRGILIGLYGDWLWLDKRIEDVSDEIEGISRTEENCANIMTIPGIGPMISTAMVAAVGKGEAFDRGRDFAAWVGLVPRQFSTGGRTILGRITKRGSRYLRMLFVQAAKVIMMRPHRWSDFSFGPWLTEAVARMPRNKAAIALANKLARTAWSLLRHGTRFDASQDAAMEAI

SEQ ID NO: 192471 - protein, 354 aa, unidentified
MQNDRQSSETVILGVDTHLDIHVGAVISQAGKLLGTHIIQTNQAGYLELLDWARSFGSLERAGIEGTGTYGAALTRYLIKNGIYVVEVNRPDRSKRRLEGKSDPLNAENAARTVLSGSSKAIPKMQSGACEALRIISVARRSTVKARTQAINQLRALLVSAPQDVRDKLWKSKPHECVTTCINSEVSEHSPLRIALCSTLRSLAKRWMALTEELNELDESLDKLTRKYASNLRSQFGVGPQTAATLLAVAGDNPERLKNEAALASLCGVNPLPASSGKTVRHRLNRGGSREANNALWTIALVRMRSDPRTRIYVDRRTGEGLSTKEILRCLKRYIVRELYPLILSDLAYANRRS

SEQ ID NO: 192472 - protein, 347 aa, unidentified
MEYIGIDVHKNQSQICILSEEGEITQQRIRTERKRLEEVLGGHWGCRILLEASTESEWVARCLEAFGHEVIVADPNYAPMYGQRNRRVKTDRRDAEALAIACRMGTYRQAHRVSDEQRHRRAVLSAREALVRTRVRYIALVRALLRRQGYRVPTGTSASFGIRIDKLQLPGEMDSEIGPLLTILGELNRQLEECDQQVEEMVGQDESVQRLCTVPGVGILTATAFVSVVDEVGRFQGAHQLESYLGLTPREMSSGDKQHRGAITKAGNGRMRWMLVESAWCILRSRRAETWHLRRWTERIALRRGRRVALVALARKLAGILYALLRDGTVYASLKVAQPEAQESTVR

SEQ ID NO: 192473 - protein, 403 aa, unidentified
MLFVGDDWAEDHHDVYLMDDGGARVAARRLPEGVASIAALHELIAAHAEEPGDVVVGIETDRGLWVNALSAAGYQVFAINPMAVARYRDRHRVSGAKSDAADAKLLADLVRTDRHNHRPLDGDSPEAEAVKVLARAHQSLIWARARHIRMLRSALREYYPAALQAFDDLGGRDALAVLGRAPTPAQGARLSVSKISAALKAAGRQRSIESRAQQIQAILRAEQLSAPEAVAAAFGATTRATVNIVIELNEQISDLDTTLANHFEKHPDADIYRSLPGLGVILGARVLGEFGDDPNRYTNAKSRKNYAGTSPLTIASGKKKAILARHVRNPRLYDAVDRWAFATLLNSPGARAYYDQHRAAGDTHHQALRALGNRLVGILHGCLRHQTHYNEHTAWAHRIPTAA

SEQ ID NO: 192474 - protein, 407 aa, unidentified
MDLVHPTCAGLDVHQQTVVACVRVGSGKTVTYAVRTFGTTTQELLALSDWLSTLGCTHVALESSGVYWKPVWHILDGHFELVLANAMHIRNIPGRKSDVNDATWIADLLAHGLIRSSFVPHEPIQELRDLTRTRKQLVREIAQHTLRIQKTLETANVKLTAVLADIMGGSGRAILQALVAGERNPDRLAALASDRVHASRADLVAALHGRVTAHHRFMLKLHLTQIEALETAVREVEARLGEALAPFRVAVDRLITMPGISETAARVIVAEIGFDMSRFPTAAHLVSWAGLCPRLHESAGKRLSTRIRSSNPWLKTTLVQAAWSAARKKDSYLRAQFLRLKSRRGPKKAVIAVAASMLTAAYYMLKDGVDYRDLGGDHFDRRDKAKLAKRLIARLHDLGLTVEVRAA

SEQ ID NO: 192475 - protein, 460 aa, unidentified
MNRKRSKSRVDRTMPMIHPNAAAIDVGATLHMAAVRADRATEPVRSFGTFTTDLYRLVDWFTECGVETIVMESTSVYWIPIFELLDARGFTVFLVNARDAKHVPGRKTDVSDAQWLQRLHSYGLLRASFRPKGQIAELRAYVRQRERLLEYAASHIQHMQKALTEMNLQLHHVVADITGSTGLRIIRAILAGERDPEVLACLRHYSCHSSAETIAKALTGSYRTEHLFALEQALALYDVYHEKASACDIRIEAVLKELCIHRGRGIGSVAPAPRRRHRTDQANALAFDVRAALFALLGKDITTIDGLGPYLSLKLVAECGDDLSSWPSAKHFTSWLGLAPSNKVSGGKMLSSRTRRSGGRAAALLRLAAVTVGRTDTALGAFYRRLSSRIGKAKAVTATARKVAVLFYNAVRHGMEYVDPGASSYETRYRTRVVNNLHRRAKAFGFVLQPLEPKAGAVVS

SEQ ID NO: 192476 - protein, 403 aa, unidentified
MNSVGIDISKGRSTIAVMRPFGEVVISPFEVRHTDSELSKLAKQLKSLDGETRVVMEATGNYHASVAKLLHDAGLYVSVVNAKLVHDYGNNELRRVKTDRKDAVKLANYGLDRWLTLPRYIPEEDTRLLLKNCYRQYRQYSKVQTVLKNNLISLLDTAFPNANRLFSSPIRGDGSEKWVDFVAEFWHCRCVSEKSERAFTSKYLRWCRKHGYNFREAKAHTIYAEASGHIGVMPKSETTKLLVEQAVAQLRATSTALAVLKQEMQSLASQLPEYPVVMDLFGVGPTLGPQLIAEIGDVRRFYSKKALVAYAGLDAPPNDSGDVTGRHKSMSKIGASSLRRTLFLVMSVYLQTAPLDKPVYQFMDRKRAEGKPYRVYMMASANKFLRIYYATVKAYLESLEHTA

SEQ ID NO: 192477 - protein, 355 aa, unidentified
MKLMAGMDLHSNNLMCGIVDMEGKRVFGKKLPCSLDEVLKALQPFRQGLDTIAVESTYNWYWLVDGLQAQGYRTVLANPAGIKQYSGLKHTDDTSDSFFLAELLRLGILAQGYICPARLRPIRDLLRRRGRLVSQRTSLLLSVKSLYTRTTGGSLALKELKAAEVKAVQQWFKHPADQLISGLQMGLIEQLDQSIEQIEKAILHVRDRLPCYEILHTLPGVGIILALTISLETADIGRFAHAGDYASYCRCVNSGRTSNGKGKGQNNVKCGNKYLSWAFVEAANFARRFDERCRKFHDRKTAQTNGILATKALACKLAKAGWHMMKENKPYAPERVFGPSASKPSPEPAEKTKTT

SEQ ID NO: 192478 - protein, 391 aa, unidentified
MFYIGVDIAKNNHEASIIDSNGKLVSESFSFSNSIRGLEKFQKFISSFSIDFNNCIIGMEATGHYWLSLYSFLIDLGFSCIVINPIQSDAFRKMYIRQTKNDSVDSFVIAQILRFGEFSVSHFSDEDTFALRNLSRFRFALVDEASDWKRKLVAILDQVFPEYSSLFSNIYGVTSKELLSKYPLPEDMISIPADELAKLLSKCSKGRFGIDKAKEIQEKASNSFGIKFALKSFSFQIKQIIAQISFIEEQILEIEDEISSMINSLCPVITSITGIGNVLGAAIFSEIGDISRFERANQLVAYAGLDVAVKQSGNFNATDTKISKRGSPYLRRAIWLAASVAAFKDPALSVYYQKLRQRGKAHGTAIGAVARKLTNIIFAVLRDNKSYIPNI

SEQ ID NO: 192479 - protein, 341 aa, unidentified
MGEVSAIGLDLAKNVFQLHGADASGATLFRKKLSRARLLDFLMAQPRCTVAMEACGGAHYWGREIGKLGHAVRLIAPAYVKPFVKRQKNDTADAEAICEAGQRPTMRFVAVKSEAAQSSALVFRTRDLLVRQRTQTINALRGNLAEFGMVVAQGPAHVTKLVSAVQDLTNSLPESARPILRVLIETLRSLDESITLLDVAIARRAKEDETARRLMTVPGVGPVTATALLALAPPTETFRRGRDFAAWLGLTPLQHSTGGKQKLGKTSKMGERTLRRLLIIGASAVVRWATRKGAPAGSWLAQMMARKPRMLVAVALANKMARIVWALLVKGGLYRAPVATA

SEQ ID NO: 192480 - protein, 359 aa, unidentified
MKLYMAIDLHSTNNYVAAVSEDGKAIMNKRLRNDPRVILETLAPYKEQLDGVVVESTYNWYWLVDLLMDEGYRVHLANPTAIRKYSGLKYADDKHDARWLAELLRLGILPEGYIYPKEQRPLRDLLRKRQHLMKLRTSMLLSLQNLITRNHGIKLGGSVLKREGNPLEGYLESSDDLKLAGTVSKQTLDYLTGQISTVESHILRQLKGLDVYRNLTTIPGVGKILAMTIVMETGPIDRFAKVGRYASYCRKVQSLWLSNEKTKGKGNEKSGNKYLAWAFSEAAEIARRYNPACQAFYERKRRRSNRMVAHNALAHKLARAAYHVLRDNVAFEATKLFCEKPGRNGKPESVVGIPRRLIG

SEQ ID NO: 192481 - protein, 397 aa, unidentified
MYLNIGIDIAKNVHEVCIVDDSGEQIGRFIQLKNSRKSLEKFRNKIESISKELNAKPRIGIEATGIYWYSLYSELSKYYDIQVYNPSQISGFRSVNIRVSHNDKIDSRTIANMLRFGEAPKTDYSDRRILEMREYCRFRFKLTNMKTNLKKRFRRNLHLIFPGYDMVFKDVFTKTSRGILTQSPTPDDILEMGTEKLRALMKDLSRNHINPDKTKELMDKATDTIPSEIIKESTLFELQMLLDLIETLENQIVEVDSKILSIWDTVKDRYYTQTIIGLSDLRVATICAEIGNFKNFRHPDKILAFAGLDPKVKQSGNKEIIGGPNKRGSKTLRWALGWAVQEAKRSNPVIGSCFQKKLDEGKHYNTARCAAAKKLVKIIWSVEKNKKPFQIPESFLS

SEQ ID NO: 192482 - protein, 358 aa, unidentified
MAVNEGTRRIVGGVDTHKDLHVAAVVDEQDRVIETRSFTTTRQGYRQMLAWMRAFGDLQRIGVESTGSYGAGLLRFMQQAGIAVLEVTTPDKQDRRRRGKNDDLDAQNAAHAAFAGQRTVTPRSRDGMIESLRVLMACRKTAVSARRVALQMIYNTIVCAPDGLRDQLRSLTRMQLVRTLASWRPDLTAYRDLESAYRIALKSLARRYLELHDEIADLDVMIAAIVDELAPNLVACNSIGHIGAAQLLLTAGDNPERLRSEASFASLCGVSPVPASSGKTVRHRLNRGGDRAANSALHIIAIGRLRTDQRTKDYVARRIAEGHSKLDAIRALKRYLAREVFTLITQRRREINAMRIAA

SEQ ID NO: 192483 - protein, 338 aa, unidentified
MELYAGIDLHSSNNYIGIMDQDFRRVHGRRLPNKLGSILKMLEPFRADLKGVVVESTYNWYWLADGLQEHGYVVHLANPSAIKQYEGIKQTDDRWDSFWLAQMKHLNILPEGYIYPKEERPIRDMLRRRLFFVKHRTANILSLQSMVSRNLGIRISVNDIKRLKPDDAGDLFDSPNLAFMAQNNISTIKHLTTVIKGIEKKIKPRVQLRKEFEMLTTIPGIGTILGLTIMLEVGDINRFPKVGNYSSYCRCVRSQRLSNGRKKGENNTKNGNRYLAWAYVEAAHFAMRYMPKAQKFYQKKMAKSNGAVATKALANKLARASYFVMRGREPFDESRVFK

SEQ ID NO: 192484 - protein, 375 aa, unidentified
MEVTMNTVIHIGIDVHKDSYSLSAFCLTSNRNFGESRIASKSSLVFKYVERLGKEYEGCDIVCAYEAGPTGYGLYRDLQRAGIPCVIMAPTTMPKATGNRIKNDRLDAQEIARHLAFGTYSAVHVPTPEDEAVKNFTRLRNTRKNAMKKAKQNLLSFLLRVGRNYTEGKNYWTTMHLQWLRKQKFDDLVDQETFNEYLQEVFDQQEKVKRYDMRIEELAGQESYREMVGRLCCFRGIETHTAMSIVSEIGDFSRFANAPQFSAFLGLVPSENSSGQREWRGTITKAGNTRLRLLLIEGAKATMRSSLYGQKSKRLIARQKGNSPEVIAYADRANRRLHRVYSKLVSHGVHHNKATVAVARELSCFIWGMMNDKIS

SEQ ID NO: 192485 - protein, 408 aa, unidentified
MELVHRRCAGLDVHKEEVVAGVRVVERGRLEQVTERFGTTTQELLRLGDWLEGWRIRDVVMEATGVYWKPVWHILEERFALVLVNARDARNRPGRKSDVSDAAWLAELLAFGLIRGSFVPPEPIQQVRDLTRARTQLVHRIGQGTLRVQKVLEDANIKIAGVVTDLLGASGRAILHALIEGETDPERLLARTTGRLKAPRERLLAGLYGRVTDHHRFLLGFHLGQIESDEAFLATIQTEIARVLEPFRRQFERLITIPGVSTTVATILIGEIGVDMSRFPSDGHLVSWAGLCPRMDESAGRRRSTRIRPGNPWLKTALVQSAWAAVRVKDSYLRSQFLRLRARRGPKKAIIAVAASILTAAFHMLSHDLPYHDLGAAHLDRLDKTRTARRLVRRLEHLGYSVNLTEAA

SEQ ID NO: 192486 - protein, 354 aa, unidentified
MAAVVIGIDPHKASHTAVAVDEREVMLGDVRVRATAAQSERLLAWAGRWPQRIWAVENAQGLGYLLAQQLVDAGEHVVDVQPKLAARVRLLAADASSKTDPHDARSVAIVGLRSAGLPRVVVEDHAAVMRVWIRRRRHLSRLRTKVVNQLHALLCEVVPGGFAREISARQAAVLLETVHPSSGADQARVELAAEILDDLRRVDAQLRELHKRLTAVVLASKTSVTSIVGVGSVVAAMVVGITGDVSRFRTRDHFAAYAGTAPIEVSSGPHRIFRLSRRGNRQLNHAIHMAAVTQIRNRHSDGYAYYQRKIGEGMSPKMALRALKRRITTALFNTMIRDARHQSPRRRPVGPTGT

SEQ ID NO: 192487 - protein, 329 aa, unidentified
MEGEVIAVGIDVSKKKLDVAVLFPDGRFRSKVVSNSVGGFEELRLWLGKQGVERAHVCMEATGIYWEGVAEYFFDRGFVVSVVNPFQVKAFGGSRLARAKTDRVDARLIAEFCATQRPEPWSAPAVEVRELRALVLRREALVRMRSQEENRLCVARGCVRGNIEAHIEHLDRSIREVEKEIKRHIDRYPHLRKQRDLLRSIPSFGDVSVWTVLAFFGGEDMRFRKPRQAVAFVGLDPREHTSGTTVRRKARLSKVGHCVVRRVLYFPAVTALNRTEWGIAFRRRLEGAGKPPKVIIAAMMRKLVHIAIGVLKSAQPFNPAFHYQGAHSP

SEQ ID NO: 192488 - protein, 316 aa, unidentified
MNDMIVEKFVGIDVSKSTLDVRVEPAVETMHVAYDEAGIRQIVCRLKELSPTLIVVEATGGLEVRIATELAGNKLPVAVINPRQARDFAKATGQLAKTDQVDAAVLAAFAKAIRPQARSLKDEDTRALDDMVGRRRQLIDMRVQETLRHGTAASKPLQKSLVKHIAWLDKQITEIDKDLSKRLRESDVWRTKDDLLRGIPGVGAVTTVTMLAKCPELGTLNRREIAALTGVAPLANDSGKHRGKRFIWGGRADVRAVLYMATVSAIRCNDTIKVFAERLKKAGKPPKVVIVACMRKLLTIMNSMLKNNTPWKLKNA

SEQ ID NO: 192489 - protein, 317 aa, unidentified
MTEKLTLKTFSQDPKPELLHHYLVKNFPNGIYHAAYEAGFCGYWIHNKLTALGIDSIVVNPADIPTTDKEKVNKTDKRDSNKIARSLRNGDLKGIHVSSLKTLEDRCPVRMRRTLAKDLSRNKNRIKSFLYFHGIEMPEAFNKSATHWSKRFMNWLRSIEFTESSAKKSLSLLINESQHLRLTMLDAIRGIRELAQSEEYCNLVKLLRTIPGIGTLTAMIILTEIETISRFSGFDQLCSFIGLIPSTNSSGEKEITGEITHRGNNFLMSIIIESAWIASRWDLALNKSFHDYCKRMQPNKAIVRIARKLLNRIRFVL

SEQ ID NO: 192490 - protein, 343 aa, unidentified
MRQSNKWDAIVGIDISKCTLDCYLMGQKPNLKQELHVENSIEGFDDLGRWLSSHNVDPAKALLVSEHTGRYGEHLLRWTTTEGWTHAVVKTTALEKVSPEHHRKDDRYDARLLADYGVRFSDRLRLVKAPQPAVGQLKRLQAERRKMVDRRAALKSKLTEADTHDADMSQLTVMWDQQIELLSDHIHQLEETMDQLIGRDELLKDRHQTMRTAPGIGPVLGRFWMSLFAGQPKLDARKLSSRFGFAPHGCSSGSSVKSPDRSTGYGHSEMRKLMHQAARSVANHKPHYRDYYEGKIAEGKHELVAINNIINKLIRLYCALWNNNVDYDPDYIQKNKHVWKKSA

SEQ ID NO: 192491 - protein, 341 aa, unidentified
MTTLQYFVGLDIGSEKFTAAIGTTPWKLLVRATEFANTPDGFEALLAWWQKQNYPREQTLWCMEATGVYGEALAYFLVARGHAVAVEPPLKVKRAFAPHGHKTDAVDSQQIAEYACRFSDEVKPWQPRSEILEQIKVLLTTREQITGHRTAHQNALRALKRKSVRTLVAEQIHEQVLAELQTHLHALDAEMQRLLDQHPPFQKLLGLLLTIPGVGFLLAAHVIVLMHTTTYPLEAKRLAAFLGICPYERQSGKSVYATPTSRHFGPGAPRKLLHLAARSVSTHKQSFREYYQRKLAEGKPKKVALNNVANKLLKVICAVVISQMPYDANYRSAKPELASGA

SEQ ID NO: 192492 - protein, 315 aa, unidentified
MVTVTRVDIGVDVSKKFLDVHFHPIKKAMRINNDTDGLNELLKHLSQYSVKQVVCEATGGYEKPMQKALMKKGLNVWIVNPRRIKAFIVSEDIKAKTDKLDAKMIALFASQKHSAYKPIQHTDEDEKLKALVSLKASVTASASGYKTQLQQQSDTDCIKYLKQLLHTTEKNIKKINQQINDLIKQDEGLVRKAQIISSIPGAGEGTVAVCLSMLPELGNIDNKKIASLVGVAPHIKQSGNNKGKARISGGRSSVRNVLYMAAVSAITHNPKLKQFYQRLITAGKPFKVAIVAVMRKLIVIINSMVMKGELWNPVI

SEQ ID NO: 192493 - protein, 313 aa, unidentified
MMASQDVFVGIDVSKDRLDVHVRPLGVGFSVSNEAAGYTALIARLRPLRVKRIVLEATGGYERALWLALSEAGLVVAVVNPRQVREFARAAGRLAKTDRLDAAVIAHFAETFAPRLCKPDPVADRLGEHVLYRRSVQDELVALEHQRRRLETPALQERADRRRAALRAEVKEIEREMRAIVDSDPAKKALFACLTAFKGVGMVLACTLIANMRELGSLSRHQAAALIGVAPLNHDSGARRGYRAIAGGRRRVRNVLYVATLSAVRSNPAIKEFYRRLSDGGKPPKVALVACMRKMLVMLNGRVRDELTVAAIP

SEQ ID NO: 192494 - protein, 391 aa, unidentified
MIFVGIDVAKDKHDCFILNSEGTVLADVFTIANNRIGFETLLSRIQSCSQGESKIKVGLEATGHYSCNILGFLLDNDLPVYVMNPLHTNLYRKSLSLRKTKTDRVDAKTIATMLLSDVDLKSYTDTAYHNEELKSLTRYRFDKVQERAKLKQSVSRLVTILFPELEQLVSSIHGTSIYALLSEYPGAKQISEAHLTRLANILVTTSRGHYRKDRATHIRDAARTSIGSVMPAKSLELKHTIKLIQELTSEINEIEDAIRKIMDELKPPILSIPGMGFYSAAMILAEVGDFSNFNSPDKVLAYAGCSPSTYQSGKLTNCYAHMEKRGSRYLRYALYTATKYVCYWNPVFTEYLTKKQAEGKHYNVALSHATKKLVRLIYALQKSGKAYLAIT

SEQ ID NO: 192495 - protein, 342 aa, unidentified
MDHFAGLDVSVKQTSICIVDDTGRIVREVKVASEPEALLAVLKNSAYHFERIGLEAGPLSQWLFSALAEVELPVVCVETRHMQAVLKAQINKTDRNDARGIAQMMRAGLYRPVHVKTLRSQKLRMLLTHRKLLQSKAIAIENDLRGTLRNFGLKVGMVGKVRFEARIEELVENFPDLAVLVEPLLIVRRALREQIVILHRRLLAIVRDDEVCRRLMTTPGVGPVVALTYRATVDVPARFRKSKSVGAVFGLTCSKYQSGEIDWSGRISRCGDEMMRVMLYEAAQSMLRSKKWSWLKAWAMQIARRRGMKKAIVALARRLAVIMHRIWVDGTEFRWTRETAAA

SEQ ID NO: 192496 - protein, 410 aa, unidentified
MTTINDKTECKTLIAIDISKSRNDILIQRPGRKRYRMQITNDRADHDRFIQHVMDIGEPVHVCFEATGNYHRPIAWRLLSAGFSVHLISSVALARTREALHNGWDKNDPKDAQVMLYMLAAGQVQRYYDPLEQETNDWQELSKTHEAISKGKTEVLHRLMTHYMPLYFPEIDRFRHNSRSEWFFRFLYEFPTPYNIAQLSKSEFIRAAWDVIGRKVNKTQVLSDIYETALTSIGLPVNLDSPAVSMYRLVIMQMRQLIQHRDEIERQANRQLSGHPDFERLQQIPGIGPIHALTVLAEAGDLRRFDHYRQFLKFCGFDLATHQSGQFRGQSKLSKYGNARLRRSFWMAGQVAIRQRENSFRDKYQRYIARDRDNRDLRRKALTAVAAKMARVAYSIIKHETDYRPFYGVR

SEQ ID NO: 192497 - protein, 451 aa, unidentified
MSPRKSDATLSLAHPDAAGIDIGSASHFVAVPHDRDDQPVREFKSFTADLYRLAQWLKDCGVTAVAMESTGVYWIPLYELLDSQGFNVYLVNARHVKNVSGRKSDVLDCQWLQQLMSYGLLAGAFRPSDEICVLREFSRQREMLLASQVRHVQHMQKALAQMNIQLTQVLSDVVGVTGQAIIRAIVGGERDPHALARLKKRQIKASEDDIAAALQGNWRHEHLFALRQALALYDTYQQLLNDCDQHIQAELHKLHRHDGDPGKSQRRWPKKAMAFDLRTHLFAMCGVDLTRINGIDEMTAFTVLAEVGPDMNRFPSAKHFASWLGLCPGTRISGGKVLNGATKRSPNRAAQALRLAAMALRHSQSALGAYYRRLCARLDKRRAITAAAHKLARLIYTLLTKGSEYVDQGELYYEERHRQRVLHHLTKRAETMGYSLVPLTASGETNEVSMT

SEQ ID NO: 192498 - protein, 326 aa, unidentified
MSPPRWIPSGGLLGVGEFPATAAGYARLLGWLGGFGTVCLVGIEGTGSYGAGLARHVTAAGIRVVEVDRSDRQDRRRQGKSDPLDAVSAARAAQSGRARGEPKGRDGAVEAIRALMVAKRSARSERTQTINQARALIVTGPDDLRARFARHTAAGLVSELAALRPRPGATVGYATRIALRELGRRAEFLDGQLGRLDELIVPLVTARAPALLALHGVGPDTAALLLIAAGDHPHRLRSEAAWAHLCAVAPIPASSGKRTRHRLNPGGNREASHALWRIVITRMSSHAPTRAYVERRTKEGLSKKEIIRCLKRYAARQVYRHLRPAG

SEQ ID NO: 192499 - protein, 409 aa, unidentified
MNKLFVGIDVGSRINAVYIMLPDGSKHSSFTVQNNLGGAQSLSKRVVAALKEYNISTVILGMEATSVYGDNLACFLREDGALGRFEKRIHVLNPKQVKKFKDAYPDLPKNDAIDAFVIADNLRFGRITAAIYSDDYRYKALQTLTRTRFSVVQNLTREKQRFMNYLFMKCSGLAQEKVFSNTYGSTALALIEEFETPDDIANMDVDQLVEFLVEKGKNRFPNPSEVAKAVQAAARGSYRLPKTVNDSVNQVLSIFISSMRAMQEQIKALDKEIERQFENIPNTLTSIPGIGKVLSAGIIAEIGDINRFPNHAAVAKYAGLAWTQHQSGMFEAQNTRQIKSGNRFLKYYLCEAAFSIVRCDTEYRRFYYLKYKEVNRYQHKRALALTARKLVRLVFRLLKDNRLYKPSVA

SEQ ID NO: 192500 - protein, 385 aa, unidentified
MNRTSCSAVSRHTLHCALELSKKSWLLAIQFPDREQPSVYPIGGGDTEKLMAKLTTARDCWAKVSGAPPMITLCYEVGYDAFWLARFLKARGIECLVIDPGSVQVNRRGRRVKTDRVDVKMLLRTLIAWCRGERHVWSLVRVPSIDEEDLRRSHRERSRLVRERTAHINRIKGLLFAQGIRGINVKSQYKTLVVDKLLTGDGHRLAPRLAREIGRELQRLAMVQEQIAEIERERDTAPTPCEATERKRHLLLQLKSIGPAISALLSREVYYRQFANRRQVGSFLGLTPSPYSSGEEEHCQGISRAGSGHVRAIMIETAWLWIRYQPRSALTRWFVERTAGQSTRIRKIMIVAVARKLAIALWRYVEHGLVPQGAILNPPMTGKLR

SEQ ID NO: 192501 - protein, 343 aa, unidentified
MQQYVGLDVSQKETAVCVIDDAGRIVFEGKARSEPGALAKVIRKRAPQAARIGFETGSMASWLWHELKRIDLPVVCIDARHAHAALSVRINKSDPNDARGLAELMRMGWYREVRVKSAESQVVRSLLIARARLVGIRRDLENQVRSLLKENGQLFPRAIGRQFRDRVREMLGEGHPLRDIIESLLAVHERVSEQQTALDTRVRALARTDQTTRRLMTVPGIGVVTALAFRHTIDDPSRFRSAASVGAYLGLTPRRKQSGELDLTGRISRWGDRFLRSYLFESARVLIHRTKRWSPLQAWGLRLVKRIGLKKAKVAIARKMAIVLHCIWSDGTEFDWGKQPGML

SEQ ID NO: 192502 - protein, 404 aa, unidentified
MEVLYERCGALDVHKKLVVACVATPEGKETKTFGTMTNDLLELADYLVSKGCTHVAMESTGVYWKPIYNILEGTGIEVLVVNARDIKAVPGRKTDVKDAEWICDLLRHGLLRGSFIPDRPQRELRELVRYRKELVRERAREVNRLQKVLEGANIKLGDVATDVMGKSGQAMIEALVVGETDPELLASLAKGRLKKSEQLASALRGLIGPHQRMILGAQLEHIRFLDKQIERLNREVEERMRPFDQAVEAIDEIPGIGRRIAEEVLAETGTNMDQFPSAGHLASWAGLCPGNNESAGKRKSGRTRHGNPHLRQALVEAAQAAAHTKDTYLSAQYHRIAARRGAKRAAVAVAHSMIVIIYHMLREGTAYQDLGSNHFDELNRNATVRRAVKRLEALGYKVTLEEAA

SEQ ID NO: 192503 - protein, 367 aa, unidentified
MEKSSTVFVGMDVHKESIDITLAEPGGEVRRLGQIGGDRVSLLKMVRRQQSKGCKLVFVYEAGPCGFWIYREITALGHACMVVSPSLIPRRAGDHVKTDRRDSERLASLARAGELEAIHVPDIRDEAIRDLVRGRDDAVIAQRRVRQQLKALLLRNDIRYVGRTSWTGAHRRWLSELKLPEPAQRIVFEEYVDAIVVATARIERLTRAIETEVAGWRFAPVVGALQAMRGIQFVHAVTLVAELGDLTRFASARQLMGYLGLVPREDSSGEHRHQGSITKAGNSYARRALIEAAWAYRHPARVTRIIATRQTGIPKAVCDIAWRAQLRLSAKYRRMNARHVNHNKIVVALARELSGFVWAIGQSVKPQ

SEQ ID NO: 192504 - protein, 437 aa, unidentified
MRRVIGIDIHRTFGEVVIWENGLTRHEGRVDMTRTALEGFGRQLLRTDEVVIEATGNCMAVSRVLSPHVARVVIANPLQVKAIAHAHVKTDKVDAATLASLYAAGYLPEIWTPDATTERLRRLVARRYQIVRHRTRIKNEVHSILHAHLIPTCPHADLFNRRGRDWLTRQPVPDDERAAIARHVRELDRLGEDLAVLERDIAQDALEDEAIRRLLTITGVNLAVAAGLMAAIGSIDRFSSPQKLVSYFGLNPRVRQSGLGAAHHGRISKVGRSHARAMLVEAAWAAAKAPGPLRAFFIRIRARRGHQIAAVAVARKLATLCWHMLTRGEDYRWARPSLVAHKGRAMELAAGSPQRKGSKRGASFAYNVKKCGIRKGRSPSGPRRATNTSSRLGGRIRHRGKSVRPPHTGRDCMGCPVALSADMPRFTTRSTARGKNS

SEQ ID NO: 192505 - protein, 395 aa, unidentified
MPATNQRSAAMTNQNDLSRSVVAFEQHNTIIVVIEMSLSSWLVAGMVPGIERHPLKKLNCDQEMLLKLLFRWRDEAVKAGHTITRIVVAFEAGRDGFWLARWLLARDIEAHVIHPTSVAVSREHRRAKTDRLDTESLKRAFLGWLRGERDHCSMAAIPNLQEEDAKRPTRERENLVGERTRIINRIKACMVRFGIRNFNPTLLRAIERLNALCTPEGVTLPPHTLAELRRDLARLRLVMDQINEIEAARLRRLEQAPAEGPHAMVRLLARVIGVGVETADMLVHEILSRKLRDRRAVARYAGLTGAPDESGNKRREKGLAKAGNARVRRGMIQLAWRFLLFQKNSALSQWYRARTESAGKKRKTMIVALARKLLIALWRLVTTGEVPAGVVLRAA

SEQ ID NO: 192506 - protein, 352 aa, unidentified
MAKIEFDQLMSIGIDIGKDTFHIVGFDDAGRLVLRRKIKRLALEQTFERLPRCVVGMEACLSAHFVSRTLNRMGFEPRIIPALYVKPFIKGQKNDYNDAEAIAEAALRPNLPIVPEKSQDQLDLQALHRVRSRLVSRRTATINQIRAFLIEQGITVRKGLRALNNSFDAILRERSDEISPRMRSILLGLREDWFHLDERIEAVSDEIEGISKTEENCVNVMTIPGIGPMISTALVAAIGTGEAFGRGRDFAAWVGLVPRQYSTGGRTVLGRISKRGSRYLRMLFVQAAKVILMRTNRWPDFSFGEWLTRAAERMNRNKLAVALANKLARMAWSILRNKTHFDAPRDEIAAGV

SEQ ID NO: 192507 - protein, 416 aa, unidentified
MKGTGKARETQGRYIALDIHKEYVLVGGQNVAQAWVIQPRRISMEGFQEWAIANLRAGDAVVLETTTNVWDVYDIIAPLASRTVVAHAGAVRQIAEARVKTDKKDVERLIRLLIAEIVPEVWVPPVEVRELRGLISYRNRLVKTSTMIRNRLQSLIHRHNLILPKGMLRDKAWWEAQQMSALEKIQIRQELAMLDEMEKHKAEVDGELGRQSLGEVWGKQAMRLLQLSGFGAIISMTVLSAIGDIARFESAKKLVGYAGLGPGVHDSGQEHIEKRITKSGRKELRWALVEAAWRAIRISPYWKEQYEKYLRRMRKPNQAIVVIARKLLVVVWHVLTKEETDERVSAEELAYKMLILSWDLNEDVRMGLTYKQFAKYALMKLGVEGDITRFVRKNVPRRLAAREEVLARMEELGIRQ

SEQ ID NO: 192508 - protein, 344 aa, unidentified
MTYYAGLDVSLRTVNICVVDDQGEQIAETKLASDVQDIIAYLDNLNIEIESVALEAGTLSQYLTYGLQAASFEVICMEARQVKGALSAMRNKTDKHDARGIAQILRSGWYSRVHIKSMASHHIRMLLSSRKAVLSKCVDLENEVRGLFKIFGIKLPPKLGHGAFDAAVRDIIETDETLSYALLPLLDARLVLYHTFRVLDNRTRHLAHDDPVCVRLMSVPGVGFITALTFKAGVDDPLRFKRSRTVGAHFGLTPRRFQSGEIDIDGHISKCGDASVRGTLYTAANALLTRSSRWSPLKAWGMKLAKTRGHRRAVIAVARKLAVILHRVWIDDTQFRWGNEGVRS

SEQ ID NO: 192509 - protein, 399 aa, unidentified
MNAVGIDVSKGKSTVAIMQPFGVVAASPFEVSHNGQELKELVERVKLLPGETKVVMEYTGNYYEPIAQYLHNEGIYVSVVNAMLLHNYSGNSIRKAKTDKKDAIRIAQYALDRWLDLREYIPDDEIRRSLKLLNRQYTTLCKVKTMLNNNFISLVDQSFPGVNKLFTSPQRSSDGHIKWVDFVIKFPHCDCVRGIPRSAFKDKYYRWCNKNGYYYSDKKADTIYDYSKTLIATLTNSDYIASLIGQSATQLNCACETLSELQKQMTALSQQLPEYDVVMEMFGVGKVLAPQLIAEIGDTRRFHSRKAITAFAGLDAPPYQSGNIDVKSRSISKRGSPHLRKTLFQVVDVILKNSPADEPVYSFLDKKRAEGKPYKVYMMAAANKFLRIYYAKVNEALNT

SEQ ID NO: 192510 - protein, 408 aa, unidentified
MLAVVVADVEIEGEYQFERRRFGSNPEHLRLLAEWLVEQQVREVFTAQYWQPVWAALERYWKPISEKQKGPGPKSGTLHLAQAQSNRGPRGRKRDFPDAERLVKRLVANELTLSFVPDAEQRLWRTVMRRKYQLTRNRVQLHNRLEALLEEAHIKLSSLVSDLLGVSARRMLKALGDGENNPAVLAAMADKKLRATPAQLCDALGACTELNGVYRRLLKMTREELQLLEQQISQLEQEMASLLRQHQDSVQRLAEIPGLGVGSAQQIIAEVGATAATFPSAKELSSWVGACPGDEESGGVSKTHRSPKGNRRMRGILNQCANSAIKVKGSIFEIVYRRLAPRLGHKSTIGAIAHRLCHLIWIILYRGVRYEERGPAVSQRSRKHRTNRMIRELRSLGYRVESMNPQPA

SEQ ID NO: 192511 - protein, 448 aa, unidentified
MEPQEIDDEEHEQVLERVAAVDVAKASGMVCTRVPHQSRPGKRRTRVWPVDATTNAVLELADHLVAEGVEKVTLESTSDYWRIWFYLLESAELDVQLVRAQDVKQAPGRPKSDKLDAVWLAKLTERGMLRPSFVPPAEIRRLRDYTRLRADLTCERTRHYSRLEKLLEDALIKVSAVASSLAAKSVRDMLEALIGGERDPKILASLARGRMRAKHDRLVQALAGRFDDHHGELARLLLDQIDTLSAQIGRLTTRTGELIAAIPPAQGIDADGTTGPAAGHGKNAPVLPAVDRLDEVTGIGRGGAQAIIAEIGLHMSVFPTAAHLVSWAKISPQTIQSGTRSRAGHTGKGNPYLRGLLGEAAAAAGKTDTFLGERYRRLVKRRGKLKALVAIARSILVIVWHLLDDPAARYHDLGAGYYASRVDKNRKMRNHVRQLEALGYTVTLTQAA

SEQ ID NO: 192512 - protein, 428 aa, unidentified
MEGFDCNRIRDFRQFKKEIRGSKEYLIVGIDIAKENHNAFMGSATGKTLLKRLVFENSAAGFEKLKVQAESIRVQNGLTKVVFGLEPTACYHKPLAESLINDQQKLVYVSGEAVKKNRVLLDGRWDKHDAKDGANVADLISQGKCLFYDHPPLPLRELRSLLSLKIRLKKQEHGLRVRIRNHLLAQFFPELDPFFANGGPYLLSIVKWCLAPRDIAIMDFKEFLKIVAPGLMRGDTLERLRKIWEIAPKSIGCEAGPALQFEGKMMVELLIEIRKKLKALDDKIEELCLLFPAYPLLLSIPGFGPDVSAKVLAAIGDPFRFDNLNQVIRIAGYDLNANRSGKTSDHAVPVISKKGKAGLRYALYQAALVAATRNKEFIRYFTEKIRGREKERGIKTKIRVKLAAKMLVIAWTLMKKKELFNPEYLSIS

SEQ ID NO: 192513 - protein, 454 aa, unidentified
MRTDNKLWRNRKAKKELARRLQSENPGLEVVHPQAAGIDVGNSAHYAAVRPDRDSQPVRRFECFTADLYRLADWLQNCGVQTVALQSTGVYWIPLYDILEERGFEVYLVNARHTKNLPGRKSDVQESQWLLKLHTYGLLNNSFQPPAKIRMLRTYWRQRLQHVTGAATCVQRMQKALTQMNIQLANVISDLSGVTGQLIVRAIVGGERDPWKLAELSHPRIQASRAEIAKSLEGHWRQELIFVLQQEMEMYDTYQRRVAECDQELHKHLRAFADTISPPGKEELPPKKKKKQNKNNPHFHLAEELQRITGVDLTRIDGVDVMVAQTVISEVGLDMSPWKTEAHFASWLGLCPDNRISGDKVLARGTRHVLNRAATALRLGASTLLKSQTYLGAPKAITAMAHRLARLVYRMLKYGQHYIDKGAEYYEQRNRQQQIEFVRKKAALLGLQVTPAHV

SEQ ID NO: 192514 - protein, 425 aa, unidentified
MTTTDFAATIGLDWADQKHDLWLHPTDGSQAQHLRLEQTPEALHAWVAQLRGRFGSRPVALGLETSRGAIISALMAYDFIVLFPVNPKALKDYRAAFAVSGAKDDRTDALLLEELVRLHRDKLHALEPDTELTRRLVGLVQNRRHLVDERTRLVNQLHSTLKTYYPLAEHLLGCDMNQPLAAEFLTRWPDLESLQTADAQTLRAFFYKHHSRGAKRMEERLRAIQQAQALTTDTAIVLPARLQVQALTALLKPLHRAIAQHDQAIQQAMDQHPDAAIFRSFPGAGPALAPRLLVAFGTQRQRFASSVEVAQFYGVAPVVQQSGNTKTVHMRYRCPKFGRQTFHENAACALRQESWALTYYVGHKHSHENHHHQACRALAFKLIRIYFACWRDRRPYDSNRYLAGLAKQGSPLHAKLKTAAKTLGE

SEQ ID NO: 192515 - protein, 400 aa, unidentified
MRCTDQPARLRAAVREENSSLFVALELSKSAWLIAASAPGSEKVSKYRVAAGDVAALVALLARLKAQAERYRGGPVQIVSIQEAGLDGFWVHRMLEANGVESHVVDAASIAVNRRRRRAKTDRIDVEGLLRTMMGWARGERRICSMVRPPSPADEDERRLTRERGTLVTERTRHVNRIKGLLATQGVFGFEPLRKSRRKRLEELRQWDGQPLPARLKTELVRELDRLELVMSQLAALEAERDRALQARGTAVANTTKAPSSGAASSGEVGRQLLRLRSIGPEIASVLSLEAFYRNFSNRREVAGYSGLAPSPWKSGGIDVEQGISKAGNVRLRTTMVQLAWLWVRHQPGSALSRWFHEKIGDRRGKIKRIAIVAVARKLLVALWRYVTLGVVPDGAALKA

SEQ ID NO: 192516 - protein, 602 aa, unidentified
MAAESSLDRIGVGIDTARYGHRVCFLRPDLEPAAKPLTVTENRAGYQALQQQLEQLHARHPSANFQVRIDAAGQYALNLEHFLRALPLPITLSIGEPKRNKDYRMAHFPKRTNDDLESQAMARYAIVEPSQATPETTDALILLREVAGRLQGQVKQTTRAVNRLHNLLARTFPELAQLAGDLSAAWVLRLLQRYPTPQRIAQARRASLEKLPYLSAERAEALHQAAQQSVASLHGPVAEDMVRTLVAELRHCQQAERQLRTLLKSAFEQLPASPHVQLVTIPGIGVTTAAVLVAKIGDIDRFPTPNHLVNYFGIFPEENSSGVDKHGNVRPSGTLSMSRKGNDLVRAYLWNAAWSAIRCNPAVRALYRRLKARGKRGDVALGHCMRKLLLLVYAVWKTDRPFDPEHFPWEDTAQATAPAAGPDAAAAVPANETAVGHKRDVPARKVVTTADSTVAPAPPAVKPVPTTVPAARPKVDFAFLRQQITMEQVLGRLGLMARLHGRGLQRRGPCPLHSDPGDAEPTFSVHLGKHVFRCFHAGCGARGNVLDLWAAVHRVSLYDAALHLAETFQLRRNREEEPVPGTRGPTGTSALAGPADAGQATG

SEQ ID NO: 192517 - protein, 388 aa, unidentified
MQTVAYRPEAPNAIRNDLGAIFVSMELSRSTWLITSLSPGGGDKMSKHSMPAGDVGALLARFAELRRKAFTRTGESLPIIVIQEAGLDGFWIHRVLKQEGIEGHVVDPASIATSRRRRRAKTDRIDGETLLRALLAYKRGEPRVCAMVKAPTVEEEDRRRLCRERKALIEERVLHVNRIKGLLFSQGVSGYEPLRRGRRRRLDELQTGDGRPLPKHLKTQIGRELDRLELLLEQIKAVEAERDALLGARHVATPAPAAMLLNIKRIGPEFAAVLWSEGLFRHFDNRRQVASYAGLAPTPWQSGSVDREQGVSKAGNPRLRTTLIQLAWLWLRNQPQSALALWFKDRVSRNGGRLKKTTIVALARKLLVALWKYVTAGVVIEGAIVKSA

SEQ ID NO: 192518 - protein, 357 aa, unidentified
MSKTNSVKIIIGVDTHKDIHAAVAINEIGARLGTLTIPVRPKGYRDLEIWARAFGVIHAFGIEGTGSYGAGLSRFLQAKGHSVVEVNRPNRQLRHQNGKSDSLDAENAARAVLGGQANARPKSADSSVEMIRHLKVARDTAVKSRTQAMITLKTIIINAPAALRQALDRIIGKMALIRHLAALRPGPILSATASAKAALRAIARRWLMLDAEIRVHDADLEALTASCAPAMLEAHGISTGTAAEMLILVGDNPERIRSEAAFAKLCGVAPEPASSGRTTGRHRLSRSGDRQANSALYIVTIVRMRHHEPTRAYVERRTNEGLNKREIIRCLKRYIAREIYANLPRPETNSAALTAAA

SEQ ID NO: 192519 - protein, 439 aa, unidentified
MSQELPMLDPLAAFVDVGSEHMHVSVGGNKPEVFGTVTSQLHALRDWLLAQGVHSVAMEATGVYWLPLYGVLESAGLDVRMVNGRQTRNLPGRKTDMADSQWGATLHMHGLLHAGFVPPADIRRLQDYLRLRADHVAAAAGCVQLMQKAFDRMNIKLHDVISSLAGVSGMAVTRAIVAGERSPEALVALCDVQIRRKKEQAVIEALRGTWADEHIFALGQALQSWDHYQKLIADCDERIAAVLPPHDQALPPLPRSTRQTSVNAPEIARLREILAQMCGGRDLTQLPALSSYGVLQLIGEVGTDLSVWPTEKHFTAWTGLAPGSHDSGKRRKGVKRGRNRTGRLFCMMAQSLVRSKDIALGGFYRRLAARRGGLVATKALARKLAGWFWRVMVKGEDYVEKGLARYAEQVHKTREHALTRLARELGRELVPVPAVTGAV

SEQ ID NO: 192520 - protein, 366 aa, unidentified
MEKGTTFVALDDSKRKVVVAILRPGASEPEQRELPKEPHLIRRLFQRLAREGRVRACYEAGVSGYDLYRQITACGVECEVIAPALTPRRPGQRIKTDRRDAAKLVRLFRAGELTPIHVPNEAEEAVRDLLRCREDVRRDVLRWRHRLLKFLDRHGRLYVSGKNWSQRHWAWIRSQHFDLPTLQRTLEATLFALEQALARVAALDQDVAALAATDPYRTPVGWLRCFRGIDTLSAMILIAEIVDFQRFQHPRALMAYLGLVPSEYSSGERQRRGAITKAGNTHARRVLVEAAWHYRHSPRIGGALRQRTDGQPPAIVGQAWRAQQRLHRRYRHLTAHGKRAPIAVVAIARELVGFLWAAMTHAAAAA

SEQ ID NO: 192521 - protein, 336 aa, unidentified
MTTERFVGVDLHKKLCYFTELDSEGNVIKKGKFGNNLGEVATYAASLKPQTKLTVEPVLNYLWFLDQVVPYVSSVHPANPSKVRIIAEAKTKCDRYDSLMLAELLRTNFLPESYYVPKEIRSLRDLIRQRSQLVAMRVSLKNRIRHLIFLNGSLVKAADIASPKASKEMERLCLSPTVKDLIRQCLGTIEYLNRGIAVLEKEINSGREDIAEIKLLQTIPGIGPLSAVIIYAETGDINRFKSGRAFASYCGLVPWVRASGDKTYTGSITKAGSVAMRRVFVEAAIIAPRKSPALNRLLNRVLYKSNIQKARVAVAHKLARITHAMLSRGESFRDCN

SEQ ID NO: 192522 - protein, 343 aa, unidentified
MQTITTIGLDIAKSVFQVHGVDAAGEVVIRRQLKRRSVLAFFRKLPPCLVGIEACASSHYWSRELQALGHTVRLMPPAYVKPYVKRQKNDMADAEAICEAVTRANMRFVPTKTPEQQSCLMLHRTRHLFIRQQTAVINSIRAHLAEFGIVAPVGRKGVTELLHVVADPSDKRVPEVARACLAALGAQLLSLKQQILEFDRMIMTWHRSSQTSKRLHCIPGVGPMLATALVASVADPRTFRSGRNFSAWIGLVPKQHSSGGKDRLGGTSKQGDRYLRSLFVAGALAVIRYAKIHGTKHRPWLTALLGRRPTKVAAIALANKIARMAWAMMAKGERYRQPVALAA

SEQ ID NO: 192523 - protein, 339 aa, unidentified
MTQHAAFDVSLKVAHGCIVDASGQVLKEGKVAAEPETMAAWLNKHAPELAWVGIETGPLATWHLHALRKLGVQVVCLDARHAHRVLSCWPIKTDKNDARGLAELVRLGAFRQVAVRSEASVRRRALLGAREQLVKMRRDVENQIRGLLRSFGRLLGSARGRAFAGRAKELVADEPLLAAIIEPLLRVRERLVDEVAALEGKLVAEARTDPVCRRLATVPGVGPITALAFQSGVDDVTRFEDRRQVGAWLGLVPRRHQSGKMDYSGKISKAGDGRVRALLFEAAHVLLSRVKRGCALKDWAEQLARRVGMRKAKVAVARKLAVLLARLWAKEEVFRWQAA

SEQ ID NO: 192524 - protein, 357 aa, unidentified
METAYDGRQVVGMDLHRRRSVLVRMTGDGRRLGTARIANSPAELRAQIARAGKSPQVVLEATYGWYWAADTLAAAGAEVHLAHPLGVKAFTYRRVKNDERDAADLADLLRMGRLPEAWIAPPEVRELREITRYRQKLVHLRTSCKDQVHAVLAKLGVPVTCSDIFGTAGSAWLDGLGLPQPYAGKVTSLRQLTGELTAEITMLSEVIADLLAGDRGYQVIQQLPGIGPVLAAVIVAEIGEVTRFKNAGQLCSWAGLTPRHRESDTKVSRGHVTKQGSRMLRWALIEAIQRVRADTVTGAVKDAIIARRGKEARSIAKVAAARRLLTLVFYGMRDGQIRCLSRSPADPPVTQPPARAA

SEQ ID NO: 192525 - protein, 319 aa, unidentified
MTTPVYIGIDISKRTLDIATSDRYLGQVPNTPTGHAQLLEQLATLDAEQNNVHVAMEASGGYERPLLQHLLTAGSHVSVVQPACVRHFAKSLKLHAKTDRIDAMLIARFAATTKPNPAEKTCKTSEKLRALRDRRDQIIDDRVREQNRLECCDNTTIARMIKQSIVRLRKLESQLDDQITRCLSRSKSLSAKADRLTQVVGIAQQTAVTLLAHLPELGTVNRQQIAALAGLAPYAHDSGAMRGKRRIFGGRAVVRRALYMASLSAVRHDAVLRTFYQRLLAAGKAKKVALCACARKLLVHVNSLCAQVQALPGKKAAGA

SEQ ID NO: 192526 - protein, 323 aa, unidentified
MTRIVCGVDVSKDSLEARIGRQGAAHTFPNNPEGISELAAFCQTHRAELVAMEATGGYEQQAFALLSEQGLGVAILNPRAVRQFAESMGRLEKTDRIDAAMIAWYAEVKQSKALCVAPKTQQHLRALVTRLRQLTEVRTAQLNQQRLVTDRSVQASFTRMLAFLARQIRDLEQRIAKLIDEDPLWRELNQAFRTIKGVADRTVARMMAEMSEIGTLSNKTISKLAGVAPLARDSGKYQGKRVVRGGRASVRDLLFIVASVVGRHEPDFVAFQQRLKQAGKPPKVIRIALAHKLLVRLNAKAREVRQRLHVAPSSSPGLFLEKI

SEQ ID NO: 192527 - protein, 435 aa, unidentified
MRCERESVGVVLPACLPSVEGGVHTKLLGLDVHREFTYVVMLERERLTHLGRIPTTPEALRSLAARLGPEDHVVLEATVNTYAIVQLLRQHAGRVVVSNPVQTRAIADAKIKSDKVDAEVLVRLLAGGWLPEVWVPDPKTQALRQQVAHRADLVQQQTRLKNRIQSVLHRNLVPGCPRSDLFGKAGRAWLMQHALPQLPTHEQAMIHATLRELAVVQGERGQAERTLAEIALAQPAVRRLMTIPGIDAVTALAVLAAIGDIHRFHAPSKLVGYLGLDPRVRQSGTRLATTGHISKRGRAHARGLLVEAAWAAVKTPGPLRAFYHRLRSRRGAQIAAVATARKIAVLAWHLLTRDEDYTFARPSLMTRKWRALELHAGRPARRGQLGMAHAYNVKAARRQELELCTQAERVYVALTHQWQHKRTQQDAGATNGKRL

SEQ ID NO: 192528 - protein, 479 aa, unidentified
MNHRRLVGIDLGIASAHTVRVLDGEGNTVAKRKAWPTVESLGEVETAALAGTPAGTKLEVIVEPTGPAWLPIAVFFTSRGHVVHRVSSAKAADLRRFLSRHTKTNGIDADTLARLPLFDPAGLQPLELPGSERAALDRRVRATDRLTQQGALHKRRIKDLTRQLLPMTPLTGDLGAADLAVLERYADPNALLKAGIKRLTALIAKASHNHQGIDRARQWLAAAEASIELYDAHPAVAFSDLAAEVATEVRLLRAVQAELAAHATERETCYRWVDPTALARSLPGVADVGGPALVAAMGDPARFRRGNQFRSFTGLTPKASETGDTDRKGQPMSKAGSSLLRTTLVRAADTARKTDPQLARIYYVQMVERGKDHLGALCVVAANLAERAWAVMHRGMPYVICDTDGRPVEPDEAKTIIAQHWTVPPEVRARRRSKKVGKAPQQVLTAQVKPNARSAGRRGDLPRPASSTATTDHVNRRTA

SEQ ID NO: 192529 - protein, 371 aa, unidentified
MGVIIGMDPHKRPATIEVIDERAVVLAAGRYGTDKAGYTQMLAAARTFAGRVWAVEGCNGIGRHLAHRLVHDGEVVVDVPPELSAQVRVFAAGNGRKTDEVDAHAVALRTPGLVQVQVEEDLVVTGMLADRRDELGRARTQVVNRLHRLLPELLPGGAEKFLSARQARALIASVRPRDLAGKTRRRLAVELEMIDKKTRALDKELTGLAAARGSALMDLHGIGPSGAARLLADAGDIHRFASRDRFASWNGTAPLDASSGSQARHRLSRAGNRRINRVLHIMAAGWLRNQTKGRAYYDARRAGGMPSMMAMRALKRRLPNVAFSCMLADQKRREAGPGGQSGTPADSSVTGLAPGHRPFGQATSRTRHSTA

SEQ ID NO: 192530 - protein, 306 aa, unidentified
MEQVTTIGLDLAKAVFQVHGVDAAGAVMVRRSLRRKQVLAFFAKLPRCLVGMEACATAHYWARELAKLGHDVRLIPPAYAKAYVRRNKNDAADAAAICEAVSRPSMRFVAIKTEAQQASAGIHKVREMLVKQRTMLINTLRGLMAEFGIVVAEGPRHVGELVAILADPADARIPAPLHDGLMAIVESLRGLEQRIARVEKQIVGGGRDNATCRHLITIPGYGPILSSAMAAMIVNPAAFTSARHFAASLGLVPRQDGTGGKSLPLRRRGSSSVRSANAAMATCVGCWSMARCRCWAVNAPKTIPGW

SEQ ID NO: 192531 - protein, 399 aa, unidentified
MVSVGIDVSKGKSTVCLMRPFGEIAAGPMEISHVDSELKALVKLMKSMNDEVKVVMEATGIYHLPVLTYLKDSGIFTAVINPYQMKQYRVQGLRRVKTDKADSMTIAKYGLDNWDELKDFVSSEDRYRELSLLSRQYRHYMRIHVASLLELTHILDYTMPGIKKEFNSWVPESGRDKLADFVEKYWHYDNIRKKSERQFVESYLNWAKKKGYHRNQNKAAKIYSMAKEGIPTLPADQTTKMLVIQSIEVLRRVDETLNTILARMQEIAKALPEYPVVRSMGGVGDVLAPKLIADIGDVRRFHNSKALIAYAGIDAPPYQSGQFTGTNRNISKRGSSAIRKTGYEVMRVLKTHPEPEDGAVYQFILKKESEGKPKKVAKMAGLNKFLRIYYARVMEVYNC

SEQ ID NO: 192532 - protein, 426 aa, unidentified
MTTGRGRRGQEPSGHIEVLYGTVAGFDVHKATIMVCVRQLQPDGRVLKEIRQVGTMTADLLELSDWLRAAGVTHVAMESTGVFWKPVYNLLEGQCTVLLVNAQHLKKVPGRKSDVSDAEWIAHCLQCGLLRASFVPERPQRELRDLTRDRAVVAEERTRVANRVHKVLEDANIKLAAVATDILGVSGRAMLERLIAGEEDSAVLAELARRRLRAKLPQLRQALQGRVTPHHRFLLRELLDHYDFLTQRLTRLSARIAEVLPPPFREAVQHLITMPGVQERSAQAIVAEIGCDMGRFASPAHLASWAGVAPGNHESAGKRMRGTPAKGNRWLRRTLTEVAQAAAHTKGTYVRAQFDRLAPRRGKKRALGALAHTQLTAAYHMLATGTDYHDLGPDFFARLNPERLTRYYVKKLEALGHHVTLTSVAA

SEQ ID NO: 192533 - protein, 406 aa, unidentified
MNMNAVGIDVAKRKSTVAVLRPGGEVVVKPFDIPHLTNDFKSLTSLLHSLEGETRIVMECTGRYYEPVARTLSQAGFFVSAVNPQIIRNFQGQDNPLRKVKSDKADSVKIARYALDSWVNLKQYSLMDEIRTQLKTMNRQFDFYTKHKTAMKNNLIGLVDQTYPGANTYFDSPAREDGSQKWVDFLDTYWHVDRVREMSLKAFTDHYQKWCSRKKYNFSKTKAEEIYGTAKGLIPVLPKDDFTKRIIKQAIEQLNAASQTVEQLRSLMNETAAQLPEYPVVMAMKGVGPSLGPQLMAEIGDVTRFTHKGALTAFAGVDPGVNDSGDYSQKSVHTSKHGSPVLRKTLFQIMDVLIKTKPDDPVYLFMDKKRAQGKPYYVYMTAGANKFLRIYYGRVKEYLASRPVSE

SEQ ID NO: 192534 - protein, 336 aa, unidentified
MIVIGIDAHKRTHTAVSADQNGSQLSTRTIRTTSKDHLALLRWGAEQGDDRMWAIEDCWHLSRRLERVVRVPPKLMANVRDGARTYGKSDPIDALAVARAVLREPNLPEARLDGMEREIRLLVDHRDDLVAERTRIIGRLRWHSRELDPGWTPPKRLERASAYDKIESFLSELSGLVSELAVRLVDHLRRLTVEIEELATEITTRITVLAPSLLAIPGCAPLTAAKLIGETAGVDRFRSKDAFARHNGTAPLPVWSSNRARHRLSRTGNRRLNAAIHIIALSQAHCHDDARALLSRRKANGDGGMEALRILKRRLSDVVYRAMIADRPLMGSATAA

SEQ ID NO: 192535 - protein, 461 aa, unidentified
MAHLKGKKAPAQLVEDEEYQLRYERVAGIDIAKAKADVCTRLPPREGGVRRRSRVEEVPATVPEVTALAGRLLEDGVELVVMESTSDYWRLWFYVLEAAGLRVQLVSSSQVRQLKGRPKTDRLDAQWIARLAEMGLLRPSFVPPAEIRELRDWTRARLQLVRDRTAEWQRLEKLLEGALVKVSSVVSALAGNVTARAIVEALIAGERDPRRLADLARGSLRGKRKELAAALEGAAFGPHHARLARMHLDRIDALDRDVAVLDDEVAACLGGIEGGWGIDAAGEPCPDPGADAAVLAAAARLAEIPGVSLHLAMAVIAEAGLDMSRFPSAAHLVSWAGLAPSARQSGSRSRKPGKGKGNAYLKGYCTQAAVGTAKTDTFLGERLRRLSRRIGGARAQCAVGRSILIIVWHLLKDPSARFADLGAGWHDRKTDRDKKIRNHLRQLRAMGVDVNISDPQPRPAA

SEQ ID NO: 192536 - protein, 388 aa, unidentified
MEAQTVDTLPPVAADHDPVRCLLAIEMSKKSWIVAITTALSDKISRYTLDGCDWKGLLELMERVRARVAREVGRPVEMISCYEAGYDGFWLHRLLERQGVRSHVIDPASVQVDRRARRAKTDHIDAKRLLRSLMAYLRGEPKVWSVLRVPSVAEEDDRRLHRERDRLIAERGQHVNRIKGLCAIHGIYDYEPMRRDRMLRLEQLHTGDGRELPPRLKAEIARELQRLELILGMLKEIETERDAVALTENVSAHTNAKKIQNLVKLKAIGAEIATVLTGEVFYRPFNSRRQVASYVGLTPSPFQSGSKCRDQGISKAGNPKARSTMIELAWLWLRHQPDSPLSVWFRERVGTLKGRIRRITIVAVARKLLIALWRYLETGMVPTGAVLN

SEQ ID NO: 192537 - protein, 359 aa, unidentified
MKKIRHSILNGKEIFVGLEDSKKTWKICVRSGRTVVHETSMPADYDVLRNYFLNKYPDCKIRVMYEAGFRGFELHDKLVADGWQCVVTPPHTVTQEKCNKQKNDRIDSRRLAKNNENGDYRSCRVPSRQEREDRQVSRLCNQIQKDITRISNRIRRAIQYHGLEKHFPLKDNWGPRHYREAEEMLTKLSISDSLRFTFQVYFKELHEVRAKKAEILKRLRALGKSERYKRVVSLLQSAPGIGPLTAIRLALEWGDIRRFGRKEAFAAFLGLIPSDYSTGENDHKGHITKQGNRQVRAWLVESAWVSIRHDPVLLEKYQAVISRCGSGKKAIVAVARKLAMRLRGILLSGEPYQVGLIEG

SEQ ID NO: 192538 - protein, 440 aa, unidentified
MNVVYAEAAAAFEALTLDNTYDTLRWQDDGAWPNTFRKACFISAVDLVQTDRLRCRVMQALGAYISIAHYSDGVDGSTQSASQCAITVVSETHIEKEPSTMDITTLGIDLAKSVFQLHGVDAQGVIVLQKKLRRGAVVKFLSKLEPCLIGIEACATSHYWAREIAALGHDVKMIPPAYVKPYVKRQKNDAADAEAICEAVTRPNMRFVPVKTEEQQAVLVLHRSRDLLMRQRTMILNAIRSHCAEFGIIAAQGARKVSELVTKLRNDDTLGVPEVGVSALLSLASQLDCLEQEVRKIEHQLLAWHRQNAASQRLETIPGIGLITATALAASVPDPAVFKSGRQFAAYLGLVPRQNSSGGKDRLGRISKMGNGYLRRLLVVGATSVTRRAPTIDTRTGTWVRSLLEHKPTRVVTVAIANKTARTAWALLSKGESYKAVPAI

SEQ ID NO: 192539 - protein, 407 aa, unidentified
MTITCGIDWAEKHHDVTLVGDDGHIIIHRRISTDAAGFTTLIALLTEHAGDPTQVPVAIETDKNLVVVGLQAAGVTVYPINPRACARYRERHSQSGGKSDPGDAFVLASILRTDQHMHRQLPQLSDGSKGLKALARQHQEAIWALHQTQSRLRSVLLEFYPQALDAFPNLSHKAAHTFLAALPSPATAQKLTIAKTITLLRRSGRGNRVGLADKIRAALTAPGIRQPAPVENALAVTVQGLIAIIVTMQASVEALEHALDEAFRVMPSARIVQNIPGLGTVLGARVLAEIGDDPTRFTTASGLRAFAGTAPITRASGKSHYVKARKVRNKRLADACHWWAFNAITRSPGARAHYDRRRAAGDYHNAALRNLANKLLGRLWWCLAHDQSWDENAAWTSLEAVPKLLAA

SEQ ID NO: 192540 - protein, 347 aa, unidentified
MYYAGIDYHKRYSVVSIQDAQGQIVQEQRVDHQFPEVFKRLFREYREPVSLVYESTINWGWLYEILEPAENVASITLANPFKVRLIAEAEIKTDKISARALATLLRLNVVPACHIPDRRTRQRKEVLRQRSYWVKLRTAVRCRVHKILGNQHDLSMPQVTDLFGRKGRAALDKALLPEPDATLLAQNLRVLDAIDKEIGTDEQLIRQEGQADRASQVLASMPGLGLILANVIATETDGIGRFGRSERYTGYSGLSPTVHSSGGKTHMGRMMQQCNRWLKWAYIEAAWIAVGCSPYFGGLYRYHRGRGKQANTAITIVARRMCHIAYQLLTEDRLYQERPFSPAALLK

SEQ ID NO: 192541 - protein, 338 aa, unidentified
MEQITTIGLDLAKNVFQVHGVDVAGKVLVRKQLRRAEALRFFAALPPCLVGMEACGTAHHWARELTKLGHTVRLMPPAYVKPYVKRGKTDAADAAAIAEAATRPTMRFVAVKTVDQQSVLMLHKVRELLVRQRTMLINALRGHLAEFGIVAARGPGGVTAVITALHEAQGGLPDLARQVLHGLIDQMRVICAEITKAEKRIMAWHRASEASQRLATIPGIGPITASAIAAAVPDATLFRSGRQFAAWLGLTPRAHSSGGKQRLGGISKQGDGYIRRLLVIGATAVIRFARQDNASKTWAARLLERKSARLVSVALANKTARIAWAVLARNQSYTATAI

SEQ ID NO: 192542 - protein, 344 aa, unidentified
MNSMHYIGFDIHKKVISFCEKQMDGTIVDQGIIRATRQSLTNWTGERTTLWVGAMEATLFTGWIYDYLLPHAKELKVAHPEMLKAITAAKKKNDAADAEKIADLLRCNLLPECYMAPEEHRNLRRILRYRNLLVREAAKMKTKTATLLMEVGAEYNKRRLHGSKYFQELLSTLEYVPESVLNLLQMSRSSMEFFDKMQKSLIGALGNNPKISQRVELLKGIQGIGEVTALTWVLEIGDVYRFGRINQAISYCGLCSAQKESAGKEIRGPLSKKRNKHLQTVLIEAAKLAPHWNPQLAEVHERELKKGNRNRATLAVARKLVAYMLAVDKSQKKFTPKEVLDKAA

SEQ ID NO: 192543 - protein, 343 aa, unidentified
MNEISMIGLDLAKNVFQVHGVDASGKVVLQRRLGRKAMEKFFAKLPPCTIGMEACGSAHHWARVIGGHGHDVKLMPPAYVKPYVKRNKNDGRDAEAICEAVSRPTMRFVAVKSVEQQAMLSVHTTRALLVKQRTMVANALRAQLSELGIVAAQGHEGLHELMARLEAPSEEIPEMMRNALLMLVEQWRALDAKERVLEKQIVKAVRCDQEARRLMAVPGVGPIIASAVLAKVPDAKVFRSGRDFAAWVGLTGRDHGTGGKHRPGRISKQGDRALRTLLINGASAHLRQQKRRGVSDPWLRELLARRPYKVAMVAFAAKTARIIWAMLAKGEAYRDRASAPAAA

SEQ ID NO: 192544 - protein, 342 aa, unidentified
MKSATTIGIDLAKNSFSVYGVDDKGKTVLSRTLTRAGVVRFFANLPSCLVGMEACASSDYWARTIESLGHEVRRIHPQYVKAYLLGAKNDTNDAAAICEAVQRPNMRFVPHKSPEQIDIQCIHRTRQGYIKSRTALVNQARGLLAEYGIIIRQGISAIRNQLPLIIADEENALSGLMRRNIASLYESICFFDSQILEQDKLLKTVAKENEACQQLMQVPGIGIMTATILLTVAGVASNFKNGREFAAFVGLVPRQNSTGGKTRLLSISKRGDCYIRTLFIHGARSAITRILAGQTPKYRPNSWVIELIARRGRNKACVAMANKTARIAWSMLAQGTEYRHAA

SEQ ID NO: 192545 - protein, 351 aa, unidentified
MQIIGVDLHTRQQTVAMLNVETGEIVEKTLPHEGDAVREFYSTLAGPTRVGIEATGSMQWFLALMEELGIDCEVGHPAKIRAAEPRKQKHDRRDAALVLQLLVENRFPSIWMPSSEQRDVRSLILYRHQWVRMRTRVQNALQAIALSHGLRRGSSLWSKAGQQTIASLSLTRYTAERRTALQSLYQQLEEQIADLNRKVEELAWQRPQARRLMTHPGVGPITALATETFLGEPKRFVDGKAVASYVGLIPSEHSSGGRQRLGRLSKQGNPLLRFLWCEAVGHAVRKDAELQRFYQHKLVQKGLGKAKVAAARKLGIRLWILLRDQIDYQEFCRRGQLRQKHGGAHAGMPAR

SEQ ID NO: 192546 - protein, 420 aa, unidentified
MVCTRVPDEDRPGRRTTHVWTVIATMNAVTELGDHLRCQGIEVVTLESTSDYWRVWFVVLEAAGLRVQLVNARAVKNVPGRAKTDKKDAVWLAKLTERGMLRPSFVPPPEIRRLREFTRLRADLVHEKSRYWARLEKLLERALIKISAVASALDTQSCRAMIEALIAGQRNPKVLADLATGKMRARRADLTEALDGRFEDHHGELARMLLDNIDALSAQIDALTARVTELVEQIPAAWGVDADGSTGPRAGTSPGSPALPAVMRLDEITGCGVIAAQAIIAEIGLDMTVFATPGRLASWARRCPQTRQPGNKTTSGQAGKGNPWLGGILGEIAASAARTDTFLGERYRRLVRRRGKRKALTAITRSILVIIFHLLSDRSARYRDLGPDFYDTRISEERKIRNHISQLEALGYTVTLTQAA

SEQ ID NO: 192547 - protein, 401 aa, unidentified
METVRDNAVRVKRFRELKATLRTDRSRLLVGLDIAQAEHVVHLRQAHTRVVVPTLTIPNTTRGFTQLWTRIQQAQRATGCRDVVCGLEPTGTYHQAVATFLEAQGADVLLLSSSVAYWNRRTQDGTWDKNDRKDAVNCADLLEQGKVLFYSQPTGPLVELRHLVKCLRRARTELAACKARWRTTLRPALAPMGAPLPSRLWVELPAVLQAWEPVTPGRPAVPKGRLPLGLAIACADLGAQVTAVQARIATLEAALTPLAERLPAYTLLRSIPGVGATVGAILLAEIGDIGWFTQFSQLRKLAGLDIVRVQSGQFAGQMRISKCGRGLLRWALYHAAVGLARTAGGRVRLAALKAKRRGDRYAGFKAVTELAAKQLRVVWGVWRSGAPFDPTRAGSLRRQVR

SEQ ID NO: 192548 - protein, 463 aa, unidentified
MSKKRQSKDPGHADKAKLDWKALEVVHPNAAGIDIGGSEHWVAISPERDEEPVRRFDCFTADVEQMADWLVDRGVRSVAMQSTGVYWMPVFEILQQHGLEVYLVNARHTKNLPGRKSDIAECQWLLKLHTFGLLNNSFQPTDEIRTARTLWRHRGGLVAQASSAIQRMQKALIEMNVQLSNVLSDLSGVSGMAIVQAILDGEREPRKLAALADPQVKASKAVIAKSLEGNWRPELVFVLRQEVEMYRICQDKIAACDRQLQQHLKGMEPKVDLESQPLGPRPKGKRARGNAPKFDLRTELYRITGVDWAQVDGIDVQVAQSVIAEVGVDLNAFPSEKQFANWLGLCPTNETSGGKVLKRRTPKVVNRAKVAFRQAASTLIRSRSYLGAQYRRLRTRLGAPKAITAMARKLSCLFYRLLKHGQQYVDKGVEFYEAKYREQQIRSVIKRAHQLGLQVAQPAGKPA

SEQ ID NO: 192549 - protein, 418 aa, unidentified
MNQIRDSLIVGIDVSLSNNVATFMRDDGQEFARYFKFPNDLPGAIEFVKRLNSLIVTHNFTHLKIGIESTSLYWWHLVEFLNSDNTGLLLKPEVYLLNPNRVDAFRKGFPNLPKTDSIDSWLIAEIVRIGRLSPNRPPDMEYAPLQRLTRFRCQLVESLITEKNRALSLIFLKFSSYSDKSQNPFSDIFGKTSLNLIENFTPEEIANTSVEDLIKFISYSSKNHFSEEETIKYVEELNKLTRRAYKLNPKLLDTVSVTLTMTLENVRYFESQIKKINKVIEREFSAFPQKQMLSLVRGLGPVLSAGIVAEIGDINRFRSERNLASYAGLVWRKHQSGEYEGDDTPLTRSGNEYLRYYLVEGANCLRMHNAEYSKYYNRKYQEARTHHHKRALVLTARKLVRLVFALLSKNQNLLGRSR

SEQ ID NO: 192550 - protein, 405 aa, unidentified
MEVINPCCCGLDIHKKTIVACLISPEGKEIRSFGTMTESLLDLADWLLSNNCTAVAMESTGVYWKPIYNILEATDMEILVVNARHIKAVPGRKTDVKDAEWIADLLRHGLLQGSFVPDREQRELRELVRYRTKLTQERSREVNRIQKVLEGANIKLGDVASDIMGKSGQDMLRAIVSGNQSPQAIAQMARGKLKSKTDLLEKALTGLIGAHQKMMLKAQLRHIDFLNEEIQTLSKEIESRMRPFEAAIEALDGIPGISRINAEQILCETGIDMSRFPTHRHFASWAALCPGSNESAGKRKSGKTRKGNMALKAALTQAAISASRTKGTYFNAMYHRLAARRGKNKAIVATAHAILVTIYHMLKDGTSYQDLGFNHYDKINHQATVKRSIKRLENMGYKVTIEPAA

SEQ ID NO: 192551 - protein, 463 aa, unidentified
MTLGIDVACRAAHQGSLADEAGRFAWSGRRFRTAAADLQRLWESIPQGAAVTVVMEPTRNAWVPLAAWFRRHGAAVILIPPEQSADLRDYYSKHAKSDRLDSRMLARLPLLHPEGLRPAEGLGPADTLRRATKLRASLVKRRNVIVARLDSYLELLGPQWHAAFGGKLTRYTPLRFLATGYADPHALRRLGKTRLTRFIWRYSHGAWGDQHATRLLAAAAETLQLWDGELSYPDLAEDIAAEARLALALCTEIRDLDVKLASLLHQVDPAAIMTSVPGVGIIHGAQILARLGNPARFQSLAGARSFTGLVPSLAASGTSGHHGPPTKSGDAPLREALFMAANAARRTDPTLAARYYRLMVHQGKHHNSALCHLSTILLNRIIACWRAGTPYQIRDTDGSPLTTAQGRAIIAERYHISDELRAQRRTSHTQKGTSRRHKESPSAPTPARPRTTLRPPAEMLDTA

SEQ ID NO: 192552 - protein, 387 aa, unidentified
MSDAITLIKAADKLFIGMDLHKNTSTFVVKDREGKLIDSMKVLTDKNDVTRYINAIKRNGDGKELSLVVEPVSQWYYYADLIENLGVDVHLAHPMEVKAIAHAHIKTDKIDAGVLADLLRTNFLPEAYFAPAEVRGWKEQCRFRASLINLRTQVKNKIHAILFKHSLKHNFSDLFGKGGRRWLASLELKEPFKGNLDKYLSLVDYLTNETGYAEERITNTVINCPQAKLLISIPGISYCSALTIMAEIGDINRFISVKHLQSYAGLIPSTYNSGDKQIHGKITKRGSKWLRWIMIESAYHQMNCKRIPGFGSYYNTLKKRKGSKTAAVATARKLLAVVWRLLKDNRPYEVADPRLSAIALATAGCWKSGPIASKISSVSPVVLTTAD

SEQ ID NO: 192553 - protein, 382 aa, unidentified
MWPDRSVLLARLRRALAENDDTSSDSHWRHPVTVVGIDSHKKTHTLVAVDQVGKRLAQLTVEATAKGHRQVCTWLGQFDQVLLAIEDCRHLTRRFEADLLLAGYAVVRVHTRLMAGARRSARERGKSDPIDAEAVARVALREPDLPRAELDGPTREVKLRSDHRRTLVRQRTAIANKLRWFLHEIDPGLAVPSRGLKRLCVLDSLEADLAAHHGVVAEIALDLVQDCRRLTVRINAMESQLRQLVCELAPNLLAVPGCGVLSAAMILGETAGAARFKSKDAFARFNGTAPIPVWSSNTVRVRLNRGGNRTINNALHMAAVTQVRRDGPGATYYAKQIATGKTVKEALRLLRRRISDRVFRALLADEAARDNQQIAQTPPQAA

SEQ ID NO: 192554 - protein, 367 aa, unidentified
MRKSSKVFVGMDVHKESIDITVAEAGGEVRRWGQIGGDRVALGKAVRKLESAGGELHFVYEAGPCGFWIQRLIAARGHTCWVVSPSLIPKKSGERIKTDRRDSEKIARMARADELEPIYVPSEEDEALRDLVRTRDDALIAQRRARQQLKALLLRNEIRYAGKSSWTQAHRRWLSELKLPQPVQQIAFEEYVDAIEVASSRVERLTRAIERSTEGWRFAPVVEHLQALRGVQFVHAVTIICELGDLARFDNPRQLMAYLGLVPTENSSGERRRQGAITKSGNRFARRALIEAAWAYQHPARVSPVIARRQQGLPQGVRDMAWKAQLRLCARFRKLCARRLNKNKAVVAVARELSGFVWAIAKDVKLA

SEQ ID NO: 192555 - protein, 304 aa, unidentified
MSDARLDVCIEPGHRLASFKNDTAGIAELAAFCREHAVELVVMEASGGCERRAFVGLSEKAISCALTNPRNVRRYAEAMGILEKTDRTDASVIARFADAKSLAPTPLPSQAQQRLKALDARLRQVTSDLTVQKQRRSALRDNPEMLASLDEVIALLKRQSRSLEGEIASMIDDDPLWAKLAEAWREVKGVAGRTVGRLHAQLPEIGLLSNKAASKLVGLAPIADDSGKRKGKRSIHGGRAEVRSILFLVAATAARYHPGLREFRDRLQKAGKEKMVIRIALARKLLVILNAKARDARAEYANAT

SEQ ID NO: 192556 - protein, 379 aa, unidentified
MMTPSIAATCFVAIDLSKSKWLVALDAPQLAKIKSVRLDGFDTAGLIDLVRATVAEASELCGPHQRPIVCFETGYDGFWLQRLLSSEGIETLVLDPTSFLVNRRARRVKTDRVDAEGMVVLLKNYCSGDRKAFRTVRVPTVAEEDAKRFHRERKRLMSERTGHINRIRALLALQGVRHINPAMVTWRKKLDGLETADGRPFPDQLMREIVRSFERLELTNKMIKALAEERDEALATESERFPEHEKAVLLEGLRGVGRHSAMLLSAEVFGREFKNRRHLSSYLGLTPSPYSSGDVERSQGISKAGNRPARTLGIELAWCWLRYQPQSALARWFRKYTAERPGVRKKVAIVALARKLIVALWRYVETGLVPSGAVLKAEV

SEQ ID NO: 192557 - protein, 346 aa, unidentified
MMIIGCDFHPSWQQVCWLDTATGESGEQKLVQASGDAERFYRQVAAPALIGMEATGNCHWLVDLLAEIGHELWVGDAAQIRASYVRQQKRDKRDAVHILKLLVEGRFPRIWMPSSQVRDLRQLLLQRYKLVMIRARVKNEVQHLCLNQGVQRKRKLWSQAGQQVLRELPLKPWAGRRRDDLLKLMAMLDQQIEPLEEAVKAEAQGDKMARLLQTQPGVGPITALAYVLTMGDVGRFPRGKQVASYLGLIPREHSSGGRQKLGAITKQGNRMLRMLLVEAAQIAVRYDPEFRRQYLHRCHQKPKAVAKVAAARKLAVRLYWMLRTQVAYPEIVRIESSPRVPLVGAS

SEQ ID NO: 192558 - protein, 358 aa, unidentified
MYKFMKKFFIGVDVSKDTVDVSFFDDDRMKSPEYLAQYSNSPKGFREMVKDLRMCCHGVSSGQWLFCCETTGRYDHPLCHWLVDHGMVVWRESALQIKWSSGIQRGKNDRVDSLRIAEYAWRHQDKMQKFVKPSESLSNLKAAFTHRRRLVEKRTATRCQLKSMSSEKGLSASVARMIVRDLSREIERLSASIATMDESIQEIIRSDSELDRNYRHIISVKGVGPITAVALIVCSGNFKAITSAKKMACYCGVASFRSQSGTSINRKASVSNLSNRQIKSLLSMAARSASRSNPVFAEYFNRTLSRGKPVALVYNNLRNKIITVIYKLIERDCDFDVDYMRMHSTGQRANESAIREAV

SEQ ID NO: 192559 - protein, 373 aa, unidentified
MDQHIRAFVGIDTSKLHNAVAVAEEGRGGDVRYLGEIDTTEAATRKLVTKLAAKYRQLTFCYEAGPTGYGLHRLIGKLGHDCIVAAPSLIPKKPGVRVKTNRRDAVGLAKLLRAGELTAVWVPDERHEAMRDLSRAREAARKDLRGKRQQVSSFMLRLGRHFPGKKTWGPAHMNWLMLQKLEHREQRIALEELLGAVRQESERVERLEQAIRNAVPEWSLAEVVTALQAMRGIDLVAAVTVLAEIGDLSRFQNPRELMGYLGLVPSESSTGDTVNRGSITKAGNGRVRRILVESAWSYRYPPRVSREKQMKVAAAPRAVREIAWKAQMRLCGRFRSLTRKGKQPNVIAAAIARELSAFIWAINREVMAHATAS

SEQ ID NO: 192560 - protein, 353 aa, unidentified
MSKKKIMVKSTKDNSYPDNIDQFDHYLALDWSMVNMAVARITKKMKQPIVIDVPANLKNLKDYIDNLNGKKILTIEETTTSQWLFVELVDYVDQIVICDPYRNRLLSDGPKTDKIDASKLCLLLKNGLLKEVYHTTDSMYDLRLLVSAYDDQVRAGVRLLNQKSALYRSEHKSHKKDKQVEENEIKKFVLTNIEEGIESYREKKDLYEKEFDRISRQNKTLRNLKTIPCIGPISSVTILSIVIDAKRFKSPNHYLSYCGLVNHEKLSGGRSYGKRKPRYSRKLKGIYKSAAIRAVNHENPLRDYYDYLITEKKITERNAVNAVARYIAKVSLGIMKSGKKYKPYKKVDKEKAA

SEQ ID NO: 192561 - protein, 355 aa, unidentified
MKYYTSTTQYNCGIDLHARQMYVCVMDRQGKKLVHTNVKNNDFGFFLKLVEPYKHDLTVCCECMFGWYWLADACQAAGLTFVLAHALYVKAIHGGKNKNDRIDSEKLTHLLRSNLIPPSYVYPSEKRPLRALLRQRLFYVWRRAELLARIYSHQLAHNRTPAKQTRRVRDSWEEQLLAAEDNPLRQLALKNDLAMIKHFDHQISQLEEELQRQTKKVASREYALLQTVPGIGESLGLTILYEVGDIERFPTVKDFLSYCRLVKGTVASAGKIKGLRGAKLGNPYLRWAFGEAAVIAKRDHFLIRPLAQRLEQQMGGNKFNANTVVAIKMARAVYFMLKNKTVFDPERLVAALAKK

SEQ ID NO: 192562 - protein, 324 aa, unidentified
MYIQVGIDVSKDKLDVCYLTDSKLVKFTRIVVDNTEKGHKQLLRWLKKETKKSFNHIQVTLEATGVYHLNLAYFLQAKQLRVCVTHPLHSKHYAISLSMRAKTDRLDSIMLSRYGAERNLPEWQPAPKELVELKALNVRLTAVEKDIRREQNRLESVVIANHSKAVIRLNKQSIRQLQKQAETLVELIDELIESHEQLRTNRRLLETIKGIGEVTSRHLVAEIYSGRFHNAGQCAAYMGLVPVPQQSGKFEIVHLSRAGNRALKAKLYMAAISAKQHNPVLKAHYDKLVARGKCKMSALCAVMRRLVQISFGVIKHQKEFCLPA

SEQ ID NO: 192563 - protein, 397 aa, unidentified
MYIVGIDIAKRKHEAAVIDGEGAVIIKPFSFTNNCSGYNRLLAMLAKAKLPLDEVSFAMEATGHYWLALFTRLQKEGFRVQVINPVQTNSIRSFYIRQAKTDPRDALLIAEVIRFGHFSESTLHPENIYELRELCRGRHAIVSMQADVKRKVVALLDQVFPEYETAFTNMFGDTSMAILQTCPTPKELSEMPFEELCHLIEVSSHKRFRMAKAQELQALARNSFGFAMAGDVFSTMIRLYAKHLDFLKQQVREMDRKIAEIMETLDTPITTITGIGPTLGAYILSEIGDISRFSSAAKLAAYAGIDPTMRQSGEYNGVRNRMSKRGSPYLRHAIWLAASSAVLHDPALKLYFQKKRDEGKPYMASVGHACRKMVSIIYAVMRDNKAYTPYIPNEISA

SEQ ID NO: 192564 - protein, 401 aa, unidentified
MKEFNAEAVRIETASALEAVRPAQAGRKYPAYIGLDVHKETIAVAVARVGRAAPESRGEIANKPKTVAKLVERLNQEFDGEVLLFCYEAGPCGDGLYRQLLALGHDCQVVAPSLIPKKPGERIKTDRRDACKLAGTLRSADLTAVWVPDEEQEAMRDLTRARDDMKGQERKARQQLNAYVLRHGHAWPSNKTRWTQTHYNWLESLKFAHDWQQVVLQEYIDAVKAASQRVADITAQMERVLPQWSLAPVVDSLVALRGIDKLAAMVLLAELGDISRFDSPKQLMAYLGLVPSEHSSGGRRRQGAITKTGNSHARRMLVESAWSYRFPARQTAHLKRKAANASDEAKVIAWRAQKRLCGRYRTLLQAGKNTKQTTVAIARELTGLIWDIVCHEMPKVQQTTR

SEQ ID NO: 192565 - protein, 360 aa, unidentified
MQDVSAKTSGMDRRVVGLDVGDRKTHVCELSTASGDVLAESSMTTTRDSVRAFFEGKERMRVVLEVGKQSPWMSHLIARFGHEVLVANARKVSLIFKTRRKRDRVDAQKLARLGRVDPELLYPIQHRGEEAQHDLSILRSRECVIASRTKLINHTRGVAKSSGYRLPKCDAKCFANRMRGAIPEPLRPALDPVVEMIGALTQTIKAYNKQLEELAKTKYAQSELLTRIHGVGLITSMAFLLVIDDPKRFQKSRTVGAYLGLVPALDDSGDCHRQLHISKEGDRLLRGVLLQSAHYMMGPFGKDCDLRRHGERIVAAGGERAKRRAVVAVARKIAVLLHRLWLHGEDYDPFFNSADAVEAA

SEQ ID NO: 192566 - protein, 356 aa, unidentified
MTSTKYIGMDVHKESISIAVMNASGKIVMECVIETKASMILQFFDGLRGDLQVTFEEGTSAAWLYDLLKPHVTKLVVCDPRKNASMREGNQSDKIDARRLAELLRLNHLNPVYHGEHGLRSLKELVRSYLTITKDLGRVMSRVKAIYRSWAIPCTGKQVYAPRHRAEWLGKIGEPGVRRRAEFYYQQLDALRTVRQQVRRELLVESKKHQAWKRLCQIPSIGPIRSAVLLGILQTPHRFRTKRQLWTYSGFGIETQSSADHRSVDGQLQRVKKQSSIRGLNRNCNHDLKNLFKGAAIVASSKPGPFQEFYTALLTKGIRPEMARLTLARKMLHPWGSSLAVAVGFSRHSGSRASLS

SEQ ID NO: 192567 - protein, 344 aa, unidentified
MANDTLVGVDLAKDVFQVAISCVPGKVAKRLRLSRKAFAEFLTHTPPARIVMEACGTAHYWTRYAEARGHTVALLPPHQVRPYVLRNKTDRTDVDGILEANRNAEIRPVPAKSVTQQGIGSLHRLRSAWMSTRVARLNTARGLLRELGVFIPLGAAKVVPRLREAIGDADSGVPDLLRASLHELADEIGQLEQRIAAIEHQLTALARQLPDVARLMTIPGIGIITATALFAFIGSVERFPSARHLASYLGLTPREYSSGSRRRLGGISKRGDTYLRTMLIHGARAVLARARQGSRPDRLRQWAIELDARVGHNKAAVALANKITRVVWSVWRSHTDYTSVPLAA

SEQ ID NO: 192568 - protein, 339 aa, unidentified
MTLYCGIDLHSNNSYVAVSDEQDKPVYEKRLPNDLQRIVAALAPYREELAGVVVESTYNWYWLMDGLRDAGHTPRLANTMAIKQYEGLKHGDDPSDARFLAHLLRLGILPTGHICPRAERALRDLLRKRQQMVRQSVMHLLSLQGQISRYTGRRLSGNEIKQLEAEQIAELIEVPEAALAAQMNWLMRRALSDAGESLAQAAMKQVRHRAELKWLRSVPGIGEVLGMTILLETGDIGRFRAAGNYASYARCVSSERLSNGKRKGSGNRKNGNKYLGWAFMEAAHFAIRWNPKIRAYYQRKQAKAHPMVALKAVANKLAKACYYVLSRREAFDVDRAFAN

SEQ ID NO: 192569 - protein, 410 aa, unidentified
MKVLHRRCAGLDVHKAEVVACARVLAGRKVVHEVRRFGTTTRELMALAAWLESLEVTHVAMEATGVYWKPVWHILEADLTLILANAQHVRNVPGRKSDVNDATWIADLLAHGLITPSFVPPQPIRELRDLTRTRRQAVGEAVRHQHRIEKILQDANIKLSSVLSDPMGVSGRRMLAAMAAGETDAGKIAELGSPRLECGRGALIEALSGRVSEHHRYLIGWHLRLLDEIEAKIAELDQRIEAQIAPFRAAIERLTGIPGIKQVAASAIIAEIGADMSIFPTAGHLLSWARIVPRLDESAGKKRSRRVKKGGAWLKPVLVQCARAAARKRDSYYGAQYRRLKARIGDQKAIIAVAASILTAIYHMLRDGTEHADLGAAYLSRREGDSKAIAHQLARRIRALGYQVDLREAA

SEQ ID NO: 192570 - protein, 348 aa, unidentified
MRFYSQAHRFYCGIDLHTRTLSLCLLDAAGAVRLEVTLPPDRDRLAAVLAPYRDGLVVGCECLFAWYWLADWCAEQGIPFVLGHALYLRAVHGGKTKTDAVDAAKLARLLRGGTFAEAYVYPNAMRATRDLLRRRTYLVRQRATLIAHLQTTFLQYNLPAPQKKLAYAANRADLDLSVFPDPSTRSMLEADLAVAAALDAQVKRLEAELVRTAKVHDPQTFARLRSVPGIGPVLALIMLYEVQSIHRFEHEGQFLSYARLVGGVRESAGKSKGTGGRKIGNAHLKWAFGEAACLMLRESGKAKTWVARKERKVGKPRALGALACRIGRTVYHLWRKQASFDAAKFLAS

SEQ ID NO: 192571 - protein, 355 aa, unidentified
MNDAKYIGLDLHQATISAAVLDSIGKLMMECILETKAETVLQFLQGLRGSLHVCFEEGTCAAWLHDLLKPHVAEVLVCDPRKNALLKAGNKNDRIDARKLADLLRCGLLSPVYHGEHGIRTLKELARSYLAITQDLTRVMNRLKALFRSGAIPCAGQQVYAPHYRGDWLAKIGEVGVRRRAEVLYQQLDALQALRQQVRRDLLTESRKQPATHLLREIPSIGPIRAAMLIALLQTPHRFRTKRQLWAYCGLALKTYTSGEYRFVQGELQRSKSLLAIRGLNTNHNHDLKNLFKGAAIRAAIVPGPLQEFYAALVSRGMKPSLARLTLARKIAAITLRVWKKGVHFDAEQLKPQAA

SEQ ID NO: 192572 - protein, 331 aa, unidentified
MLAANGEHLSTEAFPNTHAGRARAIAWAARRTSGDLDALWVIEGAGSYGAQLARQTAVAGYRVAEAARMGRTGRRGIGKSDPIDARRIAAAVLPLTLEQLRTPRMDERLRAAAQILLTARDELTGERTRAVNALTALVRVADLGIDARHPLGARKITEISRWRPREEDVAAATARTEAVRLAKRILALDAEIADNMNRIGELVDASPAADLLEETGIGPVTAATVLVTWSHPGRVRDEAAFAALAGVNPIPASSGDTTRHRLNRGGDRRVNRALNVIAMVRIVHHPQTRAYVDRRRAEGKTDREIRRCLKRYLARRLYRHLNNAAAAKSGG

SEQ ID NO: 192573 - protein, 348 aa, unidentified
MRFYTQQHRYTCGIDLHARSLYVCILDDTGQKLVHKNVKASPEALLKLIADYQDDLIIGVECMFSWYWIADFCEDHGIEFVLGHALYMKAIHGGKAKNDKIDSEKIARLLRGGMFPYAYVYPRSMRSHRDLMRRRIKLARERGDLMAHIKNTLSQYNLPAHSQNLRYEKHREPMRSAFSDPSVQRSIDLDLARIEFYDGQLAKLEWYLKRTAKSVDPKTVILLQSIHGVGDILSLVILYEIHDIARFPRVQDFVSYCRLVKCQRESAGKKHGTGGAKIGNPYLRWAFGEAAVLFLRGNPQAQRWLEKKTRKHNKAKALTILAHKLGRAVYFMLTRKTLFDQERFLVSS

SEQ ID NO: 192574 - protein, 341 aa, unidentified
MYNFIGIDVSKATLQVYIPIKDENINISNTKKSINSLYSKLKKYYKKESSNLVFIFEPTGPYSSLLKHFCADKGILAYMVNPRQSANFSKALDNRSKSDIIDTKMLYLFHVMAKEGDLVVPMVNELQETLGEMLSYFKLLIKQRNSFSNHLESLESKDGIGYIIKQLKKEIKQLKLQEENILAEMLQLIKSDTYLYERFENIKSFKGIGDRAGIALIHLFITYPEANRQELTALSGLDAIEITSGTSIQRKSRISKKGSAIYRSMLFMPVLSAVRSNKYMQAVYDRLKENSKHSTVAQIAVMRKMLLITHSLFKNNIAFDNELYEKRVSWKEPESNSEKVA

SEQ ID NO: 192575 - protein, 334 aa, unidentified
MKSDAVYIGVDVSKAKLDVYIPPKKEGLRAEIKELENNLAGLRKLRSIARSAKGTICVEPTGGYELELIAFMHKFDVPVAYADALRVRQFAKAEGNLSKNDAIDAALISRFAAKVGVRIIDKKDLDIVELKRKTKFRQALIESRTALISRLDTEFDDEIKEMIKAQIKHLNKLARKIENSCIEIINNNERIKELLPRFTMIGGVGDLTAVSILAQLPEIGRLDDAKLNRLVGISPEQRQSGTKEWQRRIGGGRKDVRNTLYMAVTAGLMWNSILSDYYRKKRAEGHSHKWAMVPTMRKLLSLLNRIARDPNFIPLPEPESTKKNAGAGRKKKSA

SEQ ID NO: 192576 - protein, 385 aa, unidentified
MKGKTFKPTDYEVFGGLDVDKRSISVTFTNHQGFIRSLRMPYSVEHLVNHVRKHFGDQKVAFAYEAGPTGYGLYDGLVAKAYPCLIASPSMIPKAPGQRVKTNRLDSRGLSENLRGGQLRSIHVPSALYRELRHLTQLRDTFVSEMVGMKQRIKSLLLFEGIEFPPAPAGRQWSFMVKDKLRKLECSKTVRFKLDQLLDSLEFSEKQVLKATREIRRFCRNDAELSQCIEYLMTIPGIGWIVASQLVARIGDWRELKNIRQLGGFLGLVPTENSTGERTDRGSITHTGDGRLRSKLIQASWSAIRQDGELREFFRSVCRTHARHLASRVAIVAVARKLSVRISVVLMKQRPYEVRQKVQSAPLTQEETSPQGTTRREPEPGEKNS

SEQ ID NO: 192577 - protein, 320 aa, unidentified
MNSHYKIEKIQTEINHVGIDVSKQHLDVSIAGSKTQRLANTQAGLRVLHQKLGRLAHPRVTCEATGGYEKLLVDSMLDAEIEVCVAAPGRVRYLANAEGLLAKTDSIDAELIRRFAEKIPLPRQIKQDPAAQKLRQMSDYRRMLSEDIVKTSNRLELAQGYLREQLQSQLTHLQGLMKKVEVDIKAHIRNCEELAHKAARLQELKGVGPVLAATLLAHVPELGKVGDKTLACLVGVAPHPKQSGNFKGKSSIRGGRANVRHVLYMAAVTAARSNPILAAFYQRLRTQSGKTAKVALVAVMRKMLSILNKMIAQPNFSLAH

SEQ ID NO: 192578 - protein, 367 aa, unidentified
MKMSVGVDLHKSQFTVYWRSNDGLIGKHERYRTNDEGYHEFEKALQAVTATGTPVEVAVESTGNTRYFKHRIERCGIPVRVVNTAKFKVVTESVKKTDRHDAATLAEFLEKDMLPEARLCSPESEELRRIIKTRKTLVGTIVTIKNQLHGLLLGIGIETTRGQLQSKKERRRVQSVLAAHHVTGAAVDPLFETIDRLTEEVKKLEKVITEMTRNDRVVQLIMTIPGAGLITATTIRAFTDDIRRFPTAGKYAAYAGLVPWVQNSNETIHHGRITRRGPVELRTALVQVVMGMVRNRRVTGTYRIMERYDRLKREKGSGKSIIATARQLSEIIYRMLTDDAEFDELKMLDPAMRRKALEMQAAAWDAA

SEQ ID NO: 192579 - protein, 487 aa, unidentified
MAKGTSVYERLTRGNRKQRKDLQRRFYSDNPGLEAIHPNAAGIDIGSESHFVAVPPARDEEPVREFGSWTADLERMAAWLKSCGIDTVAMQSTGVYWFAVYDVLEKHGLKVFLVNASHTKNLPGRKSDVQESQWLMKLHTYGLLRNSFRPPEDIRPIRAVWRLRDRHVQDAARSIQHMQKALTSMNVQLANAISDIGGLSGQTIIRSILAGERDPQKLAQLRDRRIQASEEEVARSLEGNWQEDQLFELRQAVDEYNFRQKQVAECDCKLQAYLAVLPSRRVPPADTGKVPPPPPRATGRKKKRAKRVGGGNAPQSFDLAAELKRVTGVDALRVDGINLMTIQTVVAELGTNLGEWFPTEQHFASWLGLSPKRDVSGGKVIRHTREKNRNRVAGVLRLAATSLLRSDSYLGARYRNLRSRLGSPKAIKAMARYLACIIYRLFTKGQAWVDRGAEQFEQNRQTRDLAKLQAQANSRGFRLIPLTEQTA

SEQ ID NO: 192580 - protein, 387 aa, unidentified
MPQPNDMSRSLVPFEQETTLVAIIELSQSSWLIAGTVPGVERQPLKKMEPDEANLLRLLHRWRDEATRSGHAIERIVVAYEAGRDGFWLARWLAKHDLEVHVIHSNSVAVSREHKRAKTDRLDAAMLMRVYLGWLRGERGHCRMVAVPTLAEEDAKRPSREREKLVGECTSAVNRLKAALARLGIRGFNPKLRKASGRLEILRTPENEPIPPNMLDEMRRDLANLASLRDQIKAIEQARLERLEQAPRNRTNVMVLTLASIIGVGIETADRLVNEVFLRNLRDRRAVARYAGLTGSPDESGSKRREKGLAKSGNARVRRSMIQLAWRFLNFQKDSALALWFRSRTSGAKSANKKTMIVALARKLLVALWRMVTFGEVPHGVVLRHAT

SEQ ID NO: 192581 - protein, 364 aa, unidentified
MKKIAHLGVDYHVKTVTITVYINDEGFYETVRFKNIDKTIAKYLKKMSKQFEIRLCYEASSSGYVFQRKMEKLGYHCDVIAPSLIPRKPGDKRKNDHRDSKKLAENYAKGLLTVVHPPTEFEESIRGLVRCQLAMKNSEKRIKNQINAYLLSQGHRWPKSRWTLEHYSWLSNLELRDQYSQMALEEYMGHLEYITARVQALKQDIKKIATSEIYAPSVKKLRAFRGIGTMTAMLLIAEITDFRRFPTAGALMAYLGLIPGEESSDSKSKDKAITKAGNTRCRKAIIGAIQHYMKQPRLTAPMKRDLQEVDAHSANIAIKCMKRLNKRFWALTCKGKTHNKAKVAVAREFVGFIWAMMQPEAVTT

SEQ ID NO: 192582 - protein, 312 aa, unidentified
MPDQPQPEYVGVDISSSRLDYCASDTEEGNCSNDAPGRSQLIARLKRITAPRVICEASGGYEKLIVAELLAAGIEVCLVQPGRVRAFAYAEGLLAKTDRIDARLLRRYGQKIALRLVQPVDAAAATLRELLEHRRQLVEQLSEVDGRMALAGATLKKLLVKQQAFLKRQIAQVERMIHDHIDQDPSLREKSQRMQQMKGVGPILSATLLAYVPELGRIESAPLSALVGVAPHAKDSGKNQAPRHVRGGRWQVRNVLYMAAVSASRSNPILAAMYNRLKARGKPPMVCLVALMRKMLCVLNRMLQKPDFALAH

SEQ ID NO: 192583 - protein, 392 aa, unidentified
MYIIGIDIGKNHHEASIVSPEGKQIGHSLRFATTHKGADSLMSFIFNNIGNSSCFFGMEATGHYWYPIYSFLKARGYTIYVINPIQSDSLRKMYIRQTKNDSIDSFLIAEVIRFGQFTTTSMADENILAMRQLCRYRDSVISSRTEIKLRISTIMEQIFPEYEKQFSSLWLSTSMGILEKYLTPENIENAPIDELFEIIKDKSHNKLTMKKAISIREAAADTFGIKIAQDAFSFQLKQLIDRMNFLDKQIEALDCQILEYYEKFDCYLHTIPGIGMIAAATILAEIGDINRFKSSSALVAFAGIDPTVRQSGEFSSTHNHMSKRGSPYLRHAIFLAATTCSFHNSPLNAYYKKKREQGKHHLTATGAVARKLTTIIYAVFRDGKPYEPKKFC

SEQ ID NO: 192584 - protein, 336 aa, unidentified
MMKEFIKQNVGVDISKDDFKVCYSCMTSTMEIVRLGSKTFDNSQKGFTSFLEWVLHKNSGNTGASPCFTLEATGVYYEGLAYFLFEKGSTVHVVLPNQSKKYGQSLGARSKTDRIDAQILSQMGLERKLNPWKPVSPNFLKLKQLTRERDAIICERTSVSNQLHAYRHQAKPNSETVKRAEERIDLLKRHIVEIEKEIKALVEADKILSKRLDYVLSIPGVGLITAVTIVAETNGFASITGIKQLTGFAGLDIKISESGKWKGKSKISKQGNRHIRKSLMFPAFSMIKHNDKTKKYYERLSEKKGIKMVAAVAVQRKLLGLIYTMWKKQEVFSNDY

SEQ ID NO: 192585 - protein, 465 aa, unidentified
MSRRSTSNRSHSDRVKKRIAGHLEKINLFAAGIDIGSESHFVAVPEELDEQPVRSFGCFTADLEAMADWLVKLGITTVVMESTGIYWIPAFEILESRGLDVKLVNARHVKNVAGRKSDVLDCQWLLQLHTYGLLNGAFRPDEQVCSLRSYRRQRDTLVGYRASHIQHMQKALRQMNLLLDNVVTDITGKTGMTIIRAILNGQRNPVELAKYRDKHCKKSEEEIAKSLKGHYRDEHVFALRQAVELYDTYDEKIRACDKALEQKINTFDSKDDKDSQKPSTPDKLSKKRKSRCAPDFDVRSELNRVSGVDLTDIDGIDENTALKIVSEIGLDMSRWPSAKHFASWLGLCPGTKISGGKVLNRKTKRLPGAAATAFRLAAYSLTRSKSALGAYYRRMRSKLGAPKAITATAHKLARLVYSMLKHGSQYVDEGQEYFEQRYRERVLKTLKQKAKDMGFTLTPVETAVG

SEQ ID NO: 192586 - protein, 371 aa, unidentified
MKQQTKSSNITVGLDLGDRRHRFCALDERGEVVEQDSICNDRVSLRKLAGRYHGALGVMEAGAHSPWISRFLEALGWRVVVSNPRKVRAIYQHERKSDQRDALMLARIGRMDLALLYPVRHGTAEAQQDLLRIKLRDSLVRARVAVINSVRFTLKSLGYTVRNPSSERFHKVVMEEVPESVREMITPSVQALAELTARIKMLELEINTLAQLKYPQSAQLQQIPGVGPITALYFVLKIEDPNRFAHVRDVGAYAGLCPRRDQSGESDPQLRISKRGDAYLRRLLVSAAHYILGPFGPQSALRAYGLMLAADGTARAKKRATVAVARKLAVLLLSLWKSQQPYQPFPGACLNGKQEDRRSGTIALHRMEATD

SEQ ID NO: 192587 - protein, 348 aa, unidentified
MLADQLDYIVGVDPHRDSHAVAVVEVVSGAVVFEATVAASSDGYAHALKLVDEHAAGRRAFAVEGTGSFGAGLTRFLTVRGERVLEVGRLRRERRSGGKTDALDAVRAARSVLAKERPGTPRAGGERQALQALVAAREGAVNAKRAGLCQLRDLLITTPEPLRNELRPLTRARLLQRLAATRPGGGRDPELRGSMLALRSIARRVLQLTAEERELAREIETITRKLAPQLLEQPGVGPHAAAQLLLSWSHQGRITSEAAFARLAGAAPIPASSGQTVRYRLDRSGDRKLNRALHMILVTRKRSHPATIAYIERRMQEGKTRREANRCLKRYLARNLYRLLEHGAPLAT

SEQ ID NO: 192588 - protein, 272 aa, unidentified
MEHIGIDVHKRECQVCILTESGELIERRIRTERGRLKEVLGSRPKAKVLLEASTESEWVARYLEELGHEVVVADPNFAAMYATRSRRVKTDKRDARTLAEACKLGAYRASYRVTDARRHIRAQLAVREALVRSRARAIILAGALIRAAGLRVGTGGPHTFLQRVEKVELPGALKAQVAPLLAAMRTLNEQIAFLDGVLERLAQQDEQVSCLCTVPGVGAVVASAFVCVVDEAGRFDGPHQVEAYLGLVPSESSSGEKQRKGHITKAGNTRVR

SEQ ID NO: 192589 - protein, 436 aa, unidentified
MDIGSTEIVAAVPPERADETVRAFGTFTPDLEALVAWLVSLGIDTVAMESTGIYWVPIYDLLEQHGITPYLVNVRHVKIVPGRKSDWNDAQWLQKLHMLGLLHGSFRPDAEILALRTLVRYRAEVIQHRAPHILHMQKALLLMNLHLSVVLSDITGVTGQAIIRAIVAGERDAARLAALRNPACKASVAEITKALTGTWQAEQLFVLQQALSLFDHYTERIVACDGEIERLLAAMESRGEDDAPLPDLPPAKGKSKTKNAPAASTRAQLARIVGVDLVAITGLSASSVQTILAEIGTDMTRFPTVKHFCSWLGLAPHNDISGGKVLRSRTMKVVNRAAQAFRQAAQSVARSNTAFGSYFRAMRARKGPQQAVVATAHKLARTVYFMLLRGEPFQEESVAAYDERRQEREIRQLARRAKKLGFTLTEAAPRPVEATT

SEQ ID NO: 192590 - protein, 405 aa, unidentified
MFEIEDVGVFLGLDVGKSAHHGHGLTPGGKKVFDKPLPNSEPKLRAVFDKLTAKFGTVLVVVDQPASIGALPLTVARDAGCRVAYLPGLAMRRIADLYPGEAKTDAKDAAVIADAARTMPHTLRSLQLTDEITAELTVLVGFDQDLAAEATRTSNRIRGLLTQFHPSLERVLGPRLDHQAVTWLLERHGSPAALRKAGRRRLVELIHPKAPRMATRLIDDVFDALDEQTVVVPGTGTLDIVIPSLAASLAAVHEQRRSMGARINALLEAHPLSPVLTSMPGVGVRTAAVLLVTVGDGTSFPTAAHLASYAGLAPTTKQSGTSIHGEHAPRGGNRQLKRAMFLSAFACMNADPASRAYYDKQRARGKTHTQALLRLARQRISVLFAMLRNGTFYESRTPANIELAA

SEQ ID NO: 192591 - protein, 408 aa, unidentified
MNQLFVGIDVGSRGNTAYLMRPDGEKHSNFTVQNNRGGAKILIDKIVSALTTMGLEQVVIGMEATGIYGDNLVYALREDGALGRFQRKIHVLNPKQVSKFKESYSDLPKNDDVDAFVIADKLRFGRITKEVYMDDYRYKALQTLTRARFYAVQDLTREKQRFANYLFLKCSGLAQDKDIANSSATTIALMERFETVDELAYADLDELTAFVSKVGHGRFADPQATAKAVQSAAMSSYRLPKTVNDSVNQAMAVCIATMRALEKQIKVLDKQIEQIFAVIPNTLTSVPGIGKVYSAGIIAEIGDVNRFQSQASVAKYAGLVWKQHQSGEFEAQNTRLIKSGNRFLRYYLLEAANSVRRCDSEFRRYYDLKFKEVNKYQHKRALALTARKLVRLVFRLLKDGRNYIPPKG

SEQ ID NO: 192592 - protein, 349 aa, unidentified
MTMVGGFDVHRKQITFDYVDDDGLVRWGQIRPATRKTLRGWLGEHCPGGGAEFGLEGCTGWRYVVEELAAAGVVAHVGDPAEIAGLRGPKKRAKTDRADARLLRTLLLEGRFPESWIPPAHVVEIRTLGRLYCTLMDERRAWQQRIHAQLFHQGCPPVTALLSVAGRDALARAELSAVGRQYVDTALRRIDELGAEIEPLRAQLVTFARHQRGCQVLQARHYGIGWLCAAIIWAEIGDARRFSSSDQLVRFAGMDVTVYSSDAKRSPGHLSRQGSPELRWATFEAAKCAARRGSPDYAYYHQLAARRDGRNGKNPTLAVERKILRRCYHSLRELGDAALSPPEPVREAA

SEQ ID NO: 192593 - protein, 370 aa, unidentified
MNHTNTLFVGLDVHKETICVAYVAGNPGAEVVSLGSIATRQCDIDKLIRKLKGKASKLFFVYEAGPCGYWLYRYLTKQQLTCWVVAPSLIPRKPGDRVKTDRRDAVQLARLMRSGDLTPVYVPAIEDEAIRDLSRARQDAMHDLKAAKYRLKAFLLRHDIRYEGRATWNPAHLRWLAEVVCPTPAQQIVFQEYVRTVSEHHDRLQRLESELQAAVKTWRWGSVVEAIQALRGVQFTVAVTLIAELGDLTRFDNPRQLMSYLGLTPSEYSSGPLRRLGGITKAGNTHARRALIEGAWAYRYPAKVSRHLQLRLEKVPKAIQDISWKAQVRLCKRYRQLTARGKHANKVVVAIAREMAAFVWAIARVVQEAH

SEQ ID NO: 192594 - protein, 366 aa, unidentified
MRKVMAGMDLHGNNVMVGIVDDQGARLQHRRLACELPEIIEFLAPYKTELESIAVESTFNWYWLVDGLKAAGFPVVLANPAKIDQYSGIKHADDKNDAYFLAELQRLKILPTGYVYDPELRPVRDLFRRRMSLMRQRTTLFLSAKSLHQRTTGRGLELRRLKAMEPEEAAALYTHPANQLIAQIQKEHIDSLDQSIRQIEKAVLKVALQQPYYQRLQTIPGVGIILGLTISMEVGNVDRFAGPGQFASYCRTVDAKRISNGKTKGDNNQKCGNKYLAWAFVEAAHGARRFDATCRRWYDRKAGKKCTTVATKALACKLAKAAWYVMAKGTEYQAGKIFPGLTEPKAEEISGEQASASKGVGPNPED

SEQ ID NO: 192595 - protein, 310 aa, unidentified
MMSGVGIDVSKAWLDVAWSACDRRLRVANTSVGWKVLVQAMADDPHVRIVLEASGGYEQGLLDYLVQAGHWVCRINPRQARDFAKALGQLAKTDTLDARVLAQMAATIDTLSPYRSLTAAQRELSQWVRRRAQLVQMIQCERQRIALLSEPILRGWARRQLASLQGQLGRINQGIRARLKALPVVRELARTKGAGPVLISVLVGLVPELGQLDRRAIAKLIGVAPLNDDSGTRRGRRHVWGGRGSVRAVLYMAALSAIRHEPSIRAMYQRLRANGKLAKVAIVACMRKLLVILNAKARDHYAQAQLPILV

SEQ ID NO: 192596 - protein, 343 aa, unidentified
MEYYAGIDVSLESSSICVVDAIGRIVREAKVASEPEALTAWCKGLGFEIARIGLEAGPLSQWLFAGMKQAGLAIELLETRHVRNAFKLMPVKTDRKDARGIAQLIRMGWFRPVHCKSVAAQETRSLLGARKLLQSKLHDIELGLRGTLRGFGLKLGTTTPKTFESRVRTLVADHPTLLAVADALLRARATLAEQFIKLDKQLHALARGDDRARLLTTVPGVGSIVALTFASAIDDPGRFKSSKTVGALFGLTPKRYQSGETDVTGRISKIGDAGVRTALYEAANVILTRTRKGSSLKKWAMGVAKRAGMRKAKVALARKLAVVMHRMLVDGTAFVAQRTAATA

SEQ ID NO: 192597 - protein, 339 aa, unidentified
MDKSGSCGLEVSARELVVAEEAKSVQRYANTAAGHRKLVETLTRGGKRVRVVMEATGLYGLDVALALSGAEGIEVMVANPRSVRDFAKALMQRSKTDPLDAEVLREYGRRMPFRAWRRPSENRLALWAIVRRLQALTEICRAEKNRQHAVQLSVTTPACVRRDVQRNLRAQQRAMSRLREQARKCIAREAELEREYRLLVSVPGIAESSALQILGELAMLPEDRDIRQWVAYAGLDPSEYQSGESVRKRTRLSRTGNRHLRRALYMPALTAIRWEPHLRGFYEHLVNRGKRKKQALLAVARKLLHAIYGMFRTNSAYQGQLVFRLHQPQNVLARAQKNS

SEQ ID NO: 192598 - protein, 418 aa, unidentified
MKKHSNSTKKSEPTSKRAKSRGPVQRDTKEVLAELVGKLKEKLDPKKVAAASTGDEQPRGGFRPNLDRLTVGVDLGDKWSHYCILGLEGETLAEGQVRTTQQDVAEFFHALNAARVVFEVGTHSAWVQEVIYSCGHEVLVANPRLMDGAKRRKRKNDRIDANKLARLGRVDPQSLHPMRHRSKEVRQDLVVLRARDALVAARTELINATRGLVKSMGTRLPKCSSPSFAQKVEEAVPVGMRDALLPLVRMAAALTDCIQGYDEKIEKLGSEKYGHTALLRQVKGVGPITSLAYVLTLENPQRFTTSRDVGPYLGLVPKQEDSGESQPQLGISKTGDTMVRKLLVGSAQYILGPFGPDTDLRRYGLRLCERGGKNAKKRAAVAVARKLAVLLHRLWVSGEVYEPLRQSMSATIAPAVAA

SEQ ID NO: 192599 - protein, 400 aa, unidentified
MLSIGIDVSKGKSTVCGMKPGGEIVYTPFEVQHTRKGMSELVSLLHNSGEEVRAVLESTGSYHCPVVTALLENGIFVSVVNSLRMKRFCSQSIRKVKTDRIDAMQIALYGLAYWQELQPTRLPEDTYRELQLLARQYYQMTSLLIKAKVDFNAICDQVLPGMQELMNDHAGRHKLSDFVLRYHHTTHILEMGETRFRKDYCKWAEKKGYRNCERMAALIFATAQNGIPVLPNAPSTQIVITEAIPVLHTVEASRDAILTQMQALAKTLPEYSLVREMPCIGDTLAPRLIAEIGDVRRFHSKRALIAYAGIDAPPYQSGKFCANNRHISKRGNRYLRKTGYEVMQSYVMHKPANDPIFTFIEKKRGEGKSGKLAMVAGLNKFLRVYYGKVTELYRSLPAIE

SEQ ID NO: 192600 - protein, 403 aa, unidentified
MRVPAALDKAWAGIDVGKRHHWVCVVDRDGRQLLSVKVANDEAEIAAVIGSMTRLAGKITWAVDIIGAPSALLLAVLSQSGQHVRYASGRLVAAMSGAYTGEGKTDPKDAFVIAETARIRRNLPVTGHKGELVCNLSLLTAHRADLIADRVRMINRLRDVLTSVFPALEREFDYSSCKGALVLLTGYACPARIRRIGQARLASWLRQRRVRGYASVAARAITAAQAQRITLPGQDIAADIIAELARNLLALDERVTELDTQIAALFAEHPQAEIIQSMPGFGPVLGATLLVTAGDLAAFPSPGHLAAAAGLVPVPNDSGRRSGNLHKPRRYSRPLRRVFYLSAQTSMMREGPSRDYYLKKRQHARPHNQAVIALARRRIDVLWALLRDNRTYAATPPAPAKAA

SEQ ID NO: 192601 - protein, 351 aa, unidentified
MTRTRRLIIGGVDTHASTHHAAVIDLKGRLLDDAEFAASPAGYAQLLIWMRERGQLQSVGIEGTGAYGAGLARHLHEKGVTVLEVPRPERRLRRQHGKSDPLDAEAAARTVLAGNASGAPKLATGRIEAIRMLRVARTGAVKAKTAAANTLQAVLVTAPEPLRSQLRTLSTSKLIAACLRFRPDTDSLHDPVQAAKLSLRSIATRARALDAEARSLKRQLDALTAAAAPATTAVFGLGPDTVSALLIAIGDNPDRLRSEAAFAHLCGVAPIPASSGKTHRHRLHRGGDRSGNRALHIAVVVRLRYHQRSRDYAARRTTEGLSMPEIIRCQKRYLAREVFTALRADYAAITT

SEQ ID NO: 192602 - protein, 350 aa, unidentified
MVVVGADVHKRTHTFVAVDEAGVKLGEITVKAETKGHDKAIRWALRNFGDELKWGIEDCRHLSARLEIDLLDAAQAVVRVPPKMMAEQRRTARTRGKSDPIDALAVARAVLREPGLPEASHDEASRELKLLVNHRDDLVKQRTQVINRFRWHLHRIDPTVDPPARSLDRAKTRAGLTEFLVGKDGIDARLARELLEDIGALTTRINALEKELTALVAEQAPALLELSGCGALTAAKIVGETAGINRFADDARYAMHAGVAPIPVWSGRTKGRVRVNKSGNRQLNAALHRIALTQIQRDGLGRAYYDKRIATGDSKTEALRCLKRRLARVVFNTLKNNPSTATASDLAAAA

SEQ ID NO: 192603 - protein, 373 aa, unidentified
MKYSTVYVGMDVHKETFSVCCYTNEKEEAEYCQTMDAQYSKVLNYIESMRFHYGEEAMFICGYEAGCLGYTLYHQLTDHGIKCVILAPTTMSKPTNEKKMKTDRRDARLIARCLAHHDYKSVYIPTEHDEQVKEFIRMRDDHNLALKKIKQQILSFCLRHNYRYEGSKQHWTQKHLDWLRALEPEEIYKEILNEYLLTYQTLVDKIERLDRRIEYLASDEAYNDKVNKLVCFLGIKTHTALSVIVETGDFKRFKDARSYSAYLGLVPGENSSGPKKNGLSITKAGNRHIRRLLVETAQSYTRGQVGYKSKALKARQKGNAADVIAYADRSNERLRRKYYNMTLRNNKKTNVAKTAIARELSCFIWGMMTANYI

SEQ ID NO: 192604 - protein, 335 aa, unidentified
MAIVTIGLDTAKSWFQVHGVDESGQVVLRRKLARGRGLQFFAGLTPCVVGLEACGGAHFWARELAKLGHDARLMPARYVRAYVKTNKHDAADAEACCEAVQRPGMRFVPVKSEEQQGMLMIHRSRDLLVRQRTAAVNALRGHLAEYGITAAKGTARARELMSLVDTDERVPAIARDALLQLVEQIRDTERKIEAFDKQILSLARENEVCRRLMTVLTIGPFAATALTATVGDPRYFASGRHFAAWIGLVPKQYSTGGKERFGGISKRGDAYLRKLLIHGARAAVHRVRSHQRPGAWIAALLARRHFNIATVALANKTARIAWAVMVNGSNYRAAA

SEQ ID NO: 192605 - protein, 362 aa, unidentified
MPMLAELIDAVVGVDTHRDTHEVELALPTGTAIGIRKISNDNSGFAELLAWILDHSPGPRVVVSIEGTRSFGVGLARAVAAAGLTVIECEQPNRKARRGKGKSDPIDAHLAVLAALRLDADRLPVPRADGDREALRILLGTRHELTVVTTAQTNRLRALLLGGKDSERDLARATLTDPVLLAMVRRREPPQASREQAVRHGEIRRLAHAIRAGRHALAANRAQLQAIVDQIAPELTERRGIGAVTAAQAIVSFSHPGRCRSDAAFAALSGTSPLQASSGKTVRHRLNRGGDRALNSAIHTIAVTRMRCCPRTKDYVARRTAEGKSSREIQRCLKRYIARQLYRALNASTTLTAQISAAPTTA

SEQ ID NO: 192606 - protein, 341 aa, unidentified
MGQAHTIGLDIAKRVFQAHGADASGRVVFRKRLVRAKVLAFFAAQPPCTVAMEACAGAHHWARELGKLGHTVRLIPPAYVKPYVKRHKNDMADAEAICEAAQRPSMRFVPVKTEEQQANGVVFRARDLLVRQRTQCINALRGHLSEYGYVFPQGITHAEAVIAHVEDPDSAVPESARAVLKVLIGTFQALEAQIQALDAEITQRAKADPVARRLMTIPGIGPIAATAITALVPAPEGFRAGRDFAAWLGLTPLQTSTGGKQKLGAISKMGERTIRRLLILGASAVVRWAGQRGTPAGSWLARMLARKPKMLVTVALANKTARIVWALLVKGGGYRAPAPAA

SEQ ID NO: 192607 - protein, 342 aa, unidentified
MSIVYVGLDLGSSNFQQVALDHHGVSRVNRDFSTSEANLVKAFSDLKGEIEVHLEAGELAPWAASIIAPLVERVVCSHPQSNAWIAKDADKCDRVDAYKLAELLRLNRFKEVHYAPDQRRRNFKQLVQHYDELTAQQARLKTKLKARLRMQGVIVSGERVFSSRGRKPVLAEVKSPDLRTAITQLYTVLDQSVAAQAEARLLMLRAAQAFPEIRIFRTAPGIGPIGACRFSAYIHTPNRFSSTRKLWKYCRLSVSHRSSNGKPLRRPRLDRSGCGRLKDVSRKAFDVAMRSRQDNGFKRAYQRALETTHDATHARLTVQRKIISTLRAMWLNQTPYSDELMP

SEQ ID NO: 192608 - protein, 353 aa, unidentified
MEHDTMTEHFIGVDFHKETTVVTRLRKDGTRAGKTQTYPSTHEGLKRFRESCTPHDHVAIEATYHWALFADVFEDFEGELVLAHPYKNRLIAESRNKNDKVDSKVLADLLRTNFLARAWIAPREVRDARELLRYRCSLVRIQSALKNRVRVLLAKAGRNLEASDVFGAGAMRELEQMDLGSTRNAMIAGYLKVAREISSVIGQSEKEIEERVKKSAEAERVDSIRGFGPLAALTVVSEIGDIRRFSSAAKLVSYAGLAPSNRASAGVLRHGPITKQGSPWLRWILIEATQHAVSGYPQLAALHRRVTANQGGRKNAGRIAVARQLLVSIYHMLKRNQPFNPERIGGQRMHAKS

SEQ ID NO: 192609 - protein, 430 aa, unidentified
MKSNTQNAKIEAITEKTLILGIDVGSETHYARAFDYRGIEYSRKPFKFSNTEEGFVTIKEWILDLKDRHEKDKVVPGMEPTGHYWFNLGKFLQDNEMKPVLVNPHHVKKSKELDDNHPTKNDRKDPKVIAGLVREGRYMIPYLPDGVYADLRTASNIRFQLQAELTRIQNRISRWFNIYFPEYKTVYGKPDAKSGMLILKAAPLPEDILTLGIDGVNQIWRDAKLRAVGKARAKTLIEAAGHSVGSKEGAVSARMEIRMLLEDYESRNMRLQEVMVLIEELVKGIPMAEKLLEIKGVGIRTVSGFLAEVGDISRFNNPKELQKLAGLALVENSSGKHKGGTTISRRGRKRLRYLLFEAAMSLVAKNPEFRELHNYYTTRRRNPLKKMQSLMAVATKLIRVFYAMLTKGVDYDPKKMVSDIRRPEAYLQAA

SEQ ID NO: 192610 - protein, 370 aa, unidentified
MSNATTFVGLDVHARSVKACAFVPETGETIRKSFGYEPGEIASWVSSLPQPARCVYESGVTGFHLCRELNAMGAACVIGAVSKMHKPAADRGRKTDRRDAQFLAVQLALGVVTEVHVPDAECEGARDLARALADARDDAVRAKQRLSKFLLRHGLVYDERNAAGQRRNRWTGDFWAWVGRIDLGDAAAMATLDHYCERVREADAAKAALEAKVKSLAQQPRWKPTCDALKCLKGIDAVTAASIACEADGFARFATASGFAAWVGLVPSEHSSGESRFRGGITKAGNKHLRKLLVEAAWHYKGASRSPKDLAKGQIVDEATRRHANAGVRRLVDRRRSMDDAGKQSSVANVAVARELACWCWAVGRMAEGA

SEQ ID NO: 192611 - protein, 475 aa, unidentified
MVHPYTKTMRSLWSKPMKKQEQPIAAEQRNLPVINPNAAGIDIGADRHWVSVPVDRDSENVHSFACFTAELYAMADWLKQCGIETVAMESTGVYWIPVFQVLESRGFEVKLVNAHYVKTVPGRKTDVLDCQWLQKLHSYGLLSGSFRPDDQICVLRSYIRQRDNLIKSACVHVQRMQKALTEMNLQLHRVISDITGTTGLSIIKAIVRGERNPLTLAALKDGRIKASCEEIAAALTGDYRDELIFILQQELQLYEFYQTQILAVDAQIEQCLASFADRVDVTKKPLTKPKRRGKKQPGNAPQFDLRTHLYRISGVDFTQIQGFGALTVLILLSELGLDPTRFPTVKHFTSWLGLCPGSRVTGGKVKSSQTRSVVSRAANAFRMAAQTLCRSNSALGAYYRRMQAKIGAPKAITAAAHKLARIFYRLWTSGDKFIDPGVDAYEQQYRERVVNNLKKKALTFGLELIPISDSTQCVS

SEQ ID NO: 192612 - protein, 351 aa, unidentified
MIVLGADTHKRSHTIAGVGATTGELLGERTVQVGRAGFGALLAWARALGGERVWALEDCRHVSGSLERFLIERGERVLRIPTNLMAETRKSARQRGKSDAIDAVNVARAALREGLATFPAAHLDGPELDLRLLVDHRERLVIHRVELNNTLQWHLHDLWPELELPGGALFSKKWSTRIARRLSRAEQTMRVRIARDDLRRLRELTETVKALAREITQLIEQIAPRLLAEPGFGPLIAAKLVGEIAGAQRFATDAKLARAAGAAPIPASSGNTRRQRLDRGGNRQINAALHRVIVTRARCHQPTRDYIERRRGEGKTTRDAIRCLKRYLARQVWNLLRASPPNMTLTTPSIS

SEQ ID NO: 192613 - protein, 352 aa, unidentified
MKITTVGVDLAKNNFQIAMADEEYRIVRRQRLSRTQFSRLMSNHPRTQVVMEACGSAHHWARVLEGYGHEVKLLPAQHAKAYVRRNKTDAADAAALIEASRCEEIRAVSVKSVEQQTLQQLHRLRTQWQGVRTARINALRGMLREFGIDIALGAVRGLAQIHEALEAADNGLPDALRPFIGSVLTEIAEQERRVKEIDLTLKELTREDTIVQRLQQVPGVGPIVSTAMRAAVGDIHRFPTARHFSSWLGITPRERSSGTTRRLGKISKQGDPYLRTLLIHGSRAVLIWAHRAAVKGKQLDRLRRWAVETYQRVGHNKAAVALANKLARIIWATWKFDRPFDGNWKSVTAAKA

SEQ ID NO: 192614 - protein, 400 aa, unidentified
MLLFFEVITMIFVGIDVAKDTHYAAVSDDSGAVLVKPFAFQNNAEGFCLLLKKLSEFDRSKLLIGLESTGIYSENLICFLYESGFRLAVINPIQTATLRKTAIRKTKTDKVDTMLIIKSLMVNSYRLYSQRDADSLKLRTLCRFRQNLKNSKARLKIQLAGYVNLVFPEFVKFFKSGIHIAASYALLKKYSSPKEIAALRTSTLCTLLSKASHGRFGKDTAEALKSLALSSVGVKNPYISIQIAQTIAQIELLEQQIKDLNSAIEEAMESINSVLMTVPGIGAVNAACILGEIGDIKRFSKPCKLLAYAGLDPTVRQSGQFTAKSTRMSKRGSALLRFALINSAWQLTLNDTTFKAYYDLKRSQGLNHYGALGHVAHKLTRVIFKLLTSDTPFNPAKLVA

SEQ ID NO: 192615 - protein, 344 aa, unidentified
MNYHTAFDVSLRSVSICIVDDNGTIQFEAKVPAEIEEIVACLKRFSSKINSVGFEAGALTQYLTYGLQAAGYEVICLEARQVNAALSAMRNKTDKIDARGIAQILRTGWYSRVHVKSMESHLIRALLSSRKMVLQKCVDLENEIRGLIRLLGIRLPGTLYHGYYDATVRQAIEADGSMVDTLIPLLDARLVLYQTYLKLDNQVKSLVREDPICQRLMTVPGVGAITALTFKAAVDDPGRFKRSRTVAAHFGLTPRRFQSGELDNPGRISKAGDPDVRCALYMAAHSLVVRSDQWCSLKVWGIQLMKTKGHRRATVAVARKLAVILHQMWINGTDFRYGSTEVTT

SEQ ID NO: 192616 - protein, 404 aa, unidentified
MSSAVPLPMLSDRRSFVIIIGVDPHKRTHTASALEPGTHRVLATLQIDATLAGYRQLARWAAQFEVRRWAVENARGLGRHLAQWLAARGEQVDDVPCTATARVRELTRGGRRKNDVIDAAAAASVAALAGDATPIPVEDLSTVLALLDERRANLAAHRTRLVNQLHALLRDLVPGGADTDLTATAAARVLAAVRPVGPVEAARKQLARDLVAEVREVDVRLAKLSAQMSKTLAEHGSRLLEVDGIGPVVATRLLGRTGRASRFPTSSAFANYAGVAPVEVASADRARHRLPRGGDRQLNLALHIAALTQVRMRDSLGRAYYDRKIAEGKTRNEAMRCLKRRLADHVWRIMIADERRTGRAAGPGGQPGATLTSSATGSTPTTSSSDKSLPRPAGPHPTTSDPAA

SEQ ID NO: 192617 - protein, 312 aa, unidentified
MVTIGLDPHPDSHTVAALDENGTTLASLAVANNAEGLLKLHQFALPFPEHRWAVEGAANRFILPFVCELLKQGEVVHHIPPNLTSQYRARLGRKKNDVVDASNAARALLANPRLPAFQPGESQQEFQDFTRTQRRLSEQLKANRMAFQALGRDSSARSALAQVIQVLEEQLVELSKQMKTLVKTFAPTLLELLGVGPVVASVILGEVGNVGRFVNEGQFASYCGAAPVERGSGKNSRMQLNHGGNRRLNWALHIVALTRSRCDERTKALLAKLKGRGKTQRASLRILKTYIAREMFRQLKRSPAPVLVAVKT

SEQ ID NO: 192618 - protein, 408 aa, unidentified
MNAVGIDVSKGKSMVAALRPMGEVALLPREFLHTEVGLEQMAYAILALGEDTRVVMEATGRYHEPVAAALYEYGIYVCVLNPLFIKQSGGGSIRKVKTDKADAMKIAKYGLDNWVDLREYTPMDTVRQQLKLCSRQYNLYMKTVVSLQNNLISLADKTFPGVNELFSSPERADGHQKWVDFVMTFWHCDCVCRISEKAFTERYQKWCKRKGYHFSAEKALDVYAGSCGHFTTLPKNDNTKLLITTAAQQLLAGKMTLAALRAEMTHLAKQLPEYDTVRAMYGVGETTAAQLMAEIGDVRRFPRRSSIVGFAGVDPAVDQSGKHEAKSTPTTKRGSPHLRKTLYQIVCTYLKRSPVDEPVYQFLDKKRSEGKPYFVYMTAAQNKFLRIYYARVKECLEAFDAQQGTSQG

SEQ ID NO: 192619 - protein, 314 aa, unidentified
MLEAILERCAGLDVHQETVVACVLSGPLDRAPKSETRRFGTTTDELLELGRWLEDMQCTHAAMESTGVYWKPVWNVLEAFDLELLLANAYHVKNLPGRKTDINDAEWLAKLLRCGLIEGSYVPSVDIRDLRDLTRYRKKLVQDSTSEKNRIHKVLQDANIKLTTHMSDIFGKSGRILLQKLVNGEDITMEFLETQMKGALKHKSRNLLQSLNGRFRNHHRSMLQFSWNHLLYLENQIVQVERDIRQRLVDKQEAVSLLTIIPGVNEQAASVIIAEIGTDMNHFKSDHHLAAWAGVSPGNHESAGKKKNSCPLRQ

SEQ ID NO: 192620 - protein, 430 aa, unidentified
MTTHTYSTSPRAIIASHNQKISQNKAVQPLVVDLSDQSIIKELNGKRPLGLDLATKKYRLCYQDDLGKMINVELRKNELRKMLRETPGKYHLCIEGCSGASYWERFARENGHKVKVVPGYVTRKLGWNQPKDDFNDAYNLYNALFNPLVPSCQTRTADELAISALISQKEALLKSLNEQVNKTRSFLIETGEYDCVVKGGGSAVQAIELYISNHIHAASEHKRSIRCLEGFKRMILSLTKEIDEINETLSEYGQTNKQVKLLLTIPGVGIETAVPIAIGAKNIERFESARQFQAYWGYHPTHGGSGGEIEMGKMSSNGDRALKRTLYESALSLNHQGRYKDEPRSEWIYTKVTQNKTAFKKGMIVIGAKILRTAYGVLKTGKPYNPAIDNSLGRIKTKIHKRSNPKYKEQNINAVLQNKYEQELTLAALG

SEQ ID NO: 192621 - protein, 317 aa, unidentified
MPQLPAPIETVLGLDVAQDSVTLHDLVTGRTVTVANTGEALLAALEPLRQRALAVCEATGGHETVLLGVLLALAIPAHRADGAKISAFARSLHLAKTDRRDARTLALYGRERGAGLAHWTPPPAHQAALTALVRRRADLVAARKAERARTTAPGAAAIAASLARSLAFLDAEIAGLETAIAELIAATPQLERRQSVLTGLPGIGKTVAASLLALLPELGRLSRRQAAALAGVAPHPDQTGTTRNRGRTIGGRRVLRPVLFLAALTAVRGDNSLSHFYKRLVAAGKPKRLALVAVMRKLVVIANARIADLNTKTLQLT

SEQ ID NO: 192622 - protein, 395 aa, unidentified
MFIVGIDVAKRNHEVTVITSAGQVVCKGFRISNTCTGYNRMMERLGKLTNLKSQFIFAMESTAHYWLALYTRLKKDGYQVVILNPIQTHTMREMFLRKSKTDAKDSLVIAEVIRFGRYAASDVPQEKLLALKELCRSRAYLMDMASDLKRKTIAILDRVFPEYETLFDSVFCKTSLAVLTKYPTPDKLSRAQLGKLTEVLQKSSNGRFGEWKAREIKELARGSFGVADCEGVYSTMIQLFLEQIHTLLETCSSLERQINELLLQFGTTLTTIPGVGTLLAATILSEIGDISRFSSADKLAAYIGIDPAVNQSGEFVGSHAHMSKRGSPYLRRAVWMASMIAVQRDPMFKAYYEKKASEGLRYMNIIGHVTKKMTAVIYAIMRDNKAYVPVMPVVA

SEQ ID NO: 192623 - protein, 370 aa, unidentified
MSKISKPARRRETTKDKPEMTMGIDVGDRYSHLCLVDEEGEVVERDRVRSTEAAFRRHFENAPPVRIALECGTHSPWMSRLLKQLGHQVIVANARKIPTITESESKNDGNDAEQLALMAAFNPKLLSPLEHRSLARQQDLNLIQARAILVKARTMIVNALRGLVKSAGGRLPACSTESLPARAPLAVPPALADVAGPLIEQIARLNMQIAAMDRQIEKLAVKYPEIGTLRSAPGVGALVAAAYVLTLDRPNAVPSSRSAGAFLGLRPGQSQSGASDPQRRITRTGNTYLRCLLVQSAQYILGRFGPDSALRRWGLKLAQSGGKRGKKRAIVAVARKLAVLLLSMWRSGQRFQPFPQPAGEQAQQPARAQA

SEQ ID NO: 192624 - protein, 347 aa, unidentified
MVYVGIDLHRSRSQIAVLDQQGGELLSRRIANDREIFLELLHGLGDDVQVALEATYGWEWLADLLEEAGYELHLAHPLRTKAIAAARVKTDAVDARTLAHLLRTDLLPEAYIAPRELRDLRDLLRHRVALTRIRSALKQRVGAILAKQGIARPHSNLFGPGGSRFLTELELRQGPRRRLDSLLALIAAFDREIDTTTKEIEQRASEDPYVDVLCQIRGVGRYIAMLVIAEVGDITRFPSARHLCAWAGLTPTVRSSNGKARLGHISGQGSPALRWALVEAAQHAPTGGGPLRAAYERIAKRRGKQVAKVAVARKILTLCYYGLRDGEIRCLAPRAKARTNRTTVVTR

SEQ ID NO: 192625 - protein, 305 aa, unidentified
MTYIGIDISKATFVAAFPHGKGYRTETFQNDVKGIRRFISKLAPDIHHCVMEATGNYCFLLLYLLDKAAIRASLINPKKIKNYARVMMSVTKTDSKDACLIADFGERFKPEPYKFPSEQIMILKQKKTVLRQLQKQLTATKNLLSSLEPLPVKDKKCVNSLKQTITFLEKQIKYMRQEMEAVVTEVFDKQLKLLTSIKGIGVTLATALIIATGGFTYFDNAKQLSRYIGICPTIEQSGTSVNIRGHINRNGDETLRSMLYVAAWSASQHNKACKECYQRLRGKGKSAKIAMIAVANKLVRQALCC

SEQ ID NO: 192626 - protein, 368 aa, unidentified
MMKEAPSRLPSHISYSEAFMRYFQPPPDTRFYGGVDLHARSLYLVVLDSHGQVRLSRNLPAAPEPFLRATTPFRKGLVVGCECMHCWYWLADACRDAHLSFVLGHAWAMKAVHGAKTKCDRHDAEAIARLLRGGNFPLAYAYPRERRGLRDLLRARLRLVRQRAELYGHVHTARRQANLPPVSSAVKYKSKRGDITADIADPFVRRRVETHLALLEPLDTTIRRLEAEIEDAAGELFPTELAVLQTTPGVGPILSLTILLEIDTIERFDTRQQFCSYARLCGAVQESDNKRVGIGNRKAGNAWLKWAFSEAAVLSAQKDERIGRYLERLATKLGKPKALSALAHKLGRAFYHLLHTKQVFDVQRFVRH

SEQ ID NO: 192627 - protein, 355 aa, unidentified
MDCKKYIGMDVHQATISVAVMNEAGKVVMDSVIETKASTILEFIQGLHGTLWVTCEEGTSAAWLYDLLKPYVAKVVVCDPRKNALLKAGNKNDRIDARKLADLLRAGLLSPVYHGESGVRLLKELARSYLAITKDLTRVQNRIKGLYRSWAIPCAGQKVYSPRHRTAWLKQLPESGVQRRAAHLYQQLDDLRPLRREARQELLVESRKHPASALLRQIPWLGPIRVALLIAFVQTPHRFRTKRQLWAYSGLALRSRVSGEYRSADGQLQRMKRPPALRGLNENHNHELKALFKSTATRASTAAGPFGEFYAALLATGMRPTMARLTVARKIAAIVLTIWKKGERFDPEQLKRQAA

SEQ ID NO: 192628 - protein, 421 aa, unidentified
MKSTAASKLRQIPQGYLVIGVDPHKKTHAAVVITQDFTTHAKFKFSNTMEGLEMMLQRAKAEMVKTSCRGVIFAIETGGHYWRNLAYFLDERGIPFHFINQFTLKRRREGKDINRRKNDYRDSEVAAQLLCTGEFTESKLPQGVYAELRAAHNAYRRLIKERSRITNLLKGLLDSLFPEFTTVFINPCALTAMSVLYTCAIPKVISNMSEDEFVTTVKAGHHGRLMRRKLRALHHTARTSIGIEASARSVSMEISFLVEKLNLIKRHTRTIEGTLVRFVDETEEGKYLLSIRGLNYIAVAGLLAEIGSFKQYSNAKQLIKMAGSNPIESESAGKRSSHTPMSKHGRPVLRYCAWTSVIPMLRLNSDFRAWAKKMRERPVQANPLNGREVVGACLNRLLRLSFALAKKQSYYQMPELARTAA

SEQ ID NO: 192629 - protein, 409 aa, unidentified
MQVFVGDDWAEDHHDIEVQDETGRVLARRRLPEGIEGITTLHELVGEHSSGLESPPQVVVGIETDRGPWVQALLAAGYQVFAVNPMSVARYRERHAVSGAKSDPGDAHVLADLVRTDRHRHRPIAGDSELAEAIKVLARGHQSLCWMRGQQANQLRSTLREFYPAALVAFEQLTSADALAVLAIAPTPDQGRALTLPRIQTALRRAGRQRNLTARAEAIQLALRTEQLSQPPLIAQAFGANVSALVGVLSASVAAVTDLERQLEASFGQHPAAELIRSQPGLGTVLGARVLAEFGDDPDRYADAKARKNYAGTSPITKASGKSHVVLARYKTNKRLRDALRQQAFAALTASPGARAFYDARRAAGDGHDKALRALANRLVGILHGCLRHATLYDEHTAWAHRSDHTQAA

SEQ ID NO: 192630 - protein, 319 aa, unidentified
MSEEEKKVFVGIDVSKDKLDVAVRPPETGMTFSNDEDGISFLVNFVKSLSPSLIVLEASGGLETAAVGALAIASLPVVVINPRQMRDFAKATGKLAKTDAIDARTIARFAELLQPEVRPLKDEDAQRLTALNTRRRQIVEMITAEKNRLSSAPIWTRKDIKAHITWLEKCLKKVDNDLSNFLKKSPVWKEKNDILRSAPGVGPVTATTLLSNLPELGKLSRKKVAALVGVAPLNRDSGLFRGKRTTWGGRKSIRSVLYMSAVSAIRCNPVIKKFYQHLCEAGKPPKVAITACMRKLLIILNTMVKNRTPWSASPIENFS

SEQ ID NO: 192631 - protein, 387 aa, unidentified
MRVAAHRAEAPSAICVDLGAIFVSLELSRSKWLITSLSPGGGEKMSKHMVAGGDVAGMLSCFAELKRKAQARTGRCLPIIVIQEAGLDGFWIHRVLQAEGIESHVVDPASIATSRRRRRAKTDKLDGEALLRALLAYKRGEPRVCAMLRAPTPEEEDRRRIVRERKALTNERIRHVNRVKGLLFGQGVSGYEPLRSDRRKRLEELKTGDGRSLSPNLKAQISRELDRIELLLTHIKDVEEARDTMLESAQAVAPAPKLLLNLKGIGPEFAAVLWSEGLSRHFDNRRQVAAYAGLAPTPWQSGIVDHEQGVSKSGNPRLRSMLIELSWLWVRHQPQSALTIWFKERVKQNGGRFKKSTIVALARKLLIAIWKYVNAGVVIEGAVLKAA

SEQ ID NO: 192632 - protein, 429 aa, unidentified
MNYTQNEKIEQVTDSTMVVGVDIGSQIHYARAFDNRGRELTKRIFSFHNDLEGFNSFNLWAETLKTENKKTAVLIGCEPTGHYWFAFAKYVNDHQKRLVMVNPFSVKKIKELDDNSPKKTDSKDPKTIAKLVVDGRYSIPYMPEGIYAEIRDLVYSRDRIMKQHNISANRIQRWLAIHFPEYLGLYTRFDAISGLAVLEKAPLPKDVIALGVNGIRKIWHDKKMRGRGVTEDRAKILVEAAHNSVGLDGGIGTKSELYMLLEEHRLWTSQLEAVNKVLEEMILKVPHVEKLLAIKGVGSIIIAGFIAEVGDIRRFDSPKQIQKYAGLELVENSSGKHKGRTRISKRGRRKLRKILYQVMVPLLARNKEFRGIYDYYVTRVKNPLKRRQAMVAVSCKLIRVFYAVLTKGVEYDRFKMMSDIHRKSDIIAA

SEQ ID NO: 192633 - protein, 415 aa, unidentified
MNDARRWFSGVDWASQSHWVFLTDGDGRKLGERTFKHSGEGLAEMAVWLMTTSGAAELGQVQIAIEVPHGPVVETLIERGFAVHAINPKQMDRFRDRFTMSGAKDDSRDAEVMASALRTDPRCFRRLAPADPVVVELREWSRIAEDLGVERCRLANRLREQLWRYFPALLDLEGDLAAEWLIDFLEIAPTPRKASRLREATIAKLLKRHRIRRFAAAAVIKAAGQPPIPLAAGAIEAASAHVASLIPRIRLANQQIKEAEARIDRLVARLAETGDAEPGQSEQHDAAILASLPGVGRTILATLLAEAWEPLQRRDYAALRSLTGVAPVTKRSGKSCIVVRRQACHDRLANALYHWARVAVQHDPRSRAKYAALRGRGHSHGRALRSVGDRLLNVACAMLRSGAPFNPSIPTQNAT

SEQ ID NO: 192634 - protein, 385 aa, unidentified
MTQAAPISSIIPRDYDIFGGLDVDKKSMAVTFRDHGTMRKSLKLPYSASQLLNYTRKHFPGQRVAFGYEAGPTGFGLHDELTAASHPCLVVSPAMVPTAPGQRVKTNRLDSNKLSEGLRGGQLRSIHVPTQSYRELRHLVQLRDTQVAQLTATKCRIKSLLLYEGIPFPAANGRWSGQALRQLEALPCSAAVRFKLDRLIDALQFHFQSAAVVQKEIRRFCQNDPELKQCISFLTSLPGIGSITATHALARLGDWRQIENVRSIAGFLGLVSSEHSTGDQENRGSITRSGDSRLRNKLIQCAWVAINKDPELRAFYRRVYERHPRKVAARKAIVAVARKMTTRMYAVLKEQRPFVIRADNSIAPLTAEETVGPRERLDGAQTGQQ

SEQ ID NO: 192635 - protein, 358 aa, unidentified
MIVRITTYRKERRYEPGKVYWHGRSPGNDFGCHSILETKAATILEFIQGLRGSLSVTFEEGTSAAWLHDLLKPHVTDLVVCDPRKNALLKDGSKSDRIDARKLAELLRGGQLKPVYHGEHGLRTLKESGRSYLTLTKDVSRVMTRIKALYRSWAIPCSGATVYAPRHRAEWLAKISEPGVRLRAERFYQQLDLLEPVRQEARRDLLNESRKHPAVKLLRQIPSIGPIRAALLVALLQTPHRFRTKRQLWAYSGFAVETHDSGEYRYVRGKLRRNRERITVRGLSDNHNHDLKNLFKSAAISASTRPGPLRDFYAALVQKGMRPTMARLTLARKMASITLTMWKKGVDFDAKQLQPQAA

SEQ ID NO: 192636 - protein, 339 aa, unidentified
MAIVGGLDVHRRQITFDWLDSESGEVRRGRIPGDRLGFRAWLDQLEQRPADFAVEGCTGWRFVVEELERAGMGAHLAEPADTQALRGPKRHAKTDGIDARHLRDLLRAGTLPESWIPPTHIQEMRARVRLYKELIELRTAWVQRIHAVRYHQGLPTLSPSAAPGRRRYLDGEEALSPAGRDWVAAALRLLDHVDGELAQLRALFTRFARQQPGCRALSEEYGVGPVTAVAIWAEIGDCRRFSSSREAVRYSGLDITVYSSDAKRARGHLSRQGSPVLRWALFEAAQCGARPSSTDHAYHAAVKERAGSKQAALSVARKLARRAHHRLRSLGDQAMVPVG

SEQ ID NO: 192637 - protein, 444 aa, unidentified
MVCSGMILIREVADAPVIMGISKPAGLKSPCGEVKIVNPLFVGIDVSSRSNVAYLMKPDGSKHSSFSVQNNLGGAKMLSERIVSALSSMRLSDVVIGLEATSIYGNNLVYALREDGSLSRFQRKIHVLNPKQVKKFKEAYPDLPKNDFVDAFVIADHLRFGRIAKEVYMDDYRYQALRTLTRARFDVIQNLTREKQRFANYLFLKCSGIAQEKDIQNTSATTIALMEHFETVDDLANTDLDELTDFIAQAGRGRFVDPDATARAVRAAAKGSYRLPKTVNDTVNQAMSVSIASMRALKEQVKVLDKAIEQQFEIIPNTLTSIPGIGKVYSAGIIAEIGDIHRFDSQASVAKFAGLVWTQHQSGEFEAEHSRMIKSGNRYLRYYLLEAANSVRRCDSEFRRYYDLKFKEVNKYQHKRALALTARKLVRLVFRLLKDNRLYIPSKG

SEQ ID NO: 192638 - protein, 437 aa, unidentified
MPLTEEGDYVTNNEKLTALFVGIDVGSRSNYYYVMDFFGDKRLAFSAPNNQPGTKLAGERLAGCLLANNLTSIVIAMESTGFYSWHVANALSVHERLVIYEPYVYCLNPVLIKNYKKTFTDIGKTDPLDAIAIADYARVGKIQSKPWRGADFMPLQRLTRQRLHITENLTREKNYLLSNIFIKFSELAVGEEKPFSNSFGATSTAVLTEFLSSEDIAESNVDDLITFIAEHGKNRFANPDQTAKLLQKAARDSYRLDKALADPINVAIAMSFDQIKFFQNQIKELDKVIARIVKGLPSNGYTILTSIKGIGTVFASGIIAEIGDITKFDNQAALAKFAGLVWGCFDSGLFSSEDNFLTKSGNKYLRYYLIEATNSIIRHNPEYKQFYDRKCGEVNKHKHKRALALTARKFVRLVFALLRKNQLFTSKEADRLSLTTE

SEQ ID NO: 192639 - protein, 411 aa, unidentified
MEAMIERCAGLDVHQKTVVACVLYGPLDKRPKKSIETFSTTTNGLLELNDWLESMEVTEAVMESTGVYWKPVWNILEEHFRLVLANARHVKNVPGRKTDVKDAEWLAKLLRSGLIEGSFVPPEDIRDLRDLTRYRKKLVNNRTAEQNRIHKILQDANIKLTSVLSDIFGKTGRKILEAIIEGEKIDEEKLRNMVHKRVKASLTDIANSINGRFRRHHRDMLRYHWEHMIYLEAALKNLEEQIDQCLAPYRKEVELLDTIPGVDKDSAAVFIAEMGVDMSAFDYSAKRAASWAGVSPGNNESAGKKKSTKASKGNRALKTTAVQCALGAMGQDNRITAHRNRIAKRQGAKKANMASAHLIITIAFHILKTGEPYHELGPNYVQQHHKNKELKMIEHLKRKGYSVSLSDQQTA

SEQ ID NO: 192640 - protein, 339 aa, unidentified
MKVSTLGIDLAKNVFQLHGVGCDGQTVLKKKLTRDKFLPFLMQLEPCLIGMEACASSHHFARVLRQYGHEVKLIPPQYVKPYVKTNKTDAADAEAICEAVARPNMRFVQIKTAEQQAILVLHTERNILIRERTACANSMRAILAEFGIIMPRTLSQLYKKIPEILEEYDNELSPFVRCSVARQLEHLQGVEDQITLIEQELSRWAKTQPACQRVMKVPGVGLMTATYLVASVGNGQQFHSAKQFAAWLGLVPREFSSGGKQRLGRISKRGERYFRYLLVHGARAVAAVIERHKDNMPWLYRLLNKKAYNVAVVAQANKTARILWSMLVHHTEYRTLSAV

SEQ ID NO: 192641 - protein, 342 aa, unidentified
MKIVMLGIDLGKNLCSLAGLDQMGAVVLRRRLKRESLLRFTAQLDVCTVAMEACCGAHHLGRQIAEQGHRVRLMSPEYVRPYVKAQKNDERDAEAIAEAATRPTMRFVELKSEAQLEVQSLHRVRGRLVTERTALINQLRALLLERGITAPQGRRKLERLLSEILAEEDNGLGSRMRRLIEDMRSEWRGLDERITAFDDELVERARADDAARRLVTIPGIGVLTATALVAAVGNARTFARGRDLAAWLGLAPRQATTGGKPRLLGISKRGNRYLRMLLIHGARTALPGLAQSDTPLGRWLKGLLERTHRNVATVALANKLARIAWAVLAHDRRFVAVHTATD

SEQ ID NO: 192642 - protein, 311 aa, unidentified
MPANATPHYVGLDIAKDQLDYCISDTDEGRFPNTTPARAAFIAQLKLLRTARVVCEASGGYEKIVVAELLAAGIEVCVVQPGRVRAFAYAEGLLAKTDRIDARLLRRYGEKITLRLAVPADPAATILRELLEHRRQLTTQLTEVEGRLALAGSTLRKLLQRQRTFLQKQIATVETMIDEHIDHDPDLRAKSTRLQQITGVGPVLSATILAYVPELGQIDAAQLSALIGVAPYPKDSGTTHGPRHVRGGRWQVRNVLYMAAVTAARSNPILAALYQRLLARGKPAKVCLVAVMRKLVGLMNRLIQDPDFVLA

SEQ ID NO: 192643 - protein, 462 aa, unidentified
MEQMTLGIDVACRAAHQGSLADATGSFLWSGRRFRTTVEDLESLWRSLSPDIELTVVMEPTRNAWVPLAAWFRRKGARVIVVPSEQSADLRDYYSKHTKSDRLDSRLLARLPLLHPDGLRPAEGLGPADGMRRATKLRANLVKRRTAVLARLDAYLELLGPGWHAAFGGDLANNTPLRFLGAGYADPHTLRRLGRARLAKFFWRHSHGAWGDAHATRLLAVADETLALWGDEIDYGELADDIAVEARLALQLSTEVHELEQRIAVFLHNVDPAGIMTSVPGVGRTNGAQILARLGDPNRFESLAGVRSFSGLVPSLNASGVNGRHGPPTKSGDAPLREALFIATNAARRVDPTLAARYHRLMVHEGKHHNSALCHVSTVLLTRIVACWRRGSHYVIRDLDGTPLMPDEGRRIVSERYRVSEELRALRRTTHGRTGTGRRSKESPSAPSTGPSPTNATAPKVA

SEQ ID NO: 192644 - protein, 320 aa, unidentified
MSKIALGIDVSKLTFDVALLLETNKVKTKKFDNKSKGFVELVEWLNKKNVQDLHVCMEATGVYSNALATYLFDTGYMVSVVNPVQIKGFAQSELSRNKTDKADAQLIARFCRAMQPKPWQPKPLHIRELQELVRRLEALQNMYYQENNRLQVASSHVKTSIEAVLSMLNEELEAVKKKIHEHIEQYPDLHEKSKLLETIPGVGDATISQVLAFIGNVDDFKNAKQFAAFVGLNPKQRQSGTSVHGRSRMSKIGSASLRKAFYMPAVSAKHHNPIVRDFCENLKKAGKPTMLIIGAAMRKLVHIIFGVLKSGKPFNINFSK

SEQ ID NO: 192645 - protein, 425 aa, unidentified
MTRPQLTPPAGVLVAIDVAKARNEVLIEVPGSSRRRRVSVLNTRGEYDRLIALLSELGQPVTCGFEATGNYHRPIAWRLLQAGFAVRLISSVGLARTREALHNGWDKNDPKDAQVMLHMIRIGASQVYHDPLAAGINDVQELSKTHDAVSRAKTEVLHRILTHYLPLYFPEVDRFRHNSRSDWFFAFLDRFPTPASITALSKEAFIDAAWDVVGRKVAKAQLLGDIYETARSSIGLPVPPDAPAVSMFRLVIGEVRGLIRQRDAIEAAAETLLSESADYKLLRCIPGIGPINALTILAEAGDLRRFSHHRQFLKFCGLDLATQQSGTFRGQTKLSKYGNARLRRTLWLAGQVAIRQRENGFRDKFERYIARDRHDADLRRKALTAITAKMARVVHAVIKTGDDYRPFVEEPVPGGRTPLNGAVRA

SEQ ID NO: 192646 - protein, 337 aa, unidentified
MAQIKYFIGTDISKDWLDMCIYGPQGVLHKQQIKNKPAAINSWIRQTCKSFGYTIDSSLFAMEYTGIYNHHLLHILVELSAKIWVIPGAQITESKGLDRGKSDEQDAQRIAIYASKNLEQVRLWNQPREVILQLRTLLMLRDKYKSTQHQYETTLNESKTFNTSTTHTLIASHCKVAIELAQKEIIKLEKEMKSLISSDERLAELDGYIQSVDQVGLITSVSMIVTTNEFINITEAKKYACYSGVVPFMNASGKLKKRERISHKANKNIKKLFHLLAVGSIRFKGDLKDYYDRKVAEGKPKMSVLNAIRNKIILRIFACVNARKYYQKNYQYDLAVS

SEQ ID NO: 192647 - protein, 405 aa, unidentified
MIYVGNDWSEDHHDVDVIDEQGQRLARRRLPEGVAGISAFHELLADWAEEPEDVAIGIETDRGLWVAALVAAGYQVYAINPKAVARYRERHSLSGAKSDPGDAKVLADLVRTDRHNHRTVAGDSNQAQGIKVMARAQHRLVWARRRQLNALRATLREFYPAAISVFDDDLGHPHNLAVLERAPTPQRGRALSLTTIAAALRRGGRKRSVEQRAKEIRDGLRSEQLMPSTVLADAYGAVVSSAVAVVAEMNRQLERLETEMESSLKCHPDAEIIRSQPGLGVILGARVLGEFGDDPNRYIDARARKNYACTSPVTVASGKRKVVRARYVGNRHVRDACYLWAFSALTASPGARAYYDTLVARGNDHDAALRALANRLVGILDGCLRNRTLYSERIAWGHRSTDQAA

SEQ ID NO: 192648 - protein, 412 aa, unidentified
MQVVYQRCAGLDVHKKSGVACVLVSQEDGSVHDEVRTFGTMTADVATLSTWLREQQVECVAMESTGVFWWPVFNILEEDGHAVVLVNPPHMKAVPGHKTDVADSTWLADLLRHGLLAASFIPPTAIRELRALLRYRKTLIGERAQEINRLQKVLEGANIKLAAVAPDILGVSGRQMIEALATGEEDPEILAELARGRMRAKLDLLRRALEGRVKLHHRVLIRSILQHTSFLEEALAPLDQEVERCLAPFQAQMTLLQSIPGVSRTAAATLSAEIGVDMSRFASAKHLASWAGICPGNRQSGGTRHNAKTTNGNVWLRGVLGEIAWGASHTKERAFGARFRRSARRQNKYKAVVAVMHHVLIVVYCVLREQTPYRERGPEYYAPQDAQRKMPAHVRYLEELGYTVTRTPKEAA

SEQ ID NO: 192649 - protein, 425 aa, unidentified
MNQSNHYTQNDYAAFIAIDWADQKHVFSLQVTGQTKKEAGTLEHKPEVIGPWVAKLRERFAGRPLAVAVEQSRGALIHALLTYDFLVIYPLHPTTVSKFREAFKSSGAKTDPLDADQILQILTKHLELLKPLTPDTEETRLLARLAEDRRKAVDLRTSHIQALTATLKEYFPQAIDLVSGNLASRLACDLLMKWPTFESFRQAKPSTIKRFYYGHNIRSSEVIQRVLDLAKAKSLTTDPAIVQSGSRLSQMYTQLIRALNPVIDDYDSSIEKAFEAHPEVNLFNRLPGAGPALAPRLLTFFGTDRSRYQSAQNVHSFSGIAPVTKSSGKTRAVYFRVACPKFDRQTFHEFARLSIAKSQWARNYVDYYTDKGKNFHTIIRALAFKWIRILWKCWQDRTPYCEEKYMQALKKRGSVFATLHLQNKS

SEQ ID NO: 192650 - protein, 312 aa, unidentified
MSERVAVGIDISKEEIVVAVAPNGEQWASPTTPEALERTMARIATYQPAVVVMEATGGYEAPVAAAAAAAGLPLAIVNPRQVRAFAQAIGRLAKTDVLDAHVLAAFGLHVAPPVRPLPDADTQALAALVARRRQLLEMLTAERQRLAQATTRTVQRDLQTHIRWLERRLAQVDDDLTTHIQRSPVWRVRDDLLRSVPGVGPNLVRTLLADLPELGTLTDRAAAALVGVAPINRDSGHYRGYRMILGGRPTVRRALYMSALVASRHNPVLARFYQRLRAAGKPAKVALVAVMRKLLVILNAMLKHQTAWNPAV

SEQ ID NO: 192651 - protein, 349 aa, unidentified
MTYIGIDVSKDSFVVAYSPEKNSKTKTFKNTTKGIREFIRTISKDEHHCVMEATGNYSALLVYLLSEAGITTSLENPLKVKNFARAMLSTIKTDEIDARLIALYGEKMQPVPYKLRSDAILTLKQKRTVIRQLKKQLIATRNLKGSMEALPFFDAKCRKSVEKTIAFLEKQIKDLEEDLSNLARSEYKKQMDLLTSVKGIGITLAAALIIATGGFTYFDNAKQLTRHLGLSPTYQQSGTSVNFKGHINRNGDSSLRSQLYVAAFSSIRYNTECRACYDRLRSKGKPGKVAVIAVANKLIDRLLPLSLRRSPMSMVMYLQKSNSCIFPKCIRLKNLIPENTEGCGGEKPP

SEQ ID NO: 192652 - protein, 462 aa, unidentified
MKKEQKEAKPERWKAIQANKLDTLEQLRPNAAGLDLGVEEVYAAVPEDRDERPVRSFPTFTGDLQALAQWLKECGVTTVAMEATGVYWIPVYDVLEAEGLEVYLVNARHLQNVSGRKSDILDCQWLQQLHTFGLLRNSFRPREEVRAVRSLVRHRENLIRYRSAHIQHMQKALRQMNVLLDQVVSDITGVTGMSIIRDIVQGKRDAEQLAKHRDPRCQKSEEEIAHSLQGNYRPEFLFELRQALELYDLYSDKMRDCDREIEQLYTLLNQALPEEEEPPSPPKRRRRGNAPAFDLHTQLYRLAGVDLTRIDGIDVLTAQTLLAEIGADVSAWPTEKHFASWLHLAPNHRISGGKILTRSTSSGVARASLALRQAAQSLSHSQSALGAFYRRIRAKHGPAHANVATAHKLARIVYRMLKYKEEYVDPGPEQYEQRQKERAIRALEKKATQLGFTLQPNQPLPT

SEQ ID NO: 192653 - protein, 346 aa, unidentified
MKDITVLGIDLAKNVFQLHGADSHGRKLFSKQVTRQGLFKFVGNLKPCVIAMEACGGSHHFARLFRHYGHEVRLMSPQFVKPYVKGNKNDSADAEAIAEAVTRPTMRYVGIKEVEDQDIQGLHRYRERLVKNRTQLMNQIRGLLQEYGIVVRQGKSHLLKTLVALRENEVNKELTPMNKELFWDAYEELMDLDQRIEKYTVKLEILSKKDERSQDLLTIPGIGSITATAILAAVGDPHVFKSGRELSAYFGLTPKHQGSGQKTRILGISKRGDRYVRSLLIHGARSLVKVVGEKTDPRSQWIKQLIDRCGINKAVVAVANKNVRIVWALLTKQMCYQENYGLNEVA

SEQ ID NO: 192654 - protein, 343 aa, unidentified
MYNMKNTKYFIGLDVHKEKTTYVVRDKIGNILTEGETATLYPELYPQLKPYLATSVIGLEASTSYYTLYQTFLKNDYNIKVANTIQLRQLIAKNDKLDARRLSEMLRLGTLPCSYIPDEKIQRLRSLVQVRHAFMQEKVRCNNRIQAFLDKNGVVMPPQKAFSKKWRYALMEHMGTEMVSVELRYEYDHYVFLEKKLEQVEQVIQGYTRKHWMQEYTLIQSITGFGPVLSCYIIAHVLPVERFASNRKLRRYAGVIPVFKESGENTSKGRIPKGSSRKQLRWALVQAANTAGKTNTPLGRYYRMKKKQKKKAGIAKIAVASSMIDILYKVLTTKQPYQIPSTY

SEQ ID NO: 192655 - protein, 375 aa, unidentified
MAHRNLPRPAAVYGIDIGKNVFHVVGLSADGTPVQKVRFRRDTLLQFFARADPSIVGMESCAGSQWLARRIQALGHKVRLIPAQFVKPYVKSNKNDIIDAEAIAEATTRPTMRFVTAKATDQVDLQALHRIRDQMVGSRTRLINQMRAFCLEYGVALRQGAGLFKLDLPQALNDPENDLSPAMRRLLGDLHADLLRLEERIRQVTKEIEAIADREDVTRRLMTIPGIGALGATALLAAVGDGLQFRKARDLAAWLGLVPRQYSTGGKQTLLGISKRGNRYVRKLLVHGARSCLRHLDRTRDRLGNWLNGLEARMHPNKAVVALAAKMARIVWAVLKRLRFIPWSSQWARAYFKMDYFNVSPVPRANGGGCDLNRM

SEQ ID NO: 192656 - protein, 397 aa, unidentified
MYIVGIDIAKRKHEAAVIDGEGAVIIKPFSFTNNCSGYNRLLAMLAKAKLPLDEVSFAMEATGHYWLALFTRLQKEGFRVQVINPVQTNSIRSFYIRQAKTDPRDALLIAEVIRFGHFSESTLHPENIYELRELCRGRHAIVSMQADVKRKVVALLDQVFPEYETAFTNMFGDTSMAILQACPTPKELSEMPLEELCHLIEVSSRKRFRMVKAQELQELARNSFGFAMAGDVFSTMIRLYAKHLVFLKQQVQEMDRKIAEIMDTLDMPITTITGIGPTLGAYILSEIGDISRFSSAAKLAAYAGIDPTMRQSGEYNGVRNRMSKRGSPYLRHAIWLATSSAVLHDPALKLYFQKKRDEGKPYMASVGHVCRKMVSIIYAVMRDNKAYTPYIPNEISA

SEQ ID NO: 192657 - protein, 355 aa, unidentified
MTPLNYVPQEFDIFLGIDVDKKSFSINMKDHRHFSRSFTMPSTAEGLYQYIQNHFPGKRVLCAYEAGPTGYHLYHSLNNHQQPCCVISPASVPRARNERVKNNRLDSEKITTYLRSGELKVVRVPSAIYQELRHLTEMYECYAQQRQKSKQRIKSLLLFEHLHENFRDADRAWTKNYIQQLKKLNCSLMVGERLNMLLRDLDYALEQIRLVLKKLKTFIKEHKDIQEYIRCLRSIPGIGPITSSLLLGRLGDPQNLKDVREIASFLGLVPSEHSTGDHIHQGRITHLGDPFVRSRLIECAWVTIRHDQELEQFYHRIKARHHPKVAAGKAIVAVARKLTLRIYRVLKERRPYIVH

SEQ ID NO: 192658 - protein, 333 aa, unidentified
MNVIYLGIDLAKNVFQLCGLNQAGKPVYKKRTDRKTLLQACLIGVEASTGAFYWQREFEKLGHKVKVISPQYVKPFVRGQKNDGNDAQAIAIALMQPTMQFVPPKSPEQQDIQALHRARQRIVNHRTATVCQIRGLLLDRGITIGAAVSRVRRAVPLILEDAENGLSVRMRRTIAELYDLFNDLGRRISFFDKEIDAVFRQSEACQRIAKVKGIGPKTATAVVAAIGKGTEFKNGRHFAAWLGLVPRQHSSGDRQVLMNMTKKGDKHLRTLFIHGARAVVRVAANNNEGYLNQWVNQLKERRGFNKTTVAVANKNARIIWSILHNETEYRPAV

SEQ ID NO: 192659 - protein, 350 aa, unidentified
MIIVGCDYHPGFQQIAYVDTETGELQEQRLPHREEAGRFYRDLAARKATVRVGMEASGHGRWFERLLAELNFELWMGDAAAIRAKRVRKQRTDRQDAQHMLNLLLEDRFPRIWVASWENRDLRQLLWHRHRMVQARTRVMNQLQAVALNEGLRCKKRLWREGGRQQLESLTLAPWASRRRRELLELLDRLNPTIAELSQAIEQQVEKYPEAQRLMTHPGVGALTALAYVLIIGDANRFSRGKQIASYLGLVPTEESSGDRRRLGHISKQGNSLLRFLMVEAAQVTARTDPQWRSKYFHLAMRRGRKIAKVAMARRLAVALFWMWRRKWNYEQLQKFGSRVGQPGNPYGVQ

SEQ ID NO: 192660 - protein, 418 aa, unidentified
MKHSKSEKIGTINKKTLIAALDIGKKVHYGYFRAPSGKDFQPFAFHNTRNGFDKFWERLCNFKEKQMLEEIIVGFESTGPYAEPICHYLRHKSVKLVQVNPMHTKRIKELTGNSPNKTDKKDPRVIADVMSLGHSLTVIVPEGAAAHLRRLTQARERAIERRTAVSNQLQHLVFLIFPELVHIIKPSTKTGMYLIKHYSDPKKLFFAGIDKLNAIIKKVSRGRLGTDRAEQLHGAAKKSVGITEGKESILFEITHLVSKIESENHYVGDLEKQMGDYLEKIPYSHSILSIAGIGHVTAAGLIGEVGDFRKFKTISEVLKLAGLDLYEISSGAHQGCRRISKRGRALMRKLLYFAAINTTRKNGILHGPYQRHLANGMPRIKALMAIARKLVGIIFALVRDHSNYIADYSSQLVFKKAA

SEQ ID NO: 192661 - protein, 353 aa, unidentified
METIYIGVDFHARQQTICYLKTETGELVTLELKHQDKGAVRSFYEQFAGPVIVGLEASGYSPWFERLLEEMGCEVWLGHATEIRRRARWRQKNDRRDAELILELMLHNEFPRLHRPPVQSREVMRMLRYRQKLIKMRTMTKNSLQALALQSGLAKRSRLFTRAGKQELTMVLMSPAMQWQRDHWWALLQPLNQQLLETMRWLKIQSHGDVAVSRLRTHPGIGLLTSLCLVHSLQPVSRFRNTRKVAAYAGFDPVERSSAERKYFLGISKAGSRILRHLLVEAAQVAVRRDEDLKRFYKRLAERRGRPKAKVAAARKLLIRAYIMLRDEIDYAEFRRRAVAARLAREITKASSA

SEQ ID NO: 192662 - protein, 433 aa, unidentified
MISRWLLIMDIEGGRAAAVLFVGDDWAEDHHDVEVQDATGRRLGKARLPEGVAGIARLHGLIGQFADPDDEAGPGQVLIGIETDRGPWVAALVAAGYRVFAINPMQVARYRERHTTSGAKSDAGDAHALADMVRTDAHQLRPVAGDSALAEGIKVVARTHQTMIWDRQRHVLRLRSTLREYFPAALDAFEGVIGDLTGTDVLELLERAPDPDTAARLSRSQIAAALRRARRHHVDAKTEQIQTVLRAEALRQPAVLAAAYAATVRALAAVIGVLNTQITVLQGQVEAHFGRHPAVEIYRSQPGLGEVLGARVLGEFGDAPHRYLDARARKNYAGTSPITRASGKKKIVLARYARNDRLADALHQQAFCALNSSSGARAYYDSLRARGTGHHAALRQLGNRLVGILHGCLKTGRLYAEHIAWAHHTQQNQQAAA

SEQ ID NO: 192663 - protein, 436 aa, unidentified
MANDESALLKVISDVLELSEGEPVTWAIDLNAGGAAPMIALLAGNGQQVLCIPGRTVHHASGSCRGDGKTDAKDALVIAGQARMRRDLQTMHHGDDIAVDLRILTSRRLDLATDRTRAINRMRAQMLGYFPALEWAFDDKISKASLVLLTGYQAPASLRRVGKSRLETWLRNRKIRNHQLVAAIAVEAAEAQHTAVAGEKFAAVVVAKLAREVMALGEEIAETDVLIEGRFRDHRHAEIILSMPGPGPGPGLVLGAESIAHTGGGISVFGTSDRLAGVAGLAPAPKDSGRISGNMRRPRRYCRRLPRVFYLPAMAAARCCPASEAFYDRKRAEGKGHRQTVIALAHRRPNALWALMRDGRAFQITAPPSPIALGRPAHCESPDLNDNFIENPHLHAARYFFPFCRLPVRRRTMGPGLSVRCLCVGRWRRGGGRQGR

SEQ ID NO: 192664 - protein, 342 aa, unidentified
MTNFNTKYQSVCGIDIAKNVIQIYQVNQDGECKNFQVKRKEFLQLFENREPSLIGMEACGGSQYWARELQKLGHTVNLMAPSAVKPYVSGFKSDRKDAIGIFNAMLAGVRKVAVKTEAVTDLATLLGIRARRVSARTAKVNMVRGYLMEYGIIMARGLRQFKNSIADSLLQLERAQVSNMVKEEFKFLVDEVDKETEAILRLDREINSLAKQCKNFDHFLTAPGVGLITAATMCVKLADPQVFKNGRQFAAYIGLVPQHYGSGGKNVNTTIPIKCNKELRGLLVQCAQSIRRTKNKSSWVIQIEDRKPNSVATIAVANWLARRLWAIASKGEDWKRMDINFG

SEQ ID NO: 192665 - protein, 309 aa, unidentified
MENIIVGIDVSKDRLDVAIRPTAEIFAVERNAKGLEALAAKLKGLSVHLIALEATGGFETVVTATLSSLGFPVVVVNPAQVRNFAKAIGLRAKTDTIDAGVIAHFAEATNPEVRVLPDDRTQILSDLVARRRQIVEMIGAERQREKRASKNLKKSITRLLKALEKELSSVDADIDDAVRGSPAWKDKEDLLASVPGVGPAIARTLIADLPELGSLNRKQIAALAGLAPFTRQSGQWRGRSFIGGGRQAVRTVLFMGAMVAKRHNPTLKAFFDRLVTAGKPKMAALIAVARKLLTILNAIARDQKPWKIA

SEQ ID NO: 192666 - protein, 364 aa, unidentified
MKRKVYVGMDVHKETIQIAYLTSNSKEILKEQQIKHNEVQIKKFIKKLKTEWNEIHCCYEAGVTGYPLYRYLKSLGVNCILVAPGKIPRQNTDKIKTDKRDAIKLARLMRSGELESIHVPSEEDEAVRDYLRSRDSLRLDLGRNRQRLMKFLLRKDIKYSTTKYWMVSHYKWLNNLHFNNEILQETFNDYYSRVRVQEENLNSMDKKIQEIAESEPYREKVGILRCFRGVDYLTAMFLLCEVNDFKRFKTADSFMSFLGLVPGEYSSGSKRKQTGITKTGSPRLRRILTEAAWQHRFPGTGSKIITARRSGQPALVVALAEKASLRLHKKFRNLQLRGKTPQVMITAVSRELSGFLWAAMNLVA

SEQ ID NO: 192667 - protein, 322 aa, unidentified
MYKYKEIYGVDISKDVYDVFGSLVGHNQFKNDEKGFRSFFKSIPKDSLVVMEATGYYHYRLAQFLYKNGIAVSVVNPLSVKRFLQMKLAKVKTDKSDSKAICEYAQMNEVPLYTALTDVQSECLQLFRLLDSFLKKRTVTKNKLHGEETLGVPSKYVYRSLKRNLKHLDKEVEGIESRLLELVKKEQQKQLTLLKSIPGIGVKTALFLIVVTDGFTKFENASQLCSYVGITPTIRVSGSSVRGRSRISKVGNRKLRNLLFLCAFSACKHNKACREIYERITNKAKSKKLALIAVSNKLLKQAFAIAKSGRPYDEMHVSVLSK

SEQ ID NO: 192668 - protein, 355 aa, unidentified
MTSEKYIGLDVHQSTISVAVMDASGKLVMESVLESKASTLLQFLAGLRGNLSVTLEEGTWAAWLYDVLKPHVTHLVVCNPRKNALLKAGSKSDRIDARKLAELLRGNLLKSVYHGETGVRMLRELARSYLTIVEDQIRVMSRLKALYRSWGIACAGRDVYYTRHRVQWLEKLREPGVRRRAERLYEQLDGMQRLRRVARHDLLVESRKHSISSKLRQIPYVGPIRAALLIALLQTPHRFRTKRQLWAYSGLALEIHTSGDYGYPEGQLRRSKKLVSIRGLNKDHNHDLKGLFKATATMASMRPGPFREFYLGLLAKGMKPAMARLTLARKIAAITLTLWKKGESFDAEKLKQQAA

SEQ ID NO: 192669 - protein, 336 aa, unidentified
MTLYCGIDLHSNNHVIVITDEEDNKVLDKRVPNDLETSLLLLSPYKNRLKAVAVESTFNWYWLVDGLMEAGYAVDLVNTAAIKQYDGLKYSGDHQDAFHLAHLMRLGILPTGHVYPKERRAIRDLLRRRFQLVKQASTHQISIQNQIWRSMGYRVSCNLIKKSDFELPFEKESYLYFSANSNLLLLRQLQQQISQIEKLVLKVIEPEGAYKLLTDITGIGPILGLTIMLETGSIERFDQVGNYASYCRCVNSIRESNGKKKGTGNRKAGNKYLSWAFSEVAHYMVRFNDKAKRFYERKKAKRNGIVAIRAIAHKLARAVYYVLKNKQPFDINRVFV

SEQ ID NO: 192670 - protein, 444 aa, unidentified
MFARLSGVPWLLIEICARSLGYGCVSGVFHGPLLATGTNGWRSVVAQRDIAWIGIDVGKTHHWACMVDAEGKKLSSIKVANDEAEIVALITNAGSQARQVVWAVDIIGAPSALLLALLARADHAVRYASGRVVAAMSAAYVGEGKTDAKDAYVIAETARLRGDLPVIDTGTDLVRKLAVLTGHRADLIADRVRMINRLRDLMTSVFPSLERAFDYSSHKGAVVLLTGYATPDGIRRIGQTRLTGWLRNRNVRGSADVAARAIDAAKAQTVVLPGQDLSASIITELATAILALDDRLKALDAQIEATFAEHPQAAIIQSMPGFGPFLGASLLVGSNDLRAFPSAGHLAAAAGLVPVPNDSGRRTGNLHRPLRYSRPLRHVFYLSAQTSMMRAGPNRDYYLKKRSQGATHSQAVISLARRRIDVLWALLRENRMWTAAPPPLAQAA

SEQ ID NO: 192671 - protein, 330 aa, unidentified
MRAESTPGARGPVFCGVDTHADSHWLCVLDWRGRKVLSRRFPADAAGYEALAGAIAAAGEPACIAMEGTSSYGAGLTRHLASLGMPVREALSPARMQRRRPGQGKCDESDAERAARAAMSGSKLGTPKSQDGWVDGVRCMLAARSGAVKARTSAINTARSLLTTAPEGLRSRFRGMAGPRLMEELPSVRAEGALGAALGALADLWAAARDAALDMERAIEASLEENCPALLAMYGCGPVSAAKLAVAAGDNPGRLRSEASFAAICGACPIPASSGKTVRHRLNRGGDRQARANMDTARCTRSRGRGSCATPRPPSTPRGRGRGGRATGRS

SEQ ID NO: 192672 - protein, 361 aa, unidentified
MKNPTQHRIAEVPRSSSRVGMTIGIDLGDVWSHYCTLNEDGEVVGRGRFRTSPSGVEKWFTDLPPVRIAMEAGTHSIWISEQLQELGHEVIVANVRELRAISHSDRKSDQVDAEKLARYARLDPKILRPIAHRTVAQQEALTVIRARNLIVRLRTAAVNAVRGLAKPCGYRLPASSTLCFAKRCVAVLPPGLAQALGPVLEQIAEMTVKIKHYDRLIKQLTETEYPETQALIQVYGVGQLTALTYVLTLGSKERFQRSRDVGCYLGLRPRRSQSGDRDPQLGITKAGNIYLRTLLVECANHVLGPHGRDSTLRQWGLHLASRGGKQSRNRAIVAVARKLAVLLHRIWITQQPYIPFYGVAA

SEQ ID NO: 192673 - protein, 303 aa, unidentified
MQVEPSIIGIDVAKAELVIYFLGQTYSIENTPQAIRAWLKGLPAHCEIAIEATGTYHMDAIELAHRKGHHIYVIDGSRLHHYRKGTGGRAKTDASDAQLLARHLQHEKEALRRWSPPPKAYRTLQILLRRRAALVKARTIIQQSLGAEPLLKAGLKRLISQINTLDAQIQKHLRDAVREAGLCDQVKRCKALEGVGDLTAYALVMAFLRGDFRNSDAFVAFLGMDVHVKDSGTKTGKRKLTKKGDSETRRLLYCAAMAARRSKRWAGVYQAYLDRGLATTQALVILARKLVRIAFALMKNGTD

SEQ ID NO: 192674 - protein, 367 aa, unidentified
MKKVSTAATKQSRNISQPTRTIGLDLGDRNSWYCVLDETGRIQLEQRVRTTAKVLQEVFGPMPRSRIALEIGTHSPWISRLLRELGHEVIVANARKVRLIGESRKKDDRLDAQTLARLARIDPQLLYPVKHRSAQAQADLMTIRARAGLVRARTALVNTARGLAKSYGERLRGCNVRNLDPEKAEGVSPELQRALEPLLAALESLSERITEYNGRIEQLAQQSYPQTALLKQVKGVGTLIALTFLLTLEDPHRFQKSRDVGCYLGLQPGRRNSGQSEPQLHISKEGDPYLRTLLVQGAQHILGPFGIDCDLRRWGLKLAERGGRNGKKRAIVATARKLAVLLHHLWVSGEAYEPLHNSHRMAVAVAA

SEQ ID NO: 192675 - protein, 400 aa, unidentified
MKTVLSVDVAKNKSMIMLMNNEGEILIDTKEIKHNLGEFEKVKEEMEEINPENLTVFMESTGTYHLPVERYFKENGFNTLVINSLTTKNNFDTIRKTKTDKKDCYRLAKLFFVNEVEYHEISKKDLYANLKAMTRQYFYLTQVNIRCKNRYKRLINICFPEFEGFFARNRIYEDTALNFIKAFPHAYIVREKRIDALYNNLRKVDARHDYYYKRLARQLKDTAMDSFPGVDKDHADVKNLSDMASILQENNRLIDEIRKNMIELAKQSPYFEIVNSFYGIGEVLAAELLGELGDITRFDNHKQLIAFCGLDPAIVQSGKSINVHGAISKRGDKYARWILFNISQMVVKLGHQYPSHPVYNYYLIKKAEGKHYYESLTACSTKILRMLYSMCKNNKRFLEE

SEQ ID NO: 192676 - protein, 422 aa, unidentified
MPYRIAGIDVHKKKLAVVVADVEVEDEYQFERRWYGSNPEQLRLLAEWLIEEQVEDIVLESTAQYWKPVWAVLERYWKPKCHRREEGGMSGALHLAQALSNRGRRGRKRDFRDAERLVKRLVSQELVLSFVPDGEQRLWRTVTRTKYQLTRDKVRLQNQLEALLEEAHIKLSSLVSDLFGLSARRMLRALADGETDPAVLSALAHERLRATPAQLCDALGACTELNPIYRRLVKMALEDLQLIEQQIGQLDQEIASLLRQDQDAVERLAEVPGLGVDSAQQIIAEVGAKAATFVSAKNLSSWVGACPGEEESAGVNRSRRSPKGNRQMRRLLNQAANAAVKHKGSIFEIIYRRFLPRLGHNKTIGVIAHRLCKLIWIILHNGIRYEERGPAVSEKSRRLRTARMIRKLRILGYRVEPLGNPA

SEQ ID NO: 192677 - protein, 402 aa, unidentified
MFFVGIDIGKRNHEAAIIDELGKPVGKPIRFSNTKAGSEKLLKLINEYELLPDNSMIGLEATGHYWLSVFSFLTALEFNVIPFNPIQSDTLRNFYIRKTKTDTIDAVLIAQVIRMDLPDQTYVPSEDIFRLKQLSRFRYSIVDQTSDLKRKVIASLDQVFPEYEKLFSDMFGKSSTQLLLQSPLPEDLLEIDSQKLIELLNEASNGRLTLEKSTEKVHQLKDLAKDSFGIRVATDVYKLQIQLLLQQILLLEEQLKTVEEEMAELVALQDQHLTTITGIGPVTAAVILSEVGDIHRFERPNQLLAFAGLDASVHQSGDFTGTRNKLSKRGSPYLRRAIWQAAFIASNRDPALSLYYQSLRKRGKHHGTAVGAVCRKLVNIIFAVWTKSKPYEVHINPDLKDD

SEQ ID NO: 192678 - protein, 449 aa, unidentified
MANYAGVDWASEKHDVLVADAAGERLLAATFAHDEAGLRALCRALVGLGVGLVAIERPDGLMVERLLDAGLRVMAIHPNQVHAARPRFRPSGGKSDRFDAFVLCELARTDSHRFRVLVGDSDQTKALRALTRAREDLVQTRVGLCSQLRAELERFWPGATVLFSELDSQISLAFLERYPSPVDAQRLGEKRLAAFLAGQRYSGGRKPAELLAKLRAAPKGRAAADELEARRTIVLALIAALRPLIDKIAELTAQIADRVRSHPDGQIFLSLFKDPSSVITAATLLAEIGDCRERYPTADALAADAGMSPVAVESGKRKVATFRWGCDKRLRTATSTLADSTRHWHPWAQDHYARARARGHDHPRSIRTVGRAWCRVMWRCWQDRVPYDPARHHGLQQHITVTINSSSEPRPDIAATHQMAGAAVTETAAQRAEREALDGKPTSAKARGG

SEQ ID NO: 192679 - protein, 351 aa, unidentified
MIIIRGCDYHPGFQQIAFVDTETGELGERRLIHREEAERFYGELERQNLKVRVGMEASGHSRWFEHWLRNLEFELWIGDAAEIRTKRVRKQKTDRQDAQLLLRLMMEGRFPQIWVPDAANRDMRQLLWHRHRLVQMRTRVMNQLHVVALNEGLRRKKALWRPAGRKELESIALAPWATRRRQDLLDLLDQLTPKIQELTRALEEEVEKRPVARRLRTHPGVGPLTALAFELVIGTPERFHCGKQIASYVGLVPSEESSGDRRRLGHISKQGSALLRFLLVEAAQVTVRSQSEWRSKFFHLAMRRGRKIAKVAMARKLAVHLYWMWRQGLDYGQMHKLGSHAGEPGNLDGGK

SEQ ID NO: 192680 - protein, 366 aa, unidentified
MKKNSTMATSRDKIFKQPKLTIGLDLGDRTSHYCILDEAGNVILEDSLPTTPKGIRQAFGRIPRSRIALETGTHSPWVSRQLTEMGHEVIVAHARNVRLIGESSRKDDQLDARTLARLARIDPGLLGPVRHRSAQAQIHLTVIRARAALVGTRTALVNAARGLTKSYGQRLRKCGSGQINREMAKGLSPELREALDPLLGEIESLNERIAEYDRRIEQIATQVHPEVARLKQVKGVGTLIALTYVLTLDDPQRFRRSRDAGCFLGLRPGRRNSGQSEPQLHISKEGDRYLRTLLVQGAHYILGPFGQDSDLRRWGLKLAERGGKNAKKRAVIAVARKLAVLLHKLWVSGEVYEPLRNSHKVVSAVA

SEQ ID NO: 192681 - protein, 340 aa, unidentified
MTVIIGIDPHKASHTAVAIGCDERQLAEIKVRATCQQTAKLLAWAKPLGERTWAVESAGGLGYLLSQQLVEAGERVLDVPATLASRVRVLGTGRSNKNDPNDALSVAIAALRSPGLCPVEGADHIEVLRLLAKRNHELGRLRNIVVSRLHAALLNLSPGGISKELNASDADRLLGAFDPVSPVERTRYDLALELLDDVKRLDVQLKESHRRIKTAVQASGTSLTELYGVGPILACGLIGYTGDVRRFANRDQFASYAGVAPIELSSGGRTVHRLSRRGNRQLNHSIHMVAICQIRQTDSEGRAYFERKVAEGKTKREAIRSLKRHISNAVYRQLLLDARK

SEQ ID NO: 192682 - protein, 345 aa, unidentified
METMYYIGLDVHKRTISYCVKDVSGRVYAEGSVPATRFDLDRWMKTLPGPWTAAMEATVFTGWIYDHLQPHAAALKVAHPLMLRAIAAAKKKNDRIDAKKICDCLRCDFLPECYMASTAIRERRRTLRYRNLLVRQMVQMKNKIAMLLMEAGVSYNKQKLHKAGYFRELLATNPDINEGLCSLLRVCRETVVRLQRTESALVRSLERDSLLMDRVERLMTIPAVGPITALTWALEVGDVQRFSSIKKAISYCGLCSAEKSSGNTVQRTPLSKQRNKHLQTTLIEAAKMAPRNSPELAMLYDKEKRKGHANRATLAVARKLVAYLMAVDRGQRNFQVVETSNCIAA

SEQ ID NO: 192683 - protein, 384 aa, unidentified
MNKHNILFIGLDTHKVSIEVAYIEDDRGAIPIHHGKIPTTKAAIKKLVRRFESKYPKATLHFAYEAGPCGYWIYRLITSLGHCCYVIAPSLIPKKPGDKVKTDKRDALRLAKLLKTEELTPIYVPEPEDESIRDLSRARETAMNDLNDARFQLKAMLLRNNINYKGTANWSKKHLRWLSELILPHPAQQIVLQEYLQTVSERIKRLARLVNELQHQVQNWRYYPVVKALQAMRGVRLLVAAGVIAELGDLTRFDHPRKLMSYLGLVPGEHSSGERRRLGSITKCGNTRARRLLIEGAHSYRYAANISTELQKRQESLPKEIIDIAWKAQLRLCRRYQQLMHKGKHYNLVITAIAREMIAYIWAIAREVVLSQVNPKLRISRVPA

SEQ ID NO: 192684 - protein, 465 aa, unidentified
MKRQPRRRAPKPRQSAAALERLHPHAAGIDCGSAEHFVAVPPDRDPTPVQSFPTFTGDLHRLADWLQACRVTHVAMEATGVYWIPIFEILDARGFEVILVNARHVKNLPGRKSDVSDCEWLRDLHVLGLLRGSFRPADGIVALRGYLRHRTTLIESAGALVQRMQKALVQMNVQLPLVVSDITGVTGLRILRDIVAGQRDPQHLAQHRDVRCHASEAEIVAALRGNYRPEHVFVLQQNLELFDTYQQQLAACDGALEAHLAQLAVTPAPPGSPLPAPRRRRKPKEHEPGFDLRTPLHQLTGVDLSQIDGIGPYNALRLLSEIGTDMARWPTAKHFTSWLTLAPQNRVSGGRLLSSRTQPSANRAAAIFRMAAMTLGRTQTALGAFYRRVAFRIGKPKAITATARKLAVLVYRMLKDHLVYIDPGAEAYEAQDRTRVVRRLRHRAAHLGFGLVNLSTGEVIEGAVS

SEQ ID NO: 192685 - protein, 355 aa, unidentified
MTKQYLAPCDYDVFIGIDVDKHSFAITAVNHGTLKKSCKLPSDPEQLWQTIQHRYDGQRVLCVYEAGPTGYHLYDYLKERNQPCLMVSPLSIPKAPNSRVKTNRIDSEKLAVELRGGKLTSIRVPEGPYRELRHMTTARANYARSRMIARQRIKGLLLFTHLSTGLPENAENWSRRHIEELKKLSCSPAVRLRLDMLLNDLEYARKQTLSVIKQLKIFCNDHREIDRYRSYLQSIPGIGFITALTLLGRIGDPRHLQNVREVGAFLGLVPCEHSTGETVSRGSITHLGNLMARSLLVEAAWGAIRQDTELNHFYHRIKQRHHPKVAARKAIVAVARKLTARIYCVLKEQRNYQIH

SEQ ID NO: 192686 - protein, 377 aa, unidentified
MKKDIRFIGLDVHAETIAVAVAEASGEVRSLGVIPNRPEPVKRLVKKLGPAESLRVCYEAGPCGYVLYWQLTELGVHCDVVAPTLVPVKAGDRIKTDRRDALKLARSYRSGDLTPVWVPNEEHEALRDLVRAREAAKKDQLRARHRLQKFLLRRGLRPPEKIKAWTTKHLAWAQTLRLEQPAQAATLLDYITEVQHARERIERLERAIDQAIEAAPATIRAVIEGLQALRGVARISAATIVAELGQLSRFRRPKQLMGYTGAVPSEHSSGERVRRGAITKTGNAHLRRILVEAAWSYRHRPSVRGELQRRQKNTSEEVKEIAWKAQVRLHSRYARLTGRGKLKQQVVTAVARELAGFVWAIGVAVENKLAAQTERAA

SEQ ID NO: 192687 - protein, 404 aa, unidentified
MDARASGGPRHGGVDWSWERHAVCVVDDAGEVVDRFDVQHGRRELQEMGSRLRSRGVERVAIERPDGPVVDALLATGLQVVVISPRQVRAYRLRHGTAGNKDDRFDAFVLAEALRTDGHRMASLQPDAAATRALRALVRARKDLVGHRIAVHNQLLANLQQAFPGAVGLFAQLDSPISLTFLRRFPTAQRARWLSERRLTSWLRSVGYAGRRSAAELMVHLDAAPEGLSGEAGEAFGVVTTELVGLLGQIRDRTQVLERRIAEALELHRDGEIFRSLPRAGVIRAALLLAEVGDCRGRFPDESSLAAAAGVAPSTRASGKRRAVSFRRGCDKQLRAALIDFAQDSVQASPWARDIYDRARSRGCRHPHAVRILARAWVRVIWRCWTDGVPYDPARHEGAIRLAA

SEQ ID NO: 192688 - protein, 339 aa, unidentified
MELYAGIDLHARNSYFAVVDSAGVKVLLKKSSNESRAVFSVLEPYKERLKGVAVESTFNWYWLVDGLMDAGFKVHLANPSAFQKYSGLKHADDKSDAVWLADMLRLGILPKGFIYPREDRSIRDLLRKRMHLVKLRTSLINSLQNILARNGSTHLGASKIKQLTRDNISPLLDWNEDLAMSGRVSKDSIDHLTGQIKTIEKFIEDKVLLKQEYLCLKTIPGVGVILSLTIMLETGPIDRFAKVGNYASYCRKVPVCWSSDGKKKGDPNKKNGNKYLAWAFSEAAELARRFDDTIRAYYNRKAGKTNFMIAHSALAHKLARAAYYIMRDQVPFEKEKLFA

SEQ ID NO: 192689 - protein, 340 aa, unidentified
MPLYGGIDLHANNCVVALMNEQDEVIYQKRLPNDLPTILEQLAPYHADIEGLVVESTYNWYWLVDGLMEADYRVHLANPAAIQQYNGLKYSDDHSDARWLGHLLRLGVLPEGYIYPKADRAVRDLLRKRAHFVRQHTANVLRVQNIMVRNTGSRFSVKRIRELTAKELKHLLPEAYQVLAITSSLAILDCLSQQIKTLEKAVSKRLKHTPSYEQLLTVDGIGTILAQTIALETGQIGRFPTVGDYASYCRCVNSTKLSNGKRKGQGNVKNGNLYLGWAYMEAAQFAIRFNPQAQRFYQRKLAKSTNNTVLARKSVAHKLSRACYYIMRDLVPFEATKAFG

SEQ ID NO: 192690 - protein, 360 aa, unidentified
MSAKATIKYVGMDVHKETISIAVVNATGRLIMQSVIATAREPILDFIGGLSGTVHVTFEEGNYSAWLYPLLARVVAKAVVCNPRKNALLKSGSKSDRIDSQKLAELLWLGKLKNVYHADHGLQTLKELGRTYAGLTDDTTRVMSRLKALYRGQAIPNKGRSLYTRRRREQWLSQLPAQEVGLRRRAECLFEQLDSLQKLRRQARTDFLTESRKQPASKILPTIPFLGPIRTAQLIARVQTPHRFRTKRQFWTYCGFGVDTWTSSDYRITDGHIQRRQKPVFVRGLNLDHNHQLKSIFKSTATTASVKPGPLREYYQGLLDKHMLPAMARITLARKIAAITLAIWKKGERFDPRYLNTQAA

SEQ ID NO: 192691 - protein, 326 aa, unidentified
MDPQVSLPVVGIDVSKASLAVCYQAEHQVRHLEVSNTKAGFEQLLQASGTNCLFVMEATGAYYLLLAYYLHAQGAQVAVLNPLVIKRFIQMHLGKGKSDRKDAQWLLRYGQQQATKPWQPEENVLVECRQLEQVSEQLIKQKIMVSNSLEALTQQPIQSSGALKQLQQTLHLLGQQQQLVEQELLSLLEKRYAQELALLCSIPGIGRKTAALLLLFAGGFTTFDNYRQLIAKAGLSPREHTSGTSIRGKVSITKMGGGLIRSKLYRCSLSAKRGNAACRALYERLVARGKNGKVALIAVCNKLLKQAFAIIKSGVPYRTDFTSNLA

SEQ ID NO: 192692 - protein, 373 aa, unidentified
MKKVRFLGLDVHADTIAVAVAEPDGEVRSLGIIPNREESVRKLVKKLGPAEQLQACYEAGPTGYVLYWQLTALGVKCEVVAPSLVPVKAGDRVKTDRRDATKLARSYRAGDLTAVWVPNQEHEALRDLVRARETAKQDQLRARHRLSKFLLRHGRRVPLGIKVWTQRYQDWVKEQVHFEQPAQEYTLLDYLHEVEHMGDRIRRLDQAIAEAVKLAPPRMQEVMQSLQALRGIAQISAVTIVAELGKISRFDRARQLMGYSGAVSSEHSSGKRMQRGQITKTGNAHLRRIAMEAAWAYRHRPAIGPRLRKRQEGLSEEVKEIAWKAQHRLHKRYRNLSAAGKEKQKVVTAIGRELLGFIWAIGVQVERNSKQVA

SEQ ID NO: 192693 - protein, 321 aa, unidentified
MDKITIFVGIDISKDTIDVYDSDAGHFQFENNPKGFSLLRKRLSADHWCAMEATGCYHQRLAIYLYEHGIRLSVLNPLVVKRFIQMKLNHVKTDKSDARMIFRYASEQPLSLWVPEAGYVVECKRYQSAIRLYFKQRTALKNMLHSLLAGGQARDKLVRSIKRQIKNLDKEIGLLEIEMEQLIKSNEQGLYSRLNTIPGIGRKTAMILIVSTNGFRDFESASQVTSFFGLAPNERSSGSSVKGRTRISKIGDPLLRNHLFLCSFTASVHNPQCKALFDRIVGKGKSKKLALIAVCNKLIKQAYGISKSGLDYDRNFVGRLS

SEQ ID NO: 192694 - protein, 443 aa, unidentified
MKRRCFGLDVHREFAQVAIWQDGVVRQAGQVAATPEGLRLFADSLAPTDEVALEATCNTHAIAKLLQGRVGRVVISNPQKTRAIAEAKVKTDKVDAAVLAELLAADYLPGVWLSDDVTHALRRQVARRANIVRQRTRLKNQVQAILHRNLIPRCPATDLFGHKGRAWLAERQLPADERQAVSALLRQLDFHGQELKLIEAELARVAIDSADVKRLMTIPGVDATVALSIVAAVGDFGRFRTPEQLVSYLGLNPRVRQSGGQPASHGRITKQGRAHDRGMLVEAAWAASKTPGPLRAFFERIRARRGMQIAVVATARKLAVLCWHLIAKGEDYAFARPSLTAQKMRRLELRAGLPAKRGRKGKAAGYSLKEVRERERALTEQAEQAYRQQVADWQAKAPGRARKGVAATNGARLSRPSDGAAARQDSAPDPALRSGVDHAHSPA

SEQ ID NO: 192695 - protein, 342 aa, unidentified
MAEFRKYVGMDVHKETIAVAAAEGEGGAVRYLGEIPNNAEAVRRLLKRLAGEGGRLRFCYEAGPCGYGLYRRLVAAGHACAVVAPALIPRKSGERVKTDRRDALNLARLDRGGDLTAVWVPDLEQEAMRDLSRAREDMKTLDKQTRQRLSAFLLRQGRTFAGKQRWTQAHFRWIELQKMDSPVQQIVLEEYVEAVRAGQARTAAITLLAELGDVNRFENPSQLMGYVGLTPSEHSSGGRRRQGGLTKTGNAHARRMLVECAWAYRFPARKTARIERRTERASAAVRALSWKAQKRLCGRFHRLTARGKRPTVVVAAIARELTGFIWAVVCETQRPGEVPVTA

SEQ ID NO: 192696 - protein, 391 aa, unidentified
MIFVGIDVAKDTHYAAVSDDSGAVLVKPFAFQNNAEGFCLLLKKLSEFDRSKLLIGLESTGIYSENLICFLYESGFRLAVINPIQTATLRKTAIRKTKTDKVDTMLIIKSLMVNSYRLYSQRDADSLKLRTLCRFRQNLKKSKARLKIQLAGYVNLVFPEFGKFFKSGIHIAASYALLKKYSSPKEIAALRTSTLCTLLSKASHGRFGKDTAEALKSLALSSVGVKNPYISIQIAQTIAQIELLEQQIKDLNSAIEEAMESINSVLMTVPGIGAVNAACILGEIGDIKRFSKPCKLLAYAGLDPTVRQSGQFTAKSTRMSKRGSALLRFALINSAWQLTLNDTTFKAYYDLKRSQGLNHYGALGHVAHKLTRVIFKLLTSDTPFNPAKLLA

SEQ ID NO: 192697 - protein, 417 aa, unidentified
MWNKATRVKSSVESASNKHIGGILMVCVGIDVAKDKHDCFIISSEGEILADVFTIPNNAEGFDTLLQAIRRSTRPEDKIKVGLEATGHYSYNILGFLLDKGLPTYVINPLHTNLYRKSLSLRKTKTDRVDARTIAAMLMSDVDLKSYTDTVYHNEELKSLTRYRFDKVRERAKLKQSVSRLVTILFPELEKLVSSLHSASVYALLSEFPGAKQISSTHMTHLKAVLKNASQGRYGQEMAETIRNAARSSVGSVMPAKSLELQHTIRLIRELDAEIEDIETAIQAIVDEMQSPITTIPGMGVRMGAVILAEIGDFSRFDSPDKILAYAGMSPSTYQSGQLSPSGAYSHMEKRGSRYLRYALYNATKHVCHWDPTFAAYLAKKRAEGKHYNVALSHAAKKLVRLIFAMEKSQRPYCAAA

SEQ ID NO: 192698 - protein, 343 aa, unidentified
MSEVSIIGLDIAKNVFHAHGADASGRALFSRKISRTKLLEFFARQPRCLVALEACGGAHHWARELTLLGHRVKLIPPAYVKPFVKRHKNDAVDAEAICEAAQRPNMRFVAIKSEEQQASALVFRTRDLLVRQRTQLINAIRGHLTEYGWVAPKGPSHITLLSDMLDGEMGSSLPDAATTMFRTMLSLLKELNCKIDELDKEIARRAREDVIARRLMTIPGVGPITATAIAALAPPAETFTRGRDFAAWLGLAPRQLSTGGKQKLGSITKMGERTLRRLIIIGCSAVVLQASKRGAPPGSWLEQMMARKPRMLVTVALANKTARIIWALLIKQEDYKAPVAAAV

SEQ ID NO: 192699 - protein, 375 aa, unidentified
MGDYSEAFVGLDTSKLRNAVAIADAGRGGEVRFLGEIENTPAATAKLVRKLSSKYKRLTFCYEAGPTGYGLHRQIKGLGFECVVVAPSLIPKRPGDKVKTNRRDALSLAKLLRADELTAVWVPDGRHEAMRDLTRARETAMLDLRTKRQHVSAFLLRLGRPYPESKKTWTKAHVSWIASQKLDHPQQRLVLEEMMLAIRQAQERLQRLEQAIAAAVPEWSLAPLVTALMAMRGMDLISATTLLAEIGDLSRFQTPTELMAYLGLVPSENSTGDTVKRGPITKAGNRRARRMLVECSWSYQHPPRVGQAKQPKVDAAPPAVREIAWKAQCRLYRRYRTLIRNGKLKTVAIVAIARELAGFIWAVARAVSTTRVAAA

SEQ ID NO: 192700 - protein, 352 aa, unidentified
MIVLGADAHKRSHTIAAVSATTGELVGEQTVQVGARGFAALLSWARALGGERVWALEDCRHVSGSFERFLIGRGERVLRVTTRLMAASRRNVRDRGKSDNIDAIAVARAALREGLDALPAAHLDGPELDLRLLVDHRERLIRQRVALNNTLQWHLHDLWPELELPGSSLFSGRWAPRVARRLARAQQTMRVRIARDELRRIRELSQTIKALEREIAALVGEVAPQLLTEPGFGPLTAAKLVGEVAGASRFASDAKLARAAGVAPIPVSSGKTNRHRLDRGGNRQINASIHRIAVTRLRCHPETQDYIARKRSEGKSTKQAIRCLKRHLARRIWHLLQAPHPDRATPPSPSIS

SEQ ID NO: 192701 - protein, 346 aa, unidentified
MKHITTIGLDLAKQVFQIHGADAEGSPIVSRKLRRAEVLRFFEKQPACLVGLEACGGSHYWAREIAALGHKVRLIPPAYVKPFVKRGKTDAADAEAISEAVVRKTMRFVPVKTVEQQAAAMVLKTRGLLVRQRTQVINALRAHLSEMGIIAGISSAKVAGLIDIVRDETDARLPKAARLALSAIADQIEALMRQIDDLEREIVREARRDGDMRRMATIPGVGAITAASIKALVPDPGGFKSGRHFAAWLGLTPRSHSSGGKERLGGISKMGNAEIRSLLVLGATSVLRHMRGNDKAPKWLNGLLKRRPYKVVAVALANKMARIIWALLTKGGTYRGLEAANSAAGA

SEQ ID NO: 192702 - protein, 432 aa, unidentified
MSKHTLGIDLGVRAAHVATLCDERGEVVWSKRRFRNRHDELVAVVDQIGDCDQLTVVMEPTRNAWVPVAAHFMAMGAGVVLVPPERSADLRRYYAKHTKNDRLDSHVLARLPLLHPDGLNLIDSLGPADGLKRAVRRRVKLVEYQLASRQRLDSMLDLLGPGYAEALGGARYTKTALRILEDYGNPRKLRRLGVNRLTVLMRQVSGGQWSTDKATEVIAAAGEAIALWENDQLDFDELASDFASEVRVIRQVSDEITHLEGRIDVLYEKADPTGIVISTPGVGQILAGGILGRLGDAKRFANLAGVRSFSGMVPKVNQSGHTQTRPGITKAGDAGLRRDIWFAADQARHIDPQLAAKYQRLIVERRLHHYSAICHLATSLLTRIAACWRNDERYVIRDVDGRRITATEGRAIVKARYPIPPEIRNRTRISEQ

SEQ ID NO: 192703 - protein, 408 aa, unidentified
MDLTPMHKRVIALDVHQAKITACAVVEHDDGRVEVTKRDFGAFRRDRRALAQWSLEIRPEVVVMESTGVYWKSPFAALEAVGIIAWVVNARHVKAVPGRKTDMADAQWLATLARAGLLRASFIPPVDLRQLRLVARQRQKLVGMCSAEKNRLHKVLVDAGMRINVVVSDIHGASARAMVKALIAGQAMYEVLDQKGRLRASRDELFEALSTEQFSAAHRFVAQEIMQHIEHIETRIARMDQYLLDGLRAWQPQLKLLQTLPGIDIQGAAMLLVEIGADMDVFGSAERLASWVGICPGNNESAGKRKTGRIRKGNAWVRRLLCEFAQAAARTRCALKAKFDALAIRKGHKKSIVALAHKMLRTVYAMLANGTHYQDKEVDYEALNVQRNAPRWLKMLRKHGFIATPTAT

SEQ ID NO: 192704 - protein, 427 aa, unidentified
MGLIVPTTLHPEREDQPLPYEWFVGIDWGSQQHQVSVLDRDRRRVGERVVDHDGASLARLADWLWTLSVGQPQRVAVAIEVPRGAIVEGLLERGFHVFAINPKQLDRFRDRHSVAGAKDDRRDAFVLADSVRTDQPSFRRVHLEEPQLLLLRELSRAEETLLEEFRRSANRLREQLHRLYPQMLQLCSAADEPWLWGLITLAPTPAHAMLLSEEQVQRVLKAHRIRRITATEVLACLQAPALPVAPGAAEAAQAHCQLLLPCLRVLAEQLQACSQQVSALLSTLAEEPGEGESPSDVAIVLSLPGVGRKITAWLFAEAAQSLTERDYQMLRTHSGVAPVTKQSGKRRLVVMRRGCNPRLRHALYHMARVAMQRDAHFSSVYAALRAKGQRHGQALRNIGDRLLRILIAMLRHRTGYDASRIRCKPVV

SEQ ID NO: 192705 - protein, 437 aa, unidentified
MSDNKASEIRVSVDVGYRRHSVAIGLPSGEVLEEFEIAHRPEGFAEFFSRIEKHQKVRDCEVAVAMEGFNGCARPLDAMVRRRGYRLYNINNLKLARFKEIFPGAAKSDRIDARKGLELFQLSDHLPLAKEVLQEVKGTPRENEVLKRLTRRRRRLVDEQIRVISNLQTDLQAVCPGLLEITKNAGNQWFLNFLLSADTLPQLARLRPATLLKVPAVGRKYASLIEDWQKRAHFSEEVEWVSEMIQEDAQRCLDLDEKIKALRAKIKEVAKDSTIVKVLLSIPGFGTICTAELAGEIGTLERFSKEGSLALYLGMSTLDNSSGKYQGSKQPKHVNTRAKAAMMVALDRHRKFVPESQRYYEKKRSEGKKHNQAIRALGRHLCRIIYKLLKEEREYEIRLEKGNTKGKVSPRSLIKTQIRKAKISTKGTNNKIYQQST

SEQ ID NO: 192706 - protein, 348 aa, unidentified
MSKISQYVGLDVSLKETSICVIDEAGKIVWRGRTDTTPEAIASAVKQHAPNAVRIGLESGQLSTWLFHELKAVGLPVICVDARHAKAALSLKVSKTDANDALGLAQIMRVGWYREVSVKGLDCQAVRTLLVVRAQLVSQVTTLKNCVRGVLKTFGLVLPKGLRSQFPGRVRAAIDGHPVLGAIIEPTLLVLEATRAQLIVYDRAIIQRARSDDTARQLMSAPGVGTVVALAYMTGVEDPARFKRSSSVAAYFGMTPRRYQSGEVDHAGRISKCGDGMVRGPLFEAAKVLLSRSARPSALKTWGEALGKRIGPKKATMAVARKLAVILHRMWITGTTFQWNAEAASLAA

SEQ ID NO: 192707 - protein, 393 aa, unidentified
MFYIGIDIAKHNHEASIIDSNGSLLCESISFSNSQKGCEKLIALLEHLSVCTDNCIIGMEATGHYWLSVYSYLFELGFELKVINPIQSDAFRKMYIRQTKNDSKDSFIIAQIMRFGQFSASSLSDENVMALRQLSRYRLFLVDDCSDFKRKVICLLDQVFPEYSKLFSDIFGVTSKELLLKYPTPDEMLSVSTTKLSNFISKCSRGRHGRVKAEEIQNAAKHTFGIKFAANAFSFQIKQMIEQIKFIENQLKELEKEITELLLQTNQVITTIPGIGTVLGAVIIGEIGDISRFDAAPKLVAYAGLDVRVSQSGQFVGNQMKISKKGSPYLRRAIWMAATVAAFSDPVLSAYYQSLRARGKHHLTAIGAVARKLCNIIFAVLRDNKPYMLMPNQ

SEQ ID NO: 192708 - protein, 351 aa, unidentified
MMIIGVDYHPSFQTMAFLLEETGECGEQELNHSDGQAEKFYRDLKQRGISVRVGMEATGYSRWFERLLAELGFEVWIGDPAEIKAKRVKTLKNDREDARLLRRLMLENNFPRIWVPDPENRDLRQLLWHRHRLVQMRTRIMNQLQALAMNEGYRWRKKLFSEQGRAQLEKLSLAPWASRRRQELLELLDRMNPTIAELTAAVEREARKRPAVQRLMTHPGVGPLTALAFVLILGTWERFPRGKQIGNYVGMIPSENSSAGKQRLGHITKQGNSLLRFLLVEAAQAAARVHPDWRRRYVHLAMRRHRSIAKVAMGRRLAVRLYWMWRNGCEYSQSLEFGSYAGQLGTGHGAK

SEQ ID NO: 192709 - protein, 440 aa, unidentified
MKAKKQGKGESGRAVSGAVRLDTLERINLNAAGLDIGAEEIYACVPDGRDAEASVRVFGTYTTDLLALADWLAQCRIDTVAMESTGVYWIPAFEILEARGFKVYLVNARQVKNVSGRKTDVLDCQWIQQLHTYGLLSNSFRPEGEICALRAYLRHRSNLIRYRSGHVQHIQKALQQMNVQLVQAVSDMTGATGMRIIRAIVAGERDPFHLAQLRNYRCKKDAAEIAKALTGTWRSEHLFVLQQALELYDFYTAQIQACDAEIERTYATIRPDWPVAQPLEFTRKKNHSHSKNRPPNELALRSHLLRIAGVDVPAVDGISVSVAQTILSEIGTDMSRWPTVKHFCSWLGLAPKNDITGGKVIRSRTGKTKNRAGQAFRLAASSVTRADCAFGAFYRRKKSQIGPAQAIVATAHMIARVVYFMLKNQVPYEHISAASFDQQI

SEQ ID NO: 192710 - protein, 441 aa, unidentified
MKKRIYRATHVKELNVERLCGELADGCVVVGVDVAKEDMVAGLMDGRVQVVATVKWRHPEQSQLFMEVLEAVQRSGRQVEVAMEPSGTYGDALRVAVLERGIPVYRVSPKRCHDAAEVYDGVPSQHDAKSAAIIAKLHLDRASEPWPVKSEGERTLAAALRVLQVYEGQFQENRNRLEAILARHWPELGAILDLGSATLLELLKTYGGAGAVVADEAGARELMQRVGRGFLKTEKVEEVVRSARTSFGMGQLEEERRLVMEIAGEARRNQQKSQKAKKRVEQLTPESESAARMTAVVGKVTAAVLMAALGDPGGYDNATAYLKSAGLNLKEKSSGKQKGGLHITKRGPGVARQFLYLAVLRLLQTDRVIRAWYAKKVARQGGKLKSKAVVAIMRKLVLALWYVARGSRFDSAKLFDVSRLNLDLAAEVALAPIDPEEEVAA

SEQ ID NO: 192711 - protein, 381 aa, unidentified
MNANTSLSKRAPAAPVLYLALELSRASWKLGFTVGLGQKARVRNVQAGDLARLRKEIAAAKRRFRLPAETPVKSCYEAGRDGFWIHRFLESIGVVNVVVDAASIEVARRKRRAKTDRIDVDLLLGRLVRYDLGERKVWSVVHVPSDETEDERHLHRELEVLTRERTRLVNRIRGLLAGVGVRDVHLDRHFAERLGELKLWDGNPLGSALHCRLLREWERVELLERQIAAIHEERVETLEHSESGEMQQVRSLSGLRGIGIDSAWLLVMEMFGWRGLRNRREVASLAGLAPTPYASGDLQREQGISKAGNYRVRVRAVELAWCWLRYQPRSVLSRWYEKRFGSGGARLRRVGIVALARKLLVALWRFLDQGLIPEGAVFKTA

SEQ ID NO: 192712 - protein, 420 aa, unidentified
MEEITEDAEIVARVAGLDIGKATLTACVRVPHEDRPGRRLQEVRTFATTTPALLGLRDWLICQGVTLVVMEATSTYWKPPFYLLEDAVECWVVNARDVKNVPGRAKTDKLDAVWLAKLAERGMLRPSFVPPPWQRELRDLCRYRRTLVQERTREKQRAEKLLEDTQIKLSAVISDIFGASGRAMLEALIAGQTNPAVLADLARGSMRGKKSVLQEALTGQFRDHHGWLLRMMCDRIDALTAQIDALTARIDEAIAPFAHQVAQLDQIPGVGKTGAQELIAEVGIDMTRFPTAAHLVSWAKFAPRARQSAGRAKPGTTGKGNPWIGGTLGEAVIGAARTKTFLGSRYHRLARRRGKRRALVAVGNSLLVIAYHLLSDPGARFTDLGPDWHDRLAPVRRKRQLIAELERLSGKKVTLQEAAA

SEQ ID NO: 192713 - protein, 335 aa, unidentified
MRYVGLDVHYRSSTYCVLEESGREVACETVRGHWPQLLERLRTVEGPWVICFEATCGYGYLYRELSRMAARVVVAHPGQLRLIFRAKRKNDRIDARKLAKLLYLDEVPQAYVPSQEVQSWRGLIEHRRRMVDRQTTCKNAIRSLLRAHGKIAAPGLWTKKGLAWLRQEERPTPAARLKRDLLLDELAEAKRRVRTVTKALDEIGERHPAVLLLRTIPGVGIRTAETVAAYMDNARRFVRSSQVGAYFGLIPCQDASAGVNRLGHITRQGPATARKYLVEAAWQGVYRSPTIRAYFERVRHGRPECRKIALVATAHYLLRCMHAMLVRGQPWHEAA

SEQ ID NO: 192714 - protein, 395 aa, unidentified
MFYLGIDVGKNNHEAGFIREDGIHVGKSMRFSNSQEGFDALSTFIINRLPDGESFCVGMEATGHYWLSLYSYLHAHGMIIHVINPIQSDSLRNFHIRQQKTDSVDCFLVAEVIRFGKFTQTHLADEDILIIRNLARFRESLKDTCANYKRQVVTILDQVFPEYDKLFSNMFGESSKAFLKTYGTPEQTVDLNTKSLATLLRKASRGHHSTDKAREIKEAAARSVGLILCSDAFAFQLRILIEQIDFTEKQLDEIEKKIAHQLKKINSVILTIPGIGPSTGAIILGEIGDINRFSNPKKLVAYAGIDPTMYQSGNFNGQHNRLSKKGSPYLRRAVWMSALIASRFDPVFKAYYEKKRAEGKSHGTALGAVSRKLLYTIYAVLKENKPYLVQLDTIQ

SEQ ID NO: 192715 - protein, 407 aa, unidentified
MEVLYPRCAGLDVHAGSVTACARIATDAQVTYEHRAVSTTTRGLLDLAEWLTAQGCTHVAMEATGVYWKPVWHVLEEHFTLVLANAMHIRNVPGRKSDMNDATWIADLLAHGLIRSSFVPPAPIQELRDLTRTRRQLVHEIARHILRIQKTLEDANLKLTQVMSDIVGVSGRAILNALISGETDPERLADLTRGRLKATRADLVDALHGRITDHHRFMIQVHLGQIDGLESAVAAIEARIGDVLGPFRAAVSLLTTMPGISETTARVLVAEIGTDMSRFPSVGHLISWAGFCPRLDESAGKRRSTRTRQSAPWLKPTLVNAAWAATHKKDGYLRAQFLRIKSRRGAKKAILAVASSMLTAAYFMLRDGVEYHDLGAQHFEQRDKEKLAKRLLQRLRDLGVAVEVKAA

SEQ ID NO: 192716 - protein, 510 aa, unidentified
MITIPVITERCAGIDVGKRGLAAAVAVGPADKEAEIKTRWFGTTVPALHDLHAWLREEGCTTVAMESTGSYWIPVKNILEQDLRITLVCPRKHHPKKGEKTDFRDAIDPAVHHRHGLLTGSYMPERGVVELRDLTRRRKKLPGHLRSEKNRIQKVLETASVKMGNVVSDVFGVSGQEIPRALLENLPLSAEQMAEMAKKRLRQKIPQLTEALEGQQMNDHHRWLIEQSVEHAKFLDRQVEELEKKIDLQLQPYRGQYELLMTIPGIKEAAAFNILAEIGPKMQQFPTADQLCSWAGICPGNNRSAGKSKSSHIKKANKFLLAALVESSWGAARQEGSVFQRKFRRWVKKGEKKAVIAVCRCLLRVIWSVLRNDRPYVEPDANVLQHLERQKQVRYHTQRLRELGADDQTIKTLLDNLMEAPLPTEFDAGAVAAQSKEPDPARSRCSPNQKKSDASGRRPIARGVLGFRIRTARKKKYSVEKDPPDPPSQAAASETASPPRTGGRPRKTKT

SEQ ID NO: 192717 - protein, 387 aa, unidentified
MGAVLIGVDPAKRSNTIEVINASEKTLATGRFDNSTVGYREMRALARKWPDRVWVIEGATGVGLHLAQRLVSDGERVVDVPAKLSTRVRAMDTGHGRKNDPADAHAVAVVGLRSRGLREVSLDDETVALKLMSERRRDLVRSRTQAMNRLHQILMQLIASGAPKQLTVAQAKALVASVRPRDAVGKTRRQLAVDLIDDVVILDRKIKVLEARLSEAVAATGTHLTEIVGVAAVTAATIIGEVGNVSRFATSNHFATYTGTAPIEASSGDIVRHRLSRAGNRRLNSALHIAAMANKRHDPRGKAYYERKLAAQKGHMGALRCLKRRLSDVVFRVLLEDQARANPGGQMGATLTASAVDQIPKANTSDKPQPGFTAEATPTRRPTKAAS

SEQ ID NO: 192718 - protein, 345 aa, unidentified
MNYYAGIDVSLKESSVCVLDAKGKVIREAKVASEPEALIAWFAQLGLAMELIGLEAGPLSQWLFAAMKEAGLAVELLETRHVRNALKTMPVKTDRKDARGIAELMRIGWFRPVHCKSMSAQETRAILTARKLVETKLHDVEMSLRGILRGFGLKVGKTTPTRFASRIRELVSGHANLQVIADSLLAIHEVSLREFKGFEKRVRTMARHNEQARLLMSTTGVGAVISLTYVAAIDDPARFENSKVVGAHYGMTPKKYQSGEAEYDGRISKIGDASVRMALWQAAHVILTRPVKGSALKSWGLSIAKRRGMAKAKVALARKLAVVMHRMLVDAKSFDHALPNRTAAA

SEQ ID NO: 192719 - protein, 417 aa, unidentified
MEVVHPRCAGIDVSKRDAKVCIRIQGSNGRKTSSTVTTWGSMTNQILALRDHLAAQQVTVVIMESTSEYWRPFYYLLEADFQVLLVNAREVKNVPGRKSDVSDAAWLADLGAHGLLRASFVPPEPIRQLRDLTRTRTHITAERTREVQRLEKLLESAGIKLSSVATDITGVSGRLMLQALIDSQGTAEPARIAGLAKRRMRSKIPVLTEALNGYFTAHHAFMTRLFLDRIDAHTRDIELLSQRIDGLMEPFLPARDLLESIPGFSQTVAEVFIAETGGDMTQFPTPEQLASWAGVSPGSNESAGRVKSTKTRPGNRYLKGALGVAALNQARSKSRKTYFSAKFRHLAPTRGPMKAIVAVERAMLVAAWHMLTNSEFYRDPGADYYTRRDPAKTKARALKQLQALGYDVTLQPLPQAG

SEQ ID NO: 192720 - protein, 312 aa, unidentified
MAKDTIGIDVSKDRLDAFWHSHDVALSLPNTAEGFAQLCAWLGENDGVLFVFEATGAYHRGLERYLSLAGHPFIKVNPKQARRFAQAIGRLAKTDSVDAKMLARMGIVLDLTPQGIEGEDVHDLRELLTARRALVKDQITAKTRLATATNPLVKDQLCRRINDIDTDIKALDEVVAQIAKQRGTLDERIRRLMTIPGVGRLTATILVIDMPELGHLDSKKIAALAGLAPMTQQSGKWQGKERIIGGRASLRRAIYMPALVAIRFNHDLRDKYQQLVNAGKAKKVAITAVMRRIIVLANTLLREGRDWQPKRP

SEQ ID NO: 192721 - protein, 367 aa, unidentified
MTKLFVGMDVHKETIAVALAEGDVGSEVRFYGNIPNEAGVIEKLAKKLAQKHLDICFVYEAGPCGYIIQRHLTALGFECRIAAPGSIVKKPTDRIKNDHRDAIGLARLCRANELTFVWIPDETHEAMRDLVRARHATTRDVKSAKIRLQSYLLKYDMRYAGKSWTYRHRVWLTDRKFPEAPQQIVFQTYLNALEQHEGRRSQLDEQIRDLIPQWKLAPVVRDLQALKGVAQVIAATIAVEAGDIYRFQSPKQLMAFFGLIPGEHSSGGSFRPRGITKTGSTHARSMLFEAAWNYTKTPKKGQHMCRMEIDGIPQHAKDIAWKAQLRLHKRYKQLTANGKRSSSAITAVARELVGFAWAIAKESQMAA

SEQ ID NO: 192722 - protein, 353 aa, unidentified
MKYIIGYDAHKRFSQMAVFEEQSKTLQQKRVDHKPGAICNFLAKYPEGTAVGLESVGNWYWIVDEIEAAGCQPLMAHAAKAKVMMGNVNKTDKLDAQGLVTLLRNGTLPTVWIAPGEIRDARELPRTRMALCKIRVALKNRIHATLAKYNLHPANKTDIFAQRGCQELEDVIQKLPSETLKCVQQELELLNMVQEQILSLEKRIREQIPEKWMMQLLKTLPGVGDILSIVIACEIGSVERFPGAEYLASYAGVVPGVKGSGDKVRYGRLPKQANHYLKWAYIEAANSVSSHCNAPNWRQKHVTLLYERVRRRKGHSVAAGAVARHLAEASYWILTKKEPYRDPVRKKVLPRQG

SEQ ID NO: 192723 - protein, 343 aa, unidentified
MSISMIGLDTSKSVFQIHGVNETGKAELRRKVRRSDLIAFFEKQERCTVVMEACGAAHHWARILTGLGHTVKLLAPEAVKPFVKKGQKNDAADAAAICEAASRPDVKFVPVKTVAQQGILALHTARSLLVKQQTMLANAIRGLATEFGHVVPKGLHNLEPLVELVDADEAMPAQARQAIGELYKRFGELATGIQSCEAEIVKHARTDPTARRLATIPGIGPITASLIAATVVDISRFKTARQFAAWLGLVPRQHSTAGKTRLGRITKAGNREIRKLLVLGATAMLGHAEGWHSALGAWLRNILERRPARLATVALANKMARIAWAVMTRNEVYRPQGGVAAKA

SEQ ID NO: 192724 - protein, 340 aa, unidentified
MKLYGAIDLHSTNNVTVVIDEQDRVVYQKRLPNDLALILNELLVYQAELQGIVVESTYNWYWLVDGLMERGYKVRLANTAAIQQYNGLKYTDDNSDARWLAHLLRLGVLPEGYIYPRADRPVRDLLRKRSQMVRQRTTNLLSIQNLMTRNTGSSLSAKQIKGLDVQQVDELLPNPDLALAVKANLSVLCSADEQTKILERTVIERVQLRPQFCFLKTVPGIGKILALTIMLETGDIRRFSSVGNFASYCRCVGSQKISNSKKKGKGNTKNGNKYLAWAFVEAANFAIRFNSKIKSFYQRKKAKTKGVVAIKAVAHKLCRACYYIMRDRVAFNITKAFGPK

SEQ ID NO: 192725 - protein, 420 aa, unidentified
MEDVVEREEIIERVAALDIGKAELVCCVRVPGEGTRRRQEVVRYSTMTRSLLALADRLDELGVTRVVMEATSDYWKSPFFVLEAAGFQTWLVNARDVKHLPGRPKTDRLDAVWLCKVAERQMLRPSFVPPPQIRDLRALTRYRRSLVAERTAEKQRVEKLLEDTGVKLSVVASDIFGVSGRQMMAALVAGERDPEVLASMARGLLRKKNPELVEAFFACRFGQQHGWLLSKMLDRVDQFTADIAEVDERIGEQIAPFASAVARLTQIPGISDTTARIIIAEIGVDMTRFPTPGHLASWAKFAPGIKSSAGRHKGNGASGHGNRYLAAALGEAAVVAGRTNTFLGQRYQRVARRRGKKRAVVAVGRSLLVIIWHLLNDPDAQFHDLGPGYYDTLVNTSRSRRNHVRQLERLGYKVTLEPAA

SEQ ID NO: 192726 - protein, 414 aa, unidentified
MDRMFEVAAGIDVHRDTVVVTVRRRLNGREEQKTKTFDTFRDSLVAMTSWLASEGVQVVGLESTGVYWQPVVRALKEHLTTARVWLLNSAHVKQMPGRKSDVTDSQWLSRLVMYGHVSPSFLPSADLCELRKLTRHRTKVVADQTRYKNRIIKELEASGVKLASVCADPLGKTARAILDVLIEGEDVTPERIAALARGTLRRKVDLLARAVRDTLTPSTAIVLRQMLVRLDSLDADIHALDREIARLLIPYRDHIARLSEIPGIDCVAAGSILAETGPDLTSFPTPRHLASWAGLSPGSNESGGKAKPAPTRKGNKYLRTTLVQAATSAKATKQTFWQRRYRQLVRLGPKKALVALARRLLHTVYAMLRFSRPYKDPDLTPVPPHRLQRTVQALTSRLESLGFHVALQPRPSVS

SEQ ID NO: 192727 - protein, 349 aa, unidentified
MSIVGAFDVHRRQITFDWVDRARGLGQRGRIQPVTRDVLRLWLAELPAHDGAFAVEACTGWRFVVEELQAAGWQAYLAEPAETASLRGRKQRAKTDRTDARLLRELLEQQRLPQSWVPPAHILELRVLVRLRKSLVDERTAWQQRLHAVLFHHGLPCPEHALLSRVTRGWLERVELSAASRFQVAAALRHIDQLDAELDPLERWLRSFARRQVGCRALMAAHYGIGALTAPTILAELGDARRFRNGDAVVRYTGLDVTVYSSDGKRSPGHLSHQGPQVLRWALFEAATCAARPTSPDHQLYAQVKDRLGGKRAALTVARKLARRVRHTLAALGDTALAAVTDHPLPKVA

SEQ ID NO: 192728 - protein, 342 aa, unidentified
MQSISTIGLDIAKSVFQVHGADAAGQVVLRRQLKRRHVLAFFEKLPSCLVGIEACASSHHWSRELQAMGHTVRLMPPAYVKPYVKRQKNDTTDADDREAVTRPNMRFVPTKTVEQQSCLMLHRARHLFIRQQTAVINSIRAYLAEFGIVAPVGRRGVEQLLEVVADTADRRLPEVARACLAALASQLRALKAQILEFDRRIIAWHRSNATSKRLDAIPGVGPALATALVASIADPVAFRSGRDFSAWVGLVPKQNSSGGKDKLGSISKQGDRYLRSLFTAGALAVIRYAKIHGTGHRPWLTGLLARRPTKIAAIALANKLARMAWAMMARNERYREPAALAA

SEQ ID NO: 192729 - protein, 414 aa, unidentified
MDIVHTHCAGLDVHKKTVVAAIIVPDGKNGLLKETRTFGTMTCDLLALSDWLMGYGVTHVAMESTGEYWKPIFNILENNFEVLLVNAQHIKAVPGHKTDVKDSEWIADLLRHGLLKASFIPPLGQRELRELTRYRSTFVRERATLVNRVQKLLESANIKLASVATDVMGVSGRAMLEAIIQGHSSPAEMAELAQKRMRQKRVLLANVMEGRVKPHHRFVLTELLCQIDSLDETIERFNKQIEEYCRPFEEAVSLLDTIPGVGCEVAEIIVSEIGIDMSRFPSADALASWAGVAPGNNESAGKRRSGKTTKGNQALSIALNQAAHGASHTKDTYLSAQYRRLAARRGKKRAIMALMHSILVIAYHIIQRSEPYHDLGGDYFDKRHPEATAKHLVKRLEQLGYSVFLQQPAICPVA

SEQ ID NO: 192730 - protein, 404 aa, unidentified
MWYVGIDWADTHHDALVIDEKGRQVGSLRIDHSPQGMSKLTTFLEQIISTAPKEQMACIIETTHGLLIAHLLEAGWPVYPVNPRTVDRRRSASGAKTDTIDAYLLAKTGRADFADLHRLTPDSEKVAELKLLTRDQDALIQTQTRLVNQLTACLKAYYPVALELFIKLQQHTTLVFLQTYPTPQAAKSASTDQITHVLKQAGHPNPLAVAPKIVERLQSPHLQADAVITRTKSRLMVALVGQLLPLIVQIAQYDKEIDTLFLTHEDHAIFKSLPRAGQRLAARLLAEIGDDRKRYQDASSLQALGGTSPVLYQSGMYSKAHRRLGCIKPLRNALQQFAWQTTQSEAWARAYYQRKRAEGKSHTVAVRALANVWVRIIFAMWFHHRCYETTTFEQAQRQHARKAA

SEQ ID NO: 192731 - protein, 336 aa, unidentified
MREVSTIGLDLAKNVFQVHGVDAAGETVVRRVLRRARVVVYFAQLPPCLIGMEACGTAHYWARELGKLGHRVKLIPPAYAKAYVRRNKNDAADAAAICEAVSRPSMRFVEIKSEAQQAAAGIHKVREMLMKQRTMLINALRGLMAEFGIVVGAGTRHVGELTAILVDPEEHRIPALLKDELRRMAEMLRGLERQLQGIDKQIVDWGRGITTYRHHRSRLWADSVERHGGNRGQPGGLPQRAFSASLGLVPRQDSTGGKVKLRPISKRGNGYLRRLLVNGAMSVLNSKRAKQDPWLVKLLANKERKVAAVALANKMARVGWALMMRQEDFRTTSVAG

SEQ ID NO: 192732 - protein, 355 aa, unidentified
MNGLRYIGLDVHQDTVSAAVLDGTGKLLMQSVFATRAVAILDFLHGIKGTLHVTFEEGVHSAWPYDLLQRRVARVVVCDPRKNKLLKSGNKGDLIDARKLAELLRNNSLSPVYHGGMSALEVQHRTRSYTMLTEDTTRVMNRLRAVFRSQAIRVHGRKLFRSDLRESHLAQLATPGLRQRAESLYRELDALHPLRLQAKREMLAECRKHSAMKWLRSVPFLGKVRTAVLIGRVQTPHRFRTKRQFWSYCGLALETHDSAEYRVVHGQVQRKSRPAQVRGLNWNHNHELKGLFKSAATMAAFRKGIFREFYSGLLAKGIRPEMARLTLARKIAAITLKIWKEGETFNAEHIKPQAA

SEQ ID NO: 192733 - protein, 367 aa, unidentified
MKKVTTTSMGRRPGKLRDGKLTVGLDLGDRSSFYCVLNGAGEVIVEEKVATRPEAMKETFGRMPRSRIALETGTHSPWVSRLLTELGHEAIVAHARNVRLIGESRRKDDRLDAQALARLARIDPQLLSPIQHRSAQAQADLSVIRARYALVRARTALVCAARGLTKSFGERIRGRNPKGFSLATSETLSPPLQVALAPLLSALAAITARIREYDAQIEKLAEESYPETALLKQIKGVGTLIALTYILTLEDPRRFRKSRDAGCYVGLQPGRRNSGQSEPQLHITREGDSYLRMVLVQGAQHIIGPFGEDSDLRRWGLKLAERGGKRGKRRAIIAVARKLAVLLHHLWISCEAYEPLHNTRKRRLAAA

SEQ ID NO: 192734 - protein, 351 aa, unidentified
MKDYTGKKIYLGIDVHKKTYAVTAICEGVVIKKATLSANPEGLVSFCKKYFVGAAIESAYEAGFSGFHLHRTLEKNGIKNIVVHAAGIEVAAGDRVKTDKRDSLKIATQLAANRLRGIHVPSEEREEKRALTRTRDMIVEHRTCVANQIKALLHQHGLILPTSKQKVCPKWIESLKKLPMRDGIRDSLNHLVTLWQQLTIGIKEINFKMVKQAGEDKALETVYRSAPGIGPVGARVLANELEDMSYFENERQLFSYTGLTPSEHSSGGHVRKGHISRQGKTIIRKILVLAAWKAIQTDQKLRETFDRIAAKAGGKRAIVAIARRLIGHIRACFKRRCFYKTDVKKLVAAAA

SEQ ID NO: 192735 - protein, 351 aa, unidentified
MEIKRVGVDLAKNVFQLHGVDGHEKPVWRRSLRRGQWLLELQRRVAAGAEIGMEACAGAHHWGRQLRARGYQVKLMAPQFVKPYVKSNKNDRNDAEAICEAMSRPSMRFVELKSVEQQDIQAVHRVRAELIKQRTAKVNQIRGLVGEYGVVAPQGVSSVRKALPQWLEDASNGLSDRFRRLLAGLWQDLRRLEERVEELDQEIVSIVKETPAARRLLALHGVGPATATALVAALGSGRSFARGREFAVAMGLTPKHHGTGGKERILGISKRGDAYLRQLLVHGARSAVRVAKGKDDGLSRWIQGLLTHKHSNVVTVALANKTARMAWALIRHDVDYDRGLAAKPPAVHAAV

SEQ ID NO: 192736 - protein, 253 aa, unidentified
MTDTTMIAAGIDTAKHKLDVAIHGDRQRFAFANSPPAFGDLIKLMRRRKVTRIGIEATGGYERDVVGALRKAGFTVVVLQPIQVRAYAQFVLCRAKSDKIDAALIAACIAHRDTLREPPDPRLVPLADLLTFVEQTEEDIARSKVRLEHARNPDQRRLLEADVKRLAKRRTQMLAKLSAKLEAHDDLARRRDLVLSIDGIGERTALAMIIRMPELGRLSREEAASLAGVAPFVHDSGEHKGERHIAGGRARLR

SEQ ID NO: 192737 - protein, 335 aa, unidentified
MAIVTIGLDTAKSWFQVHGINESGQVMLRRKLARGKVLQFFAGLTPCLVGLEACGGAHFWARELIKLGHDARLMPARYVKAYVKTNKHDAADAEACCEAVQRPGMRFVPVKTEEQQGMLMLHRTRDLIVRQRTAAVNALRGHLAEFGITAAKGAARARDLMSLVGTDERVPAIARDALLQLVDQIRDTERKIDAFDKQLLTLARENEVCRRLMTVLTIGPIAATALAATVGDPRSFTSGRHFAAWIGLVPRQHSTGGKERLGGISKRGDAYLRKLLIHGARATVHRVRSHRRPSAWIAGLLARRHFNIATVALANKTARIAWAVMANGSTYRAAA

SEQ ID NO: 192738 - protein, 391 aa, unidentified
MINIGIDVGKFKHCATVLDDSTGEVLIKPFFLTNDRKGFDLLYSKTKQFIRRKHSVGMEDTGHYMINLTNYLLDKKFTVKYINPRATCLRRKELGVSAKNDRKDALLIAEMLSEKRFWRSISPRTIENSKFRDITRLYHQLQEQQNQDMNRLQRALDIVFPEVNLLSWTRYSKAYMKFLSTYPSASSLAFEDIRNLRKALKTEGKGRQCKVTAEEIRELTKHSVGEDNSSIELEVTSIIAVIITREEQLRILEKKIEEFSHKLNSPIISIPGISHISGMTILAEIGDINHFQNTGNLISFAGMDPLVYQSGKYDAAHMPISKHGSRYMRKALYQAVFTVCKYSPTFHAYYTKKRNQGKSHRCAQGHCARKLLRVIYKLLSTNSLYNQNHIH

SEQ ID NO: 192739 - protein, 411 aa, unidentified
MNNTLFVGIDISKRSNVATFMNCEGKVVGRLAFSNNGSGADRLVAKILSYYEKEDFEAIRIGLENTSVYSKNLVWFLYEHEALNEHKLSIIPLNAIMVANYKKSFLDMDKDDITDSFAIADFIRIRPGLLPFKLDDRQEALKIMTRSRYNYVQALSRMKSQFLTRLFLSFSEMEAGKPFYSIFSKTSLSLLEEEFTLDELAEKPIPELVEFLQEKGGGKFQNPEEIAKVLKKAASSSYRVPAMVRESLNRTMASDMEIMRILENEIHNCDKNIEKLMKSVPAILVSIPGIGPVLAAGIMSEIGDISRFRKQESLGKMAGFKWKRNQSGKKESEDKAAVLSGNKKLRYYLVEAANRVRIHDPVFEAYYRKKYAESKTHAHKRALILTARKLVRVIFYLLKENKLYKPDVGIS

SEQ ID NO: 192740 - protein, 465 aa, unidentified
MNTINRSTGTANAKEQTGRGTSGLDVINPNAAGLDLHKEIITACAPVIAGDTRHPVRTFGTYTHALRDLATWLKKQRATTVAMEATGVFWFPVIEILRAEGLEVLLVNAREVRSVKGRPKTDKLDCEWIRRLHACGLLRGSFIPDTETGALKSLWRHRMNMEQEDARAIQRIQKAFQIMNIRLDIAVTDIVGETGIRIIEAILAGERDSQKLAKLRDPRVAKSEREIATALEGNFKAEQLFIIRENLAHHRFLQGRIAETDNLMATRMATMEKKASASELPAATKPDRSNHGEALTREHLYELLGVDLTQIDGVGVLTASSFLVNAGRDMSPWATEKHFAAWLGLSPNVKQSAGKTRSGPTRQTASALAHALRMAALTISRVDSWLGAYCRRLKGRIGAPKAITATARKLAIIFYHAVKEGGVVKRLDAEAYEQAHRERTLKNLRHRAAHFGFDLMPKDIVPVMA

SEQ ID NO: 192741 - protein, 353 aa, unidentified
MKRTTKYVALDVHQATTVASVREPGGRVIARCIVPTEAAALVEFFGGMRGAIHVAFEEGTQAQWLHDLLEPRVDRIVVCHRRGEPRGRKADLRDADGLSHRLLVGDLRSVYHGRTDRVTLQQLTRTYSQVVADSTRVMLRLKSLFRARAIRTSGRRVYGLRDRAEWLARLPDPGARLRAETLYAQLDLLRELRPRAKAAMIAEARRDPAWTVLHSIPCLGPVRAALILATMKTPWRFRSKRNLWAYAGLAVVTQSSADHEFIDGRPVRRRRRPLTRGLNRNHNRSLKHVFKSAASAATGRPGALQDLYRAMLDRGMRPDMARLTLARKFAALTLRLWKRGDRYDPAKLTAQPT

SEQ ID NO: 192742 - protein, 330 aa, unidentified
MEHVTSSASVATDCYVGIDVSKDRLDLARLDQPNERLSFDNDPVGIRKIVSLMRQWNPARIAIESTGKLERPLLLALIDADLNACHVNPVRVRRFAQGMGLLAKTDTLDALVLAHFAHKAGPRISTKTPEKRAELVELVTCRRQLIEARTAHSNQRLRTDSTFASKQLDSVLNHLEERIDELEKQIAALIEEDDDMRHLDDLLRSVTGVGAVLSATLLAMLPELGRIDHAPIAALVGLAPYNDDSGHHKGQRHIRGGRSSVRNVLYVCTVCAIRTNAVIKAKYKDLLARGKAKKVALIACARKLLRILNALARDGVRYKLQNVQNLVSEA

SEQ ID NO: 192743 - protein, 401 aa, unidentified
MKQQWCGLDWASRTHAVCVVDDDGSIRARFEVPNTGKSFAGLVKRLVKLRVAGVAIERPDGPLVEALLEAGLTVHVVPPSMLKAVRGRYGAAGAKSDPGDAFVLADLLRTDHHRLTPLVPDGSATKGLRALTRARKDLIEARVGLTNQLLAQLHVCFPGAIGLFADLHSVVAAAFLRRYPTAARAASLTEARLAAFLRRIHYCGRTPVAELLRRLEEAPPAVLGSEEDEARAACVLGLVEAIQVCQARARDLEAEIVERLEVHPDAHVFTSLPRAGRGVRAASLLAEIGDARQRFPDPQSLMALAGAAPVTKASGKHRVVSFRWACDKKLRAAVIDFADDSRHASAWAERIYERSIAKGHTHPHAIRILARAWLRVIWRCWQDGAAYDVAKHRGAVMPIAA

SEQ ID NO: 192744 - protein, 347 aa, unidentified
MDQIIIGVDTHKSCHIAVAINTQGKRIGTMTIPTTRQGYRSLEAWATGFGPVKAFGIEGTGSYGAGLSRDLQTKGHTVLDVIRPNRQLRYLHGKSDILDAESAAKSVLNGQATALAKTQSGASEMVRHIKIARDSAVKSKSQAMITLKTLIINAPAELRASLDQIRGPITLVRHISALRPGEITSPTASAKAALRALAQRWLALHEEIQTHEAELERLVADKAPKLMKSHGISTLTVAEMLILVGDNPERIRSEAALAKLCGICPIPASSGKTTRMRLNRGGNRQANAAIYRVAIVRMRDDDRTKAYAARRTAEGKTRREIIRCIKRYIVREVYTALCATKSTQIPA

SEQ ID NO: 192745 - protein, 338 aa, unidentified
MKATMIGLDIAKSVFQVHIEGAGEAPVRKRLGRAAMERFFATLPPAVIGIEACGTSHYWGRTLRALGHEVRLVPAAYVKPFVKRNKTDARDAAAICEAMQRPDMRLVAVKSVEQQAARGIETARELLVKQRTQLHNAMRALMAEFGLVAAQGRRGLATLVAALDAGDGALPAAVRPALGALRDQAAALDASIDALEAQIVARAKADAVMRRLTTVPGIGALGAHAIVAAIGLGHQFGSARDFAAWAGLTPLEQQSANKRRKGGISRQGVPGVRRLLVLGASAVMRQRRIKPERATEWQRGILARRPVKVAVVAQAAKTARIAWAMLRSGENYREAPAA

SEQ ID NO: 192746 - protein, 415 aa, unidentified
MDDETIAWFVGVDWGSENHQACLVDAGGSIVGEREFSHSGTGLAELGNWVVSIAGAANGVLVAVEVPHGPVVDALLDRGFVVYAINPKQLDRLRDRFSVAGAKDDRRDAYVAADGLRTDRHLFRRLQVADPRLIELRAWSRLAEELQQERVRLSNRVHQQLWRYYPQMLKLTDDLTATWFLELWDRAPAPARAAHLHKSTVERLLKQHRIRRMDAETVLRTLREPALRVPEGVISAATIHMRSLVTRLRVVNRELSAAERKLDEFCAQIGETGPVSGESSFERGDVAILKSLPGIGRINLATLLAEASGPLSRRDYQGLRTLSGVAPVTKRSGKSCIVVMRFAAHARLRSTVYHWARVATQRDPKSRVRYAAFRRRGHSHGRAIRGVADRLLALACVLLQRQTLFDPHFGQASAS

SEQ ID NO: 192747 - protein, 356 aa, unidentified
MTKVRTNFSQQTIYIGLDVHKRSWNAALYLNDQYLRNVHQPPSAHALYKYLHSHYPGARYVCAYESGKFGYWIHRQLSGKDIECIVVNPADIPSAQKDDLQKTDPRDARGIAKALQKGLLKGIYIPCLQQEADRSLARQRKKIWSDLVRCKNRIKNFLDYTGIELPDKFNNSNWSRNFIQWLNNLPFEHPGHRSTLNYMIREMELLRKELLSISNDIRKLMRSAFYKKRYYLLRTVTGIGPLTAASLLTEIWDMKRFASFYELNSFIGLMPMEHSSGERELKGRLTIRKHRQLRSDLIECAWTAKRTDPALQLYYHQQLKKGKEPKLIIVKIARKLLSRIRYVWLTERPYQIAVVK

SEQ ID NO: 192748 - protein, 307 aa, unidentified
MFVGIDVSKDRLDVHLRPSGEAFAVARDGPGLEALAARLSAAAPALVVLEATGGFEQTVAAALAAAALPLAVVNPAQVRAFARAAGRLAKTDRLDAEAIARFAEAIRPEPRPVASEQAQALAELVARRRQVVEMIGMESNRRRAARNPRVLRGIERTLASLQAALADLDDEIGGTVRRSPAWREAEDLLTSVPGTGPVTARTLIAELPELGTIDRRRVAALVGVAPVNRDGGAMRGHRAIAGGRKGVRNTLYMAALTAVRWNPAVRAAYLRLRARGAPPKAALVAAMRKLLTILNAILRDGRPWRTA

SEQ ID NO: 192749 - protein, 327 aa, unidentified
MTQNPLTYVGMDIAKATLQVHLNGHQFEFPNNAQGHAQLTQRLAKLPFPQVICEATGGYEFPVVQAFHQGKILVSVLNPAQTLAATKAQGKRAKDDPLDAASLTDYGQRYQPQPTAPVAADQLEMTELTCWLKQLIENRAVAKTQAEHHHANAFVRQQHEQLLAHYQEQIQTVEAKIQQLLATMNAFRQRLDCLTEIKGVGFRTALMALVFMPELGHLNRGTAAALAGLAPWTRDSGTLKGKRCIGGGRAQVRPVLYMSALSSIRCNPVLKAIYAGLVQRNKPGKVALTAVMRRLIIHMNNKLKALSQTPPTAKAEATNKNQKKLAK

SEQ ID NO: 192750 - protein, 327 aa, unidentified
MNNTFYIGIDIACKKFDVAIYKENKKALHNTFDNDKKGFESLLKWINKDTQNLHVVMEATGIYWEELAYFLYDKKAKVSVINPKCIKAYGIGQNLRNKTDKIDAMLIARFAAKEQPQAWQPPPKAQRALLLRLRQLEHLKQAEQKERTRIKMMSDSESIASAERLANFLREEIKAFEKQIDETIKTDTMLKQNAKLLSSIPGLGKKSVAWLLAYLGDGSRFKNGKAAAAYAGLTPMHHQSGSSINGKPKISKIGQTDIRKILFMPAVAYSFGNYKDRIYKTFVDNLLAKGKDKKVIIVALMRKLVAIAQTVLKNQMPFDASLHQKTM

SEQ ID NO: 192751 - protein, 278 aa, unidentified
MRHIGVDLHKTNFVACFIEADDTQRLETYPLTRDGLARFTRQLGEADELAVEATQNVYYFYDQVKGHVGRVAVVDTYRFGVVAKSKKKTDKADASALARFLKLGWLPEVAVPSEQVRTLRQLLQARETLVSMRTKLKNMAHAAFSRNGVALTRAAFASAAGRARLASRDDLPAADLLVLRAALRQTAQLDAEVAQLEAEIVRRGKTLRGVGRLLQVHGLNLLSAVALLAEVGDINLFDTSKQLVSYAGLATSTRQSNETTRHGGITKRGRKRLRTVVI

SEQ ID NO: 192752 - protein, 374 aa, unidentified
MDQISKVYVGLDVHKESIAIAQAAAGRQPARLVGEIAHDVNRLIKKLAPLGDPGSVHIVYEAGPTGYGLQRKLQALGYVCEIIAPSLIPRRAGDRVKTDRRDCLRLAELSRAGELKAIWIPDPADEAIRELSRAREDAVNARTRARHQLRGFLLRHDIRYPGKTAWTKTFGRWLATLSFEAPGSQIAFTEYCLAVQACDARVERLSLSLLQAIQGWRFESVVRALCALRGVDAVSAIGLVSEIGDIARFDHPRKLMGYLGLVPSERSSGERVNRGPITKSGNAHARRLLTEAAWCYRFKPRVGYQAQRRQEDLPESTRAIAWKAQLRLTERYAKLQARGVTLNKVCVAVARELAGFVWAVACNASPTMRTPTAP

SEQ ID NO: 192753 - protein, 412 aa, unidentified
MTEESFTWFVGVDWGSEKHHACILDTRGTVVGERQFPHSGVGLAELGDWLLSIAGTTATVAVAIEVPHGPVVDSLIDRGFVVHAINPKQLDRLRDRFSVAGAKDDRRDAYVLGDGIRTDRRLFRRLHVADPRIVELRAWSRLTEELQEERVRLGNRVQQQLWRYYPQMQKITNDLAAPWFLELWAMAPTPGKARQLRKSTVEQILKKHRIRRIDADTVLRMLREPAIKVAEGIAEAASIHLRSLIARLHVVNRELRQAEQKLDQLCAGIGETEGAPGECLQGQDIKILKSVPGIGRINLATLVCEASGPLRSRDYPALRTLCGAAPVTKRSGKSQIVVMRYAAHARLRETVYHWARTATQHDAKSRCRYAALRQRGHSHGRALRGVADRLLGLTCVLLQRQTMFDPHFGQAG

SEQ ID NO: 192754 - protein, 403 aa, unidentified
MVFVGIDWAEAHHDICVVDDEGLVLAKRRVPDGLEGVGKLHALVAEHAEDPAQVVIGIETDRGLLVGSLVAAGYQVYAINPFASSRYRDRHATSGAKSDSGDARVLADLVRTDRHKHRPLAGDSHLAEVVQILARAHQGLVWTRQRQANQLRNALREFYPGALAAFDDLDAADAVAILERAPTPSQGRALSQAKIISALRQGGRERNLESKAAEIQAQLRLPQLEVPALLAQAYGHSVAATVAVIKQLNLQIAALEQELAASFEMHPDAEIYLSLPGLGVVLGARAMAEFGDDRTRFLNPKARKSYAGTAPITKASGTRKVVLARVARNRRLADACYQWAFSALTRSEGARHRYDVLRARGQTHHQALRALGNRLVGILHGCLTNRQIYSEHLAWSPHLEVAA

SEQ ID NO: 192755 - protein, 408 aa, unidentified
MEQLYVGIDVSSTKHAAYLMKPDGDKFSSFPMQNDRSGAKMISEKIVSALTKLGLKDVVIGMEATSIYGDNLVYALREDGNLGRFHRKIHVLNPKQVKNFKKSYPELPKNDPVDAFVIADQLRFGRIGKEVYMDDYRYKALQTLTRARFYAVQNLTREKERFANYLFLKCSGIAQSKDIPNTSATTLALMEHFETVDELANADLNELTAFVNRAGHGRFADPEATAKLVQAAARGSYRLPKTVNDSINQVMSASIAAMRALESQIRTLEKAIEKQFEIIPNTLISIPGIGKVYSAGIIAEIGDICRFTGQASVAKYAGLVWTQHQSNEFEAEDTRLIKSGNRYLRYYLLEAANSVRRCDSEFRRYYDLKFKEVNKHQHKRALALTARKLVRLVFRLLKDNRLYKPPEG

SEQ ID NO: 192756 - protein, 397 aa, unidentified
MYIVGIDIAKRKHEAAVIDGEGTVIIKPFSFTNNCSGYNRLLAMLTKAKLPLDEVSFAMEATGHYWLALFTRLQKEGFRVQVINPVQTNSIRSFYIRQAKTDPRDALLIAEVIRFGHFSESTLHPENIYELRELCRGRHAIVSMQADVKRKVVALLDQVFPEYETAFTNMFGDTSMAILQTCPTPKELSEMPLEELCHLIEVSSRKRFRMAKAQELQALARGSFGFAMAGDVFSTMIRLYAKHLDFLKQQVQEMDRKIAEIMDTLDTPITTITGIGPTLGAYILSEIGDVSRFPSAAKLAAYAGIDPTMRQSGEYNGVRNRMSKRGSPYLRHAIWLATSSAVLHDPALKLYFQKKRNEGKPYMASVGHACRKMVSIIYAVMRDNKAYTPCIPNEISA

SEQ ID NO: 192757 - protein, 340 aa, unidentified
MQQLLKHKDMKYKEVVGIDVSKLTIDAHHHQSNVHARFDNNSKGFRKLSTWMKKYSVDSVNELLVCFEVTGLYSLNLASFLSQKSIDYVMENAIQIKRSMGLTRGKADKVDAKRIAEYAYMRKDALKLTVLPTSEIIKLQNLLALRERMIKQKAGYQASLGEYKRVFIQKHEKDFFQMLNSLIVALKKQIQKAEKALLEIIESISTLKKQYDLLTSITGIGIILASNILVTTVCFNKFDNSRKYACYCGTAPFEYSSGTSIRGRTKVSQMANKKMKALFNLAARSAIQHDPELKLYFRKRMDNGANGMSTINIIRNKIIHRVFAVIKRGTPYVTLTHNGI

SEQ ID NO: 192758 - protein, 459 aa, unidentified
MRKKTKSSKKQKNKVSIDQPWTAVNPNAAGVDLGSREHWVAIPADRDPKPVRCFGTFTADLEALADWLKASAITSVAMEATGVYWIPLFQILERRGFEVLLVNARQIKNVSGRKSDVLDCQWIQRLHTYGLLGGSFRPADAYCVVRSYLRYRDELVSARSTQTQHIQKALQQMNIQLVQVLANVTGVSGLAIIEAILKEERDPMKLAGMVDRRVKASQQQIAKALKGDYRSEHLFQLKTAFELFHVYESKILACDQQLAAELEKLPDRVDIKAKPLPAKAKNKDIHEPLREGLYCKLGVDLTAVEGIGGLVGLTVLTEAGPDLSRFKTEKHFTSWLGLCPDNRISGGKILSRRTRRVVNRLSDVLRIAATSLERSSSALGAYYRRMKARLGAAEGVTATAHKLARLLYRLLKHGEDYVRQGLEEYEKKHRARKLAMLQKTAVSLGLQLIDPQNSAQGVS

SEQ ID NO: 192759 - protein, 367 aa, unidentified
MKKVSTVAAKPSKKMSQQKLTVGLDLGDRNSWYCVLDESGQIQLEQRVRTNAKALREVFGEMPHQRIALEIGTHSPWISRLLSELGHEVIVANARKVRLIGESRKKDDRLDAQTLARLARIDPKLLYPVKHRSEQAQADLMMIRARAGLVRARTGLVNTARGLAKSYGERLRGCNVRNMNPEKAEGLSPQLQMALEPLLGCIESVSEQIREYNQRIEKLAQDSYPQVALLKQVKGVGTLIGLTFLLTLEDPHRFRKSRDVGCYLGLQPGRRNSGRSEPQMHISKEGDPYLRTLLVQGAQHILGPFGVDCDLRRWGLKLAERGGRNGKKRAIVATARKLAVLLHHLWVSGEVYEALHNNRATTVAAAA

SEQ ID NO: 192760 - protein, 344 aa, unidentified
MPSIAGGMDIHRKQVTFDYLDLVTGEVKCGQIAPADRASLRAWLKRFAGVPGVAFAVEACTGWRYVTEELRRAGVEAHLAEPADTAAARGRKMRARTDKADSRLMRDLLAGGRLPECWIPPPQILEYRALLEAYHDLRREHTAWVQRVHAVLFHQGAPVFHDLSRADAPQELAALARAHLSPAGQQQVALYLRMLEVTGGEVDALRRQLVSAAGQLRGARVLAGQLYGVGPVTALALTCWLGGAGRFSSARKAVRFTGLDITVYSSDGKRSPGHLSRQGPPVLRWCVYEAGKTHARAGAPDHDYYAAVKDRKGGKRAALSEARKIVRRACHLLGELGDDAFAAA

SEQ ID NO: 192761 - protein, 388 aa, unidentified
MRRSNQDRIVGLDVHPDSFAGAILQGIDPWKARVVSTSTRVALPLLEKWALRHTREEDILVMEASGNAFCVAERLRALKRKVVILESHRAGKVGKTYCATDRVDAIKIARIYLSALSPVVWQPDAKTRERREVFSAYQAVVKEGMRLKQQIKSMLNEHCVRLEKGFRLSHPSALGRLLRRRKWTEAQKMLLSQLHAGLVGARVRRQRLRHYMAQEILAEKKLLRLTRLCGINLITLYGLIAAIGDIQRFANARKLSTYFGLNPTVEQSGNYEGSGALKRHGRGAIRALLVQSAKKLLQVDNPLQKWGLALAARRGRNKAAVAVARKLCVAVWHVMQGHVIGAIERMDTLHTKLHKLATELGVPTIKQLGYESKEAFVQKKLYVLRSYA

SEQ ID NO: 192762 - protein, 388 aa, unidentified
MQTVADRPEAPNAIRTDLGAIFISLELSRSTWLITSLSPDGGEKMSKHAVRGGDVAGLLERFAQLRKKARARTGKVFPFVVIQEAGLDGFWIDRVLRKEGIESHVVDPASITTSRRRRRAKTDRIDGEALVRALLAYKRGEPRVCAMVKAPTPEEEDRRRLCRERKVLIVERVRHVNRVKGLLFSQGISGYEPLRRDRRKRLDTLQTGDGRRLPDHLKAQVRRELDRLELLLDQIKTVEAERDALLAVQQGAASAPAAMLLNIKGIGPEFAAILWSEGLFRHFDNRRQVASYAGLAPTPWQSGSVDREQGVSKAGNPRLRTTLIQLAWLWLRNQPQSALALWFKERVNRNGGRLKKTTIVALARKLLVALWKYVTAGVVIEGAIMKSA

SEQ ID NO: 192763 - protein, 355 aa, unidentified
MESTKYIGMDVHKDAISIAVLNSSGKLVMESIIETKAITILEFVHGLRGSLYLTFEEGTWAAWLYDLLKPHVTKLVVCDPRRNDYLKQGSKSDRIDARKLAELLRSNLLRPVYHGEHGVRPLKELARSYLTITKDQTRVMTRVKAVYRSWAIPCAGKQVYGQRHRLEWLGKIQEAGVRRRAEFYYVQLDALRSLRLVVRRELLLESRKHGASKRLSQIPSIGPIRAALLIALLQTPDRFRTKRQLWAYSGLAIETHDSAENQYVNGQLQRSRKQASIRGLNQNHNHDLKNLFKSASAVAAAKAGPFQKFYDAQIGKGLKPEMARLTLARKIAAITLIVWKKGVSFDARYLNPQTA

SEQ ID NO: 192764 - protein, 338 aa, unidentified
MAKQTTEYEQVIERGCGLDVHRDTVVATVMGKGLQTETRTFGTTTSSLKELGEWLEHLQVTDGAMESTGVYWKPVLHVLREYPINLLVVNARHIKNVPGRKTDKADSQWICRLLISGLLKGSFIPPENIQALRDIHRYKKKLVGTVASEKNRIIRVLEDANIKLSSVVSDTSGVTTTYLINGLIEGRKDLEKLVSECYHKKLQATPEQIVEAINGRLTPHLMFLLKSMQKHIQSVEEQIAEIDAEIEKHIKDFEKEIELLQTIPGVGKEGAIGIVAEIGVDMDVFPSEHHLASHSGMCPGNNESAGKKKFKNTTRKQTSESNTYRTGMGRHSHKEKFL

SEQ ID NO: 192765 - protein, 412 aa, unidentified
MGAVVIGMDPHKRSATIEVMDRDETILGGGRYATDVAGYQAMLKYGREFEQRTWAIEGCNGIGKHIAERLLADGELVVDVPPKMSARVRVFATGQGRKTDATDAHSVALVGTRMSGLRPVVNNEQLAVLRLLVDRRRSLGDDHTRMVSQLHRLLLELIPGGAKTSLSAAQAKALLGKVRPRDTAGKTRRRVAAELIADLERIYERTKAADKELKELLAATGTTLTQLHGIGPSGAARLLVEVGDITRFPTRAHFGSWTGTAPIDASSGDHVRHRLSRGGNRQINRVLHIMAVVQLRSPTEGRAYYDRRKAAGKTSMEAMRCLKRRLSDAVYRQLLADAIRPSKAGPGGHSGATTSSSAVDSNPDIDASEKSLPGPANHHVTRAKSLRPDRSSARSRRPETTPARSRRQAQSA

SEQ ID NO: 192766 - protein, 352 aa, unidentified
MSSQESFPNVTIGLDLGDKVSRTCEIDAVGKVVKTAAVATTPEALERYFGGRPRCRVVLEASTHSPWVSRKLKELGHEAVVANGSEVYGKRRRKRRNDRLDAEFLGRQGRADVELLHPIKHRGEAAQRDLALLRARDQLVGARTKLINHVRGAVKSLGGRISKGSAESFAKRAAGQVPEPLRAALTPLLEMIAELTRQIRGMDEQTERMIEQHPEAVRLQQPAGVGPLTALAFVLAVEDPKRFKHSRELGAYFGLVPKLDESGDSSPQMRITKAGDPLVRKYLVGAARYILGPFGPDCELRRYGEAIAARGGKNAGKRAAVAVARKLAVLLHRLWVTNADYDPEWSQHHRAA

SEQ ID NO: 192767 - protein, 379 aa, unidentified
MTSTAAAAGSRETVYAAIELSKKTWVLGIAHPDRDRPSIHRVCGGNFAELVGRLRVAARNNRRILVCYEAGYDGFWLARALAKIGIECRVLDPASIQVNRRARRVKTDRIDVLALLRALIATDRGERHVCATVRVPSVEEEDARRSHRERQRLVRERTGHINRIKGLLFAQGIRDIKPKLRRTRIDFAGLETAEGHQLPDRLRRELEREYARLALIETQLREVEKERDTADAQDPVVERKRQMLVALQGVGSTSAAILAREVFARSFASRRQLGSYLGLTPSAYDSGSTTRCQGISKAGNSWARRVLIEVAWLWRKYQPASPLSNWYLQKTTGQSGRIRRIMLIALARKLAICLWRYVETGLVPEGVVIARAEPRCTPA

SEQ ID NO: 192768 - protein, 383 aa, unidentified
MGADWSQGQREDITIKQYVGLDVSQKETAVCGVDDTGRLIFEGRAKSDPGALAALLAKKAPDAERVGFETGAMSSWLWHELKRIGVPVVCIDARHAHSVLSVRMNKSDENDARGLAELVRIRWYREVAVKSEASLQVRSLLVVQSRLVTMRRDLENKVRSMLKECGLIFPRAIAGQFQRRVTELTGDGHALSPVLLPLLSVHGHVCRELEGLDRQSRQIARTDDTTRRLMTVPGIGVVTALTSVIPSRSVPLSKCNIRGCLSRSNARRKQSGETDTVGHVSRWGDRLLRTYLFEAASVSLHRTRRWCALKAWGPRLAKRNGMKKARSLLLANWPSSCTPSGSMAPRSSGARSQPDTAHSPEIAGLGPVMSLNRLRLKQTRSAR

SEQ ID NO: 192769 - protein, 322 aa, unidentified
MSVVVLGIDIAKQKFDVSLLVEEKTKHKTCKNSAEGFEALTVWLEKQGVGKVHACLEATGNYGEDLGIYLHEAGHTVSIINPARIKGFAQSELIRTKTDKIDASLIARFCLAMKPGIWTPPAPEIRSLRALVRRVDSLIDMRSQEKNRISTAHESVVLLIKEHIVYLDKEIEKIRRQIDDLIGKNPHLKQRKDLLASIPGLGKATIPHLLAALNDLEKFRHVREVVAFIGLAPKETLSGSSIKGKPRLCKIGHARLRKALFMPALVSIQCNPAMIAFYNRLKYKGKNGKVIVCAIMRKLVHVIFGVLKSGKKYDPNYKPVFA

SEQ ID NO: 192770 - protein, 346 aa, unidentified
MEHYAGIDVSLELSSVCVVDTQGKIVKEAKVASDPEDLIAFFASLGFAMTRIGLEAGPLSQWLQSGLKCAGLEVVLLETRHVKAALSAMTVKTDRKDARGLAQLIRMGWFRPVHAKSMGSQEVRALLVARKQLLGRLIDVELSIRGILRGFGLKIGVVTRKGFEARVRELVTGQATLEHITRAMLSARSVLRVEYEKLHKSVLAMVREDAVCRRLMTVPGVGPLVAMTYKSAIDDPSRITKSKAAGALFGLTPKKYQSGEKDITGGITRTGDEMVRTALYEAANILLSRITRFSKLKRWGLDVAKRRGSKRAKVALARKIAVILHRMWIDGTTYRWSDAQLMATQA

SEQ ID NO: 192771 - protein, 358 aa, unidentified
MVQRKELNFEGQNIYIGIDVHLKTWHVSILTESGCLKKHSQQSSAQALFEHLKKHYPNGNYLSAYEAGFSGFSTYYSLLDFGIECLPVHAADIPTGQYESVMKTDAIDSTKIARALKSGLLRGIYIPKKEVLDDRNVMRLRITLKRQLSGYKSRVKHLLYNNGVIYPECFQNSKSHWSKRYLKWVHEDVQLLSESRNSLDLLLRQVELFRKSLLEITRLVRTLSRNGRYGEAYENIVSIPGIGMITGMCLLTEIGDIHRFRNERQFASYLGLVPTSHSSGEKTSHGEMTFRGNKRLGPLLVESALVAIRQDRALAAAYGEYCKRMLPQEVIIRITRKLSNRILIILKSGKKYEHDRCY

SEQ ID NO: 192772 - protein, 338 aa, unidentified
MNATTIGLDIAKSVFQLHGEDAEGRLVVQKRLNRRGMAEFFAKLAPCVVALEACGTSHYWGRTLRAMGHEVRLIPAAYVKPFVRRNKTDARDAAAICVAAWRPDMRPVAIKSEEQQASRALERSRELLIKQRTQLMNSLRAMLAEFGIVAAQGARGFAELRARLASGDGLPKTLVTALRLVAAQLDGLTPAIESMEDKIKTIARADPTMRRLSRIPGVGFITAHAVVAAIGDGRQFVSSRCFAAWGGMTPRETSSAGKRRTKGLSRQGESRLRKLFALGAATLMRNARSRDDRASAWQRGILARRPMKVAVMAQAAKTARIAWAVLTSGKDYAPPAAA

SEQ ID NO: 192773 - protein, 422 aa, unidentified
MNDQEAVVYSVYVGIDWADSKHDVCIQPTTSDERVFDVIPHRPEAIDAWAKDLHQRYGDHIAVAVELTKGPIVSALQKYDFIDIFPVNPSSLAKYREAFKPSRAKDDPTDAELALDMLQRHPEHFKVLKPQSVEMRSLAALVEQRRSLADDQVRITNRLRCALKQYYPQVLEWFEHIDTPLFCAFVKRWPTLMQAKRARANTLRRFFHEHHMYRKSVLDSRRSAINSATPLTLDAAVIEPYRLQTLVLVDQLELMFGAIHQFDDEIAKLASQHPDYALFQLLPGAGPALAPRLLVAFGEQRERYKSAADIQKYSGIAPVTERSGQKHWVHWRLQCPTFMRQTFVEWARQTINKSYWAGEYYRQQREKGSTYQAAVRSLAFKWIRILYRCWQTGVAYDEIRYLKALERHGSPLLKRQSMPKTT

SEQ ID NO: 192774 - protein, 317 aa, unidentified
MGSTPEVYVGIDVSKKVLDVSIGVKGEHFKVGNDDVGVQKLIERLKEVTPSMIVVEATGGLEKMVVTELFANTLPVALVNPGRVRDFAKATGRLAKTDKLDARVLAHFGEAIHPALVTLPSEEEQYLAALVTRRRQVVELLVAEKNHLLSTPSKVRPLVEKSIAALQSQLDELNQTIDQFIDHTPAFRKKEEILLSVPGVGAVTTAMILSDLPEMGLMDRKKIAALVGVAPFNDDSGHHSGKRRVKGGRKSIRKVLYMATLAATRCNPVIKRFYQRLDKSGKPFKVVIVACMRKFLTILNSMIRNLTPWQPNPTLDA

SEQ ID NO: 192775 - protein, 460 aa, unidentified
MTKRKKSPLNVPVLDVLEQINIHAAGLDIGSEEIYACVPADRDEQSIQAFPTFTADLHALADWLAACQIETVAMESTGVYWIPVYEILESRGFEVYLVNARHVKNVPGRKTDILDCQWIQQLHTYGLLRASFRPPEEICALRALARHRDNLIRYRSAHIQHMQKALQLMNVKLTEVVSDITGVTGLSIIRAIVAGERNPFQLARLRRSGCAKTEEEIAKALQGNYKPEHVFVLKQALAQYDFYLEQIQECDAELEAMYAALPPTSPEDQVSPPPKPKGGKPRKNQAHFDLATSLYQVVGVDLTAIDGIDALTVHAIITEIGIDVSAWPTVKHFTSWLGLAPHNDKSGGKILRSRTKKTKNKASLAFRLAAQSLSRSQSAVGAFYRRMRAKHGPAKANTATAHKLARIVYFMLKNRTAYMDPGVTYYEQQYRDRAIRNLKHRAAGLGLAVVPVPAEPATVS

SEQ ID NO: 192776 - protein, 400 aa, unidentified
MLLFFEVITMIFVGIDVAKDTHYAAVSDDSGAVLVKPFAFQNNAEGFCLLLKKLSEFDRSKLLIGLESTGIYSENLICFLYESGFRLAVINPIQTATLRKTAIRKTKTDKVDTMLIIKSLMVNSYRLYSQRDADSLKLRTLCRFRQNLKKSKARLKIQLAGYVNLVFPEFGKFFKSGIHIAASYALLKKYSSPKEIAALRTSTLCTLLSKASHGRFGKDTAEALKSLALSSVGVKNPYISIQIAQTIALIELLEQQIKDLNSAIEEAMESINSVLMTVPGIGAVNAACILGEIGDIKRFSKPCKLLAYAGLDPTVRQSGLFTAKSTRMSKRGSALLRFALINSAWQLTLNDTTFKAYYDLKRSQGLNHYGALGHVAHKLTRVIFKLLTSDTPFIPAKLVA

SEQ ID NO: 192777 - protein, 435 aa, unidentified
MDIVHPRVAGIDVHKKVIWVAVRLPGPGPGERKVTVKSFKTFWRSLQKMAAWLAELGVTDAAMESTGVYWWPVYHALAGTGAIGVCVCNAAHMRNVPGRKTDLKDCQWIAELHEHGLLRPSFIPGQQVAALRARTRYRKKLIEHRASEGQRLSKVLEDAGIKIDSVASELLGVSCREMIEALIGGERDPWRLADLARGRLRAKLGDLQMACDGRFTAGHGQMCRLHLDAYDHLTAEIVTLDQLVARAAEPFDAVIARLVTIPGIGQRIAQVIVAETGGDMARFASSARLAAWAGLAPGDNESAGKRKKAAARKGNPHLRSAMVEAAWAVSRTASRPGARFRRLARRFGRLNIKKAAVAVAHTPLRVAWAVMKDDSDYAEAGADYYDQRDQRNHEHLVRHHQQALARLGYQVALIPPGDGSPPPGADSASARHPAA

SEQ ID NO: 192778 - protein, 360 aa, unidentified
MLYLANDQHRKQLTVNLRNEAGDVILKRQVSTEWARVREFLAEVRKRSVPEGGFVAIVEVCGFNDWFVKLLGEYGCREIVVIQPEKRSKKKTDRRDANALGELLWVNRQRLLAGKKVQGVRHVQLPSPQDAEDRQVTVWRKRLGQLRTRTINRIKHLLRKHNLEQECPTKGLDTIKGREWLSQVLLGTIDRLEMNQLLAQWKLWDEQIAKVEVAIQTRQHRSRTAGVLATIPGCAAYGSLALASRIGPIERFPRPASLANYWGLTPGCRNSGEATDRLGSITKQGSAMARFILAQVILHVLRRDAHVRAWYARIKRRRGSKIARVAVMRRLTTVIWHMVKHQEPYVIGGPPRRKLAAQVA

SEQ ID NO: 192779 - protein, 332 aa, unidentified
MEHCAIDLGGRESQVCVRRANGDLLFEGRYDTALLPDYLRQLPPARVILETAAEAFRIADAAKEAGHEVKVVPATLVRTLGVGARKTKTDKRDARVLSEVSCRIDLPSVHIPSARSREWKSICGMHDALISSRTKLINNLRGWMRGQGLRLPRGTAETFAQRMTRLQPLPEYVASQVEALAELTERTRASVRRIEAIALNDELCCRLMTVPGIGPSTAVRFVAAIDDISRFDSAHKVEAYLGLAPGESSSSERQQRLSITKAGPATVRWVLIQAAWALQIRCRTAAARPLQLWAAEIARRRGRLIATVALARKLAGIGYALWRDGTTYQPPR

SEQ ID NO: 192780 - protein, 472 aa, unidentified
MYRERPMPRHHPRRPSKSRSSHAVLDHINPNAAGIDCGAAEVVVAVPPDRAAMPVQTFRTFTGDLERLAEWLTACGITSIAMESTGVYWIPVFEILEARGFAMSLVNAHHVKNVPGRKTDVSDAEWIRDLHILGLLRASFRPPDAIVALRAYMRHRASLVEGTSAHVQRMQKALVQMNVQLSLVVADITGATGMRILRDIVAGRTDPEGLAQHRDRRCHASAAEIAAALTGNYRPEHVLVLRQHLALYDAYQEQITACDAAIQAHLDQLTAAVPAPSTPLPVPRTRRRPQHTNEPSFDVRTPLHHLTGVDLSQIDGIGPHTALRLIAEIGTDMTRWPTEQHFTSWLTLAPQNKISGGRLLSSRTQPSANRAATILRVAAMSLGRGSTALGAFYRRLAARVGKAKAITATARKLAILVYRMLKGELQYDDPGADAYDAQHREQLVRRLRHRAKKLGFALVDLETGELIEAAVS

SEQ ID NO: 192781 - protein, 403 aa, unidentified
MNMNAVGIDVSKGKSMVAILRSYGEIISKPFEVKHTVSGIRSLIEQIQSIDGESRIVMEHTGRYYEPLVRELSKADLFVSAINPKLIKDFGDNSLRKVKSDKADAVKIARYTLDSSTELRQYSLMDEIRNQLKTMNRQFDFYMKHKTAMKNNLISILDQTYPGANTYFDSPAREDGSQKWVDFSATYWHVDCVRKLSLNAFIDHYQKWCKRRKYNFSRSKAVEIYEASKELVSILPKDDLTKLIIKQAVEQLNTASQTVEQLRTMMNEAASKLPEYPVVMAMKGVGKSLGPQLMAEIGDVSRFTHKGAITAFAGVDPGVNESGSYEQKSVPASKRGSSTLRKTLFQVMDVLIKTKPQDDPVYLFMDKKRAQGKPYYVYMTAGANKFLRIYYGRVKEYLSSLPE

SEQ ID NO: 192782 - protein, 343 aa, unidentified
MNYYAALDVSLRAVHLCVMDENGEIHAEGQVDSEPQDVDAFLRKLALEITTIGLEAGTLTQYLTYGLRAAGYSVVCMEARQVKVALSAMRNKTDKNDARGIAQLLRTGWYSPVHIKSIESHQIRALLSSRKAVLTKCVDLENEIRGLFKIFGIKLPPKLGHGSFDHSVRETIENDRALCHALLPLLDARLVLYHTFPELDNRTRKMAHQDPVCQRLMSTPGVGFVTALTFKAAVDDPSRFKHSRTVAAHFGLTPRRFQSGEMDNPGHISRAGDPDVRCTLYVAANAMMTRSSRWSPLKVWGMKLAKQRGHKRAVVAVARKLAVILHRMWLDGTTYRWGTEGAP

SEQ ID NO: 192783 - protein, 339 aa, unidentified
MGFYAGMDLHSRNTLVGVINSSFKRVFEKRVANDLSLIVDTLEPFRSELQGIVIESTYNWYWLVDGLMNAGYRVHLATPSANKQYEGLKHTDDRHDAFWLAHLLALGILHEGYIYPKEDRPVRDLLRKRSFLVKHRTAHILSLQSMLEREQGYKVKSNKIKRLKAEDIARIFSEEHLLLSAQANMSSIEFLGHQIKRIEKAVRKRVKLRKSFEYLLTVPGIGEILAVTIMLEVGDIARFARVGNFSSYARCVASQKLSDGKKKGQGNRKNGNLYLAWAFVEASHHARRYNEMLRSYYQRKCAKRNQAVATKAVCNKLARACYYIIRDQVPFREEALFCS

SEQ ID NO: 192784 - protein, 365 aa, unidentified
MQKISTMQTSEENILNGQLTIGLDLGDRFSSYCILDEVGKILREQKVPTTPEEMQQTFGRMVRSRIAMETGTHSPWVSRLLTGLGHEVIVAHAQRARLIVKSRRKDDRLDARTLARLARIDPELLSPVQHRSAEAQIHLTEIRARAGLVSARTALVNAARGLVKSYGERLRKCGTQQFRQEITSGLSTGLREALEPLVREVESLNERIKEYDRRIERMAKETYPEVELLKQVKGVGDLIALAYVLTIEDPHRFRKSRDAGCFVGLQPGRRDSGESAPQMHISKEGDEYLRKLLVQGAHYILGPFGEDSDLRRWGKKLAERGGKNAKKRAVVAVARKLAVLLHRLWVSGEAYEPLRNSQKAMSTAA

SEQ ID NO: 192785 - protein, 460 aa, unidentified
MTLLEKLGARLPRRYYLGVDVGYKEHVAVVISLKTFVRGDERWKQTRCVHFPSTQAGLRKIQRYLDRFSADPGEFLGLCEPTGGYYGATVFQYLLDRDYDMPLVENATVKHMREKIFPGLPKTDEMDGRVMARIGYLHEAVGEEFTLRPLGLPDPDSSHLLALCRDSWKLNTTITRARNQFTQLMAVTFPELKLFFTSSVSTVGPVSLVAAYPTPALLAETAKEEVYQVLWKAGCYQHARRVAELQALARDSSGLLPDPGRVWRLEWLTGFLLTNFRYQASLDKQVQELVKQREGYELIVNVPYSGPNTLGVILAVTGDVSRFSNYRKYVAYTGYFAGLEKSQTIDRTKMSRRGNRNMKRALFQIAAPLVWFDKGDNPYKQLFQRKMAEGREWYKAMPFVCAALARHIYHCLKFNDPYDVEKAFRGSVHSPASEEEWLSLGADLDEKFEVMEASLCLMEG

SEQ ID NO: 192786 - protein, 342 aa, unidentified
MQQSIFVGLDLGSSHCHQTVINADGTIIRSRSVPTSEQHLRNSFADLQGDIHVHAEASELSDWVRSIINPLVTRFVISHPRSLAWIAKDSVKDDAVDARKLAELLRFNLVHEVYYEDRADRRSFRQLVVHHEQLSREQARLKSKIKARLRTLGIIRKDARLFSEAGQIELFASITDLLIEQMFHQSFAVLNQMLISLMDAKTAMIEFSRRLPEVRLLQTAPGVGVITACRFVAYIQTPQRFSNKQKLWRYARLGITRRESNGKRLSHPHLDPAGCGSLKDVSRKIFEAARRTKTDNSFKRLYEQSLANTKNAVHARLSTQRKILATLRAMWQANQPYRNDGG

SEQ ID NO: 192787 - protein, 400 aa, unidentified
MHTIGIDIGKRQHVAAVCRSGARVAERRILRFRADRAGFDELLGWISREGEVSRVVMESSGHYWMPLAGALTRAGLPVAVVNPVSAKYFARRRLQRTKSDPADARTLAALGMADEPRTFDPLASVDIRQAARFAMRLVEDQSRVLNRIQRLIDLGFPELGQVYDDPTCVSALAVLRVAPTALVAARKHPETLAKAERPGGGRPIGLAKATELIALAKQTIAPIELENQVRFEMQTLIEQHDLLERQIDGAESRVRMLLDGELARRLQTIPGVGPASAATLIAEIGDITRFGDFDQLVAYAGVHPAEKSSGQKGGPETSWEMSKTGNAYLRAALYRMALVGLQHNPVIRDHYARKRAEGKTKMNALGHCMKKALALVWGIWRGEHDFTPEPPRRLTSGYGS

SEQ ID NO: 192788 - protein, 410 aa, unidentified
MDLLHQRCAGLDVHKKTVVAAIRLATEARLVTEVKTFATTTAGLLALSAWLAENGCTHAAMEATGVYWRPVWHVLSDGEIELILANAAHVKNVPGRKTDVSDAAWLAELLAHGLIRASFVPDAPTQELRALLRTRKQFVRERARHTQRLQKTLEDANIKIDAELSDLLGKSGRAMLEAMIAGETDPVRLAALAHRNVKAAQGVLQQALRGRVTPHHRFLLKLHLEQVDHLDAAIAALDGQVEANLEPFRTAVELVSTIPGVSTLSAEVIVSEIGLDMSRFPTAAHLVSWAGLSPRNDQSAGKRRSTRLRKGAQWLKTMLVQCGWAAKNKKGSYLQAQFGRLRVRRGPQKAICAVAASILTAVYHMLKDGTVYQDLGPDHFSRRSKTSYPQRLVRRLQQLGYAVDIKPIAA

SEQ ID NO: 192789 - protein, 318 aa, unidentified
MKEESVIFPQLVERGCGLDVHKSTVVATVNGQGLTKETREFSTFTSSLIEMRTWLQSLDVTHIAMESTGIYWKPVMNILETAGFTILVVNARHIKYVPGHKTDKKDSAWICKLLLAGLLKGSFVPPVSIRDLRDLTRYHRKLTQSIAADKNRIIKTLEDGNIKLSMVLSDVNGASGTAIIEAIIAGERDPAKLMLLCKCGIKASPEDIRKALEGRLTVHHQFMLKTLEGNIKRTEQTKLVIEARIEELLKPYAQEIALLDEIPGVGKQSAGEIIAEIGADMSVFPDAKHISSWAGMCPGNNESAGKKKVVAQLKATRI

SEQ ID NO: 192790 - protein, 416 aa, unidentified
MKKNSNSPTKNGQKTKTAKARGPVQRDSKEVMTELVAKLSERLEPKPALENATVEKPRGVPAPNRDRLTVGVDLGDQWSNYCILGLEGETLVEGQLRTTREDVAEFFRALSAARVILEVGTHSAWVREVVVGCGHEVLVANPRLMDGTKRRKRKNDRIDANKLARLGRIDPQSLFPMEHRSTEVRQDLVVLRARDALVSVRTQLINTTRGLVKSMGTRLPKCSSPSFPHQVEEALPAEVRESLLPLVRLAEALSDCIKVYDERIEKLGQEKYRHTELLRQVKGVGPLTSVAYVLTLENPDRFAKSRDVGPYLGLVPKQEDSGDSQPQLGISKAGDVMLRRLLVGSAHYILGPFGPDTDLRRYGLRLCERGGKNAKKRAAVAVARKLAVLLHRLWISGEVYEPLRHAPPTAEVQEAA

SEQ ID NO: 192791 - protein, 341 aa, unidentified
MSNAGTYIGVDLHKKTCFITIMNQAGKIKKQTEISTDTDKVAKFFSKHTDASVAVESTMNWIPFYENLESLGCSVVLSNPLQTKAIAAARIKNDKVDSKILADLLRTNLLPTAYIQPREIRDLKELVRQRVNYVEIRTRIKNKIHSVLFKNNLKHDFTCLYGKAGMIWLKELELRDIYRQEMNRYLTTLNLLDKQIAEMSDQIMATAKTDYDCKLLMTIPGVSYFTALVVKSEIGDINRFASAGKLCAYAGLIPSTYASAEKIRHGRISKRGSKWLRKALIDSVTSGSKHPSRLGFFYRKLKKSKGTGKAKVATARKLCTVIFAMLSDKQPFREFVPVKQR

SEQ ID NO: 192792 - protein, 356 aa, unidentified
MKRTLENTNNLFDGQEFNIGLDVHKKNFKVNIRNNGRELKRFSMDPNPDELRRYMDKNYPGGKYNSVYEAGFCGFWIHRELVKAGINNIVINPADVPTMHKERKNKTDKVDSKKLARELENKSLEKIYIPTEEEEALRSISRLRFQIVKDQTRTKNRIISFLDSHGIKLPGNSEEKHWTKKYMQRIKEIRFSEENYNIYLNGLIEELEHQRSRNLEILHLIRKICNENEIIGYISTVPGIGIITAFTLYAELYNMARFKKLDELASIVGLVPSVSESDETKHNLGLTIRFNKYLRTLLVEASWQAIRKDPALTASFNEYCKRMIKQKAIIRIAKKLLNRIRYVWINKREYVIGVIE

SEQ ID NO: 192793 - protein, 430 aa, unidentified
MGLIVPTTIHPEREDQPLPYEWFVGIDWGSQQHQGYVLDRDRRRVGERVVDHDGASLARLADWLWTLSAGQPQRVAVAIEVPRGAMVEGLLERGFHLFALHPKQRDRFRDRHSVAGAKDDRRDAFVLADSVRTDQPSFRRLQLDAPQLLLLRELSRAEETLLEEFRRSANRLRDQLHRFYPQMLQLCSAADAPWLWDLLDLAPTPAHAALLSAEQVQRVLKAHRLRRITAPEVLACLQAPALPVAPGAVEAAQAHCGFLLPCLRVLAEPLRACGQQVDALLRPMADEPGAGERPSDVAIVLSLPGVGRKMTAWLFAEAAQPLAKRDYQVLRTHSGVAPVTKQSGKRRLVVMRRGCNPRLRHALYHMARVAMQRDAHFSSVYTALRAKGQRHGQALRTLSDRLLRILVAMLRNGTCYDASRIRRESVVQMG

SEQ ID NO: 192794 - protein, 350 aa, unidentified
MKTKHPVIIGIDTHKATHVAVAIDTQGTRLAALTIPANPKGYLEVERWSQSLGKVQAFGIEGTGSYGAGLSRSLLDQGHNVVEVTRPNRQLRYTQGKTDSLDAEGAARSVLSGQAAARPKTQSGSSEMIRHLKIARDTAVKSRSQAMVTLKTLIINAPADLREALDQIGGKVGLIRHIAAFRPRKIDNTMASAKAAMRALARRWLWLHEEIISHDKELERFATERAPNLMASHGIATLTVSEMLILVGDDPTRIRSEAAFAKLCGVCPIPASSGKTHRFRLNRGGNRQANAALYRVAIIRMRSHEPTLAYVKKRTKDGKSKSEIIRCLKRYIVREIYSQLCVPKTAKIAA

SEQ ID NO: 192795 - protein, 388 aa, unidentified
MIYVGIDVAKQDHFASLISSDGEILVGPFQFSNDGDGFQYLVSAFEPFDDEEIIIGLESTAHYADNLIRYLVAESYNVCVLNPLSTSSMRKNNIRKTKTDKIDTYIIAQTLMMQKSYRFVTSEDLDLMNLKELGRFRQKTIKQRTRLKIQLTSYLDQTFPELQYFFKSGLHQKSIYALLKEAPTAKSIASMHLTHLATLLAKTSHGHFKKEQATELRVLARKSVGQSDQALSIQVTSTIAQIELLDEQIARVEAEMTEIMRFNDSVIMTIPGIGYLNGGMILGEIGDIHRFSTPKKLLAFAGLDPSVYQSGNFNARRTRMSKRGSRVLRYALMNAAHNVVKNNSTFKAYYDKKMAEGRTHYNALGHCAGKLVRVIWKMLTDEVEFNLD

SEQ ID NO: 192796 - protein, 372 aa, unidentified
MKEETAGHPGVVGGVDTHKDLHMAAVVDEHDRVLGSECFATTRHGYRQMLAWMRSFGELLRVGVECTGTYGAGLLRYLQHAEVTVLEVTAPDRSDRRKRGKDDTLDAENAAHAAFAGVRTVTPRTRDGMIESLRVLKVCRKTAVAARRVALQLIHNTVVCAPDELRESLRTMTRMQLIRTLAAWRPDLSDYRNLTSAYRITLKSLVRRYLELHDEIADLDVMIAGLVDELAPDLVSRNSIGYESAAQLLLTAGDNSERLQSEAGFAALCGVSPVPASSGKVTRHRLNRGGDRAANSALHIIAIGRLRTDARTKAYVERRVSEGHSKLEAIRCLKRYIAREVYYVIRKRNRQIGQVQVASKGSVPDDRQAFAI

SEQ ID NO: 192797 - protein, 337 aa, unidentified
MSRARIYKEGNPTVQPNSNAKCWAGIDVSKDWVDVAVLVEEQKVEQIRCVRSLVELEQLAQKLLPYGPQGVVLEATGGLEGSVITALVAAGLKVMRMNPKRVRDFARAQGLLAKTDQLDAHILALFGARMQPPLRAWPEAERQQLGAWIARQQQLTLQRAAERTRLHQATEPQLRKSVERVIAFLGKELARLEKQMGKWMAQSEIWTEQESLLRTAPGVGPKTARLLLAQLPELGHINRREIASLVGLAPLACDSGHWRGKRRIHGGRGAVRAILYLASWSAVRPPGSLREFYRRLVAAGKPRQVALIAVARKLLLALNEMMRLNQPWRSPKESIPA

SEQ ID NO: 192798 - protein, 296 aa, unidentified
MKIVGCDLHTRYQQIAMLDTETGELIERRLEHANGEARAFYAGLQGPVRVGIEATGHTRWFERLLAELGHELWIGDAAQIRAAMVRKQKTDARDAAHLLQLLVEERFPRIWRPTMAERDLRQLVWHRQKLVWMRNAVGNQLHALAMGEGVCRKKQLWTKQGRAELQALNLGAWASYRRQELLEMVDQLDGSLEKLDRAVEEQSQQNEAAVLLRTHPGVGPVTSLAFVLTLGPVERFKRSKQVVSYLGLNPREHSSGGKQRLGGISKQGNPMMRRCWSKPDTRRHVWMPNYTRTIND

SEQ ID NO: 192799 - protein, 384 aa, unidentified
MGNQTFIPRDYDVFAGLDVDKRSIAVTFTDHQGLVKSLRMPYNVEHLVNHVRKHFPNQKVAFAYEAGPTGYGLYDGLVAQDFRCLIASPSMIPKAPGQRVKTNRLDSVGLSENLRGGQLKGIHVPTPLYRELRHLTQLRDTVVSEMVGMKQRIKSLLLMEGMEFPPAPAGSQWSFMVKNKLRKLPCSGTVRFKLDQWLDSLEFNEKQVLKTTREIRRFCHNDPELSQCIEYTMSVSGIGWIVASQLLARIGDWRELRNIRQLGGFLGLVPTEHSTGERTDRGSITHTGDERLRSKMIQASWSAIRKDAELREFFRLICHRHPRRQGPRVAIVAVARKLSVRISVVLMKQRPYVVREKVHSAPLTQEETSSQGTTRRQAEPGDNS

SEQ ID NO: 192800 - protein, 398 aa, unidentified
MFYAGIDIAKRNHEASVIDAEGKPLLDSISITNTKEGCDKLSALFEKFDITKDDVVIGMEATGHYWLAIHECLTEQGYDVRVINPIQSEAFRKMYIRQTKNDSKDSFIIAQVMRFGQYSETSLSDENLVAMRQLSRFRFALVDNCGDCKRRIIALLDQVFPEYASLFSDTFGKTSKELLLQCPTPEDMLSVSTRKLTNLLTKTSRGRFGEEKAKEIRSAAADSFGVGFAKNAFAFQIRQLIEQLTFSENQIKELEEQISLLLHQTNDVITTIPGIGDTLGAVILSEIGDINRFDAPGKLVAFAGLDVKVTQSGEFTGTKNKISKRGSPYLRRAIWLAANRAAFCDPILSDYYQSLKARGKHHMTAIGGVARKLCNIIFTILRENRPYEAVPPKKQTIT

SEQ ID NO: 192801 - protein, 349 aa, unidentified
MVIIGADTHKRSHTVVAVDANGRPLAERTVAATPAGHLELRRWAERFAERSWALEDCRNLSRRLEADLLRAGQRVVRVPPKLMAGARVGGREPGKSDPIDALAVARAALREPDLPTAQLDGPEREVRILVDHREDLVAERTRIQNRLRWHLHELLPGSEPAPRSLDRTAVLDGLQRRLAVESGTIARLAVELLGRVRELTTAINRLEREIAALVRPLAASLLELVGCGALTAAKLVGETAGASRFRSRAAFARHNGTAPVPVWSGNVTRHRLSRGGNRQLNAGIHRIALTQLQRPGPGRDYVEHRRAAGDTNTEAIRALRRRISDEVFRRLRHDEQHWNHQSAGLRAAA

SEQ ID NO: 192802 - protein, 385 aa, unidentified
MESQTFIPRDYEVFAGLDVDKKSISVTFTDHQGFLKSLSMPYSVEHLVNHVRKHYPDKKVAFAYEAGPTGYGLYDGLEAQAYKCLIASPSMIPKAPGQRVKTNRLDSRGISENLRGGQLKSIHVPTPLYRELRHLTQLRDALVSEMVAMKQRIKSLLLMEGLEFPPAPAGSQWSLLVKKKLRALPCSTTVRFKLDRLLDSLEFDEKQVLKTTREMRRFCQTDPELSQCINYLKSLPGISWVVASQLMARVGDWRQIKNIRQLPAFLGLVPTERSTAERTERGSITHSGDGRLRSKLIQAAWSAIRQDGELREFFRTVAKGHSRHLASRVAIVAVAHKLCVRASVVLMQQRPYEVRQKVQSAPLTQEETVPQGTTRRLAVPGEKNS

SEQ ID NO: 192803 - protein, 330 aa, unidentified
MSFKILKFNCCGLDIHKTWIYACIGITDSNNRTEYKQARFSSFTKGLNELCNWLAKYNCMDVCMESTGKYWIPVFNILEQHNLWVTLSHPKYTKPMKGNKTDRKDAKWICDLYMCGMVKPSFIPPADIRELRDLVRYRYKLTCMITGEKNRAQNCLTVSNLKLDDVFSDVFGKSSRSITEQILQHPGKNFDVAPFVDGRCKTPVEEIQAAVDGAISKEQAVKLRQCLDHIDELNQHISEVEQEILRLSDKYEAALNLIRTVPGFDKNPLTSIQVLSEICGDMSVFPTAKHLVSWAGCCPRNDKSDRKIKSTRISRAGFYFNQFWCRLQML

SEQ ID NO: 192804 - protein, 403 aa, unidentified
MFYLGIDVAKKSCRYLLLNEEGEKVKSFSLDNNHQAFQNLLERLQALAIPKENLLIGLEASGGFWENLYTHLKENGFSVVLLNPYHTKKFREALAKKAKTDDIDALVIAQLLRTGEYVQSQVAEELIQSLRELTNLRYELIQERKNYQRQVYALLAIIFPEFEKTPLKNPFATASTAILQKFPTAKDLAQAKPKQIEKIVRAIPGNNLHLQEIETLIKTAQTSIYSGRAKEARATSLCILLGHIQNLSASIEKLEAEIKQLLAPQGPKDSFPGENLLTIPGVGDKTMAAVLSYLGTNGASFSTSTKAIGYVGYFPKIHQSGQTYRDNTICKRGPKLLRWALYMAAVASLKHNPEMRTIYHKKISQGKTEKQALICVGKKLLQIMLAMLKSGEPYNPTKVFVNC

SEQ ID NO: 192805 - protein, 348 aa, unidentified
MRTCCNPKEADVKYSGIDLHSNNSVVVVSDEVDRVLVRRRVANDAAAILALLAAHRDDLVGVVVESTYNWYWLVDALQAAGYRVHLANTAAIKRYEGLKHSGDEDDAAYLAHLLRLGILPSGYICPPAARAVRDLARKRMQLVRSRTAQVLSVENMLSRETGAGMRSRAVQRLTAQAVEGFGFNPEVEQSMCANVAVIKTLNREIDKLEKRLHQCVRLRPEFRLLTSVPGIGQTLATVIMLEVGTIERFAAVGNFASYARCVDSARISNGKKKGQGNVKNGNAYLAWAFVEAANFAHRYCAEARRFYERKKARTNGIVATKALAHKLARACYHMLKENKPFDVKRCFA

SEQ ID NO: 192806 - protein, 410 aa, unidentified
MDRNRTVAGLDVHKDSVYLCIMRYDEAIIFEKTYGVLTPELRQMCQDMIEYGVTEAAMESTAVYWVPVWNELCNSMELKLVNPYFIKQLPGRKSDIKDAQWIAECLLKNLIKGSFVPEPIVQDMRKLNRRIMDLNEDMTYNSNKLDAALQRCGFRLSNYVSTIKSKSYQSVLQAIINGMTNPEELAKMVHGRTINKHGRDKIKAAVSGLFSETDITIFRQTKEFIDTIERQIEECQKELTALCRKHFPEQYRRIQTIPGVKERAATAIIAETGVDMKMFATAACLVGWCGLRPRNDVSNGRYKSRKVTHGNRYLRQVLIEIAWVASRTRNCFFSNFSYVQTTVKKKSKMKIQVAIARKILVALWHMLSKEEDFIDIYLKRLEQQKLMEANLKSLESKLARRPYDIPSGAM

SEQ ID NO: 192807 - protein, 359 aa, unidentified
MQEQRKELSFKGESIYVGIDVHLKSWSVTILTEHSHHKTFSQPAEAAKLWSYLKTFFPGATYYSAYEAGFSGWWTHYQLESLGLKNQVINAADVPTTGKDRLQKTDSVDSRKIARSLRAKELKGIHVPSPVTLKDRSVVRMRDSVVKAQSRLKQQIKMMLHFYGVKIPSSFSKNTNLTKRYLHWLRTEASRAEGMSTQAFLFLLDEYESKRKSLLSITRVIKQLSKEERYGKNMELIRSVPGIGLITGITFLVEIEDIARFSSNDKFAGFIGIIPSCHSSGENENKGEMTPRRQASLRANLIESSWVAVRRDPALALAFKRYCRRMETNKAIVRIARRLANRIYFVLLKQTKYAYGVLQ

SEQ ID NO: 192808 - protein, 410 aa, unidentified
MEVMFDRVAGLDVGKETVTVCLRTPGPRGGRRSETRTFKTMTGSLRVMRDWLVEAGVSIAAMESTSTYWKPPFYCLEEVMEVWLLNAAHMKAVPGRKSDVRDAEWIAQLLEHGLLRPSFVPPPAIRRLRMLTRYRVQLMGDRAREIVRLELMLEDASIKLSSVASSLKTVSARAILTAMINGESDPLRLADLAKGKMRRKIPDLAQTLSGHFDANHARLARSMLRRLDLVEQALAELDAVIMDACQPWQHQIELLQTIPGVGPKVAETIIAETGADMSRFPSAAHLAAWAGLAPAMNESAGRQTPAGKRHGNKWLTAMLVEAAGSVGRMHGKNYLAVQHARLTKRRGMGRAQVAVAHSILVAAYWMLKRDEPYHDLGADWHSRRNDQAHTRRLIAQLEHLGHTVIIDPAA

SEQ ID NO: 192809 - protein, 395 aa, unidentified
MDAGGRRLAKARLPEGVAGIARLHAMIGEQLGEDADEDDAGQVAIGIETDRGPWVAALIAAGYTVFAINPLQAARYRERHGVSGAKSDAADAHVLADMVRTDSHQLRPVAGDTALAAAVKVVTRTHKTLIWERTRCTQRLRHALRDYFPAALEAFEDLDAADTLELLARAPEPASAAKLTTAQISAALKRARRRDIAAKAERIQAVLRAAHLGQPDIVAAAYAASARALIAVLATLNEQVKTLQGQVEAYFGQHPDAEILVSQPGLGPVLGARVLAESGDDPGRYISAKARKNYAGTSPITRASGKKKTVMARHVHNDRLIDALISQAFTALRTSPGARACYDHQRARGAGHNPALRQLANRLTGILHGCLKTRTLYDEATAWPQYTATSEKTAA

SEQ ID NO: 192810 - protein, 351 aa, unidentified
MPSKKDAAVIRAIGIDTGKNTLHMVGLDEKGAIVLREKVSRNRITARLVNMPPCLIGIEAGMATHYMSRELVALGHKVKQVPPAYARPFRQGHKNDFRDAQAVAEAVQRPSTRCVPIKTDDQLDLQALHRVRSRLIGDRTAVINQIRGFLLEHGIPVRQGPRFLRQQLPQILATRTDVLSPRMVRIIGEIVDDWENLDERIERVTDEIEGLARADVSCGQLMTVPGIGPIIASATVAAIGNGTAFAKGRDFAAWLGLVPKQMSTGDRTILGRITKRGNRYLRTLFVQGARAILLHPASWAKHSFGPWLTSAARRLHRNVLVIALANKLARIALTVLVQGRSYETRVEPAAV

SEQ ID NO: 192811 - protein, 398 aa, unidentified
MTESSDYESVQVFIGVDVGKDTHHAVAVNRSGNRLFDKALPNDENKLRSLISDLKQHGQILLVVDQPATIGALPVAVARSEGILVGYLPGLAMRRIADLHAGEAKTDARDAAIIAEAARTLPHALRTLKLADEQIAELSMLCGFDDDLAAQTTQASNRIRGLLTQIHPALERVLGPRLDHPAVLDLLQQYPAPEKLASLGEKKLATQLCKLAPRLGKRLAADITQALTEQTVVVPGTNAAVVVLPRLALQLITLRKQRDEVALEVEQRGLAHPLYPVLTSMPGVGVRTAARLLTEVACRAFASAAHLAAYAGLAPVTRRSGSSIRGEHPSRRGNKTLKRALFLSAFAALRDPISRAYYTRKMSQGKRHNQALIALARRRCDVLFAMMRDGTFYTPTAS

SEQ ID NO: 192812 - protein, 344 aa, unidentified
MDHFAGLDVSVKETSICIVDDTGKIVRELKVASEPEALLAVLKNPAYNFKRIGLEAGPLSQWLFGALAEAELPVVCVETRHMQAVLKAQINKTDRNDARGIAQMMRVGLYRPVHVKTLRSQKLRMLLTHRKLLQSKAIAIENDLRATLRNFGLKVGMVGTLKFEARIKELVENLPDLVVLVEPLLLVRRVLREQIVILHRRLLAIVRDDDVCRRLMTVPGVGPVVSLTYRATVDVPARFRKSKSVGAVFGLTCSKYQSGEIDRSGRISRCGDEMMRVMLYEAAQSMLRSKKWSWLKAWAMQIARRRGMKKAIVALARRLAVIMHRIWVDGTEFRWTREQAPAAA

SEQ ID NO: 192813 - protein, 408 aa, unidentified
MRYFAGLDWGSVEHAACVLDEQEQVVQRLAVPHTAAGLHTLLSVLARCAPAPEMPIAIERPNGLVVDTLIEAGHPVVPVHPNALRACRPRYRAALGKSDPGDAYILADVLRTDGHRFRALRPASDEMRALQALVRTRGDLVAERVALANQLRALLDSFWPGAAALFCDIDSPIALAFLERYPTPSSARCLGCKRLAAFLARHGYCGRRSPESLLARLHAAPAGLAGEAEQEAKGELVRALVAVLLTLVAQLKHTSAAVEHAVAQLPTGQVLMSFPRAGKINAAQILAELGDDPQRFATDDQLAAEAGVAPVTYSSGKHHGVGFRYACNKRLRQALTCFADNSRHLSPWAQHVYARARGRGCDHPHAIRILARAWVRVLWRCWHRAAPYDPAHHGAAQPFIHPPSPSEA

SEQ ID NO: 192814 - protein, 337 aa, unidentified
MDRRYVGIDLHRRRSVIYAMDAAGERLFCERISNDALPLLEVVSAAGETAEVVVEATYGWYWAVDLLRDAGFSVHLAHPSGNDWGNRRVKNDERDARDLADLLRLGRLAEAWIAPPAVREARELVRYRAKLVQLRSGLKAQVHAVMAKEGVLPGVTDMFGPAGQRLLDELELADAYLVRVESLRDLIVVYDRHVATLECRIHELLRDDRGYQAIQKLDGVGRTIAAIFVTEIGDIGRFRSPEALCSWAGLTPRHRESDTKVVRGKITKQGSKLVRWAALEAIVRYHGGPPLREHFHRIADRRGINKARIATARRLMTLVYYGLRDGEIRCLKQRAAA

SEQ ID NO: 192815 - protein, 346 aa, unidentified
MKDHRVIAIDLAKQVFQVCVLDGRDQVLTNKRMGRKRLEVYLARQRPGLVALEACSGAHYWGRQAEGMGHRVVIIPPRQVQAYRQGHKTDGNDALAIGIAARRPQLKAVRVKSVEQQGVQSDKRVQEHISDQMTATGNMLRSLVGEFGLLIPKGEAGLRREMPKILAEADNGLPLGVRASLALGWRHWQGLAESMRQSEGILAQRVKELEPCRRLLALEGVSQKNAIGLYVAIGRADQFKNGREAAACIGLTPKQDSTGGKVKLRGIGKFKGNQRLRSSLIVGARAAVNGLIKREPRTTKERWLKDLIERRGPGRAAVALANKNVRTAWAMLHESTSYQAQPLSDN

SEQ ID NO: 192816 - protein, 349 aa, unidentified
MLADEVDYVIGVDTHRDQHTLAVVVAPTGGVLAQTVVGASGRGYAQALRFAERHAGGVRAWAIEGAGHYGAGLTRYLRDRGETVLEAGRHIRTERRLRGKDDPLDAILAARTELAAETLTLPRSGQGQEALRLLLLTRRSAVDVRRVALVQLRSVIVTAPEHLRDELRRLSVTRLIRRCSGFRRSGSRTPDELAVVLTLRSLARRIEAATAEAVQLEREILNQVRSLVPELLDEPGVRPIVAAQLIVTWSHHDRVRSEAAFARLAGVAPLPASSGQTVRHRLSRGGDRQLNRALHTVILHRRLHDPTTRDYIARRVAEGKTTREATRILKRYLARHLYRVMQNATPLTT

SEQ ID NO: 192817 - protein, 423 aa, unidentified
MGKRRNRVCGADVHKDLIVATIQSADGTEFQEKFGTTSIELDRFRDWLIAHNCEQVAFEATGVYWFPVYDALNPSIDTIVANPWMIKGIPGNKSDANDSKWIAENCLDGKIKRSRVLSKEDRDLRTMTRARSAYTKTRTQLRNRIHKCLALCGITLSSYISDIFGKSGRHILDGLVESKDLDEIMDSIPSGKVKKKRDVIQASLGKGLDDASRMLVKDTLELLDHLEKKIEKTSLEILSRLQKRAKDLAIVMSIPGIGFTSASIILAEIGDYRDFRTPEQLVKWCGLVPGLNESAGKKKPCGITKQGSKNLRTILVEIAQVVAKMGNNKLSRFFHRLSARKNYNVAITALARKLISIIYHLLINQELYQENNCTTATSKPVKRDLLYLSKEERLKEGVAAIVDAFYHLKDRYSEGGWIALHFL

SEQ ID NO: 192818 - protein, 408 aa, unidentified
MIFVGHDWAEDHHDVVLLDEVGERLASARLVDGVDGVARFHALVAESVDEAEEVVIGTETDRGLFVGALVAAGYQVFAVNPKAVDRYRDRVRMAGGKSDAADAKVLADLVRTDRHLHRPVAADSELAEALKVLTRAHKDLIWQRQGQVNQLRSALREYYPGALEAFGTELAHPDALAVLALAPTPEHGQRLSPARIASALRRAGRQRNVEARANTIRAALEAVQLSAPTTVSNAYGAATRAAVAVLLAINEQIAAIEDELAQRFEQHPDAEIYRSLPGLGVVLGARALSEFGDDPNRYESAKARKNYAGTSPVTHQSGKLRLVTARRARNQRLADTCYRWAFCSLHASSGARAYYDALRARGKGHHGALWQLANRWVGILHGCLSVRARYDETTAWAHHLAEMKADAA

SEQ ID NO: 192819 - protein, 336 aa, unidentified
MSEITTIGLDLAKRVFQVHAVDGGGAVILRRQLKRRQVEGFFAKLPRCLVGVEACGTAPHWARRLGALGHDVRLIPPAYAKAYVRRNKTDPADAEAICEAVSRPSMRFVPIKSEAEQAIASVHRVRDRLIGQRTMLLNALRAQMAEFGMVAATGPGPVRELVVRLSEPDSLPAMLREALLGLVRLLDALGREIAAVDQQLLAWHRDSEVSRRLSSIPGLGPITSSALAARVLQAERFRRARDFAAWLGLVPRQHSSGGKIRLGAISKKGDGYLRRLLVNGAQAVLNSKRARTDPWIKRLIEHKPRLVAAVALANKLARIVWAVMVGNTPFRAAATI

SEQ ID NO: 192820 - protein, 344 aa, unidentified
MTYHAALDVSLRSVSICIVDDDGAIQFEGKVDSEVEAIIACLNRFDPTIKSVGFEAGALMQYLTYGLQAAGYEVICLEARQVSSALSAMRNKTDKNDARDIAQILRTGWYSRVHVKSFESHLIRVLLTSRKAVLKKCVDLENEIRGLIRIIGVKLPGTLKHGIYDVTVREIIDNNDILADALVPLLDARLVLYKTYLKLDNQAKAMVREDPICQRLMTVPGVGAITALTYKAAVDDPTRFKHSRTVAAHFGLTPRRFQSGEVDNTGRISKAGDPEVRSALYVAAHSLVVRSAEWSSLKIWGLRLAKTKDHRRAVTAVARKLAVILHKMWMDGTDFRHGSTEATA

SEQ ID NO: 192821 - protein, 468 aa, unidentified
MTHEVLDQVISTQTLLDRRAAAARRRPEPPTHERTITMKNAWKGQPVLPRGRAVVGIDIGKRKHAATALSPHGEVIAQLASFPNTRPGVDRLEKEVLRKAGGSGKVLVGMEATGHYWMCLYHELSRRGYACVVLNPLQTNARSSAHIRKTRNDKIDSETIARLILSGEARATRVPNPNITELRLLVRHRRRLLRAAGGMERYAHTLVDRIFPEYADVFCKPFLPSSQQLIRQIGIAPDKLARNADQVRDLLRRAGRGRIANETIEQLLQAARESIGTRQAEEAIERQLGSIFDYLETVRRQIADIEEQLDQRALKLDSPLYSLGLTSPMVAAIHAESDPIGDFATPEQYVAYTGLDPSMHDSGDTIQRRGKISKRGSPLLRHTLYLAAFVVCRRHDYFTRVHRKQLARGRKHRHALVVVAHRLARVIWRLLTDGRPFHKRPPKTVLPPNKPHPSLAPNTTKKVAKARA

SEQ ID NO: 192822 - protein, 455 aa, unidentified
MPIKRGSQGFSVVHPHAAGIDIGATFHIVAVSPDCDPSPVRRFQSFTTDLHKLSKWLHEVGVTSVAMESTGVYWVPVFEILESDGFEVILVNAREVKQVPGRKTDYNDAQWLQKLHQFGLLKASFRPSERLASLRAYLRHRERLIEYSAAHIQHMQKALMQMNVQLHHVVSDITGATGMKIIRDMINGERCAATLAAHRDIRCKQSEETITAALTGNYRDEHVFALKQAVELWDFYQERIRECDAQIEKVMAKLNQNKTSSDVPIPKARHRTKQPHEPDFAVRSALYTLTGVDLTQINGFGPYTALRLIGECGDDMAKWPTEKHFVSWLSLSPGNKKSGGKILSNKTGRTKNRATTLLRIAAVNVGKTETALGAFYRRLAARVGKAKAVTATARKMAVLFYSIMKHGKEYVEPGAAYYETLYRNRVLANLKKRAKRLGYELVANPVPERLYGEVS

SEQ ID NO: 192823 - protein, 338 aa, unidentified
MKVYVGMDLHATNTYVGMVDEENKVLHKQRFRNELPLILSGLDPFKKDIQGVVVESTFNWYWLVDGLMAEGYRVHLANVSAIKQYEGLKQIDDKRSAFWLANLLRLGILPTGYIYPKEERPTRDLLRKRLHLVRHRTSHILSVKNILARNLGLRMKSEEVKKITDPEVKRLFQDREMQTMVLASVGLIRHLQVEISAIENMITKKLKVRKEFAKLMTVPGIGKILTLTIMLEVGDINRFPTVGDYSSYCRCVKSIRTSAGKVIGYGNRKNGNKYLSWAYIEAAQAARRFHETVRAFYEKKMAKTNRIVAIKALSHKLTRASYYVMRDRVDYDPARLFR

SEQ ID NO: 192824 - protein, 358 aa, unidentified
MEKVYFVGLDIAKNIFQVFLADQRGRELANRKLTRKQMVQFFANLSPCTVGLEACGTAHHWARTLLKMGHETKLIQPIRVKAFLGHRNKTDAADARAICEALMHPGTRFVKVKTIIQQEMKNYLSRRERLVRNRTELINQTRAFLSECGISLQKSRAQFERNFRTVISTHWDEFSDNFKRILEDNYSEYLNIQEMIIEIDRHIKNNSNNDEQCRRLQEIKGIGPLTATALTANVGDAKQFKNGRQMAAYFGLTPREYSSGGKQHLSGITKRGNRQVRTLLVLAAHAAILGIIRRKVDETGKPLCLSRLEKWILALKERIGLFKTTVALANKMARIAWVILAKDEHYNPMKAVALEPVK

SEQ ID NO: 192825 - protein, 355 aa, unidentified
MDNRKYIGMDVHKEAIAIAVLNAAGKLVMESIIETKANTILEFLKGLRGELHLTFEEGTWASWLYDLLQPHVKRVVVCNPRRNALLKEGSKSDRVDARKLAELLYTKMLRPVYHRDHGMRAVKELARSYVTISKDQARVMTRVKALYRSWGIACSGKQIYTVRHRASWLGKIKEASVRRRAEFYYQQLDGLRSVRRQVRRELLLESGKHKANKLLCQIPSIGPIRAALLLALVQTPHRFRTKRQLWTYSGFGIETHDSSEYRYVAGQLERSKKPQQVRGLNRNYNHDLKNLFKSAATNAIAKSGPLQEFYLALVKRGIRPEMARLTVARKIAAITLAIWKKGVSFDAEHLKQQTA

SEQ ID NO: 192826 - protein, 341 aa, unidentified
MTQLYAGLDVSDKQTHICIVDGAGATVWRGVCASDPEALSGVLKRRAPGLDKAVLETGPTSSFLYHGLRCRSIDVVCICARHAKGVLSTRLNKSDVNDAEGLAQLARTGWYKVVHTKEKGTHLDRTLLRVRHQLVKSHADMLNQLRGLLRLFGLRLGSATTPAKRSERLILLFEREPALKPLLEPLVATLASLEQELDKLDKAVSSRVTSDPICRRLTTIPGVGPIAALTFKASIEDPARFSRTQDVGAYAGLTPRRYQSGEVDAMGHISKRGDRMLRRALYEAANSVLGRLKRDCVLKSWGLKIAEHKGPKRARVAVARKLAILMLRLWQTGQEFVWQKA

SEQ ID NO: 192827 - protein, 348 aa, unidentified
MSLELQSLLPYPNSCQGVSPHQQGRDTKMLSFCGIDVSKDRLDVMVLPDEYSSSVPNDPAGWAILVEQLRGFSITAIGIEASGGYERGAVRSLQAAGMPVRQVNPFKLRQFAKASGVLAKNDPLDARMIASFVGIMPTRPAQRTTPAAEQLVEMLAVRRQLSAEKIAAENASRLLEDPMLQRLYRRRIARLAADIELLDKRLVEIVATDATLAHRYRLLTSMPGVGPVLACTLIALLPELGGMSRKQVAALVGVAPYAFESGTLKGRRCIWGGRANVRQVLYMAAMSASNWNPALKLFHDRLKGAGKLPKVVIVAVMRKMITTLNAMVRDDIAWADRLSGRHSVTTAR

SEQ ID NO: 192828 - protein, 434 aa, unidentified
MNCNTQNAKIKSITEKTLIVGIDVGSETHYARAFDWRNIEFSKKPFAFSNDEAGFASFKAWLEDIKEKFGKTIVLPGMEPTGHYWFNLGAFLQDNGMKPVHVNPHHVHKSKELDDNNPSKDDRKDPKTIAALVNEGRFNYPYIPTGVYAEIRSLYGLQVMTQEALIRVKNRIARWLSIYFPEYKDVYRSCDAISGVMVLKVCPLPADIVMLGADGVNKIWRDAKLRAAGMKRARPLVEAAKHSVGSTESPEAAKYEMELLLGDYEVYTKRLEELTEKIEVKLEEIPYVDKLLEIKGVGKKIVSGLIAEIGDISRFDNPKQVQKLAGYAIVACSSGKHKGESHISYRGRKRLRYVLYEAAISLIGQNAEFKEIHRYYLTRQNNPLKKMESVIAVACKALRVFYAILTKGVSYDGKFMLESIRYPENQVLGNRIAA

SEQ ID NO: 192829 - protein, 351 aa, unidentified
MRKIAYLAMDVHAKHCVLGDMDFKGNFKGTQTFPTSEQNIMKALEAIKAKNKYLTLEEGNLAYWAAQVAAPYVTEVIPCDPKENALIYRGPRKNDKVDTRKLCRLLRLGELKRVYHPETDERAIFKASAQHYMDLRDQQIALKQKIKAMYHHWGVIDVAGEAVYSKGKRDDYFRQIKHIEIKNQVSRLYYLMDQTESMQASALKAMKQLGRKYPEIKQFKEIPGIGDILAHFFDAFIQTPHRFANKHRLWRYCRLGVTDRTSDGKPLGFKRLDRSGVAELKSLSYRAWMSALRGDNEVRRFYTTSLQRTFSRVHARLNTQRKIIATMYGMWKRGEPYKPKRFLDSPQSGAV

SEQ ID NO: 192830 - protein, 313 aa, unidentified
MAETVVTAGIDVSKEWLDCAVWPGKAELRVERNAVGFDQLAAWLVEHRVSRVGLEASGGYETAVMDALQARGFAVIRFNAKRIRMFAKAKGRLAKNDRADARVIAQATLVLDENTPPERRRDLDPLVEHLAYRRQLRDWLGDCANQLEHLRDASLRRQILVRQAGLNKALAALDAKLAKLVAAHKDWHALEQRLRKVPGVGPVLAQTLIALLPELGQVSRRAIASLVGVAPFDDDSGKRAGERHITGGRDAVREVLYMAAVAARRWNPVIAAFAKRLAGKKPKVIIVACMRKLLTILNAMVRDGQDWNPRAAA

SEQ ID NO: 192831 - protein, 427 aa, unidentified
MKHDNVTKYQQFCQFKAGIRGSGEYLIVGIDVAKDRHHAFFATATGRTLLKRLVFDNNRIGFEQLVERAGQLQGHHGLSKVVFALEPTGNYHKPLAHWILEQGQLLVQVSNHAIAENRQTLNGRWDKNDTQDSANVADLVSQGKCQFFEEPNEDLLELRSLLSLRKRLKKDEHALRMQIRNGLVAKHFPELDRHWGNCLTENLAIVSWCLDPSYIASLPFDNFVQRVTTKDRGLKQVRRLREIYDAAAVSVGCPVGEATEYEAQLLVGFFEDMRRRIKDTEWKIQIVCRSFPEYAHILTIPGFGPYVCAQVIANIGDPNRFRGRKQVIRLAGLDLNAKRSGRRSNTAVPVISKRGNSDMRYALYQAALIGSYHNADLRALYTRYLKGRQKERGIQTKMRVKLAAKMLVIAWTMMKNHTDFDPSLLNI

SEQ ID NO: 192832 - protein, 359 aa, unidentified
MLVERTCVGLDVHARSVAAAAIDGVTGELSQARLTPSHDHIRSWIEQFDGPVAVVYEAGPTGFGLYRALNPVGVRCVVAAPSKLQRPPGDRVKTDAKDAVHLARLLRLGEITAVTVPTVDQEAARDLVRAREDCRGDLMRARHRLSKLLLRHGFVYSGGQAWTGVHDQWLRRQRFDHRATTMAFESGYEAVTAITARRGRLDKAIAELAAASEFTPIVHRLGCLRGIATLTAFALAVEIGDWNRFTGSSIASFVGLVPSEHSSGASRVQGSITKTGNTHVRRLLVEAAWQHRPAYRPGKVMRDRWDLADPAARARGDAGNRRLHQRWVQFNLRRKRPVIANIAIARELAGWCWSLAVMG

SEQ ID NO: 192833 - protein, 346 aa, unidentified
MEHYVGLDVSLKLTAICIVDRTGKIEREGVVASDPETIAAFVKLHAPHVARVGLETGATSTWLWTELSKLGLPVICIDARHAKAALKLQINKSDRNDAVGIARIMQCGWYKEVRVKDLDSHAIKALLVSRALLVKIKRDIENQVRGLLKNLGLVIGRAKMNVFAVRAAELTDARPELAAAVEPLLKAREAVGRQIADLDRKVMRLARNVAQVRRFMTAPGVGPITALCFLATIDDPTRFRKSRSVGAYVGLTPRRYASGEIDWTGRISKCGDKLLRCYLYEAANVLLTRVAKWSALKAWGIRLAKRTGLRKAKVAVARKLAVILHRMWIEGSEFNWPSKEAANQPA

SEQ ID NO: 192834 - protein, 366 aa, unidentified
MKKSLVYVGLDVHKDSIVVAMAVGRNQAVVVRVIPNDLGTLGRLLDDLGARSRLRICYEAGPTGYGLARSLNAWGMCCIVVAPSRIPREAGRRVKTDRRDARQLAELLRAGLLKEVKIPEAETEAMRDLERARDDAKNAERAVRQQLDKFLLRHGRSWSQTKWTRLHWAWIKQQAFPAEASRRVLADQIRAVEEATARVERLDKDIEGLVESWSLAGLVRALQALRGIRLLSAVVLAAELGEMAQFATPSQIMAFLGQVPSENSSGQRCRRGRITRTGNGHARRILTEAAWNYRFWPRASRAIRKRRESLPAGIVAIAEKAEQRLSHRYRHLVDKGKSPPKAVAAVARELAGFVWAIAREMRTQAA

SEQ ID NO: 192835 - protein, 382 aa, unidentified
MPSENTVYVAVELSSSSWLVAIRLPGAEKSRLHRIESGDSKALLALLADVGQQPSAKLGRALDVACCFEAGRDGFWLLRLLAAHGVAAYVLEPTSVLVNRRARRAKTDRPDAEGMLRVLTAWLGVDRQLCSTVRVPTPQEEDAKRPHREREHLVQERLRIENRIEALLFTQGIRERPSLRSWERDMAEFPTGDGRALSPLLRAELDRLRRRLVLTLELIRELEAKRAAALAAAAEAAAADNAMAQKITALQRIRGIGVNFSAVLVRDVLYRSFANRRQLASYVGVTPTPYQSGGMDLDRSISRAGNPRARTMLIQLAWLWLRYQPDSALAAWFRARVGTLQGRTRRIAIVAMARKLLIALWRYVEASVLPQGIGIRDAGATA

SEQ ID NO: 192836 - protein, 338 aa, unidentified
MTIVMGLDQHRAQITAEWIDTSTGEVSRARIAPADRDRVRRFAGRFGGQELEVALEATTGWRFVVEELEAIGARVHLAEPAETAARRGTKKRAKSDRADARHLRELVMVGRLPESWVPPAHLLDLRARVRLRHTLVDARREWQQRMQAVLYHHGVPPRSWLMSAESRAWLTGLALPAAAREQITVGLALIDAHDAQLAPLDQELRNYAKRQPGCRALMRHYGIGPLTSITILAELGDTRRFSSSREAVRYAGMDITVHQSDKRRAPGHLSRQGPPALRWALFEAAQCARRPASPDHKYYVEAAARLGGNRACLAVARKLLKRSYHTLRELGEEAMAPA

SEQ ID NO: 192837 - protein, 368 aa, unidentified
MSKHSKEPAEKSGRYVGIDLGDTKSRVCTVDKLGQVVSEEWLATTPEAFFKRFGGRTNLHIAMEVGTHSRWASEVLLRCGHGVIVADARQLALITNSNAKSDKRDARTLAQLVWADPRLLSPIRHRAEELQRDLTLIRQRDNLVETRTRLINSVRGVVKASGARLPDCLTGNFPQQVAEAIPEPLRAALAPTLEIIDQVNEQIYACDITLEHWARTRYSESAGRLTQVGGVGTLTALAFLLTVGDKERFSRSRDIGSFLGLRPRLEQSGDSHPQLRITKAGDGYLRKTLVQCAQHIVGPFGQDSDLRRWGLKMVADGNGSKRAKQRAVVGVARRLAVLLMSLWKSGESYDPLRHSRSVEKEADAEVAA

SEQ ID NO: 192838 - protein, 415 aa, unidentified
MKKHSKISRAESANKQQVVKAKGNKEKTKVNRDIPSLVETVKRALSVLNGKRQPMVLLADRDTFCVGVDLGDKKSHYCFLDPKGAIAAEGILETTQAGLSALFSSIPKCRIAIEVGTHSPWVSALLESYQHEVFVANPRKVKSIHKNKRKNDKVDARTLARLLRADPELLYPIRHRGVEARHDLVLLRARNTLVSARTDLINSVRGLVKSVGGRVPQCSAESFHKTAIEALPEGIRESLLPMVEQIESLTERIRGYDKQVSRIAAQKYPETGALQQVRGVGDLTSLAFVLTLEEPGRFQKSRDVGAYVGLVPKQDDSGETSKQLRITKEGDTMLRRLLVGGAHYILGPFGEDCDLRRWGLKLAERGGKNAKKRAVVAVARKLAVLLHRLWLTGEQYEPLRNAPLQEESLAATTNP

SEQ ID NO: 192839 - protein, 423 aa, unidentified
MKFKAQAKQNQLLERISTQHLVVGIDIAQQAHVARAVNFRGILLGTPLHFSNDDAGFNLLLKWMKNLQETQQLNGAIIGMEPTGHYWLSLAAWLQDRNLEVVLVNPHLVKKNKENRDNTPSKSDDKDAFVIADMVKNGYYTFIKESSEVFMEMRVLMANRETVVHRLVSVKIQIHRWVDIVFPELRQVYKHLIGAGVLATLRLFPTPADLQKLTVRQVVDGWKTVMKRHSGERRAGELLALAARSVGAKHAEKAYKLHLQQLLAEYDLAMEQLHVIEDEVTAALARIPLAQPLLAIKGLSTLAVAGILGEAGDLSGYAHGNALLRHAGLNLAEASSGKWKGQMSISKRGRPRLRHALFMATMALILNDVAFKRQHEMNVKTKNMKPMRTVMKLCGKLARLLVAMAQSGEAYDPDRALPMKQAA

SEQ ID NO: 192840 - protein, 345 aa, unidentified
MKITTIGIDLAKNVFQVHGVDERGNAVLRKQLRRAQVAVFFANLPPCVIGMESCSSAHHWGRTLTRFGHTVRLMASQFVKPYVKTNKNDAADAEAICEAVGRANMRFVPIKNIEQQAILSVHRVRQGFVKARTAQANQIRGLLGEFGLVIPQGIYNVAKRVPEILEDASNELPPPFRHLIDRLTQHLKELDRQVKEFEKEIIAWHRSSELSRKLEAIPGIGPLAASALVASIADPHSFKNGRQVSAWLVLVPRQHSSGGKPTLLGMSKRGDAYLRTLLIHGARSAILAAQNRVDNTNGWLKNLLNRRHPNIAAVALANKNVRTVWALLAHGREFRADYAPQPIAA

SEQ ID NO: 192841 - protein, 298 aa, unidentified
MAEHAIGVDISKSRLDVFRLEDGAAQRFDNSAAGFRALIKWLGKAPVARIVFEPTGPYHRGFETALSGRFPLVKVNPLQARRFAEASGTRAKTDAVDAHVLARMGAALALEPDRSVSETSGELRDLQVARTGLVKERTRLRNRGQTRGNRVLKRQTRTRLALVERQIKELDAEIAKRIAGNEAMARKREILRSIPGLGQVAAAAILTFLPELGTMGRKQLGSLAGLAPHTRESGQWKGKSFISGGRKPLRDALYMPALVAMRFNPDLKAKYTALRAAGKPAKVAIVAFVGKTAPHAVF

SEQ ID NO: 192842 - protein, 417 aa, unidentified
MENFAALIAIDWADKQHAVSLYDETTAHREQTTIKHTPEALQDWALALRTRFQGQPIAVCLEQSRGPLIYALLKYDFFVLYPINPATLARYRKAFSPALGKDDPSDADYLLDLLQHHRDRLTPWRADDEKTRTLRYLVEQRRRLVNDGTRTTNRLTALLKSYFPQVLSWFSELRRTVVCDFLDCWPTLEAVQRARPTTVNKFLRSHHSVRRDTNERRLSEIKTAVALTDDAAVLNSSQLIVKTLTAQLRTTIKALAELDRHIEALCQTHADYELFSSLPGVGSIYASRLTAAMGSDRTRWTRVEDLLCFSGVAPVIERSGKQNWIRWRYFCPKFFRQSFVEYAEQSIQHSFWAKAYYSMQRAKGKGHYAAVRALAFKWIRIIWKCWQTRTPYNEVIYLESLRKTGSSLLKFAAENQA

SEQ ID NO: 192843 - protein, 343 aa, unidentified
MKNTIYDQYIAIDWSIENMAIARMTKKSNKITAIDVPSDIVDLQAYLKNLKGTKILAIEETTTSQWLYAELKDYADKIFICDPNRNKLLNEGPKTDKIDAAKLVQLLKAGLMKEVYHSGDKFLYLRRVTSGYEDLVKAGVRLKNQRYALFRACGKAGNEKKDINLGSQGEQFVLECLDRQIEVYESEKQGYENEFERLARKNPEIKHQKSLPGIGTINAVKIVTRVVTPHRFPDKGHYLSYTGLVKLDKISGGRSYGKKNPRFSRQLKSVYKSGILAAIGGNNPINDYYEHLIQEKGYAEHNARHKACRRLAILSLGVFKSGRKYQPYRRDHVKGGKEDTSGL

SEQ ID NO: 192844 - protein, 344 aa, unidentified
MSTIRVVGIDIAKSVFQVCVWMVDGSVAWNKKIPRSKLLDTIRQFEPGTLVAMEACATSHFWGRTFASMGYCVRLIPAQHVKAFVRSQKNDANDALAICETAFRPGIHFVSVKTTEQQDIKALRNTRQLMVEQRTALANQLRSLLAEYGFTIPVGILRLQQQLPELIEDASNSLTFTLRRLLSSLREDMQALNERITSLDNEIAALSSQQTVYRHLLTIPGVGPLIAAAFISEVDATQFSSGRELSAWCGLVPRQHSSGGKQRLSSVTKNGNRSLRTLIIHGARSVMRSVKKRDDSLSIWLQRLEARRGFLKTTVALANKLTRIIWRVLTDGIDFNMQKAVAMN

SEQ ID NO: 192845 - protein, 358 aa, unidentified
MKYIGCDFHPSFQQITMLDLETGELVRRRLVHGNGEARAFYEALQGPVVVGIEASGNTLWFERLLSRLGHELWMGDATRIRRQDPRMQKYDDRDASLILQLMVEKRFPKVWIPTMEERDLRQLLIHRHHLVRMRTRVKNQLQHIAMNQGVQRKYKLWTQAGLKVLRELELEPWTRLRRETLLEMLEELEQKIRPLEQAVEREVEARPAARRLATHPGVGPVIALATVLTMGEAKRFANSRSWVSYLGLNPRERSSGVKRRMGGISKQGNPFLRFLLVQGAAIAARGDKSLARVYARLKAKKHHGVAKVAVARKLAVRLYWMARTQKPYPEVVRMQGSQSHPVAEVMAVRLNRPPASRQ

SEQ ID NO: 192846 - protein, 398 aa, unidentified
MTESSDYESVQVFIGVDVGKDTHHAVAINRSGKRLFNKALPNDENKLRSLISDLKQHGQILLVVDQPATIGALPVAVARSEGVLVGYLPGLAMRRIADLYAGEAKTDARDAAIIAEAARTLPHALRTLKLADEQIAELSMLYGCDDDLAAQTTQASNRIRGLLTQIHPALERVLGPRLDHPAVLDLLQRYPSPEKLASPGEKKLAAQLCKLAPRLGKRLAADIAQALAEQTVVVPGTNAAAVVLPRLALQLITLRKQRDEVALEVEQRVLAHPLYPVLTSMPGVGVRTAARLLTEVACRAFASAAHLAAYAGLAPVTRRSGSSIRGEHPSRRGNKALKRALFLSAFAALRDPISRAYYTRKMSQGKRHNQALIALARRRCDVLFAMMRDGTFYTPQAS

SEQ ID NO: 192847 - protein, 403 aa, unidentified
MNSVGIDISKGRSTIAVMRPFGEVVISPFEVRHTGSELSKLARQLKSLDGETRVVMEATGNYHASVAKLLHDAGLYVSVVNAKLVHDYGNNELRRVKTDRKDAVKLANYGLDRWLTLPRYIPEEDTRLLLKNCYRQYRQYSKVQTVLKNNLISLLDTVFPNANRLFSSPIRGDGSEKWVDFVAEFWHCRCVSEKSERAFTSKYLRWCRKHGYNFSEAKAHTIYAEASGHIGVMPKSETTKLLVEQAVAQLRATSTALAALKLEMQTLASQLPEYPVVMDMFGVGPTLGPQLIAEIGDVRRFYSKKALVAYAGLDAPPNDSGDVTGRHKSMSKIGASSLRRTLFLVMSVYLQNAPLDEPVYQFMDRKRAEGKPYRVYMMASANKFLRIYYATVKAYLESLEHTA

SEQ ID NO: 192848 - protein, 338 aa, unidentified
MHTDQTVLTYTLFVGVDIAAETAMVATQRPGAKASRSFTIDQTPEGYTSLIHQLQATGSVPGQVLVVMEATGSYWISVATRLVHEGFVVSVINPAQAHHFAKALLKRAKTDAIDAQTLAQLAMILQPEPWTPPPQIYYALQQRLAQRDDLLNLRQQVRNQLHALVQHPEIIAEVRARMESLLATFEAQLTEVESEIMAALSQDSAWAAAATRLQSIKGVGWVTAAWTLVTTLNLTSCDTVDALTAYAGLAPMPRQSGSSVWHRPSIGHTGNGRLRTAFYMATLSAAQHNPVIKAFYTRLREVGKPEKVARCAAARKLLHIAWAVVKKDQPFDPNYALG

SEQ ID NO: 192849 - protein, 464 aa, unidentified
MADKKLWRNRKERKEWARRLQSEDPGLEVVHPHAAGIDVGNGVHYVAVRPDRDSQPVRRFECFTADLHRLADWLRSCGVKTVAMQSTGVYWIPIYEILEERGIQVYLVNARHTKNLPGRKSDVQESQWLLKLHTYGLLNNSFQPPSEIRVLRTYWRQRGEHVHGAATCVQRMQKALTQMNVQLANVISDVSGLTGQTIVRSIVAGEHDPRKLAELSDPRIQASHEEVAKSLEGNWRPELLFVLQQEVAMYDTYQQRIAECDQQLQKHLASFADTIPLQPTAEEPKRKKTKPAKNAPRFELRSELQRITGVDLTRIDGIDVMVAQTLVSEVGLDMSRWKTEAHFSSWLGLCPDNRTSGDKVLARGTRRVVNRAATALRMAAVTLMRSRTYLGAQYRRLRTKLGAPKAITAMAHRLARLVYRMMKYGQRYIDKGAEYYEHRYRRQQIEFLRKKAAKLGLQITLAQT

SEQ ID NO: 192850 - protein, 429 aa, unidentified
MSEEKAIELRVSVDVGSRRHSVAMGLSSGEVLEEFEIEHRPEGFAEFFSRIEKHQKTQSCAVAVAMEGYNGYARPLDSMVRQHGYRLYNLNNLKFARFKEIFPGGAKSDRIDARKGLELFQLSDHLPLAKEVLQEVKGTPQENEILKRLSRRRRRLVNERVRVVNGLQADLQAVCPGLLEITAEASNQWFLNFLLSAETLPQLSRLRRSTLMKILCVGVKCAAKIEEWQKRAHFSDEVKWVGEMIQEDARRCLELDEKIKRLRSKIAEVAKDSKIAKTLRSLPGFGAVCTSELAGEIGTVERFTSEGSLALYLGMATLDNSSGKYQGTKAPKQVNTRAKAAMMIGVDRHRKYVPESQRYYEKKRAEGKKHNQAIRALGRHLSRIIYRMLKEEREYEVRPEKGNTKTKVNSTAFVKTQIRRPKKSGKNKN

SEQ ID NO: 192851 - protein, 343 aa, unidentified
MEAYAGQQFVGIDLHRRRSVIVRTTDRGDPLETVRINNDVDSLTKVMARAGVSPEVVLEATYGWYWAADALADLGARVHLAHPLGVKGFAYRRVKNDVRDATDLADLLRMGRLPEAWIAPPATRELRELVRHRAKLVAIRSGCKCEIHAVLAKCGIQVLMSDLFAGPGTRLLEHLDLPAPYLARVGSLRRLIDDLDGEIDLFARLIRGRLAADPGYRAVQQIPGVGPTLGAVFVVEIGDVHRFPGPGQLASWAGLTPKHRESDTHVHRGRITKQGSRLVRWAAIESVQALGPGTGAGRLKHRVADRRGRNIGKTAAARQQLTYVYYAMRDGHVRSLHRSRVAA

SEQ ID NO: 192852 - protein, 409 aa, unidentified
MDVVNSRCAGLDVHQATVVATVRVPAENGGRQVVTQTFGTMTADLLALRDWLQAYGVTHVALESTGVYWKPVYYVLEDAFTLLLINMQELKHVPGRKTDVKDSEWLAQLLECGLLKASFVPPPEIRELRDLTRYRVQQVRGRSQEVNRLCKVLEDAGLKLTSVVTDIMGASGRAMLTALVKGTTDAAILADLAQGKLRKKLPELRRALQGRFRPHHSFLIELIFAKIDFLDETIQRLTAELDRRLVRFEPMLSALDTIAGVDRTTATVIVAETGGDMSRFPSAAHLCSWAAMCPGQNESAGKRRTGKTRKGNLYLRAALIQAALAATRKKNSALQARYHRVKRHRGHKKAVVAVGHQMLEIAYYVMRDGVSYQELGADYLDRRHADRAARRHVRQLEALGFQVAITKAA

SEQ ID NO: 192853 - protein, 358 aa, unidentified
MAVTEGTRRIVGGVDTHKDLHVAAVVDEQDRVMETRSFATTRQGYRQMLAWMRSFGELQRIGIESTGSYGAGLLRFMQQAGITVLEVTTPDKQDRRRRGKNDDLDAQNAAHAAFAGQRTVTPRSRDGMIESLRVLMACRKTAVSARRVALQMIHNTIVCAPDGLRDQLRSLTRMQLVRTLGSWRPDLTAYRDLESAYRIGLKSLGRRYLELHDEIADLDAMIAAIVDELAPNLIARNSIGHVGAAQLLLTAGGNPERLRSEASFASLCGVSPVPASSGKTVRHRLNRGGDRAANSALHIIAIGRLRTDQRTKDYVARRIAEGHSKLDAIRALKRYLAREVFTLITQRRREINATRIAA

SEQ ID NO: 192854 - protein, 348 aa, unidentified
MTSVAEHIDLVTGGIDTHKELNVAAVVDRVGRIMATKEFATTTDGHRALLRWFRGHGELARVGVEGTGAYGAGITRFLSAAGIEIVEVDRPNRQVRRRRGKSDTVDAEAAARAALNGEASGTPKTRAGEVEAIRALRVARRSALKARSQATNQLHALVLTAPDELRTRLRALPPAQLIAAAARLRSRSANPALAGNKTAMAAIARRCQFLTVEIEALDTELTELVGRVAPQLVTRLGVGTDTAGALLVAAGDNPQRLRSEASFAALCGVSPIEASSGQHQRHRLNRGGNREANNALWRIVLVRMAHDPRTRHYVARRTTEGRTKKEIMRCLKRYVAREIYADLLTPKK

SEQ ID NO: 192855 - protein, 377 aa, unidentified
MSKVLFVGLDVHAETIAVAVAEQGGEVRSLGTIPNRLESIRKMIHKLGPVKHLKACYEAGPTGYVLYWQLTQLGVECQVIAPSLVPTKAGDRVKTDRRDAQKLARCHRAGDLTAVWVPDAAQEALRDLVRAREAAKKDQLKARHRLGKFLLRHGRQRPEGVRAWTSKHREWIKSSVRFEQAALEATLADYLEEVDHVAARIVKLDQAIDEAIQQAPAEIRAVIEALQALRGVAQTTAASIVSELGSLSRFPTAPQLMGYSGLVASEHTTGNHVQRGGLTKTGNGHLRRVVVEAAWAYQHRPNVIGYLLRRQKDLAISDEVKGIAWKAQQRLHKRYKAMDARGKNKNQIVAALGRELLGFIWAIGVKAESQQRLGKVA

SEQ ID NO: 192856 - protein, 343 aa, unidentified
MQVSTIGLDLAKNVFQAHGVSAEGKVVLKKQLRRGQVLSTFAKLPPCLVGMEACAGAHYWARELRKLGHDVRLMPARDVKAYVKRDKTDAADAAAICEAVSRPSMRFVALKTPEQQGRLMQHRVRDLLLRQRTQTINALRAHMAELGLVAATGRQGLGLLLAILADARDARLPQDARASLKLLASQIAALQAQIDTLDKRLHAQHRQCPASRRLETIPGIGVIGATALAATITDPKAFKSGRDLAAFIGLVPRNNSSGGKQRLGPISKQGDRYLRRILVVGAHSILKQARARPDKHPWLARLMARKPGKLAAVALANKTARIAWAVLARGESYRAPTAPAAAG

SEQ ID NO: 192857 - protein, 338 aa, unidentified
MKTIKQVIGIDVSKDTFHVCFGSIDETQSIKIVKQSSFTNNEKGFKQLLSWKQKNLNSDIYLYYVMEATGVYYENLAYFLSEKGEHISVLLPNKSKSFSKSLDIKTKTDKVDAAMLCRIGLERVLPIWKIPTVLMKQIKSLCREYKSLKVDGAKIKVRLHAYKHSYKPEKRTISRLKQQLSLIEKQIMMVEKEIQCYIIKDEALQKRVNNIQQVKGLSMITIITVIAETNGFASITSAKQLTSYSGLDITMNQSGQFYGRTKISKKGNSHIRTALYLPAMSAVRYNIRLKQFYENIMQKHKCGKVGIVAVARKMLVLIYTLWKNETIYDPMLNVEKIY

SEQ ID NO: 192858 - protein, 387 aa, unidentified
MQKPHDNSKASPAAFMQDNTLIAVIELGLSNWLVAGLIPGVSREPLKKLEPNPEDLLKLLHGWRDEAIKAGRPITRIAVAYETGRDSFWLARWLRERGIDAHVIHATSVAVSREHRRAKTDRLDTAMLKRGFLGWLRGERGHCTVAIVPTMEEEDAKRPHREREGLVHEQTRVVNRMKSALIQFGVRNFNPKLRKARVKLETVRTPEGKSLPPNTIAALRRDMERLKIIKEQIKAIEQARLQQFEQQPVALANRMVYLLVRIYGLGWETADLLVHELLSRTLRDRKAVARYAGLTGSPDESGSKRREKGLSRSGNARVRKIMIQLAWRMVKFQPDSALVQWFKQRTENAKRSRKPMIVALARKLIIALWRYANDGVIPEGFRLHSAA

SEQ ID NO: 192859 - protein, 330 aa, unidentified
MQYLGIDISKNKFDCCIFLNNQKKKTKVFDNNHSGFIKLNEWLQKLEIEILELVAVMEATSIYHENLAYFLYSNNIKVCVANPARVRKFAAGISVLTKTDEVDAEVLVKYGELAPYNMWQPDSDQLRLLKQLILRRDAYTSELNREKNRLDQAYSNNTNSKLIEIIQVDIKNINNRIQYLDKLIDETIDDDISLKQDLCLLESIPAIGKRTALTLLTLFKGKTFTNAGQAAAFCGLVPLQKQSGSSIRGVSKISRSGSSKIRSKLYMAAVVAIRHNPHIKIVYDRLLRNGKAKMAALCAAMRKLIHIAFGVLKHQKPYNENLIGFAKIPC

SEQ ID NO: 192860 - protein, 494 aa, unidentified
MPELVNNSAVGHNGDGPFPVPPETRLSWTSPARVSRRSPTRAVADAPKAERTTPREGSCISSPGSRRPVPVRAARTMNADWTQHAYFAGLDWASDHHDVIVLDRTGAVQAEFRFAHTAAGWAEFTQKMQPYVGAPITLETSSGPAVDQLLQRGWTIYPVAPTAAAGYRGRKAPSGTKTDRHDTWALADALRTDGHAWRRLRPQDEATATLRALCRDEIALIEQRTALVNQLQAALREYYPAALEVFADWTKPHAWALILQFPTPGQLQGVGKRKWEKFLHVHRLWRPETAQERLRIFAAANALPASAAVTAAKSLLAVSLAKVLVTLQSQLDEYRRRITEAFRQHPDHDLFGSLPGAKDILAPRLLGEIGSVRAEYPDADALMCQAGVSPVGYQSGQINKCRLRQACNKVLRATIHLWANTSRLKCAWAEAYYAHKRAEGHSHASALRCLGKRWLKILWRLWQNRQTYDETKHLTQLEKRGALSWIKLAAAQTR

SEQ ID NO: 192861 - protein, 391 aa, unidentified
MSMYFLGIDISKYKHDCCIISAADQQVVSKFVIRNDKDGFNELLKTLNSLSSPKDIKIGFESTSHYALNLELFLEKAHHSFMEVNPVLISEYKKSTTLRRTKTDRVDCESIARWLMTVEYKPHPNGFYHAYSLKSLTRLRDRLIRQRSLYLVKLTNVLDHTFPEFKPFFGERFSKTAFYLLETYGTAEKMSRMNSASYEKIRVLSRGKFSPQQFLALKEMAANTVGVSNEIFETELTCLLTLYKGIAEQVDCLETKIVELISEIRPHYISIPGVGPISAAVIYAEFGDVSNFSSPAQMLAFAGLEPGVNDSGTESHGGRMVKRGSSHLRYVLMNCALPLIRFDITFATYYAKKRAEGKPHRVAMSHVAKKLVRVIFALERQKTDFVTAALH

SEQ ID NO: 192862 - protein, 360 aa, unidentified
MTKYTQAQMRELDTIGCDLGDRTSELFVLRPNESAWRPKAVKTTRDGFRNFFAGRKPAHVVLEVGTHSRWTSSLLQELGHVVTVANPRKVKLIAENDQKNDDVDAELLARLGRADVQLLSPIQHRGEGVQVDLAVPKARDALVRCRTRLINQARGLTKSIGFRLPTCDAEAFHRKTKEFVPEALAPALLPMYEVLEELAKRIAAFDKKIEELVETRYPDAELVTQPKGVGLLTGLVYILTLEDKSRFAKSRDVGPFIGLTPKKRKSGRADPQLHITKAGDEFLRRLLVQDANYILGPLCREDSDLRRWGLRLCERGGKAAKKRARCAVARKLSTLMHRLWVTGEVYQPLGYRQDRSRPAK

SEQ ID NO: 192863 - protein, 365 aa, unidentified
MKKIAYVGIDYHQNTLDIAVRVQDKKKIHDHIRIRNEDKIIRKYLKKLSEKFHIRACYEASCSGYYFQRKMKSWGYHCEVIAPSSLPKRRGDRRKNDFRDAINLAQNYANETLSIVHLPTEEEESVRSLIRCRMAFKDNEKRAKRHINSLLLSQGITWPQSKWTVRHLQWLWGLKMPNEYLQMVLDEHLSNLDYLQSRVKYLDQKIEQIASSDLYAPAVKKLRAFKGIGTLSAMLFIGEITDFRRFPNPRALMAFLGLIPSEHSSGNKQRGGPITKTGNPRCRTQLIESVQHYVKKPQISYKMKADLAQVDPRSAEIATKCLKRLHKRYWALTSKGKIRSVAITAIARELVGFIWAMMQPKAVHT

SEQ ID NO: 192864 - protein, 350 aa, unidentified
MERRRLWVGLDVSEASTQICVLGADELPLFEGATGSSAVAILEELSRFEPDEIQAVAMETGAAHTLARHLKEAGCAVLLLDAGKVSRFLSISLHKTDGNDARGIAEIARIGRHSHLTAQIRGVECQQIRDQLVIRSQLIRQRTASRNALRSMLRNQGSQIRQITSGKAFRSRVEEEILTISSFVGSDAIAGIRSLLDLCEAQSNFIQQADKRLARLSDEIPVVQRFRTIPGVGPICAISFYSAIGDPDRFRHNASVGAYLGMVPRIKQSGVASWRSGISKAGDALTRGHLVMSAGVLISRAAGESALRDWGIGLTAKIGYKRARMAVARKLAIAMLSIWKSGSDFCAFPK

SEQ ID NO: 192865 - protein, 353 aa, unidentified
MSYRIYYVGLDVHKAMTVMVVLNAQGKQVCRSVLETKAAIIINSIRGLIGEIHLTFEEGIHSAWLYDMLKPYVAELMVCNPREIKKTSGSNKSDDFDAFNLADSLRLNALKPVYHGEHGLKLLKELARAYLNLVADCTRVKNRITAIFRSRAISYSGSELYRPENRAYWCSQLEPDYQCRANILFTQLDALLPLREQTEKAMIKEAQKHPAFALIKSVPYLGDVRASIILAVMMTPFRFRTKRQIWNYSGFAIVTSSSADYEQVNGTIIKTRRHTFIRGLNQNFNRSLKMVFKSAALAANNGVFKHYFDSLLAKGMKANMARLTLARKIAAVTLTIWKKGELFNPDKFLQTTV

SEQ ID NO: 192866 - protein, 520 aa, unidentified
MMDPRPGDVIAGVDTHTDTHHCAIIDHLGRPLADREFPTTATGYDDLAAWTATHGHPIAVAMEGTGSYGAELTRRLTAAGHTALEVNRPDRSARRRHGKSDPLDAYAAARAALADHARAAPKDRTGTAGALRPLHHLRTMPVGQRTQTINQIHALITTTGQDLRALLRGLSTTRLIRACADLEPHAADPAELADPDAAARYSLAALARHYQDLTRRITEIARHIDHLTATAAPGLRALVCVGPQSAAQLMLTTGDNPDRITGEAAFAHLCGTAPVPASSGRRDRHRLNRGGDRAANKVLHQIVIARMRHDGDTRAYVQRRLKQGLTKKDIIRCLKRYVARQVYKALTRTGHQRRHLYPSRLTNRSIDGGSGAGPVVVGSGARRWRLRRGRRSAAAGRSARLGPSIANLWSQESTSRGHKFTIIAGWTGIPDIPAPVGRRGVAVLWPGPRRLDGRAVWRGRGCSRGSGVRRIGGRGRRHVARCARARPRGVAPPDGVGFWGSMPVLRAASAGAAATRRTKS

SEQ ID NO: 192867 - protein, 344 aa, unidentified
MKISTVGVDLAKNVFQVHAVGETGEVVVRRALRRRQVIPFFRKLEPCLIGIEACGTSHFWARELSDLGHRVKLMPPVYVQAYVKRGKTDAGDAEAICEAVTRPTMRFVAIKSPEQQAILALHRTRDLLVRQRTQLVNMIRAQLAEFGIVLAKGIQHALRFVEQLVEGAVPNIPSLAIKVVVTLAEQLGDLQVRIGELEKELKTWARDNAVVKRLRTIPGVGILTASALAASVTDPHQFTSGRQFAAWLGLTPRANSSGGKARMGRISKMGDSYLRRLLVNGMTAQSQSVRRNPGSDAWATKLLREKPAKLVAVAMANKAARIAWVVMTRDEIYRAPKHAAEGAA

SEQ ID NO: 192868 - protein, 447 aa, unidentified
MTKKNVSMEVINPNAAGIDIGSRSHYVAIGQGDEDVKEFGVYNEDLQALSQWLLDNEIKTVAMESTGTYWQNLYAVLQSSGLEVILCNGKFTKNIKGRKSDVQDCQWIQKLHTLGLLSGSFLPDEATEHLRTYCRHRSNLLEQAADTTRKMQKYLRLLNLRLDVVVKDVTGLTGLSIIEAICKGEINPGTLASLRNGNCKKSEAEIAKALQNNGRKDYLFALKHEYQMYLNFQSKIKECDVEIEKMLNEQINIDDNKKQHYIDKKVHKRVNKNTPKNIDINLLSYQYFEGVDLLAIEGVSYSTVLTLISEVGTGIHKFQSAKQFTSWLRLSPNNKISGGKVLSNRIPKGSNRLKIALRNAANSIGNLKDTALSNFFKRIAFRKGRVSAISATARKLAIIIWNMIVKRVPYKPETEYQFLDQKRKKITQMKKLITKFDITINDLSFQL

SEQ ID NO: 192869 - protein, 457 aa, unidentified
MESQIHSVFNEVQRNVAGIDLAGRSDHYVCGPRRDDGSYEIVAFGTTTSELHRMLKWLKEREVVSVAMESTSVYWIPLTDLLESNNIEVVLVDSREVRMIPCRKSDVQDCQWLQRLHSYGLLRGAFRPSEDIVAIRTIIREKETFLVMRTQSIQQMQKSLDQMNIRVHHAVSDIDGMTGLAIIEAIVKGERNPAILASLRDKRCKKSVQEIAEHLTGTWRSEHLFNLEQAFNTFKFLDEKISVYDSKISVLFASLTKDSYQSDEQLSPPSSFPSKKQTTKERKHTIDKANLQKIMNFDMTTIPGIDYDTAKIVVSEIGNKYDRFPDEHHFVSYIGLAPSLGKSAGKNVRQKKRSKNTSRAGRALRMAAASLWRSKSALGSFFRNVARRSDKKTAIMATARRIAQMIYRGVRYGKEFIDIGAEAYENRMREKSLKNFKNIIKTFKISALEIEEILAGI

SEQ ID NO: 192870 - protein, 348 aa, unidentified
MTSLAEQIRPVTVGVDTHRDFHVVGVIDARGVEIAAQSFPAEAAGYAALESWAQSLGPVACFGVEGTGSWGAGLARHLVGRGQAVVEVNRSDRSERRRVGKDDTIDAYAAARAAQSGRARAVPKTQDGPVEALRALKVARNGAVKAKTQAANQLKNLVATAPDALRAELRGLSTLNLARRCAASRPRPGADPLNATRRALRSIARRWLDLDHEATELYAEIKALTDQTAPGLVAMTGIGPDIAAQLLLTAGDNPHRLHTEAGFARLCGVAPIPATSGQTIKVRLHRGGDRAANAALHRAVIVRLNHDPETKAYMQRRLAEGKPKLEIIRCLKRYLARRVYHQLLALDI

SEQ ID NO: 192871 - protein, 391 aa, unidentified
MRFAGIDVGSEHHTIAIVDEHGDPIQRALSITEDADGYRRLRDVLGDPTDCLVAMEAPGHYWRNLFASLTTDGFTIALLNPIRTRRFAEEELQRTKTDNVDALGIARFAAQKRPKATQPPHQATQELRQLVHLRRQAIQHLGDRVRNLHRAIDLTFPEFTRYVRGLDTELANAILSRYPSALSLAAVTVTKLAKLCFDGRRRVGPTLARALIAAAKQSVGSLQTAPFELEVRYACQDICEMRERCRQLEGDIQRRIDSHDLGKLFTTIKGISTLTAAAIIAEAGDPARFPNAATFASYVGVVPRLHHSGKRKFSGNGAIPLGNARLRHALWMPVLVAIRVNPWLRAYYQRLRAVGKRPKVAIVACMHKLLAAVYSVAKNRRPFVPRLSADL

SEQ ID NO: 192872 - protein, 488 aa, unidentified
MSDRKTKAPPPRPRPPDDLRRAARRAALDRRHAEDCARIAALPVRHEHAAGIDAGDASPWACVDATPDGSDRVREFPAHTAGLRQLVAWLQFCGVTTAALEATGAYGHVLFLTLLEAGLATIMIPPQFARQIKGRPRTDRRDCQWIQRLHSHGLLPGVSQPDAATQALRGYVRQRANLVRPSGQHIQRMQKALELMNLKLTKVLGDVTGVTGLKVVRAILAGQRDPQQLARLRDRRCGHTAAEMAQALDGRYRPEHLLELRCNLTMWEKYQEVIAVVDTAIAAQLRSMRRQAELPPLPPRIRVRGRKAHDPGFDVRTALYYATGVDLTAIEGIDEVHALTLVSELGTDLSKWPTVKQFTSWLGLCPNWKKTGGKVQSSQTRRGKNRAARALRLAAWCLMRSQSYLGAYLRRQRSRLGAPKAITALAHKLARIVYNLLRYGVAYVRQTEAADAEQVRARLEKQLRRRAAELGFTVQPLAAPVPPAVEEQ

SEQ ID NO: 192873 - protein, 347 aa, unidentified
MKHSAGLDVSVKETAICIVDEVGKVVRETKVVTEPESIIALLNSAGLEYERIGLEAGPLSQWLVNGLAEAGLPVICVETRHMKAVLKAQQVNKSDRNDARGIAQMMRVGLYKSVHVKTLASQQDRMLLTTRKLLRDKLQDMENELRGTLRNFGLKVGAVSPGRFEARIRELVAGHLRLEMIVTPLLAVRRVLREQLAKLHKMVLDQVRGDPLCRRLMTVPGVGPVVALTFRATVDQAQRFVRSKTLGAHFGLAPRRFQSGEVDYDGRVSKCGDAMMRTALYEAAQVLLTRTQKWSWLKAWGMQVARRRGAKKAIVALARRLAVVMHRMWIDGTEFRWRKETDAAAAA

SEQ ID NO: 192874 - protein, 355 aa, unidentified
MSLSSWLVAGIVPGVERQPLKKLAVDESALLKLLHRWREEAEKAGRRIERIAVAFEAGRDGFWLARWLKARGIEAYVIHASSVAVSREHRRAKTDRLDTELLKRSFLGWLRGERDHCKMVEIPTMQDEDAKRPNREHDSLIGERSRIVNRMKAALVRLGIRGFNPKLKRATTRLDGLHTPEGEPIPPNALAELRRDMERRRLVNNQIRQIEEERLERIEQAPCDGAHVMVMGVGIETADMLVHEVLSRNMRDRRAVARYAGLTGSPDESGRKRREKGLARSGNARVRRGMIQLAWRFLLHQKNSALTKWFRSRTENARGTRKPMIVALARKLLIALWRLMREGIVPDGVVLRPAQ

SEQ ID NO: 192875 - protein, 345 aa, unidentified
MFYVGVDLHKSFTQVYGFNDATGEVVERRVSNDKGSIRAVMSQFGENAKVVLEATRNWYWFVDLLQEMGIDVVLSNPLQTKAIAYAKVKTDKVDARMLSHLLRADLIPFAWIPSMEERGIREMLRTRLTLVRIRARFKNLVRSILAKLNIVLSHGDIWRGKGRKELEQLNLPSPYNEILPHYLSIIDNLDKYIEEWNRKIERIAKETPEAFLLKSVPGIGTISALTILYETGPIDRFPSAKRYSSYAGLVPRVKGSGGKFKTGHLSRQANMYLKWIYVEIATGIVRIGKGYLYEYYKKQMYKKGKNVAKIALARKISRMVYHLLKQHITYDTFVERNVNKMRRTG

SEQ ID NO: 192876 - protein, 309 aa, unidentified
MKEELVYLGVDIAKSYLDAAIGNEKRRFANERIGHRELIKWVKQLKVPVQVICESSGGYERALVQALVGAQLKVSLVQANRVRQFARAAGILAKTDRIDAKLLCHFAKAMQPGTISASELEQEHLRELESQRRHLTHLLVMEQNRAARASDGGVRRLNRSLLNQIKKQIEQLDLLIKEHIEASPELSAKAQKLTAINGVGARTAALLLAQMPELGQLNRREVAALVGVAPFNRDSGKMRGKRAIYGGRRPVRHGLYMAALVAARHNPTLRSFYLRLRAAGKPAKVALTATMRKLVIVLNSALKPELNYA

SEQ ID NO: 192877 - protein, 333 aa, unidentified
MKIKDTVGIDVSKKTIDVVLHLLGTHKQFENNHGGFNQMLKWIIKLTPLNLDEILFCFEHTGIYSMALASYLQEKKINYVIESGLAIKKSGGLEFSRGKNDKVDAKRIAHYAYLRRSELKQVDLPSKNVFRLKNLLTLRERMVVERAAYRTQTKEFKNILPKGVNRVFFDVQDKMIKVLEKQILKLETEIKLIVHEDLRLKELYELITTVKGVGFVLGVNLIVVTNCFTRFENSRKFACYSGIAPFETQSGTSINKRSKISHYANKKIKKLIHMAALSAIRHDPEMKLYYHNRVEKGKGKMSTINIVRNKIIGRVFAVVKRGTPFVAIMQYAK

SEQ ID NO: 192878 - protein, 313 aa, unidentified
MRPSNIYVGIDVAKERLDVAPRPVGAGWQVANDERGVVELVARLDQLRPALVVLEATGGMELPLVGALAAAGLPVVVINPRQAREFAKATGRLAKTDAIDAQVLAHFAEAVRPRLRPLADAAAQELSALMTRRRQLIEMLTAERNRLRTAAPAVRPDIQEHIRWLERRLADLDGDLSQTIRSSDIWREKDDLLQSAPGVGPVVSTTLLADLPELGALNRKEIAALVGVAPLNRDSGTLRGRRTVWGGRSKVRSALYMATLVATQRNPVIRIFYQRLLSAGKPKKVALTACMRKLLTILNAMIRSRTPWPAHAI

SEQ ID NO: 192879 - protein, 377 aa, unidentified
MSKIRFVGLDVHAETIAVAVAETGGEVRSHGVIPNRLESVRKLIGKLGPVGALKACYEAGPTGYVLYWQLTQLGVACEVIAPSLIPTKAGDRVKTDRRDAEKLARCYRAGELTAVWVPDAAHEALRDLVRAREAAKKDQLKARHRLGKFLLRHGRRPEGLKAWTKKYLEWIKTHVHFDQAALEVTLADYLEEVDHVAARIVKLEKAIDEAVRQAPPEIRAVIEALQALRGVAQTTAATIVSELGSVSRFQSPRQLMGYSGLVAREHSSGNRVRHGGITKTGNSHLRRVLVEAAWAYQHRPNVTGFLLRRQKNLALSDEVKKIAWKAQQRLHKRYQAFAARDKNKNQIVTALGRELLGFIWAIAVHIEGQQKQLRKIA

SEQ ID NO: 192880 - protein, 361 aa, unidentified
MQSTTIIAFDQHAATTVAAVLLPQHRTPALHSLSSDIPTIQRFVARVKCQGAVSCCYEAGPCGFELQRALTARQIPCDVIAPALIPRRAGDRIKTDRRDAGQLAVLYRAGALTAIHIPSEEEEAARDLLRCREDIRADLLRARHRLSKFLLRHGRRFTATKKQWSKRHDAWLRAQTWSLSALDQTHRAYLRAVDEVVARLRDVEVQLHDLLTLEPLRPRVQRLRCFRGIDDLTALTIAAELGDPRRFASAPRLMAYVGLVPSERSSGTKRAQGGITKTGNAHLRRVLIESAWHYRHHPFVSAGLRTRQRGAPATVIAHAWTAQQRLHRRYARFAARGKRKQHIVTAVARELTGFVWAVLTQ

SEQ ID NO: 192881 - protein, 462 aa, unidentified
MTKRRKKAKSRSFQITKLPAQLQHINLNAAGIDIGSERHLVAVPEGRDEVSVREFGTFTVDLEALAAWLKTCGVTTVAMESTGVYWIPLFELLERRGFEVKLVDARHVKNVSGRKSDVLDCQWLQQLHTYGLLAGAFRPPDEVCVLRSYLRQREMLRQVASQHIQHMQKALQQMNLLLHNVVSDITGVTGMKIIKAILAGERDPRVLASNRDNRCKQSSATIAKSLVGNYRAEHLFALRQALDLYEVYQAKIADCDEAIIKQLEKKPDVSDDQPPSGDSYVQARDRVRGGIDVRELLFKKSGVDLFAIPGLAADHLLTLASEVGFDMSPWKTEKHFSSWLGVCPGTKRSGGKTLDSKTKRNPNRAAQAFRMAAASLSRSRTALGAFYRRLKARRSGAQAVTATAHKLARIYYAMLTKGANYIELGQQAYEQRYKERRIAHLKIQAKSLGFQLVACTANESSF

SEQ ID NO: 192882 - protein, 326 aa, unidentified
MAGAPELIFVGIDVSKATLEVALNDRDKTQTFSNDEPGLKSLLAMLTEMRERVGVVLLEATGGLEQPAAAMLCAHGLAVMVINPRQAHDFAKAMGYLAKTDRTDAKMLSQFARTLHASDRRERLLYKLPTDAQETLLAMVTRRSQLVAMRVAEHNRLASMHASQRKSIRTILKMLDHQIGKIDDDAGGFLKEHFKDKLELLKGLKGVGPGTQAMLMAALPELGQLKRREIAKLVGVAPLNNDSGTFKGRRSTWGGRANVRSALYMASLSAVRYDPVLRSFYERLVQAGKPKKVALTACMHKLLTIINAVIKSGTAWQPSYPQPALA

SEQ ID NO: 192883 - protein, 343 aa, unidentified
MELYVGLDVSLKETSICVVDRNGAVIAEGVAKSDPAALAEYIASEAFGALRIGLESGPTSTWLWHELKALDLPVICIDARHAKAALAMQINKTDRNDAIGIARIMQTGWYREVQVKRLSCHEVRAALNSRALFVRMKRDTENQIRGLLKNFGLIVGKVGRSVFPTRVRELLNERPILERAVLPLLDLREQLKTEVAEFDRMLLKLARDNDVAHRLTTVPGVGPITALTFISTIDDPTRFGRSRSVGAYIGLTPKRYASGEIDRNGRISKCGDGMLRSYLFEAAGVLLTRVPKWCAIKAWGVRLAKRIGFKKAKIAVARKLAVIMHRMWCDGTDFRWTSKEVSA

SEQ ID NO: 192884 - protein, 398 aa, unidentified
MDLPVYYELETNNGNRDYRIQIGGHYMNYNTVYVGMDVHKESFTLCSCKYEDEKASHYQRTPASYKNVLRYLAFLRTIYGEYTRFVCGYEAGCLGYSLYHQLENFNVECVILAPTTMLEQRSKRRIKTDKRDAEIIARSLAQHNYSPVHIPTETDNQTKEFIRMRDDHKAELKKIKQQILSFCLRQGYQYDGSGNWTAKHVKWLRSLKPAGLYKEILDEYLLTYTILTDKLNRLDQRIEELASKEEYKESVSKLTCFLGIKIHTALSVIVEVGDFQRFVSARKFAGYLGLVPGQHSSGDDRNGLGITKAGNTHVRRLLVESAQSYTRGKIGYKSRVLRSRQAGNSPQIINYADRANERLRRRYYQMVLKDGKKYNIAKIAVARELACFIWGMMTDNIY

SEQ ID NO: 192885 - protein, 486 aa, unidentified
MPSPPSKGKGQPSITLHRYGVGVDCHSRFFQVCALIPDGTEIVQIERKVPALWTELRAAKAWLLHTLREHGIDVSPSDLRYTCESTGQYHMPLCLAWKGHPAIINPSDTGHVRRKTDRLDARKLAQHSVHGLWRESWMAPDEIQELRVLSNQRAKLVAERSRLSNRINSDMLRFGHMVGQLGKINGPVVRALIEDFCTNGCVAIHHDHFSDIRIPAGVVRVFDQRWKRIDALDQEIKTIEELCIKQVDDLTWRIGAGRTSCGRPLRSNLESIPGVGTQTVIIWLGEIGDITRFDSVNKLLAYAGLDPSDEISAGKVTGAKTRKGNARLHGALRNAARAMLSRVPSCKFSMWARGYMGRHSRAGKSKAVHALARRVGKALYYCHLRNEPFDDSGYQALLSESSYPFCPVEEMGLSPGVVEKLKGNGLHTSRQVVDAFYSDLGRRPGCGKVTVQAVAAWINGHAKRSQDRAQKPKGAAAPETLPAAEA

SEQ ID NO: 192886 - protein, 435 aa, unidentified
MEEVEDEPLFCDRVAGIDIGKATVMVTIRVPSEARAKGRQQETREFGTTRRELLALADWLRCWQVERAGMEATSDYWKPVLFTLEQEGFDCLLYQASQVKALPGRPKTDKLDSVWLARITEQGSLAGSFVPPEEIRRLRTHTRCRRKLVQMRTAQKERCEKLLEDAHLKLSSVISDIHGVSGRDMLRAIAAGERNPKVLAQMARGVMRSKIARLEQALDCSFFTGEHAFILTMMLDSIDSLTAQAGVLDARIADMCQPYQRQLEQLDEIPGFGTTTAQDLIAEIGTDMNVFPTAGHLASYARQAPRVKESAGKRKGKNATGRGNPYIGGALGEASISAGRTQTFLGEKYRRLTRRMPKRKAQVAIMRSQLVIAHALLSDPDARYQDLGPDYYERKADIRRRARNHARALERLGYKVTLEAIDPGTGELHLVATAG

SEQ ID NO: 192887 - protein, 391 aa, unidentified
MTQSAMAGRSTKAFDADATLVVVVEMSRSVWLVAGLLPGIERRPLKKMTPDENELALLLGRWRGEVAATGRCVRRVVVAYEAGRDGFWLARWLRAQEVECEVIHASSIAVSRDRKRAKTDRLDTALLMRALLGWLRGEQGHCTMVSVLSIEEEDAKRPTRERENLVGERTRLINRMKGAMARLGIRGFNPALRKAEGELEDIRTPEGTKLPPNTLAELRRDTARLRIIEGQIREIEQGRRERLEAAGSSEADAMVSNLTRVVGLGLETADMLVHEILLRNLRDRRAVARYAGLTGSPNESGAKRRERGLSRAGNARVRRGMVHLAWRFLVFQKDSALVRWFRQRTADGRVRTKMAMVVALARKLLVALWRMARTGEVPEGVRLRPMAPVIA

SEQ ID NO: 192888 - protein, 372 aa, unidentified
MSQRVLFFQSFVGVDLHKHTVTLAAVAPDGTLIGRVTLSTKCRDKIAAWLLALPRPSHMAVETVGFVEWFIDCFRGCVDRIDIADATELANRRGKRRKNDPNDARDIAARLARGECPLGYIADDELMQLRKLGRHWRQLSTVMARAKQYMKSMLLAANLRGPKFDGASAQRWLLAHGRRLKPVQRRAFANFVQIVQLIELQRQPLRWSIIEAGRSERFAPIMKTLQSVPGIGEIWSCIIAAEIGPFDRFPNADALEFWAGMTADLKESAGRTQSGHITKAGSRTLRWALCNAALTLCHSDAKQEAIRQRLIRKTGGIKGKANTAMGRRLLRLLYAMFRDGKTYQPGPSRRRNAAANKARAGKRTRQKRKEAA

SEQ ID NO: 192889 - protein, 315 aa, unidentified
METGPVYVGIDVSKVQLDVAERPSGERVVIPHTEEGIAALVAQLRIRRPACVVLEATGGLQVPLASALAVGGIPVAVVNPRQVRDFAKATGQLAKTDAIDAQVLARFADAVRPTPRPLPDEATQQLGALLTRRRQLIEMLVAEQQRMQRAPHPIQRQIQAHLTWLKQQLAGLDEDLTHRIQATPLWREHEDLLRSVPGIGPVVSRTLLAELPELGTLTHKQIAALVGVAPLNRDSGTLRGRRMIWGGRAVVRSVLYMSAVVAARHNPLIKAFYQRLRAAGKAPKVALVACMHKLLTILNAMVKHRTPWRLSTQGT

SEQ ID NO: 192890 - protein, 373 aa, unidentified
MENSITYVAMDTHKKQHSIALVYPNNEQVIEFSVKNTPAEIKKMVRKIKGNAPGQVKFCYEAGVCGFTLQRRIEALGCKCNVIAPSLTPRKPGERIKTDRRDAKRLLGMFMADMLTEVYPPDEQQEAARELTRCREAAQENLKRIRHQLQKLLVRHGYVFTDGQHWTQKHLRWLEIVEFDQPLLREVFDCYFTEMRHCLQRVKTLDKELEKLAQSDAYREVTGILRCFYGVKTLTAMSIIAEVFDFGRFASARDFMSYLGLTPSESSSGEKQHKGSITKTGNKRARRLLTEAAWHYRHAYTVSKTLNERREGQPQWAIDIADRAGLRLRKRYHRLVNRGKLPCKAVVAVARELAGFIWSVLIEYQARKKRKAA

SEQ ID NO: 192891 - protein, 350 aa, unidentified
MKIVGCDFHPSYQQVAILDTETGEVQEKKLIHASGEAEKFYRELPAPALVGMEATGNSRWFELLLEKLGHELWIGDAARIRASYVRKQKTDKRDAGHILTLLTEKRFPRIWVADAQQRDIRQLLTHRHKLVGVRTRLKTELQHLALNQGVQKKRQLWNEKGRALLESLSLEGWTQQRRKDLLQLLAVVEPQIEHLDKAVEQAAKANPQAVLLMSQPGVGPITSLAFAVTIGEVSRFPHSKQVASYLGLIPSEHSSGSKRRLGSISKQGNVFLRTLLVESAQSAVRHDPGFRKEYQHRCHHKAKGIAKVAAARKLAVRLYWMLKSNKPYPEVLLIGGSPRHPVAARAKPTA

SEQ ID NO: 192892 - protein, 432 aa, unidentified
MGKRKYRAVQVNQVEVAPLSEALGAGRVVVSIDVAKEDFFAAVQDQEQRVHVTVKWKHPDTSWAFIGFLEELRCHGHEIEVVMEPSGTYGDPVRVKLLGRGFPVFRVNPKRSHDAAEVYDGVPSLHDAKSAAIIGKLHLDGASESWPLTSAEERQLSAALRVLEVHQKAFQRNRNRLEGLLARHWPELPRILDLGSATLLELLMAFGGPEAVSRNPEQANELMRRVGGQFLDPAKVERVIESARSTFGVAQIEEEAELLKIVAGEARRAQKLASQAKRRVERLTQELEPTKAMAPVVGKTTAAVMVAAVGDPRNYDSAAAYLKSVGLNLKEKSSGKQQGGLHITKRGPGIARMFLYLAVLRLIQSDVVIRAWYAKKVKRQGGQMKSKAVVAIMRKLVLALWHVGRGSEFDSSLLYDTSRLNLAVAPISVGLA

SEQ ID NO: 192893 - protein, 348 aa, unidentified
MKNKSFVGIDISKNVIDVSIFREDTNIKMFPHEVFNNTRKGFGDMCSWLKKSRVVLSQALFGMEFTGCYSLDLEKFLTSKNYSFCMLSTRIVKHHPMGTIDKRDKNDSAKIADFLYRYDGTECAKPYKLPSKAMQQLKQLVNERKFLVEQRTNFMNRMQMFETKEDSAMYESYIKKLNHDIEKIDQEECELMAKEEDVFDTFQNLLTIPGIGFVNATNIIAITRNFTAFDTARQYARYVGVAPCSHTSGTSVKWRARPSAHCNGQVKADLSMAALRAVEYDVEMQMFYNRKLGGRKDSDTKRKALNAVKFKLICRMFAIGKQKRKWEVLNTSDDRKNLHIEKSKASEL

SEQ ID NO: 192894 - protein, 316 aa, unidentified
MVPSPLFVGIDVAKATLDIAVRPTAETWSASNDATGIDALVLRLGALAPILIVLEATGGYQGPLVAALVAAALPVVVVNPRHIRAFAQAVGILAKTDRIDARVIAHFAEAVKPAPRPLPDAETQELRALLVRRRQLVEMVSAERARLDTVPPSIQDAIQAHIAWLTTQIAGLDDALTRASQTHPVWQAKDDVLQSIPGVGPVLARTMLGQVPELGTLGPKPLAALIGVAPFNRDSGTLRGRRTVYGGRAEVRAVLYMGALVATRHNPVIKTFYERLLAAGKAKKVALTACMHKLLTIMNAMVRDLKPWQPQEVPSA

SEQ ID NO: 192895 - protein, 390 aa, unidentified
MDRRRYNVCCGADIHKKFLIATILLQDGTKLTKRFSMDLKSLFEFRDWVIANRCEVVAVESTGSYWVPIYRVLEGHVELIVANAYRIKNVPGRKTDTIDSEWIAELCLNGQIKPSRIFPKDARDLRSLTRARERYVDDKTRVKNRIHHILDSNCIRISSVLSNIFGKAGRYVLNCLLEGVNIDEIIEGIPVTRIKKKSDQIREAIAGQLSGTDVILIRGYLDQIDAIQKNIEDLESEIRRRIAPLRKNLAIVMSVPGIGFISAAVILAEIGDCNDFDKAEQLAAWCGLVPSVYNSADKNYTGSITKQGSRHIRRILVEVAHVIARTKGKSKLKSFFLRIQAKKGTNIAAVALARKVLCIVHHLLTVQEMYHEEEREKDDDAHIPQVAVST

SEQ ID NO: 192896 - protein, 413 aa, unidentified
MDNAAYYVAGIDVHKKMLAVVIANARNRELQFECRRFGTTVCELQKLSTWLQEHAVQEVVMESTAQYWKPVWFVLEGQFQLWLAQARSNRGPRGRKTDFRDAKRSVSRLLSDDLILSYVPDAEQRGWRTLTRTKYQLRRDRVRLQSQLESLLEECQIKLSSVVSDLLGASGQRILCAIANGETDPARLRALGDKRLHATDEELRDALNGQPQPLHRRLLKLYLERLNLIEGQIAELERMIAEAMKAHQDAVVRLSELPGLGVDSAQQIIAEIGPRAESFPSAGQLASWVGVCPGLQESAGESSSNRSAQGNRAMRRLLNQLAHAAVRKRDCYLQILFKRLSPRLGYAKAVWAIAHRLCRLIWKLLHEGVHYVERGPSVSALTLKRRKQRLVTQLAKLGYSVQLTPILVPGPGS

SEQ ID NO: 192897 - protein, 388 aa, unidentified
MWEATVRSWADCLNAKSGRSTRCYKKLNSAPKLIQRTTSEAPQRHMYFIGLDVHKKTISYCVKDAAGRVHQEGKIGSTRRELDGWIRTMPQPRTIAMEATIFTGWIYDHLLPHAERLKVAHPLMLRAIAASKKKNDRIDAGKIADCVRCDFLPECHMASTEIRDRRRTLRYRNLVIKQMVQMKNRISGLLMETGVSYNKQRLHKVGYFAELMTTNKEVHESIRPLLKLSRDMISRSQKLDYALVSSLQRDPVLKERLRRLRTVPGVGPITALTWALEIGDYTRFPSIKQAISYCGLCGDEKSSAEKVMRMPISKQRNKHIQRVLIEAAKLAPSESPELALTHARELEKGNRNRATLAVARKMVSYMLAVERRQQDFVPAEEFRSSIAV

SEQ ID NO: 192898 - protein, 482 aa, unidentified
MKPKQQEETRKATCRPTQGHWHQMNRKQRREMMRRIQSENLSLEVIHPDAAGIDIGNESHYVAVPPTRDSEPVRRFGCTTAELKSMADWLKQCRIRTVAMQSTGVYWIAVFDILEEAGFEVYLVNARETKNLPGRKSDVQESQWLMKLHTYGLLRNSFRPSQEIRTMRTYWRQRNDLVQGAARHVHRIQKALTQMNVQLANVLTDVSGITGQATIKAILAGERDPHKLAAFRDPRVKATEEEIARSLEGNWQEDLVFVLQQEQDAYEFCQKQMAECDRRLQDYLQQRKDRSAGADLPEEKRKTRLKNKKGNKPQFDSRRELFRMTGADLTRIDGIDVMTAMTIISEAGWDMSKWKTDGHFVSWLRLCPDNKISGDKLIGKGRLPSNNRVTIALKMAASSLRTSHSYLGAQFRRLKTRLGAPVAIKAMAAKLARLVYRMLSHGMQFIDRGADFYEAQHRHRQINALKWKAARLGLQIIEAPAA

SEQ ID NO: 192899 - protein, 465 aa, unidentified
MPENRKKTDQGDSQMEAEGLPVVRANVAGIDLGSKQHWVCAPKPGGQGREVKSFGATTPELERMAAWLKERNVASVAMESTGVYWIAPHEVLERHGLEVVLVDTRQLARVPGRKKSDPVDCQWIQRLHSCGLLMGAFRPVEQVCMLRTLVRDKAVLVAETGDWLRRMQKSLDQMNVRVHRAVSDIDGVTGMAMVRAIVGGERDARQLAKFRDPHCHQSEEAMAEQLSGHWRADHLFTLEQTLKMYDAIPERIAAYEQEIMRKLAELEREECRGKEAPKLNNPNKAKAIKKRGEEPLRQALYRTSGVDLTGIDAIGVETVLLVQSEYGTDLSMFPTEKQFVSHLTLAPHKPTSGGKPVKKQKKKRGSASSRVAAGLRMAALSLRNSKTALGAHYRHIAARKDGDVAVFALARKLATLIYRLLRWGQPYLDEGAAAYEKRYQEGRLKRLTATAKDLGYQLTPKAVTA

SEQ ID NO: 192900 - protein, 456 aa, unidentified
MTKHKRQKSPAEQQLPAQLHAVNVHAAGIDVGAEAHWVAVPVEADPQPVRAFPAHTASLHALAAWLTLCGITTVALESTGVYWIPLFELLETQGFEVILVDPGTMPKNGRPKTDVHDCQWLQRLHTLGLLSAAFRPDDPVVVLRSSLRLRLTLLAAAARHIQHMQKALTQMHITLQHVVSDIPGVTGLRIIKAMLNGERDPRRLATLRDQRGKENEATIAQALHGTWREEHLFALHQAVAASEFCHQQIQECDAKIAAQLQTFEDRSKGEILPPKARKRHRNRFSFETRPLLHRMTGVDLTKIEGIDETTALIVLGEIGLDMSRWPSEKQFTSWLGLSPRVRVSGGRVLSSRTRPTANRAAAALRLAAASLHHAKSALGAFFRRMKARLGTPKAITATAHKLARLIYAMLKHGTAYVAGSMAEYEQKYRQRMMHTLSRKARELGYELHPVLGGPPA

SEQ ID NO: 192901 - protein, 341 aa, unidentified
MYYAGLDVASKESFLYVQDRRGRKIESRPLLTTKLVIEEAFKRYDSRQAEVAIEAGGSTRWIYDTLKGIGVRAYVVNPNKVKAIAESKRKTDKIDAKLLSDLLRLGALPQEVIMAEGETRQLRDLIQARQKVIDGYTNLMNYLRGLLRQEGVNLPARAFCDGETFLKLLKSSLPEHVRQIIARYHELIDKMVVEKKTLELKILHYNNEDIEIMKTFPGVGEISSRTIGAAVGCIKRFKKAKQLIGYAGLAPSVYSSGERTEYGHITREGRSEMRRVAVQCAHALLRSKSVESLPLRKWYERIAERRGARTAVVALARKMLTIMFYMLRDKKPYDYKLLTVS

SEQ ID NO: 192902 - protein, 342 aa, unidentified
MDHYAGIDVSLECSSVCVVDASGKIVREGKVGSEPEALIAYFGSLRLSVVRIGLEAGPLSQWLYAAMKEAGLAVELLETRHVRTALETMPVKSDRNDARGIAQLIRLGWFRPVHCKSIGAQETRAVLTARKLVQSKLLDVENSVRGILRGFGLKVGKTTNRSFAGRVEDLVVHHASLHMIAAALLSVHAVLLRELKAFDKQVRSMARVDVKAKLLMSAPAVGPIVALTYASAIDDPGRFTSSRRVGAHFGLTPKKYQSGETDYTGRISKIGDATVRTALYEAAHIMLIKPIKGCAPLKSWAMRIARRSGMKKAKVALARKLAVILHRMLANATPFNAAMAAA

SEQ ID NO: 192903 - protein, 351 aa, unidentified
MMIIGVDYHPSFQTIAFLMEETGECGEQELKHSDGQAEKFYRDLQQRGICVRVGMEATGYSRWFERLLAELGFELWIGDPAEIKTKRVKKQKYDRNDARLLRRLMLENNFPQIWVPSPENRDLRQLLWHRHRLVQMRTRIMNQLQALAMNEGYRWKKKLFREQGRAQLEKLTLAPWASRRRRELLELLDRMNPTIEELTAAVEREARKRPEVLRLMTHPGVGPLTALAFVLIIGTWERFPRGKQIGNYVGMIPSEDSSAGKQRLGHISKQGNSLLRFLLVEAAQAAARIHPDWRRRYIHLAMRRHKSIAKVAMGRRLAIRLYWMWRNGCEYSQSLEFGSYAGQLGTGHGGK

SEQ ID NO: 192904 - protein, 350 aa, unidentified
MGNHKFAAADVHAATTTFAVLDDRGKFVMETVVETKAESLLSVVKSITGAVHLTFEEGTHAAWLYDLLRPHVAKLVVCDPRKNRNSKENKNDRIDARQLARWLRSGDLSPVYHGHDSTKVLKELVRGYENLVADSARTKNRLKAIYRSQGEWSSGGDVYRFEKREEWLSKLRSSGLRSRAEWLYSQMEALDELKGEAERAVLGEAKKHRPCSLLKTVPGIGPIRSATIVAHVATPFRFRTKRQFWSYCGLAVVTRGSSDWEIKGEELRRSRRPVSTRGLNKNHNRHLKDAFKGAVRDARAFRPHLDSLIESGMRASMARLTVARKIAATTLAIWKKGEQFILSKAVIRSE

SEQ ID NO: 192905 - protein, 415 aa, unidentified
MEALYASCAGLDVHKKTVVACVLRSVGSAVAIVQETRTFSTMTKGLEELAGWLVDREVSHVAMEATGVYWKPVYNILELKPRFTLLVANAQHLKAVPGRKTDVKDAEWIAQLLRHGLVRGSFIPDRQQRELRELTRYRTALLQERAREVNRLQKTLEGANIKLAVVLSDITGVSGQRILDALLAGESDPESLADLAHWRVQSKREALEQAVVGQLGSALHFVVSQQLKHLRGLDEQIERCDAEVASQMRPFAAELESLDEIPGVGPRTAQVILAEIGVDMSRFPNADHLAAWAGMAPGNNASGGKARPARTRRGSPWLRAALAESAWAASKCRSGYLPAQFRRLASRRGKKRAIVAVGHSILVIVYHLLESGKPYEDLGANYFDERDRANVERRAVARLESLGYRVQLVPVSSAA

SEQ ID NO: 192906 - protein, 400 aa, unidentified
MRVVFGIDVSKVSSEVAILVNGEKVHGYTMANDAIGFSRLLGDLKTVHKPEIIFEATGVYSRLLQAFLEDNGYAYTRLNPLEAKKQLDSLRVRKTDKIDAEKLAQSQFVLNRKPTYVQEEVYQDLRDLSRFYQNLTEDIVRAKNRLHKVLQVTFPELENILSTPTGEQYWNLVTAFPCKDFVLELSKDELSKSIRLSTSKRISDKRVAYLAEKLTALANQSYCAVKKTSPMLKEVRYYAKELLRLSEQRQAVLDEMVELAQPLPEYDILLSIPGIAETTATSIIGELGDIRRFQSANQINAFIGIDLRHYESGNFIAKEHITKRGNPYARKILFKCIHNIASASHTNPCHIADFYEKRKRQSQTTSTKPHTIASIHRLIRTMYYLITHNKLYDYTSTQNR

SEQ ID NO: 192907 - protein, 346 aa, unidentified
MHVIGIDPHKLSHTATSVEPSTNTDLGSLRVPSTLEGYQQLLDWSATWPDRVWAIENAKGLGHHLAQWLIQAGETVVDVPSTATARVRELSRGGRRKTDRIDAAAAACVAFTQADYRPVEADGDRAIIRLLDERRTDVANQHSRVINQLHAVLRELLPGGVATNQRVEQIRHIVVTHQPATPADEMRKTVALEIIGDLRRLRFQLDELTERIITALEASGSTLTSIAGVGPICAARLVARIGNPTRFASEAAFASYVGTAPIDVSSGDHNRHRLSRSGDRKLNAVIHIIAVSQSRHPSAPGYSYYRRKITEGKTRREAQRCLKRQITKQIWRTMQHDNTTENLAAA

SEQ ID NO: 192908 - protein, 335 aa, unidentified
MYYVGLDVHYRTSTYCILDGHGREVKCETIRGHWPKLLERLAMIRKPWTICFEATCGYGYLYRELSRMAHRVVVAHPGQLRLIFRAKRKNDRIDARKLAKLLFLDEVPQAYVPNQDVQNWRELIEYRRRTVDRQTTCKNAIRSLLRSHGIIAPKGLWTKKGLAWLCQMEMPTPAASLKRDLLREELTEAKRRVRTVTKGLDEIGERHPAVLLLRTIPGVGIRTAETVAAYIDHASRFVRSSQVAAYFGLIPCQDASAGANRLGHITRQGPGTARKYLVEAAWQGVYRSPTIRAYFQRVLHGRKERRKIALVATAHYLVRCMYAMLISGRPWREAA

SEQ ID NO: 192909 - protein, 406 aa, unidentified
MGRRRGCGAIVAFRQQMERPMQVNDLSWSLVAFDQNSTLVAVVELSLKSWLVAGLVPGLTRQPLKRSPPDGEALAALLDRWRSEAVKSGRRIERVAVAFEAGRDGFWLARVLRARGIEAYVIHPTSIPVPREHRRAKTDRLDTGLLMRAFLGWLRGEAKHCSMAPIPSLAEEDAKRPNREHEKLGAERTRILNKIKAALVRLGVRGFKPNLRNAAERLEALRTPEGLPVPPNTLAELRRDLGRLKLVREQIKEIERARERRLKQAPQEGAHPMVLMLARLKSLGVETADRLVHEAFYRSLRDRRAVARYGGMTGAPDESGAKRREKGLARAGNGRVRKAMLQLAYRWIMFQKESALTQWYQRRVAGAKGDVRKTMIIALARKLLIALWRYVTEGEVPAGAVLRPAP

SEQ ID NO: 192910 - protein, 316 aa, unidentified
MTQHTPIVAGIDVSKAHLDVYLHPDGLHRRFVNDKTGWRALHKWLPAASLQSIVYEATGPYHKGVERYLGEHGCPIARLDPRRARRFAEALGVKAKTDLVDARVLAQFGALLEPAPRSLPGPALEQLKELVAARRGLVKQRTRIANKSKTATIPLLKRQLRHAREQAARQIEQIDAQCHKIVRTDPALEPRFDILMSIPAIGIVTAMTLLADMPELGALNDKQAASLMGVAPIARDSGAFKGKRHIRGGRALVRQAVYMAALVATRFNPDMKRKYKTLIENGKPPKLALTVIMRKLIILANALIRDNRTWTEIRPC

SEQ ID NO: 192911 - protein, 352 aa, unidentified
MEKSRLHHIEGGDTTALLALIAELRTRASTKLGKPAEVVCCFEAGRDGFWLHRALTMHGVTVYVLEPTSILVNRRARRAKTDRLDAEGMLRVLAAWLAGDRQVCSMVRVPTPEEEDAKRPHREREHLVQERLRIENRIAALLFTQGIRKRPSLRSWERDVAELRTGDGRALPSLLRVELNRLRRRLVLALELIREVEAERVEALAETADDEMTQKIAALQRIRGIGTNFAAVLVREVLYRSFANRRQLASYVGIAPMPYQSGGMDRDRSISRAGNPRARTTLIQLAWLWLRYQPGSVLAAWFRERVGTLQGRTRRIAIVAMARKLLIALWRYVETGVTLDGVEFRAEADVTA

SEQ ID NO: 192912 - protein, 387 aa, unidentified
MYFVGIDISKFKHDCAIVDELGDVITPSWSFQNDREGFSLLKELLDALDGKKKIGLEATGHYGQNLKLFLENNDFSFMEFNPLLINRFVHSKSLRKTKTDSIDALMIAQYLMTVEYKPYPPSFYTFEKLKSLTRFRDSLIRQRSRQLVELTNILDKVFPEFKPFFKGRFSATALYILSHYASPEKISNMNSKSYEPLRRLSRGRFSMVDFVELKTLARNTVGSTSDYLLQEMEITIDIYNQLQSKAEEIELQIHDCVLDLAPPMLTIPGIGAASAAVILSEFGDLSKFNSPSKLLSFAGMEPGYFQSGTSESTGKMVKHGSSHLRYAMMNCAQTVINNEPTFAAYYAKKRAEGKEHRVALTHVAKKLLRVIYTLQTKELSYNPDLVR

SEQ ID NO: 192913 - protein, 421 aa, unidentified
MRAIGLDVHRDFCEVAIAEGGEVRSAGRIQTTPQALELFAGSLGGDDRVALEVTCGAWEIARIIEPHVERVVVVSPSDTGIRQARAKTDRLDARTLAKLLVAGELDSVWMPDARIQVLRRRLGRRAQLVHSRTRAKNEIHAVLQRRLTGRPPASDLFGVKGRRWLAGVELPLEERATVDACLRHVDFLDSEIEAVERLIAQQALGWPEIRRLMTVPGVNVIVAATFVAAVGDITRFPSPRQLVGYLGLDPKVRQSGSTPATHGRISKQGSAPARHALVEACWTAARAPGPLHAFYERVRARRGHQVAIVASARKLACLFWCLLTRDEDYAYGQPSLTRKKLRRLEITAGAPRWHSRAGIWAANTAAQAAERELARQAEAAYRRTVADWQTTRPKKVGASATPGRASKKPSKGKAARQTTSP

SEQ ID NO: 192914 - protein, 408 aa, unidentified
MNAVGIDVSKGKSMVAALRPMGEVALLPREFLHTEVGLEQMAYAITTLGEDTRVIIEATGRYHEPVAAALHKYGIYVCVLNPLYIKQSGGGSIRKVKTDKADAMKIAKYGLDNWVDLREYTPMDTVRQQLKLCSRQYNLYMKTVVSLQNNLISLTDKTFPGVNELFSSPERADGHQKWVDFVMTFWHCDCICRVSEKAFTERYQKWCKRKGYHFSTEKALDLYAGSCGHFTTLPKNDNTKLLITTAAQQLLAGKMTLAALRAEMTRLAMQLPEYNTVRAMYGVGETTAAQLMAEIGDVRRFPRRSSIVGFAGVDPGVDDSGKHSAKSVPTTKRGSPHLRKTLYQIVCTYLRKAPANELVYQFLDKKRAEGKPYFVYMTAAQNKFLRIYYARVKECLAAFDAQQDTTQS

SEQ ID NO: 192915 - protein, 381 aa, unidentified
MMQTMTRGNESSAATGYLLVAFELSQRWWKVGFTTGMGHRVRTRRIAAGALESVAGAIADAKKMFGLAADARVISCYEAGREGFWLHRYLTGRGATNHVVDSASIDRRARRTKTDAVDLRGLLALLARYVVGDRRCWRVVRVPSVADEDARQLHRTWETLQGDRTRVINRLKAVLATHGVRLAITADFLEHVAATRIWDGSEIPSGARERLAHDWAQLQSIEEQLAAVKAARARLRIDPATATGRAVQALQGVRAIGAGGAWVLATEVFGWREIRNGRQLGALVGLVPALYQSGATQRDRGITRAGNAHVRRLMVQLAWGWLRWQSDSALAQWYRRRFATGGSRQRRIGIVALARKLLIALWRYVDQAIVPEGARLKVTVA

SEQ ID NO: 192916 - protein, 346 aa, unidentified
MLADELDYVIGVDPHRDTHALAVVDVRSGAVVFEASAVADGEGYASVLRLADQHAPGRRAFAVEGTGSFGAGLARFLASQEQRVLEVGRLRRERRSGKSDALDAIRAARSVLGQTRPAQPRAGGEREALRALSAAREGAVTARRAGLCQLRGLLVSAPEPLRAELRSLTRAQLLRRLAAVRPEGRQDPELRGTLLALRALARRVKALTVEERELAREIETLTRKLAPQLLAQPGVGPLAAAQVLISWSHRGRITSEAAFARLAGCAPIPASSGQTVRYRLDRGGDRRLNRALHMILVTRRRAHAPTIAYIERRIQEGKSRREATRCLKRYLARNLYRLLENPPMPT

SEQ ID NO: 192917 - protein, 348 aa, unidentified
MNALHYIGFDVHKKTISFCIKTAAGEIVEEGSVPAQRGDLRRWASARPQPWRGAMEATLFSGWIYDTLKPYGEQLEMAHPAKMKAISSGKKKSDTIDARTIADLVRCNLLPACYVAPPRIRELRRLLRYRSLVVSEAVRMKNKMAGLLMETGALYVKAKLHRKKYFASLLEELEEVPESVIDLLRLSRGALEMFENTQKRLVRELLTDPELAQRVERLMTIPAVGEITALTWALEVGDPHRFRSGSDAMSYCGLTAALKSSAGKQQRGPISKQRNHWLQTTLIEAAKLAPRWNPQLAALQARELERGHRNRATLAVARKLVAYLLAVDKSGQAFQTREPLEVPTQKAA

SEQ ID NO: 192918 - protein, 343 aa, unidentified
MESVDYIGLDVHKKTIAYCIKTVNGQIVRQGTVNANRMALHQWLMELKTPWSGAMEATLFTGWIYDFLRPHAVEMKVAHPEMLKAITAAKKKNDRADAETLADLLRVNLLPECVMMSEELRELRRILRYRNMIVRTATRMKNKISGLLMEVGADYNKQRLHGKAYFDQFLECVEDVPDSVKDLLKLSRSNLELFTAVQKKLLKVLRNDSRIQQRVENLKSIAGVGEITALTWVLEVGDPARFRSSRQAISYCGLCSAQQESAGKEQRGPISKKRNKHLQTMLVEAAKLAPLWNPLLASLHERELARGNRNRATLAVARKLVEYMLAVDRRGTPFVTENMEKAS

SEQ ID NO: 192919 - protein, 348 aa, unidentified
MLIIGCDYHPGFQQIAFVDTETGECGERRLAHREEAEQFYRELKEQCVRVGMEASGHARWFERLLRELQFELWIGDAAEIRTKRVRRQKTDRQDAQLLLRLMLEDRFPRIWVPDSENRDLRQLLWHRHRLVQMRTRVMNQLHVVALNEGLRRKKALWRPAGRTELEALALARWASRRRQDLLDLLDQLTPKIQALTRTIEGEVEKRPVTRRLMTHPGVGPLTALAFELVIGTPGRFPCGKQVASYVGLVPSEESSGDRRRLGHISKQGNALLRFLLVEAAQVTVRSQPQWRSRFFHLAMRRGRKIAKVAMARKLAVHLYWMWRQGKDYGQLQKLGSHAGEPGHPDGGK

SEQ ID NO: 192920 - protein, 317 aa, unidentified
MRNTEVVYIGIDVSKETLDMDAGDFGIMKIKNTPAEVRKALTAIARKAQGKPLHACFESTGSYHGTLASECPVMGIAYSILNPYKVMCFAKSVAHAKTDAIDASVIRRYAQVRRPAPTPPPRKALVNLDEHLLARESIMKGTVALRCVLATLKTPAAGKPLKRVIASNERKIAEYDRLIAEAVKADAGVAGLADALATVKGVGGLTAAKLVAWMPELGTLGRRKAAALAGLAPHTRESGKWKGKSRTGGGRRHVRTALYMCATSAICANPQMKAFYERLVARGVIKMVALTATIRRLLCHLESVAKNYYAQRKDVPA

SEQ ID NO: 192921 - protein, 319 aa, unidentified
MGTVMNNTASSPYVGIDVSSAFLDVAIHPTDETFRVANDADAIDQLVVRLSALRPALIVMEATGKLELAVLKALCQARLPAVTVNPRQVRDFARATGRRAKTDRIDALVIAHFGQAVGPVVRPLDDEQTEQQQALVMRRLQLIDMLTAEKNRLKRAHHAARESLRDHIKWLEQQLDVAERDIDGFLRTSPAWRQKEDLLRSVPGIGPTAAATLIGFMPELGSLSRREIAALAGVAPFNADSGNHTGKRHIHGGRAIVRRALYMACVPALRFNPVVRAFYDRLKKAGKPSKVALTAYMRKLLIMLNAMVRNLTPWDGSIA

SEQ ID NO: 192922 - protein, 351 aa, unidentified
MQIIGVDLHTRQQAVAMLNVETGEIVEKTLQHEGESVREFYSTLAGPTRVGIEATGSMQWFLELMEELGIDCQVGHPAKIRAAEPRKQKHDRRDAALVLQLLVENRFPSIWMPSREQRDVRSLILYRHQWVRIRTRVQNALQAIALSHGLRRGSSLWGKAGQQAIASLSLTCYTAERRTALQSLYGQLEEQIDDLNRKVEELAWQRPQARRLMTHPGVGPITALATETFLGEPKRFVDGKAVASYVGLIPSEHSSGGRQRLGGLSKQGNPLLRFLWCEAVGHAVRKDAELQRFYQRKLVQKGLGKAKVAAARKLGIRLWILLRDQIDYQEFCHRGQLRQKYGGAHAGMPAR

SEQ ID NO: 192923 - protein, 352 aa, unidentified
MNHYTGDDAHKKYSVFVTVNENGRAGSPERVPHEKELYRKYLATLPPASPIAIESVGNWYWMIDAIEEAGHKPILVHPRKAKLLMGLINKTDKLDAKGLAMLNLNGSLPAVWIPPAELRDQRELSRMRMSMVGVRTQFKNRIQATLAKYAIMIDEVSDTFGKTGRILLSEAIKELPPETLNSVKEQLVLLDQVSGQIEKIEKHISEVVKETPMMQLIKSLQGVGDILAIVIALEIGDVERFAGAEHLASYAGTVPRVSSSGGKTHYGRVRPDVNHYLKWAYIEAASCIALQQKRNSGRHVVELMQRIQKQKGYPKAAVAVGRHLAEATYCMLKRNEPYHEPNLRKAVLSSQG

SEQ ID NO: 192924 - protein, 343 aa, unidentified
MYFIGIDVSTKESALCILDGNGKIVRETKLPSDPEIIARFITDTGLAIERIGLESGCTAAWLFAGLQRYGWPVICIDARHAAAALQAGFRNKNDRNDARGIADLMRVNKYRPVWVKSPEAQRQGRLLTARATLQSQLVALENTIRGLLRQEGIGLTDRRTAFEAAVREVIAEDRLLHAAVHPLLETRNAVLCQRAALDRQILLIVRADPVCRLLMTAPGVGALISLAFKVAVDDPRRFSRSRNVGAHFGLTPREHSSGELRYQGRISKMGDREVRRLLYVAASRMLRRDAALWCPLKAWAVRLAQRVGIRRARVALARKLAVVLHAMWSDGQVFQWRRTEASA

SEQ ID NO: 192925 - protein, 403 aa, unidentified
MFHLGIDVCKKTARYLILNEEGKKLKAFTLNNDKTSLESLPERFKNLSIPRDNLLIGIEATGGFWENIYSFLKDKGFNIVLLNPYNTSKFREALSKKAKTDNIDALIIAQLLGTGEYVQSQVAEEHIQALRELTNLRYEFVKERKNLQRQVYSLLSIIFPEYDKTIVAKPFSKASMAILKKLPTAKHLSEAKTKQIEKIVRKIQGNNFSIKQIQQLIETAKNSIYSGRAKDARATTLRMLLGHIENLSNSIEELEKEIEEILSPSDEDGSFPGENLLSIKGVGTKTLAVLLSYLGSDGSNFPDSKSVIGYVGFYPKIYESGQARRDNKISKRGPKVLRWALYMSAVASLRHNREMKTLYHKKLSQGKNEKQALIYVGKKILQISFSLLKSGETYNPARVFVSS

SEQ ID NO: 192926 - protein, 376 aa, unidentified
MVRPCSCPASDKLARGTKTRSTPCLQQHRPIAAIGIDIGKNSFHVVGQDTRGQIVLRQKWSRHQVEARFANMPPCLIGMEACVGAHHLSRRLKALGHDARLMPAKYVRPYSKGQKNDFRDAEAIAEAVQRPTMKFVATKTADQLDLQALHRVRERLVSQRTGIINQIRAFLLERGIAVRQGQRFLRAELPRILATPPDVLSPRMLRMIEDLAGDWRRLDERVEGLSNEIEAIARQDTGCERLMSVPGIGPMISSAMVAAIGAGDVFTKGRDFAAWLGLVPKQISTGDRTILGKISRRGNRYLRVLFVQAAWVVLIKPKIWERHGLKPWIEAARKRLHRNVLAIALANKLARIAWSVLARGRAFEARKMDQAANQSA

SEQ ID NO: 192927 - protein, 412 aa, unidentified
MDVIVERPAALDVHNATVMACVRVPGEGRRRAEHVAEFQTTVQGLLALRDWLEAHEVVQVAMEATGVYWKPVWAVLEDRFSCLLVNARHVKQVPGRKTDVQDAQWLCQLLEAGLLKPSLVPPKPVRTLRNLSRYRKSQIRDRQREMNRLHKIMQDTGIKLDCVATDMMGKSGRAMLDALVSGTTDPVVLADLARGQLRKKIPALRAALEGRFDTEHSLIVGRILSHIDYLDEAIDELSGAIEQQLGPFAPAVELLCTIPGVGRRAAEVIIAETGGDMTVFPTAKHLASWAGMCPGNDESAGKRRSGKTRKGSKWLSQTLVECAKTANRSKDTYLAAQYTRLRARRGANKATIAVCHSILTAAWHMLQSGETYTDPGGDFFARRDPERTRKRLVGQLERLGYSVKLQEGAALA

SEQ ID NO: 192928 - protein, 412 aa, unidentified
MDIVHDRAVGMDISKRDAKVCLRVPGKRAGTYTSTVSTWGATTSQILELRDFLEHEHVTTVVMEATSDYWKPFYYLLEETLPVMLVNAKAARNIPGRKTDVSDAAWLAQLGAHGLLRASFVPPEPIRELRDLTRARSIATRDRTREIQRLEKFLEGSGIKLSSVVSDLTGVSSRAMLEALINGERNPDVLAGLAKGTLRSKIPDLVDALTGRFKGHHAFMARLHLDQIDAQSRIIDALTGRIEEAMTPFRAAREFLATIPGVSLKVADVIIAETGADMTRFETPGRLASWTGVCPGSNESAGRIKSAHILPGNKYLKAALGTAALSASRSKDTYPAAKYRRIAARRGPMKAIVALEHSILTAAWHLLAEGECYTDPGADHFTRLDPIKAKNNAIKKLNSLGFDVTITPATAA

SEQ ID NO: 192929 - protein, 341 aa, unidentified
MERLYYIGLDIHKKTISYCVKKVDGTIVQQGKIAADRETLLKWMEGLPGPWLGAMEATLFTGWVYDFLKPYAVELKVAHPEMLKAITAAKKKNDRADAEKIADLLRVNLLPECYMLSEELRELRRILRYRNMIVRTAVKMKNKISGLLMEVGATYDKGKLHRRKYFNNLLERVEDVPDSVKDMLKLSRSSLEMFEAVQKKLVYTLRKDNLIHERVQRLMSIKGVGEVMALTWVLETGDSSRFHSARQAISYCGLCSAQRESAGKEQRGPISKKRNKHLQTMLIEAAKLAPRWNPQLAALHEKELNCGNRNRATMAVARKLVEYMLAVERQQKDFVPSELAA

SEQ ID NO: 192930 - protein, 428 aa, unidentified
MNCNTQNTKIASITEKTLIVGIDVGSETHYARAFDWRNFEFTRKPLIFSNTQAGFLTFKAWIEEIQEKNGKTAVIPGMEPTGHYWFALGKFLQDNGMKPVHVNPHHVKKSKELDDNNPNKNDRKDPKTIAALVNEGRFSYPYIPTGIYAEMRSLSNLRFQTQEEVTRIKNRIARWFAIYFPEYKDVYRDLKAVSGRMILKAAPLPEDIGKLGVEGVNQIWRDAKLRGAGMKRAKTLVSPAEHSVGSKEAPEAARMELKNLLDDMDVYTSRLEELVQKIEGKLKEIPYIDKLLEIKGIGMVTVSGFIAEVGDIRRFDNPKQLQKLAGYAIVANDSGKHNGESRISYRGRKRLRYVLYEAAISLVGKNAEFREIHEYYRTRKENPLKKMQSVVAVACKVIRVFYTILTKGVDYDAARLLGDIKHPQMQTA

SEQ ID NO: 192931 - protein, 464 aa, unidentified
MTASKKLWRNRKERKEWARRLQSEDPGLEVVHPHAAGIDVGNSAHYVAVRPDRDAEPVRRFECFTADLHRLADWLQSCGVKTVAMQSTGVYWIPLYEILEERGLEVYLVNARHTKNLPGRKSDVQESQWLLKLHTYGLLNNSFQPVSEIRVLRTYWRQRGEHVREAATCIQRMQKALTQMNVQLANVISDISGLTGQAIIRAIVAGERNPLKLAALSDPRVHASQEEIAKSLEGNWRSELLFVLQQEVDMYDTYQKRIAECDQRLQKHLASLTHPLQLQPPTQKPTTKKPAAKNAPRFDLSSELQRVTGVDLTRIDGIDVMVAQTLLSEVGLDMSRWKTESHFASWLGLCPDNRISGDKVLNRGTRRVVNRAATALRQAANTLMRSRSYLGAQYRRLRTKLGAPKAITAMAHRLARLVYRMLKYGQTYVDKGTDYYEERSRQQQIQLLRKRAAKLGLQVAEIHA

SEQ ID NO: 192932 - protein, 377 aa, unidentified
MESIIYVGIDVHKDTYSLCSFEMQKDIFFSQHTVKASTANVVSYLNKISESNGNAITVCGYEAGPTGYRLCLDLQQKGFNCVIMAPTSIAKTAKDKMLKTDRADAQILARTLAYHSYKQVILPTENILAIKEVVRLRASVLKSCKKAKQNLLSFLLYHGISYPGGGRESYWTVKFFTWLKTVTFESDYLTYCFEEYVSEVSRQIQRLEQLNAKLKELEGDKEISEGVKKLKCISGIDTVTAISLIAETGDFNRFKSAKEFASYTGLIPGRHDSGLSVGNSVGITKQGNQNLRHLLVESAKSIKRATALSHGQKSRRLLARQEGMKSEIINYADRAALRIKSRMRKLEIRGLNYNKAAVACARELACFAWGIMTNHIQ

SEQ ID NO: 192933 - protein, 405 aa, unidentified
MDIIIERGAGLDVHKGSVVACIMGTGIKKEIRTYLSMTNDLFRLKAWLQENRITHVAMESTGVYWKPVFNVLEDSFEVILVNARHVRHVPGRKTDVQDSEWLCKLLRSGLLRGSFIPPKEVRELRDLTRYKRKLIHTITSEKQRVEKILEDANIKLSSIASDTFGVSGRGIIQELLKGELHPEEMAELSRGRLRNRKQELKEALVGNMGEHHKQMIRTSLKHINAIEQMLTSVERKIQKKINCHFKEAYELLKTIPPVKDNASVLIAEMGVDMEIFPTEMHLSSWAGISPGNNESAGKKRPGTTTHGNNYLKTILTEFAWIASKMKGTYLQAKYQSLVGRRGKKKALVAVGHKILISCYHILKYKVAYKELGANYLDQRKKDKITKSYIKRLNSLGYTVTLHEAA

SEQ ID NO: 192934 - protein, 428 aa, unidentified
MDTPTSNPPVVAWIGLDWADQRHELRLQAADSLHVESFTVEQKPEALHAWVAQLRARFPQGRVALALEQSRGAVIFALMNYDFLLLYPVPPKALARYREAFASSGAKSDDVDADLLLEMVRTHSDRLRAWQPDDALTRQLRLLVEYRRKTVADRTRLTHRLTDLLKTYFPQALDWAGDLRSLGACEFLAAWPRLEALQEARRSALRRFFHDHRRLSAEERDQLFEQIDHARSLTQDPALVEASALMTQTLVEQLRAVITALARLDQKLEKLFQQHPDQELFDGLPGAGEALAPRLAAAFGTDRHRYQSAEELQPFAGIAPVTERSGKSAWIHWRWACPKFLRQTFHEFADASRKKSLWAQAYYEQQRQHGVSHHAAVRALAYKWIRVLYRCWKTSTPYQEAVYLHALQRRHSPLWLAVASLSVQEANP

SEQ ID NO: 192935 - protein, 382 aa, unidentified
MKGNSIARLQVTKGQIRRMAAKQRLTVGLDLGDRSSRYCILDEAGNKASEEVLPTTKAGLESMFAKMAPCRIAVEVGTHSPWVSRHLAGMGHEVIVANPRKVRLITHSVKKNDRMDAEQLARLARVDPKLLSPIRHRGPEAQADLAVIRARAGLVDVRTELINTARGLTKPMGERLKKCDAAAVKESLADGLGEATQKVIRPLLKSVEGISQQIAVYDKQIQEIEKRYPETKLLKQVYGVGTLIALTYILTLEDGERFLHSREVGPYLGLTRKLRDSGESQPELGISKAGDELLRRLLVQAAHCILRQGAPDSDLRVWGLTKAQAAGGGKKSSKKRKKKAAVAVARKLAVLLHKLWVTGEVYDPHYNRKAVETAKEKAKVAA

SEQ ID NO: 192936 - protein, 349 aa, unidentified
MRFYTKQHRFYCGVDLHARTMYLCILDDQGQVVFDKNLPARADAFLSAIAPFRDGLVVAVECLFCWYWLADLCAKEHIAFVLGHALYMKAIHGGKAKNDKIDAGKIARLLRGGNLPQAYVYPAGMRETRDLLRRRQYLVRKRTEALGHIQNTNSQYNHPPFGKQLGPAANRAELAVADRFTHPSVHKTIAIDLALIDYYEELIDDVERYLIDTAKVDDLQAYYHLQTIVGVGKILGLVLLYEIHDIRRFADVGHFLSYARLVRCAHTSAGKKQGSGGKKIGNPHLRWALGEAACMMVCHSAQAKKWMQRQEKKRGKGKAMGILAAKLGRAVYQVLTKNVAFDERRFWNN

SEQ ID NO: 192937 - protein, 342 aa, unidentified
MTAVTLIGIDLGKHSFHLHAQDAAGRMVFRKKLTRSQLFAQLANVPSCMVVMEACAGAHWVARQLAALGHTARLISPQFVKPFVQGNKNDFNDAQAICEAASRPSMRFVSPKSEAQQTLSALHRVREGLVRQRTAATNQIHAFLLEFGISLPKGSAVIKRLPAVLALHPDLPVRLIAVLERLQAHFKYLDEQVAEVERELTQQLKEDESSQRLLAIPGIGPITASALSMELGDAHQFGSSRQFAASLGLVPRQYSTGGKPTLLGISKRGDKNLRCLLVQCARVLMQRIDKREDALGLWVRDLLSRRHSNVVACALANKLARIAWAILAKGTHYQPDTAVQAA

SEQ ID NO: 192938 - protein, 427 aa, unidentified
MSEVETARQEPQFAAFVGIDWADQKHVWCLQALDSTKRESGELEHTPEAVEAWVGQLCQRFSDRPIAVAVEQSRGALVFMLAKYEPLHLFPVPSTMSASMRKALYPSGSKDDPRDADVLLDLLLQHRNKLRRLSPDTEATRRVQNLVEERRKLVDEKTEQTNRLTSHLKIYFPQILNWFEHLDTELVCALLERWPTLEQLQKVPPAKLRTFFRKHHCRDQELLERRILAIRQSIPAIRDRAVIEAKSTVVKVIVQLIRTLLEGIADLDEKIEEAAAAHPDFFIFESLPGAGAVLAPRLLAAFGSQRDRYASADEVQKYSGIAPVMEKSGKKQWIHFRWACPKFLRQSFHEWAGHSIAYSVWARSYYQQQRNKGQDHHAAVRALAFKWIRVVFRCWKDRVVYDESKYLAALARRGSPLAAVAAIAKTV

SEQ ID NO: 192939 - protein, 446 aa, unidentified
MDVLYTHCAGLDVHKKSRTACRWIPDPTGHCTEGLTEIETFGTMTIELLGLVDWLTEAGITHVAMESTGEYWHPVYNLLEGHFTVLLVNAAHVKNVPGRKTDQADARWLAKLLRHGLLQASFIPPRGQRDVRDLTRYRTKLVQERAREVNRVQGVLERANIKRASVVSDVMGVSSRAILAALVDGRADPATMAELARGRLRSKMPLLEQALSGLVREHHQQLLAMQLAHIDFLDDQIATLNTTIAERLSALPPTETVTVPVAADEPSAGSTPHVDAAVPLTFDQAIILLDTIPGVDRRGAEMLVAEIGTDMSRFGTAARLAAWAGVTPGNDESAGKRRSGKTRKGNRALRTGLVQLAHSATHTKATYLAMLFRRLAARRGKQRAIIAVAHSILVSVFYILVRHEPYRELGATHFDRLRHSQSVEHLTRRLEQLGYAVHLEPRPVAA

SEQ ID NO: 192940 - protein, 345 aa, unidentified
MTRFVGLDVSQKLTAICIVDETGRRLWRGQCATDPGQIERLVRGHTGEDASIGVETGPMTPWLVHELRARELNVICLDARHASAALKMQMNKTDQNDAEGLAQIMRTGWYRPVHVKSLDAHRARALLGARAQLVGMTTRLSNHIRGVLKTFGMLPGAMRGLPFDRRVEELLVDRDDLTPIVGPMLTAWRQLREQIAAFDKAVRALAKADPTCRLLMSVPGIGVLSVLAYVSTIEDPARFARSRSVGAHMGLTPRQYQSGEVDRSGRISKCGDTLARTLLYEAAVVILTRVKRASSLKDWAQVIAKRSGPGKARVALARKLSVILHSIWRSGEPFRWSEQPQPAGA

SEQ ID NO: 192941 - protein, 411 aa, unidentified
MVKENFIYVGIDLHKETHTAVMIDCYNQKLGEITFPNRPADFPKLVTKVKKCNTDAKEVVYGLENAYGYGRPLAVWLIDKGYFVKDVNTAISHRQAKHRGAMYRKSDSDDAEAIALATLNMLDKLPDACPNDAYWSLGQLVHRRDNIMKQRTRLVNQLHEQLCIAYPSYKSFFNDISRPTALYFWEHYPSRKYLRGKSVEDLRKELVPVSHNRCSTKNCEKILDAVASDKVKNNAYQDARDMVTLSIVSDLQHYDSQLAEVDKMLEQMYKMLGCTLTTIPGVNVITAVKILAEIGDIKRFSNANKLAQFAGIAPLHLSSSGKGKDVATKQGNRRLQATIYFLAIQMVQVSSKGTPRNSVVRAYYEKRKAEGKTSQQALICISRRLISVIYGMLKNGTEYRMPVVENAGENR

SEQ ID NO: 192942 - protein, 330 aa, unidentified
MENWNVILGVDVSKLSLDICCAERDLHLKIENQTKGLNLFLKWCKNQEIDLKRTLIILEHTGGYEYRFLQFCEALSIPYCRISGLEIKRSMGIVRGKNDRVDAFRIGQYGEEKIKKLIPSKPLDKNILALKHLLSFRKRIVREKAGLLSTVKERRHMYNAKKTDMVTHISQAKIKANDQYIKQVEQEIMEVITANEDLLKNYRIITSIKGIGPVNAWMTIAYTENFTSFTDARKYAVYVGVVPYDHSSGTSLNGRKRVSHLANKELKQELNQAAKAAITHDPELKAYADRKIKSKCYPVILNNVKFKLILRMFSLVKRGEKYVENYRRSA

SEQ ID NO: 192943 - protein, 517 aa, unidentified
MSLEASPVSSGRNGQRDPAYHPLDPNMVKEEWMIQSVGIDFHGGLHQARCLDERAQLCDGFSFRTTLQGLATLEEHIFRDGSTPIVVFEPMGLAWLIVAAYLRARHPGCRLVKAKGQKVAALRRYLRGSAKSDRIDAITLAKMPFIDPEQLVEVYLPPPEVHALQRLTRQRQRLEGEVVARKNRIGRIVDGYLPGVREAFSSPWSLQARAFLRSQLDPFSVVCAGEEALHTFLTKARSRSRGDKGETHPVYLACQNVAALYELSRSAGGVDEGFFADLQEEIARELRLMEAEEAESEALSLRIEELYKKLHTSDNLRTIPGVGEHTAPVFLAIVGDPARFGSQAAFANWTGVVPGARQSSDVEAKGLRMTKAGPPIIRWALYQAGQIGRRYDPQLAWVYYREMVHHGKNHKQAMGAVMSHLAARVLTVLREGRPYELRDAEGKPVSREEARGLLSRYRVPEEIRREKRRRNPAKGSGRTLRKKAQGMASHRTSEAADAPQPAVATAIPHEPVYRGSA

SEQ ID NO: 192944 - protein, 313 aa, unidentified
MQTITTIGLDIAKSVFQVHGIDAGGQVVIRQQLKRRYVLAFFQKLPPCLVGIEACASSHHWSRELQALGHTVRLMPPAYVKPYIKRQKNDAADAEAICEAVTRANMRFVDTKTPEQQSGMVLHRTRHLCMRQQTSAINAIRAHLAEFGIVAPVGRNGVEELLDIVSNPSDKRVPEIARTCLAALGTQLRRLKEQVLEFDRMIRTWHRSNEMSMRLDECPCVGPVLATAVVASVADPRTFRSGRNFSAWIGLVPKQRSSGARTGSAASVNRVTAIYAACSWPGTRHSPLLGSNLLRPVEFGSVDPHAMQNELGP

SEQ ID NO: 192945 - protein, 411 aa, unidentified
MDVQYQRCAGLDVHKRTVVACVRLTTAQGEVQQEVRTFGTMTADLLALADWLAGDAVEQVAMESTGVYWRPVFNVLEAQHAVVLVNPQHMRAVPGRKTDVKEAEWLADLLAHGLLQPRCIPPAPVRALRALVGYRRSLVQARTQEINRVHKLLELGNMKLAAVATEVLGKSGRALLHGWVAGDHDPEALAELARGRLRVKLPALRQALEGHLQPHQRLLLRQMLAHLDFLEASLAEVQAEMDRHLIPFAEAVSLAQTLPGVGAVAAAGLIAEVGTDRRVFPSAKHLASWAGVCPGNKQSGGKQFQARTRPGHPRLKALLCEVAQALARTSDNYLAALYHRIARRRGKGRATLAVAHAVLVILYYMLRDQKPSTDLGVDSFDRLDTERIQRRYVQRLEQLGYSVILTPAPAA

SEQ ID NO: 192946 - protein, 344 aa, unidentified
MILIGIDPHKSTHTAVAIDSSGNKIAHRRFPVNAGTFGQLMAWSQRWPERRFAVEGARGLGRGIAQQLAADGEHVVDVPSTLSARARMLATGGGRKTDAADALHVAHVALFRPDLRQVRSEDQATILRLLTERRDDLVNERTRLLNRLHVLLRDLVPGGAPIDLSAEKAAQLLRRVRPVTATDCCRRDLARDLLADLRRLDRAIKDNEHQMRDAVDASRTTLTNLPGVGIVLAAKILGHVGNIDRFPTEHHFASYTGSAPLEASSGNNTRHRLNTGGNRSLNCVLHIIATCQIRDIGPGQDYYRRKVSEGKTPAEARRALKRRLSNVIYRTMRRDQRNLLPEAA

SEQ ID NO: 192947 - protein, 342 aa, unidentified
MKYVGVDLHKQTISACVVMKECGRKKVAARKRLECRDEAGIAAWFGELGNHEVVVEATASYEWFVKLVEPLAHRVLLAHLKKLRVIAESKRKTDKLDAQVLAEFLADDAIPLAYRPGPRVREHRTLVRYRHYLQRRITSVKNKLRHVLAKYNADVRHLFTSEGREHLASVKLSPCDRFVADELQAELRQHQKRQAKANRQLRQFAAKAPLAEQEARAVLDSIPNVGPVTSDVVLAELGDWRRFRSQADVASYAGLAPGFRESAGKTKQLGITKEGSRLLRWAMIELAWRMVRTSRKWGRHYTRLEARIGAKKAIVAIARRLLGVIFSLLRSGQKYALALEAA

SEQ ID NO: 192948 - protein, 399 aa, unidentified
MIAVGIDVSKSKSTVAILNGDGSIRAKPFDVHHVADELQALVDYIKRTSEPPTILMEPTSHYHYPLLKAFTEAELPVCLINPYQMKKYGDTELRKAKTDKRDSLRIAQYALEKSYSLIPYTPQDQKYEDLRFLSRQYSQRISTLTVAKVQLLSLLDETMPGITTILPLKSRDPDNCVLLRFIKRFKSFDVIRKMGKTRFLDSYQVLVKKTKDRFAGSKGLAIYELVLSSVTTRGENPLSAMTQDQCVDLVSTSQKAADEINLQMRIIAETMPEYKVLRSMAGVGDRLGPIILGEIGDIRRFHSGKALNAYAGNDAPPYQSGQFESRNRHISKRGNPALRKACFEVMQALKLTKPQDDPVYLFLLKKEQEGNPYNVAKMAGVDKFLRIYYARAMETLKQQ

SEQ ID NO: 192949 - protein, 414 aa, unidentified
MDQLYDRVAGLDVHRDNVVGCFRRRGPRGGVVREKERFTTTTAGLRVLEAWLAERQVELVAMEATGVYWKPVYYALESRFTVWLCNARAVKKVPGRKTDMSDSEWLADVAAHGMIRPSFVPPPPIRELRELTRYRKTQIDARAAEVQRLEKVLQDAGIKLTSVASKVLTQSGRAMVEALIAGERDGARLAELAKGKMRPKMLALAEALSGHFGSHHAVACERILGHLDFLDASISALTAQIDQRTAAFAPVYASLLPVPGLDRLTIDVIIAETGADMTRFLTPGDLASWVGVCPGSHESAGKRRRVGTTSGNQWLRRALIESARAAARTKRSYFGAQYRQIARRRGPNKAAVAVAHSLIELVWNLLSTGEVYNDLGEDYFTNRQDPERRARRLVAQLEELGFKVTLEAASAVTA

SEQ ID NO: 192950 - protein, 356 aa, unidentified
MRKDNKNYFSKTDIYVGLDVHKKSWAVSIYVGNIYYKSFSISPPSSKVLIEFLEKNFIGGRYHVVYEAGFSGFWIYDELTERGIDCVVVSPADIPMSNKNKNFKTDINDSKQLAQKLKSGILEGIHIPEKIQREHRALLRLRNKYVKDRTRIKNYVKSNLMFFGKVIGTDYEDTKSWSKKFVQGLMGLGYLSNEGKEVIQKLLKMLSVYEEAIKEVDKSIKQLSITEQYKKDVEILCSVPGISTLSAMIILIEIGDFNRFADTNKLKSYIGLIPQEHSSGEKEIKTGITKRGNKFLKKVIIEVSWVATRKDETLLSLYTKLTKRMRGSKAIIVIAGILLNRIRSIMKKKEFYRIAA

SEQ ID NO: 192951 - protein, 346 aa, unidentified
MCSLPVFVGMDYHDSFVRVVVQDTDGSEMGNADRTNHWKAIADFGDRFGRPVRAAIESCCGAADLAEELVSCAGWSVALAHPGYVQRMKQNPDKTDCQDAQLLADLERVGYLPRVWLAPRYIRELRHVVRYRLQLTEQRRATKLRLRALLREQRCHAPEGLNAWTKAWQHWVRHTTELSAQGRWLVKQHLRELARLAIRIHEVEKRLEHLTANDVEVQRLQQQPGIGPVTAWTMRAEIGHFDRFRTGKQLARFCGLSPRNASSGQRQADAGLIRAANPALRTVLIEAAHRLVQYDPSWQKFAQRLRARGKPGSVVAAAVGNRWMRRLYHEMKTPSGELAVAVGPAR

SEQ ID NO: 192952 - protein, 314 aa, unidentified
MSSPSCYLGVDVSKNTLVVAGSGRRWQFANTKDGHRKFIAQIKKLSGSGHVVCESTGSYHLSMCLALQEAGLAFTVANAARIHYFGLSEGIIAKNDPIDAGLIERFANTKQPLADPPLCRAQLALSESVTHRQQLVEMIKVLRTHRQQVLHAPLVTEIDKSITALEKRLEALERKLRAQVDAHPLWKKKLALLVEVQGIGFITALSLLAKMPELGTLNRGQCAALGGLAPYDNDSGKHQGKRTIRGGRKEVRCALYMAALSAAQFNPILKTFYQRLLAQKKLAKVALTAVMRKLLIYLNTVLKNISTPPLTTAS

SEQ ID NO: 192953 - protein, 377 aa, unidentified
MKRVKFVGLDVHAETIAIAIAEQDGEVRSLGVIPNREDSVRKLVRKLGTMEELQFCYEAGPTGYVLYWQLTRMGAKCEVVAPTLVPVKAEDRVKTDRRDALKLARNYQAGELTAVWVPDAAHEALRDVVRAREAAKKDQLRARHRLSKFLLRHGRRPPMGVKVWTIKYLEWVKREVHFEQLAQEATLLDYLHEVEHAAARIARLDGAIEEAVKVAPPKMRAVIEALQALRGVAHVSAVTVVAELGELSRFARAKQLMGYGGIVASEDCSGERTRRGNITKTGNAHLRRVVVEAAWAYRHRPDVGATLRKRQEHVSEEVKEIAWKAQQRLHQRYRKLLAKGKNKGVVVTAIGRELLGFIWAIGIKVETAQKEPLQRAA

SEQ ID NO: 192954 - protein, 358 aa, unidentified
MATYYIGADVHSKSIEMAIMNRKKIVQRYTLPTSISAVAAILNSLSGKKYLAIEEGPMAGWLYRNLHRKVERFVVADPRRNKLISSDGDHDDKIDSAKLAMLLAGGYLREVYHTDDEHRVELKHWVSLYHDRVRDAVRYINKIRARCRMQGITIPRHVVLQPEHRDAWLSQLRHPALAKQLLMLWIGYDATAQQARMAKQQLIDLSQRYAIIGRWKQLPGIGMIRAVTIFAYLDTPWRFKQKNKLWKYCGVGLQRTTSGTDRKGKPKPALLQLSRAANRILKNAVLGAAITAIHQKHNTFKKDYERMVQHGLITSNARHTVARKLLTVMWGMWKKSYQFDSDKVALSESIQQSVCIEL

SEQ ID NO: 192955 - protein, 338 aa, unidentified
MNPTMIGVDIAKSVFQVHGEDASGKVLLRKRLGRAAFEKFMATLPAAAVGIEACGSSHHWARRLRALGHEVRLVPASYVKPFVKRNKTDARDAAAICEAMQRPDMRFVAVKSLDQQASRGLQTSRDLLIKQRTQLRNAFRAQMAEFGIIAAQGRRGLAELAARLAGDDPMLPAAIRLALRQLHDQAAALDVAIEALERAIVASAKADPVMKRLTTIPGIGALGAHAIVTAIGDGAQFRCGRDFAAWVGLTPRERQSANTRRRGGISRQGDRGVRRVLVLGASALIKARRQRPERATAWQSGILARRPVKVAVVAQAAKNARTAWAMLRSGEAYRGVAA

SEQ ID NO: 192956 - protein, 344 aa, unidentified
MAIVGGLDIHRRQITYDWIDTDTGETRRGQLSPATRTELRGWLEQFHSQQADFALEATTGWRFVVEELQEAGAVAHLAEPADTRALRGPKRRAKTDRTDARHLRDLLRAGTLPESWPPPAHIADARTQVRLRRTLVGERTGWQQRIHAILFHHGLPERSQLLTADGRAWLARVELPTVARQAVDLALRMIDHLEVELDRLDTQLAGIARTQPGCQALMGRYGIGWLTAVSIWAEFGDVRRFANSRQAVRFTGLDITVSESDGKRARGHLARQGSPVLRWALHEAAMCASRPGSPDHAYYLQVKQRLGGKRAALSVARKLAREAYHLLKELGDQALVPAEFPTAA

SEQ ID NO: 192957 - protein, 330 aa, unidentified
MATQHWVGIDVSKAVLDVHELPLGESWSVANDGRGIAALVKRVSSLPDALVILEATGGYQHEAAVELSRGGIAVAIVNPRQVKDFGRALGQLAKTDKISAEVLALFGERVRPEARFLSDSRQELLSALVQRRRQLLEMLTAEKNRLGMTRARVVQGEVRKHIQWLEKRLKDTDRQIDESIRESPLWRAKEDLLRSVPCIGPTTTRTLLADLPELGHLNRKQISALVGVAPFARDSGTLRGRRSVWGGRAPVRAGLYMATLVGVRHNPTLRAHYQHLIAAGKCPKVALVACMRKLLVILNAILRTQTPWRELEPAGRQTSHSGLRLLAATP

SEQ ID NO: 192958 - protein, 349 aa, unidentified
MEVTTIGIDIAKRIFQLHGVNNNGKTVLKKRLMRDQVLIFMSNLPKCLVGIEACGGSNYWARELSKLGHEVKLMAPQFVKPYVKTNKNDEADAEAICEAVARSNMRFVPIKTVEQQDMLSIHRVRARLVKNRTALANEIRGLLLEFGIIIPQGINKIVDKLTEVLDSDQLSGISYQTFSDLKEEYITNDKRVKELENRLKILSNQCSLYKRLQEIPGGGLITGTALIASIGNASCFKNGRQLASWLGLVPRQNSSGGKTKLLGISKRGDVYLRSLLVQGERAILNAKLRYISKKDQIHANCSKFTEWICNLSERCGSNKTVVAIANKLARVIFAVLSSGNAYLEQKVCN

SEQ ID NO: 192959 - protein, 391 aa, unidentified
MDKAWAGVDVGKGVHWAHVLDVSGRELLSRRVENDEADILRLIDEALSFTEEVHWALDQPGGGAALLLALLWEHDQKVLYVPGLSVDRARDTYRGESKTDARDARVIADQARMRGDLGKLKPGEQEIAELRLLLARRRDLVTDQTRSITRLREALVSLFPALERVLDLNSKGPLTLLTHYQTPPQLRRAGHKRIAAYLRFRGVKGSANVAHKALAAARSQSVRLPAQEVASRIVAELAAEILALKERINTLDEELGQRFFDRTEARILTSLPGMGPILGAEFLVAVGDIRAFSSADRLAAYAGLVPAANDSGKRVGNRRRMRGGNKTLKRVFYQSAFASLRASPESRVFYDRKRAEGKRHTQALIALARRRVNVVWAMLRDGTTFETRSAA

SEQ ID NO: 192960 - protein, 380 aa, unidentified
MTENITWVGMDAHKKSIHVALKKSGRKKLVVWITPNTTKAVRQLARKMVKFADGTEVRCCYEAGPCGFVLQRQLHAAAPLVCEVIAPSLIPKRPGDRVKTDRRDAAQLVRLHAAGLLTEVIAPTEAEEAVRDLCRCRDDVRQDRVRARHRLSKFAARHGFVYTRTPWTQGHHRWLRALQWDDRQAQVVFDHYLCVLEHLNERMRHIVSELERVSEEVPYREAVGVLRAFHGIDTITAMTLLSELHGFARFESPRALMSYLGLTPSEYSSGGKEKRGAITKAGNAHVRRVLVESAQHYRRRPGGGVGIRKRREGQPAEVVAIAEHAEQRLHRRYRRLTERGKPPNKAIVAVARELVGFIWSALQSPHLQAVHAECTEEVAA

SEQ ID NO: 192961 - protein, 371 aa, unidentified
MKIYNLKAAPVANVKELKDQKRPKAKQILLGADTHLRGYQVGRKVDHGAVGAVENFRSEEAFLLFVVKQLERAERVVVVYEAGPLGYSLYRKLKELPVECYVCAPDSSEQQKKRRKNNKIDARNLTSKLFNYVNGDQNALQMVRVPSEAQEQLRMASRQHDQLVEERKRLGAKGNAMLLSQGFGSWSNWWRPKAWARLSSLVPAWLLERLQIWVDVLKMLDEKIGQAKVSLARGCTGPRPKGVGALSQMQLRSEVLDWHSYSNRRKIACLAGMVPSEWSTGQKERRGSITKVGVPAIRRIIVEMVWRMVLFQPQYQPVQKWQEVLRGSNPALKKKAVVAIGRQLIVDLWRLETGRVTAQELNLVMIDAQGV

SEQ ID NO: 192962 - protein, 289 aa, unidentified
MNYSIGLDISKGLISVYIPINDLSIEIENSLKGLKKLVSKLKKLYKKEFEQLVFVYEPTGSYSNLLKKFCSDKQIKCFIINPKRSSNFAKSMGERNKTDKVDAKLLSNAIVLAKDGEIKIPTYDERVEEMSVLMSYYRFIIKSRVNLVNHLESITAKDGAIYAINELKKEIKKYKTKEKNILLEIAKIINKDDKLKQDFENIKSITGIGEKSAIVLLHLFLKYPDANQREITSLVGLDPIEKSSGTSVRGKVRISKAGAKIYRGAMFMAVMVYNGQLMKQCAFIDYHLK

SEQ ID NO: 192963 - protein, 365 aa, unidentified
MSKDIKKPAGETRRYVGIDLGDKKSRVCILDERGEIVLQEWVVTTPEAFFKRFHGETKMDIAMEVGAHSRWASDLLGRCGHKVVVADPRQLGLITKNDAKSDKRDARTLAQLLRADPRLLSPIEHRAEKLQTDLTVIRMRDNLMETRTRLVTSVRGVVKATGGRLPSSETSSFPQQVSDLIPEPLRPAVAPVLEVIDRLNEATYEYDCLLEHWAGTRYPESSRLTQIKGVGALTALTFMLTVGDKARFSRTRDIGAYLGLRPRLGQSGDNEPQLRITQAGDGLLRKTLVECAQYMVGPFGQDSDLRRWGLKRIEAGNGSKRARQRAVVGVARRLAVLLMSLWKSGPSDDPLRHSRAQERSQEVAA

SEQ ID NO: 192964 - protein, 411 aa, unidentified
MMMGLWSLWAKWSAVGKSRLFATCPRQAPRFAGGFFASELSTKSIALFLVSVRQLVRPWGHQARGRARSAAPIFLGEPERLLGPISPHFARMGDEMSSNQTESFVGIDVAKNTLDLRLEPVGESLHVAYDDAGIAAIRKRLLTLSPTLIVMEATGGLETRLACELAACGLPVAVINPRQARDFAKATGQLAKTDQVDAAVLAHFACAIRPPVRVQKDADTCDLDDLVTRRRQLIAMRVQETLRLGSAESTALQKNLKKHIAWLDKQITSLDGDLTKRLRTSDAWRTKDDLLQGIPGVGAVTSVTLLAKCPELGQLNRREIAKLTGVAPLANDSGKHRGKRFVWGGRADVRSVLYMATVSAIRCNPAIKTFADRLKQAGKPAKVVIVACMRKLLTIMNAMVKNNAPWTAKTA

SEQ ID NO: 192965 - protein, 340 aa, unidentified
MQAIRFGVDLAKSVFQIHGVCALGEVVVQRQLRREQMLRFFAKQPPALIGMEACGSAHYWARELAKLGHDVRLMPASYVKAYVRRNKNDARDAEACCEAVSRPTMRFVPVKTVEQQSARAIHRARDLLVRQRTQAANAVRAMLYEMGLIASKGREGIAALIERIEAADTALPASLLVSLRALAAQWRALDAEVARLDQAIACQVRQDPVARRLMTVPGVGPLTAHAVICAVGDGRQFSSARDFAAWVGLTRLNHDTGGKTRLTGHISKAGDRSLRKLLVLGASSHLRRVRANHNAGSIWIQGVLARRPVKVAVIAQAAKTARIIWALLRSDQTYRAPAAA

SEQ ID NO: 192966 - protein, 314 aa, unidentified
MESVRILNDVESLDRVIERAGEDPEVVLEATYGWYWAVDALREAGARVHLAHPLGVKAFEYRRVKNDFRDAADLADLLRMGRLPEAWIAPPATRELRELVRHRATLVALRSHCKAEIHAVLAKCGIQVSMSDLFGVAGTALLDRLQLAAPYAARIASLRRLMDDLDFEIEVFTHAAQGRLDADPGYLAVQQIPGIGAILAAVFVAEVGDVTRFDHAPQLACWAGLTPKHHESDTHVRRGRITKQGSRLVRWAAVESVKRVGPHTRIGALRDRVAERRGGNIGAVAAARQQIEYVFYALRDGHVRALQHPARDSA

SEQ ID NO: 192967 - protein, 354 aa, unidentified
MISIGVDAHKRVHAAVAVDDAGRELGQWRGPNSKSGWLRLAAWSDDFGPTRRWGIEGAWSYGRGLAQHLVSTSETVYEINSRWTAFGRRRGKKPDKSDRLDARAVALFVRQEAPALPVVHADDETAVLDLLCSEREGLLVDAGRLRNQLHALLMQVDPEYQSRLPRLDSVAGLKAMTSYPLPRADGLPRRRAASVRRLAVRLTIVLIQADDLAEQVEGLAAGRFTPLTQLCGVSLLTAGTLAGILGPGRRFNNDAQLAAYAGAAPLEASSAGAVRHRLNRGGNRRLNAVLYRIVLTQAHHSEEARAYLDRRVSEGKTRREARRALKRYIARAIWRLWQQCELPQLASAAPCTAA

SEQ ID NO: 192968 - protein, 423 aa, unidentified
MKNSAANKLRQVPKGYLIVGIDPHQKKHAVVAMTQDFTTRCKFKFDNSQEGYNMALDRLREEMMKTGCQGVMFAIEAGGHYWRNLAYFLDNKGLPFRFINPFSLKRRREGKDLNRRKNDYRDSEVAAQLLCTGEFTESKLKQGVYAELQATHNAYRRMVKEKTRINNLIKGLLDGLFPEFNRVFKDPCCLNALSVLATCSIPSVIVSITEEEFVNLIRVSHQGLLKKKKLRALYHVAGTSVGIEEGAKSVSNEISFLVEKLRLIKHQIQSLEETLIHLVDQTEEGQYLLSIRGLNYISVAGLIAELGCFRLYHSAKQMIKMAGSNPTEKESAGKRGSRTPMSKKGRPALRHCAWTAVVPMLRFNTDFRAWAKQRRERPANANPLCGKEILGAALNRLLRLGFALVKNRAYYQVSMPVLAPVAA

SEQ ID NO: 192969 - protein, 438 aa, unidentified
MSNKVIFNLDDLFISVGIDVGADFSWMSIALPNQQFVGKPYKILHSSIDSLTTAVSKIKEAEELYSLESRIFLESTGIYHYPLFCYLRDKGFNCSVINPIITKNSTNINIRKVHNDRFDSKKAALVGLKPDLKVSLMPSDLALNCRNLCREYYDLMDNRSAYVNKLQGELRMVFPQYLGIFSKVTINTSLTLLETYTSPSAFLEADNQEIIDIIKSTARFGLTYAQNKYNAIIQAATDANQFGYIIDSNIKRIRLYISFIRKYDEEINNILESLHELVDANEDADFVKQIHLIETFKGAGFLSAVSIMGEIGDFSAFSKPKQLFAYFGLDPAVKQSGKFEGTKVQMSKRGSAIARRVIHTLTLQCISISRNGEAKNPVLREYYLKKCDSKPKLVAMGAVSHKVCNMIFAILRDNKPFKIIAPQEHIKQYNAAKCDMAA

SEQ ID NO: 192970 - protein, 350 aa, unidentified
MVVVGADVHKRTHTFVAVDGVGKKLGEKVVEATSVGHRQAIRWARTAFGVELVWAIEDCRHLSARLERDLLSANQKVVRVPPKLMAHARASARTRGKSDPIDALAVARAYLREPDLPVASHDEVSRELKLLVDRREDLVGQRTSTINRLLWRVHELDPGRAPKQGSLDLTKHRRMLGDWLATQPGLVAELAREELADITRLTEAINALAKRIGERVRTIAPALLAMPGCAELTAAKIIGETAGVTRFKNEAAFARHSGVAPIPVWSGNTAGRVRMTRSGNRQLNAALHRIAVTQIRLDGLGQAYYRNRLTTGDSTTEALRCLKRRLARVVFGHLHTDHHTRTQPCQTAAT

SEQ ID NO: 192971 - protein, 342 aa, unidentified
MDRTLYALDLAKQVFQVYWVEQRNRAREKRLKRGQVLAFFAQVAPGRVAMEACGGAHYWARELRGLGHEVMLIHARYVRPFVKTNKTDAADARAIWTAAQQPEMRAVAVKTVEQQTTLALHRVREGRRDMRTALMNQMRGLLAEFGVVLKRGREAGLTELRGRWAELEAKLPGTMLVLLREQCEWMAQLTLQVQELEGRIRASHAGDERYMQLTSIPGIGPLGASALLTQMGNGQQFHSGRQASAFVGIVPRQQGTGGKVWLGSISKRGDPYLRTLLIHGARSVIAKSKQHSPWLKGLLARRPKNVAAVALANKNVRIAWALLQRGTRYERDHQGRALAAAD

SEQ ID NO: 192972 - protein, 338 aa, unidentified
MSIVMGLDQHRGQITGEWIDTETGEVQRTRVAPADRAAVRKFLSRFRGAELEVALEATTGWRFVVEELRRVGAVVHLAEPAETAGLRGPKKRAKGDRADARHLRELLMVKRLPESWIPPDHILDLRARARLRHTLSEQRREWQQRIQATLYHHGCPRRRELTTGEGREWLATQPLPAAAREQVTVALAMIDALEAQVAPLDRELRAYARRQAGCRALMAHYGIGPLVAVTILAELGDCTRFSSSRHAVRYAGMDITVHESDQRRAPGHLSRQGPPALRWALFEAAQSACRRGSPDLEYYGQAVERLGHNRACLAIARKLLKRSYHTLRELGEEALAPA

SEQ ID NO: 192973 - protein, 356 aa, unidentified
MCQGDGVELPPKEAPVEQVSTIGLDIAKHVFQLHGADGAGHVLFRKRIMRAKLLSFLAAQTRCVVAMEACAGAHYWAREIAKLGHHVRLIAPTYVKPFIKRQKNDAADAEAICEAAQRPSMRFVPVKAEEQQANGIVFRARDPLVRQRTQCVNALRGHLSEYGYVFPKGITHVEALVAVVEDLQSSLSDSVRAILKLLVDTFTALEAQIAVLDAEINQRSKSDPTARRLMTIPGVGPITATAITALVPAAEGFPAGRDFAAWLGLTPLQKSTGGKPKLGAVSKRGERTIRRLLIIGASAVVQQASRRGAPKGSWLAQMLARKPKMLVTVALANKIARIIWALLVKGGTYKTPTAAA

SEQ ID NO: 192974 - protein, 359 aa, unidentified
MRIIGCDLHARQQTIAMLDTTTGEVSTLTLMHEGNQVREFYSQLPRPVLVGIEATGSMHWFLNLMDELGIECQVGHPATIRAAEPRKQKHDRRDAELILKLLVEKRFPAIWRPSKELLDLRALLLHRHQWVRIRTRIQNALQAIALANGLRRGPSLWSYDGQAKIAFLPLLPHASYRRSALQGLYRKMEEEIENLTQQVAEQAEQRCRSRLLMTHPGVGPVTALATEVFLGDPRRFVDGKALASYVGLIPGERSSGRRQRLGKITKQGSPLLRFLWGEAGTHAVRRDPELKRFYRRKLVQKGLGKTRVAVARKLGIRLWIMLRDEIDYEEFCRRGQKQSGEACAGMPGTRMVNDRRAID

SEQ ID NO: 192975 - protein, 403 aa, unidentified
MERVFGMDVHKDTLVTTIITEEGEETRWSGVEAGDLKNLMEWLKEKNCLKGVMESSGIYWVPIYVTLVDNGFQVTVANAHQVKAIPGRKTDELDSQWLARIFSAGLVKPSYIPEKKIMELRSLTRLRVLLLEAQTAFKNRAHKTLQICNIRLASKLSDIFGKDGQMLLNALMKRESIDEVVEKYGSKRLKAKKDEVKKSILGSLREADIIELKICLDNINRLEEQIRQLNAKIATLVNKKDVERISKVPGVGEVSASTVIAEIADPKRFQDEKKLFSWSGLAPSTYQTGGKKPKSGHITKRGNKWLRRTLAQCAASAIKARNSQIRLFYLRIRGRRGHKIAIVATARKLLGIIWHLLITGEEYIDKHYVKKTMTKSRKKTLKLALDEAIPLLKQAGYTIIAPG

SEQ ID NO: 192976 - protein, 343 aa, unidentified
MFAESVDVVIGVDTHRDSHALALVDAGLGALIAEERVDANRAGYRRALKLASGCGRRRLWAVEGTGSYGAGLARFLQQQGERVLELERPVRSGSRGRAKSDALDALRAARAALTGEPLAELRCGGKREALRVLLVSREASVAVRRSGLNQLRALVLTAPAELRERLQGLPKRALVKRCVALRPRSSQPPQLRGTLLALRSCGRQVELASREAALLERELAVLVEQLSPQLLSHYGVGPITAAQLLVSWSHPGRLRSEAAFARLAGAAPIPCSSGKTIRHRLDRGGDRQLNRALHTIVLARRRGDQRTIAYIHRRTSEGKTEREAIRSLKRYTARSLYRLLEHA

SEQ ID NO: 192977 - protein, 600 aa, unidentified
MTQELSVVGIDIAKRILHLVGTDDRGKVVLRKRLVRGEVLSFMAQLPPVIVGIEACGGAHEWARRLREQGHDVKLMAPQYVKPYVKTNKNDMRDAEAIAEAVTRPSMRFVPIKDVDQQDIQALHRVRERLMGARTALINEMRGLLAEYGIVLPKGAKAFRKAVVGKLDADRAKLTPLGQELFHRLFDELVQLEAEVAYYEAKLRSIAEAHPECQRLLTIPGIGPLTATALIAAVSDVGVFQNGRQFAAWLGLVPKQYSTGGETRLLGISKRGDRYLRKLLIHGARATLRWAQTKTDRRSQWIRGLLERRGWNRTAVAVANKNARVMSQKWRSAERDVTLILVLTAFQLKECLMTFIAVRCPHCQSDQIVNRGKTARGTQRYLCQNALCVKGSFLLDYCNRGCLPEVKALIIDMSLNASGVRDTARSLHISTNTVLSELKNKEDVLEPVNTALLRTLNPDDITVDIERAGEAEMDEMWSFVGNKNNPRWLWHAIDHQTGKVLAYVFGRRKDEVFLKLQALLEPFGLTHYYTDKWGAYTRHLDPDQHTVSKRGTQKIERQHLTLRTRIKRLVRQTICFSKSTQMHDIVIGLFVNRYAFGRAV

SEQ ID NO: 192978 - protein, 386 aa, unidentified
MIEAVIERCAGIDVGKKFLVVCVMTGPLEAEPKTEIRKFGTIVAELELLREWLVREGCSHAIMESTGPYWKPVFNILEDSVEVVLANAYDVQNRRGHKTDPNDSRWLAHLLRHGMIRASFIPERAVRELRDLTRQRRQLVGEKAREHNRIQKILEDANIKLGDVLSDVLGLSGRLMINALLEGIMPAEEIAQLAQRKARQKIPDLIAALRGNRLTDHHRFLLRHALRHLDFLEAEIEAMNSEIRNRLSAEQFRTPHALLQTIPGIKQDSSAAILAEVGPNMEQFPSDAHLASWAGLCPGNHESAGVRKTARTNRGNHWLRSILTQCAWAASNHKNSTLQSFYWRLVPRCGRKRSLVALGHRLLRVIYYVLLRSQPYQEPNVHTISA

SEQ ID NO: 192979 - protein, 336 aa, unidentified
MNFVGIDLHKKTISVCVVNQERKVLKRATLYCVEAQRIADFFRGLGAFTAVVEATASYEWLWQLLEPLAQRLVLAHPKKLRVIAESKNKSDRLDAQVLAEFLALDMIPEAYRPTPRQRQHRTLVRQRQQIRRALVRARNRLRHLLGNYNADRRDLFTAAGLAYLVEVPVSAADRFVRDQLLATWEHHREQLAALTKELAALAKKAPAAERAARACLASAPGVGPVTVDVLISEIGDIGRFRSNKKVMAYAGLVPGQRESAGRKKELGITKEGSRLLRWAMVQAAWRVVRPAGRWRLTFEQLRKRRGAKKAIVAVARRLLGVLATLWRTGQRYRLAL

SEQ ID NO: 192980 - protein, 347 aa, unidentified
MKFYNQQHKYYCGIDLHARKMFVCVLDQKGKTMVHENINTDTDLFIQIISPYLGDIVVGVECVFCWYWVSDLCAKHQIPFVLGHVLYMKAIHGGKTKNDKIDSYKIALLLKGGNFPTAYSYPAEWRATRDLLRRRMYLMRRCGELVAHIQNTKTQYNLPGFTKRLARKYNHDGVAEKFENPEVRKSVEVDLAAIASLNQILNQLEWHIEKTAEQHDYHTLYLLRSMPGVGLILALVFLYEIQDIKRFPSVQDFSSYARLIKPVKTSDGKWAGKSNGKIGNHHLKWACNEAAILMLRESEKAKQYVAKLERKYNKGKALGIFTHKIGRAVYFILKNKEAFNMDRFFSQ

SEQ ID NO: 192981 - protein, 409 aa, unidentified
MDLLFARCAGLDVHKKTVVGCVRTPGAGRNERRSETKSFLATTRGLRELSEWLEGHDVTHVAMESTGVYWRPVYTILEGSFELLLVNARHVKMVPGRKTDVRDCEWLAQLLECGLLRGSFVPPKAIRDLRDLTRYRKVLIRERGHHVNRVAKTLELANIKLSSVVTDIMGKTGRAILDALIEGVDDVSQLADLARGSLRNRKAELREAVEGRMTSHYAFLLKQQLSMIDTLDDHIARLDAQIEESMRPFAEAYAYVMTMPGIAARAAQSILAETGVEMDRFPSPNHLASWARVCPGTHESGGKRKNVTTGRGNTWLRATLQEAAWAASRTKRSYYHALYHRLKARRGAKKAIVAVQHSMVVALWTLLSRSIEHQDLGHDYFDTRNKAGIRRHHVRRLRQLGYTVTLEAA

SEQ ID NO: 192982 - protein, 483 aa, unidentified
MMPERQGTLLPRKTSSPASPESFPLVAQETLYVGVDIGKRAHVAGFLSVTLLTRHQRFEHCPALSFDNSREGFRSLIDRIQTFVPLTQVQVLLEVTGHYHRALMQYLQDLDIPVYIIHVQKRREGLLKSDKRDALGLANMLFHQLEKGIQVDDPLQAVRKLAPPTEAAAQLRGMVQHHAELVRESTQRKSKLTSICDELFPELTRLLRNPNLPTALALRSRFPTPSDLALASFAELRAARGRTCSVSDAKLVELQRLAAHSIGAKDPARVHALVFEQKQLIAELNLLGDHLQLLEAEIIQVVEHSREGKILTSIPGIGPQAAATLIATIGTIANFERPAQLKSYFGWVPKVAQSGSSLDWTRLSPRGVRQMKQTMYLIVWRAMQWDSDWKEIYERLVARKCHTDERTRRLVGREKVIGRLAGQMTAVVYVLLKRDQELLAHLAPGAKPPEPQLYDSALHRQHRMGHYQPVRERSREEIQLPTK

SEQ ID NO: 192983 - protein, 407 aa, unidentified
MDILYPRCAGLDVHAGSVTACARIAAGGQVNYHHHTVSTTTAGLLALSEWLTGNGCSHVAMEATGVYWKPVWHVLESDFTLILANAMHIRNVPGRKSDMNDATWIANLLAHGLIRSSFVPPAPIQQLRDLTRTRKQLMRELTRHTQRIQKTLEDANLKITHGMSNIIGTSGRAILNALVAGETNPERLADLTAGRLKVTRTELVEALHGRVTDHHRFMIRLHLTQIDALDAAVRDIDARVGDALGPFRAAVSLLTTMPGLSDTTARVLVAEIGTDMTRFPSASHLVSWAGLCPRLDESAGKRRTTRTRQATPWLKTTLVTAAWAATRKKNGYLRAQFLRIQSRRGTKKAILAVASSMLTAAFYMLRDGVEYHDLGGQYFAHRDKEQTAKRLIQRLRDLGLVVEVSAA

SEQ ID NO: 192984 - protein, 355 aa, unidentified
MNSVRYVGLDVHRDTISAAVLNESGRMIQQSILATRAAAILDFIGGMRGTLNVTFEEGTHSAWLYDLLQRRVARLVVCNPRKNALLKSGNKSDAIDARKLAELLRADMLSPVYHGEKSAMEVQHLARSYALLTEDTTRVMARIKAVFRGQAIACAGKKLYGHKHRGEFLAELGAGALRRRAEFLYQELEAVQQLRRQAKRDMIVECRKYPETKLLCSVPFLGPVRAAVLIGRVQTPHRFRTKRQFWAYCGLALEMRDSGEYRMVDGQVERRKKPAQIRGLNWNHNHELKNLFKAAATSASACDGVFREFYLGLLKKNMQPEMARLTLARKIAAIALKIWKKGEAFDAEQVKLQAA

SEQ ID NO: 192985 - protein, 372 aa, unidentified
MPEKRKNKSSDSSRRQLQGLPLMRRNIAGIDLGSTAHWVCAPTVDDSGREITDFGATTPELIRMVEWLKERKVESVALESTGVYWIAPHEVLEAHGFEVLLVDTRQLAQVPGRDKKTDPTDCEWIQRLHSCGLLRGSFRPAEQICMLRTLVRDKANLVSESGDWVRRMQKSLDQMNVRVHRAVSSIEGITGMAILRAIAGGERDAQKRAQLRDPHCRKSEEEIAEQLSGHWRADHLFSLQQALKMYDAIQERIAAYEREILRKLGELASAKQQGQSASPPKNANKAKLIKNRGQEPLRQALYRMSGVDATQIDAIGVETMEVVISEYGPDLSRLPTEKQFVSHATLAPHVPKSGNKPVKKKSGTASAAAQRL

SEQ ID NO: 192986 - protein, 365 aa, unidentified
MDKEYYTTIGMDVSDRTTKVCVMVKQGINPKIVMETTIPTSKDGLAKFLATQDKSSPVVFETGMHCRWMNEVAEGIGFKVYIANPCRLRMITESKAKNDVNDARMLARIALSDPGLLHPVRLRGKEHQKMLNLHEMRNLLVKQRTGIIVQLRAVAKSMGFRIERSSTAHFHAIDTRAWPKEFRDITWPMLKNLEQLAVTIKTYEKQIRELAQTPTFKAQVERLMEIRYVGLYVATGFVAVTGGDMDKFEKSRDVGPWLGLVPKQDQSGDIDRQCHITKTGSPFMRRLLVESAQMIVRDSATDTDLKVKGMRFCRRGAKIAKRKAIAAVARSLAVLMVAMLKHPNTPYAPLSERCKMELLSMKASA

SEQ ID NO: 192987 - protein, 450 aa, unidentified
MGNGSGVSRGDRNRNARLARLRELVPIENAIVGIDLADKKQMVVVCDHDSKVLARRTFRCRAWDLGIALDWAAERAAAKGWVGVTVACEPTGHRWRVLGQLAADRSMPFVCVQPMLTSWSRRTEDLTFDKTDEKDAVLIARLTAQLRCYLPEPVDETWGRLRHLGARREQLIVEAVSQIQQMRDLLECVWPAGLDTARQPFRSKTWAAAMTVILDRDGGDFDRTRRLGPARFEQAVRREISRRGGQKPSLRILRGLFASLADPAGVIAHRAGALERVQLLLEDWQHNQRKVADTESRMTGVLDELQLTALVTSITGLSPVGAAAILAETGDPTRFATARALVKHAGLAPREKLSGAFIGRTKLTGQGRPGLRVAAWRAVWGAQRANPVYAARYRHLTGREQNKLTPTQAQTVIAAAILRHLHAVITTGRAWDPSIATHGTRQRIGTELAA

SEQ ID NO: 192988 - protein, 357 aa, unidentified
MLHRFYAGLDAGSTVSELVAIDEAGEPVAAIKFATGERHFLSAIQEARRSHPGLWSLAVEEGELAQWIADVLRDQVDRLVVCDPKRNVWIARDPGKHDRVDATKLAQLLKGGFLAEIYHPTDAARVEFKRAVQHYHDLTRSQAGLKRQIKSRFRVLGAIERGSKIFEKSGREPVIAQLASPTSQHLVRHLYELLDQAVRTQEKARRLMVALGRAFPEVARFQEVPGIGPVWACTFSAYIQTPHRFRSKRQLWRYCRLAITNRQSNGEPLGRQRLDPSGVGALKALSYQAFCSAQTSDNEFHRHFEESLARTGHRTHARLSTQRKILTVLWTMWRRNEPYRPGGTEEQQTEMNRAEAR

SEQ ID NO: 192989 - protein, 369 aa, unidentified
MEELNRAERVWVAIDLAKNVLQVHVEDEAGRVRTSKALRRDRVLGWCQSSLPVGTVIAMEACAGAHHWARQLRALGFAPCILAAHLVEPFRRQGKRGKNDANDAAAICEASRRARIHSVPIKSAQQQGVLVVHRLREGYKSERTALINSIRGLCAEFGVVFAQGPEELRRGLPDALEDASNELTGLARQALQRAHEHWLQIEEQLAWCDERIALHAREDERARAISRIPGIGPVTASALVATVEDFGQFRSAAQFGAWLGMTPSQDSSGGKTRLGRITKRGDVYLRTLLIQAAKSAVMTAHRRGDPISQWASRLKERVGWQKACVALGHKHARIVWAMLVRGRPFDATHVSSFPSPPGAAAVMTAVTAA

SEQ ID NO: 192990 - protein, 339 aa, unidentified
MHIASIGIDLGKTNFHLVALGERNKVLVRKKFSRAQLLVYTANLSSSLIGLEACAGAHFMGARLREQGHQVRLIPAQFVQPYRKSNKNDFIDAEAIAEAVTKQNMRFAQLKTEEQLDVQAMHRVRDRLVQRRTALINEIRGFLLERGITFAANPIHLRKSLAGVMEDAEQNLSPRLRWLLERLWQEWKQVEIDIQTITDEIERISKENALCRRLRQIPGFGPLVSTATVAAIGNGAAFRRGRDFAAWVGIVPRQYSTGGKQKLFGISKRGNIYLRRMLIHAARAVLLRVKYDTGGFGRWVHRLAQRAPRNKVVVAIANKLARIAWAVWSSGKDYQHQPL

SEQ ID NO: 192991 - protein, 412 aa, unidentified
MSSSIDRHLAVDLHKHYLVVGGVNSRQEVVLSPRRVDLERWLQWAQANLSKTDVLVVEATTNTWDFYDQTLPFVGQVLVADPRQVAWIAKTRVKTDPSDVLKLARLSAAHLVPTVWVPPPPVRELRALLAHRRRLVKTQTMLKNRLHSLLHRHHLVPPGSDPFGPKYESWWGELKVSPTEQLHVRHDLATLAQLATQIAEIDDELRRLSCVEPWAAEVPYLLQLPGVGLIVAMTVLAAVGDVTRFESAKKLVGYSGLGTSIHDSGLTHRTGHITKEGRKELRYVLVEAAWRAVESSDFWRTRFQKLCQRLDEHKAIVAIAHELLIVIWHVLTERAADRQANPDLVAFKFMVWSWKLTDAQRGGLTTRQFVRAHLLRLQLGEHLTHVVRGGARHLIAPADEVLALKPELRRVA

SEQ ID NO: 192992 - protein, 409 aa, unidentified
MELLISRCAGMDVHQATVVVTVRAPGDPGERRSVTETFGTMTPDLLALRDWLQAHGVTHVALESTGVYWKPVYYVLEDAFTLLLINMHELKRVPGRKTDVKDSEWLAQLLECGLLQSSFVPPPAIRDLRDLTRYRVQQVRDQAQETNRLHKVLEDAGVKLSTVVSDVMGVSGRAMLAALLEGKSDPVALADLARGRLRAKLPALQRALQGRFRPHHAFLLRQILTKIDFLEETIAQLTEEIDTRIRPFEPMLTALDTIPGVDRIAAISLVAETGGDMARFPSAGHLCSWGAMCPGQNESAGKRRSGKTRKGNVYLRRTLIQAALAATRKRDCALQTRYHRIKRQRGHKKAVVAVGHQILEIAYYVMRDGVTYHELGPDYFVRRDRERTKRRSIQQLEALGYRVTLNDAA

SEQ ID NO: 192993 - protein, 354 aa, unidentified
MTQTFNAAVSVVGIDIGKNSFHIVGHDERGAIVLRQKWSRGQMEARFANMPRCLVGMEACVGAHHLSRKLNSLGHDARLMPAKYVRPYSKGQKNDFRDAEAIAEAVQRPTMKFVATKTADQLDLQALHRVRERLVSQRTGIINQIRAFLLERGIAVRQGQRFLRAELPRILATPPDVLSPRMVRIIEDLACDWRRLDERVERLSDEIEAIARQDAGCERLMSVPGIGPIISSAMVAAIGAGDVFNKGRDFAAWLGLVPKQISTGDRTILGKISRRGNRYLRVLFVQAAWVVLIKPKIWERHGLKPWIEAARKRLHHNVLAIALANKLARIAWSVLARGRAFEARKLDQAANQSA

SEQ ID NO: 192994 - protein, 397 aa, unidentified
MYIVGIDIAKRKHEAAVIDGEGAVIIKPFSFTNNCSGYNRLLAMLTKAKLPLDEVSFAMEATGHYWLALFTRLQKEGFRVQVINPVQTNSIRSFYIRQAKTDPRDALLIAEVIRFGHFSESTLHPENIYELRELCRGRHAIVSMQADVKRKVVALLDQVFPEYETAFTNMFSDTSMAILQTCPTPKELSEMPLEELCHLIEVSSHKRFRMAKAQELQALARNSFGFAMAGDVFSTMIRLYAKHLVFLKQQVREMDRKIAEIMETLDTPITTITGIGPTLGAYILSEIGDISRFSSAAKLAAYAGIDPTMRQSGEYNGVRNRMSKRGSPYLRHAIWLAASSAVLHDPALKLYFQKKRDEGKPYMASVGHACRKMVSIIYAVMRDNKAYTPYIPNEISA

SEQ ID NO: 192995 - protein, 291 aa, unidentified
MYAAPLPVVGLDVSKATLAVCYQRGAHLHQLEVSNDKPGFTQLLQVCGNQCLFVMEATGTYYLALAYHLHEQGGQVAVINPLVIKRFIQMHLGKGKTDRKDAQWLLRYGQQQAVKRWQPEETVLVECRQLEQATEQLLKQKTMVANSLEALQQQPIISPIAQNRLQQTWQLLDDQVRALEAELLTLLEQRFAQEMNLLQSIPGIGRKTAGMLLLFAGGFTRLDNYRQLIAKAGLSPREHTSGTSVRGKARITKMGGALLRGKLFVCSFSAKKSNAACKALYERLVAKGKNG

SEQ ID NO: 192996 - protein, 323 aa, unidentified
MTTPAPIVVAGIDVGKEKLDAHIVEGSLQRQFNNDKCGRRALRNWLLKHRVNRAVFEPTGRYHRNLHQCLADAALETVLVNPLRSRRFAEAIGQCAKNDRVDAAMLARFGLLDGLESTSPQPRNLRLLSDLLVLRRNLVEQLGTLRKLSAELDPEAAGCPATTLAALQADIDGCDRRMRACIAADAALSRRDAIIQSIPGCGPVNAACLCAAMPELGRLGRRKAATLFGLAPFDRDSGQHRGVRSIAGGRAQPRHLLYMAALTAVRCEPSFQACYQRLTANGKPHKVALVAVMRRLAGLLDTLLREDRLWQAEPPARHLEPAS

SEQ ID NO: 192997 - protein, 326 aa, unidentified
MTVSHLSDNTFVGIDVGAASLDVAWYRGDSAHYANRPDAIATLVRRLQAQPEVTRIVMEPTGGYEKPLVKALRQAQLPVEIIHTTRFKAYRELVGVKAKSDTSDARLLAAYAAAPDEVRGRKANHVKLPEDAIREALSELASRRDQIKHMIHAETCRLGTVRLAELRQAITVHLEALRAEDKQVHRMMLELVRQRIDLRRDQRLLKTIKGIGVKSAISLLASVPELGRIDNKAAAALIGVAPFVRQSGTMNAPARIHGGRAAVRSILYMAAVTASRHNPVLRPFYERLIAKGKPPKLAIIAVLRRLVVFANAVLKSGQPWKGATAS

SEQ ID NO: 192998 - protein, 353 aa, unidentified
MQTTPAAEIVVGIDTHKHTHTAVALNALGARLGAMTVPVSRDGYRRIETWARAFGPVRAFGIEGTGSYGAGLSRALREAGHRVLEVNRPDRSARRRHGKDDTLDAEAAARAVLGGQATAEPKSGTSSVEMIRHLKVARDAAVKAKTQAMLTLKAIIVSAPAELREQLEGIRGKLTLVRHLAALRPGPMVSTAASAKAALKAIARRWLVLREEIEGHDRELDRLVSTTAPDLTAARGVATATAAEMLLLVGDNPERVRSEGALAKLCGACPIPASSGRTSRHRLNRGGNRQANAALHRVVVTRMRLHQPTIDYVGRRTREGKTKAEIMRCLKRYVAREIFGLLRKPNQAASKAS

SEQ ID NO: 192999 - protein, 342 aa, unidentified
MNHYAGIDVSLEQSSVCVVEANGKIVREAKVASDPRSLIDWFGSLGFGLERIGLEAGPLSQWLFAGMKEAGLAVELLETRHVRQAFKTMPVKTDRKDARGIAELIRLGWFRPVHCKSMGSQETRAMLTTRTLVQSKLYDIEMSLRGILRGFGLKVGRTTSNRFGGRIRELVGEHPTLHVLAEALLAVHEVLLRELKGLEKRVRLMARDDTQARLLMTTTGVGAVVSLTYGSAIDDPGRFKRSKMVGAHFGMTPKKYQSGETDVTGRISKIGDKSVRTALFQAAHIILTRPVKSSALMIWARRLAKRIGMKKAKVALARKLAVIMHRMLVDQKPFNFAAGAAA

SEQ ID NO: 193000 - protein, 496 aa, unidentified
MRVAVATVGSAEIGRDGRRRLWRWPSGLEVRGGPLRVPRTHEELIGPEGSCIGVAIIGPDASRPIGMRWLTRGWHMPRKFSFDTCGGLPYPSKEAAIGMPSTGLRGMLRLIEGKHRDEHQMGWTAPGFLSHYPGRRNQRIGTARMNISMIGLDTAKSVFQVHGVDESGKAVLKRKLQRSEMVPFFEKLPPCTVVLEACGAAHFWARTLIGLGHDAKLIAPEAVRPFVKKRKKNDAADAEGLVTAGRQPGTRFVPVKDTEQQGILAIHTSRAILVKQQTMLSNSVRGQAAEFGHTAAKGNEKLAELVTEVEADELVPARARQAIVVLYDQHRALDEQIETLEAEIVAHAKNDEKARILDAIPGVGPITASLVVATVSDWSVFKTGRDFAAWAGLVPRQNGTGGKVRLGKITKAGNKQIRKLLVIGATSMVHRAEHWDSALGRWTASLLKQGRPVRLVTVALANKVARVMWALMAHNDVYRPQGAVKPSAAASAAVVA

SEQ ID NO: 193001 - protein, 344 aa, unidentified
MDYFAGLDVSVKDTSVCIVDGTGKIVREVKVASEPAALLAVLTQADCRFKRIGLEAGPLSQWLFSALGEANLPVICVETRHMRAVLQAQINKTDRNDARGIAQMMRVGLYRPVHVKTLRSQKLRMLLTHRKLLQSKSIAIENDLRGTLRNFGLKVGVAGTAKFEARIRELVENLPDLAALVEPLLVVRRVLREQIAVLHRRLLVIVRNDEVCRRLMTTPGVGPVVALTYRATIDVPARFRNSRAVGAVMGLTPCKYQSGESDRTGAISKCGDEMLRVMLYEAAQILLMRSTKWSWLKAWAMQIARRRGIKKAIVALARRLAVIMHRIWVDGTEFRWTKQEAAAA

SEQ ID NO: 193002 - protein, 354 aa, unidentified
MNITTLGIDLAKDVFQLHAIDERGKTLLTKRVKRHKLADEIAKLPICKIGMEACGGAHYWARRFQAMGHEVKLMSPQFVKPYVKGNKNDANDAEACCEAVTRPSMRFVPIKQTVQQDMQALHRVRRRLVSQRTQFTDQMRGLLAEYGIVIAQGIASVMRKLPLILEDADNELSTDGRTLFSELYEELKFLQIRIQGYEDRIKQIAKIDERCLRLQTIPGIGPITATAFLSSVGDINVFTRGRQLSAYLGLVPKQSSSGNKTRLLGISKRGDRYLRCLLIHGARSVIKVVDRKSDPYSRWIQTLITRCGIHKATVAVANKNARIAWALLKNNSEFKVNNACEFVDNYAVDNQAVA

SEQ ID NO: 193003 - protein, 340 aa, unidentified
MNIKRIGLDLAKNVFQIHGVDHHEKVVLRKTLRRAHMMTFFSGLSPCLIGIEACGSSHYWARELTRMGHTVRIIPPKLVKPYLKGNKNDANDAAAICEAISRPGMRFVALKSEAQQTLQAEHRVRARIIRERTALCNEIRGLLSEFGLVLPVGINHVRKALPEILSQQEQWNDRFIRLLCELSEELQMLDERISRHDRRLQQAARDDIRIKRLMEIEGFGPIVASALVAAVGDAKQFKNGREMSAFIGLVPRQHSSGGKERLGHISKRGDSYLRTLIIHGARAVLRFSAGKTDRHSRWLQSVAERRNNNIAVVALANKNIRIAWAILSRSEEYRGVENAA

SEQ ID NO: 193004 - protein, 331 aa, unidentified
MQKKEFFIGVDVSKLTLDVALRGTRHHIRVPNSSEGFKQLMAWLKSLNIALNDCWFVLEYTGGYEYRLVQFCQSKQITFTRVPGLQIKKSLGMQRGKNDKIDSKRIAEYGYEKRDKLKEHTVCSTAITRLKQLLTQRRGFVNDKKAHEHRMNELLVMMDFKANDPMIKRYKKAVDFALDMIDKTEAEIKKIIGKDDAMSRNFQLITSIPGIGNVNGWMTIAYTENFECFPDGRTYGAHIGVVPYEHSSGTSIRGKSKVSRMANKLLKADISMAAKTSVQHDPEMRAYYDRRAAMGKQHGAIMNEVKFKLVLRMFAVVNKGEVYVKNLKLAA

SEQ ID NO: 193005 - protein, 382 aa, unidentified
MEVVHERCAGMDISKRDAKVCLRVPGTRPGIYVKQITVHGAMHRDIAELRDHLRAQQVTLVVLEATGDYWKPFYYGLEDVLNVMLVNARHAKNLPGRKTDISDAQWLAELGAHGLVRASFVPPWPIRQLRDLTRQRTLLAGQRSREIQQLEKLIESTGIKYTSITTRSLGVSGRLFLEALIAGDRNPISLADLAKGRLRVKAEQLRIAFEGNFTTHHGNIARLHLDRIDLLNAHIQTVTGLIDTLINEHSLGWARNLLATIPGISQTGAENILAETGVDMACFETPANLASWAGVCPGQHESAGKSKNVHTRPGNTHLKGALGIAAMAAARTNGSFFQHRYKRLAARRGPARALVAIEHSLLIAIWHILKNGEPYRSGQAIA

SEQ ID NO: 193006 - protein, 311 aa, unidentified
MSSEAYIGVDVSKDLLDVKVLPSNESQQFSNDDPGIKKFIAFVKKIDPQLIVFESTGGLEMLAVSSLMVKHLPVVVINPRQVRDFAKATGRLAKTDSIDADTIARFARDIRPEVRPIKDEHTQFLSALNARRRQIVDMLVAEKNRLYTAPKSNKKNIQKHILWLERSLADINKDIDKTIKKSPTWRENDIILQSFKGVGPVVSATLLCDLPELGTLNRKKIAALVGVAPLNCDSGRFRGRRRIKGGRSNVRRKLYMAAVASLRHNPMIKDFYERLIDAGKPPKLALTACMRKILTILNAMMKNRTYWITTC

SEQ ID NO: 193007 - protein, 408 aa, unidentified
MELEAIYQRVIGLDIHQAQITACALIQEDDGTTRTERRQFGSYKKDRQALAQWAAALAPDEVVMESTGIYWKSPYAVLETVGIRAKVVNARHVRNVPGRKTDVGDAQWLAMLARAGLLRASFVPPARLRELRLIARQRQNLVGALTAEKNRLHKVLADGGIRLGVVVSDLHGQSARAMVQAIIAGKSPAEVLQYASNRLRASREEIFDALQAELSASHLFVLRETLDHIQEIETRIARFDARLLQGLEAERAALALLQTIPGVDQMGAAMLLVEIGTDMDAFGSAERLASWAGVCPGNNESAGKRKSGHMRKGNRYVRRLLCEFAHAASRTQSVFKSKFQALVVRRGHKRSIIAIGHKILRIIFHMLKRGECYRDSTTDYQALSVQRNAPRWIKALIKFGYLSQPLRT

SEQ ID NO: 193008 - protein, 370 aa, unidentified
MKKRITFVGLDTHKNSIEAALADEGRNTESRLYGTIGGDLASLDKMIRKLQTTGVELRFVYEAGPCGYEIYRHLRAHGFHCDVVAPSMVPKRSGDRIKTDRRDARNLARLYRAGELTAIYVPREDDEAMRDLVRGRQDAIHAQRKARQQLGGFLLRHGFRYPGKCVWTLAHRRWMAEIKMPHPSQQVILEDYVHSVEEGTQRVHRLTEQILQLMPDWRMHPLVTALQALRGVAPVVAATAVAEIGPMGRFEKPRQLMAYLGLVPSENSSGGSVRRGAITKTGNGHARRALIEAAQAYSHPARISRVILKRQEAVPEPIRQIAWKAQLRLCARFRKLTARGKSRNRVVTAIARELSGFMWAIAKHVPVPQD

SEQ ID NO: 193009 - protein, 454 aa, unidentified
MVTVPQQSPIPLHPEYYYAGIDIGKDAHVAAFYSTYLQRSVGHYSACPTLPFTNSRLDFERLAGELQRYAPLSQWRVLMERTGHYHLPLLQYLQEQGIQCYTVHVQKRPRKQKNDRRDAQGLANMVYRQIELGALPDDTEQEVRKVMPISEVAQSLRGLTQYRYDLTKQIVRTCNQLTAISDLLFPEFALIFKDPNGLTARIVRERYPTPVDVVAVSLDDLKDCRLPKSTRPGNAALEHLQELAKGSIGITDPGRVDALVLQQRLLIKQLRVLQDNEEVIKAKIAAVVSATREGQILLSLGSFVGTLAAGEIIASIGCIENFASAGKLKAYTGWNPIEDQSGKSQNGIALNKGGNRMLRQTMFLVGMRAVKDNTEWRGIYQRLVIRQCPFDAKLKRRKGRMRPLSRIIGQISTMIYMFLRADADLVAKATPGTDPPKPMLYTRDVHRSHINRRR

SEQ ID NO: 193010 - protein, 279 aa, unidentified
MKRDKYMGMDVHQATTVVAVIDAEGKIVLETIVPTAAGAIRRLIESISGPLHVTLEETTQAEWLHDMLQGFVTEVVVCDPRRNRLLAEGSKADKADARKLAELLRTGMVRSVWHGRQTTRGLKEMVRAYETFAVDTQRTMMRIKALYRSRGIATQGSAVYQRKDRDHWLKQLIEVGMQQRAAWLYEQLDHVRELRKRAKAAVLIEGQRHRAVQLLRTIPQVGPVRAAQIVATAGTPHRFRTKRQFWSYSGLAVVTHTSAEYELRAGRVVRRNKPVATGG

SEQ ID NO: 193011 - protein, 472 aa, unidentified
MISFGRLLSCTARAGAWGRQGETVPKKPNKVGSLPVIESNAAGIDIGATQIFVAVPADRDPEPVRCFPTFTIDLERLADWLQQCQIRTVAMESTGVYWIPLFQILEKRTFEVRLVNAHHVKNVPGRKTDVADCQWIQHLHSVGLLRGSFRPDDEICAIRSLWRHRDNLIQLATLHLQHMQKALDQMNLQIHHVISDLAGTTGLAIMDAILAGERDPHKLAQLRDPRIRASEETIMKSLVGDYREEHLFALCQSLRSYRHYQELIQEIDLKVKQMVQQLPSKVTEGEKPPKGQKPRKTPWRNEPPQLRDDLYRAFGVDLTEVPGINTLTAQMLLTEIGTDLFRFPTAAAFCSWLRLCPDPKISGGQVLSSRTRPTKNRAALALRMATQGLHRSDTFLGDYFRRMKARMGVPKAMTATAHKLARIVYHMVTTQQEYDATIFQQQEQRRRQQKSARLHAQARELGFHLVPINAVP

SEQ ID NO: 193012 - protein, 397 aa, unidentified
MYIIGIDIAKRKHEAAVIDGEGTVIIKPFSFTNNCSGYNRLLAMLAKAKLPLDEVSFAMEATGHYWLALFTRLQKEGFRVQVINPVQTNSIRSFYIRQAKTDPRDALLIAEVIRFGHFSESTLHPENIYELRELCRGRHAIVSMQADVKRKVVALLDQVFPEYETAFTNLFGDTSMAILQTCPTPKELSEIPLEELCHLIEVSSHKRFRMAKAQELQALARNSFGFAMAGDVFSTMIRLYAKHLVFLKQQVQEMDRKIAEIMKTLDTPITTITGIGPTLGAYILSEIGDISRFSSAAKLAAYAGIDPTMRQSGEYNGVRNRMSKRGSPYLRHAIWLAASSAVLHDPALKLYFQKKRDEGKPYMASVGHACRKMVSIIYAVMRDNKAYTPYIPNEISA

SEQ ID NO: 193013 - protein, 400 aa, unidentified
MISVGIDVSKGKSTVCILKPYGEIVSKPFNITHTQKDLSELSSMLFRLNDEVKIVMEATGIYHLPVLTYLQEKGFFVSVINPYLMKSYRNESLRKAKTDKIDSRIIANYGIDHWFKMKEFQTSGEIYEELKLLGQQYRHYMKLHLLSLAELTHLLDLTMPGIKNLLASWNETNRKDKRSDFVERFWHYDIITSMSEQEFTEKYILWAKEKKYVPSQEKAKVIYTLAQESIPTLPSETSSVKMLVTEAVRVLKEVDATLGLILSRMQEIAKTLPEYSVVREMGGVGNTLAPKLIAEIGDVRRFRNGKALVAFAGIDPPPYESGQFVGCNRKISKRGSASLRKVGYETMRSLKMRSRPEDPVYRYVVKKESEGKSKKSAKIAGLNKFLRIYYARVTELYKNI

SEQ ID NO: 193014 - protein, 326 aa, unidentified
MAVLGIDIGKTSFDVHLLADDHAASVHLPNAAAGFADLRDWLVRQRQTKPAALHACMEATGNYGLDLAAFLVAEGIKVSIVNPKQIRAFGIAELRRNKTDKLDAALIARFCRAQNPAPWTPPLPDMLALREAVRRCAALKEMRTAELNRQKAGFSSEAVRASIQRNLDHLNTEIEAIAGEIRTLIAHNAELHRKAHLLRSIPGIGEITATVLLAELPNIADFEPKGLAAFAGLSPAEHSSGTQTKHSGISRIGNGTVRSACYLAALSASRHNPRLTDFAQRLKAAGKPKKLVLIAVARKLLVLAHAVIRTDRPFDADHIDANPANT

SEQ ID NO: 193015 - protein, 365 aa, unidentified
MTKVRTWAGLDVHATATVACVVDAASGEMSVHRLAGRTSEAAAFCAQLPAPVRVAYEAGPTGFALARTLHTAGVGCVVAAPGKIERPAQDRVKTDRRDAERLVRLLMIGGLHPVRVPSTEEEALRDLVRAREDLRGDLMRARHRLSKLLLRHDVRYDDTASAWTAAHRAWLARLELGERAAQATLLDYLGAIDGLLIRRDTIERMIGELVPHSPWAEAVARLRCLRGIDTLSAVGLCAEIGDFARFEHPGQLMSYVGLVPSEHSSGQTRRQGAITKSGSRHARRLLVEAAWHYRRPPRTGTTLQRRQQDQPAQAIAIAWKAQQRLHQLWRRLDSERGKRKTIVAVAVARHLAGFCWAITRTDTHT

SEQ ID NO: 193016 - protein, 413 aa, unidentified
MALKIVYPICCGMDVHKTFVIACIAKTDIKGITTYKSHRFSTYTSGLKSLLQWLLDQECTDVCMESTGKYWIPVFNILEEKCKVVLAHPKYVKAIRGKKTDKKDAKWIADLFKHDLVSGSFMPPADVRQLRDLVRYHSKLTNMVSSEKNRFQNSLTVSNIQLANVLTDTLGISSMKIINSILENPDGPVELESLIHSSLKKKLPELSLAVDGIFSPEQAGKIRVIMNHLDNLKTRKDELELLIYQIAVPYSAQIDLILTTPGIKSTLSAIKIISEIGVNMEVFPSAKHLCSWAGLTPTNNESAGKKKSVRVSKAGCYIKPLLVQCATAVVKSEKHPEIRNRYLRLKKRRGHKKAIIAIARMLLTALYNMLKNNEVYNAELYKKSDILPIDREISIEQAILIAKQQGYRIKSAS

SEQ ID NO: 193017 - protein, 417 aa, unidentified
MDTLHFRAAGLDIHKKFVMACIRLTDPTTGQARESVKRFGTMTDDLQSLLKWLQEAGVTHVAMESTGVLWKPLWNVLDDQRLELVLANPQELRQVPGRKTDVRDCQWIAHLLSCGLITSSFVPSRAQRELRDLTRYRACLEDERVRTVNRIHKVLEDANIKLGVVATDILGKSGRDMLSALAEGETDAGRIAEFARGKLKAKIPDLRRALTGCMKDHHRFLLKHLLKDLDHTETQIAELDARVQELRRPFVDEATLERLDEIPGVNVRTIENVMAEIGCDMTQFPTAGHLSSWAGICPGNESSAGHVKRRAVTRGNRWLRRALVEAARAAARKKGSYFNAQYHRIAARRGANRAAMAVAHSLIVVIYHLLKNPDQPYQDLGTAWFDTLDPQRLTRHLVKRLEQLGFQVQLTPKDTAA

SEQ ID NO: 193018 - protein, 323 aa, unidentified
MDTLDFLGIDIAKKTFNVALERNDKLKHKKFENNPEGFKQLDSWLVKQGVIEIHVCLEATGSYSEALAMHLHQAGHKVSLVNPARIKAFGQAELRRNKTDRADATLIARFCSMHRPSAWVPPPAEIRELQALVRHLDDLIGTRTQLANRFTDGPKVKSVLESLQSLIEAVDAEIKLTRKKIREHINGHPRLKEDCALLETIPGIATQTATTLLAEIEHLRHYKHARQAAAYAGLSPRLRESGTSGKRSRLSKTGNSRVRKALFMPAISAKQHNPVLRQFSERLARRGKPKMAIIGAVMRKLLHLAFGVLKTRKPFDPNHPVAA

SEQ ID NO: 193019 - protein, 410 aa, unidentified
MEVLHSHCAGLDVHKDTVVACVRHMVNATVKREVKTFATTTKGLLALADWLASERCTHVAMEATGVYWKPVWHVLSDGDFDLVLANAKHVKNVPGRKTDVNDATWHADLLAHGLIRASFVPDTETQVLRSLLRTRKQLVRERNGHVQRVQKTLEDANIKLDSVISDIMGVTGRAMLQAVIDGESDPVKLAALAHPRIKTAPEKLREALRGRIMSHHRLLLQLHLQQIDALDVAIGTIDREVDARIEPFRTAVELMLDIPGIGNLSARIIAAEIGTDMSRFATASHLISWAGLCPKNDESAGKRRSTTMRKGAPWLKTTLVQCAWAAVRKKNSYYHAQFHRLRSRRGAKKAICAVAASLLTTVYHMLSNGTCYNDLGHDYFDRRSKSQQTSRLVTRLQNLGYAVQITPLAA

SEQ ID NO: 193020 - protein, 343 aa, unidentified
MQTVTTIGLDIAKSVFQVHGVDAAGQVVIRRQLKRRYVLAFFQKLSPCLVGIEACASSHYWSRELQALGHSVRLMPPAYVKPYVKRQKNDMADAEAICEAVTRANMRFVPTKTPEQQSGLMLHRARHLFIRQQTAVINAIRAHLAEFGIVAPLGRQGVWELLRVIADRNDQRVPEIVRGCLAALGNQLLRLKEEILGFDRMILAWHRSNATSKRLNCIPGVGPLLATALVATTADPKAFRSGRHFSAWVGLVPKQHSSGGKDRLGGISKQGDRYLRSLFVAGALAVIRYAKIRGAKHRPWVAALLARRPTKVAAIALANKLARIAWALMAKGERYKIPAALTA

SEQ ID NO: 193021 - protein, 436 aa, unidentified
MRVMYECVAGLDVHKKTVVGCRMRVTQDKRIEWETKTFGTMTADLLKLHDWLSEWQVKQVALESTADYWKPVFNLLEDGFEVVLVNAQHVKKVPGRKTDASDAEWLAELMLHGLLRASFIPPKPQRVLRELTRYRTTLVRERGRVVNRVEKLLESTNIKLSSVVTDVMGVSAKAMLRELAAGATDPQALATLAKGRLRNKLKALEAALTGTVDEHHRFILAQQLGHIDFLDEQIEVMSQQISQHLAQMAAPATNDDDGSGSAEREAGQPLSWSAAVELLDTIPGVDRRTAEVILAEIGLDMSQFPSADDLASWAGFAPGNHQSGGKRYSGRTTKGNRPIGAALNQAAWAASRTKDTFFKARYHRLAARRGKKRAIVAIGRSILVSIWHMLSRQEPYHDLGADYYDQRRKDTKVSYFTKQLSKLGFVVTLDPAPTAA

SEQ ID NO: 193022 - protein, 406 aa, unidentified
MAVMIGVDPHKASHTAVAIDDKERQLGELRVRSSADQVKQLRSWAAKWPKRTWAVEGAGGLGYLLAQQLVSAGETVLDVQPKLGSRVRLLATGNVNKNNPNDARSVAVAALRSKDLRPVIAEDHAAVLKLWSKRRRDLGSLRTQVVCRLHSVLCDLVPGGHGKKEITASQAARILSDLKPVGSVEAARFELALDLLADMRRIDAQMLEAKRRLEVAVKASGTTVTEVFGVGPYVAGTVIGYVVDVSRFADRDHFASYNGTAPIEVSSGGHKVFRLSRRGNRRLNHAVHMAAVTQVRFRHSEGRAYYDRKIKEGKSHKEASRCLKRRVSDAIFSHLVADAKRKAERATAGPGGQRGNGSVSSVAGSHPGRQLFGQATPRPVPAIGPGATRRSSEAQEPVRKKSRRAS

SEQ ID NO: 193023 - protein, 341 aa, unidentified
MEQATTIGLDIAKHVFQVHGANATGHVLFRKRITRAKLLGFLAAQARCVVAIEACAGAHYWAREIAKLGHHVRLIAPAYVKPFIKRQKNDAADAEAICEAAQRPNMRFVPVKTEEQQANGIVFRARDLLVRQRTQCVNALRGHLMEYGYVFPKGITHVEALVALVEDLQSALPDSARVILKLLIDTFTALEAQITALDAEINQRSKSDPTARRLMTIPGVGPITATAITALVPAAEGFPAGRDFAAWLGLTPLQKSTGGKQKLGAVSKRGERTIRRLLIIGASAVVQQASRHGAPKGSWLAQMLARKPKMLVTVALANKMARIIWALLVKGGTYRTPAVAA

SEQ ID NO: 193024 - protein, 341 aa, unidentified
MAIVGGLDIHRAQLTFDYLDLDTGEVQTGRVVGDRPHLRAWLGRFEGEDEVAFVLEGCTGWRYVVEELQRAGIEAHVAEPAETAALRGRKRRAKTDRSDARHLRCLLADDRVPESWIPPAHVLDTRVMVRLYKDLIDERTAWFQRVQATLYHLGVPVIAARLVTDEGRELLAAADLPSAARRAVETGMVQIGRINADLEPLRADIGAISTRQPGCRALREAHYGIGALTSVAIWSEMGDCRRFRNSDNAVRHTGLDVTVHSSDGKRTRGHLAKQGPPILRWALYEAALYAARPSSPDHEYFKKVKARHDAQLALLSMARKLARRCYHTLRNLGDEAFASPA

SEQ ID NO: 193025 - protein, 417 aa, unidentified
MSTDVRFFGGIDWASETHQVCLVAADGKIIGERAFAHGGAGLAEMCDWLVTTSGEEPPTVAVAIEVPHGPVVEILLERHFQVDAVNPKQLDRFRDRFTVAGAKDDRRDAYVLADALRTDRHCFRRLTVEDPVVIELREWSRMAEDLQQERNRLANRVREQLWRYYPQALELGDDLAADWFLDLWALAPTPAKAARLRESRVTSLLKAHRIRRIEAAEVLHILRQKPLVVASGTVEAATAHITAVAARLKLVNQQIKQAHRRLDELSDKLAEGREEDAPGQKSKQRDVTILRSLPGVGRIVLATLLGEAAEPLRKRDYHALRTLSGVAPVTRRSGKRCVVLMRQACDLRLRTAVYHWARVAIQHDVRSHARYAELRKRGHSHGRALRSVADRLLAVACAMLKSQTTFDPEHAVEAVAA

SEQ ID NO: 193026 - protein, 398 aa, unidentified
MISVGIDVSKGKSMVCIMKPCGEILKPPFEINHTSDELDSLVSLIKSYDEETRVVLEDTGHYHLPVSTYLASHGIFVCCVNALRMKKFCTQSIRRAKTDKIDSVKIAVFGITYWNELTEAYSSAITYDELRFMARQYYQTTSMFVKARVNLSNLLDQVMPEIQTLLQDQPSNHKLTEFVNKYIHFQNILDMEERKFTTDYCKWAEKKGYRCNERKAAEIFALAQNGIPTLPNSNSVKIAVREAVKMIHSIEESRNTILAQMQELCKTLPEYSIVRSMNCIGDTLAPRIIAEIGDVRRFNNKHSLIAYAGIDSPPYQSGTFNATERHISKRGNAYLRKTGYEIMQSLVKHKPQDDPVYDFIQKKLNEGKRGKEAMIAGLNKFLRVYYGKVMEIYSSETS

SEQ ID NO: 193027 - protein, 427 aa, unidentified
MSVTQDAKIRQVTDRTIIIGVDIASEVHYARAFDWRGVELGKVYSFENSADGFRGFSVWVSELASKTKKDHVLVGAEPTGHYWFSLGVYLRDNGVKLVLVNPYHVKQSKELDDNHPSKTDRKDPKTIAKLVIGGRYNEPYIPDGIYAELRVAMNCRWRILRELTATQNQIQRWLKIYFPEYKEVFGSFDCVSSMAILRIAPMPEDLKVLGADGINAVWRKAKLRAAGMKRAARLYEAANDSIGCTDGGAAARMELGLLLDDYEAKQQQYGAVMAVVEELCAQLPEVAELLKIKGIGLVTVAGFLAEVGDLRRFDSPRQIQKLAGLAIRENSSGKYKGRTSISKRGRAKLRAILFRAAIVLAAKNPEFLEIHNYFTGRATNPLKKKQSIVAMSCKLIRVFHTVVTKECAYDPVRLLADIHRNQPVAAA

SEQ ID NO: 193028 - protein, 345 aa, unidentified
MQITTIGLDLAKSVFQVHGVDAEGKVAVRRKLRRAQLRQFFAGLAPCLIGMEACGTAHFWARELMAMGHQVKIMPPSYVKAYVRRGKNDAADAAAICEAVMRPHMRFVPVKTEEQQAALMLHKARELLVRQQTMLINAVRGHMAELGMSAPQGSAKIKDLIAVIQDSKDQSIPALARAALQPLVRQLHTLDEQVETLDREIKAWHTRNETSRRLATIPGIGVLTASAIAATVPDPSFFSSGREFAAWLGLTPRQNSSGGKERLGRISKKGNTYIRRLLVTGATSMLRFARAKTAAGADWVNGLLQRRPARLVTVAMANKTARIAWAVMVRGENFRVPVRPMTEAA

SEQ ID NO: 193029 - protein, 342 aa, unidentified
MDYYAGLDVSLEETSVCVVDGDGAVVHEAKVATEVEAIAETLRRFARSLARVGLEAGPFSPWLHRGLHGAGFAVICIETRHLKASLGAMRNKTDRNDARGIAQMIRLGWVRMVHVKSPESHAIRLLLTNRKTLQRKALDIQNEIRGTLKAFGLKVGKVSRRSFEQKVCELIGDQPWLGEMVQPMLTARAVLLDQFTRLHRVMLDAVRRDEVCRRFMTIQGVGPVTALTYKTGVDVPQRFAKSKNVGAHFGLTPRRFSSGEIDYQGRISKCGDAMVRTALYEAANVVLTRTTRWSALKAWAMRIAKKRGLKRARVALARKLAVIMHRMWIDGSEFRWTDEVPA

SEQ ID NO: 193030 - protein, 441 aa, unidentified
MPRRIGLDVHREFAQIAVWEDGVVRHAGQIQTTPEAIRAFADSLLPTDEVAIEATCNTHAIVKLIAARVARVVISNPMKTRAIAEAKVKTDKVDAAILAQLLAADYLPAVWMPDEHTQALRRQVARRAHIVRQRTRLKNQVQAILQRNLVPKPPMSDLFGIKGRCWLANQPLPPDEDLAVEALLRQLDFHAQELRIIDAELGRIALEREEVRRLMTIPGIDATIALSIVAAVGDFHRFGAPGRLVSYLGLNPRVRQSGGQPASHGRITKHGRAHARGMLVEAAWVAVRTPGPLRAFYERIRSRRGMQIAVVATARKLAVLCWHLVIKGEDYAFQRPSLTEAKLRKLELRAGMPARRGRKGKGAAHNLTEVRRRERELSQQAERAYRQLVSDWQAKAPKPKEGVAAANGTRLNRPSAGQAARQASVPEPALRSGVDHAHAQA

SEQ ID NO: 193031 - protein, 351 aa, unidentified
MLVVGIDVHKKSHTAVAVDGVGKKVGEVVVAATDSGHRQLLGWARRRFGRLPDRWAVEDCRHLTGRLERALLSAGQVVVRVPPKLMAGARRSVRSPGKSDPIDALSVARASLTEPDLPAARLDEPTRELKLLIERREQLVAERTREVNRIRWHLHALDPAQDPASSAFNTATTRARLHHWLDMREGIDADLARMVLNHIDRLCDLIRELTSRIERLTLEQAPPELLALPGCGVLTAAKILAETAGATRFRSEACFAMNAGVAPIPVWSGNTAGRVRLNRGGNRQLNAAMHRIAITQVRLGGLGRAYYDHRRANGDTSTEAYRALKRRLARVVFNILTRHEQASATCIPQAA

SEQ ID NO: 193032 - protein, 392 aa, unidentified
MSHQDYHFDASRSLTALEQGGTIIAVIEMSQSKWLVAALVPGVERHPLKKFDAQEEGLLKLLHRWRNEAGQAGREIKRIVVAYEAGRDGFWLARWLRARDVEAYVIHPTSIAVSREHRRAKTDRLDTELLMRAFLGWLRGEKRHCSMVAIPTIEEEDARRPNRERQNLVTEQTRIVNQMKAIFVRFGIRAFRPTLRKVEGKLKDLRTAEGSPLPENTRAELCRHLARLHVVRDQIRAVEQERLRKLAAAPAVEKGSHVMVRLIARVLGVGIETADMLVNEVLSRRWRDHKAIARYAGLTGSPDESGKRRRERGLARAGSARVRCGMIQFAWRFVRFQKGSALAQWFAARTADRRASTRKTMIVALARKLLIALWRLATRGEVPPGIILRPAS

SEQ ID NO: 193033 - protein, 334 aa, unidentified
MEKTYFIGVDVSKNELDFAIVNSNKVLFHLEVTNDKTGIDSFIKQLKKQTEFSFHNSLFCMEFTGIYNNILLNYLSANQAFIWVENARQINDSMGTLRGKTDKLDSIMIAQYAYKNRENPRLWSPKREVIQEIDRLTAIRLRLKNAAKMLQTPLSDAKNFIGKKAHKSTCNACQDSINALKKDIKNIEKEIEQLIKNDPELAHLFEIITSVKGISSVTATEIIITTNEFKDIDDPKKFGSYAGCVPFERSSGKRKGKSKVSPIANKKLKSLLHLAALSAIQYSKELKAYYHRKVNEGKNKMLVINNVRNKLILRVFACVNKNQKYDENYSFSLV

SEQ ID NO: 193034 - protein, 394 aa, unidentified
MRFVGIDVAAEPHVVAVVDETGAVGLKPTPFTEDAAGYQQLFDRLGVPTDTLVAMAATGHYWKNLFAALVARGFAVALLNPRRTHRFAGEDLRRTQTDAIAALGIAHFAAQKRPPATRLPDRAVEELRELVRFRDRLVQDLGDRVRQLHRLVDLGFPEFTRDVRDLSSELATAILRDYPTAAAFTGVSPRRLAGLRYDGRHKVGAELAQALLQAVARSVGRHHGEAYRIQVRYRCEDLDVLRRRLRDREGDIERLLHDPEGGSLLTTIEGIGPQTAARLVATFGDFSGFRRGAAVAAYVGAIPALRQSGKRPPLRASLTPIGDAQLRAKLWMPVLTAVRKTPWLRAYYEALIARGKLPKVALMAAMRKLLHAAYRVATHRRPFVPCPVGEGARP

SEQ ID NO: 193035 - protein, 430 aa, unidentified
MNSNTQNKKIEAITEKTLVVGIDVGSETHYARAFDHRGIEYSKKPFKFSNDEAGFAAFKAWILEHKAAHEKDKVVPGMEPTGHYWFNLGKFLQDNGMKPVLVNPHHVKKSKELDDNSQTKNDRKDPKVIAGLVREGRYMIPYLPDGVYADLRTASNMRFQIQSELTRILNRISRWFNIYFPEYKTVYGNLDAVSGMLVLKTAPLPEDILTLGVDGIDRIWRDAKLRAVGKKRAQTLVNAAEHSVGSKEGAISARIEIRMLIEDYESRNARLQEIIALIEALVKKIPMTEKLLAIKGVGIKTVSGFLAEVGDISRFKSPKELQKLAGLALVENSSGKHKGETTISRRGRKRLRYLLFEVAMALVSKNREFAELHNYYTTRKQNPLKKMQSLMVVAAKLIRVFYAMLTKGVDYDPKKMLGDIRRPVTSLQAA

SEQ ID NO: 193036 - protein, 423 aa, unidentified
MEVIHERVAGLDVHKDSVVACVRIVSEGKAKRECRTFGTTTAELEALRDWITSWGCTLVAMEATGVYWLPIWKILLGGAFEMNIANARHIKAVPGRKTDMNDAMWIADLAAYGLIRASFVPDEEFHELRTLMRERKQLVREQTSHVQRIQKTLTEANIRLDSVISDIMGVNGRRIIEAMIEGVRDAGKLAALGDRRLKATRKELHDALHGRLTEHHRFLLKLHIDQHDALEATIRVIDAEVEKRIARLDKQAKAAETPLSRLIELLVSIPGVSYLSAITIISEIGSNMSRFPTAGHLLAWAGMCPGQNESAGKRKRSRLRKGAPWLKTMLVQCAWAAKRQKNSYYRAQFYRLQARRGPQKAICAVAASILTAIYHILKDGVPHQDLGIDYFDNRKPEAKAKRLVAQLAKLGFEATLQPIAKAA

SEQ ID NO: 193037 - protein, 391 aa, unidentified
MICVGIDIAKDKHDCCILDSDGTVRADCFTIPNNMDGFKQLLQTIRNCTKKSDKIKVGLEATGHYSYNILGFLLDNDLAVYVMNPLHTNLYRKSLSLRKTKTDRVDARTIATMLLSDVDLKSYTDIAYHNEELKSLTRYRFEKVRERAKLKQSVSRLVTILFPELEKLVPSLHGASVYALLSEYPGAKQISEVHLTKLTNLLVTASKGHYGKEKATLIRETARASIGSVMPAKSLELKHTIKLIQELTSEINEIEDSIQKIIDELNPPILSIPGMGVNSAAVILAEIGDFSNFSSPDKILAYAGCSPSTYQSGKLTNCYAHMEKRGSRYLRYALYNATKYVCHWNPVFAEYLAKKRAEGKHYNVALSHSMKKLVRLIYALQKSGKTYLAAA

SEQ ID NO: 193038 - protein, 412 aa, unidentified
MLKIVYPICCGMDVHKSFVVACIATTNDHGVTTYKSKRFSTFTGDLRRCAAWLSENNCKDICMESTGKYWIPIYNILEHTCNIVLAHPKYVKAIRGKKTDKRDAKWIADIFKHDLVSGSFIPPADIRQLRDLVRYHWKLTNFNVGEKNRAQNCLTVSNIKLDDVFSDVFGKAASAITTRLLESNEPFDVKPYLTKNIKKPIEQIQAAVDGEMCAEQAEKLRIIRSHMDSLELCKLNLESLILATAEKYLPQLGLVMTVPGIQSFAAIGIISEIGVDMSVFPTSKHLCSWAGLTPQNNESAGKKKTTRISRAGAYIKPLLVQCALCAIRTKQFPEVRNRYLALKKRRGHKKAIIAIARMLLTAIYNILKWNEVYNSELYRKADRPPAHREVSVEEAVFILQRQGYLVTAPAVT

SEQ ID NO: 193039 - protein, 343 aa, unidentified
MDVSTIGLDIAKSFFQVHGIDAAGEVVVRRRLRRRQLVGFFEKLGPCLVGIEACATAHHWGREIAALGHEVRLMPAHYVKAYVKRGKNDAADAEAICEAVQRPTMRFVSLKSTEQQSMLMLHRTRELLVRQRTMLVNALRAHMAEFGIVTRVGLPQIKELLAVIADRDDHRLPLGARACLESLGRQFLSLHEEICAADKRLHAWHRSNPVSQRLATIPGIGPVTASALAASIADPEVFKSGRELAAWIGLVPRQNSTGGKQRLGKISKQGDRYLRWLLVAGAMTVIRHAKRRGATNQPWLDDLIARRPTKVAAVALANKMARMAWALLRHGGAYRQPVVTASL

SEQ ID NO: 193040 - protein, 500 aa, unidentified
MPFPIPDGKGQSQLLPSPIPDGKGQSQLTLHSYGVGVDCHSRFFQVCILIPNGREIAQIERKVPALWPELRTARAWVLDTLRQLGVGVSPTDLRYTCESTGQYHMPLCLAWRGRPAIINPSDTGHVRRKTDRLDAQKLAQHSLHGLWRESWMAPDEIQELRVLTNQRSKLVGERGRLTNRINSDLLRFGHVVGQLGRIKGSLVRALVEDFSAHGSVGLHGDYFSDTPIPAEVVAVLQQRWNRIDALDQEIKRIEELCLQHADRLTWRIGAGRTAPGGQLRANLQSIPGVGPQTALTWLAEIGDITRFGSANKLLAYCGLDPSDQISAGKVTGTKTRKGNARLHGALRNAARAMLAHAPSCKFAMWARGYMGRHARDSKSKAIHALARRIGKALYYCHLKNEPFDDTGYDALLNESSYSNCPVEEMGLSAGVVRVLKGNGLRTSRQVVDAFYSDLGRRPGCGKLTVQAVATWIEKHRDRSRERTRKSRGPEAPGDPPQAEG

SEQ ID NO: 193041 - protein, 309 aa, unidentified
MAMMTTNKEYGVDVAKQWLDISDGKQVIRIDNDVRSIKSFLKQVSKTTCIAIESTNTYHELFVELAIAAKHAIYMIDGYRLSRYRDAVGVRAKTDVNDAHLLLRYMKAEKHQLIPFKPLPKAVKRLNRLLKARAHLAKTKASVGLSLKGVSELGQTRSALINRIKQAMALIDKRVQDCIKLAGYSNDYQRCLSIPGIGPQNASALVAMYHRGTFRKSDSFIAFIGLDVRVRESGYFKGKRKLTKQGNPEIRRLLFNAARSASRTTAWNAYYLSMRNRGHSTTATAVALSRKIARLAFALLRDQSEYQAA

SEQ ID NO: 193042 - protein, 399 aa, unidentified
MFVGWDWASTAHDVTVIDSAGELVHRMAIPHTEDGIARAVAKLADYGDPGELPVAIEATRGLVVDRLLGVGHPVIAVHPNAFHAVRPRWGAARAKNDPGDSFKLADYARTDIHRLPMLVPTLPETLELQALTRQRDCQLALRIAAVSQLAALLDQYWPGGKTIFAQLHSPIALDFLDRYPTPRAAASLTPARIEAFCRRRGYSGRRSGAELLDRLRSAPISASRLGEPVVAQMIRGQVAVVRALQAGIDALDIVIAEKVTAHPYAGLLAVLPRIGTLNLAQIIGEVGPILERATSFDQLAAETGLAPVTRSSGKTHTVAFRYATNRRARQALHTWLDNSRRSSDWAAQRYAAARARGQRHPHALRTIGRAWLRIIWACWRTKTAYDPARDERAKQPTAA

SEQ ID NO: 193043 - protein, 410 aa, unidentified
MEVLHPRCCGLDVHKDTVVACVRLVIDGKTVKEVRTFSTTTADLMALSQWLAENKCTHIAMESTGVYWKPVWHILADGQFELVLANAAHIKGVPGRKSDVKDADWVSDLLAHGLIRASFVPDSPTQEMRTLIRTRKQLSREQARHILRVQKTLEDANIKLDSVISDLMGVSGRKMIEALIAGQRDPVKLARLADPRVKASQETLRQALRGRVTRQHRFLLRLHLDQIDGLDAAIAKIDREVEAAIAPFRTAVEQISSVPGVKNLAALQIISEIGTDMKRFPSDANLVSWACICPRSDESAGKRRSTRIRKGSPWLKTALVQSAHSAVRMKGTYFHALFHRIRSRRGVKKAIVAVAASILTAIYHMLKDGTMFHDLGPDHFNRRTKEQQKDRLVKRLAELGYAVELAPLPN

SEQ ID NO: 193044 - protein, 459 aa, unidentified
MARKKRAPEEIPDQEFEQVFERVCAIDVAKEFGQVCVRTPRTDGRRASKVFEVDSITGDILTLGESLLEQGIEMITLESTSDYWRIFYYLLEGCGLRVQLVNARDVKHVPGRPKSDKHDCVWLAKLTERGMLRPSFVPPGEIRVLRDYTRTRVDLTRDRTRHWQRLEKLLEDALIKVTTVASKITAVSVRDMVDALIRGERDPEALADLARGVMRDKRRDLVRALDGRFDEHHAELATILLGQIDSLTAEIDRLTTRIEQLVDQLPTPEHPVDPDRGATPAPSHDNPQPATAPSQPRPALQRLAEIPGINLDAAQVILAEIGPDISRFPTPEHLCSWARLTPQLIQSGNKRRGGKTSKGNPYLKGALGTAAASASRTNTFLGERYRRIVKRRGKGKALVAVARSILVIIWHLLANPDADYQDLGANFYDSRIDKDRRKRQLIQQLEALGLQVTLTPAAA

SEQ ID NO: 193045 - protein, 322 aa, unidentified
MVDRKGKRVEQEKLPNDLSVILEFLKPYQKEIVGIVVESTFNWYWLVDGLMDSGYKVHLANPSAIQQYSGLKHADDKHDAFWLAQMLRLGILPEGYIYPKEERPIRDLLRKRRHLVKLRTSLILSLQNIISRNCGVQCKGNEVKRLKEDRVSPLLEGNEDLALAGQTSKEMIDQLTRQIRKIEAWIVQRIELKESYRFLLTLSGVGKILALTIMLETGPISRFAQVGDYASYCRKVPSKWTSNDKTKGHGNQKNGNKYLAWAFSEAAEFARRYDPQARAYYTRKMRKTNFMVAHSALAHKLARAAYYLMRDQVPFMPEKLFG

SEQ ID NO: 193046 - protein, 344 aa, unidentified
MNHTQGNSQAKYHSYLGLDISKDKIDCALLRNEAPPMHKIIDNNETGFAELQNWLIEQQVELNRVHVCCEATNVYYIAVAIHLHQSQIAISVVNPSIIKSYAALKLKRIKTDKQDAKLIAQYCQTECPNLWQPQSKTKAQLKSLCRRAEQINQLLTMEKNRAHVADEFSQESIKRAIEWLEQELNSCRASVANLIKQDKTLQKQQQILTSIVGIGQTTAQILLSVLVDIDKFSTAKKLISWLGLSPVVRQSGKHKGIAKLSKMGDRSIRKALYTPARVACTRSKLWRGWFDEKVKTKPVKQVYVLMMVKLVKYAYYCIKHNELFDEKRHVRAEQSWKTVKGEAL

SEQ ID NO: 193047 - protein, 351 aa, unidentified
MATLPSIKRYAMNTLQGKKHFIGIDISKDTLDLSLLSEARYGAFKDHRVSNSFKGYDAVLVWLEKMGVKAEDCLLCMEHTGTYGLLLFAWLNQMGFDFCVEPGQRIKKSMGMVRGKSDRVDARRIADYACTNRSKLTLFTMPSTLIIQVKQLLTYREQLVKIGTSLKNSLASHEQYQAVSGLRGIANDIRQQIQENERRIDGIEEQIVATIGADAEMKRNFDMATSVKGVGLIIAAFMLVTTNNFTGFENGRKYACYSGIAPFENTSGSSIKGKAHVSHLGNKRVKALLSNGASSACTWDPEIKAYYNRKLKEGKEHMLIINAIRCKLVNRVFAAVKRQAPFVKLYEHNFD

SEQ ID NO: 193048 - protein, 361 aa, unidentified
MSHTSAWNNATEMPAVTIGLDLGDRTSRIFEVSATGEQLAEAVVPTTPSALAKYFGKRASCRVVLEVGTHSPWVARTLTELGHEVVVANPSAVYGKGRRRKRNDRMDAEFLARQGRADVKLLHPIRHRSAAAQADLALLRARDQLVQTRTGLINHVRGAVKAIGARLTRCAAEAFPRRVRAEVPEALRPALTPLLEVIGELSQRIAGYDRQLVAAIRDRHPVARRLQQPAGVGPLTALAYVLLVEDPQRFGRSRDVGAYFGLVPRLDESSDSRPQLRISKAGDVLGRRLLVSAAHYILGPFGPPCDLRRYGEALAARGGKNAKKRAVVAVARKLAVLLHRLWVSETAYDPDYLATRQTRAA

SEQ ID NO: 193049 - protein, 348 aa, unidentified
MYAGLDLHKNFSVITAMNGQGKEVVKQEKVANNGEIIKLFQGFNEPVVIAMEATRSWYWLYDLLEENGIEAKLTHPLKTKAIASAKVKNDKIDSRILAHLLRTDLLPQSYVPPKPIRMQRELLRYRASLVKMQTGVKNRIHAILAKNNITHSFSDLFGKRGKDFLHDLPLSETYRMALDGYLSVLDQLEQQIRSVNTKIVVSARDDEDAKLLTTIPGVGYYGALVIKSEIGDINRFPSAKQLCSYSGLVPSTYSSGNTTFHGHITKQGSRWLRWSLAEAMGHCVAKSRHLQAFYWRLQRRKGGKIAKVATERKLLEWIYHMLKERKTFQKIEKMVSYQGKPVLVTGLR

SEQ ID NO: 193050 - protein, 343 aa, unidentified
MKITRVGVDLAKKVFQVHGVDAAGRRVWKRQLKRSSWLSVLTEAVEPGCEIGMEACGGAHHWARELKSRGFEVKLISPQFVKPYLKSLKNDVNDAEAICEAMSRHHMRFVAVKTVEQQNIQAIHRVREGLMNHRKAKANQIRGLVAEYGLVAPRQMGPLRKAIPCWLEDAENGLRPAFRVLLHGLWEDLQNLDIRLKVLDKEIFALSESHADAKRLKQLRGIGPLIATALVAQFGDGRHFKRGRQASASVGITPRHAGTGGKNYLFGITKKGNPYLRSILIHGARSVVSKAKHKDDRLSRWVTELARRKHPNVAAVALANKTVRIAWAMLRNGTDYDPELAMA

SEQ ID NO: 193051 - protein, 408 aa, unidentified
MDLTPLHKRVMALDVHQAKITACSIVEHDNGRVEVTKHDFGAFKRDRRALTKWALEIRPEVVVMESTGVYWKSPFAALEAVGIIAWVVNARHVKAVPGRKTDMADAQWLATLARAGLLRASFIPPLPMRQLRLVARQRQKLVGMCSAEKNRLHKVLVDAGIRINVLVSDVHGTSARAMVKALIAGKPMHEVLDCKGRLRAGREELFEALSTEQFSAVHRFVAEEITQHIEQIEQRIARLDQYLLDGLRPWQPQLKLLQTIPGIDEQGAAMLLVEIGADMSAFGSAERLASWVGICPGNNESAGKRKTGRIRKGNAWVRRLLCEFAQAAARTRCALKAKFDALAIRKGHKKSIIALAHKMLRTVYAMLANGTHYQDKEVDYEALNVQRNAPRWIRMLKKHGFIPTTACA

SEQ ID NO: 193052 - protein, 322 aa, unidentified
MCKIIGIDISKQTFDVGFNDGSNWHHLVLDNNEKGFKRLLKELSNNDWIVMEASGPYYLKLATFFYGKGYNVCVLNPLIIKRYSQTRLIRAKTDKKDAQTIAEYGAQYRLKQWKPEPTNISKIKQLYTVLELLNKEVHQSERQLEALTATGVMDKDLKSILQGIVSYLTCKRNKVEKQIEEIAQSVYKSTLDRLKSIPGIGTKTAIMLTVITGNFENFETHKQLIAYVGFSPRIYQSGTSVKGKGHICKMGKSQIRKLMYLCSWSAKRCNKDCVDMYERLLEKGKPERVIKIALANKLLKQAFSIAKNKTYYDENFNKKTCF

SEQ ID NO: 193053 - protein, 350 aa, unidentified
MLIIGCDYHPAFQQIAFVDTDTGELQERRLQHREEAEKFYRELAVQGMKVRVGMEASGHARWFERLLAELNFELWIGDAAEIRTKRVRKQKTDRQDAQLILQLLLEDRFPQIWVPSWENRDLRQLLWHRHRLVQARTRMMNQLQAVALNEGLRCRKKLFREAGRKQLEGFRLARWASRRRHDLLELLDRLTPTIAELTQAIEQEVEKCPAAQRLRTHPGVGPLTALAFVLIIGKADRFQCGKQIASYLGLVPLEKSSGNQRRLGHITKQGSSLLRFLLVEAAQVTARSLPKWRSKYYHLSMRRGRKIAKVAMARKLAVRLYWMMRKQWDYGQLTKFSSHAGKLGTGDGVK

SEQ ID NO: 193054 - protein, 343 aa, unidentified
MKHYIGLDVSMKRTFICVINEQGKIIHEGSENTDPHSIADYLSKLGLEDMTVGFESGSLTPYLVTGFKERAIDAICMDARKLSPILALKVNKTDKNDARGIAEALRSGMYTRVHCKPEESINRAILLTSRRALVEQQTHLKNTVRGLLKGYGIRLGAISAKKFSAAVMKQIESCQEIVILSIKCLLDAFDTIVEETGKLDKKMLEIAYYDKEVRRFMTVPGVGPVTALTYKAEIFDATRFKESRSVGAYLGMTPTQYASGETQRQGKTSKCGSKELRFLLVEAGIVVLTRSKKWSKLKAWGLKIMRKKGLKKAAVAVGRKLAVIMHRMMLEEKDFIYGEPKAA

SEQ ID NO: 193055 - protein, 414 aa, unidentified
MDVVYTQCAGLDVHKKTVVAAIIVPDGQGGLHKETRTFGTMTVDLLALSDWLMGHGVTHAAMESTGEYWKPPFNILESNFEVMLVNAQHVKAVPGRKTDINDAEWLADLLRHGLLRASFIPPVGQRELRELTRHRSNFVRERATLVNRVQKVLESANIKLASVASDVMGVSGRAMLAALIEGHASPTEMADLAKGKLREKREQLVKALEGRVKPHHRFILTELLCQIDNVEEAVSHFDEQIQLLCVPFEAAIALLDTIPGVARQTAEIIVSEIGIDMSRFPSAAHLAAWAGVAPGNNESAGKRRSGKTRKGNQALGVALNQAAHGAAHTKGTYLSAQYHRLAGRRGKKKAILAVAHSILVIAYHLIKRQEPYRELGGDYFDQRRPEATAKRLVKRLQQLGYEVVIQSQPANVAA

SEQ ID NO: 193056 - protein, 349 aa, unidentified
MFAGVDTHKDTLAVAVIDHAGRVVRQLELPNQDSGYVRLLALLSSHSVVRVGIEGSGNFGWPAAIYLLERDLNVVEVPPLMTSRERLSRPGQGKTDPVDAVAIARITAREDALPPVRPMTGHAADLRVLTEYRDQLVNERTATANRVHTDLGWLRPGYQHQLPHLTNTAHLHAALELLSGEDSVRAAVTRNRLARMLTLTEQLAELRIQIDALVKASGSTLPEVYGVGPVVAATIIGHVFDVRRYPTRHHFAAANGTAPIPASSGRTVRHRLNRGGNRQLNRALYTIAITQIRADTEGRAYYQRKRAEGKTSREALRCLKRRLSDLIYRTLRADLANAAQRTPTLSIAA

SEQ ID NO: 193057 - protein, 310 aa, unidentified
MEAIYVGVDVSKDRLDVHVLPSGQAFAVACDGKGLNELIERLSSVRPRLIAVEATGGFETIVAAAIAGAHLPLAVINPAQVRHFAQAIGKRAKTDPIDAAVIARFAEAVKPEPRELPDEPARLLSELVGRRAQVIEMLVAERQRERRASALRVRKSLARHIATLEKELPEIDRDIDAMVCGSPVWRDKEDLLVTFPGVAHKIARNVLADLPELGRLTRRQIASLVGVAPFTRQSGRWKGKSMIAGGRPFVRAAIFMAAFSAIRCNPVLRDFYQRLLAHGKPKMVALIAVARKVLTILNAMLRDRKQWQPA

SEQ ID NO: 193058 - protein, 377 aa, unidentified
MKNGTKVYVGMDVHKDSVMIAVLPEGAREPTLVKRLSHDPRGIRRLLDRLAREHEVRACYEASGAGYVLERKIRSWGHECEIVAPSLIPRRPGERRKHDRKDAEDLARLYRAGELVTIRVPAEREERVRDLVRCRETLQREALQSRHYILKFLARRDLVYREGRNWTVKHFAWLRAIQRDGVLEVEDQVAFGEYLALLDYKLGRREELDRQIEALALEPPYKEAIGRLCCLKGISTHAAMVLVTEIGDFRRFEHPGKLMAYVGLVPTEHSSGGSRRQGSITKAGNSRVRHVLVQAAWNYRFPPRLSAVLKRRQQGQPPDAVAHSWKAQHRLHKVYKRLAFRKNNKIAAVAVARELAGFIWALMQDCAPDHEAGRKAA

SEQ ID NO: 193059 - protein, 318 aa, unidentified
MAASPMVGVDVAKDRLDVAVRPSGEAWSEANDDAGVRALVARLRPLGPALIVCEATGGFERAAIAALAAAGFPVVVANPRQVRDFARATGQLAKTDQLDAAILALFAERVRPTPRPLPDAAAQLLDAVLTRRRQLLEMLVAEKNRLGFAPKPLHRGIQAHIRWLERQVDDVTKELAGLIEASPVWRAKDDLLQSVPGVGPIVSSTLLGELPELGTLSHKQIAALVGVAPLARDSGTLRGKRLVWGGRASVRTALFMAALCGRRWNPALKRFYERLKAAGKPTKVALIACARKLLTILNAMVRDGKRWAVPAPSVQYSC

SEQ ID NO: 193060 - protein, 318 aa, unidentified
MKITAIGIDISKDHLDIAIRPTGETWRVAHTPDQLPALLARLQALDPERIVLEATGGLEVLLATQLAAAGLPVVVINPRQARDFAKATGQLAKTDPVDAGILAHFGEALKPEVRPLPDEQTRALEALLTRRRQLVEMLVAEKNRHAALARQPKLQKGVAEHINWLNRRITDLDDELKGQLEQSPVFCRNDSLLRTVPSVGDVTSRTLLACLPELGKLTHKQIGALVGVVPFARQSGQWKGEAHIRGGLLEVRSALYMATLSAVRYNPIIKAFYQRLLAKGKKKKVALTACMHKLLTILNAMIRQQQEWKAPQISAATS

SEQ ID NO: 193061 - protein, 313 aa, unidentified
MECFVGIDTSQERLDVYVEPTQEQFSHRNDDTGIAELVKRLKALSPTLVVIEATGKLEIPFMNGALEACLPVVVTNPQRIRDFARSVGQSAKTDTLDARIIAQFAEKVRPELKSLPDHDQQKLVELVVRRDQIVAMLAAETHRLHRVSPFMRTEIQQDVTYLMSRLNEISERVQQLVRNHPVWKERRRLLESVPGVGPATSACILACLPELGRCSNRQIAALVGVAPFNADSGTRKGQRFTRGGRSRVRKALYMATLVALRYNPVLTAFYTRLITAGKRKKVALVACMRKLVVILNTMIRHQQPWRTQTAMQT

SEQ ID NO: 193062 - protein, 335 aa, unidentified
MEFEFFIGIDVSKNELDFSVQQGKCFLFHKEIINEPEAIKMLLKELSKLCGFSLSKAVFCMEHTGIYSNHLLSCLYQNRANICLESATQIKRSLGNLRGKNDKVDSMRIAAYAYKNREELRLWSPRREQVQQLAHLSSTRSRLIKAKKMLKTPLREYGSFVKKKASKQNTAVCNKALNGIEASLENVEKLIMSIINTDPELKRLFTLVTSVVGIGRVTAVQLLVTTNEFKDINNGKSYACYAGLVPYLEESGVFKGKGRISHMANKKVKTLLHMAALVAIQHNEELKLYYERKVNIEKKNKMSVINAVRNKLVQRIFSCVNQNRKYEKNYLKSVA

SEQ ID NO: 193063 - protein, 413 aa, unidentified
MQCLAVPGDDAMRFFVGIDWASQTHAVCVLDPRGHLHWQGTVPHTSEGLAALLGRLRRFHRRGPVRVALERPSGLLVDTLVDAGFEVVPIHPNALKASRPRYSAAGGKSDPGDAFILADVLRTDGHRLRPLHPPSDDTRALRALVRGREDLVAQRVALANQLRALLERFWPGAAAIFADIDSPIALAFLTRYPTPHSAARLGERRLAQFLGQHAYCGRRPVAELLARLHRAPASQVGEAEAEASGDIVRAIVAVLGPLVAHIQHLSAAIAAALPQHPDGRLVQSLPRSGAVNAAQILAELGDDRARFSTDDQLAAEAGLAPVTQASGKHHAVVFRWACNKRLRRALTTFADNSRHASRWAALVYQRARARGCRHPHAIRILARAWARVLWRCWQDRTPYDVTRHRAAQTVAAA

SEQ ID NO: 193064 - protein, 365 aa, unidentified
MSSVPSAAELIHLGMDTSMNEIVAGVLRPGEEMPVVSRIPNDKESIRRLIGRFPDRRLLSACYEAGPGGYELHRLLTSMGVACDVVAPSLIPKGASDKVKTDRRDSVRLTLMHRAGLLTAIRVPSPAEEAVRDLVRARGDLLDDRRRMQQRLNAVLLRHGQTWRGAKWTYAHRVWVDKQVFDEPALAEAFALYRGGLDAREAELRAAEARLAAWAGRDPLAGPVARLGAYRGIAQLTGLTLAAEVVDWRRFASARAFMGFAGLTPTEYSSGSRTRRGHITKAGPEGVRTALIEAAWAYRYRPAIGVTLVRRQAGLPPETLARSWKAQQRLHARYKKMTGRGKPAGVAVVAVARELAGFVWAEMTS

SEQ ID NO: 193065 - protein, 405 aa, unidentified
MKPGNNLVEEIDSDETERILNCAAAVDVAKASGMVCIRRPHPSIEGRRLSRVWEVESTTNSILALGEDLVALGVERVVLESTSDYWRPFFYLLEAVGLTVWLVNARDVKQVTGRPKTDKLDALWLAKLNERGMLRPSFVPPREIRALRDYTRLRTELVEERSRHKQRIEKLLENALIKLSSVATDLLGVSARAMIEALIAGERNPKVLADLARGKLNAKRAALLEALTGRFDDHHADLAQLLLEPDRRLHRQDRRLTTRIEQLVAELPEPSPPAGRQPSTPAREVPVEHDPDVDRLTTVERLDEIPGIAERAAQIIIAEVGLDMAQFPTPAHLVSWAKLSPKTIQSGPRSKVGKTGKGNRYLKGVLGEVATAPPRRTPSSASVTGVSCAAVASNEPSSPSPDRSS

SEQ ID NO: 193066 - protein, 370 aa, unidentified
MGKSALYVGLDVHKMSVDVAVAEPGPGAEVRFYGRIGGDLEALDKVTRKLQAKGAELRFAYEAGPCGYQVYRHLTAQGHSCLVAAPALIPRRPGDRLKNDRRDALALARLLRAGELTPVKVPDADDEAMRDLTRAREDAICVERRARQRTVAFLLRHGRVYPGKTTWGRGHWAWLLEQVMDHPAQQIVLQEYLDAVREASARVLRLTGQIRDLVPQWHQAPFVAAYQALRGVSFIVAATVVAEVGDLDRFNNPKELMAYLGLVPSEHSSGASVRRGRITKTGNSHARRVLVEAAWAYRLQARVTRHLLKRQEGLPECVRQLAWKAQLRLCARYRRLLARGKARQTIVIALARELAAFLWAIGRAVAPATA

SEQ ID NO: 193067 - protein, 351 aa, unidentified
MHYVGLDVHARRSSLCILDSCGKVVKRLEVKGSWPKLMERVAAEVPRPFSVCFEASCGYGHLHERLSALAERVAVAHPGKLRLIFRAKRKNDRVDAEKQAKLLYLDQVPLVHVPGADVRAWRGLIELRRKLVGRRTAVKSQLRALLRGAGCCDAPAGKALWSKRGLKWLAAAALGEADALRRDLLLEELAQADERVGRVTRELDRRADAHPGVALLRTIPGVGPRTAEAFVAYVDDVRRFARTRQVGCYLGLVPCQDSSAGRDRLGHITGDGPPTARMLLCEAAWQAVRRSPSVKAFFERVMHGEPGRKKIALVAVAHKLARSMAAMLRAGEAWREDEQEQDRGQGQEPGA

SEQ ID NO: 193068 - protein, 345 aa, unidentified
MTEAYDGRQVVGMDLHRRRSVLVRMTEDGRKLETVRITNTPAALRREIAKAGKHPRVVLEATYGWYWAADVLEAAGAEVHLAHPLGVQAYSCRRVKNDQRDASDLADLLRMGRLPEAWIAPPEIRELRELTRYRHKLVQVRTSVKDQVHAVLAKLGIPVTHTDIFGVHGQAWLEELKLPQPYAGKVTSLRQLAGELSAEITLLERVLGDLLAGHEGYAAIQQLPGIGPVLAAVIVAEIGDIRRFRKPGQLACWAGLTPRHRESDAKVTRGHISKQGPRILRWALCEAIQHQPAGSRPRQVKDGIIARRGPQARNIAKTAAVRELLTLIFYALRDGRVRRAGSPAA

SEQ ID NO: 193069 - protein, 341 aa, unidentified
MEVSTIGIDIGKSCFHFVGFDRRGAIVIRRRCSRTQLIRTLSNLPRCLIGMEACCGAHHLARILITQGHDVRLIPPQYVRPFVKSQKNDMLDAEAIGEALQRPTMRFAPIKTVSQLDVQALHRVRTRLIARRTGVINQLRGLLLERGVTFPVGRRALGERLPAVLENPAADLSPRFCGLVHHLREEWRQLDRTIHEADLEIQAVATDDELCQRLTQVPGIGPLTATALVAAVGNGTAFTQGRDLAAWIGLVPRQHSTGGRTTLRGISKHGNAYLRCLLIHGARAVRRHHRLRPHRLGRWIANLEARAHPNVVVVALANKLARTAWAVLQRDARYDGRLLSV

SEQ ID NO: 193070 - protein, 450 aa, unidentified
MSKGSGVSRGDRRRNARLAELRVLVPRENAIVGIDLAEDNQALVVTDHDSRVLARRSPRCKAWQLGEVLDWAVAKAQARGFESVTVACEPTGSRWMHVQQACAERGLNFVCVQTLVTHSARVAEDYTRDKSDQKDAVLIARLTAELRCYRPEVIEEEWATLRYLGQRRDALVTEAIRCRQQIADRLALAWPAVLGAAAAPLGSVTFLACLQVVAERGDGDPGVLRRYDLAEFTQIVRGVLPRWGGQRICHRIVGCFHAALGDSRGAVPARRRGALKLAGYALADLRRARKLQVTVEAEMTGQLDVLGIAGVLASIDGLSVQVAACILAEIGDPARFGSSRALVKHAGVAPCENSSGNSAGQARISRRGRPVLRKAAWRAAWAMIHGANPVLAAKYAHLTSRDTGQLAKGQAHIACVAALLRWIYSVITSRAAWDRRVAAGTISHTAPMAA

SEQ ID NO: 193071 - protein, 412 aa, unidentified
MQDILTCAMGLDVHRDVIVACLARGELGTEPEIEIRSFSTLIPEMRKLRDWVLEVECRHVAMESTGIYWQPIYEMLEPCFDGQINILVVNARHMKNVPGRKTDMRDAQWIATLLRAGLLNGSFIPDKTFRELRHLTRYRKSIVHDITAQKNRIDKFLQSSGFRFTAFLSDAFGASGRNIIRHLMEYGDISREALDKCLKTQTRKRIDEILVALNGSLSEHQRSFLRMIFEHLESLERHRHTVEDAISEEIVKHEAALSLLCSIPGIDVTAAASIIAEIGTDMSAFPDSQHICSWAGLSPGNNESAGKRKSAHINKGNPYLKSMLCEVGWVISGKRTLYLSGWYWRVKQRKGAKRATVALARKLLALIYTMLKTGTPYNEECFEIRRKQSERKRASRMVNELQKLGYFVVAPD

SEQ ID NO: 193072 - protein, 350 aa, unidentified
MNATTVAVDLAKNVFELALADERWKIIERARLTRAQFERWFDNRKVDRVVMEACGSAHHWARTLRARGIEVRLLPAQYVRAYVKRDKTDAADAQALLEAARANDIRPVAVKSIEQQALQALHRTRSGWMSTRTRRINTLRGFCREFGLVVPEGAATGLACIARYLADDRSGLPELLRPSMRLILDEIRLMEARIGQLEQALSQIAKHSPDCQVLQSVPGIGLLTSTAMVAAVADPRSFDSGRRYSSFLGLTPREYSSGNTRYLGRISKRGDRYIRMLLTHGARSVLRAATVAHRAGRPIDRLKSWALAVQARTNHNKAACALANKLARIAWAVWVKQEKYQSASIKALSV

SEQ ID NO: 193073 - protein, 342 aa, unidentified
MSHYVGIDVSLKESSVCVVDEKGKIVREAKVLSEPDALVQFFSELGLALTQIGLEAGPLSQWLHAGMVKAGLPVVLLETRHVKAALSAMIVKTDRKDARGIAQLLRMGWYRPVHCKSLPAQEVRALLAGRKLLQSKLLDIELSIRGLLRGFGLKMGEVSKGRFAARVEELIAGHAMLEQVIGTMLAAREALRAEFNRLHRAVLAITRKDAVCKRLMTAQGVGALTAITYKSAVDDPRRFAKSKAVGAHFGMTQKRYQSGETDINGSISKVGDATVRTALFEAANAVLTRSRRFSSLKRWGLNVAKHRGMKRAKVAVARKLAVILHRMWVDETDFRWGQEQAA

SEQ ID NO: 193074 - protein, 351 aa, unidentified
MDSKANDNTVTTIGIDIGKNTFHLVGLNARGAIVLRQKLSRGQVVVRLANMPPCLVGMEACVGAHHLSRQLLSLGHDVKLVPGQFVKPFLKGQKNDFRDAEAVAEAVQRPTMRFVPTKSVDQLDLQALHRVRSRLVSQRTAIVNQIRAFLLERGIAVRQGLRFLRQSLPDILANRTDLLTPMMVNMIGGLVGDWHHLDQRIDDVTSEIETVARDDEACQRLMTVPGIGPIIASAMVATIGDGSAFRRGRDFGAWLGLVPRQISTGDRTILGRISKRGNSYLRMLFVQAARVVLLRPANWPKHSFGRWLEAAAKRMHHNVVATALANKLTRIAWSVLYHGRGYEPRMCAELA

SEQ ID NO: 193075 - protein, 448 aa, unidentified
MNKIKTKNEQVKRISQLVVINPTVAGIDVSDKEMMVAYPINSEQLEVRVFECFTRDLHSIAKTLKTHGITSVAMESTGVYWVSLFLLLQEYGFEVYLVNAKHVKNVTGRKDDESDAEWIQKLHSCGLLSASFQPDNITRTLRSMVRHRKNLVQTSSTYLNRMQKALELMNIKLHTVISDIDGKTGSLIIESILAGERNPEVLADMRDKRIKASREEIIKSLEGYWTNEHLFELRQCYQLYCTHRQMIDDCDKEIEKQLEVQIASRNEGVIPNIPKVKRKPSGKHRVSFNLTSYLKEISGVDVTEVAGINELSALGILSEVGTDISKWKTEHHFTSWLGLAPNTKISGGKVISSKIKKKKHHAGQAFRIAANSLYHSKSPLGDHYRRIRAKAGAAKATVATARKLAIIYYKMIAHKETFNPKAIQEYQQKYKEKKINQLKKKIALLEAA

SEQ ID NO: 193076 - protein, 323 aa, unidentified
MTVYLGIDIASKKFDVAELCDGNYRCKAFENTSAGFLALYKWLGQSTMPDIHACLEATGDYGTSLATFLYENKIKVSVVNPARIKGFGASKLSRTKTDKADSKLIARFCKAAVPDGWKPTPAPVRKLQALVRRISALNGMLRMECNRRENADANIQASLDRIISLLKTEIEVVRQEIKDHVRSDDELKKQDALIQSVPGIGEVSSNLILSFMSGKGFRKAKEVTAYLGLNPRHHQSGSSVRGKTRMSKMGDTRLRSALYMPALAALRYNPDIKAFGQRLLLAGKPRMLVVGAVMRKLIHIVFGVLKSGTAFSSRIAVHSVVTS

SEQ ID NO: 193077 - protein, 389 aa, unidentified
MKIFVGIDIAKLNHFAAAISSDGEIILEPFKFTNDADGFQLLVSKLESFDKNSIIIGLESTAHYGDNLVRYLVAEFYQVCVLNPIKTCQMRKNNIRKTKTDKVDTFVIAKTLMMQDDLRFVSFYDLDMMDLKALGRFRQKTIKQRTRLKIQLTTYVDQVFPEIQYFFKSGLHQHAVYALLKEAPSPKEIASMHMTHLANLLKVNSHGHFTKEQAKELRVLAQKSVGANDSSISIQITQTIQQIELLDSQLEKIEAEMTDIMRFNDSVIMTIPGIGYINGGMILGEIGDIHRFSNPNKLLAFAGLDPSVYQSGNFQAKTTRMSKRGSRVLRYALVNAAWNVVRNNATFKAYYDAKRAEGRSHYNALGHCAGKLVRVIWKMLTDEVEFNLE

SEQ ID NO: 193078 - protein, 391 aa, unidentified
MYSDGSKHSSFSVPNNRNGAKIIVDRVTSVLLLQDIPQVVIGMEATSVYGDNLMRFLRESGSLGRFERSLHMLNPKQVKKFHDAYSDLPKNDYVDSYVIADHLRFGRINKEVYMDDYKYQALKMYTRARHQLVQELTREKQRLLNTVFISFSGLTQEKIFSDKFGATSMALIEEFSSLDELAYMSTDELADFIRERGKNHFENPEEIAKAVQRAAKNSYRPPQVIADAAKQMIAISMNTIRLLQKQIKEYDKAIEKMLEAFPQTLTSIKGIGNIYAAGIIAEIGDINRFPSQASLAKYAGLVWTQHQSSDFEAEDKRMIQGGNHHLKYYLCEAANALRRCDPEFKRFYSLKYKEANKHNHKRALALTARKLVRLVYTLLKTNRLYIPPEEY

SEQ ID NO: 193079 - protein, 429 aa, unidentified
MSEEKAIELRVSVDVGSRRHSVAMGLSSGEVLEEFEIEHRPEGFAEFFSRIEKHQKTKSCAVAVAMEGYNGYARPLDSMVRQHGYRLYNLNNLKFARFKEIFPGGAKSDRIDARKGLELFQLSDHLPLAKEVLQEVKGTPQENEILKRLSRRRRRLVNERVRVVNGLQADLQAVCPGLLEITGEASNQWFLNFLLSAETLPQLSRLRRSTLMKILCVGVKCAAKIEEWQKRAHFSDEVKWVGEMIQEDARRCLELDEKIKRLRNKIAEVAKDSKIAKTLRSLPGFGAVCTSELAGEIGTVERFTSEGSLALYLGMATLDNSSGKYQGTKAPKQVNTRAKAAMMIGVDRHRKYVPESQRYYEKKRAEGKKHNQAIRALGRHLCRIIYRMLKEEREYEVRPEKGNAKTKVVPLACVKTQIRRSKKSGKNKN

SEQ ID NO: 193080 - protein, 349 aa, unidentified
MQFNPFCFILKNKVMKKYQTFVGIDVSKSKFDYCIVTDISSQKHEFGVAVNNQKAIRKFISGLQKKCKDASGILFCMENTGVYSMPLCYELQSAGADYWVASGLEIKRSRGIIRGKSDKTDALCIAMYSVSHLHLLKLSELPEADFAELRLLLAEREKLVKALGMFSTTKEGNGFLPKLVLKSTLTNNAATIKYLNRQLKNIESLLDELIERNETFKKQSQLLKSVPGICKQTAISMIAYTQAFTLFKNHRQFACYCGVAPFEYQSGSSIKGKTKVSPLANKKMKTLLNMAALSAKKCDAEMKIYYEKKVAEGKNKMLVINNLRSKIISRAFAVINRDSPYVNTLKAFA

SEQ ID NO: 193081 - protein, 318 aa, unidentified
MKFYTTLHKYYCGIDLHARLLYVCILDEHGNKVVHQKIKADPHQLHKLLKPYIGQVVVGVECMHCWYWVSDFCREMNVEFILGHALYMKAIHGGKAKNDKIDSYKIASLMRGGNFPLAYNYPAETRATRDLLRRRTYVMRHGSELKAHVVNTDSQYNLPAQSLNLKNVSARDGLRHYYDDPVVQRMIALDMNILDCYIRELKHVESFIEGKAKEHYGALLNIVRTFPGIGQTLALTILYEIGDINRFPTVQQFASYSRLVKCKAESAGKTYGTSGNKIGNGYLKWAFSEAAVLYLRGNDNAKRYLAKLQKRMSKGKAL

SEQ ID NO: 193082 - protein, 408 aa, unidentified
MNVVYSHVCGLDVHKKTVVACILTPDDKEIRTFSTMTDDLLRMVGWIKSKGCTHAAMESTGSYWKPVYNLLETEQIQTLVVNAQHIKHVPGRKTDVKDAEWIASLLRHGLLQGSFIPPRDQRELRELIRYRRSLIEERAREVNRIQKVLEGANIKLSSVASDILGKSARAMIEALISGNEDPEALSELALRRLKNKKADLQRALKGLIGPHQRLMLRTQLRHIDELDALIQQLDEEIKRRMLPFEEDLERLDTIPGVARRTAEQIVAETGIDMSRFPSAAHLCSWAGLAPGNNESAGKRKSGRTTKGNPKLRSALIEAARAAARTKNTYLSSLYHRIAARRGANRAAVAVAHRILVIVYHLLKKKQTYNELGPQYYEEHRREHVAKQALRKLQSLGYTVTIEVSNQTA

SEQ ID NO: 193083 - protein, 312 aa, unidentified
MNTIICGVDVSKAWLDAKVGAAGASGRFGNDPMGIAKLEAFCRHHDVELVAMEASGGYERLVFMMLWEKGQPCALVNARNVRRFAEAMGFMEKTDDIDAGVIAQYAEVKRVSPTPLPSAAQQRLKALVSRLSQVTGDLTVNKQRRSAAADAETTASLDEIIFLLKRQQRRLEGEVASLIDDDPLWACLDKAFRQMKGVASRTVARLMAEVPEIGILSNKAIAKLVGLAPIANDSGKRQGRRPVRGGREGPRSILFLIARGAAKYDPNLAAFYQRLQQAGKPKMVARIALARKLLVILNAKARDARTEFANAT

SEQ ID NO: 193084 - protein, 379 aa, unidentified
MTQFSSVTSIEPTLHAALELSKNSWLLAIQFPDRDKPSLYRLKGGDGDGLMAKLDAARNRLAKVLGQAPKLVLCYEAGYDGFWLARLLERHGVDCRVMDPASLQVDRRARSVKTDRVDVEKLLQALIAWCRGERHICSMVVIPSVEEEDLRRSHRERDRLVREQTAHINRIKGLLFGQGIRGINVKSRHKTLVPADLVTADGRPLPERLAREIAREIERLEQVQEQLRQVERERDLAPACNQATEQKRQQLLRLKGIGTAIAAILSREVYYRQFTNRGQVASFIGLAPSPYDSGESRRSQGISKAGNGLVRGVMVQAAWLWLQHQPNSALSQWFRQRTQGHSKRVRCIMIIALARKLAIALWRYLEQGLIPEGATFSGK

SEQ ID NO: 193085 - protein, 313 aa, unidentified
MPTCCVGLDIAKDHVDVHARPGDESWRALQTEDGIAQLVTRVMALTPTLVVVESTGGYETAVVSALAIAQIPVAVVNPRQVRDFAKAIGQLAKTDAIDARLLALFAERVRPEVRPLPDEAQQELVALVTRRRQLLDMLTAERNRLAMARRSVRGSVQQHIRWLERRIHDADADLTTTIHRSPLWRAKDDLLRSVPGIGRVTSSMLIALLPELGVLSRREIASLAGVAPLNRDSGHHRGRRMVWGGRASVRGPLYMATLVATRCNPVIRAFYQRLRTAGTPPLVALVAAMRKLLTILNAMVKHQQSWQPIHAEN

SEQ ID NO: 193086 - protein, 342 aa, unidentified
MRIRKVTPSCDRGKSAICLTYDHYVAIDWSLQNMAIGHMSRHDDHPRVFERPSELKELKEYLASLKGRTILTLEESGTAHWLYLELLDCVERIVVCDPFHNRLLCHGPKTDKIDAGKLCELLRAGLLKEVYHSDNGLYELRTLVSAYQNVVCAGVRTLNQKKALTLGHRDRGKSAFFIGGILQENIDLYRRSKQTYERRFDDVARRNQLVRFQREINGIGTIGAVKIVATVVDAKRFPCAGKYLSYCGLVKHEKLSGGRSYGRRKPRYSRVLKSVYKTAAMVALQGASPIREYYDHLLSQGVTEHNARNAVARYIARISYGMLKSGTRYEPYRWRGRVQEAM

SEQ ID NO: 193087 - protein, 408 aa, unidentified
MNTLYVGIDVSSKSNVVYLMLPNGDKHSNFSVANSHEGSTQLVKRILSALASHSLDTVLIGLEATSVYGDNLVYFLREDATLAPFNRKIHVLNPKQVKKFHDTYNDLPKNDYVDSFVIADCLRFGRINKEVYMGDYRYKALQNLTRARFFAVQNLVKEKQRFMNVLFKKYSTMTQEKVFSDTFSTTALAVYDEFESAEALANMDLHELTDFIIEKGKNRFPDPDAVAKAIQKAARSSYRLPKTVNDSVNQVLSISITSMKALESQIKEFDKAIKALMELLPNVLISIPGIGPVYSAGIMAEIGDINRFDNQASLAKYAGLAWKQHQSGGFEAEVTRLIPSGNRFLKYYLCEAAFSLVRCDKEYSDFYHLKYKEVNRCQHKRALALTARKFVRLVFRLLKDNRLYCPAK

SEQ ID NO: 193088 - protein, 335 aa, unidentified
MKKIYVGIDISKEKCNLCYRSGLKIVREEEISNEVRALKKAFKAALKALDASMDEVLVCAEYTGRYIYPLTVVCQELDIFLWMDDPTRIKNSMGLTRGKNDAIDAARIAEYAFRYSDKAVRYAIPDAAIVSMKNLLADREFLLIDRKRYQSQLTDQKKYMAPGDFKHKNSRWKKVIKSIDEQIAAIDAEIESLIATDPVLARQKELLVSIDGIGDRIAINMIAITGGFTRFQNARQFCSFAGLTPYKYDSGTSVRSKAKISKRANQTMKALLHMSAVNVATRMKAGEYKDYYERKLKEGKHVMCILNVLRAKLVHRMFSVIKRDTEYTKEYKPAC

SEQ ID NO: 193089 - protein, 426 aa, unidentified
MWDARRRVLKMKSLKQGIIQDKEIIIMRTVFGIDVSKASSEVAILVNGEKVHGYTMPNDAIGFNRLLGDLATVNSPEIIFEATGVYSRRLQAFLEINGYAYTRLNPLEAKKQLDSLRVRKTDQIDAEKLASSQFILNRKPTYVQEEVYQNLRDLSRFYQNLTEDIVRNKNRLHKVLQVAFPEIENLLSSPTGEQYWSLVTIFQTKHWVLELSEVELKETIRQSTSKRISENRVERLAEKLVELAKQSYPALSKTSPMIEEVKYHAQELLRLTNPRDQVLAQMIELAEPLPEYEILLSIPGIAETTATSIIGELGDIRRFQSTNQINAFIGIDLRHYESGNFLAKEHITKRGNPYARKILFKCIHNIASASHTNPCHIADFYEKRKRQSQTTSTKPHTIASIHRLIRTMYYLLTHNKLYDYASTQSR

SEQ ID NO: 193090 - protein, 379 aa, unidentified
MFENITYVALDDHKRRHQVAVLLPGAERDEALTWRVENTRSGIRKMVRKVLKMAPGDVRFCYEAGPNGYVLQRQISGFDRVSCVVVAPSKTPRRPGDRVKTDRRDARKLVGLFRAGELQSIVPPMEEEEAIRDLCRCRRTAQMRATASRHHLDKFLTRNGYIYRDGKNWTRRYWEWLRSLNFDDWRRERTFQAYLFGIEQDEDRVKRLDLEIVRAAEEEPYRTLVGFVRCFRGLDTLSAMVLTSELYAVGRFTTAPSLMGFVGMVPSEDTTGWDPHRGPITKAGNGHVRRILVESAKHYRHPARVSKALAERRKGQPDWVIAIADKAQTRLHQKYWKLVMGKGKHPNVATIAVARELVGFIWAVLIRTATTQSVDELVA

SEQ ID NO: 193091 - protein, 351 aa, unidentified
MVQFIGCDAHKKYSVFVGIGENGQRTGAVRVEHSAGQMQQYLSTLPEGTPIAVETLGSWYWMVDAMEKAGHQPMLTHAARAKKMMGQINKTDKLDAGGLAILMKNGTLPSVWIPPQDLRDQRELPRTRMVMVGIRTKLKNRLQATLAKYNLQIEEVSDTFGVHGRVLLEQRLKALPPETQRSARQELQLLDQVTQQIKDIEKRIKAVVKGTETMQCLTTLPGVGPILSVVIGLEIGSVDRFGSAEQLASYSGTVPRVHSSGGKTFYGRVRPDVNRYLKWAFVEAANVIVMNQSHMPNRHVVKLYQRIRERKGHAKAVVAVARHLAEATYWMLTKKEVYKDPQTKSDSSTQG

SEQ ID NO: 193092 - protein, 403 aa, unidentified
MISVGIDVAKGKSTVCIVRPFGEVLMKPKDFKHTQSELKVLADKIKMYDEEIHVIMEATGTYHLPIKSYLEEKNYDVRVINPLEMKRYRCQGIRNPKTDRIDSIIIAKYGIDNWYYQPKELEMEGERAELKFLGTQYFSLMKTKQDGMLKLYNIMERSLPGMYGILDDFNKATGKDKQSDFVYDFYHLNMITKYSEKKFCEKYQFWTKKKGYLFSEKEARQLYLIAKEGIPTIKPSENTMLVVREAVNVLREVNASLYSILTQMTEIAKQLPEYDLVMSMKGIGSSLGPRLMAEVGDPRRFHNAKALIAYAGIDVDPYESGTFKGTERHMTKRGSKIMRKIGFEIMDAVNKHQKIYAGDSVCDYFLKKREEGKPYRVAMFAAYNKFLRIYHSRVSALLNETEV

SEQ ID NO: 193093 - protein, 345 aa, unidentified
MKNTIVGVDLAKDVIQVCVYANNKVQSNMEMTHHEFLEWLFKTSNTTVVFEACGTSNYWKQKAVEAGHDARLISAELVSTIRQNQKTDKNDALAIVQASLLPDISFIKGKTIEQQQLQCILRLRELAVKQKTASGNQLKALLLEFNIRVSARNGGLGGMIESVLENAENEFSMAFREALHAAWQHHLEIIKSIATYDRSLEELVDQHEACKRLLKLEGVGVINAVNLYIALGCADLGSFLKGKDASACIGLTPIQHTSGGKIKLGSIGKYVKNSVLRSQLITGAMAVVAQVCKRTAVTCKELWIQQLVARRGKKCAAVALANKTVRTAFAMLTHGTEYKAELIVA

SEQ ID NO: 193094 - protein, 340 aa, unidentified
MNLTTLGIDLAKTSFSLVGMDQHGKVVLRKTLSRAKLLPFIAQCPTCLIGMEACSGAHYWAREFTKLGHKVGIIASKFIVPFRKGGKNDNNDAEAICEAVGRANIWFVPIKTAEQQAQLCVHRVRQGLVSERTALINQLRGLLSEFGIVMPKGRYPAQREIPLILEDANNGLPMLARQMISNLWDRIKIANEQVLFYDRELHKQAHHHPVAKRLLTIPGVGEQVASAVVASVPDPSLFKDSRQFAAWFGLVPKQHTTGGNVRLGRITKQGDRYLRMCLVHGARSVLANLKDKQDKISCWARELIARRGYLRAVVAMAARNARLIWTLMVKQEDYKVIAAN

SEQ ID NO: 193095 - protein, 333 aa, unidentified
MKFCGIDWANDHHDALSIDEQGQPLGSIRVSHTPEGLSQLDAYLERIAGPEGKEQVACIVETTHGLLIAHLLEQGWPVYPVNPRTVEKRRAPSGAKTDTLDAYLLAKTGRADFQDLRRLNPDSEQIQELKTLTRDQDALIQMQTRLVNQLTACLKAYYPVALEVFGQLQQPSTLAFLRAYPTLQAARAASVDELTTLLKQARYPGARQKAQQLVMQLQQPQLQASEVTTRTKARLMLALVAQLDPLLKQIAAYDKEIERPSWQALAGTSPVLFQSGTYQKAHRRLGCIKPWRNALHQFAWQSTHQEAWAREYYQRKQAEGKSHTVAVRALANV

SEQ ID NO: 193096 - protein, 347 aa, unidentified
MNFYTKQHTYYCGIDLHAKKMYVCILDRDNQVKIHLNIKTDPNDFLKLIRPYQEDIVIGVECVFCWYWLADLCAEHGLPFVLGHALYMKAIHGGKTKNDKIDSYKLATLLRGGTFPTAYAYPQGWRATRDLLRRRMYISRRTGELVAHILNTNTQYNLPAFRKKLTRKYNHAGVAERFSDPAVRKSVEVNLEMIACFNQILKQLEWYIEKTARLHDYHTLYLLRSIPGVGQILALVILYEIHDIRRFPRVQDFSSYARLIRPHKESDGKWAGSSNKKIGNAHLKWAIKEAAILMLRDSKDAKYYVSKLEHKYNKGKALGIFTHKLGRAIYYMLKNKEAFEMKSFFAK

SEQ ID NO: 193097 - protein, 366 aa, unidentified
MLLIGCDFHPSWQQVCWMDTGTGETEEHKVVHAPGEAEKFYGRFAAPARIGMEATGNCQWFVDLLAKLGHEVWIGDAAKIRASDVRQQKHDRRDAALLLRLLREDRFPRIWTPSSAEKDLRQLLIHRHKLVRLRAQTKNGLQHLAMNQGIQKKRRLWSKAGQEALRGLALGPWAGRRREDLFRILEMLDRQIESLDLAVKKAAEENPGARLLMTQPGVGPVTSLAFVLTLGNVSRFPRGKQVASYLGLIPREYSSGGQQRLGPISKQGNRFMRMLLVEAAQVAVRCDPEFRREYLQRCHQEKPKAVAQSRGSAEVGGTALLDAAHRKAVPTDRSCREQLAGGRGRRKLVRRFDWALSSRSTDRDSD

SEQ ID NO: 193098 - protein, 422 aa, unidentified
MLAVGIDWAEAFHLVALGRPGEGVIEVRRIDHTPGGVEALLAHIATMEADPAEVRVVIKTRHGMLVERLVDAGYTVLPVNPDLIARRRGPARNKDDAEDARIACLLALDRYASLRPLIPHGELAGELRSIARDDERAARDQRRLLNRLRQDLISTFPAALQIAGNDLGAPTILKLLQRWPTAQTLAAAPRHELVAFARAAHHGWPKRLADQVAAALASDQFTPRDYLVRAKADSIRLGATQLLAIGDQRRTWQRRMGALLLGAPRQGRANTPPEDQLGQAFPGGKVYLSFPGLGDRLAARVADEIGDHPEQFESPNALACYAGKAPVTRRSGKTELVVACRLACNRHLAAAVQQWAFCSLRESGRARAFYDAQRARGKTHHAALRALGNRWLEVLWHCLHKGVLYNEATHVANRNRAHGRAA

SEQ ID NO: 193099 - protein, 383 aa, unidentified
MDTAATRNIEYSAFEPVLYLAFELSEAHWKLGFTIGVGQRPRERNIRSCDLVALQKEIQQAKKRFDLPETVRVVSCYEAGRDGFWLHRYLIQEGIENLIVDSSSIEVNRRQRRAKTDRMDVEKLLSQLIRYRSGDRKVWSVVHAPSVEDEDQRHLNRELAAAKKDRTRHNNRIKGLLVGQGVRLAIKADFLDRLDAVRTWEGLPLPPGLQMRLKREYERMKLAERQIKELERERIEAIRHSEDPSVDMVRQLLKLKGIGLNSAWLYTMEFFSWRKFQNRKEVGALAGLTPTPHESGSSSRERGMSKAGNRHIRGMAVEIAWGWLRYQPDSELTQWYEERFGHGSSRIRRIGIVALARKLLVELWRYLETGAIPKGAVLKTRLI

SEQ ID NO: 193100 - protein, 499 aa, unidentified
MQVIIGVDPHKATHTAVAISDREDELDRTKVRATRAQVTQLLSWAEPFPRRTWAIEGAEGLGFLLAQQLVAAGESVVDVPATLAARTRVLASTRSNKNDPNDAMSVAVTALRHGGLRAVAAVGDSEELRLLAKRNTDIGRQRSLVVSRLHSLLVELAPGGISREIHAKAADAFLAGLSPATSVERVRFELAAELVDDIRRLDAQLKESHRRIARTVSASGTTLTDLFGVGPIIAATVIGHSGDVRRFRNRDHFAAYNGTAPIEYSSGARTAHRLSRRGNRTLNSAIHMAAVTQLRNRGYEGRVYFERKVAEGKTNKEALRSLKRQISNAVYSQLLIDANRTGRGSIEGPGGQEGTTLSQRDRSHILTTGSSAKSLPDPPTTLRQPAPPVEQTRPHAPQNCHLTQRGFDLSDSARASRTSLCAVVLGGAKRVRADGQRMRALLPPPDPGRFTQEGAASAGARRPSCRDRVGHTTCGRSHRIRLPPSISGDVGVPPIQLRR

SEQ ID NO: 193101 - protein, 407 aa, unidentified
MEILHPRCAGLDVHKDSVVARVRCVSEPPHDEVRSFATTTSALLELNDWLSGHDVTHVAMEATGVYWKPVWHLLEGHCELVLANAQHIRNVPGRKTDVNDATWIADLLAHGLIRASFVPPQPIQDLRDLTRTRKQLSRETVRHEQRLQAVLEEANVKLASVITDILGASGRRILKAMITGETDPSHLAELGSRRLGCSRDTLVEALDGRVRDHHRFLLDQHLKTIEQLEETMAAFDARIEAALAPFRDTVERLTQVPGLSTRAAEVVIAEIGLDMSRFPTAGHLLSWAGLVPALDESAGKRRSTRVTKVAPWLKPVLVQCAWAAANKKNSYFEAQFLRLKGRRGPKKAAVAVAASILTTVYHMLRDGTCYQDLGPNYFARRNPARTARKLADRIRSLGYIVEIRSAA

SEQ ID NO: 193102 - protein, 373 aa, unidentified
MSRQGSNSRCYTVGDMQNNTDKERSEGQAEAKPEVIKLGLDVHARQVTECRQLDGSTPKSAQKWDPWKLLSQVQEWVKAGIKVYSCYEAGACGYWFHRELIKCDAVNYVVVPRPLESQRSKHQKTDRLDARALLDNLDSYLRGNRNAMSIVAVPSAELEQQRSVVRHREQLIRNRRRAEARGRALALTQGIVAPVGWWRPVAWKQLKTQAPEWMDCQLEHWREEARGIDAKEREVRRQLENMVSMKLPIGVGALSWITLELEIRGWDRFQNRRQIASYTGLCPGIHNSNGRGREDSINRCGNSVVRYTLIEMVWRMLRWQPDYPPIKKLRSMLSKRGKRRLVVAAARRLAIDLWRWSTGRATAEALGLRLDQP

SEQ ID NO: 193103 - protein, 347 aa, unidentified
MENATRLFLGLDVGKSEILATLMDDTEAELFRGSFKNQLSGFRKMMKAVNKETSKVSGKHMIHAGMEATGTYYLKLVKFLYEKEEEVIPYVINPGSVKKYMEYRGSRTKTDLQDSRIIAMCVKDGMEKKIFRPWFPARKEHEELKQLVRLREDLLTMRTMEKNRIEGLSQDPDHSEPAMKILQDHVEYLSNQIREIEDILKENIRHGNFPDIGEDIELLKSIPGISDLTATSFISEIGDIDRFDGIKQIVAHAGLAPMERQSGTSVRGRTRICKRGSKKLRQLLYMPTLAAIRCNPAIKSFYERMIEKGKRKMVAVTACMRKLLHIMYGILKNRTPFDPVICIGYLK

SEQ ID NO: 193104 - protein, 409 aa, unidentified
MATDPPNVIVGVDTHSDTHFVAIIDEHGKHIAAEEFLAVDSGYRKILAFITRFGLIIGVGVEGTGSYGAEVSRVLRTAGLPVHEVNRPNRQARRLHGKSDPLDAYQAAESVLAERGTSTPKTKDGPVECLRVLRAARSSAMKARTIAINQIKGILVSAPEHVRSRFRPLTTAQLILALERSRPMGNLTDPEIATALTLKKLAARYRFLEQEILDTDQALAEILRDCAPLLRDVPGVGIEVASQLLVTVGDNPERIATEAQFAALVGVAPIPASSGKTSRHRLSRGGDRAANAAIHHVVVSRLATDSRTRDYAARRTAQGKTKKEIMRCLKRYVARELYRQLTNPQAAPSITDLRTAREDLHITLREAAGHFNTWPGTLSRIERGLSRDDNLASQFRDWLHEQKAVQNIN

SEQ ID NO: 193105 - protein, 394 aa, unidentified
MKLIGIDIGKNKHFFCVMDQQTGEIISQPVSFSNDKEGFDFLVQKIKSYPKDSILIGMEDTGHYHFALLKYLLDLQYTVALINPKTTDFNRKMQGGITKNDKLDTINICDVLDTPERKKQYRITKVNSFDLYEQKQLTRHHHNLKEEENVYKNRLQKCIDIVFPEFNKLFNSKYGIVYMNILKMFGSAENIANTDIRTIRKCFEIEGRGNRISLTPERLKECARSSIGISSSAEVIQIKHLTAQIELIEEQLTEIDKKIEEFSIQNNSPILSIPGISHFSGTSILAELGDISNYSKPSQIIKFAGVAPLHYESSQFNAQHTAITKKGSKYLRKTLYQIILPVIRHNPVFNKYYQLKISQGKGHRCAQGHCVRRLLRIIYHLLKTNQQFDPQLLR

SEQ ID NO: 193106 - protein, 436 aa, unidentified
MFVGHRFRTDPDELDTLWARLPKDAERIEVVMEPTRNAWVALAAWFRRHGATVVMVPPEQSADLRDYYNKHTKTDRLDSTVLARLPLLHPEGLHREDSLGPGDELKRAVKIRSGLVHRRTACMARLDALLEILGPAWIAALGSDMTLTALRFLARYANPVQVKRLGKARLAAFFRRSSRQAWADERADAVIEAAATTLRLWGADGGELDFDALAADIAAQARLALTLTDEINGFDKRIGALYDKADPAGIVRSVPGAGRVCAPQILGRLGDPTRFANLAAVRSFAGLVPAADSSGQADGHRGPTKAGDCCLREALFIAADHARKIDPTLAVHYQRLMLAGKHHDSAVCTLAAVLLTRIAACLRAGTHYLLRDTDGRVITEAQGRAIVAERYTVPPEVRAARRKVTPHRHPRRNERNERAKTGVATRSKASPVPQPA

SEQ ID NO: 193107 - protein, 418 aa, unidentified
MGVESDPLSGRPYVRGVKVARPRGKLKSGVASDGPEPSPKLKRGRTMEQHSEIFIGLDTSKLKISVAVANGERNGEVRFYGDIPSDPGSVRSMVDKLATRGARLHFCYEAGPTGYDLHRQIIAMGHDCVVVAPSLIPKRPGDRVKTNRRDAVSLARLHRAGELTSVWVPDAGHEAVRDLVRAREAASDALKRSRQQLQAFLLRHGRIYRGRTSWTQAHIRWLCSLQFEHPAHYIVLAEYRQAIEEATVRLDRLTKQVAETAASWSMAPVVEAYQAMRGVGFMTAVTFVVEIGDVRRFDSPRQLMAFLGLVPCESSTGERVKRGGITKAGNMRARRALVEGAWTYRFPARVSTRIQARLEGLPRTVREIAWKGQVRLCARYRKLIMAGKLKTVAVTAIAREMAAFLWAIGQEVAPTTQA

SEQ ID NO: 193108 - protein, 337 aa, unidentified
MKQITKNEIYNHYIALDWSKVNFAIASVRGNGTSIKVEEHPPDLKLLKNCLKQLPGKKILTIEETTTAHWLYVELQDCVDKILICEPFQNRLVQSGPKTDKIDSKKLCTLLRNGSLKEVFHTTDELYHLRKIVSIYEDYVKASVRMKNQRSSMFLSEGKDHKKEKILSGSTIKKFITEKQNFTIEHIAQIRKEFEVLFRKIQKENKMIQQLVKVSGIATKLAVTILAVVIDANRFENKYKYYAYCGLVKHSKYSGGRNYGKRIGRHSRILKRCYKIAANAAIGGNNDIREYYEYLLQNNYSQEDARNQIARYIAKVSYAIIKYKTKYRPYQWREGMQ

SEQ ID NO: 193109 - protein, 344 aa, unidentified
MNSTTIAVDVAKSVFEVAVSEYPGQVRERHRLSRGRFSRFLAEHPPATVVMEACGSAHHWAREAQSRGHRVILVPPHAARPYVLRNKTDRTDAKGLLEAFRNDALHPVPVKSETQQALAALHRLRSTWVATRTARLNTVRGILREFGVVIPTGAHHVVPHVRALLEDADAGVPGLLRVPLSEAIREIGELEERILAIERQLARTAEPALLIGRLRTIPGIGILTATALVAAVGDVQRFPSGRHFASYLGLTPREHSTGQRRHLGAISKQGDTYLRMLFIHGARSVLHHAKSKTAPATDRLRTWALQVERLRGHNKAAVALANKLARIAWAVWRSGNDFTAAAAV

SEQ ID NO: 193110 - protein, 415 aa, unidentified
MLFVGDDWAEDHHDVEVLDAAGTRLGRARLPEGVAGISRFHALIGQFADPNDPAGAGQVLVGIETDRRPWVAALVAAGYRLFAVNPAQVAGYRSRYSTSGAKSDAADAHLLADMVRTDAHQLRPVAGDSALAEGVKLLARAHQSLVWEQTRHGLRLRAGLREYYPGVLAAFEAGGLDLADRDALELLGSCPDPDTAARLSISKIAAMLRRGGRRGDLTARAEQIQAALRAPQLTQPAVLAGAYAAVTRSLVAVLTALAEQIKALEGQAGAHFGRHPDVEIYRSQPGLGQVLGARVLGEFGDDPHRYTSAKARKNYAGSSPITRASGRKTVVLARYARNRRLTDALHAQAFSALRASPGARAYYDTLRARGIGHHAALRQLGNRLVGILHGCLKTRTLYDETTAWAHHQKDQPSAA

SEQ ID NO: 193111 - protein, 316 aa, unidentified
MPAPAFVGIDVSKACLAVHVSPAGSAFTVANDPDGLAELVARLAALAPAAVVLEATGGLEAAAVAALAGAGLPVCAVNPRQARDFAKGFGLLAKADAVDAAALALFAEKVRPRPRPLPDEQAQAFAALLVRRRQLLEMRVAEQNRLPTARTAAVRRGIQKHIDWLARQLGGLEAELAAAVRASPVWRAKEDLLRGVPGVGPTVARTLLAELPELGTLSGKQVAALAGLAPFARDSGTRRGQRRVGGGRAGVRSALYMASLSAARYNPALRAFYRRLRAAGKLAKVALVAVARKLLVLLNAMLRDGRPWNPELAKTA

SEQ ID NO: 193112 - protein, 429 aa, unidentified
MEEVTDEPLFRERVCGIDIGKAQMSATIRVPSEKNRKRRAKEVRDFATTRRGVLELADWMRSWQVELAGMEATSDYWKPVFYRLEAEGFECVLADARQIKNLPGRPKRDPSDSGWIAQNLERGAVRGCFVATPEFRVIREHTRYRRDLTGERTREKQRVEKLLESAALKLSSVLSDLHGVTGRDIMDHLIAGERNPGVLAGLARGRARARIADLAEALEGTEFFTPELAALLKTMLGRIDGLSAGIDAVTAVIERLLAPYEEQLEQAESMPGWGRRAAQDVLAETGPDMSRFPTGGHLASWAGFTPLDNQSGGRAGKAKSKKGNRYIGGAVGETSVAAGRTQTREGARYRRLRSRRGQAKAQVALGNTQLKVYHRLLSSPGSRYEDLGPDYYDRRAAVRRRTRQAVAVLEDLGYDVTLCRRTDPADAAG

SEQ ID NO: 193113 - protein, 550 aa, unidentified
MASSHTSPRQRRRADSVHKPRGVLNPRVKRVGPEHFGIVAIDCAKHRSKWMFTDFYGTILAPPTVVEHQEPAFRRMVDQINRLREQHQIKDMIVAIEQTGTYHKHIKSYLVKACFEVRTVHPFATKSARLPADPGNKTDDTDLAAIFRAAVNGFALQEPSEDPQFVRMQLLERRRRDLVRENASLRCRIREHLQAYLPGFTNCFDDVFNNKIALIIAGRFPSAAAIRAAGRAGLEEVLARDGVRYQGRSLTKVLAWAAKAPGGDAVPSTHQYILCNMERERQAKLRQVAGLEAELLTLLVRTPYVLLLGITGINVVSAAEFAGEMGPIANDSNARTITGRSGLYPARYQSDQVDRRDGKLVRSRNRALRHAILLIADNLMRCNPYFNDMSDRWREAGHDVRTIHVKVADRFCRIAYQVVAGRQAFRHPLCPRWDGVAEKVVEFIIDNNLINYECTDSKINVNVIVEQCLSHLPERSRAEEWDRIRGRGTATVSGTTTVRPSAQWAELASGLLADQASSPLEYPLSGESFSEPSNRSRGPHNAECPQGEKP

SEQ ID NO: 193114 - protein, 353 aa, unidentified
MRRPNEKLIAGIDLHSNNVMIGVINQDGKRVAHRKLECDLRQVTQFLEPLKPRLQSMAVESTFNWYWLVDGLRAQSYPIDLANPARIEQYRGIKHADDKDDAFHLAELQRLKILPKAHVYDPRLRPVRDLLRRRSNLVHQRTALLLSFKSLYTRTTGQALDLAEAKKMEPKEAAKLYEHPANQLIAQVQAEHIQALEKSIRRVEKAVLGCAREIPLYEKLLTIPGIGRILAMTITLEVGDIKRFRTDGNFASYCRVVDAKRLSNGKCKADNNPKCGSQYLSWAFVEAANFARRYGEHCRRWYDRKAARTSKVLATKALACKLAKAAWHVMARQTDYDENRMFPELATKPMNKS

SEQ ID NO: 193115 - protein, 412 aa, unidentified
MQDILTCAMGLDVHRDVIVACLARGELGTEPEIEIRSFSTLIPEMRKLRDWVLEVECRHVAMESTGIYWQPIYEMLEPCFDGQINILVVNARHMKNVPGRKTDMRDAQWIATLLRAGLLKGSFIPDKTFRELRHLTRYRKSIVHDITAQKNRIDKFLQSSGFRFTAFLSDAFGASGRNIIRHLMEYGSISREALDRCLKTQTRKRIDEILIALNGSLSEHQRNFLRMIFGHLEALEQHRHTVEDAITEEITKHEEALRLLCSIPGIDVTAAAAIIAEIGTDMSAFPDSQHICSWAGLSPGNNESAGKRKSAHINKGNPYLKSMLCEVGWVISGKRTLHLSGWYWKIKQRKGAKRATIALARKLLALIYTMLKTGSPYSEECFETRRKQSERKRAYRMVNELQKLGYFVLPPD

SEQ ID NO: 193116 - protein, 327 aa, unidentified
MKRTTKYVALDVHQASTVASVREEGGRVIARSVLPTDGIAVTEFIRGMRGAVHVTFEEGTQAQWLHDLLVPLVDRVVVCDRRGAPRQGDKGDQVDADTLSELLRRGGLRAVYHGSAHRGTLKELTRAYRNLVEDATRAQWLAQLGDRGARFRAEVLYAELDRLRTRHPTVKAAMLAEARQDPAWAVLRSIPYLGPVRVALLLATIGTPWRFRSKRHLWAYAGLAVVTHSSADYTVSGGQVSRRRRAPRTRGLNRNHNRVLKDVFKGAATAATARPGPLQEFYRDLITRGLRPELARVTLTRKLTALTLRLWKHGERYDATKLTTPAR

SEQ ID NO: 193117 - protein, 429 aa, unidentified
MHYTQNQKLEQVTEKTLVIGVDIGSESHHARAFNYRGIEYSQKDFKFGNDAKGFEAFKGWMQGYVRTNGAKKVIVGFEPTGHYWYNFADYLKALEIMFVMVAPQHVKHSKEMDDNSQRKDDHKDPRVIAKLVTEGRYIIPYVPEGIYAELRTAYSRYCELTETKVRLENRITRWFDIYFPEYRAVYKNPGAKTGMMVLRIAPLPADVLKLGAEGINQLWRSVKVKAAGMKRAETLVAAAKRSTGRAGGDAVRRDLWQMLEEYELVTRHLAEMQVMLEELVAQIDGAERLLRIKGIGFITVAGFFAEVGDLSRFTDPKQIQKLAGLSVVTPDSSGKHNGQSEISRRGRKRLRMILFRAAMSLVKSNKEMKMLHEYYTTREQNPLKKMQSLMAIAGKIIRVFYGIMRNGTEYDPVRLLTDIRRPGTDKNAA

SEQ ID NO: 193118 - protein, 370 aa, unidentified
MKEHSIFVGMDVHKNSIDIAIAEKGREGQLRHFGTIEGSLAALDKVVRKLVSNGQRPCFAYEAGPCGYSIYRHLTAKGFDCAVAAPSLVPRASGNRIKNDRRDSLMLARLHRAGELTAVCVPHDEDEALRDLTRAREDAKIDEKKAKQRLLAFLLRSGNRYSGRAPWSQAHRRWLADLKMPHRCQQIVLQEYIEALSHCSLRLQRLTDQIRQLVPQWRLFPVVQALQSLRGVSLIVSATTVAEIGDFKRFQNPQQLMSYLGLVPSEHSSGEKNRRGSITKAGNTHVRRMLVEASWAYRFRARVSRALLKRQEGLPQSIRDIAWKAQVRLCARYRCLWARGKVKAVVTTAIARELCGFIWAIATAVDGPTA

SEQ ID NO: 193119 - protein, 386 aa, unidentified
MQKLNDLSRSLTPLKPDGTLIAVIEMSLSNWLVAGIVPGVERQPLKKLEADESSLLKLLNRWREEAKKSGHRIERIAVAFEAGRDGFWLARWLRARDIEAHIIHASSVAVSREHRRAKTDRLDTELLKRAFLGWLRGERNHCKMVAIPTIKDEDAKRPNRERESLVGEQSRIVNRMKAALIRLGIRGFNPKLKKAAERLDGLRTPEGEPIPPNTLAELRRDMVRRRLVRDQIRQIEDARLERLKQAPSDGPHAMVRLLARVIGVGVETADMLVQEVLSRNMRDRRAIARYAGLTGSPDESGRKRREKGLARSGNARVRRGMIELAWRFLRFQKDSVLAHWFRTRTENARGARKTMIVAVARKLLIALWRLVREGVVPDGVVLRPVS

SEQ ID NO: 193120 - protein, 338 aa, unidentified
MKVYVGMDLHATNTYVGMVDEENEVLHKQRFRNELPLILAGLDPFRKDIEGVVVESTFNWYWLVDGLMAEGYRVHLANVSAIKQYEGLKQIDDKRSALWLANLLRLGILPTGYIYPKEERPTRDLLRKRLHLVRHRTSHLLSVKNILARNLGLRMRSEDVKKLQDPEVKRFFPDQEMQTAVLASVGLIRHLEEEISGIERMITKKLKIRKEFAKLMTVPGIGKILTLTIMLEVGDIRRFPTVGDYSSYCRCVKSIRTSAGKVIGYGNRKNGNKYLSWAYIEAAQAARRFHETVRSYYEKKMAKTNRIVAIKALSHKLTRASYYVMRDQVDYDPGRLFR

SEQ ID NO: 193121 - protein, 338 aa, unidentified
MGRFIGVDLHKNNFMICIMDSAGEKTYRKFALGEIDAFVQSVDAEDEVAVETTTNTRYFVKKVRHRVKTVRVIDTSQFKVISQSVKKTDANDAEVIALYLSTGLLPEVRMKDEKAAEMESLANTRDKLVKLRTALKNKIHNLLGANGIITAKEFLSSEKGLEKALSYPLSATQQVEMEVLVEQIRSLSQSIAKIDEEIKQRGKGLKGFENITSIKGIGDKSGTILLSVIGDIENFRSRKQLDAYFGIVPRVSNSNETVHHGRITKRGNKLGRTTLVQCTLIAIRYSDYLKTYYSRLKTKKGSGKAIIATARKLLGIIYDTLKNDWIFEDFPNFVLKSA

SEQ ID NO: 193122 - protein, 457 aa, unidentified
MPARGKQPRSGAGAPAHTIDPNAAGVDIGATEIYIAVPTDRDPHPVRKFSTFTEDLLAAADWLKQCGIKTVAMESTGVFWIPLFQILEAGGMKVCLVNARHVKNVPGRKSDVCDCQWLQHLHSAGLLRASFRPEQQICAVRSLVRYRDSLVQLSAMHLQHMQKALDQMNLQLHHVISDLGGKTGMAIVEAIVAGERDPHQLATLRDPRTRASKETIAKSLVGDYRREHLFTLRQSLTGFRQNGQLIADCDVEIESLLKEFSSGEGPGAEAVPEPQAELKRKPRRNEMNFDLRTQLHRIFAVDLTEIPGIDTLTAHTLFTEVGRDLSKFANVAAFTSWMGLCPDNRVSGGKILHAQTRRVNNRVAKALRMAAQALSRSHGWMGQYYRRMRAKLGGPKAITATAHKLARIIYHLLTTGQAYDETVFAQQEAQNNQRNEKRLRRQARKLGFELTLIPTEV

SEQ ID NO: 193123 - protein, 379 aa, unidentified
MTVGEFFRQCVGIDISKKKFTVCLYMYDRASDAGCCTQSVDFANTKTGFNQMVKWSRKEAVKGQPLTYLMEPTGSYYEKLAYHLNKIGLTVYVVLPNKARQWCEAEGVKTKTDAMDARCLALMGCASRKLSPWSPPAAIYRELRQITRFHADLCKVRTSVANRMEALDNMYGPDKSVRKHCEKLLEEIDNLMEKNDEALLCKLAEDKDLKSKVERIAGAKGVSIQTVACVIAETDGFHLIRNRKQLTSYAGFDVVAKQSGGQDPKHKISKKGNANIRAALYMPALVATRYNKQMKAAYDRICQKHPNEKKIGVTAVMRRILLLIYTLWKNGEEYDENKDKANAKGKKKQAQEHGPEDCLAVNEEHVEGGAEDENGQPSS

SEQ ID NO: 193124 - protein, 348 aa, unidentified
MKYFIGLDAHSSTSTFAVLNEIGECVLRKTVDTSEKNLWHVLESINGERILTLEESTISQWLYLILREKVDRLLVCNPTFVAKKPGAKTDFRDAIHLANELRCGHLREVFHDDSHWAQLRTSVSGYLDIVQEIVRFKNRLKSVFRANGLKTDENNFYKNKERCSEFKNDSARFVSENLFHQIEFLENEKIKYLDWFKNNQKKYRPIRNLMTIPGISIVRSNIITAIVCQPERFKNKHQFWGYCMLVRHIQESGGKIYGNKRVHGRRELRDIFIGAAESAMRTETTLRDYHDALRAKGTSAKDAKVALARKIASLTLNLLKNNDTYNDDYEEYLKERKRLRLLVGQKKR

SEQ ID NO: 193125 - protein, 480 aa, unidentified
MNVKTRKAKKQVNLKHQSINLLSQEELNKKIEVIAKELKSYTWRELETNGKFSKNDKISFITDDMLIVGCDIGSEFHYIRAIDVRGRELSHGAYEFSNTVEGFGSAKAWVLELAAKNDKKQIILGLEPTGHYWFALATWMISNGINVVQVNPYAVKQSKEIEDNSQLKDDRKDPKLIANLVKDGNYGMPYLPEKIYADMRRLSMFRDQITEDRIRNINRLHRELKIYFPEYMDAFGKIDGAFTLEVLKVSAIPSDIKSLGEEGIKNIWRDAKLRGRGYSRASVIVSYADKSVGLKEGADVGREALKWYAEQILKLDEQLVAIESALHNKCREIPYAENILSISGVGESILSGILAEIGDISRFDDVKEIQKISGMSIVSCSSGKHKGKTKISYRGRKRLRYWLFQATKSAVSHADEFKQLHEYYIARSNNPLKKMQSLIVIACKILRVIYTILKTGTSYDPQKMLKDIKRTVETQSVLVA

SEQ ID NO: 193126 - protein, 341 aa, unidentified
MEQATTIGLDIAKHVFQLHGADAAGHVLFRKRITRVKLLGFLAAQTRCVVAMEACAGAHYWAREIAKLGHHVRLIAPAYVKPFIKRQKNDAADAEAICEAAQWPSMRFVPVKTEEQQANGIVFRARDLLVRQRTQCVNALRGHLMEYGYVFPKGITHVETLVALVEDLQSSLPDSVRVILKLLVDTFTALEAQIAVLDAEINQRSKSDPTARRLMTIPGVGPIASTAITALVPAAEGFPAGRDFAAWLGLTPLQKSTGGKQKLGAVSKRGERTIRRLLIIGASAVVQQASRRGAPKGSWLAQMLARKPKMLVTVALANKMARVIWALLVKGGTYRAPAVAA

SEQ ID NO: 193127 - protein, 477 aa, unidentified
MEVIHERVAGLDVHKNSVVACLRSHSGKSAARECRSFGTTTDELLALLEWLTTSGCQAVAMEATGVYWMPIYKILGDGDFPVLVANAAHIKAVPGRKTDMNDAMWIADLAAFGLIKASFVPGEYVHELRTLMRTRKQLVREQTSHVQRIQKTLTEANIRLDSVISDIMGLNGRRMIEAMIGGQRDPRKLAALADKRLKATAKELYDALHGRLTDHHRFLLKLHLKQWDALDVSVQTIDREVDARLGKIQAARPTVDTQPAANAEAVEAKPIKVKRTKTKTAKTEEVKTEEVKAEEVKAEEVKAEEVKANDNGVSKLVDLLSTIPGVSRVSALTILSEIGPDMSRFPTAGQLVAWAGMCPSQNESAGKKKGSRLRKGAPWLKTMLVQCAWAAKRAKSSYYRAQFYRLQARRGPQKAICAVAASILTAIYHMINNGSPHKDLGIDYFDRRTPETKAKRLAAQLGKLGYQVTLTQAAQAA

SEQ ID NO: 193128 - protein, 402 aa, unidentified
MTYDYVIGMDVGKYFHHACVLDIDGTQVLSKRINQNEQSLRALFSAFSPYDHKVLVVVDQPNNIGRLTVAVAQDIGIDVRYLPGLAMRQLSRIHAGNAKTDIRDAYIIAHAAKNLPESLRSVDRVEEAFLQLKVLNGIDEDLARSYTRLINQIRSALVGCYPQFEQALRGQIIHRKWVLHLLARYGGPTKIKRLGKAKAAAFARRYKARNPEPVLDAIFAAISEQTVTIAGAHYAEMGVAMSAKDALLKLEHRQQIEKEVIELINDIPHTQFLLSMPGIGPKTAAQILMTAGDMSDFPSAGHLASYAGLSPRTNQSGTSIMSNSLNRAGNKKLKNALWQSSCASIRFHERSRQFYERKRREGKRHNAAVVALARRRLNVLYAMMRNHEHYHDPAPSQEDLAA

SEQ ID NO: 193129 - protein, 345 aa, unidentified
MKILGCDLHTRYQQIAMLDEETGELVERRLEHGNGEAKEFYTHLAGPVRVGIEATGHTRWFEQLLAELGHELWMGDAARIRAAEVRKQKTDARDAALLLDLLLSGRFPRLWRPARQERDLRHLLWHRQKLVWMRNAVGNQLHALAMGEGLCRKKQLFTKKGRCELEALKLDAWASRQRQELLHLLDQLDASLAQFDQAVNEQAAANGDAVRLMTHPGVGPVTSLAFVLIVGPAARFERSKQLVSYLGLNPCEHSSGGKQKLGAISKQGNPMLRGLLVEAGHTAARMDPELRQDYQRLRLRRGGSVAKVAIARKLAVRMYWMLRRQVNYTQLVRTQGSSRATLVQQ

SEQ ID NO: 193130 - protein, 325 aa, unidentified
MEVQKFCCGIDVSHTTLDVCYQNNLGELFHLQVGNNNKGFEEILEHTGTGYHFVMEATGVYYIRLAFYLHQQGCQISVVNALSIKRYIQMHLERNKSDKKDAGWICRYAIEQCPPYWEMPDSAYFESKQLYNTIREYTEQIKRFNNQLHSLRLLPVPSKDTMKSLEKVKQQLEKEIDGLEEKLEALLQKWQPVQLKNVGSIKGIGKRATAMLIVFTQGFKNTHSHRQLISFAGLSPVEYSSGSSIQGKPRIYKRGGKNLRDVLYMCAMNAIKTNTACKVLYERLRTNGKTGKQALIAVCNKLLKQVFAVVKNNTLYQPNYCSAKP

SEQ ID NO: 193131 - protein, 408 aa, unidentified
MTQYYLGVDWADEFHQVWVSDPDGKKVIEKKVVENVEGLAEFGRWLDERRAQQIELWASIEKPHGRIVDFLLDHGVVVYPVNPKALDRARDRFRMSQSKSDGFDAYVLAQFLRTDHGHLRALKPNSDPAQELKLLTRDQQRLVRQKTRLLNQLTTTLKEYYPQPLEVFSDLESNIALDFLKQYPTPHDLSKLTRRQWNRFAKREHHLGEERCKELWEKLNQPQLEVPEHVVRAKARLLEVVVVQLKTLRDAVESYNERVRSFFACMPAAELVKALPGAKTGTIVATLWAELGDAKDRWESFRHLQAEAGVVPVTKASGKSRVVQFRFSCNKVMRHAAYWLAFVSLNRTEWANHYYRDQRAKGHSHHQALRALGAKWLKIIFVMWRDHKPYDENYHLANIARQQMRQAA

SEQ ID NO: 193132 - protein, 438 aa, unidentified
MRSIGLDIHKRFAEVAIIEGKGPPDRRRIATTPAALQAFAATLRPDDQLVLEATMNTWAIADVLRASGARVVVSNPVRTRAIAEAKVKTDKVDAETLAQLLAADFVPEVWIPDEQVRALRRDVAARAALVRQRTQARNRAHAVLHRCLQDAPVSDVFGTAGRSWLSALALPVAERAQLEATLRVHEAIEAEITLADRRLAEAALADERVDRLMSLPGVGATTALSLVALIGDITRFRRPPKLVGYLGLDPRIHQSGERAAWMGSISRAGHAHSRSLLVEAAHAAVGGPGPLRAFFRRVQRRRGTQVALVAVARKLAVLVWYVLTTGERYRFERATLVRDKRNRLARTLGQRTPRRRPAKGEPSLALRREHELALLDEAEAAYKADVAQRTQRDAAAANGEATVQPSKGQDARRSSHPWRSALLTGSTASEGGGYASGA

SEQ ID NO: 193133 - protein, 457 aa, unidentified
MSKRKSKAKSKSFQVPKLPAQLQHMNLNAAGIDIGSERHLVAVPEGRDPVSVREFGSFTSDLEALAAWLKQCGVTTVAMESTGVYWIPLFELLERRGFEVKLVDARHVKNVSGRKSDVLDCQWLQQLHTYGLLAGAFRPPDEVCVLRSYLRQREMLTQSASMHIQHMQKALQQMNLLLHNVVSDITGVTGMKIIKAILAGERNPRVLARNRDERCQNTAATIAKSLVGNYRAEHLFALRQAVDLYETYQAKIADCNQALIKQVEQQPDISDEGPPTPEKPVQARDRLREGVDVRDLLFRKSGVDLFAIPGLAADTLLTLASEVGFDLTPWKTEKHFASWLNLCPGTRISGGKLLKNKTKRHPNRATQAFRMAAASLHHSQTALGAFYRRIKSRAGGQYAVTATAHKIARIYYAMLTRGTNYVELGQQAYEQRYKKRRLDHLKVQAKSLGFQLVPCAT

SEQ ID NO: 193134 - protein, 407 aa, unidentified
MTNETLKVIAGIDTHADTHHVALITEYGKHLGDRKFLAVGTGYREIAAYLTSLGPVAAVGIEGTGSYGAELSRVLANRGFAIKEVNRPNRAERRLHGKSDPLDAYQAAESVLAERGTSTPKSRNGFVEALRVLRTARTSAMKARTAVLSQISAVLTAAPEPLRAKYRGMTSEARVKAMTATRPTGDPADPGVATALTLKRMGSRHLFLSEEIAAIDLELSQIVAVHAPALLEVNGVGTVVASQLLVTVGDNPERLSNEAAFAALTGTAPIPASSGKTTRHRLSRGGDRHANASLYRIVLVRMSRDRRTKEYVVKRTANGKSKKEIIRCLKRYVAREIYRVLQNPRLAPPTNDLQPQRITLGLTMTAAAMDLGVWPTTILRIERGQMRDHDAIKRYRDWIEHKTLINA

SEQ ID NO: 193135 - protein, 410 aa, unidentified
MLGLKIYINEMWSVELVGKGARGGKREAFSTASDPVRRRRIVHKSTDLWFRCGSSSLPWDAKPVEKQRAPYRLLKANPNGCLGDRARIFARMGTMSANEVETFVGIDVSKNTLDIRIEPASESLQVAYDDPGVKEVCHRLVKAAPALIVVEATGGLETRLASTLLAKGLPVAVVNPRQTRDFAKATGELAKTDRIDAAVLCRFAQAIRPAVRPFKDAETRELDELVSRRHQLVENRVQETLRLGTAASKMLQKSLKSHIIWLDKQIATLDDGLNTRLRNSDAWKAKDDLLRGIPGVGPVTSVTMTAKCPELGQLNRQRIAKLVGVAPLANDSGKHRGKRFVWGGRADVRAALYMATVSAIRCNPTIKAFADRLKGTGKPAKVVIVACMRKLLTIMNAMVKNNTPWQPENA

SEQ ID NO: 193136 - protein, 380 aa, unidentified
MPEAVIGLDVGKSSHWACVATRDGEVLLSTPVANREDDLDSLFGRFPDALVVVDQSRNIGALALARARAAGMSAAYLPGLGAHGAARLFAGDAKTDERDAMVIAKTALGIPDALLPVGDPGPTIAAARALAAQRNFLTCENTRNKNRLRSILLESCPAFEALVDLSDGPQLRLMASLGGAWSVADAGPRRAAALTRGAARGKIEALVRSTTSSTRPDASVVAAEDRAVKLLARRISENSAEIEAITAEISALLEGDDTYRCLLTVPGIGPKTASELAISIDIEDFPSHDRLASYCGLAPRNRQSGTSISSVTASRQGNKRLKNLLIFSCNCLTRTEGRWGDYYTRCRERGMSHGKALKALARKRLKVIYAVMRDRVPYAA

SEQ ID NO: 193137 - protein, 417 aa, unidentified
MNTYNKFTKIGEKTLIVGIDIGKETHYGFMRTLSIEDFKAFTFKNTSEGFNTLLKRIIDFKRWHRIENVIVAFESTGNYWIPFANYMMNQKDYTLLQVNSKHTKRFKDITDNTSNKTDHKDPRVIAQIVMIGSGLHVNLPAGPKADLRELTRMRKTIVENKKRVINHLESTLAVYFPELGRVFKDLSCKTCLFLLKEAPIPDAILKMPEELLIKALRRISNGRVDQNKTKLLISLSHCSVGIRYGMEAYLINLKILLAQLELYGAQIKEIEIRITKILKTLHEYNILKTINGLGEITMATVISEVVDFNNFKTDRELLKYAGLNLVENSSGKRQGNRKISKIGNKFFRTSIFFATLRLISKRGVYHELYQTHLKKGMSKKKAVIAISRKLVRTIHAMIRKNEEFNMSHEINKYKNAA

SEQ ID NO: 193138 - protein, 314 aa, unidentified
MPKVKSYVGIDISKDHLDLHQLPQDRTASFETNSEGIGKLITYLKRRKPALIVIEATGGYESQLAAELVSAKLNVAVVNPFQVRSYAKALGILAKTDAIDARVLARFAQDVRPEPRPLPDEQQMELKSLVMRRRQLTEMLIAEKNRLNRTGSKRVRESLKSSLESIQKQLEQLDDQIKGEIRKTPAWREKDDLLRSVPGINHITSHMLLAQLPELGKLNRRQIAKLVGVAPMNRDSGIYRGTRMIYGGRKHVRKALYMATIAAIRWNPPIENYFLHLRNQGKNFKVALVACMRKLLIIINSMLKHKVTFKQCFA

SEQ ID NO: 193139 - protein, 497 aa, unidentified
MKKQRQNRTPKAASNTASPAQSKRGRSAKLRKLKAIEALEQINLHAAGIDVGSAQNFVCVPAQAVKPGQSNVRSFGAFTKDLDDLVEWLKECGITTAAMEATGIYWMSLYDKLEAAGIEVVLVDPHSVRHVPGRKTDVLDCQWLQQLHTYGLLRGAFRPEASVRRLRVLCRHRADLVCEGSSHLQQAQKALVQMNIQLPLVVSDINGETGLRIIEAILAGERSPQALVQLRDPRIKKSTVPEMAAALSGHYTEEHLFVLRQNIEAWRFYQGQMQQCDQQIEAALKAMASASNLNVPTAPPKPIPAAQPGSPGAKKKRQRPLHGNNAPTIDFSEQIRRVCGVDLMKICGLNLLSVLMLIAEIGVDMSQWRSAKAFSSWLGLCPGSKVSGGKHLSRRTRHVVNRASVLFRMAALAAGQTDTWIGRFYRRKRSHLGAPKAITATAHKIACVVYHMLKYQEEFLPLDIALYELKAQQRRMRNLRKQAQELGYELIERKQAA

SEQ ID NO: 193140 - protein, 349 aa, unidentified
MRTYINPTEAEMTCYSGIDLHSNNSVVLVSDEADRVVYQRRLPNDLPTILAALEPHRGELAGVVVESTYNWYWLVDGLQAAGYRVHLANTTAIKRYEGIKHSGDETDAAYLAHLLRLGILPTGYICPPDERAVRDLARKRLQLVRTRSSQVLAVENIVARQTGAGISANVVKRLERETVAALNLPEDVRRALAANVAVIQTLNAEIGKLEARLRERVRLRTPFRLITTTPGIGEVLGTTIMLEAGAIERFAAVGNFASYARCVDSKRLSNGKKKGEGNVKNGNKYLAWAFIEAANFARRYCPEAKRFYERKKARTNNIVATKALAHKLARACYHMLKEGKAFDVKRCFA

SEQ ID NO: 193141 - protein, 410 aa, unidentified
MDILNPHCAGLDIHRDTIVACVRLAEDGGVVRLVETFATTTSALEQLSEWLASHGVTCVAMEATGVYWKPVWAVLAETFELVLANAHHVKAVPGRKTDVNDAMWLADLLAHGLIRPSFVPSMQEQALRDLTRARKQLTREKASHVQRIDKTLQAANIKLGSVLSNIMGQSGRALLEALAAGESDPERLAGQVRTKIRASHAQVVEAVRGRLEAHQRLLLRLYLAQVDALDAAIADIDRELGERLEPVRDAVRRLTTMPGLSALSAAVVISEIGLDMSRFPSVAHLISWAGLCPKNDESAGKRRSTRLRPGAPWLKALLVQTAWCAVRAKATYLHALFQRLKARRGPRKAIVAVAGAMLTAIYFMLKRGAEYHDLGPDHFQRTERSRLATRLTRKLTELGFDVTLTQRAAA

SEQ ID NO: 193142 - protein, 347 aa, unidentified
MAFIGVDLHTNSFTICRLHDDGSEAFETFTLSASALQAFCMSLDADDEISVEATGNTAWFCDEIRACVGRIVVVNPRQFQVIRKSVNKTDKNDARALAFFLSKDMLPETRLKSTAESELSSLVYTRDVFVKQRTMLLNKIHAMFVRRGTKLKKEGLASKKRLRELDVSQFTALEQVELNALRNQALGLTETLAELDKAIESAGADLPGHEGISSIKGIGSRSAAILLAGIGNIDDFESADKLAAYVGIVPKVSQSNDTDNRGRITKRGNKLMRTTLVQCTLITIRYSGYLNAFYQRIKERRGAGKAIIATARKLLAIIYDTLKNGWVFEDFSEFKIKQNQRPTGQPS

SEQ ID NO: 193143 - protein, 350 aa, unidentified
MKKNTGRKEQKQREIIGIDLGDKVSRYVVINEDGEVIEEGTFRNQATSIEKHFRGEPRCIALEVGTQSAWITRQLQQMGHEVIVANARQVKWITSSDQKSDRVDAKKLAWLARADMRLLAPIEHRSAEQQAELSVIRARGAVVRARTLLVNAARGIAKGFGQRLPATVTATFGKRALTMVPPMLQAALTGLLEQIDALGKRIQDYEERIEQAGARHPEVEKLTSIPGVGTLTALTFVLTLGRAERFSHSRDVAAFLGLRPRQRQSGGLDPQLGISKSGDKYLRKLLVQCAHHTLGHWGQDSALRQWGLAKGGGAKGATRRAVVAVARKLAVLLHRLWVTGEVYKPFPKAA

SEQ ID NO: 193144 - protein, 365 aa, unidentified
MTTMTQPPNDTRRVIGGIDTHKDVHVAAVLDELGRLLGTESFPTTASGYRQLLCWLRSHGDVVAVGIEGTGSWGAGVARHLSALGVDVREVMRPNRQHRRRHGKSDEADAIGAARAVLAGEALGTPKSQTGQVEAIRLLRVARRSAMKARTQAGNQIHAVIDTAPEELRRRFVGKPTTAIVAETALFRRRQRPDTPLEAARLALRTIARRWEYLNDELVELDAQLDDLTAQAAPTLRAINGVGAQVATALLAAAGDNPERLRSSSSFAALCGVSPIDASSGRQRHHRLNRYGDRQANWALHVVIISRLRWHTPTQAYMARRLAEGRTKKMVMRCLKRHLIREVHRAITTDLAPPRYAERAPAQAA

SEQ ID NO: 193145 - protein, 338 aa, unidentified
MNKRDIDRLDDSMRMFVGLDVHKKYTEVAIVDEEGVITEQGRIENEPGLVEEFSDRLSNANMVLESSSSWYWLYEILSRKHKVVLSNPAKTKAIASAKLKTDKVDALMLANLLRGGYIAESYVPSRRVMSLRELVRYRANLVRMRGSVKNRVHAYLLMNNIRIGCSPFTKGFLEELRKVEDIRVQGYLRIIDGLNGEIREASKKVCDEALNDENARLLMTIPGISFYSALLLISEIGEIGRFPDSAHLVSYAGLASSTHSSGGSTYHGRITKAGSPYLRWVLNQCTWVHVRNEPGGSIAVFYERLRRKKGHSKASVAASAKLLKVVYWVLREKRPYHG

SEQ ID NO: 193146 - protein, 345 aa, unidentified
MEIRTIGIDLGKTVFHLVGVNARGEVVVRKKCSRTQLLRCTSNLRACLIGMEACGGSHFLGRALREQGHDVRLMPAQYVKPYVKTNKNDYIDAEAIAEAVTRPTMRFVPIKTDDQLDLQSLHRVRERWVVRRTAVINQMRGLLLERGITIRKGRQHLEASLPGILEDADNKLSGALRVLLTQLRWEMQYLHRQIEESDKLIVRIASELEPCRRLVAIPGIGPLIATATIAAIGNGAAFKRGRGFAAWLGVVPGEHSTGGKQKLTGTSRRGNKYLRKLFVLGAHTVLLQRTKQSSGLSTWLASLTARKRKQVATVALANKMARMVWAVLFKGEAYRPPLVPPSVAA

SEQ ID NO: 193147 - protein, 360 aa, unidentified
MSQSFDASRSLTAFEQDSTLVAVIEMSQSKWLVAAVIPGVARQPLKKLDADAGALLKLLQRWRDEARKAGRTIGRIVCAYEAGRDGFWLARWLHVQAIEAYVIHAASVAVSREHRRAKTDRIDTELLMRSFLGWLRGEKRHCNMVAIPTMAEEDARRPSRERESLVGEQTRIVNRIKAVLTLFGIGGFNPRLRKAMQKLETLRTADGTPLPENAHAELRRDLERLHLVQEQIRNIESERLRRLALAPAAGPHAMVRLIARVFGVGIETADMLVNEALARNLRDRRAVARYAGLTGAPDESGMRRREKGLARAGNGRVRRGMIQLAWRFLIFQKDSRLVRWFRERTADGRHAQNHDRGAGA

SEQ ID NO: 193148 - protein, 338 aa, unidentified
MKTRTFGLDLAKRVFQVHSVDMETGEIERRQLNREALATYFANQAPAVIAMEACGSAHYWARRFANFGHEVRLIAPSFVRPFVKSNKTDVADARAIWEAAQRPEMRFVAVKSEAQQGVLSLHRVREQLVKMRCMQINQLRGLLYEFGTALPCGPGGMAQVLQALAGLADTLPAMVIDTLREQLQRIEVLGQNIAAIEHRLTQCKREDEATQRLMAIPGVGLLSATAAVATIGDAHTFRSGREFAAFLGLVPRQSGTGGRVRLLGISKRGDVYLRTLLIHGARAVFSHRQHLAEPLQRLLARRPFNVAVVALANKMARTIWALLMHDRTYQPGYAAHAA

SEQ ID NO: 193149 - protein, 368 aa, unidentified
MKEAITSFAGLDVHKDSTAIGVAEAGRDSPRFIGTVGPELGALLKGLKSLGKPETMLVVYEAGPCGYGLARQLRSRGYSCEVVAAGRLARSAGERIKTDRRDALALARLARSGDLVKVMVPDERDEAMRDLSRAREDAVRARLKARQQLKALLLRHGHRYEGKSSWTLAHERYLASVSFAHPAQHVAFAEYRQAVRDGQERVQRLTQALRDQSEHWRMKPLIAALSSLRGIDFVAAVTLAAEIGDFSRFAHPCELMGFLGLVPSEYSTGQTRRQGDITKTGNTHARRVLVEAAWNYRFPARISRVLQIRQESQSKAVRQIAWRAQLRLAHRYRRLSSRKLHPNKICVAIARELAGFVWDIARQVKVAA

SEQ ID NO: 193150 - protein, 421 aa, unidentified
MNLLSGKPYTAYIGIDWASSKHDICLQVAGSEDRAFDRISHTPEAIEEWARALYQRLGGPIAVALELSEGPIVSALEKYDFLVLFPIDPKRLAKYREAFVPSGAKDDPTDAEFAMDYLMRHPEKLTPLKPESAPMRKLRYLVEARDRFRGDQSRCVNRLIQALKQYYPQAVDWFNDHNTLVFCDFLKQWPTLTTVQRARKARLERFFKEHNVRFARLIEERIQAIKSATPLTHDEAVIEAHRLQVEVLVEQLRITIKAMKCFDEQIAAIAAQFPDYEHLYTPLPGAGKVIAPRLLAAFGEDRDRYNCAAQLQKRSGIAPITKRSGDSTWVHWRFQCPKFLRQTFIDFAAQTINKSAWAGAYYRQQRDKGASHHVAVRALAYKWIRVLYRCWQQRTPYDESKYLETLRQRGSPLLKQLAEAA

SEQ ID NO: 193151 - protein, 429 aa, unidentified
MNPTQKIDPSSSTTQFVAWIGLDWGDKEHAFCLVASGSSQFETGKLTHSAETLHRWFKDLEQRFGGRPVALAVESNRGAVLHVLAQYSWLTIFPINPVTSARYRKAFIPSGAKDDLPDAAIVLDLVRYHQDKLRPLIWEDENTRKLSALVLARRDTVDRRTQALNQLTSVLKTYYPQAFGLAGEDLRAPMALEFLRRWPDLISLKAARLSTIRNFYYRHNVRRPEVVEKRLAQIKEMVALTTEEAVVSVALLQLKLLLELIATFNKHIARFEGETATTFAAHADAALFKALPGAGPALAPRLAVAFGTDRTRYPNAESFQKYAGVAPVREKSGGQLWTHWRWQAPVFTRQSLVEWAGQTVIWCQWAKRYYERMKAKGKKHHVILRSLAFKWVRILWKCWKTNTAYDEGMYLKALEKKKSPNLPLPETSQ

SEQ ID NO: 193152 - protein, 350 aa, unidentified
MIIIGVDFHPEFQQIASVDTDTGEFQEKRLAHREDAENFYRGLAAMGRAVRIGMEASGQAHWFERLLANLQFELWVGDAAKIHTKRVRKQKTDRQDAQLILTLMLKDDFPKIWVPSWENRDLRQLLWHRHRMVQARTRIKNQLQAVALKEGLRCKKRLWREHGRQELESFQLAPWASRRRRDLLELLDRLNPTITELSQAIEREVENHPEVRRLMTHPGVGPLTALAFVLIIGETERFHCGKQVASYLGLVPLEDSSGSRRRLGHITKQGSSMLRFLLVEAAQVTARSLPEWRSQYFHLMMRRGRKIAKVALARKLAVRLYWMWRKQWDYEQLTKFGSHAGQPGHRHGVQ

SEQ ID NO: 193153 - protein, 465 aa, unidentified
MLKRNASALGLDLSDRTFNFCRLTEGTSPPVEGKRRLTKLDLSEVWALYPADVVVIEAGTPSSWVADHLVSLGARVIVADPRKLRAVTADVRKSDLRDARMLARLGLADEDLVAPTYVRSVAHRRWMALLKARDQLVRVRTATILEVRSQVKVAGGRLPPCTTKGFERCQALLPADLAPLLGPSFDVIRSVNVAISQLDDQIEAAGKADPDVQRLRRVHGVGPITALAFVAVVGDPTRFARTRDVGAYLGMVPGRSQSGDDDPQMRITKAGCGFLRRLLVQCAQFLIGPFAKDCTLRRKGLALVERMGPKLGRRKAVIAIARKLAVVLLSLWKRQTDWQPLHRVADVQSGDAPQPVVDGECALSLGAFELVTETAPPPATQTQPCTAPKTGPSANGSAGQPGATPLTANRPRVERAIPTPKATPAPAARRRPDVDSTGVVDRLVRRPEGDAVPAPNSLDNLRSGP

SEQ ID NO: 193154 - protein, 368 aa, unidentified
MSKAIICGTDMHDNSLVCRVAVGKEDAKTKRYGNTDSGRKHLFGDLKGMSMKHGGGRIIVAYEASTHGFCLYDDCRDEGIECYILAPTKMRKSKKEQKKKTDESDAQLILETIKGHILAGNELPSIWIPDDKTRADRETVRARLDLGTKLTTVKTQVQTLLKAHRMKKPADVNKAWTKPYRKWLMSLSMDWPALATLVRQIENLEREIMILDLEIKKLSETERYAIPSKALVENIKGVGLLTAMVYLTEMGDLSRFSSRQKTGAFLGLAPSSHESGEADDRKGHITREGSFRVRRVLCQATWSHVTHGGVETQLYNRIVKRNPKHKKIAVVAVMRRLGIRMWHIGLNAQKSANVFNDVEKKVEVKKVA

SEQ ID NO: 193155 - protein, 355 aa, unidentified
MNDAKYIGMDVHQATISVAVRDSRGNLVMEAILETKAETILQFIHGLRGSLYVAFEEGTWAAWLHDLLQPHVACVLASDPRKNALLKAGNKSDRIDARKLSELLYLNKLSPVYHGEQGIRTLKELARSYITITRDLTRVMSRLKAIYRGWGIPCAGQQVYAPRYRAEWLAKISEAGVRRRAELYYQQFDVLAALRQGTRRELLAEARKHPAMGLLRQIPAIGPIRAALLIALIQTPNRFRTKRQLWAYCGLALRTYTSGEYRFVGGQLKRSKKVLAVRGLNINHNHDLKNIFKAAATRAAATAGPLQDFYQACVARGVKPHLARLTLARKIASITLLVWKKGVRFDAEHLKQQAA

SEQ ID NO: 193156 - protein, 407 aa, unidentified
MSSIENSHQNPPPACQAQPAPEAWIGLDWGNTQHAFALQDRSGHTERGPLVHTSENLHQWPRQIGQRYGRRPVALAIEASRGAVIHALLNYAWLTMYPINPITSARYRVAFTPSGAKDDQPEADVLLELVRDHAATLRPLEVQDPQTVKLTELVQVRRDIVDRRTQALNQATSLLKTYYPQALELAGDLNTDMALDFLSRWPDLISLQAAKPATLKRCYYQHHVRSTELVAQRWEFIKKAVALTSEESRVSVAVLQMSHLVDQLRAFRKHIDIFDQEIQTAFRAHPEAGLYRDLPGAGKQLAPRLCAAFGTLRTTYPDPASLQKNAGVAPVRVKSGHQLWTHWRWQAPKFLRQPFVEGAGQTVVYCPWAAHYYQRMKKKGKKHAAILRPLAFKWIRILWKCWKDRKP

SEQ ID NO: 193157 - protein, 343 aa, unidentified
MKNTTIAVDIAKDIFEIVLSHKPGEVNEKHRVTRKKLLSFFVNQPPTTVVMEACGSAHHWAREVNKLGHRVVLLPPHMVRPYVQRNKTDQSDAKGMLEAYRNKDIKPVPVKSISQQSITLLHRVRSSWAASRTARLNMIRGLLRELGIFIPVGARKVVPRVLELLEDADSQLPDAVRHTLHEVCLEIRDYEQRMRDVEKQLEALSKQIPTVTLLRTVPGIGLLTSTALFAFVGDIQRFRSSRHFAAFLGLTPRLRGSGFAIHLGPISKQGDRYLRMLVSHGARSVLLRAKSMNPPDRLRAWALTVHSRRGHNKATIAIANKLARIVWAVWKHDTEFQSYPKAA

SEQ ID NO: 193158 - protein, 392 aa, unidentified
MEPSYQKKRFSTFNNSILQFKEWLVKNQCRDVCMESTGKYWVPVFNLLEDEINITIANPKWVKAVKGNKDDTKDSKWIGDLFRLGLVPGSYIPCKPIRILREFTRNRYKLTSCRTSEKNRYQNALTVCNVALDSVVFDIFGKSATSVIDYLIEQPDNSINHEEIASRLLRSLKRKSDSVIESIEGYQMTDSQKYRMRLIRAHLDYITSTINDIDTMLNSLIAPYENAVQLLCTIPGVDRNSAITVISEIGTDMTPFSNSKRLCCWAGLTPGNNESAGKKKSVRITRAGVYLKPALVQVAHAAVKSDKSPYYKQKYERIMKRRGKKRAIIAIARMILTAIYQMLSTGEAWNPTDLFKIDMPEPMKEKQKEKAIKQAMKLLIREGKISESQLAS

SEQ ID NO: 193159 - protein, 334 aa, unidentified
MNAVGIDVSKGKSMVAIMRPFGEIVSTPFEIKHTSNDINSLIELINSIEGESRIVMEHTGRYYEALAHELSAANLFVSAVNPKLIKDFENDSLRKVKSDKADSIKIARYALDKWQNLKQYSVMDELRIQLKTMNRQFGFYMKHKTAMKNNLIGILDQTYPGVNSYFDSPARSDGSQKWVDFASTYWHVDCVRKMSLNAFIDHYKKWCKRKKYNFSQSKAEEIYGKAKELVPVLPKDEITKLIIKQAVDQLNSASSTVEELRTLMNETASKLPEYSIVMNMKGVGPSLGPQLMAEIGDVSRFTHKGAITAFAGVDPGVNESGTYEQRSVPTSKWC

SEQ ID NO: 193160 - protein, 343 aa, unidentified
MQAVTTIGLDIAKSVFQVHGVDAKGNVVVRRQLKRRYVLSFFEKLQPCLVGIEACASSHHWSRELQALGHTVRLMPPAYVRPYVKRQKNDAADAEAICEAVTRANMRFVETKTTEQQSCLTLHRTRHLFIRQQTAVINAIRAHLAEFGIVAPVGRNGVDELLRVVADPNDKRLPAIARACVAALGSQLRMLKTQILQFDRMIMAWHRSNELSKRLDKLPGVGPALATALVASVANPKAFRSGRDFSAWIGLVPKQNSSGGKDRLGNISKQGDRYLRSLFTTGALAVIRYAKIHGTGHRPWLTTLLARRPTKVAATALANKLARMAWAMMAKGEPYKEPVALAA

SEQ ID NO: 193161 - protein, 262 aa, unidentified
MSEEAFVGIDVCKERLEVAIRLQGTSFSLPHSEEGLEELLTRLRELSPALVLLEASGGLEAAVAATLATGGLPVVVVNPRQVRDFARATGRLAKTDRVDAQVLAHFAQAVRPSPRPLPQEQQQAIVSLVTRRRQVLGMLVAERNRRERSPLPIRRRIELHIRFLEGELKELEGELDDAIRGSPLFREKVDLLRSVPGVGPTTACALLAYLPELGQVGRKAIACLAGVAPLSWESGRRSGRRRITKAAGPGLGRPSTWLPWWR

SEQ ID NO: 193162 - protein, 350 aa, unidentified
MSKSMDRVVGFDVGDRRIEVCVVSLGAGQVLAREKLATRREALEPWLAAAPRSRIVLETGTHAPWIARAAQAAGHEVIVADARTVELITKSRKKTDRRDAELLARLGRSDLELLRPVHVRSQTTQRQRALLRMRDALVRARAQQINCVRGVMKTDGRPLKSCGAEAFAGRVRETADTSWRGALEPVLAAIDALTGQIRSYDAMLTAIAERDYAPALERVSQPAGVGTLTALALILAVEDPRRFRNGREMSAYLGLVPRRRQSGDSDPDLGISKEGDAYARRLLVSAAHYVLERGPDTDLKRWGLALEARWGPKTRKRAAVAVARKLTVLLWRLWTDGQRYEPLRHAAAAA

SEQ ID NO: 193163 - protein, 429 aa, unidentified
MTRSKDTTVVTVLHPVCCGLDVHKEFITACLMTTNSSDEETLLLETFGTFTDDLIRLREWLLGHECPVVALESTGVYWRPVHNILEGYLNVVLVNARHIKDLPGRKTDMSDCQWIATLLRVGFLKGSFIPPKIIRQWRDLTRYRRSLVEGLGDVKRQVHKLLEASNIKIDSVVSVLFGKTGRNLLELLAQKPGKLTMEAVQTCLRGTLKKKATELFRSVQGFFEDHHRWLLRDMLHRVDLYERDVKKVESRLKDLMEPHAELVHRLCQIPGIAPTSAYAILSETGTTLESFPNAAALCSWAGVSPANNESAGKRRSTRSPVRRNHLRTHLVEAAWGAIKKKGTYLRSKYFSLRSRLGPKKAIMAIAHKILKALYNIIKHGESFRDLGEDYLIELRSRSVISYIQRQAKKLGMVVLPEGIWKMMLHPSPA

SEQ ID NO: 193164 - protein, 323 aa, unidentified
MADKYVGLDVHMATTSYSVRDCEGKVVAEGIVATSGVNLVSLVRGIDGKVHLTFEEGTQAAWLYDLLKPYVEKLIVCDPRKASQKQEDKSDRIDANRLSELLRVGSLTPVYHGEKGTRGLKELVRGHRDLVRDVVRVKNRVKAIFRGRGIGVKGAAVYHPDKREVFLSQLDRKELVQRVQWYLEELDKLEELRDQSEAALKKEGRRHGGCRILCSMPGIGPVRAAQVVGVLDTPHRFRTKRQLWKYIGLSVVTKTSSDFVPTPNGFVRDAIAKYPTWKAYFNALVERGLEPEIARVTVARKIAAISLFIWKKGQRYDSSIALM

SEQ ID NO: 193165 - protein, 359 aa, unidentified
MKKRLSKKQMFFNKINLTKDDDVYVGIDTHKQSYSVAIWLNDTPAIDFVMPADNTKLLKVLEKVRIGLKMVVYEAGPTGYTLARYLQKAALPIKVVAPSKTPRQSARDSKTDRLDARTLAKYAAKGLLRAIAIPTKQQEADRQLTRTREQMVSKQSCVKLQIKSFLLQHGIKQPPSLRAWSTNAVRELNALKLPKQLRFCLDVLVEELQFLKNQLTIIEDQLKDIFSRQRHAQKVDLLQTHPGIGPVIARQFTAEIFAPRRFEHKTELAKYVGLSPTIIQSGQSLRDGPVTKTGRPQLRSNLIQGAWIWITRDPKARKTFLRILHNTGHKNKAITAMARRMAIHMWKMICDNKSYISAA

SEQ ID NO: 193166 - protein, 354 aa, unidentified
MANYYIGADVDSKMAELAIEKNEMIINRYRVPTTIPALREVLGSIPGTKFLTFEEGPMAGWLYRNLKDNVDDLVVCDPRRNKLITCDGDKDDSIDAGKLAGLLRGGFLRAVHQSEDIDRVVLKQWVSLYHDKVCEAVRQINKIRARCRMYGIRIPRRVLRDRVSRHQWMTGLREKELAEQLSVLWIGFDTAAKQVKMARKQLIRHSKDYDIIKYWSDVPGIALIRATTMLAYLDTPWRFSNEKKLWKYCGVGLQRTASGTDKFGRPNRGKLKLAWAVNRRLKAVVTGAAISAINQKHNIFAYEYGRLVRNGLTPSNARHAVARKLLSVLWAMWKTSSRFDESLVCYSPVTVKAS

SEQ ID NO: 193167 - protein, 395 aa, unidentified
MLYAGLDLSRKRLDFHVLDDEGATVEVGAVAPDADGVRGLTRRLDRHGHPIRAAIESMNGARFVHDQLERAGWQVEVADAQKAKGLAPLACKTDRIDAWVLAELSRRDLVPAIWLPDPQVRAERERARWRLHLVRHRSSLKQRVHAVLLAHGKPCPVSDLFGVSGRQLLARLALPEPWSGNVQASLRLIDELDRDIDHCESELRRLGAEHRYVPLLCTVPGISRVLAYTIAAEIGDIARFASPRKLSGYTGLCPRVYQSGDSDRRGPLAKQGPKYLRWAFVGAAVHASTHPAYRDRYQHTKTRLGKQRGAKIAQVDLARRLAEAIWHMLTRNQLFAPAGACVNRSPPPHSGDSQARPLDPVCSNVCSQRMTETTGWARSTSSNDRPRPRRPTGRC

SEQ ID NO: 193168 - protein, 316 aa, unidentified
MSRKQLESFIGIDVSKQLLEVAVHERSYKFRCPNEAQAFGQLITELIDLRPALIVLEATGGLERAVVTALHGAGLPVVVINPRQVRDFARALGQLAKTDPIDARVIAHFAATIKPRPRPIKSQEEQELDALSGRRDQLIEMLTDEKNRRASAARDSVRDEIEEHIDWLKDRIAELDQQMKKLIKRSAQWQAKDELLRSTPGIGSVVSFSLLAELPELGKLKRQEISKLVGVAPLNRDSGQTRGSRHIFGGRAHVRRVLYMAAFNAIRCNPVIKAFFERLRARQKPYKVAITACMRKLLTIINVMIRDGNPWKFAEA

SEQ ID NO: 193169 - protein, 381 aa, unidentified
MALTIVEDTRAVTGGVDTHADMHVAAALDPVGGLLGVGEFPATAAGYARLLGWLGGFGTVCLVGIEGTGSYGAGLARHVTAAGIRVVEVDRSDRQDRRRQGKSDPLDAVSAARAAQSGRARGEPKGRDGAVEAIRALMVAKRSARSERTQTINQARALIVTGPDDLRARFARHTAAGLVSELAALRPRPGATVGYATRIALRELGRRAEFLDGQLGRLDELIVPLVTARAPALLALHGVGPDTAALLLIAAGDHPHRLRSEAAWAHLCAVAPIPASSGKRTRHRLNPGGNREANHALWRIVITRMSNHPATRAYVERRTAEGLPKTEIIRCLKRYIARELYHALIADLLPQPPPRDRASRSSPSAAAPDRSDAPSRPLEHL

SEQ ID NO: 193170 - protein, 430 aa, unidentified
METLNRFVAGIDVHKKMLAVVVRREQDGQTQYEKHSFGTTRSEIASLRAWLQHQQVSEVVMESTAQYWRPVWYGLEGHFQLHLTHPLKTRAPRGRKRDFRDAQRLADRWRSGDLEESFIPKAEQRSWRWLTRTRVQLKRKVGVIRCHVEGLLEQGGIKLTSVASDLFGVSGWAMLEQIAKGETDVEAMVKEARGALRKKETQLREALAGQLEPVYRLLLKQHMDQVRLLWRQIEELNQALAGAMKEHLPALHRLSKIPGVDLYAAQELLAEIGPGAAAFASAEKFVSWVGVCPGSQESAGVCYSRRSAKGNRYLRRLLCQVAWAAIHTKETFFSGLFARLKPRIEGKGAAWAVAHRIAKIIWLVLHQQVEYQEKGPVPPNERTLVRKFNRLLRDFGRLGLDVRALLDQQLPAPATPAATTAPSIPSAPPA

SEQ ID NO: 193171 - protein, 356 aa, unidentified
MTTQITKPDFTGQELFVGIDVSKNSWKVCILTQHIEHKTFTQPPKPEVLVGYLQRHFPGAHYHCAYEAGYCGFWIHDGLMALGVDCIVVNPADVPTIHKERTFKTDRIDARKLARALRNGELTPIYVPNRAALEDRSLVHTRYSLVRKQTRCKNQIKGLLSFYGIPLPQEPSTVNWSKRFIVWLEQLTMQSPNGTLALKALIQELKYLRQMIAESTKQIRTLANEPPYRSYTVFLITIPGISTLAAMILLTELITLSRFATLDKLSSFVGLVPGEYSSGEREITTGISQRRNPFLRGLIIECAWVAVRKDPALVLAFSKLCARMPKHQAIICIAHKLLNRIRFVLKNQTPYVPAVV

SEQ ID NO: 193172 - protein, 287 aa, unidentified
MNIKVVGIDLAKNIFQVCILLEDYSIQSNRKINRTKLLNSLRKLPSGTLVAMEACGSSHYWARTFINLGLKVKLIPAQHLKPFVANQKNDSNDALAICEAAFRPGIFFVPIKSVEQQDIKSLRCVRSRLIKNRTVTSNQIRSLAGEYGITFPVGRLKLKPSLFYVLEDATNSLTFVLRPLFKRLYDDMSLMDQNIDAIDNEIKSLCQLHPRYKALLSIPGFGSIVAASFMSEVGTGEQFKNGRQLSAWCGLVPTQFSSGEKIRLGSITKNGYSELRVLFIYYDLNYK

SEQ ID NO: 193173 - protein, 341 aa, unidentified
MSLIDVFNKQTKKTDIQSVGLDVCKDWVRICFWNKTQTIDYEIENNSQEIKKFCLECKEVKIKKKVPFIVESTWDYHLLLALELRKSWCNVKEINPIITKQYTRTSVRGTKTDKTDAVILWKIGSIEWEQLKAFDRTEENIELKKKIWLVANLEKQLQSMKATIKRYHESLKKLWMNKGHEENLWHDEIKSVEKLIKRLQKEIENYMFEKDEDNEKVTYISSIVWVSNYMAKVFYIQFANKEFKSKDAMYAFVWCEPRLKQSWTKSIGTRMSKRGNGYVRKKLYQSAYCAKYHCEELGKLYDRMKERWKHHYIALNVVMKKIVHIIWSLLKHKSYFNPALV

SEQ ID NO: 193174 - protein, 407 aa, unidentified
MDKTDTMNIRPQLKRACGIDIHKNKVSICYYISNKSEEVKEYGTFTHELEQIRDEILSHQIKDVIMESTGVYWIALCSILMASGMNVKVVNPKFIKNMPKEKTDKKDARWLCKLLVNGLVRNSFVVSEDQRAFRDLCRMRTKYRNHITQSQNRIVKNLERRNIKLRSVVSNMDTVSAMEIVTAIAAGETDIEKLISLCRTKLKKKKKEMRKALVGVITPHDRRMLQSLLDDIAHYRKQIKNIEEEIKTHTDKINEELIKNLREVKGIGEQSTQIILAEIGDNVTPFATPDKLAAWVGVAPGNKESAGKTYYSGTRKGNVYLRTVMIQVAWAAVRTKNSYWRALYYHFTRRMPMKKAIVAIARKLVRLIYKIINGTKTYVEYGADYFHQHLQERLAQKRNHNIVIRPA

SEQ ID NO: 193175 - protein, 387 aa, unidentified
MIAVGIDIAKRTHEACFMGQDGQVVAKPRRFHNTRRGVQALLDDLQQLREPATIGLEATGHYWLALHDALERAGHTVQVLNPLQTHAYRKTTIRKVKSDRKDAWLIADVVRIGRGRAAYVPDETILQLRELTRFRWGLVDQIGDAKRRALSVLDRVFPEYESLFSDVFLKSSRALLQRATTAAELADADLAELASVLKQTSRNRFGLEKAEAVQAAARDSLGLAKLGGVASFELRALLDHIAFLEQQVVACEQQIEQLLATLEQHVTGIKGIGPVLAASLVAEIGDVHRFARFESLVAYTGIDPTVFASGEFSATETHMSKRGSPYLRRALWLAAISASQSNPDLAAYLHRRLEQGKPWGTAMGAVARKLLSRIYVVLKQNRPYEVR

SEQ ID NO: 193176 - protein, 359 aa, unidentified
MLKIVYPICCGLDVHKSFVCACIASTDSCGVTTYRSHRFSTFTNGLKSLLQWLLKNRCHDVCMESTGKYWIPVYNILENDCKVVLAHPKYVKAIKGKKTDKKDAKWIADIFKHDLVSGSFIPPADIRQFRDLMRYRSKLTNFNAGEKNRAQNCLTVSNLKLDDVFSDVFGKTASAILDRMLESNESFDVRPFLHKNLKHSPEEIQEAIDGVICTEQAEKLRIIRSHMEHIDLCKANLESVILSLAEKYIHQIDIVCSVPGIDTFSAITVISEIGVDMSVFPTDKQLCSWAGLTPQNNESAGKKKTTRISRAGAYIKPLLVQCALNAVRTKANPEIRSRYLALKKCRVTRKQSLQFPECF

SEQ ID NO: 193177 - protein, 392 aa, unidentified
MLFVGIDVASKKHDVAITTFGQSILSKPFTISNDYQGFKKLRDEILSHTEYLDDVRIGIEETGIYSKNISEFLALCGFTVHMINPILTSHSRKSSSVRLTKTDKIDAISIARYVEFNFKRLNPYTISLYIYNEIKSLSRARLDIQTKLIKAKTEWTRLLDISFPEFRTHYNQHSKWVYTLFNSYATPIEISKMHTSTLTKIIATQGNRLVQAENIKQLAKITIGNSSASTKILLKNTLSDILHFTNQMRIFEKAIDELIKEHFHNLLTIPGVGSITAGLIVGEIGSISRFKSPESLVAFAGVDPTVFESGQFKAKNVHISKRGSKYLRTALYTSTKVAIINPKVKDNKFRDKYHKKIAQGKHHNSAIFSAVKNMVNTIYKLLQTGENFDYSI

SEQ ID NO: 193178 - protein, 456 aa, unidentified
MKNRIKPAEPIEIVHPNAAGLDIGAREIWVCVPPDRDEEAVRAFGTFTPDLDRLADWLVSCRIDTVAMESTGLYWLPIFEILEARGLKVCLVNARHIKNVPGRKSDVQDCQWIQKLHTLGLLTASFRPDAEMCVLRAYLRHRAQLIQHRSPHVMHMQKALTQMNIQLAQVVRDMMGETGQRILRAIVAGERDSLKLAQYRDPRCKSSEETLAKALTGDWKAEHLFALQQSLELYDFYTRQLAACDAEIMGQFSLMKPRWEIVPAGETADAPTTAPKKYKNKNDLAFDGQTEIMHLTGIDLSAIPGIGVSLALNILSEIGTDMSRWPTAKHFASWLGLAPHNDISGGKVLRSRTLPTANRAGQAFRQAATVVSRTNTSLGAFYRRKRAHGGPQFAQVATAHKIARLVYYLLAHHVPYAELGTQAYEQKQRDRELANLRKKAAKLGVTVVVPESAPAA

SEQ ID NO: 193179 - protein, 428 aa, unidentified
MDQRARKLDIVRAEHTLVVGVDIAKHKHWARVMDGLNGIQVGNAFSFQNTREGFERLLGIVVRAQKATGATKVVVAMEPTGHYWKPLAWYLKKAGITVVLVNPYHVKRYKEFDDNSPSKNDRKDAWVIARLANEASFFEVYLPEGVYAELRGLTQARQQQRNKSNMALNQIRCLLDEYFPEYEDVFTDILGKASLYVLGHRPFPGDILAVSAEELAEELKLASNRRVGLKRALRLQEAARDSVGVTEGLEAARLRLKQLLEEARFWRARLAETESAMADALQRTGLAKYLLSVPGIGVVLAASFLGEIGAPGRYQDSRQIRKLAGLNVVEDSSGQKKGRTEISKRGRPGLRSVLYQMAMTMASKNIQFRALYRYFISRRENPLKPKQALIALGCKLVRVLWTLMKEKRLWDPDRVLGAWRAEQLALAA

SEQ ID NO: 193180 - protein, 355 aa, unidentified
MTLTAYDPRSYDIYIGIDVDKKSFSFTVTDHNQMNICKTIPANAENLSRYIQNTYAGKRVVCAYEAGCTGYHLHDQLQAQNISCFIVPPAGVPKASTDRVKNNRLDSEKIARLLTTAHVPSIHIPPEAYRELRLLVTSREQYARQSISIKQKIKSLVLFSQLHLQLRSDEQRWSGKYIAALKKLACSPGTQLRLSLLLEDLEYTRNQYVRVVKALRMQMFAQPELQELVKLLMTIPGIGFVIAVTVIARIGNPAEIRNVRQLAAFVGLVPTEYSTGDTVSRGHITHHGNRMLRALLIQAAWIMIRKDARMQQFFNRIRSRNHKTAGSLKAIVAVARKLTMIIFAVLKEQRPYRAY

SEQ ID NO: 193181 - protein, 359 aa, unidentified
MRIIGCDLHSRQQTLAMLDTATGEVVERTLKHEGNNVREFYSSLSRPVRVGIEATGSMQWFINLREELGIECLVGHPTEIRAAEPRKQKHDRRDANLLLSLLVEERFPAIWLPTKELLDLRALLRHRHQWVCLRVKIQNALQAIALANGLRRGSSLWTQAGQHAIASLPLSPHASYRRNELQAMYMKFETEIEKLNQRVEEQACGRAGARLLMTHPGVGPITALATDVFLGDPARFDDSKAPASYVGMIPGEYSSGKRQRLGALTKQGNPLLRFLWSEAAIHAVRRDPELKHFYHRKLIQKGLGKARAAVARKLGIRMWIMLRDRIEYHEFCRRGQMQQISGGARAGMPGPRYGAKVTG

SEQ ID NO: 193182 - protein, 350 aa, unidentified
MIIIGCDYHPGFQQIAYVNTDTGDLSEERLGHKEQAEQFYQGLRTRGLTVRVGMEASGHGRWFERLLNELQIELWIGDAAAGRTKRVRKQKTDRQDAQLLLRLLVENRFPRIWMPDAENRDLRQLLWHRHRLVQMRTRIMNQLHVVALNEGLRRKKALWRPAGRAQLESLALAPWANRRRQDLLDLLDQLTPKIHHLARTLEEIVDQRIVARRLQTHPEVGPLTALAFELVIGTPERFACAKQIASYVGLVPAEESSGDRRRLGHISKQGNALLRFLLVEAAQVTVRSHPQWRSQFFHLAMRRGRKIAKVAMARKLAVELYWMWRRGWDYNEMQQLSSHAGEPGNRHGVQ

SEQ ID NO: 193183 - protein, 423 aa, unidentified
MAGVMIGIDPHKGSHTAFVIDGREKPLGQLRVRASCEQAEALLGWAGRWRQRTWAIEGARGLGQLLAQQLLAAGERVLDVPPKLTARVRLLESGQINKTDENDARAVAIAALRARELPQLTVEDQTIVMRVWARRYHDLGRLRTQAVCRLHTVLCELVPGGVRKQLRTSQAIAMVDSITAESPVAQAKLELAHDLVADLQRLDAQRREVKRRVSRAVAAAPTSITEVYGVGPIVAACVLGYVRDIRRFPSRDRFASYNGTAPIEVSSGDRKIYRLSRRGNRQLNHAIHIAAVSQISHRGSEGHAYYQRKRAKGMTGKCALRALKRKISDTLYERMLHDIRPRKDPGGHSGNDAVSSAAGSHPDGPALRTSHSRATANSKTATTNQRPLTSPPAPDKRRTSRSGTGVKLQPRPRPRRGRGQERA

SEQ ID NO: 193184 - protein, 448 aa, unidentified
MFTMHYKRLLSLIDSVSSYLSVGLDVGADFTWMSIALPNGSFIGKPFKIVHSDPRSRDLAVAKIKEAQETYSLKSRCFLESTGIYHIPLLCFLRDKGFDCAVINPIITKNSTNMNVRKLHNDKFDSKKAAKVGLDASLKASIVPDDAIIDLRNLVRDYYYFKDLQSAIVLKLHAELKVSFPAYLNVFSKVTTQTSLKLLEAYPLAADMLAAPKDELVETIRSTARFGETYALARYDAICTAAKDAAVFGRALPSNALRIRLYIKMYREYQAHLDSILEELHQAVGKLEGTPDYDRISFIQTLHGVGFLSAVVLIAEMGSFDLFSSPKKLYAYFGLDPGVNDSGKFHGDRVHMSKRGSSLARRILHMVAINNLKVDKATKTPVNPVIYDYYTRKCASKKKSVAVGAVMHKICNIIFAMLRDNKPFELITPEEHRERYAAEHPESVNTAA

SEQ ID NO: 193185 - protein, 336 aa, unidentified
MQVTTIGLDLGKRVFQVHGVDAAGQVVVRRKLQRAEVAGFFAELAPCLVGIEACATAHYWSRMIASYGHEVRLMPPAYVKPYVRRGKNDAADAEAICEAVTRPSMRFVPTKSASQQAALSQHRVRDLLVRQRTMLINALRGHLGEFGIIGPAGRHRLGDLQRALWAADDVPALARVALQALISELHSLEQRIEALELAIVREHKTNVVSRRLATIPGIGPITATAITATIADPAVFKSGREFAAWIGLVPRQHSSGGKQKLGRISKQGDQYLRRLLTVGATAVMRRVSGKLDRLSVWVRELLGRRPFRLVSLALANKLARIAWAVMTKQEPYRCIS

SEQ ID NO: 193186 - protein, 334 aa, unidentified
MSQEKYIGMDVHQATISVAVMDAGGKLIMECLLETKAATIVEFMEGLHGTLWLTFEEGTSAAWLYDLLKPHVSRLVVCDPRKNARLKDGNKSDRIDARKLAELLRTNQVKPVYHGEHGVRTLKELGRSYLTITKDATRVMNRVKALYRSWAIPCAGTTVYAPRHRAEWLAKIAEPGVRVRAERLYQQLDLLQPVRLEARRELLVESHKHSAVKLVRQIPSMGPIRAALLVALLQTPHRFRTKRQLWAYIGFAVETHDSGEYRYVRGKLQRNRERITVRGLNDNHNNELKNLFKGAAISASTRPGPLRDFYVGLRKGCGRPWPVSPWHGRLPLSV

SEQ ID NO: 193187 - protein, 352 aa, unidentified
MEKNNKLDFGGQHIYVGMDVHKKSWSVSIHTEQFEHKTFTQPPEVEKLTYYLERTFPGATYHTVYEAGFSGFWLHDKLREKGIDCMVVNPADVPTKDKERAGKTDRVDCRKLARGLRNGEIKGIYVPPRVKVEDRTLVRTRQSMVRKQTRCKNQITSILFFYGIVIPEESRWSRRFINWIESIRMERASGDFALKAHLEELKHLRQIIANLNKAILSLSRAEEYMADVLLLKSVPGISTLTAMILLTELADLSRFSSLDKLASYAGVVPDIRSSGETEYVAGITFRRNAALRALLIESSWIAVRKDPALIMVFNKLSVRMKKTKAIVHIARKLLNRIRFVLKNRQEYVPAVV

SEQ ID NO: 193188 - protein, 355 aa, unidentified
MSQEKYIGMDVHSATISVAVVDAQGKLLMECVLETKASTIVEFIQGLQGTLSLTFEEGTWAAWLHDLLQPHVSRLVVCDPRKAALLKEGNKSDRIDARKLAEMLRTNQLHPVYHGEHGIRTLKELARSYLTLSQDVTRTMNRIKSLYRSWAIPCSGSTVYAPRHRAEWLAKIVEPGVRLRAEHLYQQLDSLQPLRLEARGGLLRESHKHAAVKRLRQIPSIGPIRAALLVALLQTPHRFRTKRQLWAYSGFAVETHDSGEYRWVRGKLQRNREHITVRGLNDNHNHDLKNLFKAAAISASTRPGPLQDFYLARVAKGMRPTMARLTLARKMAAITLTLWKKGASFDPQQLSRQTV

SEQ ID NO: 193189 - protein, 347 aa, unidentified
MRFYTRQHRHNCGVDLHARTMYVCVLDREGNVLVSQNIASAPEPFLELIAPYREDLAVAAECMFTWYWLADLCAREGLVFVLGHALYMRAIHGGKAKNDRIDAHKIAALLRGGMMPQAYVYPQAMRATRDLMRRRNYLMRQRAELLAHITNTNHQYNLPALGVRPARPAERAGLAEHFDEVPVRKSVEVDLSVIEHYDRELPRLERYLESNAQAHDPVALAIVRTIHGMGKVLGLSILYEIHDVGRFSRVQQFLSYCRLVKPTKESGGKILGHSGRKIGNAHLKWAFSEAAVCFLRANKPAQALRARLMAKHGKGKSLAIIAAKLARAVYFMLRRSEAFDTERFFAH

SEQ ID NO: 193190 - protein, 338 aa, unidentified
MNYMGIDHHKQYSHITLMDEKGKKLKSGRVANYRSEVERFLDGSGEAKAVIEAGRSSYTMVDVMDELGIEVTIAHPLQVKAIAKAKIKTDKRDSFMLAHLLRTDLIPEIYKRSGENRGYQRVLRQRAFYVGSITRVKNRIWALLAQQREEVRDKVSQKKNIFSRDGVKFLKTLNLPDTDKDLLSAVLKTFTHLEKMKEETNGLVEKLYQEIPEARLIRSVPGYGVFLSVLAAVEIADINRFSKVSKFLSYAGVIPSTHSSGERSYHGKIIKQGNRWLRWAAVEAVYPGMKADFDIKSFYNRLKKRKGPNPAKVATARRMLTIIYRMLKENRLYIPYKR

SEQ ID NO: 193191 - protein, 390 aa, unidentified
MIYVGVDIAKLNHFASAISSDGEVLIEPFKFTNDADGFQMLVSKLISLNAELDSIIIGLESTAHYGDNLVRYLVAEDFQVCVLNPIKTSTMRKNNIRKTKTDKVDTYIIAKTLMMQGSYRFYTFYDLDLMDLKALGRFYQKTIKQRTRLKIQLTAYVDEVFPELQYFFKSGLHQKSVYALLKEAPTPETIASMHMTHLASLLMKTSHGHFTREQAKELRVLARKSVGTSDSALSIQITHSIAQIELLDSQLNKIEEEMTDIMKFNGSVIMTIPGIGYINGGMILGEIGNIHRFSSPCKLLAFAGLDPSVYQSGNFQARRTKMSKRGSKVLRYALINAAHNVVKNNATFKAYYDTKMAEGRTHYNALGHCAGKLVRVIWKMMTNDLEFNLH

SEQ ID NO: 193192 - protein, 425 aa, unidentified
MKNQKLEAITPSTLIVGVDIAKAVQWARFVDYRGLEIGKALRFQNDKTGFENILASIIANCNQRNLNDVMVGLEPTGHYWKALANYLMLQGITVVLVNPYHTKRAKELDDNSPTKSDRKDALTIAKLVRDGRYYETYMPQDIFAELRVLSTARISLMKRRNAIQNTITAVLDEYFPEIVTVFKKPLKGKASLQILKSCPFPALILKMSVDEIVSELRKAVEKTVGRKKAQQLFDAAKSSIGVQYGIVSAKLKIELRVEELELLTNQLERLETKMANALSATGFGEVILSVPGIGVVSAASFLGEIGDPMRFENPRQISRMAGYNLVEDSSGKNKSGTMISKRGRKNLRSILYQIALTLVAVNDEMKELYAYLKTRPNNPLKKKQALIVIAKKAITVIYNLVKKKTEYRAELVLGEFRKGQMKQAA

SEQ ID NO: 193193 - protein, 342 aa, unidentified
MKFYCGIDLSARDCHVCVIDEQLKIVVQQKLRNELPKIIKLLEPYKAQLKIVVESTFNWYWLIDGLQAAGFDVVLAHTLGLYLITGAKVKTDRRDAYSLAKLLLVGAVPVAYIYPVETRPVRDLLRRRMHLVQVRAGEYGSLRRLLLRQGILSSKQQEIKTATEAELEQWFEHPLVRLHASQELRRIELYSQQIGELEKTILALAQTAPSYELLLQLPGVGQTIALTILYEVGELTRFANVKDFSSYCRVVPGIAQSGNVTRRGRASKQGNHYLKAAFSQAAVHAVRCYPKVRRYYERQLKRHQGRGRQMICYNIIAHKLAQAAFHVLKEQTEYREELLFGR

SEQ ID NO: 193194 - protein, 344 aa, unidentified
MENYAGIDVSLELSSVCVLDAQGKILKEAKVASEPGAFVEFFETLGFAVKRIGLEAGPLSPWLHAGLKRAGFETVLLETRHVKAALSAMTVKTDRKDARGIAQLIRMGWFRPVHAKSIGAQEIRALLVARKQLLGRLIDVELSIRGILRGFGLKVGPVTRRNFEARIRELVAGQATLERVATAMLSARLALKAEYGRLHKAVLAIVRDDAVCRRLMTVPGVGPLVAITYKSAIDDPHRIVKSKAAGPLFGLTPKKYQSGEKDVTGGITLAGDEIVRTVLYEAANVLLSRITRFSKLKRWGMDVAKRRGSKRAKVALARKLAVILHRIWVDGTTYRWAEAGSMAA

SEQ ID NO: 193195 - protein, 362 aa, unidentified
MNQEETSRRLYTTQHPFYCGIDLHARMMSVCILDQSGEVLVHRTMKTDPETFLKAIAPYRQGMVVAVECLCTWDWLADLCADAGIPVVLGHALSMKAIHGGKAKHDQIDSHQIAALRRGGMLPQASVSPATMRATRDVLRRRRPLAHKRAALLAHVQNTHSPYHLPAMGTKIASKANREGVAERCADAAVQKSIAVDLALITSDDALRRDGELPIVTTAKHHDAHTLSLLHTVPGIGTMLRLVLLDAIHDVHRVPRVQDVVSSCRLVQCARASAGTRYGTSGATLGKAHLTWAFAAAAVLFLRDHPAAQTYLARVEKKHDTGHALTSLAQTLARAVSDLLKRPGACETETFFQRYTIREGSG

SEQ ID NO: 193196 - protein, 346 aa, unidentified
MEHYAGIDVSLELSSVCVVDAQGKIVKEAKVASEPEAGVAFFEALGFAVKRIGFEAGPLSHWLHAGLKKAGFETVLLETRHVKAALSAMTVKTDRKDARGLAQLLRMGWFQPVHAKSMASQEVRALLVGRKQLLGRLIDVELSIRGILRGFGLKVGAVTRKGFEARIRELVTGQATLERIAEAMLSARAALKAEYEKLHQAVLAIVREDAVCRRLMTVPSVGPLVAITYKSAMDDPSRIAKSKAAGALFGLTPKKYQSGEKDVTGGITRTGDEMVRTALYEAANVLLSRITRFSKLKRWGMDVAKRRGSKRAKVALARKIAVILHRIWIDGTTYRWAEAKPIAAQA

SEQ ID NO: 193197 - protein, 360 aa, unidentified
MMKNSVAAAVHAALNAERPVILDNPPAALAEEPRPRQEPTTEAVPLPAECWVGIDVAKAHLDGATWPEIERLRVARDDAGLVALTAWLRARAPRLIVLEATGGLEVPVVTALVEAGLPVAVINPRQARDFAKATGRLAKTDALDAAVLAHFGHAIGPEPRPWKDAEAQALTAVIQRRRQVVEMLTAEKNRLASAHPHVKPDLEATIAWLEQRLKDHDRDLQQRLRASPVWRERDDLLRGVPGIGPVTAATLLAALPELGTLDRRQISALVGVCPFNRDSGRSRGRRMIFGGRAGVRAVLYMATVAASRCNLVIKAFYQRLRQAGKPAKVALTACMRKLLTILNAMLKAKTPWQPPAECRS

SEQ ID NO: 193198 - protein, 347 aa, unidentified
MGSMLVIGIDAHKRNHTVVVVDEQGRQLAHRTIRAVRGDHLALLKWAAGHGSLRLWAVEDCRHLSRGLERDLLTAGERIVRVPPKLMAKARDAARSYGKSDPIDALAVARAALREPDLPVAHLDGPEREVRLLVDHREDLVGERTRIICRLRWHLHELDPGWEPAARSLDRPRALNKVAVRLDGLEGLVARIARDLVDRCRALNIEIAKLSAEIEALFEQLAPSLLAICGCGPLTAAKILGETAGIRRFRSNSAYARHNGTAPLPVWSSNRSRHRLNRAGNRQLNAALHRIALTQTQWHPGAKTLIARRKAGGDGGLEALRVLKRRLSDVVYRALITDLNTALAEAA

SEQ ID NO: 193199 - protein, 404 aa, unidentified
MKGPIVSIDVSKGKSDYQAFKNLNVKYTGSRSIKHTKEGFDEIVSLVREMEKKLETEVCVVYEATGVYHRVLKKVLEDNNIKQFIINPLLSAKTRKNDSLRSPKTDKLDPKSIAKTYYSHSLHNSHKPETIYHELRELSRYYEDILVHLRKDKVAFRAQLDVVFPGYDTLFDDLYSPVSLTIIEKYPHPEMLQKKKINTVSKVIQSKTCHRQAASDTMADKAIEYSKTIYSGCDKDDIEVLILQRFIKKLKEDMAEAERTIGEMIKLAQELPDFSIIKSIPGIGDNLAARIIAELGDMTRFKKKNELVAFAGLDPRISESGQNDGDHMHITKKGNKRLRCLLYLAVTCSIRLKRDDNSIKDFYIKKKQQSNPMCSKAAKTACASKLVRIIYSMCKTGELYQYNK

SEQ ID NO: 193200 - protein, 449 aa, unidentified
MSHFTNMSPTNEVGKPLNSHGPVRCLYHSAIGVDVHAQLLVCCFQKHLPETNQLLSEQAQFGTSNSQIKQFVDWVSSHKPEIILMESTGVYWMSPYEALESAGFTSQQLAVVNARDIKAAYGRKSDKADARRLTEFARMNSFKRSFVPSRDIRTARLIARRLHHATQDCTRESNRMQKLLSCSGTRISSVFSSFKGKAAQKIINSFLDDSYPEFIACVRSNCSRLRATFTDIVDAFRQLNTPTFKELLLEQRKSWRQAMERRDRLEALLRIQMKPYKKTVDQLCAIPGVKELAALKILSEIGTDLSSFRSSEAFCSWIGICCGNNKSAGKAKKSGTPKGNNYLLAFITEVGQAIALVKTYTTVLRKVFQAFKERRGHNRAVVAIAHKIARIIYTMIKNSIAYVEISSPTLEKIRLKKLRASINNAKEVGISLQKLSVVKDSTGEILSDT

SEQ ID NO: 193201 - protein, 439 aa, unidentified
MAHQRKVRSALVPIPMLSQETLYVGVDIGKFRHGAGFLSRTLLARHERFEGCPTLAFEQSREGFRTLVDRIRELVPLEQATVLLEHTGHYHRLLEQYLLEMDITVYRIHVQERPKGMLKTDKRDALNLANTLYAQLELGVQVADKMQLVRQAVAPTKAATQLKGFIQHRYELSHHGTQLKNKLTAICDELFPEFTQIFRDPNLPTALTFREQFPTPSALATASLSALRALRSRNFPSDAQLLKLQQLARETIGTKDVDRLQGLLLEQTLLLKELRLVQEHLALLQTEICAIVTNCREGQILLSIPPIGHIQAATIIATIGTIANFEKASELKSYFGWAPRRHQTGVTFDRTKLTRAGVRPVKQMLFLMATCATTMDCEWSRLYQRLLPRLASYDVPAGQEPPPPMLYDPAVHRRHQEGHYRSLKPGTLPRKIIQLPKHT

SEQ ID NO: 193202 - protein, 363 aa, unidentified
MRFYGEQRRFYCGIDLHASKMYVCIVDDQGKIVLHRNLRTEPEALKRALAPYRESVVVGAECMFSWYWVADWCREEGVEFVLGHALYMKAIHGGKAKNDRIDSEKIARLLRGGTFPLAHVYPKEMRGTRDLLRRRNLFVRRRAELLAHVQNTFTQYNVPTASGKGRDRLREGDVGSSFEDTSVQVMLDADIEVVGQLDETIAVLETHVLKHAKIHDPIRLHLLQTIPGVGKVLSLVMLYEIQDVDRFENIRQFASYARLVACAKESAGKKQGSSGRKIGNAHLKWAFSEAAALMIRSMPEAKAFMEKMTRQRGKARAVALVAAKIGRVVYWMMKRKQPFDARQFWRSSLPKGTPLMEEAAMTG

SEQ ID NO: 193203 - protein, 355 aa, unidentified
MTTVPHDEVRVTVGVDTHEDIHVAVAVDQLGRWLAETSIPTNTGGFARLIDWASEFGVIDTFGVEGTGSWGAGLARWLRAEGLVVIEVDRPKRKHRRHGKSDAIDAEAAARAVLSGEATAVPKTGDGPVEMIRVLRLTRRSAVKNRTMTANQINALVITAPDALRDQLRAMTTRRRVAVAAKFRTGDEPTTVLEATRYALRELARRYQHLTEQITRFDAQLARLVAETAPELIAKVGVGTHTAAALLVTAGDNPQRLAREGSFAHLTGSAPLDASSGKQERHRLNRGGDRDANCALYQIALTRSSVHEDTKRYLQRRIAEGKTKKEAFRCLKRYIAREVHQTLVRTPALQAALDT

SEQ ID NO: 193204 - protein, 354 aa, unidentified
MPIVSEKYRRVVGIDTHAATNTLAVIDASNGAELRSATFPTTRAGLARASAWAGRRTGDDPALFVVEGIGSYGAGIARALADRGQPVVEPSQMSKADYRGHGKTDALDAVRIARSVLGVDLSLLRLPRADGGHRTALRVLVVARDQMTTERTRLVNALTALLRMLDLGVDVRRPLTAGQTATVARWRQRSTDPVAVATGRAEAIRLASRIVALDSELVDNRKHLDTLVDQHAPQLRQLLGVGTVVAATILVAWSHPGRVRSESAFASLAGTCPIPASSGNTDRHRLNRGGDRQLNKAITTIALVRMRCDPATRAYVSRRTAEGRTKKEIMRALKRYISRQLFRALAPKQAPASP

SEQ ID NO: 193205 - protein, 340 aa, unidentified
MQVTTIGLDLAKNIFHIHGVTADGNVAFNRALRRGQVVPFFAKLAPCLIGMEACGTSHFWARELTKLGHRVRLMPPIYVKPYVKRGKTDAADAEAICEAVTRPTMRFVAIKSSEQQALLCQHRARQLMIGQRTQLSNMIRGLLGEFGCIVAKGLTHITALAEVIETGDGPVLPETAQGVITCLCKQLLGLDHRIKTLEKKIFTASRKDARVRLLETIPGIGPVTASAIVATVGTPDQFASGREFAAWLGLTPLNRSSGGKERLGRISKRGDRYLRQLLVVGMTSRVRAARSRPDRVEPWLASLLERKPVRLATVAMANKTARIVWAVLTRGQPYKQPVAV

SEQ ID NO: 193206 - protein, 349 aa, unidentified
MDATTVAIDLAKDVFQVAVANRAGRILDRQRLTRRQFERFIDTLVEGTDVIMESCGTSHYWGRRMQSRHLRVRLLPVQYVRPYVRRNKTDRADTDALLEAARCGDIRSVPVKTVEQQTLQAIHRVRTQWQTARVARINAIRGLLAEHGYAIPVGARTVLRRVTAILTDPDAAVPDVLRQTIALVVDEVHALEEKIAGVDRQLKQIAGVHPVATRLQTIPGVGVLTATALVGSVGHIHAFRRGRDFASWLGLTPRESSTGARRYLGRISKRGDIHLRCLLAHGARAVLRVALQLAERAPDRLTRLQQWAVSIATNRGRHKAVIAVANKLARIVWAVWHYDVAFEAQPRVA

SEQ ID NO: 193207 - protein, 413 aa, unidentified
MTDESLSWFAAVDWGSEKHQACILDAKGDVAGEREFPHSGTGLTELCDWLLSVACDTSAVAVAIETPHGPVVDALLDRGFAVYAINPKQLDRLRDRFCVSGAKDDRRDARVSADGLRADRHLYRLVQVSDPAVIELREWSRLLEELQQERVRLCNRVRHQLWRYYPHLLDLTDDVGADWFLELWALAPTADKAGRLRETTIARLLKQHRIRRLNAETACRILRQPAIKVAAGVTEAAVLHLRSLFARLRVVNRERHQAERKLDELCTELSERASEGQSGEPCDVAILKSLPGIGRVTLAALLAEASGPLSRRDYPALRTLSGVAPVTKRSGKSNIVVMRYAAHARLRNTVFHWARAAVQNDPKSSCRYAALRKRGHSHGRALRGVADRLLQVACVLLQRQTMFDPDRCQPAAA

SEQ ID NO: 193208 - protein, 423 aa, unidentified
MEVFYSRCAGLDVHKKKVTVCVLIGEGGQRPSKQIRTFSTMWDDLQQLSSWLKGEGVTHVAMESTGVYWQPIWNALEGSFELLLVNAHHIKTVPGRKTDVKDSEWIADLLRHGLLKGSFVPAREQRELRELTRYRTSLLQEKSAEVNRLQKTLEGANIKLASVVTDVMGASGREMLAALVAGTTDPTVLVELARGKLRDKQPELQRALAGRFREHHRFLVAQQLAHIDDLDHLIAELDREIAERLRPFEETISRLDAIPGIGRRIAEILIAEIGTDMSRFPTSAHLASWAGMCPGNNESAGKRHSGKTRKGNSYLRVVLTEAANAAARKKGSYLAAQFRRLAKRRGGKRAALAVGHSILVIAYHLLAHADRPYEDLGYTYFDRRDRDIIERRLVKRLEQLGNRVTLEKVGLAQPSAPSTLEAA

SEQ ID NO: 193209 - protein, 452 aa, unidentified
MPAGKDITMHYHKVLEMFESIPCLSVGLDVGADFTWMSIMLPNGILTGKPFKIIHSDPQSRELAVSKIKEAQEMYSLESRCFLESTGIYHIPLLYFLRDKGFDCAVINPIITKNSTNRNVRKLHNDKFDSKKAAKVGLDASLKTSIVPDDAIIDLRNLVRDYYYFKDLQSAIVLKLNAELKVSFPAYLNVFSKVTTQTSLKLLEAYPLAADMLAAPKDELVEIIRSTARFGEKYALAKYDAICTAAKDAAVFGRALKSNALRIRLYIKMYWEYHAHLDSILEELHQAVDKLEGTPDYDRICLIQTLHGIGFLSAVVLIAEMGSFDLFPSPKKLYAYFGLDPGVNDSGKFHGDRVHMSKRGSSLARRILHMVAINNLKVDKATKAPVNPVIYNYYIRKCASKKKIVAVGAVMHKICNIIFAMLRDNKPFELITPEEHRERYAAEHPESVNTAA

SEQ ID NO: 193210 - protein, 467 aa, unidentified
MTPHKDYCLDPCPPAPTPTLTASSVLAEALQVCNPHAAGIDIGEAEHWVAVPPGCDPQPVRRFGTFTVDLDALADWLIDCGVTTVAMESTGVYWIPLFELLEARGLQVLLIDPRQAKRAPGRPKTDRLDCKWLQRLHTYGLLAGAFRPADQVCVLRSYLRHRQMLLTSAAHHIQHMHKALQQMNLKLPQVVSDITGVTGMAIIKAIIAGERHPQRLAQLRNPHCHHDTDDIAKALQGNWRAEHLFALRQAVELYDVYHQQIAQCDQQIKRHLETFADQSAGQPLPPKARRHKKTNEPRCDARTPLYRLAGVDLTTIEGIEENTALILLSEIGTDMHRWPSVKHFCSWLGLCPQHQISGGKILSRRVRPGAHRVTVALRLAARSLHHSQSALGAFFRRMKARLGTPKAITATAHKLARLVYSLLQHGSAYVQQGVDAYEAQYRERKVTTMAKQAKALGYTLVPLTAQG

SEQ ID NO: 193211 - protein, 349 aa, unidentified
MLYIGLDVHSKSTTAKWLDASTGDTHTEKVPNDIDSLGKFFNGLEGPLFGAMESGTNSWSIYRNIESHFAELVVIDPATVWGKTIRRGAKTDERDALGLALKMQRGELIPLYVPDKETQDLRCLTRARINATRHVTKLVNEICSLLKSWGIVAKCSLLSKVGKKLIEESRLRLPEQSLKVFDMWIRLLNQAIEVEDELERTIKSIAAKDEVCQLLMSIPNVGAFTALVIRAEIGDINRFECFEQLVSYCGLSPMVYQSGDNIHYGKLNRACNRFLKYVIILRAQSMSAMKEPNPFKSTYWRMTIKGKNNAKLAVARQLIRVIFRMLKSKERWNASKINDRRALSASKVA

SEQ ID NO: 193212 - protein, 366 aa, unidentified
MQKISTMWRSGKKIFEKGQLTIGLDLGDRSSAYCVLNEVGEIVFEHKLATTPEAMEQVFGSMPRCRIAMETGTHSPWVSRLLTALGHEVIVGHAQKVRLITKSRRKDDRLDARTLARLARIDPELLSPVRHRSAHAQLHLAEIRARAGLVSARTALVNAARGLVKSYGERLRKCGTQQFRRETTSKLSVGLREALDPLWREIESLNERIQEYDRRIAKMAKEEYPETALLKQVKGVGDLIAMAYVLTVEDPHRFRKSRDAGCFVGLQPGRRNSGESEPQMRISKEGDEYLRTLLVQGAHYILGPFGEDSDLRRWGLKLSARGGKNAKKRAVVAVARKLAVLLHRLWVSGEVYEPLRNSQKAMSAAA

SEQ ID NO: 193213 - protein, 407 aa, unidentified
MEVLYPRCAGLDVHAGSVTACARIAVGAQVTYDHHTVPTTTRGLLELADWLTAHGCTHVAMEATGVYWKPVWHVLEEHVALILANAMHIRNVPGRKSDMNDATWIADLLAHGLIRSSFVPPAPIQELRDLTRTRRQLVHEIARHVLRIQKTLEDANLKLTQVMSDIVGVSGRAILNALIAGETDPDRLADLTRGRLKATRVDLRDALHGRVTDHHRFMIKLHLTQIDALETAVATIEARIGDALGPFRAAVSLLTTMPGLSETTARVLIAEIGTDMTRFPSVGHLISWAGFCPRLDESAGKRRSTRTRRTTPWLKPTLINAAWAATRKKDSYLRAQFLRIKSRRGAKKAILAVASSMLTAAYFMLRDGVEYHDLGAHHFEQRDKDQLAKRLLQRLRDLGVAVEVKAA

SEQ ID NO: 193214 - protein, 430 aa, unidentified
MKSNTQNAKIEAITEKTLVLGIDVGSEMHYARAFDYRGIEYSKKPFKFSNTEAGFATFKEWVLDLKERHEKDKVVPGMEPTGHYWFNLGKFLQDNEMKPVLVNPHHVKKTKELDDNNPTKNDRKDPKVIAGLVREGRYMIPYLPEGVYADLRTASNIRFQLQAELTRIQNRISRWFNIYFPEYKTVYGKPDAKSGMLILKAAPLPEDILTLGIDGVNQIWRDAKLRAVGKARAKTLIEAAEHSVGSKEGAVSARMEIRMLLEDYESRNTRLQEVMVLIEELVRKIPMAEKLLEIKGVGIRTVSGFLAEVGDISRFNNPKELQKLAGLALVENSSGKHKGETTISRRGRKRLRYLLFEVAMSLVSKNQEFRELHNYYTTRRLNPLKKMQSLMAIAAKLIRVFYAMLTKGVDYDPKKMVSDIKRPAVYLQAA

SEQ ID NO: 193215 - protein, 403 aa, unidentified
MTVRPRVWVGIDVGKASHHACALDDSGAVCWSQKVGNDQRSLEQLVERAGTTAEQVRWAIDLTSPMALMLITVLLAAEQPLVYVPGRVVNTMTHAFRGEGKTDAKDARVIAETARQRSDLSEVAIPDELVIELTQLTGYRCDLMADWVRGINRLRALLGSIFPALEAAFDYSNRTPLILVAALCTPAEIRAAGIEGVTTHLTENKAWPAGIDKTAATAVSLAHQQSLALPGESGTAALVKRTARKLLDLDREIKDIDKTITERFRAHPHARIIESLPGFGPGLGAEFLVVTGGGLASFATPGRLASYAGLVPVPKDSGRISGNLHRPKRYNRRLRRVFYMAALSSIRTSGPSRRFYDRKRGERLIHTQALLALARRLVDVLWALLRDDREFTREMPTPVTAAA

SEQ ID NO: 193216 - protein, 343 aa, unidentified
MEQIGIDVHKKASQVCIRTESGELLECRISTSREALAKLFAERARARILIEASTESEWVARWLEELGHEVIVADPNFAAMYATRSRKVKTDRRDARTLCDACGLGAYRPAHRASDEARHRRAQIAVRESLVRTRTKFISLTRALLRREGIGVPSGGTPTFAKRVRELTLPAHLALEIAPLLMMLEQLTTQVREADKRLESFVVNDEAVARLCTVPGIGPVTAVTFVAVVDRVARFESASQVRAYLGLVPRESSSGERRMRGHLTKAGNSRLRSLLVEAAWGVLRHKKPETEAIREWTLRIAARRGKRIAAVALARKLAGILYAMWRDKTPFEPAKTNQARVAA

SEQ ID NO: 193217 - protein, 438 aa, unidentified
MKITEKTLEVNANHILNIGVDVSSRKLDVHFECPLQLNKREVYREQILNRSVEIEKALKNYLSLAQSKGFLNLRIVCEPTGPYSLNLLSMATHLNCLTAYVSGEAVKNSKIIEFNGTNKNDLVDAELINSLAERNKVLIHRTYSANYTRLRMLNSHYEDVDKAYVSARNQVHNTLKQLWPDYSSKLSLLYSSTGQALYRCYGFNPWKIVSYNYSYFERRMRTHCKGVWSSTLKQIYRNAEESVRNHCSDTASTLESILSDHYENCLRGLERKASLKTEMKTILSEIREQDDRIPQARVNFISEFHIARLLAETGPLSDFKNLKQLTKYLGLNLRERQSGEYQGRVRLSKRGRSLARKVLSLVVLPLTTQKALYGPDYHRIKTQKDKPGKLVMCIFMKRFLKSFFGIYRSHQSFDSRRLFIDRGSYEKLNSKEELEAIS

SEQ ID NO: 193218 - protein, 346 aa, unidentified
MEHYVGLDVSLKLTAICIVDRTGKIQREGVVHSDPEAIAAFIKSNAPHVARIGLETGATSTWLWTELNRLGLPVICIDARHAKAALKMQINKSDRNDAVGIARIMQCGWYKEVHVKDLDSHAVKALLVSRALLVKIKRDLENQVRGLLKNLGLVIGPAKMNVFALRAAELTEDRPELAAAVTPLLNARVAIEQQIADLDRKVMKLARNNAQVRHFMTAPGIGPVTALCFLATIDDPRRFRRSRSVGAYVGLTTRRFASGEIDWTGRISKCGDKMLRSYLYEAANVLLTRVAKWSALKAWGIRLAKRSGLRKAKVAVARKLAVILHRMWIDGTEFKWSSKETAKQAA

SEQ ID NO: 193219 - protein, 405 aa, unidentified
MVIYIGIDWSQKKHDFTFLSERGAMLAQFTIPHTHEGFLRLEETRKRLGLATSACAVALETAHNLLIDFLWARGYSQVYVVPPKVVKSNRSRYRQSGAHTDQSDSFVLADLLRTDCGVLQPWHPDSVLTRQMRAKVNLISFLTRDILRLHNRLTAVLLRYYPAALHIFSCLSQIGTDFIQAYPTPQAAAALTFEQFVAFARQHKYQHPQKLRAYFSSLQASYPEAMPETVQVYQDEAPLLAARLSELVQAKARALSELQTLFKQHPDYPIFSSLPGAANLLAPGLLAMFGDDRQRFPSPVSVQALAGTCPVTKSSGQSKFIHFRWSCNRDFRLIAQQWAKASLRKSIWANAYWRQVRPRCKSDSHAYRCLANRWLAILWKLWQIRQPYDETYHCKQRALRSIPLS

SEQ ID NO: 193220 - protein, 315 aa, unidentified
MEQPGVFVGVDVSKAKLDVAIRPSGEFFSEPNDQRSVRRLVNRLRSLGCARIVLEATGGYETLLAAALAAEGLPVVVVNPRWARDFARSIGQLAKTDHLDAKILAQFAEVAELQVRELPDEQTRELKALVARREDLIEMLVAEQHRLEHAPKRLHREINGHIDYLRKRIKHLDDLIDRTIRGSELWWEKAKILTSVPGVGPVLCAALLARLPELGRLNRAQAAKLVGVAPLNQDSGKFRGIRMISGGRADLRRVLYMNALIGMRHNPVLKTYYLRLRAKGKPAKVALVATMRKLLLILNLMIRNRTLWNPRCLDA

SEQ ID NO: 193221 - protein, 325 aa, unidentified
MQLHFIDEHTGEVIDKQIKRDALLKYFSNREPCLIGMEACGGSQYWARELEKLGHKVRLLQGKFVKAFVMGNKNDVMDARAIWMAVQQPAKAVAVKTEEQQAVLSLHKIRRQLVKFRTAQINALHGLLLEFGETVRKGRASLDKAMPEVLERLKEKLPPFLIDQVKDQHRRLSDLDMQIDGIEKQLTAWAKQNEACKRIMDIPGVGPLVATAAVAIMGDAGTFRSGREFAAYIGLVPKQTGTGGKVRLLGISKRGDAYMRTLFIHGARSAALQAKEPNPWVTELMKRRPTSVAVVGMANKIARTVWALIAHNRTYDKKHISVRPF

SEQ ID NO: 193222 - protein, 314 aa, unidentified
MTARWVGIDVAKAELEVAVWPPSGEHLSVPYDEAGCDTLLAAVRAWQPAGIVVEATGGLEVRVGSVLAAAGLPVIVLNPRQVRDFARGLGHLAKTDRLDAQLLAEVGAKVQPVRRPLPDEATRELQALVARRRQLMEMLTAEKNRLGSAVRQIQPQIRKHIRWLEAQLQQSDRDLDGALRHSPVWQEHLELLQSVPGVGPVVSRTLLAYVPELGTLTRKTAAALVGVAPFNRDSGTWRGTRHIAGGRAPVLAQLYMATLAGLRCNPLLRAFYARLVAAGKPRRVAMVACMRKLITLLNAILKHRQKWVAPPAPC

SEQ ID NO: 193223 - protein, 354 aa, unidentified
MSQKLESAIAVIGIDIGKNSFHVVGHDERGAIVLRQKWSRGQVEARFANMPTCLIGMEACVGAHHLSRKLKALGHDARLMPAKYVRPYSKGQKNDFRDAEAIAEAVQRPTMKFVATKTADQLDLQALHRVRERLVSQRTGIINQIRAFLLERGIAVRQGQRFLRAELPRILATPPDVLSPRMVRVIEDLAGDWRRLDERIEGLSSEIETVARQDAGCERLMSVPGIGPIISSAMVAAIGTGDAFTKGRDFAAWLGLVPKQMSTGDRTILGKISRRGNRYLRVLFVQAAWVVLIKPKIWERYGLKPWIEAAKKRLHHNVLAIALANKLARIAWSVLARGRAFEVRKMDEAANQSA

SEQ ID NO: 193224 - protein, 354 aa, unidentified
MFVGVDTHKKTHVLVALDTEGRTHGSRTVPNTPEGWAAALQWVRGQQQQPVRWGVENSGSLGKGFAQFLLAQGEADVREVVPHRTAQYRRRGRSQDKTDVADALAMARLLRAEGEGLPMVQADDASTELRLLSDHRDNLVVDRTRLTNQLHAQMLQLDPCYVERSGPLTRAAGVRYCQDLHLPEGDGVVQTRLLVVRQLAARIAHLDVAIKEVTATIQQRVAATETRLTELPGVGAVVAARLLGELGCIPRVRSAAALAALAGIAPLAVASGGRHGHRVNPGGNRKLNRALHIVALVQRRCEPRAQAYYEKKRAEGKTGRAAMRCLKRRLVDVLFRRLQPTASALPAPITTVAA

SEQ ID NO: 193225 - protein, 413 aa, unidentified
MRVFCGIDWAEDHHDVALVDVDGKLIAKRRIRDDAAGFTLLLELFAEAGDSVEEPMPVAIETGRGLLVACLRATGRQVFAINPMAVSRNRDRHSVARKKSDAGDALMLAHILRTDMAAHRSLPADSELAQAIAVLARAQQDAVWDRTCAHNKLRSLLREYYPAILAAFADKRDGLLRPEARALLAAAPTPAAGAALTRPQLRAALKRAGRQRGIDAEAARIQTALRAPQLRQLPMVENAFGRQALALLRMLDAACANAEELAEAASKHFDQHPDAGIITSLPGLGSLTGARVLAEIGDDRSRFADARALKAYAGAAPVTRASGKSSTVMHRRVKNQRLAGVGYLWAFAALTASPGARAHYDRRKAAGDRHIAAQRNLFNRMIGILHHCLATGAKYDERTAFPKISSNPATAAA

SEQ ID NO: 193226 - protein, 352 aa, unidentified
MSLYGGIDLHANNSVVVLINEQDEVLYQKRLPNDLSTILEQLAPYHAELQGLVVESTYNWYWLVDGLMEVSYRVHLANPAAIQQYNGLKYTDDRSDARWLAHLLRLSVLPEGYIYPKAERAVRDLLRKRAHLVRQHTANVLSVQNIMARNTGIRFSGKRIQELTQQALTTLLPDVTQVLAVTSSLVVLDCLKQQIKTLEKTVQKHLHHTPSYEQVLTVQGIGTILAQTMTLETGAISRFPTVGHYASYCRCVDSTKISNSKRKGTGNVKNGHPYLAWAYMEAAQFALRFQPEVQRFYQRKLVQSRNNTILARKAVAHKLSRACYDLMRDLVPYEATKAFGGGLAGCWVEARS

SEQ ID NO: 193227 - protein, 324 aa, unidentified
MIDGRLGIDVSKNKLDASLSNGNKVWAGCFVNSSEGWRQLLDWVTAQKIRRVHACLESTGRYSLGIACRLHEAGHVVSIVNPAQIRDFSRTKLGRNKTDWVDASHIREYCELFKPQPWTPPSRAYRRLGELQTIRAGIVAGLTQWKNRKNSGMIDAVAQSLVDMTISHFTSQLGAVDEAIAQTIDNDPGLRQKRDLLLTISGVGETLAGVVLAELPGPDVLRTSAEVVAYAGLNPRQHQSGTSIDRMTRISKIGNAVLRAALYMPALSAMRYNPAIVALVTRLKSRGRLSPKQIVVAAMRKLLVLCFGVLKTGKPFDPAMATGC

SEQ ID NO: 193228 - protein, 342 aa, unidentified
MRRSIGVDLHKNSFRVCFYMRKKEYELETYKVRKSGLEAFKKSLKKSDEVAVESTGNTGYFVREIEEKVKRVRVINPRQFKVITMSVKKTDDEDALKIAKYLKKDLIPEVRMPNKEQQQMRSLVGTRDKLVKLRTGLKNKIHNILNANGIVSCKEMFSGEKGFIFVQRLGLEDSYQFEIELIVEQIKHLNEAVKKIDQQIKERSEKLDGHKSLKSIKGISDTGAAIFLSAIGDVNDFRDEKALFSYFGIIPRVSISNETSHYGRITKRGNKIARTALVQSTLVAIRYSPYLRAFYDKIKNKRGSGKAIIATSRKMLGIIYKTLKNNWVFEDFTQYKLVPSAL

SEQ ID NO: 193229 - protein, 422 aa, unidentified
MDAETCHRCCRPNRSTCKAFDARKPTQHSSVDVFVGVDVGKGHHHAVALDRRGKRLYNKALPNDEAKLRALITELKTHGQLLFVVDQPATIGALPVAVARDEGVLVAYLPGLAMRRIADLHAGEAKTDARDAAIIAEAARSMPHTLRSLRLADEPLAELTMLCGFDDDLAAQITQTSNRIRGLLTQIHPALERVLGPRLDHPAVLDLLERYPSPAELASASEKTLANRLTKLAPRMGKSLAADIVQALSEQAVIVPGTQAATIVMPRLAQQLASLRKQREEVASEVERLVQAHPLWPVLTSMPGVGVRTAARLLTEVAHKAFASAAHLAAYAGLAPVTRRSGSSIRGEHPSRRGNKVLKRALFLSAFAALRDPISRDYYARKVQQGKRHNQALIALARRRCDVLFAMLRDGTLYQPKSAPTA

SEQ ID NO: 193230 - protein, 320 aa, unidentified
MQSPSIALNIGADVGKDEMATACAEGSFATRKIHNQRAALLAFLKELPAGSRIGMESTGSYHESLAELAHKLGFVVYVLNPKDTRHYAKAMGLRGKTDRVDAELIARLIAHEHAKLHPWIPPTAEQRQIDRLLKRRAKVSRIRAALTQSFKGVKGFAADVNALRERLDKLLARIDAKVKTLIEASTERKQDYARLRTIGGVGAVVGSSVLNTLERVPFKSADAFVAFTGLDPRPDESGHHHGRRRLSKRGPSELRRLLYLAAMAAAKTKIWKPLYQHYRARGLSTTAALVVLARRIARTAWSIYTHKTAFDPQRLTKALT

SEQ ID NO: 193231 - protein, 355 aa, unidentified
MKTKIPLITIGLDLGDKKHALCVLNQDGEIIDERAITNHRESLRRLSQKHPGARIAFEVGSHSPWIKRFLTDLGHEVFVANPRKLRAIYTSDRKSDKNDARMLAKIARMDPQLLHPVEHGTEEAQRDLLRVKLRDNLVRQRVDIISSVRFTLKSLGVALPSPNSACFAKRCRTLLAERDSALLDSIEPSLQVIDLMTQKIRELDRAVETICETKYPVTQRLRQIVGIGPITALSFVLTIEDPELFENPRDVGAYLGLVPKRDQSGGLDKQLRISKAGDAYLRSLLVGCAQYILGPFGPDTDLKRHGLMLAERGGGRGKRKAVVAIARKLAVLMLALWKSGRDYEPLRGAETAQAA

SEQ ID NO: 193232 - protein, 366 aa, unidentified
MKKISTVQVFGNEIFKEQKLTIGVDLGDRWSFYCVLDEAGKIILEQKVSTTPEAMKQTFGKIPRSLIALETGTHSPWVSRLLTELGHQVIVAHAQKVELITKSNRKDDRHDARTLARLARIDPALLGPVRHRSAKAQIHLTVIRARAELVSARTALVNAARGLVKSFGQRLPKCGTDQVNEKLAEGLSVELRDVLAPLLREVESLSQRIQEYDERMEKIAKEVYPEVFLLKQVKGVGTQIALTYVLTIEDPYRFPKSREVGCFLGLKPGRRNSGKSEPQKKISKEGDRYLRTMMVQGAHYILGPFGEDSDLRRWGRKLAQRGGKNAKKRAVVAVARKLAVLLHRLWVSGEVYEPLRNSQKAMRAVA

SEQ ID NO: 193233 - protein, 357 aa, unidentified
MSKSNQLDFTGMTINCGVDVHLKQWRVNIHDGNFELEDFSQDANPLSLYKHLSRKYPNATYKIGYEAGFCGFNAQRILQDLGVICYVVNAADVPTTDKEKKQKKDKLDARKLCDYMQSSKAKSIYIPTVSWEHGRSLVRTREQIVNNQTRCKNRIRHLLHFSGLHLPEQYKAERYWSKKMINCLEQMDCGSEHLRTALQLLIKDYKQTRSLLLESTRAIRKLCKELAYQPGIFWLRSIPGIGLINAAIILFEIQDIKRFKSLDHLYSYAGLVPDTADSGEKKKTKGITVRCNENLRTALVESSWTVVRKDPALLMKYNELRKRMHYNKAIIRIAKHLLARIRFVLLHQKEYVTGVVA

SEQ ID NO: 193234 - protein, 348 aa, unidentified
MDHIIRIGMDTSKHVFQLHGVNAAEEPVLRRKLRRNDMVVFFERLAPTIIAIEAAGASHHWARLLRSFGHEVKLIAPQLVKPYVKRGKNDAADAEALCEAMSRPTMRFVPVKTAERQAALMLLGLRDRLVRNRTQLANAIRGYAAEFGLAAAKGIAHLAPLLARIQSDESLPGLARELFAAHAKEYAQLQAQIDEVEGKLMAWHKTNPGSRRLAQIPGIGPIGAAMLIMKTPAPETFRSGRQFAAWIGLTPKDHSTAGKVRLGVITRAGDEGLRSALVVGATAVIRHLRNGKGRSMLSAWVEQLLKRKPPKLAAVALANKLARIAWKLMVTGETYAAKPRPVASAGIA

SEQ ID NO: 193235 - protein, 357 aa, unidentified
MIAMKYYTSTTEFNCGIDLHARQMYVCVMDRTGKKLVHTNIRNNDFAYFLKLVAPYRHDLTVCAECMFGWYWLADACQAANIHFVLAHALYLKAIHGGKNKNDRIDSEKITHLLRTNLIPPGYVYPAAKRPLRALLRQRLLYVWNRSELLSRIQSHQLAHNRPTTRQTPYNREPWEKHLLAQEPDPVRQLALQNDLALIGHYDNQLASLEKELLQLTKQTAGRDFTLLKTTPGIGDYLGLTILHEIGDIARFPSVKDFLSYCRLVKGTVASAGKIKGLRGAKLGNPYLRWAFGEAAVVAKRDPLVIGPLAQRLEARLNNKFKANTVLAIKLARAVYFMLKTKTVFDPERLVAALSHN

SEQ ID NO: 193236 - protein, 340 aa, unidentified
MYKSSAEGFLSCGIDVSAAQLVVALEGEAGSWRQRSFPNRTSGHQALIRWLQKTGERVRVCLEATGRYSLDLALALHTASGIEVAVLNPKVVHAFAATLCRSKTDPADAQVLAEYARRMPFQPWHPPSAVALELRTITRHIAALTQQHTQQSNRLHALSASSAGSGWVRQDLKRSLRDLQRRKEKMRRAALALIAQDAELRPRFARLLSMPGIAEISALSLLGELALLAPGLSVRQWVAHSGLDPAHHDSGSSVHKRARISRAGNRHLRRALYMPALVAARRDPHLRAFYQVLLARHKAKLQALMAVARKMLHAIFGMFRAGTDYDGSRLFPTLELAVAA

SEQ ID NO: 193237 - protein, 364 aa, unidentified
MNATAAAPIVGVDLAKNVFQLAIADENWRVVGRERLTRTQLERWFANRAVGLVVMEACGSAHYWARWLGGLGIEVRLLPAPYVRAYVKRNKTDAADACALLEAARCAEIVPVRVKSVEQQAVQALHRTRSLWMATRTSRINALRGFCREFGINIAQGARIGLEQIARVLAEPRSAIPELIRGTMGLLVEEIRLLETRIAQLERELTQSARQSPACATLLTIPGVGLLTATAMVAATSGSVRHFSDARHFAAWFGLTPKEFSSGTTRRLGRISKRGDRYLRMLLTHGARSVLRAASAATQVGRSVDPLRTWALAVQSRSNHNKATCALANKLARICYACLRDASPYGEVRRPEKKITRSAFPIPA

SEQ ID NO: 193238 - protein, 325 aa, unidentified
MRIYGIDLSKDKFDVSYVLAGEEKKRFVRNDFKGICNFLKQVEHSCILVAEHTGSYGDLLVHLCYQFQIKIALVPGYNIKHSLGLQRGKSDSQDAYRIRKYGERFVEELRFMEPRSESVKELKELYSLREQLSKSRTSLLLGQKTRKHSPSQSIVAHRGYQRAIANLENEIDAIEKEIEKIVQNDSDLNDNYKLITSIKGIGPVIANNLIIKTENFKRINTAKKAAAFAGVCPYPNSSGKMSMKSKTSHMADKKLKSLLFLAAKTAVTHNKEYSLYAERKKLEGKPYFLIMNNVSNKMLRTVYGVIQSRKPYDMNHICNDPRQLN

SEQ ID NO: 193239 - protein, 358 aa, unidentified
MRIIGCDLHARQQTIAMLDRDTGEFVEKTLEHDGEELQKFYSGLTRPVLVGIEATGSMQWFLELREELSIECRVGDPAKIRAAEPRKQKNDRRDAQLLLKLLSENRFPTIWMPSTEQRDLRTLLRHRHQWVRMRTRVQHTLQSMALNHGLRRGHSLWNQAGQQALRAVPLAPHASERRAALLSLYPRLQESIDELDQQVSRQAQQHPQARRLMTHPGVGPITALATEVFLGDPLRFIDGKALASYLGMIPREHSSGGRQRLGAMSKQGNALLRYLWCEAAMHAVERDPELKRFYRRKLVQKGLGKARVAAARKLGIRLWIMMRDQIDYQEFCRRGKTRQENGSVCAGMPDITSGPAEA

SEQ ID NO: 193240 - protein, 450 aa, unidentified
MDVVNTNAAGIDVGSRSHFVAIGQELKDVKEFGVYAEDLSALCQWLVDSGVTTVAMESTGDYWQNLYTELISFGLEVVLANGKFTKNAKGKKTDVKDCRWIQKLHTLGLLTGSFLPDFDTEQLRTYCRQRGNWIELASSATHKMQKYLKLLNLRLDVVVKDVCGLTGMKIIEDIFKGNLDPYSLAEHRHYNCRKPKEEIAKALHGNNREDYLFGLKQELQSYKFYQQKIKACDDQINRKIKAYIRQDSKRKDLKTTEKPFKRINKNAPKIKDMNQLAFQYFDGVDLFAIEGLSHASILSIMSEIGPEGFKKFPTAKHFTSWLRLAPNNKISGGKTLSNRVPKGSNRLKIALRQAANAIGNLKDTHLSDFFRRVAYRKGRHSAVSATARKLAVIIWNMVTKKIQYNPPKQYLYLDQKRKLGLAKRIRKQIDKFGLTDEDLGINLNNCKIAT

SEQ ID NO: 193241 - protein, 460 aa, unidentified
MNQYFLGIDASKGYSDFVMLNAKKQPVIENFQLDDTFDGHARLYELLASFNQAHQQATIYAAVESTGGYENNWFRSLLNFQASLPIKTAHLNPVGVNHNRKADLKRNVTDKISAQNVAEYMIAHPEKVSYQHQDSLASLRKQWRFITMLTKQSTQLLNQLESLVYNANPEILMYCKDGTPQWVLKLLTRYPTALRLSKANAKSVARIPYVSKDRAQQLVATAKKSVASADDEVTEQLIIATVKQILDVNNTIKAQTKILTDRCSVPEVELLKTFNGIGDYSAIGLMLEIQSVNRFLSSKKIASFFGIHPAYKKSGDGTWKYRMSKKGRKEPRRILFMVAMSAIKSNPLIRSIYQQAVQRGMKKKAAVGLCMHKILRIIYGMLKHNKAFDPEIDRKNRQKKPLRQRRVRQDKDRRYQNFDSKAPISRRQKMKRKERKQSQNVSNVEYGINEASVPANQLTN

SEQ ID NO: 193242 - protein, 377 aa, unidentified
MMQRCLLQISGILAAICQPQIKQEASMKSIKKQIQGEELFVGIDLHKRRWHVTIRTADVEIFSNSIAGRWPELKKVLNRYKGCRIHAVYEAGFLGFWLFDHLTESGVDCIVTPPSLIPQEHGNRVKTDRLDSRKLARLLAKGLLKSIWVPNAEERFHRQVIRRRRQLVGDRVRTQNRIKSELCFYGIDLPVAHGQWSKVYFGNLQQIRFKNRWMQQSFNRLLEQYEFLCTQIDKQTQLLKQLSQLPLYRDRVKILRSIPGIGLLTAMEILLELQDVSRFRRAEQLAAYVGLTPAQYSSADKIRMGRITRMGKNAVRSALVESCWHLIRKDKAMRKKYEQIKARAGGKRAIVAVSRKLILCIRRLLLDNRPYEYEPVS

SEQ ID NO: 193243 - protein, 323 aa, unidentified
MSQPNLQCMGIDVAKLSLDIATTDTIEPFTVGNDEDGFAVITDKLKHTKINLILMEATGGLEAAIACKLQSEGYDVVVINPRQARDFARSMGYLAKTDKLDAAMLAQLALVIDRHPDRSRYIRHLPDEARAVLAAMVVRRRQLNHMLVAERNRLYPSHPQSRKSIDNIIDARQNELDRINEQMKQHMTAFFQEQARLIGSVKGVGDITVASLIAELPEQGKLNRREISALTGVAPLNRDSGKMRGKRTTFGGRAGVRATLNMAALVATQFNPAIKLFYQRLLAAGKPKKLALVACMRKLITILNTMLRKGEEWNASFQSQVIS

SEQ ID NO: 193244 - protein, 394 aa, unidentified
MRYMGIDIGSEHHVVVIVDDAGQVLQTATQCAEDAAGYERLRELLGGNADTLIAMEATGHYWKNLFAMLAAEGFAIALLNPMRTNRFAQEELERTKTDAVDALNIARFAAQKRPAATRLPDQAADELRELVRHRDRLVQDFGDRTRQLHRLVDLGFPEFTRHVRHLDSTLATTILHTYPTAEAFHGLAVGRLSRMRYDGRHVVGPELARTLIEAARVSVGRHHGPAYRLQVQHCCEDLDLLRRRLRAIDDDIERTLAEHEVGTLLTTIDGIGPTTAARIIAEVGDPADFLSPATLAAYVGVVPALKQSGKRQSQRGGISRVGNARLRAALWMPTLTAVRRNPWLKAYYDRLVARGKPRKVAMVAALHKLLAAIHSVARRRQPFVPFLRTEAIAP

SEQ ID NO: 193245 - protein, 336 aa, unidentified
MNEATWFLGIDVAKRKLDIALLVTDKIKSKVFDNNTSGHAALTRWLIERGAIQSHTHICLEATGPYSEALAIALVDAGWRVSVVNPARIKGFAQGELARNKTDRADASLLARFCAAMRPGFWTPPSSEWRELRSWVDRLQALKDMHQQESNRLEAHLASGQAALVTAVQTHLDWLTKHIEQLERDIDDHIDRHPELKRDAELLHSIPGIGNTTIAKVLAYAGDVRRFASAKALAAFVGVTPRQRLSGTSVKGRSMMSRTGHADLRRALYMPGLVARRHNPLLKVFGDRLSAAGLAPKAVVGAVMRKLAHLIYGVIKSGQPFDPKFSTARLDFQDGI

SEQ ID NO: 193246 - protein, 307 aa, unidentified
MCCVLMVVIAPKKFANTTKGHDELVSWLKGHKIDHAHICIEATGTYMEPVAECLYDAGYIVSVINPALGKAFAQSEGLRNKTDTVDARMLAEFCRQKRPAAWEAPHPLERALRALVVRHQALTDMHTQELNRTETAREVQRPSIDAHLLWLEAELKRLEKQIKDLTDDDPDMKHRRKLLESIPGIGEKTSAVLLAYIGLKDRFAHARQFAAFAGLTPRRYESGSSVRGASRMSKAGHVSLRRALYMPAMVATSKTEWGRAFRDRLAANGKKGKVILGAMMRRLAQVAYGVLKSGVPFDASRHNPVAA

SEQ ID NO: 193247 - protein, 350 aa, unidentified
MLIIGCDFHSRFQQIAMLDPQTGEVIERRLEHENGEARKFYAALTTPAGVGMEATGYAQWFERMLAEQGHQLWVGDAAEIRAAMVRKQKSDSRDACHILDLLLRDKFPRIWIPSTEERDVRQLLRHRYKLVCLRTSLKNQLHAMAMGQGICRKKKLWTAVGRKELQGLSLGPWASRRRQHLLNLLDQLEPVLDELDRAVIQEVEKRPAAVRLMTQPGVGPVTALAFVLTIGPVERFQKSRKLVSYLGLNPSEESSGGRQRLGAISKQGNSMVRFLLVEAAQTASIYDPELRRDYQRLKFRRGRGVAKVAIARKLAVRLYWKLREQLSQVPPAPMQGSPASPVVGESLSAF

SEQ ID NO: 193248 - protein, 337 aa, unidentified
MKYCGIDLHSNNSVVTVLDEEDRVVAEKRLPNDLVKILGLLAPWQDELAGVVVESTFNWYWLVDGLQAAGFKVHLANTTAIKKYEGLKHSGDEADARYLAHLLRLGILPTGTILPPEQRAVRDLARKRMQLVRSRTTHILAVENITARQHGLRISSNQVKRLTAEAVDQMTLSEEVALAIKANVAVVTTLSAQINLLENRLQARVKARAEYALLTTVPGIGEVLATTILLETGPIDRFAAVGNFASYARCVDSVRTSNGKKKGQGNTKNGNKYLAWAFVEAAHFAPRYCVEAKRFYERKKARTNTVVAIKALAHKLARASFHILKDRKPFDVTRCFA

SEQ ID NO: 193249 - protein, 475 aa, unidentified
MNVKGTKKKNQVVTANIFEQQELLKKAEVIKKNLTASTWRELETNGKFDKNEKLSFISDDMLILGCDVGSETHYLRAIDTRGRELSKSAFPISNDSEGFQSAKEWAVRIAADHDKKQIVLGLEPTGHYGFCLATWMISNGISVVQVNPYAVKQTKEVEDNSQLKDDTKDPKLIANLVKDGNFGMSYLPEKLYAELRRLSMFRDQLNEDRIRAINRMHREMKIYFPEYKDAFGKVDGAFSLELLKAAPFPDDLKALDENGIRQIWREAKLRGGGYSRSGEILGYARLSVGIRDGADAAKIAVQWFVKKIMELDEELAVIENLINQKCQEIPHAGNILEISGIGENTLSGILADMGDISRFDDVKEIQKLSGLGLVACSSGKHKGETKISHRGRKRLRYWLFQAAKSAVAHAEEFKELHVYYTTRPDNPLKKMQSLIVIACKLLRIVYTILKKGTVYDPKKMLMDIRRPEKKEAIAA

SEQ ID NO: 193250 - protein, 305 aa, unidentified
MRELTSVGIDLAKNVFAVHAVDRDGRVVLRRLLGRGKLAELIAQLPPSLIGMESCTGAHEWARRFQALGHSVRLMAPMFVAPYRKSGKNDGNDAEAICEAVSRPNMRYVPIKTLDQQAMLTLHRVRQGFVVERTAVVNRIRGLLAEFGVVIPQRVESLRRELPAHCETLPSLAAWAIRDLQQHLRVLDTTIGEYDLELKRLASANEDARRLQTIPGIGPISASAIVATVGSAAEFRNGRQFAAWLGLTPRQSSSGGKSRLGHISKRGDAYLRMLLVLGARSVLQTAPRHTDRLSRWVQSIHARCG

SEQ ID NO: 193251 - protein, 354 aa, unidentified
MSQTLNATIAVVGIDIGKNSFHVVGLDQRGAIVLRRKWSRGQVEARFANMPPCLIGMEACVGAHHLSRKLKTLGHDARLMPARYVRPYSKGQKNDFRDAEAIAEAVQRPTMKFVATKTADQLDLQALHRVRERLVSQRTGIINQIRAFLLERGIAVRQGQRFLRAELPRILATPPDVLSPRMVRLIEDLASDWRRLDERVEGLTGEIEAIARQDTDCERLMSVPGIGPIISSAMVAAIGRGDVFSKGRDFGAWLGLVPKQTSTGDRTILGKISKRGNRYLRVLFVQAAWVVLIKPKSWERHGLKPWIEAAKKRLHPNVLAIALANKLARIAWGVLARGRNFEARTNTNATAQAA

SEQ ID NO: 193252 - protein, 427 aa, unidentified
MLKHNTEPDPAQEFAAFLAIDWADEEHAFHLQVVGQSKIETGTLEQKPHVLGTWVAKLRERFGGRPIAVGLEQSRGALIHGLMAYDFLVLYPIHPTTVAKYREAFKSSGAKSDPLDAGQILEILTKHQDRLHRFNPDTVETRLLGRLVEDRRKAVGLRTTQVQALGANLKEYFPQALELTSDNLSSRLACDLLLKWPTFADFQQAKPSTLKSFYYGHNIRSPEVIERVLALAEKSQALTTDPAIVESGSRLTQMYVGLIQALNPVIVKYDQRIQRVFDAHPEVKLFTGLPGAGPALAPRLLAFFGTDRSRYAAALNVQSFTGVAPVTKSSGKSRVVYARAACPKFDRQTFHEFSRLSVTHCQWARNYVQYYTDKGKKYHTIIRALAYKWIRILHKCWQERTPYNEDLYMERLKKRGSIFATSHLQTK

SEQ ID NO: 193253 - protein, 519 aa, unidentified
MHQTKYRGIITEAGSLTYSPWEPASRLVKPLKKSVNPFGGDLCFGWLGSLRLYLYKPLGCVSAFWKWMPAGKDKTMQYQKVLKMLESIPYLSVGLDVGADFTWMSIMLPNGTLAGKPFKIVHSDPQSRELAVAKIKEAQEAYSLKSRCFLESTGIYHIPLLCFLRDKGFDCSVINPIITKNSTNMNVRKLHNDKFDSKKAAKVGLDASLKTSIVPDDAVIDLRNLVRDYYYFKDLQSAVVLKLNAELKVSFPAYLNVFSKITTQTSLKLLEAYPLAADILAAPKDELVETIRTTARFGEKYAISKYDAICAAAKDAAVFGRALPSNALRIRLYIKTYREYQAHLDSILEELHKAVDNLQGDPVYDRICLLQSLRGVGFLSAVVLIAEMGSFDLFPSPKKLYAYFGMDPGVNDSGKFHGDRVHMSKRGSSLARRILHMIAINNLKVDKAAKAPVNPVIYDYYIRKCANKKKIVAVGAVMHKICNIIFAMLRDNKPFEIITPEEHCERYAAEHPKSVNTAA

SEQ ID NO: 193254 - protein, 280 aa, unidentified
MDFVTIGVDLAKNVFQVHGVDAEGDVVIGRQLRRSRVLPFFKKLPPCLIGMEACATAHHWARQLIGFGHEVRLMPPHYVKPYVKRGKNDAADAAAICEAVTRPTMRFVSVKGMEQQSVLMLHRTRELLVRQRTMVINVIRAHMAEFGIVAPVGVLQVKKLLGIIADTDDARLPSLARTFLESLARQFLSLHDEINTAEKRIHAWHRSNEVSRRLETIPGIGPITASALAASITDPEVFKSGRELAAWIGLVPRQTSTGGKQRLGKMSKQADHALTFTLAL

SEQ ID NO: 193255 - protein, 355 aa, unidentified
MNDAKYIGLDVHQATISVAVLDSAGKLVMEAILETKAEAILQLIHGLRGSLHVTFEEGTCAAWLHDLLKPHVTQVLVCDPRKNALIKAGNKSDRIDARKLADLLYLNKLNPVYHGETGIRALKEVARSYLALTRDTTRVMNRLKALYRSWAIPCAGQRVYAPRDRSEWLAKISEAGVRRRAEIYYQQLDALRSLREQVRRDLLAEGRKHSAMKWLRQIPSIGPIRAVLLIALMQTPHRFRTKRQLWAYCGLALKTSTSGEYRIVEGQLKRSKKFLAIRGLNANHNHDLKNIFKGAATRAAAVPGPFQEFHAGLVARGMKPTMARLTLARKIAAIALIVWKKGVSFDAEHLKQQAA

SEQ ID NO: 193256 - protein, 449 aa, unidentified
MRKPQVIEDQQHERVFERVAAVDVAKASGMVCTRTPNPARPGARHSTVWEVPAAMNAVLALADRLVADGIEMVTLESTADYWRIWYYVLEGAGLAVQLVTASQARNLPGRPKTDRLDAMWLARLTEMGMLRPSFVPPAPVRVLRDYARARTHLVQDRTRCWQRLEKLLEGALIKVSAVASKLTTVSAQDMIKAMIGGQRDPHILAGLARGRMKAKHDALVEALTGMFDDHHGELAQMLLDQIAFCDTRIAALATRIEQHLAQIPAAWGVDGDGSTGPAAGTGPDAAVLPAAQRLAEIPGVSAELARSIIAETGLDMSRFPTAAHLVSWAGLCPSARQSGARNRTGKKGQGDGYLRGYLGQAATGAAGTATFLGERHQRIARRRGRAKAQVAIGRSILVIIWHLLASPGTRFADLGPDYYASRTDKDKKIRNHIRQLQALGLTVTIAPAA

SEQ ID NO: 193257 - protein, 375 aa, unidentified
MVPSNSDKTGSEGVRTIDIHKREYVVVHQADNEPPKSPHKFSPEAFLTWIAGQRKRAKRIVTCYEAGCFGYVLHRQLESMGIENLVVRPRNWDEYGSKVKTDSRDARELCSHLDRYLAGNERALSVIRVPTEEQERSRSLSRQRDTFSKELKRLQNVGISNARYYGYELKMSWWKSGNFKKLIEELPEYLIAILQPFQSVLAAIDKQLRETTAREECSANRQLPVGLGALTASILDKEFRDYTRFKNRREVASYTGLCPGEASSGGTRRQGSINKHGNPRIRHNLIEAVWRFLQFQPDYAPIKYWKQRMCNEPFGAAKKKKMTVAIARRFAVDWWRINTGQIEPETVGLKVAYPTSYATRAMREGRVAKIYAKTA

SEQ ID NO: 193258 - protein, 398 aa, unidentified
MDLPVYYELETNNGNRDYRIQIGGHYMNYNTVYVGMDVHKESFTLCSCKYEDEKASHYQRTPASYKNVLRYLAFLRTIYGEDTRFVCGYEAGCLGYSLYHQLENFNVECVILAPTTMLEQRSKRRIKTDKRDAEIIARSLAQHNYSPVHIPTETDNQTKEFIRMRDDHKAELKKIKQQILAFCLRQGYQYDGSGNWTAKHVKWLRSLKPAGLYKEILDEYLLTYTILTDKLNRLDQRIEELASEEEYKEPVSKLTCFLGIKTHTALSVIVEVGDFQRFASARKFAGYLGLVPGQHSSGDDRNGLGITKAGNTHVRRLLVESAQSYTRGKIGYKSRVLRSRQAGNSPQIINYADRANERLRRRYYQMVLKDGKKYNIAKIAVARELACFIWGMMTDNIY

SEQ ID NO: 193259 - protein, 338 aa, unidentified
MQFKHFFGIDVSKNTLDLTVLDIQGNQIAYEHLTNDLKSIKKCFLGVLKRHQILMEDCLFCLEYTGIYNLPLVQWLTSLSAHIWLESGSQILKSQGIVRGKSDKVDSLRIAKYAFLNRNEVRLWKAPREIIQHLAMLMSVRSRFIKNKKQMEVPAKELNGFMKKETIRSINKHNKAPLNALKLQIDKIEKEILEVIKSDERIHQLYKIITSVDGVGLVTATQVIITTNEFINITEGRKYACYSGVVPFEHRSGTSIRGKTRVSHMANKKIKTLLHLAAISAIRVKGDIQDYYLRKVAEGKHKMSVLNAVRNKIILRIFACVTQERMFKKKINFCLEKP

SEQ ID NO: 193260 - protein, 359 aa, unidentified
MKTIVSNKQNWFNKIKLTKDDEIYIGIDVHKKSYAVAVWLNDAPAIDFVMPADNQKVLTMLDKLRIALKQIVYEAGPTGYSLARLLQDAKLPIRVIAPSKTPRQSARESKTDKLDCRKLAQYAAKGLLRPIAIPTKQQEADRQLFRLREQLVEKQRRLKLQIKSFLLQHGISEPAGLKSWSVLAVEKLRTIALPDKLRYCLNIFLDELAFLKTQIKKTEQHLKETFSSPQHAKKIELLLTHPGVGPVIAGQFCTEIFNPKRFKNAAEIGKYVGLSPMVTQSGQSRKDGPVLKTGRPQLRSNLIEASWVWIRKDPHAYKTYLRLLRNTGEKNKAIVAMARRLAIHLWKMLSDNKPFIQAA

SEQ ID NO: 193261 - protein, 356 aa, unidentified
MNIRRVQHFVVDGKEIFVGLEDSKKTWKLAVRSEGMLIHQASMEAKYSVLIRYLRNNFPNCTIHLIYEAGFKGFNLHDRLVDDNIDCVVIPPHVVTEPKVNRVKTDKRDAKRLALILENHDFRDVCHVPDRERREDRQISRTLIAMQKDIIRTRNRIRKLLDFHGIEVSLPDRWGRDEFRSLKKLSLPDPLRISLDVLLTQLEELWAHQMTLRDALRKLCRKERYTKAYTIARSLPGIGWFTAIRLVLELGEDLSHFTSGKKIASFVGLTCSEYSSGQTEWKGHITGMGSRFIRATLIENSWAAIRKDPVLLAKFSRIWRASGSKKKAIVAVARMLIVRLRACVILGTPYSLGVVR

SEQ ID NO: 193262 - protein, 351 aa, unidentified
MKILAMDLGKNKTVVCIYDQKSGKHRYQKVMTGPQQMHDLIVEHKPDRVVFEICSAAGWVFDIARCVGIEVQVANTNGQAWRWKNIRRKNDREDALKLAQLSAMNQLRTVHIPNRQVRQKRALIQYRQSLVARCVQIKNSIHSILDKEGLSMASGKSGWTKESTEELKAMALPMEKCDGDNLWRGSMWVELEMLAKVTELIKEVESKLDEMAQDDRRVRILRTIPGVGPRLAEAVVAYVDEPGRFRSCKQVGCYAGLTPRQYQSGNSNRVGRISGQGNKVLRALLVEVSWLGLRHNEWMRQTYQRILRGSASRKKIAITAVARKLLIRCWAMLRDGTAWRKEKAKVSNVAA

SEQ ID NO: 193263 - protein, 315 aa, unidentified
MAEPFFVGIDVSKSQLDIAINQGDALLESFSVSHTEEAISDLIQKFGNTVPKLIVVERSGGLERSLVALLAEAGLPVVANNPRQIRDFARAMGILAKTDKIDARTMALFAAAVKPPERPIKDAERQQLSDRVARRRQLVKMLAQEKNRLSRAAGPVRADIEHHISYLKERLDKTNKDIEQMIANTPVYQETVEILVTFPGLGRVTSAALVADCPELGTLNSRKIGTLTGTAPLNDDSGTRAGRRFVWGGRKTVRVHLYMATISAIRCNYKIRGFYQRLIARGKKPKVAITACMHKVIIILNAMVKQHKPWQTDAV

SEQ ID NO: 193264 - protein, 360 aa, unidentified
MRFQRTSVGLDVHARSVVACGLDGQTGEVFERRLTPDHGEILEWIRSLPGPAAVVYEAGPTGFGLARFLIAAGIDTVVAAPSKLQRPSGDRVKTDARDARHLARLLHLNEISVVSVPSVEQEAARDLVRAREDCRGDLMAVRHRLSKFLLRQGIVYYGGEAWNKKHQLWLQTHRFDTPGLQLAFDAAFDAMLATVDRRDRLDAAITAMASDSAFTPVVTRLGCVRGISTLTAFGLATEIGDWHRLSGRSIGAYLGLVPTECSSGSTRVQGGVTKTGNSHARRLLIEAGWHHRAPYRPGRHLRRRWETASPAARARGQAANRRLHARWVRFDDRKKRSVVANAAIARELAGWCWSLAVLED

SEQ ID NO: 193265 - protein, 399 aa, unidentified
MLDDGSQPTKLFNVDNNQLGAEVLVKRVDSIAKEHCVSDILIGTEATSMYDWHLLEYLAESKLALEFNLKLYRFNAKWIKNFKKSLAPRGKTDPIDSFAIAERLRMGRLPKEYIPDSKYQPLRKLTRFRFHLIQQIAREKDFFLANLFLKASAYSQVKPFGSTFSATSLSVINDFFSVDELAAMPIEELTEFILEKGKSHFSQPSEIVANLKRVARESYRLKPELSPTVNLILASTYNNIRCYKEQVKLVDEAIAENLKAFKHTLESIPGIGPVYAAGILAEISDIQRFPNDSALAQFAGLTWPKHQSGKFQAEETRMSHTGNQYLRYYLVEAANSVKRCDATYKTFYEKKYKEATKHHHKRALVLTARKLVRLVWTLLTRQTLYQSGYCSFEDLSKIG

SEQ ID NO: 193266 - protein, 346 aa, unidentified
MIYVGIDLHRKRSQIAALDEQGKELLSRRVANDPEALKAILAGLGGELQVALEATYGWEWLADLLEREGHELHLSHPLRTKAIAAARVKTDAVDARTLAHLLRTDLLPEAYVAPRELRDLRDLLRHRVVLTRMRSALKNRVHALLARQGIQSGHSDLFGKGGRAFLSELPLREPARRRLDSLLSLIGDFDREIDKAKREIDELAVDDPRVDVLTQLRGIGPYTAMLVIAEVGEIERFRSARHLCAWAGLTPTVRSSDGRARLGHISRQGSPHVRWALVEAAQKAAQGGGPLRAAFERIAKRRGRNIAKVALARRMLTLCYYGLRDGEIRCLKHPGPASARPVRTAR

SEQ ID NO: 193267 - protein, 355 aa, unidentified
MLCLGLDQHARQITISLRDENGDVLQARQVSTRPDKINEFFQRLTRERLREGESFVAVLEVCGFNDWLIRLLHDYRCEKVILIQPEKRKKQKTDRRDAATLSELLWVNRGRLLEGKPVRGLRQVDCSSAKDRETRRLTTLRKDAGRARGRIINILRHILRRHNLQWEMPTQTFPTQRASAWLKTLVLPEIDRLELDHLLADLDHIQRRVEELDKVIAQRCQLSDDAVLLASIPGAGAFTATSLACRVGRIERFPRSRSLANYWGLTPGCRNSGENNKRLGSITKAGSSMARWLLAQVIQKVLRKDTRMREWFKRIKRRRGASIARVAVMRKLATIIWHMLTKRKTYAECRALAAP

SEQ ID NO: 193268 - protein, 334 aa, unidentified
MEQITTVGIDLAKRVFALHGVDAGGRVILRSIVRREQLLEAMAKLPPCVVGMEAGSGAHDWARQLQRLGHTPKLMAAKFVSPYRRKGKNDGNDAEAICEAVSRPGMRFVPVKSLEQQALLSLHRVRQGFIVERTATINRLRGLLAEFGVVLPVRAVVVRREACKAAESLPALGRRAIEDLLAHLRTLDERIAAYDRELEQQARQCEPARRLMKIRGIGALSALAIVATVGNARDFRSGRQFAAWLGLTPRQHSSGGKTRLGHITKRGDAYLRCLLVQGARSVLHTASRHADGMSRWAQTLEARRGYHRTLVAIASKNARIAWALLSRNEVLRPA

SEQ ID NO: 193269 - protein, 330 aa, unidentified
MTNATFEQAAPAALDFVGVDMAQQTFMWALHGVPTTHSASNDEPGFQALLDALKGRRVGLLVIEATGGLERALASFLLQHHVPVAVVNPRAAREFSRSMGHLAKTDSIDATALAHYAQTLAGKADQAGVLFAPPSAEVQALQAMVARRVQLLNMRTAEKNRLGGAMRVLRDSIHAVIKTLDEQIARLDKDINTHLDLHFKEQSKRFEAIKGVGPTTCATMLAFMPELGTVSSARAAKLAGVAPLNQDSGKARGKRHVWGGRSLVRSTLHMAMLSAVRFNPTIKTFYDRLIAAGKPKKVALTACSHKLLRILNAMARTNQPWSDALHAVTP

SEQ ID NO: 193270 - protein, 355 aa, unidentified
MNATTVAVDLAKNVFALAVADGNWKIVECARLTRAQFERWFDNRKVDLVVMEACGSAHYWARTLRARGIEVRLLPAQYVRAYVKRNKTDAADARALLEAARASDIKPVAVKSIEQQALQALHRTRSGWMSTRTGRINTLRGFCREFGLVVPEGASTGLACMARYLADEHSGLPELLRPSMRLMIEEIRLLEARIGQLEQALSQLVKHSPACQVLQSVPGIGLLTSTAMVAAVSDPKSFDSGRRYASFFGLTPREFSSGNSRYLGRISKRGDRYIRMLLTHGARSVLRAATVARRTGRPLDRLRTWALEVQQRTNHNKAACALANKLARIAWAVWVKQENYQATRVPSPSTEAFSV

SEQ ID NO: 193271 - protein, 345 aa, unidentified
MGSKLEQLLERPSRPFTPRAGPAWPARILEAGVNYHVKEQLVYLGIDIAKSYLDAAIGSEKRRFSNDTIGHRELIKWGKQVKAPVQVICESSGGYERALVQGLARARIKISLVQANRVRQFARAAGILAKTDRIDAKVLCEFGKVMQPQTVTAATLEQEHLRELESQRRHLTHLLVMEQNRAARVSDASVVRLNRSLINQIKKQIEKLDLLIKEHIEQSPRLSAKAEKLISIKGVGLRTAALLLAQMPELGQLNRREVAALVGVAPFNRDSGKMRGKRAIYGGRRFVRHGLYMAALVAARHNPILRNFYLRLRAAGKPAKLALTATMRKLLIVLNSSLKTDLNYA

SEQ ID NO: 193272 - protein, 337 aa, unidentified
MIVIGVDVHKHSLTAVAVDEVGRTLAEVTAGDERAVLAWSASLPAGRLWALEDCRQLTRALERELLGAGEELVRVPPKLMAPERRAGRLRGKSDPIDALAVARAALREPRLSRPRPDEQPFRELKLLVDHRDDLVDERRRAQQRLRWHLHQLDRSLAVPAKALDRPAQLDRVGRWLARQPAELQVRLARQLVARCRSLTRTISELDRELEQRTAETAPALLELPGCGALTAAKLLAEIGPIGRFQSDAQLARHSGVAPLEASSGRIQRHRLDRGGNRQLNAAFYRIAITQARVHPAARAYLERKQAEGKSRREAIRCLKRQLARVVFNTLKASPTLT

SEQ ID NO: 193273 - protein, 320 aa, unidentified
MRNTVGLDISKLTFDASAIVGNAEYSAKFDNDSKGLDQFSDRLKSLGCQNLHICMEATGNYYEEVADYFAQYYSVYVVNPLKISKYAESRFKRTKTDKQDAKLIAQYCRSAKESELVKRQKPTDEQYRLSRMTAAYAQIKSECAAMKNRHHAAKDEEAAKAYAEIIKAMNEQLEVLKEKIKEQTEKPNCKEGVKRLETIPAIGRMTAAVLFHHLTSSKFETSNKFAAFAGLSPQQKESGTSVRGKGKLTKFGNRKLRAVLFMLTMVAYRIRAFPDFIKRLEEKKKPKKVIIAALMRKLAVIAYHVHKKGGDYDPSRYKSA

SEQ ID NO: 193274 - protein, 386 aa, unidentified
MVDGKVTTVVKTFQTTTQELMALSDWLSAEGCTHIAMEATGVYWKPVWHILSDGEFQLVLANAAHVKNLPGRKTDVNDATWLADLMAHGLIRASFVPDEPTQQMRDLLRTRKQFVRERSSHTQRIQKTLEDANIKLDSVTSDIVGLSGRRMIEAIIAGQTDTESLTALADRRIHATKAELEAALRGRVTAHHRFMLQLHLDHLDAVNAVIARIDKEVDGQVKPFRVAIEMLTTIPGVSSLAAEVLVSEIGIEMSRFKTEGHLISWAGLCPRNDESAGKRRSNRMKKGAPWLKTTLIQCAWAASRTKGSYLQAQYLRIRSRRGPKKAIGAVAASMLTAAYHMLKDGTLYQDPGASHFDNRDKGKQALRLVNRLQSLGFTVQITSIAA

SEQ ID NO: 193275 - protein, 312 aa, unidentified
MTIIGIDPHPASHTVVALDSTGRRLGHVTVANQAEGLVGLEAWLKHYPNEVCAVEGANNPFARALSRSLLRQGYKVVDVSPSLTSQYRSKRGRTKSDLIDAENVAKAVLANPELASFQPMADIEELKSLSRIREALVKQLTAHRLSLKSSDSETARQVLGAVITVLVEQIGTLEGEMKTYVQELMPELLEVQGVGVVHAATLLAEAGDVRRFRSPHTFAMFAGCAPIERSSGGQQRRQLNIGGNRRLNRTFHMMVQVRLRCDETTRSYLHKKQQQGKTTRATLRCLKTYLARELFRFMHANISAYPQRWLNP

SEQ ID NO: 193276 - protein, 415 aa, unidentified
MEVVYPTCCGVDVHKTFLVATIITTPVNSLQPHYQKKRFSTFNSDLNRFADWLLNHDCQDVCMESTGKYWVPVFNILERRGIRVVIANSKWVKAVKGNKDDVKDSKWIGDLFRIGLVKSSFIPDLNIRILREFTRYHYKLTSMKSSEKNRFQNAFTVCNVALDSVVSDMFGKSATAITDYLTSSESFDPEHCVSLLQRSLKKKADLVVESIEGFSIAPKQKERIKLIREHHDFIDSLIARVDTCVNEMVAKYEGQINLLCTIPGIDRNSAITIISEIGLDMTQFTSSKRLCAWAGLTPGSNQSAGKKKSVRISRAGVYLKPALVQVAHAAVKDKRSPYYALKYERIAKRRGKKRAIIAIARMILTAIYSMFCTGEIWNPVDLYKVDMPEHLKEQQLQKAIKQAVRFLEKQGLSVA

SEQ ID NO: 193277 - protein, 343 aa, unidentified
MNIASIGIDLGKTTFHLVALDDHGNIIIRKKFSRKQLLAYTANLPSSLVGIEACSGAHFIGARLRDQDHQVRLIPAQFVKPFVKSNKNDFIDAEAIAEAVSRQNMRFVPIKTDDQLDLQALHRVRDRLVHRRTAVINQIRGFLLERGITFAKGPANLRNRMPDIVEDADANLTPRMRTLLDRLWQEWKQLESGIETASDEIEQIASEDEACQRLRQIPGVGPLVSTATVAAIGNGAAFRKGREFAAWLGLVPRQYSTGGKARLYGISKRGNTYLRRMFIHGARAVLMRVKYDTAGLGQWVHQLEARTTRNKVIVAVANKLARIAWAVLFKAEAYRHAAVCAQA

SEQ ID NO: 193278 - protein, 375 aa, unidentified
MQNKVRFLGLDVHADTIAVAVAEPDGEVRSLGTIANRAESIRKMVKKLGTVDQLRACYEAGPTGYVLYWQLAELGVNCAVIAPTLVPMKAGDRVKTDRRDAERLARSHRSGDLTAVWVPDAGSEALRDLVRAREAAKQDHLRARHRLSKFLLRSGQRPAQGMKAWTQAYMIWVKQIRFSQVAQESTRLDYLTEVEHMGERVARLEKSIEEAVKLASPEIQEVVKGLQALRGIAQISAVTIAAELGNISRFAGARQLMGYSGAVPSEDSSGKRTQRGSITKTGNSHLRRIAVEAAWSYRFRPGVGPALRKRQEGVPEEIKEIAWKAQHRLFKRYSRLSAAGKDRRKIITAVGRELLGFVWAIGIKAEAAAKQPIAA

SEQ ID NO: 193279 - protein, 515 aa, unidentified
MHQTKYRGIITEGRSIDVSSLGTSGFPLAKPLRKSVSPFGGDLCFGWLGSPRLYLYKPLGCVSALWNWMPDGKDKTIHYQKVLRMLQSVPYLSVGLDVGADFSWMSIMLPNGTLTGKPFKIIHSDPSSREPAVKKIKEAQEMYSLESRCFLESTGIYHIPLLCFLRDKGFGCSVINPIITKNSTNMNVRKLHNDKFDSKKAAKVCLDASLKTSIVPDDTVIDLRNLVRDYYYFKDLQSAIVLKLHAELKVSFPAYLNVFSRVTTQTSLKLLEAYPLAVDMLAAPRDELVESIRQTTRFGEKYAISKYDAICAAAKEDAVFGRALQSNALRIQLYIKTYREYQEHLDSMLEELHKAVDKLEGTPVYDRILLLQSLQGVGFLSAAVLIAEMGSFDLFSSPKKLYAYFGLDPGVNDSGRFHGDRVHMSKRGSSLARRILHMATINSLKVDKAIKTPVNPVIYDYYIRKCDSKKKIVAVGAVMHKICNIIFAMLRDNKPFELITPEEHCERYAAEHQNL

SEQ ID NO: 193280 - protein, 343 aa, unidentified
MQTITTIGLDIAKSVFQVHGVDADGQVVIRRQLKRRYVLAFFQKLTPCLVGIEACASSHHWSRALQALGHTVRLIPPAYVKPYVKRQKNDAADAEAICEAVTRANMRFVPTKTPEQQSGLVLHRTRQLFIRQRTAVINAIRAHLAEFGIVAPVGRHGVEELLTVVANPNDMRVPEIARACLLAFEAQLRGIKKQILEFDRLIRAWHRSNEMSMRLEEAPGVGPVLATALVAAVADPKSFRSGRNFSAWIGMVPKQHSSGGKNRLGNISKQGDRYLRGLFVAGALSVIRYAKIHGTNHRPWLAALLARRPTKVAAIALANKIARMVWAMMARGERYKEPVALAR

SEQ ID NO: 193281 - protein, 427 aa, unidentified
MPYKIAGIDVHKRMLHVVVSDVEVDGEYDFTRRIFGALPKALRSLAAWLVEQQVEEVVMESTAQYWKPVWGTLERYWKPICQTRERAFATSGTLHLAQALSNRGRRGRKKDFRDAERLVKRLVAHELVLSFVPDVEQRLWRTVVRTKYQLTRNRVQLQNRLEALLEEAHIKLSSLVSDLFGASARRMLHAIADGETNCETLAALADRGLRATQEQLQDALGVCQELNSVYRRLIRMVLDEVASIDKRIEQLNQEVANLLRPHEDQVKRLAEVPGLGVDSAQQVIAEVGASAATFPSEKHLSSWVGACPGDEESAEVNRSRRSPQGNRHMRRILNQAANAAVKYKGSIFEILYRRYVPRLGHNQTIGIIAHKLCRLVWKILHRGIRYEERGPEVRKASKQKRTRKMIQALRRLGYRIEPGPSQSAITA

SEQ ID NO: 193282 - protein, 382 aa, unidentified
MNRIIKIGMDVHSTNYTLCAMEPVLDGEDRIFTNIQVTPDYENVIQFVDNLKKRLGSSDSYSIECGYEAGCLGYSLYHQLTKAGVKCTILAPTTMLTQQGKRVKTDKRDAAMIAQCLSYGGYHAVHVPTDKDTSVKEYLRMRDDHKLALKKIKQQINAFCLRHGYIYDGHKWTLKHLDWLKKLNLSGLYRETLNEYMTSYEEQTAKIERFDKRIEELAADSDYHENVRKLSCLLGIQTYTALSLIVETGDFKRFRKGNTYAAFLGLAPGESSSGEKISRTGITKAGNSRLRTLLIEAATGICKGRVGHKSKALCARQAGNPEEVIAYADRGNIRMRSKYKRMIRHEKKRNVAVAAVARELACYVWGIMTNHIEPREEGKKAA

SEQ ID NO: 193283 - protein, 408 aa, unidentified
MELRPLFHRVIGLDVHHAQVTACAIVTDADGTVTIDRRQFGAFQKDRRELANWCASHQPEEVVMESTGIYWKSPYAALEKVGIQAKVVNARHVKQVPGRKTDVGDAEWLATLARAGLLRGSFVPPAQFRELRLIARQRQKLVGMLSAEKNRLHKVLTDGGIRLGVVVSDIHGQSARAMVKALIQGNAPEEVLRLASHRLKASHEEILDSLQGELSASHRFVLQETLGHIEALEAQIARFDAQLLAELEPQAKALELLQTLPGVDIVGAALLLVEIGDDMSVFGSADRLASWTGLCPGNNESAGKRKSGRTRKGNPYVRRVLCECAHAASRTQCALRSKFQSLVVRRGHKRSIVALAHKMLRIIYFMLSQGTYYRDADTDYEALSVQRNAARWIKKLIKFGFLPKNQPA

SEQ ID NO: 193284 - protein, 428 aa, unidentified
MNYNTQNAKIASITEETLIVGIDVGSEMHYARAFDWRNYEYSKKPLEFSNTEAGFLTLKAWMEDIAERHGKTAVIPGMEPTGHYWFALGKFLQDSGMKPVHVNPHHVKKSKELDDNNPNKNDRKDPKTIAALVNEGRFSYPYIPTGIYAEIRSLSNLRFQTQEEVTRIKNRIARWFSIYFPEYKDVYGDVKAVSGRMVLKKAPLPEDIKKLGVEGVNKIWRDAKQRGAGMKRAKTLVSAAEHSVGSKEAPEAARIELKHLLGDMDVYTARLEELVEKLENKLKEIPYIDKLLEIKGIGMITVSGFIAEVGDIGRFDNPKQLQKLAGYAIVANDSGKHNGESRISYRGRKRLRYVLYEAAISLIGKNAEFREIHEYYRTRKENPLKKMQSVVAVACKVIRVFYTILTKGVDYDAGKLLGDIRHRKVQAA

SEQ ID NO: 193285 - protein, 458 aa, unidentified
MAPRKRKKAAVSHALPPQLATVNLHAAGIDVGAEEHWAAVPACDAPQPVRRFGANTADLDALADWLWACDITTVALESTGVYWIPLFEVLEARGFQVLLVDPGKMPRNGRPKTDVHDCQWLQRLPTYGLLSACFRPEDQVVVLRSYLRQRAALLADAARDIQHLQKALTQMNVKLQHVVSDITGVTGLAIIKAILAGERAPQKLAQLRDHRCKQDAAAIAHALYGNWREEHLFALQQALERYEFQHRQIAACDGRIETQLQTFADRSQGEPLPPKRGQRRRHRNRPAFDPRAPLHRMTGVDLTRIEGIDETTALIVISEIGLDMSKWPSEKHFTSWLGLSPHQRVSGGKVLSSRTRPTTNRAAAALRLAAASLHHSTSALGAYFRRMKSRLGTPKAVTATAHKLARLIYSMLKHGTAYVAQGMDDYEQQYRDRVVKHLHRRAKELGYELHPVPAGTPA

SEQ ID NO: 193286 - protein, 319 aa, unidentified
MDTVTHDWIIGIDVSRDWLDIHCLPDNERLRLPNSEQGYGRLGELARLHDALVCFEATGGQEWKLWAALDAAGIATRQLPPAQIKAFAASLGTRAKTDRIDAELIARFMMFRPEAGRNLPHEKIRLLRALVSKRGQLVETRKRLLAQIKAHGKLGAADMFEAMDAKLKDLLDHQIAELEAQIQQVISTHESLAATAGILRSVPGIGPVASTMLIAEMPELGQITGEKAAALTGLAPIAHDSGALRGRRAIGGGRRLLRHVMFQAALVASHHNPLLKTFADRLRAAGKPHKVVITAVARKLVTIVNALVKSGQKWSPQTL

SEQ ID NO: 193287 - protein, 410 aa, unidentified
MEAIVECCAGLDVHQATVVACLNNGPAGKRSAKEIRTYGTTGLELREMREWLKSAGCTLVAMESTGVYWKPIHAELEGYFEIIVGNAHHIKNVPGRKTDVKDCEWISDLARHGLIANSFVPPRAIRDLRDLTRYRRKLVEAQAAERNRLIKLLESASIKLSGVISDVFGVSGRAMLRALIEGDQSPTEMAGLAQRRMKRKQPEIARALDGHIDEHHRFILRLQLQRITAAEADLEQLDERLSEKLAPYDEELRRLMQIPGVDRVIAGAMIAEMGVDMSVFHGAAHLAAWAGLCPSNHESAGRQRGGKTRKGNVWLKTAMVTAAIAAAKTRRSYFAEKYRRLSSRRGKMRAAVAVAHKILVAAYRMLVNQSDYRELGPDYLDRLNHHRTAINLTNRLRAMGYEVQITAKAA

SEQ ID NO: 193288 - protein, 364 aa, unidentified
MVIIGCDFHPSGQQVYGIESESGEVVAERWIAHGGEEVDQFYASLPAGAVVGVETSGNMLWFERKLAQYGHRLRIGDAAQIQAHEVRKQKHDRRSAELIARLLVEGTFPDLRWVPSLGERDLRQLLLHRDKLVRMRTQVKNQLQHIALNQGQQKKRQLWTKGGRELLEKLPLEPWTARRRDDLLRWLDQLDQECASLDEAVKQAAEANPEARRLMTHPGVGPVISLGFVLTIGPIQRFQRSRELVSYLGLNPSEESSGERRWLGGISKPGSVFLRRLLIQGAQTAVRGDAELARQYRRLAAKQHRAVAKVMVARKLAVRMFWMQTTQQTYPELVRTRGSSSHPGVSKTDRLRERPASPQGPAVS

SEQ ID NO: 193289 - protein, 425 aa, unidentified
MNYKQNEKINQVKESTLVVGIDIGSTTQYARAFDWRGIELGKVFPFSNSREGFESFKAWMQHLQDKYKKLDAIVGIEPTGHYWFDLGAYLEDEGILLVMVNPYAVKQTKELDDNSQSKNDRKDPKVIAKLVTEGRYSAPYTPDGVYADLRIMVANRKRLIREMTQIKNRFARWFAIYFPEYTDVFGDYEAQSSMLLLKKVCTPEAIVELGAEKINQIWRDAKLRAVGMKRATTLCETAKRSIGLKKGSSAAQYEMKLLLEDYEYKKAQLDAVMEEIEKLCRKIPESEQMLAIKGIGVITVAGFLAEVGDVEAFRITQTDTKLAGLSLRENSSGKHKGQTTISKRGRSKLRAVLFNAAIPLIAKNPEFKSLHEYYTTRANNPLKKKQSVIAISCKLIRVFYAILAKGVTYDAQKLISDIHRQPQVA

SEQ ID NO: 193290 - protein, 367 aa, unidentified
MEMPEARWYAGLDVHKDTVSVAVMERFAAEPELEVVKPNRLVSLSRLLAEFAKRGEVLAGYEAGPTGYGLARSLRQAGVECCVLAPGKLPRAALERVKTDRRDAVKLARALRAGEAVKVRIPTATEEAVREYVRTRHELKLAGAKAKNRLQAVLLRHDLRYGGKGQWTKAHWRWIQGIRVEHPELQESISRRADTVAYFDEQVRQMDGQIKECAARPSFMQQVQRLRYLKGIGTYTALALISEVGDFRRFPTARAFMAFLGLVPSEHSSGPRRRTGGITKTGNSFLRALLIEAGWHYAYPERSSEKLRRKRRGQSGRIAAYAARASERLHRVYCRLSFRRHNGKVAVVAVARELAGFVWGIMTDSTL

SEQ ID NO: 193291 - protein, 340 aa, unidentified
MNITTFGLDIAKRAFQMYWVETETGEIVNRRFTKQQVIEFLGQRPAGRVAMEACGSAHWWARKIVALGHEVVLLHARFIRPFVQNNKTDATDARAIWTAAQQPGMRSIAPKTADQQATLALHRMRSLLVKSRTMQVNQLRGLLYEFGVTLKAGRVAGLAEVRERLHEIEEVVPGTLFDALRDQLQHIERIDGEIRKLERQIVAWQRQEAACQRVATIPGIGPLTATALVATIGDPAAFKSGRELAAYLGLVPRQSGTGGKVRLGGISKRGDSYIRMLLIHGARAVMFKSRSKGAWSEQLSLRRPKNVVAVALANKMARTAWSLLAHDKTYQTDYAAQRAS

SEQ ID NO: 193292 - protein, 348 aa, unidentified
MTTMVEDTRAITGGVDTHADLHVAAALDSVGGLLGVQEFPATAAGYAELLGWLRSLGNLALAGVEGTGSYGAGLARYLAAAGVRVVEVDRPDRQDRHRQGKSDPLDAVSAARAAQSGRASGAPRGRDGAVEAIRALMVAKRSARQERTQAVNQARALIVTGPEELRARFAQRSPAQLIEAIAALRPRPGDVPGYATRVALRELGRRAQFLDGQLDRLDELIGPLVTERAPGLLALHGVGPDTAALLLVAAGDHPERLRSESSWAHLCGVAPIPASSGKTAGRYRLNRGGDRQANSALWRVVIVRLSSHPATRAYADRRGKEGLSKKEIIRCLKRYVAREVYRQLRAES

SEQ ID NO: 193293 - protein, 380 aa, unidentified
MSEITRLMLLIVRVGVDLAKNLIQVHAVDAAGRRIVSRALKRDQFVAWCEQLPKGCLVAMEACSSGHHWARRLRAAGLDARLIAAHFVTPYRMEGRNGKNDATDAAAVCEAASRPSMRFVPIKTTEQQGVMTLHRIREGLKEERTGCINRIRGVLAEFGLVFGKSPKALRAVLADVLEDASNELSGTARLVLQRAFDHWHELDEHLLWCDQQIGQHVRSTPEAKRAAKIIGIGEITASAMVAAVGDFGQFKSGAQCGAWLGLVPSQNSSGGTARLGRITKRGDDYLRTLLIQGAKAAVMSAHKRDDPTSRWLAQLKERIGWQKACVAMANKNARILWAVMTRDAPFDARHTSILPRAKTKPEPQALEVSQDTATPLSCPA

SEQ ID NO: 193294 - protein, 310 aa, unidentified
MDRYIGIDVSKATLDVASLPDGESWTVANDDPGLAALAPRLVALAPTLIVLEATGGFELLAAITLAKVGLPIAVVNPRQVRDFAKAMGRLAKTDALDAGILAEFAQRVHPVPRPLPDEAAQLLESLLTRRRQIVDMLTAEKNRLGFARGPVKRDISQHIRWLEKRLADVDGDLQDAVAASPLYQAKADLLRSVPGVGQVTTLTLLATLPELGQLSRHQIAALVGVAPMNRDSGTLRGKRMVWGGRAPVRAVLYMATLVGLKHNPVLRVFYERLRAAGKPFKVAATACMRKLLTILNAMLHQNRRWDPQIA

SEQ ID NO: 193295 - protein, 312 aa, unidentified
MPLQESLQFIGVDVAKLSLAIQFPGRLWSTVNTPAGHTALVAELRHFGAVHVVCEATGGYERALVLALHAAGVRVSVINPRQIRDFARACGRLAKTDALDATIIRDYGCRLQPDPDPAPAPGEVEFAELIRSRQDLVGLITEEINRREHTTLPVLLKLSRARQRQLERQLAALDALIDAQVARQAALAAKTQRLQQVSGVGRVTALTVVALMPEIGTLRDAEAAALAGVAPMNRDSGQHRGQRRIHGGRPALRRVLYMAALTATVHNPILKAFYQRLRQNGKPAKLALTAVMRKLIILLNRLLKNPQFNLVS

SEQ ID NO: 193296 - protein, 354 aa, unidentified
MSQQLNTTIAVIGIDIGKNSFHIVGLDKPGAVALRQKWSRGQFEARLANMPPCLIGMEACVGAHHLSRKLKALGHDARLMPAKYVRPYSKGQKNDFRDAEAIAEAVQRPTMKFVATKTTDQLDLQALHRVRERLVSQRTGIINQIRAFRLERGIAVRQGQRFLRAGLPTILATPSDVLSPRMVRIIEGLASDWRRLDERIEGLSSEIKAIACQDSSCERLMSVPGIGPIISSAMVAAIGTGDTFSKGRDYAAWLGLVPKQMSTGDRTILGKISKRGNRYLRVLFVQAAWVVLIKPKTWQRHGLKPWIEAAKKRLHRNVLAIALANKLARIAWSVLARGRGFEASTINDTATQPA

SEQ ID NO: 193297 - protein, 429 aa, unidentified
MQNESTPDARGPVFCGVDTHADSHWLYVLDWRGRKVLSRQFPADAAGYEALAGAIAAAGEPACIAMEGTSSYGAGLTRHLASLGMPVREALSPARMQRRRPGQGKCDEADAERAARAAMSGSRLGTPKSQDGWVDGVRCMLAARSGAVKARTSAINTARSLLTTAPEGLRSRFRGMAGPRLMEELPSVRAEGALGAALGALADLWAAARDAALDMERAIEASLEENCPALLAMYGCGPVSAAKLAVAAGDNPGRLRSEASFAAICGACPIPASSGKTVRHRLNRGGDRQANSALHEIARQRVMRDPETAEYAERARARGKSDREVMRCLKRYVAREAYRALMRPHEIRRPADASALVAARRAARVSQVRAASILGTSEKYISMLERGQRELKPIRRAYEAWVEAGLPLDWDRQAFEAERKMDSKKHLAK

SEQ ID NO: 193298 - protein, 401 aa, unidentified
MPTVRENGTRIKRFRELKATLRTDRTRLLVGLDVAQAEHVVHLRHAHTRIVVPTLTIPNTTRGFTALWARIQQAQRTTGCREVVCGLEPTGTYHHAVATFLEAQGADVVFLSSSVAYWNRRTQDGTWDKNDPKDAANCADLLEQGKVLFYRQPTGPLAELRHLVRCLRRVRTELASCKARWRTTLRPALAPMGESLPQRLWAELPTVLQPWERAAPGRPAVPKGRLPLGLATACADLGTQVTAVQARIAAIEQALTPVAERLPAYALLRSIPGVGATVAAVLLAEIGDIGWFTKFSQLRKLAGLDIVRVQSGQFAGQQRISKCGRGLLRWALYHAAVGVTRTVAGRARLAALKAKRRGDRFAGFKALVELAAKQLRVIWGVWRSGTPYDPTRAGGLRRPVR

SEQ ID NO: 193299 - protein, 412 aa, unidentified
MQRMTDVPGTVHAGEPAWTVGIDLGRRAAHEAVVRAPDGTDRRLRFTHSRDGIDGFLGELAGLEGGVLVILEPTATRWQALAEELSGKGVEVRQVHAATVAKLRGARDITGAKSDRVDARTLAGAVDYSHLVRPDTPAVACAHALCLERLRLRRERRRLRGAVKTCLDTIWPEFLQTFRGGERGVTARAVIAVTGGDPARATRLGAQELERRVRAAAPGRHIGHNKIKQLIEKTSRPVGYRAARGAYAARLQRLMRRRALVEGQLEALEEELLHLYPRLPGAQRLDSLPGLRELDRALLLAAAGDVRRMRSARALGKLGGCAPIARDSGQSTPKRKISERCRYQLRDAAFHAARHIIKACPAFQALYRALRQKLTARQAVIACANRLLRVIWRMVNSDVDYNPAKVAPALNR

SEQ ID NO: 193300 - protein, 438 aa, unidentified
MSNKVIFNLDELFISVGIDVGADFSWMSIALPNQQFVGKPYKILHNSIDSLTTAVSKIKEAEELYSLESRIFLESTGIYHYPLFCYLRDKGFNCSVINPIITKNSTNINIRKVHNDRFDSKKAALVGLKPDLKVSLMPSDLALNCRNLCREYYDLMDNRSAYVNKLQGELRMAFPQYLGIFSKVTINTSLTLLETYTSPSAFLKADKQEIIDIIKSTARFGLTYAQNKYNAIIQAATDANQFGYIIDSNIKRIRLYISFIRKYDEEINNILESLHELVDANEDADFVKQIHLIETFKGAGFLSAVSIMGEIGDFSAFSKPKQLFAYFGLDPAVKQSGKFEGTKVQMSKRGSAIARRVIHTLTLQSISISRNGEAKNPVLREYYLKKCDSKPKLVAMGAVSHKVCNMIFAILRDNKPFKIIAPQEHIKQYNAAKCDIAA

SEQ ID NO: 193301 - protein, 367 aa, unidentified
MKKVSTAVTMPSRNISQQKLTIGVDLGDRNSWYCVLDEAGHIQVEQRVRTTAQALGEVFGAMPRSRIALEIGTHSPWISRLLSGLGHEVIVANARKVRLIGESRKKDDRLDAQTLARLARIDPELLYPVKHRSVRAQADLTLIRARAGLVRARTGLVNTARGLAKSYGERLRGCNVRNLNPEKAESLSPELQRALEPLLSAIEELSQRICEYNDRIEALAENSYPQVKLLKQIKGVGTLIALTFLLTLEDPHRFRKSRDVGGYLGLQPGRRNSGKSEPQLHISKEGDPYLRTLLVQGAQHILGPFGVDCDLRRWGLKLAERGGRNGKKRAIVATARKLAVLLHHLWVSGEVYDSMHNSRRTTVAAAA

SEQ ID NO: 193302 - protein, 358 aa, unidentified
MVQSKKINFNGQNIYIGIDVHLKSWSVTIMTESGYKRTHSQKPSAKELFEHLKKHYPDGKYQAVYESGFSGYSTYYALKEYGIECMIIHAADVPTSQYDHVMKTDAIDSEKLAKSLKGGLLRGIYIRDKEELDDRSLVRLRKTLQKQLGGYKSRVKHLLYNNGIDYPDCFENSRSHWSNHFIFWLENEVKLLSSTRHSLDLLLEQVKLFRKNLLKATRMVRELSKKSLYTQRYENLISIPGIGIVTAMSILTEIGDASRFHNQREFASFLGLIPSCHSSGESIASAEKTFRGNKHLGALVIESAWISIRHDRAMAMAYGEYCKRMKAQEAIIRVARKMSNRILSVLKSGKKYQYDKIR

SEQ ID NO: 193303 - protein, 341 aa, unidentified
MNIKRIGIDLAKQVFQLHGVDGQEKVVLRKQLRRVQLLDYFKKLPPCLIGMEACGGAHYWARELQKLGHTVKLMAPQFVKPYVKSNKNDANDAEAICEAVARPNMRFVAIKTIAQQDIQAIHRIRSEQVKQRTAKVNQIRGLLVEYGIVVGRRVDVLRNALPQLLEEAENGLTADFRVLLDGLRQDLITLDERVDDLDKKIKTLATSNPAAKRLQQIPGIGPIIATALICAIGDGKQFQRGRDMAAWLGLTPRQHSSGGKDRLLGISKRGDTYLRTLLIHGARSALKVAGKKDDPRSRWLQNLCSRRNKNIAAVALANKNARIAWALLSKETDYLPEGEPA

SEQ ID NO: 193304 - protein, 350 aa, unidentified
MDATTVAVDLAKTVFELATANAQWRIIARQRLNRAQFTRFLIRTAPTHVVMEACGMAHHWGRVAQEHGHRVTLLPPAYVRPYVRRNKTDRADAEAILETVRSGEVPSVPVKRIEQQALVGLHRVREQWMTTRTARINTLRGILREHGILLPAGARAALQTVPTILEDADTPLPMHLRQVLSSVHAEVRAIEARLDDLERQLRAAADADPVATRLREIPGIGLLTATALVGTVGHIHAFRRARQFASWLGLTPREYSSGARRRLGGISKRGDVYLRCLLSHGARAVLHAAHRRRVAQQPLTRLHQWALMVQARRGHNKATIAVANKLGRIVWAVWVRDVEFSPRPALLEAA

SEQ ID NO: 193305 - protein, 339 aa, unidentified
MKYTPVGVDIAKHVIQIHFINEHTGEVVDKQLRRQDFLMFFGNREPCLIGMEACGGSQHWARELTKLGHKVRLLQARFVKAFVMGNKNDVMDARAIWMAVQQPGKEIAVKTEEQQSVLVLHRTRMQLVKFRTAQINALHGTLLEFGETIHKGRAAMEREFPEALERMKERLPPYLIMVLENQYNRLNELDSLIEDIEKQLTSVARQNETCKRLLDIPGVGPLIATAAVATMGEASAFKSGREFAAYVGLVPKQTGSGGKVRLLGISKRGDTYLRTLFIHGARAVALVAKEPGPWITELKKRRPASVAIVAMANKLARTVWAITAHDRKYDRNHVSIRPY

SEQ ID NO: 193306 - protein, 403 aa, unidentified
MNSVGIDISKGRSTVAVMRPFGEVVISPFEVRHTDSELSELARQLKSLDGETRVVMEATGNYHTPVAKLLHDAGLYVSVVNAKLVHGYGNNDLRRVKTDKKDSVKLANYGLDRWLALTRYVPEEDTRLLLKNCYRQYRQYSKVQTVLKNNLISLLDTVFPNVNRLFSSPAREDGSEKWVDFVAEIWHCRCVSEKSEKAFANKYQRWCRKYGYNFNEAKAHTIHAEASGHIGVMPMSETTKLLVEQAVAQLRATSTALAALKHEMQALTSMLPEYPVVMDMFGVGPTLGPQLIAEIGDVRRFYSKKALVAYAGLDAPPNDSGDVTGRHKSMSKIGASSLRRTLFLVMSVYLQTAPLDEPVYQFMDRKRAEGKPYRVYMMASANKFLRIYYATVKAYLESLEHTA

SEQ ID NO: 193307 - protein, 369 aa, unidentified
MKEITTYVGVDAHKKDLFIAMLIGNERTPVTWTVPNEPNAVRRLVRKLEREAPGPVRMCYEAGPCGYALQRQVATARVSCQVIAPSLIPRKPGERIKTNRRDAKKLAELFRAGLLTEVRPPTPADEAVRDLCRARDDARDDLQRSRHRLGKLLLRRGLHYSAGRNWTQGHRRWIGSLKWAHASERVVVDDYLLAIDHLEARLIELDARLVEIADTEPYRERVGWLRCFRGIDTLTAILMLAELHDFQRFPSAPALMAYVGLVPGEDSSGEKQRRGRITRMGNALVRRLLVEMAWHYQHRPSVGPALTRRRKGQPSRVIAIADKAQQRLCRRFRRFAEQHKPAPKIAVAIARELAGFLWAALQPAPARTN

SEQ ID NO: 193308 - protein, 338 aa, unidentified
MTCYSGIDLHSNNSVVLVSDETDRVLYQRRLPNELVRILAALEPYRGELAGVVVESTYNWYWLIDGLQAAGYRVHLANPAAMKRYEGIKHSGDETDAAYLAHLLRLGILPTGYICPPDERAVRDLARKRLQLVRTRNAQVLAVENIVARQTGAGISANAVKRLQSETVEALGLPEDVTPAVAANVAVIQTLTAEIGKLEARLRQRVRLRTEFRVLISAPGIGEVLATLIMLETGSIARFAAVGNFASYARCVDSKRMSNGKKKGEGNVKNGNKYLAWAFIEAANFARRYCPEARRFHDRKRAQTNAIVATKALAHKLARACYHMLKDGQPFDVKRCFA

SEQ ID NO: 193309 - protein, 381 aa, unidentified
MTTAAPHNEHGNITEATLFVAFELSEKTWKLGFTTGHGQKPRERTMTARQQERILDEIAQAKRRLGLPETAPVVSCYEAGREGFWLHRFLQAHGITNQVVDSSSIEVNRRRRRAKSDGLDVRKLLSMLIRYAHGERQVWQVVKVPSVEAEDHRHLHRDLETLKQERASTTTRILGLLSSQGLRVTSLTKLPEQLEALRLWDGSPVPPGLRRRVLRVYAHHTFLSEQIAAVEAERRAQLHASTDARIDKVRQLMLLKGIGINGAWLLVMEFFGWRAFKNRREVGGLAGFTPTPYQSGASAREQGISKSGNRHVRWMTTELAWSWLRFQPDSTLSIWFRERFGGGGKRLRRIGIVAVARKLLIALWRFLETGLIPEGAVLKEA

SEQ ID NO: 193310 - protein, 315 aa, unidentified
MVNVPCFIGIDVAKAQLDIAIRPSGERWAVPNDASGVTMLVDRVQALQPTLIVLEATGGLERAATVALATAGLPVVVVNPRQARDFARATGQLAKTDALDARALAHFADVIRPTPRPLPDAQTQELRALLGRRQQLIGMRTAEQNRLAGTSERLTQDIKAHIAWLNTRIATLDDDLETMLRASPLWRENDDLLQSVPGIGPVCARTFLLELPELGTLTRQQIAALVGVAPLNCDSGTLRGRRTIWGGRAHVRTVLYMGTLVATRFNPQIKAFYQRLLAAGKIKKVALTACMHKLLTMRNAMLKHRTSWQAQEVQN

SEQ ID NO: 193311 - protein, 407 aa, unidentified
MEVICPRCAGLDVHKQTVVACARIVGEGPALQEVRTFATTTSGLLALADWLESLGVEHVAMEATGVYWKPVWHVLEGHFELVLANAAHVKNVPGRKTDVNDAMWLADLLAHGLIRASFVPPVAVQELRTLTRTRKQFVRERSAHAQRIDKVLEDANLKLGVVLSDILGKSGRAVLEAIIDGHTDPERLASCISTRVKASRAELLEALHGHVSAHHRFMLKLHLGHIDALDQAIADIEKEVGLGLEPFRQAAKLLSTMPGLSAVGSNVVIAEIGIDMSRFATPGHLLSWACMCPRNDESAGKRRSTRLRRGGKWLKTTMVQAAWAAVKVKGSYLQAQFHRIRARRGAKKAIIAVAASMLTAAWHMLRDGTEWHDLGAAHFDRADAHKTANRLIRRLQQIGYTVQVTPA

SEQ ID NO: 193312 - protein, 412 aa, unidentified
MTAKDQFAAHVGLDWADKKHNVCVQFKNGDRIFHVIEHTPEALDIWLNELHQRAKGRIAIAVELKKGPVVYALQKYPFVTVFPVHALSLARYRQAFWPSGAKDDPQDAELALDLMLRYPRKIKAIEADNPDIRLLQQLVEQRRLLVEDKRRFVNRLINTLKQYYPQPLEWFSHRDSSLFCELIIRWPSLQQLKRARSDTVRHFMNAKGGPAVAYTEQRVASIASAIPLTTDKTVIEANALMATALASQIKLTGDLIRTYDERIESLFDTLPDAELFKSLPGMGPCMGPRMLAALGDNRNRFNSAEEIQNYAGIAPVTERSGQKSWVHWRWQCAKFVRQTFVEWTAKTVNSSYWARLYYQGQREKGKSHQSAIRALAFKWIRIIYRCWKTRTRYDEAKYLLALEARKSPLLKP

SEQ ID NO: 193313 - protein, 401 aa, unidentified
MAAQRDIAWVGIDVGKTHHWACVVDAEGKTLLSVKVANDEAEIMALLANAGSLATRLIWAVDIIGAPSALLLALLARAGRSVRYASGRVVAAMSAAYAGEGKTDAKDAYVIAETARLRRDLSVIDAGTDLVRNLAVLTGHREDLVADRVRMINRLRDLMTSVFPSLERAFDYSSHKGALVLLTGYATPDRIRRIGQTRLTGWLRNRNVRGAADVAARAIAAARAQTVVLPGQDLTASIITELANAILALDDRLKALDAQIEVMFAEHPHAAIIQSMPGFGPFLGASLLVGANDLRAFPSAGHLAAAAGLVPVPNDSGRRTGNLHRPLRYSRPLRHVFYLSAQTSMMRAGPNRDYYLKKRAQGATHSQAVIALARRRIDVLWALLRENRTWTATPPPLAQAA

SEQ ID NO: 193314 - protein, 350 aa, unidentified
MVVIGVDAHKRTHTLAAVDEVGRALANRTFPATLDGHRAVLGWARTWPERMFALEDCRHLTRRLEADLIRAGERVVRVPARLMATARRTARELGKSDPIDALAVARAALREPGLPVAQLDGEARRLRLLVDHREDIVGERTRMQSRLRWHVHELFPGLEIAPKSLGRQHVIAAVDRRLRPVEGTVAAIARELLGRIRDLTVRINELEREITQLVRPLAPNLLAMPGCGPLSAAKILGEVAGAARFRSRAAFARWNGTAPIPVWSGNDTRHRLNRGGNRQVNAALHRIALTQWRGVGPGRAYVQHRLGAGSTKTEALRLLRRRLSDEVFRRLVSDETLTGSTPVGEEVIAA

SEQ ID NO: 193315 - protein, 412 aa, unidentified
MDVLVERCAGLDVHRDSVVATVRVPGKRRRQREQHKRAFGTTVAQLQELGGWLQGFGVTLVGMEATGVYWLPVFDVLERRFECWLLNAQHLHNVPGRKTDTIDSAWICQLVEHGLVRPSFVPPPEIRRLRDLTRLRKAQINERARAIQRLEKVLQGVGIKLTSVASAAYSVSARAMLEALLAGTTDPNELAELARGSLRGKIPQLREALANRFELVHHGVLVSGLLAHIDALDQGIAALDARVVEATEPLAELVELVSTIPGVKQRNAQVLIAECGIDMSVFPTVHHFASWARICPGNNQSAGKHRSGKTLRGSRWLRQALTESARAAARTKGTYLASHYWQIRGRRGEPKAIGAIRHDILVAYYHITRDRVPFRELGADWLTRRHSPEHRARRLVRQLEALGLKVTLEAAA

SEQ ID NO: 193316 - protein, 276 aa, unidentified
MTHPTLVLGIDVAKAKFDVALLNAEDKYRSKVFPNTPVGYRQFLEWLTRHDAREAHLCMETTGAYGRDLARFLAQQQFVSVVNPAQIHAFGKTELTRAKTDKADARLIARYCQMHRPAPWVPPAEEIVILQALVHRLEDLLTLQTMENNRLEATEGPARESVETVLAVIQQQIDKVRQQIQSHIDQHPHLKKQKELLSSIPGIGDNTAATLLAFLCPLDRFRSVKQVVAYAGLNPCIRQSGQWAGKTPIAKAGNALLRTALYVTSRYKLGALSRAI

SEQ ID NO: 193317 - protein, 430 aa, unidentified
MKFNTQNAKIEAITEKTLVLGIDVGSEMHYARAFDHRGIEYTKKPFKFSNTETGFMALQAWILDLKEKHEKDKVVPGMEPTGHYWFNLGKFLQDNEMKPVLVNPHHVKKSKELDDNNPTKNDRKDPKVIAGLVREGRYMIPYLPDGVYADLRTASNIRFQLQAELTRIQNRISRWFHIYFPEYKTVYGKPDAKSGILILKTAPLPEDILTLGVDGVNQIWRDAKLRAVGKARAKTLVEAAEHSVGNKEGAVSARMEIRMLLEDYESRNIRLQEVMALIEELVDQIPMAEKLLEIKGVGIRTVSGFLAEVGDISRFNKPKELQKLAGLALVENSSGKHKGETTISRRGRKRLRYLLFEVAMSLVAKNQEFRELHVYYTTRKLNPLKKMQSLMAVATKLLRVFYAMLTKGVDYDPKKMVSDIKRPAAYLQTE

SEQ ID NO: 193318 - protein, 395 aa, unidentified
MDAGGRRLAKARLPEGVAGIARLHAMVGGQLGEDADEEDAGQVAVGIETDRGPWVAALTAAGYTVYAINPLQASRYRERHGVSGAKSDAGDAHVLADMVRTDSHQLRTVAGDSAQAAAVKVVTRTHKTLIWERTRHTQRLRHALRDYFPAALEAFEDLDAPDTLELLARAPDPASAARLTTAQISAALKRARRRGIAGKAERIQAVLRAAHLGQPDIVTAAYAASVRALIAVLATLNEQVKTLQGQVEAYFGQHPDAEIITSQPGLGPVLGARVLAETGDDPARYASAKARKNYAATSPITRASGKKKTVMARYVHNDRLTDALMSQAFSALQASPGARAYYDRQRARGSGHNPALRQLANRLVGILHGCLKTRTLYDESTAWPQYAAKTEKTAA

SEQ ID NO: 193319 - protein, 393 aa, unidentified
MPRKRILVKSIDTSISYQVIGIDLAKHLVSACLITGAGEIFGIDRLTYDDLLKSAERMSPTLFCMEPCPEVHYLAEKLQGYGHHTKVIDGAAVKEYIKTHFGGQKTDLNDAQAIAFLSLDTNLPEITPKNTSNSVLSSIQAVREQFRKEYIQSFVSLKGICQRWGLPISKGVMNKNKVEELVSESKKIPQEVKDWLLELLQSCRELQKRLNKISKYLKEYADNDEICQKIMSVPGIGPITATRLKATIGDIQRFEKPKSIVAYYGLVPKSKATGHNEKKGGITRRGDRVARSLLIEGAGVVLNLAAKGFLRSKPLNKWIEKKRKLKMPWGKLCCALAAKMLRIVHAILIQGTSFNAKIAGVARCSLPKESRNNVMGNNKLSEIPSPNGSVYIH

SEQ ID NO: 193320 - protein, 351 aa, unidentified
MMIIGVDYHPSFQTIAFLMEETGECGEQELKHSDGQADKFYRDLKQRGICVRVGMEATGYSRWFERLLAELGFELWIGDPAEIKAKRVKKQKTDRNDARLLRRLMLENNFPQIWVPSPENRDLRQLLWHRHRLVQMRTRIMNQLQALAMNEGYRWKKKLFREQGRAQLEKLTLAPWASRRRRELLELLDRMNPTIEELTAAVEREARKRPEVQRLMTHPGVGPLTALAFVLIIGTWERFPRGKQIGNYVGMIPSEDSSAGKQRLGHISKQGNSLLRFLLVEAAQAAARVHPDWRRRYIHLAMRRHKSIAKVAMGRRLAIRLYWMWRNGCEYSPKLEFGSYAGQLGLVHGGR

SEQ ID NO: 193321 - protein, 432 aa, unidentified
MVNFTLWRSKMKVFNPADFAALIAIDWADRKHDVCELDQQNNETTFSVISAKPEAINAWANALKQKYNGQQVAVACELKKGPLIYALSKFKHIVLFTINPSTVAKYRKAFTHSGAKDDPTDAAIQLEILQQHMSKLNVIMPDTQSIRSLAQLVEYRRKLVQDRVNLTNRLSTTLKNYYPQVLDWFNEKDSMIFCDFLLRWPSLAKVKRARKQTLHDFFNLHNARYPNVNEKRINDIKHAEPLTSDNAIIGPNLLLVECLVGQLKQLMLSIERFDHEIKSIYKQHSDRFIFDSLPGAGPQMAPRLLAAMGSNRERYQSSEEVQKYAGIAPVTERSGKKEWIHWRYSCTTFLRQTFVEWAGQSVRYSFWAKAYYEQQKSKGKPHNTIIRALAFKWIRILFRCWKRKTAYDESTYLEALKRKGSPLLRYAMESKF

SEQ ID NO: 193322 - protein, 343 aa, unidentified
MTHYVGLDVSMKETKLHVLDEAGQRVWRGRCATEPTAIAAAVRRYAPAAVRIGLETGPLTTWLWTALTAEGLPMVCLDARHAKRALDMKVNKTDANDAEGLAHLVRAGWYREVRVKSRNAMLAKALLGARSQLLSMSLALENQIRGILKTFGRIVPKGAGGLFEKNVRALITDDAAIAAVIMPLLQARGMARSKCAALDRRLIGSVQADVTCRRLMTMPGVGPLTAVAYVAALEKPDTFKRSRAVGAWLGLTPRRFQSGEVDYDGHISRRGDRQLRALLYEAAAVLLTRVRRESALRRWGLLLWKRLGFKRAATALAGRMAVVLHAMWKTGTSFNPTLGAATP

SEQ ID NO: 193323 - protein, 460 aa, unidentified
MACDPDKQSGPRCIEVPFFVAPGNGEHAWQCLDYTCGVTVAFLWMEAKMQVIIERCCGLDVHQETVVACVLIGAPGERPRKEVRTFRTMTRDLEALRDWLLELGVTQVGMESTGVYWRPVYAVLEGHFDLIVGNARHIRNVPGRKTDVKDAEWIADLVRHGLVAKSFVPPAPQRELRELLRYRRKLVESQAAERNRLLKLLETANIKLASVASDVFGVSGRAMLKALIEGSASAEAMADLARGQLRRKRDDLVLALEGRMEEHHRFLLATQLRRLEAAEHDIAALDDRIEAKLAPYCVQHALLMQIPGVDWVVAAALIAEIGVDMSVFLSVYHLAAWAGVCPGNHESAGKQKSGRARKGNVHLRTMLVGAAISAARTKGSYLKDKFHRLKARRGAMRAALAIAHKILVAAYHMLAKGLPYRELGEAYLDQIGQTRTVANLKRRIERLGYNVTLEPKAEPA

SEQ ID NO: 193324 - protein, 422 aa, unidentified
MSYCPVAGIDVSKQFSDMCILSPDNKIFAQEKIYHDETSINRANALLQKAERLFFSKPVIVMESTSHYHLILFQFFSEHGYDVIVVNPLQSNSMKDFSIRKRKTDRVDAFKLAMMYRTKTLRPSQIPQTATRALRQLCRHRAELLNDVSSYKNRLTALLDQTFPGYDKVFSDVGGVTSCAVLVRFPTPTILLVEEESELVEVIAAACKSGYSFAKKKAGLLISAAQKAQTLGIHSCADETLIVCTIQMLRTLSESVLQIETAIDDLLAQIKEMRNNVSLLQSIPGIGSHSAALLLGEIGDISLFKKPKQLAAYFGLDPTERQSGSFRGTKNKLSKRGSPYARAALHMGVVNSICKRGKDSAANPVLLSYYEKKCKNKPAKVAQAASMHKLVFIVFAVLRDQKPFELKTPEQHAVEQGFVKAA

SEQ ID NO: 193325 - protein, 400 aa, unidentified
MNSVEIDVSKGKSMVAALRPMGEVALSPKEYPHTSIGLEQMAYDIISLGEDTKVIMEATGRYHEPVAAALHKYGIFVCVLNPILIHQSGGGSVRKVKSDRKDAIKIAKYDLDNWIDLQEYTSVDILRQQLKIYSRQYNLYTKNIVALKNNLIALTDQVFPGVNELFDSPEKADGHQKWVDFVSTFWHCDCICRVSENAFSQRYQKWCKRNHYHFNLVKALDIYTASCGHFTTLLKNSNTKFLVTTAAKQLISIKKNVALLKAEIFSLAKQLPEYDVVMGMFGVGEITGAQLMAEIGDVRRFPNRSSLVAFASVDPSVNQSGKYNAHSNSTTKRGSSHLRKTLFQIVSTYIKRSPADEPVYQFICKKRSEGKPYYVYMTAAENKFLRIYYARVKECLNAQE

SEQ ID NO: 193326 - protein, 372 aa, unidentified
MTQSNILFIGMDVHKESIVISLADDDRSEVRRYGSIGGSLTEFKKTLRKLVSTGKDLFFCYEAGPCGYELYRFIVSQEHQCIVVAPSLIPKKPGDKVKTDKRDADQLARLLRAGDLTSVYVPNAEDEAIRDLSRAREDAVLVLKAARQRLKSFLLRHNIRYKGSANWAEKHLRWLAECVSLGFPAQQIVFQEYVNAATEAKQRVTRLEDEILFHTQQWRLFPVVQSLMAMRGVKMVVAVTIVSELGDLTRFENAKQLMSFLGLTPSEYSTGERQKRGAITKTGNQHARRVLVEAGWSYRFPAKVSKEMQKRQESLPLNIRDIAWKAQVRLTKRFKVMANKGKPHNVIVVAMAREIVAYMWAIAHEVPVLPRD

SEQ ID NO: 193327 - protein, 442 aa, unidentified
MPNRTVNRLSRGDRRRNAKLRDLRSLVRPDLAICAVDLADANQAAVVADHDSVVLGRRMFRCSAWGIDQILDWAIPIAQQAGFAGVVVACEPTGHRWKPVAERARARGLNVVCVQPLLVCRAREAEDFTRDRSDFKDATIIARLTSERRCYRPEVTTPRWARLRHLGQRRAQVLCAATAARQALGDLLGVSWPSVLDAAAAPLDSLTFRACLSVATDPATIVAMGYDAFTGAVAAELGRWGGTRRRHQIMRAVFAAAQTPGGLAAERTGAAERAAFAVADWHRALQELGEVEARMVAVLDQLHLTQLVTTITGLSAVGAAAILAETGDPARYDIARTWAKHAGLCPRDNTSGRFQGQTTTSGRGRPGLRTAAWRAIWGLLPHNPVFAARYAHLTGRAHNPLNDGQARAALAAGLLRQLHAVCTRQVAWDPKIAAGEVTATAA

SEQ ID NO: 193328 - protein, 465 aa, unidentified
MKHAQRRPRTKPASGPSLLERITPTAAGIDCGSEEHYVAVPTDRDAAPVRAFKTFTTELHRLADWLTACGVTTVAMESTGVYWIPLYEILEARGLDVVLVNARHVKNVPGRKTDVVDCQWLQQLHSVGLLRGSFRPTAAIAALRAYLRHRETLVQSAATHVQRMQKALVQMNLQLSTVISDITGVTGLRIVREIIAGQTDPRALAQHRDARCRASEEDIMAALTGNYRPEHVFVLQQNLELFDAYQRQLAACDAAIEAHVSTLAAKAPTPAGPLPAPRTRKTPRANEPRFDIRRPLHQLTGVDLTQIDAIGPYSALRLLAEIGPDMRRWPTEKHFTSWLTLAPHNKITGGRLLSSATLPSANRAAGILRMAAMSLGRTETALGAFYRRLAFRVGKAKAITATARKLAILVYRTLKDGLVYRDPGAAAYDAQHRQRVIRRLRQRAANLGLALVNRETGELLEGPVS

SEQ ID NO: 193329 - protein, 354 aa, unidentified
MPATAQTAIAVIGIDIGKNSFHVVGQDTRGQIVLRQKWSRHQVEARFANMPPCLIGMEACVGAHHLSRRLKTLGHDARLMPAKYVRPYSKGQKNDFRDAEAIAEAVQRPTMKFVATKTADQLDLQALHRVRERLVSQRTGIINQIRAFLLERGIAVRQGQRFLRAELPRILATPPDVLSPRMLRIIEDLAGDWRRLDERVEGLSNEIEAIARQDAGCERLMSVPGIGPMISSAMVAAIGAGDVFTKGRDFAAWLGLVPKQISTGDRTILGKISRRGNRYLRVLFVQAAWVVLIKPKIWERHGLKPWIEAARKRLHHNVLAIALANKLARIAWSVLARGRAFEARKMDQAVNQSA

SEQ ID NO: 193330 - protein, 363 aa, unidentified
MKNYSTEMTIGMDLGNKKHDIFTLDSISGNLVETASVLNDRESIETYFQKFLEPNKVKIAIEAGTHSPWIYHLLKDMGFTVLVGNPRKLRMIWMSDNKNDQKDAEMLARIARFDTKLLHPIQHRDMEAHKDLNIIKCRDGLVSCRTNLVNTVRGLLKSQGIAVPPSSTDAFAKKITSILPTELKPIFRDLIKIIEELTFKIKKYDKLISKICEKKYPEATRLQQIKGVGPITSLTFILTLEKHNRFKKSRDVGPFLGLVPKRDQSGDTDKQLSITKSGNSYLRSTLVSAAHYILGPFGEDCDLRRYGLRIAARGGKAAKRKAVVAAARKLAVLMHSLWKSGETYEPLRKSKNSRKNRQLNNAA

SEQ ID NO: 193331 - protein, 396 aa, unidentified
MNATDERVVIGMDPHKRSMTIEVMAADEEVLGGGRFGTDAAGFQSMLEYVTRWPDRVWAIEGCNGIGRHVAMRLIAEGHEVVDVPPKLSARARVFATGQGRKTDATDAHSVALVGTRMAGLRPVVHDEQLAVLRLLVDRRSSLGDDHTRMISQLHQLLLELIPGGAKKDLSAAQAKALLAKVRPRDTVGKARRRVAAELIADLERVYARKKAADKELKELLAATGTTLMDLHGIGPSGAARLLVEVGDITRFPNREHFASWNGTAPIDASSGDQVRHRLSRAGNRQINRTLHIMATVQLRNDTEGRAYFDRRKRDGKTSMEAMRALKRRLSNIVYRTMLDDAIRASAASEVTGPGGQRGSDSDSSATGSQPQHRLFGQATPGPVTTQPRTPLPRVS

SEQ ID NO: 193332 - protein, 289 aa, unidentified
MSRIKDIRKSVDITHMYVGLDLHKATINATVMDENGTVLNEVKIKSEPDSLRNFSDSIPLGSDIVIESSSTWYWAYKILSERHNVTLSNPLKTKAIAESKVKTDKVDSLTLANLLRGGYIAESYIPPMELMQLREMVRYRASLVRVRSIIKNRIHAHLLMYNIKINASPFTKEFIKTLRELNDYKINGYLNVLEVLNKEIDDISNRIKEIANDNEDAKLLMSIPGISLYSALSIISEIGDINRFPDSRHLVLYAVASSTRSSGNKVYHGPITKQGSSYLRWILRLSGQT

SEQ ID NO: 193333 - protein, 413 aa, unidentified
MDVQYRCCCGIDVHKETVAANLLRRGVDDKPDLNEVRSFSTMTHGLLKLCEWLENAGCTHVAMESTGVYWKPIFNILEADFEVILVNAKHIKNVPGRKTDVKDCQWIAQLLQHGLLQASFIPPLEIRQLRDLTRERKKLIQDRSSVVNRVQKVLEDANIKLSSVATDVIGKSGWDMLLAIVGGEEDAEKLAALARGKLKAKKEQLRYSLEGRLTDHHRFLLREYMRQIRGLDEMIERFDAKIEEQMKPFFEYLSLLDTIPGINQRAGENVVAEIGVNMTQFGDHRHLSSWAGICPGNNESAGKHRSGKASDGDKWLKATLVEAAWAASRMKGSYFAAQYRRIASRRGHKRALVAIAHSMLVIIFHVMKNKVVYTELGSDFFDKLNTERLKRYLTKRLESLGYKVEISKGDTAA

SEQ ID NO: 193334 - protein, 340 aa, unidentified
MTDVSRIGLDLAKNVFQVHGVDAREEVTVRRPLRRGQMLGWFGKLPPCLIGIEACGTAHYWARELTRLGHTVRLIPPGYVKAYVRRNKNDAADAAAICEAVGRPSMRFVAPKTEQQQAASGIHRVRALLMKQRTAAMNALRGLMAEFGIIANKGMSGINELLAIVADPEDSRIADPLRAGLVAIAATLRALDTQLGTVDKAMAAWGRADKTCRHLNTIPGYGPVLSTAMAARVTNPQGFDSGRHFAASLGIVPRQDGTGGKVKLGPISKRGDGYLRRLLVNGAMSVLRSKQAKHDPWLVTLLASKPLKVVAVALANKMARIGWCVMMRQEDFRVEPVTAA

SEQ ID NO: 193335 - protein, 348 aa, unidentified
MLHAGLDLSRKKIDVCLLSEHAEIVEEFAAPPDADGLRALARRVAVHREPVRAVIESMTGARFVHDRLEELGWEVLIADAAKVKGLAPLACKTDRIDARVMAVLSHRDLVPEIWLPDPRVRREREQARFRMHLVKHKSSLKNRIHSTMITFGHPCPVTDLFGVAGRQLLDRLEVPAPWRGTIDASILLIDDLERQIDRVNRELRAGGADHPYVPLLLTVPGIGWVLAFTIAAEIGDISRFPTATKLVGYTGLCPRVNQSGDRDRRGPLTKQGPKYLRWAMLEATMHACRHDAYRERYQRTKQRLGKQRGAKVAQIDIARRLTEAVWHMLTRNQPFTPSAGGSTFRLAA

SEQ ID NO: 193336 - protein, 359 aa, unidentified
MREQRKEISFIGQKIYVGIDVHLKSWSITVLSETSVLKKFSQNPDPEALHGFLTRSYPGAEYHSVYEAGFCGFWIHERLTALGINNIVVNPADVPTTSNEKLRKTDAVDSGKLARSLRANELKGIYTPDSVSLEMRSLIRLKNSITKDTTRQKNRIKSQLRYLGIEIPQEFLEPFSNWSKRFFAWLKEVETLTPSGRQALDIQIRHLEELRRQKLEMTRALRALAKADRFREPQRLIMSVPGFGQTTGMAFLSEICDITRFRNAEQLAAYIGMIPMCHSSGEKDGTGDITVRKHAVMRCNLIEAAWVAIRQDPAMNLFYTEQCKRMPKSKAIVKVARKLVNRLYFVLKHQTEYVNSVVS

SEQ ID NO: 193337 - protein, 462 aa, unidentified
MDKMVLGIDVACRAAHQASLADDRGRFVWSARRFRTSSADLEALWASLPEGVELTVVMEPTRNAWVPLAAWFRRRGASVIVIPSEQSADLRAYYAKHTKSDRLDSRMLARVPLLHPEGLRAAQGLGPAEAMRRVTKLRSSLVKRRNTIVARLDSYLELLGPSWHACFRGDLVHNTPLQLCAAGYADPHTVRRLGRARLTKFIWRHSHGAHGAAMADALLEAAAETLRLWGDEIDYGELADDIAVEARLALQLSREIRDLEQRIEAGLDAADPGGIMVSVPGVATLNGAQILARLGDPNRFQSLAGARSFSGLVPSLNSSGLNGHHGSPTKSGDAPLREALFLAANWARRIDPSLARRYHRLMVAEGKHHNSALCHISTALLTRIVACWRAGTPYVIRDLDGTVLTAQEGRRICEVRYPVSAQLRAQRRTTRRLERGTSRRNKESASAPSIGSFRHEATPARA

SEQ ID NO: 193338 - protein, 354 aa, unidentified
MEVFAGLEVSLDETHVCVIDEGGRIIEETRASGEPKALAKAVRRRGRRIEHVGLEAGDLSQGLCEGRVREGVSVSVTEARHVRAAFAAMRVKTDRHDARGIARLVRLGRFRRVHVTSLDAQETRAPLTTRAFLVGKVTATENSLRAALGNFGLKTGSVTRKKTWEGRARELAEGDTALEGVVGAMPRVRALALEDLAGVDGRLTALATSDPVTRLPMTAPGVGVIVAPTSRSAVEDPDRFPRSRDVGARAGPTPRRWRSGGTDIVGRIAKAGDPRVRVMLFEAAAGLLGRVRVMSPLKAGGMRIAERTSMKRAVVAASRKLATILSAMRKSGAAHRAKGRPPASAPDFAAAWSR

SEQ ID NO: 193339 - protein, 394 aa, unidentified
MKLVGIDVGKNSHHFCVMDKETGEFNVTPSSFPNNKEGFDFLINSLKPYSKKSILLGMEDTGHYHVALLKFLLSNGYTVALINPKTTDLTRKMEGGITKNDKLDTITICDVLDTPERKKQYRITKVDRFDLYEQRQLTRHHHNLKEELNVYCNRLQKSIDLVFPEFNTLFSSKYGIVYMNLLKTFGSAEVIASTDIRTIRKCFEIKGRGNRISLTPEKLKECAKNSIGISSEVETIQIKHLVSQITLIKEQIAEIDKKIEEFSIPNNSPILSIPGISHFSGTSILAELGDIGNYSKPSQIIKFAGVAPYHYESSQYNAQHTAITKKGSKYLRKTLYQIILPVINNNPVFKKYYLLKISQGKGHRCAQGHCIRKLLRIIYHLLETGQSFDSALLR
